United States Patent Application Publication US 2005/0244851 A1 - sequence listing, part 45

SEQ ID NO: 1742689 - DNA, 25 bp, Homo sapien
tacatgcaaggtaggaccattagtc

SEQ ID NO: 1742690 - DNA, 25 bp, Homo sapien
ctacatgcaaggtaggaccattagt

SEQ ID NO: 1742691 - DNA, 25 bp, Homo sapien
aatgttgtctggcttcctggccacc

SEQ ID NO: 1742692 - DNA, 25 bp, Homo sapien
tctgttttcatcagtcaccagtgtc

SEQ ID NO: 1742693 - DNA, 25 bp, Homo sapien
catcagtcaccagtgtcttccagtt

SEQ ID NO: 1742694 - DNA, 25 bp, Homo sapien
ctggccacccttctgttttcatcag

SEQ ID NO: 1742695 - DNA, 25 bp, Homo sapien
taaatggcattctatgccaagtgaa

SEQ ID NO: 1742696 - DNA, 25 bp, Homo sapien
ggtagtctatattcatcggttcaag

SEQ ID NO: 1742697 - DNA, 25 bp, Homo sapien
tagcattaagagatcaaacctagct

SEQ ID NO: 1742698 - DNA, 25 bp, Homo sapien
tgtttaaaaaccgactgctagatgg

SEQ ID NO: 1742699 - DNA, 25 bp, Homo sapien
gaagagtctcgatacacattctcaa

SEQ ID NO: 1742700 - DNA, 25 bp, Homo sapien
tatcgaacgaacaacactgagatga

SEQ ID NO: 1742701 - DNA, 25 bp, Homo sapien
cattgagcaagtaaagtacctgtag

SEQ ID NO: 1742702 - DNA, 25 bp, Homo sapien
gatatcctggaaacgtgaatcaatt

SEQ ID NO: 1742703 - DNA, 25 bp, Homo sapien
actaagtgcccacatgcgtccaggg

SEQ ID NO: 1742704 - DNA, 25 bp, Homo sapien
caatgattctcgagtagtttgtcac

SEQ ID NO: 1742705 - DNA, 25 bp, Homo sapien
ctcgagcagctaaaaagtaaaaggc

SEQ ID NO: 1742706 - DNA, 25 bp, Homo sapien
taaacatgccctcagcagactaagt

SEQ ID NO: 1742707 - DNA, 25 bp, Homo sapien
tgaataataaggagcccaatgttaa

SEQ ID NO: 1742708 - DNA, 25 bp, Homo sapien
gaataataaggagcccaatgttaac

SEQ ID NO: 1742709 - DNA, 25 bp, Homo sapien
ccttcacggtggccccttccatcac

SEQ ID NO: 1742710 - DNA, 25 bp, Homo sapien
gaccttcacggtggccccttccatc

SEQ ID NO: 1742711 - DNA, 25 bp, Homo sapien
aagtccattatatcctttatcctta

SEQ ID NO: 1742712 - DNA, 25 bp, Homo sapien
taaattgataccagtatatcgaggg

SEQ ID NO: 1742713 - DNA, 25 bp, Homo sapien
tatcggaagtatgagaacacactaa

SEQ ID NO: 1742714 - DNA, 25 bp, Homo sapien
taccagtatatcgagggaacccacc

SEQ ID NO: 1742715 - DNA, 25 bp, Homo sapien
taggttttgccaggaaagtcagcat

SEQ ID NO: 1742716 - DNA, 25 bp, Homo sapien
ttgacaacataggttttgccaggaa

SEQ ID NO: 1742717 - DNA, 25 bp, Homo sapien
catccaatcctctaacatgtctcat

SEQ ID NO: 1742718 - DNA, 25 bp, Homo sapien
tttgaacatccaatcctctaacatg

SEQ ID NO: 1742719 - DNA, 25 bp, Homo sapien
catcaagccaacttccacaaggaag

SEQ ID NO: 1742720 - DNA, 25 bp, Homo sapien
taggtcccacctacagaaagtctta

SEQ ID NO: 1742721 - DNA, 25 bp, Homo sapien
cttgggtatggtcacggtatcagaa

SEQ ID NO: 1742722 - DNA, 25 bp, Homo sapien
aataagtctacatctcctgtcctga

SEQ ID NO: 1742723 - DNA, 25 bp, Homo sapien
taatcaggccatacaacactgtcct

SEQ ID NO: 1742724 - DNA, 25 bp, Homo sapien
cacaagccacaatgccctgctaact

SEQ ID NO: 1742725 - DNA, 25 bp, Homo sapien
gacacaagccacaatgccctgctaa

SEQ ID NO: 1742726 - DNA, 25 bp, Homo sapien
acagacacaagccacaatgccctgc

SEQ ID NO: 1742727 - DNA, 25 bp, Homo sapien
caagcaattctctgggattacagac

SEQ ID NO: 1742728 - DNA, 25 bp, Homo sapien
tccattgtgacttaacctccccgag

SEQ ID NO: 1742729 - DNA, 25 bp, Homo sapien
tgtctcaggcattacacatcgtggc

SEQ ID NO: 1742730 - DNA, 25 bp, Homo sapien
aaagtacctggtttcatgcctgaca

SEQ ID NO: 1742731 - DNA, 25 bp, Homo sapien
tagcaggtaagagaggacaagcaca

SEQ ID NO: 1742732 - DNA, 25 bp, Homo sapien
tctcttgaaccagtaacttggaaag

SEQ ID NO: 1742733 - DNA, 25 bp, Homo sapien
tattactttagctgacactgggctg

SEQ ID NO: 1742734 - DNA, 25 bp, Homo sapien
ggaaagctggcctaccacaagaagt

SEQ ID NO: 1742735 - DNA, 25 bp, Homo sapien
tacctgttataaaatgactgttctc

SEQ ID NO: 1742736 - DNA, 25 bp, Homo sapien
atgctttatccctaccccctgtgtg

SEQ ID NO: 1742737 - DNA, 25 bp, Homo sapien
ttaaaagggatatgtgattaaacta

SEQ ID NO: 1742738 - DNA, 25 bp, Homo sapien
ggaatcatgatacctcatgctttat

SEQ ID NO: 1742739 - DNA, 25 bp, Homo sapien
gtgtgagtccccaagcccagactga

SEQ ID NO: 1742740 - DNA, 25 bp, Homo sapien
tgggataatatcaaatacgctgttc

SEQ ID NO: 1742741 - DNA, 25 bp, Homo sapien
taactctgcagcatgaaactggcaa

SEQ ID NO: 1742742 - DNA, 25 bp, Homo sapien
tacgctgttctacgaatataaatgg

SEQ ID NO: 1742743 - DNA, 25 bp, Homo sapien
gcatgttcgcatgatcccagtttta

SEQ ID NO: 1742744 - DNA, 25 bp, Homo sapien
tcatttttcgaagggcatcataaca

SEQ ID NO: 1742745 - DNA, 25 bp, Homo sapien
gcctctaggttcaagaaacattcct

SEQ ID NO: 1742746 - DNA, 25 bp, Homo sapien
tactcttgatataggagcctctagg

SEQ ID NO: 1742747 - DNA, 25 bp, Homo sapien
ggtgtgtcataaccacatactcttg

SEQ ID NO: 1742748 - DNA, 25 bp, Homo sapien
gaaatatagcatctacaccggtatg

SEQ ID NO: 1742749 - DNA, 25 bp, Homo sapien
taaaaatagcaacgaggcacgtggc

SEQ ID NO: 1742750 - DNA, 25 bp, Homo sapien
tctttattacggctggtccacggaa

SEQ ID NO: 1742751 - DNA, 25 bp, Homo sapien
gcatctgtgggctaatggtcctaac

SEQ ID NO: 1742752 - DNA, 25 bp, Homo sapien
tttcagccaatatcgtgatggttca

SEQ ID NO: 1742753 - DNA, 25 bp, Homo sapien
tatttccatatctagtcataatctt

SEQ ID NO: 1742754 - DNA, 25 bp, Homo sapien
aatcatcaatacatgtgtgttacaa

SEQ ID NO: 1742755 - DNA, 25 bp, Homo sapien
ttgaatactatcacacacataatat

SEQ ID NO: 1742756 - DNA, 25 bp, Homo sapien
ccatcctggtcataaagaactgaac

SEQ ID NO: 1742757 - DNA, 25 bp, Homo sapien
tctgtcaacatataaccatcctggt

SEQ ID NO: 1742758 - DNA, 25 bp, Homo sapien
ttaggctgtccatctcacggaagag

SEQ ID NO: 1742759 - DNA, 25 bp, Homo sapien
tacgacaccttgttcaggcaagagg

SEQ ID NO: 1742760 - DNA, 25 bp, Homo sapien
aacctgcatagtgagagaacatttt

SEQ ID NO: 1742761 - DNA, 25 bp, Homo sapien
gcacagtataacagatgatcaatag

SEQ ID NO: 1742762 - DNA, 25 bp, Homo sapien
aacagatgatcaatagggtgaatag

SEQ ID NO: 1742763 - DNA, 25 bp, Homo sapien
aatagggtgaatagaaaacctgcat

SEQ ID NO: 1742764 - DNA, 25 bp, Homo sapien
gacataagatcacatatttacagct

SEQ ID NO: 1742765 - DNA, 25 bp, Homo sapien
gtgatctgcctacctaattgtagat

SEQ ID NO: 1742766 - DNA, 25 bp, Homo sapien
ggcatcacattgcttgatttcaaat

SEQ ID NO: 1742767 - DNA, 25 bp, Homo sapien
aaaacatcccatgaattggaataac

SEQ ID NO: 1742768 - DNA, 25 bp, Homo sapien
gtgtttgaaagcaaccctcacgcaa

SEQ ID NO: 1742769 - DNA, 25 bp, Homo sapien
tagctaccggcagcagatatttctg

SEQ ID NO: 1742770 - DNA, 25 bp, Homo sapien
gcttcaatagtgagcgtcagctgca

SEQ ID NO: 1742771 - DNA, 25 bp, Homo sapien
gggatccctgtatctcaacaagagg

SEQ ID NO: 1742772 - DNA, 25 bp, Homo sapien
tataccataaatcacaaaccacagc

SEQ ID NO: 1742773 - DNA, 25 bp, Homo sapien
gatcctttaatactggtgcttggac

SEQ ID NO: 1742774 - DNA, 25 bp, Homo sapien
ggttcttgcagtaatcagacagata

SEQ ID NO: 1742775 - DNA, 25 bp, Homo sapien
cagctataccatattatcctaggca

SEQ ID NO: 1742776 - DNA, 25 bp, Homo sapien
ccccagggggctttcctgctacact

SEQ ID NO: 1742777 - DNA, 25 bp, Homo sapien
ctgctacactaaaggagaacacatc

SEQ ID NO: 1742778 - DNA, 25 bp, Homo sapien
ttcctgctacactaaaggagaacac

SEQ ID NO: 1742779 - DNA, 25 bp, Homo sapien
ggctttcctgctacactaaaggaga

SEQ ID NO: 1742780 - DNA, 25 bp, Homo sapien
gttagctaccagtgtcaacatgacc

SEQ ID NO: 1742781 - DNA, 25 bp, Homo sapien
ttccaagccttggtgtaacagaggc

SEQ ID NO: 1742782 - DNA, 25 bp, Homo sapien
tttgttagctaccagtgtcaacatg

SEQ ID NO: 1742783 - DNA, 25 bp, Homo sapien
tcatgtgcggcttccaagccttggt

SEQ ID NO: 1742784 - DNA, 25 bp, Homo sapien
tgcttttcaaacaagggaactcaaa

SEQ ID NO: 1742785 - DNA, 25 bp, Homo sapien
gggttagcagcaagactttgcatgg

SEQ ID NO: 1742786 - DNA, 25 bp, Homo sapien
ttatggagccaagcctgagaggatc

SEQ ID NO: 1742787 - DNA, 25 bp, Homo sapien
gggaaccaggataatatgagtcatg

SEQ ID NO: 1742788 - DNA, 25 bp, Homo sapien
gatttttggctaactgaaccaggaa

SEQ ID NO: 1742789 - DNA, 25 bp, Homo sapien
tattgagcaactaccatgtgatcag

SEQ ID NO: 1742790 - DNA, 25 bp, Homo sapien
gactgcggaccaaatgactgagatt

SEQ ID NO: 1742791 - DNA, 25 bp, Homo sapien
gatcagctttgtacagactgcggac

SEQ ID NO: 1742792 - DNA, 25 bp, Homo sapien
caggctctttactacctcggttcca

SEQ ID NO: 1742793 - DNA, 25 bp, Homo sapien
tgtggctggtagttagaaatgtcct

SEQ ID NO: 1742794 - DNA, 25 bp, Homo sapien
gctataggaattaacagctcaccag

SEQ ID NO: 1742795 - DNA, 25 bp, Homo sapien
gatattgttcaatctggagtccata

SEQ ID NO: 1742796 - DNA, 25 bp, Homo sapien
caaaccatattattcaaccccaatc

SEQ ID NO: 1742797 - DNA, 25 bp, Homo sapien
ccagaaagactatgacaagctttcc

SEQ ID NO: 1742798 - DNA, 25 bp, Homo sapien
tcttttccgctctctattccagatc

SEQ ID NO: 1742799 - DNA, 25 bp, Homo sapien
aagccagaaagactatgacaagctt

SEQ ID NO: 1742800 - DNA, 25 bp, Homo sapien
aaagactatgacaagctttccttgg

SEQ ID NO: 1742801 - DNA, 25 bp, Homo sapien
caacctgtagtttggaatgtaccag

SEQ ID NO: 1742802 - DNA, 25 bp, Homo sapien
gatctctacatggatttacggaaag

SEQ ID NO: 1742803 - DNA, 25 bp, Homo sapien
gaaaaagcaatcatgctgtcaggca

SEQ ID NO: 1742804 - DNA, 25 bp, Homo sapien
aactgtagatcttcttcaaaaggga

SEQ ID NO: 1742805 - DNA, 25 bp, Homo sapien
taagcgacatccacatgaataaata

SEQ ID NO: 1742806 - DNA, 25 bp, Homo sapien
catataatggaagccagatgttgac

SEQ ID NO: 1742807 - DNA, 25 bp, Homo sapien
tcagtatccaacatataatggaagc

SEQ ID NO: 1742808 - DNA, 25 bp, Homo sapien
tctattatccagtgcgtaataagcg

SEQ ID NO: 1742809 - DNA, 25 bp, Homo sapien
tccacattacacagaaggaggtgct

SEQ ID NO: 1742810 - DNA, 25 bp, Homo sapien
gagacagcctgcaagttatatcctt

SEQ ID NO: 1742811 - DNA, 25 bp, Homo sapien
gatatctctgtcatccactgcccag

SEQ ID NO: 1742812 - DNA, 25 bp, Homo sapien
gagttgctcattcccactacaatag

SEQ ID NO: 1742813 - DNA, 25 bp, Homo sapien
aatggatgtatgcttcactcatgtg

SEQ ID NO: 1742814 - DNA, 25 bp, Homo sapien
ctcatgtttcttgccccatggacaa

SEQ ID NO: 1742815 - DNA, 25 bp, Homo sapien
tcttgccccatggacaatggatgta

SEQ ID NO: 1742816 - DNA, 25 bp, Homo sapien
agctcttcccgcttttcacttcatg

SEQ ID NO: 1742817 - DNA, 25 bp, Homo sapien
gaggccgtgggcaactataatgagc

SEQ ID NO: 1742818 - DNA, 25 bp, Homo sapien
tttcattggccggaaatttcattga

SEQ ID NO: 1742819 - DNA, 25 bp, Homo sapien
cgtgggcaactataatgagcagagc

SEQ ID NO: 1742820 - DNA, 25 bp, Homo sapien
tcattggccggaaatttcattgact

SEQ ID NO: 1742821 - DNA, 25 bp, Homo sapien
tttcccttcttatgttcacagtgtt

SEQ ID NO: 1742822 - DNA, 25 bp, Homo sapien
tctgcttctcaaaattacatctgtg

SEQ ID NO: 1742823 - DNA, 25 bp, Homo sapien
tgcatccaattctgatttcaaagcc

SEQ ID NO: 1742824 - DNA, 25 bp, Homo sapien
tacatctgtgcttgcagaactggtc

SEQ ID NO: 1742825 - DNA, 25 bp, Homo sapien
tctagtcgactcattgtgcctattt

SEQ ID NO: 1742826 - DNA, 25 bp, Homo sapien
tttctagggaccatgtgctaattac

SEQ ID NO: 1742827 - DNA, 25 bp, Homo sapien
gctctcaagagacagtgtgtatttc

SEQ ID NO: 1742828 - DNA, 25 bp, Homo sapien
tgtgtatttctagtcgactcattgt

SEQ ID NO: 1742829 - DNA, 25 bp, Homo sapien
gatcctcaagagtgtagtgggtcat

SEQ ID NO: 1742830 - DNA, 25 bp, Homo sapien
gaaagtgtagatcctcaagagtgta

SEQ ID NO: 1742831 - DNA, 25 bp, Homo sapien
cattactcagaaagtgtagatcctc

SEQ ID NO: 1742832 - DNA, 25 bp, Homo sapien
tactcagaaagtgtagatcctcaag

SEQ ID NO: 1742833 - DNA, 25 bp, Homo sapien
acaatactcagctctatccaggtct

SEQ ID NO: 1742834 - DNA, 25 bp, Homo sapien
tctggaaagatagttatagcatcca

SEQ ID NO: 1742835 - DNA, 25 bp, Homo sapien
aaagatagttatagcatccaatgcc

SEQ ID NO: 1742836 - DNA, 25 bp, Homo sapien
ccatctggaaagatagttatagcat

SEQ ID NO: 1742837 - DNA, 25 bp, Homo sapien
gcctaccatgtaccaactattgaga

SEQ ID NO: 1742838 - DNA, 25 bp, Homo sapien
tgttgaaaagatatagctcatgccc

SEQ ID NO: 1742839 - DNA, 25 bp, Homo sapien
aacatatctgttgagtgcctaccat

SEQ ID NO: 1742840 - DNA, 25 bp, Homo sapien
gctcatgccctcaaataactcttga

SEQ ID NO: 1742841 - DNA, 25 bp, Homo sapien
ggccataatgccttcaagaaccata

SEQ ID NO: 1742842 - DNA, 25 bp, Homo sapien
gagaagactcctgaaacactggcta

SEQ ID NO: 1742843 - DNA, 25 bp, Homo sapien
aagtcctcttggcactctgtaacca

SEQ ID NO: 1742844 - DNA, 25 bp, Homo sapien
atactcacttagaagggcacggaga

SEQ ID NO: 1742845 - DNA, 25 bp, Homo sapien
tggtggcttgctcccagtgcatcac

SEQ ID NO: 1742846 - DNA, 25 bp, Homo sapien
gctccatttttcatgcgatggcaga

SEQ ID NO: 1742847 - DNA, 25 bp, Homo sapien
agcactctgaactgtcctgtggaat

SEQ ID NO: 1742848 - DNA, 25 bp, Homo sapien
taaattgcaggtgggtgtcattcca

SEQ ID NO: 1742849 - DNA, 25 bp, Homo sapien
cgaaatatgtttgcacttacttaaa

SEQ ID NO: 1742850 - DNA, 25 bp, Homo sapien
tatgtttgcacttacttaaagctta

SEQ ID NO: 1742851 - DNA, 25 bp, Homo sapien
tctaatttagggaaacatgcaattt

SEQ ID NO: 1742852 - DNA, 25 bp, Homo sapien
atttagggaaacatgcaatttttag

SEQ ID NO: 1742853 - DNA, 25 bp, Homo sapien
aatgtgaggtcacatcacaggaggc

SEQ ID NO: 1742854 - DNA, 25 bp, Homo sapien
ggactgaaggtccaagacatcaact

SEQ ID NO: 1742855 - DNA, 25 bp, Homo sapien
tggagacacaaagcatctacccttc

SEQ ID NO: 1742856 - DNA, 25 bp, Homo sapien
taactataggcaaggtgtcagcatt

SEQ ID NO: 1742857 - DNA, 25 bp, Homo sapien
tacgtgtcttaccactctagagagc

SEQ ID NO: 1742858 - DNA, 25 bp, Homo sapien
aaatgctgtctccttcacgaggccc

SEQ ID NO: 1742859 - DNA, 25 bp, Homo sapien
tgcaaagatttgtgccatgtaccat

SEQ ID NO: 1742860 - DNA, 25 bp, Homo sapien
gagctactgtatcccaggaacaccc

SEQ ID NO: 1742861 - DNA, 25 bp, Homo sapien
tgcttcccctatctacgaaggactg

SEQ ID NO: 1742862 - DNA, 25 bp, Homo sapien
gaaggactgtatggttctattgcac

SEQ ID NO: 1742863 - DNA, 25 bp, Homo sapien
gacattggacaaagctgagcagggt

SEQ ID NO: 1742864 - DNA, 25 bp, Homo sapien
cagggtttttcaattgcatctggca

SEQ ID NO: 1742865 - DNA, 25 bp, Homo sapien
gaagattattggagaggatctctcc

SEQ ID NO: 1742866 - DNA, 25 bp, Homo sapien
tgtagaagaatacaatctctgcctc

SEQ ID NO: 1742867 - DNA, 25 bp, Homo sapien
gaggtttgcattagtttccatgggc

SEQ ID NO: 1742868 - DNA, 25 bp, Homo sapien
tccatgggctgctataatgaagtac

SEQ ID NO: 1742869 - DNA, 25 bp, Homo sapien
tgccaacttagacaacactcttttt

SEQ ID NO: 1742870 - DNA, 25 bp, Homo sapien
tggtgccaacttagacaacactctt

SEQ ID NO: 1742871 - DNA, 25 bp, Homo sapien
caactctggtgccaacttagacaac

SEQ ID NO: 1742872 - DNA, 25 bp, Homo sapien
ctctggtgccaacttagacaacact

SEQ ID NO: 1742873 - DNA, 25 bp, Homo sapien
tcatggttccatttctcttgcccct

SEQ ID NO: 1742874 - DNA, 25 bp, Homo sapien
catggttccatttctcttgcccctg

SEQ ID NO: 1742875 - DNA, 25 bp, Homo sapien
atcatggttccatttctcttgcccc

SEQ ID NO: 1742876 - DNA, 25 bp, Homo sapien
gatcatggttccatttctcttgccc

SEQ ID NO: 1742877 - DNA, 25 bp, Homo sapien
caagccatataacagtaggttgaga

SEQ ID NO: 1742878 - DNA, 25 bp, Homo sapien
ttcgggctcagggatgcgccctctc

SEQ ID NO: 1742879 - DNA, 25 bp, Homo sapien
tcctgtagacaggtggaagccgcct

SEQ ID NO: 1742880 - DNA, 25 bp, Homo sapien
caagccttccaactgcaagcggtgt

SEQ ID NO: 1742881 - DNA, 25 bp, Homo sapien
catattggaacaattgtcccgcaaa

SEQ ID NO: 1742882 - DNA, 25 bp, Homo sapien
tggtttccagaatgtcagaagccat

SEQ ID NO: 1742883 - DNA, 25 bp, Homo sapien
tctggtttccagaatgtcagaagcc

SEQ ID NO: 1742884 - DNA, 25 bp, Homo sapien
attgtcccgcaaaagcccgtgctct

SEQ ID NO: 1742885 - DNA, 25 bp, Homo sapien
tccaactgtgttgcatagggtttgc

SEQ ID NO: 1742886 - DNA, 25 bp, Homo sapien
taattccaactgtgttgcatagggt

SEQ ID NO: 1742887 - DNA, 25 bp, Homo sapien
aagaataattccaactgtgttgcat

SEQ ID NO: 1742888 - DNA, 25 bp, Homo sapien
caactgtgttgcatagggtttgcca

SEQ ID NO: 1742889 - DNA, 25 bp, Homo sapien
actatcctcataaagggatatgggt

SEQ ID NO: 1742890 - DNA, 25 bp, Homo sapien
ggtaagtctgacttcctatgtccac

SEQ ID NO: 1742891 - DNA, 25 bp, Homo sapien
aactcatgtttagctgattgataac

SEQ ID NO: 1742892 - DNA, 25 bp, Homo sapien
tccactgttcaggacagcaatattt

SEQ ID NO: 1742893 - DNA, 25 bp, Homo sapien
agtgtgttccacaagagttaaatgt

SEQ ID NO: 1742894 - DNA, 25 bp, Homo sapien
tgtgttccacaagagttaaatgtgt

SEQ ID NO: 1742895 - DNA, 25 bp, Homo sapien
gttccacaagagttaaatgtgttcc

SEQ ID NO: 1742896 - DNA, 25 bp, Homo sapien
ccacaagagttaaatgtgttcctgt

SEQ ID NO: 1742897 - DNA, 25 bp, Homo sapien
ttaagctcggctatgcaaagagaca

SEQ ID NO: 1742898 - DNA, 25 bp, Homo sapien
ataaacagtgctccctccgggtgtc

SEQ ID NO: 1742899 - DNA, 25 bp, Homo sapien
gagtatgctcgccaatcctatgggt

SEQ ID NO: 1742900 - DNA, 25 bp, Homo sapien
cctatgggttatacaccagcagaca

SEQ ID NO: 1742901 - DNA, 25 bp, Homo sapien
cagttcctgagtctgcttggatggt

SEQ ID NO: 1742902 - DNA, 25 bp, Homo sapien
tgctcctcaaagttttttgaaccca

SEQ ID NO: 1742903 - DNA, 25 bp, Homo sapien
ttgaacccagttcctgagtctgctt

SEQ ID NO: 1742904 - DNA, 25 bp, Homo sapien
gtaagatgctcctcaaagttttttg

SEQ ID NO: 1742905 - DNA, 25 bp, Homo sapien
gagcagcagtagtcatcttgcaaca

SEQ ID NO: 1742906 - DNA, 25 bp, Homo sapien
ttgagcagcagtagtcatcttgcaa

SEQ ID NO: 1742907 - DNA, 25 bp, Homo sapien
tgagcagcagtagtcatcttgcaac

SEQ ID NO: 1742908 - DNA, 25 bp, Homo sapien
gcagcagtagtcatcttgcaacaag

SEQ ID NO: 1742909 - DNA, 25 bp, Homo sapien
ggccatggcttgagtctgtacttga

SEQ ID NO: 1742910 - DNA, 25 bp, Homo sapien
tttgtctgaaccctggcatcctagg

SEQ ID NO: 1742911 - DNA, 25 bp, Homo sapien
catgctaccctgactgcctgttttg

SEQ ID NO: 1742912 - DNA, 25 bp, Homo sapien
tttattaaggctgtaatggtgtctc

SEQ ID NO: 1742913 - DNA, 25 bp, Homo sapien
gataccccatgtaagtggaacaatg

SEQ ID NO: 1742914 - DNA, 25 bp, Homo sapien
aaatatattgctaggtctctttccg

SEQ ID NO: 1742915 - DNA, 25 bp, Homo sapien
tatgcctttagataagtaactcaac

SEQ ID NO: 1742916 - DNA, 25 bp, Homo sapien
cagtcaatgagcaggtagtttttcc

SEQ ID NO: 1742917 - DNA, 25 bp, Homo sapien
gatcattacaggcatgcttaatgac

SEQ ID NO: 1742918 - DNA, 25 bp, Homo sapien
tcattacaggcatgcttaatgacta

SEQ ID NO: 1742919 - DNA, 25 bp, Homo sapien
atgatgatcattacaggcatgctta

SEQ ID NO: 1742920 - DNA, 25 bp, Homo sapien
atgatcattacaggcatgcttaatg

SEQ ID NO: 1742921 - DNA, 25 bp, Homo sapien
ccaaactatgtttttatggagatag

SEQ ID NO: 1742922 - DNA, 25 bp, Homo sapien
attccaaactatgtttttatggaga

SEQ ID NO: 1742923 - DNA, 25 bp, Homo sapien
caaactatgtttttatggagatagt

SEQ ID NO: 1742924 - DNA, 25 bp, Homo sapien
tccaaactatgtttttatggagata

SEQ ID NO: 1742925 - DNA, 25 bp, Homo sapien
ttcacttgtctactctctaaagcct

SEQ ID NO: 1742926 - DNA, 25 bp, Homo sapien
ctactctctaaagcctgtttagcct

SEQ ID NO: 1742927 - DNA, 25 bp, Homo sapien
tctctaaagcctgtttagcctccat

SEQ ID NO: 1742928 - DNA, 25 bp, Homo sapien
tttcttttcacttgtctactctcta

SEQ ID NO: 1742929 - DNA, 25 bp, Homo sapien
tgttctactctctgccattgcctca

SEQ ID NO: 1742930 - DNA, 25 bp, Homo sapien
tcattcccggaatgctgttctactc

SEQ ID NO: 1742931 - DNA, 25 bp, Homo sapien
tcccggaatgctgttctactctctg

SEQ ID NO: 1742932 - DNA, 25 bp, Homo sapien
gaatgctgttctactctctgccatt

SEQ ID NO: 1742933 - DNA, 25 bp, Homo sapien
tcaaaaatctcacttagattggttg

SEQ ID NO: 1742934 - DNA, 25 bp, Homo sapien
gacgaatgtcccatatgtgtataaa

SEQ ID NO: 1742935 - DNA, 25 bp, Homo sapien
tcaagttcgtagatgactgtacttg

SEQ ID NO: 1742936 - DNA, 25 bp, Homo sapien
tagattggttgacttctctgtgata

SEQ ID NO: 1742937 - DNA, 25 bp, Homo sapien
cataacgtttattgctggattcttc

SEQ ID NO: 1742938 - DNA, 25 bp, Homo sapien
caactgtgatggtgaattagagcag

SEQ ID NO: 1742939 - DNA, 25 bp, Homo sapien
cagaactgttcataacgtttattgc

SEQ ID NO: 1742940 - DNA, 25 bp, Homo sapien
actgttcataacgtttattgctgga

SEQ ID NO: 1742941 - DNA, 25 bp, Homo sapien
tcatccacagcttggagatctccca

SEQ ID NO: 1742942 - DNA, 25 bp, Homo sapien
tctgccttgttttatgtatatccac

SEQ ID NO: 1742943 - DNA, 25 bp, Homo sapien
catccacagcttggagatctcccat

SEQ ID NO: 1742944 - DNA, 25 bp, Homo sapien
tttatgtatatccacttcatccaca

SEQ ID NO: 1742945 - DNA, 25 bp, Homo sapien
gcagttacaacagggtaggtgtcat

SEQ ID NO: 1742946 - DNA, 25 bp, Homo sapien
tgtgtagcagctgcaataacttcca

SEQ ID NO: 1742947 - DNA, 25 bp, Homo sapien
atgtgggaggttaatgacaggagtc

SEQ ID NO: 1742948 - DNA, 25 bp, Homo sapien
agggttatgtgggaggttaatgaca

SEQ ID NO: 1742949 - DNA, 25 bp, Homo sapien
agtcatcagtattaagcttatagta

SEQ ID NO: 1742950 - DNA, 25 bp, Homo sapien
cacttagatcctgtatctccaaagg

SEQ ID NO: 1742951 - DNA, 25 bp, Homo sapien
tagtactcagtaacacttagatcct

SEQ ID NO: 1742952 - DNA, 25 bp, Homo sapien
tctccaaaggatccacagactgacc

SEQ ID NO: 1742953 - DNA, 25 bp, Homo sapien
tctgcatctggatttatcaatggac

SEQ ID NO: 1742954 - DNA, 25 bp, Homo sapien
tctgttctccttataacccacccaa

SEQ ID NO: 1742955 - DNA, 25 bp, Homo sapien
gttgcttcacaaggggcattctgtt

SEQ ID NO: 1742956 - DNA, 25 bp, Homo sapien
cttcacaaggggcattctgttctcc

SEQ ID NO: 1742957 - DNA, 25 bp, Homo sapien
agccagttgcttcacaaggggcatt

SEQ ID NO: 1742958 - DNA, 25 bp, Homo sapien
taccttcatatatctgctcttttgt

SEQ ID NO: 1742959 - DNA, 25 bp, Homo sapien
aggcacactgaatgtggcttcattt

SEQ ID NO: 1742960 - DNA, 25 bp, Homo sapien
tcaggcacactgaatgtggcttcat

SEQ ID NO: 1742961 - DNA, 25 bp, Homo sapien
ttaccttcatatatctgctcttttg

SEQ ID NO: 1742962 - DNA, 25 bp, Homo sapien
gtgtgtggtgtccagcagccatgca

SEQ ID NO: 1742963 - DNA, 25 bp, Homo sapien
tgtccagcagccatgcagggcagcc

SEQ ID NO: 1742964 - DNA, 25 bp, Homo sapien
tggtgtccagcagccatgcagggca

SEQ ID NO: 1742965 - DNA, 25 bp, Homo sapien
tgtgtggtgtccagcagccatgcag

SEQ ID NO: 1742966 - DNA, 25 bp, Homo sapien
cacaggcctgcgtgcaggacagctg

SEQ ID NO: 1742967 - DNA, 25 bp, Homo sapien
ggacagctgagagagcggcaactcc

SEQ ID NO: 1742968 - DNA, 25 bp, Homo sapien
ctgagagagcggcaactccctgccc

SEQ ID NO: 1742969 - DNA, 25 bp, Homo sapien
acaggcctgcgtgcaggacagctga

SEQ ID NO: 1742970 - DNA, 25 bp, Homo sapien
cacggaacacagaatctacactgct

SEQ ID NO: 1742971 - DNA, 25 bp, Homo sapien
gctttccattgttcgtatctcacgg

SEQ ID NO: 1742972 - DNA, 25 bp, Homo sapien
cagtgctttccattgttcgtatctc

SEQ ID NO: 1742973 - DNA, 25 bp, Homo sapien
tgttcgtatctcacggaacacagaa

SEQ ID NO: 1742974 - DNA, 25 bp, Homo sapien
taagggaaacttcgtcttgacactg

SEQ ID NO: 1742975 - DNA, 25 bp, Homo sapien
aacttcgtcttgacactgactttac

SEQ ID NO: 1742976 - DNA, 25 bp, Homo sapien
cgttgtcaaccaagtcagaagcttt

SEQ ID NO: 1742977 - DNA, 25 bp, Homo sapien
gggaacacgttgtcaaccaagtcag

SEQ ID NO: 1742978 - DNA, 25 bp, Homo sapien
atatcccccttttcagggttgatag

SEQ ID NO: 1742979 - DNA, 25 bp, Homo sapien
cgaattagcaaaggcaactttcagc

SEQ ID NO: 1742980 - DNA, 25 bp, Homo sapien
ttcatggcatactgcgaattagcaa

SEQ ID NO: 1742981 - DNA, 25 bp, Homo sapien
tttctggaagctgcttcatatcccc

SEQ ID NO: 1742982 - DNA, 25 bp, Homo sapien
ccaactctctgacaccacacatgcc

SEQ ID NO: 1742983 - DNA, 25 bp, Homo sapien
aattaggaggctctttgctgatggg

SEQ ID NO: 1742984 - DNA, 25 bp, Homo sapien
tgctgatgggttataattactttcc

SEQ ID NO: 1742985 - DNA, 25 bp, Homo sapien
tcactgtcccgtgcatgcagcactt

SEQ ID NO: 1742986 - DNA, 25 bp, Homo sapien
ttcaaaattaggaggctctttgctg

SEQ ID NO: 1742987 - DNA, 25 bp, Homo sapien
caaggattaacgatgtcaagttgtg

SEQ ID NO: 1742988 - DNA, 25 bp, Homo sapien
taacgatgtcaagttgtgtctgtcc

SEQ ID NO: 1742989 - DNA, 25 bp, Homo sapien
tgctcaaggattaacgatgtcaagt

SEQ ID NO: 1742990 - DNA, 25 bp, Homo sapien
atgatttgctcaaggattaacgatg

SEQ ID NO: 1742991 - DNA, 25 bp, Homo sapien
atattccttggaatgctaccctcag

SEQ ID NO: 1742992 - DNA, 25 bp, Homo sapien
agatattccttggaatgctaccctc

SEQ ID NO: 1742993 - DNA, 25 bp, Homo sapien
tattccttggaatgctaccctcagt

SEQ ID NO: 1742994 - DNA, 25 bp, Homo sapien
gatattccttggaatgctaccctca

SEQ ID NO: 1742995 - DNA, 25 bp, Homo sapien
gaagcattctccacataacctgaag

SEQ ID NO: 1742996 - DNA, 25 bp, Homo sapien
tccacataacctgaagatcagtggg

SEQ ID NO: 1742997 - DNA, 25 bp, Homo sapien
tcagtggggctatactgcagggagt

SEQ ID NO: 1742998 - DNA, 25 bp, Homo sapien
atgctcgtagtgaagagtggaagaa

SEQ ID NO: 1742999 - DNA, 25 bp, Homo sapien
ttcagcaatcaccacaaaatttaac

SEQ ID NO: 1743000 - DNA, 25 bp, Homo sapien
cagcaatcaccacaaaatttaacag

SEQ ID NO: 1743001 - DNA, 25 bp, Homo sapien
agctgttggtgtcgtggaatagaca

SEQ ID NO: 1743002 - DNA, 25 bp, Homo sapien
gctgttggtgtcgtggaatagacat

SEQ ID NO: 1743003 - DNA, 25 bp, Homo sapien
taaaatatcagtatagccatcagag

SEQ ID NO: 1743004 - DNA, 25 bp, Homo sapien
aaaatatcagtatagccatcagagt

SEQ ID NO: 1743005 - DNA, 25 bp, Homo sapien
tatcagtatagccatcagagttatc

SEQ ID NO: 1743006 - DNA, 25 bp, Homo sapien
aatatcagtatagccatcagagtta

SEQ ID NO: 1743007 - DNA, 25 bp, Homo sapien
tatatattcgagaaatcctgttcat

SEQ ID NO: 1743008 - DNA, 25 bp, Homo sapien
ttctctatatattcgagaaatcctg

SEQ ID NO: 1743009 - DNA, 25 bp, Homo sapien
tctctatatattcgagaaatcctgt

SEQ ID NO: 1743010 - DNA, 25 bp, Homo sapien
tctatatattcgagaaatcctgttc

SEQ ID NO: 1743011 - DNA, 25 bp, Homo sapien
ggtgctcatcaacctcatctcttca

SEQ ID NO: 1743012 - DNA, 25 bp, Homo sapien
tctgatctaaaggtgatacaatggt

SEQ ID NO: 1743013 - DNA, 25 bp, Homo sapien
acctgttccacatgttctgatctaa

SEQ ID NO: 1743014 - DNA, 25 bp, Homo sapien
catctcttcattaacctgttccaca

SEQ ID NO: 1743015 - DNA, 25 bp, Homo sapien
caattctgatctaaatggtctatgc

SEQ ID NO: 1743016 - DNA, 25 bp, Homo sapien
cttggatagggtctctgatatggca

SEQ ID NO: 1743017 - DNA, 25 bp, Homo sapien
tctatgccgttgcttggatagggtc

SEQ ID NO: 1743018 - DNA, 25 bp, Homo sapien
taaatggtctatgccgttgcttgga

SEQ ID NO: 1743019 - DNA, 25 bp, Homo sapien
aattcttgccctctcattgagcact

SEQ ID NO: 1743020 - DNA, 25 bp, Homo sapien
tgtgagtgtgatccaactgcaattc

SEQ ID NO: 1743021 - DNA, 25 bp, Homo sapien
cattaatctagctgatctggctgct

SEQ ID NO: 1743022 - DNA, 25 bp, Homo sapien
tgctttgtatctagaagaatctatg

SEQ ID NO: 1743023 - DNA, 25 bp, Homo sapien
tcaggagcgtccagcagatctcaga

SEQ ID NO: 1743024 - DNA, 25 bp, Homo sapien
gatgctcacgtgaaatccagcagtc

SEQ ID NO: 1743025 - DNA, 25 bp, Homo sapien
tctcagagtgatccgctggatgctc

SEQ ID NO: 1743026 - DNA, 25 bp, Homo sapien
gatccgctggatgctcacgtgaaat

SEQ ID NO: 1743027 - DNA, 25 bp, Homo sapien
caatcagcagacgtgtcaatagcat

SEQ ID NO: 1743028 - DNA, 25 bp, Homo sapien
cgctcataatacaagcaatgatgat

SEQ ID NO: 1743029 - DNA, 25 bp, Homo sapien
cagacgtgtcaatagcattttccag

SEQ ID NO: 1743030 - DNA, 25 bp, Homo sapien
catagttttgggtctaaaacgctca

SEQ ID NO: 1743031 - DNA, 25 bp, Homo sapien
ttcagcaaaattaaggataggtaac

SEQ ID NO: 1743032 - DNA, 25 bp, Homo sapien
ggactctggattggacactcttccc

SEQ ID NO: 1743033 - DNA, 25 bp, Homo sapien
ggattggacactcttccctcttggt

SEQ ID NO: 1743034 - DNA, 25 bp, Homo sapien
ttttcagcaaaattaaggataggta

SEQ ID NO: 1743035 - DNA, 25 bp, Homo sapien
gccactcttatacaacagacattag

SEQ ID NO: 1743036 - DNA, 25 bp, Homo sapien
tgtgtataggatctgcaagtcgcca

SEQ ID NO: 1743037 - DNA, 25 bp, Homo sapien
ggatctgcaagtcgccactcttata

SEQ ID NO: 1743038 - DNA, 25 bp, Homo sapien
gacattagcacttatatcattctca

SEQ ID NO: 1743039 - DNA, 25 bp, Homo sapien
tgcacacaagccccatataacagac

SEQ ID NO: 1743040 - DNA, 25 bp, Homo sapien
acacaagccccatataacagaccat

SEQ ID NO: 1743041 - DNA, 25 bp, Homo sapien
gatgtgcttgtcacctgcacacaag

SEQ ID NO: 1743042 - DNA, 25 bp, Homo sapien
gtcatgatgtgcttgtcacctgcac

SEQ ID NO: 1743043 - DNA, 25 bp, Homo sapien
catctctaggataagtacagcttca

SEQ ID NO: 1743044 - DNA, 25 bp, Homo sapien
ctgcatctctaggataagtacagct

SEQ ID NO: 1743045 - DNA, 25 bp, Homo sapien
gcatctctaggataagtacagcttc

SEQ ID NO: 1743046 - DNA, 25 bp, Homo sapien
atctctaggataagtacagcttcat

SEQ ID NO: 1743047 - DNA, 25 bp, Homo sapien
tgctttatttgaccctttacttcaa

SEQ ID NO: 1743048 - DNA, 25 bp, Homo sapien
tctaaaacattgtagggttggacag

SEQ ID NO: 1743049 - DNA, 25 bp, Homo sapien
cattgtagggttggacagtaattaa

SEQ ID NO: 1743050 - DNA, 25 bp, Homo sapien
cagtaattaatggttttcgaagttg

SEQ ID NO: 1743051 - DNA, 25 bp, Homo sapien
gatgatttcgattgccggttgacag

SEQ ID NO: 1743052 - DNA, 25 bp, Homo sapien
caatcatggagatgatttcgattgc

SEQ ID NO: 1743053 - DNA, 25 bp, Homo sapien
tcgattgccggttgacagatataca

SEQ ID NO: 1743054 - DNA, 25 bp, Homo sapien
tgccggttgacagatatacattgta

SEQ ID NO: 1743055 - DNA, 25 bp, Homo sapien
gtatcttctgtaagttgatcaccag

SEQ ID NO: 1743056 - DNA, 25 bp, Homo sapien
tcttctgtaagttgatcaccagagc

SEQ ID NO: 1743057 - DNA, 25 bp, Homo sapien
tctgtaagttgatcaccagagcacc

SEQ ID NO: 1743058 - DNA, 25 bp, Homo sapien
agagtatcttctgtaagttgatcac

SEQ ID NO: 1743059 - DNA, 25 bp, Homo sapien
tatcattggggtggctatcatccgt

SEQ ID NO: 1743060 - DNA, 25 bp, Homo sapien
ggtggctatcatccgttgtttcaaa

SEQ ID NO: 1743061 - DNA, 25 bp, Homo sapien
tgtcatccttatctgactggtcccc

SEQ ID NO: 1743062 - DNA, 25 bp, Homo sapien
aatttgaaggcgaactggaatgtta

SEQ ID NO: 1743063 - DNA, 25 bp, Homo sapien
gcaaaactaatctttataagagaag

SEQ ID NO: 1743064 - DNA, 25 bp, Homo sapien
cactgtaccgagctcaacattctta

SEQ ID NO: 1743065 - DNA, 25 bp, Homo sapien
gaaacaggatcattctcagacaagc

SEQ ID NO: 1743066 - DNA, 25 bp, Homo sapien
aacaggatcattctcagacaagcaa

SEQ ID NO: 1743067 - DNA, 25 bp, Homo sapien
ttcactactgagtatgagtctgttg

SEQ ID NO: 1743068 - DNA, 25 bp, Homo sapien
cactactgagtatgagtctgttgac

SEQ ID NO: 1743069 - DNA, 25 bp, Homo sapien
tatggaacccaaatcagattgaaga

SEQ ID NO: 1743070 - DNA, 25 bp, Homo sapien
tctgttgactttttatatggaaccc

SEQ ID NO: 1743071 - DNA, 25 bp, Homo sapien
cttcacatgggaaaggagacaagag

SEQ ID NO: 1743072 - DNA, 25 bp, Homo sapien
gagacaagagttggagtgaacttcc

SEQ ID NO: 1743073 - DNA, 25 bp, Homo sapien
tataactgtgttcctgtcccttccc

SEQ ID NO: 1743074 - DNA, 25 bp, Homo sapien
aggtgcttcacatgggaaaggagac

SEQ ID NO: 1743075 - DNA, 25 bp, Homo sapien
gctgcacatgagtctaaacagatgt

SEQ ID NO: 1743076 - DNA, 25 bp, Homo sapien
ttatagagtgcatgtttatctttca

SEQ ID NO: 1743077 - DNA, 25 bp, Homo sapien
tctgttgtttagtccgatgaagttt

SEQ ID NO: 1743078 - DNA, 25 bp, Homo sapien
ctccctgttgctgaactcagccaaa

SEQ ID NO: 1743079 - DNA, 25 bp, Homo sapien
gacttcatgctttcgtggattccct

SEQ ID NO: 1743080 - DNA, 25 bp, Homo sapien
catgctttcgtggattccctctctt

SEQ ID NO: 1743081 - DNA, 25 bp, Homo sapien
caagacttcatgctttcgtggattc

SEQ ID NO: 1743082 - DNA, 25 bp, Homo sapien
ctttcgtggattccctctctttctg

SEQ ID NO: 1743083 - DNA, 25 bp, Homo sapien
ctccagactggcaacagagcgagga

SEQ ID NO: 1743084 - DNA, 25 bp, Homo sapien
tccagactggcaacagagcgaggag

SEQ ID NO: 1743085 - DNA, 25 bp, Homo sapien
cagactggcaacagagcgaggagac

SEQ ID NO: 1743086 - DNA, 25 bp, Homo sapien
agactggcaacagagcgaggagact

SEQ ID NO: 1743087 - DNA, 25 bp, Homo sapien
caatgtagtactttaggcaggcaaa

SEQ ID NO: 1743088 - DNA, 25 bp, Homo sapien
tccaggttaccagcaacaggaagag

SEQ ID NO: 1743089 - DNA, 25 bp, Homo sapien
gagtgccaggacaattcaacaggga

SEQ ID NO: 1743090 - DNA, 25 bp, Homo sapien
tgggaagcaaagctcatcacttgtg

SEQ ID NO: 1743091 - DNA, 25 bp, Homo sapien
atcagataagatcagccacctacag

SEQ ID NO: 1743092 - DNA, 25 bp, Homo sapien
gatcagataagatcagccacctaca

SEQ ID NO: 1743093 - DNA, 25 bp, Homo sapien
tcagataagatcagccacctacagg

SEQ ID NO: 1743094 - DNA, 25 bp, Homo sapien
cctacagggagatatggctgtagat

SEQ ID NO: 1743095 - DNA, 25 bp, Homo sapien
aattctgccttgttcagggaggtca

SEQ ID NO: 1743096 - DNA, 25 bp, Homo sapien
ttcaaattcaaaggacatcagctgg

SEQ ID NO: 1743097 - DNA, 25 bp, Homo sapien
tcaaaggccatgagatgcagaattc

SEQ ID NO: 1743098 - DNA, 25 bp, Homo sapien
gagacacgggttgatactgcagttc

SEQ ID NO: 1743099 - DNA, 25 bp, Homo sapien
caagggtccttaaagcatgtgagtt

SEQ ID NO: 1743100 - DNA, 25 bp, Homo sapien
catgtgagttttgtggtgcaaggaa

SEQ ID NO: 1743101 - DNA, 25 bp, Homo sapien
cacagggttgattctcaagggtcct

SEQ ID NO: 1743102 - DNA, 25 bp, Homo sapien
accaatcaattgcttcagacctccg

SEQ ID NO: 1743103 - DNA, 25 bp, Homo sapien
gctcaccaggctctcaagctgtgcc

SEQ ID NO: 1743104 - DNA, 25 bp, Homo sapien
tcaccaggctctcaagctgtgcctt

SEQ ID NO: 1743105 - DNA, 25 bp, Homo sapien
accaggctctcaagctgtgccttgc

SEQ ID NO: 1743106 - DNA, 25 bp, Homo sapien
caccaggctctcaagctgtgccttg

SEQ ID NO: 1743107 - DNA, 25 bp, Homo sapien
tttatgtgttccttcctgtttagca

SEQ ID NO: 1743108 - DNA, 25 bp, Homo sapien
ctgacagttttatgtgttccttcct

SEQ ID NO: 1743109 - DNA, 25 bp, Homo sapien
ttatgtgttccttcctgtttagcat

SEQ ID NO: 1743110 - DNA, 25 bp, Homo sapien
acagttttatgtgttccttcctgtt

SEQ ID NO: 1743111 - DNA, 25 bp, Homo sapien
ggtaccaaatgtatccatgcacaga

SEQ ID NO: 1743112 - DNA, 25 bp, Homo sapien
gactgtgaccatctcaacaggttct

SEQ ID NO: 1743113 - DNA, 25 bp, Homo sapien
tcagaattgctttgtgactgtgacc

SEQ ID NO: 1743114 - DNA, 25 bp, Homo sapien
tggatgattgtgtccactgttgtcc

SEQ ID NO: 1743115 - DNA, 25 bp, Homo sapien
taaactacactgcaagggcattctg

SEQ ID NO: 1743116 - DNA, 25 bp, Homo sapien
tgtggtgtgtcgagatcatgccagt

SEQ ID NO: 1743117 - DNA, 25 bp, Homo sapien
aagtctagtcttggtctgatgcagg

SEQ ID NO: 1743118 - DNA, 25 bp, Homo sapien
gggaggctcttgagtctaaactaca

SEQ ID NO: 1743119 - DNA, 25 bp, Homo sapien
gagggagtcattcactagcatggac

SEQ ID NO: 1743120 - DNA, 25 bp, Homo sapien
gacaatagtcaggaataagatgcac

SEQ ID NO: 1743121 - DNA, 25 bp, Homo sapien
tacagcaggctactaatggcagagc

SEQ ID NO: 1743122 - DNA, 25 bp, Homo sapien
cagaatgggcatgcaatgtaccttg

SEQ ID NO: 1743123 - DNA, 25 bp, Homo sapien
gacctttgattccctcggtaccatc

SEQ ID NO: 1743124 - DNA, 25 bp, Homo sapien
tcggtaccatccgttctatcccatt

SEQ ID NO: 1743125 - DNA, 25 bp, Homo sapien
gattccctcggtaccatccgttcta

SEQ ID NO: 1743126 - DNA, 25 bp, Homo sapien
ctttgattccctcggtaccatccgt

SEQ ID NO: 1743127 - DNA, 25 bp, Homo sapien
gctttgaggtgttctgttgcagcaa

SEQ ID NO: 1743128 - DNA, 25 bp, Homo sapien
tgtgttaggtgaaaccaaaaagcca

SEQ ID NO: 1743129 - DNA, 25 bp, Homo sapien
tgcaaagccttgcagaacggaggag

SEQ ID NO: 1743130 - DNA, 25 bp, Homo sapien
tttgactataggctgcgtcacaggc

SEQ ID NO: 1743131 - DNA, 25 bp, Homo sapien
tctctctttgtggatgtgcggccta

SEQ ID NO: 1743132 - DNA, 25 bp, Homo sapien
gactctgccataacaataacctgct

SEQ ID NO: 1743133 - DNA, 25 bp, Homo sapien
tagaacaggctgtactcaagacaac

SEQ ID NO: 1743134 - DNA, 25 bp, Homo sapien
tttgaatgtctggtgagagagagcc

SEQ ID NO: 1743135 - DNA, 25 bp, Homo sapien
gacgtgggcatattgcaatgatgaa

SEQ ID NO: 1743136 - DNA, 25 bp, Homo sapien
gccattttgacagttggaacccatt

SEQ ID NO: 1743137 - DNA, 25 bp, Homo sapien
tcagggactgcctcaagaagaaaat

SEQ ID NO: 1743138 - DNA, 25 bp, Homo sapien
tgactgctaaaaaggatttccggtg

SEQ ID NO: 1743139 - DNA, 25 bp, Homo sapien
tactacattgcacaggttcagccag

SEQ ID NO: 1743140 - DNA, 25 bp, Homo sapien
taaagtgtgcaatgactctgaccga

SEQ ID NO: 1743141 - DNA, 25 bp, Homo sapien
gacatttcaccccacaataatcggg

SEQ ID NO: 1743142 - DNA, 25 bp, Homo sapien
tccctccggaggcagtttgaattca

SEQ ID NO: 1743143 - DNA, 25 bp, Homo sapien
tacttcgccatgtctgaggacgagc

SEQ ID NO: 1743144 - DNA, 25 bp, Homo sapien
gagcgagaccattccgattcacggg

SEQ ID NO: 1743145 - DNA, 25 bp, Homo sapien
ggactattgcgaaagccctacggcg

SEQ ID NO: 1743146 - DNA, 25 bp, Homo sapien
gactgcctgttggacttcttacccg

SEQ ID NO: 1743147 - DNA, 25 bp, Homo sapien
tgtcagagaactcgcagcaaaggca

SEQ ID NO: 1743148 - DNA, 25 bp, Homo sapien
gggccgcgaggaacgcgcttcgccg

SEQ ID NO: 1743149 - DNA, 25 bp, Homo sapien
gcaaaggcaccggacacctagcggc

SEQ ID NO: 1743150 - DNA, 25 bp, Homo sapien
gcttcgccgcctccaattttgtcag

SEQ ID NO: 1743151 - DNA, 25 bp, Homo sapien
catctgctttgtcaggtcattgtgc

SEQ ID NO: 1743152 - DNA, 25 bp, Homo sapien
accccattgtgtttcagtgtgtctg

SEQ ID NO: 1743153 - DNA, 25 bp, Homo sapien
ccataaggtgctggcttgctagctc

SEQ ID NO: 1743154 - DNA, 25 bp, Homo sapien
cacagaggtcattcgtggctgctgg

SEQ ID NO: 1743155 - DNA, 25 bp, Homo sapien
tgaggaaaggagtacagctggctta

SEQ ID NO: 1743156 - DNA, 25 bp, Homo sapien
gtacagctggcttaattgactgcag

SEQ ID NO: 1743157 - DNA, 25 bp, Homo sapien
agaaacaagctgtgtatacaacaaa

SEQ ID NO: 1743158 - DNA, 25 bp, Homo sapien
ccattacaccgagcccctgtgagga

SEQ ID NO: 1743159 - DNA, 25 bp, Homo sapien
gggctttctagagataccctgcaca

SEQ ID NO: 1743160 - DNA, 25 bp, Homo sapien
tgacttaccaatgtaaattctggcc

SEQ ID NO: 1743161 - DNA, 25 bp, Homo sapien
taaattctggccatggtaccctggg

SEQ ID NO: 1743162 - DNA, 25 bp, Homo sapien
ctagagataccctgcacacctgtct

SEQ ID NO: 1743163 - DNA, 25 bp, Homo sapien
ttgttctgcaccttggtatggatgg

SEQ ID NO: 1743164 - DNA, 25 bp, Homo sapien
gaacttggccctgtgtagggactca

SEQ ID NO: 1743165 - DNA, 25 bp, Homo sapien
tgtgtagggactcagtcacatgctc

SEQ ID NO: 1743166 - DNA, 25 bp, Homo sapien
ccctgtgtagggactcagtcacatg

SEQ ID NO: 1743167 - DNA, 25 bp, Homo sapien
tgcattaaacttgatagagccccat

SEQ ID NO: 1743168 - DNA, 25 bp, Homo sapien
ccacagccatctgagataagacact

SEQ ID NO: 1743169 - DNA, 25 bp, Homo sapien
gacacttctcaactaccatgtcttc

SEQ ID NO: 1743170 - DNA, 25 bp, Homo sapien
taaacttgatagagccccatttctt

SEQ ID NO: 1743171 - DNA, 25 bp, Homo sapien
acagcagaacagtggaagccttcct

SEQ ID NO: 1743172 - DNA, 25 bp, Homo sapien
cagaacagtggaagccttcctgagt

SEQ ID NO: 1743173 - DNA, 25 bp, Homo sapien
taagagacagcagaacagtggaagc

SEQ ID NO: 1743174 - DNA, 25 bp, Homo sapien
agccttcctgagtgcaaggcctgac

SEQ ID NO: 1743175 - DNA, 25 bp, Homo sapien
gctttattgatggtaggtgtatgga

SEQ ID NO: 1743176 - DNA, 25 bp, Homo sapien
attgatggtaggtgtatggagcttc

SEQ ID NO: 1743177 - DNA, 25 bp, Homo sapien
ttattgatggtaggtgtatggagct

SEQ ID NO: 1743178 - DNA, 25 bp, Homo sapien
tgatggtaggtgtatggagcttcct

SEQ ID NO: 1743179 - DNA, 25 bp, Homo sapien
tgtgtttacacagcctctatctgtt

SEQ ID NO: 1743180 - DNA, 25 bp, Homo sapien
ggtttggcttgggaatgtactgatt

SEQ ID NO: 1743181 - DNA, 25 bp, Homo sapien
cagacataatacgaaatagaagaat

SEQ ID NO: 1743182 - DNA, 25 bp, Homo sapien
gaagcctaggatatgctgtgtttac

SEQ ID NO: 1743183 - DNA, 25 bp, Homo sapien
ggccactgatggctacatctcctgc

SEQ ID NO: 1743184 - DNA, 25 bp, Homo sapien
tgtggccactgatggctacatctcc

SEQ ID NO: 1743185 - DNA, 25 bp, Homo sapien
gcagcatgtggccactgatggctac

SEQ ID NO: 1743186 - DNA, 25 bp, Homo sapien
cactgatggctacatctcctgccat

SEQ ID NO: 1743187 - DNA, 25 bp, Homo sapien
gctcgtttctagcttctctgctggg

SEQ ID NO: 1743188 - DNA, 25 bp, Homo sapien
tggactcaagaaaaatccgattagc

SEQ ID NO: 1743189 - DNA, 25 bp, Homo sapien
ccgattagcagggaatcaacaacat

SEQ ID NO: 1743190 - DNA, 25 bp, Homo sapien
aacacttgactgttgctggactcaa

SEQ ID NO: 1743191 - DNA, 25 bp, Homo sapien
tacttcctggctggcatatttaatt

SEQ ID NO: 1743192 - DNA, 25 bp, Homo sapien
agcaacactgttttctctggtgaag

SEQ ID NO: 1743193 - DNA, 25 bp, Homo sapien
cagcaacactgttttctctggtgaa

SEQ ID NO: 1743194 - DNA, 25 bp, Homo sapien
tatttaattgttggtagaagacctc

SEQ ID NO: 1743195 - DNA, 25 bp, Homo sapien
tgcttgtcctcgagttgagttctcc

SEQ ID NO: 1743196 - DNA, 25 bp, Homo sapien
tctaattctagtgacgcagacacct

SEQ ID NO: 1743197 - DNA, 25 bp, Homo sapien
tgagttctccctctctcataggcat

SEQ ID NO: 1743198 - DNA, 25 bp, Homo sapien
taacctccacgtggagacctcagat

SEQ ID NO: 1743199 - DNA, 25 bp, Homo sapien
cttgaagaaaaatgtgtggggctga

SEQ ID NO: 1743200 - DNA, 25 bp, Homo sapien
aagaaaaatgtgtggggctgatttc

SEQ ID NO: 1743201 - DNA, 25 bp, Homo sapien
ttgaagaaaaatgtgtggggctgat

SEQ ID NO: 1743202 - DNA, 25 bp, Homo sapien
tgaagaaaaatgtgtggggctgatt

SEQ ID NO: 1743203 - DNA, 25 bp, Homo sapien
gcaataatagcttggaaaggcccac

SEQ ID NO: 1743204 - DNA, 25 bp, Homo sapien
acttcccgatggtgctgtgaatggc

SEQ ID NO: 1743205 - DNA, 25 bp, Homo sapien
ttggtaaggcctacagaactcggta

SEQ ID NO: 1743206 - DNA, 25 bp, Homo sapien
ggtaaacagacacaacgggccttgc

SEQ ID NO: 1743207 - DNA, 25 bp, Homo sapien
gatgcacaactttcgtaagccaaaa

SEQ ID NO: 1743208 - DNA, 25 bp, Homo sapien
tgcacaactttcgtaagccaaaatt

SEQ ID NO: 1743209 - DNA, 25 bp, Homo sapien
tgtgatgcacaactttcgtaagcca

SEQ ID NO: 1743210 - DNA, 25 bp, Homo sapien
ttctgtgatgcacaactttcgtaag

SEQ ID NO: 1743211 - DNA, 25 bp, Homo sapien
aagtgattcttctgctgcagccccc

SEQ ID NO: 1743212 - DNA, 25 bp, Homo sapien
accatgcctggccaatttttgtatt

SEQ ID NO: 1743213 - DNA, 25 bp, Homo sapien
gtagctggaactacaggcatgcacc

SEQ ID NO: 1743214 - DNA, 25 bp, Homo sapien
tgattcttctgctgcagccccccaa

SEQ ID NO: 1743215 - DNA, 25 bp, Homo sapien
caactggagacctgcattcatcatc

SEQ ID NO: 1743216 - DNA, 25 bp, Homo sapien
agaaatttcttattggtcgtttcat

SEQ ID NO: 1743217 - DNA, 25 bp, Homo sapien
caggctaggtgagtcattcaactgg

SEQ ID NO: 1743218 - DNA, 25 bp, Homo sapien
tcatcatctgtctattagaatctgg

SEQ ID NO: 1743219 - DNA, 25 bp, Homo sapien
tgctacacggaatccagaggaatgt

SEQ ID NO: 1743220 - DNA, 25 bp, Homo sapien
atctgactcttttgcaaaccttttg

SEQ ID NO: 1743221 - DNA, 25 bp, Homo sapien
aaccttttgctacacggaatccaga

SEQ ID NO: 1743222 - DNA, 25 bp, Homo sapien
ttttgcaaaccttttgctacacgga

SEQ ID NO: 1743223 - DNA, 25 bp, Homo sapien
cagcattcttgccagacatggatga

SEQ ID NO: 1743224 - DNA, 25 bp, Homo sapien
tgtgaagtcatacagattagagagc

SEQ ID NO: 1743225 - DNA, 25 bp, Homo sapien
ggtaaccatgagctttttccagccc

SEQ ID NO: 1743226 - DNA, 25 bp, Homo sapien
aaacatgcgtaagtcatcattcccg

SEQ ID NO: 1743227 - DNA, 25 bp, Homo sapien
cccatgtccttttactggctcaaca

SEQ ID NO: 1743228 - DNA, 25 bp, Homo sapien
tataaactccttagataacccgtca

SEQ ID NO: 1743229 - DNA, 25 bp, Homo sapien
ggctcaacacctataaactccttag

SEQ ID NO: 1743230 - DNA, 25 bp, Homo sapien
gataacccgtcatcatccatgctca

SEQ ID NO: 1743231 - DNA, 25 bp, Homo sapien
ttaggaaatgttgcctcttgtggtg

SEQ ID NO: 1743232 - DNA, 25 bp, Homo sapien
ctgaagatgtgctattgctactgct

SEQ ID NO: 1743233 - DNA, 25 bp, Homo sapien
taaggtggatggcagagcttcatat

SEQ ID NO: 1743234 - DNA, 25 bp, Homo sapien
gctattgctactgctaaggtggatg

SEQ ID NO: 1743235 - DNA, 25 bp, Homo sapien
ctgtatatatctgaagatgtgctat

SEQ ID NO: 1743236 - DNA, 25 bp, Homo sapien
tgcctcgctgtaatgtccagaggtt

SEQ ID NO: 1743237 - DNA, 25 bp, Homo sapien
tctttttttgcctcgctgtaatgtc

SEQ ID NO: 1743238 - DNA, 25 bp, Homo sapien
ttttttgcctcgctgtaatgtccag

SEQ ID NO: 1743239 - DNA, 25 bp, Homo sapien
ttttgcctcgctgtaatgtccagag

SEQ ID NO: 1743240 - DNA, 25 bp, Homo sapien
tcttcattgtagctgtaagacagtt

SEQ ID NO: 1743241 - DNA, 25 bp, Homo sapien
cacaaagcttagcagtgggtattgg

SEQ ID NO: 1743242 - DNA, 25 bp, Homo sapien
ccacaaagcttagcagtgggtattg

SEQ ID NO: 1743243 - DNA, 25 bp, Homo sapien
tgtagctgtaagacagttgcattct

SEQ ID NO: 1743244 - DNA, 25 bp, Homo sapien
gaggagatgagctagaagtgctgct

SEQ ID NO: 1743245 - DNA, 25 bp, Homo sapien
ctgctgtatttcagggcttgggcca

SEQ ID NO: 1743246 - DNA, 25 bp, Homo sapien
taatagagaatcatggtgaggaggc

SEQ ID NO: 1743247 - DNA, 25 bp, Homo sapien
agtgctgctgtatttcagggcttgg

SEQ ID NO: 1743248 - DNA, 25 bp, Homo sapien
gcttgtgcggtgaaactcttcaggt

SEQ ID NO: 1743249 - DNA, 25 bp, Homo sapien
ggagcttgtgcggtgaaactcttca

SEQ ID NO: 1743250 - DNA, 25 bp, Homo sapien
cacaggagcttgtgcggtgaaactc

SEQ ID NO: 1743251 - DNA, 25 bp, Homo sapien
ctacacaggagcttgtgcggtgaaa

SEQ ID NO: 1743252 - DNA, 25 bp, Homo sapien
cagatgagtctcctccatgtctatc

SEQ ID NO: 1743253 - DNA, 25 bp, Homo sapien
attcttcaagtcctgccacgtgaga

SEQ ID NO: 1743254 - DNA, 25 bp, Homo sapien
cctccagatacagctcctctatcac

SEQ ID NO: 1743255 - DNA, 25 bp, Homo sapien
tccagatacagctcctctatcactc

SEQ ID NO: 1743256 - DNA, 25 bp, Homo sapien
ctccagatacagctcctctatcact

SEQ ID NO: 1743257 - DNA, 25 bp, Homo sapien
tgctggattgtgaatggaaggccat

SEQ ID NO: 1743258 - DNA, 25 bp, Homo sapien
gctgctggattgtgaatggaaggcc

SEQ ID NO: 1743259 - DNA, 25 bp, Homo sapien
cttcctccttgactggtgagggcat

SEQ ID NO: 1743260 - DNA, 25 bp, Homo sapien
taatctggctgacatcctgtatgag

SEQ ID NO: 1743261 - DNA, 25 bp, Homo sapien
cattttcgtctgttcactgggctaa

SEQ ID NO: 1743262 - DNA, 25 bp, Homo sapien
cctgtatgagatcaaaagtgtgaga

SEQ ID NO: 1743263 - DNA, 25 bp, Homo sapien
tggggtttccccatgatggtcaggg

SEQ ID NO: 1743264 - DNA, 25 bp, Homo sapien
tccccatgatggtcagggtggtctt

SEQ ID NO: 1743265 - DNA, 25 bp, Homo sapien
gtggtcttgaactcccgacttcagg

SEQ ID NO: 1743266 - DNA, 25 bp, Homo sapien
gccaccctacaagagctactgaagg

SEQ ID NO: 1743267 - DNA, 25 bp, Homo sapien
tggccaccctacaagagctactgaa

SEQ ID NO: 1743268 - DNA, 25 bp, Homo sapien
ggccaccctacaagagctactgaag

SEQ ID NO: 1743269 - DNA, 25 bp, Homo sapien
tttaagtggaaggttgaatacatac

SEQ ID NO: 1743270 - DNA, 25 bp, Homo sapien
agtggaaggttgaatacatactttc

SEQ ID NO: 1743271 - DNA, 25 bp, Homo sapien
tggaaggttgaatacatactttcca

SEQ ID NO: 1743272 - DNA, 25 bp, Homo sapien
ccatctttaagtggaaggttgaata

SEQ ID NO: 1743273 - DNA, 25 bp, Homo sapien
tgggtgtacaaacgcttgtttctga

SEQ ID NO: 1743274 - DNA, 25 bp, Homo sapien
catgggtgtacaaacgcttgtttct

SEQ ID NO: 1743275 - DNA, 25 bp, Homo sapien
atgggtgtacaaacgcttgtttctg

SEQ ID NO: 1743276 - DNA, 25 bp, Homo sapien
ggtgtacaaacgcttgtttctgaaa

SEQ ID NO: 1743277 - DNA, 25 bp, Homo sapien
aagcaagccctcctcattgttcagg

SEQ ID NO: 1743278 - DNA, 25 bp, Homo sapien
tcaggttgatggagaatgcgctctt

SEQ ID NO: 1743279 - DNA, 25 bp, Homo sapien
ttggcagaatattgataagcaagcc

SEQ ID NO: 1743280 - DNA, 25 bp, Homo sapien
tgttcaggttgatggagaatgcgct

SEQ ID NO: 1743281 - DNA, 25 bp, Homo sapien
ccagataacccaagctgtgctgtgc

SEQ ID NO: 1743282 - DNA, 25 bp, Homo sapien
tctactgtagataggagagttgcct

SEQ ID NO: 1743283 - DNA, 25 bp, Homo sapien
gcctagatagttaccccaaatacca

SEQ ID NO: 1743284 - DNA, 25 bp, Homo sapien
cctgttcctttgaataagcctagat

SEQ ID NO: 1743285 - DNA, 25 bp, Homo sapien
ccttggttgccagctgtgaaaatac

SEQ ID NO: 1743286 - DNA, 25 bp, Homo sapien
ctgtcaaggtgctgacatctttgga

SEQ ID NO: 1743287 - DNA, 25 bp, Homo sapien
tttggaattctatcttcagtgccat

SEQ ID NO: 1743288 - DNA, 25 bp, Homo sapien
caaggtgctgacatctttggaattc

SEQ ID NO: 1743289 - DNA, 25 bp, Homo sapien
aattctatcttcagtgccatttcca

SEQ ID NO: 1743290 - DNA, 25 bp, Homo sapien
aacttgaacttcaaacatgcgctgt

SEQ ID NO: 1743291 - DNA, 25 bp, Homo sapien
gtattggaggactttgatgaattcc

SEQ ID NO: 1743292 - DNA, 25 bp, Homo sapien
tgctatagtcgtatgcaatgacact

SEQ ID NO: 1743293 - DNA, 25 bp, Homo sapien
taaaagagtgcgttagactccatgc

SEQ ID NO: 1743294 - DNA, 25 bp, Homo sapien
aacgcagagttaagaaatagtttgc

SEQ ID NO: 1743295 - DNA, 25 bp, Homo sapien
gaatgtaagggctagaatcacaaat

SEQ ID NO: 1743296 - DNA, 25 bp, Homo sapien
caaatttactgcgtgctatgatggg

SEQ ID NO: 1743297 - DNA, 25 bp, Homo sapien
gagtgaaagctatagggataacgca

SEQ ID NO: 1743298 - DNA, 25 bp, Homo sapien
cctaagccctgccctattgctgtcc

SEQ ID NO: 1743299 - DNA, 25 bp, Homo sapien
taagccctgccctattgctgtccct

SEQ ID NO: 1743300 - DNA, 25 bp, Homo sapien
cctttccacaaccagacttcctgaa

SEQ ID NO: 1743301 - DNA, 25 bp, Homo sapien
ctgtccctttccacaaccagacttc

SEQ ID NO: 1743302 - DNA, 25 bp, Homo sapien
tatactgtatagtcctgcatactga

SEQ ID NO: 1743303 - DNA, 25 bp, Homo sapien
aacagggaggactgacattctctgc

SEQ ID NO: 1743304 - DNA, 25 bp, Homo sapien
tctggtcgtgctggaagcactgccc

SEQ ID NO: 1743305 - DNA, 25 bp, Homo sapien
caagactgggcagtccgaagaggcc

SEQ ID NO: 1743306 - DNA, 25 bp, Homo sapien
ttactaccctgcatccccttgttgg

SEQ ID NO: 1743307 - DNA, 25 bp, Homo sapien
gcctagagccctggttcagtccaag

SEQ ID NO: 1743308 - DNA, 25 bp, Homo sapien
cacactaaatagaacttggcagcca

SEQ ID NO: 1743309 - DNA, 25 bp, Homo sapien
gaagtctcttagaaagcctagagcc

SEQ ID NO: 1743310 - DNA, 25 bp, Homo sapien
cttcacctttggctgatctatggga

SEQ ID NO: 1743311 - DNA, 25 bp, Homo sapien
tctatgggaattacttggtgagagg

SEQ ID NO: 1743312 - DNA, 25 bp, Homo sapien
tcaaccctaaggagttcaatctccc

SEQ ID NO: 1743313 - DNA, 25 bp, Homo sapien
tctgctaaccattcaaaattccctt

SEQ ID NO: 1743314 - DNA, 25 bp, Homo sapien
tcagcctcttgctactaggtccctt

SEQ ID NO: 1743315 - DNA, 25 bp, Homo sapien
ttgctactaggtccctttgccagtg

SEQ ID NO: 1743316 - DNA, 25 bp, Homo sapien
tctctttaagtccacttgactcatc

SEQ ID NO: 1743317 - DNA, 25 bp, Homo sapien
agccctcatttgtgtagcattggca

SEQ ID NO: 1743318 - DNA, 25 bp, Homo sapien
ttaccagaacagagagccattcccc

SEQ ID NO: 1743319 - DNA, 25 bp, Homo sapien
agaacagagagccattccccacgct

SEQ ID NO: 1743320 - DNA, 25 bp, Homo sapien
cctgacaccttcaagggacattggc

SEQ ID NO: 1743321 - DNA, 25 bp, Homo sapien
gcctgacaccttcaagggacattgg

SEQ ID NO: 1743322 - DNA, 25 bp, Homo sapien
tgtagatattgattgtggatactcc

SEQ ID NO: 1743323 - DNA, 25 bp, Homo sapien
ctggagtctggtgtagatattgatt

SEQ ID NO: 1743324 - DNA, 25 bp, Homo sapien
tattgattgtggatactccttcttc

SEQ ID NO: 1743325 - DNA, 25 bp, Homo sapien
tctggtgtagatattgattgtggat

SEQ ID NO: 1743326 - DNA, 25 bp, Homo sapien
atggttacattctgtagatgacttt

SEQ ID NO: 1743327 - DNA, 25 bp, Homo sapien
ttttgacttggtaatataacaatgt

SEQ ID NO: 1743328 - DNA, 25 bp, Homo sapien
ggatagcgccagtgtaggatatttt

SEQ ID NO: 1743329 - DNA, 25 bp, Homo sapien
aagatatttataattggccgtacaa

SEQ ID NO: 1743330 - DNA, 25 bp, Homo sapien
cgtacaatgtgtaggatagcgccag

SEQ ID NO: 1743331 - DNA, 25 bp, Homo sapien
gaaatatacagactcttgaagatct

SEQ ID NO: 1743332 - DNA, 25 bp, Homo sapien
gaagatctctgaaattgggacagac

SEQ ID NO: 1743333 - DNA, 25 bp, Homo sapien
aatatacagactcttgaagatctct

SEQ ID NO: 1743334 - DNA, 25 bp, Homo sapien
ctctgaaattgggacagacctgagc

SEQ ID NO: 1743335 - DNA, 25 bp, Homo sapien
aaattgtacatatagtggtggagcc

SEQ ID NO: 1743336 - DNA, 25 bp, Homo sapien
gatgtttctcccaaatatggttcaa

SEQ ID NO: 1743337 - DNA, 25 bp, Homo sapien
gtggagccaaacttgacctgatgtt

SEQ ID NO: 1743338 - DNA, 25 bp, Homo sapien
aaaacagtagcatacatggatcagc

SEQ ID NO: 1743339 - DNA, 25 bp, Homo sapien
gcatggatgctagttcactgtggag

SEQ ID NO: 1743340 - DNA, 25 bp, Homo sapien
cagtacctatgtggaataagcatgg

SEQ ID NO: 1743341 - DNA, 25 bp, Homo sapien
cgcagggaccactggcagtacctat

SEQ ID NO: 1743342 - DNA, 25 bp, Homo sapien
ttgttgaaaggacaccgcagggacc

SEQ ID NO: 1743343 - DNA, 25 bp, Homo sapien
caagcagctactaatctaccaataa

SEQ ID NO: 1743344 - DNA, 25 bp, Homo sapien
tatatacacctatgacaccaacaca

SEQ ID NO: 1743345 - DNA, 25 bp, Homo sapien
tatatcagcagggtcgtgcagtatg

SEQ ID NO: 1743346 - DNA, 25 bp, Homo sapien
gaaacggttacggagatataattga

SEQ ID NO: 1743347 - DNA, 25 bp, Homo sapien
acctatttttaatgagcttttgttg

SEQ ID NO: 1743348 - DNA, 25 bp, Homo sapien
cttacctatttttaatgagcttttg

SEQ ID NO: 1743349 - DNA, 25 bp, Homo sapien
tatctgatgcataattgtaatagct

SEQ ID NO: 1743350 - DNA, 25 bp, Homo sapien
ttgttgttgttatctgatgcataat

SEQ ID NO: 1743351 - DNA, 25 bp, Homo sapien
ttctttttctctgccgtatctctct

SEQ ID NO: 1743352 - DNA, 25 bp, Homo sapien
ggattgacattctctacctctttca

SEQ ID NO: 1743353 - DNA, 25 bp, Homo sapien
cagttaacacatatggcagaccttt

SEQ ID NO: 1743354 - DNA, 25 bp, Homo sapien
tcaagtttaccgactcttccatcta

SEQ ID NO: 1743355 - DNA, 25 bp, Homo sapien
cagtttataggattgaatatggcag

SEQ ID NO: 1743356 - DNA, 25 bp, Homo sapien
tgtagttaccctgaagaatgctgct

SEQ ID NO: 1743357 - DNA, 25 bp, Homo sapien
gaataatgatgtttacctggatgga

SEQ ID NO: 1743358 - DNA, 25 bp, Homo sapien
gctatgctactggaatttgcagcaa

SEQ ID NO: 1743359 - DNA, 25 bp, Homo sapien
tgtggctctatgtggaccctgcgga

SEQ ID NO: 1743360 - DNA, 25 bp, Homo sapien
aatcatcaagagacatacaggagcc

SEQ ID NO: 1743361 - DNA, 25 bp, Homo sapien
aatccaccggcgcagtttcatctag

SEQ ID NO: 1743362 - DNA, 25 bp, Homo sapien
gtgctgccacgcgaaaccttctggg

SEQ ID NO: 1743363 - DNA, 25 bp, Homo sapien
gggacactcccatcaccgttgttgg

SEQ ID NO: 1743364 - DNA, 25 bp, Homo sapien
taccgtattaggcattcagcagcag

SEQ ID NO: 1743365 - DNA, 25 bp, Homo sapien
tctaactacgagatggctggcctga

SEQ ID NO: 1743366 - DNA, 25 bp, Homo sapien
gaaactcttctgtgcaggacgccta

SEQ ID NO: 1743367 - DNA, 25 bp, Homo sapien
ccattattggcttctttgttcatga

SEQ ID NO: 1743368 - DNA, 25 bp, Homo sapien
tgaaagtcattatatgtagcttctt

SEQ ID NO: 1743369 - DNA, 25 bp, Homo sapien
tttgccattattggcttctttgttc

SEQ ID NO: 1743370 - DNA, 25 bp, Homo sapien
aatatgaaagtcattatatgtagct

SEQ ID NO: 1743371 - DNA, 25 bp, Homo sapien
attggcaaataaaaccgtagtgcat

SEQ ID NO: 1743372 - DNA, 25 bp, Homo sapien
gccaattcagtaccatactcctcaa

SEQ ID NO: 1743373 - DNA, 25 bp, Homo sapien
aacccaacaaatgccaattcagtac

SEQ ID NO: 1743374 - DNA, 25 bp, Homo sapien
aacaaatgccaattcagtaccatac

SEQ ID NO: 1743375 - DNA, 25 bp, Homo sapien
aaatgccaattcagtaccatactcc

SEQ ID NO: 1743376 - DNA, 25 bp, Homo sapien
tgatgaaggtgcaatgagatgccca

SEQ ID NO: 1743377 - DNA, 25 bp, Homo sapien
ccagtgaatgctttaggtggctctg

SEQ ID NO: 1743378 - DNA, 25 bp, Homo sapien
ttctccaagaggaatggtgccctga

SEQ ID NO: 1743379 - DNA, 25 bp, Homo sapien
gaagtcagccattactccccagtgg

SEQ ID NO: 1743380 - DNA, 25 bp, Homo sapien
aggcactgaaagactgatcaaatct

SEQ ID NO: 1743381 - DNA, 25 bp, Homo sapien
gactgatcaaatctgcatgtgtcaa

SEQ ID NO: 1743382 - DNA, 25 bp, Homo sapien
gaaagactgatcaaatctgcatgtg

SEQ ID NO: 1743383 - DNA, 25 bp, Homo sapien
gatcaaatctgcatgtgtcaatcat

SEQ ID NO: 1743384 - DNA, 25 bp, Homo sapien
tgatattttgcctcctttctgacta

SEQ ID NO: 1743385 - DNA, 25 bp, Homo sapien
ctgatattttgcctcctttctgact

SEQ ID NO: 1743386 - DNA, 25 bp, Homo sapien
tccaaattgctttgcatgccttacc

SEQ ID NO: 1743387 - DNA, 25 bp, Homo sapien
caaattgctttgcatgccttaccca

SEQ ID NO: 1743388 - DNA, 25 bp, Homo sapien
attgctttgcatgccttacccaccc

SEQ ID NO: 1743389 - DNA, 25 bp, Homo sapien
aattgctttgcatgccttacccacc

SEQ ID NO: 1743390 - DNA, 25 bp, Homo sapien
cagttccaaagtattcccagctgcc

SEQ ID NO: 1743391 - DNA, 25 bp, Homo sapien
gctgccgagagtcacaaattctgtc

SEQ ID NO: 1743392 - DNA, 25 bp, Homo sapien
tctgtctgaaaagcagggtgacctt

SEQ ID NO: 1743393 - DNA, 25 bp, Homo sapien
ttctgtctgaaaagcagggtgacct

SEQ ID NO: 1743394 - DNA, 25 bp, Homo sapien
tattcaaagtcggagaagctggttg

SEQ ID NO: 1743395 - DNA, 25 bp, Homo sapien
atgatattcaaagtcggagaagctg

SEQ ID NO: 1743396 - DNA, 25 bp, Homo sapien
tgtgattatgtctaatgaatgagga

SEQ ID NO: 1743397 - DNA, 25 bp, Homo sapien
gaagctggttgtgattatgtctaat

SEQ ID NO: 1743398 - DNA, 25 bp, Homo sapien
caaaggtttctccactaataagtct

SEQ ID NO: 1743399 - DNA, 25 bp, Homo sapien
aggtttctccactaataagtctatg

SEQ ID NO: 1743400 - DNA, 25 bp, Homo sapien
aatggaggtacttgcaaaggtttct

SEQ ID NO: 1743401 - DNA, 25 bp, Homo sapien
caaatggaggtacttgcaaaggttt

SEQ ID NO: 1743402 - DNA, 25 bp, Homo sapien
gcccttgagtcgctgtgctaggaaa

SEQ ID NO: 1743403 - DNA, 25 bp, Homo sapien
ggcccttgagtcgctgtgctaggaa

SEQ ID NO: 1743404 - DNA, 25 bp, Homo sapien
caggcccttgagtcgctgtgctagg

SEQ ID NO: 1743405 - DNA, 25 bp, Homo sapien
aggcccttgagtcgctgtgctagga

SEQ ID NO: 1743406 - DNA, 25 bp, Homo sapien
aagtacttcctgtaagtgagctgct

SEQ ID NO: 1743407 - DNA, 25 bp, Homo sapien
gacttgcagcacgtgatgtgttttc

SEQ ID NO: 1743408 - DNA, 25 bp, Homo sapien
ccttggagaataggcaggtaaattc

SEQ ID NO: 1743409 - DNA, 25 bp, Homo sapien
tcatgttttagcaccctccagaggc

SEQ ID NO: 1743410 - DNA, 25 bp, Homo sapien
aacggtttgcaaccagtatggcaca

SEQ ID NO: 1743411 - DNA, 25 bp, Homo sapien
caaacagtgttcaataatcagaggc

SEQ ID NO: 1743412 - DNA, 25 bp, Homo sapien
tgacatcaggcggtactttcacccc

SEQ ID NO: 1743413 - DNA, 25 bp, Homo sapien
gaaacccggtagagaaatgtgtgac

SEQ ID NO: 1743414 - DNA, 25 bp, Homo sapien
ggaacttgtgaagagagcgcgccaa

SEQ ID NO: 1743415 - DNA, 25 bp, Homo sapien
agtgatggaacttgtgaagagagcg

SEQ ID NO: 1743416 - DNA, 25 bp, Homo sapien
atggaacttgtgaagagagcgcgcc

SEQ ID NO: 1743417 - DNA, 25 bp, Homo sapien
tgatggaacttgtgaagagagcgcg

SEQ ID NO: 1743418 - DNA, 25 bp, Homo sapien
tttaggcatgacagagcagcgcgaa

SEQ ID NO: 1743419 - DNA, 25 bp, Homo sapien
aaatgagctgaaaatctactgcggc

SEQ ID NO: 1743420 - DNA, 25 bp, Homo sapien
gcagcaaaggcacggcaggttgtat

SEQ ID NO: 1743421 - DNA, 25 bp, Homo sapien
ctttggcagtgacgagatagattta

SEQ ID NO: 1743422 - DNA, 25 bp, Homo sapien
cttggactggagcaaaaccgctggt

SEQ ID NO: 1743423 - DNA, 25 bp, Homo sapien
atctcgtggaattcaccctgattca

SEQ ID NO: 1743424 - DNA, 25 bp, Homo sapien
tgaatctcgtggaattcaccctgat

SEQ ID NO: 1743425 - DNA, 25 bp, Homo sapien
aaaaccgctggtgaatctcgtggaa

SEQ ID NO: 1743426 - DNA, 25 bp, Homo sapien
cctcggcagccgtaggtagggggat

SEQ ID NO: 1743427 - DNA, 25 bp, Homo sapien
actgtcggggagattcccgacgcgc

SEQ ID NO: 1743428 - DNA, 25 bp, Homo sapien
aagaagagagactaggggagctggg

SEQ ID NO: 1743429 - DNA, 25 bp, Homo sapien
ccgacgcgcggccaacctcggcagc

SEQ ID NO: 1743430 - DNA, 25 bp, Homo sapien
gagttccaccagagtagcgacgact

SEQ ID NO: 1743431 - DNA, 25 bp, Homo sapien
caactctgagttccaccagagtagc

SEQ ID NO: 1743432 - DNA, 25 bp, Homo sapien
agagtagcgacgacttcccggctcc

SEQ ID NO: 1743433 - DNA, 25 bp, Homo sapien
cgacttcccggctccgcgttgcggg

SEQ ID NO: 1743434 - DNA, 25 bp, Homo sapien
ctctcccgttccttcctgcaccgcc

SEQ ID NO: 1743435 - DNA, 25 bp, Homo sapien
tccctctcccgttccttcctgcacc

SEQ ID NO: 1743436 - DNA, 25 bp, Homo sapien
cttctccctctcccgttccttcctg

SEQ ID NO: 1743437 - DNA, 25 bp, Homo sapien
cctgcaccgcctcggcggaaggtcg

SEQ ID NO: 1743438 - DNA, 25 bp, Homo sapien
ccggccttttcgagtctagtcgtct

SEQ ID NO: 1743439 - DNA, 25 bp, Homo sapien
tccgacacccagaccgcaaagtctt

SEQ ID NO: 1743440 - DNA, 25 bp, Homo sapien
gtctagtcgtctccagtctgtccca

SEQ ID NO: 1743441 - DNA, 25 bp, Homo sapien
ctgccgcggcttccggagtgcaaaa

SEQ ID NO: 1743442 - DNA, 25 bp, Homo sapien
tggcgcccctcgctggatcctctga

SEQ ID NO: 1743443 - DNA, 25 bp, Homo sapien
gttggcgcccctcgctggatcctct

SEQ ID NO: 1743444 - DNA, 25 bp, Homo sapien
ttgttggcgcccctcgctggatcct

SEQ ID NO: 1743445 - DNA, 25 bp, Homo sapien
cgcccctcgctggatcctctgaggg

SEQ ID NO: 1743446 - DNA, 25 bp, Homo sapien
ctgctcccgctcctcttcctgccgc

SEQ ID NO: 1743447 - DNA, 25 bp, Homo sapien
ggtcgggacgctccgctccgcgctc

SEQ ID NO: 1743448 - DNA, 25 bp, Homo sapien
tgccgccgccctggtgccacctctt

SEQ ID NO: 1743449 - DNA, 25 bp, Homo sapien
ggcgggtcgggacgctccgctccgc

SEQ ID NO: 1743450 - DNA, 25 bp, Homo sapien
gagccggcggaagcgtctggaaaaa

SEQ ID NO: 1743451 - DNA, 25 bp, Homo sapien
ctcgtggaaccgagggagtggcgcc

SEQ ID NO: 1743452 - DNA, 25 bp, Homo sapien
gcggctcgcgtttccccggagctgg

SEQ ID NO: 1743453 - DNA, 25 bp, Homo sapien
gcgccgcagccggaacttggctaac

SEQ ID NO: 1743454 - DNA, 25 bp, Homo sapien
agcccaggagtaccagcgctagtcg

SEQ ID NO: 1743455 - DNA, 25 bp, Homo sapien
ggagtaccagcgctagtcgcgccag

SEQ ID NO: 1743456 - DNA, 25 bp, Homo sapien
gagtaccagcgctagtcgcgccagc

SEQ ID NO: 1743457 - DNA, 25 bp, Homo sapien
ccaggagtaccagcgctagtcgcgc

SEQ ID NO: 1743458 - DNA, 25 bp, Homo sapien
ctgggcggacacggcggaagccagg

SEQ ID NO: 1743459 - DNA, 25 bp, Homo sapien
gcggacacggcggaagccaggaacg

SEQ ID NO: 1743460 - DNA, 25 bp, Homo sapien
acggcggaagccaggaacggcgccg

SEQ ID NO: 1743461 - DNA, 25 bp, Homo sapien
ggaagccaggaacggcgccgaggag

SEQ ID NO: 1743462 - DNA, 25 bp, Homo sapien
cgcggggcactggtccggcagcggg

SEQ ID NO: 1743463 - DNA, 25 bp, Homo sapien
acagcgcggggcactggtccggcag

SEQ ID NO: 1743464 - DNA, 25 bp, Homo sapien
agcgcggggcactggtccggcagcg

SEQ ID NO: 1743465 - DNA, 25 bp, Homo sapien
cacagcgcggggcactggtccggca

SEQ ID NO: 1743466 - DNA, 25 bp, Homo sapien
tatgcacaggtgagccggtctttgc

SEQ ID NO: 1743467 - DNA, 25 bp, Homo sapien
aagaatcgggtcacagtccaggtca

SEQ ID NO: 1743468 - DNA, 25 bp, Homo sapien
tatcagggctaaaacaatacccagg

SEQ ID NO: 1743469 - DNA, 25 bp, Homo sapien
tggcagtcgcagacccagggattgt

SEQ ID NO: 1743470 - DNA, 25 bp, Homo sapien
taacaattcagtcggttggatctcg

SEQ ID NO: 1743471 - DNA, 25 bp, Homo sapien
ccatacgtgttgaggagttccaaga

SEQ ID NO: 1743472 - DNA, 25 bp, Homo sapien
tttgaagagcctgctaacgtctgca

SEQ ID NO: 1743473 - DNA, 25 bp, Homo sapien
ccttgaactgtactgagagagagac

SEQ ID NO: 1743474 - DNA, 25 bp, Homo sapien
catttcaaaacgatctcccaagtct

SEQ ID NO: 1743475 - DNA, 25 bp, Homo sapien
taattatcatcggaaccaagaccat

SEQ ID NO: 1743476 - DNA, 25 bp, Homo sapien
tgggaccatacagtcacatgaatac

SEQ ID NO: 1743477 - DNA, 25 bp, Homo sapien
caagaccattgaatactcctgccct

SEQ ID NO: 1743478 - DNA, 25 bp, Homo sapien
ctgggtctctgataaactaaagaac

SEQ ID NO: 1743479 - DNA, 25 bp, Homo sapien
gggtctctgataaactaaagaacat

SEQ ID NO: 1743480 - DNA, 25 bp, Homo sapien
gtctctgataaactaaagaacattt

SEQ ID NO: 1743481 - DNA, 25 bp, Homo sapien
gctgggtctctgataaactaaagaa

SEQ ID NO: 1743482 - DNA, 25 bp, Homo sapien
ctttcagttaagcaataatggctac

SEQ ID NO: 1743483 - DNA, 25 bp, Homo sapien
gagacacgtgtttacagatgtagac

SEQ ID NO: 1743484 - DNA, 25 bp, Homo sapien
taaatcacttgataaaagagcctga

SEQ ID NO: 1743485 - DNA, 25 bp, Homo sapien
taaccagttcaaaggaaaagcaagc

SEQ ID NO: 1743486 - DNA, 25 bp, Homo sapien
tttacggtgctgctctgaaaggtgg

SEQ ID NO: 1743487 - DNA, 25 bp, Homo sapien
tgagcttgacacttctaagagcgct

SEQ ID NO: 1743488 - DNA, 25 bp, Homo sapien
cattgaatcacacccatagcagcca

SEQ ID NO: 1743489 - DNA, 25 bp, Homo sapien
tctaaggtcctcaacaaggtaagcc

SEQ ID NO: 1743490 - DNA, 25 bp, Homo sapien
ttttggttcagcacacttaagttca

SEQ ID NO: 1743491 - DNA, 25 bp, Homo sapien
gcataaaactagtcacaaacagtac

SEQ ID NO: 1743492 - DNA, 25 bp, Homo sapien
tgtgtgctaatcacaatgtaatagc

SEQ ID NO: 1743493 - DNA, 25 bp, Homo sapien
taggctttgtgggtctaacatctct

SEQ ID NO: 1743494 - DNA, 25 bp, Homo sapien
atgcgcctggctggtgatagctttt

SEQ ID NO: 1743495 - DNA, 25 bp, Homo sapien
caatgcgcctggctggtgatagctt

SEQ ID NO: 1743496 - DNA, 25 bp, Homo sapien
aatgcgcctggctggtgatagcttt

SEQ ID NO: 1743497 - DNA, 25 bp, Homo sapien
tacaccaccatgttgggtaaagaag

SEQ ID NO: 1743498 - DNA, 25 bp, Homo sapien
tgtgagtgaaagtcataagtgccac

SEQ ID NO: 1743499 - DNA, 25 bp, Homo sapien
aaaactgctaattgcttcccggatg

SEQ ID NO: 1743500 - DNA, 25 bp, Homo sapien
gaaaagagagccagccgtcaatgag

SEQ ID NO: 1743501 - DNA, 25 bp, Homo sapien
tagattgcccatgcatgtaagaagc

SEQ ID NO: 1743502 - DNA, 25 bp, Homo sapien
caagatccctgggtgtagattgccc

SEQ ID NO: 1743503 - DNA, 25 bp, Homo sapien
ccaatgatggccacgcttgcaggaa

SEQ ID NO: 1743504 - DNA, 25 bp, Homo sapien
ccaggtcagggcttgcaaggccaat

SEQ ID NO: 1743505 - DNA, 25 bp, Homo sapien
tgttgaggaaagctacccactcaga

SEQ ID NO: 1743506 - DNA, 25 bp, Homo sapien
gaaagctacccactcagagaaggtc

SEQ ID NO: 1743507 - DNA, 25 bp, Homo sapien
tctgaaatgttgaggaaagctaccc

SEQ ID NO: 1743508 - DNA, 25 bp, Homo sapien
caaaggatttgaagttgcttcacct

SEQ ID NO: 1743509 - DNA, 25 bp, Homo sapien
gtggaagcccggctgcccaatcctg

SEQ ID NO: 1743510 - DNA, 25 bp, Homo sapien
gaagcccggctgcccaatcctgcat

SEQ ID NO: 1743511 - DNA, 25 bp, Homo sapien
tggaagcccggctgcccaatcctgc

SEQ ID NO: 1743512 - DNA, 25 bp, Homo sapien
ggaagcccggctgcccaatcctgca

SEQ ID NO: 1743513 - DNA, 25 bp, Homo sapien
cttgcagggatgcttcaggtagtga

SEQ ID NO: 1743514 - DNA, 25 bp, Homo sapien
gaagatgacacaaagggcctcttgc

SEQ ID NO: 1743515 - DNA, 25 bp, Homo sapien
gcttcaggtagtgaagggagtgtgg

SEQ ID NO: 1743516 - DNA, 25 bp, Homo sapien
gacacaaagggcctcttgcagggat

SEQ ID NO: 1743517 - DNA, 25 bp, Homo sapien
taatgttattgtagttgctgtttct

SEQ ID NO: 1743518 - DNA, 25 bp, Homo sapien
ttaatgttattgtagttgctgtttc

SEQ ID NO: 1743519 - DNA, 25 bp, Homo sapien
aatgttattgtagttgctgtttctc

SEQ ID NO: 1743520 - DNA, 25 bp, Homo sapien
tttaatgttattgtagttgctgttt

SEQ ID NO: 1743521 - DNA, 25 bp, Homo sapien
gaaaaggatttcgacaagtggcatc

SEQ ID NO: 1743522 - DNA, 25 bp, Homo sapien
tatctatagatctcacttggaaggt

SEQ ID NO: 1743523 - DNA, 25 bp, Homo sapien
tagtacttaacttagaggcacccgc

SEQ ID NO: 1743524 - DNA, 25 bp, Homo sapien
gaggccatggcacccaatttctcag

SEQ ID NO: 1743525 - DNA, 25 bp, Homo sapien
aaatctttgctcattaagagggaag

SEQ ID NO: 1743526 - DNA, 25 bp, Homo sapien
taggagtccatctgcaaggcaaatg

SEQ ID NO: 1743527 - DNA, 25 bp, Homo sapien
cttgtacaagttagagaacgtcaac

SEQ ID NO: 1743528 - DNA, 25 bp, Homo sapien
agacttagcttttcctaacaatttg

SEQ ID NO: 1743529 - DNA, 25 bp, Homo sapien
ctctttgtgctcttgtcgtgatgaa

SEQ ID NO: 1743530 - DNA, 25 bp, Homo sapien
ctcttgtcgtgatgaaaatgggctg

SEQ ID NO: 1743531 - DNA, 25 bp, Homo sapien
tgaaaatgggctgacggccatgtcg

SEQ ID NO: 1743532 - DNA, 25 bp, Homo sapien
tgggctgacggccatgtcgtctgtt

SEQ ID NO: 1743533 - DNA, 25 bp, Homo sapien
ctggaacataatttatcaaggcttc

SEQ ID NO: 1743534 - DNA, 25 bp, Homo sapien
ttgagttcttccagactccagactc

SEQ ID NO: 1743535 - DNA, 25 bp, Homo sapien
ttctctctggaacataatttatcaa

SEQ ID NO: 1743536 - DNA, 25 bp, Homo sapien
tttgctgcccttgctcttcactaat

SEQ ID NO: 1743537 - DNA, 25 bp, Homo sapien
ctgtgcttagcaatatatcctggaa

SEQ ID NO: 1743538 - DNA, 25 bp, Homo sapien
catcgtgtagatgtaccatggttta

SEQ ID NO: 1743539 - DNA, 25 bp, Homo sapien
tgcagttccatagtactccatcgtg

SEQ ID NO: 1743540 - DNA, 25 bp, Homo sapien
gttgttttccaacgctaccctagca

SEQ ID NO: 1743541 - DNA, 25 bp, Homo sapien
tgcccactttttgatagagtcgttt

SEQ ID NO: 1743542 - DNA, 25 bp, Homo sapien
ttctgtaggtcacctgttcactttg

SEQ ID NO: 1743543 - DNA, 25 bp, Homo sapien
ccactttttgatagagtcgtttgtt

SEQ ID NO: 1743544 - DNA, 25 bp, Homo sapien
gttataaggaaggaatccagtttca

SEQ ID NO: 1743545 - DNA, 25 bp, Homo sapien
acaaggacagccaaatccccagtgg

SEQ ID NO: 1743546 - DNA, 25 bp, Homo sapien
gcttcctataggcaagtgacaagga

SEQ ID NO: 1743547 - DNA, 25 bp, Homo sapien
gctactatagcaatctccacaagga

SEQ ID NO: 1743548 - DNA, 25 bp, Homo sapien
aagtcatgttggtctgaatagcacc

SEQ ID NO: 1743549 - DNA, 25 bp, Homo sapien
cagaccctgggtaatggaagtgctc

SEQ ID NO: 1743550 - DNA, 25 bp, Homo sapien
ggaaccagctccatgtctcatgaaa

SEQ ID NO: 1743551 - DNA, 25 bp, Homo sapien
tactgggcatgtcactggttagaag

SEQ ID NO: 1743552 - DNA, 25 bp, Homo sapien
aaagtggccaaatcttgccatagag

SEQ ID NO: 1743553 - DNA, 25 bp, Homo sapien
ggccaatatctaaacttcgtgaagg

SEQ ID NO: 1743554 - DNA, 25 bp, Homo sapien
ccaatatctaaacttcgtgaaggta

SEQ ID NO: 1743555 - DNA, 25 bp, Homo sapien
ctggccaatatctaaacttcgtgaa

SEQ ID NO: 1743556 - DNA, 25 bp, Homo sapien
aacttcgtgaaggtattatttgata

SEQ ID NO: 1743557 - DNA, 25 bp, Homo sapien
tctgctctctggtaggaactccgtg

SEQ ID NO: 1743558 - DNA, 25 bp, Homo sapien
gtaggaactccgtggcccctggatc

SEQ ID NO: 1743559 - DNA, 25 bp, Homo sapien
cctggatccattctctaggaggttc

SEQ ID NO: 1743560 - DNA, 25 bp, Homo sapien
tgcaatagcatttggtatgcccttg

SEQ ID NO: 1743561 - DNA, 25 bp, Homo sapien
ggagtcaggtctaagcagacatctt

SEQ ID NO: 1743562 - DNA, 25 bp, Homo sapien
actggagtcaggtctaagcagacat

SEQ ID NO: 1743563 - DNA, 25 bp, Homo sapien
tctggcattgtgatgactggagtca

SEQ ID NO: 1743564 - DNA, 25 bp, Homo sapien
aatccaggtagcatcctttcccact

SEQ ID NO: 1743565 - DNA, 25 bp, Homo sapien
tgaagcttcttgactagccacatcc

SEQ ID NO: 1743566 - DNA, 25 bp, Homo sapien
gctgaagcttcttgactagccacat

SEQ ID NO: 1743567 - DNA, 25 bp, Homo sapien
ctgaagcttcttgactagccacatc

SEQ ID NO: 1743568 - DNA, 25 bp, Homo sapien
gaatacagtgattatcattcattaa

SEQ ID NO: 1743569 - DNA, 25 bp, Homo sapien
ttcattaatatgagtgcatacaact

SEQ ID NO: 1743570 - DNA, 25 bp, Homo sapien
tatgagtgcatacaacttcagtata

SEQ ID NO: 1743571 - DNA, 25 bp, Homo sapien
tatcattcattaatatgagtgcata

SEQ ID NO: 1743572 - DNA, 25 bp, Homo sapien
aatcttgtgttctaggctggaaaac

SEQ ID NO: 1743573 - DNA, 25 bp, Homo sapien
tgacactcagatgtatcaacttaga

SEQ ID NO: 1743574 - DNA, 25 bp, Homo sapien
gaaaagctcattaatcgttgtaagg

SEQ ID NO: 1743575 - DNA, 25 bp, Homo sapien
gttatgttataagggcaaccacagt

SEQ ID NO: 1743576 - DNA, 25 bp, Homo sapien
tttcttatccggatttactctttga

SEQ ID NO: 1743577 - DNA, 25 bp, Homo sapien
ctttcttatccggatttactctttg

SEQ ID NO: 1743578 - DNA, 25 bp, Homo sapien
cacctttcttatccggatttactct

SEQ ID NO: 1743579 - DNA, 25 bp, Homo sapien
gatgcaaatacaggttccagaataa

SEQ ID NO: 1743580 - DNA, 25 bp, Homo sapien
gaaacagaccgatcaaatgcacatg

SEQ ID NO: 1743581 - DNA, 25 bp, Homo sapien
gcttaggacttgtgtggcatcagat

SEQ ID NO: 1743582 - DNA, 25 bp, Homo sapien
ccacacatcccatgcttaggacttg

SEQ ID NO: 1743583 - DNA, 25 bp, Homo sapien
agtttttccagtcaccagatgaggt

SEQ ID NO: 1743584 - DNA, 25 bp, Homo sapien
gtttttccagtcaccagatgaggtc

SEQ ID NO: 1743585 - DNA, 25 bp, Homo sapien
ttgcaactggcatttggtgaatctc

SEQ ID NO: 1743586 - DNA, 25 bp, Homo sapien
cttgcaactggcatttggtgaatct

SEQ ID NO: 1743587 - DNA, 25 bp, Homo sapien
tagagggaaattactcttgataatt

SEQ ID NO: 1743588 - DNA, 25 bp, Homo sapien
ctgctgcctgattgtgtgatatgta

SEQ ID NO: 1743589 - DNA, 25 bp, Homo sapien
tctgctgcctgattgtgtgatatgt

SEQ ID NO: 1743590 - DNA, 25 bp, Homo sapien
atgtagagggaaattactcttgata

SEQ ID NO: 1743591 - DNA, 25 bp, Homo sapien
aggttcctcacctgtgtcagtgtag

SEQ ID NO: 1743592 - DNA, 25 bp, Homo sapien
tttatgcagatttagacatctctga

SEQ ID NO: 1743593 - DNA, 25 bp, Homo sapien
tttctttcaaggtgctgcacagtca

SEQ ID NO: 1743594 - DNA, 25 bp, Homo sapien
gtgtagcagtttgcgctaacagtag

SEQ ID NO: 1743595 - DNA, 25 bp, Homo sapien
ttattcaggccctgaacgatccttt

SEQ ID NO: 1743596 - DNA, 25 bp, Homo sapien
cagtgacttggctgattgtaaacca

SEQ ID NO: 1743597 - DNA, 25 bp, Homo sapien
caaactgtctggagttatttcctcc

SEQ ID NO: 1743598 - DNA, 25 bp, Homo sapien
gatgtagccttcatggatgtgcact

SEQ ID NO: 1743599 - DNA, 25 bp, Homo sapien
gacagtggctgtgatgacagtgact

SEQ ID NO: 1743600 - DNA, 25 bp, Homo sapien
tccaaagggacacctaataagtgcc

SEQ ID NO: 1743601 - DNA, 25 bp, Homo sapien
ttaacgctctatcaacatcactgac

SEQ ID NO: 1743602 - DNA, 25 bp, Homo sapien
catccttggtggttgttattcttaa

SEQ ID NO: 1743603 - DNA, 25 bp, Homo sapien
gagccaatgaatctggtcatccttg

SEQ ID NO: 1743604 - DNA, 25 bp, Homo sapien
tgatggcagccccattagcaatgcc

SEQ ID NO: 1743605 - DNA, 25 bp, Homo sapien
tcagtgagcctagaagagatatgcc

SEQ ID NO: 1743606 - DNA, 25 bp, Homo sapien
aacagttggaaatcttcagtgagcc

SEQ ID NO: 1743607 - DNA, 25 bp, Homo sapien
agggatttttcaagtatctgcttga

SEQ ID NO: 1743608 - DNA, 25 bp, Homo sapien
tcattttttggtttcatgacaacac

SEQ ID NO: 1743609 - DNA, 25 bp, Homo sapien
catgacaacactcaacacagtgaat

SEQ ID NO: 1743610 - DNA, 25 bp, Homo sapien
tttcatgacaacactcaacacagtg

SEQ ID NO: 1743611 - DNA, 25 bp, Homo sapien
ggtttcatgacaacactcaacacag

SEQ ID NO: 1743612 - DNA, 25 bp, Homo sapien
ctgggtgaggacaggaaacaggcag

SEQ ID NO: 1743613 - DNA, 25 bp, Homo sapien
gaaacaggcagaggaagtgaaagaa

SEQ ID NO: 1743614 - DNA, 25 bp, Homo sapien
gacaggaaacaggcagaggaagtga

SEQ ID NO: 1743615 - DNA, 25 bp, Homo sapien
gggtgaggacaggaaacaggcagag

SEQ ID NO: 1743616 - DNA, 25 bp, Homo sapien
aatttgacacgactggccttggaag

SEQ ID NO: 1743617 - DNA, 25 bp, Homo sapien
ccttggaagattcgcctgggcaaat

SEQ ID NO: 1743618 - DNA, 25 bp, Homo sapien
ggttcccggagcttccaatttgaca

SEQ ID NO: 1743619 - DNA, 25 bp, Homo sapien
aattcatttgcacagaggttcccgg

SEQ ID NO: 1743620 - DNA, 25 bp, Homo sapien
ttatgatgatgagtaggaatagctg

SEQ ID NO: 1743621 - DNA, 25 bp, Homo sapien
cttgaacacgctggtgtctgaagga

SEQ ID NO: 1743622 - DNA, 25 bp, Homo sapien
gaggagctccttgaacacgctggtg

SEQ ID NO: 1743623 - DNA, 25 bp, Homo sapien
tgaaggatgagttaggcagttatga

SEQ ID NO: 1743624 - DNA, 25 bp, Homo sapien
ggtggcccaagacaagcatctcaat

SEQ ID NO: 1743625 - DNA, 25 bp, Homo sapien
tacatccccgacaaggctctcagcc

SEQ ID NO: 1743626 - DNA, 25 bp, Homo sapien
acatccccgacaaggctctcagccc

SEQ ID NO: 1743627 - DNA, 25 bp, Homo sapien
gcccaagacaagcatctcaattttc

SEQ ID NO: 1743628 - DNA, 25 bp, Homo sapien
tgtgaggctcactgatggacccatc

SEQ ID NO: 1743629 - DNA, 25 bp, Homo sapien
tggctttgagctgtctaccttgcag

SEQ ID NO: 1743630 - DNA, 25 bp, Homo sapien
ctctggctggtgtagcttgttcttt

SEQ ID NO: 1743631 - DNA, 25 bp, Homo sapien
ttcttctcttggcacggccacggtc

SEQ ID NO: 1743632 - DNA, 25 bp, Homo sapien
tgacactcatctgttctatgccctc

SEQ ID NO: 1743633 - DNA, 25 bp, Homo sapien
cttatctaccttgacactcatctgt

SEQ ID NO: 1743634 - DNA, 25 bp, Homo sapien
ccttatctaccttgacactcatctg

SEQ ID NO: 1743635 - DNA, 25 bp, Homo sapien
tccttatctaccttgacactcatct

SEQ ID NO: 1743636 - DNA, 25 bp, Homo sapien
tagtgatctgatcatctgtatgcct

SEQ ID NO: 1743637 - DNA, 25 bp, Homo sapien
gcaccactgctaggaactgatgact

SEQ ID NO: 1743638 - DNA, 25 bp, Homo sapien
gattcactctccttaatcaaagttc

SEQ ID NO: 1743639 - DNA, 25 bp, Homo sapien
tattatcttgaaggctttactatct

SEQ ID NO: 1743640 - DNA, 25 bp, Homo sapien
ctttggagaggcataggcataggca

SEQ ID NO: 1743641 - DNA, 25 bp, Homo sapien
gagccagagggctgagtactttcac

SEQ ID NO: 1743642 - DNA, 25 bp, Homo sapien
taggcagttcctctgttactggtaa

SEQ ID NO: 1743643 - DNA, 25 bp, Homo sapien
caggagatgcattgtaggagagtca

SEQ ID NO: 1743644 - DNA, 25 bp, Homo sapien
tcatgaccccattccgatttgtcca

SEQ ID NO: 1743645 - DNA, 25 bp, Homo sapien
ccagaaagaatgttcattccctcat

SEQ ID NO: 1743646 - DNA, 25 bp, Homo sapien
agaatgttcattccctcatgacccc

SEQ ID NO: 1743647 - DNA, 25 bp, Homo sapien
gaaagaatgttcattccctcatgac

SEQ ID NO: 1743648 - DNA, 25 bp, Homo sapien
aagcaggttttcaggcaccagaggg

SEQ ID NO: 1743649 - DNA, 25 bp, Homo sapien
ggtcctataatctgaaacagcagca

SEQ ID NO: 1743650 - DNA, 25 bp, Homo sapien
ttaagtggtcctataatctgaaaca

SEQ ID NO: 1743651 - DNA, 25 bp, Homo sapien
caaagcaggttttcaggcaccagag

SEQ ID NO: 1743652 - DNA, 25 bp, Homo sapien
ctgttgtcttccggctttcagcttc

SEQ ID NO: 1743653 - DNA, 25 bp, Homo sapien
gctttccctgtcagggcatctctca

SEQ ID NO: 1743654 - DNA, 25 bp, Homo sapien
agcttcagctttccctgtcagggca

SEQ ID NO: 1743655 - DNA, 25 bp, Homo sapien
tgtcttccggctttcagcttcagct

SEQ ID NO: 1743656 - DNA, 25 bp, Homo sapien
tctggtaacactcttctcttgtgat

SEQ ID NO: 1743657 - DNA, 25 bp, Homo sapien
ctagggtctggtaacactcttctct

SEQ ID NO: 1743658 - DNA, 25 bp, Homo sapien
tagggtctggtaacactcttctctt

SEQ ID NO: 1743659 - DNA, 25 bp, Homo sapien
gggtctggtaacactcttctcttgt

SEQ ID NO: 1743660 - DNA, 25 bp, Homo sapien
ccttcgcttgagctacagctctgat

SEQ ID NO: 1743661 - DNA, 25 bp, Homo sapien
ctgcttccttcgcttgagctacagc

SEQ ID NO: 1743662 - DNA, 25 bp, Homo sapien
gccttgtcctgttctagctcctgta

SEQ ID NO: 1743663 - DNA, 25 bp, Homo sapien
ctgttctagctcctgtacctgctgc

SEQ ID NO: 1743664 - DNA, 25 bp, Homo sapien
ttggcatggcttttgggctgataga

SEQ ID NO: 1743665 - DNA, 25 bp, Homo sapien
tcactctcaaccctcaggttggcat

SEQ ID NO: 1743666 - DNA, 25 bp, Homo sapien
ggttgtcgtctccttagatccaggc

SEQ ID NO: 1743667 - DNA, 25 bp, Homo sapien
gtgtgggcccaaggttgtcgtctcc

SEQ ID NO: 1743668 - DNA, 25 bp, Homo sapien
gccactttgaagacaaggccgactg

SEQ ID NO: 1743669 - DNA, 25 bp, Homo sapien
taaagtctggccactttgaagacaa

SEQ ID NO: 1743670 - DNA, 25 bp, Homo sapien
gtgaacaatagcaacccatagttgt

SEQ ID NO: 1743671 - DNA, 25 bp, Homo sapien
ctttcaattccaccccacactttgg

SEQ ID NO: 1743672 - DNA, 25 bp, Homo sapien
ctgcattgaactgcaatggatctta

SEQ ID NO: 1743673 - DNA, 25 bp, Homo sapien
ttcagaagagagttatattgtgaat

SEQ ID NO: 1743674 - DNA, 25 bp, Homo sapien
ttgaactgcaatggatcttaattgc

SEQ ID NO: 1743675 - DNA, 25 bp, Homo sapien
gaactgcaatggatcttaattgcca

SEQ ID NO: 1743676 - DNA, 25 bp, Homo sapien
tcagatataggaaccctgattggtg

SEQ ID NO: 1743677 - DNA, 25 bp, Homo sapien
agatataggaaccctgattggtgaa

SEQ ID NO: 1743678 - DNA, 25 bp, Homo sapien
gatataggaaccctgattggtgaag

SEQ ID NO: 1743679 - DNA, 25 bp, Homo sapien
cagatataggaaccctgattggtga

SEQ ID NO: 1743680 - DNA, 25 bp, Homo sapien
gcacagttggtccctgcttcttcat

SEQ ID NO: 1743681 - DNA, 25 bp, Homo sapien
gaggactatatgcaaggtttcttgc

SEQ ID NO: 1743682 - DNA, 25 bp, Homo sapien
caatagagaggactatatgcaaggt

SEQ ID NO: 1743683 - DNA, 25 bp, Homo sapien
gaacttttcaatagagaggactata

SEQ ID NO: 1743684 - DNA, 25 bp, Homo sapien
ttcctgcagccttaaacctctccat

SEQ ID NO: 1743685 - DNA, 25 bp, Homo sapien
aaaggcactgagttgcaggtggcgt

SEQ ID NO: 1743686 - DNA, 25 bp, Homo sapien
cccatttgggcaccattttaaccat

SEQ ID NO: 1743687 - DNA, 25 bp, Homo sapien
gttgcaggtggcgtaatggtaccca

SEQ ID NO: 1743688 - DNA, 25 bp, Homo sapien
gccagcatggcaagaaccttttgcc

SEQ ID NO: 1743689 - DNA, 25 bp, Homo sapien
tgccagcatggcaagaaccttttgc

SEQ ID NO: 1743690 - DNA, 25 bp, Homo sapien
cagcatggcaagaaccttttgccat

SEQ ID NO: 1743691 - DNA, 25 bp, Homo sapien
ccagcatggcaagaaccttttgcca

SEQ ID NO: 1743692 - DNA, 25 bp, Homo sapien
actacccaaattaggcgacaggtca

SEQ ID NO: 1743693 - DNA, 25 bp, Homo sapien
cactacccaaattaggcgacaggtc

SEQ ID NO: 1743694 - DNA, 25 bp, Homo sapien
caatggcttcagcagtgtaggttgg

SEQ ID NO: 1743695 - DNA, 25 bp, Homo sapien
tctcccctctcccaatggcttcagc

SEQ ID NO: 1743696 - DNA, 25 bp, Homo sapien
gtgccactcccaccccatagctatt

SEQ ID NO: 1743697 - DNA, 25 bp, Homo sapien
ttctggctaatctcacctccacagg

SEQ ID NO: 1743698 - DNA, 25 bp, Homo sapien
tgcagggggagcttgtttatcatgt

SEQ ID NO: 1743699 - DNA, 25 bp, Homo sapien
gcagggggagcttgtttatcatgtt

SEQ ID NO: 1743700 - DNA, 25 bp, Homo sapien
ggtggaactgaatgttaactgctgt

SEQ ID NO: 1743701 - DNA, 25 bp, Homo sapien
aatccagtgaggaattttattggtg

SEQ ID NO: 1743702 - DNA, 25 bp, Homo sapien
tattggtggaactgaatgttaactg

SEQ ID NO: 1743703 - DNA, 25 bp, Homo sapien
taactgctgtaaatcctaggaaata

SEQ ID NO: 1743704 - DNA, 25 bp, Homo sapien
taacttgttatcaggaatgttctct

SEQ ID NO: 1743705 - DNA, 25 bp, Homo sapien
gaaccacagaagtccgttgccagtt

SEQ ID NO: 1743706 - DNA, 25 bp, Homo sapien
tcagagagaaccacagaagtccgtt

SEQ ID NO: 1743707 - DNA, 25 bp, Homo sapien
tccgttgccagtttgttactgtgac

SEQ ID NO: 1743708 - DNA, 25 bp, Homo sapien
ctttttttatttatacgctgcttgt

SEQ ID NO: 1743709 - DNA, 25 bp, Homo sapien
ttatttatacgctgcttgtgcatat

SEQ ID NO: 1743710 - DNA, 25 bp, Homo sapien
tttttatttatacgctgcttgtgca

SEQ ID NO: 1743711 - DNA, 25 bp, Homo sapien
tttatttatacgctgcttgtgcata

SEQ ID NO: 1743712 - DNA, 25 bp, Homo sapien
tgctgtttggattcccatggatatc

SEQ ID NO: 1743713 - DNA, 25 bp, Homo sapien
tgctgctgtttggattcccatggat

SEQ ID NO: 1743714 - DNA, 25 bp, Homo sapien
tcccatggatatctttatccagcat

SEQ ID NO: 1743715 - DNA, 25 bp, Homo sapien
tggattcccatggatatctttatcc

SEQ ID NO: 1743716 - DNA, 25 bp, Homo sapien
gcttcatggagggcaaaacagacca

SEQ ID NO: 1743717 - DNA, 25 bp, Homo sapien
aacatcatgcagtctaagtccagcc

SEQ ID NO: 1743718 - DNA, 25 bp, Homo sapien
ctatttctctagatgagaaacccca

SEQ ID NO: 1743719 - DNA, 25 bp, Homo sapien
cccatgtaagtcgtaacttgcagca

SEQ ID NO: 1743720 - DNA, 25 bp, Homo sapien
tttcataaacatcatgcagtctaag

SEQ ID NO: 1743721 - DNA, 25 bp, Homo sapien
cctccttactccttcccacaacttg

SEQ ID NO: 1743722 - DNA, 25 bp, Homo sapien
tactccttcccacaacttgccccac

SEQ ID NO: 1743723 - DNA, 25 bp, Homo sapien
tccttactccttcccacaacttgcc

SEQ ID NO: 1743724 - DNA, 25 bp, Homo sapien
ttctcctccttactccttcccacaa

SEQ ID NO: 1743725 - DNA, 25 bp, Homo sapien
tataacaacatctagtcacaggtcc

SEQ ID NO: 1743726 - DNA, 25 bp, Homo sapien
tctgatgtggtaggacagtcgctca

SEQ ID NO: 1743727 - DNA, 25 bp, Homo sapien
tgctgaccctcttctaggcagataa

SEQ ID NO: 1743728 - DNA, 25 bp, Homo sapien
cagtcgctcacgctgatgtcagaca

SEQ ID NO: 1743729 - DNA, 25 bp, Homo sapien
tctgatgggacttaggatgctctgc

SEQ ID NO: 1743730 - DNA, 25 bp, Homo sapien
gaaacatgtcatgaggcatcacaga

SEQ ID NO: 1743731 - DNA, 25 bp, Homo sapien
gatgggctgggacagtctactacac

SEQ ID NO: 1743732 - DNA, 25 bp, Homo sapien
gaaatttagtcagatccacgttgct

SEQ ID NO: 1743733 - DNA, 25 bp, Homo sapien
gaattgcctcagcaatttggatgtg

SEQ ID NO: 1743734 - DNA, 25 bp, Homo sapien
attgcctcagcaatttggatgtgaa

SEQ ID NO: 1743735 - DNA, 25 bp, Homo sapien
aattgcctcagcaatttggatgtga

SEQ ID NO: 1743736 - DNA, 25 bp, Homo sapien
gagaattgcctcagcaatttggatg

SEQ ID NO: 1743737 - DNA, 25 bp, Homo sapien
tgtttcatagccttggtccctgagt

SEQ ID NO: 1743738 - DNA, 25 bp, Homo sapien
ggataaggaaggagtgtttcatagc

SEQ ID NO: 1743739 - DNA, 25 bp, Homo sapien
aaggagtgtttcatagccttggtcc

SEQ ID NO: 1743740 - DNA, 25 bp, Homo sapien
acatcttacctcattaactccagct

SEQ ID NO: 1743741 - DNA, 25 bp, Homo sapien
aaagaagaaagcgtcaaacattttg

SEQ ID NO: 1743742 - DNA, 25 bp, Homo sapien
acattttgaatacctctaatgcaac

SEQ ID NO: 1743743 - DNA, 25 bp, Homo sapien
taggacatcatcaaagaagaaagcg

SEQ ID NO: 1743744 - DNA, 25 bp, Homo sapien
ctaatgcaactccaaataaagcttc

SEQ ID NO: 1743745 - DNA, 25 bp, Homo sapien
aaaggcctctagcaatagcactgtc

SEQ ID NO: 1743746 - DNA, 25 bp, Homo sapien
caggtacctatgcaaggcttcaggc

SEQ ID NO: 1743747 - DNA, 25 bp, Homo sapien
ggcttcaggccaaaggcctctagca

SEQ ID NO: 1743748 - DNA, 25 bp, Homo sapien
ggaggaagtgcttgtcccaggtacc

SEQ ID NO: 1743749 - DNA, 25 bp, Homo sapien
tcagagattcaggtaacctgctact

SEQ ID NO: 1743750 - DNA, 25 bp, Homo sapien
tctccaggccaaacattctcagatg

SEQ ID NO: 1743751 - DNA, 25 bp, Homo sapien
tccttgtagtccttccgctttcctg

SEQ ID NO: 1743752 - DNA, 25 bp, Homo sapien
tggagtggcttcaagcttccctttc

SEQ ID NO: 1743753 - DNA, 25 bp, Homo sapien
gttgtctccccacacgacgtagttc

SEQ ID NO: 1743754 - DNA, 25 bp, Homo sapien
tctccccacacgacgtagttccagg

SEQ ID NO: 1743755 - DNA, 25 bp, Homo sapien
ccacacgacgtagttccaggtacaa

SEQ ID NO: 1743756 - DNA, 25 bp, Homo sapien
caggtacaaagcctaagctccacat

SEQ ID NO: 1743757 - DNA, 25 bp, Homo sapien
tctccctgcactggtaaggtagtgc

SEQ ID NO: 1743758 - DNA, 25 bp, Homo sapien
tccggaggtctctggatggttcgcc

SEQ ID NO: 1743759 - DNA, 25 bp, Homo sapien
atttgaaacagagtggctctccgga

SEQ ID NO: 1743760 - DNA, 25 bp, Homo sapien
tgtcagcctagatctcatgagggcg

SEQ ID NO: 1743761 - DNA, 25 bp, Homo sapien
ggtgaagggcactctgatcagatct

SEQ ID NO: 1743762 - DNA, 25 bp, Homo sapien
gggcagtgactttagagctcctatt

SEQ ID NO: 1743763 - DNA, 25 bp, Homo sapien
tcttcactccagatgaaaacccctg

SEQ ID NO: 1743764 - DNA, 25 bp, Homo sapien
gaaccgaaagaaggaggtatgccca

SEQ ID NO: 1743765 - DNA, 25 bp, Homo sapien
cctcaagtggactgtcgcgggaagc

SEQ ID NO: 1743766 - DNA, 25 bp, Homo sapien
gtcgacgtctgaggccttcgatccc

SEQ ID NO: 1743767 - DNA, 25 bp, Homo sapien
tagctgttgccacagcgccctcaag

SEQ ID NO: 1743768 - DNA, 25 bp, Homo sapien
acgccggcgtcgacgtctgaggcct

SEQ ID NO: 1743769 - DNA, 25 bp, Homo sapien
ctacaccgagaccgggagccgaagg

SEQ ID NO: 1743770 - DNA, 25 bp, Homo sapien
tctcgccggcgcagctctcctggca

SEQ ID NO: 1743771 - DNA, 25 bp, Homo sapien
gcttctcgccggcgcagctctcctg

SEQ ID NO: 1743772 - DNA, 25 bp, Homo sapien
ctcgccggcgcagctctcctggcaa

SEQ ID NO: 1743773 - DNA, 25 bp, Homo sapien
ttctcgccggcgcagctctcctggc

SEQ ID NO: 1743774 - DNA, 25 bp, Homo sapien
tcggagccggctaccagcctagcgg

SEQ ID NO: 1743775 - DNA, 25 bp, Homo sapien
cgagaaggatgctcggagccggcta

SEQ ID NO: 1743776 - DNA, 25 bp, Homo sapien
gctaccagcctagcggccgcactgg

SEQ ID NO: 1743777 - DNA, 25 bp, Homo sapien
ctagccgggccgagaaggatgctcg

SEQ ID NO: 1743778 - DNA, 25 bp, Homo sapien
ccttcagcactaggtacctaataat

SEQ ID NO: 1743779 - DNA, 25 bp, Homo sapien
aagcccacgtggagatttgctactg

SEQ ID NO: 1743780 - DNA, 25 bp, Homo sapien
cctaataatcaagcccacgtggaga

SEQ ID NO: 1743781 - DNA, 25 bp, Homo sapien
cactaggtacctaataatcaagccc

SEQ ID NO: 1743782 - DNA, 25 bp, Homo sapien
tgtcaaacactgttggaccgtataa

SEQ ID NO: 1743783 - DNA, 25 bp, Homo sapien
tgactgagtcgtcttggcacccttg

SEQ ID NO: 1743784 - DNA, 25 bp, Homo sapien
cattttttcacatagggatatcagt

SEQ ID NO: 1743785 - DNA, 25 bp, Homo sapien
cactatctggtgaagaggctatcct

SEQ ID NO: 1743786 - DNA, 25 bp, Homo sapien
aatatttcattctatgtagatactg

SEQ ID NO: 1743787 - DNA, 25 bp, Homo sapien
gtagatactgtattttgcttatcca

SEQ ID NO: 1743788 - DNA, 25 bp, Homo sapien
gaaccatattgtatgggtcttttta

SEQ ID NO: 1743789 - DNA, 25 bp, Homo sapien
ccattaatccatagatgcacacata

SEQ ID NO: 1743790 - DNA, 25 bp, Homo sapien
taatattctggtttagtcatatatc

SEQ ID NO: 1743791 - DNA, 25 bp, Homo sapien
aaacctgtgaacatcactgatagtt

SEQ ID NO: 1743792 - DNA, 25 bp, Homo sapien
tatgaggggacaaaatgatagttca

SEQ ID NO: 1743793 - DNA, 25 bp, Homo sapien
gtgtggataatgtaaaacagaatcc

SEQ ID NO: 1743794 - DNA, 25 bp, Homo sapien
ggattttcgattcatgggtcagcct

SEQ ID NO: 1743795 - DNA, 25 bp, Homo sapien
ttcaaggttcaatcaggaaccctcc

SEQ ID NO: 1743796 - DNA, 25 bp, Homo sapien
gtcctatagctccaatagcatctgt

SEQ ID NO: 1743797 - DNA, 25 bp, Homo sapien
ttctactacctacccaagacagcaa

SEQ ID NO: 1743798 - DNA, 25 bp, Homo sapien
gctatataagtagatgctctttcca

SEQ ID NO: 1743799 - DNA, 25 bp, Homo sapien
taagtgtttctagcacatcccaaga

SEQ ID NO: 1743800 - DNA, 25 bp, Homo sapien
ggtgataaaaagtgagtagacctca

SEQ ID NO: 1743801 - DNA, 25 bp, Homo sapien
attattgtaagcaccatgcaatggg

SEQ ID NO: 1743802 - DNA, 25 bp, Homo sapien
gaaagatcagtatttccaccaaatc

SEQ ID NO: 1743803 - DNA, 25 bp, Homo sapien
tggcttaggtcaatacttctcaaac

SEQ ID NO: 1743804 - DNA, 25 bp, Homo sapien
aatacaatagtcaaatcctaggact

SEQ ID NO: 1743805 - DNA, 25 bp, Homo sapien
tacatacaaattgcagttctcagtc

SEQ ID NO: 1743806 - DNA, 25 bp, Homo sapien
tgttagcagtggttgaaactctcct

SEQ ID NO: 1743807 - DNA, 25 bp, Homo sapien
gcctgaaagataactacttgtgtgt

SEQ ID NO: 1743808 - DNA, 25 bp, Homo sapien
agacagcctgaaagataactacttg

SEQ ID NO: 1743809 - DNA, 25 bp, Homo sapien
tctcctcagctagtgttcagggtca

SEQ ID NO: 1743810 - DNA, 25 bp, Homo sapien
ctcccacaacttcccactagagacc

SEQ ID NO: 1743811 - DNA, 25 bp, Homo sapien
tagagaccagttccaaactcatgta

SEQ ID NO: 1743812 - DNA, 25 bp, Homo sapien
cactcaataactccagctcttctgt

SEQ ID NO: 1743813 - DNA, 25 bp, Homo sapien
tgtatttggagtcactcaataactc

SEQ ID NO: 1743814 - DNA, 25 bp, Homo sapien
caagtgctgatatcaaatctgccca

SEQ ID NO: 1743815 - DNA, 25 bp, Homo sapien
tagtgctttgtcaattgctgctaca

SEQ ID NO: 1743816 - DNA, 25 bp, Homo sapien
ggcaagtcgcttaggtccaattatt

SEQ ID NO: 1743817 - DNA, 25 bp, Homo sapien
taatgctggatgtagacattgagct

SEQ ID NO: 1743818 - DNA, 25 bp, Homo sapien
catatgtttcaagcgccttccgatg

SEQ ID NO: 1743819 - DNA, 25 bp, Homo sapien
agctaggcgtttgcctatggtcagc

SEQ ID NO: 1743820 - DNA, 25 bp, Homo sapien
cagtgttttacccaaaggcagataa

SEQ ID NO: 1743821 - DNA, 25 bp, Homo sapien
gacatggcagcatttgcaagaagag

SEQ ID NO: 1743822 - DNA, 25 bp, Homo sapien
gtaagcaatccctgtagaccaggtt

SEQ ID NO: 1743823 - DNA, 25 bp, Homo sapien
gccaggaagaataccagtaagcaat

SEQ ID NO: 1743824 - DNA, 25 bp, Homo sapien
cattagctcaatatcactgccaatt

SEQ ID NO: 1743825 - DNA, 25 bp, Homo sapien
gggcaagaacatacgtgattccagg

SEQ ID NO: 1743826 - DNA, 25 bp, Homo sapien
gttgatcttccatagaaagcttcct

SEQ ID NO: 1743827 - DNA, 25 bp, Homo sapien
tgattccaggtaaacgcacagcagg

SEQ ID NO: 1743828 - DNA, 25 bp, Homo sapien
aaacagaagagtatgaggtccagtg

SEQ ID NO: 1743829 - DNA, 25 bp, Homo sapien
tgactcatgtggaatggaaaacaga

SEQ ID NO: 1743830 - DNA, 25 bp, Homo sapien
aagtacacttgagtcctgcactgaa

SEQ ID NO: 1743831 - DNA, 25 bp, Homo sapien
cagtgtgcttctctgtacaagtaca

SEQ ID NO: 1743832 - DNA, 25 bp, Homo sapien
gcttctcaatactgggcttaaaagt

SEQ ID NO: 1743833 - DNA, 25 bp, Homo sapien
gcacatatgactgaaagagccactg

SEQ ID NO: 1743834 - DNA, 25 bp, Homo sapien
tgaaagtacaagatagaccagtgga

SEQ ID NO: 1743835 - DNA, 25 bp, Homo sapien
ccgcatctggctgaaattgtattgt

SEQ ID NO: 1743836 - DNA, 25 bp, Homo sapien
gattcagagacatatccctccttag

SEQ ID NO: 1743837 - DNA, 25 bp, Homo sapien
ccttagcactacatgaagggctgct

SEQ ID NO: 1743838 - DNA, 25 bp, Homo sapien
tcctgatcatatccggtcgagtggc

SEQ ID NO: 1743839 - DNA, 25 bp, Homo sapien
catgcataaagtcttcgattcagag

SEQ ID NO: 1743840 - DNA, 25 bp, Homo sapien
acttaaaatggaattctcaaaactg

SEQ ID NO: 1743841 - DNA, 25 bp, Homo sapien
taaaatggaattctcaaaactgttg

SEQ ID NO: 1743842 - DNA, 25 bp, Homo sapien
ctccatggaaacaaatcacaaaatt

SEQ ID NO: 1743843 - DNA, 25 bp, Homo sapien
caaatcacaaaattacttaaaatgg

SEQ ID NO: 1743844 - DNA, 25 bp, Homo sapien
ctatgatagcaccgttgttatcaaa

SEQ ID NO: 1743845 - DNA, 25 bp, Homo sapien
atgatagcaccgttgttatcaaaac

SEQ ID NO: 1743846 - DNA, 25 bp, Homo sapien
tatgatagcaccgttgttatcaaaa

SEQ ID NO: 1743847 - DNA, 25 bp, Homo sapien
catgttcttcaggattactgtgtct

SEQ ID NO: 1743848 - DNA, 25 bp, Homo sapien
gcatgttcttcaggattactgtgtc

SEQ ID NO: 1743849 - DNA, 25 bp, Homo sapien
aaatagtaagtggcatgttcttcag

SEQ ID NO: 1743850 - DNA, 25 bp, Homo sapien
actgattaaaatgcgaaaaggcttt

SEQ ID NO: 1743851 - DNA, 25 bp, Homo sapien
aaatccattcacttgtaagattccc

SEQ ID NO: 1743852 - DNA, 25 bp, Homo sapien
tagctcaggtttgtccagtaaactg

SEQ ID NO: 1743853 - DNA, 25 bp, Homo sapien
tcacttgtaagattcccaccattgc

SEQ ID NO: 1743854 - DNA, 25 bp, Homo sapien
tgaccttatgccctaggacagtata

SEQ ID NO: 1743855 - DNA, 25 bp, Homo sapien
cacatgaccttatgccctaggacag

SEQ ID NO: 1743856 - DNA, 25 bp, Homo sapien
ccttatgccctaggacagtatacat

SEQ ID NO: 1743857 - DNA, 25 bp, Homo sapien
taccacacatgaccttatgccctag

SEQ ID NO: 1743858 - DNA, 25 bp, Homo sapien
ttcagtttgaagatccaactctgct

SEQ ID NO: 1743859 - DNA, 25 bp, Homo sapien
tttgcattgagaatataatgttcta

SEQ ID NO: 1743860 - DNA, 25 bp, Homo sapien
tctaaacacttcaatcaggacatct

SEQ ID NO: 1743861 - DNA, 25 bp, Homo sapien
tgatccttgctgaagggtggttcag

SEQ ID NO: 1743862 - DNA, 25 bp, Homo sapien
ggtttaccttgaccagtttcaatca

SEQ ID NO: 1743863 - DNA, 25 bp, Homo sapien
gagtaggatcccaagttattacact

SEQ ID NO: 1743864 - DNA, 25 bp, Homo sapien
aaccaactagtgctgttaatagcca

SEQ ID NO: 1743865 - DNA, 25 bp, Homo sapien
gaggcactgtcaatacaactagtat

SEQ ID NO: 1743866 - DNA, 25 bp, Homo sapien
tcccacatataataaggttcgaagg

SEQ ID NO: 1743867 - DNA, 25 bp, Homo sapien
agcagttttaatcagctctgctgtt

SEQ ID NO: 1743868 - DNA, 25 bp, Homo sapien
cattcttcaaaccagcgtgcaacat

SEQ ID NO: 1743869 - DNA, 25 bp, Homo sapien
gaaggaattaaagagaaggttagca

SEQ ID NO: 1743870 - DNA, 25 bp, Homo sapien
ctgtaattcagatgagtcattacta

SEQ ID NO: 1743871 - DNA, 25 bp, Homo sapien
caatctgaagtctcacatgcagtgt

SEQ ID NO: 1743872 - DNA, 25 bp, Homo sapien
cagatgagtcattactatctccagg

SEQ ID NO: 1743873 - DNA, 25 bp, Homo sapien
caccagtaagcagaaattggtcagc

SEQ ID NO: 1743874 - DNA, 25 bp, Homo sapien
gacacagcaccctcatacttctagt

SEQ ID NO: 1743875 - DNA, 25 bp, Homo sapien
acagcaccctcatacttctagtagg

SEQ ID NO: 1743876 - DNA, 25 bp, Homo sapien
ctgacacagcaccctcatacttcta

SEQ ID NO: 1743877 - DNA, 25 bp, Homo sapien
cacagcaccctcatacttctagtag

SEQ ID NO: 1743878 - DNA, 25 bp, Homo sapien
cagtggaggctgaaccttgctaagg

SEQ ID NO: 1743879 - DNA, 25 bp, Homo sapien
aaaacacctccagtgctagcagata

SEQ ID NO: 1743880 - DNA, 25 bp, Homo sapien
taaggatctttgagcagagtctgag

SEQ ID NO: 1743881 - DNA, 25 bp, Homo sapien
tctttgactgaattgttctgcccac

SEQ ID NO: 1743882 - DNA, 25 bp, Homo sapien
tctaggaaagactcactattattta

SEQ ID NO: 1743883 - DNA, 25 bp, Homo sapien
ctaggaaagactcactattatttaa

SEQ ID NO: 1743884 - DNA, 25 bp, Homo sapien
ggatctaggaaagactcactattat

SEQ ID NO: 1743885 - DNA, 25 bp, Homo sapien
gatctaggaaagactcactattatt

SEQ ID NO: 1743886 - DNA, 25 bp, Homo sapien
aatgcacactagatcttgaagagag

SEQ ID NO: 1743887 - DNA, 25 bp, Homo sapien
gataattaaactgccctataaccaa

SEQ ID NO: 1743888 - DNA, 25 bp, Homo sapien
tgccattcacatgatacttctactg

SEQ ID NO: 1743889 - DNA, 25 bp, Homo sapien
ggctacaattgtccaaataaactag

SEQ ID NO: 1743890 - DNA, 25 bp, Homo sapien
gctaccaattgggatggcagctgcc

SEQ ID NO: 1743891 - DNA, 25 bp, Homo sapien
tgatgtatggttcccctcagcaatg

SEQ ID NO: 1743892 - DNA, 25 bp, Homo sapien
tctctgatgatcgactacttggtgg

SEQ ID NO: 1743893 - DNA, 25 bp, Homo sapien
gtaaactgggaaacttgagcactct

SEQ ID NO: 1743894 - DNA, 25 bp, Homo sapien
ctgtggaggctgcacatgctcacag

SEQ ID NO: 1743895 - DNA, 25 bp, Homo sapien
tgtggaggctgcacatgctcacagt

SEQ ID NO: 1743896 - DNA, 25 bp, Homo sapien
cagtcttctcagctatgtacctcag

SEQ ID NO: 1743897 - DNA, 25 bp, Homo sapien
tcccaccaggtccataactagtgaa

SEQ ID NO: 1743898 - DNA, 25 bp, Homo sapien
cacagactgtgtcagtcccaccagg

SEQ ID NO: 1743899 - DNA, 25 bp, Homo sapien
gacttaagggttgtgcaggctctac

SEQ ID NO: 1743900 - DNA, 25 bp, Homo sapien
gtgatgctgaggtgtcccatctccc

SEQ ID NO: 1743901 - DNA, 25 bp, Homo sapien
tagttccacactcttctggtgatgc

SEQ ID NO: 1743902 - DNA, 25 bp, Homo sapien
ggttaactgctgacttataacatcc

SEQ ID NO: 1743903 - DNA, 25 bp, Homo sapien
ggtcccacaatgttaaagctacatg

SEQ ID NO: 1743904 - DNA, 25 bp, Homo sapien
gaactgcaaacttggcatgtgcttc

SEQ ID NO: 1743905 - DNA, 25 bp, Homo sapien
ggagatctctcgttagatgccaaag

SEQ ID NO: 1743906 - DNA, 25 bp, Homo sapien
ctcgttagatgccaaagaactgcaa

SEQ ID NO: 1743907 - DNA, 25 bp, Homo sapien
gatttatttatatggagatctctcg

SEQ ID NO: 1743908 - DNA, 25 bp, Homo sapien
gatatatgactgtgaaatcttaata

SEQ ID NO: 1743909 - DNA, 25 bp, Homo sapien
aaattgctatctcctacacttgcca

SEQ ID NO: 1743910 - DNA, 25 bp, Homo sapien
tacacttgccaagctagacagtgga

SEQ ID NO: 1743911 - DNA, 25 bp, Homo sapien
cagtggactcaaggaaagaggcaac

SEQ ID NO: 1743912 - DNA, 25 bp, Homo sapien
ttgtcccacagagctagtagaacca

SEQ ID NO: 1743913 - DNA, 25 bp, Homo sapien
tagcaatggttccaaaactcgtgca

SEQ ID NO: 1743914 - DNA, 25 bp, Homo sapien
aataacgttctgcttgtacacgctg

SEQ ID NO: 1743915 - DNA, 25 bp, Homo sapien
tacacgctgtactgaaaccctctga

SEQ ID NO: 1743916 - DNA, 25 bp, Homo sapien
gagactctgagaaagccatagcctt

SEQ ID NO: 1743917 - DNA, 25 bp, Homo sapien
ggaaccaagactctgtagaaacaca

SEQ ID NO: 1743918 - DNA, 25 bp, Homo sapien
caaagacattctggcaataagcagg

SEQ ID NO: 1743919 - DNA, 25 bp, Homo sapien
gagagtctttgtcccttaaatgaaa

SEQ ID NO: 1743920 - DNA, 25 bp, Homo sapien
tgatgcagattccacttcgaggcca

SEQ ID NO: 1743921 - DNA, 25 bp, Homo sapien
cagaacttttcccatgtaaggcaga

SEQ ID NO: 1743922 - DNA, 25 bp, Homo sapien
gcaaagctcgtatcactgcacagag

SEQ ID NO: 1743923 - DNA, 25 bp, Homo sapien
cattggaattgtctcactgctggta

SEQ ID NO: 1743924 - DNA, 25 bp, Homo sapien
caacaaacagtaatggataatggct

SEQ ID NO: 1743925 - DNA, 25 bp, Homo sapien
tctggtggaataattgatgccatcc

SEQ ID NO: 1743926 - DNA, 25 bp, Homo sapien
ttggtgatactgtgtagttggatcc

SEQ ID NO: 1743927 - DNA, 25 bp, Homo sapien
gatactgtgtagttggatccaacaa

SEQ ID NO: 1743928 - DNA, 25 bp, Homo sapien
taatagtggtaagagatgcggatgc

SEQ ID NO: 1743929 - DNA, 25 bp, Homo sapien
tgcggatgcggcaatagtcatcttt

SEQ ID NO: 1743930 - DNA, 25 bp, Homo sapien
gattccactgcgtgcttcaaacaag

SEQ ID NO: 1743931 - DNA, 25 bp, Homo sapien
gatgcagtatgctccaaagcagtgt

SEQ ID NO: 1743932 - DNA, 25 bp, Homo sapien
cagccataaagtgaacaccatgatt

SEQ ID NO: 1743933 - DNA, 25 bp, Homo sapien
gtgaacaccatgattcattgaaatg

SEQ ID NO: 1743934 - DNA, 25 bp, Homo sapien
taaagtgaacaccatgattcattga

SEQ ID NO: 1743935 - DNA, 25 bp, Homo sapien
gaaatggggcccaacaattcaagaa

SEQ ID NO: 1743936 - DNA, 25 bp, Homo sapien
taaagctgtcgacagacttttgctt

SEQ ID NO: 1743937 - DNA, 25 bp, Homo sapien
ctaaagctgtcgacagacttttgct

SEQ ID NO: 1743938 - DNA, 25 bp, Homo sapien
ttgctttgtaccctaaatgactagc

SEQ ID NO: 1743939 - DNA, 25 bp, Homo sapien
gaactctttgaactatcacatcata

SEQ ID NO: 1743940 - DNA, 25 bp, Homo sapien
taaactatagtcaagatgaaaactt

SEQ ID NO: 1743941 - DNA, 25 bp, Homo sapien
gaactatcacatcatagtaaactat

SEQ ID NO: 1743942 - DNA, 25 bp, Homo sapien
catatataactcagctaagaccaac

SEQ ID NO: 1743943 - DNA, 25 bp, Homo sapien
tactattctaatgtgccatgatttg

SEQ ID NO: 1743944 - DNA, 25 bp, Homo sapien
ttctcttgagctttgaaactcagaa

SEQ ID NO: 1743945 - DNA, 25 bp, Homo sapien
ttttcaatatagagcatttctcttg

SEQ ID NO: 1743946 - DNA, 25 bp, Homo sapien
cagtttctgctctcatgacactgat

SEQ ID NO: 1743947 - DNA, 25 bp, Homo sapien
cttgtccttggctatggctggtggc

SEQ ID NO: 1743948 - DNA, 25 bp, Homo sapien
tgaacgaaccaattccactaataaa

SEQ ID NO: 1743949 - DNA, 25 bp, Homo sapien
acttcttttacagtctggataacag

SEQ ID NO: 1743950 - DNA, 25 bp, Homo sapien
aaatcaattttgtagtgaagaagaa

SEQ ID NO: 1743951 - DNA, 25 bp, Homo sapien
cattgttgcaactactctgtatctt

SEQ ID NO: 1743952 - DNA, 25 bp, Homo sapien
tttgtagtgaagaagaatactgcct

SEQ ID NO: 1743953 - DNA, 25 bp, Homo sapien
gaacaaaatcatcaatttttcatta

SEQ ID NO: 1743954 - DNA, 25 bp, Homo sapien
tgaagcatgcagacttccaaagaaa

SEQ ID NO: 1743955 - DNA, 25 bp, Homo sapien
ggcgtgcgctgccatgcccagctaa

SEQ ID NO: 1743956 - DNA, 25 bp, Homo sapien
ggagcacagtagcgcgatctcggct

SEQ ID NO: 1743957 - DNA, 25 bp, Homo sapien
caccgcagcctccacctccccggtt

SEQ ID NO: 1743958 - DNA, 25 bp, Homo sapien
caagcaattctctcctgcctcagcc

SEQ ID NO: 1743959 - DNA, 25 bp, Homo sapien
gaagtatcaacagtgacgcccagct

SEQ ID NO: 1743960 - DNA, 25 bp, Homo sapien
ctttcagaagtatcaacagtgacgc

SEQ ID NO: 1743961 - DNA, 25 bp, Homo sapien
gacgcccagctatccactaaattgg

SEQ ID NO: 1743962 - DNA, 25 bp, Homo sapien
gaagactcagttgtatagagtcttt

SEQ ID NO: 1743963 - DNA, 25 bp, Homo sapien
caaaagaagccgacacaaaatattt

SEQ ID NO: 1743964 - DNA, 25 bp, Homo sapien
tatgatcatgctgtgaataaccact

SEQ ID NO: 1743965 - DNA, 25 bp, Homo sapien
gggaaacctggcaagatcccatatc

SEQ ID NO: 1743966 - DNA, 25 bp, Homo sapien
tatacttatagttcaaaaacaaggc

SEQ ID NO: 1743967 - DNA, 25 bp, Homo sapien
gtttttcataataaactcattcaga

SEQ ID NO: 1743968 - DNA, 25 bp, Homo sapien
ttttcataataaactcattcagaac

SEQ ID NO: 1743969 - DNA, 25 bp, Homo sapien
gggtttttcataataaactcattca

SEQ ID NO: 1743970 - DNA, 25 bp, Homo sapien
ctagggtttttcataataaactcat

SEQ ID NO: 1743971 - DNA, 25 bp, Homo sapien
gatttcgtcgcagccatgttgtctg

SEQ ID NO: 1743972 - DNA, 25 bp, Homo sapien
gagaaggcttaacttcaagatttcg

SEQ ID NO: 1743973 - DNA, 25 bp, Homo sapien
ttcaagatttcgtcgcagccatgtt

SEQ ID NO: 1743974 - DNA, 25 bp, Homo sapien
ttgcaccaattgcatccactatttt

SEQ ID NO: 1743975 - DNA, 25 bp, Homo sapien
taaacctaaatgtttgacaagaata

SEQ ID NO: 1743976 - DNA, 25 bp, Homo sapien
ataaacctaaatgtttgacaagaat

SEQ ID NO: 1743977 - DNA, 25 bp, Homo sapien
gcggtttccattgcaggtgataaca

SEQ ID NO: 1743978 - DNA, 25 bp, Homo sapien
tgcatggacactatatacagaagga

SEQ ID NO: 1743979 - DNA, 25 bp, Homo sapien
tatacagaaggagttatgtttgcgg

SEQ ID NO: 1743980 - DNA, 25 bp, Homo sapien
ttatgtttgcggtttccattgcagg

SEQ ID NO: 1743981 - DNA, 25 bp, Homo sapien
tagggcacaacataatgcataatat

SEQ ID NO: 1743982 - DNA, 25 bp, Homo sapien
ctgaggtagggcacaacataatgca

SEQ ID NO: 1743983 - DNA, 25 bp, Homo sapien
aggaataacccgctccttttcatca

SEQ ID NO: 1743984 - DNA, 25 bp, Homo sapien
ggaataacccgctccttttcatcac

SEQ ID NO: 1743985 - DNA, 25 bp, Homo sapien
cttttttccaagctctccgtgtgta

SEQ ID NO: 1743986 - DNA, 25 bp, Homo sapien
tgctgagcagctggacacaagctcg

SEQ ID NO: 1743987 - DNA, 25 bp, Homo sapien
tactgatacccactaagactgctga

SEQ ID NO: 1743988 - DNA, 25 bp, Homo sapien
ctggacacaagctcgataactaggg

SEQ ID NO: 1743989 - DNA, 25 bp, Homo sapien
acagtattctaactttccaggggag

SEQ ID NO: 1743990 - DNA, 25 bp, Homo sapien
tgatttcatcagactgtgaggtgca

SEQ ID NO: 1743991 - DNA, 25 bp, Homo sapien
tgaaagagataaggattacaacatg

SEQ ID NO: 1743992 - DNA, 25 bp, Homo sapien
gctgaatacaaataagagggcaact

SEQ ID NO: 1743993 - DNA, 25 bp, Homo sapien
tatcatgtgtcatcagattgtccat

SEQ ID NO: 1743994 - DNA, 25 bp, Homo sapien
gtgtcatcagattgtccataattgc

SEQ ID NO: 1743995 - DNA, 25 bp, Homo sapien
catcagattgtccataattgctctc

SEQ ID NO: 1743996 - DNA, 25 bp, Homo sapien
ttttatcatgtgtcatcagattgtc

SEQ ID NO: 1743997 - DNA, 25 bp, Homo sapien
tgacttgtctgataggctggattcg

SEQ ID NO: 1743998 - DNA, 25 bp, Homo sapien
ttcaaattagacatggacccttccc

SEQ ID NO: 1743999 - DNA, 25 bp, Homo sapien
tattcccatagcgtacagaaagtag

SEQ ID NO: 1744000 - DNA, 25 bp, Homo sapien
aaagtagtgtgctttccctagagca

SEQ ID NO: 1744001 - DNA, 25 bp, Homo sapien
tgaccctaggccttctcatggttgg

SEQ ID NO: 1744002 - DNA, 25 bp, Homo sapien
taaggttagcgcaatgcgtggccca

SEQ ID NO: 1744003 - DNA, 25 bp, Homo sapien
tcaccttgtatatgagctatttagc

SEQ ID NO: 1744004 - DNA, 25 bp, Homo sapien
taaaatttgattaaggttagcgcaa

SEQ ID NO: 1744005 - DNA, 25 bp, Homo sapien
ggtactggtcaatttcactgctaaa

SEQ ID NO: 1744006 - DNA, 25 bp, Homo sapien
tagctccacatcacggtttgcaaag

SEQ ID NO: 1744007 - DNA, 25 bp, Homo sapien
tgcaaagagattaagtgaactgctt

SEQ ID NO: 1744008 - DNA, 25 bp, Homo sapien
tcttttaagaagcatagctctctgt

SEQ ID NO: 1744009 - DNA, 25 bp, Homo sapien
gcaaacggagactctcaaccaatct

SEQ ID NO: 1744010 - DNA, 25 bp, Homo sapien
acacttgagaatggagagttggcac

SEQ ID NO: 1744011 - DNA, 25 bp, Homo sapien
aagttctgtaatcatggtaggccag

SEQ ID NO: 1744012 - DNA, 25 bp, Homo sapien
gttggcacctgtggcaaacggagac

SEQ ID NO: 1744013 - DNA, 25 bp, Homo sapien
agcagtgagttcctgctccatcagt

SEQ ID NO: 1744014 - DNA, 25 bp, Homo sapien
gaaatatcttcatcagcagtgagtt

SEQ ID NO: 1744015 - DNA, 25 bp, Homo sapien
cagtgagttcctgctccatcagtaa

SEQ ID NO: 1744016 - DNA, 25 bp, Homo sapien
gtgaaatatcttcatcagcagtgag

SEQ ID NO: 1744017 - DNA, 25 bp, Homo sapien
tgtcagcagctggacccatttactc

SEQ ID NO: 1744018 - DNA, 25 bp, Homo sapien
agcagctggacccatttactcacag

SEQ ID NO: 1744019 - DNA, 25 bp, Homo sapien
gtaagcaggagacagtgctgtcagc

SEQ ID NO: 1744020 - DNA, 25 bp, Homo sapien
ctgtaagcaggagacagtgctgtca

SEQ ID NO: 1744021 - DNA, 25 bp, Homo sapien
caccgctggctgttatatgaagtag

SEQ ID NO: 1744022 - DNA, 25 bp, Homo sapien
tatgaagtagagaagccattacctc

SEQ ID NO: 1744023 - DNA, 25 bp, Homo sapien
tacctcctgtgtacgttgtctccag

SEQ ID NO: 1744024 - DNA, 25 bp, Homo sapien
tttgcaagcagagagatagaggttt

SEQ ID NO: 1744025 - DNA, 25 bp, Homo sapien
tcagagggcaatgcgagagccaaat

SEQ ID NO: 1744026 - DNA, 25 bp, Homo sapien
ctgaggaaggttttcagagggcaat

SEQ ID NO: 1744027 - DNA, 25 bp, Homo sapien
gttttcagagggcaatgcgagagcc

SEQ ID NO: 1744028 - DNA, 25 bp, Homo sapien
aaggttttcagagggcaatgcgaga

SEQ ID NO: 1744029 - DNA, 25 bp, Homo sapien
ctatgtatagaataatgacatcagc

SEQ ID NO: 1744030 - DNA, 25 bp, Homo sapien
tatgtatagaataatgacatcagca

SEQ ID NO: 1744031 - DNA, 25 bp, Homo sapien
tccgaagaagttttgctagtcgtac

SEQ ID NO: 1744032 - DNA, 25 bp, Homo sapien
cgtaaggtttaaattctcgttgatg

SEQ ID NO: 1744033 - DNA, 25 bp, Homo sapien
tgctagtcgtaccacgtaaggttta

SEQ ID NO: 1744034 - DNA, 25 bp, Homo sapien
cgttgatgtataccctgccttctga

SEQ ID NO: 1744035 - DNA, 25 bp, Homo sapien
gaccttgtttaaggtgatttggatg

SEQ ID NO: 1744036 - DNA, 25 bp, Homo sapien
tgggaagatgcctttcaatcaaaat

SEQ ID NO: 1744037 - DNA, 25 bp, Homo sapien
gatgcctttcaatcaaaatagtttt

SEQ ID NO: 1744038 - DNA, 25 bp, Homo sapien
tgaagaccttgtttaaggtgatttg

SEQ ID NO: 1744039 - DNA, 25 bp, Homo sapien
tgatgcttggccatctccaatccct

SEQ ID NO: 1744040 - DNA, 25 bp, Homo sapien
tcactgtcttaaagtcctcctcctt

SEQ ID NO: 1744041 - DNA, 25 bp, Homo sapien
gcttggccatctccaatccctccaa

SEQ ID NO: 1744042 - DNA, 25 bp, Homo sapien
caatccctccaaaatcactgtctta

SEQ ID NO: 1744043 - DNA, 25 bp, Homo sapien
tggagtttgccttctaagatcagat

SEQ ID NO: 1744044 - DNA, 25 bp, Homo sapien
tcctagtgggtcaagcagatgcaaa

SEQ ID NO: 1744045 - DNA, 25 bp, Homo sapien
tattaagaggctagtttgagaagcc

SEQ ID NO: 1744046 - DNA, 25 bp, Homo sapien
gaaggtatgtgaaaactctgtcaac

SEQ ID NO: 1744047 - DNA, 25 bp, Homo sapien
tgctggctctgccatacttacggca

SEQ ID NO: 1744048 - DNA, 25 bp, Homo sapien
tctgccatacttacggcacccttgg

SEQ ID NO: 1744049 - DNA, 25 bp, Homo sapien
gagtcaaaggaattgagttagtgtg

SEQ ID NO: 1744050 - DNA, 25 bp, Homo sapien
aaggaattgagttagtgtgctggct

SEQ ID NO: 1744051 - DNA, 25 bp, Homo sapien
tgagcacattgaagaacggcaggag

SEQ ID NO: 1744052 - DNA, 25 bp, Homo sapien
gctgttgaagacttgactgagcaca

SEQ ID NO: 1744053 - DNA, 25 bp, Homo sapien
agctgctccatactgcgcacggtgc

SEQ ID NO: 1744054 - DNA, 25 bp, Homo sapien
catttgagtagaggataggactccc

SEQ ID NO: 1744055 - DNA, 25 bp, Homo sapien
cctctgatggagaaggaacaccatt

SEQ ID NO: 1744056 - DNA, 25 bp, Homo sapien
gactaatgccatcaggaactcagag

SEQ ID NO: 1744057 - DNA, 25 bp, Homo sapien
tacttttaaggatgcatggtccagc

SEQ ID NO: 1744058 - DNA, 25 bp, Homo sapien
taatacgtttcccagcctctgatgg

SEQ ID NO: 1744059 - DNA, 25 bp, Homo sapien
caagatgatgttttgcagcattccc

SEQ ID NO: 1744060 - DNA, 25 bp, Homo sapien
tgtttacaatgcagcctactggatt

SEQ ID NO: 1744061 - DNA, 25 bp, Homo sapien
ccttgcacatgaagtgagcttggca

SEQ ID NO: 1744062 - DNA, 25 bp, Homo sapien
ggaacaattcatgcaggctactgga

SEQ ID NO: 1744063 - DNA, 25 bp, Homo sapien
cttatttagaagaatttggtctgtt

SEQ ID NO: 1744064 - DNA, 25 bp, Homo sapien
attttttcagttgtggaatgatagc

SEQ ID NO: 1744065 - DNA, 25 bp, Homo sapien
gcaacagaggcattagtacttactt

SEQ ID NO: 1744066 - DNA, 25 bp, Homo sapien
tcagttgtggaatgatagctatttt

SEQ ID NO: 1744067 - DNA, 25 bp, Homo sapien
tactgttaggccaattgtggattaa

SEQ ID NO: 1744068 - DNA, 25 bp, Homo sapien
gctgaatagggaatcaggaggagac

SEQ ID NO: 1744069 - DNA, 25 bp, Homo sapien
gtgcgctgaatagggaatcaggagg

SEQ ID NO: 1744070 - DNA, 25 bp, Homo sapien
aatagggaatcaggaggagacattt

SEQ ID NO: 1744071 - DNA, 25 bp, Homo sapien
tgaatagggaatcaggaggagacat

SEQ ID NO: 1744072 - DNA, 25 bp, Homo sapien
ctggatttttattatttggcctctt

SEQ ID NO: 1744073 - DNA, 25 bp, Homo sapien
ttttattatttggcctcttcacata

SEQ ID NO: 1744074 - DNA, 25 bp, Homo sapien
ggatttttattatttggcctcttca

SEQ ID NO: 1744075 - DNA, 25 bp, Homo sapien
ttattatttggcctcttcacatact

SEQ ID NO: 1744076 - DNA, 25 bp, Homo sapien
tcctttaaatgacagccttactctg

SEQ ID NO: 1744077 - DNA, 25 bp, Homo sapien
ctttaaatgacagccttactctgtg

SEQ ID NO: 1744078 - DNA, 25 bp, Homo sapien
tttcctttaaatgacagccttactc

SEQ ID NO: 1744079 - DNA, 25 bp, Homo sapien
atatttcctttaaatgacagcctta

SEQ ID NO: 1744080 - DNA, 25 bp, Homo sapien
gacaattggaggtactaaagccaca

SEQ ID NO: 1744081 - DNA, 25 bp, Homo sapien
taattaccctgaccttggagaaaga

SEQ ID NO: 1744082 - DNA, 25 bp, Homo sapien
tgtcgtccgagtatatgcagaagca

SEQ ID NO: 1744083 - DNA, 25 bp, Homo sapien
tgtccggccctctggtacagaagat

SEQ ID NO: 1744084 - DNA, 25 bp, Homo sapien
gtgcccttattctgctccacttgtg

SEQ ID NO: 1744085 - DNA, 25 bp, Homo sapien
cacttgtgccctagtcagtttatgg

SEQ ID NO: 1744086 - DNA, 25 bp, Homo sapien
cttggagttccgagtcatagtgaga

SEQ ID NO: 1744087 - DNA, 25 bp, Homo sapien
cagtttatggatagtggatgcacag

SEQ ID NO: 1744088 - DNA, 25 bp, Homo sapien
cgcagttcctcaggcgccagctgcg

SEQ ID NO: 1744089 - DNA, 25 bp, Homo sapien
tcactcaatggtaacagccccagac

SEQ ID NO: 1744090 - DNA, 25 bp, Homo sapien
tttctggtcactcaatggtaacagc

SEQ ID NO: 1744091 - DNA, 25 bp, Homo sapien
agctgcgcgcgacctgcggcgaggc

SEQ ID NO: 1744092 - DNA, 25 bp, Homo sapien
tgctctgagggcccgcgaccctcgg

SEQ ID NO: 1744093 - DNA, 25 bp, Homo sapien
cccagaggcccggatttggaggcgg

SEQ ID NO: 1744094 - DNA, 25 bp, Homo sapien
cctccgcggccgcagtgctctgagg

SEQ ID NO: 1744095 - DNA, 25 bp, Homo sapien
cagaggcccggatttggaggcggag

SEQ ID NO: 1744096 - DNA, 25 bp, Homo sapien
tcgacgtcggagagggggatgcggg

SEQ ID NO: 1744097 - DNA, 25 bp, Homo sapien
tgtccgaggcccagcgacggggctg

SEQ ID NO: 1744098 - DNA, 25 bp, Homo sapien
cgctcactgtgggcgaggtcgccct

SEQ ID NO: 1744099 - DNA, 25 bp, Homo sapien
cactgtgggcgaggtcgccctgtcc

SEQ ID NO: 1744100 - DNA, 25 bp, Homo sapien
acaaaccagacacttgcactcttct

SEQ ID NO: 1744101 - DNA, 25 bp, Homo sapien
gactccaaaatctagtatgcacaac

SEQ ID NO: 1744102 - DNA, 25 bp, Homo sapien
aacccatattctgcgtacccgggct

SEQ ID NO: 1744103 - DNA, 25 bp, Homo sapien
gtgtttggaactgtcccgctgcagg

SEQ ID NO: 1744104 - DNA, 25 bp, Homo sapien
tccctttacgtggaagcaattctgc

SEQ ID NO: 1744105 - DNA, 25 bp, Homo sapien
tctgcaggaacgctttgcaccgaga

SEQ ID NO: 1744106 - DNA, 25 bp, Homo sapien
cagggacgctgggtttgtcaatgcc

SEQ ID NO: 1744107 - DNA, 25 bp, Homo sapien
tatccagcgaaatttcccgaaggtc

SEQ ID NO: 1744108 - DNA, 25 bp, Homo sapien
tattcgtcagggcatttacatcttc

SEQ ID NO: 1744109 - DNA, 25 bp, Homo sapien
gaaggctttctttcaccgaagcaga

SEQ ID NO: 1744110 - DNA, 25 bp, Homo sapien
cttgggctcttcaatctggagtgta

SEQ ID NO: 1744111 - DNA, 25 bp, Homo sapien
tctccttggttaggaaacatagaaa

SEQ ID NO: 1744112 - DNA, 25 bp, Homo sapien
tggttctcaaatgcccagtccacgt

SEQ ID NO: 1744113 - DNA, 25 bp, Homo sapien
catgtgaaaggtagtccaactggat

SEQ ID NO: 1744114 - DNA, 25 bp, Homo sapien
tggcataagactgcaagatagcgtc

SEQ ID NO: 1744115 - DNA, 25 bp, Homo sapien
agatagcgtcaataaaaactccagg

SEQ ID NO: 1744116 - DNA, 25 bp, Homo sapien
gaagtgtgtaaccagcgggacagaa

SEQ ID NO: 1744117 - DNA, 25 bp, Homo sapien
gttccattgaagtgtgtaaccagcg

SEQ ID NO: 1744118 - DNA, 25 bp, Homo sapien
tgtaaccagcgggacagaatccagt

SEQ ID NO: 1744119 - DNA, 25 bp, Homo sapien
gacagaatccagtctggagaaccag

SEQ ID NO: 1744120 - DNA, 25 bp, Homo sapien
cagatgaccgtccaaacagctgcaa

SEQ ID NO: 1744121 - DNA, 25 bp, Homo sapien
taattgtgtgccagaactcctcaca

SEQ ID NO: 1744122 - DNA, 25 bp, Homo sapien
tggattgctgcacatacacagagct

SEQ ID NO: 1744123 - DNA, 25 bp, Homo sapien
gactgtagatccacattcggaggaa

SEQ ID NO: 1744124 - DNA, 25 bp, Homo sapien
accaaatagtatctgaaaaacatgc

SEQ ID NO: 1744125 - DNA, 25 bp, Homo sapien
ccaaatagtatctgaaaaacatgct

SEQ ID NO: 1744126 - DNA, 25 bp, Homo sapien
cagttgaaattcgttaccaggtgaa

SEQ ID NO: 1744127 - DNA, 25 bp, Homo sapien
tttgcactgaggatgctacacagcc

SEQ ID NO: 1744128 - DNA, 25 bp, Homo sapien
caggcataggcctcttaatcgcttt

SEQ ID NO: 1744129 - DNA, 25 bp, Homo sapien
tagagataacatcacaattgcaatg

SEQ ID NO: 1744130 - DNA, 25 bp, Homo sapien
tgaaacaggcgaatactttgtagac

SEQ ID NO: 1744131 - DNA, 25 bp, Homo sapien
tgatgcagatatccacactggtccc

SEQ ID NO: 1744132 - DNA, 25 bp, Homo sapien
aattttcagaggagatggcagtaac

SEQ ID NO: 1744133 - DNA, 25 bp, Homo sapien
tgtgtgtcatcttttaactcgtggg

SEQ ID NO: 1744134 - DNA, 25 bp, Homo sapien
tctaacacctccttgggatagggcc

SEQ ID NO: 1744135 - DNA, 25 bp, Homo sapien
agaatggaatgcctcccgggaaagg

SEQ ID NO: 1744136 - DNA, 25 bp, Homo sapien
tgtagcccaaggacacgtctgcatc

SEQ ID NO: 1744137 - DNA, 25 bp, Homo sapien
tcagaagttctgtaggctccccagc

SEQ ID NO: 1744138 - DNA, 25 bp, Homo sapien
gttgaagatctgagttgtgccctga

SEQ ID NO: 1744139 - DNA, 25 bp, Homo sapien
tacagcgagccatgggttgaagatc

SEQ ID NO: 1744140 - DNA, 25 bp, Homo sapien
cgagccatgggttgaagatctgagt

SEQ ID NO: 1744141 - DNA, 25 bp, Homo sapien
gatctgagttgtgccctgagaggac

SEQ ID NO: 1744142 - DNA, 25 bp, Homo sapien
tataggcaaagtgtcaggctccagc

SEQ ID NO: 1744143 - DNA, 25 bp, Homo sapien
tgtgcaaacaaccagcagactccta

SEQ ID NO: 1744144 - DNA, 25 bp, Homo sapien
cactagaggtttaagcagcaagagc

SEQ ID NO: 1744145 - DNA, 25 bp, Homo sapien
caaccaaggctaggatggaaacatg

SEQ ID NO: 1744146 - DNA, 25 bp, Homo sapien
gacctgatttgttgtgcagtttagc

SEQ ID NO: 1744147 - DNA, 25 bp, Homo sapien
cacaaatcaactgaagtatggtaat

SEQ ID NO: 1744148 - DNA, 25 bp, Homo sapien
tacttacacgagtacaggtcacccc

SEQ ID NO: 1744149 - DNA, 25 bp, Homo sapien
tagaatgtaaaagcagatatggtct

SEQ ID NO: 1744150 - DNA, 25 bp, Homo sapien
tttgtcctatcttaacattgctgtt

SEQ ID NO: 1744151 - DNA, 25 bp, Homo sapien
tttttgtcctatcttaacattgctg

SEQ ID NO: 1744152 - DNA, 25 bp, Homo sapien
ttgtcctatcttaacattgctgtta

SEQ ID NO: 1744153 - DNA, 25 bp, Homo sapien
ttttgtcctatcttaacattgctgt

SEQ ID NO: 1744154 - DNA, 25 bp, Homo sapien
cagacccacagtgcatatcatactg

SEQ ID NO: 1744155 - DNA, 25 bp, Homo sapien
gacaaaaaccgtgtgattatcttaa

SEQ ID NO: 1744156 - DNA, 25 bp, Homo sapien
ttaatagaagcagaacaggccttcg

SEQ ID NO: 1744157 - DNA, 25 bp, Homo sapien
gcattcaagtcggtttcatccctgg

SEQ ID NO: 1744158 - DNA, 25 bp, Homo sapien
tgacatattcccacgtttctctgaa

SEQ ID NO: 1744159 - DNA, 25 bp, Homo sapien
cagaagcttaaattcacccaaggcc

SEQ ID NO: 1744160 - DNA, 25 bp, Homo sapien
taagaatttgtaatgtaccaggtac

SEQ ID NO: 1744161 - DNA, 25 bp, Homo sapien
tgtgtgccaaatgctatactaggtg

SEQ ID NO: 1744162 - DNA, 25 bp, Homo sapien
gcagctgtctgttgaatgggaggag

SEQ ID NO: 1744163 - DNA, 25 bp, Homo sapien
atgcacgagaagatgcagctgtctg

SEQ ID NO: 1744164 - DNA, 25 bp, Homo sapien
ctggcaatgcacgagaagatgcagc

SEQ ID NO: 1744165 - DNA, 25 bp, Homo sapien
aagatgcagctgtctgttgaatggg

SEQ ID NO: 1744166 - DNA, 25 bp, Homo sapien
gaccaggcagccaatacaaccaaat

SEQ ID NO: 1744167 - DNA, 25 bp, Homo sapien
aggcagccaatacaaccaaatctgt

SEQ ID NO: 1744168 - DNA, 25 bp, Homo sapien
cagccaatacaaccaaatctgttga

SEQ ID NO: 1744169 - DNA, 25 bp, Homo sapien
ctggtgaccaggcagccaatacaac

SEQ ID NO: 1744170 - DNA, 25 bp, Homo sapien
tttgccatgggcagaattatactgg

SEQ ID NO: 1744171 - DNA, 25 bp, Homo sapien
gaagatgcagctgttgttctcagcc

SEQ ID NO: 1744172 - DNA, 25 bp, Homo sapien
ctggaacatgtagacagtgttgttg

SEQ ID NO: 1744173 - DNA, 25 bp, Homo sapien
caatgcacgagaagatgcagctgtt

SEQ ID NO: 1744174 - DNA, 25 bp, Homo sapien
gaccaggcagccaatacaaccaaat

SEQ ID NO: 1744175 - DNA, 25 bp, Homo sapien
aggcagccaatacaaccaaatctgt

SEQ ID NO: 1744176 - DNA, 25 bp, Homo sapien
cagccaatacaaccaaatctgttga

SEQ ID NO: 1744177 - DNA, 25 bp, Homo sapien
ctggtgaccaggcagccaatacaac

SEQ ID NO: 1744178 - DNA, 25 bp, Homo sapien
gggtcattgatggcgacaatatcga

SEQ ID NO: 1744179 - DNA, 25 bp, Homo sapien
ctggaacatgtagacagtgttgttg

SEQ ID NO: 1744180 - DNA, 25 bp, Homo sapien
agtgttgttgaggtcaatgaagggg

SEQ ID NO: 1744181 - DNA, 25 bp, Homo sapien
tgaaggggtcattgatggcgacaat

SEQ ID NO: 1744182 - DNA, 25 bp, Homo sapien
agtgatgagatttccattgataaca

SEQ ID NO: 1744183 - DNA, 25 bp, Homo sapien
tcttgcccctggaaaatagtgatga

SEQ ID NO: 1744184 - DNA, 25 bp, Homo sapien
gatcttgcccctggaaaatagtgat

SEQ ID NO: 1744185 - DNA, 25 bp, Homo sapien
ttgcccctggaaaatagtgatgaga

SEQ ID NO: 1744186 - DNA, 25 bp, Homo sapien
gctggtgaactccatgatgtactca

SEQ ID NO: 1744187 - DNA, 25 bp, Homo sapien
gttgtcatatttctcatggttcaca

SEQ ID NO: 1744188 - DNA, 25 bp, Homo sapien
ctgttgtcatatttctcatggttca

SEQ ID NO: 1744189 - DNA, 25 bp, Homo sapien
ttgtcatatttctcatggttcacac

SEQ ID NO: 1744190 - DNA, 25 bp, Homo sapien
tgttgtcatatttctcatggttcac

SEQ ID NO: 1744191 - DNA, 25 bp, Homo sapien
tggtgcaggaggcattgctgataat

SEQ ID NO: 1744192 - DNA, 25 bp, Homo sapien
tggtggtgcaggaggcattgctgat

SEQ ID NO: 1744193 - DNA, 25 bp, Homo sapien
ggtggtgcaggaggcattgctgata

SEQ ID NO: 1744194 - DNA, 25 bp, Homo sapien
ctggtggtgcaggaggcattgctga

SEQ ID NO: 1744195 - DNA, 25 bp, Homo sapien
cggtaccaaagttgtcatggatgac

SEQ ID NO: 1744196 - DNA, 25 bp, Homo sapien
ttccacggtaccaaagttgtcatgg

SEQ ID NO: 1744197 - DNA, 25 bp, Homo sapien
cttccacggtaccaaagttgtcatg

SEQ ID NO: 1744198 - DNA, 25 bp, Homo sapien
cacggtaccaaagttgtcatggatg

SEQ ID NO: 1744199 - DNA, 25 bp, Homo sapien
tttcccataggagccatccatagtc

SEQ ID NO: 1744200 - DNA, 25 bp, Homo sapien
tcccataggagccatccatagtctt

SEQ ID NO: 1744201 - DNA, 25 bp, Homo sapien
gccgtcaccccacagtttcccatag

SEQ ID NO: 1744202 - DNA, 25 bp, Homo sapien
gtcaccccacagtttcccataggag

SEQ ID NO: 1744203 - DNA, 25 bp, Homo sapien
gtgggtgtctgttgaagttggagga

SEQ ID NO: 1744204 - DNA, 25 bp, Homo sapien
tgtctgttgaagttggaggagacca

SEQ ID NO: 1744205 - DNA, 25 bp, Homo sapien
gtgtctgttgaagttggaggagacc

SEQ ID NO: 1744206 - DNA, 25 bp, Homo sapien
agagtgggtgtctgttgaagttgga

SEQ ID NO: 1744207 - DNA, 25 bp, Homo sapien
accctgttgctgcagccaaattcat

SEQ ID NO: 1744208 - DNA, 25 bp, Homo sapien
ctgtgggcagaggtccaccaccctg

SEQ ID NO: 1744209 - DNA, 25 bp, Homo sapien
cctgttgctgcagccaaattcattg

SEQ ID NO: 1744210 - DNA, 25 bp, Homo sapien
caccaccctgttgctgcagccaaat

SEQ ID NO: 1744211 - DNA, 25 bp, Homo sapien
acatgaaaaggtggggctccctcgg

SEQ ID NO: 1744212 - DNA, 25 bp, Homo sapien
ggccgctctcttcccgtcgtgctgt

SEQ ID NO: 1744213 - DNA, 25 bp, Homo sapien
ctcttcccgtcgtgctgtcgctggg

SEQ ID NO: 1744214 - DNA, 25 bp, Homo sapien
cgctctcttcccgtcgtgctgtcgc

SEQ ID NO: 1744215 - DNA, 25 bp, Homo sapien
ttccagacctgggtaaaatggcagg

SEQ ID NO: 1744216 - DNA, 25 bp, Homo sapien
tagtatagtgcctgtcttccagacc

SEQ ID NO: 1744217 - DNA, 25 bp, Homo sapien
tgctccatcccgacattgtactagg

SEQ ID NO: 1744218 - DNA, 25 bp, Homo sapien
taaaatttattaaggccctgctcca

SEQ ID NO: 1744219 - DNA, 25 bp, Homo sapien
gccaaagacatcctaccacctctgc

SEQ ID NO: 1744220 - DNA, 25 bp, Homo sapien
ggccaaagacatcctaccacctctg

SEQ ID NO: 1744221 - DNA, 25 bp, Homo sapien
ccaaagacatcctaccacctctgcc

SEQ ID NO: 1744222 - DNA, 25 bp, Homo sapien
ccctttgcaatggtagaaaacacta

SEQ ID NO: 1744223 - DNA, 25 bp, Homo sapien
tcctggcatgacaagacctagttgg

SEQ ID NO: 1744224 - DNA, 25 bp, Homo sapien
tcatggcaatgaaggaaaagtaccc

SEQ ID NO: 1744225 - DNA, 25 bp, Homo sapien
tagagttgcctctgcaacgtgagaa

SEQ ID NO: 1744226 - DNA, 25 bp, Homo sapien
tcaacaaggtaaacccgcaggccca

SEQ ID NO: 1744227 - DNA, 25 bp, Homo sapien
ggacgcctaatcgggtccgtatcca

SEQ ID NO: 1744228 - DNA, 25 bp, Homo sapien
ggccctcttgcaggtccccgcacca

SEQ ID NO: 1744229 - DNA, 25 bp, Homo sapien
ggcccctctctatcagggtcagggc

SEQ ID NO: 1744230 - DNA, 25 bp, Homo sapien
ttaaaaacatccgtaatgttctcca

SEQ ID NO: 1744231 - DNA, 25 bp, Homo sapien
aaaacatccgtaatgttctccacat

SEQ ID NO: 1744232 - DNA, 25 bp, Homo sapien
taaaaacatccgtaatgttctccac

SEQ ID NO: 1744233 - DNA, 25 bp, Homo sapien
aaaaacatccgtaatgttctccaca

SEQ ID NO: 1744234 - DNA, 25 bp, Homo sapien
taatgctagaattacgttgtctaac

SEQ ID NO: 1744235 - DNA, 25 bp, Homo sapien
cagaaaccaagtcattgctggcgta

SEQ ID NO: 1744236 - DNA, 25 bp, Homo sapien
ttactgatgtttatgccatctgcca

SEQ ID NO: 1744237 - DNA, 25 bp, Homo sapien
tgcaatcatcttcgacatcaccaga

SEQ ID NO: 1744238 - DNA, 25 bp, Homo sapien
tccactaagttttgctgatacagac

SEQ ID NO: 1744239 - DNA, 25 bp, Homo sapien
tacagacatatctgttatgtgttcc

SEQ ID NO: 1744240 - DNA, 25 bp, Homo sapien
cccagctgtacccatgaggccatgc

SEQ ID NO: 1744241 - DNA, 25 bp, Homo sapien
gtaaatcttgatctattccccagct

SEQ ID NO: 1744242 - DNA, 25 bp, Homo sapien
ttttgccattcggaagtggctggtg

SEQ ID NO: 1744243 - DNA, 25 bp, Homo sapien
tgagaaatgagttcctgcagacact

SEQ ID NO: 1744244 - DNA, 25 bp, Homo sapien
tgttttccattttgccattcggaag

SEQ ID NO: 1744245 - DNA, 25 bp, Homo sapien
tttccattttgccattcggaagtgg

SEQ ID NO: 1744246 - DNA, 25 bp, Homo sapien
aatgaaaatgacttagggttacagc

SEQ ID NO: 1744247 - DNA, 25 bp, Homo sapien
gggagtggtaatgaatttacattca

SEQ ID NO: 1744248 - DNA, 25 bp, Homo sapien
cattcattaaggttaatctctgtaa

SEQ ID NO: 1744249 - DNA, 25 bp, Homo sapien
cattaaggttaatctctgtaacttg

SEQ ID NO: 1744250 - DNA, 25 bp, Homo sapien
tgtcacacaggtatgatgcaagtct

SEQ ID NO: 1744251 - DNA, 25 bp, Homo sapien
tgaagattatgcttaaccaagggtt

SEQ ID NO: 1744252 - DNA, 25 bp, Homo sapien
agggtttacttagtgcaatgatgaa

SEQ ID NO: 1744253 - DNA, 25 bp, Homo sapien
ccttggcaattgatgcgatcctggc

SEQ ID NO: 1744254 - DNA, 25 bp, Homo sapien
gtcacaagggtgacgtgattgatga

SEQ ID NO: 1744255 - DNA, 25 bp, Homo sapien
ctgctcgtggtgtcacaagggtgac

SEQ ID NO: 1744256 - DNA, 25 bp, Homo sapien
ggtgtcacaagggtgacgtgattga

SEQ ID NO: 1744257 - DNA, 25 bp, Homo sapien
cctgctcgtggtgtcacaagggtga

SEQ ID NO: 1744258 - DNA, 25 bp, Homo sapien
ctgcacacgaggatggggacctcag

SEQ ID NO: 1744259 - DNA, 25 bp, Homo sapien
gcacacgaggatggggacctcaggc

SEQ ID NO: 1744260 - DNA, 25 bp, Homo sapien
tgcacacgaggatggggacctcagg

SEQ ID NO: 1744261 - DNA, 25 bp, Homo sapien
tctagaagaacggagggcgtctccc

SEQ ID NO: 1744262 - DNA, 25 bp, Homo sapien
caccggggacctagcttctctggat

SEQ ID NO: 1744263 - DNA, 25 bp, Homo sapien
ccccaggcatctagaagaacggagg

SEQ ID NO: 1744264 - DNA, 25 bp, Homo sapien
tctctggatgcacaagcctcagggt

SEQ ID NO: 1744265 - DNA, 25 bp, Homo sapien
tgccaggcttgtttggtccccgagg

SEQ ID NO: 1744266 - DNA, 25 bp, Homo sapien
acagcacccagagctcgccactgag

SEQ ID NO: 1744267 - DNA, 25 bp, Homo sapien
tttggtccccgagggcactgtcagc

SEQ ID NO: 1744268 - DNA, 25 bp, Homo sapien
ctgagatcagagctcccgaggaggc

SEQ ID NO: 1744269 - DNA, 25 bp, Homo sapien
gtaaaccatgatcatggcactgaac

SEQ ID NO: 1744270 - DNA, 25 bp, Homo sapien
cagtaaaccatgatcatggcactga

SEQ ID NO: 1744271 - DNA, 25 bp, Homo sapien
aaaccatgatcatggcactgaactc

SEQ ID NO: 1744272 - DNA, 25 bp, Homo sapien
cagctactcagcaggatcgcttgaa

SEQ ID NO: 1744273 - DNA, 25 bp, Homo sapien
catcaatgagggtccacccaggggt

SEQ ID NO: 1744274 - DNA, 25 bp, Homo sapien
atccatcaatgagggtccacccagg

SEQ ID NO: 1744275 - DNA, 25 bp, Homo sapien
gtgccacataaaatcccattccatt

SEQ ID NO: 1744276 - DNA, 25 bp, Homo sapien
agatccatcaatgagggtccaccca

SEQ ID NO: 1744277 - DNA, 25 bp, Homo sapien
agtcctttcactgacaatccggggt

SEQ ID NO: 1744278 - DNA, 25 bp, Homo sapien
ctttcactgacaatccggggtacct

SEQ ID NO: 1744279 - DNA, 25 bp, Homo sapien
tcctttcactgacaatccggggtac

SEQ ID NO: 1744280 - DNA, 25 bp, Homo sapien
gaaagtcctttcactgacaatccgg

SEQ ID NO: 1744281 - DNA, 25 bp, Homo sapien
cttagcatctgcctcaaatgcgggg

SEQ ID NO: 1744282 - DNA, 25 bp, Homo sapien
ggtgccctgagtagaccgcaatgat

SEQ ID NO: 1744283 - DNA, 25 bp, Homo sapien
catcgttcccgtgaatccagaggca

SEQ ID NO: 1744284 - DNA, 25 bp, Homo sapien
taaggttcgggtgccattctcaaag

SEQ ID NO: 1744285 - DNA, 25 bp, Homo sapien
gatcattggattcgtcggacacact

SEQ ID NO: 1744286 - DNA, 25 bp, Homo sapien
tgatttagatgatacaccgccctgt

SEQ ID NO: 1744287 - DNA, 25 bp, Homo sapien
tctcactacggtaagcagagctggt

SEQ ID NO: 1744288 - DNA, 25 bp, Homo sapien
gattcttcttagagtaggaccctga

SEQ ID NO: 1744289 - DNA, 25 bp, Homo sapien
tataaacattgagggcatgagctga

SEQ ID NO: 1744290 - DNA, 25 bp, Homo sapien
tctgggtattagattgctctgaaga

SEQ ID NO: 1744291 - DNA, 25 bp, Homo sapien
agatccccggattgcttagctagct

SEQ ID NO: 1744292 - DNA, 25 bp, Homo sapien
agtactctgggtattagattgctct

SEQ ID NO: 1744293 - DNA, 25 bp, Homo sapien
cccggattgcttagctagctgagaa

SEQ ID NO: 1744294 - DNA, 25 bp, Homo sapien
tggtccaagtctagcttggaagctt

SEQ ID NO: 1744295 - DNA, 25 bp, Homo sapien
gctggtccaagtctagcttggaagc

SEQ ID NO: 1744296 - DNA, 25 bp, Homo sapien
ggtccaagtctagcttggaagcttt

SEQ ID NO: 1744297 - DNA, 25 bp, Homo sapien
ccaagtctagcttggaagctttgtt

SEQ ID NO: 1744298 - DNA, 25 bp, Homo sapien
ccaccctttgatactaaattcatct

SEQ ID NO: 1744299 - DNA, 25 bp, Homo sapien
cctttgatactaaattcatctccag

SEQ ID NO: 1744300 - DNA, 25 bp, Homo sapien
tttgatactaaattcatctccagac

SEQ ID NO: 1744301 - DNA, 25 bp, Homo sapien
tgatactaaattcatctccagacac

SEQ ID NO: 1744302 - DNA, 25 bp, Homo sapien
tgcactgaaaagtaaagggtctgtt

SEQ ID NO: 1744303 - DNA, 25 bp, Homo sapien
gacaggttttgcatctaaattgacc

SEQ ID NO: 1744304 - DNA, 25 bp, Homo sapien
catgaaaatgcggttagagaggtgc

SEQ ID NO: 1744305 - DNA, 25 bp, Homo sapien
caagtgattctgaaggcaccccaag

SEQ ID NO: 1744306 - DNA, 25 bp, Homo sapien
gacattccatgatgcgtacatgagg

SEQ ID NO: 1744307 - DNA, 25 bp, Homo sapien
tgagtacctcctgtacattgaagca

SEQ ID NO: 1744308 - DNA, 25 bp, Homo sapien
cactaaaccttgacatgtaggtaca

SEQ ID NO: 1744309 - DNA, 25 bp, Homo sapien
gaaagcttaacccacattgagtacc

SEQ ID NO: 1744310 - DNA, 25 bp, Homo sapien
catttgtcaaggctcatggttttct

SEQ ID NO: 1744311 - DNA, 25 bp, Homo sapien
taactttcagtgcatgacctaacaa

SEQ ID NO: 1744312 - DNA, 25 bp, Homo sapien
ccactgcctcgccagcaaaggtgga

SEQ ID NO: 1744313 - DNA, 25 bp, Homo sapien
cagtggatgcatttgcagcaccatc

SEQ ID NO: 1744314 - DNA, 25 bp, Homo sapien
cactgctgacctcttatctggtgag

SEQ ID NO: 1744315 - DNA, 25 bp, Homo sapien
ctgctgacctcttatctggtgagtg

SEQ ID NO: 1744316 - DNA, 25 bp, Homo sapien
tcactgctgacctcttatctggtga

SEQ ID NO: 1744317 - DNA, 25 bp, Homo sapien
tcctctccaccacaaggggcctctc

SEQ ID NO: 1744318 - DNA, 25 bp, Homo sapien
gtagaaagtagacatccctttggat

SEQ ID NO: 1744319 - DNA, 25 bp, Homo sapien
agaaagtagacatccctttggatgt

SEQ ID NO: 1744320 - DNA, 25 bp, Homo sapien
gtgtctcaaacattgcacaaggcat

SEQ ID NO: 1744321 - DNA, 25 bp, Homo sapien
tgtgtctcaaacattgcacaaggca

SEQ ID NO: 1744322 - DNA, 25 bp, Homo sapien
cctaaggattgacaatatttggcac

SEQ ID NO: 1744323 - DNA, 25 bp, Homo sapien
aagtaatagtggtgcatggccctag

SEQ ID NO: 1744324 - DNA, 25 bp, Homo sapien
caatatttggcacacgggcagcttc

SEQ ID NO: 1744325 - DNA, 25 bp, Homo sapien
catggttggaaattttgctggctct

SEQ ID NO: 1744326 - DNA, 25 bp, Homo sapien
taagagggacgttgccatacagaaa

SEQ ID NO: 1744327 - DNA, 25 bp, Homo sapien
gctgcctgtctggtgaacatgctca

SEQ ID NO: 1744328 - DNA, 25 bp, Homo sapien
tatcctacagttgtgaagctgcctg

SEQ ID NO: 1744329 - DNA, 25 bp, Homo sapien
cagagagtgagttttcgatggaatg

SEQ ID NO: 1744330 - DNA, 25 bp, Homo sapien
ctgacatctgcttgagagatgatag

SEQ ID NO: 1744331 - DNA, 25 bp, Homo sapien
tctgcttgagagatgatagtttatt

SEQ ID NO: 1744332 - DNA, 25 bp, Homo sapien
gctgctctgggcttatctctgacat

SEQ ID NO: 1744333 - DNA, 25 bp, Homo sapien
tgctctgggcttatctctgacatct

SEQ ID NO: 1744334 - DNA, 25 bp, Homo sapien
ttctgtgacattctcgaagatgctc

SEQ ID NO: 1744335 - DNA, 25 bp, Homo sapien
tacatgtgtaatgggcccaacgtgt

SEQ ID NO: 1744336 - DNA, 25 bp, Homo sapien
tgacattctcgaagatgctcagtgt

SEQ ID NO: 1744337 - DNA, 25 bp, Homo sapien
tgggcccaacgtgtgtgattctgtg

SEQ ID NO: 1744338 - DNA, 25 bp, Homo sapien
tactcatgaagtaatgggccccaag

SEQ ID NO: 1744339 - DNA, 25 bp, Homo sapien
tctgcggattaaagccggaccgtct

SEQ ID NO: 1744340 - DNA, 25 bp, Homo sapien
tctgctgtagcaagagcggtctgca

SEQ ID NO: 1744341 - DNA, 25 bp, Homo sapien
cggtagacgcgaccacagaagatgt

SEQ ID NO: 1744342 - DNA, 25 bp, Homo sapien
agcgctagagagacgcggcggcgct

SEQ ID NO: 1744343 - DNA, 25 bp, Homo sapien
ctgactcgtcggaggagccacagct

SEQ ID NO: 1744344 - DNA, 25 bp, Homo sapien
cggcggcgctggcagaagaggcggc

SEQ ID NO: 1744345 - DNA, 25 bp, Homo sapien
ggacgcagctcggagcgctagagag

SEQ ID NO: 1744346 - DNA, 25 bp, Homo sapien
ttgtaactgagacaagcggaggagc

SEQ ID NO: 1744347 - DNA, 25 bp, Homo sapien
tttaaaatcgccctgctcatctggg

SEQ ID NO: 1744348 - DNA, 25 bp, Homo sapien
agctgaagacgcacaggtgacggtc

SEQ ID NO: 1744349 - DNA, 25 bp, Homo sapien
ttggccttcacagagtagaacccga

SEQ ID NO: 1744350 - DNA, 25 bp, Homo sapien
ctttctcacagcaaaatcttctcac

SEQ ID NO: 1744351 - DNA, 25 bp, Homo sapien
ttctcacagcaaaatcttctcactc

SEQ ID NO: 1744352 - DNA, 25 bp, Homo sapien
tctcctatgcccttgagttagaagt

SEQ ID NO: 1744353 - DNA, 25 bp, Homo sapien
ctctcctatgcccttgagttagaag

SEQ ID NO: 1744354 - DNA, 25 bp, Homo sapien
ccagtccagtcccttaaggctgaaa

SEQ ID NO: 1744355 - DNA, 25 bp, Homo sapien
ctgaaagctgggctccaaattgtca

SEQ ID NO: 1744356 - DNA, 25 bp, Homo sapien
tccagtcccttaaggctgaaagctg

SEQ ID NO: 1744357 - DNA, 25 bp, Homo sapien
gaaagctgggctccaaattgtcaga

SEQ ID NO: 1744358 - DNA, 25 bp, Homo sapien
tccactttactccaggggatttctg

SEQ ID NO: 1744359 - DNA, 25 bp, Homo sapien
tcgtatgaagtactccagacacttc

SEQ ID NO: 1744360 - DNA, 25 bp, Homo sapien
tgttgacctgtttaaagttgatttc

SEQ ID NO: 1744361 - DNA, 25 bp, Homo sapien
gggatttctgtcttcgtatgaagta

SEQ ID NO: 1744362 - DNA, 25 bp, Homo sapien
ttggtcactaagcaagatttctagg

SEQ ID NO: 1744363 - DNA, 25 bp, Homo sapien
tcactaagcaagatttctaggattt

SEQ ID NO: 1744364 - DNA, 25 bp, Homo sapien
agtcttggtcactaagcaagatttc

SEQ ID NO: 1744365 - DNA, 25 bp, Homo sapien
caaagtcttggtcactaagcaagat

SEQ ID NO: 1744366 - DNA, 25 bp, Homo sapien
gctgcagtagctaatcctttcaaag

SEQ ID NO: 1744367 - DNA, 25 bp, Homo sapien
cacttcatatactgctaagttaatg

SEQ ID NO: 1744368 - DNA, 25 bp, Homo sapien
cctttcaaagtcacttcatatactg

SEQ ID NO: 1744369 - DNA, 25 bp, Homo sapien
ctgctgcagtagctaatcctttcaa

SEQ ID NO: 1744370 - DNA, 25 bp, Homo sapien
tgtttccttggagcatgatccttcg

SEQ ID NO: 1744371 - DNA, 25 bp, Homo sapien
gattcccctgacgagactgtttcct

SEQ ID NO: 1744372 - DNA, 25 bp, Homo sapien
taacacccagtagaccagaagattc

SEQ ID NO: 1744373 - DNA, 25 bp, Homo sapien
tgatccttcgtgttctcacactgtc

SEQ ID NO: 1744374 - DNA, 25 bp, Homo sapien
gcaaaaaggctttcagcagtttcac

SEQ ID NO: 1744375 - DNA, 25 bp, Homo sapien
aaggctttcagcagtttcacctagt

SEQ ID NO: 1744376 - DNA, 25 bp, Homo sapien
ggcaaaatacagctgcaaaaaggct

SEQ ID NO: 1744377 - DNA, 25 bp, Homo sapien
gcaaaatacagctgcaaaaaggctt

SEQ ID NO: 1744378 - DNA, 25 bp, Homo sapien
gggattcctattgggctgaggcaat

SEQ ID NO: 1744379 - DNA, 25 bp, Homo sapien
ttaacatggttcgtgacagccaaga

SEQ ID NO: 1744380 - DNA, 25 bp, Homo sapien
taacatggttcgtgacagccaagaa

SEQ ID NO: 1744381 - DNA, 25 bp, Homo sapien
ggggattcctattgggctgaggcaa

SEQ ID NO: 1744382 - DNA, 25 bp, Homo sapien
acaccaatcctgcttggaggtgcct

SEQ ID NO: 1744383 - DNA, 25 bp, Homo sapien
gattctcgggcacaccaatcctgct

SEQ ID NO: 1744384 - DNA, 25 bp, Homo sapien
tacccagattctcgggcacaccaat

SEQ ID NO: 1744385 - DNA, 25 bp, Homo sapien
accaatcctgcttggaggtgcctct

SEQ ID NO: 1744386 - DNA, 25 bp, Homo sapien
aaatgctgacatagttaccaccata

SEQ ID NO: 1744387 - DNA, 25 bp, Homo sapien
ttaaatgctgacatagttaccacca

SEQ ID NO: 1744388 - DNA, 25 bp, Homo sapien
ctttaaatgctgacatagttaccac

SEQ ID NO: 1744389 - DNA, 25 bp, Homo sapien
cattctttaaatgctgacatagtta

SEQ ID NO: 1744390 - DNA, 25 bp, Homo sapien
taagcgagtctacacgttttgtgga

SEQ ID NO: 1744391 - DNA, 25 bp, Homo sapien
gaggagatggaattaagcgagtcta

SEQ ID NO: 1744392 - DNA, 25 bp, Homo sapien
agaaaaacaacattcgcccgagcag

SEQ ID NO: 1744393 - DNA, 25 bp, Homo sapien
gcccgagcagccaatttccgtgtga

SEQ ID NO: 1744394 - DNA, 25 bp, Homo sapien
atgttaatcgcccttcgacacatgg

SEQ ID NO: 1744395 - DNA, 25 bp, Homo sapien
tgcaactcccaaatggcccgggaca

SEQ ID NO: 1744396 - DNA, 25 bp, Homo sapien
gacagggttttgtcgagcgaatgtt

SEQ ID NO: 1744397 - DNA, 25 bp, Homo sapien
agccccgggtgtgaacgcgtgcaac

SEQ ID NO: 1744398 - DNA, 25 bp, Homo sapien
ggtccgagacccgagctttatatag

SEQ ID NO: 1744399 - DNA, 25 bp, Homo sapien
cagctcgcgggcaatcttgaccagt

SEQ ID NO: 1744400 - DNA, 25 bp, Homo sapien
tgaccagttccagtaggtccgagac

SEQ ID NO: 1744401 - DNA, 25 bp, Homo sapien
tcgcggcctgctgcacattgagagg

SEQ ID NO: 1744402 - DNA, 25 bp, Homo sapien
cccgcgcgccgcgtagggccgtcgg

SEQ ID NO: 1744403 - DNA, 25 bp, Homo sapien
gcgcgccgcgtagggccgtcggtgg

SEQ ID NO: 1744404 - DNA, 25 bp, Homo sapien
cgcgcacgccgcagctccactctct

SEQ ID NO: 1744405 - DNA, 25 bp, Homo sapien
tcggtggccgcgcacgccgcagctc

SEQ ID NO: 1744406 - DNA, 25 bp, Homo sapien
gacgggggaagctgggaggcgcaga

SEQ ID NO: 1744407 - DNA, 25 bp, Homo sapien
gggaagctgggaggcgcagagcagc

SEQ ID NO: 1744408 - DNA, 25 bp, Homo sapien
gggaggcgcaggagggagagacggg

SEQ ID NO: 1744409 - DNA, 25 bp, Homo sapien
ggagagacgggggaagctgggaggc

SEQ ID NO: 1744410 - DNA, 25 bp, Homo sapien
cgcagaggagacgtgagcccagacc

SEQ ID NO: 1744411 - DNA, 25 bp, Homo sapien
gtgagcccagacccgggagaatcca

SEQ ID NO: 1744412 - DNA, 25 bp, Homo sapien
ataggggagcacaaggcgcgcagag

SEQ ID NO: 1744413 - DNA, 25 bp, Homo sapien
gagaatccaccgaagccgagcgctg

SEQ ID NO: 1744414 - DNA, 25 bp, Homo sapien
gcctccgcggcgtggttcggcgtct

SEQ ID NO: 1744415 - DNA, 25 bp, Homo sapien
cgtggttcggcgtctcctcttcttt

SEQ ID NO: 1744416 - DNA, 25 bp, Homo sapien
ccagggtctccagaagcctgcgtat

SEQ ID NO: 1744417 - DNA, 25 bp, Homo sapien
ttgcctccggcgtccacccagggtc

SEQ ID NO: 1744418 - DNA, 25 bp, Homo sapien
aaggaagtgaatccagttatcaccc

SEQ ID NO: 1744419 - DNA, 25 bp, Homo sapien
agaggaaaggaagtgaatccagtta

SEQ ID NO: 1744420 - DNA, 25 bp, Homo sapien
gagaggaaaggaagtgaatccagtt

SEQ ID NO: 1744421 - DNA, 25 bp, Homo sapien
ggaaaggaagtgaatccagttatca

SEQ ID NO: 1744422 - DNA, 25 bp, Homo sapien
ctgactgggtgcctgaattggtaaa

SEQ ID NO: 1744423 - DNA, 25 bp, Homo sapien
cctgaattggtaaagctttcctgag

SEQ ID NO: 1744424 - DNA, 25 bp, Homo sapien
tgcctgaattggtaaagctttcctg

SEQ ID NO: 1744425 - DNA, 25 bp, Homo sapien
tgggtgcctgaattggtaaagcttt

SEQ ID NO: 1744426 - DNA, 25 bp, Homo sapien
gagagagagactgcaggaccagctg

SEQ ID NO: 1744427 - DNA, 25 bp, Homo sapien
aatttgatgagtgagaagataagta

SEQ ID NO: 1744428 - DNA, 25 bp, Homo sapien
ctttttcaatttgatgagtgagaag

SEQ ID NO: 1744429 - DNA, 25 bp, Homo sapien
tttgatgagtgagaagataagtaac

SEQ ID NO: 1744430 - DNA, 25 bp, Homo sapien
ttttcaatttgatgagtgagaagat

SEQ ID NO: 1744431 - DNA, 25 bp, Homo sapien
gtatgtattcatcaacagtcccttt

SEQ ID NO: 1744432 - DNA, 25 bp, Homo sapien
ttccctcttcgtaatatattcatca

SEQ ID NO: 1744433 - DNA, 25 bp, Homo sapien
cagtccctttacgtgggaccgtgag

SEQ ID NO: 1744434 - DNA, 25 bp, Homo sapien
cctttccctcttcgtaatatattca

SEQ ID NO: 1744435 - DNA, 25 bp, Homo sapien
tatgctactatcacagccttcatgg

SEQ ID NO: 1744436 - DNA, 25 bp, Homo sapien
tggatatagccttaagatacagagt

SEQ ID NO: 1744437 - DNA, 25 bp, Homo sapien
taaaccctggatatgcataagatca

SEQ ID NO: 1744438 - DNA, 25 bp, Homo sapien
cacaacttgaggcatagaaagacta

SEQ ID NO: 1744439 - DNA, 25 bp, Homo sapien
ttcatcttcgctatcagaatcttca

SEQ ID NO: 1744440 - DNA, 25 bp, Homo sapien
tcttcgctatcagaatcttcataaa

SEQ ID NO: 1744441 - DNA, 25 bp, Homo sapien
catcttcgctatcagaatcttcata

SEQ ID NO: 1744442 - DNA, 25 bp, Homo sapien
aatttcatcttcgctatcagaatct

SEQ ID NO: 1744443 - DNA, 25 bp, Homo sapien
atataatcaaaagtagctaatcaga

SEQ ID NO: 1744444 - DNA, 25 bp, Homo sapien
cacaagctttggatataatcaaaag

SEQ ID NO: 1744445 - DNA, 25 bp, Homo sapien
tatgatacatttgtacactaaattt

SEQ ID NO: 1744446 - DNA, 25 bp, Homo sapien
aaccccacaagctttggatataatc

SEQ ID NO: 1744447 - DNA, 25 bp, Homo sapien
acttcagcaccggagcaaggtgaca

SEQ ID NO: 1744448 - DNA, 25 bp, Homo sapien
gctagttccgcatcccgaacttcag

SEQ ID NO: 1744449 - DNA, 25 bp, Homo sapien
cagggaggaagtacgcatgctcagc

SEQ ID NO: 1744450 - DNA, 25 bp, Homo sapien
tgaggcgcattctgacgcagcacgt

SEQ ID NO: 1744451 - DNA, 25 bp, Homo sapien
ggggatcgccgccagacgggacagc

SEQ ID NO: 1744452 - DNA, 25 bp, Homo sapien
aaagactgggaagggacgttcagca

SEQ ID NO: 1744453 - DNA, 25 bp, Homo sapien
aagactgggaagggacgttcagcat

SEQ ID NO: 1744454 - DNA, 25 bp, Homo sapien
gaaagactgggaagggacgttcagc

SEQ ID NO: 1744455 - DNA, 25 bp, Homo sapien
cccggaggcgacacgctgctgcgac

SEQ ID NO: 1744456 - DNA, 25 bp, Homo sapien
cttgctacgccccccggaggcgaca

SEQ ID NO: 1744457 - DNA, 25 bp, Homo sapien
cccccggaggcgacacgctgctgcg

SEQ ID NO: 1744458 - DNA, 25 bp, Homo sapien
tacgccccccggaggcgacacgctg

SEQ ID NO: 1744459 - DNA, 25 bp, Homo sapien
ctcttatgcatatccaacaatcatc

SEQ ID NO: 1744460 - DNA, 25 bp, Homo sapien
gcatatccaacaatcatcttttttg

SEQ ID NO: 1744461 - DNA, 25 bp, Homo sapien
cttcagttacttcaattaacctgcc

SEQ ID NO: 1744462 - DNA, 25 bp, Homo sapien
ttccacttttggtcagtcgaatcca

SEQ ID NO: 1744463 - DNA, 25 bp, Homo sapien
taagggctgacattataaacgaaac

SEQ ID NO: 1744464 - DNA, 25 bp, Homo sapien
aaaagttcagtaccatctgatcctg

SEQ ID NO: 1744465 - DNA, 25 bp, Homo sapien
ttctccaccaggatgatactccata

SEQ ID NO: 1744466 - DNA, 25 bp, Homo sapien
tcaaaaagttcagtaccatctgatc

SEQ ID NO: 1744467 - DNA, 25 bp, Homo sapien
cggtgaagagacacttaggtgattg

SEQ ID NO: 1744468 - DNA, 25 bp, Homo sapien
agtatgatggtttcccggtgaagag

SEQ ID NO: 1744469 - DNA, 25 bp, Homo sapien
gtcatccggcagtgaaaaaagctca

SEQ ID NO: 1744470 - DNA, 25 bp, Homo sapien
gcagtgggtccaaacagtactagta

SEQ ID NO: 1744471 - DNA, 25 bp, Homo sapien
ggccattctgccaaccaggcattct

SEQ ID NO: 1744472 - DNA, 25 bp, Homo sapien
ggcattctttcagcatggattcata

SEQ ID NO: 1744473 - DNA, 25 bp, Homo sapien
ggattcataattgacccaacgatga

SEQ ID NO: 1744474 - DNA, 25 bp, Homo sapien
tggattcataattgacccaacgatg

SEQ ID NO: 1744475 - DNA, 25 bp, Homo sapien
tctctaaacaacagtcgaactttta

SEQ ID NO: 1744476 - DNA, 25 bp, Homo sapien
tcaatagatgtcttgtccttgctca

SEQ ID NO: 1744477 - DNA, 25 bp, Homo sapien
aaagtaatgtctcagcccactatag

SEQ ID NO: 1744478 - DNA, 25 bp, Homo sapien
gaaagaactttgactgactttacaa

SEQ ID NO: 1744479 - DNA, 25 bp, Homo sapien
taggtcctggtgtctatctccatcc

SEQ ID NO: 1744480 - DNA, 25 bp, Homo sapien
ttctggcaagaattacccagacaac

SEQ ID NO: 1744481 - DNA, 25 bp, Homo sapien
tggcaagaattacccagacaacggg

SEQ ID NO: 1744482 - DNA, 25 bp, Homo sapien
ctggcaagaattacccagacaacgg

SEQ ID NO: 1744483 - DNA, 25 bp, Homo sapien
gcaagaattacccagacaacgggcc

SEQ ID NO: 1744484 - DNA, 25 bp, Homo sapien
aagactttcttttcctcctcacgat

SEQ ID NO: 1744485 - DNA, 25 bp, Homo sapien
actttcttttcctcctcacgatagt

SEQ ID NO: 1744486 - DNA, 25 bp, Homo sapien
gactttcttttcctcctcacgatag

SEQ ID NO: 1744487 - DNA, 25 bp, Homo sapien
taagactttcttttcctcctcacga

SEQ ID NO: 1744488 - DNA, 25 bp, Homo sapien
cttggataactaggaccttctttgg

SEQ ID NO: 1744489 - DNA, 25 bp, Homo sapien
gcaagtgtatctgtcacttggctct

SEQ ID NO: 1744490 - DNA, 25 bp, Homo sapien
taactaggaccttctttggcaagtg

SEQ ID NO: 1744491 - DNA, 25 bp, Homo sapien
ccttctttggcaagtgtatctgtca

SEQ ID NO: 1744492 - DNA, 25 bp, Homo sapien
gtatatatggcaatggtgactaaag

SEQ ID NO: 1744493 - DNA, 25 bp, Homo sapien
caatggtgactaaagagtctgtttg

SEQ ID NO: 1744494 - DNA, 25 bp, Homo sapien
agagtctgtttggaaccaatcatag

SEQ ID NO: 1744495 - DNA, 25 bp, Homo sapien
gactaaagagtctgtttggaaccaa

SEQ ID NO: 1744496 - DNA, 25 bp, Homo sapien
tctgctctaaaggaatcattctgat

SEQ ID NO: 1744497 - DNA, 25 bp, Homo sapien
tcattctgatgatcaactattattg

SEQ ID NO: 1744498 - DNA, 25 bp, Homo sapien
ctattattgagtctaaattgatatc

SEQ ID NO: 1744499 - DNA, 25 bp, Homo sapien
gtttctgctctaaaggaatcattct

SEQ ID NO: 1744500 - DNA, 25 bp, Homo sapien
atcttcctgaacctcatggcttagc

SEQ ID NO: 1744501 - DNA, 25 bp, Homo sapien
tcttcctgaacctcatggcttagcc

SEQ ID NO: 1744502 - DNA, 25 bp, Homo sapien
atggccaagaaagtcccaagaagta

SEQ ID NO: 1744503 - DNA, 25 bp, Homo sapien
ggatggccaagaaagtcccaagaag

SEQ ID NO: 1744504 - DNA, 25 bp, Homo sapien
gaattatgattcttcaggggatggc

SEQ ID NO: 1744505 - DNA, 25 bp, Homo sapien
tgaattatgattcttcaggggatgg

SEQ ID NO: 1744506 - DNA, 25 bp, Homo sapien
tgaatataaccgttgacaagccaca

SEQ ID NO: 1744507 - DNA, 25 bp, Homo sapien
gtacaaggtaggagattgttcactc

SEQ ID NO: 1744508 - DNA, 25 bp, Homo sapien
ccacatgcacagtttccaattagct

SEQ ID NO: 1744509 - DNA, 25 bp, Homo sapien
ctgaaatgctgggtacaaggtagga

SEQ ID NO: 1744510 - DNA, 25 bp, Homo sapien
tctgcctgggaaaccaaccatgtga

SEQ ID NO: 1744511 - DNA, 25 bp, Homo sapien
tagcctcaagatgggacctgtctgc

SEQ ID NO: 1744512 - DNA, 25 bp, Homo sapien
taaccctggttcctgacattgagct

SEQ ID NO: 1744513 - DNA, 25 bp, Homo sapien
tagctggtcagaagatagatcacaa

SEQ ID NO: 1744514 - DNA, 25 bp, Homo sapien
gaaagccatggacctcactttgaaa

SEQ ID NO: 1744515 - DNA, 25 bp, Homo sapien
gcttggcacaatatgcaaccagtaa

SEQ ID NO: 1744516 - DNA, 25 bp, Homo sapien
gcttattttctatcttccacctggg

SEQ ID NO: 1744517 - DNA, 25 bp, Homo sapien
caaccagtaatgatctgtagctcca

SEQ ID NO: 1744518 - DNA, 25 bp, Homo sapien
tatatgaatccttcaggtaagtata

SEQ ID NO: 1744519 - DNA, 25 bp, Homo sapien
gatatatgaatccttcaggtaagta

SEQ ID NO: 1744520 - DNA, 25 bp, Homo sapien
atatatgaatccttcaggtaagtat

SEQ ID NO: 1744521 - DNA, 25 bp, Homo sapien
tatgaatccttcaggtaagtatatt

SEQ ID NO: 1744522 - DNA, 25 bp, Homo sapien
cagaaaagcctcgtatcatgagtaa

SEQ ID NO: 1744523 - DNA, 25 bp, Homo sapien
aactggcactttctgtagtacaaac

SEQ ID NO: 1744524 - DNA, 25 bp, Homo sapien
tcatgagtaacatcttccttggaaa

SEQ ID NO: 1744525 - DNA, 25 bp, Homo sapien
tgaggtaaacatgttgcccaatggg

SEQ ID NO: 1744526 - DNA, 25 bp, Homo sapien
tcaagctctggtgtgaagagtccag

SEQ ID NO: 1744527 - DNA, 25 bp, Homo sapien
caatctgaagacgatcaagctctgg

SEQ ID NO: 1744528 - DNA, 25 bp, Homo sapien
cttgaactctgagagtaaggaacca

SEQ ID NO: 1744529 - DNA, 25 bp, Homo sapien
gatacaggtgtatatggctttacta

SEQ ID NO: 1744530 - DNA, 25 bp, Homo sapien
caatctagaatcaacacagttgaga

SEQ ID NO: 1744531 - DNA, 25 bp, Homo sapien
ttggtgtgaagcctgttccagctgc

SEQ ID NO: 1744532 - DNA, 25 bp, Homo sapien
tgagactgggtatatcagtcaaagc

SEQ ID NO: 1744533 - DNA, 25 bp, Homo sapien
tcagtattttaaccattggtgtgaa

SEQ ID NO: 1744534 - DNA, 25 bp, Homo sapien
ccctcaggactgcttacagaaacaa

SEQ ID NO: 1744535 - DNA, 25 bp, Homo sapien
gttttattgaagaacatcagcttca

SEQ ID NO: 1744536 - DNA, 25 bp, Homo sapien
tttattgaagaacatcagcttcact

SEQ ID NO: 1744537 - DNA, 25 bp, Homo sapien
ttttattgaagaacatcagcttcac

SEQ ID NO: 1744538 - DNA, 25 bp, Homo sapien
gtttgccgggagtccactctagacc

SEQ ID NO: 1744539 - DNA, 25 bp, Homo sapien
tttgccgggagtccactctagaccc

SEQ ID NO: 1744540 - DNA, 25 bp, Homo sapien
agtttgccgggagtccactctagac

SEQ ID NO: 1744541 - DNA, 25 bp, Homo sapien
tcaaataagtctgtgacatactggg

SEQ ID NO: 1744542 - DNA, 25 bp, Homo sapien
taaaaattgctatgtgctcaaagga

SEQ ID NO: 1744543 - DNA, 25 bp, Homo sapien
cacaactccagatcaggttcttata

SEQ ID NO: 1744544 - DNA, 25 bp, Homo sapien
taatgaaacactagtatgcctccag

SEQ ID NO: 1744545 - DNA, 25 bp, Homo sapien
tatgagtggagctaaaccctgtgta

SEQ ID NO: 1744546 - DNA, 25 bp, Homo sapien
gacctgcttctgatgagtgcctatg

SEQ ID NO: 1744547 - DNA, 25 bp, Homo sapien
ggctgaaaaccctcctagtgtgtac

SEQ ID NO: 1744548 - DNA, 25 bp, Homo sapien
taaactggaacaggagcattcccaa

SEQ ID NO: 1744549 - DNA, 25 bp, Homo sapien
cacaaatgcagacgagaactttgga

SEQ ID NO: 1744550 - DNA, 25 bp, Homo sapien
gctggtgaaatatgtccctgtttgc

SEQ ID NO: 1744551 - DNA, 25 bp, Homo sapien
gtaaatggcactggtccacaaatgc

SEQ ID NO: 1744552 - DNA, 25 bp, Homo sapien
cttactccttgttctgtaaatggca

SEQ ID NO: 1744553 - DNA, 25 bp, Homo sapien
atattggcagccatcacgagcagag

SEQ ID NO: 1744554 - DNA, 25 bp, Homo sapien
tgggcagtctgtttcctactacact

SEQ ID NO: 1744555 - DNA, 25 bp, Homo sapien
tgaatttcaaacaggatcgccacta

SEQ ID NO: 1744556 - DNA, 25 bp, Homo sapien
caatatgcataatcctggcctccaa

SEQ ID NO: 1744557 - DNA, 25 bp, Homo sapien
tccaggccagtccaatcctgaagag

SEQ ID NO: 1744558 - DNA, 25 bp, Homo sapien
caggccagtccaatcctgaagaggt

SEQ ID NO: 1744559 - DNA, 25 bp, Homo sapien
cttccaggccagtccaatcctgaag

SEQ ID NO: 1744560 - DNA, 25 bp, Homo sapien
gccagtccaatcctgaagaggttaa

SEQ ID NO: 1744561 - DNA, 25 bp, Homo sapien
tggcctccctaagtttatggtcaat

SEQ ID NO: 1744562 - DNA, 25 bp, Homo sapien
ttatgctgtaaaactatggatctca

SEQ ID NO: 1744563 - DNA, 25 bp, Homo sapien
ggaaaagttgagatcatgcagcaac

SEQ ID NO: 1744564 - DNA, 25 bp, Homo sapien
aaaactatggatctcatttttggaa

SEQ ID NO: 1744565 - DNA, 25 bp, Homo sapien
tcatttttggaaaagttgagatcat

SEQ ID NO: 1744566 - DNA, 25 bp, Homo sapien
tgttgccatgattaactttccaggt

SEQ ID NO: 1744567 - DNA, 25 bp, Homo sapien
gcatagaaacatgatcgaagtgatc

SEQ ID NO: 1744568 - DNA, 25 bp, Homo sapien
gaaagccaagaagttacctgtactg

SEQ ID NO: 1744569 - DNA, 25 bp, Homo sapien
ctttccaggtcaaatatcagtagta

SEQ ID NO: 1744570 - DNA, 25 bp, Homo sapien
tggatcacttaataagttataacat

SEQ ID NO: 1744571 - DNA, 25 bp, Homo sapien
cttaataagttataacattctatgt

SEQ ID NO: 1744572 - DNA, 25 bp, Homo sapien
taagtataattttattctattctgc

SEQ ID NO: 1744573 - DNA, 25 bp, Homo sapien
taacaaggacataaatgatcatttc

SEQ ID NO: 1744574 - DNA, 25 bp, Homo sapien
tattgttgcattcaaccacatttct

SEQ ID NO: 1744575 - DNA, 25 bp, Homo sapien
tgttgcattcaaccacatttctacc

SEQ ID NO: 1744576 - DNA, 25 bp, Homo sapien
cttgagacgctggcccaatattgtt

SEQ ID NO: 1744577 - DNA, 25 bp, Homo sapien
cgctggcccaatattgttgcattca

SEQ ID NO: 1744578 - DNA, 25 bp, Homo sapien
gaaccaccagttgtggagaaagcag

SEQ ID NO: 1744579 - DNA, 25 bp, Homo sapien
catgcaagaacctaagagggcttcc

SEQ ID NO: 1744580 - DNA, 25 bp, Homo sapien
ctgaatctgtgaaagtatttgacag

SEQ ID NO: 1744581 - DNA, 25 bp, Homo sapien
gataccctttgctgatctgaatctg

SEQ ID NO: 1744582 - DNA, 25 bp, Homo sapien
agtccaggacagctagattcctgtc

SEQ ID NO: 1744583 - DNA, 25 bp, Homo sapien
gacagctagattcctgtctttgtga

SEQ ID NO: 1744584 - DNA, 25 bp, Homo sapien
cagctagattcctgtctttgtgaat

SEQ ID NO: 1744585 - DNA, 25 bp, Homo sapien
caggacagctagattcctgtctttg

SEQ ID NO: 1744586 - DNA, 25 bp, Homo sapien
gatgagaaagatgttggctaagtta

SEQ ID NO: 1744587 - DNA, 25 bp, Homo sapien
gctaagttagatttgatacatcgca

SEQ ID NO: 1744588 - DNA, 25 bp, Homo sapien
gatacatcgcaaatgaactaaaaaa

SEQ ID NO: 1744589 - DNA, 25 bp, Homo sapien
tcttcataatacagcaggaggtggg

SEQ ID NO: 1744590 - DNA, 25 bp, Homo sapien
tatagcgactaataggagattctgt

SEQ ID NO: 1744591 - DNA, 25 bp, Homo sapien
acatatagcgactaataggagattc

SEQ ID NO: 1744592 - DNA, 25 bp, Homo sapien
ttacatatagcgactaataggagat

SEQ ID NO: 1744593 - DNA, 25 bp, Homo sapien
catatagcgactaataggagattct

SEQ ID NO: 1744594 - DNA, 25 bp, Homo sapien
tccaagtccttctagaataccctgg

SEQ ID NO: 1744595 - DNA, 25 bp, Homo sapien
gctactgtactaatccagctgaggg

SEQ ID NO: 1744596 - DNA, 25 bp, Homo sapien
atcatgtcagtggagattacccagg

SEQ ID NO: 1744597 - DNA, 25 bp, Homo sapien
aattttaggagatcaggactgcagc

SEQ ID NO: 1744598 - DNA, 25 bp, Homo sapien
catttcccggtatctttgcagcaac

SEQ ID NO: 1744599 - DNA, 25 bp, Homo sapien
tgctgataaaagacgtacctgagac

SEQ ID NO: 1744600 - DNA, 25 bp, Homo sapien
gaagaggctgccacaaatgtctctg

SEQ ID NO: 1744601 - DNA, 25 bp, Homo sapien
tccaggcacctggtacaagctgtaa

SEQ ID NO: 1744602 - DNA, 25 bp, Homo sapien
tactgaaatagtttagcatatacct

SEQ ID NO: 1744603 - DNA, 25 bp, Homo sapien
tttggatgtatactctctggtgctc

SEQ ID NO: 1744604 - DNA, 25 bp, Homo sapien
tgtagattacttaggaaaggctttg

SEQ ID NO: 1744605 - DNA, 25 bp, Homo sapien
tgtggtacaacactttcttaaagca

SEQ ID NO: 1744606 - DNA, 25 bp, Homo sapien
tctccttaccattaaaagtcctcag

SEQ ID NO: 1744607 - DNA, 25 bp, Homo sapien
tgctcccttccaacagagaaagtga

SEQ ID NO: 1744608 - DNA, 25 bp, Homo sapien
gatggagggccagcaagtcctttct

SEQ ID NO: 1744609 - DNA, 25 bp, Homo sapien
acagcagtgttcagcgtgagcctca

SEQ ID NO: 1744610 - DNA, 25 bp, Homo sapien
aatttggttgaggtctaaggttcat

SEQ ID NO: 1744611 - DNA, 25 bp, Homo sapien
cttggtaccagcttggcctatcttt

SEQ ID NO: 1744612 - DNA, 25 bp, Homo sapien
cagcttggcctatctttattgctca

SEQ ID NO: 1744613 - DNA, 25 bp, Homo sapien
gaatcattgctctccccaaatttgg

SEQ ID NO: 1744614 - DNA, 25 bp, Homo sapien
gtaaagtgccaatttattgagcatg

SEQ ID NO: 1744615 - DNA, 25 bp, Homo sapien
ggagaaagactcagaccacagactg

SEQ ID NO: 1744616 - DNA, 25 bp, Homo sapien
tttataaactggtggccaatggaag

SEQ ID NO: 1744617 - DNA, 25 bp, Homo sapien
ctgttcctgtgggtccatgttattt

SEQ ID NO: 1744618 - DNA, 25 bp, Homo sapien
ttcagggtccgttccatcctttcat

SEQ ID NO: 1744619 - DNA, 25 bp, Homo sapien
cagggtccgttccatcctttcataa

SEQ ID NO: 1744620 - DNA, 25 bp, Homo sapien
tcagggtccgttccatcctttcata

SEQ ID NO: 1744621 - DNA, 25 bp, Homo sapien
tccgttccatcctttcataaacctc

SEQ ID NO: 1744622 - DNA, 25 bp, Homo sapien
tattagcccaaggttcaaggtcctg

SEQ ID NO: 1744623 - DNA, 25 bp, Homo sapien
caagggtgtagatgaagccgtctca

SEQ ID NO: 1744624 - DNA, 25 bp, Homo sapien
tctcagttgtgaaattattagccca

SEQ ID NO: 1744625 - DNA, 25 bp, Homo sapien
ggtcctcaataagtgaaccatgaaa

SEQ ID NO: 1744626 - DNA, 25 bp, Homo sapien
ttgcgcctcatcttccatctatcaa

SEQ ID NO: 1744627 - DNA, 25 bp, Homo sapien
cttcattgcgcctcatcttccatct

SEQ ID NO: 1744628 - DNA, 25 bp, Homo sapien
attgcgcctcatcttccatctatca

SEQ ID NO: 1744629 - DNA, 25 bp, Homo sapien
tcattgcgcctcatcttccatctat

SEQ ID NO: 1744630 - DNA, 25 bp, Homo sapien
gagggcagatggctcatacttagag

SEQ ID NO: 1744631 - DNA, 25 bp, Homo sapien
ccagccaggtgagatgagggcagat

SEQ ID NO: 1744632 - DNA, 25 bp, Homo sapien
cttgacatcagtcatttgagacagg

SEQ ID NO: 1744633 - DNA, 25 bp, Homo sapien
tagagtaactctggttgagtgaggc

SEQ ID NO: 1744634 - DNA, 25 bp, Homo sapien
tacatcttcacagcataggcactca

SEQ ID NO: 1744635 - DNA, 25 bp, Homo sapien
tgaggacagggagcatccctacatc

SEQ ID NO: 1744636 - DNA, 25 bp, Homo sapien
taggcactcacatattcaattcatt

SEQ ID NO: 1744637 - DNA, 25 bp, Homo sapien
tctggatgtgagcatcttgaggaca

SEQ ID NO: 1744638 - DNA, 25 bp, Homo sapien
gacaataggccaacactgagaatgg

SEQ ID NO: 1744639 - DNA, 25 bp, Homo sapien
tttgccaagttatactaccctgagg

SEQ ID NO: 1744640 - DNA, 25 bp, Homo sapien
ttataactagtcagtgccaaatcac

SEQ ID NO: 1744641 - DNA, 25 bp, Homo sapien
gtattactctcatagcactgttgtg

SEQ ID NO: 1744642 - DNA, 25 bp, Homo sapien
catcatcccctccaaagtgactctc

SEQ ID NO: 1744643 - DNA, 25 bp, Homo sapien
tttctaagtttcttattccatccca

SEQ ID NO: 1744644 - DNA, 25 bp, Homo sapien
gagaaggtaaatgcgccatcatccc

SEQ ID NO: 1744645 - DNA, 25 bp, Homo sapien
ctgagaaggtaaatgcgccatcatc

SEQ ID NO: 1744646 - DNA, 25 bp, Homo sapien
aaaaatggagatatagaaggaggaa

SEQ ID NO: 1744647 - DNA, 25 bp, Homo sapien
ctaaaaatggagatatagaaggagg

SEQ ID NO: 1744648 - DNA, 25 bp, Homo sapien
aaatggagatatagaaggaggaaag

SEQ ID NO: 1744649 - DNA, 25 bp, Homo sapien
aatggagatatagaaggaggaaagg

SEQ ID NO: 1744650 - DNA, 25 bp, Homo sapien
ggtaaatgaacgatttgatttgcca

SEQ ID NO: 1744651 - DNA, 25 bp, Homo sapien
gaggagtctgtaccacatcctatag

SEQ ID NO: 1744652 - DNA, 25 bp, Homo sapien
tactctgtattatctaaggaaggaa

SEQ ID NO: 1744653 - DNA, 25 bp, Homo sapien
tgatttgccatgaacaaatgaagtc

SEQ ID NO: 1744654 - DNA, 25 bp, Homo sapien
tgtcattgcccctcttacactgcat

SEQ ID NO: 1744655 - DNA, 25 bp, Homo sapien
gagcttgggtcttgatctgtgttat

SEQ ID NO: 1744656 - DNA, 25 bp, Homo sapien
tctgtctcccctactttggtgtaag

SEQ ID NO: 1744657 - DNA, 25 bp, Homo sapien
ggtagtcacccttgcatgtttccct

SEQ ID NO: 1744658 - DNA, 25 bp, Homo sapien
tcctctgaagttaggccaagctggg

SEQ ID NO: 1744659 - DNA, 25 bp, Homo sapien
tcataactgttggacctgcagcaag

SEQ ID NO: 1744660 - DNA, 25 bp, Homo sapien
tgaagttccaatccagtcataactg

SEQ ID NO: 1744661 - DNA, 25 bp, Homo sapien
gaatcaaccagaaatatctatgcct

SEQ ID NO: 1744662 - DNA, 25 bp, Homo sapien
cgaaggcttggttttggaacaggat

SEQ ID NO: 1744663 - DNA, 25 bp, Homo sapien
ataggacctctttacgaaggcttgg

SEQ ID NO: 1744664 - DNA, 25 bp, Homo sapien
aggcttggttttggaacaggatctt

SEQ ID NO: 1744665 - DNA, 25 bp, Homo sapien
aataggacctctttacgaaggcttg

SEQ ID NO: 1744666 - DNA, 25 bp, Homo sapien
ctctttagatctgaatgtgaggccc

SEQ ID NO: 1744667 - DNA, 25 bp, Homo sapien
ccagagctccatatgtctctttaga

SEQ ID NO: 1744668 - DNA, 25 bp, Homo sapien
tctctttagatctgaatgtgaggcc

SEQ ID NO: 1744669 - DNA, 25 bp, Homo sapien
gagctccatatgtctctttagatct

SEQ ID NO: 1744670 - DNA, 25 bp, Homo sapien
ggagagtgaccatttcatcaaacat

SEQ ID NO: 1744671 - DNA, 25 bp, Homo sapien
gttttggagagtgaccatttcatca

SEQ ID NO: 1744672 - DNA, 25 bp, Homo sapien
agtgttttggagagtgaccatttca

SEQ ID NO: 1744673 - DNA, 25 bp, Homo sapien
ttggagagtgaccatttcatcaaac

SEQ ID NO: 1744674 - DNA, 25 bp, Homo sapien
caggagatgtttaattctataccag

SEQ ID NO: 1744675 - DNA, 25 bp, Homo sapien
catcaggcaggagatgtttaattct

SEQ ID NO: 1744676 - DNA, 25 bp, Homo sapien
tcaggcaggagatgtttaattctat

SEQ ID NO: 1744677 - DNA, 25 bp, Homo sapien
ggcaggagatgtttaattctatacc

SEQ ID NO: 1744678 - DNA, 25 bp, Homo sapien
ttcatgtgagtcagatttgacattc

SEQ ID NO: 1744679 - DNA, 25 bp, Homo sapien
ctgattcatgtgagtcagatttgac

SEQ ID NO: 1744680 - DNA, 25 bp, Homo sapien
tagtacagcttgtcactagggaaga

SEQ ID NO: 1744681 - DNA, 25 bp, Homo sapien
agcttgtcactagggaagacttctg

SEQ ID NO: 1744682 - DNA, 25 bp, Homo sapien
acagcacacgctcccctttaagaag

SEQ ID NO: 1744683 - DNA, 25 bp, Homo sapien
gaaggacacgattaagcagcaggtc

SEQ ID NO: 1744684 - DNA, 25 bp, Homo sapien
tgagcaactgctttatctccgggaa

SEQ ID NO: 1744685 - DNA, 25 bp, Homo sapien
tatctccgggaaggacacgattaag

SEQ ID NO: 1744686 - DNA, 25 bp, Homo sapien
gtcaaagaggtcttcattggaatct

SEQ ID NO: 1744687 - DNA, 25 bp, Homo sapien
agtcaaagaggtcttcattggaatc

SEQ ID NO: 1744688 - DNA, 25 bp, Homo sapien
tcaaagaggtcttcattggaatctc

SEQ ID NO: 1744689 - DNA, 25 bp, Homo sapien
caaagaggtcttcattggaatctct

SEQ ID NO: 1744690 - DNA, 25 bp, Homo sapien
ttctggagtggacaacatatcctga

SEQ ID NO: 1744691 - DNA, 25 bp, Homo sapien
ctgcatgtggagaggagctcatatt

SEQ ID NO: 1744692 - DNA, 25 bp, Homo sapien
cctgcatgtggagaggagctcatat

SEQ ID NO: 1744693 - DNA, 25 bp, Homo sapien
ctggagtggacaacatatcctgagt

SEQ ID NO: 1744694 - DNA, 25 bp, Homo sapien
ccccttggtggctatgatctcgaac

SEQ ID NO: 1744695 - DNA, 25 bp, Homo sapien
cctggacatggtaaatctgagggca

SEQ ID NO: 1744696 - DNA, 25 bp, Homo sapien
tgccaggttgtccagagagttcccc

SEQ ID NO: 1744697 - DNA, 25 bp, Homo sapien
tgatctcgaacaggctggataagca

SEQ ID NO: 1744698 - DNA, 25 bp, Homo sapien
gggagtggggtatcatgaatcaagg

SEQ ID NO: 1744699 - DNA, 25 bp, Homo sapien
gagggagtggggtatcatgaatcaa

SEQ ID NO: 1744700 - DNA, 25 bp, Homo sapien
aagagggagtggggtatcatgaatc

SEQ ID NO: 1744701 - DNA, 25 bp, Homo sapien
agagggagtggggtatcatgaatca

SEQ ID NO: 1744702 - DNA, 25 bp, Homo sapien
gtcaactttgggtaacaggaggagc

SEQ ID NO: 1744703 - DNA, 25 bp, Homo sapien
tcccgggctctgcagtgggtccctc

SEQ ID NO: 1744704 - DNA, 25 bp, Homo sapien
cagtgggtccctcgggtcaactttg

SEQ ID NO: 1744705 - DNA, 25 bp, Homo sapien
gctctgcagtgggtccctcgggtca

SEQ ID NO: 1744706 - DNA, 25 bp, Homo sapien
tagctcctagatccgaggtgcggcg

SEQ ID NO: 1744707 - DNA, 25 bp, Homo sapien
ggccgggcgagtagctcctagatcc

SEQ ID NO: 1744708 - DNA, 25 bp, Homo sapien
gcgagtagctcctagatccgaggtg

SEQ ID NO: 1744709 - DNA, 25 bp, Homo sapien
ggagacgcgcgctcccgacccgcag

SEQ ID NO: 1744710 - DNA, 25 bp, Homo sapien
ggtccacactcttcccgtgggcgtc

SEQ ID NO: 1744711 - DNA, 25 bp, Homo sapien
aggcttttcggacgcccagcggcgt

SEQ ID NO: 1744712 - DNA, 25 bp, Homo sapien
acacgcacatcagcgggctgccggg

SEQ ID NO: 1744713 - DNA, 25 bp, Homo sapien
gtgggcgtcctcacaccccaattct

SEQ ID NO: 1744714 - DNA, 25 bp, Homo sapien
gggaaagggtgtgcctcggccgctg

SEQ ID NO: 1744715 - DNA, 25 bp, Homo sapien
agcgggaaagggtgtgcctcggccg

SEQ ID NO: 1744716 - DNA, 25 bp, Homo sapien
cgggaaagggtgtgcctcggccgct

SEQ ID NO: 1744717 - DNA, 25 bp, Homo sapien
cagcgggaaagggtgtgcctcggcc

SEQ ID NO: 1744718 - DNA, 25 bp, Homo sapien
ttcactactctaggacgtctgccat

SEQ ID NO: 1744719 - DNA, 25 bp, Homo sapien
ccagtccagtttcgggcttcgagac

SEQ ID NO: 1744720 - DNA, 25 bp, Homo sapien
aagatgactgtaaccgctttcacta

SEQ ID NO: 1744721 - DNA, 25 bp, Homo sapien
tttgggttttgaacaatccagtcca

SEQ ID NO: 1744722 - DNA, 25 bp, Homo sapien
ttccagaatatgttgatgacataat

SEQ ID NO: 1744723 - DNA, 25 bp, Homo sapien
ttcagacatcctttgcccaacaaac

SEQ ID NO: 1744724 - DNA, 25 bp, Homo sapien
tggctgctcattcctacttctgctg

SEQ ID NO: 1744725 - DNA, 25 bp, Homo sapien
ctgccaggggccctcgcccttaggc

SEQ ID NO: 1744726 - DNA, 25 bp, Homo sapien
acctggctcccagatcatcttcaga

SEQ ID NO: 1744727 - DNA, 25 bp, Homo sapien
tttgtaccaatcactctaactataa

SEQ ID NO: 1744728 - DNA, 25 bp, Homo sapien
ccacaattggctaaatccatggatg

SEQ ID NO: 1744729 - DNA, 25 bp, Homo sapien
gaataaggtgccgtatgtactgaat

SEQ ID NO: 1744730 - DNA, 25 bp, Homo sapien
aactgtgtgaagaggcaacaagagg

SEQ ID NO: 1744731 - DNA, 25 bp, Homo sapien
gtggagccccgactgtactacaatg

SEQ ID NO: 1744732 - DNA, 25 bp, Homo sapien
cttagcatctgtgggggcttggttc

SEQ ID NO: 1744733 - DNA, 25 bp, Homo sapien
ttccttagcatctgtgggggcttgg

SEQ ID NO: 1744734 - DNA, 25 bp, Homo sapien
aaagtcattccttagcatctgtggg

SEQ ID NO: 1744735 - DNA, 25 bp, Homo sapien
tatataaagtcattccttagcatct

SEQ ID NO: 1744736 - DNA, 25 bp, Homo sapien
agcatgtccagcgtcactatcatca

SEQ ID NO: 1744737 - DNA, 25 bp, Homo sapien
gcatgtccagcgtcactatcatcat

SEQ ID NO: 1744738 - DNA, 25 bp, Homo sapien
catgtccagcgtcactatcatcatt

SEQ ID NO: 1744739 - DNA, 25 bp, Homo sapien
tgtccagcgtcactatcatcattca

SEQ ID NO: 1744740 - DNA, 25 bp, Homo sapien
tttcagtgcagatttggatctctgc

SEQ ID NO: 1744741 - DNA, 25 bp, Homo sapien
tctgccctcgcagcctcatcagctg

SEQ ID NO: 1744742 - DNA, 25 bp, Homo sapien
tcagctgtacctgacagctccacca

SEQ ID NO: 1744743 - DNA, 25 bp, Homo sapien
tccagggccttcataagggtttcag

SEQ ID NO: 1744744 - DNA, 25 bp, Homo sapien
gggcaggtcattcgtggaggtggct

SEQ ID NO: 1744745 - DNA, 25 bp, Homo sapien
gctgggggcaggtcattcgtggagg

SEQ ID NO: 1744746 - DNA, 25 bp, Homo sapien
tgggggcaggtcattcgtggaggtg

SEQ ID NO: 1744747 - DNA, 25 bp, Homo sapien
caggtcattcgtggaggtggctcca

SEQ ID NO: 1744748 - DNA, 25 bp, Homo sapien
tagagaccagccagttttcatggac

SEQ ID NO: 1744749 - DNA, 25 bp, Homo sapien
gggaatgttttctagagaccagcca

SEQ ID NO: 1744750 - DNA, 25 bp, Homo sapien
aaaattagcagcttcccaacgacaa

SEQ ID NO: 1744751 - DNA, 25 bp, Homo sapien
tagcagcttcccaacgacaaaaagg

SEQ ID NO: 1744752 - DNA, 25 bp, Homo sapien
gctgggaggttctgttagaaattaa

SEQ ID NO: 1744753 - DNA, 25 bp, Homo sapien
tcagaattagatgccgattgctggg

SEQ ID NO: 1744754 - DNA, 25 bp, Homo sapien
tattcatattcccaggtgtaatcag

SEQ ID NO: 1744755 - DNA, 25 bp, Homo sapien
ggaaactggtccaatctcataatat

SEQ ID NO: 1744756 - DNA, 25 bp, Homo sapien
ctgcaagaccaacccaaaatccaat

SEQ ID NO: 1744757 - DNA, 25 bp, Homo sapien
gcaagaccaacccaaaatccaatca

SEQ ID NO: 1744758 - DNA, 25 bp, Homo sapien
gactgcaagaccaacccaaaatcca

SEQ ID NO: 1744759 - DNA, 25 bp, Homo sapien
aagaccaacccaaaatccaatcaca

SEQ ID NO: 1744760 - DNA, 25 bp, Homo sapien
ctggatgagatgtacttaacaaagg

SEQ ID NO: 1744761 - DNA, 25 bp, Homo sapien
tctcttctctgaggactctgcattg

SEQ ID NO: 1744762 - DNA, 25 bp, Homo sapien
tgaatctcttctctgaggactctgc

SEQ ID NO: 1744763 - DNA, 25 bp, Homo sapien
tctgaatctcttctctgaggactct

SEQ ID NO: 1744764 - DNA, 25 bp, Homo sapien
aatctcttctctgaggactctgcat

SEQ ID NO: 1744765 - DNA, 25 bp, Homo sapien
tgaaagagagacctggactcctcgt

SEQ ID NO: 1744766 - DNA, 25 bp, Homo sapien
caagcgttccacctcattgatgtag

SEQ ID NO: 1744767 - DNA, 25 bp, Homo sapien
gcttcctggagttggacgtcactgt

SEQ ID NO: 1744768 - DNA, 25 bp, Homo sapien
cgttgccttggcgagaaaatacttt

SEQ ID NO: 1744769 - DNA, 25 bp, Homo sapien
aatcagaagatcatcctccccaaag

SEQ ID NO: 1744770 - DNA, 25 bp, Homo sapien
gaacaataggtggttcagaaatcag

SEQ ID NO: 1744771 - DNA, 25 bp, Homo sapien
ggtctttgtgtgaggtctgggaaag

SEQ ID NO: 1744772 - DNA, 25 bp, Homo sapien
tgtgaggtctgggaaagtggcttag

SEQ ID NO: 1744773 - DNA, 25 bp, Homo sapien
gccatgcatgcaactgtgtgcgcaa

SEQ ID NO: 1744774 - DNA, 25 bp, Homo sapien
gagctagtataaatcagaggtgtcc

SEQ ID NO: 1744775 - DNA, 25 bp, Homo sapien
tacaagagatacgaggcagtaccct

SEQ ID NO: 1744776 - DNA, 25 bp, Homo sapien
ccagaggttaacagcttgccatgca

SEQ ID NO: 1744777 - DNA, 25 bp, Homo sapien
ggaaaactgacagcctttgtctcag

SEQ ID NO: 1744778 - DNA, 25 bp, Homo sapien
caggtttctgcatgtaaagtgagca

SEQ ID NO: 1744779 - DNA, 25 bp, Homo sapien
gaagtcgcctctctcaatatatcta

SEQ ID NO: 1744780 - DNA, 25 bp, Homo sapien
taaaagcctggcctagacataaaga

SEQ ID NO: 1744781 - DNA, 25 bp, Homo sapien
ggagacctctcactaggtatacagt

SEQ ID NO: 1744782 - DNA, 25 bp, Homo sapien
cacattcttcccaaggcaggcgtat

SEQ ID NO: 1744783 - DNA, 25 bp, Homo sapien
ccaaggttatctgggtaggttcaga

SEQ ID NO: 1744784 - DNA, 25 bp, Homo sapien
caacatctgtatcctagacgaggga

SEQ ID NO: 1744785 - DNA, 25 bp, Homo sapien
ggtatcagggtgacactgtatttat

SEQ ID NO: 1744786 - DNA, 25 bp, Homo sapien
ggttaatctagctgtcaatttggtt

SEQ ID NO: 1744787 - DNA, 25 bp, Homo sapien
tatccttcactgattgttggtatca

SEQ ID NO: 1744788 - DNA, 25 bp, Homo sapien
tgatactagctctttgtatgtctgg

SEQ ID NO: 1744789 - DNA, 25 bp, Homo sapien
ttaacccatgcagtatgatgttggc

SEQ ID NO: 1744790 - DNA, 25 bp, Homo sapien
tgtcaagtctacgagtcttctggag

SEQ ID NO: 1744791 - DNA, 25 bp, Homo sapien
tccgtttgcttgtgtcatctgcagt

SEQ ID NO: 1744792 - DNA, 25 bp, Homo sapien
tctggctaggactgccaatactgta

SEQ ID NO: 1744793 - DNA, 25 bp, Homo sapien
ttttctcaacccatgtgagttcctg

SEQ ID NO: 1744794 - DNA, 25 bp, Homo sapien
tctgccagttttgctaggatttcat

SEQ ID NO: 1744795 - DNA, 25 bp, Homo sapien
tggatggggtatcccagaaagtccc

SEQ ID NO: 1744796 - DNA, 25 bp, Homo sapien
gcattgccaaaaactgtcaggaagg

SEQ ID NO: 1744797 - DNA, 25 bp, Homo sapien
agaagcctgtatttgtcagagtgct

SEQ ID NO: 1744798 - DNA, 25 bp, Homo sapien
atgatcttgaagttatcagaagcct

SEQ ID NO: 1744799 - DNA, 25 bp, Homo sapien
ctggccaaatggtatgatcttgaag

SEQ ID NO: 1744800 - DNA, 25 bp, Homo sapien
tatcagaagcctgtatttgtcagag

SEQ ID NO: 1744801 - DNA, 25 bp, Homo sapien
caaatcattgtcttagtgctgagaa

SEQ ID NO: 1744802 - DNA, 25 bp, Homo sapien
tacgtgcagcacacaatgcaggaga

SEQ ID NO: 1744803 - DNA, 25 bp, Homo sapien
ttcaggagatattgcaggtgagctc

SEQ ID NO: 1744804 - DNA, 25 bp, Homo sapien
tggaacaagtgcagctgaacaaatt

SEQ ID NO: 1744805 - DNA, 25 bp, Homo sapien
aaccagtgctgccattatacaattt

SEQ ID NO: 1744806 - DNA, 25 bp, Homo sapien
tactcttttgtatgtacgtatatta

SEQ ID NO: 1744807 - DNA, 25 bp, Homo sapien
gacaacagtatttcaggatcaacca

SEQ ID NO: 1744808 - DNA, 25 bp, Homo sapien
tcttttctaatatgccttgatcaaa

SEQ ID NO: 1744809 - DNA, 25 bp, Homo sapien
ccaaatatgtacttagcgtgtgtgt

SEQ ID NO: 1744810 - DNA, 25 bp, Homo sapien
tggcggcaaatttggcaccatgtgg

SEQ ID NO: 1744811 - DNA, 25 bp, Homo sapien
catttagagcttgcacagccaattc

SEQ ID NO: 1744812 - DNA, 25 bp, Homo sapien
aaaacgatgctgaaagaaagggaat

SEQ ID NO: 1744813 - DNA, 25 bp, Homo sapien
taagaagtgattagcaaaaacgatg

SEQ ID NO: 1744814 - DNA, 25 bp, Homo sapien
cccagggaaccacaggacactcatc

SEQ ID NO: 1744815 - DNA, 25 bp, Homo sapien
ccccttcctcatgtcaatgccacct

SEQ ID NO: 1744816 - DNA, 25 bp, Homo sapien
tcccagggaaccacaggacactcat

SEQ ID NO: 1744817 - DNA, 25 bp, Homo sapien
gtcccagggaaccacaggacactca

SEQ ID NO: 1744818 - DNA, 25 bp, Homo sapien
aataccatctggaaacctacaccag

SEQ ID NO: 1744819 - DNA, 25 bp, Homo sapien
tcagccaataacagcatctaatacc

SEQ ID NO: 1744820 - DNA, 25 bp, Homo sapien
aagtcctcaaagcttgtaaatctgg

SEQ ID NO: 1744821 - DNA, 25 bp, Homo sapien
agtcctcaaagcttgtaaatctggg

SEQ ID NO: 1744822 - DNA, 25 bp, Homo sapien
gaaaatgtggctgcgtacatctcca

SEQ ID NO: 1744823 - DNA, 25 bp, Homo sapien
tggaaatgtacttcacagggactgt

SEQ ID NO: 1744824 - DNA, 25 bp, Homo sapien
tcaagtgttcagcacgtgggtctgg

SEQ ID NO: 1744825 - DNA, 25 bp, Homo sapien
ggcagtggcctgaaccatttgctaa

SEQ ID NO: 1744826 - DNA, 25 bp, Homo sapien
gcaccatttacaatcacgtcaataa

SEQ ID NO: 1744827 - DNA, 25 bp, Homo sapien
catgtgaatgtggtaatcatcagca

SEQ ID NO: 1744828 - DNA, 25 bp, Homo sapien
tgtgaatgtggtaatcatcagcacc

SEQ ID NO: 1744829 - DNA, 25 bp, Homo sapien
tcacgtcaataacatgtggtgatgg

SEQ ID NO: 1744830 - DNA, 25 bp, Homo sapien
gacgctgtgcatcagacccaacttt

SEQ ID NO: 1744831 - DNA, 25 bp, Homo sapien
gaaactgcttgacgctgtgcatcag

SEQ ID NO: 1744832 - DNA, 25 bp, Homo sapien
gcttgacgctgtgcatcagacccaa

SEQ ID NO: 1744833 - DNA, 25 bp, Homo sapien
gacagtgaaactgcttgacgctgtg

SEQ ID NO: 1744834 - DNA, 25 bp, Homo sapien
tctgagggagccaaatgaaaatttc

SEQ ID NO: 1744835 - DNA, 25 bp, Homo sapien
gggagccaaatgaaaatttcctggc

SEQ ID NO: 1744836 - DNA, 25 bp, Homo sapien
ttatcccaaagatctgagggagcca

SEQ ID NO: 1744837 - DNA, 25 bp, Homo sapien
cccaaagatctgagggagccaaatg

SEQ ID NO: 1744838 - DNA, 25 bp, Homo sapien
ttagctgtaaattgaaattccattg

SEQ ID NO: 1744839 - DNA, 25 bp, Homo sapien
ctcctttcattgaatttagctgtaa

SEQ ID NO: 1744840 - DNA, 25 bp, Homo sapien
ttagaaccagttgaagtaaggagac

SEQ ID NO: 1744841 - DNA, 25 bp, Homo sapien
gtggtggcacactcccaacatctgc

SEQ ID NO: 1744842 - DNA, 25 bp, Homo sapien
ttcagtgaccgcttcttatgcccct

SEQ ID NO: 1744843 - DNA, 25 bp, Homo sapien
gctgtgacttgttcatcagcagcat

SEQ ID NO: 1744844 - DNA, 25 bp, Homo sapien
agctgctccttcagtgaccgcttct

SEQ ID NO: 1744845 - DNA, 25 bp, Homo sapien
gtgaccgcttcttatgcccctgctg

SEQ ID NO: 1744846 - DNA, 25 bp, Homo sapien
taaattggggtccagacaatacaca

SEQ ID NO: 1744847 - DNA, 25 bp, Homo sapien
ggatccattataaattggggtccag

SEQ ID NO: 1744848 - DNA, 25 bp, Homo sapien
ggtccagacaatacacaaagttgta

SEQ ID NO: 1744849 - DNA, 25 bp, Homo sapien
tccattataaattggggtccagaca

SEQ ID NO: 1744850 - DNA, 25 bp, Homo sapien
tctctagcaagaaaggcaggcggtg

SEQ ID NO: 1744851 - DNA, 25 bp, Homo sapien
gcaggcggtgggtagtgatgtaact

SEQ ID NO: 1744852 - DNA, 25 bp, Homo sapien
aagtattactaaagatcccacaagg

SEQ ID NO: 1744853 - DNA, 25 bp, Homo sapien
taggaactcctctgcattctctagc

SEQ ID NO: 1744854 - DNA, 25 bp, Homo sapien
tggttataacttctgaacctggccc

SEQ ID NO: 1744855 - DNA, 25 bp, Homo sapien
tacatagtaacatggagcctctgac

SEQ ID NO: 1744856 - DNA, 25 bp, Homo sapien
tgcttcagtttttcggaaaggtaca

SEQ ID NO: 1744857 - DNA, 25 bp, Homo sapien
gcagttaggtcttgataataggcct

SEQ ID NO: 1744858 - DNA, 25 bp, Homo sapien
tgttggccacgatacaaggagtcag

SEQ ID NO: 1744859 - DNA, 25 bp, Homo sapien
aatgacttcccacgacctgctgttg

SEQ ID NO: 1744860 - DNA, 25 bp, Homo sapien
gactctaataggtggtcacagtcct

SEQ ID NO: 1744861 - DNA, 25 bp, Homo sapien
atgactaagcccagcaggaccgggc

SEQ ID NO: 1744862 - DNA, 25 bp, Homo sapien
tatagtgccagacctattctgaagc

SEQ ID NO: 1744863 - DNA, 25 bp, Homo sapien
gtgccagacctattctgaagctgtg

SEQ ID NO: 1744864 - DNA, 25 bp, Homo sapien
aagatgtatagtgccagacctattc

SEQ ID NO: 1744865 - DNA, 25 bp, Homo sapien
aaccttggcatttgaatcttgaatc

SEQ ID NO: 1744866 - DNA, 25 bp, Homo sapien
cacacacgcttcctgttggacatgc

SEQ ID NO: 1744867 - DNA, 25 bp, Homo sapien
gctctcggagagaccatttcggtgg

SEQ ID NO: 1744868 - DNA, 25 bp, Homo sapien
agcagcgatgacctgcacacacacg

SEQ ID NO: 1744869 - DNA, 25 bp, Homo sapien
catgctgtgttgttcgggccctaca

SEQ ID NO: 1744870 - DNA, 25 bp, Homo sapien
tgaattactggcaacattgatgctg

SEQ ID NO: 1744871 - DNA, 25 bp, Homo sapien
catttatctgggctttcctgtccaa

SEQ ID NO: 1744872 - DNA, 25 bp, Homo sapien
ttgatgctgtgttcatttatctggg

SEQ ID NO: 1744873 - DNA, 25 bp, Homo sapien
agatatctccgtttctgaattactg

SEQ ID NO: 1744874 - DNA, 25 bp, Homo sapien
agctgtgaccggataaaaactgcca

SEQ ID NO: 1744875 - DNA, 25 bp, Homo sapien
aaactgccagcaaaatgtgataagg

SEQ ID NO: 1744876 - DNA, 25 bp, Homo sapien
ttaatgggcagacaagatgaaactc

SEQ ID NO: 1744877 - DNA, 25 bp, Homo sapien
gacaagatgaaactccagttgctca

SEQ ID NO: 1744878 - DNA, 25 bp, Homo sapien
tgattaactgccttccgatacaagt

SEQ ID NO: 1744879 - DNA, 25 bp, Homo sapien
taactgccttccgatacaagtcacc

SEQ ID NO: 1744880 - DNA, 25 bp, Homo sapien
gtcaccaaaattgaccagagctatt

SEQ ID NO: 1744881 - DNA, 25 bp, Homo sapien
ttccgatacaagtcaccaaaattga

SEQ ID NO: 1744882 - DNA, 25 bp, Homo sapien
gattaggctctaccagagcagacct

SEQ ID NO: 1744883 - DNA, 25 bp, Homo sapien
ccagtcaggtatggcatcggcatat

SEQ ID NO: 1744884 - DNA, 25 bp, Homo sapien
tggcatcggcatatacctgattagg

SEQ ID NO: 1744885 - DNA, 25 bp, Homo sapien
ccagagcagacctgctggagatcag

SEQ ID NO: 1744886 - DNA, 25 bp, Homo sapien
ctgcagatgagctgtcgccggttcc

SEQ ID NO: 1744887 - DNA, 25 bp, Homo sapien
ggcggtctggctatgaggcaaagtg

SEQ ID NO: 1744888 - DNA, 25 bp, Homo sapien
cagatgagctgtcgccggttcccct

SEQ ID NO: 1744889 - DNA, 25 bp, Homo sapien
ctgaggctggcggtctggctatgag

SEQ ID NO: 1744890 - DNA, 25 bp, Homo sapien
tgtatcactgttcagggtcaaaagc

SEQ ID NO: 1744891 - DNA, 25 bp, Homo sapien
catgatagctctccaactttgttcc

SEQ ID NO: 1744892 - DNA, 25 bp, Homo sapien
actgttcagggtcaaaagctgggaa

SEQ ID NO: 1744893 - DNA, 25 bp, Homo sapien
gttccttcctgtgtatcactgttca

SEQ ID NO: 1744894 - DNA, 25 bp, Homo sapien
gagatatatcatcagaaaaccacac

SEQ ID NO: 1744895 - DNA, 25 bp, Homo sapien
atgcaccgaggtgccataaagtagt

SEQ ID NO: 1744896 - DNA, 25 bp, Homo sapien
taaagtagtgttgacaactccatct

SEQ ID NO: 1744897 - DNA, 25 bp, Homo sapien
caccgaggtgccataaagtagtgtt

SEQ ID NO: 1744898 - DNA, 25 bp, Homo sapien
cttgaggatcatactttttattcca

SEQ ID NO: 1744899 - DNA, 25 bp, Homo sapien
tcttgaggatcatactttttattcc

SEQ ID NO: 1744900 - DNA, 25 bp, Homo sapien
cctcttgaggatcatactttttatt

SEQ ID NO: 1744901 - DNA, 25 bp, Homo sapien
ttgaggatcatactttttattccag

SEQ ID NO: 1744902 - DNA, 25 bp, Homo sapien
tctggagacacaccattgagagtga

SEQ ID NO: 1744903 - DNA, 25 bp, Homo sapien
tgcactttcctcagtcagctctgga

SEQ ID NO: 1744904 - DNA, 25 bp, Homo sapien
taactcctggcacagaatgaaatct

SEQ ID NO: 1744905 - DNA, 25 bp, Homo sapien
gagagtgatgtataactcctggcac

SEQ ID NO: 1744906 - DNA, 25 bp, Homo sapien
catcagtccagtagagagggctgac

SEQ ID NO: 1744907 - DNA, 25 bp, Homo sapien
gctacttggcagattggcagccaca

SEQ ID NO: 1744908 - DNA, 25 bp, Homo sapien
aataattaagaatgctacttggcag

SEQ ID NO: 1744909 - DNA, 25 bp, Homo sapien
gggctgacatgacatattagtctta

SEQ ID NO: 1744910 - DNA, 25 bp, Homo sapien
tctgtccttccactcctccagcaaa

SEQ ID NO: 1744911 - DNA, 25 bp, Homo sapien
tccttccactcctccagcaaaatcc

SEQ ID NO: 1744912 - DNA, 25 bp, Homo sapien
tgtccttccactcctccagcaaaat

SEQ ID NO: 1744913 - DNA, 25 bp, Homo sapien
cttccactcctccagcaaaatccat

SEQ ID NO: 1744914 - DNA, 25 bp, Homo sapien
aattttggtgctgattccaaaggtc

SEQ ID NO: 1744915 - DNA, 25 bp, Homo sapien
aaaggctcattttcccgtttgctgg

SEQ ID NO: 1744916 - DNA, 25 bp, Homo sapien
ggcatgatggggtaattgcccagac

SEQ ID NO: 1744917 - DNA, 25 bp, Homo sapien
gcccagactctcattaaacggttcc

SEQ ID NO: 1744918 - DNA, 25 bp, Homo sapien
taagagagagtttaacagctcctgg

SEQ ID NO: 1744919 - DNA, 25 bp, Homo sapien
tcttgggactatcaaactgagtgca

SEQ ID NO: 1744920 - DNA, 25 bp, Homo sapien
cagccgcaatcagctgcaatctcag

SEQ ID NO: 1744921 - DNA, 25 bp, Homo sapien
tccataaaacaaatcgtgtgggcct

SEQ ID NO: 1744922 - DNA, 25 bp, Homo sapien
ggccctggcctgtagataactcttt

SEQ ID NO: 1744923 - DNA, 25 bp, Homo sapien
tccaccagggaagttacactgggtc

SEQ ID NO: 1744924 - DNA, 25 bp, Homo sapien
tagggagagtcaagtatccccagct

SEQ ID NO: 1744925 - DNA, 25 bp, Homo sapien
gataagaatagaacgtgtccggagg

SEQ ID NO: 1744926 - DNA, 25 bp, Homo sapien
cactgcccagcaagccgtagaaaga

SEQ ID NO: 1744927 - DNA, 25 bp, Homo sapien
ttgtaagaccactgcagtgcactgc

SEQ ID NO: 1744928 - DNA, 25 bp, Homo sapien
gaaagatcaatatatcttcgcgtga

SEQ ID NO: 1744929 - DNA, 25 bp, Homo sapien
ctattttggcaagttgatcatccct

SEQ ID NO: 1744930 - DNA, 25 bp, Homo sapien
actgcagcttaatctgacaaggata

SEQ ID NO: 1744931 - DNA, 25 bp, Homo sapien
caaggataatgtgcagaatgtaaat

SEQ ID NO: 1744932 - DNA, 25 bp, Homo sapien
ctcagatcagacactaatttgcaaa

SEQ ID NO: 1744933 - DNA, 25 bp, Homo sapien
catttgttccatgtcatctcagatc

SEQ ID NO: 1744934 - DNA, 25 bp, Homo sapien
gaagtacagcaccagtactctaggg

SEQ ID NO: 1744935 - DNA, 25 bp, Homo sapien
cagcaccagtactctaggggtctct

SEQ ID NO: 1744936 - DNA, 25 bp, Homo sapien
accagtactctaggggtctctggga

SEQ ID NO: 1744937 - DNA, 25 bp, Homo sapien
tgaagtacagcaccagtactctagg

SEQ ID NO: 1744938 - DNA, 25 bp, Homo sapien
aatcccagtgtcagctctcttttgc

SEQ ID NO: 1744939 - DNA, 25 bp, Homo sapien
ttttgcattgcatgctgaaaagtac

SEQ ID NO: 1744940 - DNA, 25 bp, Homo sapien
gaaaagtactgtagtagatttcaca

SEQ ID NO: 1744941 - DNA, 25 bp, Homo sapien
ctgaactgtaaagaataattggaat

SEQ ID NO: 1744942 - DNA, 25 bp, Homo sapien
gtctctagctgaaagcaaaaccaaa

SEQ ID NO: 1744943 - DNA, 25 bp, Homo sapien
gctgcaggtatttgtctctagctga

SEQ ID NO: 1744944 - DNA, 25 bp, Homo sapien
cactcacagttcccgggattccttg

SEQ ID NO: 1744945 - DNA, 25 bp, Homo sapien
aagatgttccatgccgtgacaaacc

SEQ ID NO: 1744946 - DNA, 25 bp, Homo sapien
tgttccatgccgtgacaaacctggg

SEQ ID NO: 1744947 - DNA, 25 bp, Homo sapien
atgcaagatgttccatgccgtgaca

SEQ ID NO: 1744948 - DNA, 25 bp, Homo sapien
tcctttctacccatcagcctctggg

SEQ ID NO: 1744949 - DNA, 25 bp, Homo sapien
ttcctttctacccatcagcctctgg

SEQ ID NO: 1744950 - DNA, 25 bp, Homo sapien
cttcctttctacccatcagcctctg

SEQ ID NO: 1744951 - DNA, 25 bp, Homo sapien
ttgttttggcaaagcagtctgcttc

SEQ ID NO: 1744952 - DNA, 25 bp, Homo sapien
ttgttgttttggcaaagcagtctgc

SEQ ID NO: 1744953 - DNA, 25 bp, Homo sapien
tttgttgttttggcaaagcagtctg

SEQ ID NO: 1744954 - DNA, 25 bp, Homo sapien
tgttgttttggcaaagcagtctgct

SEQ ID NO: 1744955 - DNA, 25 bp, Homo sapien
ggggaagttgtaaaaacatcaatga

SEQ ID NO: 1744956 - DNA, 25 bp, Homo sapien
tgtaaaaacatcaatgaatgctggc

SEQ ID NO: 1744957 - DNA, 25 bp, Homo sapien
gttgtaaaaacatcaatgaatgctg

SEQ ID NO: 1744958 - DNA, 25 bp, Homo sapien
ctggggaagttgtaaaaacatcaat

SEQ ID NO: 1744959 - DNA, 25 bp, Homo sapien
agtgagatcaagaagcctggtagac

SEQ ID NO: 1744960 - DNA, 25 bp, Homo sapien
cccacactaggtctctcctgatgaa

SEQ ID NO: 1744961 - DNA, 25 bp, Homo sapien
tgacagcatcctatacaatggactg

SEQ ID NO: 1744962 - DNA, 25 bp, Homo sapien
tgaattgaggtggacagtgacctca

SEQ ID NO: 1744963 - DNA, 25 bp, Homo sapien
gtggcactgtctacagcttgtacca

SEQ ID NO: 1744964 - DNA, 25 bp, Homo sapien
ataggtggctgcgatcaaggctgca

SEQ ID NO: 1744965 - DNA, 25 bp, Homo sapien
cacatgtaggatctagtgggatcac

SEQ ID NO: 1744966 - DNA, 25 bp, Homo sapien
tactacctccaagaaatcgacagtt

SEQ ID NO: 1744967 - DNA, 25 bp, Homo sapien
taaaagacagctgagcacccttatg

SEQ ID NO: 1744968 - DNA, 25 bp, Homo sapien
catttggttattttatggcctctta

SEQ ID NO: 1744969 - DNA, 25 bp, Homo sapien
gaagaactttgtgccaaatttgcaa

SEQ ID NO: 1744970 - DNA, 25 bp, Homo sapien
caggtccttatacatttcagctgtg

SEQ ID NO: 1744971 - DNA, 25 bp, Homo sapien
gggcaatttcataactcctctaagc

SEQ ID NO: 1744972 - DNA, 25 bp, Homo sapien
tggaatatcgtgcttttcagctgac

SEQ ID NO: 1744973 - DNA, 25 bp, Homo sapien
ctatctggaatatcgtgcttttcag

SEQ ID NO: 1744974 - DNA, 25 bp, Homo sapien
tctggaatatcgtgcttttcagctg

SEQ ID NO: 1744975 - DNA, 25 bp, Homo sapien
tatctggaatatcgtgcttttcagc

SEQ ID NO: 1744976 - DNA, 25 bp, Homo sapien
tctcattgcatggtgtgatctcatt

SEQ ID NO: 1744977 - DNA, 25 bp, Homo sapien
acagtctcattgttactgtcaatgt

SEQ ID NO: 1744978 - DNA, 25 bp, Homo sapien
ctatctcattgcatggtgtgatctc

SEQ ID NO: 1744979 - DNA, 25 bp, Homo sapien
gttactgtcaatgtttagttgctca

SEQ ID NO: 1744980 - DNA, 25 bp, Homo sapien
cagcctgagtcttctcaggatgtcc

SEQ ID NO: 1744981 - DNA, 25 bp, Homo sapien
tggagagcagagctttcgtcccagc

SEQ ID NO: 1744982 - DNA, 25 bp, Homo sapien
gcactggccagtggagtatttctga

SEQ ID NO: 1744983 - DNA, 25 bp, Homo sapien
ggttttagatgcaatccaggatttc

SEQ ID NO: 1744984 - DNA, 25 bp, Homo sapien
cagtgaaggatttctcaaggtcaga

SEQ ID NO: 1744985 - DNA, 25 bp, Homo sapien
cccagaagtggccagtgaaggattt

SEQ ID NO: 1744986 - DNA, 25 bp, Homo sapien
taatgaggaacatggaatggaaaat

SEQ ID NO: 1744987 - DNA, 25 bp, Homo sapien
tttaatgaggaacatggaatggaaa

SEQ ID NO: 1744988 - DNA, 25 bp, Homo sapien
tcagtgagagagatacctccagtag

SEQ ID NO: 1744989 - DNA, 25 bp, Homo sapien
tattcttgactaagctcagtgagag

SEQ ID NO: 1744990 - DNA, 25 bp, Homo sapien
gcaagaacacgatgcacagcagtat

SEQ ID NO: 1744991 - DNA, 25 bp, Homo sapien
cagaagtgctgatgacagttgcaag

SEQ ID NO: 1744992 - DNA, 25 bp, Homo sapien
gaaagggtacaactcctgatttgct

SEQ ID NO: 1744993 - DNA, 25 bp, Homo sapien
gatgaggcacattccccttctgagg

SEQ ID NO: 1744994 - DNA, 25 bp, Homo sapien
taactttgagagcacagtatgagat

SEQ ID NO: 1744995 - DNA, 25 bp, Homo sapien
aataacatgtctgtgcattgaccca

SEQ ID NO: 1744996 - DNA, 25 bp, Homo sapien
gagctatagtgcaaaggccaaagcc

SEQ ID NO: 1744997 - DNA, 25 bp, Homo sapien
gaatttcagtaggttatctccagca

SEQ ID NO: 1744998 - DNA, 25 bp, Homo sapien
ttccattgggcacataagaggttct

SEQ ID NO: 1744999 - DNA, 25 bp, Homo sapien
tcttaaccttgtccgtctgcctgag

SEQ ID NO: 1745000 - DNA, 25 bp, Homo sapien
ggtcctcaccgagtgggaccatgac

SEQ ID NO: 1745001 - DNA, 25 bp, Homo sapien
gggtcagcagagtttctttgactct

SEQ ID NO: 1745002 - DNA, 25 bp, Homo sapien
gtcagcagagtttctttgactctag

SEQ ID NO: 1745003 - DNA, 25 bp, Homo sapien
atgacggatcggcagatgttgcccc

SEQ ID NO: 1745004 - DNA, 25 bp, Homo sapien
tccataattcagttttcctggacat

SEQ ID NO: 1745005 - DNA, 25 bp, Homo sapien
ccgacttccataattcagttttcct

SEQ ID NO: 1745006 - DNA, 25 bp, Homo sapien
ttccgacttccataattcagttttc

SEQ ID NO: 1745007 - DNA, 25 bp, Homo sapien
atgtttccgacttccataattcagt

SEQ ID NO: 1745008 - DNA, 25 bp, Homo sapien
ttccttgtgcaataggcaactgcca

SEQ ID NO: 1745009 - DNA, 25 bp, Homo sapien
tccttgtgcaataggcaactgccat

SEQ ID NO: 1745010 - DNA, 25 bp, Homo sapien
cttccttgtgcaataggcaactgcc

SEQ ID NO: 1745011 - DNA, 25 bp, Homo sapien
cacctgcctactttcagggtattta

SEQ ID NO: 1745012 - DNA, 25 bp, Homo sapien
tgaacccatttttgaccaagaccat

SEQ ID NO: 1745013 - DNA, 25 bp, Homo sapien
gacgccaccgcgacgctgatttatg

SEQ ID NO: 1745014 - DNA, 25 bp, Homo sapien
gaattaattaggaggtcgctcctgc

SEQ ID NO: 1745015 - DNA, 25 bp, Homo sapien
gatttatggtccagtcgctcgcttg

SEQ ID NO: 1745016 - DNA, 25 bp, Homo sapien
gcttgaaccccaacgctttggctgg

SEQ ID NO: 1745017 - DNA, 25 bp, Homo sapien
ttatcaacagaaacccgcgttccgc

SEQ ID NO: 1745018 - DNA, 25 bp, Homo sapien
gccgctggcgcggttcttgggcctg

SEQ ID NO: 1745019 - DNA, 25 bp, Homo sapien
tgtgcacttagcaccgagagggccg

SEQ ID NO: 1745020 - DNA, 25 bp, Homo sapien
gggccgtactttgcacttatcaaca

SEQ ID NO: 1745021 - DNA, 25 bp, Homo sapien
ccagcggaacctaattgcccatgaa

SEQ ID NO: 1745022 - DNA, 25 bp, Homo sapien
agtccagcggaacctaattgcccat

SEQ ID NO: 1745023 - DNA, 25 bp, Homo sapien
ccgcagcccggcgagtccagcggaa

SEQ ID NO: 1745024 - DNA, 25 bp, Homo sapien
gcggaacctaattgcccatgaaccc

SEQ ID NO: 1745025 - DNA, 25 bp, Homo sapien
agagatcttgctcatctgtactgac

SEQ ID NO: 1745026 - DNA, 25 bp, Homo sapien
caagcagggagcgtgagggagctca

SEQ ID NO: 1745027 - DNA, 25 bp, Homo sapien
gctcatctgtactgacagatcttgg

SEQ ID NO: 1745028 - DNA, 25 bp, Homo sapien
tactgacagatcttggagctcaaat

SEQ ID NO: 1745029 - DNA, 25 bp, Homo sapien
gctctctcccagaaactggctccac

SEQ ID NO: 1745030 - DNA, 25 bp, Homo sapien
cccagaaactggctccactctttaa

SEQ ID NO: 1745031 - DNA, 25 bp, Homo sapien
tgctctctcccagaaactggctcca

SEQ ID NO: 1745032 - DNA, 25 bp, Homo sapien
agaaactggctccactctttaacca

SEQ ID NO: 1745033 - DNA, 25 bp, Homo sapien
atggaggcagggctgcagtcccaaa

SEQ ID NO: 1745034 - DNA, 25 bp, Homo sapien
gcagggctgcagtcccaaagacctc

SEQ ID NO: 1745035 - DNA, 25 bp, Homo sapien
cagggctgcagtcccaaagacctca

SEQ ID NO: 1745036 - DNA, 25 bp, Homo sapien
ctgatggaggcagggctgcagtccc

SEQ ID NO: 1745037 - DNA, 25 bp, Homo sapien
gctccagaagcaccaatcttctagg

SEQ ID NO: 1745038 - DNA, 25 bp, Homo sapien
gctgcttgggggaacttcagtttaa

SEQ ID NO: 1745039 - DNA, 25 bp, Homo sapien
catggagatggcatcagtaacagag

SEQ ID NO: 1745040 - DNA, 25 bp, Homo sapien
aagctccagaagcaccaatcttcta

SEQ ID NO: 1745041 - DNA, 25 bp, Homo sapien
cccagactgaaacattggccttcag

SEQ ID NO: 1745042 - DNA, 25 bp, Homo sapien
gactgaaacattggccttcagttga

SEQ ID NO: 1745043 - DNA, 25 bp, Homo sapien
acacccagactgaaacattggcctt

SEQ ID NO: 1745044 - DNA, 25 bp, Homo sapien
aaacattggccttcagttgattcca

SEQ ID NO: 1745045 - DNA, 25 bp, Homo sapien
ctctgaatgagcgaaataacttttt

SEQ ID NO: 1745046 - DNA, 25 bp, Homo sapien
tcctctgaatgagcgaaataacttt

SEQ ID NO: 1745047 - DNA, 25 bp, Homo sapien
tctgaatgagcgaaataactttttt

SEQ ID NO: 1745048 - DNA, 25 bp, Homo sapien
ctcctctgaatgagcgaaataactt

SEQ ID NO: 1745049 - DNA, 25 bp, Homo sapien
gaaacacattgcctgaagtgtctta

SEQ ID NO: 1745050 - DNA, 25 bp, Homo sapien
gaagtacaatattggccctgaaaca

SEQ ID NO: 1745051 - DNA, 25 bp, Homo sapien
ttcatgagaagtacaatattggccc

SEQ ID NO: 1745052 - DNA, 25 bp, Homo sapien
aatattggccctgaaacacattgcc

SEQ ID NO: 1745053 - DNA, 25 bp, Homo sapien
aagatgggtggtcacacagagagct

SEQ ID NO: 1745054 - DNA, 25 bp, Homo sapien
acaggctaacgacccagagctgctg

SEQ ID NO: 1745055 - DNA, 25 bp, Homo sapien
ctgctggctgactgcggtagggtga

SEQ ID NO: 1745056 - DNA, 25 bp, Homo sapien
cccaacgtcgtgtatgctggagtgt

SEQ ID NO: 1745057 - DNA, 25 bp, Homo sapien
tgtctcttatccctgtgtgctgtac

SEQ ID NO: 1745058 - DNA, 25 bp, Homo sapien
ggcatcatccaccacttccctgctg

SEQ ID NO: 1745059 - DNA, 25 bp, Homo sapien
gctgtgtctcttatccctgtgtgct

SEQ ID NO: 1745060 - DNA, 25 bp, Homo sapien
tgtgtctcttatccctgtgtgctgt

SEQ ID NO: 1745061 - DNA, 25 bp, Homo sapien
cagtttgtcttgattccagtggtct

SEQ ID NO: 1745062 - DNA, 25 bp, Homo sapien
ggtcttgattctgcaattaataatt

SEQ ID NO: 1745063 - DNA, 25 bp, Homo sapien
gatcagaagcagtgtgttgaagatg

SEQ ID NO: 1745064 - DNA, 25 bp, Homo sapien
taaattattgacacaaagtcagttt

SEQ ID NO: 1745065 - DNA, 25 bp, Homo sapien
ataaaactgagactgtgcatggatt

SEQ ID NO: 1745066 - DNA, 25 bp, Homo sapien
gctctatttttagggtgaggtggtc

SEQ ID NO: 1745067 - DNA, 25 bp, Homo sapien
tcactggggagctctatttttaggg

SEQ ID NO: 1745068 - DNA, 25 bp, Homo sapien
aactgagactgtgcatggattcaag

SEQ ID NO: 1745069 - DNA, 25 bp, Homo sapien
aagttcttgacctctgttctgttgc

SEQ ID NO: 1745070 - DNA, 25 bp, Homo sapien
caagttcttgacctctgttctgttg

SEQ ID NO: 1745071 - DNA, 25 bp, Homo sapien
ccaagttcttgacctctgttctgtt

SEQ ID NO: 1745072 - DNA, 25 bp, Homo sapien
gtttggctggctgctggctgaactc

SEQ ID NO: 1745073 - DNA, 25 bp, Homo sapien
tagtttggctggctgctggctgaac

SEQ ID NO: 1745074 - DNA, 25 bp, Homo sapien
ctatgctagtttggctggctgctgg

SEQ ID NO: 1745075 - DNA, 25 bp, Homo sapien
gctagtttggctggctgctggctga

SEQ ID NO: 1745076 - DNA, 25 bp, Homo sapien
aatatcagaaccacacttgcctttg

SEQ ID NO: 1745077 - DNA, 25 bp, Homo sapien
cataggagatgcaatggtctggata

SEQ ID NO: 1745078 - DNA, 25 bp, Homo sapien
agccagtgactttgcagaaatgtct

SEQ ID NO: 1745079 - DNA, 25 bp, Homo sapien
gtctggataatgctttccaagcctg

SEQ ID NO: 1745080 - DNA, 25 bp, Homo sapien
aagagtaggctgctcaataatgagc

SEQ ID NO: 1745081 - DNA, 25 bp, Homo sapien
caatccaattcagtgaaatccacca

SEQ ID NO: 1745082 - DNA, 25 bp, Homo sapien
gaaagccgaactctgctaccctaag

SEQ ID NO: 1745083 - DNA, 25 bp, Homo sapien
ggcagaaaactgaagcaccaaaatc

SEQ ID NO: 1745084 - DNA, 25 bp, Homo sapien
acttctttcattccttttctcacct

SEQ ID NO: 1745085 - DNA, 25 bp, Homo sapien
tttcattccttttctcacctctaac

SEQ ID NO: 1745086 - DNA, 25 bp, Homo sapien
ccacttctttcattccttttctcac

SEQ ID NO: 1745087 - DNA, 25 bp, Homo sapien
tctttcattccttttctcacctcta

SEQ ID NO: 1745088 - DNA, 25 bp, Homo sapien
tgctctgacctttgggtaatgtggc

SEQ ID NO: 1745089 - DNA, 25 bp, Homo sapien
gtaatgtggcgtttctttctctggg

SEQ ID NO: 1745090 - DNA, 25 bp, Homo sapien
gaacccgtagtccagaagtcagctc

SEQ ID NO: 1745091 - DNA, 25 bp, Homo sapien
actgcaggcctcctaaggttggata

SEQ ID NO: 1745092 - DNA, 25 bp, Homo sapien
cacacatacagtaagacataatgtt

SEQ ID NO: 1745093 - DNA, 25 bp, Homo sapien
cacacacatacagtaagacataatg

SEQ ID NO: 1745094 - DNA, 25 bp, Homo sapien
catacagtaagacataatgtttgcc

SEQ ID NO: 1745095 - DNA, 25 bp, Homo sapien
tacagtaagacataatgtttgccat

SEQ ID NO: 1745096 - DNA, 25 bp, Homo sapien
gtgtcagcttgactgttcttgcata

SEQ ID NO: 1745097 - DNA, 25 bp, Homo sapien
ttcccattctttgccagtcgtttaa

SEQ ID NO: 1745098 - DNA, 25 bp, Homo sapien
tctctgctcagatttggcgactcac

SEQ ID NO: 1745099 - DNA, 25 bp, Homo sapien
tgagccatcaatgttgtgccttctg

SEQ ID NO: 1745100 - DNA, 25 bp, Homo sapien
ccaggacggtacttggggatagctt

SEQ ID NO: 1745101 - DNA, 25 bp, Homo sapien
tgttagctatggctgcccaaccagt

SEQ ID NO: 1745102 - DNA, 25 bp, Homo sapien
gggaggctgtgtgccatacccacag

SEQ ID NO: 1745103 - DNA, 25 bp, Homo sapien
ccacagccaggacggtacttgggga

SEQ ID NO: 1745104 - DNA, 25 bp, Homo sapien
gggcttcaagcacttccgtattttg

SEQ ID NO: 1745105 - DNA, 25 bp, Homo sapien
ttattgcaggtggtcgggcttcaag

SEQ ID NO: 1745106 - DNA, 25 bp, Homo sapien
gagaatagatcagacgaagtacaac

SEQ ID NO: 1745107 - DNA, 25 bp, Homo sapien
aagctttgcgcctccacattgtagg

SEQ ID NO: 1745108 - DNA, 25 bp, Homo sapien
tccagtgtccgcaaacaggttttca

SEQ ID NO: 1745109 - DNA, 25 bp, Homo sapien
tttgatgccggtcgcatttgggagc

SEQ ID NO: 1745110 - DNA, 25 bp, Homo sapien
cttggattggatccagtgtccgcaa

SEQ ID NO: 1745111 - DNA, 25 bp, Homo sapien
ggttttcattagactttgatgccgg

SEQ ID NO: 1745112 - DNA, 25 bp, Homo sapien
cagaagtgcctacgttattgcaagg

SEQ ID NO: 1745113 - DNA, 25 bp, Homo sapien
cactgcttcagacttgagtacttca

SEQ ID NO: 1745114 - DNA, 25 bp, Homo sapien
gaagagtagttctaatctgcccaga

SEQ ID NO: 1745115 - DNA, 25 bp, Homo sapien
gtttctgaggcctatacttcactgc

SEQ ID NO: 1745116 - DNA, 25 bp, Homo sapien
actccattcactctatgggcagctc

SEQ ID NO: 1745117 - DNA, 25 bp, Homo sapien
gactccattcactctatgggcagct

SEQ ID NO: 1745118 - DNA, 25 bp, Homo sapien
aaaatgatgtaatttccttccccat

SEQ ID NO: 1745119 - DNA, 25 bp, Homo sapien
gcttcatggtttagagataggcctc

SEQ ID NO: 1745120 - DNA, 25 bp, Homo sapien
atacatagggttttggtctgtacgg

SEQ ID NO: 1745121 - DNA, 25 bp, Homo sapien
cattttgtgtcccatcttgtagcag

SEQ ID NO: 1745122 - DNA, 25 bp, Homo sapien
tagattgtacagaaggtctctcagc

SEQ ID NO: 1745123 - DNA, 25 bp, Homo sapien
agggtgatgcttattgggcaacagt

SEQ ID NO: 1745124 - DNA, 25 bp, Homo sapien
tacgtcgatggtgtttaaaggaatg

SEQ ID NO: 1745125 - DNA, 25 bp, Homo sapien
gcaaagggaggtacttgttcaatac

SEQ ID NO: 1745126 - DNA, 25 bp, Homo sapien
aacagtttatcagttggcaaaggga

SEQ ID NO: 1745127 - DNA, 25 bp, Homo sapien
tttctgtggatgcattcaacatcct

SEQ ID NO: 1745128 - DNA, 25 bp, Homo sapien
tctgtggatgcattcaacatccttt

SEQ ID NO: 1745129 - DNA, 25 bp, Homo sapien
tgtggatgcattcaacatccttttc

SEQ ID NO: 1745130 - DNA, 25 bp, Homo sapien
ttttctgtggatgcattcaacatcc

SEQ ID NO: 1745131 - DNA, 25 bp, Homo sapien
ggagggagtgggttgcagcagatgt

SEQ ID NO: 1745132 - DNA, 25 bp, Homo sapien
agggagtgggttgcagcagatgtgc

SEQ ID NO: 1745133 - DNA, 25 bp, Homo sapien
ggagtgggttgcagcagatgtgcac

SEQ ID NO: 1745134 - DNA, 25 bp, Homo sapien
gagtgggttgcagcagatgtgcaca

SEQ ID NO: 1745135 - DNA, 25 bp, Homo sapien
cttttgcctccccattgtgctggct

SEQ ID NO: 1745136 - DNA, 25 bp, Homo sapien
tgttcttttgcctccccattgtgct

SEQ ID NO: 1745137 - DNA, 25 bp, Homo sapien
gctgtccctggtgacagactgcagc

SEQ ID NO: 1745138 - DNA, 25 bp, Homo sapien
tgtccctggtgacagactgcagccc

SEQ ID NO: 1745139 - DNA, 25 bp, Homo sapien
cagaagcttccagtgacatctatga

SEQ ID NO: 1745140 - DNA, 25 bp, Homo sapien
taacaccagcagatcttataaagtc

SEQ ID NO: 1745141 - DNA, 25 bp, Homo sapien
gacatctgggaccacggtaacacca

SEQ ID NO: 1745142 - DNA, 25 bp, Homo sapien
gacatctatgaccatggcaacacca

SEQ ID NO: 1745143 - DNA, 25 bp, Homo sapien
ctttccacacgggttactctgaaga

SEQ ID NO: 1745144 - DNA, 25 bp, Homo sapien
gacctagcatgcaggcctctttgag

SEQ ID NO: 1745145 - DNA, 25 bp, Homo sapien
attttgtgacctagcatgcaggcct

SEQ ID NO: 1745146 - DNA, 25 bp, Homo sapien
ttccacacgggttactctgaagagt

SEQ ID NO: 1745147 - DNA, 25 bp, Homo sapien
tgaaaggtactgtgcaacctgcaaa

SEQ ID NO: 1745148 - DNA, 25 bp, Homo sapien
cctctaggactttcctgggctgctg

SEQ ID NO: 1745149 - DNA, 25 bp, Homo sapien
gtcaagtgcacagaaggtcctctag

SEQ ID NO: 1745150 - DNA, 25 bp, Homo sapien
ttcaggttggccaaaagtcaagtgc

SEQ ID NO: 1745151 - DNA, 25 bp, Homo sapien
tcagaattaccaactctgtccacca

SEQ ID NO: 1745152 - DNA, 25 bp, Homo sapien
agccgccgggctcttcagcaagctg

SEQ ID NO: 1745153 - DNA, 25 bp, Homo sapien
ctctgtccaccaggcggaagcacgg

SEQ ID NO: 1745154 - DNA, 25 bp, Homo sapien
gtccaccaggcggaagcacggacag

SEQ ID NO: 1745155 - DNA, 25 bp, Homo sapien
caaatgaccaattgcagaggactgt

SEQ ID NO: 1745156 - DNA, 25 bp, Homo sapien
tgattgatgtctgctcgcaccagcc

SEQ ID NO: 1745157 - DNA, 25 bp, Homo sapien
tatttggctgcgaatagctaaggac

SEQ ID NO: 1745158 - DNA, 25 bp, Homo sapien
tctctgctgtgacggaaaagggtca

SEQ ID NO: 1745159 - DNA, 25 bp, Homo sapien
tggacaattggagcagatcccttca

SEQ ID NO: 1745160 - DNA, 25 bp, Homo sapien
acaattggagcagatcccttcagca

SEQ ID NO: 1745161 - DNA, 25 bp, Homo sapien
accttaggggggtcacatgaagagt

SEQ ID NO: 1745162 - DNA, 25 bp, Homo sapien
gggtcacatgaagagtggacaattg

SEQ ID NO: 1745163 - DNA, 25 bp, Homo sapien
gggagtaacatgctattaatgtagt

SEQ ID NO: 1745164 - DNA, 25 bp, Homo sapien
tgtaatggaagcttctagatcaggg

SEQ ID NO: 1745165 - DNA, 25 bp, Homo sapien
gctattaatgtagtttggaagtgaa

SEQ ID NO: 1745166 - DNA, 25 bp, Homo sapien
gagggcattgcacttcagggatttg

SEQ ID NO: 1745167 - DNA, 25 bp, Homo sapien
cttggaatcctcatccagggctgtg

SEQ ID NO: 1745168 - DNA, 25 bp, Homo sapien
ctgtgcagtccacggacaccctcac

SEQ ID NO: 1745169 - DNA, 25 bp, Homo sapien
tggaatcctcatccagggctgtgca

SEQ ID NO: 1745170 - DNA, 25 bp, Homo sapien
acaccctcaccgctcccgtgaacat

SEQ ID NO: 1745171 - DNA, 25 bp, Homo sapien
ttctgtggtctaaaggcattccagg

SEQ ID NO: 1745172 - DNA, 25 bp, Homo sapien
ccagatagaggtggttttgcaattc

SEQ ID NO: 1745173 - DNA, 25 bp, Homo sapien
ggttttgcaattctgtggtctaaag

SEQ ID NO: 1745174 - DNA, 25 bp, Homo sapien
caaatccagatagaggtggttttgc

SEQ ID NO: 1745175 - DNA, 25 bp, Homo sapien
ccaaagtgctccctatcctcacttc

SEQ ID NO: 1745176 - DNA, 25 bp, Homo sapien
aaagtgctccctatcctcacttctt

SEQ ID NO: 1745177 - DNA, 25 bp, Homo sapien
gtttttgccgctgagatttagcacc

SEQ ID NO: 1745178 - DNA, 25 bp, Homo sapien
cttgtttttgccgctgagatttagc

SEQ ID NO: 1745179 - DNA, 25 bp, Homo sapien
ttaactctaatatgagtagctgtga

SEQ ID NO: 1745180 - DNA, 25 bp, Homo sapien
gtgatcccagggcaataatagttga

SEQ ID NO: 1745181 - DNA, 25 bp, Homo sapien
cagtcgccatttcttggtagtgtgg

SEQ ID NO: 1745182 - DNA, 25 bp, Homo sapien
caaacatggttgtccctcacagtcc

SEQ ID NO: 1745183 - DNA, 25 bp, Homo sapien
catgctgaagtcttacgatgcatag

SEQ ID NO: 1745184 - DNA, 25 bp, Homo sapien
tctctgtcacaagggcagaatactt

SEQ ID NO: 1745185 - DNA, 25 bp, Homo sapien
gcataggttcaatttcctcttagga

SEQ ID NO: 1745186 - DNA, 25 bp, Homo sapien
gacacttctctgtcacaagggcaga

SEQ ID NO: 1745187 - DNA, 25 bp, Homo sapien
tacaaaagtgaggtgtcgctgactg

SEQ ID NO: 1745188 - DNA, 25 bp, Homo sapien
acaaaagtgaggtgtcgctgactga

SEQ ID NO: 1745189 - DNA, 25 bp, Homo sapien
aaaagtgaggtgtcgctgactgatg

SEQ ID NO: 1745190 - DNA, 25 bp, Homo sapien
caaaagtgaggtgtcgctgactgat

SEQ ID NO: 1745191 - DNA, 25 bp, Homo sapien
ccactgcctgaatcaaggcctgttg

SEQ ID NO: 1745192 - DNA, 25 bp, Homo sapien
ctgcctgaatcaaggcctgttggca

SEQ ID NO: 1745193 - DNA, 25 bp, Homo sapien
cactgcctgaatcaaggcctgttgg

SEQ ID NO: 1745194 - DNA, 25 bp, Homo sapien
actgcctgaatcaaggcctgttggc

SEQ ID NO: 1745195 - DNA, 25 bp, Homo sapien
agaggaagcggaccaatggcgcctt

SEQ ID NO: 1745196 - DNA, 25 bp, Homo sapien
cgagaggaagcggaccaatggcgcc

SEQ ID NO: 1745197 - DNA, 25 bp, Homo sapien
ctgcgagaggaagcggaccaatggc

SEQ ID NO: 1745198 - DNA, 25 bp, Homo sapien
aggaagcggaccaatggcgccttct

SEQ ID NO: 1745199 - DNA, 25 bp, Homo sapien
taaagacgttgctctcagatacgcg

SEQ ID NO: 1745200 - DNA, 25 bp, Homo sapien
gaacgcaccgtgctgatgataaaga

SEQ ID NO: 1745201 - DNA, 25 bp, Homo sapien
gatacgcgtaaatgcccgtgacctg

SEQ ID NO: 1745202 - DNA, 25 bp, Homo sapien
gtggtccgcgtcaaaacacgccgct

SEQ ID NO: 1745203 - DNA, 25 bp, Homo sapien
cactgaaaggcatccaatcagggtg

SEQ ID NO: 1745204 - DNA, 25 bp, Homo sapien
tcagggtggctttcaacgtgcacac

SEQ ID NO: 1745205 - DNA, 25 bp, Homo sapien
tgaaaggcatccaatcagggtggct

SEQ ID NO: 1745206 - DNA, 25 bp, Homo sapien
catccaatcagggtggctttcaacg

SEQ ID NO: 1745207 - DNA, 25 bp, Homo sapien
gctataatatgcctctggcaatggg

SEQ ID NO: 1745208 - DNA, 25 bp, Homo sapien
ccttagcctctagttggagcttggg

SEQ ID NO: 1745209 - DNA, 25 bp, Homo sapien
ctgacagggtgattgtgccttagcc

SEQ ID NO: 1745210 - DNA, 25 bp, Homo sapien
tgtccctgtatgaggcacaaaactt

SEQ ID NO: 1745211 - DNA, 25 bp, Homo sapien
aaggatgaggctatgcctggtccca

SEQ ID NO: 1745212 - DNA, 25 bp, Homo sapien
ggatgaggctatgcctggtcccata

SEQ ID NO: 1745213 - DNA, 25 bp, Homo sapien
actagtgaaagctgcatgaggaagg

SEQ ID NO: 1745214 - DNA, 25 bp, Homo sapien
ctgaaggctgaggttactagtgaaa

SEQ ID NO: 1745215 - DNA, 25 bp, Homo sapien
cagagatgtgaaagacgccagcccc

SEQ ID NO: 1745216 - DNA, 25 bp, Homo sapien
agagccagagatgtgaaagacgcca

SEQ ID NO: 1745217 - DNA, 25 bp, Homo sapien
aatggaatgcaaacagaccctgaga

SEQ ID NO: 1745218 - DNA, 25 bp, Homo sapien
gcaatggaatgcaaacagaccctga

SEQ ID NO: 1745219 - DNA, 25 bp, Homo sapien
ccagtgtccctccagtagaagcggg

SEQ ID NO: 1745220 - DNA, 25 bp, Homo sapien
cactgtggccggtagacagcagagg

SEQ ID NO: 1745221 - DNA, 25 bp, Homo sapien
gggatttccagtcatccgatcactt

SEQ ID NO: 1745222 - DNA, 25 bp, Homo sapien
tgacaatgtcctggtgcactgtggc

SEQ ID NO: 1745223 - DNA, 25 bp, Homo sapien
tcacagggattatttagcaggggat

SEQ ID NO: 1745224 - DNA, 25 bp, Homo sapien
actgaaactcttgcttctgcaactt

SEQ ID NO: 1745225 - DNA, 25 bp, Homo sapien
gggaaggccattttcaagcagatgt

SEQ ID NO: 1745226 - DNA, 25 bp, Homo sapien
ttagcaggggataaactgaaactct

SEQ ID NO: 1745227 - DNA, 25 bp, Homo sapien
aatacacttgtaactcagatttctc

SEQ ID NO: 1745228 - DNA, 25 bp, Homo sapien
gaccaaaatcatttgagtaatgtgg

SEQ ID NO: 1745229 - DNA, 25 bp, Homo sapien
ttcttctaggatctcaatggaagaa

SEQ ID NO: 1745230 - DNA, 25 bp, Homo sapien
ttaaatggatgaagcaattgagatt

SEQ ID NO: 1745231 - DNA, 25 bp, Homo sapien
tggagttccacttggccgaaatagc

SEQ ID NO: 1745232 - DNA, 25 bp, Homo sapien
taagacatgccggagctggagattg

SEQ ID NO: 1745233 - DNA, 25 bp, Homo sapien
caaggccctttgagttggaggattc

SEQ ID NO: 1745234 - DNA, 25 bp, Homo sapien
cactcaacagggtatgaaggtagct

SEQ ID NO: 1745235 - DNA, 25 bp, Homo sapien
agaaggagctggcatagtaatcccc

SEQ ID NO: 1745236 - DNA, 25 bp, Homo sapien
agatgaaccatccaaccccaaacgg

SEQ ID NO: 1745237 - DNA, 25 bp, Homo sapien
caggtaaaggtaccttccacagaga

SEQ ID NO: 1745238 - DNA, 25 bp, Homo sapien
ggcaaaggtactcttagtccctcgc

SEQ ID NO: 1745239 - DNA, 25 bp, Homo sapien
cattaacacctatttggtcattgtc

SEQ ID NO: 1745240 - DNA, 25 bp, Homo sapien
tctgtcattaacacctatttggtca

SEQ ID NO: 1745241 - DNA, 25 bp, Homo sapien
cctctctgtcattaacacctatttg

SEQ ID NO: 1745242 - DNA, 25 bp, Homo sapien
aacacctatttggtcattgtcagac

SEQ ID NO: 1745243 - DNA, 25 bp, Homo sapien
cacagatccaacactgctgaatggt

SEQ ID NO: 1745244 - DNA, 25 bp, Homo sapien
aatggtttccagtcagtgcagaata

SEQ ID NO: 1745245 - DNA, 25 bp, Homo sapien
aggtcacagatccaacactgctgaa

SEQ ID NO: 1745246 - DNA, 25 bp, Homo sapien
aacactgctgaatggtttccagtca

SEQ ID NO: 1745247 - DNA, 25 bp, Homo sapien
ctttcttagtgtaagggaaagtcat

SEQ ID NO: 1745248 - DNA, 25 bp, Homo sapien
ggagacccagcccttctatgacttt

SEQ ID NO: 1745249 - DNA, 25 bp, Homo sapien
aaggacccttgttgatcattttgcc

SEQ ID NO: 1745250 - DNA, 25 bp, Homo sapien
tcatttgcagatcatgggagagctt

SEQ ID NO: 1745251 - DNA, 25 bp, Homo sapien
catcacataataagagttcttagtc

SEQ ID NO: 1745252 - DNA, 25 bp, Homo sapien
agcattagggtatttgacaatttac

SEQ ID NO: 1745253 - DNA, 25 bp, Homo sapien
gaacataggagtcttgcttggcttt

SEQ ID NO: 1745254 - DNA, 25 bp, Homo sapien
ggatccaagattcacactttatatt

SEQ ID NO: 1745255 - DNA, 25 bp, Homo sapien
ggttgccactgaggcatagctccat

SEQ ID NO: 1745256 - DNA, 25 bp, Homo sapien
cattgcggacaacatctgcctgaag

SEQ ID NO: 1745257 - DNA, 25 bp, Homo sapien
tccattgcggacaacatctgcctga

SEQ ID NO: 1745258 - DNA, 25 bp, Homo sapien
gttcatgaggttgccactgaggcat

SEQ ID NO: 1745259 - DNA, 25 bp, Homo sapien
cagtgattgacatgtcaagggtttc

SEQ ID NO: 1745260 - DNA, 25 bp, Homo sapien
cataaacttgggggctttggtggct

SEQ ID NO: 1745261 - DNA, 25 bp, Homo sapien
tgtcagtgattgacatgtcaagggt

SEQ ID NO: 1745262 - DNA, 25 bp, Homo sapien
gattgacatgtcaagggtttcataa

SEQ ID NO: 1745263 - DNA, 25 bp, Homo sapien
gctatagagcctatgctgggcttac

SEQ ID NO: 1745264 - DNA, 25 bp, Homo sapien
tcttcccttagtttgcatttagcta

SEQ ID NO: 1745265 - DNA, 25 bp, Homo sapien
tcaagaacaccgatcttcccttagt

SEQ ID NO: 1745266 - DNA, 25 bp, Homo sapien
gcatttagctatagagcctatgctg

SEQ ID NO: 1745267 - DNA, 25 bp, Homo sapien
gggcagagtcccgtaagcatggtcc

SEQ ID NO: 1745268 - DNA, 25 bp, Homo sapien
cagaggcgttaatgatggcatccaa

SEQ ID NO: 1745269 - DNA, 25 bp, Homo sapien
gacccctaatttgtgaggcctcaga

SEQ ID NO: 1745270 - DNA, 25 bp, Homo sapien
catggtccctgagaaggacccctaa

SEQ ID NO: 1745271 - DNA, 25 bp, Homo sapien
ttttgatattgtgtacatccacaag

SEQ ID NO: 1745272 - DNA, 25 bp, Homo sapien
tttgatattgtgtacatccacaaga

SEQ ID NO: 1745273 - DNA, 25 bp, Homo sapien
cttccaccctgagtacttaactgct

SEQ ID NO: 1745274 - DNA, 25 bp, Homo sapien
ttccaccctgagtacttaactgctc

SEQ ID NO: 1745275 - DNA, 25 bp, Homo sapien
tttctgatgagcaagcagttcaggg

SEQ ID NO: 1745276 - DNA, 25 bp, Homo sapien
gcagttcaggggccgcataggcagg

SEQ ID NO: 1745277 - DNA, 25 bp, Homo sapien
cactttggggccatatttctgatga

SEQ ID NO: 1745278 - DNA, 25 bp, Homo sapien
tgaaccagacatccactttggggcc

SEQ ID NO: 1745279 - DNA, 25 bp, Homo sapien
tgctcaatactgaatatctccaatg

SEQ ID NO: 1745280 - DNA, 25 bp, Homo sapien
taggacattgctgattgcaccaatc

SEQ ID NO: 1745281 - DNA, 25 bp, Homo sapien
acggtaaggtgccagtcagcatcag

SEQ ID NO: 1745282 - DNA, 25 bp, Homo sapien
caaaggagatttcaggtaggacatt

SEQ ID NO: 1745283 - DNA, 25 bp, Homo sapien
aatattgtgggttgctattgctgcc

SEQ ID NO: 1745284 - DNA, 25 bp, Homo sapien
gctaccaaacttagagaccacagta

SEQ ID NO: 1745285 - DNA, 25 bp, Homo sapien
tgttgttcttgagcttcgctaccaa

SEQ ID NO: 1745286 - DNA, 25 bp, Homo sapien
tccccaaagtaacccaagatgctgt

SEQ ID NO: 1745287 - DNA, 25 bp, Homo sapien
tcaacatgaagacctttaagtaaaa

SEQ ID NO: 1745288 - DNA, 25 bp, Homo sapien
ggcagcctttcagagatagtatgga

SEQ ID NO: 1745289 - DNA, 25 bp, Homo sapien
ttaagtaaaaatggcagcctttcag

SEQ ID NO: 1745290 - DNA, 25 bp, Homo sapien
aaaatggcagcctttcagagatagt

SEQ ID NO: 1745291 - DNA, 25 bp, Homo sapien
caccaggacactggcaatttctgaa

SEQ ID NO: 1745292 - DNA, 25 bp, Homo sapien
gagaaggcttgttattcaccaggac

SEQ ID NO: 1745293 - DNA, 25 bp, Homo sapien
tgaaaggccaaattccatggtgttt

SEQ ID NO: 1745294 - DNA, 25 bp, Homo sapien
tacaaatccgtgataggagaaggct

SEQ ID NO: 1745295 - DNA, 25 bp, Homo sapien
tggagttacacttcacactgagagt

SEQ ID NO: 1745296 - DNA, 25 bp, Homo sapien
ttggagttacacttcacactgagag

SEQ ID NO: 1745297 - DNA, 25 bp, Homo sapien
ggagttacacttcacactgagagta

SEQ ID NO: 1745298 - DNA, 25 bp, Homo sapien
gagttacacttcacactgagagtag

SEQ ID NO: 1745299 - DNA, 25 bp, Homo sapien
cgtttgtactttcttcttcctccat

SEQ ID NO: 1745300 - DNA, 25 bp, Homo sapien
acattccagtgactaaatacagagt

SEQ ID NO: 1745301 - DNA, 25 bp, Homo sapien
cccacatctttacccttagagtgag

SEQ ID NO: 1745302 - DNA, 25 bp, Homo sapien
ctttacccttagagtgagcaggatt

SEQ ID NO: 1745303 - DNA, 25 bp, Homo sapien
ttatctcctagaataatgaggctgc

SEQ ID NO: 1745304 - DNA, 25 bp, Homo sapien
gcatcaatggtaacatcatctgaga

SEQ ID NO: 1745305 - DNA, 25 bp, Homo sapien
tctctggaccctatttatggtagcc

SEQ ID NO: 1745306 - DNA, 25 bp, Homo sapien
agcttctgactaaattctgggcacg

SEQ ID NO: 1745307 - DNA, 25 bp, Homo sapien
taaagccttctgtcaagaggttcct

SEQ ID NO: 1745308 - DNA, 25 bp, Homo sapien
tagccgagccggtcactttgctttc

SEQ ID NO: 1745309 - DNA, 25 bp, Homo sapien
cacagatatggtatcagatattcct

SEQ ID NO: 1745310 - DNA, 25 bp, Homo sapien
ttctggttctcttggagtgcccgag

SEQ ID NO: 1745311 - DNA, 25 bp, Homo sapien
tatgttttccagacaataacacaga

SEQ ID NO: 1745312 - DNA, 25 bp, Homo sapien
tgtagtcttgggtcaccatcttttg

SEQ ID NO: 1745313 - DNA, 25 bp, Homo sapien
ctctttgtactttgccacacttgca

SEQ ID NO: 1745314 - DNA, 25 bp, Homo sapien
cacaaactctttgtactttgccaca

SEQ ID NO: 1745315 - DNA, 25 bp, Homo sapien
acaaagtgaagccacgagggcctga

SEQ ID NO: 1745316 - DNA, 25 bp, Homo sapien
aaagtgaagccacgagggcctgaga

SEQ ID NO: 1745317 - DNA, 25 bp, Homo sapien
gcctgacacgaagccatttagaatt

SEQ ID NO: 1745318 - DNA, 25 bp, Homo sapien
gaagtgactatgctctgcggactcc

SEQ ID NO: 1745319 - DNA, 25 bp, Homo sapien
tcgtctcgtgttatcctcaaggcct

SEQ ID NO: 1745320 - DNA, 25 bp, Homo sapien
tggtgttcatggttttgactcgtct

SEQ ID NO: 1745321 - DNA, 25 bp, Homo sapien
tgttcttgatgacttctagttcatt

SEQ ID NO: 1745322 - DNA, 25 bp, Homo sapien
ttcagatctgaggtcagctcttgca

SEQ ID NO: 1745323 - DNA, 25 bp, Homo sapien
agctcttgcaactgtttcccagagg

SEQ ID NO: 1745324 - DNA, 25 bp, Homo sapien
aaatgtgttccctctaggacactga

SEQ ID NO: 1745325 - DNA, 25 bp, Homo sapien
ttcttcctccgccgcatccttcttc

SEQ ID NO: 1745326 - DNA, 25 bp, Homo sapien
ctccgccgcatccttcttcctccgc

SEQ ID NO: 1745327 - DNA, 25 bp, Homo sapien
tccgctccaccaccgcttccttctt

SEQ ID NO: 1745328 - DNA, 25 bp, Homo sapien
tgctgtgtccgctgtgtccgctcca

SEQ ID NO: 1745329 - DNA, 25 bp, Homo sapien
agatatcttcatgtggtacattcct

SEQ ID NO: 1745330 - DNA, 25 bp, Homo sapien
cagatatcttcatgtggtacattcc

SEQ ID NO: 1745331 - DNA, 25 bp, Homo sapien
gatatcttcatgtggtacattcctt

SEQ ID NO: 1745332 - DNA, 25 bp, Homo sapien
ttaattaaattcgttgattatcact

SEQ ID NO: 1745333 - DNA, 25 bp, Homo sapien
attaaattcgttgattatcacttga

SEQ ID NO: 1745334 - DNA, 25 bp, Homo sapien
aattaaattcgttgattatcacttg

SEQ ID NO: 1745335 - DNA, 25 bp, Homo sapien
tgcacttaattaaattcgttgatta

SEQ ID NO: 1745336 - DNA, 25 bp, Homo sapien
aagtcatcaattggtggatttcgat

SEQ ID NO: 1745337 - DNA, 25 bp, Homo sapien
tctgatggggtgaatggagaagcct

SEQ ID NO: 1745338 - DNA, 25 bp, Homo sapien
catcaattggtggatttcgatcact

SEQ ID NO: 1745339 - DNA, 25 bp, Homo sapien
tcaattggtggatttcgatcactgg

SEQ ID NO: 1745340 - DNA, 25 bp, Homo sapien
ctttaacttcgtggtggctgaggaa

SEQ ID NO: 1745341 - DNA, 25 bp, Homo sapien
gtaagagaggatcaagactgtatct

SEQ ID NO: 1745342 - DNA, 25 bp, Homo sapien
gactgtatctaccaatatatttacg

SEQ ID NO: 1745343 - DNA, 25 bp, Homo sapien
tatttacgtctatgtgatgaattaa

SEQ ID NO: 1745344 - DNA, 25 bp, Homo sapien
tgcccacagctcgaagtgcagcagt

SEQ ID NO: 1745345 - DNA, 25 bp, Homo sapien
tgctcatcagttcccataataatgt

SEQ ID NO: 1745346 - DNA, 25 bp, Homo sapien
gatattagagaggaaccacactgct

SEQ ID NO: 1745347 - DNA, 25 bp, Homo sapien
taaaagggcatcacagttcaacact

SEQ ID NO: 1745348 - DNA, 25 bp, Homo sapien
ttaagttacttatggcccaagcagc

SEQ ID NO: 1745349 - DNA, 25 bp, Homo sapien
taagttacttatggcccaagcagct

SEQ ID NO: 1745350 - DNA, 25 bp, Homo sapien
ctggccacgcgctgactgtccaggc

SEQ ID NO: 1745351 - DNA, 25 bp, Homo sapien
tggccacgcgctgactgtccaggcg

SEQ ID NO: 1745352 - DNA, 25 bp, Homo sapien
ggccacgcgctgactgtccaggcgc

SEQ ID NO: 1745353 - DNA, 25 bp, Homo sapien
ctgtggacaggcctctggaccccat

SEQ ID NO: 1745354 - DNA, 25 bp, Homo sapien
acccccggccatccctgtggacagg

SEQ ID NO: 1745355 - DNA, 25 bp, Homo sapien
ggccatccctgtggacaggcctctg

SEQ ID NO: 1745356 - DNA, 25 bp, Homo sapien
cccggccatccctgtggacaggcct

SEQ ID NO: 1745357 - DNA, 25 bp, Homo sapien
gatattgctctccggctaccaattc

SEQ ID NO: 1745358 - DNA, 25 bp, Homo sapien
cagatattgctctccggctaccaat

SEQ ID NO: 1745359 - DNA, 25 bp, Homo sapien
tattgctctccggctaccaattctc

SEQ ID NO: 1745360 - DNA, 25 bp, Homo sapien
attgctctccggctaccaattctcg

SEQ ID NO: 1745361 - DNA, 25 bp, Homo sapien
ccacagactggcacatggccagctc

SEQ ID NO: 1745362 - DNA, 25 bp, Homo sapien
actctcaagtcatcagcagcaagac

SEQ ID NO: 1745363 - DNA, 25 bp, Homo sapien
cagcagcaagacgggcattgtcgat

SEQ ID NO: 1745364 - DNA, 25 bp, Homo sapien
ttgcggagctcacggatgtcgctct

SEQ ID NO: 1745365 - DNA, 25 bp, Homo sapien
ttgaggcctcaatctctatctccag

SEQ ID NO: 1745366 - DNA, 25 bp, Homo sapien
cttgaggcctcaatctctatctcca

SEQ ID NO: 1745367 - DNA, 25 bp, Homo sapien
tccttgaggcctcaatctctatctc

SEQ ID NO: 1745368 - DNA, 25 bp, Homo sapien
cctccttgaggcctcaatctctatc

SEQ ID NO: 1745369 - DNA, 25 bp, Homo sapien
cagcttgccatattgggcccagttt

SEQ ID NO: 1745370 - DNA, 25 bp, Homo sapien
gcttgccatattgggcccagttttc

SEQ ID NO: 1745371 - DNA, 25 bp, Homo sapien
cttgccatattgggcccagttttct

SEQ ID NO: 1745372 - DNA, 25 bp, Homo sapien
agcttgccatattgggcccagtttt

SEQ ID NO: 1745373 - DNA, 25 bp, Homo sapien
cagctccataagcatatctcagcag

SEQ ID NO: 1745374 - DNA, 25 bp, Homo sapien
gtctcagctccataagcatatctca

SEQ ID NO: 1745375 - DNA, 25 bp, Homo sapien
atgtctcagctccataagcatatct

SEQ ID NO: 1745376 - DNA, 25 bp, Homo sapien
ccataagcatatctcagcagctcca

SEQ ID NO: 1745377 - DNA, 25 bp, Homo sapien
ctgcagggtgtagcgggcctccatc

SEQ ID NO: 1745378 - DNA, 25 bp, Homo sapien
cgggcctccatctccctcaggctgt

SEQ ID NO: 1745379 - DNA, 25 bp, Homo sapien
gggcctccatctccctcaggctgtt

SEQ ID NO: 1745380 - DNA, 25 bp, Homo sapien
cagggtgtagcgggcctccatctcc

SEQ ID NO: 1745381 - DNA, 25 bp, Homo sapien
aggtgcggccggatcctgttgagct

SEQ ID NO: 1745382 - DNA, 25 bp, Homo sapien
gcctggccctgtccttctgcctggg

SEQ ID NO: 1745383 - DNA, 25 bp, Homo sapien
tccaggtgcggccggatcctgttga

SEQ ID NO: 1745384 - DNA, 25 bp, Homo sapien
gccctgtccttctgcctgggtctgt

SEQ ID NO: 1745385 - DNA, 25 bp, Homo sapien
ttgtccatggtttatgccttatctt

SEQ ID NO: 1745386 - DNA, 25 bp, Homo sapien
tgagtactgcctgcacaacttgtgc

SEQ ID NO: 1745387 - DNA, 25 bp, Homo sapien
attacttagtccattgagtactgcc

SEQ ID NO: 1745388 - DNA, 25 bp, Homo sapien
catggtttatgccttatctttggcc

SEQ ID NO: 1745389 - DNA, 25 bp, Homo sapien
ctaacttccatgacgtctttctaaa

SEQ ID NO: 1745390 - DNA, 25 bp, Homo sapien
cttccatgacgtctttctaaaacta

SEQ ID NO: 1745391 - DNA, 25 bp, Homo sapien
taacttccatgacgtctttctaaaa

SEQ ID NO: 1745392 - DNA, 25 bp, Homo sapien
catgacgtctttctaaaactagaac

SEQ ID NO: 1745393 - DNA, 25 bp, Homo sapien
ggatttcttacaatgagccacctag

SEQ ID NO: 1745394 - DNA, 25 bp, Homo sapien
tgagccacctagttctttttgtaca

SEQ ID NO: 1745395 - DNA, 25 bp, Homo sapien
acaatgagccacctagttctttttg

SEQ ID NO: 1745396 - DNA, 25 bp, Homo sapien
ttcttacaatgagccacctagttct

SEQ ID NO: 1745397 - DNA, 25 bp, Homo sapien
tgtttgggcacacgtgggtaacaat

SEQ ID NO: 1745398 - DNA, 25 bp, Homo sapien
gtgtttgggcacacgtgggtaacaa

SEQ ID NO: 1745399 - DNA, 25 bp, Homo sapien
ggtgtttgggcacacgtgggtaaca

SEQ ID NO: 1745400 - DNA, 25 bp, Homo sapien
tgccaaccagcagctggctggtttg

SEQ ID NO: 1745401 - DNA, 25 bp, Homo sapien
gggatgtaataaccacaagccacat

SEQ ID NO: 1745402 - DNA, 25 bp, Homo sapien
gctggtttggggatgtaataaccac

SEQ ID NO: 1745403 - DNA, 25 bp, Homo sapien
tttggggatgtaataaccacaagcc

SEQ ID NO: 1745404 - DNA, 25 bp, Homo sapien
tcaggatgcttattcctgtttggga

SEQ ID NO: 1745405 - DNA, 25 bp, Homo sapien
aaagcctgcaggtcaagtggggtaa

SEQ ID NO: 1745406 - DNA, 25 bp, Homo sapien
attgcattcaaggggtcggcatttc

SEQ ID NO: 1745407 - DNA, 25 bp, Homo sapien
cacactcatagggcaaagcctgcag

SEQ ID NO: 1745408 - DNA, 25 bp, Homo sapien
ggtctttctaattccttctctgcag

SEQ ID NO: 1745409 - DNA, 25 bp, Homo sapien
caagcaacagaaacgcggtatttaa

SEQ ID NO: 1745410 - DNA, 25 bp, Homo sapien
tatgaaagttccaagcaacagaaac

SEQ ID NO: 1745411 - DNA, 25 bp, Homo sapien
agccagagggagtgtgaaatatagc

SEQ ID NO: 1745412 - DNA, 25 bp, Homo sapien
gctcagcagctgaagcactgccaat

SEQ ID NO: 1745413 - DNA, 25 bp, Homo sapien
gccaatggttgcatggggaacaaca

SEQ ID NO: 1745414 - DNA, 25 bp, Homo sapien
tgccttggcttcaatagactagaac

SEQ ID NO: 1745415 - DNA, 25 bp, Homo sapien
agaacaggcctcagctggcttaggg

SEQ ID NO: 1745416 - DNA, 25 bp, Homo sapien
catcaagtctgatgtttatgacact

SEQ ID NO: 1745417 - DNA, 25 bp, Homo sapien
tggaccaaagatcatcaagtctgat

SEQ ID NO: 1745418 - DNA, 25 bp, Homo sapien
gatgtttatgacactccagttacaa

SEQ ID NO: 1745419 - DNA, 25 bp, Homo sapien
ggaccaaagatcatcaagtctgatg

SEQ ID NO: 1745420 - DNA, 25 bp, Homo sapien
gctgctaccctttgtaagaatcatt

SEQ ID NO: 1745421 - DNA, 25 bp, Homo sapien
agtagagggcgctgctaccctttgt

SEQ ID NO: 1745422 - DNA, 25 bp, Homo sapien
catactcagacttccaccttgtaaa

SEQ ID NO: 1745423 - DNA, 25 bp, Homo sapien
gagggcgctgctaccctttgtaaga

SEQ ID NO: 1745424 - DNA, 25 bp, Homo sapien
agtaggtactgttccagcaatcttc

SEQ ID NO: 1745425 - DNA, 25 bp, Homo sapien
aagtaggtactgttccagcaatctt

SEQ ID NO: 1745426 - DNA, 25 bp, Homo sapien
ttccagcaatcttccgggcacgtcc

SEQ ID NO: 1745427 - DNA, 25 bp, Homo sapien
ccagcaatcttccgggcacgtccct

SEQ ID NO: 1745428 - DNA, 25 bp, Homo sapien
agaattggttggatctattaaagct

SEQ ID NO: 1745429 - DNA, 25 bp, Homo sapien
caagaattggttggatctattaaag

SEQ ID NO: 1745430 - DNA, 25 bp, Homo sapien
tcaagaattggttggatctattaaa

SEQ ID NO: 1745431 - DNA, 25 bp, Homo sapien
aagaattggttggatctattaaagc

SEQ ID NO: 1745432 - DNA, 25 bp, Homo sapien
tctgtatgggccagtgttgcactat

SEQ ID NO: 1745433 - DNA, 25 bp, Homo sapien
gtgttgcactatccctgcgatgagg

SEQ ID NO: 1745434 - DNA, 25 bp, Homo sapien
tgcttggtttggtctgtatgggcca

SEQ ID NO: 1745435 - DNA, 25 bp, Homo sapien
tgcatgtttgcagtgcttggtttgg

SEQ ID NO: 1745436 - DNA, 25 bp, Homo sapien
gggacagtcctctgatttgctttgg

SEQ ID NO: 1745437 - DNA, 25 bp, Homo sapien
cagtcctctgatttgctttggtgat

SEQ ID NO: 1745438 - DNA, 25 bp, Homo sapien
gaagcaagatctcagaagtgcaggt

SEQ ID NO: 1745439 - DNA, 25 bp, Homo sapien
ctactgtggaaaggagggacagtcc

SEQ ID NO: 1745440 - DNA, 25 bp, Homo sapien
cccacatgggcagttgcgacttctg

SEQ ID NO: 1745441 - DNA, 25 bp, Homo sapien
gcagctgccagctttactactgcct

SEQ ID NO: 1745442 - DNA, 25 bp, Homo sapien
ttcctgagtggtcaaccctgggcag

SEQ ID NO: 1745443 - DNA, 25 bp, Homo sapien
taaagctgttcactactgtggccca

SEQ ID NO: 1745444 - DNA, 25 bp, Homo sapien
cttctgggagattccaaaaaggcaa

SEQ ID NO: 1745445 - DNA, 25 bp, Homo sapien
ttcttctgggagattccaaaaaggc

SEQ ID NO: 1745446 - DNA, 25 bp, Homo sapien
ggagattccaaaaaggcaaagctgc

SEQ ID NO: 1745447 - DNA, 25 bp, Homo sapien
cttaggaagcttcttctgggagatt

SEQ ID NO: 1745448 - DNA, 25 bp, Homo sapien
tgtccatggctctttgtttctctcc

SEQ ID NO: 1745449 - DNA, 25 bp, Homo sapien
ctgtccatggctctttgtttctctc

SEQ ID NO: 1745450 - DNA, 25 bp, Homo sapien
catttcccccagcaaatcggctggc

SEQ ID NO: 1745451 - DNA, 25 bp, Homo sapien
ttcccccagcaaatcggctggcctg

SEQ ID NO: 1745452 - DNA, 25 bp, Homo sapien
ccagcaaatcggctggcctgtggag

SEQ ID NO: 1745453 - DNA, 25 bp, Homo sapien
tggaggagggtgacatgcagctgtg

SEQ ID NO: 1745454 - DNA, 25 bp, Homo sapien
gcaggaaacaagcttcacaaaagaa

SEQ ID NO: 1745455 - DNA, 25 bp, Homo sapien
ctgcaggaaacaagcttcacaaaag

SEQ ID NO: 1745456 - DNA, 25 bp, Homo sapien
aggaaacaagcttcacaaaagaagc

SEQ ID NO: 1745457 - DNA, 25 bp, Homo sapien
tgcaggaaacaagcttcacaaaaga

SEQ ID NO: 1745458 - DNA, 25 bp, Homo sapien
tacaaaatccgggagactgcggatg

SEQ ID NO: 1745459 - DNA, 25 bp, Homo sapien
aagcgaaggtaccaaaagcacagta

SEQ ID NO: 1745460 - DNA, 25 bp, Homo sapien
tcccacatttacaaaatccgggaga

SEQ ID NO: 1745461 - DNA, 25 bp, Homo sapien
tgaaggcactgaaagcgaaggtacc

SEQ ID NO: 1745462 - DNA, 25 bp, Homo sapien
gagccgggcgagtgccggcgagtag

SEQ ID NO: 1745463 - DNA, 25 bp, Homo sapien
cgagtaggggcgagcagctagggcc

SEQ ID NO: 1745464 - DNA, 25 bp, Homo sapien
aactgggtgcgaaagcgggcgagcc

SEQ ID NO: 1745465 - DNA, 25 bp, Homo sapien
agctgtggcgcgtgaactgggtgcg

SEQ ID NO: 1745466 - DNA, 25 bp, Homo sapien
gcgttcatgaagtgcgccacctcgg

SEQ ID NO: 1745467 - DNA, 25 bp, Homo sapien
agatagtgccctggtactggtcgcc

SEQ ID NO: 1745468 - DNA, 25 bp, Homo sapien
tgtacacggtgaaccagatagtgcc

SEQ ID NO: 1745469 - DNA, 25 bp, Homo sapien
tgtgcaaaatcgtaagctcccaggc

SEQ ID NO: 1745470 - DNA, 25 bp, Homo sapien
gggacttctatgcatccagctggca

SEQ ID NO: 1745471 - DNA, 25 bp, Homo sapien
taagacgaatcgtccaagggacttc

SEQ ID NO: 1745472 - DNA, 25 bp, Homo sapien
gcacactggccggagtctcacttta

SEQ ID NO: 1745473 - DNA, 25 bp, Homo sapien
gtccctagctctggataactgtcag

SEQ ID NO: 1745474 - DNA, 25 bp, Homo sapien
cacgtctccctttttgcggggatgg

SEQ ID NO: 1745475 - DNA, 25 bp, Homo sapien
cctttcaataagattgagataaagc

SEQ ID NO: 1745476 - DNA, 25 bp, Homo sapien
tattcagcttcttcgacgcggtttc

SEQ ID NO: 1745477 - DNA, 25 bp, Homo sapien
gggatggtgcctgttaatttattca

SEQ ID NO: 1745478 - DNA, 25 bp, Homo sapien
gaccacagagttcttgaaacccacg

SEQ ID NO: 1745479 - DNA, 25 bp, Homo sapien
tcaaaagcatcagaacggagggagc

SEQ ID NO: 1745480 - DNA, 25 bp, Homo sapien
cagggtgtccctgataagctcaaaa

SEQ ID NO: 1745481 - DNA, 25 bp, Homo sapien
gaataccaatgcttaagagaccaca

SEQ ID NO: 1745482 - DNA, 25 bp, Homo sapien
ggcctcacctagatgtcctgtcata

SEQ ID NO: 1745483 - DNA, 25 bp, Homo sapien
taaaaagggttcacacaattgtgga

SEQ ID NO: 1745484 - DNA, 25 bp, Homo sapien
caactagacttacaagagggaaata

SEQ ID NO: 1745485 - DNA, 25 bp, Homo sapien
ttaacaccaggagctcaactagact

SEQ ID NO: 1745486 - DNA, 25 bp, Homo sapien
gtggctcctttgaactaggtccagt

SEQ ID NO: 1745487 - DNA, 25 bp, Homo sapien
ttgtcctccatatgcttcagtcctt

SEQ ID NO: 1745488 - DNA, 25 bp, Homo sapien
ggagatgcccctccacaactgtttt

SEQ ID NO: 1745489 - DNA, 25 bp, Homo sapien
gcttcagtccttttatgtggctcct

SEQ ID NO: 1745490 - DNA, 25 bp, Homo sapien
ggtgagaccatccaggaagatatct

SEQ ID NO: 1745491 - DNA, 25 bp, Homo sapien
cagggagcagatgggtaaaatacgt

SEQ ID NO: 1745492 - DNA, 25 bp, Homo sapien
gtactcaaagtatgccctgtggcca

SEQ ID NO: 1745493 - DNA, 25 bp, Homo sapien
gcagggtgttagacgccatctccaa

SEQ ID NO: 1745494 - DNA, 25 bp, Homo sapien
tctgtgtttcctcctgcagacaatg

SEQ ID NO: 1745495 - DNA, 25 bp, Homo sapien
gcaggccaacgtcctgcaggccagg

SEQ ID NO: 1745496 - DNA, 25 bp, Homo sapien
caggccagggtcaagtctgaggcct

SEQ ID NO: 1745497 - DNA, 25 bp, Homo sapien
ccagggtcaagtctgaggcctccat

SEQ ID NO: 1745498 - DNA, 25 bp, Homo sapien
tggcaggatagggaggagtggggag

SEQ ID NO: 1745499 - DNA, 25 bp, Homo sapien
ctggcaggatagggaggagtgggga

SEQ ID NO: 1745500 - DNA, 25 bp, Homo sapien
agcgtcactggagctaagcgccctt

SEQ ID NO: 1745501 - DNA, 25 bp, Homo sapien
cgtcactggagctaagcgcccttct

SEQ ID NO: 1745502 - DNA, 25 bp, Homo sapien
cactggagctaagcgcccttctctg

SEQ ID NO: 1745503 - DNA, 25 bp, Homo sapien
ggagctaagcgcccttctctgctgg

SEQ ID NO: 1745504 - DNA, 25 bp, Homo sapien
tgctcctccgtgcatttccaacagg

SEQ ID NO: 1745505 - DNA, 25 bp, Homo sapien
aacaggaaccatatgcatcctcaca

SEQ ID NO: 1745506 - DNA, 25 bp, Homo sapien
tccgtgcatttccaacaggaaccat

SEQ ID NO: 1745507 - DNA, 25 bp, Homo sapien
cttctggtgtttcactgctcctccg

SEQ ID NO: 1745508 - DNA, 25 bp, Homo sapien
gctggtttgctaacttagtacttaa

SEQ ID NO: 1745509 - DNA, 25 bp, Homo sapien
gctaaataccacatccagtttcgtt

SEQ ID NO: 1745510 - DNA, 25 bp, Homo sapien
caaggctggtttgctaacttagtac

SEQ ID NO: 1745511 - DNA, 25 bp, Homo sapien
cagtttcgtttcactttgtgggtca

SEQ ID NO: 1745512 - DNA, 25 bp, Homo sapien
ttgcagctccccgtagtgagttggg

SEQ ID NO: 1745513 - DNA, 25 bp, Homo sapien
cattttgcagctccccgtagtgagt

SEQ ID NO: 1745514 - DNA, 25 bp, Homo sapien
tgtcattttgcagctccccgtagtg

SEQ ID NO: 1745515 - DNA, 25 bp, Homo sapien
tgtctgtcattttgcagctccccgt

SEQ ID NO: 1745516 - DNA, 25 bp, Homo sapien
cattcctcactggttgaggagtggc

SEQ ID NO: 1745517 - DNA, 25 bp, Homo sapien
ggagtggctgctgggtacaaaacca

SEQ ID NO: 1745518 - DNA, 25 bp, Homo sapien
agtggctgctgggtacaaaaccacc

SEQ ID NO: 1745519 - DNA, 25 bp, Homo sapien
ctcccattcctcactggttgaggag

SEQ ID NO: 1745520 - DNA, 25 bp, Homo sapien
ttcagaccccatgattcaagccgcg

SEQ ID NO: 1745521 - DNA, 25 bp, Homo sapien
cagaccccatgattcaagccgcgat

SEQ ID NO: 1745522 - DNA, 25 bp, Homo sapien
cacatttcagaccccatgattcaag

SEQ ID NO: 1745523 - DNA, 25 bp, Homo sapien
catttcagaccccatgattcaagcc

SEQ ID NO: 1745524 - DNA, 25 bp, Homo sapien
gaagtgtatccaacgattcccacaa

SEQ ID NO: 1745525 - DNA, 25 bp, Homo sapien
gagtggctcgatcagtccttccaca

SEQ ID NO: 1745526 - DNA, 25 bp, Homo sapien
agtggcccctttgctttaatgtttg

SEQ ID NO: 1745527 - DNA, 25 bp, Homo sapien
gatatttgagatgctagtggcccct

SEQ ID NO: 1745528 - DNA, 25 bp, Homo sapien
cactttctgagcgatgagtttatcc

SEQ ID NO: 1745529 - DNA, 25 bp, Homo sapien
atttcaaaacccgaatgtcccagtg

SEQ ID NO: 1745530 - DNA, 25 bp, Homo sapien
gaatgtcccagtgcaataattttgt

SEQ ID NO: 1745531 - DNA, 25 bp, Homo sapien
taacttatctacttcaggttgtaat

SEQ ID NO: 1745532 - DNA, 25 bp, Homo sapien
ttggagtgtcctcccaccacgacgt

SEQ ID NO: 1745533 - DNA, 25 bp, Homo sapien
tgtgttggagtgtcctcccaccacg

SEQ ID NO: 1745534 - DNA, 25 bp, Homo sapien
aagaaatgtgttggagtgtcctccc

SEQ ID NO: 1745535 - DNA, 25 bp, Homo sapien
ctgtgtaaagaaatgtgttggagtg

SEQ ID NO: 1745536 - DNA, 25 bp, Homo sapien
tggcccatgcaatccttttgaaaca

SEQ ID NO: 1745537 - DNA, 25 bp, Homo sapien
ttatctggacatcctggcccatgca

SEQ ID NO: 1745538 - DNA, 25 bp, Homo sapien
cccatgcaatccttttgaaacaatt

SEQ ID NO: 1745539 - DNA, 25 bp, Homo sapien
cctggcccatgcaatccttttgaaa

SEQ ID NO: 1745540 - DNA, 25 bp, Homo sapien
catattaaatagcagtaaaaagagt

SEQ ID NO: 1745541 - DNA, 25 bp, Homo sapien
tatagatcatataatatacattaca

SEQ ID NO: 1745542 - DNA, 25 bp, Homo sapien
tgttcccatttaatgtatattacat

SEQ ID NO: 1745543 - DNA, 25 bp, Homo sapien
tttgtaagatttgcacatgttccca

SEQ ID NO: 1745544 - DNA, 25 bp, Homo sapien
cctctgtctcaaaggggagatgtgg

SEQ ID NO: 1745545 - DNA, 25 bp, Homo sapien
aaccagcaggcacactcctgacccc

SEQ ID NO: 1745546 - DNA, 25 bp, Homo sapien
ggccaaccagcaggcacactcctga

SEQ ID NO: 1745547 - DNA, 25 bp, Homo sapien
acccagaggctaggaggcccaccac

SEQ ID NO: 1745548 - DNA, 25 bp, Homo sapien
gccaaaagcataggcctggactaca

SEQ ID NO: 1745549 - DNA, 25 bp, Homo sapien
gatagcctaggtatttgccaaaagc

SEQ ID NO: 1745550 - DNA, 25 bp, Homo sapien
ccatgggaagagatgacgtttcctc

SEQ ID NO: 1745551 - DNA, 25 bp, Homo sapien
gactatgaatgggtacttcccagca

SEQ ID NO: 1745552 - DNA, 25 bp, Homo sapien
tgctgctgtttagaagaatgggatt

SEQ ID NO: 1745553 - DNA, 25 bp, Homo sapien
cttcaggaatgctgctgtttagaag

SEQ ID NO: 1745554 - DNA, 25 bp, Homo sapien
caggaatgctgctgtttagaagaat

SEQ ID NO: 1745555 - DNA, 25 bp, Homo sapien
atgctgctgtttagaagaatgggat

SEQ ID NO: 1745556 - DNA, 25 bp, Homo sapien
cacaaatcaggttgcccatgttgca

SEQ ID NO: 1745557 - DNA, 25 bp, Homo sapien
ccatgttgcattctctaaagcggca

SEQ ID NO: 1745558 - DNA, 25 bp, Homo sapien
ccagatagacaattgttttccctaa

SEQ ID NO: 1745559 - DNA, 25 bp, Homo sapien
attgagaggagccatccagatagac

SEQ ID NO: 1745560 - DNA, 25 bp, Homo sapien
cggataccacctccatttaaaatgc

SEQ ID NO: 1745561 - DNA, 25 bp, Homo sapien
tccgtgtgtctcaggttgttgttaa

SEQ ID NO: 1745562 - DNA, 25 bp, Homo sapien
tgttgcgttcatcaatgggcgaccg

SEQ ID NO: 1745563 - DNA, 25 bp, Homo sapien
cacatggatacgtggttccagaaca

SEQ ID NO: 1745564 - DNA, 25 bp, Homo sapien
tcagggcaagaaccataacagaaaa

SEQ ID NO: 1745565 - DNA, 25 bp, Homo sapien
agagagagaacatgacacactgagg

SEQ ID NO: 1745566 - DNA, 25 bp, Homo sapien
gcaagaaccataacagaaaaggaga

SEQ ID NO: 1745567 - DNA, 25 bp, Homo sapien
gaaccataacagaaaaggagatcag

SEQ ID NO: 1745568 - DNA, 25 bp, Homo sapien
gactgacattctggtacatggctgg

SEQ ID NO: 1745569 - DNA, 25 bp, Homo sapien
gtcagaaattcagaccaagtttgag

SEQ ID NO: 1745570 - DNA, 25 bp, Homo sapien
tgagttccactaaccttacctgcag

SEQ ID NO: 1745571 - DNA, 25 bp, Homo sapien
tcagatgccaaggtggtgactgttg

SEQ ID NO: 1745572 - DNA, 25 bp, Homo sapien
tgcctcagaagttcaccatgctcag

SEQ ID NO: 1745573 - DNA, 25 bp, Homo sapien
aatgagtttaggaggcctctggccc

SEQ ID NO: 1745574 - DNA, 25 bp, Homo sapien
aagatggcgggagctcacaaatggc

SEQ ID NO: 1745575 - DNA, 25 bp, Homo sapien
ttttcacagtaaatcagggagggct

SEQ ID NO: 1745576 - DNA, 25 bp, Homo sapien
gcggtgcacgctatgctcaaaggcc

SEQ ID NO: 1745577 - DNA, 25 bp, Homo sapien
gcctccaaagggcaatacagcagcc

SEQ ID NO: 1745578 - DNA, 25 bp, Homo sapien
tctccagtggactggccgtagcggt

SEQ ID NO: 1745579 - DNA, 25 bp, Homo sapien
ttaactggactaggtcaaatgtgcc

SEQ ID NO: 1745580 - DNA, 25 bp, Homo sapien
atactgcttattgccagggctttgg

SEQ ID NO: 1745581 - DNA, 25 bp, Homo sapien
tattagaaactagacctcaaagcag

SEQ ID NO: 1745582 - DNA, 25 bp, Homo sapien
ctttgaccccaacctaatcttagtg

SEQ ID NO: 1745583 - DNA, 25 bp, Homo sapien
aaatccaaaccagtttgaccacagg

SEQ ID NO: 1745584 - DNA, 25 bp, Homo sapien
gctccttccaggaatcatcctggtt

SEQ ID NO: 1745585 - DNA, 25 bp, Homo sapien
ggtgttcaggtatgtctgtgcagta

SEQ ID NO: 1745586 - DNA, 25 bp, Homo sapien
gtatgtctgtgcagtaggctgctcc

SEQ ID NO: 1745587 - DNA, 25 bp, Homo sapien
cctggttaatacagattggacagca

SEQ ID NO: 1745588 - DNA, 25 bp, Homo sapien
agtgtttcagaagcccttggcaatt

SEQ ID NO: 1745589 - DNA, 25 bp, Homo sapien
agcccttggcaatttaggaagcatt

SEQ ID NO: 1745590 - DNA, 25 bp, Homo sapien
ttaattcactggactgtggaattat

SEQ ID NO: 1745591 - DNA, 25 bp, Homo sapien
gcccttggcaatttaggaagcattt

SEQ ID NO: 1745592 - DNA, 25 bp, Homo sapien
caggttttcgggaaagatcatacac

SEQ ID NO: 1745593 - DNA, 25 bp, Homo sapien
tttgagagggtcataactgggcact

SEQ ID NO: 1745594 - DNA, 25 bp, Homo sapien
caccattggccaggaagtttgggag

SEQ ID NO: 1745595 - DNA, 25 bp, Homo sapien
tcgacacttggtgcaaagaacatct

SEQ ID NO: 1745596 - DNA, 25 bp, Homo sapien
agctccccttcttggcccaattttg

SEQ ID NO: 1745597 - DNA, 25 bp, Homo sapien
ctagtagctccccttcttggcccaa

SEQ ID NO: 1745598 - DNA, 25 bp, Homo sapien
tagtagctccccttcttggcccaat

SEQ ID NO: 1745599 - DNA, 25 bp, Homo sapien
agtagctccccttcttggcccaatt

SEQ ID NO: 1745600 - DNA, 25 bp, Homo sapien
gacagggtacatattcctctctgct

SEQ ID NO: 1745601 - DNA, 25 bp, Homo sapien
caaagcaggagggagtcagcaatac

SEQ ID NO: 1745602 - DNA, 25 bp, Homo sapien
tgctcggggattgacagggtacata

SEQ ID NO: 1745603 - DNA, 25 bp, Homo sapien
tcctaaaattccagaggtgtgatat

SEQ ID NO: 1745604 - DNA, 25 bp, Homo sapien
gctgcctcctttggtctggtcctgc

SEQ ID NO: 1745605 - DNA, 25 bp, Homo sapien
ggctgcctcctttggtctggtcctg

SEQ ID NO: 1745606 - DNA, 25 bp, Homo sapien
tagaaaccacgttgatatcttggtc

SEQ ID NO: 1745607 - DNA, 25 bp, Homo sapien
ttggagatatatgtagaaaccacgt

SEQ ID NO: 1745608 - DNA, 25 bp, Homo sapien
gaaaccacgttgatatcttggtcac

SEQ ID NO: 1745609 - DNA, 25 bp, Homo sapien
tgtagaaaccacgttgatatcttgg

SEQ ID NO: 1745610 - DNA, 25 bp, Homo sapien
aacaaagatcactgcccaaagtgaa

SEQ ID NO: 1745611 - DNA, 25 bp, Homo sapien
acaaagatcactgcccaaagtgaaa

SEQ ID NO: 1745612 - DNA, 25 bp, Homo sapien
caaagatcactgcccaaagtgaaag

SEQ ID NO: 1745613 - DNA, 25 bp, Homo sapien
ggttgctgaccctgagtaatcatgt

SEQ ID NO: 1745614 - DNA, 25 bp, Homo sapien
catcaaaggcacatgggtgttgcaa

SEQ ID NO: 1745615 - DNA, 25 bp, Homo sapien
ggtctaggtcttggatctgtcagca

SEQ ID NO: 1745616 - DNA, 25 bp, Homo sapien
ttagctgtatggtcaagtcaaccct

SEQ ID NO: 1745617 - DNA, 25 bp, Homo sapien
tcatttattttcttcgagaactctg

SEQ ID NO: 1745618 - DNA, 25 bp, Homo sapien
tcttcgagaactctggacattccat

SEQ ID NO: 1745619 - DNA, 25 bp, Homo sapien
ctctggacattccataactgggtgt

SEQ ID NO: 1745620 - DNA, 25 bp, Homo sapien
ccataactgggtgtgtagtatgagt

SEQ ID NO: 1745621 - DNA, 25 bp, Homo sapien
tccatatatgcatagaaccgaggct

SEQ ID NO: 1745622 - DNA, 25 bp, Homo sapien
gcataggtcatttcatcagcatggg

SEQ ID NO: 1745623 - DNA, 25 bp, Homo sapien
attacttatgcagagctgagcaggc

SEQ ID NO: 1745624 - DNA, 25 bp, Homo sapien
gaagttctcatatctgggcttaaga

SEQ ID NO: 1745625 - DNA, 25 bp, Homo sapien
gaggaagatcttaggcacacagcca

SEQ ID NO: 1745626 - DNA, 25 bp, Homo sapien
tatttgtaggaatcagtactggcct

SEQ ID NO: 1745627 - DNA, 25 bp, Homo sapien
ggtataacgaaaccaactcattgtg

SEQ ID NO: 1745628 - DNA, 25 bp, Homo sapien
taatacatagcccaaacaaagacag

SEQ ID NO: 1745629 - DNA, 25 bp, Homo sapien
ttgaaaataattatgcctagtatgg

SEQ ID NO: 1745630 - DNA, 25 bp, Homo sapien
gactgataaacttcgtattgtatag

SEQ ID NO: 1745631 - DNA, 25 bp, Homo sapien
ggagaaacaggaataagatctgatt

SEQ ID NO: 1745632 - DNA, 25 bp, Homo sapien
ttcataatgatgttatggcaaacag

SEQ ID NO: 1745633 - DNA, 25 bp, Homo sapien
caccattgtatgctgtgtaagtcag

SEQ ID NO: 1745634 - DNA, 25 bp, Homo sapien
caagctcagtgttatcgtctgcacc

SEQ ID NO: 1745635 - DNA, 25 bp, Homo sapien
taagtcctagcactagaataggcca

SEQ ID NO: 1745636 - DNA, 25 bp, Homo sapien
taattacaagcagatagggacccta

SEQ ID NO: 1745637 - DNA, 25 bp, Homo sapien
tatgatccagttaatggtgagtcac

SEQ ID NO: 1745638 - DNA, 25 bp, Homo sapien
ttttgcctagtatctgggaaacagg

SEQ ID NO: 1745639 - DNA, 25 bp, Homo sapien
gccttgtgcattgtgaatctccaaa

SEQ ID NO: 1745640 - DNA, 25 bp, Homo sapien
tatccaggagcctcttatagaaaca

SEQ ID NO: 1745641 - DNA, 25 bp, Homo sapien
gatgtacaaacatcattttagggtt

SEQ ID NO: 1745642 - DNA, 25 bp, Homo sapien
tgtacaaacatcattttagggttta

SEQ ID NO: 1745643 - DNA, 25 bp, Homo sapien
cagatgtacaaacatcattttaggg

SEQ ID NO: 1745644 - DNA, 25 bp, Homo sapien
tacagatgtacaaacatcattttag

SEQ ID NO: 1745645 - DNA, 25 bp, Homo sapien
gaaaataccaaggatgtactatgcc

SEQ ID NO: 1745646 - DNA, 25 bp, Homo sapien
tcttattcactgagaaaagtctgcc

SEQ ID NO: 1745647 - DNA, 25 bp, Homo sapien
caaaagtccagaaattaggtgttct

SEQ ID NO: 1745648 - DNA, 25 bp, Homo sapien
caaatctgaactcgttggaccctaa

SEQ ID NO: 1745649 - DNA, 25 bp, Homo sapien
gactcaagttctttggtctggactt

SEQ ID NO: 1745650 - DNA, 25 bp, Homo sapien
tagtaaggttttgtctagtagaatc

SEQ ID NO: 1745651 - DNA, 25 bp, Homo sapien
cagcctacattgtgattttaagcca

SEQ ID NO: 1745652 - DNA, 25 bp, Homo sapien
gctgttttactaggatagaaagcca

SEQ ID NO: 1745653 - DNA, 25 bp, Homo sapien
tgagcacacctaatactccccgaaa

SEQ ID NO: 1745654 - DNA, 25 bp, Homo sapien
ttctccagtggaggctgtgagcaca

SEQ ID NO: 1745655 - DNA, 25 bp, Homo sapien
gcatggaaaattagcattccatatg

SEQ ID NO: 1745656 - DNA, 25 bp, Homo sapien
ttgttgtaatggaagatgattctcc

SEQ ID NO: 1745657 - DNA, 25 bp, Homo sapien
gttttcaataaactagactgttgtg

SEQ ID NO: 1745658 - DNA, 25 bp, Homo sapien
actgttgtgataatttgctatgtac

SEQ ID NO: 1745659 - DNA, 25 bp, Homo sapien
taaaggagtattcaaaagtaccaca

SEQ ID NO: 1745660 - DNA, 25 bp, Homo sapien
caatggagggagctatgttgcctaa

SEQ ID NO: 1745661 - DNA, 25 bp, Homo sapien
aaaagcaactgaaccggcttctcct

SEQ ID NO: 1745662 - DNA, 25 bp, Homo sapien
gtgcagattttttgctactgctcca

SEQ ID NO: 1745663 - DNA, 25 bp, Homo sapien
gaaaacacttcagattgcattgaat

SEQ ID NO: 1745664 - DNA, 25 bp, Homo sapien
cactaggatactgtgaatcatttgc

SEQ ID NO: 1745665 - DNA, 25 bp, Homo sapien
gcatacataagagagtgtaaaaaac

SEQ ID NO: 1745666 - DNA, 25 bp, Homo sapien
aagaaatgtcttatagagtgggtga

SEQ ID NO: 1745667 - DNA, 25 bp, Homo sapien
tttaacaactatccatattttgcca

SEQ ID NO: 1745668 - DNA, 25 bp, Homo sapien
gcaagcacccattactcaactttaa

SEQ ID NO: 1745669 - DNA, 25 bp, Homo sapien
cttcttaacaggtaacgccgcagcg

SEQ ID NO: 1745670 - DNA, 25 bp, Homo sapien
gcttttctccgaaggtgcagacgcc

SEQ ID NO: 1745671 - DNA, 25 bp, Homo sapien
taactgccggtaggcgtctgtgtgc

SEQ ID NO: 1745672 - DNA, 25 bp, Homo sapien
tcgccgttacggagatggtgccctg

SEQ ID NO: 1745673 - DNA, 25 bp, Homo sapien
gggctgggcccagccggacgcgacc

SEQ ID NO: 1745674 - DNA, 25 bp, Homo sapien
gtggggctgggcccagccggacgcg

SEQ ID NO: 1745675 - DNA, 25 bp, Homo sapien
gggcgtggggctgggcccagccgga

SEQ ID NO: 1745676 - DNA, 25 bp, Homo sapien
ggcgtggggctgggcccagccggac

SEQ ID NO: 1745677 - DNA, 25 bp, Homo sapien
ttaggcgtcacgcaaagctcggacc

SEQ ID NO: 1745678 - DNA, 25 bp, Homo sapien
agtttccacggaagactgcgcgcta

SEQ ID NO: 1745679 - DNA, 25 bp, Homo sapien
gatttccggaaatggccggtcgcca

SEQ ID NO: 1745680 - DNA, 25 bp, Homo sapien
tccctctgcgggttcgtgtcacgaa

SEQ ID NO: 1745681 - DNA, 25 bp, Homo sapien
gaaagtgcttagtgtctgtaccgcc

SEQ ID NO: 1745682 - DNA, 25 bp, Homo sapien
cccgtgagcgcgcaaaagagatttt

SEQ ID NO: 1745683 - DNA, 25 bp, Homo sapien
gggaaaaccccatgagactctataa

SEQ ID NO: 1745684 - DNA, 25 bp, Homo sapien
aattgagctctacccttgcccgtga

SEQ ID NO: 1745685 - DNA, 25 bp, Homo sapien
taccaggcaggttaataacttacat

SEQ ID NO: 1745686 - DNA, 25 bp, Homo sapien
taagctttccaatgatgttacactg

SEQ ID NO: 1745687 - DNA, 25 bp, Homo sapien
gcactcaagtccataggaggcactt

SEQ ID NO: 1745688 - DNA, 25 bp, Homo sapien
tggtttagtcacaaacagaaaagtg

SEQ ID NO: 1745689 - DNA, 25 bp, Homo sapien
tcctaggtgtcttaactgtgaagca

SEQ ID NO: 1745690 - DNA, 25 bp, Homo sapien
cagtacttgcaagggactatctaga

SEQ ID NO: 1745691 - DNA, 25 bp, Homo sapien
tccaccatggtaagtaatagtttct

SEQ ID NO: 1745692 - DNA, 25 bp, Homo sapien
tagaaaacacgatggaacttggcag

SEQ ID NO: 1745693 - DNA, 25 bp, Homo sapien
tctgattaccagtgactccccaagt

SEQ ID NO: 1745694 - DNA, 25 bp, Homo sapien
gaattgggagttaacctgaatcaca

SEQ ID NO: 1745695 - DNA, 25 bp, Homo sapien
catatagtccaaaatagcatcggtg

SEQ ID NO: 1745696 - DNA, 25 bp, Homo sapien
tgaggaggaaaactatcaagctctc

SEQ ID NO: 1745697 - DNA, 25 bp, Homo sapien
gtttgagggctacacaaaacattta

SEQ ID NO: 1745698 - DNA, 25 bp, Homo sapien
tgggtaaactaaatgtagccttcag

SEQ ID NO: 1745699 - DNA, 25 bp, Homo sapien
tatgtcagttactgggatagctggg

SEQ ID NO: 1745700 - DNA, 25 bp, Homo sapien
tatatgtaaatgtgccttgccggtt

SEQ ID NO: 1745701 - DNA, 25 bp, Homo sapien
tccccaaagggatactgcagttata

SEQ ID NO: 1745702 - DNA, 25 bp, Homo sapien
agtgtccagtggtgaagcatcctct

SEQ ID NO: 1745703 - DNA, 25 bp, Homo sapien
tgacaattgtacagcgaagcctgac

SEQ ID NO: 1745704 - DNA, 25 bp, Homo sapien
taggcaccacgatgaagatcagagc

SEQ ID NO: 1745705 - DNA, 25 bp, Homo sapien
tgtaacattcttagttgcctttagt

SEQ ID NO: 1745706 - DNA, 25 bp, Homo sapien
tgtaagacttcctcatgaccatcat

SEQ ID NO: 1745707 - DNA, 25 bp, Homo sapien
gaccatcataacaggccttgctttt

SEQ ID NO: 1745708 - DNA, 25 bp, Homo sapien
gcttttgtcgtattttgtggctgaa

SEQ ID NO: 1745709 - DNA, 25 bp, Homo sapien
cagtttcaggtgtaatcatcagagc

SEQ ID NO: 1745710 - DNA, 25 bp, Homo sapien
ggttaactacctcagtagcagagga

SEQ ID NO: 1745711 - DNA, 25 bp, Homo sapien
tattgcagtggtatagatgaatgcc

SEQ ID NO: 1745712 - DNA, 25 bp, Homo sapien
cagagctggttagtcaggcattcca

SEQ ID NO: 1745713 - DNA, 25 bp, Homo sapien
gcagtgcaagttattaaactaaagc

SEQ ID NO: 1745714 - DNA, 25 bp, Homo sapien
cagtgcaagttattaaactaaagct

SEQ ID NO: 1745715 - DNA, 25 bp, Homo sapien
ctgcagtgcaagttattaaactaaa

SEQ ID NO: 1745716 - DNA, 25 bp, Homo sapien
tgcaagttattaaactaaagctact

SEQ ID NO: 1745717 - DNA, 25 bp, Homo sapien
tgacctgttacaatgaagactgact

SEQ ID NO: 1745718 - DNA, 25 bp, Homo sapien
gaagaccttcctatgaagatcatgg

SEQ ID NO: 1745719 - DNA, 25 bp, Homo sapien
caccagaagcttgcagtggagtaat

SEQ ID NO: 1745720 - DNA, 25 bp, Homo sapien
taaatatgtcggctgtataggagca

SEQ ID NO: 1745721 - DNA, 25 bp, Homo sapien
tctgcacattacacaacactgattt

SEQ ID NO: 1745722 - DNA, 25 bp, Homo sapien
tgcacattacacaacactgatttat

SEQ ID NO: 1745723 - DNA, 25 bp, Homo sapien
tgtctgcacattacacaacactgat

SEQ ID NO: 1745724 - DNA, 25 bp, Homo sapien
atatgtctgcacattacacaacact

SEQ ID NO: 1745725 - DNA, 25 bp, Homo sapien
tcagatatacaggttcttagagagt

SEQ ID NO: 1745726 - DNA, 25 bp, Homo sapien
tagttgacaaggtaggttcagagat

SEQ ID NO: 1745727 - DNA, 25 bp, Homo sapien
gatccatttgcttcggcctcatgaa

SEQ ID NO: 1745728 - DNA, 25 bp, Homo sapien
gccattttgatgaatgtagttgaca

SEQ ID NO: 1745729 - DNA, 25 bp, Homo sapien
tgaaatctgtttgcacgttacgatt

SEQ ID NO: 1745730 - DNA, 25 bp, Homo sapien
caagcattggaatagatgaaatctg

SEQ ID NO: 1745731 - DNA, 25 bp, Homo sapien
tcttaaataacggaaatatcctgat

SEQ ID NO: 1745732 - DNA, 25 bp, Homo sapien
tgaaatgctaataatgtctatgtac

SEQ ID NO: 1745733 - DNA, 25 bp, Homo sapien
ggttgtttggaaatagacatgttga

SEQ ID NO: 1745734 - DNA, 25 bp, Homo sapien
gggttgtttggaaatagacatgttg

SEQ ID NO: 1745735 - DNA, 25 bp, Homo sapien
ccctgtgattaaggtaaattagtag

SEQ ID NO: 1745736 - DNA, 25 bp, Homo sapien
tgtgattaaggtaaattagtaggtg

SEQ ID NO: 1745737 - DNA, 25 bp, Homo sapien
acattgagcaccttaccacccagtt

SEQ ID NO: 1745738 - DNA, 25 bp, Homo sapien
gaaagcagcccatttatgactgatg

SEQ ID NO: 1745739 - DNA, 25 bp, Homo sapien
gaactgtgccccattatgtagtagg

SEQ ID NO: 1745740 - DNA, 25 bp, Homo sapien
tgacttgctgaccagtgctctctaa

SEQ ID NO: 1745741 - DNA, 25 bp, Homo sapien
tgggaaggtggcttgtatgagcgct

SEQ ID NO: 1745742 - DNA, 25 bp, Homo sapien
ccgcagtggtgagactgccgctctg

SEQ ID NO: 1745743 - DNA, 25 bp, Homo sapien
gccgcagtggtgagactgccgctct

SEQ ID NO: 1745744 - DNA, 25 bp, Homo sapien
cttgtatgagcgctttgttcttcgc

SEQ ID NO: 1745745 - DNA, 25 bp, Homo sapien
ttgggaaccagtgatggtcgtcttg

SEQ ID NO: 1745746 - DNA, 25 bp, Homo sapien
tccgaccgcggcttcgggttgatgt

SEQ ID NO: 1745747 - DNA, 25 bp, Homo sapien
ttgccgttgaaggaagttgtaggac

SEQ ID NO: 1745748 - DNA, 25 bp, Homo sapien
gccgccggtgcctcggtgttcaggg

SEQ ID NO: 1745749 - DNA, 25 bp, Homo sapien
gggaggtaacgactgccagaacctg

SEQ ID NO: 1745750 - DNA, 25 bp, Homo sapien
gataccatcggacaggatttctccg

SEQ ID NO: 1745751 - DNA, 25 bp, Homo sapien
aactggatcgggtttgctgccagcg

SEQ ID NO: 1745752 - DNA, 25 bp, Homo sapien
cttcggccgccattttacaacagct

SEQ ID NO: 1745753 - DNA, 25 bp, Homo sapien
caagggcgactctcgcactcgagta

SEQ ID NO: 1745754 - DNA, 25 bp, Homo sapien
tgcgcctgcagcttcccgaggagga

SEQ ID NO: 1745755 - DNA, 25 bp, Homo sapien
gagtaccgccagtccggcggaccaa

SEQ ID NO: 1745756 - DNA, 25 bp, Homo sapien
gggcggtttcgcttccaaatctggc

SEQ ID NO: 1745757 - DNA, 25 bp, Homo sapien
agcaaaaagggtgtagaccttcctg

SEQ ID NO: 1745758 - DNA, 25 bp, Homo sapien
aaggcaattattgcaaactggagca

SEQ ID NO: 1745759 - DNA, 25 bp, Homo sapien
catgtggcatctaatgtccatgaaa

SEQ ID NO: 1745760 - DNA, 25 bp, Homo sapien
cctgcttgccatgtcagaaaaggac

SEQ ID NO: 1745761 - DNA, 25 bp, Homo sapien
aaaggggcagcaagatctatagatt

SEQ ID NO: 1745762 - DNA, 25 bp, Homo sapien
ggggcagcaagatctatagatttaa

SEQ ID NO: 1745763 - DNA, 25 bp, Homo sapien
aggggcagcaagatctatagattta

SEQ ID NO: 1745764 - DNA, 25 bp, Homo sapien
aaggggcagcaagatctatagattt

SEQ ID NO: 1745765 - DNA, 25 bp, Homo sapien
ccacccccacagcccagagcactgg

SEQ ID NO: 1745766 - DNA, 25 bp, Homo sapien
ccacagcccagagcactggcatcat

SEQ ID NO: 1745767 - DNA, 25 bp, Homo sapien
tggccacccccacagcccagagcac

SEQ ID NO: 1745768 - DNA, 25 bp, Homo sapien
ccccacagcccagagcactggcatc

SEQ ID NO: 1745769 - DNA, 25 bp, Homo sapien
gcatttgcaagtagtctgagccaga

SEQ ID NO: 1745770 - DNA, 25 bp, Homo sapien
caagtagtctgagccagaaaacgct

SEQ ID NO: 1745771 - DNA, 25 bp, Homo sapien
aagtggaagccccacagtgaagcca

SEQ ID NO: 1745772 - DNA, 25 bp, Homo sapien
cagaaaacgctgaaagacctcagaa

SEQ ID NO: 1745773 - DNA, 25 bp, Homo sapien
cacaaggacttcagatacagaaatt

SEQ ID NO: 1745774 - DNA, 25 bp, Homo sapien
gccctgatctgatgactatacatta

SEQ ID NO: 1745775 - DNA, 25 bp, Homo sapien
tgagccagcacgaataagaattagc

SEQ ID NO: 1745776 - DNA, 25 bp, Homo sapien
tccaaaacacgcaaggaactgagcc

SEQ ID NO: 1745777 - DNA, 25 bp, Homo sapien
tgtaaactgtacaccacaatagtac

SEQ ID NO: 1745778 - DNA, 25 bp, Homo sapien
taagatatgaaatcatcctaggtgt

SEQ ID NO: 1745779 - DNA, 25 bp, Homo sapien
ttagctaagtacagtagtgtgtgcc

SEQ ID NO: 1745780 - DNA, 25 bp, Homo sapien
caaagagtcatctgcatccccatgt

SEQ ID NO: 1745781 - DNA, 25 bp, Homo sapien
tttcttgaaggatattgcttgcttt

SEQ ID NO: 1745782 - DNA, 25 bp, Homo sapien
taaaattagttctattgccagaaac

SEQ ID NO: 1745783 - DNA, 25 bp, Homo sapien
catttggtgctttctaaaattagtt

SEQ ID NO: 1745784 - DNA, 25 bp, Homo sapien
gaaacccaatatccactgtgcttgg

SEQ ID NO: 1745785 - DNA, 25 bp, Homo sapien
tattgccagaaacccaatatccact

SEQ ID NO: 1745786 - DNA, 25 bp, Homo sapien
ccgtacttaaaactctgttaatcat

SEQ ID NO: 1745787 - DNA, 25 bp, Homo sapien
ttgtgtggaaaaacgccttggagtg

SEQ ID NO: 1745788 - DNA, 25 bp, Homo sapien
tcgaaggcggcgttgtgtgcaattc

SEQ ID NO: 1745789 - DNA, 25 bp, Homo sapien
tgaaactgagctgttcgaaggcggc

SEQ ID NO: 1745790 - DNA, 25 bp, Homo sapien
tttcccgcaggaacaatggcgctgt

SEQ ID NO: 1745791 - DNA, 25 bp, Homo sapien
atggcgaaggccttccgtcggcgtt

SEQ ID NO: 1745792 - DNA, 25 bp, Homo sapien
aaatggcgaaggccttccgtcggcg

SEQ ID NO: 1745793 - DNA, 25 bp, Homo sapien
aatggcgaaggccttccgtcggcgt

SEQ ID NO: 1745794 - DNA, 25 bp, Homo sapien
tggcgaaggccttccgtcggcgttg

SEQ ID NO: 1745795 - DNA, 25 bp, Homo sapien
gttgagtcgtgacggccacaggctc

SEQ ID NO: 1745796 - DNA, 25 bp, Homo sapien
ggactgccacatgtactgaggttga

SEQ ID NO: 1745797 - DNA, 25 bp, Homo sapien
ttttggcgtgaggaaccgctgatcg

SEQ ID NO: 1745798 - DNA, 25 bp, Homo sapien
gaacttgctggcctccggcatgtgc

SEQ ID NO: 1745799 - DNA, 25 bp, Homo sapien
ggtattgcgggctagtatccgagca

SEQ ID NO: 1745800 - DNA, 25 bp, Homo sapien
tggcgcaggccgagttaagagcttt

SEQ ID NO: 1745801 - DNA, 25 bp, Homo sapien
tatccgagcaaaagatggtggcgca

SEQ ID NO: 1745802 - DNA, 25 bp, Homo sapien
taagagctttaatcctgtgaagaca

SEQ ID NO: 1745803 - DNA, 25 bp, Homo sapien
tcctggacggacttggctcgtggca

SEQ ID NO: 1745804 - DNA, 25 bp, Homo sapien
tcgtaagagacgcttcgcagtgcgc

SEQ ID NO: 1745805 - DNA, 25 bp, Homo sapien
tcgtggcaggcgaaagcgtcgtttc

SEQ ID NO: 1745806 - DNA, 25 bp, Homo sapien
tcgaatcggtcctaagctgaggccg

SEQ ID NO: 1745807 - DNA, 25 bp, Homo sapien
gctcagcaagatggcccatgtctgt

SEQ ID NO: 1745808 - DNA, 25 bp, Homo sapien
ttcgcttgactgttttaggtatggg

SEQ ID NO: 1745809 - DNA, 25 bp, Homo sapien
aatatttggtagtaattcgcttgac

SEQ ID NO: 1745810 - DNA, 25 bp, Homo sapien
taggtatgggagcaataactgatgg

SEQ ID NO: 1745811 - DNA, 25 bp, Homo sapien
tattgttgagaactccattcagctc

SEQ ID NO: 1745812 - DNA, 25 bp, Homo sapien
ttccctttgacatccattggtttcc

SEQ ID NO: 1745813 - DNA, 25 bp, Homo sapien
ggtcctctggacattgcttcctatt

SEQ ID NO: 1745814 - DNA, 25 bp, Homo sapien
tatccctcgttttaacaatgaaagc

SEQ ID NO: 1745815 - DNA, 25 bp, Homo sapien
ggtaatagtcttcacacatccctct

SEQ ID NO: 1745816 - DNA, 25 bp, Homo sapien
tgacagctgacatagggtaatagtc

SEQ ID NO: 1745817 - DNA, 25 bp, Homo sapien
agtgtgcattggtccgccatggcag

SEQ ID NO: 1745818 - DNA, 25 bp, Homo sapien
ggtccgccatggcagcaggtcttgc

SEQ ID NO: 1745819 - DNA, 25 bp, Homo sapien
aagacatgactcacacaggcactga

SEQ ID NO: 1745820 - DNA, 25 bp, Homo sapien
caacccactatgtgatttgcaggta

SEQ ID NO: 1745821 - DNA, 25 bp, Homo sapien
aatacaaatgattgaggacctctat

SEQ ID NO: 1745822 - DNA, 25 bp, Homo sapien
gcagcagcatcaggatgtcaaccca

SEQ ID NO: 1745823 - DNA, 25 bp, Homo sapien
atataagctgagaataaatgaaggg

SEQ ID NO: 1745824 - DNA, 25 bp, Homo sapien
tataagctgagaataaatgaagggt

SEQ ID NO: 1745825 - DNA, 25 bp, Homo sapien
taagtagatccaaataatataagct

SEQ ID NO: 1745826 - DNA, 25 bp, Homo sapien
ataagctgagaataaatgaagggta

SEQ ID NO: 1745827 - DNA, 25 bp, Homo sapien
taatagtatcctgggcctcggtgag

SEQ ID NO: 1745828 - DNA, 25 bp, Homo sapien
ggcctcggtgagctttacttctggg

SEQ ID NO: 1745829 - DNA, 25 bp, Homo sapien
tttagtaatagtatcctgggcctcg

SEQ ID NO: 1745830 - DNA, 25 bp, Homo sapien
aatatttagtaatagtatcctgggc

SEQ ID NO: 1745831 - DNA, 25 bp, Homo sapien
aaggataatcaatcaggaaaagagg

SEQ ID NO: 1745832 - DNA, 25 bp, Homo sapien
aacccagcaccacatcaaaaagcta

SEQ ID NO: 1745833 - DNA, 25 bp, Homo sapien
gaaagaaataaaggataatcaatca

SEQ ID NO: 1745834 - DNA, 25 bp, Homo sapien
aaattaggtattgatataacatatc

SEQ ID NO: 1745835 - DNA, 25 bp, Homo sapien
tgtttaccactgtctaacttgaaga

SEQ ID NO: 1745836 - DNA, 25 bp, Homo sapien
gcatatacagtaaaggaatacctgg

SEQ ID NO: 1745837 - DNA, 25 bp, Homo sapien
tggtcttctttaaggcagaggatca

SEQ ID NO: 1745838 - DNA, 25 bp, Homo sapien
taccaatgagctcaacatggtcagc

SEQ ID NO: 1745839 - DNA, 25 bp, Homo sapien
caatcagcaagtggatgaagaaatg

SEQ ID NO: 1745840 - DNA, 25 bp, Homo sapien
gcagtaccaccatactcctgtaaga

SEQ ID NO: 1745841 - DNA, 25 bp, Homo sapien
atacaaatcaagaccacaatgcagt

SEQ ID NO: 1745842 - DNA, 25 bp, Homo sapien
agatgttggcatggaatggccataa

SEQ ID NO: 1745843 - DNA, 25 bp, Homo sapien
gataaacctcactagctacactact

SEQ ID NO: 1745844 - DNA, 25 bp, Homo sapien
cggataaacctcactagctacacta

SEQ ID NO: 1745845 - DNA, 25 bp, Homo sapien
taaacctcactagctacactactgc

SEQ ID NO: 1745846 - DNA, 25 bp, Homo sapien
tttaattagcaataactgcacctcg

SEQ ID NO: 1745847 - DNA, 25 bp, Homo sapien
tttaaaagctttaatgataataggc

SEQ ID NO: 1745848 - DNA, 25 bp, Homo sapien
aaaaatcagtctaggaagtgaacaa

SEQ ID NO: 1745849 - DNA, 25 bp, Homo sapien
aaaatcagtctaggaagtgaacaag

SEQ ID NO: 1745850 - DNA, 25 bp, Homo sapien
gataataggctaaatcaagcagaaa

SEQ ID NO: 1745851 - DNA, 25 bp, Homo sapien
acgtttagattcaggaaatacggag

SEQ ID NO: 1745852 - DNA, 25 bp, Homo sapien
ggccaacgtttagattcaggaaata

SEQ ID NO: 1745853 - DNA, 25 bp, Homo sapien
ctggaagaaagcatatcagtgatgg

SEQ ID NO: 1745854 - DNA, 25 bp, Homo sapien
ggcaggccaacgtttagattcagga

SEQ ID NO: 1745855 - DNA, 25 bp, Homo sapien
gggtcataatctgtccacctgtgta

SEQ ID NO: 1745856 - DNA, 25 bp, Homo sapien
ttttgaggcctggttgaacactcca

SEQ ID NO: 1745857 - DNA, 25 bp, Homo sapien
gaaaacggcttgcatagcttcgtca

SEQ ID NO: 1745858 - DNA, 25 bp, Homo sapien
taaaccctgccgttaggtgatggaa

SEQ ID NO: 1745859 - DNA, 25 bp, Homo sapien
cacacttccaaaagtagggcattca

SEQ ID NO: 1745860 - DNA, 25 bp, Homo sapien
aagtagggcattcagtgacagcttc

SEQ ID NO: 1745861 - DNA, 25 bp, Homo sapien
accacacttccaaaagtagggcatt

SEQ ID NO: 1745862 - DNA, 25 bp, Homo sapien
gtagggcattcagtgacagcttctc

SEQ ID NO: 1745863 - DNA, 25 bp, Homo sapien
gccctttatgggtcagatgattaat

SEQ ID NO: 1745864 - DNA, 25 bp, Homo sapien
tgagcattcaggtgttctgaaagcc

SEQ ID NO: 1745865 - DNA, 25 bp, Homo sapien
aatatttatgtagcaaattctgagc

SEQ ID NO: 1745866 - DNA, 25 bp, Homo sapien
ctgggcaggagtcattgtcaaactg

SEQ ID NO: 1745867 - DNA, 25 bp, Homo sapien
atctctcagcagaaactctacaagc

SEQ ID NO: 1745868 - DNA, 25 bp, Homo sapien
cccattagactaacagtggatctct

SEQ ID NO: 1745869 - DNA, 25 bp, Homo sapien
attagactaacagtggatctctcag

SEQ ID NO: 1745870 - DNA, 25 bp, Homo sapien
gatctctcagcagaaactctacaag

SEQ ID NO: 1745871 - DNA, 25 bp, Homo sapien
acacagcaattgcaagatcagttat

SEQ ID NO: 1745872 - DNA, 25 bp, Homo sapien
tcaacacagcaattgcaagatcagt

SEQ ID NO: 1745873 - DNA, 25 bp, Homo sapien
taatgtcaacacagcaattgcaaga

SEQ ID NO: 1745874 - DNA, 25 bp, Homo sapien
tttttactaatgtcaacacagcaat

SEQ ID NO: 1745875 - DNA, 25 bp, Homo sapien
cctgtggagcaagatttgagaaatc

SEQ ID NO: 1745876 - DNA, 25 bp, Homo sapien
ttttgtctgtttgtccagctttttg

SEQ ID NO: 1745877 - DNA, 25 bp, Homo sapien
ggtacaaactacaaccctatgcagg

SEQ ID NO: 1745878 - DNA, 25 bp, Homo sapien
tatttgacaacagagccctttgcag

SEQ ID NO: 1745879 - DNA, 25 bp, Homo sapien
gaagaagtttatcctagcattcccc

SEQ ID NO: 1745880 - DNA, 25 bp, Homo sapien
tatgcaggaagctacctgttgaagc

SEQ ID NO: 1745881 - DNA, 25 bp, Homo sapien
tgactaagggaactgtttcaaccaa

SEQ ID NO: 1745882 - DNA, 25 bp, Homo sapien
ccaaagtaaggtagccaaagaccag

SEQ ID NO: 1745883 - DNA, 25 bp, Homo sapien
caagttgactaagggaactgtttca

SEQ ID NO: 1745884 - DNA, 25 bp, Homo sapien
gcttaagtccagtggacaagttgac

SEQ ID NO: 1745885 - DNA, 25 bp, Homo sapien
gcagaaaacctgacataatgggcta

SEQ ID NO: 1745886 - DNA, 25 bp, Homo sapien
taacacagggatataagccttagcc

SEQ ID NO: 1745887 - DNA, 25 bp, Homo sapien
tagttcctgataccgaagctctctg

SEQ ID NO: 1745888 - DNA, 25 bp, Homo sapien
tgcaaaagatccctatgactcagtg

SEQ ID NO: 1745889 - DNA, 25 bp, Homo sapien
aaggaccatgtagttgtcaatgtcg

SEQ ID NO: 1745890 - DNA, 25 bp, Homo sapien
aggatgacaacagccctcacagcta

SEQ ID NO: 1745891 - DNA, 25 bp, Homo sapien
cacagctactgcagacattctgcag

SEQ ID NO: 1745892 - DNA, 25 bp, Homo sapien
tgtcaatgtcgcagacctcagctgt

SEQ ID NO: 1745893 - DNA, 25 bp, Homo sapien
ctcattcccttgatgctggactcac

SEQ ID NO: 1745894 - DNA, 25 bp, Homo sapien
tcagccaagcgtatatacaatgaca

SEQ ID NO: 1745895 - DNA, 25 bp, Homo sapien
gccaagcgtatatacaatgacagcc

SEQ ID NO: 1745896 - DNA, 25 bp, Homo sapien
cgtatatacaatgacagcccctact

SEQ ID NO: 1745897 - DNA, 25 bp, Homo sapien
caagcgtatatacaatgacagcccc

SEQ ID NO: 1745898 - DNA, 25 bp, Homo sapien
agcccttgaagccattgtgcagccc

SEQ ID NO: 1745899 - DNA, 25 bp, Homo sapien
gtggcctactctgcagaggacccta

SEQ ID NO: 1745900 - DNA, 25 bp, Homo sapien
tttcactgctgaagaaccatccccc

SEQ ID NO: 1745901 - DNA, 25 bp, Homo sapien
agagtttgccatgacagaccccagt

SEQ ID NO: 1745902 - DNA, 25 bp, Homo sapien
cacaagatggtaaggttcaccccga

SEQ ID NO: 1745903 - DNA, 25 bp, Homo sapien
gatgggtctgcgtaatcttatcaag

SEQ ID NO: 1745904 - DNA, 25 bp, Homo sapien
caatacagtgtaggtgactccaata

SEQ ID NO: 1745905 - DNA, 25 bp, Homo sapien
tcaccccgagagttaagaaaggcca

SEQ ID NO: 1745906 - DNA, 25 bp, Homo sapien
aagtcctcagtgacctacaaagaga

SEQ ID NO: 1745907 - DNA, 25 bp, Homo sapien
agtcctcagtgacctacaaagagac

SEQ ID NO: 1745908 - DNA, 25 bp, Homo sapien
cataaagcaagtcctcagtgaccta

SEQ ID NO: 1745909 - DNA, 25 bp, Homo sapien
aagcaagtcctcagtgacctacaaa

SEQ ID NO: 1745910 - DNA, 25 bp, Homo sapien
tgtcagagtctctttgactgccttc

SEQ ID NO: 1745911 - DNA, 25 bp, Homo sapien
gcttgtttgtcagagtctctttgac

SEQ ID NO: 1745912 - DNA, 25 bp, Homo sapien
tgcatcccactgcttgtttgtcaga

SEQ ID NO: 1745913 - DNA, 25 bp, Homo sapien
ccactgcttgtttgtcagagtctct

SEQ ID NO: 1745914 - DNA, 25 bp, Homo sapien
gaatgcaacagaagagtgcctgtag

SEQ ID NO: 1745915 - DNA, 25 bp, Homo sapien
atcactttggtggtcactaagggaa

SEQ ID NO: 1745916 - DNA, 25 bp, Homo sapien
aactctgactctggtactcctggac

SEQ ID NO: 1745917 - DNA, 25 bp, Homo sapien
cattcacggaaaatcatttgcaagg

SEQ ID NO: 1745918 - DNA, 25 bp, Homo sapien
cttcaggtttatggaagacaatggt

SEQ ID NO: 1745919 - DNA, 25 bp, Homo sapien
tcctttaaattctgcatcttcaggt

SEQ ID NO: 1745920 - DNA, 25 bp, Homo sapien
ttacaatcctttaaattctgcatct

SEQ ID NO: 1745921 - DNA, 25 bp, Homo sapien
tttacttttctcatttggctgaagc

SEQ ID NO: 1745922 - DNA, 25 bp, Homo sapien
ggaccatgaagtggctccactgggt

SEQ ID NO: 1745923 - DNA, 25 bp, Homo sapien
atgaagtggctccactgggtgccat

SEQ ID NO: 1745924 - DNA, 25 bp, Homo sapien
cttcttgggaccatgaagtggctcc

SEQ ID NO: 1745925 - DNA, 25 bp, Homo sapien
accatgaagtggctccactgggtgc

SEQ ID NO: 1745926 - DNA, 25 bp, Homo sapien
catgacctagggttaatagggacct

SEQ ID NO: 1745927 - DNA, 25 bp, Homo sapien
taatagctacatggacaagaatgaa

SEQ ID NO: 1745928 - DNA, 25 bp, Homo sapien
tctatggctccatgataattcacct

SEQ ID NO: 1745929 - DNA, 25 bp, Homo sapien
gatatgaccatagaccagaacaaac

SEQ ID NO: 1745930 - DNA, 25 bp, Homo sapien
tccgcagaaagattggccgtggtaa

SEQ ID NO: 1745931 - DNA, 25 bp, Homo sapien
tccggtgccctgatatatgcacaga

SEQ ID NO: 1745932 - DNA, 25 bp, Homo sapien
tccaacctggaagaatccggtgccc

SEQ ID NO: 1745933 - DNA, 25 bp, Homo sapien
tataaggcgtaagtttccgcagaaa

SEQ ID NO: 1745934 - DNA, 25 bp, Homo sapien
cagatactacgttctgagagtttct

SEQ ID NO: 1745935 - DNA, 25 bp, Homo sapien
atggccacagatactacgttctgag

SEQ ID NO: 1745936 - DNA, 25 bp, Homo sapien
atactgattttgctatccagaaggt

SEQ ID NO: 1745937 - DNA, 25 bp, Homo sapien
actgattttgctatccagaaggtac

SEQ ID NO: 1745938 - DNA, 25 bp, Homo sapien
tactgattttgctatccagaaggta

SEQ ID NO: 1745939 - DNA, 25 bp, Homo sapien
agcaaaagcagtctgtcacttccat

SEQ ID NO: 1745940 - DNA, 25 bp, Homo sapien
aacagcaaaagcagtctgtcacttc

SEQ ID NO: 1745941 - DNA, 25 bp, Homo sapien
agcagtctgtcacttccatgtatac

SEQ ID NO: 1745942 - DNA, 25 bp, Homo sapien
aaaagcagtctgtcacttccatgta

SEQ ID NO: 1745943 - DNA, 25 bp, Homo sapien
ctctgcataatcagtagtgacccac

SEQ ID NO: 1745944 - DNA, 25 bp, Homo sapien
tctgcataatcagtagtgacccact

SEQ ID NO: 1745945 - DNA, 25 bp, Homo sapien
cataatcagtagtgacccactgggg

SEQ ID NO: 1745946 - DNA, 25 bp, Homo sapien
tgcataatcagtagtgacccactgg

SEQ ID NO: 1745947 - DNA, 25 bp, Homo sapien
agatttcacccaaagcattggccat

SEQ ID NO: 1745948 - DNA, 25 bp, Homo sapien
catagaaagatgctggttaagatac

SEQ ID NO: 1745949 - DNA, 25 bp, Homo sapien
acagatttcacccaaagcattggcc

SEQ ID NO: 1745950 - DNA, 25 bp, Homo sapien
gatgctggttaagatacaacagatt

SEQ ID NO: 1745951 - DNA, 25 bp, Homo sapien
acctggtttctagggatcggcttgg

SEQ ID NO: 1745952 - DNA, 25 bp, Homo sapien
tctagggatcggcttggcagaggca

SEQ ID NO: 1745953 - DNA, 25 bp, Homo sapien
ctggtttctagggatcggcttggca

SEQ ID NO: 1745954 - DNA, 25 bp, Homo sapien
gtttctagggatcggcttggcagag

SEQ ID NO: 1745955 - DNA, 25 bp, Homo sapien
catctctgtccctagtggcagtgtg

SEQ ID NO: 1745956 - DNA, 25 bp, Homo sapien
ccatgctcaggctcatgcatgaagg

SEQ ID NO: 1745957 - DNA, 25 bp, Homo sapien
ggttcccatgctcaggctcatgcat

SEQ ID NO: 1745958 - DNA, 25 bp, Homo sapien
gtccctagtggcagtgtggttccca

SEQ ID NO: 1745959 - DNA, 25 bp, Homo sapien
gggtatccaaggagaggtctataca

SEQ ID NO: 1745960 - DNA, 25 bp, Homo sapien
gcctgtgtgcgggtatccaaggaga

SEQ ID NO: 1745961 - DNA, 25 bp, Homo sapien
tgtgcgggtatccaaggagaggtct

SEQ ID NO: 1745962 - DNA, 25 bp, Homo sapien
gcgggtatccaaggagaggtctata

SEQ ID NO: 1745963 - DNA, 25 bp, Homo sapien
actgatggtttgacatttgaaagcc

SEQ ID NO: 1745964 - DNA, 25 bp, Homo sapien
tctactgatggtttgacatttgaaa

SEQ ID NO: 1745965 - DNA, 25 bp, Homo sapien
gatggtttgacatttgaaagccaca

SEQ ID NO: 1745966 - DNA, 25 bp, Homo sapien
tggtttgacatttgaaagccacagc

SEQ ID NO: 1745967 - DNA, 25 bp, Homo sapien
gtggcaagtaggtcccagattctat

SEQ ID NO: 1745968 - DNA, 25 bp, Homo sapien
tctattaatagtggccaggggcaac

SEQ ID NO: 1745969 - DNA, 25 bp, Homo sapien
cagattctattaatagtggccaggg

SEQ ID NO: 1745970 - DNA, 25 bp, Homo sapien
caagtaggtcccagattctattaat

SEQ ID NO: 1745971 - DNA, 25 bp, Homo sapien
ataatctgccctcctttccactctg

SEQ ID NO: 1745972 - DNA, 25 bp, Homo sapien
tcaataatctgccctcctttccact

SEQ ID NO: 1745973 - DNA, 25 bp, Homo sapien
caataatctgccctcctttccactc

SEQ ID NO: 1745974 - DNA, 25 bp, Homo sapien
taatctgccctcctttccactctgg

SEQ ID NO: 1745975 - DNA, 25 bp, Homo sapien
tgttctacccagataggacaccacc

SEQ ID NO: 1745976 - DNA, 25 bp, Homo sapien
gcctcctggacccaactgaagagtt

SEQ ID NO: 1745977 - DNA, 25 bp, Homo sapien
taactggtcaagaactctgaatgcc

SEQ ID NO: 1745978 - DNA, 25 bp, Homo sapien
gaagagtttttcctaaccagtgtgc

SEQ ID NO: 1745979 - DNA, 25 bp, Homo sapien
aggcttggttacagaaagccttctg

SEQ ID NO: 1745980 - DNA, 25 bp, Homo sapien
gaattctgtgaattggctcaatatc

SEQ ID NO: 1745981 - DNA, 25 bp, Homo sapien
taaggcttggttacagaaagccttc

SEQ ID NO: 1745982 - DNA, 25 bp, Homo sapien
aaggcttggttacagaaagccttct

SEQ ID NO: 1745983 - DNA, 25 bp, Homo sapien
tttgcatatttctgaaacagcaggg

SEQ ID NO: 1745984 - DNA, 25 bp, Homo sapien
ttgttttgcatatttctgaaacagc

SEQ ID NO: 1745985 - DNA, 25 bp, Homo sapien
ttttgcatatttctgaaacagcagg

SEQ ID NO: 1745986 - DNA, 25 bp, Homo sapien
tgtttgttttgcatatttctgaaac

SEQ ID NO: 1745987 - DNA, 25 bp, Homo sapien
tctgtaatgcaccttttgtccaaag

SEQ ID NO: 1745988 - DNA, 25 bp, Homo sapien
cagaagtgtaaagtccagcagaacc

SEQ ID NO: 1745989 - DNA, 25 bp, Homo sapien
ggaagtagcgggcagacctctgtaa

SEQ ID NO: 1745990 - DNA, 25 bp, Homo sapien
cagcagaacctgcatggttgattcc

SEQ ID NO: 1745991 - DNA, 25 bp, Homo sapien
cacattcaccattgctacaaggaga

SEQ ID NO: 1745992 - DNA, 25 bp, Homo sapien
actcacattcaccattgctacaagg

SEQ ID NO: 1745993 - DNA, 25 bp, Homo sapien
caaatctccttagctgataggcgtc

SEQ ID NO: 1745994 - DNA, 25 bp, Homo sapien
ctgataggcgtcttaagcaaagtct

SEQ ID NO: 1745995 - DNA, 25 bp, Homo sapien
tgattggtgcccacggggtgccacc

SEQ ID NO: 1745996 - DNA, 25 bp, Homo sapien
ggcacttctgtccagggtacagcca

SEQ ID NO: 1745997 - DNA, 25 bp, Homo sapien
cggggtgccaccaaactgaggcctg

SEQ ID NO: 1745998 - DNA, 25 bp, Homo sapien
gtaatggcacttctgtccagggtac

SEQ ID NO: 1745999 - DNA, 25 bp, Homo sapien
tgtacccttgacactcagagccagg

SEQ ID NO: 1746000 - DNA, 25 bp, Homo sapien
tatgtagttagtgaagtgtctgagc

SEQ ID NO: 1746001 - DNA, 25 bp, Homo sapien
gctggcgtctgcatagtgagaacga

SEQ ID NO: 1746002 - DNA, 25 bp, Homo sapien
gaacgagcatgcaagcacattttta

SEQ ID NO: 1746003 - DNA, 25 bp, Homo sapien
gcttcaaaccatgcagtcatggact

SEQ ID NO: 1746004 - DNA, 25 bp, Homo sapien
acttgtgtgtaaggaacagtcaaca

SEQ ID NO: 1746005 - DNA, 25 bp, Homo sapien
taaggtcttatagactggtgtagaa

SEQ ID NO: 1746006 - DNA, 25 bp, Homo sapien
aacatgatagaaagggttaaggtct

SEQ ID NO: 1746007 - DNA, 25 bp, Homo sapien
gaactgaagatttaaggcagtcctc

SEQ ID NO: 1746008 - DNA, 25 bp, Homo sapien
ctgaagatttaaggcagtcctctgc

SEQ ID NO: 1746009 - DNA, 25 bp, Homo sapien
gaagatttaaggcagtcctctgcct

SEQ ID NO: 1746010 - DNA, 25 bp, Homo sapien
gatttaaggcagtcctctgcctgga

SEQ ID NO: 1746011 - DNA, 25 bp, Homo sapien
aacagtaagcttaaatagcaggcca

SEQ ID NO: 1746012 - DNA, 25 bp, Homo sapien
tatcaagaactaagccttgagatct

SEQ ID NO: 1746013 - DNA, 25 bp, Homo sapien
taagtcccagggcaaaacagtaagc

SEQ ID NO: 1746014 - DNA, 25 bp, Homo sapien
taccttctgagcaaaccttgaggtt

SEQ ID NO: 1746015 - DNA, 25 bp, Homo sapien
tggagcagaggctattgaccccacc

SEQ ID NO: 1746016 - DNA, 25 bp, Homo sapien
cctctggagtatgtggatctgtgga

SEQ ID NO: 1746017 - DNA, 25 bp, Homo sapien
cctgaatcaccacaggtactttggg

SEQ ID NO: 1746018 - DNA, 25 bp, Homo sapien
gccccgtgggaagactgttgtcctg

SEQ ID NO: 1746019 - DNA, 25 bp, Homo sapien
tgctgtgtgctctgtccctgctgtg

SEQ ID NO: 1746020 - DNA, 25 bp, Homo sapien
ggacttgactgggagggctggccct

SEQ ID NO: 1746021 - DNA, 25 bp, Homo sapien
cctgctgtgccagggacttgactgg

SEQ ID NO: 1746022 - DNA, 25 bp, Homo sapien
gccctgcactgtgcttgggacttga

SEQ ID NO: 1746023 - DNA, 25 bp, Homo sapien
gcctgatcactttattgggctggct

SEQ ID NO: 1746024 - DNA, 25 bp, Homo sapien
ctttgggttaggctatcctggttgg

SEQ ID NO: 1746025 - DNA, 25 bp, Homo sapien
ctgatcactttattgggctggctcc

SEQ ID NO: 1746026 - DNA, 25 bp, Homo sapien
gatcactttattgggctggctcctg

SEQ ID NO: 1746027 - DNA, 25 bp, Homo sapien
tcaagccttgttggagtcggaagat

SEQ ID NO: 1746028 - DNA, 25 bp, Homo sapien
aattagtaaacttggctggtagaga

SEQ ID NO: 1746029 - DNA, 25 bp, Homo sapien
tcttctaagcccaggagtgacttcc

SEQ ID NO: 1746030 - DNA, 25 bp, Homo sapien
gtcggaagatctattcaccctctga

SEQ ID NO: 1746031 - DNA, 25 bp, Homo sapien
ctgtttctgacctgcctaaggaggt

SEQ ID NO: 1746032 - DNA, 25 bp, Homo sapien
cttactactaatcagcaaaggagtt

SEQ ID NO: 1746033 - DNA, 25 bp, Homo sapien
tgtttctgacctgcctaaggaggtt

SEQ ID NO: 1746034 - DNA, 25 bp, Homo sapien
gcccaatcttactactaatcagcaa

SEQ ID NO: 1746035 - DNA, 25 bp, Homo sapien
tgtctatggtgaaagcatgtgagaa

SEQ ID NO: 1746036 - DNA, 25 bp, Homo sapien
actgtctatggtgaaagcatgtgag

SEQ ID NO: 1746037 - DNA, 25 bp, Homo sapien
gcttcttgtgcatgactgtctatgg

SEQ ID NO: 1746038 - DNA, 25 bp, Homo sapien
tctatggtgaaagcatgtgagaagc

SEQ ID NO: 1746039 - DNA, 25 bp, Homo sapien
gacagaatatgccacgtgaagaccc

SEQ ID NO: 1746040 - DNA, 25 bp, Homo sapien
tctgaacagtgccagtgaaggatga

SEQ ID NO: 1746041 - DNA, 25 bp, Homo sapien
aagaacacaagttgtaccgactgtg

SEQ ID NO: 1746042 - DNA, 25 bp, Homo sapien
acgtgaagacccagtaggaccagcc

SEQ ID NO: 1746043 - DNA, 25 bp, Homo sapien
caattggtgaaggttacacatttgc

SEQ ID NO: 1746044 - DNA, 25 bp, Homo sapien
cagcacaattggtgaaggttacaca

SEQ ID NO: 1746045 - DNA, 25 bp, Homo sapien
ttggtgaaggttacacatttgccat

SEQ ID NO: 1746046 - DNA, 25 bp, Homo sapien
gcacaattggtgaaggttacacatt

SEQ ID NO: 1746047 - DNA, 25 bp, Homo sapien
aaaatggggcttgcaagcttagaag

SEQ ID NO: 1746048 - DNA, 25 bp, Homo sapien
ctaaaatggggcttgcaagcttaga

SEQ ID NO: 1746049 - DNA, 25 bp, Homo sapien
catctaccaggagctctaaaatggg

SEQ ID NO: 1746050 - DNA, 25 bp, Homo sapien
tagcatctaccaggagctctaaaat

SEQ ID NO: 1746051 - DNA, 25 bp, Homo sapien
tatctcttcccttcatgagaacagc

SEQ ID NO: 1746052 - DNA, 25 bp, Homo sapien
tctttggtgtctcaataaatagccc

SEQ ID NO: 1746053 - DNA, 25 bp, Homo sapien
tgacctaacagagtgtgtaaagagg

SEQ ID NO: 1746054 - DNA, 25 bp, Homo sapien
ccatggtccagttctagtccaagcc

SEQ ID NO: 1746055 - DNA, 25 bp, Homo sapien
gttaccacgagtaaaagcctctcag

SEQ ID NO: 1746056 - DNA, 25 bp, Homo sapien
gattcaaaggtgcaggcatcccaga

SEQ ID NO: 1746057 - DNA, 25 bp, Homo sapien
gactttcgggtacttctggctattg

SEQ ID NO: 1746058 - DNA, 25 bp, Homo sapien
aagtccccagttacaagtctcatgg

SEQ ID NO: 1746059 - DNA, 25 bp, Homo sapien
ttcattttcatctatcccgtgtagc

SEQ ID NO: 1746060 - DNA, 25 bp, Homo sapien
cattttcatctatcccgtgtagctg

SEQ ID NO: 1746061 - DNA, 25 bp, Homo sapien
attttcatctatcccgtgtagctgc

SEQ ID NO: 1746062 - DNA, 25 bp, Homo sapien
tttcatctatcccgtgtagctgcat

SEQ ID NO: 1746063 - DNA, 25 bp, Homo sapien
ccaggtctttagcatctctgattag

SEQ ID NO: 1746064 - DNA, 25 bp, Homo sapien
ccatcttctctggatgaaaaagtga

SEQ ID NO: 1746065 - DNA, 25 bp, Homo sapien
ctatcccatcttctctggatgaaaa

SEQ ID NO: 1746066 - DNA, 25 bp, Homo sapien
attttcttagctccaggtctttagc

SEQ ID NO: 1746067 - DNA, 25 bp, Homo sapien
tagctgcatggagactgagaggtgg

SEQ ID NO: 1746068 - DNA, 25 bp, Homo sapien
tgagaggtggacagcgtgcaatccc

SEQ ID NO: 1746069 - DNA, 25 bp, Homo sapien
ggacagcgtgcaatcccaggtggca

SEQ ID NO: 1746070 - DNA, 25 bp, Homo sapien
aggtggacagcgtgcaatcccaggt

SEQ ID NO: 1746071 - DNA, 25 bp, Homo sapien
tttttcatatgcagacccccagatt

SEQ ID NO: 1746072 - DNA, 25 bp, Homo sapien
tttcatatgcagacccccagattct

SEQ ID NO: 1746073 - DNA, 25 bp, Homo sapien
ttttcatatgcagacccccagattc

SEQ ID NO: 1746074 - DNA, 25 bp, Homo sapien
tcataaagcttcagaggcaatagtt

SEQ ID NO: 1746075 - DNA, 25 bp, Homo sapien
ggccagtttgccaggatgttgtagt

SEQ ID NO: 1746076 - DNA, 25 bp, Homo sapien
ttttgtgcagcgtctctggggaccc

SEQ ID NO: 1746077 - DNA, 25 bp, Homo sapien
gtagtttgtggactatggaaaattg

SEQ ID NO: 1746078 - DNA, 25 bp, Homo sapien
gtcattgtctgcttctacagatgcc

SEQ ID NO: 1746079 - DNA, 25 bp, Homo sapien
agtcattgtctgcttctacagatgc

SEQ ID NO: 1746080 - DNA, 25 bp, Homo sapien
tcattgtctgcttctacagatgcca

SEQ ID NO: 1746081 - DNA, 25 bp, Homo sapien
gtaactcccaactgtgggctgaaca

SEQ ID NO: 1746082 - DNA, 25 bp, Homo sapien
taactcccaactgtgggctgaacag

SEQ ID NO: 1746083 - DNA, 25 bp, Homo sapien
ttttctccaaagggcacacttcaga

SEQ ID NO: 1746084 - DNA, 25 bp, Homo sapien
gttttctccaaagggcacacttcag

SEQ ID NO: 1746085 - DNA, 25 bp, Homo sapien
cagttcacgatcaagtgaagtgacg

SEQ ID NO: 1746086 - DNA, 25 bp, Homo sapien
ggagaagcacagttcacgatcaagt

SEQ ID NO: 1746087 - DNA, 25 bp, Homo sapien
gtgacggctatatccccaggtgggc

SEQ ID NO: 1746088 - DNA, 25 bp, Homo sapien
caagtgaagtgacggctatatcccc

SEQ ID NO: 1746089 - DNA, 25 bp, Homo sapien
ctctctgtgtgacaggctcctgagc

SEQ ID NO: 1746090 - DNA, 25 bp, Homo sapien
tctctgtgtgacaggctcctgagcc

SEQ ID NO: 1746091 - DNA, 25 bp, Homo sapien
gctcctgagccccttagatcctgcc

SEQ ID NO: 1746092 - DNA, 25 bp, Homo sapien
ttctgtccttccatgctatttgtat

SEQ ID NO: 1746093 - DNA, 25 bp, Homo sapien
gacagaaggaccgatttgatcactg

SEQ ID NO: 1746094 - DNA, 25 bp, Homo sapien
tgatcactgggctaccgtctggatg

SEQ ID NO: 1746095 - DNA, 25 bp, Homo sapien
taccgtctggatggagcttctgtcc

SEQ ID NO: 1746096 - DNA, 25 bp, Homo sapien
gtgctcctttggtgatctattcagc

SEQ ID NO: 1746097 - DNA, 25 bp, Homo sapien
gatctattcagcttagctctcacca

SEQ ID NO: 1746098 - DNA, 25 bp, Homo sapien
cctttggtgatctattcagcttagc

SEQ ID NO: 1746099 - DNA, 25 bp, Homo sapien
tggtgatctattcagcttagctctc

SEQ ID NO: 1746100 - DNA, 25 bp, Homo sapien
acaagacaagtatctgagtctggac

SEQ ID NO: 1746101 - DNA, 25 bp, Homo sapien
gacaagacaagtatctgagtctgga

SEQ ID NO: 1746102 - DNA, 25 bp, Homo sapien
agacaagacaagtatctgagtctgg

SEQ ID NO: 1746103 - DNA, 25 bp, Homo sapien
cagtgacaccattctttgaaggaac

SEQ ID NO: 1746104 - DNA, 25 bp, Homo sapien
tgtagactcagcaaagggtatgcct

SEQ ID NO: 1746105 - DNA, 25 bp, Homo sapien
tgccaaaaactggtgcattcccatc

SEQ ID NO: 1746106 - DNA, 25 bp, Homo sapien
tgtgctgtaccagctcatgagtagc

SEQ ID NO: 1746107 - DNA, 25 bp, Homo sapien
gatgatactggaagtccgtacagct

SEQ ID NO: 1746108 - DNA, 25 bp, Homo sapien
ggatgatactggaagtccgtacagc

SEQ ID NO: 1746109 - DNA, 25 bp, Homo sapien
gacaggatgatactggaagtccgta

SEQ ID NO: 1746110 - DNA, 25 bp, Homo sapien
caggatgatactggaagtccgtaca

SEQ ID NO: 1746111 - DNA, 25 bp, Homo sapien
gctcgttcactttgcgggcgtccat

SEQ ID NO: 1746112 - DNA, 25 bp, Homo sapien
aggtggtactttacctcccatgctc

SEQ ID NO: 1746113 - DNA, 25 bp, Homo sapien
cggtgtgcagaatgctcggatcctg

SEQ ID NO: 1746114 - DNA, 25 bp, Homo sapien
cctcacttgatggttcgtctgcctt

SEQ ID NO: 1746115 - DNA, 25 bp, Homo sapien
gagtccggagccttgcgcccatctc

SEQ ID NO: 1746116 - DNA, 25 bp, Homo sapien
gagccttgcgcccatctcccatttc

SEQ ID NO: 1746117 - DNA, 25 bp, Homo sapien
tctgcaccgtggagtccggagcctt

SEQ ID NO: 1746118 - DNA, 25 bp, Homo sapien
gccttgcgcccatctcccatttctt

SEQ ID NO: 1746119 - DNA, 25 bp, Homo sapien
cctcatagtaggttagcatgggctt

SEQ ID NO: 1746120 - DNA, 25 bp, Homo sapien
gcatgggctttgtaagtacaaaaag

SEQ ID NO: 1746121 - DNA, 25 bp, Homo sapien
gctttgtaagtacaaaaagtctctc

SEQ ID NO: 1746122 - DNA, 25 bp, Homo sapien
tttgtagtttaagggtgatgtcttc

SEQ ID NO: 1746123 - DNA, 25 bp, Homo sapien
aataaatgtcttttccacgatcata

SEQ ID NO: 1746124 - DNA, 25 bp, Homo sapien
taaatgtcttttccacgatcatatc

SEQ ID NO: 1746125 - DNA, 25 bp, Homo sapien
taataaatgtcttttccacgatcat

SEQ ID NO: 1746126 - DNA, 25 bp, Homo sapien
aaatgtcttttccacgatcatatca

SEQ ID NO: 1746127 - DNA, 25 bp, Homo sapien
gttctgcaccagacaatcgtctttg

SEQ ID NO: 1746128 - DNA, 25 bp, Homo sapien
ccagacaatcgtctttgtctccttg

SEQ ID NO: 1746129 - DNA, 25 bp, Homo sapien
ctagggttctgcaccagacaatcgt

SEQ ID NO: 1746130 - DNA, 25 bp, Homo sapien
tgcaccagacaatcgtctttgtctc

SEQ ID NO: 1746131 - DNA, 25 bp, Homo sapien
cagcctaacccttttctcaaatgga

SEQ ID NO: 1746132 - DNA, 25 bp, Homo sapien
agaaggcatttacatgaatgactac

SEQ ID NO: 1746133 - DNA, 25 bp, Homo sapien
cattttcgataactatttcttgaac

SEQ ID NO: 1746134 - DNA, 25 bp, Homo sapien
cacctccaacctggaagtttgaaag

SEQ ID NO: 1746135 - DNA, 25 bp, Homo sapien
tgaaagagatataggacttggtccc

SEQ ID NO: 1746136 - DNA, 25 bp, Homo sapien
gttgatacattttcgataactattt

SEQ ID NO: 1746137 - DNA, 25 bp, Homo sapien
aacttgggtgactcaacattgaagc

SEQ ID NO: 1746138 - DNA, 25 bp, Homo sapien
aacattgaagcctaacatggattga

SEQ ID NO: 1746139 - DNA, 25 bp, Homo sapien
ttgaagcctaacatggattgagccc

SEQ ID NO: 1746140 - DNA, 25 bp, Homo sapien
tggttggttattctctgtggagaac

SEQ ID NO: 1746141 - DNA, 25 bp, Homo sapien
agaaggggaaaatagatacaacaag

SEQ ID NO: 1746142 - DNA, 25 bp, Homo sapien
gaaaatagatacaacaagggggcag

SEQ ID NO: 1746143 - DNA, 25 bp, Homo sapien
ggaaaatagatacaacaagggggca

SEQ ID NO: 1746144 - DNA, 25 bp, Homo sapien
ctcctgagccccttgccggccacag

SEQ ID NO: 1746145 - DNA, 25 bp, Homo sapien
cctgagccccttgccggccacagcc

SEQ ID NO: 1746146 - DNA, 25 bp, Homo sapien
tcctgagccccttgccggccacagc

SEQ ID NO: 1746147 - DNA, 25 bp, Homo sapien
caggtggtattgtgaactggaggtc

SEQ ID NO: 1746148 - DNA, 25 bp, Homo sapien
gatgaaaagatgagcccgggtgtga

SEQ ID NO: 1746149 - DNA, 25 bp, Homo sapien
ttcgccgagtctgggcgcctggact

SEQ ID NO: 1746150 - DNA, 25 bp, Homo sapien
aaatcatctacgcaggtcgcagcct

SEQ ID NO: 1746151 - DNA, 25 bp, Homo sapien
tgggcaaaccggcacgtccagctgg

SEQ ID NO: 1746152 - DNA, 25 bp, Homo sapien
agaagtctcactcggaacccgctcc

SEQ ID NO: 1746153 - DNA, 25 bp, Homo sapien
gcttctctcaacattcgattctgga

SEQ ID NO: 1746154 - DNA, 25 bp, Homo sapien
ttctggagtacgttgagcccagggc

SEQ ID NO: 1746155 - DNA, 25 bp, Homo sapien
tcgtcccggaaggtgtgcgcccctc

SEQ ID NO: 1746156 - DNA, 25 bp, Homo sapien
gtcccggaaggtgtgcgcccctcac

SEQ ID NO: 1746157 - DNA, 25 bp, Homo sapien
agccaaggtcgtcccggaaggtgtg

SEQ ID NO: 1746158 - DNA, 25 bp, Homo sapien
caaggtcgtcccggaaggtgtgcgc

SEQ ID NO: 1746159 - DNA, 25 bp, Homo sapien
tcccctcgtcacttgtgacggcaca

SEQ ID NO: 1746160 - DNA, 25 bp, Homo sapien
tggttctagaaaatgattcagggag

SEQ ID NO: 1746161 - DNA, 25 bp, Homo sapien
acttgtgacggcacactcatcttca

SEQ ID NO: 1746162 - DNA, 25 bp, Homo sapien
tccctggggtttatgttcatataat

SEQ ID NO: 1746163 - DNA, 25 bp, Homo sapien
caatgaggtgagattgtgctgctgc

SEQ ID NO: 1746164 - DNA, 25 bp, Homo sapien
cgggcgaatcatttgaggtcggggg

SEQ ID NO: 1746165 - DNA, 25 bp, Homo sapien
gaatcatttgaggtcgggggttcaa

SEQ ID NO: 1746166 - DNA, 25 bp, Homo sapien
gttgcaatgaggtgagattgtgctg

SEQ ID NO: 1746167 - DNA, 25 bp, Homo sapien
tgtacgcagatggttgggttacagc

SEQ ID NO: 1746168 - DNA, 25 bp, Homo sapien
acaactcaaagcagtgatggtggca

SEQ ID NO: 1746169 - DNA, 25 bp, Homo sapien
cttcaggagggtcggagaacatgta

SEQ ID NO: 1746170 - DNA, 25 bp, Homo sapien
gttacaagcagacatcaattgatac

SEQ ID NO: 1746171 - DNA, 25 bp, Homo sapien
actgtgctcctgtaggcttttgccc

SEQ ID NO: 1746172 - DNA, 25 bp, Homo sapien
taggttaccagcatccaccactgtg

SEQ ID NO: 1746173 - DNA, 25 bp, Homo sapien
tgtgctcctgtaggcttttgcccat

SEQ ID NO: 1746174 - DNA, 25 bp, Homo sapien
ttccataggttaccagcatccacca

SEQ ID NO: 1746175 - DNA, 25 bp, Homo sapien
gggcatggaagtgaatcattaaatc

SEQ ID NO: 1746176 - DNA, 25 bp, Homo sapien
gcatggaagtgaatcattaaatccg

SEQ ID NO: 1746177 - DNA, 25 bp, Homo sapien
aatacacgctgacgcacttggcaaa

SEQ ID NO: 1746178 - DNA, 25 bp, Homo sapien
taacaatacacgctgacgcacttgg

SEQ ID NO: 1746179 - DNA, 25 bp, Homo sapien
gttccggcaataaaagagggtatca

SEQ ID NO: 1746180 - DNA, 25 bp, Homo sapien
tgcaaaacttctttgctttttcttg

SEQ ID NO: 1746181 - DNA, 25 bp, Homo sapien
ctctgcaaaacttctttgctttttc

SEQ ID NO: 1746182 - DNA, 25 bp, Homo sapien
cttgagggtttttggcaaagcagga

SEQ ID NO: 1746183 - DNA, 25 bp, Homo sapien
tttcttgagggtttttggcaaagca

SEQ ID NO: 1746184 - DNA, 25 bp, Homo sapien
ggccattcgaatctccattctgtcc

SEQ ID NO: 1746185 - DNA, 25 bp, Homo sapien
tttgtgtgcacaccattggaacttc

SEQ ID NO: 1746186 - DNA, 25 bp, Homo sapien
caccattggaacttctgatcctgat

SEQ ID NO: 1746187 - DNA, 25 bp, Homo sapien
ctttgtgtgcacaccattggaactt

SEQ ID NO: 1746188 - DNA, 25 bp, Homo sapien
cattggaacttctgatcctgatgac

SEQ ID NO: 1746189 - DNA, 25 bp, Homo sapien
cactgaagatccgacaaaggtgaag

SEQ ID NO: 1746190 - DNA, 25 bp, Homo sapien
ctgaagatccgacaaaggtgaagaa

SEQ ID NO: 1746191 - DNA, 25 bp, Homo sapien
taccctgatgcaatatgtggctcta

SEQ ID NO: 1746192 - DNA, 25 bp, Homo sapien
ggtaccctgatgcaatatgtggctc

SEQ ID NO: 1746193 - DNA, 25 bp, Homo sapien
tgttgtagattagctcatttactga

SEQ ID NO: 1746194 - DNA, 25 bp, Homo sapien
ataaccactgttgtagattagctca

SEQ ID NO: 1746195 - DNA, 25 bp, Homo sapien
ccactgttgtagattagctcattta

SEQ ID NO: 1746196 - DNA, 25 bp, Homo sapien
gccataaccactgttgtagattagc

SEQ ID NO: 1746197 - DNA, 25 bp, Homo sapien
ctgtcaaggcgattaatttattgac

SEQ ID NO: 1746198 - DNA, 25 bp, Homo sapien
tctgtcaaggcgattaatttattga

SEQ ID NO: 1746199 - DNA, 25 bp, Homo sapien
tcccataataggcctgttgatctgg

SEQ ID NO: 1746200 - DNA, 25 bp, Homo sapien
cattcccataataggcctgttgatc

SEQ ID NO: 1746201 - DNA, 25 bp, Homo sapien
attcccataataggcctgttgatct

SEQ ID NO: 1746202 - DNA, 25 bp, Homo sapien
cccataataggcctgttgatctggt

SEQ ID NO: 1746203 - DNA, 25 bp, Homo sapien
ttttagcatacaagtcctgcatatg

SEQ ID NO: 1746204 - DNA, 25 bp, Homo sapien
tagatagcctgtaattgaatctcgc

SEQ ID NO: 1746205 - DNA, 25 bp, Homo sapien
tatgctttggtttaagtctaccatc

SEQ ID NO: 1746206 - DNA, 25 bp, Homo sapien
tatccagtctgacatcctctgcttg

SEQ ID NO: 1746207 - DNA, 25 bp, Homo sapien
cacttgtaaggaggctataatttgt

SEQ ID NO: 1746208 - DNA, 25 bp, Homo sapien
cactgtggagaagctgttggttatt

SEQ ID NO: 1746209 - DNA, 25 bp, Homo sapien
gctgaaaactatgtagcctcgaagg

SEQ ID NO: 1746210 - DNA, 25 bp, Homo sapien
gcctcgaaggtttctcacttgtaag

SEQ ID NO: 1746211 - DNA, 25 bp, Homo sapien
ctgtggtacagtttgtgatgttcat

SEQ ID NO: 1746212 - DNA, 25 bp, Homo sapien
tctgtggtacagtttgtgatgttca

SEQ ID NO: 1746213 - DNA, 25 bp, Homo sapien
ccaagttcagcaacgtggtgagggt

SEQ ID NO: 1746214 - DNA, 25 bp, Homo sapien
cttcttggtggtgccaatagccatg

SEQ ID NO: 1746215 - DNA, 25 bp, Homo sapien
ggtggtgccaatagccatgatcaca

SEQ ID NO: 1746216 - DNA, 25 bp, Homo sapien
ggtgatgaccaccagagtcatgcaa

SEQ ID NO: 1746217 - DNA, 25 bp, Homo sapien
tccgtcacggccagagaacagatta

SEQ ID NO: 1746218 - DNA, 25 bp, Homo sapien
aagcttccagcgatccatgacaatg

SEQ ID NO: 1746219 - DNA, 25 bp, Homo sapien
catgacaatgtagatgatgctcagg

SEQ ID NO: 1746220 - DNA, 25 bp, Homo sapien
gaacagattaggtagttggcaggct

SEQ ID NO: 1746221 - DNA, 25 bp, Homo sapien
aatagcattggtgatggcccagtac

SEQ ID NO: 1746222 - DNA, 25 bp, Homo sapien
ctggcgtattcaatagcattggtga

SEQ ID NO: 1746223 - DNA, 25 bp, Homo sapien
caatagcattggtgatggcccagta

SEQ ID NO: 1746224 - DNA, 25 bp, Homo sapien
gtattcaatagcattggtgatggcc

SEQ ID NO: 1746225 - DNA, 25 bp, Homo sapien
taacatggtcgtgctggatggtgca

SEQ ID NO: 1746226 - DNA, 25 bp, Homo sapien
gtaaaggctcttggccgcgtggtaa

SEQ ID NO: 1746227 - DNA, 25 bp, Homo sapien
ggatataaaacgcacccagcgtgga

SEQ ID NO: 1746228 - DNA, 25 bp, Homo sapien
cgcgtggtaaatccggtaatagaga

SEQ ID NO: 1746229 - DNA, 25 bp, Homo sapien
ggtgatctagatcattgtcgaaggg

SEQ ID NO: 1746230 - DNA, 25 bp, Homo sapien
tctcctgggtgatctagatcattgt

SEQ ID NO: 1746231 - DNA, 25 bp, Homo sapien
agtctgtgtaagtttacaacttgca

SEQ ID NO: 1746232 - DNA, 25 bp, Homo sapien
agaattctggctatctgtgcttctg

SEQ ID NO: 1746233 - DNA, 25 bp, Homo sapien
aatcagccccaggatgcgtgctgcc

SEQ ID NO: 1746234 - DNA, 25 bp, Homo sapien
aatgaatgcacccagaatcagcccc

SEQ ID NO: 1746235 - DNA, 25 bp, Homo sapien
ggataaaatgaatgcacccagaatc

SEQ ID NO: 1746236 - DNA, 25 bp, Homo sapien
tccgttccctggtgctagagatctg

SEQ ID NO: 1746237 - DNA, 25 bp, Homo sapien
gaattcacataaccgagccacgtca

SEQ ID NO: 1746238 - DNA, 25 bp, Homo sapien
cagagggttgatcagagaattcaca

SEQ ID NO: 1746239 - DNA, 25 bp, Homo sapien
gccacgtcagaaagtcggccacttc

SEQ ID NO: 1746240 - DNA, 25 bp, Homo sapien
gacacggtgtagatgctcagaccca

SEQ ID NO: 1746241 - DNA, 25 bp, Homo sapien
tcaagaattaataagttgcacccct

SEQ ID NO: 1746242 - DNA, 25 bp, Homo sapien
caagaccacacatacttacaaactc

SEQ ID NO: 1746243 - DNA, 25 bp, Homo sapien
gctctggaaaaagtcgtgcctttta

SEQ ID NO: 1746244 - DNA, 25 bp, Homo sapien
ggtagaaaacagcacgccaaataac

SEQ ID NO: 1746245 - DNA, 25 bp, Homo sapien
gactcaaactttagcttgtatcaga

SEQ ID NO: 1746246 - DNA, 25 bp, Homo sapien
aaatctactgtatgctctaaaatag

SEQ ID NO: 1746247 - DNA, 25 bp, Homo sapien
acagagattaatgggctccactctt

SEQ ID NO: 1746248 - DNA, 25 bp, Homo sapien
taaaatagtgactcaaactttagct

SEQ ID NO: 1746249 - DNA, 25 bp, Homo sapien
gagaagacttccatagggacaggga

SEQ ID NO: 1746250 - DNA, 25 bp, Homo sapien
tatgagtccctagagatacagagag

SEQ ID NO: 1746251 - DNA, 25 bp, Homo sapien
cattaacagacactgagtgccgact

SEQ ID NO: 1746252 - DNA, 25 bp, Homo sapien
tcacaatctactagggaagacagca

SEQ ID NO: 1746253 - DNA, 25 bp, Homo sapien
attcccagtgcatatccagggtgcc

SEQ ID NO: 1746254 - DNA, 25 bp, Homo sapien
ttcccagtgcatatccagggtgcca

SEQ ID NO: 1746255 - DNA, 25 bp, Homo sapien
cccagtgcatatccagggtgccact

SEQ ID NO: 1746256 - DNA, 25 bp, Homo sapien
tcccagtgcatatccagggtgccac

SEQ ID NO: 1746257 - DNA, 25 bp, Homo sapien
agcagcaggggttcttgtgagtttt

SEQ ID NO: 1746258 - DNA, 25 bp, Homo sapien
ttaagcagcaggggttcttgtgagt

SEQ ID NO: 1746259 - DNA, 25 bp, Homo sapien
gcaggggttcttgtgagttttgaat

SEQ ID NO: 1746260 - DNA, 25 bp, Homo sapien
cttttaagcagcaggggttcttgtg

SEQ ID NO: 1746261 - DNA, 25 bp, Homo sapien
ctggtaagagacgcaggaactcctc

SEQ ID NO: 1746262 - DNA, 25 bp, Homo sapien
cctggtaagagacgcaggaactcct

SEQ ID NO: 1746263 - DNA, 25 bp, Homo sapien
tggtaagagacgcaggaactcctcc

SEQ ID NO: 1746264 - DNA, 25 bp, Homo sapien
ataggaaggaggatgctggcatgcc

SEQ ID NO: 1746265 - DNA, 25 bp, Homo sapien
ctggaaacattcttgtcgggaccct

SEQ ID NO: 1746266 - DNA, 25 bp, Homo sapien
tagtatccattcttagtcccttctg

SEQ ID NO: 1746267 - DNA, 25 bp, Homo sapien
gaaacttgtaattatggcctgaacc

SEQ ID NO: 1746268 - DNA, 25 bp, Homo sapien
taacttatgccatcacaaggccagc

SEQ ID NO: 1746269 - DNA, 25 bp, Homo sapien
tccacagatacaatacatagcagct

SEQ ID NO: 1746270 - DNA, 25 bp, Homo sapien
caaggccagctacataatctgcagg

SEQ ID NO: 1746271 - DNA, 25 bp, Homo sapien
caacggagtggagacgcttcatgca

SEQ ID NO: 1746272 - DNA, 25 bp, Homo sapien
gaaaatgagtccgtggctggctgct

SEQ ID NO: 1746273 - DNA, 25 bp, Homo sapien
gagctccacccagtggcaatgtgta

SEQ ID NO: 1746274 - DNA, 25 bp, Homo sapien
ttgctggttccaaggtgcttttgtg

SEQ ID NO: 1746275 - DNA, 25 bp, Homo sapien
ggtgcttttgtggactttgagctcc

SEQ ID NO: 1746276 - DNA, 25 bp, Homo sapien
gaaactgagcgtggccaaagagaag

SEQ ID NO: 1746277 - DNA, 25 bp, Homo sapien
cgatgctaggccgaatgggtccagc

SEQ ID NO: 1746278 - DNA, 25 bp, Homo sapien
tatggatttcttcagtccgctgcag

SEQ ID NO: 1746279 - DNA, 25 bp, Homo sapien
cagctgactgggcacatttgtcttc

SEQ ID NO: 1746280 - DNA, 25 bp, Homo sapien
aaccctggtgagcactagggtgaaa

SEQ ID NO: 1746281 - DNA, 25 bp, Homo sapien
cactcgaggagtaaagagagaggac

SEQ ID NO: 1746282 - DNA, 25 bp, Homo sapien
gggtgaaatgtcatagccatactta

SEQ ID NO: 1746283 - DNA, 25 bp, Homo sapien
ctactaagtgttgggtctggagagc

SEQ ID NO: 1746284 - DNA, 25 bp, Homo sapien
cataccactttgacacgcttcaagg

SEQ ID NO: 1746285 - DNA, 25 bp, Homo sapien
taccaagtgctgtcttgatgactgc

SEQ ID NO: 1746286 - DNA, 25 bp, Homo sapien
tacagtacaatcagcagtctagttc

SEQ ID NO: 1746287 - DNA, 25 bp, Homo sapien
tcaaggatatactgcagctttactg

SEQ ID NO: 1746288 - DNA, 25 bp, Homo sapien
gcatggttcatagcaccaaacttca

SEQ ID NO: 1746289 - DNA, 25 bp, Homo sapien
agcatggttcatagcaccaaacttc

SEQ ID NO: 1746290 - DNA, 25 bp, Homo sapien
cagcatggttcatagcaccaaactt

SEQ ID NO: 1746291 - DNA, 25 bp, Homo sapien
acagcatggttcatagcaccaaact

SEQ ID NO: 1746292 - DNA, 25 bp, Homo sapien
gatgaggttgatattttcagaagac

SEQ ID NO: 1746293 - DNA, 25 bp, Homo sapien
catctggcaagaaaggagagtgacc

SEQ ID NO: 1746294 - DNA, 25 bp, Homo sapien
agaacacaatgggatgaggttgata

SEQ ID NO: 1746295 - DNA, 25 bp, Homo sapien
cagtgagaggggtgtcatgccaatc

SEQ ID NO: 1746296 - DNA, 25 bp, Homo sapien
tccgtgtataagttttttgcactga

SEQ ID NO: 1746297 - DNA, 25 bp, Homo sapien
aactttcacaattactccaaatacg

SEQ ID NO: 1746298 - DNA, 25 bp, Homo sapien
ttcacaattactccaaatacgctcc

SEQ ID NO: 1746299 - DNA, 25 bp, Homo sapien
caccattacttccgtgtataagttt

SEQ ID NO: 1746300 - DNA, 25 bp, Homo sapien
gtgctctggtggagtaaaatctggg

SEQ ID NO: 1746301 - DNA, 25 bp, Homo sapien
tctcctcaaatcctcatcctcataa

SEQ ID NO: 1746302 - DNA, 25 bp, Homo sapien
agaggccgtggcgcgggcactgctg

SEQ ID NO: 1746303 - DNA, 25 bp, Homo sapien
ggccgtggcgcgggcactgctgcct

SEQ ID NO: 1746304 - DNA, 25 bp, Homo sapien
tggcgcgggcactgctgcctgattt

SEQ ID NO: 1746305 - DNA, 25 bp, Homo sapien
cgtggcgcgggcactgctgcctgat

SEQ ID NO: 1746306 - DNA, 25 bp, Homo sapien
gcggtttttccacccagcactgagg

SEQ ID NO: 1746307 - DNA, 25 bp, Homo sapien
actgaggatcaagcccgctgtagcc

SEQ ID NO: 1746308 - DNA, 25 bp, Homo sapien
gatcaagcccgctgtagcctggctg

SEQ ID NO: 1746309 - DNA, 25 bp, Homo sapien
cagcaacgccgacacccagcagttg

SEQ ID NO: 1746310 - DNA, 25 bp, Homo sapien
gaattcttgaaatagccgggcctga

SEQ ID NO: 1746311 - DNA, 25 bp, Homo sapien
gcacacgccggtgcactctttttct

SEQ ID NO: 1746312 - DNA, 25 bp, Homo sapien
gcttcacgggttttccgggcagcac

SEQ ID NO: 1746313 - DNA, 25 bp, Homo sapien
agatgtgcttgcatccgggccgtgc

SEQ ID NO: 1746314 - DNA, 25 bp, Homo sapien
acgtggtgtaatcatatggaccttc

SEQ ID NO: 1746315 - DNA, 25 bp, Homo sapien
ggtgtaatcatatggaccttcactc

SEQ ID NO: 1746316 - DNA, 25 bp, Homo sapien
cgatttcagagaaaatctgggagac

SEQ ID NO: 1746317 - DNA, 25 bp, Homo sapien
cttcactcccaagagactcgatttc

SEQ ID NO: 1746318 - DNA, 25 bp, Homo sapien
catgcccattttgaacacaacgcga

SEQ ID NO: 1746319 - DNA, 25 bp, Homo sapien
cgaagacctgttccattgagaaaac

SEQ ID NO: 1746320 - DNA, 25 bp, Homo sapien
gggaactcagtatccgcgccgcgag

SEQ ID NO: 1746321 - DNA, 25 bp, Homo sapien
gggcaaaagactccgcgtctctggg

SEQ ID NO: 1746322 - DNA, 25 bp, Homo sapien
caatcttatccatagaaaagtcatg

SEQ ID NO: 1746323 - DNA, 25 bp, Homo sapien
tgaaaatactatcccgtgacaggtc

SEQ ID NO: 1746324 - DNA, 25 bp, Homo sapien
caaactgtcagctcataggaaccat

SEQ ID NO: 1746325 - DNA, 25 bp, Homo sapien
atagaaaagtcatgacttctgtgct

SEQ ID NO: 1746326 - DNA, 25 bp, Homo sapien
gcattagacaaaagacctatctctc

SEQ ID NO: 1746327 - DNA, 25 bp, Homo sapien
gacctatctctcttgcaactgaata

SEQ ID NO: 1746328 - DNA, 25 bp, Homo sapien
cgttagagcattagacaaaagacct

SEQ ID NO: 1746329 - DNA, 25 bp, Homo sapien
tagagcattagacaaaagacctatc

SEQ ID NO: 1746330 - DNA, 25 bp, Homo sapien
agctgaaaagaattaatacttggca

SEQ ID NO: 1746331 - DNA, 25 bp, Homo sapien
aagctgaaaagaattaatacttggc

SEQ ID NO: 1746332 - DNA, 25 bp, Homo sapien
tgcgtgaggtaccagatctcgtctc

SEQ ID NO: 1746333 - DNA, 25 bp, Homo sapien
ctagtgcgtgaggtaccagatctcg

SEQ ID NO: 1746334 - DNA, 25 bp, Homo sapien
ccggagaggagggatctagtgcgtg

SEQ ID NO: 1746335 - DNA, 25 bp, Homo sapien
gagggatctagtgcgtgaggtacca

SEQ ID NO: 1746336 - DNA, 25 bp, Homo sapien
aaggcaggactatgaactgtcaaaa

SEQ ID NO: 1746337 - DNA, 25 bp, Homo sapien
agagagaaggtaaaacccgcccatg

SEQ ID NO: 1746338 - DNA, 25 bp, Homo sapien
gcccatggaccgcaagcgtgagagc

SEQ ID NO: 1746339 - DNA, 25 bp, Homo sapien
tatgaactgtcaaaattgtctctga

SEQ ID NO: 1746340 - DNA, 25 bp, Homo sapien
ctgagtggtctcgggcaatggctgc

SEQ ID NO: 1746341 - DNA, 25 bp, Homo sapien
agtggtctcgggcaatggctgcatt

SEQ ID NO: 1746342 - DNA, 25 bp, Homo sapien
gtggtctcgggcaatggctgcattt

SEQ ID NO: 1746343 - DNA, 25 bp, Homo sapien
tgagtggtctcgggcaatggctgca

SEQ ID NO: 1746344 - DNA, 25 bp, Homo sapien
cgatcccggcgtggctttccccagt

SEQ ID NO: 1746345 - DNA, 25 bp, Homo sapien
cgaagtcttctacggacatatcctc

SEQ ID NO: 1746346 - DNA, 25 bp, Homo sapien
cccagtccacgaagtcttctacgga

SEQ ID NO: 1746347 - DNA, 25 bp, Homo sapien
cggcgtcccgatcccggcgtggctt

SEQ ID NO: 1746348 - DNA, 25 bp, Homo sapien
aaggcctgctctcggtcacgtgggc

SEQ ID NO: 1746349 - DNA, 25 bp, Homo sapien
tcacgtgggcgccgcgacgggaaaa

SEQ ID NO: 1746350 - DNA, 25 bp, Homo sapien
gctggtgaaggcctgctctcggtca

SEQ ID NO: 1746351 - DNA, 25 bp, Homo sapien
gggcgggctggtgaaggcctgctct

SEQ ID NO: 1746352 - DNA, 25 bp, Homo sapien
ataacacaatgccacgttcggcggg

SEQ ID NO: 1746353 - DNA, 25 bp, Homo sapien
tcggcggggtcacgtgccgggcgcg

SEQ ID NO: 1746354 - DNA, 25 bp, Homo sapien
ctgggtcacgtgataacacaatgcc

SEQ ID NO: 1746355 - DNA, 25 bp, Homo sapien
cacgttcggcggggtcacgtgccgg

SEQ ID NO: 1746356 - DNA, 25 bp, Homo sapien
tgcagctccgcgacgcagccgcctt

SEQ ID NO: 1746357 - DNA, 25 bp, Homo sapien
ctcttcgtccgccatcttcacaccc

SEQ ID NO: 1746358 - DNA, 25 bp, Homo sapien
ccgcaactcaacctctcctgctcgg

SEQ ID NO: 1746359 - DNA, 25 bp, Homo sapien
tgacagtagtcggtggccgcttcca

SEQ ID NO: 1746360 - DNA, 25 bp, Homo sapien
ctctcggccgcctagcgctcgctcg

SEQ ID NO: 1746361 - DNA, 25 bp, Homo sapien
aaggaagcggcgaccacctctcggc

SEQ ID NO: 1746362 - DNA, 25 bp, Homo sapien
cggaggcgccgatgatgccaaggaa

SEQ ID NO: 1746363 - DNA, 25 bp, Homo sapien
ccgatgatgccaaggaagcggcgac

SEQ ID NO: 1746364 - DNA, 25 bp, Homo sapien
cggggaccgcgcagtcccgagttca

SEQ ID NO: 1746365 - DNA, 25 bp, Homo sapien
ggattttccgccttgaccgcaactc

SEQ ID NO: 1746366 - DNA, 25 bp, Homo sapien
cgtgtacatttcctcagccgcgggg

SEQ ID NO: 1746367 - DNA, 25 bp, Homo sapien
gcagtcccgagttcagggaaggaaa

SEQ ID NO: 1746368 - DNA, 25 bp, Homo sapien
agtgggaagcagaggcgcagaggcg

SEQ ID NO: 1746369 - DNA, 25 bp, Homo sapien
gtgggaagcagaggcgcagaggcgg

SEQ ID NO: 1746370 - DNA, 25 bp, Homo sapien
gggaagcagaggcgcagaggcggga

SEQ ID NO: 1746371 - DNA, 25 bp, Homo sapien
gagtgggaagcagaggcgcagaggc

SEQ ID NO: 1746372 - DNA, 25 bp, Homo sapien
cgaacgtctagctcaactagaaggg

SEQ ID NO: 1746373 - DNA, 25 bp, Homo sapien
tgctcctccgaacatcaacaaaggc

SEQ ID NO: 1746374 - DNA, 25 bp, Homo sapien
ccttcagtcctaaggcgaaactcga

SEQ ID NO: 1746375 - DNA, 25 bp, Homo sapien
aacaaaggcccggagacagccagga

SEQ ID NO: 1746376 - DNA, 25 bp, Homo sapien
caagcaagcaagtatgggcaggagg

SEQ ID NO: 1746377 - DNA, 25 bp, Homo sapien
tgatgcaccaagcaagcaagtatgg

SEQ ID NO: 1746378 - DNA, 25 bp, Homo sapien
gtgatgcaccaagcaagcaagtatg

SEQ ID NO: 1746379 - DNA, 25 bp, Homo sapien
ccaagcaagcaagtatgggcaggag

SEQ ID NO: 1746380 - DNA, 25 bp, Homo sapien
cgaaagcaaatgagaaacggactct

SEQ ID NO: 1746381 - DNA, 25 bp, Homo sapien
tggaaatcatactcctcgaagggcg

SEQ ID NO: 1746382 - DNA, 25 bp, Homo sapien
gagacagatgtacaggcacagctcc

SEQ ID NO: 1746383 - DNA, 25 bp, Homo sapien
aaggacactcaacctgagacagatg

SEQ ID NO: 1746384 - DNA, 25 bp, Homo sapien
tgtaaggctcgtaatgaagtgcaaa

SEQ ID NO: 1746385 - DNA, 25 bp, Homo sapien
caaactctccgattttcaccatgga

SEQ ID NO: 1746386 - DNA, 25 bp, Homo sapien
tcatcactagcaaacagtgttatta

SEQ ID NO: 1746387 - DNA, 25 bp, Homo sapien
gtgcaaatgtagtcccaaactctcc

SEQ ID NO: 1746388 - DNA, 25 bp, Homo sapien
tctactcagctaaaatggtcaacca

SEQ ID NO: 1746389 - DNA, 25 bp, Homo sapien
ttttgtatgtgatcacgtatccccg

SEQ ID NO: 1746390 - DNA, 25 bp, Homo sapien
tgcatacagcaacggagattctttt

SEQ ID NO: 1746391 - DNA, 25 bp, Homo sapien
ggtcaaccattgttctacgttaaga

SEQ ID NO: 1746392 - DNA, 25 bp, Homo sapien
agttatctaagcagtcacaaaggca

SEQ ID NO: 1746393 - DNA, 25 bp, Homo sapien
caatgggttcatgcttaaatgcaga

SEQ ID NO: 1746394 - DNA, 25 bp, Homo sapien
agtgtctcttactaccctctatggg

SEQ ID NO: 1746395 - DNA, 25 bp, Homo sapien
tgtgctgggagccttcaccagtgtc

SEQ ID NO: 1746396 - DNA, 25 bp, Homo sapien
gagtatatacaaattctaggctggg

SEQ ID NO: 1746397 - DNA, 25 bp, Homo sapien
caatgtgcactatcctattttaggg

SEQ ID NO: 1746398 - DNA, 25 bp, Homo sapien
tcaaactacttaagtatcaggcttt

SEQ ID NO: 1746399 - DNA, 25 bp, Homo sapien
ttgcaaaaagtagggaaagatcagc

SEQ ID NO: 1746400 - DNA, 25 bp, Homo sapien
aagaatgcttaattagtctccaggg

SEQ ID NO: 1746401 - DNA, 25 bp, Homo sapien
actcagggcatttattggtattagg

SEQ ID NO: 1746402 - DNA, 25 bp, Homo sapien
ccttttatcatgactactatagtac

SEQ ID NO: 1746403 - DNA, 25 bp, Homo sapien
tgaaacagatttcacctttaatcat

SEQ ID NO: 1746404 - DNA, 25 bp, Homo sapien
taaaaatttaagtgtgtgtctgtgg

SEQ ID NO: 1746405 - DNA, 25 bp, Homo sapien
tgcctggccaaggattaaaaattta

SEQ ID NO: 1746406 - DNA, 25 bp, Homo sapien
tgtgcctggccaaggattaaaaatt

SEQ ID NO: 1746407 - DNA, 25 bp, Homo sapien
tgtctgtggggaggagtggggggcc

SEQ ID NO: 1746408 - DNA, 25 bp, Homo sapien
taattagacatacttatattgaggt

SEQ ID NO: 1746409 - DNA, 25 bp, Homo sapien
ctattcaaatgttttctggtaaggt

SEQ ID NO: 1746410 - DNA, 25 bp, Homo sapien
gaagaccactgctgtagaaaatagc

SEQ ID NO: 1746411 - DNA, 25 bp, Homo sapien
ctgctgtagaaaatagccctacttc

SEQ ID NO: 1746412 - DNA, 25 bp, Homo sapien
tctccatgagtgtttcattgggaag

SEQ ID NO: 1746413 - DNA, 25 bp, Homo sapien
gcaaatttaacacgttgctatggaa

SEQ ID NO: 1746414 - DNA, 25 bp, Homo sapien
tctatactaatgtaaaggctactgg

SEQ ID NO: 1746415 - DNA, 25 bp, Homo sapien
cattgggaagatcacctacagagcc

SEQ ID NO: 1746416 - DNA, 25 bp, Homo sapien
tagggaagatctgacctcactgtgg

SEQ ID NO: 1746417 - DNA, 25 bp, Homo sapien
gatggactgttgtggaactcctcag

SEQ ID NO: 1746418 - DNA, 25 bp, Homo sapien
tgaggccttaggaactggactgagc

SEQ ID NO: 1746419 - DNA, 25 bp, Homo sapien
gaagctttcaatctcccactgagag

SEQ ID NO: 1746420 - DNA, 25 bp, Homo sapien
gactggagaactaagagggaatgaa

SEQ ID NO: 1746421 - DNA, 25 bp, Homo sapien
gaaaatgaagtggtaaggcattccc

SEQ ID NO: 1746422 - DNA, 25 bp, Homo sapien
actagtctgggaatttaacctccat

SEQ ID NO: 1746423 - DNA, 25 bp, Homo sapien
tggctggcagcccataggtaacttg

SEQ ID NO: 1746424 - DNA, 25 bp, Homo sapien
tctctgataaatcaatccgtaaacc

SEQ ID NO: 1746425 - DNA, 25 bp, Homo sapien
tgataaatcaatccgtaaaccataa

SEQ ID NO: 1746426 - DNA, 25 bp, Homo sapien
tctgataaatcaatccgtaaaccat

SEQ ID NO: 1746427 - DNA, 25 bp, Homo sapien
attctctgataaatcaatccgtaaa

SEQ ID NO: 1746428 - DNA, 25 bp, Homo sapien
tacagggacgtgcaatgcaatactg

SEQ ID NO: 1746429 - DNA, 25 bp, Homo sapien
taacagtaattgaacacattcctgg

SEQ ID NO: 1746430 - DNA, 25 bp, Homo sapien
gcaatactgttcctgatggtcaaga

SEQ ID NO: 1746431 - DNA, 25 bp, Homo sapien
tccttatccattaagatccctggaa

SEQ ID NO: 1746432 - DNA, 25 bp, Homo sapien
aactgcttgagcccaaaggtggagg

SEQ ID NO: 1746433 - DNA, 25 bp, Homo sapien
gagaactgcttgagcccaaaggtgg

SEQ ID NO: 1746434 - DNA, 25 bp, Homo sapien
catcccagatacttggaggctaggg

SEQ ID NO: 1746435 - DNA, 25 bp, Homo sapien
cccagatacttggaggctagggcag

SEQ ID NO: 1746436 - DNA, 25 bp, Homo sapien
tgtcacatgtgaaattggcctacag

SEQ ID NO: 1746437 - DNA, 25 bp, Homo sapien
aaggatttttcgcatatattgctgg

SEQ ID NO: 1746438 - DNA, 25 bp, Homo sapien
cagagcagcaaacttagttcctccc

SEQ ID NO: 1746439 - DNA, 25 bp, Homo sapien
caatagaacttgtaaccattcagac

SEQ ID NO: 1746440 - DNA, 25 bp, Homo sapien
ctctggctctgactccccataccag

SEQ ID NO: 1746441 - DNA, 25 bp, Homo sapien
gactccccataccaggtagctcctt

SEQ ID NO: 1746442 - DNA, 25 bp, Homo sapien
ggctctgactccccataccaggtag

SEQ ID NO: 1746443 - DNA, 25 bp, Homo sapien
tctgactccccataccaggtagctc

SEQ ID NO: 1746444 - DNA, 25 bp, Homo sapien
tttgagggtactataaacttgagat

SEQ ID NO: 1746445 - DNA, 25 bp, Homo sapien
aaactgggtacatacggtatgagaa

SEQ ID NO: 1746446 - DNA, 25 bp, Homo sapien
aaaatcacaggccaatctcagacat

SEQ ID NO: 1746447 - DNA, 25 bp, Homo sapien
tggagagcgggaaaaaaccccagca

SEQ ID NO: 1746448 - DNA, 25 bp, Homo sapien
ctactgcatctgctctatagtgtgt

SEQ ID NO: 1746449 - DNA, 25 bp, Homo sapien
tctgctctatagtgtgtgttctggg

SEQ ID NO: 1746450 - DNA, 25 bp, Homo sapien
acaaagttatttgtggctactgcat

SEQ ID NO: 1746451 - DNA, 25 bp, Homo sapien
caaagttatttgtggctactgcatc

SEQ ID NO: 1746452 - DNA, 25 bp, Homo sapien
agctctcttattctttgattctcca

SEQ ID NO: 1746453 - DNA, 25 bp, Homo sapien
tgatcctgttaaatatagtgaaccc

SEQ ID NO: 1746454 - DNA, 25 bp, Homo sapien
aagtttagcttcctggttctcttca

SEQ ID NO: 1746455 - DNA, 25 bp, Homo sapien
tagtgaaccccaagtttctcttcaa

SEQ ID NO: 1746456 - DNA, 25 bp, Homo sapien
ccaataaaggtaaaggatcttctga

SEQ ID NO: 1746457 - DNA, 25 bp, Homo sapien
atttctctgcatattctaggagtgt

SEQ ID NO: 1746458 - DNA, 25 bp, Homo sapien
ctccaataaaggtaaaggatcttct

SEQ ID NO: 1746459 - DNA, 25 bp, Homo sapien
ataaaggtaaaggatcttctgaagt

SEQ ID NO: 1746460 - DNA, 25 bp, Homo sapien
cataactttggatagccactgtgta

SEQ ID NO: 1746461 - DNA, 25 bp, Homo sapien
tcagaggtaagataaggtcgggctt

SEQ ID NO: 1746462 - DNA, 25 bp, Homo sapien
cagaggtaagataaggtcgggcttt

SEQ ID NO: 1746463 - DNA, 25 bp, Homo sapien
taacataactttggatagccactgt

SEQ ID NO: 1746464 - DNA, 25 bp, Homo sapien
aatgccaagcgttccagaaccaagg

SEQ ID NO: 1746465 - DNA, 25 bp, Homo sapien
gccaagcgttccagaaccaaggcta

SEQ ID NO: 1746466 - DNA, 25 bp, Homo sapien
ccaagcgttccagaaccaaggctac

SEQ ID NO: 1746467 - DNA, 25 bp, Homo sapien
tgccaagcgttccagaaccaaggct

SEQ ID NO: 1746468 - DNA, 25 bp, Homo sapien
ccactgtttatctgataactcaaca

SEQ ID NO: 1746469 - DNA, 25 bp, Homo sapien
tgataactcaacaggcagacacagt

SEQ ID NO: 1746470 - DNA, 25 bp, Homo sapien
ctgcaccagtgtctgaaattgttcc

SEQ ID NO: 1746471 - DNA, 25 bp, Homo sapien
caacaggcagacacagtaaaagttc

SEQ ID NO: 1746472 - DNA, 25 bp, Homo sapien
tttaaaagcaagcttatcaggcttt

SEQ ID NO: 1746473 - DNA, 25 bp, Homo sapien
tccaaagaattacaacagattttta

SEQ ID NO: 1746474 - DNA, 25 bp, Homo sapien
gcaagcttatcaggctttaaatata

SEQ ID NO: 1746475 - DNA, 25 bp, Homo sapien
agcttatcaggctttaaatataaca

SEQ ID NO: 1746476 - DNA, 25 bp, Homo sapien
aagaatagtgcacagtaccgggttt

SEQ ID NO: 1746477 - DNA, 25 bp, Homo sapien
ctgggaaagaatagtgcacagtacc

SEQ ID NO: 1746478 - DNA, 25 bp, Homo sapien
tagtgcacagtaccgggtttttcca

SEQ ID NO: 1746479 - DNA, 25 bp, Homo sapien
gaaagaatagtgcacagtaccgggt

SEQ ID NO: 1746480 - DNA, 25 bp, Homo sapien
tgtagatactgcttcctcaaggagg

SEQ ID NO: 1746481 - DNA, 25 bp, Homo sapien
ggaaagagctgccaacactggaaga

SEQ ID NO: 1746482 - DNA, 25 bp, Homo sapien
ccattgatgagggacacaagagtca

SEQ ID NO: 1746483 - DNA, 25 bp, Homo sapien
cacagctaggtggtctaggttcaca

SEQ ID NO: 1746484 - DNA, 25 bp, Homo sapien
aagaacctcactgaaaggaatggag

SEQ ID NO: 1746485 - DNA, 25 bp, Homo sapien
cattttgttgaagtgggaggtcaca

SEQ ID NO: 1746486 - DNA, 25 bp, Homo sapien
tatactactgtaatggtggacacac

SEQ ID NO: 1746487 - DNA, 25 bp, Homo sapien
ggaagcccaagatggaatacagaat

SEQ ID NO: 1746488 - DNA, 25 bp, Homo sapien
catatcatagatgaacttagtatgc

SEQ ID NO: 1746489 - DNA, 25 bp, Homo sapien
agtatgctacaatttttgcgtaaaa

SEQ ID NO: 1746490 - DNA, 25 bp, Homo sapien
aatatacccattaaagccaggcatg

SEQ ID NO: 1746491 - DNA, 25 bp, Homo sapien
ccctttcctgaagaaagatgttaca

SEQ ID NO: 1746492 - DNA, 25 bp, Homo sapien
cgtagcaatctactagtcgtctcca

SEQ ID NO: 1746493 - DNA, 25 bp, Homo sapien
tagttgtgtcacttccaatgcctaa

SEQ ID NO: 1746494 - DNA, 25 bp, Homo sapien
tgtgctcaaggcagaaacctaggag

SEQ ID NO: 1746495 - DNA, 25 bp, Homo sapien
taccacaggttacactaggtcctag

SEQ ID NO: 1746496 - DNA, 25 bp, Homo sapien
ttgggcctatcaagaaagctatgtg

SEQ ID NO: 1746497 - DNA, 25 bp, Homo sapien
tcattggaatggcaccttacagcag

SEQ ID NO: 1746498 - DNA, 25 bp, Homo sapien
gacttatctttgagtagcttagacg

SEQ ID NO: 1746499 - DNA, 25 bp, Homo sapien
taaaaacctgtgaagtagcatcagc

SEQ ID NO: 1746500 - DNA, 25 bp, Homo sapien
gatcatggctcgttggtattaaaac

SEQ ID NO: 1746501 - DNA, 25 bp, Homo sapien
ttctggtgcctctgactacatgtct

SEQ ID NO: 1746502 - DNA, 25 bp, Homo sapien
tgactatcccctagtgcttgtttgg

SEQ ID NO: 1746503 - DNA, 25 bp, Homo sapien
caatggctagcctgaaaccttggga

SEQ ID NO: 1746504 - DNA, 25 bp, Homo sapien
gctttgctagagcagttgcttgact

SEQ ID NO: 1746505 - DNA, 25 bp, Homo sapien
tcatatccaacaagatgggaccctc

SEQ ID NO: 1746506 - DNA, 25 bp, Homo sapien
tttatgccaatctctggatggtcag

SEQ ID NO: 1746507 - DNA, 25 bp, Homo sapien
tgcttaaaactaccttttatgccaa

SEQ ID NO: 1746508 - DNA, 25 bp, Homo sapien
tgaagttaaggccaaaagctgacaa

SEQ ID NO: 1746509 - DNA, 25 bp, Homo sapien
tcagacaagattgaagttaaggcca

SEQ ID NO: 1746510 - DNA, 25 bp, Homo sapien
tttcccacaatttagccaaagcatt

SEQ ID NO: 1746511 - DNA, 25 bp, Homo sapien
gaaactaggtgcaatcagtttacat

SEQ ID NO: 1746512 - DNA, 25 bp, Homo sapien
ggcacccagccaatctagtatagtt

SEQ ID NO: 1746513 - DNA, 25 bp, Homo sapien
cttgatcaacaacttctaattctcc

SEQ ID NO: 1746514 - DNA, 25 bp, Homo sapien
gaaattgtaagtccctcaaaatgca

SEQ ID NO: 1746515 - DNA, 25 bp, Homo sapien
tctttaaatatacacgccctgtttc

SEQ ID NO: 1746516 - DNA, 25 bp, Homo sapien
tacgcttctttagtgaagggcctac

SEQ ID NO: 1746517 - DNA, 25 bp, Homo sapien
gataataaaagctttcgtggcactg

SEQ ID NO: 1746518 - DNA, 25 bp, Homo sapien
aaatgttacaacacgtcaaaggtga

SEQ ID NO: 1746519 - DNA, 25 bp, Homo sapien
tttcctaacaggagatacgcttctt

SEQ ID NO: 1746520 - DNA, 25 bp, Homo sapien
ggccattgctgactccttctaacaa

SEQ ID NO: 1746521 - DNA, 25 bp, Homo sapien
tcaatcccttgcctcacttggacaa

SEQ ID NO: 1746522 - DNA, 25 bp, Homo sapien
aaagatcaccaccaatccaggccat

SEQ ID NO: 1746523 - DNA, 25 bp, Homo sapien
tctatcacaccgaaagggtcctggg

SEQ ID NO: 1746524 - DNA, 25 bp, Homo sapien
caaccagggagtgtgtatgcgattt

SEQ ID NO: 1746525 - DNA, 25 bp, Homo sapien
tcaaaattaactcttgggctagcaa

SEQ ID NO: 1746526 - DNA, 25 bp, Homo sapien
tactccccacaaggatacacggatg

SEQ ID NO: 1746527 - DNA, 25 bp, Homo sapien
tcttttctggaggatagtttgaacc

SEQ ID NO: 1746528 - DNA, 25 bp, Homo sapien
ttcatggtgtacttgggatccttca

SEQ ID NO: 1746529 - DNA, 25 bp, Homo sapien
gctacattcagtaacacagcaaact

SEQ ID NO: 1746530 - DNA, 25 bp, Homo sapien
aggcaagaaatttacttccccaatg

SEQ ID NO: 1746531 - DNA, 25 bp, Homo sapien
tgcaacataccaactgaaacatctg

SEQ ID NO: 1746532 - DNA, 25 bp, Homo sapien
cattaaagatccaagctctggccgg

SEQ ID NO: 1746533 - DNA, 25 bp, Homo sapien
tgtgacactcatgcaatgctgcctg

SEQ ID NO: 1746534 - DNA, 25 bp, Homo sapien
taccactttcgcaccgttgtagagc

SEQ ID NO: 1746535 - DNA, 25 bp, Homo sapien
gtggcagcagtgagacaaaatcgca

SEQ ID NO: 1746536 - DNA, 25 bp, Homo sapien
cgcagtacatatctccttgttggag

SEQ ID NO: 1746537 - DNA, 25 bp, Homo sapien
ttggagctgacgtgacaaaaacgca

SEQ ID NO: 1746538 - DNA, 25 bp, Homo sapien
gcatctttgcaatcaacttctgaaa

SEQ ID NO: 1746539 - DNA, 25 bp, Homo sapien
caccctcagattctaagttacagat

SEQ ID NO: 1746540 - DNA, 25 bp, Homo sapien
tcgttaacaaagaaagttgacgaca

SEQ ID NO: 1746541 - DNA, 25 bp, Homo sapien
agatggttctactctttgttgtaat

SEQ ID NO: 1746542 - DNA, 25 bp, Homo sapien
ttgacgacacctctcaaggtacact

SEQ ID NO: 1746543 - DNA, 25 bp, Homo sapien
ggtacacttgtatagatggttctac

SEQ ID NO: 1746544 - DNA, 25 bp, Homo sapien
gaattaataactttaatcaggaaga

SEQ ID NO: 1746545 - DNA, 25 bp, Homo sapien
tgtccagtaggattgccactagcaa

SEQ ID NO: 1746546 - DNA, 25 bp, Homo sapien
tgaacccaaactctctggaatagtg

SEQ ID NO: 1746547 - DNA, 25 bp, Homo sapien
gcaacatggagctactcagcaacta

SEQ ID NO: 1746548 - DNA, 25 bp, Homo sapien
cagctcttgtccagtattttgcacc

SEQ ID NO: 1746549 - DNA, 25 bp, Homo sapien
tggtgcatactatccctgtcaagaa

SEQ ID NO: 1746550 - DNA, 25 bp, Homo sapien
ctgctgcgaaggtcatgtgtggtgg

SEQ ID NO: 1746551 - DNA, 25 bp, Homo sapien
catggtgcatactatccctgtcaag

SEQ ID NO: 1746552 - DNA, 25 bp, Homo sapien
caagaaggctgctgcgaaggtcatg

SEQ ID NO: 1746553 - DNA, 25 bp, Homo sapien
taaggtctcttcagtcctaaaataa

SEQ ID NO: 1746554 - DNA, 25 bp, Homo sapien
tcaaatcactacatcgaggttaacc

SEQ ID NO: 1746555 - DNA, 25 bp, Homo sapien
taatcactatagcttaactttaagg

SEQ ID NO: 1746556 - DNA, 25 bp, Homo sapien
ggaaaatgaagagagttattacacc

SEQ ID NO: 1746557 - DNA, 25 bp, Homo sapien
ccactctagtagaaagacccatata

SEQ ID NO: 1746558 - DNA, 25 bp, Homo sapien
tagacaagtgggttattatggccca

SEQ ID NO: 1746559 - DNA, 25 bp, Homo sapien
ttctgtgactaggaacactctctcc

SEQ ID NO: 1746560 - DNA, 25 bp, Homo sapien
cagactacaaaatccttaaaggcag

SEQ ID NO: 1746561 - DNA, 25 bp, Homo sapien
tctatacaggtagcaagtccagccc

SEQ ID NO: 1746562 - DNA, 25 bp, Homo sapien
tctgtagactccaagcgaagagcct

SEQ ID NO: 1746563 - DNA, 25 bp, Homo sapien
gagtaacactcacaaaatgccgcct

SEQ ID NO: 1746564 - DNA, 25 bp, Homo sapien
cacaatactgcatgtaggcttgcca

SEQ ID NO: 1746565 - DNA, 25 bp, Homo sapien
caatggtccattagcttgcctgagc

SEQ ID NO: 1746566 - DNA, 25 bp, Homo sapien
taacatgggcatcattaaagcaatc

SEQ ID NO: 1746567 - DNA, 25 bp, Homo sapien
aactggcgtatgtaagtctgtgacc

SEQ ID NO: 1746568 - DNA, 25 bp, Homo sapien
tgagagacaccttaatggacacagc

SEQ ID NO: 1746569 - DNA, 25 bp, Homo sapien
gataagtgcccacccagtgatctgg

SEQ ID NO: 1746570 - DNA, 25 bp, Homo sapien
gatgcatcagagacacaacctgttg

SEQ ID NO: 1746571 - DNA, 25 bp, Homo sapien
taaagttagtcacaccagatcgagg

SEQ ID NO: 1746572 - DNA, 25 bp, Homo sapien
tgcaactgggccgaacaagcaggat

SEQ ID NO: 1746573 - DNA, 25 bp, Homo sapien
ggctaacactgtatgggactcaaga

SEQ ID NO: 1746574 - DNA, 25 bp, Homo sapien
caagttttgggaagcgttaggtgca

SEQ ID NO: 1746575 - DNA, 25 bp, Homo sapien
gaggaccacttataacagaaacacg

SEQ ID NO: 1746576 - DNA, 25 bp, Homo sapien
taagtcattcgttggaaaaacaggc

SEQ ID NO: 1746577 - DNA, 25 bp, Homo sapien
agttgtgcatgaattcaaagccatc

SEQ ID NO: 1746578 - DNA, 25 bp, Homo sapien
gcaaatcagaatttattgaagttgt

SEQ ID NO: 1746579 - DNA, 25 bp, Homo sapien
gttgtgcatgaattcaaagccatca

SEQ ID NO: 1746580 - DNA, 25 bp, Homo sapien
caaatcagaatttattgaagttgtg

SEQ ID NO: 1746581 - DNA, 25 bp, Homo sapien
tatcagtacacattgggatgctgga

SEQ ID NO: 1746582 - DNA, 25 bp, Homo sapien
tgtaaaatgatgcaccaactgacag

SEQ ID NO: 1746583 - DNA, 25 bp, Homo sapien
agttgatttaacaggcgtgggagtc

SEQ ID NO: 1746584 - DNA, 25 bp, Homo sapien
caactgacagtgtgcccggaggtta

SEQ ID NO: 1746585 - DNA, 25 bp, Homo sapien
tctgctctcaattctaaagcaggct

SEQ ID NO: 1746586 - DNA, 25 bp, Homo sapien
cattgttctgaagtaactgtaatca

SEQ ID NO: 1746587 - DNA, 25 bp, Homo sapien
acttgtgtacttcgtgaggccggca

SEQ ID NO: 1746588 - DNA, 25 bp, Homo sapien
tgtgggtattttgggtctctgctct

SEQ ID NO: 1746589 - DNA, 25 bp, Homo sapien
caggtagatctgatttgtgtacagc

SEQ ID NO: 1746590 - DNA, 25 bp, Homo sapien
cctggtgaacacatcgataaggtct

SEQ ID NO: 1746591 - DNA, 25 bp, Homo sapien
tacagcctggtaatggagaatcaag

SEQ ID NO: 1746592 - DNA, 25 bp, Homo sapien
caagttttgctgtatcgtaaaggca

SEQ ID NO: 1746593 - DNA, 25 bp, Homo sapien
aatcccgtggtctgcctctagatga

SEQ ID NO: 1746594 - DNA, 25 bp, Homo sapien
tacactctaactggtcacatggaaa

SEQ ID NO: 1746595 - DNA, 25 bp, Homo sapien
tcttcttggacgaatcaaatgagcc

SEQ ID NO: 1746596 - DNA, 25 bp, Homo sapien
gggttgcatatatacggtcacagcc

SEQ ID NO: 1746597 - DNA, 25 bp, Homo sapien
tctgactggcagaggttatcttcct

SEQ ID NO: 1746598 - DNA, 25 bp, Homo sapien
cctttacttgtgagttgcaacaccg

SEQ ID NO: 1746599 - DNA, 25 bp, Homo sapien
gcaggatgctcctcaatggtttgaa

SEQ ID NO: 1746600 - DNA, 25 bp, Homo sapien
gcttgtacactcagacagggcatca

SEQ ID NO: 1746601 - DNA, 25 bp, Homo sapien
tagttcatgaaaagggcaactgggt

SEQ ID NO: 1746602 - DNA, 25 bp, Homo sapien
gctggtggcagcacatgatttacaa

SEQ ID NO: 1746603 - DNA, 25 bp, Homo sapien
caattctagcatgcttgatggcttc

SEQ ID NO: 1746604 - DNA, 25 bp, Homo sapien
aaaaactgtagctataggaaactgc

SEQ ID NO: 1746605 - DNA, 25 bp, Homo sapien
aataacctctacctctcgctgtgaa

SEQ ID NO: 1746606 - DNA, 25 bp, Homo sapien
taaacacaagatgggctcactttga

SEQ ID NO: 1746607 - DNA, 25 bp, Homo sapien
tattcagagtaccagcgatttcagt

SEQ ID NO: 1746608 - DNA, 25 bp, Homo sapien
tactgggctacttcacaaatcacca

SEQ ID NO: 1746609 - DNA, 25 bp, Homo sapien
gattttaacgtgtcaggttttatgc

SEQ ID NO: 1746610 - DNA, 25 bp, Homo sapien
tgcttattggtagtaagtcttaaac

SEQ ID NO: 1746611 - DNA, 25 bp, Homo sapien
acgtgtcaggttttatgcttattgg

SEQ ID NO: 1746612 - DNA, 25 bp, Homo sapien
taagtcttaaacaggtgaaatgaac

SEQ ID NO: 1746613 - DNA, 25 bp, Homo sapien
aaagaaaagccccaatacattggca

SEQ ID NO: 1746614 - DNA, 25 bp, Homo sapien
cacctttaagagctaggtcaatttc

SEQ ID NO: 1746615 - DNA, 25 bp, Homo sapien
tgtttcatgctaaaaagcccactct

SEQ ID NO: 1746616 - DNA, 25 bp, Homo sapien
tcattaaatgttggcaaactcttcc

SEQ ID NO: 1746617 - DNA, 25 bp, Homo sapien
tgttctcagggtcaattaagtctgg

SEQ ID NO: 1746618 - DNA, 25 bp, Homo sapien
gcaaaggaatcaacccattgggata

SEQ ID NO: 1746619 - DNA, 25 bp, Homo sapien
caatgagcattacttgaataccggg

SEQ ID NO: 1746620 - DNA, 25 bp, Homo sapien
tcagtcctggttgaataaatgccat

SEQ ID NO: 1746621 - DNA, 25 bp, Homo sapien
agggccatcatcatcgtgtccactt

SEQ ID NO: 1746622 - DNA, 25 bp, Homo sapien
atcatcatcgtgtccacttcttttc

SEQ ID NO: 1746623 - DNA, 25 bp, Homo sapien
ttctccaacttacgcaggggaagag

SEQ ID NO: 1746624 - DNA, 25 bp, Homo sapien
tttctccaacttacgcaggggaaga

SEQ ID NO: 1746625 - DNA, 25 bp, Homo sapien
tcttgaacacctcactgctacagag

SEQ ID NO: 1746626 - DNA, 25 bp, Homo sapien
gaacacctcactgctacagagggac

SEQ ID NO: 1746627 - DNA, 25 bp, Homo sapien
gcttcttgaacacctcactgctaca

SEQ ID NO: 1746628 - DNA, 25 bp, Homo sapien
ttgaacacctcactgctacagaggg

SEQ ID NO: 1746629 - DNA, 25 bp, Homo sapien
tggtgtgatctgctcctgaatagtt

SEQ ID NO: 1746630 - DNA, 25 bp, Homo sapien
catctccagtgaagaactgcctggt

SEQ ID NO: 1746631 - DNA, 25 bp, Homo sapien
ctggtgtgatctgctcctgaatagt

SEQ ID NO: 1746632 - DNA, 25 bp, Homo sapien
agacatctccagtgaagaactgcct

SEQ ID NO: 1746633 - DNA, 25 bp, Homo sapien
aagccttgtcccaacactgtggact

SEQ ID NO: 1746634 - DNA, 25 bp, Homo sapien
caaacccactgagaagacgatcttc

SEQ ID NO: 1746635 - DNA, 25 bp, Homo sapien
actgagaagacgatcttcatcctct

SEQ ID NO: 1746636 - DNA, 25 bp, Homo sapien
gccttgtcccaacactgtggactgc

SEQ ID NO: 1746637 - DNA, 25 bp, Homo sapien
cacttctggtggttttacatgtagc

SEQ ID NO: 1746638 - DNA, 25 bp, Homo sapien
ttcacttctggtggttttacatgta

SEQ ID NO: 1746639 - DNA, 25 bp, Homo sapien
cttcacttctggtggttttacatgt

SEQ ID NO: 1746640 - DNA, 25 bp, Homo sapien
tcacttctggtggttttacatgtag

SEQ ID NO: 1746641 - DNA, 25 bp, Homo sapien
ggctttttggacagtatttatgcag

SEQ ID NO: 1746642 - DNA, 25 bp, Homo sapien
cagtgcaagggctttttggacagta

SEQ ID NO: 1746643 - DNA, 25 bp, Homo sapien
gggaatgacgaagcagctctctggc

SEQ ID NO: 1746644 - DNA, 25 bp, Homo sapien
tatgcaggtagccttgcctgtcttc

SEQ ID NO: 1746645 - DNA, 25 bp, Homo sapien
gagtttgctagtgtcagcaggcaca

SEQ ID NO: 1746646 - DNA, 25 bp, Homo sapien
tacatataaacttcttgtagacact

SEQ ID NO: 1746647 - DNA, 25 bp, Homo sapien
gcaggcacaacaggactcagagatg

SEQ ID NO: 1746648 - DNA, 25 bp, Homo sapien
taagaatataacaacaaaccctcag

SEQ ID NO: 1746649 - DNA, 25 bp, Homo sapien
tcattcctgctgtacatctacccat

SEQ ID NO: 1746650 - DNA, 25 bp, Homo sapien
tctccaatcaaactactagcaggct

SEQ ID NO: 1746651 - DNA, 25 bp, Homo sapien
cactcgtctccaatcaaactactag

SEQ ID NO: 1746652 - DNA, 25 bp, Homo sapien
ccaatcaaactactagcaggcttca

SEQ ID NO: 1746653 - DNA, 25 bp, Homo sapien
gctgctgctagcagaaggtgtctta

SEQ ID NO: 1746654 - DNA, 25 bp, Homo sapien
agtctggtgagtgccagtaataaac

SEQ ID NO: 1746655 - DNA, 25 bp, Homo sapien
tagcacaaacaggtgatgctttaag

SEQ ID NO: 1746656 - DNA, 25 bp, Homo sapien
taaggtcatggataaagtctggtga

SEQ ID NO: 1746657 - DNA, 25 bp, Homo sapien
acatttttagaaggctgggatcctc

SEQ ID NO: 1746658 - DNA, 25 bp, Homo sapien
catttttagaaggctgggatcctct

SEQ ID NO: 1746659 - DNA, 25 bp, Homo sapien
tagctcaacttcagtcctcaacctg

SEQ ID NO: 1746660 - DNA, 25 bp, Homo sapien
tagcaccaagatatgccaatagctc

SEQ ID NO: 1746661 - DNA, 25 bp, Homo sapien
tgacagtattcactttcctcttggt

SEQ ID NO: 1746662 - DNA, 25 bp, Homo sapien
caggacttctttacgttggcaaaca

SEQ ID NO: 1746663 - DNA, 25 bp, Homo sapien
gcaagactgtgggtaattgaagcat

SEQ ID NO: 1746664 - DNA, 25 bp, Homo sapien
tggcaagactgtgggtaattgaagc

SEQ ID NO: 1746665 - DNA, 25 bp, Homo sapien
gacaccggtctcatctggcaagact

SEQ ID NO: 1746666 - DNA, 25 bp, Homo sapien
gataaggggctagtaccctggacac

SEQ ID NO: 1746667 - DNA, 25 bp, Homo sapien
tgctaaaaagtctacaccctgaagc

SEQ ID NO: 1746668 - DNA, 25 bp, Homo sapien
tccccagttgatcaatcattgtttt

SEQ ID NO: 1746669 - DNA, 25 bp, Homo sapien
tacaccctgaagcagtaaggcttgg

SEQ ID NO: 1746670 - DNA, 25 bp, Homo sapien
ttagaacttccccagttgatcaatc

SEQ ID NO: 1746671 - DNA, 25 bp, Homo sapien
ttacatcaattgactttggaacagt

SEQ ID NO: 1746672 - DNA, 25 bp, Homo sapien
agtacaatagcactggtgatggcct

SEQ ID NO: 1746673 - DNA, 25 bp, Homo sapien
tacatcaattgactttggaacagtc

SEQ ID NO: 1746674 - DNA, 25 bp, Homo sapien
gagcaatttctccaggggttgtcat

SEQ ID NO: 1746675 - DNA, 25 bp, Homo sapien
tcttccaaatttatttgcatcagaa

SEQ ID NO: 1746676 - DNA, 25 bp, Homo sapien
atcgtagcaacctgagcaatttctc

SEQ ID NO: 1746677 - DNA, 25 bp, Homo sapien
catcagaaatgatgttgacaatttc

SEQ ID NO: 1746678 - DNA, 25 bp, Homo sapien
cattcagtgtttttccatcctttac

SEQ ID NO: 1746679 - DNA, 25 bp, Homo sapien
atttctaattcatcattcagtgttt

SEQ ID NO: 1746680 - DNA, 25 bp, Homo sapien
taataatttctaattcatcattcag

SEQ ID NO: 1746681 - DNA, 25 bp, Homo sapien
ttatgcctttaataatttctaattc

SEQ ID NO: 1746682 - DNA, 25 bp, Homo sapien
cttacagtgaggattggcaatttaa

SEQ ID NO: 1746683 - DNA, 25 bp, Homo sapien
attaaaaatgaatgtacttcgagct

SEQ ID NO: 1746684 - DNA, 25 bp, Homo sapien
aaatgaatgtacttcgagcttctct

SEQ ID NO: 1746685 - DNA, 25 bp, Homo sapien
taaaaatgaatgtacttcgagcttc

SEQ ID NO: 1746686 - DNA, 25 bp, Homo sapien
tgaatgtacttcgagcttctctatc

SEQ ID NO: 1746687 - DNA, 25 bp, Homo sapien
ccagtagcaatagctgtatcttcac

SEQ ID NO: 1746688 - DNA, 25 bp, Homo sapien
gtagcaatagctgtatcttcacgtt

SEQ ID NO: 1746689 - DNA, 25 bp, Homo sapien
tatcttcacgttggttctttctgtt

SEQ ID NO: 1746690 - DNA, 25 bp, Homo sapien
agcaatagctgtatcttcacgttgg

SEQ ID NO: 1746691 - DNA, 25 bp, Homo sapien
taagttacgaggctaaatagcttca

SEQ ID NO: 1746692 - DNA, 25 bp, Homo sapien
tctaagttacgaggctaaatagctt

SEQ ID NO: 1746693 - DNA, 25 bp, Homo sapien
aagttacgaggctaaatagcttcaa

SEQ ID NO: 1746694 - DNA, 25 bp, Homo sapien
tttctaagttacgaggctaaatagc

SEQ ID NO: 1746695 - DNA, 25 bp, Homo sapien
ctgctcaacgatttcttgaatatat

SEQ ID NO: 1746696 - DNA, 25 bp, Homo sapien
gctcaacgatttcttgaatatattt

SEQ ID NO: 1746697 - DNA, 25 bp, Homo sapien
tagttgtaacatctaactgctcaac

SEQ ID NO: 1746698 - DNA, 25 bp, Homo sapien
aactgctcaacgatttcttgaatat

SEQ ID NO: 1746699 - DNA, 25 bp, Homo sapien
cagccttcagcactgctactccatc

SEQ ID NO: 1746700 - DNA, 25 bp, Homo sapien
aaagttttgccagacatacattcag

SEQ ID NO: 1746701 - DNA, 25 bp, Homo sapien
ctgaaagttttgccagacatacatt

SEQ ID NO: 1746702 - DNA, 25 bp, Homo sapien
atctgaaagttttgccagacataca

SEQ ID NO: 1746703 - DNA, 25 bp, Homo sapien
ccaaggctcaagtgcactggagcaa

SEQ ID NO: 1746704 - DNA, 25 bp, Homo sapien
aatccaaggctcaagtgcactggag

SEQ ID NO: 1746705 - DNA, 25 bp, Homo sapien
tgaatccaaggctcaagtgcactgg

SEQ ID NO: 1746706 - DNA, 25 bp, Homo sapien
actggagcaaggcacaaccccctcc

SEQ ID NO: 1746707 - DNA, 25 bp, Homo sapien
tttccaccatattcataacatagca

SEQ ID NO: 1746708 - DNA, 25 bp, Homo sapien
ttagttaacagagtgcaccccagca

SEQ ID NO: 1746709 - DNA, 25 bp, Homo sapien
tagtcactgcaggatttttgagtgt

SEQ ID NO: 1746710 - DNA, 25 bp, Homo sapien
acagcttatgatttagttaacagag

SEQ ID NO: 1746711 - DNA, 25 bp, Homo sapien
gaaataaagatagacttacaagaag

SEQ ID NO: 1746712 - DNA, 25 bp, Homo sapien
tctgcctatccccagtttgtgaaga

SEQ ID NO: 1746713 - DNA, 25 bp, Homo sapien
tggctgtgtagtggtagcacattgt

SEQ ID NO: 1746714 - DNA, 25 bp, Homo sapien
tcagcaatacttaatagtgtcagtc

SEQ ID NO: 1746715 - DNA, 25 bp, Homo sapien
atgataaggtgatttctttcctttt

SEQ ID NO: 1746716 - DNA, 25 bp, Homo sapien
tctttccttttccatttgccaaata

SEQ ID NO: 1746717 - DNA, 25 bp, Homo sapien
tgatttctttccttttccatttgcc

SEQ ID NO: 1746718 - DNA, 25 bp, Homo sapien
ccttttccatttgccaaataagtca

SEQ ID NO: 1746719 - DNA, 25 bp, Homo sapien
cttgtcaattggtccaaaacatcca

SEQ ID NO: 1746720 - DNA, 25 bp, Homo sapien
tgtcaattggtccaaaacatccaca

SEQ ID NO: 1746721 - DNA, 25 bp, Homo sapien
gacttgtcaattggtccaaaacatc

SEQ ID NO: 1746722 - DNA, 25 bp, Homo sapien
gaagacttgtcaattggtccaaaac

SEQ ID NO: 1746723 - DNA, 25 bp, Homo sapien
tcttgaagactcagcacacacctgt

SEQ ID NO: 1746724 - DNA, 25 bp, Homo sapien
ccttggccaactgaaaacaaatctg

SEQ ID NO: 1746725 - DNA, 25 bp, Homo sapien
gggaacagatttcagcagtgagata

SEQ ID NO: 1746726 - DNA, 25 bp, Homo sapien
caggaatgtcttgtctcatgtctcc

SEQ ID NO: 1746727 - DNA, 25 bp, Homo sapien
gaaggctcagatgcatccacgttta

SEQ ID NO: 1746728 - DNA, 25 bp, Homo sapien
tacagcaggagaccacaaaagggtt

SEQ ID NO: 1746729 - DNA, 25 bp, Homo sapien
gcacaagattctatggaagcacaga

SEQ ID NO: 1746730 - DNA, 25 bp, Homo sapien
cacgtttagggaatgagtacagcag

SEQ ID NO: 1746731 - DNA, 25 bp, Homo sapien
ctttcgcggggtcacctcctctcct

SEQ ID NO: 1746732 - DNA, 25 bp, Homo sapien
gatgaagcaccgaacaaactggagc

SEQ ID NO: 1746733 - DNA, 25 bp, Homo sapien
agcccgcaaggtgagtacgggaaat

SEQ ID NO: 1746734 - DNA, 25 bp, Homo sapien
gagtccacggagaggcaaagatttg

SEQ ID NO: 1746735 - DNA, 25 bp, Homo sapien
caaagatttgggctatccgagagga

SEQ ID NO: 1746736 - DNA, 25 bp, Homo sapien
aattgctatctgtagccacacagtc

SEQ ID NO: 1746737 - DNA, 25 bp, Homo sapien
tgagtgctagattggttcaaatacc

SEQ ID NO: 1746738 - DNA, 25 bp, Homo sapien
tgtaccctgatccaatggctgcaga

SEQ ID NO: 1746739 - DNA, 25 bp, Homo sapien
tgcagtcttcttacaggaggacctc

SEQ ID NO: 1746740 - DNA, 25 bp, Homo sapien
taattgggtatgcacctcaagagga

SEQ ID NO: 1746741 - DNA, 25 bp, Homo sapien
gatcccatgcctgtatacttatacc

SEQ ID NO: 1746742 - DNA, 25 bp, Homo sapien
tactttgtgttgcagtagtcgctga

SEQ ID NO: 1746743 - DNA, 25 bp, Homo sapien
cacacctggccagtataagtattca

SEQ ID NO: 1746744 - DNA, 25 bp, Homo sapien
gttgttgtgcgcacccctctgagcc

SEQ ID NO: 1746745 - DNA, 25 bp, Homo sapien
ggttgttgtgcgcacccctctgagc

SEQ ID NO: 1746746 - DNA, 25 bp, Homo sapien
ataaggttgttgtgcgcacccctct

SEQ ID NO: 1746747 - DNA, 25 bp, Homo sapien
aaggttgttgtgcgcacccctctga

SEQ ID NO: 1746748 - DNA, 25 bp, Homo sapien
tagaactttctgacagtctggttgg

SEQ ID NO: 1746749 - DNA, 25 bp, Homo sapien
cctacagggtagaattgcagtatgt

SEQ ID NO: 1746750 - DNA, 25 bp, Homo sapien
gagaggtcttacttgtcaacataaa

SEQ ID NO: 1746751 - DNA, 25 bp, Homo sapien
gcatttacaatcgtccttccacctg

SEQ ID NO: 1746752 - DNA, 25 bp, Homo sapien
tgcatgtagataaccaatatatgcc

SEQ ID NO: 1746753 - DNA, 25 bp, Homo sapien
caatagcttcatagaggtccttttt

SEQ ID NO: 1746754 - DNA, 25 bp, Homo sapien
tgccacgcaaagtgaaagagttacc

SEQ ID NO: 1746755 - DNA, 25 bp, Homo sapien
taccaatccgaaagccattacaggt

SEQ ID NO: 1746756 - DNA, 25 bp, Homo sapien
tttggatgttttccgcctcatataa

SEQ ID NO: 1746757 - DNA, 25 bp, Homo sapien
ttttccgcctcatataactgtgccc

SEQ ID NO: 1746758 - DNA, 25 bp, Homo sapien
ccatttggatgttttccgcctcata

SEQ ID NO: 1746759 - DNA, 25 bp, Homo sapien
gatgttttccgcctcatataactgt

SEQ ID NO: 1746760 - DNA, 25 bp, Homo sapien
gaacctttaataaaggtccatctgc

SEQ ID NO: 1746761 - DNA, 25 bp, Homo sapien
aaaggtccatctgcactaaccagca

SEQ ID NO: 1746762 - DNA, 25 bp, Homo sapien
taataaaggtccatctgcactaacc

SEQ ID NO: 1746763 - DNA, 25 bp, Homo sapien
cctttaataaaggtccatctgcact

SEQ ID NO: 1746764 - DNA, 25 bp, Homo sapien
aaaagaatgagataatggctgcagc

SEQ ID NO: 1746765 - DNA, 25 bp, Homo sapien
aatattatgacgctcactctgtgga

SEQ ID NO: 1746766 - DNA, 25 bp, Homo sapien
gaaacatgatactgtacactcacaa

SEQ ID NO: 1746767 - DNA, 25 bp, Homo sapien
catggcacttttataagaggtaagg

SEQ ID NO: 1746768 - DNA, 25 bp, Homo sapien
ccagtgggtactgaccgtagggcta

SEQ ID NO: 1746769 - DNA, 25 bp, Homo sapien
gatttactactgaggcccaatgaca

SEQ ID NO: 1746770 - DNA, 25 bp, Homo sapien
tattaatagcgactgaagcaagact

SEQ ID NO: 1746771 - DNA, 25 bp, Homo sapien
gtaaactttcacgacagctgcaccg

SEQ ID NO: 1746772 - DNA, 25 bp, Homo sapien
cagctttgtgcttgactgactctag

SEQ ID NO: 1746773 - DNA, 25 bp, Homo sapien
gaagaaccctagttttgtgatagcc

SEQ ID NO: 1746774 - DNA, 25 bp, Homo sapien
aaacatcaacacataggcaggcagc

SEQ ID NO: 1746775 - DNA, 25 bp, Homo sapien
tgcaatctcttgacagttcacgcaa

SEQ ID NO: 1746776 - DNA, 25 bp, Homo sapien
gatgtcttctcctacttacagttaa

SEQ ID NO: 1746777 - DNA, 25 bp, Homo sapien
tcttagaatcagaaaaagtcgtttc

SEQ ID NO: 1746778 - DNA, 25 bp, Homo sapien
tgctagaggctggtaaggattaaat

SEQ ID NO: 1746779 - DNA, 25 bp, Homo sapien
tgtgtctaacgttaaagaatggtgc

SEQ ID NO: 1746780 - DNA, 25 bp, Homo sapien
caaagtttttgtaatctgaatttct

SEQ ID NO: 1746781 - DNA, 25 bp, Homo sapien
aaacagcacagcaaacaaagttttt

SEQ ID NO: 1746782 - DNA, 25 bp, Homo sapien
tattttattacaaacagcacagcaa

SEQ ID NO: 1746783 - DNA, 25 bp, Homo sapien
ttttgtaatctgaatttctgatcat

SEQ ID NO: 1746784 - DNA, 25 bp, Homo sapien
agtgtaaaagcgtgtcttaagtggc

SEQ ID NO: 1746785 - DNA, 25 bp, Homo sapien
tttgtgagtgtaaaagcgtgtctta

SEQ ID NO: 1746786 - DNA, 25 bp, Homo sapien
tcatggatccgtttgaaggtttttc

SEQ ID NO: 1746787 - DNA, 25 bp, Homo sapien
gcgtgtcttaagtggcttgtattca

SEQ ID NO: 1746788 - DNA, 25 bp, Homo sapien
aagttctatatagtgcactgccagg

SEQ ID NO: 1746789 - DNA, 25 bp, Homo sapien
tgcttagtcctgaccgtagaggtcc

SEQ ID NO: 1746790 - DNA, 25 bp, Homo sapien
cactgccaggattgagaactatcgt

SEQ ID NO: 1746791 - DNA, 25 bp, Homo sapien
taagaatggagatacactgtcctgg

SEQ ID NO: 1746792 - DNA, 25 bp, Homo sapien
taggagggaattcacagcactgtca

SEQ ID NO: 1746793 - DNA, 25 bp, Homo sapien
tatgtttggcggcacagagtctcct

SEQ ID NO: 1746794 - DNA, 25 bp, Homo sapien
cactaaaagggtaagcatggacaga

SEQ ID NO: 1746795 - DNA, 25 bp, Homo sapien
caggcctggatagagttggtcattc

SEQ ID NO: 1746796 - DNA, 25 bp, Homo sapien
gctttcgcaatgtgttctctgagta

SEQ ID NO: 1746797 - DNA, 25 bp, Homo sapien
ctgctttcgcaatgtgttctctgag

SEQ ID NO: 1746798 - DNA, 25 bp, Homo sapien
tgctttcgcaatgtgttctctgagt

SEQ ID NO: 1746799 - DNA, 25 bp, Homo sapien
cagctagccaggattcagtcagttc

SEQ ID NO: 1746800 - DNA, 25 bp, Homo sapien
gaaggaagctcctgatgatgccggc

SEQ ID NO: 1746801 - DNA, 25 bp, Homo sapien
tgtgaaagaacggtaaagatggact

SEQ ID NO: 1746802 - DNA, 25 bp, Homo sapien
gaggttgtagaacttgcccaatgtc

SEQ ID NO: 1746803 - DNA, 25 bp, Homo sapien
tgtctgtcatttgcttcttcaagtg

SEQ ID NO: 1746804 - DNA, 25 bp, Homo sapien
cactgcttgtttttgacgttcatta

SEQ ID NO: 1746805 - DNA, 25 bp, Homo sapien
tgaatttcaattttgtgtctgtcat

SEQ ID NO: 1746806 - DNA, 25 bp, Homo sapien
ctgatgttcctctttcaaaatctga

SEQ ID NO: 1746807 - DNA, 25 bp, Homo sapien
agcaagtcctctctgggtaaagaca

SEQ ID NO: 1746808 - DNA, 25 bp, Homo sapien
taccaaccctggctgaggtaggcca

SEQ ID NO: 1746809 - DNA, 25 bp, Homo sapien
cagatctaatatacggtaggtgctc

SEQ ID NO: 1746810 - DNA, 25 bp, Homo sapien
gggagcatcccactagccttcagga

SEQ ID NO: 1746811 - DNA, 25 bp, Homo sapien
aaatggaatatccctcacctcaaga

SEQ ID NO: 1746812 - DNA, 25 bp, Homo sapien
atttactgcctcacatagcatgtgg

SEQ ID NO: 1746813 - DNA, 25 bp, Homo sapien
agccctttattttggctgggttgtg

SEQ ID NO: 1746814 - DNA, 25 bp, Homo sapien
gaactcagtccctcttttatgtaat

SEQ ID NO: 1746815 - DNA, 25 bp, Homo sapien
tgcacattaggaggctatttaaacc

SEQ ID NO: 1746816 - DNA, 25 bp, Homo sapien
ggcaaaactaggtttagctattaca

SEQ ID NO: 1746817 - DNA, 25 bp, Homo sapien
taacactgatgatttaaaagaagag

SEQ ID NO: 1746818 - DNA, 25 bp, Homo sapien
tctgctagcaagtgtacctgttaac

SEQ ID NO: 1746819 - DNA, 25 bp, Homo sapien
ctctgtcttagttttagctgtcact

SEQ ID NO: 1746820 - DNA, 25 bp, Homo sapien
tctgtcttagttttagctgtcactt

SEQ ID NO: 1746821 - DNA, 25 bp, Homo sapien
ctgtcttagttttagctgtcacttc

SEQ ID NO: 1746822 - DNA, 25 bp, Homo sapien
tggattgcttcctgggcgatgtgtc

SEQ ID NO: 1746823 - DNA, 25 bp, Homo sapien
ctgggcgatgtgtctttcttcagcc

SEQ ID NO: 1746824 - DNA, 25 bp, Homo sapien
tctgtggaccatgcgctgttctgca

SEQ ID NO: 1746825 - DNA, 25 bp, Homo sapien
gtggcattccatcataatcctttgg

SEQ ID NO: 1746826 - DNA, 25 bp, Homo sapien
tactaatttgtaaatgagttctctg

SEQ ID NO: 1746827 - DNA, 25 bp, Homo sapien
tttgtaaatgagttctctggaatac

SEQ ID NO: 1746828 - DNA, 25 bp, Homo sapien
gttactaatttgtaaatgagttctc

SEQ ID NO: 1746829 - DNA, 25 bp, Homo sapien
taatttgtaaatgagttctctggaa

SEQ ID NO: 1746830 - DNA, 25 bp, Homo sapien
caaaatgggcattctagctggatat

SEQ ID NO: 1746831 - DNA, 25 bp, Homo sapien
gtgtctcctgggcaatctgtttaga

SEQ ID NO: 1746832 - DNA, 25 bp, Homo sapien
gaagagtggcttcgactaattggaa

SEQ ID NO: 1746833 - DNA, 25 bp, Homo sapien
ctgcatagaattctcaacagtggtc

SEQ ID NO: 1746834 - DNA, 25 bp, Homo sapien
acataccccacccatactgcttgat

SEQ ID NO: 1746835 - DNA, 25 bp, Homo sapien
cctatgtgctatttgtaccagtcca

SEQ ID NO: 1746836 - DNA, 25 bp, Homo sapien
tgaactcttgcagcacctatgtgct

SEQ ID NO: 1746837 - DNA, 25 bp, Homo sapien
tttccaggactttgaactcttgcag

SEQ ID NO: 1746838 - DNA, 25 bp, Homo sapien
tatgccatagaggatgctcatttca

SEQ ID NO: 1746839 - DNA, 25 bp, Homo sapien
tatccatcatattgccaagagtggc

SEQ ID NO: 1746840 - DNA, 25 bp, Homo sapien
tttccaatttgtcatgattcccagt

SEQ ID NO: 1746841 - DNA, 25 bp, Homo sapien
gttttgctatagacagcagctcccc

SEQ ID NO: 1746842 - DNA, 25 bp, Homo sapien
atttagtctggaatgatgtcttttg

SEQ ID NO: 1746843 - DNA, 25 bp, Homo sapien
tatttagtctggaatgatgtctttt

SEQ ID NO: 1746844 - DNA, 25 bp, Homo sapien
ttatttagtctggaatgatgtcttt

SEQ ID NO: 1746845 - DNA, 25 bp, Homo sapien
tatcaagaatactgtctggccttgg

SEQ ID NO: 1746846 - DNA, 25 bp, Homo sapien
ctgtgcagcatacagtggtatatca

SEQ ID NO: 1746847 - DNA, 25 bp, Homo sapien
tttgggtcctcagcagaggaagtcc

SEQ ID NO: 1746848 - DNA, 25 bp, Homo sapien
cagaggaagtcctttatggtcttaa

SEQ ID NO: 1746849 - DNA, 25 bp, Homo sapien
tctccagagtagctgatattacaag

SEQ ID NO: 1746850 - DNA, 25 bp, Homo sapien
tagctgatattacaagcatgtacca

SEQ ID NO: 1746851 - DNA, 25 bp, Homo sapien
gctattctcccaccccagtctccag

SEQ ID NO: 1746852 - DNA, 25 bp, Homo sapien
agctattctcccaccccagtctcca

SEQ ID NO: 1746853 - DNA, 25 bp, Homo sapien
aaaggcctgtagaatctgcatgaga

SEQ ID NO: 1746854 - DNA, 25 bp, Homo sapien
gctccttgacttatggcgggatcaa

SEQ ID NO: 1746855 - DNA, 25 bp, Homo sapien
caactgttaagtcaggtacactgct

SEQ ID NO: 1746856 - DNA, 25 bp, Homo sapien
catgtcatgaccctgtggaccaggt

SEQ ID NO: 1746857 - DNA, 25 bp, Homo sapien
taagtatgctttccacttgagttct

SEQ ID NO: 1746858 - DNA, 25 bp, Homo sapien
tgttctatcttgcagctttccattc

SEQ ID NO: 1746859 - DNA, 25 bp, Homo sapien
gacaaacgactggtttctatgcaac

SEQ ID NO: 1746860 - DNA, 25 bp, Homo sapien
tatgcaaccacgcaggtgaagggca

SEQ ID NO: 1746861 - DNA, 25 bp, Homo sapien
cttagtttcacctccatcattggtt

SEQ ID NO: 1746862 - DNA, 25 bp, Homo sapien
ggttgtggctgctatcttagtttca

SEQ ID NO: 1746863 - DNA, 25 bp, Homo sapien
tgaccacaacccagcccgaattaat

SEQ ID NO: 1746864 - DNA, 25 bp, Homo sapien
ctgttgttctgggttctgtgcttca

SEQ ID NO: 1746865 - DNA, 25 bp, Homo sapien
caaagcaagtgcctaatgggtctaa

SEQ ID NO: 1746866 - DNA, 25 bp, Homo sapien
gcaactggtgtagcgttcaggagca

SEQ ID NO: 1746867 - DNA, 25 bp, Homo sapien
tggtagctggcaaatgtcactgtgt

SEQ ID NO: 1746868 - DNA, 25 bp, Homo sapien
cctaattgttctggacctaggccaa

SEQ ID NO: 1746869 - DNA, 25 bp, Homo sapien
gagagggttctcatccgtgtatgtc

SEQ ID NO: 1746870 - DNA, 25 bp, Homo sapien
taaaagagagatcagcgaagcaagc

SEQ ID NO: 1746871 - DNA, 25 bp, Homo sapien
tatgtctggtaacaaaaactgtcac

SEQ ID NO: 1746872 - DNA, 25 bp, Homo sapien
aaatagagccgggaaggccacaaag

SEQ ID NO: 1746873 - DNA, 25 bp, Homo sapien
gactcggaatctgacgctgacctag

SEQ ID NO: 1746874 - DNA, 25 bp, Homo sapien
taggccccatgaccctagcaaaatg

SEQ ID NO: 1746875 - DNA, 25 bp, Homo sapien
tcaagtactgcagtcatgtgcggac

SEQ ID NO: 1746876 - DNA, 25 bp, Homo sapien
gcggactaggcaaacatgactcgga

SEQ ID NO: 1746877 - DNA, 25 bp, Homo sapien
tctctggtccattttgaaggtgttc

SEQ ID NO: 1746878 - DNA, 25 bp, Homo sapien
cctgcattgtggatatgcagtatca

SEQ ID NO: 1746879 - DNA, 25 bp, Homo sapien
gattttactgtggacatctctctgg

SEQ ID NO: 1746880 - DNA, 25 bp, Homo sapien
ttcctgcattgtggatatgcagtat

SEQ ID NO: 1746881 - DNA, 25 bp, Homo sapien
gtttgccgacccctgacatagtgta

SEQ ID NO: 1746882 - DNA, 25 bp, Homo sapien
gaagacattgtagggtcagtggtca

SEQ ID NO: 1746883 - DNA, 25 bp, Homo sapien
tatggcacacaccaaaagtagaaga

SEQ ID NO: 1746884 - DNA, 25 bp, Homo sapien
tgtatgtatcatctcaggctgcctt

SEQ ID NO: 1746885 - DNA, 25 bp, Homo sapien
cccatgaagactctgcatatctcca

SEQ ID NO: 1746886 - DNA, 25 bp, Homo sapien
gctttgcttcatcccggaggcacac

SEQ ID NO: 1746887 - DNA, 25 bp, Homo sapien
tgcatatctccagcctgttgcagcc

SEQ ID NO: 1746888 - DNA, 25 bp, Homo sapien
gttgctttgcttcatcccggaggca

SEQ ID NO: 1746889 - DNA, 25 bp, Homo sapien
tgtactgccaaggatctgaccttca

SEQ ID NO: 1746890 - DNA, 25 bp, Homo sapien
tacatatatgtaagggagccaccta

SEQ ID NO: 1746891 - DNA, 25 bp, Homo sapien
gatttcctatacagaccacagtgcc

SEQ ID NO: 1746892 - DNA, 25 bp, Homo sapien
aaatcaatgtgaagaactgcctcca

SEQ ID NO: 1746893 - DNA, 25 bp, Homo sapien
ctttggcttataccacactgtctgg

SEQ ID NO: 1746894 - DNA, 25 bp, Homo sapien
tctggttaaggacatcccttgctct

SEQ ID NO: 1746895 - DNA, 25 bp, Homo sapien
caggtagtatcagtcagtacattta

SEQ ID NO: 1746896 - DNA, 25 bp, Homo sapien
ggtagcttttcagtaagccttgaag

SEQ ID NO: 1746897 - DNA, 25 bp, Homo sapien
gaacaatgcctatcccatggtaggt

SEQ ID NO: 1746898 - DNA, 25 bp, Homo sapien
catgttcatgtaatgactcacctta

SEQ ID NO: 1746899 - DNA, 25 bp, Homo sapien
tgtaatttattcagattcccagatg

SEQ ID NO: 1746900 - DNA, 25 bp, Homo sapien
taagaattttttgtatcgcatgtaa

SEQ ID NO: 1746901 - DNA, 25 bp, Homo sapien
ttgagatggtttgacaggtatagcg

SEQ ID NO: 1746902 - DNA, 25 bp, Homo sapien
tggctgactgcacacgaaggaaatt

SEQ ID NO: 1746903 - DNA, 25 bp, Homo sapien
aaggaaattccagcttcagcaatta

SEQ ID NO: 1746904 - DNA, 25 bp, Homo sapien
gaggcatgacaattggagtggataa

SEQ ID NO: 1746905 - DNA, 25 bp, Homo sapien
gaaaattcagtcctcctcaatggga

SEQ ID NO: 1746906 - DNA, 25 bp, Homo sapien
ctctcactcaggcaggttatgggaa

SEQ ID NO: 1746907 - DNA, 25 bp, Homo sapien
ggattacttaccttgccaacgatgc

SEQ ID NO: 1746908 - DNA, 25 bp, Homo sapien
taatattactgcctgtgtactgccc

SEQ ID NO: 1746909 - DNA, 25 bp, Homo sapien
ctggagagacagcaggtaaatgaga

SEQ ID NO: 1746910 - DNA, 25 bp, Homo sapien
ggagagacagcaggtaaatgagaca

SEQ ID NO: 1746911 - DNA, 25 bp, Homo sapien
gagagacagcaggtaaatgagacat

SEQ ID NO: 1746912 - DNA, 25 bp, Homo sapien
tggagagacagcaggtaaatgagac

SEQ ID NO: 1746913 - DNA, 25 bp, Homo sapien
gcacttcaggatcatgatctctaac

SEQ ID NO: 1746914 - DNA, 25 bp, Homo sapien
aatttctcgtcagcacttcaggatc

SEQ ID NO: 1746915 - DNA, 25 bp, Homo sapien
ggatcatgatctctaacactcatct

SEQ ID NO: 1746916 - DNA, 25 bp, Homo sapien
atctctaacactcatcttctctctg

SEQ ID NO: 1746917 - DNA, 25 bp, Homo sapien
tcttccatccgtgcctcaaactagg

SEQ ID NO: 1746918 - DNA, 25 bp, Homo sapien
tttcagaaggaaattacaattttga

SEQ ID NO: 1746919 - DNA, 25 bp, Homo sapien
tgtctttactaaagggttagaatga

SEQ ID NO: 1746920 - DNA, 25 bp, Homo sapien
gcacccttgtatgcattcctcagga

SEQ ID NO: 1746921 - DNA, 25 bp, Homo sapien
tccccacacctaagaagagagcctg

SEQ ID NO: 1746922 - DNA, 25 bp, Homo sapien
tttgaagacagggagcataccttgt

SEQ ID NO: 1746923 - DNA, 25 bp, Homo sapien
gagagcctgggatgtaatagtcaca

SEQ ID NO: 1746924 - DNA, 25 bp, Homo sapien
aaactttctctgaccggcgatactg

SEQ ID NO: 1746925 - DNA, 25 bp, Homo sapien
gactgcaaagctactaagttacgga

SEQ ID NO: 1746926 - DNA, 25 bp, Homo sapien
gagcaagagactagtctaagactgc

SEQ ID NO: 1746927 - DNA, 25 bp, Homo sapien
gaagttcatgcaagtggcagtgtac

SEQ ID NO: 1746928 - DNA, 25 bp, Homo sapien
tacggagccatcttaagtcttattg

SEQ ID NO: 1746929 - DNA, 25 bp, Homo sapien
tctggctggtcagagctcaaatgtc

SEQ ID NO: 1746930 - DNA, 25 bp, Homo sapien
ttacctttctatgcccaggatctgg

SEQ ID NO: 1746931 - DNA, 25 bp, Homo sapien
aatactggacgttgtgaattgcatc

SEQ ID NO: 1746932 - DNA, 25 bp, Homo sapien
tcattctgtgctcgactgtgtggat

SEQ ID NO: 1746933 - DNA, 25 bp, Homo sapien
gcctgtgacatggtctagccaatga

SEQ ID NO: 1746934 - DNA, 25 bp, Homo sapien
caacggtgtgccaaatcagatccaa

SEQ ID NO: 1746935 - DNA, 25 bp, Homo sapien
tggtaacgtcatggaacagccctat

SEQ ID NO: 1746936 - DNA, 25 bp, Homo sapien
actgaatccctgactgctacaatgg

SEQ ID NO: 1746937 - DNA, 25 bp, Homo sapien
taaaaacaaaggaatttcaggcaga

SEQ ID NO: 1746938 - DNA, 25 bp, Homo sapien
aacaaaggaatttcaggcagagaca

SEQ ID NO: 1746939 - DNA, 25 bp, Homo sapien
aaaacaaaggaatttcaggcagaga

SEQ ID NO: 1746940 - DNA, 25 bp, Homo sapien
acaaaggaatttcaggcagagacat

SEQ ID NO: 1746941 - DNA, 25 bp, Homo sapien
tggatcggaatcgacagcaggagcc

SEQ ID NO: 1746942 - DNA, 25 bp, Homo sapien
ctcaccgcgacggtcggagcagttg

SEQ ID NO: 1746943 - DNA, 25 bp, Homo sapien
ccaccgccgcgtaaccatggagatg

SEQ ID NO: 1746944 - DNA, 25 bp, Homo sapien
agcagttgggcgctcgcagccaccg

SEQ ID NO: 1746945 - DNA, 25 bp, Homo sapien
ctaaaggatcgagactgagagctaa

SEQ ID NO: 1746946 - DNA, 25 bp, Homo sapien
gtcaagggcgcggagccccgagtag

SEQ ID NO: 1746947 - DNA, 25 bp, Homo sapien
ctaagtctcgacgaggcaggacgcg

SEQ ID NO: 1746948 - DNA, 25 bp, Homo sapien
gactgagagctaagtctcgacgagg

SEQ ID NO: 1746949 - DNA, 25 bp, Homo sapien
ccgcgcaaaggctagagggcagccc

SEQ ID NO: 1746950 - DNA, 25 bp, Homo sapien
ggcgcctccggcaggaatggaccgc

SEQ ID NO: 1746951 - DNA, 25 bp, Homo sapien
ctggggtggcgcctccggcaggaat

SEQ ID NO: 1746952 - DNA, 25 bp, Homo sapien
gggtggcgcctccggcaggaatgga

SEQ ID NO: 1746953 - DNA, 25 bp, Homo sapien
tgcacccaccctccaattactaagt

SEQ ID NO: 1746954 - DNA, 25 bp, Homo sapien
caattactaagtctcccgaggtccg

SEQ ID NO: 1746955 - DNA, 25 bp, Homo sapien
gctagggacgcggctcagcaccttc

SEQ ID NO: 1746956 - DNA, 25 bp, Homo sapien
ctgccgggtcgctagggacgcggct

SEQ ID NO: 1746957 - DNA, 25 bp, Homo sapien
gagagtccgtcgcgctccggatctg

SEQ ID NO: 1746958 - DNA, 25 bp, Homo sapien
tcagtgggagagtccgtcgcgctcc

SEQ ID NO: 1746959 - DNA, 25 bp, Homo sapien
gctccggatctgtgtgcgcatgcgc

SEQ ID NO: 1746960 - DNA, 25 bp, Homo sapien
gcgctccggatctgtgtgcgcatgc

SEQ ID NO: 1746961 - DNA, 25 bp, Homo sapien
taagggaatcgcttaaaacagctta

SEQ ID NO: 1746962 - DNA, 25 bp, Homo sapien
acttctttccagaggtgtgaggact

SEQ ID NO: 1746963 - DNA, 25 bp, Homo sapien
tttttagtggttacaacagtgcgcg

SEQ ID NO: 1746964 - DNA, 25 bp, Homo sapien
taatcagtactccaagatcacaggc

SEQ ID NO: 1746965 - DNA, 25 bp, Homo sapien
tgtcctatttctcgtataatactcc

SEQ ID NO: 1746966 - DNA, 25 bp, Homo sapien
cataaaagcaatcagagtttcagaa

SEQ ID NO: 1746967 - DNA, 25 bp, Homo sapien
cactttcggcctgagttggaggcat

SEQ ID NO: 1746968 - DNA, 25 bp, Homo sapien
tccttataacactttcggcctgagt

SEQ ID NO: 1746969 - DNA, 25 bp, Homo sapien
ttctgcacatcacttttcatgaggg

SEQ ID NO: 1746970 - DNA, 25 bp, Homo sapien
tatccatgttaaagccattacttgg

SEQ ID NO: 1746971 - DNA, 25 bp, Homo sapien
tcatgagggttctatccatgttaaa

SEQ ID NO: 1746972 - DNA, 25 bp, Homo sapien
ccattacttggatccaggacaacag

SEQ ID NO: 1746973 - DNA, 25 bp, Homo sapien
cagctggcaggcacttggcagcatc

SEQ ID NO: 1746974 - DNA, 25 bp, Homo sapien
gcagcatcactctcaacccatctcc

SEQ ID NO: 1746975 - DNA, 25 bp, Homo sapien
tatactgcagctggcaggcacttgg

SEQ ID NO: 1746976 - DNA, 25 bp, Homo sapien
tctgtaggctgaatatactgcagct

SEQ ID NO: 1746977 - DNA, 25 bp, Homo sapien
tatccaatagccgagtcatacaaag

SEQ ID NO: 1746978 - DNA, 25 bp, Homo sapien
cttaatagtgtccagggatggattt

SEQ ID NO: 1746979 - DNA, 25 bp, Homo sapien
ttttagtatccaatagccgagtcat

SEQ ID NO: 1746980 - DNA, 25 bp, Homo sapien
ggatttttagtatccaatagccgag

SEQ ID NO: 1746981 - DNA, 25 bp, Homo sapien
cgattcgtataattcatatcgaagt

SEQ ID NO: 1746982 - DNA, 25 bp, Homo sapien
tcgtataattcatatcgaagtagac

SEQ ID NO: 1746983 - DNA, 25 bp, Homo sapien
ctcgattcgtataattcatatcgaa

SEQ ID NO: 1746984 - DNA, 25 bp, Homo sapien
taattcatatcgaagtagacttgca

SEQ ID NO: 1746985 - DNA, 25 bp, Homo sapien
actggattggatatggcaattctac

SEQ ID NO: 1746986 - DNA, 25 bp, Homo sapien
aactggattggatatggcaattcta

SEQ ID NO: 1746987 - DNA, 25 bp, Homo sapien
aaattgccaaataacaatgttctat

SEQ ID NO: 1746988 - DNA, 25 bp, Homo sapien
ttgccaaataacaatgttctatata

SEQ ID NO: 1746989 - DNA, 25 bp, Homo sapien
taaaattgccaaataacaatgttct

SEQ ID NO: 1746990 - DNA, 25 bp, Homo sapien
ctaaaattgccaaataacaatgttc

SEQ ID NO: 1746991 - DNA, 25 bp, Homo sapien
taatcttccggtagaggctttccaa

SEQ ID NO: 1746992 - DNA, 25 bp, Homo sapien
ggccagagcggagtaacacatagct

SEQ ID NO: 1746993 - DNA, 25 bp, Homo sapien
ggacccggtgatgttcttcgagaaa

SEQ ID NO: 1746994 - DNA, 25 bp, Homo sapien
taatttctcgggtaacagagcctaa

SEQ ID NO: 1746995 - DNA, 25 bp, Homo sapien
gtctctgttaaataaacgaattcca

SEQ ID NO: 1746996 - DNA, 25 bp, Homo sapien
aataaacgaattccagtaacaatca

SEQ ID NO: 1746997 - DNA, 25 bp, Homo sapien
tctgttaaataaacgaattccagta

SEQ ID NO: 1746998 - DNA, 25 bp, Homo sapien
tttgtccttcttagaaagagttaga

SEQ ID NO: 1746999 - DNA, 25 bp, Homo sapien
atacataacctttagaattaatcta

SEQ ID NO: 1747000 - DNA, 25 bp, Homo sapien
tacataacctttagaattaatctaa

SEQ ID NO: 1747001 - DNA, 25 bp, Homo sapien
catacataacctttagaattaatct

SEQ ID NO: 1747002 - DNA, 25 bp, Homo sapien
tatgaaaaggcagccataaaggaga

SEQ ID NO: 1747003 - DNA, 25 bp, Homo sapien
gtttgtaagagtatgaaaaggcagc

SEQ ID NO: 1747004 - DNA, 25 bp, Homo sapien
ttgtaagagtatgaaaaggcagcca

SEQ ID NO: 1747005 - DNA, 25 bp, Homo sapien
ctgtttgtaagagtatgaaaaggca

SEQ ID NO: 1747006 - DNA, 25 bp, Homo sapien
ctggctccgggcagtctcaagctgg

SEQ ID NO: 1747007 - DNA, 25 bp, Homo sapien
tgtgtagcggtatacctggctccgg

SEQ ID NO: 1747008 - DNA, 25 bp, Homo sapien
cctcatgagtgggtcgttggctgcc

SEQ ID NO: 1747009 - DNA, 25 bp, Homo sapien
tctgaaggaagacctcatattgtcg

SEQ ID NO: 1747010 - DNA, 25 bp, Homo sapien
ttgcacaataacatgcagctttccc

SEQ ID NO: 1747011 - DNA, 25 bp, Homo sapien
cttacttgcacaataacatgcagct

SEQ ID NO: 1747012 - DNA, 25 bp, Homo sapien
acaaatgtgctgtcaaacgcagctc

SEQ ID NO: 1747013 - DNA, 25 bp, Homo sapien
caaacgcagctcttacttgcacaat

SEQ ID NO: 1747014 - DNA, 25 bp, Homo sapien
ttgaaatgactcacaaggcaatgtg

SEQ ID NO: 1747015 - DNA, 25 bp, Homo sapien
gccagaatccttgtactgagcaggg

SEQ ID NO: 1747016 - DNA, 25 bp, Homo sapien
gaccctgtcatagagttcatcattg

SEQ ID NO: 1747017 - DNA, 25 bp, Homo sapien
gaattggaagatgaggttgagtaca

SEQ ID NO: 1747018 - DNA, 25 bp, Homo sapien
gggaccgctatctttgattttatgg

SEQ ID NO: 1747019 - DNA, 25 bp, Homo sapien
gggctcctaactgttttgtcatcat

SEQ ID NO: 1747020 - DNA, 25 bp, Homo sapien
cagatgggctcctaactgttttgtc

SEQ ID NO: 1747021 - DNA, 25 bp, Homo sapien
aagacttgtgatgttgggaccgcta

SEQ ID NO: 1747022 - DNA, 25 bp, Homo sapien
gaaagtatagttcgtgagcacccaa

SEQ ID NO: 1747023 - DNA, 25 bp, Homo sapien
tagtttcgtcttgcaagctggtcca

SEQ ID NO: 1747024 - DNA, 25 bp, Homo sapien
ttttcacagtcgctccattaagatg

SEQ ID NO: 1747025 - DNA, 25 bp, Homo sapien
gaggacaccaaccacaatagtttcg

SEQ ID NO: 1747026 - DNA, 25 bp, Homo sapien
ctgaaatctgccacatttactctat

SEQ ID NO: 1747027 - DNA, 25 bp, Homo sapien
cacaaaatccccgatattgaattaa

SEQ ID NO: 1747028 - DNA, 25 bp, Homo sapien
tctgttgcagcaaacgtgtaagcac

SEQ ID NO: 1747029 - DNA, 25 bp, Homo sapien
agcaaacgtgtaagcacaaaatccc

SEQ ID NO: 1747030 - DNA, 25 bp, Homo sapien
tccccgatattgaattaacagttta

SEQ ID NO: 1747031 - DNA, 25 bp, Homo sapien
gcagcatctttactattgaatgtgt

SEQ ID NO: 1747032 - DNA, 25 bp, Homo sapien
aatatgcagcatctttactattgaa

SEQ ID NO: 1747033 - DNA, 25 bp, Homo sapien
ctatgtcaatataatgttcaggatt

SEQ ID NO: 1747034 - DNA, 25 bp, Homo sapien
agttccaatagttgaattaactctg

SEQ ID NO: 1747035 - DNA, 25 bp, Homo sapien
tctgtgtggacctgggaagcattct

SEQ ID NO: 1747036 - DNA, 25 bp, Homo sapien
tcaaatgtgagttccaaaccggtag

SEQ ID NO: 1747037 - DNA, 25 bp, Homo sapien
gagctcctccaatttcagatacaga

SEQ ID NO: 1747038 - DNA, 25 bp, Homo sapien
gagaggaattcaacaagagacagga

SEQ ID NO: 1747039 - DNA, 25 bp, Homo sapien
gagaccaatctctcatcacaacagt

SEQ ID NO: 1747040 - DNA, 25 bp, Homo sapien
tacagaaaggcactgtagacgagac

SEQ ID NO: 1747041 - DNA, 25 bp, Homo sapien
ggcactgtagacgagaccaatctct

SEQ ID NO: 1747042 - DNA, 25 bp, Homo sapien
gaccaatctctcatcacaacagtag

SEQ ID NO: 1747043 - DNA, 25 bp, Homo sapien
gattttaaatgtcctgattgctaga

SEQ ID NO: 1747044 - DNA, 25 bp, Homo sapien
tttaaatgtcctgattgctagagta

SEQ ID NO: 1747045 - DNA, 25 bp, Homo sapien
aagattttaaatgtcctgattgcta

SEQ ID NO: 1747046 - DNA, 25 bp, Homo sapien
tcactcactaccttctttgccccta

SEQ ID NO: 1747047 - DNA, 25 bp, Homo sapien
cgtttatctccaagagacattttat

SEQ ID NO: 1747048 - DNA, 25 bp, Homo sapien
aagacatatgggaccaacttttgct

SEQ ID NO: 1747049 - DNA, 25 bp, Homo sapien
ttatgtactcagtgacagtagcacg

SEQ ID NO: 1747050 - DNA, 25 bp, Homo sapien
gacatatgggaccaacttttgctga

SEQ ID NO: 1747051 - DNA, 25 bp, Homo sapien
gagcgaggacatatgaagtttgtct

SEQ ID NO: 1747052 - DNA, 25 bp, Homo sapien
ctttgatggatacgtgggttgcttc

SEQ ID NO: 1747053 - DNA, 25 bp, Homo sapien
tttagctcccacaaaggagcgagga

SEQ ID NO: 1747054 - DNA, 25 bp, Homo sapien
tatcctcaccggcattcgttattgc

SEQ ID NO: 1747055 - DNA, 25 bp, Homo sapien
cactcatatgatctcacaatcgttg

SEQ ID NO: 1747056 - DNA, 25 bp, Homo sapien
ggtggcagtatgtgtgtattcgtct

SEQ ID NO: 1747057 - DNA, 25 bp, Homo sapien
cattcattccactcatatgatctca

SEQ ID NO: 1747058 - DNA, 25 bp, Homo sapien
gatctcacaatcgttggtggcagta

SEQ ID NO: 1747059 - DNA, 25 bp, Homo sapien
gccaagtaaatctgaggcctgggca

SEQ ID NO: 1747060 - DNA, 25 bp, Homo sapien
gctgtcttccctcatggactgggtg

SEQ ID NO: 1747061 - DNA, 25 bp, Homo sapien
ggtgatttcgctctttcctccacga

SEQ ID NO: 1747062 - DNA, 25 bp, Homo sapien
actgagtgagtaactttctggcgca

SEQ ID NO: 1747063 - DNA, 25 bp, Homo sapien
tcataattgagtagcatctatttta

SEQ ID NO: 1747064 - DNA, 25 bp, Homo sapien
gcatctattttaaaacgttgtctgt

SEQ ID NO: 1747065 - DNA, 25 bp, Homo sapien
cataattgagtagcatctattttaa

SEQ ID NO: 1747066 - DNA, 25 bp, Homo sapien
ataattgagtagcatctattttaaa

SEQ ID NO: 1747067 - DNA, 25 bp, Homo sapien
cagtttgataaaatatgggaaccca

SEQ ID NO: 1747068 - DNA, 25 bp, Homo sapien
tcacacaaccaatgaatgtgccacc

SEQ ID NO: 1747069 - DNA, 25 bp, Homo sapien
tatgggaacccaataaacagtcaca

SEQ ID NO: 1747070 - DNA, 25 bp, Homo sapien
agtcacacaaccaatgaatgtgcca

SEQ ID NO: 1747071 - DNA, 25 bp, Homo sapien
taagcccaaatttcaggttacagcc

SEQ ID NO: 1747072 - DNA, 25 bp, Homo sapien
caaataagggttaattgaacagata

SEQ ID NO: 1747073 - DNA, 25 bp, Homo sapien
caagccttaacttgataagcccaaa

SEQ ID NO: 1747074 - DNA, 25 bp, Homo sapien
ggaatcttgcagaatcaaataaggg

SEQ ID NO: 1747075 - DNA, 25 bp, Homo sapien
gatgccttctgatataaagtgggta

SEQ ID NO: 1747076 - DNA, 25 bp, Homo sapien
tgccttctgatataaagtgggtatt

SEQ ID NO: 1747077 - DNA, 25 bp, Homo sapien
atgccttctgatataaagtgggtat

SEQ ID NO: 1747078 - DNA, 25 bp, Homo sapien
tgatgccttctgatataaagtgggt

SEQ ID NO: 1747079 - DNA, 25 bp, Homo sapien
cccttgtggtcatagagacgaagcc

SEQ ID NO: 1747080 - DNA, 25 bp, Homo sapien
agacgaagccgctcggcctagagcg

SEQ ID NO: 1747081 - DNA, 25 bp, Homo sapien
tggtcatagagacgaagccgctcgg

SEQ ID NO: 1747082 - DNA, 25 bp, Homo sapien
gggaccgccccttgtggtcatagag

SEQ ID NO: 1747083 - DNA, 25 bp, Homo sapien
caaggttaaacagggatcagcaaat

SEQ ID NO: 1747084 - DNA, 25 bp, Homo sapien
tcaaggttaaacagggatcagcaaa

SEQ ID NO: 1747085 - DNA, 25 bp, Homo sapien
ctcaaggttaaacagggatcagcaa

SEQ ID NO: 1747086 - DNA, 25 bp, Homo sapien
cattcaaatctttaggctcaaggtt

SEQ ID NO: 1747087 - DNA, 25 bp, Homo sapien
cactgccaagcagtataacttgaat

SEQ ID NO: 1747088 - DNA, 25 bp, Homo sapien
gtccttgtgtatcttaaagctatgg

SEQ ID NO: 1747089 - DNA, 25 bp, Homo sapien
tcccacacttagcaataactttata

SEQ ID NO: 1747090 - DNA, 25 bp, Homo sapien
cacacggctgtggttgaaaagtaga

SEQ ID NO: 1747091 - DNA, 25 bp, Homo sapien
tcaactgtctcatcacacactgctg

SEQ ID NO: 1747092 - DNA, 25 bp, Homo sapien
aactgtctcatcacacactgctgaa

SEQ ID NO: 1747093 - DNA, 25 bp, Homo sapien
tacttcaagtggattagtataagcc

SEQ ID NO: 1747094 - DNA, 25 bp, Homo sapien
tttttcatattcgaactacttcaag

SEQ ID NO: 1747095 - DNA, 25 bp, Homo sapien
tcaaaactacaagtcttttagcaca

SEQ ID NO: 1747096 - DNA, 25 bp, Homo sapien
ccaaaatcaaactgttgatatcttt

SEQ ID NO: 1747097 - DNA, 25 bp, Homo sapien
tctgtactgtccaaatttttagtat

SEQ ID NO: 1747098 - DNA, 25 bp, Homo sapien
catgctatcttctctgtactgtcca

SEQ ID NO: 1747099 - DNA, 25 bp, Homo sapien
tcttctctgtactgtccaaattttt

SEQ ID NO: 1747100 - DNA, 25 bp, Homo sapien
gctatcttctctgtactgtccaaat

SEQ ID NO: 1747101 - DNA, 25 bp, Homo sapien
ggtgtgtacctgttgtcccagttgc

SEQ ID NO: 1747102 - DNA, 25 bp, Homo sapien
gtggtgtgtacctgttgtcccagtt

SEQ ID NO: 1747103 - DNA, 25 bp, Homo sapien
gagccgaaatcacgccactgtacac

SEQ ID NO: 1747104 - DNA, 25 bp, Homo sapien
ccgaaatcacgccactgtacaccag

SEQ ID NO: 1747105 - DNA, 25 bp, Homo sapien
gtggtatcaatcaatgtagaactct

SEQ ID NO: 1747106 - DNA, 25 bp, Homo sapien
tagaatcctcaccattagataaggg

SEQ ID NO: 1747107 - DNA, 25 bp, Homo sapien
taaacatcttgagcataatgggagc

SEQ ID NO: 1747108 - DNA, 25 bp, Homo sapien
gaaactactccttatctattctagg

SEQ ID NO: 1747109 - DNA, 25 bp, Homo sapien
ctaaaaagactttgattggccaggc

SEQ ID NO: 1747110 - DNA, 25 bp, Homo sapien
tcgagaccatcctgatttacacggt

SEQ ID NO: 1747111 - DNA, 25 bp, Homo sapien
atcctgatttacacggtgaaaccct

SEQ ID NO: 1747112 - DNA, 25 bp, Homo sapien
aaaagactttgattggccaggcacg

SEQ ID NO: 1747113 - DNA, 25 bp, Homo sapien
gaaaatgcttaattaataagacagg

SEQ ID NO: 1747114 - DNA, 25 bp, Homo sapien
aatgcttaattaataagacaggaac

SEQ ID NO: 1747115 - DNA, 25 bp, Homo sapien
gctgtagaacattctacctccaaga

SEQ ID NO: 1747116 - DNA, 25 bp, Homo sapien
taattaataagacaggaactttgac

SEQ ID NO: 1747117 - DNA, 25 bp, Homo sapien
tcctgtatcataaatcagctcattg

SEQ ID NO: 1747118 - DNA, 25 bp, Homo sapien
catattgattatgcatgctcttaac

SEQ ID NO: 1747119 - DNA, 25 bp, Homo sapien
gtttactgtttgactgcatattgat

SEQ ID NO: 1747120 - DNA, 25 bp, Homo sapien
tattatttcagaaggacgtggctaa

SEQ ID NO: 1747121 - DNA, 25 bp, Homo sapien
cactatctctagtcaaagctctgag

SEQ ID NO: 1747122 - DNA, 25 bp, Homo sapien
tatgacaacaactagatttaccact

SEQ ID NO: 1747123 - DNA, 25 bp, Homo sapien
tctgagagattctgagtatattgaa

SEQ ID NO: 1747124 - DNA, 25 bp, Homo sapien
catactatgcttgctgtaatttagc

SEQ ID NO: 1747125 - DNA, 25 bp, Homo sapien
taaagatgctttgaatctacccaga

SEQ ID NO: 1747126 - DNA, 25 bp, Homo sapien
tacactaacgatggcacacttaact

SEQ ID NO: 1747127 - DNA, 25 bp, Homo sapien
cacttaacttcaacagttccttggg

SEQ ID NO: 1747128 - DNA, 25 bp, Homo sapien
gttgttctgaacagcatacactaac

SEQ ID NO: 1747129 - DNA, 25 bp, Homo sapien
cagattgctaagagctaggaaagcc

SEQ ID NO: 1747130 - DNA, 25 bp, Homo sapien
tgctgcatccagattgctaagagct

SEQ ID NO: 1747131 - DNA, 25 bp, Homo sapien
gattgctaagagctaggaaagccat

SEQ ID NO: 1747132 - DNA, 25 bp, Homo sapien
catccagattgctaagagctaggaa

SEQ ID NO: 1747133 - DNA, 25 bp, Homo sapien
tttcattatcattaactccacttac

SEQ ID NO: 1747134 - DNA, 25 bp, Homo sapien
cttttcattatcattaactccactt

SEQ ID NO: 1747135 - DNA, 25 bp, Homo sapien
ttttcattatcattaactccactta

SEQ ID NO: 1747136 - DNA, 25 bp, Homo sapien
cacggaatcttcaactggtaggtca

SEQ ID NO: 1747137 - DNA, 25 bp, Homo sapien
gctgagtgtccggtttaacattaaa

SEQ ID NO: 1747138 - DNA, 25 bp, Homo sapien
aaacagtgcataaagcagtacacgg

SEQ ID NO: 1747139 - DNA, 25 bp, Homo sapien
gtacaagcgtaactccagcacacag

SEQ ID NO: 1747140 - DNA, 25 bp, Homo sapien
cataccagatttccttactgaaagg

SEQ ID NO: 1747141 - DNA, 25 bp, Homo sapien
caggatcttgtggtataatcatggt

SEQ ID NO: 1747142 - DNA, 25 bp, Homo sapien
tcgcactatcactcgagctggtgtg

SEQ ID NO: 1747143 - DNA, 25 bp, Homo sapien
gaaaggactcctaatgttaagtgat

SEQ ID NO: 1747144 - DNA, 25 bp, Homo sapien
cgccaaaccctaataatggattttg

SEQ ID NO: 1747145 - DNA, 25 bp, Homo sapien
tatagcgccaaaccctaataatgga

SEQ ID NO: 1747146 - DNA, 25 bp, Homo sapien
tagctatagcgccaaaccctaataa

SEQ ID NO: 1747147 - DNA, 25 bp, Homo sapien
acagcaatagctatagcgccaaacc

SEQ ID NO: 1747148 - DNA, 25 bp, Homo sapien
ttttggccggactgagatggtcaag

SEQ ID NO: 1747149 - DNA, 25 bp, Homo sapien
taactgcaagtatgaatagggactg

SEQ ID NO: 1747150 - DNA, 25 bp, Homo sapien
gatggtcaaggataacagaagtagt

SEQ ID NO: 1747151 - DNA, 25 bp, Homo sapien
aagcaagataaactagactggtgtc

SEQ ID NO: 1747152 - DNA, 25 bp, Homo sapien
catgatcctactccatagctcctaa

SEQ ID NO: 1747153 - DNA, 25 bp, Homo sapien
ctcatgatcctactccatagctcct

SEQ ID NO: 1747154 - DNA, 25 bp, Homo sapien
tcatgatcctactccatagctccta

SEQ ID NO: 1747155 - DNA, 25 bp, Homo sapien
atgatcctactccatagctcctaac

SEQ ID NO: 1747156 - DNA, 25 bp, Homo sapien
tatcttgatgcattggaggagtgct

SEQ ID NO: 1747157 - DNA, 25 bp, Homo sapien
tccctgtttggttattagctttatg

SEQ ID NO: 1747158 - DNA, 25 bp, Homo sapien
tacaacgccagacttccgtggattg

SEQ ID NO: 1747159 - DNA, 25 bp, Homo sapien
aggagtgcttgtccctacacataca

SEQ ID NO: 1747160 - DNA, 25 bp, Homo sapien
tataagctacatttaacagaaggct

SEQ ID NO: 1747161 - DNA, 25 bp, Homo sapien
tgtctttcatttagaacaataccct

SEQ ID NO: 1747162 - DNA, 25 bp, Homo sapien
tattatgtaggttgtgtgacacatg

SEQ ID NO: 1747163 - DNA, 25 bp, Homo sapien
ttagagcagtaagaccacaaaagct

SEQ ID NO: 1747164 - DNA, 25 bp, Homo sapien
agaagtatctgaactctttaaaact

SEQ ID NO: 1747165 - DNA, 25 bp, Homo sapien
aaagagaagtatctgaactctttaa

SEQ ID NO: 1747166 - DNA, 25 bp, Homo sapien
gagaagtatctgaactctttaaaac

SEQ ID NO: 1747167 - DNA, 25 bp, Homo sapien
agagaagtatctgaactctttaaaa

SEQ ID NO: 1747168 - DNA, 25 bp, Homo sapien
atagatacatttgaatgtttctcac

SEQ ID NO: 1747169 - DNA, 25 bp, Homo sapien
gatagatacatttgaatgtttctca

SEQ ID NO: 1747170 - DNA, 25 bp, Homo sapien
ctgatagatacatttgaatgtttct

SEQ ID NO: 1747171 - DNA, 25 bp, Homo sapien
tgatagatacatttgaatgtttctc

SEQ ID NO: 1747172 - DNA, 25 bp, Homo sapien
tctgacaagtagacgccagctaatg

SEQ ID NO: 1747173 - DNA, 25 bp, Homo sapien
taatatgtgtaaccatagaaaaatc

SEQ ID NO: 1747174 - DNA, 25 bp, Homo sapien
gacgccagctaatgtcacaataatc

SEQ ID NO: 1747175 - DNA, 25 bp, Homo sapien
gctccatctgacaagtagacgccag

SEQ ID NO: 1747176 - DNA, 25 bp, Homo sapien
aattggtagttcctatataacactg

SEQ ID NO: 1747177 - DNA, 25 bp, Homo sapien
ttgccttcacaatcaaaactaagtc

SEQ ID NO: 1747178 - DNA, 25 bp, Homo sapien
tataacagcttaaaatggacatcta

SEQ ID NO: 1747179 - DNA, 25 bp, Homo sapien
aactggtatttacagtatcaaagga

SEQ ID NO: 1747180 - DNA, 25 bp, Homo sapien
tggtgaggcaattttcatccccaga

SEQ ID NO: 1747181 - DNA, 25 bp, Homo sapien
gccgctgctgcagaaaagcctttca

SEQ ID NO: 1747182 - DNA, 25 bp, Homo sapien
gtctgtgtacttaaccacaacagaa

SEQ ID NO: 1747183 - DNA, 25 bp, Homo sapien
tggccgctgctgcagaaaagccttt

SEQ ID NO: 1747184 - DNA, 25 bp, Homo sapien
cgctgctgcagaaaagcctttcatg

SEQ ID NO: 1747185 - DNA, 25 bp, Homo sapien
gattgctaagacatgctagttgacc

SEQ ID NO: 1747186 - DNA, 25 bp, Homo sapien
tgcacagttaagaaatggtacaggc

SEQ ID NO: 1747187 - DNA, 25 bp, Homo sapien
cagctaaaagttcacccaaatcagg

SEQ ID NO: 1747188 - DNA, 25 bp, Homo sapien
aacaaagcagtggtactggaatgcc

SEQ ID NO: 1747189 - DNA, 25 bp, Homo sapien
cttaattgtgggtttacactatcag

SEQ ID NO: 1747190 - DNA, 25 bp, Homo sapien
gcagggcgggtaaaatcaaggcagt

SEQ ID NO: 1747191 - DNA, 25 bp, Homo sapien
tggcaaggtttagaaaggtcttcca

SEQ ID NO: 1747192 - DNA, 25 bp, Homo sapien
gtgttttgttgatcactgattacag

SEQ ID NO: 1747193 - DNA, 25 bp, Homo sapien
tctgggtaatccatagagatatatg

SEQ ID NO: 1747194 - DNA, 25 bp, Homo sapien
catacaagaagagtacccagggcaa

SEQ ID NO: 1747195 - DNA, 25 bp, Homo sapien
cacaccaataactctctcctttgaa

SEQ ID NO: 1747196 - DNA, 25 bp, Homo sapien
tgtagtgtcttgtctgggtaatcca

SEQ ID NO: 1747197 - DNA, 25 bp, Homo sapien
ctagtttaatgcaaatggtttagtc

SEQ ID NO: 1747198 - DNA, 25 bp, Homo sapien
gagattgacttaaggctctagttta

SEQ ID NO: 1747199 - DNA, 25 bp, Homo sapien
aaaggagtctcacgtgaggctaaaa

SEQ ID NO: 1747200 - DNA, 25 bp, Homo sapien
tggtttagtcttaaaaggagtctca

SEQ ID NO: 1747201 - DNA, 25 bp, Homo sapien
tcattctaaaacaatagtagacccc

SEQ ID NO: 1747202 - DNA, 25 bp, Homo sapien
cagttcactcagatagcttcgtttg

SEQ ID NO: 1747203 - DNA, 25 bp, Homo sapien
caaacaggtctacattaagtttctg

SEQ ID NO: 1747204 - DNA, 25 bp, Homo sapien
tgttgtttccacataaccgcactga

SEQ ID NO: 1747205 - DNA, 25 bp, Homo sapien
cagaaatggctttggcactttaacc

SEQ ID NO: 1747206 - DNA, 25 bp, Homo sapien
tgaactagcctgtcttgtttctgcc

SEQ ID NO: 1747207 - DNA, 25 bp, Homo sapien
cacccagaaattgtccgagttatga

SEQ ID NO: 1747208 - DNA, 25 bp, Homo sapien
tatgctgctaggacaaaatactgta

SEQ ID NO: 1747209 - DNA, 25 bp, Homo sapien
tatagcactaaaggggtactcacta

SEQ ID NO: 1747210 - DNA, 25 bp, Homo sapien
agcactaaaggggtactcactaaag

SEQ ID NO: 1747211 - DNA, 25 bp, Homo sapien
aatgaatggcacaaatatagcacta

SEQ ID NO: 1747212 - DNA, 25 bp, Homo sapien
gtgtatcatctaacagaaaagaaat

SEQ ID NO: 1747213 - DNA, 25 bp, Homo sapien
gaatttccccattaacattatagaa

SEQ ID NO: 1747214 - DNA, 25 bp, Homo sapien
tattgctgaatttccccattaacat

SEQ ID NO: 1747215 - DNA, 25 bp, Homo sapien
taaagtttattgctgaatttcccca

SEQ ID NO: 1747216 - DNA, 25 bp, Homo sapien
gctgaatttccccattaacattata

SEQ ID NO: 1747217 - DNA, 25 bp, Homo sapien
tctgaactcttttagcgtctgggag

SEQ ID NO: 1747218 - DNA, 25 bp, Homo sapien
ccttagggtaagaataggagattca

SEQ ID NO: 1747219 - DNA, 25 bp, Homo sapien
ccacactcagcccttgatttaattt

SEQ ID NO: 1747220 - DNA, 25 bp, Homo sapien
tcaggagaatcattttatcgtgaaa

SEQ ID NO: 1747221 - DNA, 25 bp, Homo sapien
tacatactcccagactgtactagga

SEQ ID NO: 1747222 - DNA, 25 bp, Homo sapien
tcctttctaacggaagttatgatca

SEQ ID NO: 1747223 - DNA, 25 bp, Homo sapien
actatccctgaactctgaatttatc

SEQ ID NO: 1747224 - DNA, 25 bp, Homo sapien
tattcctcttaacccaggctgcata

SEQ ID NO: 1747225 - DNA, 25 bp, Homo sapien
ctgaagcttggtaattgatatagaa

SEQ ID NO: 1747226 - DNA, 25 bp, Homo sapien
atgtgtatcagtaaagccctttaga

SEQ ID NO: 1747227 - DNA, 25 bp, Homo sapien
cctttagatctgaagcttggtaatt

SEQ ID NO: 1747228 - DNA, 25 bp, Homo sapien
actttctactgaaccttgaatagaa

SEQ ID NO: 1747229 - DNA, 25 bp, Homo sapien
tactgactctgcgtattccagatgc

SEQ ID NO: 1747230 - DNA, 25 bp, Homo sapien
tgcgtattccagatgcactcgggat

SEQ ID NO: 1747231 - DNA, 25 bp, Homo sapien
ggtcttactgactctgcgtattcca

SEQ ID NO: 1747232 - DNA, 25 bp, Homo sapien
tattccagatgcactcgggatttcc

SEQ ID NO: 1747233 - DNA, 25 bp, Homo sapien
aaagctgattaaatttaagcccaga

SEQ ID NO: 1747234 - DNA, 25 bp, Homo sapien
aacaagggggactatctactctctc

SEQ ID NO: 1747235 - DNA, 25 bp, Homo sapien
cctgatctaagaggtagacaaagaa

SEQ ID NO: 1747236 - DNA, 25 bp, Homo sapien
gattttgctctttgacacctgatct

SEQ ID NO: 1747237 - DNA, 25 bp, Homo sapien
tggagtttggcttaaaaacaaagca

SEQ ID NO: 1747238 - DNA, 25 bp, Homo sapien
cttttcaattagagccctggggtgt

SEQ ID NO: 1747239 - DNA, 25 bp, Homo sapien
ctcagcatgtattgatgtgcacagc

SEQ ID NO: 1747240 - DNA, 25 bp, Homo sapien
ccaattcctttacttatagtccagg

SEQ ID NO: 1747241 - DNA, 25 bp, Homo sapien
ttccataactttgtgctctagcagg

SEQ ID NO: 1747242 - DNA, 25 bp, Homo sapien
cactacatgttagctcttagagaga

SEQ ID NO: 1747243 - DNA, 25 bp, Homo sapien
aggctcaggatcacactccaattcc

SEQ ID NO: 1747244 - DNA, 25 bp, Homo sapien
tgcccaagtgtcttcagtcagggga

SEQ ID NO: 1747245 - DNA, 25 bp, Homo sapien
gtgcccaagtgtcttcagtcagggg

SEQ ID NO: 1747246 - DNA, 25 bp, Homo sapien
gggacagatggtgggcaaaatgcag

SEQ ID NO: 1747247 - DNA, 25 bp, Homo sapien
agatggtgggcaaaatgcagagcat

SEQ ID NO: 1747248 - DNA, 25 bp, Homo sapien
actattcttacatttttccactgac

SEQ ID NO: 1747249 - DNA, 25 bp, Homo sapien
tactattcttacatttttccactga

SEQ ID NO: 1747250 - DNA, 25 bp, Homo sapien
tattcttacatttttccactgacat

SEQ ID NO: 1747251 - DNA, 25 bp, Homo sapien
tactactattcttacatttttccac

SEQ ID NO: 1747252 - DNA, 25 bp, Homo sapien
tcaactgataagtttcgaatcgaag

SEQ ID NO: 1747253 - DNA, 25 bp, Homo sapien
cgaatcgaagcttactgtcctcagg

SEQ ID NO: 1747254 - DNA, 25 bp, Homo sapien
caactgataagtttcgaatcgaagc

SEQ ID NO: 1747255 - DNA, 25 bp, Homo sapien
agtttcgaatcgaagcttactgtcc

SEQ ID NO: 1747256 - DNA, 25 bp, Homo sapien
tgaccgcccaagtctcttgaattct

SEQ ID NO: 1747257 - DNA, 25 bp, Homo sapien
caagaacaagagcagcagttggaat

SEQ ID NO: 1747258 - DNA, 25 bp, Homo sapien
tttttgcagaaattcaatcagattg

SEQ ID NO: 1747259 - DNA, 25 bp, Homo sapien
ctctgagttttatttgaccgcccaa

SEQ ID NO: 1747260 - DNA, 25 bp, Homo sapien
caggtccttccactattctcaacaa

SEQ ID NO: 1747261 - DNA, 25 bp, Homo sapien
ggagaacattagctagataaattcc

SEQ ID NO: 1747262 - DNA, 25 bp, Homo sapien
taaaaacgaaatacacagagatgca

SEQ ID NO: 1747263 - DNA, 25 bp, Homo sapien
taatttacaaacatatgatcgtctg

SEQ ID NO: 1747264 - DNA, 25 bp, Homo sapien
ggacaatctttagcttgcaatgaga

SEQ ID NO: 1747265 - DNA, 25 bp, Homo sapien
caatgagactacatatggtgtgaca

SEQ ID NO: 1747266 - DNA, 25 bp, Homo sapien
ccgaatgtcaaatcatgatctgtga

SEQ ID NO: 1747267 - DNA, 25 bp, Homo sapien
tctgaagggcctctgttagacttcc

SEQ ID NO: 1747268 - DNA, 25 bp, Homo sapien
ctgtgagatcaacttttgcaaaaaa

SEQ ID NO: 1747269 - DNA, 25 bp, Homo sapien
aactgtgagatcaacttttgcaaaa

SEQ ID NO: 1747270 - DNA, 25 bp, Homo sapien
tgagatcaacttttgcaaaaaatgt

SEQ ID NO: 1747271 - DNA, 25 bp, Homo sapien
caactgtgagatcaacttttgcaaa

SEQ ID NO: 1747272 - DNA, 25 bp, Homo sapien
gtctttctttgggtgacgtgaacac

SEQ ID NO: 1747273 - DNA, 25 bp, Homo sapien
ttctttgggtgacgtgaacactttc

SEQ ID NO: 1747274 - DNA, 25 bp, Homo sapien
gtgtctttctttgggtgacgtgaac

SEQ ID NO: 1747275 - DNA, 25 bp, Homo sapien
ctttctttgggtgacgtgaacactt

SEQ ID NO: 1747276 - DNA, 25 bp, Homo sapien
caatttcctgggagaaaatcatcag

SEQ ID NO: 1747277 - DNA, 25 bp, Homo sapien
gtcaatttcctgggagaaaatcatc

SEQ ID NO: 1747278 - DNA, 25 bp, Homo sapien
tttcctgggagaaaatcatcagttt

SEQ ID NO: 1747279 - DNA, 25 bp, Homo sapien
aatttcctgggagaaaatcatcagt

SEQ ID NO: 1747280 - DNA, 25 bp, Homo sapien
ggctacacagcaccataacctaaga

SEQ ID NO: 1747281 - DNA, 25 bp, Homo sapien
gcagcatggttctattggacaaagc

SEQ ID NO: 1747282 - DNA, 25 bp, Homo sapien
ggtaagccttaccactcaaacaatg

SEQ ID NO: 1747283 - DNA, 25 bp, Homo sapien
taagcacttacctggaattaggctg

SEQ ID NO: 1747284 - DNA, 25 bp, Homo sapien
caagataacgacaacaggaggagac

SEQ ID NO: 1747285 - DNA, 25 bp, Homo sapien
agataacgacaacaggaggagactg

SEQ ID NO: 1747286 - DNA, 25 bp, Homo sapien
cttcaagataacgacaacaggagga

SEQ ID NO: 1747287 - DNA, 25 bp, Homo sapien
tccttcaagataacgacaacaggag

SEQ ID NO: 1747288 - DNA, 25 bp, Homo sapien
cagtcaatcttggtgagaaaaacca

SEQ ID NO: 1747289 - DNA, 25 bp, Homo sapien
tttcataaaagccaggtaatacacc

SEQ ID NO: 1747290 - DNA, 25 bp, Homo sapien
tcattcttggctcaaaaagcaaatg

SEQ ID NO: 1747291 - DNA, 25 bp, Homo sapien
tgggtgagtaagagacagtcaatct

SEQ ID NO: 1747292 - DNA, 25 bp, Homo sapien
tgcccgggccgaagattatacaatc

SEQ ID NO: 1747293 - DNA, 25 bp, Homo sapien
tatgtactttccaagcatgctaagc

SEQ ID NO: 1747294 - DNA, 25 bp, Homo sapien
taagaaaagtcctaggatctgggct

SEQ ID NO: 1747295 - DNA, 25 bp, Homo sapien
tcctcacttttgatggctaaggtag

SEQ ID NO: 1747296 - DNA, 25 bp, Homo sapien
gaagcaatcggtggatgataatagg

SEQ ID NO: 1747297 - DNA, 25 bp, Homo sapien
taataggagatgtggctattccaaa

SEQ ID NO: 1747298 - DNA, 25 bp, Homo sapien
ttatcgagtaccgtagtcaggtgct

SEQ ID NO: 1747299 - DNA, 25 bp, Homo sapien
cgagtaccgtagtcaggtgctcctt

SEQ ID NO: 1747300 - DNA, 25 bp, Homo sapien
ttttgaactgagaaatcatgataca

SEQ ID NO: 1747301 - DNA, 25 bp, Homo sapien
aaaagatgttggtcagaacctgtaa

SEQ ID NO: 1747302 - DNA, 25 bp, Homo sapien
ggtcagaacctgtaatactttttca

SEQ ID NO: 1747303 - DNA, 25 bp, Homo sapien
taaagttttgaactgagaaatcatg

SEQ ID NO: 1747304 - DNA, 25 bp, Homo sapien
tggaagattacagcacaggacactt

SEQ ID NO: 1747305 - DNA, 25 bp, Homo sapien
agattacagcacaggacacttaagg

SEQ ID NO: 1747306 - DNA, 25 bp, Homo sapien
gaagattacagcacaggacacttaa

SEQ ID NO: 1747307 - DNA, 25 bp, Homo sapien
gcacaggacacttaagggctgggaa

SEQ ID NO: 1747308 - DNA, 25 bp, Homo sapien
ggtcaagagcgcaacttgcttttct

SEQ ID NO: 1747309 - DNA, 25 bp, Homo sapien
tggtcaagagcgcaacttgcttttc

SEQ ID NO: 1747310 - DNA, 25 bp, Homo sapien
gaataagtgttcgatgaggaatata

SEQ ID NO: 1747311 - DNA, 25 bp, Homo sapien
taagtgttcgatgaggaatataaac

SEQ ID NO: 1747312 - DNA, 25 bp, Homo sapien
cctggaataagtgttcgatgaggaa

SEQ ID NO: 1747313 - DNA, 25 bp, Homo sapien
ctgccctggaataagtgttcgatga

SEQ ID NO: 1747314 - DNA, 25 bp, Homo sapien
tcgacctagtggatacttgggaaga

SEQ ID NO: 1747315 - DNA, 25 bp, Homo sapien
gacctagtggatacttgggaagaga

SEQ ID NO: 1747316 - DNA, 25 bp, Homo sapien
tgtcgacctagtggatacttgggaa

SEQ ID NO: 1747317 - DNA, 25 bp, Homo sapien
ctgtcgacctagtggatacttggga

SEQ ID NO: 1747318 - DNA, 25 bp, Homo sapien
aaacatgtacagtacaactctctga

SEQ ID NO: 1747319 - DNA, 25 bp, Homo sapien
tctaaacatgtacagtacaactctc

SEQ ID NO: 1747320 - DNA, 25 bp, Homo sapien
aacatgtacagtacaactctctgat

SEQ ID NO: 1747321 - DNA, 25 bp, Homo sapien
agctacttactctacagtccccagg

SEQ ID NO: 1747322 - DNA, 25 bp, Homo sapien
aaggtaggaggcatcgccaaaggcc

SEQ ID NO: 1747323 - DNA, 25 bp, Homo sapien
acagcaacatcaacctccaacaggg

SEQ ID NO: 1747324 - DNA, 25 bp, Homo sapien
ctaacacgcaagagagttgttgggg

SEQ ID NO: 1747325 - DNA, 25 bp, Homo sapien
gctggctgaagaaggggacacattc

SEQ ID NO: 1747326 - DNA, 25 bp, Homo sapien
gaaaaggcatgaggcgtgacacact

SEQ ID NO: 1747327 - DNA, 25 bp, Homo sapien
acactagaggctggctgaagaaggg

SEQ ID NO: 1747328 - DNA, 25 bp, Homo sapien
tgacacactggggtttgaatccgcc

SEQ ID NO: 1747329 - DNA, 25 bp, Homo sapien
ccacctctaagtaactggaataggg

SEQ ID NO: 1747330 - DNA, 25 bp, Homo sapien
tacacttaggataagcagactagac

SEQ ID NO: 1747331 - DNA, 25 bp, Homo sapien
tctttgcaagctcataaggttacac

SEQ ID NO: 1747332 - DNA, 25 bp, Homo sapien
cactctgaacatgtaatactggcca

SEQ ID NO: 1747333 - DNA, 25 bp, Homo sapien
taaaggagcatatactgaggtagga

SEQ ID NO: 1747334 - DNA, 25 bp, Homo sapien
tgatctggagcacaagcctaattgt

SEQ ID NO: 1747335 - DNA, 25 bp, Homo sapien
tataggcttacgattaagccctggg

SEQ ID NO: 1747336 - DNA, 25 bp, Homo sapien
cacattaatgccacaaaagagcgat

SEQ ID NO: 1747337 - DNA, 25 bp, Homo sapien
tacatactagtcactgttctgggca

SEQ ID NO: 1747338 - DNA, 25 bp, Homo sapien
ttctgggcatttgaggtacacctta

SEQ ID NO: 1747339 - DNA, 25 bp, Homo sapien
ggttagggcctcactgaaaagatga

SEQ ID NO: 1747340 - DNA, 25 bp, Homo sapien
tcaaaaatcactgtcctcacggaac

SEQ ID NO: 1747341 - DNA, 25 bp, Homo sapien
tgctggcagaagatctaacccaagt

SEQ ID NO: 1747342 - DNA, 25 bp, Homo sapien
gcagcatgtgaaggattagcttccc

SEQ ID NO: 1747343 - DNA, 25 bp, Homo sapien
tctggtgtccaaggaatcaccggca

SEQ ID NO: 1747344 - DNA, 25 bp, Homo sapien
tcaccggcactgacttgcttggagg

SEQ ID NO: 1747345 - DNA, 25 bp, Homo sapien
taatggcatcaaaaggaatcagacc

SEQ ID NO: 1747346 - DNA, 25 bp, Homo sapien
gatccttggttcgttgtctgtaaaa

SEQ ID NO: 1747347 - DNA, 25 bp, Homo sapien
cagagtggttgagtagctcattcac

SEQ ID NO: 1747348 - DNA, 25 bp, Homo sapien
aaggtctggattcatagtgtggctc

SEQ ID NO: 1747349 - DNA, 25 bp, Homo sapien
tctcttagctgtgctgccaaggtgg

SEQ ID NO: 1747350 - DNA, 25 bp, Homo sapien
ggtcatcagttcatcctttgccaac

SEQ ID NO: 1747351 - DNA, 25 bp, Homo sapien
tcacaataagacttaaaaaccttga

SEQ ID NO: 1747352 - DNA, 25 bp, Homo sapien
catttctcaagtatggtcatcagtt

SEQ ID NO: 1747353 - DNA, 25 bp, Homo sapien
tgaagatgatagaggtctgtcttct

SEQ ID NO: 1747354 - DNA, 25 bp, Homo sapien
gtctgtcttctgaagcccctttggc

SEQ ID NO: 1747355 - DNA, 25 bp, Homo sapien
cttctgaagatgatagaggtctgtc

SEQ ID NO: 1747356 - DNA, 25 bp, Homo sapien
tgaagcccctttggctgtgacccag

SEQ ID NO: 1747357 - DNA, 25 bp, Homo sapien
caggcagagttaatctagagcacaa

SEQ ID NO: 1747358 - DNA, 25 bp, Homo sapien
aaacatccaggcagagttaatctag

SEQ ID NO: 1747359 - DNA, 25 bp, Homo sapien
gagttaatctagagcacaaactgaa

SEQ ID NO: 1747360 - DNA, 25 bp, Homo sapien
ttaatctagagcacaaactgaaaaa

SEQ ID NO: 1747361 - DNA, 25 bp, Homo sapien
tttaaggtctggcaagaatctcgcc

SEQ ID NO: 1747362 - DNA, 25 bp, Homo sapien
gaatctcgcctcaaaggtgttttgc

SEQ ID NO: 1747363 - DNA, 25 bp, Homo sapien
actactaaattacatggcagagtgc

SEQ ID NO: 1747364 - DNA, 25 bp, Homo sapien
taagttctatagaagcacctgatgc

SEQ ID NO: 1747365 - DNA, 25 bp, Homo sapien
tcttcttaactccttcatttccaat

SEQ ID NO: 1747366 - DNA, 25 bp, Homo sapien
tacttcttcttaactccttcatttc

SEQ ID NO: 1747367 - DNA, 25 bp, Homo sapien
ttaactccttcatttccaataagga

SEQ ID NO: 1747368 - DNA, 25 bp, Homo sapien
cttacttcttcttaactccttcatt

SEQ ID NO: 1747369 - DNA, 25 bp, Homo sapien
tagacagtcaatgaagttcacaaca

SEQ ID NO: 1747370 - DNA, 25 bp, Homo sapien
gacagtcaatgaagttcacaacatt

SEQ ID NO: 1747371 - DNA, 25 bp, Homo sapien
ctagacagtcaatgaagttcacaac

SEQ ID NO: 1747372 - DNA, 25 bp, Homo sapien
acagtcaatgaagttcacaacattt

SEQ ID NO: 1747373 - DNA, 25 bp, Homo sapien
aatgctcacgaagggcatgggcagc

SEQ ID NO: 1747374 - DNA, 25 bp, Homo sapien
tgggcagcactgaagtacaccacct

SEQ ID NO: 1747375 - DNA, 25 bp, Homo sapien
gggcaattcgcggagcagcatttaa

SEQ ID NO: 1747376 - DNA, 25 bp, Homo sapien
ttgagtgcagtatggagggcaattc

SEQ ID NO: 1747377 - DNA, 25 bp, Homo sapien
tatgagacgtgcaaccctgaattgc

SEQ ID NO: 1747378 - DNA, 25 bp, Homo sapien
gaagggcaaagattacacatggtca

SEQ ID NO: 1747379 - DNA, 25 bp, Homo sapien
tttttatgacaatgacgcccagagt

SEQ ID NO: 1747380 - DNA, 25 bp, Homo sapien
cccaggagttttagtggcagactgc

SEQ ID NO: 1747381 - DNA, 25 bp, Homo sapien
ctaagatgactaacttttataaatt

SEQ ID NO: 1747382 - DNA, 25 bp, Homo sapien
caattaacagtaaactaagatgact

SEQ ID NO: 1747383 - DNA, 25 bp, Homo sapien
cagtaaactaagatgactaactttt

SEQ ID NO: 1747384 - DNA, 25 bp, Homo sapien
ctaacaattaacagtaaactaagat

SEQ ID NO: 1747385 - DNA, 25 bp, Homo sapien
ggcgatattcggaatgcagccttct

SEQ ID NO: 1747386 - DNA, 25 bp, Homo sapien
cacgaggttgatgagcctgctacac

SEQ ID NO: 1747387 - DNA, 25 bp, Homo sapien
ctctgaccagtccacgaggttgatg

SEQ ID NO: 1747388 - DNA, 25 bp, Homo sapien
tacactctaggtgcagtttgtatgc

SEQ ID NO: 1747389 - DNA, 25 bp, Homo sapien
tttttcagcagctgtcacaactgtt

SEQ ID NO: 1747390 - DNA, 25 bp, Homo sapien
cagctgtcacaactgttgcaaaagc

SEQ ID NO: 1747391 - DNA, 25 bp, Homo sapien
agcagctgtcacaactgttgcaaaa

SEQ ID NO: 1747392 - DNA, 25 bp, Homo sapien
tgaggttgcagaatttgcatccatt

SEQ ID NO: 1747393 - DNA, 25 bp, Homo sapien
tttggagtacgcctttataaatatc

SEQ ID NO: 1747394 - DNA, 25 bp, Homo sapien
tgtagttggacattgtagaaatggt

SEQ ID NO: 1747395 - DNA, 25 bp, Homo sapien
tatgtgtagttggacattgtagaaa

SEQ ID NO: 1747396 - DNA, 25 bp, Homo sapien
tctagtgtagacctggagaaattat

SEQ ID NO: 1747397 - DNA, 25 bp, Homo sapien
cagtcttctgtttggtaggttttat

SEQ ID NO: 1747398 - DNA, 25 bp, Homo sapien
tcagaaacagctctaataaaccgag

SEQ ID NO: 1747399 - DNA, 25 bp, Homo sapien
tcctaaaagttctagttcagaaaca

SEQ ID NO: 1747400 - DNA, 25 bp, Homo sapien
tccccatgttagtcttgccacatgg

SEQ ID NO: 1747401 - DNA, 25 bp, Homo sapien
gttcaagaatgatttactcacaatt

SEQ ID NO: 1747402 - DNA, 25 bp, Homo sapien
aagaatgatttactcacaatttagt

SEQ ID NO: 1747403 - DNA, 25 bp, Homo sapien
taagttcaagaatgatttactcaca

SEQ ID NO: 1747404 - DNA, 25 bp, Homo sapien
tcaagaatgatttactcacaattta

SEQ ID NO: 1747405 - DNA, 25 bp, Homo sapien
tgtagtcaccaggagaaacaacctg

SEQ ID NO: 1747406 - DNA, 25 bp, Homo sapien
tactgcctactacactaaagtgagg

SEQ ID NO: 1747407 - DNA, 25 bp, Homo sapien
gaatgaggattgctaaagcaactgc

SEQ ID NO: 1747408 - DNA, 25 bp, Homo sapien
ggcagagacagttttggaacctatg

SEQ ID NO: 1747409 - DNA, 25 bp, Homo sapien
tagtgagtagccttaaagtcccata

SEQ ID NO: 1747410 - DNA, 25 bp, Homo sapien
ctgccatagaagagatcgagatgtc

SEQ ID NO: 1747411 - DNA, 25 bp, Homo sapien
tgtgatttgtagaggccttactggc

SEQ ID NO: 1747412 - DNA, 25 bp, Homo sapien
tgggccttactttgctcatctgagt

SEQ ID NO: 1747413 - DNA, 25 bp, Homo sapien
aatgaaggaggtttgattatgcagg

SEQ ID NO: 1747414 - DNA, 25 bp, Homo sapien
gctgaactgaacttgttaagtataa

SEQ ID NO: 1747415 - DNA, 25 bp, Homo sapien
gattatgcaggctgaatatcccaaa

SEQ ID NO: 1747416 - DNA, 25 bp, Homo sapien
gaaactttttgcgtactgacatgct

SEQ ID NO: 1747417 - DNA, 25 bp, Homo sapien
catcttgctgtatgagtgttgttca

SEQ ID NO: 1747418 - DNA, 25 bp, Homo sapien
tgtccttgtattggaagaccttccc

SEQ ID NO: 1747419 - DNA, 25 bp, Homo sapien
ttttatctggtgctcatatgcatca

SEQ ID NO: 1747420 - DNA, 25 bp, Homo sapien
tacattgtacgtagtgatggtgtcc

SEQ ID NO: 1747421 - DNA, 25 bp, Homo sapien
ccaggtaaggagcacgagatgcaaa

SEQ ID NO: 1747422 - DNA, 25 bp, Homo sapien
tgtctcaggcaaagatacagctcca

SEQ ID NO: 1747423 - DNA, 25 bp, Homo sapien
tggcaagcacttgacacgaccctaa

SEQ ID NO: 1747424 - DNA, 25 bp, Homo sapien
taagcagctagggttggaaatgact

SEQ ID NO: 1747425 - DNA, 25 bp, Homo sapien
taattgtgcactacaaccgagctgt

SEQ ID NO: 1747426 - DNA, 25 bp, Homo sapien
ttcaagctttcgtcagtggcaacca

SEQ ID NO: 1747427 - DNA, 25 bp, Homo sapien
ggatgtggacctttgctacctgtat

SEQ ID NO: 1747428 - DNA, 25 bp, Homo sapien
tattctagaacatgcccttcactgg

SEQ ID NO: 1747429 - DNA, 25 bp, Homo sapien
tgaggaaaagagtattggctagccg

SEQ ID NO: 1747430 - DNA, 25 bp, Homo sapien
tcattggagtatcaaactggagtcc

SEQ ID NO: 1747431 - DNA, 25 bp, Homo sapien
ggctagccgtgtagatcagcagtaa

SEQ ID NO: 1747432 - DNA, 25 bp, Homo sapien
ttcttatagctcatgcccgccttgg

SEQ ID NO: 1747433 - DNA, 25 bp, Homo sapien
caggtatgaggtgtgtttattagag

SEQ ID NO: 1747434 - DNA, 25 bp, Homo sapien
tctatacactggtgcggtatattct

SEQ ID NO: 1747435 - DNA, 25 bp, Homo sapien
tattagagtttctgaggaactcagt

SEQ ID NO: 1747436 - DNA, 25 bp, Homo sapien
tgcattttccacgtgtactttaatt

SEQ ID NO: 1747437 - DNA, 25 bp, Homo sapien
ttatttactctacggcaggttggga

SEQ ID NO: 1747438 - DNA, 25 bp, Homo sapien
tacatcttgccgtgtttttccagcg

SEQ ID NO: 1747439 - DNA, 25 bp, Homo sapien
tatatcatggctctaaaccaggtgc

SEQ ID NO: 1747440 - DNA, 25 bp, Homo sapien
tcattgtacatagggacttcatctg

SEQ ID NO: 1747441 - DNA, 25 bp, Homo sapien
ataaggagttaccactggattccca

SEQ ID NO: 1747442 - DNA, 25 bp, Homo sapien
tagaaacgagtttccaacagacaga

SEQ ID NO: 1747443 - DNA, 25 bp, Homo sapien
tgggaaaagtctaatccaagttgtc

SEQ ID NO: 1747444 - DNA, 25 bp, Homo sapien
catgcatttctcctcagtggaccag

SEQ ID NO: 1747445 - DNA, 25 bp, Homo sapien
gtgatccgcctgccttggccttcca

SEQ ID NO: 1747446 - DNA, 25 bp, Homo sapien
atccgcctgccttggccttccaaag

SEQ ID NO: 1747447 - DNA, 25 bp, Homo sapien
tttgagtctaagtcttgctctgtcg

SEQ ID NO: 1747448 - DNA, 25 bp, Homo sapien
ttttgagtctaagtcttgctctgtc

SEQ ID NO: 1747449 - DNA, 25 bp, Homo sapien
cttaatgactattgcaagttttctt

SEQ ID NO: 1747450 - DNA, 25 bp, Homo sapien
gtcttaatgactattgcaagttttc

SEQ ID NO: 1747451 - DNA, 25 bp, Homo sapien
taagtcttaatgactattgcaagtt

SEQ ID NO: 1747452 - DNA, 25 bp, Homo sapien
tagttttaagtcttaatgactattg

SEQ ID NO: 1747453 - DNA, 25 bp, Homo sapien
gcccagggtaaaatagtgcattatc

SEQ ID NO: 1747454 - DNA, 25 bp, Homo sapien
ggaaatactgacctatcaacttgga

SEQ ID NO: 1747455 - DNA, 25 bp, Homo sapien
tgtgacaatctttcatagcccaggg

SEQ ID NO: 1747456 - DNA, 25 bp, Homo sapien
tgtacagtgaagtttgaagaaagcc

SEQ ID NO: 1747457 - DNA, 25 bp, Homo sapien
gactagctgagctgacggaagttaa

SEQ ID NO: 1747458 - DNA, 25 bp, Homo sapien
tagggactccttaacacacagctat

SEQ ID NO: 1747459 - DNA, 25 bp, Homo sapien
ggcatagctgaagtcatgttgtggc

SEQ ID NO: 1747460 - DNA, 25 bp, Homo sapien
ttgctttcttaaccgcaaggcttag

SEQ ID NO: 1747461 - DNA, 25 bp, Homo sapien
gatcacactataagtctagaccttg

SEQ ID NO: 1747462 - DNA, 25 bp, Homo sapien
gctttgtagggcatgtgtatgccca

SEQ ID NO: 1747463 - DNA, 25 bp, Homo sapien
caacctagccttgagaataatgaag

SEQ ID NO: 1747464 - DNA, 25 bp, Homo sapien
gaaaatgctcttcccgagtactgta

SEQ ID NO: 1747465 - DNA, 25 bp, Homo sapien
tttcactaggtcctcgtagcccgag

SEQ ID NO: 1747466 - DNA, 25 bp, Homo sapien
tgtcactagggcgagatctaggcct

SEQ ID NO: 1747467 - DNA, 25 bp, Homo sapien
aattgtttccgtagtcgctggagcc

SEQ ID NO: 1747468 - DNA, 25 bp, Homo sapien
tggtttgaggcgaggctacagcccc

SEQ ID NO: 1747469 - DNA, 25 bp, Homo sapien
aagtatctccgaatggagccatccc

SEQ ID NO: 1747470 - DNA, 25 bp, Homo sapien
ttcggcgacgtctcctcccgcctca

SEQ ID NO: 1747471 - DNA, 25 bp, Homo sapien
gcagaagtatctccgaatggagcca

SEQ ID NO: 1747472 - DNA, 25 bp, Homo sapien
gccgcagaagtatctccgaatggag

SEQ ID NO: 1747473 - DNA, 25 bp, Homo sapien
caagcgctctgaggccgccggattt

SEQ ID NO: 1747474 - DNA, 25 bp, Homo sapien
tcggcggcgttgttattgacgccat

SEQ ID NO: 1747475 - DNA, 25 bp, Homo sapien
tcccaaaatgcatccccggtttggc

SEQ ID NO: 1747476 - DNA, 25 bp, Homo sapien
ccggatttgaatcggcggcgttgtt

SEQ ID NO: 1747477 - DNA, 25 bp, Homo sapien
tgtgcatgatcacccaatcatcttg

SEQ ID NO: 1747478 - DNA, 25 bp, Homo sapien
catgtgcatgatcacccaatcatct

SEQ ID NO: 1747479 - DNA, 25 bp, Homo sapien
acacatgtgcatgatcacccaatca

SEQ ID NO: 1747480 - DNA, 25 bp, Homo sapien
gcatgatcacccaatcatcttgctc

SEQ ID NO: 1747481 - DNA, 25 bp, Homo sapien
ctcagtctccggagtctggataatt

SEQ ID NO: 1747482 - DNA, 25 bp, Homo sapien
ctggataattagtggcgagaatgcc

SEQ ID NO: 1747483 - DNA, 25 bp, Homo sapien
tagtggcgagaatgccgaaagctgc

SEQ ID NO: 1747484 - DNA, 25 bp, Homo sapien
gagaatgccgaaagctgctcagcct

SEQ ID NO: 1747485 - DNA, 25 bp, Homo sapien
ctgagcttttcacggatatggtcat

SEQ ID NO: 1747486 - DNA, 25 bp, Homo sapien
ttgggcctatagagattccacaagt

SEQ ID NO: 1747487 - DNA, 25 bp, Homo sapien
gcttttcacggatatggtcatgtca

SEQ ID NO: 1747488 - DNA, 25 bp, Homo sapien
tttcacggatatggtcatgtcaacc

SEQ ID NO: 1747489 - DNA, 25 bp, Homo sapien
gggtgcctctgtcacattcaccagt

SEQ ID NO: 1747490 - DNA, 25 bp, Homo sapien
ttgggcagcttgtgaaatctgtccc

SEQ ID NO: 1747491 - DNA, 25 bp, Homo sapien
gtccctcagaacattgctgggtgcc

SEQ ID NO: 1747492 - DNA, 25 bp, Homo sapien
tgaaatctgtccctcagaacattgc

SEQ ID NO: 1747493 - DNA, 25 bp, Homo sapien
ggcaaaggggacctgcactggaaat

SEQ ID NO: 1747494 - DNA, 25 bp, Homo sapien
atcagaacagtaatggggcaaaggg

SEQ ID NO: 1747495 - DNA, 25 bp, Homo sapien
tgtgtgtgcacaatcatgacagagg

SEQ ID NO: 1747496 - DNA, 25 bp, Homo sapien
ggctcagggttctgatcagaacagt

SEQ ID NO: 1747497 - DNA, 25 bp, Homo sapien
tgtcagccctggttgatataaaagc

SEQ ID NO: 1747498 - DNA, 25 bp, Homo sapien
aagacagtgccattgaacacagtga

SEQ ID NO: 1747499 - DNA, 25 bp, Homo sapien
tagatgtcagccctggttgatataa

SEQ ID NO: 1747500 - DNA, 25 bp, Homo sapien
gccctggttgatataaaagcatgaa

SEQ ID NO: 1747501 - DNA, 25 bp, Homo sapien
catagaacttctcttccggaaggtt

SEQ ID NO: 1747502 - DNA, 25 bp, Homo sapien
catatcacacatcctgagatcagag

SEQ ID NO: 1747503 - DNA, 25 bp, Homo sapien
gagatcagagactcccatagaactt

SEQ ID NO: 1747504 - DNA, 25 bp, Homo sapien
gccatcccaacgctctgaattaggg

SEQ ID NO: 1747505 - DNA, 25 bp, Homo sapien
cccgctatgttgacggtcaaggtca

SEQ ID NO: 1747506 - DNA, 25 bp, Homo sapien
tgcttggagacagggtagtcttctc

SEQ ID NO: 1747507 - DNA, 25 bp, Homo sapien
tctttgtctcacaatggcactgctg

SEQ ID NO: 1747508 - DNA, 25 bp, Homo sapien
tctgtccccgctatgttgacggtca

SEQ ID NO: 1747509 - DNA, 25 bp, Homo sapien
tcaggggagcattgttccatgtgtt

SEQ ID NO: 1747510 - DNA, 25 bp, Homo sapien
attgttccatgtgttatctccctct

SEQ ID NO: 1747511 - DNA, 25 bp, Homo sapien
gggagcattgttccatgtgttatct

SEQ ID NO: 1747512 - DNA, 25 bp, Homo sapien
gttccatgtgttatctccctcttca

SEQ ID NO: 1747513 - DNA, 25 bp, Homo sapien
gcacgtacagagaaaagcacacagt

SEQ ID NO: 1747514 - DNA, 25 bp, Homo sapien
tctctttgacaatcctcaggaagac

SEQ ID NO: 1747515 - DNA, 25 bp, Homo sapien
tacagagacaggtgttgctccattg

SEQ ID NO: 1747516 - DNA, 25 bp, Homo sapien
tagggttagatttaaatgttagcac

SEQ ID NO: 1747517 - DNA, 25 bp, Homo sapien
gtatcattcaagtgaataacaatca

SEQ ID NO: 1747518 - DNA, 25 bp, Homo sapien
ctgttcctgtatcattcaagtgaat

SEQ ID NO: 1747519 - DNA, 25 bp, Homo sapien
ttttctgaaggtgtccaaagaaatc

SEQ ID NO: 1747520 - DNA, 25 bp, Homo sapien
aagaaatccataaaggccacataac

SEQ ID NO: 1747521 - DNA, 25 bp, Homo sapien
ccttcaagctcagtgatcctttttc

SEQ ID NO: 1747522 - DNA, 25 bp, Homo sapien
tattttagacaaaactccttcaagc

SEQ ID NO: 1747523 - DNA, 25 bp, Homo sapien
ttctaaagccaaagcggatggtgca

SEQ ID NO: 1747524 - DNA, 25 bp, Homo sapien
aagccaaagcggatggtgcagcaaa

SEQ ID NO: 1747525 - DNA, 25 bp, Homo sapien
aacactcccatattctgctccttga

SEQ ID NO: 1747526 - DNA, 25 bp, Homo sapien
ggtttattcaggttcagatcaacac

SEQ ID NO: 1747527 - DNA, 25 bp, Homo sapien
gtatgattctccaggtttattcagg

SEQ ID NO: 1747528 - DNA, 25 bp, Homo sapien
cctccatagtatgattctccaggtt

SEQ ID NO: 1747529 - DNA, 25 bp, Homo sapien
gtgccagaaatcctgacagaagcaa

SEQ ID NO: 1747530 - DNA, 25 bp, Homo sapien
ggtgctgcccagaagatccaccttg

SEQ ID NO: 1747531 - DNA, 25 bp, Homo sapien
atccaccttgctcagggaagcgtag

SEQ ID NO: 1747532 - DNA, 25 bp, Homo sapien
tcagggaagcgtagttggtcctgtt

SEQ ID NO: 1747533 - DNA, 25 bp, Homo sapien
tcaagtcccagaacttgataatgat

SEQ ID NO: 1747534 - DNA, 25 bp, Homo sapien
cacatcaagtcccagaacttgataa

SEQ ID NO: 1747535 - DNA, 25 bp, Homo sapien
agccaaaggcaccctcacatcaagt

SEQ ID NO: 1747536 - DNA, 25 bp, Homo sapien
tgatgttggccttgagtggagggtt

SEQ ID NO: 1747537 - DNA, 25 bp, Homo sapien
cacaggggcaatcttactactgaca

SEQ ID NO: 1747538 - DNA, 25 bp, Homo sapien
aatcttactactgacagaaccagag

SEQ ID NO: 1747539 - DNA, 25 bp, Homo sapien
cagtggcccttcacaggggcaatct

SEQ ID NO: 1747540 - DNA, 25 bp, Homo sapien
gggcaatcttactactgacagaacc

SEQ ID NO: 1747541 - DNA, 25 bp, Homo sapien
ttattgcattggtttctgagcctca

SEQ ID NO: 1747542 - DNA, 25 bp, Homo sapien
ctttactgttattgcattggtttct

SEQ ID NO: 1747543 - DNA, 25 bp, Homo sapien
ctttatctttactgttattgcattg

SEQ ID NO: 1747544 - DNA, 25 bp, Homo sapien
tattgcattggtttctgagcctcat

SEQ ID NO: 1747545 - DNA, 25 bp, Homo sapien
aaatgtgatctcatatggtacatta

SEQ ID NO: 1747546 - DNA, 25 bp, Homo sapien
tgagctttaacgtaaggtactttga

SEQ ID NO: 1747547 - DNA, 25 bp, Homo sapien
caaatgtgatctcatatggtacatt

SEQ ID NO: 1747548 - DNA, 25 bp, Homo sapien
actgtgttctgtgagatggtaacat

SEQ ID NO: 1747549 - DNA, 25 bp, Homo sapien
gaggaatgatatgttataccagtat

SEQ ID NO: 1747550 - DNA, 25 bp, Homo sapien
caatgctctgataacacatgatgag

SEQ ID NO: 1747551 - DNA, 25 bp, Homo sapien
cagtattctcgaaactgtgttctgt

SEQ ID NO: 1747552 - DNA, 25 bp, Homo sapien
ggtggcagtcttgatactccataac

SEQ ID NO: 1747553 - DNA, 25 bp, Homo sapien
agctggtggcagtcttgatactcca

SEQ ID NO: 1747554 - DNA, 25 bp, Homo sapien
tcccccagttcaagctggtggcagt

SEQ ID NO: 1747555 - DNA, 25 bp, Homo sapien
gtcttgatactccataacctcagga

SEQ ID NO: 1747556 - DNA, 25 bp, Homo sapien
gtgcctgggtaccaaagaagaagct

SEQ ID NO: 1747557 - DNA, 25 bp, Homo sapien
agaagctcctataacttcctggagg

SEQ ID NO: 1747558 - DNA, 25 bp, Homo sapien
agcagccaaggtgtgctcttggtgc

SEQ ID NO: 1747559 - DNA, 25 bp, Homo sapien
cagccaaggtgtgctcttggtgcct

SEQ ID NO: 1747560 - DNA, 25 bp, Homo sapien
acagaatgctgagcaactgcccagg

SEQ ID NO: 1747561 - DNA, 25 bp, Homo sapien
taggaattctcttgccacaggcagc

SEQ ID NO: 1747562 - DNA, 25 bp, Homo sapien
gcagccttcccagatccaatcagga

SEQ ID NO: 1747563 - DNA, 25 bp, Homo sapien
tcacattgttccatcaagtctgaga

SEQ ID NO: 1747564 - DNA, 25 bp, Homo sapien
gccgactgaatttgctcataagcac

SEQ ID NO: 1747565 - DNA, 25 bp, Homo sapien
actcccaaatcgctgcagggcactt

SEQ ID NO: 1747566 - DNA, 25 bp, Homo sapien
aggcataccctgcagactcccaaat

SEQ ID NO: 1747567 - DNA, 25 bp, Homo sapien
gcacaggccaggcataccctgcaga

SEQ ID NO: 1747568 - DNA, 25 bp, Homo sapien
ttaagtggccgtcgtgaagcccaga

SEQ ID NO: 1747569 - DNA, 25 bp, Homo sapien
atttggcgacagttacaaagcagaa

SEQ ID NO: 1747570 - DNA, 25 bp, Homo sapien
tttccaaagtaccatccgatcaagc

SEQ ID NO: 1747571 - DNA, 25 bp, Homo sapien
tgtctcctctttaagtggccgtcgt

SEQ ID NO: 1747572 - DNA, 25 bp, Homo sapien
cagtggttacatttaaccagcaggc

SEQ ID NO: 1747573 - DNA, 25 bp, Homo sapien
gaaatcctgtaaagtgattgttcag

SEQ ID NO: 1747574 - DNA, 25 bp, Homo sapien
caaaaggtcggctgctaagctcagg

SEQ ID NO: 1747575 - DNA, 25 bp, Homo sapien
tggaatccctggtggccatactcga

SEQ ID NO: 1747576 - DNA, 25 bp, Homo sapien
ttctagactggcagcttctcatttc

SEQ ID NO: 1747577 - DNA, 25 bp, Homo sapien
tctagactggcagcttctcatttcc

SEQ ID NO: 1747578 - DNA, 25 bp, Homo sapien
gaaagcagactttctcccacagaca

SEQ ID NO: 1747579 - DNA, 25 bp, Homo sapien
gtgaaggtcgtctctgccatccaga

SEQ ID NO: 1747580 - DNA, 25 bp, Homo sapien
cacagacaccagatacggtggggac

SEQ ID NO: 1747581 - DNA, 25 bp, Homo sapien
actcctccctctagttgagcattga

SEQ ID NO: 1747582 - DNA, 25 bp, Homo sapien
tgcctctgtcaggaatcagatcatg

SEQ ID NO: 1747583 - DNA, 25 bp, Homo sapien
cactgacagctgatccagcagccca

SEQ ID NO: 1747584 - DNA, 25 bp, Homo sapien
tctgtcaggaatcagatcatgaaga

SEQ ID NO: 1747585 - DNA, 25 bp, Homo sapien
cacccagaggttgttttagcagaag

SEQ ID NO: 1747586 - DNA, 25 bp, Homo sapien
gagcacttcgaattggaacgcatga

SEQ ID NO: 1747587 - DNA, 25 bp, Homo sapien
tggtaacggcctgaagcactggtat

SEQ ID NO: 1747588 - DNA, 25 bp, Homo sapien
cctaagcaatcttgagggctgtgac

SEQ ID NO: 1747589 - DNA, 25 bp, Homo sapien
cactggtattactaagacaggtccc

SEQ ID NO: 1747590 - DNA, 25 bp, Homo sapien
agaagtgtacttccagtggaatggg

SEQ ID NO: 1747591 - DNA, 25 bp, Homo sapien
aaagaagtgtacttccagtggaatg

SEQ ID NO: 1747592 - DNA, 25 bp, Homo sapien
aagaagtgtacttccagtggaatgg

SEQ ID NO: 1747593 - DNA, 25 bp, Homo sapien
gaagtgtacttccagtggaatgggg

SEQ ID NO: 1747594 - DNA, 25 bp, Homo sapien
gacagtcagtgattaagccattctt

SEQ ID NO: 1747595 - DNA, 25 bp, Homo sapien
tctccagttgataggccttcattta

SEQ ID NO: 1747596 - DNA, 25 bp, Homo sapien
atcaaaatggtgcttccttctaggg

SEQ ID NO: 1747597 - DNA, 25 bp, Homo sapien
tctctcttttatctaacagtttctc

SEQ ID NO: 1747598 - DNA, 25 bp, Homo sapien
ccgcttcttgctctatgaactcttg

SEQ ID NO: 1747599 - DNA, 25 bp, Homo sapien
gcctgtgtctccttgtccgcttctt

SEQ ID NO: 1747600 - DNA, 25 bp, Homo sapien
gaatcaggatagtcaggaccttccc

SEQ ID NO: 1747601 - DNA, 25 bp, Homo sapien
gaactcttgttcttgtgtgggaatc

SEQ ID NO: 1747602 - DNA, 25 bp, Homo sapien
taagggcacagcgttgaacagtgat

SEQ ID NO: 1747603 - DNA, 25 bp, Homo sapien
taggcagctgcaagcacctggtctt

SEQ ID NO: 1747604 - DNA, 25 bp, Homo sapien
tgaacagtgataggcagctgcaagc

SEQ ID NO: 1747605 - DNA, 25 bp, Homo sapien
ctggtcttctactcgctgttgctga

SEQ ID NO: 1747606 - DNA, 25 bp, Homo sapien
acaaagctccaatgcctgctggagc

SEQ ID NO: 1747607 - DNA, 25 bp, Homo sapien
caatgtgtatgtgatcaggcagctc

SEQ ID NO: 1747608 - DNA, 25 bp, Homo sapien
aatgcctgctggagccaaagtgttg

SEQ ID NO: 1747609 - DNA, 25 bp, Homo sapien
tggaaaccaatgtgtatgtgatcag

SEQ ID NO: 1747610 - DNA, 25 bp, Homo sapien
ctttcatctgagaatccagtgcttt

SEQ ID NO: 1747611 - DNA, 25 bp, Homo sapien
aggtgccaggtggagcgattacccc

SEQ ID NO: 1747612 - DNA, 25 bp, Homo sapien
ggtggagcgattaccccgcttcctg

SEQ ID NO: 1747613 - DNA, 25 bp, Homo sapien
gccaggtggagcgattaccccgctt

SEQ ID NO: 1747614 - DNA, 25 bp, Homo sapien
gatcccgggagaatatgcatgcttc

SEQ ID NO: 1747615 - DNA, 25 bp, Homo sapien
caagccatactttggtgtaggtccc

SEQ ID NO: 1747616 - DNA, 25 bp, Homo sapien
tcactgcagttgtctccaagcaagc

SEQ ID NO: 1747617 - DNA, 25 bp, Homo sapien
ttgccaacaccgcaatgggatcccg

SEQ ID NO: 1747618 - DNA, 25 bp, Homo sapien
actgagcttgccatgattttcaagc

SEQ ID NO: 1747619 - DNA, 25 bp, Homo sapien
agccaaactgagcttgccatgattt

SEQ ID NO: 1747620 - DNA, 25 bp, Homo sapien
caaactgagcttgccatgattttca

SEQ ID NO: 1747621 - DNA, 25 bp, Homo sapien
gagcttgccatgattttcaagctga

SEQ ID NO: 1747622 - DNA, 25 bp, Homo sapien
ggtggcatgccgagctctctgtcta

SEQ ID NO: 1747623 - DNA, 25 bp, Homo sapien
gctctctgtctagccgtgacttgca

SEQ ID NO: 1747624 - DNA, 25 bp, Homo sapien
gaggtcagtgctggtggcatgccga

SEQ ID NO: 1747625 - DNA, 25 bp, Homo sapien
tgccgagctctctgtctagccgtga

SEQ ID NO: 1747626 - DNA, 25 bp, Homo sapien
aggccttctcagtgctgagagccat

SEQ ID NO: 1747627 - DNA, 25 bp, Homo sapien
acaggccttctcagtgctgagagcc

SEQ ID NO: 1747628 - DNA, 25 bp, Homo sapien
gacaggccttctcagtgctgagagc

SEQ ID NO: 1747629 - DNA, 25 bp, Homo sapien
caggccttctcagtgctgagagcca

SEQ ID NO: 1747630 - DNA, 25 bp, Homo sapien
gttgctctctgtgggtgacggtctt

SEQ ID NO: 1747631 - DNA, 25 bp, Homo sapien
cgcttttcccgcattggagattttg

SEQ ID NO: 1747632 - DNA, 25 bp, Homo sapien
aggagggcctgacttccaccatcca

SEQ ID NO: 1747633 - DNA, 25 bp, Homo sapien
gagggtgtcaacctcaggacgcttt

SEQ ID NO: 1747634 - DNA, 25 bp, Homo sapien
tcctcctggcttgattgcaaaaccc

SEQ ID NO: 1747635 - DNA, 25 bp, Homo sapien
gagtccattggagggaacagtgtac

SEQ ID NO: 1747636 - DNA, 25 bp, Homo sapien
taaggcaatggatgccaccaactga

SEQ ID NO: 1747637 - DNA, 25 bp, Homo sapien
tatgttatacaagcaccagagtcca

SEQ ID NO: 1747638 - DNA, 25 bp, Homo sapien
ctgaagggcaaagaatacaaggaca

SEQ ID NO: 1747639 - DNA, 25 bp, Homo sapien
tgagtggtgtcttgaatggaggcca

SEQ ID NO: 1747640 - DNA, 25 bp, Homo sapien
tttatgacggtgcatctgctgtgag

SEQ ID NO: 1747641 - DNA, 25 bp, Homo sapien
gtgtagctcaaatttatgacggtgc

SEQ ID NO: 1747642 - DNA, 25 bp, Homo sapien
tcagccgcatccatatgctacgcat

SEQ ID NO: 1747643 - DNA, 25 bp, Homo sapien
agacggtacgtttcacccgttgctg

SEQ ID NO: 1747644 - DNA, 25 bp, Homo sapien
tctatttgatttgtggagacggtac

SEQ ID NO: 1747645 - DNA, 25 bp, Homo sapien
ccgttgctggtctggctgaacactg

SEQ ID NO: 1747646 - DNA, 25 bp, Homo sapien
cagtgaggaccaaagacgaccatct

SEQ ID NO: 1747647 - DNA, 25 bp, Homo sapien
tctgtcccccgagggccagcagaag

SEQ ID NO: 1747648 - DNA, 25 bp, Homo sapien
ctgtcccccgagggccagcagaagg

SEQ ID NO: 1747649 - DNA, 25 bp, Homo sapien
gttcttttgctggatgcaaaggttt

SEQ ID NO: 1747650 - DNA, 25 bp, Homo sapien
gaaggtttccttgattgccctgtgt

SEQ ID NO: 1747651 - DNA, 25 bp, Homo sapien
ggtttttgtcaaagaccacttgatg

SEQ ID NO: 1747652 - DNA, 25 bp, Homo sapien
cattcaagataagagtgtcagatgt

SEQ ID NO: 1747653 - DNA, 25 bp, Homo sapien
tgatgtgcaaggtcggagccagttc

SEQ ID NO: 1747654 - DNA, 25 bp, Homo sapien
tgggcattaggtttgcacagctcat

SEQ ID NO: 1747655 - DNA, 25 bp, Homo sapien
tgcagaatctcattcttcaaaggac

SEQ ID NO: 1747656 - DNA, 25 bp, Homo sapien
actgcagaatctcattcttcaaagg

SEQ ID NO: 1747657 - DNA, 25 bp, Homo sapien
gaaaactgcagaatctcattcttca

SEQ ID NO: 1747658 - DNA, 25 bp, Homo sapien
aaactgcagaatctcattcttcaaa

SEQ ID NO: 1747659 - DNA, 25 bp, Homo sapien
tcaaagtggagaacgtaatcgctac

SEQ ID NO: 1747660 - DNA, 25 bp, Homo sapien
aacgtaatcgctaccagtgctatcc

SEQ ID NO: 1747661 - DNA, 25 bp, Homo sapien
catttcccaagcattggctccttcg

SEQ ID NO: 1747662 - DNA, 25 bp, Homo sapien
ccttctgttaggctttcaaagtgga

SEQ ID NO: 1747663 - DNA, 25 bp, Homo sapien
caaaagcatatgagggaatatgtgg

SEQ ID NO: 1747664 - DNA, 25 bp, Homo sapien
gtgcaaaagcatatgagggaatatg

SEQ ID NO: 1747665 - DNA, 25 bp, Homo sapien
aaaagcatatgagggaatatgtggc

SEQ ID NO: 1747666 - DNA, 25 bp, Homo sapien
tgcaaaagcatatgagggaatatgt

SEQ ID NO: 1747667 - DNA, 25 bp, Homo sapien
tcctgcctggaactaagcatctcca

SEQ ID NO: 1747668 - DNA, 25 bp, Homo sapien
ctcatcctgcctggaactaagcatc

SEQ ID NO: 1747669 - DNA, 25 bp, Homo sapien
gcctggaactaagcatctccacccc

SEQ ID NO: 1747670 - DNA, 25 bp, Homo sapien
catcctgcctggaactaagcatctc

SEQ ID NO: 1747671 - DNA, 25 bp, Homo sapien
ccgtgacgcctcaatggttgccggg

SEQ ID NO: 1747672 - DNA, 25 bp, Homo sapien
tacgtcgaagagagctgcgacaccc

SEQ ID NO: 1747673 - DNA, 25 bp, Homo sapien
ctccgaatcccgtgacgaaccgtga

SEQ ID NO: 1747674 - DNA, 25 bp, Homo sapien
gctcctgaggacaggtacgtcgaag

SEQ ID NO: 1747675 - DNA, 25 bp, Homo sapien
cagaagcagccagccgacagtcatc

SEQ ID NO: 1747676 - DNA, 25 bp, Homo sapien
tggaggcccgccagaagcagccagc

SEQ ID NO: 1747677 - DNA, 25 bp, Homo sapien
agcagccagccgacagtcatcagca

SEQ ID NO: 1747678 - DNA, 25 bp, Homo sapien
cagtcatcagcagcccggcggagca

SEQ ID NO: 1747679 - DNA, 25 bp, Homo sapien
catcctcggtttcaggcggagcgta

SEQ ID NO: 1747680 - DNA, 25 bp, Homo sapien
cgctgtcgttgttttcggtctcctc

SEQ ID NO: 1747681 - DNA, 25 bp, Homo sapien
tagttctccgcggtctcgctgtcgt

SEQ ID NO: 1747682 - DNA, 25 bp, Homo sapien
gcagcggtgacgttggtcccgcgcg

SEQ ID NO: 1747683 - DNA, 25 bp, Homo sapien
tgtccaaagcaatatttagaagtgt

SEQ ID NO: 1747684 - DNA, 25 bp, Homo sapien
acaggatgcaagaaagggacaaact

SEQ ID NO: 1747685 - DNA, 25 bp, Homo sapien
tatctgtgtatcttgctgtggcctg

SEQ ID NO: 1747686 - DNA, 25 bp, Homo sapien
ggctgaagtatgagagagagctctc

SEQ ID NO: 1747687 - DNA, 25 bp, Homo sapien
ttgtcggcatactggtctatctggg

SEQ ID NO: 1747688 - DNA, 25 bp, Homo sapien
ccacaatgcagaggtgctcaaggct

SEQ ID NO: 1747689 - DNA, 25 bp, Homo sapien
tctatctgggtgtatcgtcgtaaag

SEQ ID NO: 1747690 - DNA, 25 bp, Homo sapien
gattctgaattccattgcaacccca

SEQ ID NO: 1747691 - DNA, 25 bp, Homo sapien
ccaggttcatgcttaacagttgagc

SEQ ID NO: 1747692 - DNA, 25 bp, Homo sapien
tattaacgatgcactcaaaatctgg

SEQ ID NO: 1747693 - DNA, 25 bp, Homo sapien
tttgcccagttagagtacatacacc

SEQ ID NO: 1747694 - DNA, 25 bp, Homo sapien
tgtgccatactgtttcgctaaaagg

SEQ ID NO: 1747695 - DNA, 25 bp, Homo sapien
taacggtgcacattccgaattctac

SEQ ID NO: 1747696 - DNA, 25 bp, Homo sapien
tctttgacgacattcctatttgaaa

SEQ ID NO: 1747697 - DNA, 25 bp, Homo sapien
cgaattctacttctttgacgacatt

SEQ ID NO: 1747698 - DNA, 25 bp, Homo sapien
cacatgtaacggtgcacattccgaa

SEQ ID NO: 1747699 - DNA, 25 bp, Homo sapien
ggcattcttctacccgtacaacaca

SEQ ID NO: 1747700 - DNA, 25 bp, Homo sapien
tgttaatataacttctctaacacca

SEQ ID NO: 1747701 - DNA, 25 bp, Homo sapien
ggattcaccaccagggcatccattt

SEQ ID NO: 1747702 - DNA, 25 bp, Homo sapien
ccacaatctgttggtccacggcatt

SEQ ID NO: 1747703 - DNA, 25 bp, Homo sapien
gaatacatgccaatctaacactttc

SEQ ID NO: 1747704 - DNA, 25 bp, Homo sapien
tatatttgaaacgatttaagggaga

SEQ ID NO: 1747705 - DNA, 25 bp, Homo sapien
acatatatttgaaacgatttaaggg

SEQ ID NO: 1747706 - DNA, 25 bp, Homo sapien
tctaacactttcaagactttctgaa

SEQ ID NO: 1747707 - DNA, 25 bp, Homo sapien
aatcatttacaagtataatggattg

SEQ ID NO: 1747708 - DNA, 25 bp, Homo sapien
tgaatcatttacaagtataatggat

SEQ ID NO: 1747709 - DNA, 25 bp, Homo sapien
gaatcatttacaagtataatggatt

SEQ ID NO: 1747710 - DNA, 25 bp, Homo sapien
ctgaatcatttacaagtataatgga

SEQ ID NO: 1747711 - DNA, 25 bp, Homo sapien
gtgactttccttgcgtacttctagg

SEQ ID NO: 1747712 - DNA, 25 bp, Homo sapien
tatccagtgtgtcacactcgaaagc

SEQ ID NO: 1747713 - DNA, 25 bp, Homo sapien
cactgctcgtatagactgtgaattt

SEQ ID NO: 1747714 - DNA, 25 bp, Homo sapien
gtgtgtcacactcgaaagccaaggg

SEQ ID NO: 1747715 - DNA, 25 bp, Homo sapien
caaaaattagggctgcatcagtggc

SEQ ID NO: 1747716 - DNA, 25 bp, Homo sapien
tggtcagcacaaaaattagggctgc

SEQ ID NO: 1747717 - DNA, 25 bp, Homo sapien
aaatacacagataatgactcctatg

SEQ ID NO: 1747718 - DNA, 25 bp, Homo sapien
ttatgattatgaagatcaataagaa

SEQ ID NO: 1747719 - DNA, 25 bp, Homo sapien
ggcgatggacagtttcaaggcaaca

SEQ ID NO: 1747720 - DNA, 25 bp, Homo sapien
catagttggagaagcaagtcatgag

SEQ ID NO: 1747721 - DNA, 25 bp, Homo sapien
caaggcaacatgtaggagacatcac

SEQ ID NO: 1747722 - DNA, 25 bp, Homo sapien
taaaagctctctcatagttggagaa

SEQ ID NO: 1747723 - DNA, 25 bp, Homo sapien
cagggtgtactactcatgtaggtat

SEQ ID NO: 1747724 - DNA, 25 bp, Homo sapien
tattgtcatacaaatgaattagtag

SEQ ID NO: 1747725 - DNA, 25 bp, Homo sapien
caagttttagagttgagagaaccac

SEQ ID NO: 1747726 - DNA, 25 bp, Homo sapien
atgaattagtaggttacaataacca

SEQ ID NO: 1747727 - DNA, 25 bp, Homo sapien
gagaagttgaatctttgtatctcac

SEQ ID NO: 1747728 - DNA, 25 bp, Homo sapien
tctcacagaactctgctcggattgt

SEQ ID NO: 1747729 - DNA, 25 bp, Homo sapien
gattgtacctcaggtgtagaggctt

SEQ ID NO: 1747730 - DNA, 25 bp, Homo sapien
tctgttggtaattggtcaagagaag

SEQ ID NO: 1747731 - DNA, 25 bp, Homo sapien
tgtaataatgaatctaatattctgt

SEQ ID NO: 1747732 - DNA, 25 bp, Homo sapien
ttgtaataatgaatctaatattctg

SEQ ID NO: 1747733 - DNA, 25 bp, Homo sapien
tttgtaataatgaatctaatattct

SEQ ID NO: 1747734 - DNA, 25 bp, Homo sapien
gtaataatgaatctaatattctgta

SEQ ID NO: 1747735 - DNA, 25 bp, Homo sapien
cacactgtggcaatccatcgcaaca

SEQ ID NO: 1747736 - DNA, 25 bp, Homo sapien
aaaatagtcctatccccacactgca

SEQ ID NO: 1747737 - DNA, 25 bp, Homo sapien
tactttagcaagttcaacccagtgc

SEQ ID NO: 1747738 - DNA, 25 bp, Homo sapien
taaatatccccaagctattacctga

SEQ ID NO: 1747739 - DNA, 25 bp, Homo sapien
tagaaccactctacaaagaaaatcc

SEQ ID NO: 1747740 - DNA, 25 bp, Homo sapien
caaccatggtcactgtcgggaactc

SEQ ID NO: 1747741 - DNA, 25 bp, Homo sapien
tagaggtatgcccagcaaccatggt

SEQ ID NO: 1747742 - DNA, 25 bp, Homo sapien
gaaattgcagcctactatgtctatc

SEQ ID NO: 1747743 - DNA, 25 bp, Homo sapien
tattgctgttgcaactgtagggccg

SEQ ID NO: 1747744 - DNA, 25 bp, Homo sapien
tctgagaataaggtgccgtttggca

SEQ ID NO: 1747745 - DNA, 25 bp, Homo sapien
aataatgcctgaagagttgcctgag

SEQ ID NO: 1747746 - DNA, 25 bp, Homo sapien
gataatgcccacacaatttaggttg

SEQ ID NO: 1747747 - DNA, 25 bp, Homo sapien
ttcctgcttcagaagtgtagggact

SEQ ID NO: 1747748 - DNA, 25 bp, Homo sapien
gcttcagaagtgtagggactttcct

SEQ ID NO: 1747749 - DNA, 25 bp, Homo sapien
atcagcaacaaaagaccctaggaac

SEQ ID NO: 1747750 - DNA, 25 bp, Homo sapien
aatcagcaacaaaagaccctaggaa

SEQ ID NO: 1747751 - DNA, 25 bp, Homo sapien
ggcaaggaaccgataatcaggactt

SEQ ID NO: 1747752 - DNA, 25 bp, Homo sapien
cagtcaaggcaaggaaccgataatc

SEQ ID NO: 1747753 - DNA, 25 bp, Homo sapien
caaggcaaggaaccgataatcagga

SEQ ID NO: 1747754 - DNA, 25 bp, Homo sapien
caaggaaccgataatcaggactttt

SEQ ID NO: 1747755 - DNA, 25 bp, Homo sapien
caggaggacaagaaatctggttagc

SEQ ID NO: 1747756 - DNA, 25 bp, Homo sapien
gtcagtgaaggatgttgatgaatgt

SEQ ID NO: 1747757 - DNA, 25 bp, Homo sapien
tcccgtgactctgcagggtttctgt

SEQ ID NO: 1747758 - DNA, 25 bp, Homo sapien
gaatgttagcatggctgctcctgaa

SEQ ID NO: 1747759 - DNA, 25 bp, Homo sapien
aaaccaaatgctttcattgggatat

SEQ ID NO: 1747760 - DNA, 25 bp, Homo sapien
aagtgacaaacctttgctatgtagc

SEQ ID NO: 1747761 - DNA, 25 bp, Homo sapien
gctatgtagctgaattgctgggaga

SEQ ID NO: 1747762 - DNA, 25 bp, Homo sapien
tctgtcttctatgatcaaattcagt

SEQ ID NO: 1747763 - DNA, 25 bp, Homo sapien
ctcctggagactcagtagcagtcaa

SEQ ID NO: 1747764 - DNA, 25 bp, Homo sapien
ccaaggctctccaaaatggccatca

SEQ ID NO: 1747765 - DNA, 25 bp, Homo sapien
caatggctccctaaagctgcagaga

SEQ ID NO: 1747766 - DNA, 25 bp, Homo sapien
tacttcctcaggcaatggctcccta

SEQ ID NO: 1747767 - DNA, 25 bp, Homo sapien
cagcctcctatagtgtgttgcatcc

SEQ ID NO: 1747768 - DNA, 25 bp, Homo sapien
tatctgtaaaagtatcacttcctgc

SEQ ID NO: 1747769 - DNA, 25 bp, Homo sapien
aattaactccccatacatagcagag

SEQ ID NO: 1747770 - DNA, 25 bp, Homo sapien
gaacagagggacatcaattaactcc

SEQ ID NO: 1747771 - DNA, 25 bp, Homo sapien
gacattaccatcattgctagaaagt

SEQ ID NO: 1747772 - DNA, 25 bp, Homo sapien
aatgtttcatttgcacaagtagggc

SEQ ID NO: 1747773 - DNA, 25 bp, Homo sapien
gaatctgagagatgctgtagacatc

SEQ ID NO: 1747774 - DNA, 25 bp, Homo sapien
gtagacatctgtcctacacttgaga

SEQ ID NO: 1747775 - DNA, 25 bp, Homo sapien
atatatgtgaaaggatatgaatctg

SEQ ID NO: 1747776 - DNA, 25 bp, Homo sapien
tgtgtcaccaacctgctcatgaagg

SEQ ID NO: 1747777 - DNA, 25 bp, Homo sapien
tagctgttcacatggaaatccttgg

SEQ ID NO: 1747778 - DNA, 25 bp, Homo sapien
taaatagtaagatcagttctctggc

SEQ ID NO: 1747779 - DNA, 25 bp, Homo sapien
tgcttagcttagaatcgaagaacct

SEQ ID NO: 1747780 - DNA, 25 bp, Homo sapien
ctggtctaagaaaacctcatggctc

SEQ ID NO: 1747781 - DNA, 25 bp, Homo sapien
ggtctaagaaaacctcatggctcat

SEQ ID NO: 1747782 - DNA, 25 bp, Homo sapien
gaatgggccacagaaagtcttcttc

SEQ ID NO: 1747783 - DNA, 25 bp, Homo sapien
taggaatgggccacagaaagtcttc

SEQ ID NO: 1747784 - DNA, 25 bp, Homo sapien
tttttgtttcaaagatgtctcccac

SEQ ID NO: 1747785 - DNA, 25 bp, Homo sapien
ccactccaggcgaggagcgctcttg

SEQ ID NO: 1747786 - DNA, 25 bp, Homo sapien
cgctcttggctgaggtatgtatcaa

SEQ ID NO: 1747787 - DNA, 25 bp, Homo sapien
ttttgtttcaaagatgtctcccact

SEQ ID NO: 1747788 - DNA, 25 bp, Homo sapien
aaaggctcattaacacgtgatggga

SEQ ID NO: 1747789 - DNA, 25 bp, Homo sapien
gcgggccgaagaggcttgtcccctc

SEQ ID NO: 1747790 - DNA, 25 bp, Homo sapien
gatgggaccgcgcttcataaatggg

SEQ ID NO: 1747791 - DNA, 25 bp, Homo sapien
gccgaagaggcttgtcccctctggc

SEQ ID NO: 1747792 - DNA, 25 bp, Homo sapien
gtgtgagggtatccgggagcacagc

SEQ ID NO: 1747793 - DNA, 25 bp, Homo sapien
attaatggccccgaggtcgtgggcg

SEQ ID NO: 1747794 - DNA, 25 bp, Homo sapien
cgctgcccgggagcgtgtgattaat

SEQ ID NO: 1747795 - DNA, 25 bp, Homo sapien
aaggtgttggcgatgcgcgctgccc

SEQ ID NO: 1747796 - DNA, 25 bp, Homo sapien
cttgtttggaggttcgcaattcacc

SEQ ID NO: 1747797 - DNA, 25 bp, Homo sapien
tgtaaagaccaattaaggtttgatc

SEQ ID NO: 1747798 - DNA, 25 bp, Homo sapien
gaggttcgcaattcaccatgataaa

SEQ ID NO: 1747799 - DNA, 25 bp, Homo sapien
tttgatccgtgcacacaggaggcag

SEQ ID NO: 1747800 - DNA, 25 bp, Homo sapien
gtcataaaatgaacgccaaggcggc

SEQ ID NO: 1747801 - DNA, 25 bp, Homo sapien
ccaactcacgagagataaagatgtc

SEQ ID NO: 1747802 - DNA, 25 bp, Homo sapien
atgtctaaataaccacgaccgccgc

SEQ ID NO: 1747803 - DNA, 25 bp, Homo sapien
caggtggaaaccgtgcgatcctctc

SEQ ID NO: 1747804 - DNA, 25 bp, Homo sapien
gaagcagattcccatctagtaatgc

SEQ ID NO: 1747805 - DNA, 25 bp, Homo sapien
cagattcccatctagtaatgcagag

SEQ ID NO: 1747806 - DNA, 25 bp, Homo sapien
gattcccatctagtaatgcagagcc

SEQ ID NO: 1747807 - DNA, 25 bp, Homo sapien
agcagattcccatctagtaatgcag

SEQ ID NO: 1747808 - DNA, 25 bp, Homo sapien
tcgctggtggagcaactcacgagca

SEQ ID NO: 1747809 - DNA, 25 bp, Homo sapien
ttctttcagttgctcgcatcgctgg

SEQ ID NO: 1747810 - DNA, 25 bp, Homo sapien
caccaacttgtagttcttgagaagc

SEQ ID NO: 1747811 - DNA, 25 bp, Homo sapien
cacgcagaagtggtgcaggagtttc

SEQ ID NO: 1747812 - DNA, 25 bp, Homo sapien
ctctgaaaacagtgtcatcaccaag

SEQ ID NO: 1747813 - DNA, 25 bp, Homo sapien
cagtgtcatcaccaagttttcccct

SEQ ID NO: 1747814 - DNA, 25 bp, Homo sapien
caatcttcacaatccctttgtaact

SEQ ID NO: 1747815 - DNA, 25 bp, Homo sapien
tctatctcaatctcaatcttcacaa

SEQ ID NO: 1747816 - DNA, 25 bp, Homo sapien
aaagagtccatgacaagctatatcc

SEQ ID NO: 1747817 - DNA, 25 bp, Homo sapien
taatgtttccagcacagcgagcttt

SEQ ID NO: 1747818 - DNA, 25 bp, Homo sapien
cgagctttatcagaagaaagagtcc

SEQ ID NO: 1747819 - DNA, 25 bp, Homo sapien
caagtcgtaggctattaatgtttcc

SEQ ID NO: 1747820 - DNA, 25 bp, Homo sapien
tgagtcaggaatgaggtatggtaat

SEQ ID NO: 1747821 - DNA, 25 bp, Homo sapien
gaggtatggtaatttctcaaattca

SEQ ID NO: 1747822 - DNA, 25 bp, Homo sapien
attcctcttttggagtcactgagtc

SEQ ID NO: 1747823 - DNA, 25 bp, Homo sapien
acagtcttcctgctgattcctcttt

SEQ ID NO: 1747824 - DNA, 25 bp, Homo sapien
aacaaaggatagtctagttttccat

SEQ ID NO: 1747825 - DNA, 25 bp, Homo sapien
acaaaggatagtctagttttccata

SEQ ID NO: 1747826 - DNA, 25 bp, Homo sapien
cagaacaaaggatagtctagttttc

SEQ ID NO: 1747827 - DNA, 25 bp, Homo sapien
cagcctccacatcatgacaagtgcc

SEQ ID NO: 1747828 - DNA, 25 bp, Homo sapien
gcctccacatcatgacaagtgcctc

SEQ ID NO: 1747829 - DNA, 25 bp, Homo sapien
ctccacatcatgacaagtgcctctg

SEQ ID NO: 1747830 - DNA, 25 bp, Homo sapien
tccacatcatgacaagtgcctctga

SEQ ID NO: 1747831 - DNA, 25 bp, Homo sapien
ctttgtgagccagaagccatttgtg

SEQ ID NO: 1747832 - DNA, 25 bp, Homo sapien
gcagtgtaaatcagcacatcttcct

SEQ ID NO: 1747833 - DNA, 25 bp, Homo sapien
catttgtgatatctctgccttggag

SEQ ID NO: 1747834 - DNA, 25 bp, Homo sapien
cccatttttcaggcatatcagcagt

SEQ ID NO: 1747835 - DNA, 25 bp, Homo sapien
cctcaggatgtggtggaccaccatc

SEQ ID NO: 1747836 - DNA, 25 bp, Homo sapien
tctgcagctgccgtgtaagtgatca

SEQ ID NO: 1747837 - DNA, 25 bp, Homo sapien
tggtgtttgtttggatattcagatg

SEQ ID NO: 1747838 - DNA, 25 bp, Homo sapien
ttgtttggatattcagatgatgatg

SEQ ID NO: 1747839 - DNA, 25 bp, Homo sapien
atgccccgttgctgtgttcattaac

SEQ ID NO: 1747840 - DNA, 25 bp, Homo sapien
caatgagattggtgacatggacaaa

SEQ ID NO: 1747841 - DNA, 25 bp, Homo sapien
gcaaggattcgtcttggtcagcctt

SEQ ID NO: 1747842 - DNA, 25 bp, Homo sapien
tgccaatgagattggtgacatggac

SEQ ID NO: 1747843 - DNA, 25 bp, Homo sapien
accagtcatgctgcagatgattttc

SEQ ID NO: 1747844 - DNA, 25 bp, Homo sapien
tcctatttcctcctgcgccctggag

SEQ ID NO: 1747845 - DNA, 25 bp, Homo sapien
ggcagtgatgcccagctcgttgcac

SEQ ID NO: 1747846 - DNA, 25 bp, Homo sapien
gactctgagggctgtctgggcccca

SEQ ID NO: 1747847 - DNA, 25 bp, Homo sapien
ctcctgcgccctggagtttgatttg

SEQ ID NO: 1747848 - DNA, 25 bp, Homo sapien
acatcctcaatttgcccgatcttca

SEQ ID NO: 1747849 - DNA, 25 bp, Homo sapien
ccacagccctcagaatggaatttat

SEQ ID NO: 1747850 - DNA, 25 bp, Homo sapien
gccgcttatgccttctcaatttaca

SEQ ID NO: 1747851 - DNA, 25 bp, Homo sapien
ctcaatttacacaggtctgcggaag

SEQ ID NO: 1747852 - DNA, 25 bp, Homo sapien
aaagggactgctttgtggcttgccg

SEQ ID NO: 1747853 - DNA, 25 bp, Homo sapien
gagctatcttctgggtgtttaaaca

SEQ ID NO: 1747854 - DNA, 25 bp, Homo sapien
gcctggctgtccgttttgggaacat

SEQ ID NO: 1747855 - DNA, 25 bp, Homo sapien
tacacttctgtatcttattgatttg

SEQ ID NO: 1747856 - DNA, 25 bp, Homo sapien
agcagttgctttccgaagagtgtca

SEQ ID NO: 1747857 - DNA, 25 bp, Homo sapien
caagcttgcgcaatgtctggattgg

SEQ ID NO: 1747858 - DNA, 25 bp, Homo sapien
agccttgtgtggcaagcttgcgcaa

SEQ ID NO: 1747859 - DNA, 25 bp, Homo sapien
ggcatgtgcattacacgaatcctct

SEQ ID NO: 1747860 - DNA, 25 bp, Homo sapien
gactggactgtgcttactggtgatc

SEQ ID NO: 1747861 - DNA, 25 bp, Homo sapien
ttgaggacctcgttatttctcactg

SEQ ID NO: 1747862 - DNA, 25 bp, Homo sapien
cctcgttatttctcactggggccat

SEQ ID NO: 1747863 - DNA, 25 bp, Homo sapien
gaggacctcgttatttctcactggg

SEQ ID NO: 1747864 - DNA, 25 bp, Homo sapien
gacctcgttatttctcactggggcc

SEQ ID NO: 1747865 - DNA, 25 bp, Homo sapien
ctctcctcttttcccacattttgtt

SEQ ID NO: 1747866 - DNA, 25 bp, Homo sapien
ctcctctcctcttttcccacatttt

SEQ ID NO: 1747867 - DNA, 25 bp, Homo sapien
tcctctcctcttttcccacattttg

SEQ ID NO: 1747868 - DNA, 25 bp, Homo sapien
ctcctcttttcccacattttgttag

SEQ ID NO: 1747869 - DNA, 25 bp, Homo sapien
caaagctgcaccaaccagattgcct

SEQ ID NO: 1747870 - DNA, 25 bp, Homo sapien
gctgcaccaaccagattgccttcta

SEQ ID NO: 1747871 - DNA, 25 bp, Homo sapien
aagtaaccaaagctgcaccaaccag

SEQ ID NO: 1747872 - DNA, 25 bp, Homo sapien
agaaagtaaccaaagctgcaccaac

SEQ ID NO: 1747873 - DNA, 25 bp, Homo sapien
acaaggcagcgttgatgctacccac

SEQ ID NO: 1747874 - DNA, 25 bp, Homo sapien
tcttacaaggcagcgttgatgctac

SEQ ID NO: 1747875 - DNA, 25 bp, Homo sapien
ttacaaggcagcgttgatgctaccc

SEQ ID NO: 1747876 - DNA, 25 bp, Homo sapien
tgtcttacaaggcagcgttgatgct

SEQ ID NO: 1747877 - DNA, 25 bp, Homo sapien
actggtcccgatgatctgctgttgt

SEQ ID NO: 1747878 - DNA, 25 bp, Homo sapien
ctggtcccgatgatctgctgttgtg

SEQ ID NO: 1747879 - DNA, 25 bp, Homo sapien
tcaccaggaatgagtctgctgtcat

SEQ ID NO: 1747880 - DNA, 25 bp, Homo sapien
aagtcaccaggaatgagtctgctgt

SEQ ID NO: 1747881 - DNA, 25 bp, Homo sapien
caagtcaccaggaatgagtctgctg

SEQ ID NO: 1747882 - DNA, 25 bp, Homo sapien
gtcaccaggaatgagtctgctgtca

SEQ ID NO: 1747883 - DNA, 25 bp, Homo sapien
atttgtgtagtagagctcaactgct

SEQ ID NO: 1747884 - DNA, 25 bp, Homo sapien
ctccacgtgctctttctgtacacct

SEQ ID NO: 1747885 - DNA, 25 bp, Homo sapien
tttccccatgtagtatttgtgtagt

SEQ ID NO: 1747886 - DNA, 25 bp, Homo sapien
actggctcctcagcgcaaaatccca

SEQ ID NO: 1747887 - DNA, 25 bp, Homo sapien
ctgggccttctttgtcttgtttcct

SEQ ID NO: 1747888 - DNA, 25 bp, Homo sapien
tctgggccttctttgtcttgtttcc

SEQ ID NO: 1747889 - DNA, 25 bp, Homo sapien
tttgtcttgtttcctttttgatggc

SEQ ID NO: 1747890 - DNA, 25 bp, Homo sapien
tctttgtcttgtttcctttttgatg

SEQ ID NO: 1747891 - DNA, 25 bp, Homo sapien
tcttgtctgagcagtttccgcagca

SEQ ID NO: 1747892 - DNA, 25 bp, Homo sapien
gataagcggccttgcctgcttcagt

SEQ ID NO: 1747893 - DNA, 25 bp, Homo sapien
tgtctgagcagtttccgcagcatgc

SEQ ID NO: 1747894 - DNA, 25 bp, Homo sapien
catgcgtggcattgtcagggtctac

SEQ ID NO: 1747895 - DNA, 25 bp, Homo sapien
ccctcttgatggccgcagatctctg

SEQ ID NO: 1747896 - DNA, 25 bp, Homo sapien
tccctcttgatggccgcagatctct

SEQ ID NO: 1747897 - DNA, 25 bp, Homo sapien
ggcagagtgccttttatttttgatg

SEQ ID NO: 1747898 - DNA, 25 bp, Homo sapien
gagctgaagggagttcggtggcaga

SEQ ID NO: 1747899 - DNA, 25 bp, Homo sapien
tcggtggcagagtgccttttatttt

SEQ ID NO: 1747900 - DNA, 25 bp, Homo sapien
gttcggtggcagagtgccttttatt

SEQ ID NO: 1747901 - DNA, 25 bp, Homo sapien
gcaagtgtatctggctccagtttct

SEQ ID NO: 1747902 - DNA, 25 bp, Homo sapien
ttttacaccctggagcaagtgtatc

SEQ ID NO: 1747903 - DNA, 25 bp, Homo sapien
gagcaagtgtatctggctccagttt

SEQ ID NO: 1747904 - DNA, 25 bp, Homo sapien
caccctggagcaagtgtatctggct

SEQ ID NO: 1747905 - DNA, 25 bp, Homo sapien
catcccagtccaggcaatagtgttg

SEQ ID NO: 1747906 - DNA, 25 bp, Homo sapien
ccaggcaatagtgttgtgctgtccc

SEQ ID NO: 1747907 - DNA, 25 bp, Homo sapien
tccaggcaatagtgttgtgctgtcc

SEQ ID NO: 1747908 - DNA, 25 bp, Homo sapien
ccagtccaggcaatagtgttgtgct

SEQ ID NO: 1747909 - DNA, 25 bp, Homo sapien
accaaagcacacatcctcttagtct

SEQ ID NO: 1747910 - DNA, 25 bp, Homo sapien
attaacctcagctgaaagtaaatgt

SEQ ID NO: 1747911 - DNA, 25 bp, Homo sapien
catgaatatgtacttcagtggccat

SEQ ID NO: 1747912 - DNA, 25 bp, Homo sapien
gtaaatgtctattcctatcatgaat

SEQ ID NO: 1747913 - DNA, 25 bp, Homo sapien
tcatgaatatgtacttcagtggcca

SEQ ID NO: 1747914 - DNA, 25 bp, Homo sapien
caagtgccaatgacgacaggcaacc

SEQ ID NO: 1747915 - DNA, 25 bp, Homo sapien
tctgggccagattatgcagtctctg

SEQ ID NO: 1747916 - DNA, 25 bp, Homo sapien
tgtcatagcttacattgccagggcc

SEQ ID NO: 1747917 - DNA, 25 bp, Homo sapien
cagtatccaggaagtgattacgtcc

SEQ ID NO: 1747918 - DNA, 25 bp, Homo sapien
aggaaaaacagccacgcagcttgaa

SEQ ID NO: 1747919 - DNA, 25 bp, Homo sapien
aactcccaggtgtcctgtggttctt

SEQ ID NO: 1747920 - DNA, 25 bp, Homo sapien
agcaggaaaaacagccacgcagctt

SEQ ID NO: 1747921 - DNA, 25 bp, Homo sapien
ctatagcaagtgcagaatgatggga

SEQ ID NO: 1747922 - DNA, 25 bp, Homo sapien
ccctcacagcacgtggatgtgttca

SEQ ID NO: 1747923 - DNA, 25 bp, Homo sapien
gagttgaagtgagctaccctcacag

SEQ ID NO: 1747924 - DNA, 25 bp, Homo sapien
gagctctttgaaccctgcagtttac

SEQ ID NO: 1747925 - DNA, 25 bp, Homo sapien
gatgggtgtgttaggcagttctcac

SEQ ID NO: 1747926 - DNA, 25 bp, Homo sapien
gatgaaggtgagctcttcgtgtgtg

SEQ ID NO: 1747927 - DNA, 25 bp, Homo sapien
tgcgcatctgagtgtcccattccca

SEQ ID NO: 1747928 - DNA, 25 bp, Homo sapien
tgtgtgcgcatctgagtgtcccatt

SEQ ID NO: 1747929 - DNA, 25 bp, Homo sapien
catgtgtgtgcgcatctgagtgtcc

SEQ ID NO: 1747930 - DNA, 25 bp, Homo sapien
attgtggcttgggatgtatgatata

SEQ ID NO: 1747931 - DNA, 25 bp, Homo sapien
tgatataatcccagattttgtctgc

SEQ ID NO: 1747932 - DNA, 25 bp, Homo sapien
tgaggtagggcctgcattcctataa

SEQ ID NO: 1747933 - DNA, 25 bp, Homo sapien
gatgtatgatataatcccagatttt

SEQ ID NO: 1747934 - DNA, 25 bp, Homo sapien
ctggaagctggcagggaaagagcca

SEQ ID NO: 1747935 - DNA, 25 bp, Homo sapien
tggaagctggcagggaaagagccat

SEQ ID NO: 1747936 - DNA, 25 bp, Homo sapien
ttctgcagcaaattgtggattccct

SEQ ID NO: 1747937 - DNA, 25 bp, Homo sapien
gcagcaaattgtggattccctaatt

SEQ ID NO: 1747938 - DNA, 25 bp, Homo sapien
tctgcagcaaattgtggattcccta

SEQ ID NO: 1747939 - DNA, 25 bp, Homo sapien
gcaaattgtggattccctaatttta

SEQ ID NO: 1747940 - DNA, 25 bp, Homo sapien
cagaagacacgggacttttcatcaa

SEQ ID NO: 1747941 - DNA, 25 bp, Homo sapien
ttcatcaaaatatgagcatgctttc

SEQ ID NO: 1747942 - DNA, 25 bp, Homo sapien
ttgtgacgagggcaaccagaagaca

SEQ ID NO: 1747943 - DNA, 25 bp, Homo sapien
ttgttttgtgacgagggcaaccaga

SEQ ID NO: 1747944 - DNA, 25 bp, Homo sapien
tcccctgtgggtgtagtaaccactg

SEQ ID NO: 1747945 - DNA, 25 bp, Homo sapien
cccctgtgggtgtagtaaccactgt

SEQ ID NO: 1747946 - DNA, 25 bp, Homo sapien
tgaagtcccctgtgggtgtagtaac

SEQ ID NO: 1747947 - DNA, 25 bp, Homo sapien
ttccctgaagtcccctgtgggtgta

SEQ ID NO: 1747948 - DNA, 25 bp, Homo sapien
cactgcagctttcttgtactcccac

SEQ ID NO: 1747949 - DNA, 25 bp, Homo sapien
caatcaactgaacccagactacata

SEQ ID NO: 1747950 - DNA, 25 bp, Homo sapien
aatcaactgaacccagactacatac

SEQ ID NO: 1747951 - DNA, 25 bp, Homo sapien
ctcaacccataaggtgatggcccac

SEQ ID NO: 1747952 - DNA, 25 bp, Homo sapien
cccataaggtgatggcccacagtgc

SEQ ID NO: 1747953 - DNA, 25 bp, Homo sapien
caacccataaggtgatggcccacag

SEQ ID NO: 1747954 - DNA, 25 bp, Homo sapien
aacccataaggtgatggcccacagt

SEQ ID NO: 1747955 - DNA, 25 bp, Homo sapien
tggggaatgcaaggagagtggccag

SEQ ID NO: 1747956 - DNA, 25 bp, Homo sapien
ggggaatgcaaggagagtggccagt

SEQ ID NO: 1747957 - DNA, 25 bp, Homo sapien
gggtgataattggtcaagccagtca

SEQ ID NO: 1747958 - DNA, 25 bp, Homo sapien
gaaggttctgtgcaccatagcaggg

SEQ ID NO: 1747959 - DNA, 25 bp, Homo sapien
aacattggcccatgacctgaggtgg

SEQ ID NO: 1747960 - DNA, 25 bp, Homo sapien
cctgaggtggccaagtgaaggttct

SEQ ID NO: 1747961 - DNA, 25 bp, Homo sapien
aaggagtcctactccctggtggcac

SEQ ID NO: 1747962 - DNA, 25 bp, Homo sapien
aaaggagtcctactccctggtggca

SEQ ID NO: 1747963 - DNA, 25 bp, Homo sapien
tgttgggtgctcaggcacagtgtac

SEQ ID NO: 1747964 - DNA, 25 bp, Homo sapien
gaaaggagtcctactccctggtggc

SEQ ID NO: 1747965 - DNA, 25 bp, Homo sapien
aacagatatatcctgctttggtaac

SEQ ID NO: 1747966 - DNA, 25 bp, Homo sapien
ctgccacagggttgcatagaacaga

SEQ ID NO: 1747967 - DNA, 25 bp, Homo sapien
tggtaactgccacagggttgcatag

SEQ ID NO: 1747968 - DNA, 25 bp, Homo sapien
cagaaagacaccctctctgtaggtg

SEQ ID NO: 1747969 - DNA, 25 bp, Homo sapien
gccacgatctggcacagtgctagga

SEQ ID NO: 1747970 - DNA, 25 bp, Homo sapien
gcacagtgctaggagttgcctccat

SEQ ID NO: 1747971 - DNA, 25 bp, Homo sapien
gagccacgatctggcacagtgctag

SEQ ID NO: 1747972 - DNA, 25 bp, Homo sapien
ggagccacgatctggcacagtgcta

SEQ ID NO: 1747973 - DNA, 25 bp, Homo sapien
taaggaccatctggaagatagtcgt

SEQ ID NO: 1747974 - DNA, 25 bp, Homo sapien
cgttgcttgctgagagaatatgtcc

SEQ ID NO: 1747975 - DNA, 25 bp, Homo sapien
tcttcttagtgtcttcaaacatcag

SEQ ID NO: 1747976 - DNA, 25 bp, Homo sapien
ttcaaactcagctgggggataacgt

SEQ ID NO: 1747977 - DNA, 25 bp, Homo sapien
cagcaacggaagcaggcacagaaat

SEQ ID NO: 1747978 - DNA, 25 bp, Homo sapien
tgaattctatcgaggaacagccttt

SEQ ID NO: 1747979 - DNA, 25 bp, Homo sapien
gaacttccacaacagccagttttag

SEQ ID NO: 1747980 - DNA, 25 bp, Homo sapien
tgattagggtgtttcaggaaggaca

SEQ ID NO: 1747981 - DNA, 25 bp, Homo sapien
tccatgcagagaatagcatcttcag

SEQ ID NO: 1747982 - DNA, 25 bp, Homo sapien
gaagggcacggtccagggttgagct

SEQ ID NO: 1747983 - DNA, 25 bp, Homo sapien
tgcactgtccacttgggcccattct

SEQ ID NO: 1747984 - DNA, 25 bp, Homo sapien
attctctgaggttggagttgcaagg

SEQ ID NO: 1747985 - DNA, 25 bp, Homo sapien
tgtggatgactctactgcgtggatg

SEQ ID NO: 1747986 - DNA, 25 bp, Homo sapien
tatagtgacatagagtagttggcct

SEQ ID NO: 1747987 - DNA, 25 bp, Homo sapien
gcaacttcaaatagtctgatgcctg

SEQ ID NO: 1747988 - DNA, 25 bp, Homo sapien
gcagagcccttttgcagatacgaaa

SEQ ID NO: 1747989 - DNA, 25 bp, Homo sapien
atcatgcttacagtatatttcagct

SEQ ID NO: 1747990 - DNA, 25 bp, Homo sapien
gcttacagtatatttcagcttcacc

SEQ ID NO: 1747991 - DNA, 25 bp, Homo sapien
ttacagtatatttcagcttcaccat

SEQ ID NO: 1747992 - DNA, 25 bp, Homo sapien
tggtatataatcatgcttacagtat

SEQ ID NO: 1747993 - DNA, 25 bp, Homo sapien
gagtgcattcaaggaccccaaattg

SEQ ID NO: 1747994 - DNA, 25 bp, Homo sapien
gaggtttcatgaaccccactggagt

SEQ ID NO: 1747995 - DNA, 25 bp, Homo sapien
tcaactttcacccaaggcagagact

SEQ ID NO: 1747996 - DNA, 25 bp, Homo sapien
tgtgaaaaccatgaaccctctccct

SEQ ID NO: 1747997 - DNA, 25 bp, Homo sapien
tcttatctgggtttcttgccgggct

SEQ ID NO: 1747998 - DNA, 25 bp, Homo sapien
tttcttgccgggctaacagtcaaag

SEQ ID NO: 1747999 - DNA, 25 bp, Homo sapien
tatctgggtttcttgccgggctaac

SEQ ID NO: 1748000 - DNA, 25 bp, Homo sapien
cgggctaacagtcaaagttctgcca

SEQ ID NO: 1748001 - DNA, 25 bp, Homo sapien
ttagtgggaattttcactttcatcc

SEQ ID NO: 1748002 - DNA, 25 bp, Homo sapien
ctttcatcctcactatctaggtctt

SEQ ID NO: 1748003 - DNA, 25 bp, Homo sapien
ctcacttattagtgggaattttcac

SEQ ID NO: 1748004 - DNA, 25 bp, Homo sapien
cacttattagtgggaattttcactt

SEQ ID NO: 1748005 - DNA, 25 bp, Homo sapien
tcctaataggtttcagcaggaacat

SEQ ID NO: 1748006 - DNA, 25 bp, Homo sapien
catcagtatagccaggaatcctaat

SEQ ID NO: 1748007 - DNA, 25 bp, Homo sapien
tgtccaatgatttggaaaatcctgt

SEQ ID NO: 1748008 - DNA, 25 bp, Homo sapien
tcgctatcccattcaccgaattcat

SEQ ID NO: 1748009 - DNA, 25 bp, Homo sapien
ggaaacaagcatgccattttcaggt

SEQ ID NO: 1748010 - DNA, 25 bp, Homo sapien
tagttggaaacaagcatgccatttt

SEQ ID NO: 1748011 - DNA, 25 bp, Homo sapien
caagcatgccattttcaggtattac

SEQ ID NO: 1748012 - DNA, 25 bp, Homo sapien
gcatgccattttcaggtattacagt

SEQ ID NO: 1748013 - DNA, 25 bp, Homo sapien
gtattttaatgtcttcgtcgtttga

SEQ ID NO: 1748014 - DNA, 25 bp, Homo sapien
cgtcgtttgatgaaggattggcaga

SEQ ID NO: 1748015 - DNA, 25 bp, Homo sapien
tgtgtagtcatattaacaacaggta

SEQ ID NO: 1748016 - DNA, 25 bp, Homo sapien
gtagtcatattaacaacaggtattt

SEQ ID NO: 1748017 - DNA, 25 bp, Homo sapien
ttgaagaaggctaaccatgatgacc

SEQ ID NO: 1748018 - DNA, 25 bp, Homo sapien
ctgaattccaagtgatagcctgtga

SEQ ID NO: 1748019 - DNA, 25 bp, Homo sapien
taagtggtcctagtgaacctaaatc

SEQ ID NO: 1748020 - DNA, 25 bp, Homo sapien
tcgaggcagtcagaaaagtttcacg

SEQ ID NO: 1748021 - DNA, 25 bp, Homo sapien
tatgtcctatttgtctgaatcagca

SEQ ID NO: 1748022 - DNA, 25 bp, Homo sapien
atgtcctatttgtctgaatcagcat

SEQ ID NO: 1748023 - DNA, 25 bp, Homo sapien
ttatccgatacatgttaaagtattg

SEQ ID NO: 1748024 - DNA, 25 bp, Homo sapien
ctttatccgatacatgttaaagtat

SEQ ID NO: 1748025 - DNA, 25 bp, Homo sapien
ttcttactttagaagtctttggcat

SEQ ID NO: 1748026 - DNA, 25 bp, Homo sapien
tcttcttactttagaagtctttggc

SEQ ID NO: 1748027 - DNA, 25 bp, Homo sapien
cttcttactttagaagtctttggca

SEQ ID NO: 1748028 - DNA, 25 bp, Homo sapien
ccactgatagtgcaagtagagtaac

SEQ ID NO: 1748029 - DNA, 25 bp, Homo sapien
cagaggctccagacaattgatatac

SEQ ID NO: 1748030 - DNA, 25 bp, Homo sapien
gagtaacttgtctctgacaccttgg

SEQ ID NO: 1748031 - DNA, 25 bp, Homo sapien
gatatactgggttataaggcccaag

SEQ ID NO: 1748032 - DNA, 25 bp, Homo sapien
tctgtgtgaatcatttcctatttga

SEQ ID NO: 1748033 - DNA, 25 bp, Homo sapien
taagtccaactttctgtgtgaatca

SEQ ID NO: 1748034 - DNA, 25 bp, Homo sapien
gtaatttgtcataactgttaaacac

SEQ ID NO: 1748035 - DNA, 25 bp, Homo sapien
gttacttgctgcactaagtccaact

SEQ ID NO: 1748036 - DNA, 25 bp, Homo sapien
cttcttgctgcctctgcaatactac

SEQ ID NO: 1748037 - DNA, 25 bp, Homo sapien
taaaagtgcatcttcccttcttgct

SEQ ID NO: 1748038 - DNA, 25 bp, Homo sapien
acaaatttaaaagtgcatcttccct

SEQ ID NO: 1748039 - DNA, 25 bp, Homo sapien
aatttaaaagtgcatcttcccttct

SEQ ID NO: 1748040 - DNA, 25 bp, Homo sapien
tgatagggcctgttgataataggga

SEQ ID NO: 1748041 - DNA, 25 bp, Homo sapien
catctaaccagatggattcaggatc

SEQ ID NO: 1748042 - DNA, 25 bp, Homo sapien
tgaataaggctaggtaagtgggcac

SEQ ID NO: 1748043 - DNA, 25 bp, Homo sapien
taacagttaggttgatcacaatagc

SEQ ID NO: 1748044 - DNA, 25 bp, Homo sapien
tcattctgaggccaccagtctaaga

SEQ ID NO: 1748045 - DNA, 25 bp, Homo sapien
tgtgcacactctgtgtcttcattgc

SEQ ID NO: 1748046 - DNA, 25 bp, Homo sapien
tgagatcttagattcctgtgcacac

SEQ ID NO: 1748047 - DNA, 25 bp, Homo sapien
caccagtctaagagagatgagatct

SEQ ID NO: 1748048 - DNA, 25 bp, Homo sapien
tctacagttctacacagtctatgct

SEQ ID NO: 1748049 - DNA, 25 bp, Homo sapien
cataatctgcttactttgtactgtg

SEQ ID NO: 1748050 - DNA, 25 bp, Homo sapien
tactgtggaagaataggattgagcc

SEQ ID NO: 1748051 - DNA, 25 bp, Homo sapien
gaataggattgagccctctaattcc

SEQ ID NO: 1748052 - DNA, 25 bp, Homo sapien
caagatgctagcaggttcagtattt

SEQ ID NO: 1748053 - DNA, 25 bp, Homo sapien
tacctgagtggtactagctattctt

SEQ ID NO: 1748054 - DNA, 25 bp, Homo sapien
catttgtgcggctatagcaggatac

SEQ ID NO: 1748055 - DNA, 25 bp, Homo sapien
aaaacacagtcttctagagctgaaa

SEQ ID NO: 1748056 - DNA, 25 bp, Homo sapien
ctgtgatgaataactgtgagctgac

SEQ ID NO: 1748057 - DNA, 25 bp, Homo sapien
gcattgtacccattgtgtgagtagt

SEQ ID NO: 1748058 - DNA, 25 bp, Homo sapien
tgttgaaagtctaacctcagggtca

SEQ ID NO: 1748059 - DNA, 25 bp, Homo sapien
ccacttaacagtatgttctagaaac

SEQ ID NO: 1748060 - DNA, 25 bp, Homo sapien
ttgaaacaaccatcaacctatgtgg

SEQ ID NO: 1748061 - DNA, 25 bp, Homo sapien
ttagagtatatgcttcagaatgagg

SEQ ID NO: 1748062 - DNA, 25 bp, Homo sapien
tttctaagtgagactatcttgctgg

SEQ ID NO: 1748063 - DNA, 25 bp, Homo sapien
ctcagtttaggtgtgcgtttctaag

SEQ ID NO: 1748064 - DNA, 25 bp, Homo sapien
tactcatccagattatgcatgtatc

SEQ ID NO: 1748065 - DNA, 25 bp, Homo sapien
ggaaacatatagtgagtactcttct

SEQ ID NO: 1748066 - DNA, 25 bp, Homo sapien
attgcagagtagtagtttattgttc

SEQ ID NO: 1748067 - DNA, 25 bp, Homo sapien
aatttgatactcatccagattatgc

SEQ ID NO: 1748068 - DNA, 25 bp, Homo sapien
taaaaatccagtgcacattgctgcc

SEQ ID NO: 1748069 - DNA, 25 bp, Homo sapien
tgggcatggtacacactctatcagc

SEQ ID NO: 1748070 - DNA, 25 bp, Homo sapien
caataacagttgctcgccagtggta

SEQ ID NO: 1748071 - DNA, 25 bp, Homo sapien
aaactgcctgctcatcgggatgcca

SEQ ID NO: 1748072 - DNA, 25 bp, Homo sapien
agaagggagctaggcacataggcac

SEQ ID NO: 1748073 - DNA, 25 bp, Homo sapien
gctaaagacttcaagtggtgctccg

SEQ ID NO: 1748074 - DNA, 25 bp, Homo sapien
tccaccaaagctggtacagtacagg

SEQ ID NO: 1748075 - DNA, 25 bp, Homo sapien
gagatgggactctagcgttcttcct

SEQ ID NO: 1748076 - DNA, 25 bp, Homo sapien
agtgtgggcatacaagagagagagg

SEQ ID NO: 1748077 - DNA, 25 bp, Homo sapien
gtgggcatacaagagagagaggctg

SEQ ID NO: 1748078 - DNA, 25 bp, Homo sapien
gtgtgggcatacaagagagagaggc

SEQ ID NO: 1748079 - DNA, 25 bp, Homo sapien
tgtgggcatacaagagagagaggct

SEQ ID NO: 1748080 - DNA, 25 bp, Homo sapien
cagtgtggttggttgagaagcagaa

SEQ ID NO: 1748081 - DNA, 25 bp, Homo sapien
tgattataggtgtatctagaaagag

SEQ ID NO: 1748082 - DNA, 25 bp, Homo sapien
gaagaatgattataggtgtatctag

SEQ ID NO: 1748083 - DNA, 25 bp, Homo sapien
ctacaaaacttgccttttcccacag

SEQ ID NO: 1748084 - DNA, 25 bp, Homo sapien
acttaaaatacagacactcaggtgt

SEQ ID NO: 1748085 - DNA, 25 bp, Homo sapien
accctgcagacaatatgcaaacaga

SEQ ID NO: 1748086 - DNA, 25 bp, Homo sapien
ccctgcagacaatatgcaaacagac

SEQ ID NO: 1748087 - DNA, 25 bp, Homo sapien
tttacttaaaatacagacactcagg

SEQ ID NO: 1748088 - DNA, 25 bp, Homo sapien
ggtgaatggcaggagggttgcgcat

SEQ ID NO: 1748089 - DNA, 25 bp, Homo sapien
tgcatgatctctgagtccctctact

SEQ ID NO: 1748090 - DNA, 25 bp, Homo sapien
aggagggttgcgcatgaagccacaa

SEQ ID NO: 1748091 - DNA, 25 bp, Homo sapien
cctctacttgcaggtggcatcagaa

SEQ ID NO: 1748092 - DNA, 25 bp, Homo sapien
tcagatcaggtaacgagggtgtcag

SEQ ID NO: 1748093 - DNA, 25 bp, Homo sapien
gactgagttgaacccaacggaccat

SEQ ID NO: 1748094 - DNA, 25 bp, Homo sapien
agtttgttgacaccactgttttcag

SEQ ID NO: 1748095 - DNA, 25 bp, Homo sapien
tatgcaggctttgaatatgtcacag

SEQ ID NO: 1748096 - DNA, 25 bp, Homo sapien
cggctatgtgaatactcagctggcc

SEQ ID NO: 1748097 - DNA, 25 bp, Homo sapien
ccttaggtgggaccggagtgttctg

SEQ ID NO: 1748098 - DNA, 25 bp, Homo sapien
gagtgtgacttgaacagagcggcta

SEQ ID NO: 1748099 - DNA, 25 bp, Homo sapien
tggttcctgcggactttggaaagcc

SEQ ID NO: 1748100 - DNA, 25 bp, Homo sapien
caggtctgtgcaagagaaggctgtt

SEQ ID NO: 1748101 - DNA, 25 bp, Homo sapien
ctcccaggtctgtgcaagagaaggc

SEQ ID NO: 1748102 - DNA, 25 bp, Homo sapien
cccaggtctgtgcaagagaaggctg

SEQ ID NO: 1748103 - DNA, 25 bp, Homo sapien
tcccaggtctgtgcaagagaaggct

SEQ ID NO: 1748104 - DNA, 25 bp, Homo sapien
ggcacttctggtccatgtttctcac

SEQ ID NO: 1748105 - DNA, 25 bp, Homo sapien
cagggacagcgagaacttgatggca

SEQ ID NO: 1748106 - DNA, 25 bp, Homo sapien
aaggaaacagttcccatcctctttg

SEQ ID NO: 1748107 - DNA, 25 bp, Homo sapien
cccaggaggcaatgaaaacaggatg

SEQ ID NO: 1748108 - DNA, 25 bp, Homo sapien
cccatcctctttgccacttaggcta

SEQ ID NO: 1748109 - DNA, 25 bp, Homo sapien
tgcaggtctttttctcctgaaggaa

SEQ ID NO: 1748110 - DNA, 25 bp, Homo sapien
taagcttctgcgtgctgttctgcaa

SEQ ID NO: 1748111 - DNA, 25 bp, Homo sapien
gagggacctcataagactcattgct

SEQ ID NO: 1748112 - DNA, 25 bp, Homo sapien
tgttgtgggcagtacataagcttct

SEQ ID NO: 1748113 - DNA, 25 bp, Homo sapien
tgttcttcccgctcatcttgaggga

SEQ ID NO: 1748114 - DNA, 25 bp, Homo sapien
tgccaatattagaatctggggttcc

SEQ ID NO: 1748115 - DNA, 25 bp, Homo sapien
ctctatccagttttcctgcgcaagg

SEQ ID NO: 1748116 - DNA, 25 bp, Homo sapien
tatccagttttcctgcgcaaggctg

SEQ ID NO: 1748117 - DNA, 25 bp, Homo sapien
tttcctgcgcaaggctgccagctgt

SEQ ID NO: 1748118 - DNA, 25 bp, Homo sapien
tacacagtaaaggtgtccttggccc

SEQ ID NO: 1748119 - DNA, 25 bp, Homo sapien
tccttggcccgtggctgtagtaaag

SEQ ID NO: 1748120 - DNA, 25 bp, Homo sapien
gctgtagtaaaggtgctggcccacg

SEQ ID NO: 1748121 - DNA, 25 bp, Homo sapien
ctggaagggcttacaaaccagaagg

SEQ ID NO: 1748122 - DNA, 25 bp, Homo sapien
tacaatctttgagtggtactggtat

SEQ ID NO: 1748123 - DNA, 25 bp, Homo sapien
tggtactggtattttagaagatgga

SEQ ID NO: 1748124 - DNA, 25 bp, Homo sapien
tagaagatggatcacatgaatccct

SEQ ID NO: 1748125 - DNA, 25 bp, Homo sapien
tttacaatctttgagtggtactggt

SEQ ID NO: 1748126 - DNA, 25 bp, Homo sapien
aatatccacatgttcatagtactta

SEQ ID NO: 1748127 - DNA, 25 bp, Homo sapien
gcttattaatatccacatgttcata

SEQ ID NO: 1748128 - DNA, 25 bp, Homo sapien
ttaatatccacatgttcatagtact

SEQ ID NO: 1748129 - DNA, 25 bp, Homo sapien
tattaatatccacatgttcatagta

SEQ ID NO: 1748130 - DNA, 25 bp, Homo sapien
tcattggatcgaggagagacagctc

SEQ ID NO: 1748131 - DNA, 25 bp, Homo sapien
taattcaatgaaagagcattgttca

SEQ ID NO: 1748132 - DNA, 25 bp, Homo sapien
gcattgttcattggatcgaggagag

SEQ ID NO: 1748133 - DNA, 25 bp, Homo sapien
aaagagcattgttcattggatcgag

SEQ ID NO: 1748134 - DNA, 25 bp, Homo sapien
ataaatagccatcttgttctcagtg

SEQ ID NO: 1748135 - DNA, 25 bp, Homo sapien
cataaatagccatcttgttctcagt

SEQ ID NO: 1748136 - DNA, 25 bp, Homo sapien
tttaggaactgtggaaaatgcctat

SEQ ID NO: 1748137 - DNA, 25 bp, Homo sapien
cactaccatcctgctattcctgaat

SEQ ID NO: 1748138 - DNA, 25 bp, Homo sapien
aattcttgccctgttagtttccaca

SEQ ID NO: 1748139 - DNA, 25 bp, Homo sapien
agaagggttccttaggtgctcaaca

SEQ ID NO: 1748140 - DNA, 25 bp, Homo sapien
tttcctgcgaaagcccaattagagt

SEQ ID NO: 1748141 - DNA, 25 bp, Homo sapien
gcctgagaagatcgcggaacatgac

SEQ ID NO: 1748142 - DNA, 25 bp, Homo sapien
caattagagtgcgacaaggcaggcc

SEQ ID NO: 1748143 - DNA, 25 bp, Homo sapien
gagtgttgttatcggaagctccgcc

SEQ ID NO: 1748144 - DNA, 25 bp, Homo sapien
ctcccgctgcgggacggagacgaca

SEQ ID NO: 1748145 - DNA, 25 bp, Homo sapien
aaaagccaagcggcgcaaggcggcc

SEQ ID NO: 1748146 - DNA, 25 bp, Homo sapien
gctgcgggacggagacgacagtcat

SEQ ID NO: 1748147 - DNA, 25 bp, Homo sapien
aggcggccacccaggacgagcggct

SEQ ID NO: 1748148 - DNA, 25 bp, Homo sapien
tgagggaggaagagggtcgggggca

SEQ ID NO: 1748149 - DNA, 25 bp, Homo sapien
ggtaaaggaggcggagccgtggtca

SEQ ID NO: 1748150 - DNA, 25 bp, Homo sapien
aaaggaggcggagccgtggtcacca

SEQ ID NO: 1748151 - DNA, 25 bp, Homo sapien
gaggaagagggtcgggggcagtgcc

SEQ ID NO: 1748152 - DNA, 25 bp, Homo sapien
ccgcttcttcggcgctgcccgagga

SEQ ID NO: 1748153 - DNA, 25 bp, Homo sapien
tgcccgaggagtgcctcccgccacg

SEQ ID NO: 1748154 - DNA, 25 bp, Homo sapien
gctggggggtcagacacgggccatc

SEQ ID NO: 1748155 - DNA, 25 bp, Homo sapien
tggggggtcagacacgggccatctc

SEQ ID NO: 1748156 - DNA, 25 bp, Homo sapien
tgcaggactcggggccaaggcggcg

SEQ ID NO: 1748157 - DNA, 25 bp, Homo sapien
gactcggccggtgctgctggtactg

SEQ ID NO: 1748158 - DNA, 25 bp, Homo sapien
tccggccgccctccagactcggccg

SEQ ID NO: 1748159 - DNA, 25 bp, Homo sapien
cgggccgcagcggggcaaggtcggg

SEQ ID NO: 1748160 - DNA, 25 bp, Homo sapien
caataaggttcactgccagagctcc

SEQ ID NO: 1748161 - DNA, 25 bp, Homo sapien
aaaatcagttttgtgcggctcctgc

SEQ ID NO: 1748162 - DNA, 25 bp, Homo sapien
caaagcaagaatggagcgggcgtca

SEQ ID NO: 1748163 - DNA, 25 bp, Homo sapien
caatagcactgcaatcagacgggct

SEQ ID NO: 1748164 - DNA, 25 bp, Homo sapien
caagcagatcgctcaagctcaagga

SEQ ID NO: 1748165 - DNA, 25 bp, Homo sapien
ttaccagtatgcaacgtgaaccagt

SEQ ID NO: 1748166 - DNA, 25 bp, Homo sapien
taatgagctctcttccaaatacgag

SEQ ID NO: 1748167 - DNA, 25 bp, Homo sapien
tagtaactgcttcaagaacgctgct

SEQ ID NO: 1748168 - DNA, 25 bp, Homo sapien
ttgtgacaacacgtatgtagctggg

SEQ ID NO: 1748169 - DNA, 25 bp, Homo sapien
cagacactaggcactactagaaggg

SEQ ID NO: 1748170 - DNA, 25 bp, Homo sapien
taccctagacgaattaatgcagaaa

SEQ ID NO: 1748171 - DNA, 25 bp, Homo sapien
cacttacaagtgaatttgggagcta

SEQ ID NO: 1748172 - DNA, 25 bp, Homo sapien
gaaggtggatcactaaactttgccc

SEQ ID NO: 1748173 - DNA, 25 bp, Homo sapien
gaggagcgtttttaagtgtactgcc

SEQ ID NO: 1748174 - DNA, 25 bp, Homo sapien
catcagctccctgttttggttggaa

SEQ ID NO: 1748175 - DNA, 25 bp, Homo sapien
caagtgtataccatgaacaagctgg

SEQ ID NO: 1748176 - DNA, 25 bp, Homo sapien
tataatatacctctcaagtatgaac

SEQ ID NO: 1748177 - DNA, 25 bp, Homo sapien
cacataatacatggtatacagtatt

SEQ ID NO: 1748178 - DNA, 25 bp, Homo sapien
ttttctcaagagtccagggatatgg

SEQ ID NO: 1748179 - DNA, 25 bp, Homo sapien
atgttgcaacaaggcaaatttccat

SEQ ID NO: 1748180 - DNA, 25 bp, Homo sapien
tatacaaaacacctgcaatgtgggc

SEQ ID NO: 1748181 - DNA, 25 bp, Homo sapien
ggcctgatcctagctcaattgcaat

SEQ ID NO: 1748182 - DNA, 25 bp, Homo sapien
gagatgtcagaactcactgtagtca

SEQ ID NO: 1748183 - DNA, 25 bp, Homo sapien
tgtgggcagggcaaaatacatactt

SEQ ID NO: 1748184 - DNA, 25 bp, Homo sapien
gcatctttttacaccaccatctgct

SEQ ID NO: 1748185 - DNA, 25 bp, Homo sapien
gtgcatctttttacaccaccatctg

SEQ ID NO: 1748186 - DNA, 25 bp, Homo sapien
catctttttacaccaccatctgctc

SEQ ID NO: 1748187 - DNA, 25 bp, Homo sapien
tgcatctttttacaccaccatctgc

SEQ ID NO: 1748188 - DNA, 25 bp, Homo sapien
ttgctcaactttggaagggattgtt

SEQ ID NO: 1748189 - DNA, 25 bp, Homo sapien
cttatccaaaggtttgatgggacca

SEQ ID NO: 1748190 - DNA, 25 bp, Homo sapien
tccatgttgtcaagtaaagtgaaat

SEQ ID NO: 1748191 - DNA, 25 bp, Homo sapien
cttactgttagtaggcaattgtgag

SEQ ID NO: 1748192 - DNA, 25 bp, Homo sapien
cttgcagtttgttattccactttca

SEQ ID NO: 1748193 - DNA, 25 bp, Homo sapien
gcttgcagtttgttattccactttc

SEQ ID NO: 1748194 - DNA, 25 bp, Homo sapien
ttgcagtttgttattccactttcat

SEQ ID NO: 1748195 - DNA, 25 bp, Homo sapien
gttcacccctcattagtaaatctgg

SEQ ID NO: 1748196 - DNA, 25 bp, Homo sapien
cccctcattagtaaatctggtggtc

SEQ ID NO: 1748197 - DNA, 25 bp, Homo sapien
ctcattagtaaatctggtggtcccc

SEQ ID NO: 1748198 - DNA, 25 bp, Homo sapien
ccagttcacccctcattagtaaatc

SEQ ID NO: 1748199 - DNA, 25 bp, Homo sapien
gaactgatccctatatgtctagcaa

SEQ ID NO: 1748200 - DNA, 25 bp, Homo sapien
tgtttgcaggtctcgacacaggcga

SEQ ID NO: 1748201 - DNA, 25 bp, Homo sapien
gcggtctacctcagcaaggcagtca

SEQ ID NO: 1748202 - DNA, 25 bp, Homo sapien
tataactcagaccaaatatgcagtg

SEQ ID NO: 1748203 - DNA, 25 bp, Homo sapien
caaaagtaagtgtgactgaatgcta

SEQ ID NO: 1748204 - DNA, 25 bp, Homo sapien
tgcacaaggtgatcgcaaaagtaag

SEQ ID NO: 1748205 - DNA, 25 bp, Homo sapien
tcaaagtgtccttaacagctagtca

SEQ ID NO: 1748206 - DNA, 25 bp, Homo sapien
tatgtggccgtcagattgaaataca

SEQ ID NO: 1748207 - DNA, 25 bp, Homo sapien
aatttatatacataaggaagtttag

SEQ ID NO: 1748208 - DNA, 25 bp, Homo sapien
taatttccattatagctaggtttaa

SEQ ID NO: 1748209 - DNA, 25 bp, Homo sapien
ccattatagctaggtttaatattat

SEQ ID NO: 1748210 - DNA, 25 bp, Homo sapien
tattacaaaccagtatatgtaattc

SEQ ID NO: 1748211 - DNA, 25 bp, Homo sapien
tctggtctacttacagacggtgctg

SEQ ID NO: 1748212 - DNA, 25 bp, Homo sapien
tgagaacgttttgtaccataatgcg

SEQ ID NO: 1748213 - DNA, 25 bp, Homo sapien
gagtgcccgcgtttcagctcctttg

SEQ ID NO: 1748214 - DNA, 25 bp, Homo sapien
cataatgcgtactcgggccttacag

SEQ ID NO: 1748215 - DNA, 25 bp, Homo sapien
ttcatcaggaacgtcgcggacgcca

SEQ ID NO: 1748216 - DNA, 25 bp, Homo sapien
tcgcggacgccaccaggtgaacggc

SEQ ID NO: 1748217 - DNA, 25 bp, Homo sapien
ctccctgttcatcaggaacgtcgcg

SEQ ID NO: 1748218 - DNA, 25 bp, Homo sapien
gaacgtcgcggacgccaccaggtga

SEQ ID NO: 1748219 - DNA, 25 bp, Homo sapien
aaagcctaccacttctgcgagcgaa

SEQ ID NO: 1748220 - DNA, 25 bp, Homo sapien
cacacttaggagttgcctggttaca

SEQ ID NO: 1748221 - DNA, 25 bp, Homo sapien
caggagcaaggcgaagacgagtcta

SEQ ID NO: 1748222 - DNA, 25 bp, Homo sapien
ctagaagggtgaccacgacatgtat

SEQ ID NO: 1748223 - DNA, 25 bp, Homo sapien
ttttaagaaaggataggccatggca

SEQ ID NO: 1748224 - DNA, 25 bp, Homo sapien
aaagtgacaggccttctaagttgac

SEQ ID NO: 1748225 - DNA, 25 bp, Homo sapien
tctcactagaggaaagctagcacca

SEQ ID NO: 1748226 - DNA, 25 bp, Homo sapien
catagattctccaactgattgtgtg

SEQ ID NO: 1748227 - DNA, 25 bp, Homo sapien
taatattggtgatagagctttcttt

SEQ ID NO: 1748228 - DNA, 25 bp, Homo sapien
ctctccttctgtctataaacctttt

SEQ ID NO: 1748229 - DNA, 25 bp, Homo sapien
tattggtgatagagctttcttttta

SEQ ID NO: 1748230 - DNA, 25 bp, Homo sapien
aaattaatattggtgatagagcttt

SEQ ID NO: 1748231 - DNA, 25 bp, Homo sapien
cccggctgcattgtagtggcatgat

SEQ ID NO: 1748232 - DNA, 25 bp, Homo sapien
gccccggctgcattgtagtggcatg

SEQ ID NO: 1748233 - DNA, 25 bp, Homo sapien
taagacaggtctttctatgtccctc

SEQ ID NO: 1748234 - DNA, 25 bp, Homo sapien
atgtccctcagcctggaatgccgtg

SEQ ID NO: 1748235 - DNA, 25 bp, Homo sapien
gccctgtagttttccacattgtgga

SEQ ID NO: 1748236 - DNA, 25 bp, Homo sapien
gaagaaactttgtagcttgccctgt

SEQ ID NO: 1748237 - DNA, 25 bp, Homo sapien
gaactagagttgtcaccagccacat

SEQ ID NO: 1748238 - DNA, 25 bp, Homo sapien
caggaataacccctcaatgagtgtc

SEQ ID NO: 1748239 - DNA, 25 bp, Homo sapien
tacccgagtgttgttgttggcaagt

SEQ ID NO: 1748240 - DNA, 25 bp, Homo sapien
attagcttataattgtacccgagtg

SEQ ID NO: 1748241 - DNA, 25 bp, Homo sapien
tgttggcaagtggtccaatttcttt

SEQ ID NO: 1748242 - DNA, 25 bp, Homo sapien
agtggcagcagttgatgctctcatt

SEQ ID NO: 1748243 - DNA, 25 bp, Homo sapien
tggtacctgatgacctgaggctccc

SEQ ID NO: 1748244 - DNA, 25 bp, Homo sapien
tggcccacaaagtgaaggcagtgac

SEQ ID NO: 1748245 - DNA, 25 bp, Homo sapien
taaagccctgaatgtcctggtacct

SEQ ID NO: 1748246 - DNA, 25 bp, Homo sapien
cagtgagattagctgctctgttctc

SEQ ID NO: 1748247 - DNA, 25 bp, Homo sapien
ctggctcggccgcaggtagcgaccg

SEQ ID NO: 1748248 - DNA, 25 bp, Homo sapien
ctcggccgcaggtagcgaccgcccg

SEQ ID NO: 1748249 - DNA, 25 bp, Homo sapien
cgcaggtagcgaccgcccgcgcacg

SEQ ID NO: 1748250 - DNA, 25 bp, Homo sapien
gccgcaggtagcgaccgcccgcgca

SEQ ID NO: 1748251 - DNA, 25 bp, Homo sapien
cccgctcgaagaagtgcgtcagcac

SEQ ID NO: 1748252 - DNA, 25 bp, Homo sapien
gcagcttcagtagctccagctcgga

SEQ ID NO: 1748253 - DNA, 25 bp, Homo sapien
tgggcatggtgctcctcgtaggcca

SEQ ID NO: 1748254 - DNA, 25 bp, Homo sapien
cgacctcagcgatgaggttgtggcc

SEQ ID NO: 1748255 - DNA, 25 bp, Homo sapien
ggaggcggcctggggaggccctcta

SEQ ID NO: 1748256 - DNA, 25 bp, Homo sapien
ttcacgggcggaggcggcctgggga

SEQ ID NO: 1748257 - DNA, 25 bp, Homo sapien
cttcacgggcggaggcggcctgggg

SEQ ID NO: 1748258 - DNA, 25 bp, Homo sapien
gcggcctggggaggccctctaaggc

SEQ ID NO: 1748259 - DNA, 25 bp, Homo sapien
tcatgttcagccatatctggtagat

SEQ ID NO: 1748260 - DNA, 25 bp, Homo sapien
ttgtaaaagcccctgcttcaattaa

SEQ ID NO: 1748261 - DNA, 25 bp, Homo sapien
tatctggtagataagcagcattctc

SEQ ID NO: 1748262 - DNA, 25 bp, Homo sapien
ggtgggccataaaaacaacatcaag

SEQ ID NO: 1748263 - DNA, 25 bp, Homo sapien
ctgtctgaacacagacagattgtta

SEQ ID NO: 1748264 - DNA, 25 bp, Homo sapien
ccttcccagggataagaagcagaat

SEQ ID NO: 1748265 - DNA, 25 bp, Homo sapien
cagattgttataggccagcacagca

SEQ ID NO: 1748266 - DNA, 25 bp, Homo sapien
gaacacagacagattgttataggcc

SEQ ID NO: 1748267 - DNA, 25 bp, Homo sapien
gaataagagggaatgatattgggtt

SEQ ID NO: 1748268 - DNA, 25 bp, Homo sapien
gagggaatgatattgggttttacac

SEQ ID NO: 1748269 - DNA, 25 bp, Homo sapien
ttcattgagggtgcacggaagtaat

SEQ ID NO: 1748270 - DNA, 25 bp, Homo sapien
ggtgcacggaagtaatagattaatt

SEQ ID NO: 1748271 - DNA, 25 bp, Homo sapien
aaatgaactctattcctagctttct

SEQ ID NO: 1748272 - DNA, 25 bp, Homo sapien
gctttccataggctcttattgggaa

SEQ ID NO: 1748273 - DNA, 25 bp, Homo sapien
tccataggctcttattgggaagaac

SEQ ID NO: 1748274 - DNA, 25 bp, Homo sapien
tataggctttccataggctcttatt

SEQ ID NO: 1748275 - DNA, 25 bp, Homo sapien
cagtatgattcaaggcattagatcc

SEQ ID NO: 1748276 - DNA, 25 bp, Homo sapien
agcagcttcagtgtactgttcagta

SEQ ID NO: 1748277 - DNA, 25 bp, Homo sapien
cattagatccaatgtgaaaatatgg

SEQ ID NO: 1748278 - DNA, 25 bp, Homo sapien
cagtgtactgttcagtatgattcaa

SEQ ID NO: 1748279 - DNA, 25 bp, Homo sapien
aaataacatccagtgccgtcattgc

SEQ ID NO: 1748280 - DNA, 25 bp, Homo sapien
ttattctactgcatttacaaactgt

SEQ ID NO: 1748281 - DNA, 25 bp, Homo sapien
ttaaaaataacatccagtgccgtca

SEQ ID NO: 1748282 - DNA, 25 bp, Homo sapien
ggccgtccgcagagtgtagaactga

SEQ ID NO: 1748283 - DNA, 25 bp, Homo sapien
tggtccatccacgaagctactttaa

SEQ ID NO: 1748284 - DNA, 25 bp, Homo sapien
tccacgttgtacaagagatgactgt

SEQ ID NO: 1748285 - DNA, 25 bp, Homo sapien
ttacacccagtgcttagaaataggc

SEQ ID NO: 1748286 - DNA, 25 bp, Homo sapien
gcgagcccctgtctctattatgtaa

SEQ ID NO: 1748287 - DNA, 25 bp, Homo sapien
tatttggataacaaagggtctccaa

SEQ ID NO: 1748288 - DNA, 25 bp, Homo sapien
ttatttggataacaaagggtctcca

SEQ ID NO: 1748289 - DNA, 25 bp, Homo sapien
ccttataaagggttgctatctagta

SEQ ID NO: 1748290 - DNA, 25 bp, Homo sapien
agatgttccctcagtcccaatgttg

SEQ ID NO: 1748291 - DNA, 25 bp, Homo sapien
gtgagaacttaccacccaccacaag

SEQ ID NO: 1748292 - DNA, 25 bp, Homo sapien
cctcaactatataattggactgcaa

SEQ ID NO: 1748293 - DNA, 25 bp, Homo sapien
tgatatcttcactgaggaacttggg

SEQ ID NO: 1748294 - DNA, 25 bp, Homo sapien
tgtgtcatagaggtaactaggctag

SEQ ID NO: 1748295 - DNA, 25 bp, Homo sapien
cataatttgggactacttgtaactc

SEQ ID NO: 1748296 - DNA, 25 bp, Homo sapien
gaaaagctctttagattggcgcaat

SEQ ID NO: 1748297 - DNA, 25 bp, Homo sapien
cggcctgaatgtgcaggatctccct

SEQ ID NO: 1748298 - DNA, 25 bp, Homo sapien
gccggcctgaatgtgcaggatctcc

SEQ ID NO: 1748299 - DNA, 25 bp, Homo sapien
ggcctgaatgtgcaggatctccctc

SEQ ID NO: 1748300 - DNA, 25 bp, Homo sapien
tggccggcctgaatgtgcaggatct

SEQ ID NO: 1748301 - DNA, 25 bp, Homo sapien
ttgtagtagatgctgatctgctcca

SEQ ID NO: 1748302 - DNA, 25 bp, Homo sapien
tccagctccaagtccgagttcccca

SEQ ID NO: 1748303 - DNA, 25 bp, Homo sapien
gaagaggcctcgttgtagtagatgc

SEQ ID NO: 1748304 - DNA, 25 bp, Homo sapien
gagttccccacgtagttgccgctgg

SEQ ID NO: 1748305 - DNA, 25 bp, Homo sapien
ctccaggtcgacgaatggcccgagg

SEQ ID NO: 1748306 - DNA, 25 bp, Homo sapien
tccaggtcgacgaatggcccgaggc

SEQ ID NO: 1748307 - DNA, 25 bp, Homo sapien
aggtcgacgaatggcccgaggcaca

SEQ ID NO: 1748308 - DNA, 25 bp, Homo sapien
ggctccaggtcgacgaatggcccga

SEQ ID NO: 1748309 - DNA, 25 bp, Homo sapien
atgtccaaaaggccccgagccgaca

SEQ ID NO: 1748310 - DNA, 25 bp, Homo sapien
ctggcccagttattgccggccccac

SEQ ID NO: 1748311 - DNA, 25 bp, Homo sapien
tccgtgtagtgacccctggcccagt

SEQ ID NO: 1748312 - DNA, 25 bp, Homo sapien
aaagattaaattgtcaggcctgaaa

SEQ ID NO: 1748313 - DNA, 25 bp, Homo sapien
tcttccgcacatccaggagggaatc

SEQ ID NO: 1748314 - DNA, 25 bp, Homo sapien
cttccgcacatccaggagggaatcc

SEQ ID NO: 1748315 - DNA, 25 bp, Homo sapien
tccgcacatccaggagggaatccac

SEQ ID NO: 1748316 - DNA, 25 bp, Homo sapien
ttccgcacatccaggagggaatcca

SEQ ID NO: 1748317 - DNA, 25 bp, Homo sapien
ttgtgcccccgcccagcgagagggt

SEQ ID NO: 1748318 - DNA, 25 bp, Homo sapien
gagcagcgtgcccatacccgagctt

SEQ ID NO: 1748319 - DNA, 25 bp, Homo sapien
gcagcgtgcccatacccgagcttgt

SEQ ID NO: 1748320 - DNA, 25 bp, Homo sapien
agcgtgcccatacccgagcttgtgc

SEQ ID NO: 1748321 - DNA, 25 bp, Homo sapien
agatgtcctagagcgcctccttgtt

SEQ ID NO: 1748322 - DNA, 25 bp, Homo sapien
ctgagggtgctgacgcagatgtcct

SEQ ID NO: 1748323 - DNA, 25 bp, Homo sapien
ctagagcgcctccttgttgatgcag

SEQ ID NO: 1748324 - DNA, 25 bp, Homo sapien
tgctgacgcagatgtcctagagcgc

SEQ ID NO: 1748325 - DNA, 25 bp, Homo sapien
aggtagtgatcctgctcatggtggc

SEQ ID NO: 1748326 - DNA, 25 bp, Homo sapien
ccgggaagcacaaggaggtagtgat

SEQ ID NO: 1748327 - DNA, 25 bp, Homo sapien
cacaaggaggtagtgatcctgctca

SEQ ID NO: 1748328 - DNA, 25 bp, Homo sapien
tagtgatcctgctcatggtggccaa

SEQ ID NO: 1748329 - DNA, 25 bp, Homo sapien
cttcatgcctggcatgaagaagtgc

SEQ ID NO: 1748330 - DNA, 25 bp, Homo sapien
ctgaggggtgagctcgggcacggtc

SEQ ID NO: 1748331 - DNA, 25 bp, Homo sapien
gaggggtgagctcgggcacggtcag

SEQ ID NO: 1748332 - DNA, 25 bp, Homo sapien
gtgagctcgggcacggtcagggccc

SEQ ID NO: 1748333 - DNA, 25 bp, Homo sapien
gggtgagctcgggcacggtcagggc

SEQ ID NO: 1748334 - DNA, 25 bp, Homo sapien
gccgtggtgccggtcgcgggcagcc

SEQ ID NO: 1748335 - DNA, 25 bp, Homo sapien
cgtggtgccggtcgcgggcagccat

SEQ ID NO: 1748336 - DNA, 25 bp, Homo sapien
agcagccgtggtgccggtcgcgggc

SEQ ID NO: 1748337 - DNA, 25 bp, Homo sapien
aggtagcagccgtggtgccggtcgc

SEQ ID NO: 1748338 - DNA, 25 bp, Homo sapien
atgcccgtgctgttgctgatgaggg

SEQ ID NO: 1748339 - DNA, 25 bp, Homo sapien
gggtggaagacatcttgaggctggg

SEQ ID NO: 1748340 - DNA, 25 bp, Homo sapien
gagggtggaagacatcttgaggctg

SEQ ID NO: 1748341 - DNA, 25 bp, Homo sapien
agggtggaagacatcttgaggctgg

SEQ ID NO: 1748342 - DNA, 25 bp, Homo sapien
tcctcatctgcgaacatctcaccct

SEQ ID NO: 1748343 - DNA, 25 bp, Homo sapien
tcatctgcgaacatctcaccctcct

SEQ ID NO: 1748344 - DNA, 25 bp, Homo sapien
catctgcgaacatctcaccctcctc

SEQ ID NO: 1748345 - DNA, 25 bp, Homo sapien
cctcatctgcgaacatctcaccctc

SEQ ID NO: 1748346 - DNA, 25 bp, Homo sapien
gtataatggaaaaaccgaacagtca

SEQ ID NO: 1748347 - DNA, 25 bp, Homo sapien
ccatatgtgtctagtggccacttta

SEQ ID NO: 1748348 - DNA, 25 bp, Homo sapien
tattgatcagtgcagctttaggcct

SEQ ID NO: 1748349 - DNA, 25 bp, Homo sapien
tgttcagtacagtagcaacgagctg

SEQ ID NO: 1748350 - DNA, 25 bp, Homo sapien
tattctggcaagtaaaggctgagga

SEQ ID NO: 1748351 - DNA, 25 bp, Homo sapien
ttaagttgtcaatctgatccccagt

SEQ ID NO: 1748352 - DNA, 25 bp, Homo sapien
cccagtgtgaggttaatgagcaaaa

SEQ ID NO: 1748353 - DNA, 25 bp, Homo sapien
aagctgttgggaacgccttctgaac

SEQ ID NO: 1748354 - DNA, 25 bp, Homo sapien
tctcctagtaagaagtcaccgacgg

SEQ ID NO: 1748355 - DNA, 25 bp, Homo sapien
gaattgtccacctagtcagagccca

SEQ ID NO: 1748356 - DNA, 25 bp, Homo sapien
tagatcggtccacgaaagttagccc

SEQ ID NO: 1748357 - DNA, 25 bp, Homo sapien
gattgtgtgctaggaacagccttcc

SEQ ID NO: 1748358 - DNA, 25 bp, Homo sapien
taagaatacctccatgagccctcga

SEQ ID NO: 1748359 - DNA, 25 bp, Homo sapien
gagacaaccacactgatcatggtgg

SEQ ID NO: 1748360 - DNA, 25 bp, Homo sapien
tgtcactggatgctacttgaagagg

SEQ ID NO: 1748361 - DNA, 25 bp, Homo sapien
cattggcagctcttatattccgacg

SEQ ID NO: 1748362 - DNA, 25 bp, Homo sapien
gccaaaaatttacttagacttgctc

SEQ ID NO: 1748363 - DNA, 25 bp, Homo sapien
caaaaatttacttagacttgctctg

SEQ ID NO: 1748364 - DNA, 25 bp, Homo sapien
gagccaaaaatttacttagacttgc

SEQ ID NO: 1748365 - DNA, 25 bp, Homo sapien
agagccaaaaatttacttagacttg

SEQ ID NO: 1748366 - DNA, 25 bp, Homo sapien
gcgtctggcgccactcgcggctcag

SEQ ID NO: 1748367 - DNA, 25 bp, Homo sapien
gctcagctcctggtttcgcgctcta

SEQ ID NO: 1748368 - DNA, 25 bp, Homo sapien
gcctgcccgggaagtacaggccgca

SEQ ID NO: 1748369 - DNA, 25 bp, Homo sapien
cgcagggcgaggtggccgggtggac

SEQ ID NO: 1748370 - DNA, 25 bp, Homo sapien
gacagctttgcagccggagcccggc

SEQ ID NO: 1748371 - DNA, 25 bp, Homo sapien
ggcgccccctccgagctctcgaggg

SEQ ID NO: 1748372 - DNA, 25 bp, Homo sapien
ccctccgagctctcgagggcccggg

SEQ ID NO: 1748373 - DNA, 25 bp, Homo sapien
ccgcgcgcgggcagccggctgcgga

SEQ ID NO: 1748374 - DNA, 25 bp, Homo sapien
ctcgcaacagcaactgaatctaaaa

SEQ ID NO: 1748375 - DNA, 25 bp, Homo sapien
cccgcccctcgcaacagcaactgaa

SEQ ID NO: 1748376 - DNA, 25 bp, Homo sapien
gcaacagcaactgaatctaaaaaca

SEQ ID NO: 1748377 - DNA, 25 bp, Homo sapien
cgcccctcgcaacagcaactgaatc

SEQ ID NO: 1748378 - DNA, 25 bp, Homo sapien
tcagctatcaaataggaacgcatta

SEQ ID NO: 1748379 - DNA, 25 bp, Homo sapien
caaataggaacgcattatatacagc

SEQ ID NO: 1748380 - DNA, 25 bp, Homo sapien
ctgtggtagggcctactgcacaaat

SEQ ID NO: 1748381 - DNA, 25 bp, Homo sapien
gtagggcctactgcacaaattaggg

SEQ ID NO: 1748382 - DNA, 25 bp, Homo sapien
gtctcccaggttgatctcggctcac

SEQ ID NO: 1748383 - DNA, 25 bp, Homo sapien
ctgtctcccaggttgatctcggctc

SEQ ID NO: 1748384 - DNA, 25 bp, Homo sapien
accacacctgccagccacttctctt

SEQ ID NO: 1748385 - DNA, 25 bp, Homo sapien
tcttttctctgtaaatgtctctgct

SEQ ID NO: 1748386 - DNA, 25 bp, Homo sapien
ttcctcaaaaggagcagggcagtcc

SEQ ID NO: 1748387 - DNA, 25 bp, Homo sapien
caaatcctaaatacatggctacagc

SEQ ID NO: 1748388 - DNA, 25 bp, Homo sapien
tagggattgagaacttgccttgcag

SEQ ID NO: 1748389 - DNA, 25 bp, Homo sapien
tacatacgggttatatgccaactct

SEQ ID NO: 1748390 - DNA, 25 bp, Homo sapien
gattcctactccgaaacctggatgg

SEQ ID NO: 1748391 - DNA, 25 bp, Homo sapien
gatttccagagctatatcctgttgg

SEQ ID NO: 1748392 - DNA, 25 bp, Homo sapien
ttgccaacagacctgacacttaggg

SEQ ID NO: 1748393 - DNA, 25 bp, Homo sapien
gactttatcctcaagctagagacac

SEQ ID NO: 1748394 - DNA, 25 bp, Homo sapien
taaaatctcgaaaggttcagaatcg

SEQ ID NO: 1748395 - DNA, 25 bp, Homo sapien
taatgggacccctagagtgctgctg

SEQ ID NO: 1748396 - DNA, 25 bp, Homo sapien
tgtcttttgaaatcagaccttatcc

SEQ ID NO: 1748397 - DNA, 25 bp, Homo sapien
aaggttcagaatcggctgcagaaga

SEQ ID NO: 1748398 - DNA, 25 bp, Homo sapien
ttcataatctgtgtgatccactggg

SEQ ID NO: 1748399 - DNA, 25 bp, Homo sapien
tcataatctgtgtgatccactgggt

SEQ ID NO: 1748400 - DNA, 25 bp, Homo sapien
attcataatctgtgtgatccactgg

SEQ ID NO: 1748401 - DNA, 25 bp, Homo sapien
tgatagtgcctgatttagcagtggg

SEQ ID NO: 1748402 - DNA, 25 bp, Homo sapien
agcaaagtgagatcctgagctgagg

SEQ ID NO: 1748403 - DNA, 25 bp, Homo sapien
aggcccagggttatggcccaggaag

SEQ ID NO: 1748404 - DNA, 25 bp, Homo sapien
tagcagtgggggtgacattgcagct

SEQ ID NO: 1748405 - DNA, 25 bp, Homo sapien
ctagagctaccttccgtaattaaat

SEQ ID NO: 1748406 - DNA, 25 bp, Homo sapien
ttttattggagtctctagagctacc

SEQ ID NO: 1748407 - DNA, 25 bp, Homo sapien
ggctttcagccgttttattggagtc

SEQ ID NO: 1748408 - DNA, 25 bp, Homo sapien
ttttgtagataaaggctttcagccg

SEQ ID NO: 1748409 - DNA, 25 bp, Homo sapien
ggagtctccgagaggccgcagattt

SEQ ID NO: 1748410 - DNA, 25 bp, Homo sapien
caaacaccgttgtcaggacacctta

SEQ ID NO: 1748411 - DNA, 25 bp, Homo sapien
agatttcccgggatccacgcaaaca

SEQ ID NO: 1748412 - DNA, 25 bp, Homo sapien
ggacaccttatctgctctcggtatc

SEQ ID NO: 1748413 - DNA, 25 bp, Homo sapien
gccggcggcggcgtgactggcaggg

SEQ ID NO: 1748414 - DNA, 25 bp, Homo sapien
agctgcgggtgtcagtctcgccccg

SEQ ID NO: 1748415 - DNA, 25 bp, Homo sapien
tgcgggtgtcagtctcgccccgcgt

SEQ ID NO: 1748416 - DNA, 25 bp, Homo sapien
tggcagggtcgtcggcagctgcggg

SEQ ID NO: 1748417 - DNA, 25 bp, Homo sapien
caagctctccgcagcgtctggcggt

SEQ ID NO: 1748418 - DNA, 25 bp, Homo sapien
tgggacctctctcccagaacggtgc

SEQ ID NO: 1748419 - DNA, 25 bp, Homo sapien
ctgttgaagccagggtcagatgtcg

SEQ ID NO: 1748420 - DNA, 25 bp, Homo sapien
tctcccagaacggtgctgttgaagc

SEQ ID NO: 1748421 - DNA, 25 bp, Homo sapien
gcgcgcgcttctgcccctttcagag

SEQ ID NO: 1748422 - DNA, 25 bp, Homo sapien
ctttcagagccggtgcctcccgcgc

SEQ ID NO: 1748423 - DNA, 25 bp, Homo sapien
gggagtaagcgtctgggctggagga

SEQ ID NO: 1748424 - DNA, 25 bp, Homo sapien
gagggagtaagcgtctgggctggag

SEQ ID NO: 1748425 - DNA, 25 bp, Homo sapien
tagcggactacggagacgggcccga

SEQ ID NO: 1748426 - DNA, 25 bp, Homo sapien
tccgacgccgatccggacagcggca

SEQ ID NO: 1748427 - DNA, 25 bp, Homo sapien
ccgtgcgcgagccaccgacttggag

SEQ ID NO: 1748428 - DNA, 25 bp, Homo sapien
cgacctcgagctgccaaatgaggga

SEQ ID NO: 1748429 - DNA, 25 bp, Homo sapien
cgccaggcagcgctctcggctcctg

SEQ ID NO: 1748430 - DNA, 25 bp, Homo sapien
acgtccgcgccgcagggaccaaggc

SEQ ID NO: 1748431 - DNA, 25 bp, Homo sapien
cggctcctgcgggttacctgtggcc

SEQ ID NO: 1748432 - DNA, 25 bp, Homo sapien
ctgcgggttacctgtggccgagccc

SEQ ID NO: 1748433 - DNA, 25 bp, Homo sapien
tttgccttcctacaattcgccatcg

SEQ ID NO: 1748434 - DNA, 25 bp, Homo sapien
tcgccatcgctaaagactgaaggtc

SEQ ID NO: 1748435 - DNA, 25 bp, Homo sapien
agggctcccagctgagaactcacaa

SEQ ID NO: 1748436 - DNA, 25 bp, Homo sapien
taaaattaggatttaaggccaggca

SEQ ID NO: 1748437 - DNA, 25 bp, Homo sapien
acagagataattcaatgcacaataa

SEQ ID NO: 1748438 - DNA, 25 bp, Homo sapien
tattggatcaaggtccactctactg

SEQ ID NO: 1748439 - DNA, 25 bp, Homo sapien
gaaagggtgggtatcaatgtatgta

SEQ ID NO: 1748440 - DNA, 25 bp, Homo sapien
gattagctctgtagagatcccatct

SEQ ID NO: 1748441 - DNA, 25 bp, Homo sapien
ttatcatattgatgctggtttggac

SEQ ID NO: 1748442 - DNA, 25 bp, Homo sapien
catattgatgctggtttggacaccc

SEQ ID NO: 1748443 - DNA, 25 bp, Homo sapien
ggtcccccactcctgagaggttatc

SEQ ID NO: 1748444 - DNA, 25 bp, Homo sapien
gaggttatcatattgatgctggttt

SEQ ID NO: 1748445 - DNA, 25 bp, Homo sapien
caaaggagaggacttcttacataag

SEQ ID NO: 1748446 - DNA, 25 bp, Homo sapien
agcatctcaagacctgcttcaggga

SEQ ID NO: 1748447 - DNA, 25 bp, Homo sapien
caattcttcctagattgtatggacg

SEQ ID NO: 1748448 - DNA, 25 bp, Homo sapien
ctagattgtatggacggcttcaggg

SEQ ID NO: 1748449 - DNA, 25 bp, Homo sapien
ctgtggacacatgtgactcatggaa

SEQ ID NO: 1748450 - DNA, 25 bp, Homo sapien
tgtggacacatgtgactcatggaaa

SEQ ID NO: 1748451 - DNA, 25 bp, Homo sapien
gactcatggaaaccaagctcgctac

SEQ ID NO: 1748452 - DNA, 25 bp, Homo sapien
ggaaaccaagctcgctacttacagt

SEQ ID NO: 1748453 - DNA, 25 bp, Homo sapien
gcccaggtgggtactgcacctctgt

SEQ ID NO: 1748454 - DNA, 25 bp, Homo sapien
cagatctgttgtctagttgggccta

SEQ ID NO: 1748455 - DNA, 25 bp, Homo sapien
agtctttgtggttcatggagagcca

SEQ ID NO: 1748456 - DNA, 25 bp, Homo sapien
cacctctgtgttggaggagtctttg

SEQ ID NO: 1748457 - DNA, 25 bp, Homo sapien
taagccctgacacagaagtctctgg

SEQ ID NO: 1748458 - DNA, 25 bp, Homo sapien
cactgggcctatgatcacatcctta

SEQ ID NO: 1748459 - DNA, 25 bp, Homo sapien
tctggatgaagaggagatgttgtca

SEQ ID NO: 1748460 - DNA, 25 bp, Homo sapien
gatgttgtcagcaggtgattctacc

SEQ ID NO: 1748461 - DNA, 25 bp, Homo sapien
gacaggcagagagggttgctctcag

SEQ ID NO: 1748462 - DNA, 25 bp, Homo sapien
tctcaggggagtacactggtcatgg

SEQ ID NO: 1748463 - DNA, 25 bp, Homo sapien
caggcagagagggttgctctcaggg

SEQ ID NO: 1748464 - DNA, 25 bp, Homo sapien
gggagtacactggtcatggagaagc

SEQ ID NO: 1748465 - DNA, 25 bp, Homo sapien
ccgccaggtcactgaaagatgccaa

SEQ ID NO: 1748466 - DNA, 25 bp, Homo sapien
gggaagacagcctcaaaacatacag

SEQ ID NO: 1748467 - DNA, 25 bp, Homo sapien
ttattggaccaggtaccgccaggtc

SEQ ID NO: 1748468 - DNA, 25 bp, Homo sapien
aagaaagcagcttccccaattggct

SEQ ID NO: 1748469 - DNA, 25 bp, Homo sapien
gcaagaatctgttagggtggcaaca

SEQ ID NO: 1748470 - DNA, 25 bp, Homo sapien
cgcagggtaattataggctttacac

SEQ ID NO: 1748471 - DNA, 25 bp, Homo sapien
tagagacaaatgcagcaagtcagcc

SEQ ID NO: 1748472 - DNA, 25 bp, Homo sapien
taggcagttagaaaacaatatccca

SEQ ID NO: 1748473 - DNA, 25 bp, Homo sapien
tgagccatcttgctacttctatatg

SEQ ID NO: 1748474 - DNA, 25 bp, Homo sapien
catctaaccacaagcacttgtccat

SEQ ID NO: 1748475 - DNA, 25 bp, Homo sapien
cattttgttgtggcattactggact

SEQ ID NO: 1748476 - DNA, 25 bp, Homo sapien
aaaccaacatctaaccacaagcact

SEQ ID NO: 1748477 - DNA, 25 bp, Homo sapien
aatctgaactcctatgcttgttgca

SEQ ID NO: 1748478 - DNA, 25 bp, Homo sapien
aaaaatctgaactcctatgcttgtt

SEQ ID NO: 1748479 - DNA, 25 bp, Homo sapien
caaacatcgcaaaaacatctggttt

SEQ ID NO: 1748480 - DNA, 25 bp, Homo sapien
agacaaacatcgcaaaaacatctgg

SEQ ID NO: 1748481 - DNA, 25 bp, Homo sapien
caatgatttctatcagatccaataa

SEQ ID NO: 1748482 - DNA, 25 bp, Homo sapien
aatattatgtaaggagttaaactgg

SEQ ID NO: 1748483 - DNA, 25 bp, Homo sapien
tgggatatactcaatgatttctatc

SEQ ID NO: 1748484 - DNA, 25 bp, Homo sapien
aaatattatgtaaggagttaaactg

SEQ ID NO: 1748485 - DNA, 25 bp, Homo sapien
tacagacgactaccatgatgcccgg

SEQ ID NO: 1748486 - DNA, 25 bp, Homo sapien
gattacagacgactaccatgatgcc

SEQ ID NO: 1748487 - DNA, 25 bp, Homo sapien
cagacgactaccatgatgcccggcc

SEQ ID NO: 1748488 - DNA, 25 bp, Homo sapien
ttacagacgactaccatgatgcccg

SEQ ID NO: 1748489 - DNA, 25 bp, Homo sapien
cactgactgctcacggaacctggtg

SEQ ID NO: 1748490 - DNA, 25 bp, Homo sapien
gaaatgacagggtggacacgctctg

SEQ ID NO: 1748491 - DNA, 25 bp, Homo sapien
gatctactcccacaggtagggccct

SEQ ID NO: 1748492 - DNA, 25 bp, Homo sapien
tggtgcccaccaggactatttgcga

SEQ ID NO: 1748493 - DNA, 25 bp, Homo sapien
gctcagatgacagagaaacgaagtt

SEQ ID NO: 1748494 - DNA, 25 bp, Homo sapien
tcctgccagcagaggacctgtaaca

SEQ ID NO: 1748495 - DNA, 25 bp, Homo sapien
taacactgccccgattgaagtcagg

SEQ ID NO: 1748496 - DNA, 25 bp, Homo sapien
tcagggaacaattcacagatcggag

SEQ ID NO: 1748497 - DNA, 25 bp, Homo sapien
ttctggataactgtggtcaattctt

SEQ ID NO: 1748498 - DNA, 25 bp, Homo sapien
tagcttcctagggctgtcactccca

SEQ ID NO: 1748499 - DNA, 25 bp, Homo sapien
tctacatcgtgttcagtttctggat

SEQ ID NO: 1748500 - DNA, 25 bp, Homo sapien
tcctggagagatcattagcttccta

SEQ ID NO: 1748501 - DNA, 25 bp, Homo sapien
gaggaactctcgcaaacccatcctg

SEQ ID NO: 1748502 - DNA, 25 bp, Homo sapien
cagatctggtgaagggtctgctgta

SEQ ID NO: 1748503 - DNA, 25 bp, Homo sapien
gagagaggaactctcgcaaacccat

SEQ ID NO: 1748504 - DNA, 25 bp, Homo sapien
agatctggtgaagggtctgctgtaa

SEQ ID NO: 1748505 - DNA, 25 bp, Homo sapien
ctttatgaatatgccatcttcggga

SEQ ID NO: 1748506 - DNA, 25 bp, Homo sapien
tttatgaatatgccatcttcgggac

SEQ ID NO: 1748507 - DNA, 25 bp, Homo sapien
gtaaagatgttcacaatcatcagaa

SEQ ID NO: 1748508 - DNA, 25 bp, Homo sapien
gacaagttccttcagctcaacacga

SEQ ID NO: 1748509 - DNA, 25 bp, Homo sapien
ttcagggaagcggtagacaagttcc

SEQ ID NO: 1748510 - DNA, 25 bp, Homo sapien
gctcaacacgaagtcactggcccgg

SEQ ID NO: 1748511 - DNA, 25 bp, Homo sapien
gggaagcggtagacaagttccttca

SEQ ID NO: 1748512 - DNA, 25 bp, Homo sapien
tgaaagtgcagcgaccgcatcttgc

SEQ ID NO: 1748513 - DNA, 25 bp, Homo sapien
cagcgaccgcatcttgctggctcat

SEQ ID NO: 1748514 - DNA, 25 bp, Homo sapien
aaagtgcagcgaccgcatcttgctg

SEQ ID NO: 1748515 - DNA, 25 bp, Homo sapien
gtgcagcgaccgcatcttgctggct

SEQ ID NO: 1748516 - DNA, 25 bp, Homo sapien
ttgtacgcagctacgagaaggcgct

SEQ ID NO: 1748517 - DNA, 25 bp, Homo sapien
ttgatgagctgaaccacattctctg

SEQ ID NO: 1748518 - DNA, 25 bp, Homo sapien
taccctggcgcccttgttgatgagc

SEQ ID NO: 1748519 - DNA, 25 bp, Homo sapien
aaccgctaccctggcgcccttgttg

SEQ ID NO: 1748520 - DNA, 25 bp, Homo sapien
gcagcagaacaggtgcctacaccaa

SEQ ID NO: 1748521 - DNA, 25 bp, Homo sapien
agcagcagaacaggtgcctacacca

SEQ ID NO: 1748522 - DNA, 25 bp, Homo sapien
aagcagcagaacaggtgcctacacc

SEQ ID NO: 1748523 - DNA, 25 bp, Homo sapien
agcagaacaggtgcctacaccaagg

SEQ ID NO: 1748524 - DNA, 25 bp, Homo sapien
tagtgaacgagcagacaccctgtct

SEQ ID NO: 1748525 - DNA, 25 bp, Homo sapien
cacagcacggtaggccaatacatga

SEQ ID NO: 1748526 - DNA, 25 bp, Homo sapien
gacaactactaagagggcctcaggg

SEQ ID NO: 1748527 - DNA, 25 bp, Homo sapien
tacaaactaggaagagagcactcac

SEQ ID NO: 1748528 - DNA, 25 bp, Homo sapien
gagctacaatggtacaggagctttt

SEQ ID NO: 1748529 - DNA, 25 bp, Homo sapien
agctacaatggtacaggagcttttc

SEQ ID NO: 1748530 - DNA, 25 bp, Homo sapien
gaccagtgagatatttccaatgtca

SEQ ID NO: 1748531 - DNA, 25 bp, Homo sapien
tttgccttcgcaaagaccagtgaga

SEQ ID NO: 1748532 - DNA, 25 bp, Homo sapien
tctcttccaaccagaagggctatgg

SEQ ID NO: 1748533 - DNA, 25 bp, Homo sapien
tggaagggcattcttcaccaagaac

SEQ ID NO: 1748534 - DNA, 25 bp, Homo sapien
cttattggcagcaagatgcagggga

SEQ ID NO: 1748535 - DNA, 25 bp, Homo sapien
atcctggacatcaaggtcgcagcca

SEQ ID NO: 1748536 - DNA, 25 bp, Homo sapien
cacaggaagatggcccttattggca

SEQ ID NO: 1748537 - DNA, 25 bp, Homo sapien
cagccttcagcaagatctggaccac

SEQ ID NO: 1748538 - DNA, 25 bp, Homo sapien
gcaggtcttccagaggaagttcttg

SEQ ID NO: 1748539 - DNA, 25 bp, Homo sapien
agcaggtcttccagaggaagttctt

SEQ ID NO: 1748540 - DNA, 25 bp, Homo sapien
tttctctctccttgtatttttgttc

SEQ ID NO: 1748541 - DNA, 25 bp, Homo sapien
ttctctctccttgtatttttgttcc

SEQ ID NO: 1748542 - DNA, 25 bp, Homo sapien
cttttctgtggccaaaatcttttct

SEQ ID NO: 1748543 - DNA, 25 bp, Homo sapien
ttctgtggccaaaatcttttctctc

SEQ ID NO: 1748544 - DNA, 25 bp, Homo sapien
tgctcattgaccaatcagagatggc

SEQ ID NO: 1748545 - DNA, 25 bp, Homo sapien
gactatttctgaggcgggagctatg

SEQ ID NO: 1748546 - DNA, 25 bp, Homo sapien
gagatggcattagcgctccaatgag

SEQ ID NO: 1748547 - DNA, 25 bp, Homo sapien
gagttgacacgattggcaggaagca

SEQ ID NO: 1748548 - DNA, 25 bp, Homo sapien
cttaggacgagcctcagaaaaggtc

SEQ ID NO: 1748549 - DNA, 25 bp, Homo sapien
cattaaccttaggacgagcctcaga

SEQ ID NO: 1748550 - DNA, 25 bp, Homo sapien
atagccactagagctgccccaaaag

SEQ ID NO: 1748551 - DNA, 25 bp, Homo sapien
aaaaggtcagatgcatctgtggggt

SEQ ID NO: 1748552 - DNA, 25 bp, Homo sapien
caccactgtggcccggtgcaaggcg

SEQ ID NO: 1748553 - DNA, 25 bp, Homo sapien
tccccaccactgtggcccggtgcaa

SEQ ID NO: 1748554 - DNA, 25 bp, Homo sapien
cactgtggcccggtgcaaggcggtc

SEQ ID NO: 1748555 - DNA, 25 bp, Homo sapien
ggcccggtgcaaggcggtctggtcc

SEQ ID NO: 1748556 - DNA, 25 bp, Homo sapien
gcacacccttcgtggatgagcgccg

SEQ ID NO: 1748557 - DNA, 25 bp, Homo sapien
acccttcgtggatgagcgccgcgat

SEQ ID NO: 1748558 - DNA, 25 bp, Homo sapien
cttcgtggatgagcgccgcgatgat

SEQ ID NO: 1748559 - DNA, 25 bp, Homo sapien
ggatgagcgccgcgatgatctccgt

SEQ ID NO: 1748560 - DNA, 25 bp, Homo sapien
cttcatgcaaggctgtattcccatc

SEQ ID NO: 1748561 - DNA, 25 bp, Homo sapien
gttggctcctgctttaatgagcagc

SEQ ID NO: 1748562 - DNA, 25 bp, Homo sapien
catgccaggatgcttcatgcaaggc

SEQ ID NO: 1748563 - DNA, 25 bp, Homo sapien
ttgttcttggcaagcacgttggctc

SEQ ID NO: 1748564 - DNA, 25 bp, Homo sapien
cacaaagctgcatgcggtgccaagg

SEQ ID NO: 1748565 - DNA, 25 bp, Homo sapien
caagcttttgatccatgagggaacc

SEQ ID NO: 1748566 - DNA, 25 bp, Homo sapien
gagccaggcactaccggcgatatta

SEQ ID NO: 1748567 - DNA, 25 bp, Homo sapien
cattttgaagaaatgggcagccacc

SEQ ID NO: 1748568 - DNA, 25 bp, Homo sapien
gccgatactccagtatatcagattc

SEQ ID NO: 1748569 - DNA, 25 bp, Homo sapien
ctgccgatactccagtatatcagat

SEQ ID NO: 1748570 - DNA, 25 bp, Homo sapien
tgccgatactccagtatatcagatt

SEQ ID NO: 1748571 - DNA, 25 bp, Homo sapien
agcaggaggacgcgcgtgctctggg

SEQ ID NO: 1748572 - DNA, 25 bp, Homo sapien
gcaggaggacgcgcgtgctctggga

SEQ ID NO: 1748573 - DNA, 25 bp, Homo sapien
cagcaggaggacgcgcgtgctctgg

SEQ ID NO: 1748574 - DNA, 25 bp, Homo sapien
ccagcaggaggacgcgcgtgctctg

SEQ ID NO: 1748575 - DNA, 25 bp, Homo sapien
tgcttgaggaggatccagggaccct

SEQ ID NO: 1748576 - DNA, 25 bp, Homo sapien
tgtgcttgaggaggatccagggacc

SEQ ID NO: 1748577 - DNA, 25 bp, Homo sapien
ctgtgcttgaggaggatccagggac

SEQ ID NO: 1748578 - DNA, 25 bp, Homo sapien
cttgaggaggatccagggaccctag

SEQ ID NO: 1748579 - DNA, 25 bp, Homo sapien
cgcagcaacgtgcaaacaggtgtct

SEQ ID NO: 1748580 - DNA, 25 bp, Homo sapien
tgaggaggagcctaatgatggacaa

SEQ ID NO: 1748581 - DNA, 25 bp, Homo sapien
tgatggacaagtgattatagcgcgc

SEQ ID NO: 1748582 - DNA, 25 bp, Homo sapien
cagaacagaaagcagtgaggaggag

SEQ ID NO: 1748583 - DNA, 25 bp, Homo sapien
ccggtagccttgtgggaagggtgct

SEQ ID NO: 1748584 - DNA, 25 bp, Homo sapien
ctgtccggtagccttgtgggaaggg

SEQ ID NO: 1748585 - DNA, 25 bp, Homo sapien
tccggtagccttgtgggaagggtgc

SEQ ID NO: 1748586 - DNA, 25 bp, Homo sapien
tctgctcccgtttgcactaacagac

SEQ ID NO: 1748587 - DNA, 25 bp, Homo sapien
gcctctgctcccgtttgcactaaca

SEQ ID NO: 1748588 - DNA, 25 bp, Homo sapien
ttctctagcaggccagataagccag

SEQ ID NO: 1748589 - DNA, 25 bp, Homo sapien
gggccactagaactcagtgtgacac

SEQ ID NO: 1748590 - DNA, 25 bp, Homo sapien
ctggaattgattagaaggtctgcta

SEQ ID NO: 1748591 - DNA, 25 bp, Homo sapien
tctgctaaacctcatctgctcatgg

SEQ ID NO: 1748592 - DNA, 25 bp, Homo sapien
gaaggtctgctaaacctcatctgct

SEQ ID NO: 1748593 - DNA, 25 bp, Homo sapien
gattagaaggtctgctaaacctcat

SEQ ID NO: 1748594 - DNA, 25 bp, Homo sapien
taacaatggtcgtatctgctccggc

SEQ ID NO: 1748595 - DNA, 25 bp, Homo sapien
tgctccggcttccagtaagattttg

SEQ ID NO: 1748596 - DNA, 25 bp, Homo sapien
tccagtaagattttggccaccttct

SEQ ID NO: 1748597 - DNA, 25 bp, Homo sapien
tcttgtgatttagggcagcagcaac

SEQ ID NO: 1748598 - DNA, 25 bp, Homo sapien
cagtttaactggacatccctgagtt

SEQ ID NO: 1748599 - DNA, 25 bp, Homo sapien
tttgggtaacatccactcgtcagtt

SEQ ID NO: 1748600 - DNA, 25 bp, Homo sapien
ctttttcatgccaggttgtgttcac

SEQ ID NO: 1748601 - DNA, 25 bp, Homo sapien
gttctttttcatgccaggttgtgtt

SEQ ID NO: 1748602 - DNA, 25 bp, Homo sapien
aagaaagcgcacctgagctggtgcc

SEQ ID NO: 1748603 - DNA, 25 bp, Homo sapien
ctgaaccattcagaggggcagagac

SEQ ID NO: 1748604 - DNA, 25 bp, Homo sapien
tcgaagaagaaagcgcacctgagct

SEQ ID NO: 1748605 - DNA, 25 bp, Homo sapien
ggacagcctcgaagaagaaagcgca

SEQ ID NO: 1748606 - DNA, 25 bp, Homo sapien
ggcagagtaggacaggtgagaaagg

SEQ ID NO: 1748607 - DNA, 25 bp, Homo sapien
agaggcagagtaggacaggtgagaa

SEQ ID NO: 1748608 - DNA, 25 bp, Homo sapien
cacacgcacatagcccagctggcac

SEQ ID NO: 1748609 - DNA, 25 bp, Homo sapien
gggtcccacacgcacatagcccagc

SEQ ID NO: 1748610 - DNA, 25 bp, Homo sapien
tagtaaggagaagagcaacttccgg

SEQ ID NO: 1748611 - DNA, 25 bp, Homo sapien
cagtctccagcggagtctggcctgc

SEQ ID NO: 1748612 - DNA, 25 bp, Homo sapien
caacttccgggttattgtggtagcg

SEQ ID NO: 1748613 - DNA, 25 bp, Homo sapien
gttattgtggtagcgggcagtctcc

SEQ ID NO: 1748614 - DNA, 25 bp, Homo sapien
ccaggagtcccaacaactttgtagt

SEQ ID NO: 1748615 - DNA, 25 bp, Homo sapien
cataatcagtaccatggaaagggca

SEQ ID NO: 1748616 - DNA, 25 bp, Homo sapien
ttcagtagattgcaaccaggagtcc

SEQ ID NO: 1748617 - DNA, 25 bp, Homo sapien
cactgcctggttacattccatattt

SEQ ID NO: 1748618 - DNA, 25 bp, Homo sapien
ggcccaggcatgaacacgaagagct

SEQ ID NO: 1748619 - DNA, 25 bp, Homo sapien
cctgtcctgcgatgtcttaaactgg

SEQ ID NO: 1748620 - DNA, 25 bp, Homo sapien
tgtacttaactatctccggcaggcg

SEQ ID NO: 1748621 - DNA, 25 bp, Homo sapien
ggcagctggccgtgacaaagatcca

SEQ ID NO: 1748622 - DNA, 25 bp, Homo sapien
gataaaagctgctagaggtggaaac

SEQ ID NO: 1748623 - DNA, 25 bp, Homo sapien
ataaaagctgctagaggtggaaacc

SEQ ID NO: 1748624 - DNA, 25 bp, Homo sapien
taaaagctgctagaggtggaaaccc

SEQ ID NO: 1748625 - DNA, 25 bp, Homo sapien
gctatttctgtaaccacagatcaag

SEQ ID NO: 1748626 - DNA, 25 bp, Homo sapien
gcctaaagttccttgtttgtgttga

SEQ ID NO: 1748627 - DNA, 25 bp, Homo sapien
tatgcgtaacatcttatgcctaaag

SEQ ID NO: 1748628 - DNA, 25 bp, Homo sapien
cagatcaagagaacagtatgcgtaa

SEQ ID NO: 1748629 - DNA, 25 bp, Homo sapien
tacaaccactggtgtgcgcagcatc

SEQ ID NO: 1748630 - DNA, 25 bp, Homo sapien
atgagccatagtaccaaccacggga

SEQ ID NO: 1748631 - DNA, 25 bp, Homo sapien
tggtacactggacttgagctagccc

SEQ ID NO: 1748632 - DNA, 25 bp, Homo sapien
taaactaggatatgaatggcgtctc

SEQ ID NO: 1748633 - DNA, 25 bp, Homo sapien
tcaggcttcgcccacgactgaagcg

SEQ ID NO: 1748634 - DNA, 25 bp, Homo sapien
tttttcctcaggcttcgcccacgac

SEQ ID NO: 1748635 - DNA, 25 bp, Homo sapien
ttcgcccacgactgaagcgcaagac

SEQ ID NO: 1748636 - DNA, 25 bp, Homo sapien
ccacctcatctcttggcacagactg

SEQ ID NO: 1748637 - DNA, 25 bp, Homo sapien
gcatgggtggatgtggggacggcgg

SEQ ID NO: 1748638 - DNA, 25 bp, Homo sapien
ctctgagcatgggtggatgtgggga

SEQ ID NO: 1748639 - DNA, 25 bp, Homo sapien
atgggtggatgtggggacggcggga

SEQ ID NO: 1748640 - DNA, 25 bp, Homo sapien
tggatgtggggacggcgggaggact

SEQ ID NO: 1748641 - DNA, 25 bp, Homo sapien
ggccgaagcagggagatagtttccc

SEQ ID NO: 1748642 - DNA, 25 bp, Homo sapien
gccgaagcagggagatagtttccca

SEQ ID NO: 1748643 - DNA, 25 bp, Homo sapien
ctggccgaagcagggagatagtttc

SEQ ID NO: 1748644 - DNA, 25 bp, Homo sapien
ccgaagcagggagatagtttcccac

SEQ ID NO: 1748645 - DNA, 25 bp, Homo sapien
gggtgtctcctgctgagacactgcc

SEQ ID NO: 1748646 - DNA, 25 bp, Homo sapien
tggggaggctgacaggaactcttct

SEQ ID NO: 1748647 - DNA, 25 bp, Homo sapien
ttgggccttgactttctcctcctgt

SEQ ID NO: 1748648 - DNA, 25 bp, Homo sapien
tcctgtcatcctttgctctgggttc

SEQ ID NO: 1748649 - DNA, 25 bp, Homo sapien
tccttgccccggtacaatgtgtaga

SEQ ID NO: 1748650 - DNA, 25 bp, Homo sapien
gggatgaacaccgatgcctgttcct

SEQ ID NO: 1748651 - DNA, 25 bp, Homo sapien
agctgatacgccctgaactcatggg

SEQ ID NO: 1748652 - DNA, 25 bp, Homo sapien
gattatgagcatgcaggttcttctg

SEQ ID NO: 1748653 - DNA, 25 bp, Homo sapien
tcattttgtcctgaaccgatcccag

SEQ ID NO: 1748654 - DNA, 25 bp, Homo sapien
cacatcgacaaccatttattggtgc

SEQ ID NO: 1748655 - DNA, 25 bp, Homo sapien
tctccagcttgttgattagaggttc

SEQ ID NO: 1748656 - DNA, 25 bp, Homo sapien
cagtagcctccaactgattctccag

SEQ ID NO: 1748657 - DNA, 25 bp, Homo sapien
cagggtggaagggtgtgctaaagtc

SEQ ID NO: 1748658 - DNA, 25 bp, Homo sapien
gctaaagtcgaagttggttcctgag

SEQ ID NO: 1748659 - DNA, 25 bp, Homo sapien
tgagttcatgttctgccagaacacc

SEQ ID NO: 1748660 - DNA, 25 bp, Homo sapien
gaacaccttgcaattaggaagctgg

SEQ ID NO: 1748661 - DNA, 25 bp, Homo sapien
aaatgtttcatcttaccagtaaaca

SEQ ID NO: 1748662 - DNA, 25 bp, Homo sapien
tcactaatctattattgacctaaga

SEQ ID NO: 1748663 - DNA, 25 bp, Homo sapien
aaaatgtccttaatcaatttggcaa

SEQ ID NO: 1748664 - DNA, 25 bp, Homo sapien
aacagtcttcactaatctattattg

SEQ ID NO: 1748665 - DNA, 25 bp, Homo sapien
tctgagtgctgttgcaggcggttca

SEQ ID NO: 1748666 - DNA, 25 bp, Homo sapien
ccatcagcttgtccaaaacacgcat

SEQ ID NO: 1748667 - DNA, 25 bp, Homo sapien
aggcggttcaggcactccgtcctct

SEQ ID NO: 1748668 - DNA, 25 bp, Homo sapien
gcagaaagtcgctcaaccatcagct

SEQ ID NO: 1748669 - DNA, 25 bp, Homo sapien
gatgcagatgttggcagcatgcttc

SEQ ID NO: 1748670 - DNA, 25 bp, Homo sapien
agatgcagatgttggcagcatgctt

SEQ ID NO: 1748671 - DNA, 25 bp, Homo sapien
aatctttaacatgcaccaggttttt

SEQ ID NO: 1748672 - DNA, 25 bp, Homo sapien
ggtgtggatttagctctgcaggccc

SEQ ID NO: 1748673 - DNA, 25 bp, Homo sapien
aagtagatggtgtggatttagctct

SEQ ID NO: 1748674 - DNA, 25 bp, Homo sapien
ttaacatgcaccaggtttttaattc

SEQ ID NO: 1748675 - DNA, 25 bp, Homo sapien
agtacaagagctgctggtcgtgttc

SEQ ID NO: 1748676 - DNA, 25 bp, Homo sapien
tacgtactgcctttcagtgcaggag

SEQ ID NO: 1748677 - DNA, 25 bp, Homo sapien
ctttcagtgcaggagagtacaagag

SEQ ID NO: 1748678 - DNA, 25 bp, Homo sapien
acagccctagcatacgtactgcctt

SEQ ID NO: 1748679 - DNA, 25 bp, Homo sapien
aagtttgagcacataaatgagtgct

SEQ ID NO: 1748680 - DNA, 25 bp, Homo sapien
tccttgcccctacagagtgcacttt

SEQ ID NO: 1748681 - DNA, 25 bp, Homo sapien
tatggttacgagcaaaatacagtcc

SEQ ID NO: 1748682 - DNA, 25 bp, Homo sapien
tagcaactgagtatatggttacgag

SEQ ID NO: 1748683 - DNA, 25 bp, Homo sapien
agagctccacgacaagccctaagag

SEQ ID NO: 1748684 - DNA, 25 bp, Homo sapien
gtagtcctagcatgaaacattttcc

SEQ ID NO: 1748685 - DNA, 25 bp, Homo sapien
ttgacccaagctccaatttggaaag

SEQ ID NO: 1748686 - DNA, 25 bp, Homo sapien
cagtgtactaactgcttgacccaag

SEQ ID NO: 1748687 - DNA, 25 bp, Homo sapien
gcttttccttcagcccgcctcaatc

SEQ ID NO: 1748688 - DNA, 25 bp, Homo sapien
atggattctgtgttagccacactgg

SEQ ID NO: 1748689 - DNA, 25 bp, Homo sapien
gctttcatggattctgtgttagcca

SEQ ID NO: 1748690 - DNA, 25 bp, Homo sapien
ggcttgtcagagctttcatggattc

SEQ ID NO: 1748691 - DNA, 25 bp, Homo sapien
catgtgtaacgtctcctctgagcct

SEQ ID NO: 1748692 - DNA, 25 bp, Homo sapien
ctgcagtcaccactaattggtccac

SEQ ID NO: 1748693 - DNA, 25 bp, Homo sapien
tgcagtcaccactaattggtccaca

SEQ ID NO: 1748694 - DNA, 25 bp, Homo sapien
gcagtcaccactaattggtccacac

SEQ ID NO: 1748695 - DNA, 25 bp, Homo sapien
cagtcgggagcctgtacagtcagaa

SEQ ID NO: 1748696 - DNA, 25 bp, Homo sapien
gaccttgacgtttctcagtcgggag

SEQ ID NO: 1748697 - DNA, 25 bp, Homo sapien
tgtcccgaatgtgagggccagtctg

SEQ ID NO: 1748698 - DNA, 25 bp, Homo sapien
ctcattcatgggtagcaaggctgtc

SEQ ID NO: 1748699 - DNA, 25 bp, Homo sapien
tccttagtttggcaagttcctcttc

SEQ ID NO: 1748700 - DNA, 25 bp, Homo sapien
tagtttggcaagttcctcttctaaa

SEQ ID NO: 1748701 - DNA, 25 bp, Homo sapien
cttagtttggcaagttcctcttcta

SEQ ID NO: 1748702 - DNA, 25 bp, Homo sapien
ctagtccttagtttggcaagttcct

SEQ ID NO: 1748703 - DNA, 25 bp, Homo sapien
agaaagacacttgtctaggcacagc

SEQ ID NO: 1748704 - DNA, 25 bp, Homo sapien
gtcttcataacttcctgggcatagg

SEQ ID NO: 1748705 - DNA, 25 bp, Homo sapien
gaatgactacttgagttcagacggg

SEQ ID NO: 1748706 - DNA, 25 bp, Homo sapien
gcttacacatcgtccagtttcttgg

SEQ ID NO: 1748707 - DNA, 25 bp, Homo sapien
tacgacagacctccaagagacaaga

SEQ ID NO: 1748708 - DNA, 25 bp, Homo sapien
tcaatagtcactaggttcctgtgtc

SEQ ID NO: 1748709 - DNA, 25 bp, Homo sapien
gtagttgagaacaagacaagctccc

SEQ ID NO: 1748710 - DNA, 25 bp, Homo sapien
catgtagtaagccacactaggtcct

SEQ ID NO: 1748711 - DNA, 25 bp, Homo sapien
gaagacacataacatgcctcaagta

SEQ ID NO: 1748712 - DNA, 25 bp, Homo sapien
tcaagtatatcaacacttgactcca

SEQ ID NO: 1748713 - DNA, 25 bp, Homo sapien
atagtatctttaatgcttggaagag

SEQ ID NO: 1748714 - DNA, 25 bp, Homo sapien
taaggaatttaagatccatagtatc

SEQ ID NO: 1748715 - DNA, 25 bp, Homo sapien
gagagcacctgatcgcgactttaca

SEQ ID NO: 1748716 - DNA, 25 bp, Homo sapien
ggagccataaaatgtggtcaaccac

SEQ ID NO: 1748717 - DNA, 25 bp, Homo sapien
gggtgaaggcactcaggagccataa

SEQ ID NO: 1748718 - DNA, 25 bp, Homo sapien
tattatagtcgtatcaaagggaaag

SEQ ID NO: 1748719 - DNA, 25 bp, Homo sapien
cactagctagcctaacctggtggca

SEQ ID NO: 1748720 - DNA, 25 bp, Homo sapien
caagcattgccatagatgtgcctgc

SEQ ID NO: 1748721 - DNA, 25 bp, Homo sapien
gagggctgcctcatattgaacccgg

SEQ ID NO: 1748722 - DNA, 25 bp, Homo sapien
gatttcgagactagctaggccacta

SEQ ID NO: 1748723 - DNA, 25 bp, Homo sapien
tcaggtacgttcttcagatgtgtca

SEQ ID NO: 1748724 - DNA, 25 bp, Homo sapien
tcatcaaaaagatcaccactgggaa

SEQ ID NO: 1748725 - DNA, 25 bp, Homo sapien
tgagcacattgaagcacttaccaga

SEQ ID NO: 1748726 - DNA, 25 bp, Homo sapien
gactgaaagtatactgacaccagga

SEQ ID NO: 1748727 - DNA, 25 bp, Homo sapien
tgagttagcacttctaccccatgcc

SEQ ID NO: 1748728 - DNA, 25 bp, Homo sapien
gaaacagctgctgtatgagttagca

SEQ ID NO: 1748729 - DNA, 25 bp, Homo sapien
aaacagacggtcagttcctcaaaag

SEQ ID NO: 1748730 - DNA, 25 bp, Homo sapien
tccagaataggcagaaagattagtg

SEQ ID NO: 1748731 - DNA, 25 bp, Homo sapien
tccttggtttggtgcgatcgcgtga

SEQ ID NO: 1748732 - DNA, 25 bp, Homo sapien
ctgggtctgagctggattctccatc

SEQ ID NO: 1748733 - DNA, 25 bp, Homo sapien
agtgcccacggtaaaagtctattgc

SEQ ID NO: 1748734 - DNA, 25 bp, Homo sapien
tgacgggaggcactggctgcttcct

SEQ ID NO: 1748735 - DNA, 25 bp, Homo sapien
tgttatcctattttaccgacgagaa

SEQ ID NO: 1748736 - DNA, 25 bp, Homo sapien
gaccctatggtgcactgttatccta

SEQ ID NO: 1748737 - DNA, 25 bp, Homo sapien
aggaactgtgttaagtgccctacct

SEQ ID NO: 1748738 - DNA, 25 bp, Homo sapien
tgaactctctttaccaggaactgtg

SEQ ID NO: 1748739 - DNA, 25 bp, Homo sapien
catgaaggccaccgctcccggaaaa

SEQ ID NO: 1748740 - DNA, 25 bp, Homo sapien
tcatgaaggccaccgctcccggaaa

SEQ ID NO: 1748741 - DNA, 25 bp, Homo sapien
cacttgctgcttcgggagactatgc

SEQ ID NO: 1748742 - DNA, 25 bp, Homo sapien
gttacactgtgaagtctgcgaccct

SEQ ID NO: 1748743 - DNA, 25 bp, Homo sapien
caagtgtcccaaagcatgtacctga

SEQ ID NO: 1748744 - DNA, 25 bp, Homo sapien
tctataaaaacgatccttgggctgt

SEQ ID NO: 1748745 - DNA, 25 bp, Homo sapien
ttttcaggattaacaggcaatagca

SEQ ID NO: 1748746 - DNA, 25 bp, Homo sapien
gctcatcaattcctcatggacacga

SEQ ID NO: 1748747 - DNA, 25 bp, Homo sapien
acagacaaagcccataaggagacag

SEQ ID NO: 1748748 - DNA, 25 bp, Homo sapien
gaaaccagaaagaagccgagagtct

SEQ ID NO: 1748749 - DNA, 25 bp, Homo sapien
tgtccaattggagataactgtatct

SEQ ID NO: 1748750 - DNA, 25 bp, Homo sapien
gataactgtatcttactctaaaatg

SEQ ID NO: 1748751 - DNA, 25 bp, Homo sapien
atctgtcatatgtttgtaccataat

SEQ ID NO: 1748752 - DNA, 25 bp, Homo sapien
catcttatgaacattctccctgtca

SEQ ID NO: 1748753 - DNA, 25 bp, Homo sapien
tagagattgtagaccctccccttga

SEQ ID NO: 1748754 - DNA, 25 bp, Homo sapien
tgaggttgtagagattgtagaccct

SEQ ID NO: 1748755 - DNA, 25 bp, Homo sapien
tcatttgttcattcagccatgtacc

SEQ ID NO: 1748756 - DNA, 25 bp, Homo sapien
ccggtattgtgaaaagcactgaggt

SEQ ID NO: 1748757 - DNA, 25 bp, Homo sapien
tcttttaaccatgttggtgtaatta

SEQ ID NO: 1748758 - DNA, 25 bp, Homo sapien
tgtttttcgcctgttgtggtggctc

SEQ ID NO: 1748759 - DNA, 25 bp, Homo sapien
ccatgttggtgtaattatgattaaa

SEQ ID NO: 1748760 - DNA, 25 bp, Homo sapien
ttgaactagagttgtaggataaacc

SEQ ID NO: 1748761 - DNA, 25 bp, Homo sapien
gggaactgtaatgcattcctttcaa

SEQ ID NO: 1748762 - DNA, 25 bp, Homo sapien
gggtgtgtgtttgtgggaactgtaa

SEQ ID NO: 1748763 - DNA, 25 bp, Homo sapien
catatcttgtagtggttgcagggag

SEQ ID NO: 1748764 - DNA, 25 bp, Homo sapien
gcattcctttcaacattgtggcatt

SEQ ID NO: 1748765 - DNA, 25 bp, Homo sapien
gaagaattagatccaagtcagctca

SEQ ID NO: 1748766 - DNA, 25 bp, Homo sapien
cgctcagtgagcagtggatcatcct

SEQ ID NO: 1748767 - DNA, 25 bp, Homo sapien
catttgatgaagatgctcgtccgac

SEQ ID NO: 1748768 - DNA, 25 bp, Homo sapien
gaatatgtcacctctagagtgtggc

SEQ ID NO: 1748769 - DNA, 25 bp, Homo sapien
gcattcccattcagtcagcagcact

SEQ ID NO: 1748770 - DNA, 25 bp, Homo sapien
tcattgtatgcttggctgtccttag

SEQ ID NO: 1748771 - DNA, 25 bp, Homo sapien
ggaaaattcacgaagtgggcttgca

SEQ ID NO: 1748772 - DNA, 25 bp, Homo sapien
ttccccacgttgaggtcagctgtca

SEQ ID NO: 1748773 - DNA, 25 bp, Homo sapien
tggatgcactgagttaacccctaca

SEQ ID NO: 1748774 - DNA, 25 bp, Homo sapien
taatagttggttcattgcagtttcc

SEQ ID NO: 1748775 - DNA, 25 bp, Homo sapien
tctctaggccaatgttgctttaggg

SEQ ID NO: 1748776 - DNA, 25 bp, Homo sapien
tatacctaggcagtttctgacttcc

SEQ ID NO: 1748777 - DNA, 25 bp, Homo sapien
tctgttctatatccttctgtttaca

SEQ ID NO: 1748778 - DNA, 25 bp, Homo sapien
atttaaacagtgcagatatatgtat

SEQ ID NO: 1748779 - DNA, 25 bp, Homo sapien
tttaaacagtgcagatatatgtata

SEQ ID NO: 1748780 - DNA, 25 bp, Homo sapien
ccacaacgaggtagccattgatctg

SEQ ID NO: 1748781 - DNA, 25 bp, Homo sapien
tgtataagtcttgacatgtatacac

SEQ ID NO: 1748782 - DNA, 25 bp, Homo sapien
ggcataaagattcttagggctaaga

SEQ ID NO: 1748783 - DNA, 25 bp, Homo sapien
actttagtgttgttatatgcccaat

SEQ ID NO: 1748784 - DNA, 25 bp, Homo sapien
ctgtccataaggtgctatccagagc

SEQ ID NO: 1748785 - DNA, 25 bp, Homo sapien
aggcttgctctttaggacctgggaa

SEQ ID NO: 1748786 - DNA, 25 bp, Homo sapien
ccaatggcttgagttaggcttgctc

SEQ ID NO: 1748787 - DNA, 25 bp, Homo sapien
ctgtgtgccaatggcttgagttagg

SEQ ID NO: 1748788 - DNA, 25 bp, Homo sapien
caagcaagccatccacggataaaaa

SEQ ID NO: 1748789 - DNA, 25 bp, Homo sapien
cgttaccaggagcagaaccgttaag

SEQ ID NO: 1748790 - DNA, 25 bp, Homo sapien
ccaggagcagaaccgttaagctggt

SEQ ID NO: 1748791 - DNA, 25 bp, Homo sapien
taagctggtccagacaagttggact

SEQ ID NO: 1748792 - DNA, 25 bp, Homo sapien
aaaaggtatgacaggaactgtcttc

SEQ ID NO: 1748793 - DNA, 25 bp, Homo sapien
ttctttaaaacttgctccacacagg

SEQ ID NO: 1748794 - DNA, 25 bp, Homo sapien
caagcatgaattctgagttctttgc

SEQ ID NO: 1748795 - DNA, 25 bp, Homo sapien
tccacacagggtagtcaagccaact

SEQ ID NO: 1748796 - DNA, 25 bp, Homo sapien
gggtagtcaagccaactctccatac

SEQ ID NO: 1748797 - DNA, 25 bp, Homo sapien
gtaagctgcatgcttgcttgttgtg

SEQ ID NO: 1748798 - DNA, 25 bp, Homo sapien
gctgcatgcttgcttgttgtggtca

SEQ ID NO: 1748799 - DNA, 25 bp, Homo sapien
tgcatgcttgcttgttgtggtcatt

SEQ ID NO: 1748800 - DNA, 25 bp, Homo sapien
taagctgcatgcttgcttgttgtgg

SEQ ID NO: 1748801 - DNA, 25 bp, Homo sapien
tcttcttgtgccatgagactccatc

SEQ ID NO: 1748802 - DNA, 25 bp, Homo sapien
ttgttttaatcttcttgtgccatga

SEQ ID NO: 1748803 - DNA, 25 bp, Homo sapien
tgagactccatcaggcggtctacaa

SEQ ID NO: 1748804 - DNA, 25 bp, Homo sapien
tcaggcggtctacaaagaccattgg

SEQ ID NO: 1748805 - DNA, 25 bp, Homo sapien
ttttatgtcgcccagaacagtactc

SEQ ID NO: 1748806 - DNA, 25 bp, Homo sapien
gagtctttttatgtcgcccagaaca

SEQ ID NO: 1748807 - DNA, 25 bp, Homo sapien
cagaacagtactctgtggcacgatc

SEQ ID NO: 1748808 - DNA, 25 bp, Homo sapien
tgtcgcccagaacagtactctgtgg

SEQ ID NO: 1748809 - DNA, 25 bp, Homo sapien
gagcatcattcattaatgagcatct

SEQ ID NO: 1748810 - DNA, 25 bp, Homo sapien
ttggattgtttaagagcatcattca

SEQ ID NO: 1748811 - DNA, 25 bp, Homo sapien
taatggcctacgaatcccatggcag

SEQ ID NO: 1748812 - DNA, 25 bp, Homo sapien
ttattggcagtaggccttagacctg

SEQ ID NO: 1748813 - DNA, 25 bp, Homo sapien
aaatagtaattatatgtgcagggac

SEQ ID NO: 1748814 - DNA, 25 bp, Homo sapien
tattttactggataggcctcattga

SEQ ID NO: 1748815 - DNA, 25 bp, Homo sapien
tgcagggacttgaagtttcggaaac

SEQ ID NO: 1748816 - DNA, 25 bp, Homo sapien
caaaaaataccatcttagcaatgaa

SEQ ID NO: 1748817 - DNA, 25 bp, Homo sapien
gaataactggtactggattagctct

SEQ ID NO: 1748818 - DNA, 25 bp, Homo sapien
aacccagggccctggcggagatctc

SEQ ID NO: 1748819 - DNA, 25 bp, Homo sapien
taaccataggctgccgctccttgct

SEQ ID NO: 1748820 - DNA, 25 bp, Homo sapien
gagatctccggtgcatggaggccct

SEQ ID NO: 1748821 - DNA, 25 bp, Homo sapien
ggagatctcccaatggctaaccata

SEQ ID NO: 1748822 - DNA, 25 bp, Homo sapien
actgccctgaccctggtttctaggg

SEQ ID NO: 1748823 - DNA, 25 bp, Homo sapien
tactgccctgaccctggtttctagg

SEQ ID NO: 1748824 - DNA, 25 bp, Homo sapien
tggagtctcttactgccctgaccct

SEQ ID NO: 1748825 - DNA, 25 bp, Homo sapien
tctcttactgccctgaccctggttt

SEQ ID NO: 1748826 - DNA, 25 bp, Homo sapien
acccagggtgctcttagctgagcga

SEQ ID NO: 1748827 - DNA, 25 bp, Homo sapien
tacagctgaatcctcttctggctca

SEQ ID NO: 1748828 - DNA, 25 bp, Homo sapien
tgcacaggggtctgtagctgagtgg

SEQ ID NO: 1748829 - DNA, 25 bp, Homo sapien
cactgctctcccttttgtacccctt

SEQ ID NO: 1748830 - DNA, 25 bp, Homo sapien
gtcaggggcagctccatacagctga

SEQ ID NO: 1748831 - DNA, 25 bp, Homo sapien
tcactatcagatgcgctgggagagc

SEQ ID NO: 1748832 - DNA, 25 bp, Homo sapien
cgcctccactgccgtagagggtagg

SEQ ID NO: 1748833 - DNA, 25 bp, Homo sapien
tccccataggtgctaggtcactatc

SEQ ID NO: 1748834 - DNA, 25 bp, Homo sapien
tctggagatgccgaattcctgctcc

SEQ ID NO: 1748835 - DNA, 25 bp, Homo sapien
cattctggggtacgaagccttggtg

SEQ ID NO: 1748836 - DNA, 25 bp, Homo sapien
acagacattctggggtacgaagcct

SEQ ID NO: 1748837 - DNA, 25 bp, Homo sapien
gacattctggggtacgaagccttgg

SEQ ID NO: 1748838 - DNA, 25 bp, Homo sapien
agacattctggggtacgaagccttg

SEQ ID NO: 1748839 - DNA, 25 bp, Homo sapien
cactggaaacacagtgggcgagtga

SEQ ID NO: 1748840 - DNA, 25 bp, Homo sapien
ggcactggaaacacagtgggcgagt

SEQ ID NO: 1748841 - DNA, 25 bp, Homo sapien
actggaaacacagtgggcgagtgac

SEQ ID NO: 1748842 - DNA, 25 bp, Homo sapien
tttaagcctggaactatctcctatg

SEQ ID NO: 1748843 - DNA, 25 bp, Homo sapien
tgtctgttgttattgtctgggccat

SEQ ID NO: 1748844 - DNA, 25 bp, Homo sapien
ccgttgttaatgtctgttgttattg

SEQ ID NO: 1748845 - DNA, 25 bp, Homo sapien
atgtctgttgttattgtctgggcca

SEQ ID NO: 1748846 - DNA, 25 bp, Homo sapien
ctcccgttgttaatgtctgttgtta

SEQ ID NO: 1748847 - DNA, 25 bp, Homo sapien
gagctgatgacgtcaaacgccgtgt

SEQ ID NO: 1748848 - DNA, 25 bp, Homo sapien
gccctgggtcatggagcacttcttg

SEQ ID NO: 1748849 - DNA, 25 bp, Homo sapien
gcggttaatcgcagccaagaacgag

SEQ ID NO: 1748850 - DNA, 25 bp, Homo sapien
tgggtcgccccactagtaagcttcc

SEQ ID NO: 1748851 - DNA, 25 bp, Homo sapien
attacacgtgtgcaaaaacccaatc

SEQ ID NO: 1748852 - DNA, 25 bp, Homo sapien
atattacacgtgtgcaaaaacccaa

SEQ ID NO: 1748853 - DNA, 25 bp, Homo sapien
tattacacgtgtgcaaaaacccaat

SEQ ID NO: 1748854 - DNA, 25 bp, Homo sapien
gctgggaccatagacgcgagcgacc

SEQ ID NO: 1748855 - DNA, 25 bp, Homo sapien
tgggaccatagacgcgagcgaccac

SEQ ID NO: 1748856 - DNA, 25 bp, Homo sapien
agacgcgagcgaccaccacccctgg

SEQ ID NO: 1748857 - DNA, 25 bp, Homo sapien
tcagacagggtatcgctttgtcgct

SEQ ID NO: 1748858 - DNA, 25 bp, Homo sapien
caccaataccagagcgctatcaggg

SEQ ID NO: 1748859 - DNA, 25 bp, Homo sapien
gcgggactgagtgcctacggccaat

SEQ ID NO: 1748860 - DNA, 25 bp, Homo sapien
tatcagacgcaaagcacgtcgcagc

SEQ ID NO: 1748861 - DNA, 25 bp, Homo sapien
agtgcctacggccaatcatatcaga

SEQ ID NO: 1748862 - DNA, 25 bp, Homo sapien
gggcagccgacctccactcggggga

SEQ ID NO: 1748863 - DNA, 25 bp, Homo sapien
agatggactccctccgactctctgg

SEQ ID NO: 1748864 - DNA, 25 bp, Homo sapien
ttccttagcagtccctcacggaccg

SEQ ID NO: 1748865 - DNA, 25 bp, Homo sapien
ggactaccgcgccatgcagcctctt

SEQ ID NO: 1748866 - DNA, 25 bp, Homo sapien
ctgcggccagacgtcaggcgcggcc

SEQ ID NO: 1748867 - DNA, 25 bp, Homo sapien
tgcggccagacgtcaggcgcggccc

SEQ ID NO: 1748868 - DNA, 25 bp, Homo sapien
cggccagacgtcaggcgcggccctt

SEQ ID NO: 1748869 - DNA, 25 bp, Homo sapien
gccagacgtcaggcgcggcccttcc

SEQ ID NO: 1748870 - DNA, 25 bp, Homo sapien
tacactcatgggaaaggctaataca

SEQ ID NO: 1748871 - DNA, 25 bp, Homo sapien
tctcttgtaaaacggaacgccagga

SEQ ID NO: 1748872 - DNA, 25 bp, Homo sapien
gaggtcaaacctgtagtaagccgag

SEQ ID NO: 1748873 - DNA, 25 bp, Homo sapien
cattcacatctgagttagggcctac

SEQ ID NO: 1748874 - DNA, 25 bp, Homo sapien
tacagaaaaggcatggtaggtatta

SEQ ID NO: 1748875 - DNA, 25 bp, Homo sapien
tggacaaccagtgaagtcatgttga

SEQ ID NO: 1748876 - DNA, 25 bp, Homo sapien
catcagcaccttagtgatacgtgag

SEQ ID NO: 1748877 - DNA, 25 bp, Homo sapien
gtattatgatttgggactcatcagc

SEQ ID NO: 1748878 - DNA, 25 bp, Homo sapien
catgtttctagctttggaggacagt

SEQ ID NO: 1748879 - DNA, 25 bp, Homo sapien
tcatgtttctagctttggaggacag

SEQ ID NO: 1748880 - DNA, 25 bp, Homo sapien
ttctagctttggaggacagtcatgc

SEQ ID NO: 1748881 - DNA, 25 bp, Homo sapien
tagctttggaggacagtcatgcttt

SEQ ID NO: 1748882 - DNA, 25 bp, Homo sapien
taagccattttgagtctcccctgtc

SEQ ID NO: 1748883 - DNA, 25 bp, Homo sapien
gcaggcctagcagaatggcaagtaa

SEQ ID NO: 1748884 - DNA, 25 bp, Homo sapien
gagaaatgtccatctcacccaatgg

SEQ ID NO: 1748885 - DNA, 25 bp, Homo sapien
tgatattaatacttgcctgcaggag

SEQ ID NO: 1748886 - DNA, 25 bp, Homo sapien
caagatttaatggaaagtgtattca

SEQ ID NO: 1748887 - DNA, 25 bp, Homo sapien
tgtattcaaatggacagtcttcccc

SEQ ID NO: 1748888 - DNA, 25 bp, Homo sapien
tgagaggtagtcaacaagatttaat

SEQ ID NO: 1748889 - DNA, 25 bp, Homo sapien
cactaaaaacagatctgagaggtag

SEQ ID NO: 1748890 - DNA, 25 bp, Homo sapien
cacaatcaagtatgggtgtgaacac

SEQ ID NO: 1748891 - DNA, 25 bp, Homo sapien
ctataagttcacaatcaagtatggg

SEQ ID NO: 1748892 - DNA, 25 bp, Homo sapien
gttcacaatcaagtatgggtgtgaa

SEQ ID NO: 1748893 - DNA, 25 bp, Homo sapien
taagttcacaatcaagtatgggtgt

SEQ ID NO: 1748894 - DNA, 25 bp, Homo sapien
tcacattggcgaacacttcttgaca

SEQ ID NO: 1748895 - DNA, 25 bp, Homo sapien
cattggcgaacacttcttgacacga

SEQ ID NO: 1748896 - DNA, 25 bp, Homo sapien
ggcgaacacttcttgacacgatctc

SEQ ID NO: 1748897 - DNA, 25 bp, Homo sapien
ttggcgaacacttcttgacacgatc

SEQ ID NO: 1748898 - DNA, 25 bp, Homo sapien
ttattcactatctcaaggtttccaa

SEQ ID NO: 1748899 - DNA, 25 bp, Homo sapien
tattcactatctcaaggtttccaaa

SEQ ID NO: 1748900 - DNA, 25 bp, Homo sapien
cattattcactatctcaaggtttcc

SEQ ID NO: 1748901 - DNA, 25 bp, Homo sapien
cattctagctccattattcactatc

SEQ ID NO: 1748902 - DNA, 25 bp, Homo sapien
ttatctccacatcttaattctaggt

SEQ ID NO: 1748903 - DNA, 25 bp, Homo sapien
tttgtcagatcattatctccacatc

SEQ ID NO: 1748904 - DNA, 25 bp, Homo sapien
tttttgtcagatcattatctccaca

SEQ ID NO: 1748905 - DNA, 25 bp, Homo sapien
atctccacatcttaattctaggtcc

SEQ ID NO: 1748906 - DNA, 25 bp, Homo sapien
gagaaaacactactttcggaccagc

SEQ ID NO: 1748907 - DNA, 25 bp, Homo sapien
agaaaacactactttcggaccagct

SEQ ID NO: 1748908 - DNA, 25 bp, Homo sapien
gagacctggtaatcctgggtgtctt

SEQ ID NO: 1748909 - DNA, 25 bp, Homo sapien
agacctggtaatcctgggtgtcttt

SEQ ID NO: 1748910 - DNA, 25 bp, Homo sapien
tataaatctaagagacctggtaatc

SEQ ID NO: 1748911 - DNA, 25 bp, Homo sapien
atataaatctaagagacctggtaat

SEQ ID NO: 1748912 - DNA, 25 bp, Homo sapien
atcctatttccttttgagagtcacc

SEQ ID NO: 1748913 - DNA, 25 bp, Homo sapien
gatcctatttccttttgagagtcac

SEQ ID NO: 1748914 - DNA, 25 bp, Homo sapien
tcctatttccttttgagagtcacca

SEQ ID NO: 1748915 - DNA, 25 bp, Homo sapien
cctatttccttttgagagtcaccac

SEQ ID NO: 1748916 - DNA, 25 bp, Homo sapien
gacatcaaataaacttgttccatca

SEQ ID NO: 1748917 - DNA, 25 bp, Homo sapien
catcaaataaacttgttccatcacc

SEQ ID NO: 1748918 - DNA, 25 bp, Homo sapien
acatcaaataaacttgttccatcac

SEQ ID NO: 1748919 - DNA, 25 bp, Homo sapien
gcgtatatgtccagtgagccttcat

SEQ ID NO: 1748920 - DNA, 25 bp, Homo sapien
acagcactgtccaacccagcgtata

SEQ ID NO: 1748921 - DNA, 25 bp, Homo sapien
gtccaacccagcgtatatgtccagt

SEQ ID NO: 1748922 - DNA, 25 bp, Homo sapien
caacccagcgtatatgtccagtgag

SEQ ID NO: 1748923 - DNA, 25 bp, Homo sapien
ggtacacaggatttggaagcgctgt

SEQ ID NO: 1748924 - DNA, 25 bp, Homo sapien
caaacaatttcttgatggtacacag

SEQ ID NO: 1748925 - DNA, 25 bp, Homo sapien
caatttcttgatggtacacaggatt

SEQ ID NO: 1748926 - DNA, 25 bp, Homo sapien
tggtacacaggatttggaagcgctg

SEQ ID NO: 1748927 - DNA, 25 bp, Homo sapien
tcatcagctctttcatttgtagttg

SEQ ID NO: 1748928 - DNA, 25 bp, Homo sapien
cagctctttcatttgtagttgacat

SEQ ID NO: 1748929 - DNA, 25 bp, Homo sapien
ttttttcatcagctctttcatttgt

SEQ ID NO: 1748930 - DNA, 25 bp, Homo sapien
gacattttccatattctacttgcaa

SEQ ID NO: 1748931 - DNA, 25 bp, Homo sapien
tgataagtgctgaaatattcttctt

SEQ ID NO: 1748932 - DNA, 25 bp, Homo sapien
tcatccttgcggtttatttccactc

SEQ ID NO: 1748933 - DNA, 25 bp, Homo sapien
ccactctggcagttttgataagtgc

SEQ ID NO: 1748934 - DNA, 25 bp, Homo sapien
ctttggtgaagattacttatttctt

SEQ ID NO: 1748935 - DNA, 25 bp, Homo sapien
tacccacgtaatttataacagctac

SEQ ID NO: 1748936 - DNA, 25 bp, Homo sapien
cacatatcaatacccacgtaattta

SEQ ID NO: 1748937 - DNA, 25 bp, Homo sapien
tataacagctacaccgctcagtaat

SEQ ID NO: 1748938 - DNA, 25 bp, Homo sapien
taaaaatattccacatatcaatacc

SEQ ID NO: 1748939 - DNA, 25 bp, Homo sapien
gaaaatatgaacctctctggagcaa

SEQ ID NO: 1748940 - DNA, 25 bp, Homo sapien
tgagagatagtataagggctgttta

SEQ ID NO: 1748941 - DNA, 25 bp, Homo sapien
agcaaaatattgcctccaaccaata

SEQ ID NO: 1748942 - DNA, 25 bp, Homo sapien
aaaagaatatacaattgagagatag

SEQ ID NO: 1748943 - DNA, 25 bp, Homo sapien
tatgtaagcctcatatgaaccctgt

SEQ ID NO: 1748944 - DNA, 25 bp, Homo sapien
gatactgactcaaccgaccaactgt

SEQ ID NO: 1748945 - DNA, 25 bp, Homo sapien
ttgtttaggccacccatttctggta

SEQ ID NO: 1748946 - DNA, 25 bp, Homo sapien
taaagtgatgtcctcaaggtgggca

SEQ ID NO: 1748947 - DNA, 25 bp, Homo sapien
ctcctggttgagaaagaaattacca

SEQ ID NO: 1748948 - DNA, 25 bp, Homo sapien
cttcattcacatgagtaattcatga

SEQ ID NO: 1748949 - DNA, 25 bp, Homo sapien
atgcctctaatatcagcacttgagg

SEQ ID NO: 1748950 - DNA, 25 bp, Homo sapien
taatatcagcacttgaggaggacaa

SEQ ID NO: 1748951 - DNA, 25 bp, Homo sapien
tgattatttcgaaaatgtggaaact

SEQ ID NO: 1748952 - DNA, 25 bp, Homo sapien
caaatgtggagatctagatttaaga

SEQ ID NO: 1748953 - DNA, 25 bp, Homo sapien
aatgtggagatctagatttaagatc

SEQ ID NO: 1748954 - DNA, 25 bp, Homo sapien
gttttatgattatttcgaaaatgtg

SEQ ID NO: 1748955 - DNA, 25 bp, Homo sapien
tcgccaacctgataatgagaacgtg

SEQ ID NO: 1748956 - DNA, 25 bp, Homo sapien
tggtttctgagataccgatcctggg

SEQ ID NO: 1748957 - DNA, 25 bp, Homo sapien
taagcaaggctccagatgacacgac

SEQ ID NO: 1748958 - DNA, 25 bp, Homo sapien
ggaagtctctgtaccacaaatgggc

SEQ ID NO: 1748959 - DNA, 25 bp, Homo sapien
ccatgtgcacttctagataacaggg

SEQ ID NO: 1748960 - DNA, 25 bp, Homo sapien
aaccctccatgtgcacttctagata

SEQ ID NO: 1748961 - DNA, 25 bp, Homo sapien
taacaggggctgagtaatatgctac

SEQ ID NO: 1748962 - DNA, 25 bp, Homo sapien
aaaaaaccctccatgtgcacttcta

SEQ ID NO: 1748963 - DNA, 25 bp, Homo sapien
gattcttctgtaaggtagtcactga

SEQ ID NO: 1748964 - DNA, 25 bp, Homo sapien
catcagctgacactctacgtttgga

SEQ ID NO: 1748965 - DNA, 25 bp, Homo sapien
tgtacttccaaggagcgctcttcgg

SEQ ID NO: 1748966 - DNA, 25 bp, Homo sapien
tcagaagagggtacagcaataattg

SEQ ID NO: 1748967 - DNA, 25 bp, Homo sapien
taaaagtaaggctcgatgcttgctg

SEQ ID NO: 1748968 - DNA, 25 bp, Homo sapien
ggtggtactgaaagcctggagcaac

SEQ ID NO: 1748969 - DNA, 25 bp, Homo sapien
gatgaaccggcaatgaaagccctga

SEQ ID NO: 1748970 - DNA, 25 bp, Homo sapien
gacttttccattatgacggcatgca

SEQ ID NO: 1748971 - DNA, 25 bp, Homo sapien
ggtcaagtcgatataggtttcctca

SEQ ID NO: 1748972 - DNA, 25 bp, Homo sapien
gatgagggatctttagtcacaggag

SEQ ID NO: 1748973 - DNA, 25 bp, Homo sapien
gaagatgttccccaacagagtgtga

SEQ ID NO: 1748974 - DNA, 25 bp, Homo sapien
taaaagcacctacagtatcagcctg

SEQ ID NO: 1748975 - DNA, 25 bp, Homo sapien
aacttggcggctaaatatgcaaatg

SEQ ID NO: 1748976 - DNA, 25 bp, Homo sapien
tttatccaacttggcggctaaatat

SEQ ID NO: 1748977 - DNA, 25 bp, Homo sapien
cactccaataaaatttcccggtcat

SEQ ID NO: 1748978 - DNA, 25 bp, Homo sapien
ccaacttggcggctaaatatgcaaa

SEQ ID NO: 1748979 - DNA, 25 bp, Homo sapien
gtatttagagtagcaacatctgtga

SEQ ID NO: 1748980 - DNA, 25 bp, Homo sapien
tctgtgaaccaatagagatgtaaaa

SEQ ID NO: 1748981 - DNA, 25 bp, Homo sapien
taagtatttagagtagcaacatctg

SEQ ID NO: 1748982 - DNA, 25 bp, Homo sapien
tagagtagcaacatctgtgaaccaa

SEQ ID NO: 1748983 - DNA, 25 bp, Homo sapien
ggtgataaacctccctctagtgctc

SEQ ID NO: 1748984 - DNA, 25 bp, Homo sapien
gcaaatcagaatgatgactagcaca

SEQ ID NO: 1748985 - DNA, 25 bp, Homo sapien
gactagcacaagctgaacatgctga

SEQ ID NO: 1748986 - DNA, 25 bp, Homo sapien
taggcaaagccgtttatgtgtgtgc

SEQ ID NO: 1748987 - DNA, 25 bp, Homo sapien
tgtaatcttttaggacagggcttct

SEQ ID NO: 1748988 - DNA, 25 bp, Homo sapien
atgtgtaatcttttaggacagggct

SEQ ID NO: 1748989 - DNA, 25 bp, Homo sapien
gagccctagcactacaaaaccactg

SEQ ID NO: 1748990 - DNA, 25 bp, Homo sapien
gggacaagccccatgttggagagcc

SEQ ID NO: 1748991 - DNA, 25 bp, Homo sapien
tgcagaaggactgatggccaaccct

SEQ ID NO: 1748992 - DNA, 25 bp, Homo sapien
ctggtggtatgagatcttctgagtg

SEQ ID NO: 1748993 - DNA, 25 bp, Homo sapien
gtatgcactgcagaaggactgatgg

SEQ ID NO: 1748994 - DNA, 25 bp, Homo sapien
tatgagatcttctgagtgagagtat

SEQ ID NO: 1748995 - DNA, 25 bp, Homo sapien
atcttctacagtgggtgcaattaag

SEQ ID NO: 1748996 - DNA, 25 bp, Homo sapien
cagtgggtgcaattaagagtaaact

SEQ ID NO: 1748997 - DNA, 25 bp, Homo sapien
cttctacagtgggtgcaattaagag

SEQ ID NO: 1748998 - DNA, 25 bp, Homo sapien
ctacagtgggtgcaattaagagtaa

SEQ ID NO: 1748999 - DNA, 25 bp, Homo sapien
tatttgtcctggctaatttggaagt

SEQ ID NO: 1749000 - DNA, 25 bp, Homo sapien
aattcataactttcttcgctgttag

SEQ ID NO: 1749001 - DNA, 25 bp, Homo sapien
cataactttcttcgctgttagcaac

SEQ ID NO: 1749002 - DNA, 25 bp, Homo sapien
taacgtaattcataactttcttcgc

SEQ ID NO: 1749003 - DNA, 25 bp, Homo sapien
cctcagagtagcgtacaggacgaca

SEQ ID NO: 1749004 - DNA, 25 bp, Homo sapien
tcagagtagcgtacaggacgacagg

SEQ ID NO: 1749005 - DNA, 25 bp, Homo sapien
agccgcctcctcagagtagcgtaca

SEQ ID NO: 1749006 - DNA, 25 bp, Homo sapien
cctcctcagagtagcgtacaggacg

SEQ ID NO: 1749007 - DNA, 25 bp, Homo sapien
caggtcctccgggaggtccttgtcg

SEQ ID NO: 1749008 - DNA, 25 bp, Homo sapien
tccgggaggtccttgtcgacttgca

SEQ ID NO: 1749009 - DNA, 25 bp, Homo sapien
tgatgtcgggtgcattctgcaggtc

SEQ ID NO: 1749010 - DNA, 25 bp, Homo sapien
cagggtggcgtccaccaagtagttg

SEQ ID NO: 1749011 - DNA, 25 bp, Homo sapien
ctcagtgcacatcaggccgctgcaa

SEQ ID NO: 1749012 - DNA, 25 bp, Homo sapien
gggcagtagtcagtcagcaataaac

SEQ ID NO: 1749013 - DNA, 25 bp, Homo sapien
gaaggagagcgccatattcagggca

SEQ ID NO: 1749014 - DNA, 25 bp, Homo sapien
cttcgtacaggtccacgttaaagat

SEQ ID NO: 1749015 - DNA, 25 bp, Homo sapien
ctgaatcatcatggccgcgcctggt

SEQ ID NO: 1749016 - DNA, 25 bp, Homo sapien
tcaggtggacctcttcgagagcttc

SEQ ID NO: 1749017 - DNA, 25 bp, Homo sapien
gagtgacacttgagggcattgctga

SEQ ID NO: 1749018 - DNA, 25 bp, Homo sapien
cactctcaaggatggcgtcgggtga

SEQ ID NO: 1749019 - DNA, 25 bp, Homo sapien
ctcagcacgtaaggccaattttgca

SEQ ID NO: 1749020 - DNA, 25 bp, Homo sapien
taaggccaattttgcaagtagacgc

SEQ ID NO: 1749021 - DNA, 25 bp, Homo sapien
gcggctcagcacgtaaggccaattt

SEQ ID NO: 1749022 - DNA, 25 bp, Homo sapien
gcacgtaaggccaattttgcaagta

SEQ ID NO: 1749023 - DNA, 25 bp, Homo sapien
tgtcctcgctgctaggcaatctcca

SEQ ID NO: 1749024 - DNA, 25 bp, Homo sapien
tctgtcctcgctgctaggcaatctc

SEQ ID NO: 1749025 - DNA, 25 bp, Homo sapien
tcctcgctgctaggcaatctccagg

SEQ ID NO: 1749026 - DNA, 25 bp, Homo sapien
ctgggtgaggaccgcctgcgcctgg

SEQ ID NO: 1749027 - DNA, 25 bp, Homo sapien
ctgccaagcctccagcgcattgaag

SEQ ID NO: 1749028 - DNA, 25 bp, Homo sapien
tgggggacgtcacagtgatcaaacg

SEQ ID NO: 1749029 - DNA, 25 bp, Homo sapien
acagtgatcaaacgaagccagcagg

SEQ ID NO: 1749030 - DNA, 25 bp, Homo sapien
ggcagcctgcttgtacttcctcgcg

SEQ ID NO: 1749031 - DNA, 25 bp, Homo sapien
ccccacagacggccacgttgctggg

SEQ ID NO: 1749032 - DNA, 25 bp, Homo sapien
cttctgccggtcgaaggtggccaag

SEQ ID NO: 1749033 - DNA, 25 bp, Homo sapien
cagcttctgccggtcgaaggtggcc

SEQ ID NO: 1749034 - DNA, 25 bp, Homo sapien
aaggtggccaaggcgcataggcccc

SEQ ID NO: 1749035 - DNA, 25 bp, Homo sapien
agcatcttcagacacgaggcatcgt

SEQ ID NO: 1749036 - DNA, 25 bp, Homo sapien
gtacacatgtccaagagcaggtcgt

SEQ ID NO: 1749037 - DNA, 25 bp, Homo sapien
cgtggaattagaagacgatgtctcc

SEQ ID NO: 1749038 - DNA, 25 bp, Homo sapien
gcatcttcagacacgaggcacgctt

SEQ ID NO: 1749039 - DNA, 25 bp, Homo sapien
gcagagttgcgaatctgggcgtaca

SEQ ID NO: 1749040 - DNA, 25 bp, Homo sapien
taagggcacggccaccctgtgcgag

SEQ ID NO: 1749041 - DNA, 25 bp, Homo sapien
ccaccctgtgcgagttgagggcaga

SEQ ID NO: 1749042 - DNA, 25 bp, Homo sapien
cagagttgcgaatctgggcgtacag

SEQ ID NO: 1749043 - DNA, 25 bp, Homo sapien
tcccggacttgctgcgtcagctcac

SEQ ID NO: 1749044 - DNA, 25 bp, Homo sapien
gcgggcgcgtcagcccctcccggac

SEQ ID NO: 1749045 - DNA, 25 bp, Homo sapien
ctgtgcgagtccacgcgggcgcgtc

SEQ ID NO: 1749046 - DNA, 25 bp, Homo sapien
gcccctcccggacttgctgcgtcag

SEQ ID NO: 1749047 - DNA, 25 bp, Homo sapien
tggtgcttgcgctgatccacatccc

SEQ ID NO: 1749048 - DNA, 25 bp, Homo sapien
gcctttggcgcggtgctgaaactcc

SEQ ID NO: 1749049 - DNA, 25 bp, Homo sapien
tgccgatccgcagagacttctcgaa

SEQ ID NO: 1749050 - DNA, 25 bp, Homo sapien
cacatcccgggcgtccaggatcttg

SEQ ID NO: 1749051 - DNA, 25 bp, Homo sapien
tggctgttggccggagtcgctcccc

SEQ ID NO: 1749052 - DNA, 25 bp, Homo sapien
ggactggctgttggccggagtcgct

SEQ ID NO: 1749053 - DNA, 25 bp, Homo sapien
actggctgttggccggagtcgctcc

SEQ ID NO: 1749054 - DNA, 25 bp, Homo sapien
tgttggccggagtcgctccccgggc

SEQ ID NO: 1749055 - DNA, 25 bp, Homo sapien
ggtgagtgtggcctcataaatgtga

SEQ ID NO: 1749056 - DNA, 25 bp, Homo sapien
taaacaactgcctggggtgagtgtg

SEQ ID NO: 1749057 - DNA, 25 bp, Homo sapien
gagtggcaatcaaacctaaagtgtt

SEQ ID NO: 1749058 - DNA, 25 bp, Homo sapien
aacaaatagtaatggagtggcaatc

SEQ ID NO: 1749059 - DNA, 25 bp, Homo sapien
gatggacagtttctaggagccgtag

SEQ ID NO: 1749060 - DNA, 25 bp, Homo sapien
gagccgtagttgtacctagccagga

SEQ ID NO: 1749061 - DNA, 25 bp, Homo sapien
caagcaggagctattccgagaacca

SEQ ID NO: 1749062 - DNA, 25 bp, Homo sapien
gatattgttgcaacctggctgccgg

SEQ ID NO: 1749063 - DNA, 25 bp, Homo sapien
tccatgatcggtagggctgcctgtc

SEQ ID NO: 1749064 - DNA, 25 bp, Homo sapien
tgtatcgaatgaataattttatctc

SEQ ID NO: 1749065 - DNA, 25 bp, Homo sapien
catccagaatggaacagctcttgtg

SEQ ID NO: 1749066 - DNA, 25 bp, Homo sapien
aacagctcttgtgatagttccatga

SEQ ID NO: 1749067 - DNA, 25 bp, Homo sapien
ttatgtctctaatttgacaacagga

SEQ ID NO: 1749068 - DNA, 25 bp, Homo sapien
ctaatttgacaacaggattggatgt

SEQ ID NO: 1749069 - DNA, 25 bp, Homo sapien
tgttgtgtattgtggaggtttttgt

SEQ ID NO: 1749070 - DNA, 25 bp, Homo sapien
tctctaatttgacaacaggattgga

SEQ ID NO: 1749071 - DNA, 25 bp, Homo sapien
cattagtagactggacatggccgag

SEQ ID NO: 1749072 - DNA, 25 bp, Homo sapien
gagacccaacgagcatcagaatcag

SEQ ID NO: 1749073 - DNA, 25 bp, Homo sapien
tcagagtcagatagggcacaaatgt

SEQ ID NO: 1749074 - DNA, 25 bp, Homo sapien
catggccgaggaaacaatctctgag

SEQ ID NO: 1749075 - DNA, 25 bp, Homo sapien
tgcctggccgcaagtcacctatttc

SEQ ID NO: 1749076 - DNA, 25 bp, Homo sapien
gtgcctggccgcaagtcacctattt

SEQ ID NO: 1749077 - DNA, 25 bp, Homo sapien
gcctggccgcaagtcacctatttcc

SEQ ID NO: 1749078 - DNA, 25 bp, Homo sapien
cgtgcctggccgcaagtcacctatt

SEQ ID NO: 1749079 - DNA, 25 bp, Homo sapien
tagatctcctctgacggtgtacagc

SEQ ID NO: 1749080 - DNA, 25 bp, Homo sapien
gcagagccgctcttgtccctagatc

SEQ ID NO: 1749081 - DNA, 25 bp, Homo sapien
caggaagcacatctgacctcaggct

SEQ ID NO: 1749082 - DNA, 25 bp, Homo sapien
atcagacctccctcaagcagtgtgc

SEQ ID NO: 1749083 - DNA, 25 bp, Homo sapien
ccacgggctgtttaggaggatgcct

SEQ ID NO: 1749084 - DNA, 25 bp, Homo sapien
ccaaccacgggctgtttaggaggat

SEQ ID NO: 1749085 - DNA, 25 bp, Homo sapien
aaccacgggctgtttaggaggatgc

SEQ ID NO: 1749086 - DNA, 25 bp, Homo sapien
cctccaaccacgggctgtttaggag

SEQ ID NO: 1749087 - DNA, 25 bp, Homo sapien
caacctaacttctgccatgggaact

SEQ ID NO: 1749088 - DNA, 25 bp, Homo sapien
cactgctctaaaaaccatcttccaa

SEQ ID NO: 1749089 - DNA, 25 bp, Homo sapien
tgaacagtgactagcttcgtgcagt

SEQ ID NO: 1749090 - DNA, 25 bp, Homo sapien
gttatttcattcataatccaccatg

SEQ ID NO: 1749091 - DNA, 25 bp, Homo sapien
caactggtagtcttgaccacattcc

SEQ ID NO: 1749092 - DNA, 25 bp, Homo sapien
taacaactcatgtgcaactggtagt

SEQ ID NO: 1749093 - DNA, 25 bp, Homo sapien
tcatgtgcaactggtagtcttgacc

SEQ ID NO: 1749094 - DNA, 25 bp, Homo sapien
cctggtaacaactcatgtgcaactg

SEQ ID NO: 1749095 - DNA, 25 bp, Homo sapien
gaacactttctgctcatatcataac

SEQ ID NO: 1749096 - DNA, 25 bp, Homo sapien
ctttctgctcatatcataaccaggt

SEQ ID NO: 1749097 - DNA, 25 bp, Homo sapien
gctcatatcataaccaggtccaacc

SEQ ID NO: 1749098 - DNA, 25 bp, Homo sapien
actttctgctcatatcataaccagg

SEQ ID NO: 1749099 - DNA, 25 bp, Homo sapien
aactggttggcttgcaacccagaga

SEQ ID NO: 1749100 - DNA, 25 bp, Homo sapien
ttgggtccgggtctcactgagcagc

SEQ ID NO: 1749101 - DNA, 25 bp, Homo sapien
ggaggaggaatcagctccctcgctc

SEQ ID NO: 1749102 - DNA, 25 bp, Homo sapien
tttacaggaaggtgtgccccagagg

SEQ ID NO: 1749103 - DNA, 25 bp, Homo sapien
acaggaatccgtgattttataccag

SEQ ID NO: 1749104 - DNA, 25 bp, Homo sapien
aacaggaatccgtgattttatacca

SEQ ID NO: 1749105 - DNA, 25 bp, Homo sapien
ggtcaactttgccacttgcactgag

SEQ ID NO: 1749106 - DNA, 25 bp, Homo sapien
tgcactgagttttgggtcaaaccta

SEQ ID NO: 1749107 - DNA, 25 bp, Homo sapien
ccaagtggtgtcatttgagcattgt

SEQ ID NO: 1749108 - DNA, 25 bp, Homo sapien
tcatcctaggatgtgtagacaataa

SEQ ID NO: 1749109 - DNA, 25 bp, Homo sapien
agattaaagatgacagtagagagac

SEQ ID NO: 1749110 - DNA, 25 bp, Homo sapien
gatgacagtagagagactgccttcc

SEQ ID NO: 1749111 - DNA, 25 bp, Homo sapien
taaagatgacagtagagagactgcc

SEQ ID NO: 1749112 - DNA, 25 bp, Homo sapien
gacagtagagagactgccttcccca

SEQ ID NO: 1749113 - DNA, 25 bp, Homo sapien
cagggagccagattccttgccacag

SEQ ID NO: 1749114 - DNA, 25 bp, Homo sapien
agaccaggaccaggacttccagctc

SEQ ID NO: 1749115 - DNA, 25 bp, Homo sapien
tctgtgagttctcctcctcgccctg

SEQ ID NO: 1749116 - DNA, 25 bp, Homo sapien
tcttcctattcctacgcggaggacg

SEQ ID NO: 1749117 - DNA, 25 bp, Homo sapien
cattccgggaagataactctagcaa

SEQ ID NO: 1749118 - DNA, 25 bp, Homo sapien
gagacgatggattcagagacggcca

SEQ ID NO: 1749119 - DNA, 25 bp, Homo sapien
caggttttgcaagcacattccggga

SEQ ID NO: 1749120 - DNA, 25 bp, Homo sapien
gttaacgcagtaccccagatacaag

SEQ ID NO: 1749121 - DNA, 25 bp, Homo sapien
gattcgggacaatagcagtgctgat

SEQ ID NO: 1749122 - DNA, 25 bp, Homo sapien
gttcctgcgcatgcacaacctggag

SEQ ID NO: 1749123 - DNA, 25 bp, Homo sapien
gtttgcctacactgccaagctgtta

SEQ ID NO: 1749124 - DNA, 25 bp, Homo sapien
gcagagaaaacatccgcgaggtcat

SEQ ID NO: 1749125 - DNA, 25 bp, Homo sapien
ttgaccctggtgattttcaattctg

SEQ ID NO: 1749126 - DNA, 25 bp, Homo sapien
caggcactaattattggaagcagaa

SEQ ID NO: 1749127 - DNA, 25 bp, Homo sapien
cctgtgctgtgatggagtacaacag

SEQ ID NO: 1749128 - DNA, 25 bp, Homo sapien
aacagtggcatgcacgagacaggca

SEQ ID NO: 1749129 - DNA, 25 bp, Homo sapien
tacaggtccttgcaagaattttggc

SEQ ID NO: 1749130 - DNA, 25 bp, Homo sapien
tacaggatttgtagacatgcgtcac

SEQ ID NO: 1749131 - DNA, 25 bp, Homo sapien
gagtttaatacacacagaagtcagc

SEQ ID NO: 1749132 - DNA, 25 bp, Homo sapien
tagcctctagcaaggaccccatgat

SEQ ID NO: 1749133 - DNA, 25 bp, Homo sapien
atttaagcatcagctcgtccctgag

SEQ ID NO: 1749134 - DNA, 25 bp, Homo sapien
cgtccctgagcggagatgctttctc

SEQ ID NO: 1749135 - DNA, 25 bp, Homo sapien
tcagctcgtccctgagcggagatgc

SEQ ID NO: 1749136 - DNA, 25 bp, Homo sapien
agctccttgcagccatgtggcagag

SEQ ID NO: 1749137 - DNA, 25 bp, Homo sapien
gcaaaatcttgcagacttaaatatg

SEQ ID NO: 1749138 - DNA, 25 bp, Homo sapien
tgagcaaaatcttgcagacttaaat

SEQ ID NO: 1749139 - DNA, 25 bp, Homo sapien
aaatcttgcagacttaaatatgaca

SEQ ID NO: 1749140 - DNA, 25 bp, Homo sapien
gctgagcaaaatcttgcagacttaa

SEQ ID NO: 1749141 - DNA, 25 bp, Homo sapien
tgtactgcatccaattggccagact

SEQ ID NO: 1749142 - DNA, 25 bp, Homo sapien
agattcaccttctgcataccaaaag

SEQ ID NO: 1749143 - DNA, 25 bp, Homo sapien
attggccagacttctttggatagag

SEQ ID NO: 1749144 - DNA, 25 bp, Homo sapien
tatgagattcaccttctgcatacca

SEQ ID NO: 1749145 - DNA, 25 bp, Homo sapien
tagacatcagcttcatccgactgcc

SEQ ID NO: 1749146 - DNA, 25 bp, Homo sapien
caaatccccatgtggtaaaagggct

SEQ ID NO: 1749147 - DNA, 25 bp, Homo sapien
ggaccaatacttagctaggcctgat

SEQ ID NO: 1749148 - DNA, 25 bp, Homo sapien
taaaagggcttcgtaggatttgcag

SEQ ID NO: 1749149 - DNA, 25 bp, Homo sapien
gaaatagtttgattcacccagaaaa

SEQ ID NO: 1749150 - DNA, 25 bp, Homo sapien
cagaaatagtttgattcacccagaa

SEQ ID NO: 1749151 - DNA, 25 bp, Homo sapien
aactcagaaatagtttgattcaccc

SEQ ID NO: 1749152 - DNA, 25 bp, Homo sapien
ctcagaaatagtttgattcacccag

SEQ ID NO: 1749153 - DNA, 25 bp, Homo sapien
ccagcaggactggtatatgtgtcct

SEQ ID NO: 1749154 - DNA, 25 bp, Homo sapien
tttccaagccagcttgcagtctttt

SEQ ID NO: 1749155 - DNA, 25 bp, Homo sapien
ctccatggttttccgagcactgtca

SEQ ID NO: 1749156 - DNA, 25 bp, Homo sapien
tgtcagcctcttcccaacagatcgt

SEQ ID NO: 1749157 - DNA, 25 bp, Homo sapien
gtcgtctgacgcagttgttcccatg

SEQ ID NO: 1749158 - DNA, 25 bp, Homo sapien
ttactgtgtggcaaaggtgaactga

SEQ ID NO: 1749159 - DNA, 25 bp, Homo sapien
cagttgttcccatgttactgtgtgg

SEQ ID NO: 1749160 - DNA, 25 bp, Homo sapien
gggctgcatgcttgtcgtctgacgc

SEQ ID NO: 1749161 - DNA, 25 bp, Homo sapien
cattaatgatttgaaatgggtagtt

SEQ ID NO: 1749162 - DNA, 25 bp, Homo sapien
actggaaccagcatcattaatgatt

SEQ ID NO: 1749163 - DNA, 25 bp, Homo sapien
gctggcaaatccaatagctcagact

SEQ ID NO: 1749164 - DNA, 25 bp, Homo sapien
cagacttctctatcagcacagtaca

SEQ ID NO: 1749165 - DNA, 25 bp, Homo sapien
aggaaagaataagatgaaatgtttt

SEQ ID NO: 1749166 - DNA, 25 bp, Homo sapien
cataaggaaagaataagatgaaatg

SEQ ID NO: 1749167 - DNA, 25 bp, Homo sapien
taaggaaagaataagatgaaatgtt

SEQ ID NO: 1749168 - DNA, 25 bp, Homo sapien
tcataaggaaagaataagatgaaat

SEQ ID NO: 1749169 - DNA, 25 bp, Homo sapien
tatcttactggttgcagcactggag

SEQ ID NO: 1749170 - DNA, 25 bp, Homo sapien
gaaaatagatccagcgtacgctcag

SEQ ID NO: 1749171 - DNA, 25 bp, Homo sapien
tatgcgtaaagatgtgatcccaggg

SEQ ID NO: 1749172 - DNA, 25 bp, Homo sapien
tagtaacagtcttcgtacaggacag

SEQ ID NO: 1749173 - DNA, 25 bp, Homo sapien
atgattcagtatgcgtgctgccagg

SEQ ID NO: 1749174 - DNA, 25 bp, Homo sapien
cttgttatgattcagtatgcgtgct

SEQ ID NO: 1749175 - DNA, 25 bp, Homo sapien
tgttatgattcagtatgcgtgctgc

SEQ ID NO: 1749176 - DNA, 25 bp, Homo sapien
ttatgattcagtatgcgtgctgcca

SEQ ID NO: 1749177 - DNA, 25 bp, Homo sapien
tcagatgatctcatgtgtctgcccc

SEQ ID NO: 1749178 - DNA, 25 bp, Homo sapien
tgtgagaatcttagtgtcccgcccc

SEQ ID NO: 1749179 - DNA, 25 bp, Homo sapien
tcactctcagggacatgacccagga

SEQ ID NO: 1749180 - DNA, 25 bp, Homo sapien
ccggatggacggatgtctgtgcatt

SEQ ID NO: 1749181 - DNA, 25 bp, Homo sapien
aagtccggctataacagggccaggg

SEQ ID NO: 1749182 - DNA, 25 bp, Homo sapien
tgtcttcccacagctgtactttggt

SEQ ID NO: 1749183 - DNA, 25 bp, Homo sapien
ttctttccagcatcagaaatgactg

SEQ ID NO: 1749184 - DNA, 25 bp, Homo sapien
tttggtttctcaagcttctttccag

SEQ ID NO: 1749185 - DNA, 25 bp, Homo sapien
ctcagatgcaaggcttaagaaagcc

SEQ ID NO: 1749186 - DNA, 25 bp, Homo sapien
cagatgcaaggcttaagaaagcctt

SEQ ID NO: 1749187 - DNA, 25 bp, Homo sapien
gatgcaaggcttaagaaagccttac

SEQ ID NO: 1749188 - DNA, 25 bp, Homo sapien
tcagatgcaaggcttaagaaagcct

SEQ ID NO: 1749189 - DNA, 25 bp, Homo sapien
cacatggatggtgaaagaggccatc

SEQ ID NO: 1749190 - DNA, 25 bp, Homo sapien
tgctttacatgtgcctaaggcactg

SEQ ID NO: 1749191 - DNA, 25 bp, Homo sapien
tggaaacactagaaatcgctgaccc

SEQ ID NO: 1749192 - DNA, 25 bp, Homo sapien
ggccttgatacgtatccgtagtgct

SEQ ID NO: 1749193 - DNA, 25 bp, Homo sapien
catgaagtttatctcacctaaaatc

SEQ ID NO: 1749194 - DNA, 25 bp, Homo sapien
aaatcaacacccacaggatggacag

SEQ ID NO: 1749195 - DNA, 25 bp, Homo sapien
cagttgtttgtgctgcagaggttca

SEQ ID NO: 1749196 - DNA, 25 bp, Homo sapien
ttgtagatggcagggtactggcagt

SEQ ID NO: 1749197 - DNA, 25 bp, Homo sapien
aatgctagttaccagtttgacttgc

SEQ ID NO: 1749198 - DNA, 25 bp, Homo sapien
taaagagcggaaagagacttctggg

SEQ ID NO: 1749199 - DNA, 25 bp, Homo sapien
cataggcggatcatggctctttaac

SEQ ID NO: 1749200 - DNA, 25 bp, Homo sapien
tctgatcacctagaacataggcgga

SEQ ID NO: 1749201 - DNA, 25 bp, Homo sapien
gcttggttgaagaggacgaccttcc

SEQ ID NO: 1749202 - DNA, 25 bp, Homo sapien
agcctaacctgtcctaatacctggg

SEQ ID NO: 1749203 - DNA, 25 bp, Homo sapien
tatatacatagctgtgctgcctgct

SEQ ID NO: 1749204 - DNA, 25 bp, Homo sapien
tcagtatgcaacagaggatgggatc

SEQ ID NO: 1749205 - DNA, 25 bp, Homo sapien
tgaactcgaagggttagcaatagaa

SEQ ID NO: 1749206 - DNA, 25 bp, Homo sapien
tgtggctaggcatgatgactcaagc

SEQ ID NO: 1749207 - DNA, 25 bp, Homo sapien
gattgatggcagattagaccttgca

SEQ ID NO: 1749208 - DNA, 25 bp, Homo sapien
tttagagataaggaccacagtgtct

SEQ ID NO: 1749209 - DNA, 25 bp, Homo sapien
ttatgttgctgtatctttgtttttc

SEQ ID NO: 1749210 - DNA, 25 bp, Homo sapien
gcttatgttgctgtatctttgtttt

SEQ ID NO: 1749211 - DNA, 25 bp, Homo sapien
atgcttatgttgctgtatctttgtt

SEQ ID NO: 1749212 - DNA, 25 bp, Homo sapien
tgcttatgttgctgtatctttgttt

SEQ ID NO: 1749213 - DNA, 25 bp, Homo sapien
gaaaatcttcagtcaggttagtcta

SEQ ID NO: 1749214 - DNA, 25 bp, Homo sapien
ggttagtctaacaacagctccacga

SEQ ID NO: 1749215 - DNA, 25 bp, Homo sapien
ccattatgtttgaagaggaaccaac

SEQ ID NO: 1749216 - DNA, 25 bp, Homo sapien
gtgttttccaaagctctcaagtaag

SEQ ID NO: 1749217 - DNA, 25 bp, Homo sapien
tttcattcttagatcccatgggtcc

SEQ ID NO: 1749218 - DNA, 25 bp, Homo sapien
catttcattcttagatcccatgggt

SEQ ID NO: 1749219 - DNA, 25 bp, Homo sapien
tcattcttagatcccatgggtcctg

SEQ ID NO: 1749220 - DNA, 25 bp, Homo sapien
attcttagatcccatgggtcctgct

SEQ ID NO: 1749221 - DNA, 25 bp, Homo sapien
ctattgttaaatcccagttgtagcc

SEQ ID NO: 1749222 - DNA, 25 bp, Homo sapien
ctctctggcccgctaaacggggtag

SEQ ID NO: 1749223 - DNA, 25 bp, Homo sapien
gagatgacagtttatgcaccatgct

SEQ ID NO: 1749224 - DNA, 25 bp, Homo sapien
taaacggggtagtctcatctgacat

SEQ ID NO: 1749225 - DNA, 25 bp, Homo sapien
gacttggaaagctccaagcacattc

SEQ ID NO: 1749226 - DNA, 25 bp, Homo sapien
taatcgtcattctgagaagctgcca

SEQ ID NO: 1749227 - DNA, 25 bp, Homo sapien
gacaggacagggacttggaaagctc

SEQ ID NO: 1749228 - DNA, 25 bp, Homo sapien
cttttggtcacaataatcgtcattc

SEQ ID NO: 1749229 - DNA, 25 bp, Homo sapien
gaagaaaaggcaagccattgtcaaa

SEQ ID NO: 1749230 - DNA, 25 bp, Homo sapien
gtgaagaaaaggcaagccattgtca

SEQ ID NO: 1749231 - DNA, 25 bp, Homo sapien
tgaagaaaaggcaagccattgtcaa

SEQ ID NO: 1749232 - DNA, 25 bp, Homo sapien
ctgagggtgccattgagggtcctgt

SEQ ID NO: 1749233 - DNA, 25 bp, Homo sapien
ctgaaagcatcatcctgagggtgcc

SEQ ID NO: 1749234 - DNA, 25 bp, Homo sapien
tgtgtgctggctgttttcctgaggg

SEQ ID NO: 1749235 - DNA, 25 bp, Homo sapien
tcatcctgagggtgccattgagggt

SEQ ID NO: 1749236 - DNA, 25 bp, Homo sapien
agagccacgtctactcccagggcag

SEQ ID NO: 1749237 - DNA, 25 bp, Homo sapien
ttccagagccacgtctactcccagg

SEQ ID NO: 1749238 - DNA, 25 bp, Homo sapien
cagagccacgtctactcccagggca

SEQ ID NO: 1749239 - DNA, 25 bp, Homo sapien
ggccttccagagccacgtctactcc

SEQ ID NO: 1749240 - DNA, 25 bp, Homo sapien
atggaaagacagagaccccttcatg

SEQ ID NO: 1749241 - DNA, 25 bp, Homo sapien
gaccccttcatgtttattctcacag

SEQ ID NO: 1749242 - DNA, 25 bp, Homo sapien
ggaaagacagagaccccttcatgtt

SEQ ID NO: 1749243 - DNA, 25 bp, Homo sapien
accccttcatgtttattctcacagt

SEQ ID NO: 1749244 - DNA, 25 bp, Homo sapien
tgataagatgctcacccagaaaagt

SEQ ID NO: 1749245 - DNA, 25 bp, Homo sapien
gtgataagatgctcacccagaaaag

SEQ ID NO: 1749246 - DNA, 25 bp, Homo sapien
gataagatgctcacccagaaaagtg

SEQ ID NO: 1749247 - DNA, 25 bp, Homo sapien
ctgtgataagatgctcacccagaaa

SEQ ID NO: 1749248 - DNA, 25 bp, Homo sapien
tcttcaatagagatgacaagttgca

SEQ ID NO: 1749249 - DNA, 25 bp, Homo sapien
caagttgcacgtacagtgttacaga

SEQ ID NO: 1749250 - DNA, 25 bp, Homo sapien
gaaacgtgttgtgtacatctgttga

SEQ ID NO: 1749251 - DNA, 25 bp, Homo sapien
gaaggactcactctcatgggttcca

SEQ ID NO: 1749252 - DNA, 25 bp, Homo sapien
ttctcaccagcaaccggaaaggaac

SEQ ID NO: 1749253 - DNA, 25 bp, Homo sapien
caaggcctttccaggaccatggacg

SEQ ID NO: 1749254 - DNA, 25 bp, Homo sapien
tggacgtgccagtataactctagct

SEQ ID NO: 1749255 - DNA, 25 bp, Homo sapien
gagcactgacatccaagagaatgaa

SEQ ID NO: 1749256 - DNA, 25 bp, Homo sapien
tgcggacactcgaaggtgctcagct

SEQ ID NO: 1749257 - DNA, 25 bp, Homo sapien
gacagccacggctttcaaaaactgc

SEQ ID NO: 1749258 - DNA, 25 bp, Homo sapien
cctaggaacgtcaggatgggttatt

SEQ ID NO: 1749259 - DNA, 25 bp, Homo sapien
ggttattataagacagccacggctt

SEQ ID NO: 1749260 - DNA, 25 bp, Homo sapien
caccacgtgaattcctgtgcagtgt

SEQ ID NO: 1749261 - DNA, 25 bp, Homo sapien
gtgttctttgatcatgaggtttggt

SEQ ID NO: 1749262 - DNA, 25 bp, Homo sapien
cctctcttgaatgcaccacgtgaat

SEQ ID NO: 1749263 - DNA, 25 bp, Homo sapien
ttctttgatcatgaggtttggtttt

SEQ ID NO: 1749264 - DNA, 25 bp, Homo sapien
tgtttccaactgacaactgctgcca

SEQ ID NO: 1749265 - DNA, 25 bp, Homo sapien
tgccatcgtccctgagttcccagcg

SEQ ID NO: 1749266 - DNA, 25 bp, Homo sapien
tgcaaacaacaacactagctctacc

SEQ ID NO: 1749267 - DNA, 25 bp, Homo sapien
ttcccagcgcttcagtaaaagagac

SEQ ID NO: 1749268 - DNA, 25 bp, Homo sapien
tgattccctcccacgctttcataag

SEQ ID NO: 1749269 - DNA, 25 bp, Homo sapien
aaattagactctggctgtgattccc

SEQ ID NO: 1749270 - DNA, 25 bp, Homo sapien
catcctgtggatacactgtgtgctc

SEQ ID NO: 1749271 - DNA, 25 bp, Homo sapien
tttcataaggaatgacagattctga

SEQ ID NO: 1749272 - DNA, 25 bp, Homo sapien
tatattccccattatcttcgccgtc

SEQ ID NO: 1749273 - DNA, 25 bp, Homo sapien
tgtacacactcatatattccccatt

SEQ ID NO: 1749274 - DNA, 25 bp, Homo sapien
gcattgcagatacagcttctgttcc

SEQ ID NO: 1749275 - DNA, 25 bp, Homo sapien
tgccctttgccatagaccgaagttt

SEQ ID NO: 1749276 - DNA, 25 bp, Homo sapien
cagtgtctccagacaatgctgcttt

SEQ ID NO: 1749277 - DNA, 25 bp, Homo sapien
agtgtctccagacaatgctgctttc

SEQ ID NO: 1749278 - DNA, 25 bp, Homo sapien
tgtctccagacaatgctgctttctc

SEQ ID NO: 1749279 - DNA, 25 bp, Homo sapien
tccagtgtctccagacaatgctgct

SEQ ID NO: 1749280 - DNA, 25 bp, Homo sapien
gaagaaacaccaaagagaggcggcg

SEQ ID NO: 1749281 - DNA, 25 bp, Homo sapien
cagggaaatttgtgccttcgcaatc

SEQ ID NO: 1749282 - DNA, 25 bp, Homo sapien
aggcggcgccagcattcacagggaa

SEQ ID NO: 1749283 - DNA, 25 bp, Homo sapien
gtgtccgtttgtggctagaagaaac

SEQ ID NO: 1749284 - DNA, 25 bp, Homo sapien
cactgactgacataccaacttagag

SEQ ID NO: 1749285 - DNA, 25 bp, Homo sapien
tggtgcccgtgccttgcggatcacg

SEQ ID NO: 1749286 - DNA, 25 bp, Homo sapien
cggatcacgttgtctgtacactgac

SEQ ID NO: 1749287 - DNA, 25 bp, Homo sapien
gtacatttctttgcggaagattggc

SEQ ID NO: 1749288 - DNA, 25 bp, Homo sapien
cagctttaccccagagctgctagta

SEQ ID NO: 1749289 - DNA, 25 bp, Homo sapien
gtgccagctttaccccagagctgct

SEQ ID NO: 1749290 - DNA, 25 bp, Homo sapien
tctgtgccagctttaccccagagct

SEQ ID NO: 1749291 - DNA, 25 bp, Homo sapien
agctttaccccagagctgctagtac

SEQ ID NO: 1749292 - DNA, 25 bp, Homo sapien
catgtctgaatggattgccagagcc

SEQ ID NO: 1749293 - DNA, 25 bp, Homo sapien
ctaagactcgaaggcagcacaggac

SEQ ID NO: 1749294 - DNA, 25 bp, Homo sapien
gggtccatgtctgaatggattgcca

SEQ ID NO: 1749295 - DNA, 25 bp, Homo sapien
tgtcacaaggttgccccacaaaact

SEQ ID NO: 1749296 - DNA, 25 bp, Homo sapien
ctggggacaggcaaatggggctttc

SEQ ID NO: 1749297 - DNA, 25 bp, Homo sapien
cagcctgccaagagtcatccatgag

SEQ ID NO: 1749298 - DNA, 25 bp, Homo sapien
ccagcctgccaagagtcatccatga

SEQ ID NO: 1749299 - DNA, 25 bp, Homo sapien
acactatgaaaattctcgtggacag

SEQ ID NO: 1749300 - DNA, 25 bp, Homo sapien
aattctcgtggacagatgtagtcca

SEQ ID NO: 1749301 - DNA, 25 bp, Homo sapien
tctcgtggacagatgtagtccacgg

SEQ ID NO: 1749302 - DNA, 25 bp, Homo sapien
tgaaaattctcgtggacagatgtag

SEQ ID NO: 1749303 - DNA, 25 bp, Homo sapien
atgttttgtgtctatgcgtctggtt

SEQ ID NO: 1749304 - DNA, 25 bp, Homo sapien
ggaaatgttttgtgtctatgcgtct

SEQ ID NO: 1749305 - DNA, 25 bp, Homo sapien
aaatgttttgtgtctatgcgtctgg

SEQ ID NO: 1749306 - DNA, 25 bp, Homo sapien
gtggaaatgttttgtgtctatgcgt

SEQ ID NO: 1749307 - DNA, 25 bp, Homo sapien
cttcaaagggtccttgagctcttgc

SEQ ID NO: 1749308 - DNA, 25 bp, Homo sapien
cctggatgctccatggatcaggatc

SEQ ID NO: 1749309 - DNA, 25 bp, Homo sapien
agtactggagttcttttacaagaga

SEQ ID NO: 1749310 - DNA, 25 bp, Homo sapien
tagggggcctacatcgtcttcaaag

SEQ ID NO: 1749311 - DNA, 25 bp, Homo sapien
taatgctgagatgagcatcacacgg

SEQ ID NO: 1749312 - DNA, 25 bp, Homo sapien
tgactccgataaccagataatgctg

SEQ ID NO: 1749313 - DNA, 25 bp, Homo sapien
ttgtcaaaccgaaataccaggatct

SEQ ID NO: 1749314 - DNA, 25 bp, Homo sapien
gacacacttcgccatggagagcagg

SEQ ID NO: 1749315 - DNA, 25 bp, Homo sapien
agcgagttggcacaccctccaagag

SEQ ID NO: 1749316 - DNA, 25 bp, Homo sapien
ccaagggccagagcgagttggcaca

SEQ ID NO: 1749317 - DNA, 25 bp, Homo sapien
ggccagagcgagttggcacaccctc

SEQ ID NO: 1749318 - DNA, 25 bp, Homo sapien
tcctgcctcaactccaagggccaga

SEQ ID NO: 1749319 - DNA, 25 bp, Homo sapien
ccattcaaagcgcaagatagaccaa

SEQ ID NO: 1749320 - DNA, 25 bp, Homo sapien
ttccaaatgaccaaatgggtaatgt

SEQ ID NO: 1749321 - DNA, 25 bp, Homo sapien
ccacttgttgatttctggtgtagaa

SEQ ID NO: 1749322 - DNA, 25 bp, Homo sapien
gatctccgaacttagtgaacaagta

SEQ ID NO: 1749323 - DNA, 25 bp, Homo sapien
tttgcagtatgcagagagctttcct

SEQ ID NO: 1749324 - DNA, 25 bp, Homo sapien
tattttgcagtatgcagagagcttt

SEQ ID NO: 1749325 - DNA, 25 bp, Homo sapien
tgtatattttgcagtatgcagagag

SEQ ID NO: 1749326 - DNA, 25 bp, Homo sapien
catgtgtatattttgcagtatgcag

SEQ ID NO: 1749327 - DNA, 25 bp, Homo sapien
caatggcagatttcctctagtgact

SEQ ID NO: 1749328 - DNA, 25 bp, Homo sapien
tccagagttcgagagagaacattca

SEQ ID NO: 1749329 - DNA, 25 bp, Homo sapien
catccagttgattagggcccattgg

SEQ ID NO: 1749330 - DNA, 25 bp, Homo sapien
gagaatgctgattgatccatccagt

SEQ ID NO: 1749331 - DNA, 25 bp, Homo sapien
tacacatgtggctacttccaattgc

SEQ ID NO: 1749332 - DNA, 25 bp, Homo sapien
cctttaaagtgtcaacggtcttcat

SEQ ID NO: 1749333 - DNA, 25 bp, Homo sapien
cttgcactgcgtagtttttacacat

SEQ ID NO: 1749334 - DNA, 25 bp, Homo sapien
cttccaattgccagaagcaccttta

SEQ ID NO: 1749335 - DNA, 25 bp, Homo sapien
taactggtacatgcttctactccct

SEQ ID NO: 1749336 - DNA, 25 bp, Homo sapien
tgtgaaagtcaatcttccgctctca

SEQ ID NO: 1749337 - DNA, 25 bp, Homo sapien
agtaaatgcctctgataactggtac

SEQ ID NO: 1749338 - DNA, 25 bp, Homo sapien
gagagcccactcctggatttgtcag

SEQ ID NO: 1749339 - DNA, 25 bp, Homo sapien
ttgcaagacagcagccgaatcttat

SEQ ID NO: 1749340 - DNA, 25 bp, Homo sapien
tgggcatcgagtcctccttcttggt

SEQ ID NO: 1749341 - DNA, 25 bp, Homo sapien
ccttcttggtttagaattgtcttgg

SEQ ID NO: 1749342 - DNA, 25 bp, Homo sapien
tattagaagtctgggcatcgagtcc

SEQ ID NO: 1749343 - DNA, 25 bp, Homo sapien
aattcagatttgtgaactggccaag

SEQ ID NO: 1749344 - DNA, 25 bp, Homo sapien
tggagaactcccaaacatctaaatt

SEQ ID NO: 1749345 - DNA, 25 bp, Homo sapien
aagccaaggcattttggatcacttg

SEQ ID NO: 1749346 - DNA, 25 bp, Homo sapien
aagcctacctcagcaaaaagaagtg

SEQ ID NO: 1749347 - DNA, 25 bp, Homo sapien
ttgtctcttaatatccccatcaggg

SEQ ID NO: 1749348 - DNA, 25 bp, Homo sapien
gattgacttatgcaggacttaccta

SEQ ID NO: 1749349 - DNA, 25 bp, Homo sapien
accttcctgtgtggacattaggctg

SEQ ID NO: 1749350 - DNA, 25 bp, Homo sapien
tactcagcatttttaggcattccac

SEQ ID NO: 1749351 - DNA, 25 bp, Homo sapien
gtatgttgtttagcagattacacta

SEQ ID NO: 1749352 - DNA, 25 bp, Homo sapien
cagttgtacacaccattctcttttt

SEQ ID NO: 1749353 - DNA, 25 bp, Homo sapien
gcttaccctagagatgttggcatcc

SEQ ID NO: 1749354 - DNA, 25 bp, Homo sapien
cactaattattgattgcactaatgc

SEQ ID NO: 1749355 - DNA, 25 bp, Homo sapien
actgagaaaagacgtcctttgctac

SEQ ID NO: 1749356 - DNA, 25 bp, Homo sapien
ctgagaaaagacgtcctttgctacc

SEQ ID NO: 1749357 - DNA, 25 bp, Homo sapien
cacaataatagcatgaggaaggagg

SEQ ID NO: 1749358 - DNA, 25 bp, Homo sapien
gaggaaatattcacaataatagcat

SEQ ID NO: 1749359 - DNA, 25 bp, Homo sapien
atcagtcttccttgtatgcaggaat

SEQ ID NO: 1749360 - DNA, 25 bp, Homo sapien
tcttccttgtatgcaggaatctgaa

SEQ ID NO: 1749361 - DNA, 25 bp, Homo sapien
gaatcaggcagaggaatgcttctgt

SEQ ID NO: 1749362 - DNA, 25 bp, Homo sapien
ttggactaagcccacaacagccatg

SEQ ID NO: 1749363 - DNA, 25 bp, Homo sapien
tttacaaaggtatcatctcagtggg

SEQ ID NO: 1749364 - DNA, 25 bp, Homo sapien
tggctgggttcctacaacaacggcc

SEQ ID NO: 1749365 - DNA, 25 bp, Homo sapien
tgaggccagtctacagggaatatgt

SEQ ID NO: 1749366 - DNA, 25 bp, Homo sapien
cagagggcattcctgcgcataaggc

SEQ ID NO: 1749367 - DNA, 25 bp, Homo sapien
cacaaaaggattagcagttggccgc

SEQ ID NO: 1749368 - DNA, 25 bp, Homo sapien
ttattcctttgaagtgccagggcga

SEQ ID NO: 1749369 - DNA, 25 bp, Homo sapien
caggcgggtaattcgagccagagaa

SEQ ID NO: 1749370 - DNA, 25 bp, Homo sapien
tccagacttggcctgcttcaggcag

SEQ ID NO: 1749371 - DNA, 25 bp, Homo sapien
tttttagccaaatccgtcaggcctg

SEQ ID NO: 1749372 - DNA, 25 bp, Homo sapien
atctgcttttcacggcccgtttcct

SEQ ID NO: 1749373 - DNA, 25 bp, Homo sapien
taggctcatgcagtgatattggcga

SEQ ID NO: 1749374 - DNA, 25 bp, Homo sapien
tattggcgacatgtctgtaagatcc

SEQ ID NO: 1749375 - DNA, 25 bp, Homo sapien
tgtggaatcacctcatggatagaac

SEQ ID NO: 1749376 - DNA, 25 bp, Homo sapien
taactctctgacagtgtctcttgcg

SEQ ID NO: 1749377 - DNA, 25 bp, Homo sapien
tgttatctaccagggcgttgagtgt

SEQ ID NO: 1749378 - DNA, 25 bp, Homo sapien
gatttctttattgctcgtccaccgt

SEQ ID NO: 1749379 - DNA, 25 bp, Homo sapien
gttctgacctggatttgatcaacat

SEQ ID NO: 1749380 - DNA, 25 bp, Homo sapien
gatttgatcaacatccccttgtggc

SEQ ID NO: 1749381 - DNA, 25 bp, Homo sapien
ttgtgctgcattcctctggcactgc

SEQ ID NO: 1749382 - DNA, 25 bp, Homo sapien
aacagttaatgcgtgtcccttggga

SEQ ID NO: 1749383 - DNA, 25 bp, Homo sapien
tcccttgggataatagctcttgagc

SEQ ID NO: 1749384 - DNA, 25 bp, Homo sapien
taaattggagatgtcactacctgca

SEQ ID NO: 1749385 - DNA, 25 bp, Homo sapien
gccaagtatccacttttcacgtgta

SEQ ID NO: 1749386 - DNA, 25 bp, Homo sapien
agggtgctttgaatctacctccaac

SEQ ID NO: 1749387 - DNA, 25 bp, Homo sapien
caggaaccactgcttgacagctgga

SEQ ID NO: 1749388 - DNA, 25 bp, Homo sapien
ttcattccatgagggtgctttgaat

SEQ ID NO: 1749389 - DNA, 25 bp, Homo sapien
tgtacaggtctaacatgcagttgtt

SEQ ID NO: 1749390 - DNA, 25 bp, Homo sapien
aaaggcaagtgcagttcgggtacag

SEQ ID NO: 1749391 - DNA, 25 bp, Homo sapien
gctggtctgcagagtccagttcgag

SEQ ID NO: 1749392 - DNA, 25 bp, Homo sapien
ttattctgggactagggctggtctg

SEQ ID NO: 1749393 - DNA, 25 bp, Homo sapien
ccagttcgagttgcactgttggaca

SEQ ID NO: 1749394 - DNA, 25 bp, Homo sapien
gaagagtttttccagtgttctagag

SEQ ID NO: 1749395 - DNA, 25 bp, Homo sapien
ggcatgaactttttgcctaagccaa

SEQ ID NO: 1749396 - DNA, 25 bp, Homo sapien
tgggttcttaggcatgaactttttg

SEQ ID NO: 1749397 - DNA, 25 bp, Homo sapien
ggttcttaggcatgaactttttgcc

SEQ ID NO: 1749398 - DNA, 25 bp, Homo sapien
ttaacatttcgccacctactgaaga

SEQ ID NO: 1749399 - DNA, 25 bp, Homo sapien
gttttaacatttcgccacctactga

SEQ ID NO: 1749400 - DNA, 25 bp, Homo sapien
aacatttcgccacctactgaagaca

SEQ ID NO: 1749401 - DNA, 25 bp, Homo sapien
cagttttaacatttcgccacctact

SEQ ID NO: 1749402 - DNA, 25 bp, Homo sapien
ttttgttcttttcctgaaggctgta

SEQ ID NO: 1749403 - DNA, 25 bp, Homo sapien
tgttcttttcctgaaggctgtagga

SEQ ID NO: 1749404 - DNA, 25 bp, Homo sapien
ctttttgttcttttcctgaaggctg

SEQ ID NO: 1749405 - DNA, 25 bp, Homo sapien
ttcttttcctgaaggctgtaggaca

SEQ ID NO: 1749406 - DNA, 25 bp, Homo sapien
ctggttctggtgaggagcagggcat

SEQ ID NO: 1749407 - DNA, 25 bp, Homo sapien
ggctgctgtgtaaggggcttaatta

SEQ ID NO: 1749408 - DNA, 25 bp, Homo sapien
ctgctgtgtaaggggcttaattatt

SEQ ID NO: 1749409 - DNA, 25 bp, Homo sapien
gctgctgtgtaaggggcttaattat

SEQ ID NO: 1749410 - DNA, 25 bp, Homo sapien
ctattttggtaaggcagcgggcgtc

SEQ ID NO: 1749411 - DNA, 25 bp, Homo sapien
tgtaacatgtaggaaaggcacgtct

SEQ ID NO: 1749412 - DNA, 25 bp, Homo sapien
tcttgctgcaaaggctcgggctgac

SEQ ID NO: 1749413 - DNA, 25 bp, Homo sapien
aagctgagcgtgaaaggctgcccct

SEQ ID NO: 1749414 - DNA, 25 bp, Homo sapien
gcagggccgggagtgagtgtgtgaa

SEQ ID NO: 1749415 - DNA, 25 bp, Homo sapien
cttgagggaagttccggcgcggccg

SEQ ID NO: 1749416 - DNA, 25 bp, Homo sapien
cgcgcgtaggcgagtttggtaactt

SEQ ID NO: 1749417 - DNA, 25 bp, Homo sapien
tctgtggcccgatgaggcgcgcctc

SEQ ID NO: 1749418 - DNA, 25 bp, Homo sapien
gcgaccggcggggaatcaaagccca

SEQ ID NO: 1749419 - DNA, 25 bp, Homo sapien
agcccaagtttagggtcgcaggaag

SEQ ID NO: 1749420 - DNA, 25 bp, Homo sapien
tcagctgtcagccgccgccgggtgg

SEQ ID NO: 1749421 - DNA, 25 bp, Homo sapien
tagggtcgcaggaagaggcgagctg

SEQ ID NO: 1749422 - DNA, 25 bp, Homo sapien
cgcatcccgggctgctccgcgagga

SEQ ID NO: 1749423 - DNA, 25 bp, Homo sapien
gcatcccgggctgctccgcgaggac

SEQ ID NO: 1749424 - DNA, 25 bp, Homo sapien
agcagctgtcagacccgcggccctg

SEQ ID NO: 1749425 - DNA, 25 bp, Homo sapien
aggagcagagagtaataagtcaggc

SEQ ID NO: 1749426 - DNA, 25 bp, Homo sapien
agcagagagtaataagtcaggcatg

SEQ ID NO: 1749427 - DNA, 25 bp, Homo sapien
cgcgcgagccgcagcagctgtcaga

SEQ ID NO: 1749428 - DNA, 25 bp, Homo sapien
agctgccatgtgatgcgcgtcccct

SEQ ID NO: 1749429 - DNA, 25 bp, Homo sapien
gaagaggaggcggaaaaggacgcaa

SEQ ID NO: 1749430 - DNA, 25 bp, Homo sapien
gagctttcggtgacccacgaactgc

SEQ ID NO: 1749431 - DNA, 25 bp, Homo sapien
ctgggaacgagctgccatgtgatgc

SEQ ID NO: 1749432 - DNA, 25 bp, Homo sapien
ctgaaattgaccactctctttccaa

SEQ ID NO: 1749433 - DNA, 25 bp, Homo sapien
taatgtcctcctgaaattgaccact

SEQ ID NO: 1749434 - DNA, 25 bp, Homo sapien
tcctcctgaaattgaccactctctt

SEQ ID NO: 1749435 - DNA, 25 bp, Homo sapien
tttaatgtcctcctgaaattgacca

SEQ ID NO: 1749436 - DNA, 25 bp, Homo sapien
gcactcacacgacggcctttaaggg

SEQ ID NO: 1749437 - DNA, 25 bp, Homo sapien
tgacagggcactcacacgacggcct

SEQ ID NO: 1749438 - DNA, 25 bp, Homo sapien
gacggcctttaagggcagcaacaac

SEQ ID NO: 1749439 - DNA, 25 bp, Homo sapien
tcacacgacggcctttaagggcagc

SEQ ID NO: 1749440 - DNA, 25 bp, Homo sapien
cttcttgacatcacaacctctcact

SEQ ID NO: 1749441 - DNA, 25 bp, Homo sapien
ttgacatcacaacctctcactcttt

SEQ ID NO: 1749442 - DNA, 25 bp, Homo sapien
tcttgacatcacaacctctcactct

SEQ ID NO: 1749443 - DNA, 25 bp, Homo sapien
tccttcttgacatcacaacctctca

SEQ ID NO: 1749444 - DNA, 25 bp, Homo sapien
ttttcataaactccttgttctgtgc

SEQ ID NO: 1749445 - DNA, 25 bp, Homo sapien
cccagtctctgcttgattttctacc

SEQ ID NO: 1749446 - DNA, 25 bp, Homo sapien
cataaactccttgttctgtgcccac

SEQ ID NO: 1749447 - DNA, 25 bp, Homo sapien
tctgcttgattttctaccttcctgt

SEQ ID NO: 1749448 - DNA, 25 bp, Homo sapien
gacgttctgccacttggcaagtgga

SEQ ID NO: 1749449 - DNA, 25 bp, Homo sapien
caggcagagctgacgttctgccact

SEQ ID NO: 1749450 - DNA, 25 bp, Homo sapien
gagctgacgttctgccacttggcaa

SEQ ID NO: 1749451 - DNA, 25 bp, Homo sapien
aatcccccactgagtccaggcagag

SEQ ID NO: 1749452 - DNA, 25 bp, Homo sapien
tgctatcaagcaacatgaacgaggg

SEQ ID NO: 1749453 - DNA, 25 bp, Homo sapien
gggccgtgctatcaagcaacatgaa

SEQ ID NO: 1749454 - DNA, 25 bp, Homo sapien
caagcaacatgaacgagggctggag

SEQ ID NO: 1749455 - DNA, 25 bp, Homo sapien
gcagcatgggccgtgctatcaagca

SEQ ID NO: 1749456 - DNA, 25 bp, Homo sapien
ggagatgcccgcaagtgagcgaaca

SEQ ID NO: 1749457 - DNA, 25 bp, Homo sapien
gatgcccgcaagtgagcgaacagag

SEQ ID NO: 1749458 - DNA, 25 bp, Homo sapien
gcccgcaagtgagcgaacagaggtc

SEQ ID NO: 1749459 - DNA, 25 bp, Homo sapien
taggagggagatgcccgcaagtgag

SEQ ID NO: 1749460 - DNA, 25 bp, Homo sapien
ggatagacacaatagagtgtgcctc

SEQ ID NO: 1749461 - DNA, 25 bp, Homo sapien
gtgtgcctctattgtgcttcccatg

SEQ ID NO: 1749462 - DNA, 25 bp, Homo sapien
cagaggaggctagcagaagcagcca

SEQ ID NO: 1749463 - DNA, 25 bp, Homo sapien
tgtgcttcccatgcttcccatggga

SEQ ID NO: 1749464 - DNA, 25 bp, Homo sapien
gcattcgattccacatttggggcca

SEQ ID NO: 1749465 - DNA, 25 bp, Homo sapien
tgcattcgattccacatttggggcc

SEQ ID NO: 1749466 - DNA, 25 bp, Homo sapien
cattcgattccacatttggggccag

SEQ ID NO: 1749467 - DNA, 25 bp, Homo sapien
attcgattccacatttggggccaga

SEQ ID NO: 1749468 - DNA, 25 bp, Homo sapien
caggcaggcatccatgtaggcagca

SEQ ID NO: 1749469 - DNA, 25 bp, Homo sapien
cctaccacactagggctttgagaag

SEQ ID NO: 1749470 - DNA, 25 bp, Homo sapien
acaggcaggcatccatgtaggcagc

SEQ ID NO: 1749471 - DNA, 25 bp, Homo sapien
tctggccattccatgcatccctacc

SEQ ID NO: 1749472 - DNA, 25 bp, Homo sapien
agaaaatgcatgctcttccaatggc

SEQ ID NO: 1749473 - DNA, 25 bp, Homo sapien
tggcactggaggcttgcacgtcatt

SEQ ID NO: 1749474 - DNA, 25 bp, Homo sapien
tctctattgtatacaacagcagcag

SEQ ID NO: 1749475 - DNA, 25 bp, Homo sapien
tctctaacagcagcagtgctttctc

SEQ ID NO: 1749476 - DNA, 25 bp, Homo sapien
ctgtctccagcctcatggggttatt

SEQ ID NO: 1749477 - DNA, 25 bp, Homo sapien
ccagcctcatggggttatttccaaa

SEQ ID NO: 1749478 - DNA, 25 bp, Homo sapien
gtctgtctccagcctcatggggtta

SEQ ID NO: 1749479 - DNA, 25 bp, Homo sapien
tctccagcctcatggggttatttcc

SEQ ID NO: 1749480 - DNA, 25 bp, Homo sapien
tgcaacttccggagaaaaatagtaa

SEQ ID NO: 1749481 - DNA, 25 bp, Homo sapien
ctccccaccaagcccgctctgcaac

SEQ ID NO: 1749482 - DNA, 25 bp, Homo sapien
ctctgcaacttccggagaaaaatag

SEQ ID NO: 1749483 - DNA, 25 bp, Homo sapien
caccaagcccgctctgcaacttccg

SEQ ID NO: 1749484 - DNA, 25 bp, Homo sapien
tcatcatcccgaacataagcatagg

SEQ ID NO: 1749485 - DNA, 25 bp, Homo sapien
aagcataggactgcgcatgcaggca

SEQ ID NO: 1749486 - DNA, 25 bp, Homo sapien
cctctatacccagcatgtacgggat

SEQ ID NO: 1749487 - DNA, 25 bp, Homo sapien
tcagaattggctgtctggccaccgg

SEQ ID NO: 1749488 - DNA, 25 bp, Homo sapien
ctgcaagaggagagactgtggcctg

SEQ ID NO: 1749489 - DNA, 25 bp, Homo sapien
caagaggagagactgtggcctgaca

SEQ ID NO: 1749490 - DNA, 25 bp, Homo sapien
agaggagagactgtggcctgacatc

SEQ ID NO: 1749491 - DNA, 25 bp, Homo sapien
gacatcaaaatctatgcctttttgc

SEQ ID NO: 1749492 - DNA, 25 bp, Homo sapien
ctgtgggtccgactatgactgaggc

SEQ ID NO: 1749493 - DNA, 25 bp, Homo sapien
tgtgggtccgactatgactgaggct

SEQ ID NO: 1749494 - DNA, 25 bp, Homo sapien
gtgggtccgactatgactgaggctt

SEQ ID NO: 1749495 - DNA, 25 bp, Homo sapien
agttattgtcatactgttgatgtac

SEQ ID NO: 1749496 - DNA, 25 bp, Homo sapien
ccaagttattgtcatactgttgatg

SEQ ID NO: 1749497 - DNA, 25 bp, Homo sapien
ttgggtgcccccgatccattccaag

SEQ ID NO: 1749498 - DNA, 25 bp, Homo sapien
gcccccgatccattccaagttattg

SEQ ID NO: 1749499 - DNA, 25 bp, Homo sapien
caactgggggtcgacaatattatta

SEQ ID NO: 1749500 - DNA, 25 bp, Homo sapien
gaacttgcatcctttgtcagtttct

SEQ ID NO: 1749501 - DNA, 25 bp, Homo sapien
tttcttaattccaagagtgagggct

SEQ ID NO: 1749502 - DNA, 25 bp, Homo sapien
aaccagctgaaaggattattcttgt

SEQ ID NO: 1749503 - DNA, 25 bp, Homo sapien
attgtcaggagttacaggtcaggtc

SEQ ID NO: 1749504 - DNA, 25 bp, Homo sapien
gattggaagtgtatttgggagggtc

SEQ ID NO: 1749505 - DNA, 25 bp, Homo sapien
catattgtcaggagttacaggtcag

SEQ ID NO: 1749506 - DNA, 25 bp, Homo sapien
agaacatattgtcaggagttacagg

SEQ ID NO: 1749507 - DNA, 25 bp, Homo sapien
ttttctttgaatgaggggcttgagt

SEQ ID NO: 1749508 - DNA, 25 bp, Homo sapien
gtgttttctttgaatgaggggcttg

SEQ ID NO: 1749509 - DNA, 25 bp, Homo sapien
gattttggaatgtgccatttcacaa

SEQ ID NO: 1749510 - DNA, 25 bp, Homo sapien
agattttggaatgtgccatttcaca

SEQ ID NO: 1749511 - DNA, 25 bp, Homo sapien
tgaagacgatgctttgatcctgagc

SEQ ID NO: 1749512 - DNA, 25 bp, Homo sapien
gacgatgctttgatcctgagcttac

SEQ ID NO: 1749513 - DNA, 25 bp, Homo sapien
tttgaagacgatgctttgatcctga

SEQ ID NO: 1749514 - DNA, 25 bp, Homo sapien
gaagacgatgctttgatcctgagct

SEQ ID NO: 1749515 - DNA, 25 bp, Homo sapien
gtaggtcctagtgggagacacagcc

SEQ ID NO: 1749516 - DNA, 25 bp, Homo sapien
tctggccgctcttccttattcagaa

SEQ ID NO: 1749517 - DNA, 25 bp, Homo sapien
ttattcagaatatcaccaagagtgt

SEQ ID NO: 1749518 - DNA, 25 bp, Homo sapien
gcatctggccgctcttccttattca

SEQ ID NO: 1749519 - DNA, 25 bp, Homo sapien
ccggggtctgagaactgccccaagt

SEQ ID NO: 1749520 - DNA, 25 bp, Homo sapien
gtccatttccttgccgacctctccg

SEQ ID NO: 1749521 - DNA, 25 bp, Homo sapien
atttccttgccgacctctccggagg

SEQ ID NO: 1749522 - DNA, 25 bp, Homo sapien
gggtctgagaactgccccaagtcat

SEQ ID NO: 1749523 - DNA, 25 bp, Homo sapien
agcaaaacacattcctcccttgtct

SEQ ID NO: 1749524 - DNA, 25 bp, Homo sapien
tcaagaaaccagctcttgtttctgt

SEQ ID NO: 1749525 - DNA, 25 bp, Homo sapien
tttcatttcttgaaatccaaaacag

SEQ ID NO: 1749526 - DNA, 25 bp, Homo sapien
gaaaccagctcttgtttctgtttca

SEQ ID NO: 1749527 - DNA, 25 bp, Homo sapien
tagaaactgtatcattctacagacc

SEQ ID NO: 1749528 - DNA, 25 bp, Homo sapien
ttttctttggtatgttcaaagctgg

SEQ ID NO: 1749529 - DNA, 25 bp, Homo sapien
agaccaattaaactagaaactgtat

SEQ ID NO: 1749530 - DNA, 25 bp, Homo sapien
gaccatagcgtagaagaacaaagtt

SEQ ID NO: 1749531 - DNA, 25 bp, Homo sapien
gtactgatctagtcacattctatga

SEQ ID NO: 1749532 - DNA, 25 bp, Homo sapien
tactttctaaatagctggtgattat

SEQ ID NO: 1749533 - DNA, 25 bp, Homo sapien
tactctctggcttaataatgatagc

SEQ ID NO: 1749534 - DNA, 25 bp, Homo sapien
cattttttagccatatgctttagtc

SEQ ID NO: 1749535 - DNA, 25 bp, Homo sapien
gcttccctaatgagcacactcatca

SEQ ID NO: 1749536 - DNA, 25 bp, Homo sapien
gtggcttccctaatgagcacactca

SEQ ID NO: 1749537 - DNA, 25 bp, Homo sapien
caagtggcttccctaatgagcacac

SEQ ID NO: 1749538 - DNA, 25 bp, Homo sapien
cctaatgagcacactcatcaaggtg

SEQ ID NO: 1749539 - DNA, 25 bp, Homo sapien
ctggagaaggaaatatcattaccct

SEQ ID NO: 1749540 - DNA, 25 bp, Homo sapien
tggagaaggaaatatcattaccctt

SEQ ID NO: 1749541 - DNA, 25 bp, Homo sapien
tctccagaatttcgtgttagctctt

SEQ ID NO: 1749542 - DNA, 25 bp, Homo sapien
ctccagaatttcgtgttagctcttc

SEQ ID NO: 1749543 - DNA, 25 bp, Homo sapien
cagaatttcgtgttagctcttctga

SEQ ID NO: 1749544 - DNA, 25 bp, Homo sapien
tccagaatttcgtgttagctcttct

SEQ ID NO: 1749545 - DNA, 25 bp, Homo sapien
tgttaggtccttatgctattaaaaa

SEQ ID NO: 1749546 - DNA, 25 bp, Homo sapien
tcgtaagagagaccagacatttatt

SEQ ID NO: 1749547 - DNA, 25 bp, Homo sapien
tattacaccatacgtatgtctctcc

SEQ ID NO: 1749548 - DNA, 25 bp, Homo sapien
gatatttggctgatttattacacca

SEQ ID NO: 1749549 - DNA, 25 bp, Homo sapien
tctcagttacagatgaatcagacac

SEQ ID NO: 1749550 - DNA, 25 bp, Homo sapien
catccgaagccaagtaggcaaatgg

SEQ ID NO: 1749551 - DNA, 25 bp, Homo sapien
ccacggtgtaggacaaggcaaggca

SEQ ID NO: 1749552 - DNA, 25 bp, Homo sapien
tgagcctcttaacatgtgcatatgg

SEQ ID NO: 1749553 - DNA, 25 bp, Homo sapien
cggggcatgaggcttggggaccggg

SEQ ID NO: 1749554 - DNA, 25 bp, Homo sapien
cttggggaccggggcatgaggcccg

SEQ ID NO: 1749555 - DNA, 25 bp, Homo sapien
gaggcttggggaccggggcatgagg

SEQ ID NO: 1749556 - DNA, 25 bp, Homo sapien
ggcatgaggcttggggaccggggca

SEQ ID NO: 1749557 - DNA, 25 bp, Homo sapien
cttaaggtatggcttcagcatccgg

SEQ ID NO: 1749558 - DNA, 25 bp, Homo sapien
ttaaggtatggcttcagcatccggg

SEQ ID NO: 1749559 - DNA, 25 bp, Homo sapien
gtcttaaggtatggcttcagcatcc

SEQ ID NO: 1749560 - DNA, 25 bp, Homo sapien
ctgtcttaaggtatggcttcagcat

SEQ ID NO: 1749561 - DNA, 25 bp, Homo sapien
tctactgcactggattgcagggctt

SEQ ID NO: 1749562 - DNA, 25 bp, Homo sapien
gaataaaactgacctactctacacc

SEQ ID NO: 1749563 - DNA, 25 bp, Homo sapien
tgacaccaatatccaaggaataaaa

SEQ ID NO: 1749564 - DNA, 25 bp, Homo sapien
catgggtcactgtccgtttagctct

SEQ ID NO: 1749565 - DNA, 25 bp, Homo sapien
taaaaaagaagtcgttagcatctgc

SEQ ID NO: 1749566 - DNA, 25 bp, Homo sapien
tataccagagattaatgcccacaga

SEQ ID NO: 1749567 - DNA, 25 bp, Homo sapien
tgaagtgcctgttgtaggacagtcc

SEQ ID NO: 1749568 - DNA, 25 bp, Homo sapien
ttggtcgctaacctttgacaagtca

SEQ ID NO: 1749569 - DNA, 25 bp, Homo sapien
cacagcagacgtgtaggcaaatgca

SEQ ID NO: 1749570 - DNA, 25 bp, Homo sapien
tactcatcaatgagattccaagtag

SEQ ID NO: 1749571 - DNA, 25 bp, Homo sapien
gcaaataccgaacatagtagttcat

SEQ ID NO: 1749572 - DNA, 25 bp, Homo sapien
catgcatatgtgcacatgaatatat

SEQ ID NO: 1749573 - DNA, 25 bp, Homo sapien
tagcaacaggcagcaatagctctcc

SEQ ID NO: 1749574 - DNA, 25 bp, Homo sapien
gcagcaatagctctcccaacttcct

SEQ ID NO: 1749575 - DNA, 25 bp, Homo sapien
ctgcaggaccagagctagcaacagg

SEQ ID NO: 1749576 - DNA, 25 bp, Homo sapien
aggaccagagctagcaacaggcagc

SEQ ID NO: 1749577 - DNA, 25 bp, Homo sapien
cctgggcttagttcacgtgcacctt

SEQ ID NO: 1749578 - DNA, 25 bp, Homo sapien
catctgtacaggttggagtgctccc

SEQ ID NO: 1749579 - DNA, 25 bp, Homo sapien
tgatctactcttcacacagccgtgg

SEQ ID NO: 1749580 - DNA, 25 bp, Homo sapien
ctaggagcagccgtgatttgtgaca

SEQ ID NO: 1749581 - DNA, 25 bp, Homo sapien
ttgaacagcaaagaccaattggtgg

SEQ ID NO: 1749582 - DNA, 25 bp, Homo sapien
aaggtctggagctcatacatggtga

SEQ ID NO: 1749583 - DNA, 25 bp, Homo sapien
atggtgaaactccatgctagaacac

SEQ ID NO: 1749584 - DNA, 25 bp, Homo sapien
gacccttgtaatcagtccaagtgcc

SEQ ID NO: 1749585 - DNA, 25 bp, Homo sapien
catttccaaatgctaggacccttgt

SEQ ID NO: 1749586 - DNA, 25 bp, Homo sapien
taggaatcctgatcttttaaactct

SEQ ID NO: 1749587 - DNA, 25 bp, Homo sapien
tggtaggactgaaataggaatcctg

SEQ ID NO: 1749588 - DNA, 25 bp, Homo sapien
gataagcagagaaagtattaggtat

SEQ ID NO: 1749589 - DNA, 25 bp, Homo sapien
ggtataatgacattggtaggactga

SEQ ID NO: 1749590 - DNA, 25 bp, Homo sapien
cctcagctttcctacaagggcttct

SEQ ID NO: 1749591 - DNA, 25 bp, Homo sapien
gggcttctagagcattcttgtcttt

SEQ ID NO: 1749592 - DNA, 25 bp, Homo sapien
gctttcctacaagggcttctagagc

SEQ ID NO: 1749593 - DNA, 25 bp, Homo sapien
cctacaagggcttctagagcattct

SEQ ID NO: 1749594 - DNA, 25 bp, Homo sapien
tccactaagctgtaatatttatctt

SEQ ID NO: 1749595 - DNA, 25 bp, Homo sapien
cgaggagactttccactaagctgta

SEQ ID NO: 1749596 - DNA, 25 bp, Homo sapien
ggagactttccactaagctgtaata

SEQ ID NO: 1749597 - DNA, 25 bp, Homo sapien
tgtgtccgaggagactttccactaa

SEQ ID NO: 1749598 - DNA, 25 bp, Homo sapien
aacccaagcccccacttcaactgct

SEQ ID NO: 1749599 - DNA, 25 bp, Homo sapien
caactgcttcctatgcaacttaaac

SEQ ID NO: 1749600 - DNA, 25 bp, Homo sapien
gaacccaagcccccacttcaactgc

SEQ ID NO: 1749601 - DNA, 25 bp, Homo sapien
ttcaactgcttcctatgcaacttaa

SEQ ID NO: 1749602 - DNA, 25 bp, Homo sapien
tttgttttgccggacttcgtgtgag

SEQ ID NO: 1749603 - DNA, 25 bp, Homo sapien
tcgtgtgagccctaattagctggtc

SEQ ID NO: 1749604 - DNA, 25 bp, Homo sapien
taattagctggtctccaccaagcct

SEQ ID NO: 1749605 - DNA, 25 bp, Homo sapien
ccaagccttttgtggggctgagtga

SEQ ID NO: 1749606 - DNA, 25 bp, Homo sapien
cctgtcaatcatctctaccttactg

SEQ ID NO: 1749607 - DNA, 25 bp, Homo sapien
gtcaatcatctctaccttactgcca

SEQ ID NO: 1749608 - DNA, 25 bp, Homo sapien
aatcatctctaccttactgccactc

SEQ ID NO: 1749609 - DNA, 25 bp, Homo sapien
ctacctgtcaatcatctctacctta

SEQ ID NO: 1749610 - DNA, 25 bp, Homo sapien
caaactttgatctgggacactgaag

SEQ ID NO: 1749611 - DNA, 25 bp, Homo sapien
aaactttgatctgggacactgaagg

SEQ ID NO: 1749612 - DNA, 25 bp, Homo sapien
tttggtcagaattaatctctctcct

SEQ ID NO: 1749613 - DNA, 25 bp, Homo sapien
ctcttctgtagatatctttggtcag

SEQ ID NO: 1749614 - DNA, 25 bp, Homo sapien
tctttggtcagaattaatctctctc

SEQ ID NO: 1749615 - DNA, 25 bp, Homo sapien
cttctgtagatatctttggtcagaa

SEQ ID NO: 1749616 - DNA, 25 bp, Homo sapien
aaagtcaacatgcagttcacctcga

SEQ ID NO: 1749617 - DNA, 25 bp, Homo sapien
ttcaggggacgctgcaaagtcaaca

SEQ ID NO: 1749618 - DNA, 25 bp, Homo sapien
ctaagagagctgaccaggatccaga

SEQ ID NO: 1749619 - DNA, 25 bp, Homo sapien
cctcgaaaggcagtttcaactaagc

SEQ ID NO: 1749620 - DNA, 25 bp, Homo sapien
tcaagaaagacgcagcctggctgcc

SEQ ID NO: 1749621 - DNA, 25 bp, Homo sapien
agtaggcttgaggtcgatggctcca

SEQ ID NO: 1749622 - DNA, 25 bp, Homo sapien
ggtcgatggctccatgctcacacag

SEQ ID NO: 1749623 - DNA, 25 bp, Homo sapien
ccaagccttctgttgactaagtggg

SEQ ID NO: 1749624 - DNA, 25 bp, Homo sapien
gcgtcatcctgtagatgcacaagaa

SEQ ID NO: 1749625 - DNA, 25 bp, Homo sapien
gaacctgccaagcaatgcgtcatcc

SEQ ID NO: 1749626 - DNA, 25 bp, Homo sapien
gcactttcgcttttcaaactgtttg

SEQ ID NO: 1749627 - DNA, 25 bp, Homo sapien
ttctgtagaagtaatatgaccatag

SEQ ID NO: 1749628 - DNA, 25 bp, Homo sapien
caatttgccacatgctgctcactgc

SEQ ID NO: 1749629 - DNA, 25 bp, Homo sapien
caaagatcagacttcaacaagccgg

SEQ ID NO: 1749630 - DNA, 25 bp, Homo sapien
ggaacccagggctgccaatttgcca

SEQ ID NO: 1749631 - DNA, 25 bp, Homo sapien
ccctgtgccgtgcagaagcgtggaa

SEQ ID NO: 1749632 - DNA, 25 bp, Homo sapien
tgagagattggtctgtaaagctagg

SEQ ID NO: 1749633 - DNA, 25 bp, Homo sapien
ccctgagagattggtctgtaaagct

SEQ ID NO: 1749634 - DNA, 25 bp, Homo sapien
aaggccctgagagattggtctgtaa

SEQ ID NO: 1749635 - DNA, 25 bp, Homo sapien
tctgtaaagctaggggaccttggct

SEQ ID NO: 1749636 - DNA, 25 bp, Homo sapien
tgaccacaagggaccatatagcaaa

SEQ ID NO: 1749637 - DNA, 25 bp, Homo sapien
ccttccacggtttgaagcagatccc

SEQ ID NO: 1749638 - DNA, 25 bp, Homo sapien
gggaccatatagcaaagacttcaga

SEQ ID NO: 1749639 - DNA, 25 bp, Homo sapien
ttcccttccacggtttgaagcagat

SEQ ID NO: 1749640 - DNA, 25 bp, Homo sapien
ggatttgcaggcagccgacactaaa

SEQ ID NO: 1749641 - DNA, 25 bp, Homo sapien
aagtcttgacatgtggaactccttg

SEQ ID NO: 1749642 - DNA, 25 bp, Homo sapien
agtacagaaatctctcccctgcact

SEQ ID NO: 1749643 - DNA, 25 bp, Homo sapien
cctgcacttcccgttttacaggatt

SEQ ID NO: 1749644 - DNA, 25 bp, Homo sapien
ggaaggcggtatgctgctaatttcc

SEQ ID NO: 1749645 - DNA, 25 bp, Homo sapien
gcagtcctgccgcatttgtgggaag

SEQ ID NO: 1749646 - DNA, 25 bp, Homo sapien
agtcctgccgcatttgtgggaaggc

SEQ ID NO: 1749647 - DNA, 25 bp, Homo sapien
catttgtgggaaggcggtatgctgc

SEQ ID NO: 1749648 - DNA, 25 bp, Homo sapien
caggtgactcgcctgttggaggtct

SEQ ID NO: 1749649 - DNA, 25 bp, Homo sapien
aattaagctgttcaggtgactcgcc

SEQ ID NO: 1749650 - DNA, 25 bp, Homo sapien
tctgtggtaaaccagacacctcgcc

SEQ ID NO: 1749651 - DNA, 25 bp, Homo sapien
tgttggaggtctgtggtaaaccaga

SEQ ID NO: 1749652 - DNA, 25 bp, Homo sapien
caggcactggcgtgggtgcttgggc

SEQ ID NO: 1749653 - DNA, 25 bp, Homo sapien
ttttgtgtatcgtagtggcaggcac

SEQ ID NO: 1749654 - DNA, 25 bp, Homo sapien
ctaatttttgtgtatcgtagtggca

SEQ ID NO: 1749655 - DNA, 25 bp, Homo sapien
ttgtgtatcgtagtggcaggcactg

SEQ ID NO: 1749656 - DNA, 25 bp, Homo sapien
cctctgactcatctgctttcttttc

SEQ ID NO: 1749657 - DNA, 25 bp, Homo sapien
tctgactcatctgctttcttttcca

SEQ ID NO: 1749658 - DNA, 25 bp, Homo sapien
ctgactcatctgctttcttttccat

SEQ ID NO: 1749659 - DNA, 25 bp, Homo sapien
tacctctgactcatctgctttcttt

SEQ ID NO: 1749660 - DNA, 25 bp, Homo sapien
tgtaacagccagaaaggacagtcca

SEQ ID NO: 1749661 - DNA, 25 bp, Homo sapien
taacagccagaaaggacagtccacc

SEQ ID NO: 1749662 - DNA, 25 bp, Homo sapien
acagccagaaaggacagtccaccat

SEQ ID NO: 1749663 - DNA, 25 bp, Homo sapien
ctgtaacagccagaaaggacagtcc

SEQ ID NO: 1749664 - DNA, 25 bp, Homo sapien
taagaggctattaggtcctttcagc

SEQ ID NO: 1749665 - DNA, 25 bp, Homo sapien
caattttaattaccaggaggctctt

SEQ ID NO: 1749666 - DNA, 25 bp, Homo sapien
cttatccacaacttgcaagcagctt

SEQ ID NO: 1749667 - DNA, 25 bp, Homo sapien
ccctttaggctaactaagaggctat

SEQ ID NO: 1749668 - DNA, 25 bp, Homo sapien
ttgtttcagatcaggcacctctcct

SEQ ID NO: 1749669 - DNA, 25 bp, Homo sapien
gatacgccattgtcccatctctcgg

SEQ ID NO: 1749670 - DNA, 25 bp, Homo sapien
aaatccagtgactttgtttcagatc

SEQ ID NO: 1749671 - DNA, 25 bp, Homo sapien
tgcccggccttggttccccgtgata

SEQ ID NO: 1749672 - DNA, 25 bp, Homo sapien
catggcctgagggttacccggaaca

SEQ ID NO: 1749673 - DNA, 25 bp, Homo sapien
aatctgttcagaatcacccatggcc

SEQ ID NO: 1749674 - DNA, 25 bp, Homo sapien
tcaggttcctcgccttgtagggagg

SEQ ID NO: 1749675 - DNA, 25 bp, Homo sapien
ccagggcatttgaactgctgagcaa

SEQ ID NO: 1749676 - DNA, 25 bp, Homo sapien
tcattgggtaatgaatccttcacca

SEQ ID NO: 1749677 - DNA, 25 bp, Homo sapien
tatttgtagcttccagtgccagggc

SEQ ID NO: 1749678 - DNA, 25 bp, Homo sapien
tatggaagtcattgggtaatgaatc

SEQ ID NO: 1749679 - DNA, 25 bp, Homo sapien
gcctgaggctgcaaatacttatgga

SEQ ID NO: 1749680 - DNA, 25 bp, Homo sapien
agaaggcgacactccagatctcctc

SEQ ID NO: 1749681 - DNA, 25 bp, Homo sapien
catccttatgaataagcagggccac

SEQ ID NO: 1749682 - DNA, 25 bp, Homo sapien
tggactccccactgtttaaatacca

SEQ ID NO: 1749683 - DNA, 25 bp, Homo sapien
agggccactcggatccagaaggcga

SEQ ID NO: 1749684 - DNA, 25 bp, Homo sapien
gctgtgtagttttgctggggagata

SEQ ID NO: 1749685 - DNA, 25 bp, Homo sapien
ggctgtgtagttttgctggggagat

SEQ ID NO: 1749686 - DNA, 25 bp, Homo sapien
ctgtgtagttttgctggggagatac

SEQ ID NO: 1749687 - DNA, 25 bp, Homo sapien
gcctgctcagcaggtcccataatag

SEQ ID NO: 1749688 - DNA, 25 bp, Homo sapien
agcctgctcagcaggtcccataata

SEQ ID NO: 1749689 - DNA, 25 bp, Homo sapien
aagcctgctcagcaggtcccataat

SEQ ID NO: 1749690 - DNA, 25 bp, Homo sapien
gatagccacatgcttcgcttaggag

SEQ ID NO: 1749691 - DNA, 25 bp, Homo sapien
tagcctctgccacactaccttggga

SEQ ID NO: 1749692 - DNA, 25 bp, Homo sapien
tcattgccgccaaagggaagaggga

SEQ ID NO: 1749693 - DNA, 25 bp, Homo sapien
gtcaaatggccactcctagctgcag

SEQ ID NO: 1749694 - DNA, 25 bp, Homo sapien
atgtgtgtggttttcagcgctcaac

SEQ ID NO: 1749695 - DNA, 25 bp, Homo sapien
ggttttcagcgctcaactcctgtct

SEQ ID NO: 1749696 - DNA, 25 bp, Homo sapien
tatgtcaaatgatgtaatgcagaaa

SEQ ID NO: 1749697 - DNA, 25 bp, Homo sapien
tcctgtcttcaaatggtagtaagtt

SEQ ID NO: 1749698 - DNA, 25 bp, Homo sapien
ctagaggtcatcagaagtcagcagc

SEQ ID NO: 1749699 - DNA, 25 bp, Homo sapien
gctcattgtgtgaaggctagcctaa

SEQ ID NO: 1749700 - DNA, 25 bp, Homo sapien
caaaatacatctcgcctggtacagg

SEQ ID NO: 1749701 - DNA, 25 bp, Homo sapien
gcgtgttctgaatgccaactgccta

SEQ ID NO: 1749702 - DNA, 25 bp, Homo sapien
cctaagcatcttctaggccctgaaa

SEQ ID NO: 1749703 - DNA, 25 bp, Homo sapien
ctgaaatgaacaaggtattgctgcc

SEQ ID NO: 1749704 - DNA, 25 bp, Homo sapien
caacctgctagctgtcttgctgtaa

SEQ ID NO: 1749705 - DNA, 25 bp, Homo sapien
aaatagatgccgtcatcagccccag

SEQ ID NO: 1749706 - DNA, 25 bp, Homo sapien
tggtggcccagctttccgaatcatg

SEQ ID NO: 1749707 - DNA, 25 bp, Homo sapien
gatgttcactggctccgctgattag

SEQ ID NO: 1749708 - DNA, 25 bp, Homo sapien
gaaaggccatcagtacgcaacctag

SEQ ID NO: 1749709 - DNA, 25 bp, Homo sapien
tagtcctggtctacacatgcggctg

SEQ ID NO: 1749710 - DNA, 25 bp, Homo sapien
tcatgttgcatgatctgattcgctc

SEQ ID NO: 1749711 - DNA, 25 bp, Homo sapien
tcaaaataacaggagcaactgcttc

SEQ ID NO: 1749712 - DNA, 25 bp, Homo sapien
tagaatttctcatagcgtcaggtac

SEQ ID NO: 1749713 - DNA, 25 bp, Homo sapien
tccatatcccacattgaggaaaaca

SEQ ID NO: 1749714 - DNA, 25 bp, Homo sapien
taacacgcacggagcagtcatctct

SEQ ID NO: 1749715 - DNA, 25 bp, Homo sapien
taagacaaacatatgttggcctagg

SEQ ID NO: 1749716 - DNA, 25 bp, Homo sapien
aagtaagacaaacatatgttggcct

SEQ ID NO: 1749717 - DNA, 25 bp, Homo sapien
caaacatatgttggcctaggtctac

SEQ ID NO: 1749718 - DNA, 25 bp, Homo sapien
taagattttccttcgggttagcatc

SEQ ID NO: 1749719 - DNA, 25 bp, Homo sapien
tgctgttcctaagagtattaagatt

SEQ ID NO: 1749720 - DNA, 25 bp, Homo sapien
tttccttcgggttagcatctcctcc

SEQ ID NO: 1749721 - DNA, 25 bp, Homo sapien
tgctttgctgttcctaagagtatta

SEQ ID NO: 1749722 - DNA, 25 bp, Homo sapien
aactggaacaccaacgcttcctgca

SEQ ID NO: 1749723 - DNA, 25 bp, Homo sapien
ggctaagttccagcttagtttctcc

SEQ ID NO: 1749724 - DNA, 25 bp, Homo sapien
tgggtaactggaacaccaacgcttc

SEQ ID NO: 1749725 - DNA, 25 bp, Homo sapien
gctaagttccagcttagtttctcct

SEQ ID NO: 1749726 - DNA, 25 bp, Homo sapien
tcagctaacatccaatgggcagggt

SEQ ID NO: 1749727 - DNA, 25 bp, Homo sapien
tactcctcttggtccttggtacaga

SEQ ID NO: 1749728 - DNA, 25 bp, Homo sapien
tgggacctctgagaccacggcttcc

SEQ ID NO: 1749729 - DNA, 25 bp, Homo sapien
accaggcccagaaatccatgcgagg

SEQ ID NO: 1749730 - DNA, 25 bp, Homo sapien
catgaaatttctgctacgtgggacc

SEQ ID NO: 1749731 - DNA, 25 bp, Homo sapien
ggcttactacacaaacacggtctta

SEQ ID NO: 1749732 - DNA, 25 bp, Homo sapien
gaaagaactcggcttactacacaaa

SEQ ID NO: 1749733 - DNA, 25 bp, Homo sapien
tatcccaaataaacagacagtcaag

SEQ ID NO: 1749734 - DNA, 25 bp, Homo sapien
tacacaaacacggtcttaagacaca

SEQ ID NO: 1749735 - DNA, 25 bp, Homo sapien
tttccactccatagacccaggcctc

SEQ ID NO: 1749736 - DNA, 25 bp, Homo sapien
ttttctcccgtgttcgttattgtga

SEQ ID NO: 1749737 - DNA, 25 bp, Homo sapien
tccccagtctctcgcagaatccatt

SEQ ID NO: 1749738 - DNA, 25 bp, Homo sapien
gttattgtgaccaaattcatcaaag

SEQ ID NO: 1749739 - DNA, 25 bp, Homo sapien
gcgaaccacagagcgaagggttgat

SEQ ID NO: 1749740 - DNA, 25 bp, Homo sapien
tgatctttagcaaaacggtttgcca

SEQ ID NO: 1749741 - DNA, 25 bp, Homo sapien
tcaaagacaactcggctgtgaggct

SEQ ID NO: 1749742 - DNA, 25 bp, Homo sapien
caggagctctagtcttgtttcaaag

SEQ ID NO: 1749743 - DNA, 25 bp, Homo sapien
gctagggattagcattgacagctcc

SEQ ID NO: 1749744 - DNA, 25 bp, Homo sapien
gaagtcaccgatgtttctcagaaga

SEQ ID NO: 1749745 - DNA, 25 bp, Homo sapien
gaaacaaatgtcagcgcgacctatt

SEQ ID NO: 1749746 - DNA, 25 bp, Homo sapien
tattaaagtcaaccctgagctaggc

SEQ ID NO: 1749747 - DNA, 25 bp, Homo sapien
caaggctctatattgctggcaacac

SEQ ID NO: 1749748 - DNA, 25 bp, Homo sapien
cagtccaaggctctatattgctggc

SEQ ID NO: 1749749 - DNA, 25 bp, Homo sapien
ggctctatattgctggcaacactca

SEQ ID NO: 1749750 - DNA, 25 bp, Homo sapien
accacccagtccaaggctctatatt

SEQ ID NO: 1749751 - DNA, 25 bp, Homo sapien
taaatgccttcggtatgctcagtac

SEQ ID NO: 1749752 - DNA, 25 bp, Homo sapien
ctaaatgccttcggtatgctcagta

SEQ ID NO: 1749753 - DNA, 25 bp, Homo sapien
aaatgccttcggtatgctcagtacc

SEQ ID NO: 1749754 - DNA, 25 bp, Homo sapien
ttgcatatcgtgtagtaattttgaa

SEQ ID NO: 1749755 - DNA, 25 bp, Homo sapien
cctgtcattgcatatcgtgtagtaa

SEQ ID NO: 1749756 - DNA, 25 bp, Homo sapien
gttcctgtcattgcatatcgtgtag

SEQ ID NO: 1749757 - DNA, 25 bp, Homo sapien
cattgcatatcgtgtagtaattttg

SEQ ID NO: 1749758 - DNA, 25 bp, Homo sapien
caaaaggtggtctaatgtggacttc

SEQ ID NO: 1749759 - DNA, 25 bp, Homo sapien
gaaggtcactcccaatagttctatc

SEQ ID NO: 1749760 - DNA, 25 bp, Homo sapien
tgtacagattcaaaaggtggtctaa

SEQ ID NO: 1749761 - DNA, 25 bp, Homo sapien
ggattgtcacaactcctgtcctgac

SEQ ID NO: 1749762 - DNA, 25 bp, Homo sapien
tttatagggtctctgaaaatgatca

SEQ ID NO: 1749763 - DNA, 25 bp, Homo sapien
agactgatatccttggcaatgcaca

SEQ ID NO: 1749764 - DNA, 25 bp, Homo sapien
caagataaagatttgccagactgat

SEQ ID NO: 1749765 - DNA, 25 bp, Homo sapien
gatcaagttgacttacaagataaag

SEQ ID NO: 1749766 - DNA, 25 bp, Homo sapien
gattactgagttggtctaaacaatg

SEQ ID NO: 1749767 - DNA, 25 bp, Homo sapien
ctaaactcatgctttcggcttgaaa

SEQ ID NO: 1749768 - DNA, 25 bp, Homo sapien
ttcagactggcaaactcatgtaatc

SEQ ID NO: 1749769 - DNA, 25 bp, Homo sapien
taaaccatctaggttgagatctaga

SEQ ID NO: 1749770 - DNA, 25 bp, Homo sapien
gaaggatcttagcaaacaggacaag

SEQ ID NO: 1749771 - DNA, 25 bp, Homo sapien
aacaggacaagacagaggataaaaa

SEQ ID NO: 1749772 - DNA, 25 bp, Homo sapien
gtagttggctcttcagatttaccgc

SEQ ID NO: 1749773 - DNA, 25 bp, Homo sapien
gcatttatgtaatacttctaacagg

SEQ ID NO: 1749774 - DNA, 25 bp, Homo sapien
cagggctccgggcaaatttacaagc

SEQ ID NO: 1749775 - DNA, 25 bp, Homo sapien
tacaagcttttgagacaaggacctg

SEQ ID NO: 1749776 - DNA, 25 bp, Homo sapien
caaggacctgtctgataacaaaacc

SEQ ID NO: 1749777 - DNA, 25 bp, Homo sapien
aaaccaacacctgataactgacacc

SEQ ID NO: 1749778 - DNA, 25 bp, Homo sapien
ctttctctttgtgccagcttgtcac

SEQ ID NO: 1749779 - DNA, 25 bp, Homo sapien
atccccatggactgcctttctcttt

SEQ ID NO: 1749780 - DNA, 25 bp, Homo sapien
gatccccatggactgcctttctctt

SEQ ID NO: 1749781 - DNA, 25 bp, Homo sapien
cctttctgacaacgtttgctggatt

SEQ ID NO: 1749782 - DNA, 25 bp, Homo sapien
ttctcagctaggcagtattcaaata

SEQ ID NO: 1749783 - DNA, 25 bp, Homo sapien
tcagctaggcagtattcaaatattg

SEQ ID NO: 1749784 - DNA, 25 bp, Homo sapien
gtaaaccctactgatatttcttcag

SEQ ID NO: 1749785 - DNA, 25 bp, Homo sapien
tcctataatcctagagtaaacccta

SEQ ID NO: 1749786 - DNA, 25 bp, Homo sapien
cctttctatggacatctggtagccc

SEQ ID NO: 1749787 - DNA, 25 bp, Homo sapien
gacttacctataacgccctgacata

SEQ ID NO: 1749788 - DNA, 25 bp, Homo sapien
gacactttcactaggttcaagccca

SEQ ID NO: 1749789 - DNA, 25 bp, Homo sapien
tcttgtctagcatcgtctttaccag

SEQ ID NO: 1749790 - DNA, 25 bp, Homo sapien
gaatgaggctataagacaaatggct

SEQ ID NO: 1749791 - DNA, 25 bp, Homo sapien
ggctcttgagatgttagactcacta

SEQ ID NO: 1749792 - DNA, 25 bp, Homo sapien
caaatggcttgtctcgatgtgttcc

SEQ ID NO: 1749793 - DNA, 25 bp, Homo sapien
cagtgcagctgttgttgtggctctt

SEQ ID NO: 1749794 - DNA, 25 bp, Homo sapien
cttttgactgacttgacagctcatg

SEQ ID NO: 1749795 - DNA, 25 bp, Homo sapien
tttgactgacttgacagctcatgtg

SEQ ID NO: 1749796 - DNA, 25 bp, Homo sapien
ttgactgacttgacagctcatgtgc

SEQ ID NO: 1749797 - DNA, 25 bp, Homo sapien
cacttttgactgacttgacagctca

SEQ ID NO: 1749798 - DNA, 25 bp, Homo sapien
ccactgatgggtctacaattaaaac

SEQ ID NO: 1749799 - DNA, 25 bp, Homo sapien
tggttggtaatgtgccatccagtct

SEQ ID NO: 1749800 - DNA, 25 bp, Homo sapien
tgagtaaatgcacccgagatcccaa

SEQ ID NO: 1749801 - DNA, 25 bp, Homo sapien
tccccagagaaggatacatcagtgt

SEQ ID NO: 1749802 - DNA, 25 bp, Homo sapien
gatgatttctgtagacaaggaccca

SEQ ID NO: 1749803 - DNA, 25 bp, Homo sapien
agatatctggacatgggcccactag

SEQ ID NO: 1749804 - DNA, 25 bp, Homo sapien
tgttcttgccagtgccgagaagata

SEQ ID NO: 1749805 - DNA, 25 bp, Homo sapien
tttccctaggaaacagtctatgtcc

SEQ ID NO: 1749806 - DNA, 25 bp, Homo sapien
ttgagctaaaattttgcctccaagc

SEQ ID NO: 1749807 - DNA, 25 bp, Homo sapien
catagtaacccgagggaagaatgcc

SEQ ID NO: 1749808 - DNA, 25 bp, Homo sapien
tgcaggccttaattcaataaggaat

SEQ ID NO: 1749809 - DNA, 25 bp, Homo sapien
catatatgcattaatgagtgttaca

SEQ ID NO: 1749810 - DNA, 25 bp, Homo sapien
catagtatgtgtttgttggtcctaa

SEQ ID NO: 1749811 - DNA, 25 bp, Homo sapien
ttgttggtcctaacacaggcatcat

SEQ ID NO: 1749812 - DNA, 25 bp, Homo sapien
tacatagtatgtgtttgttggtcct

SEQ ID NO: 1749813 - DNA, 25 bp, Homo sapien
tgtgtttgttggtcctaacacaggc

SEQ ID NO: 1749814 - DNA, 25 bp, Homo sapien
aaatggtcacggaggcttttcttca

SEQ ID NO: 1749815 - DNA, 25 bp, Homo sapien
cttattgagaaaatggtcacggagg

SEQ ID NO: 1749816 - DNA, 25 bp, Homo sapien
gagaaaatggtcacggaggcttttc

SEQ ID NO: 1749817 - DNA, 25 bp, Homo sapien
tattgagaaaatggtcacggaggct

SEQ ID NO: 1749818 - DNA, 25 bp, Homo sapien
catctaaaacgtcaggtacgtgttt

SEQ ID NO: 1749819 - DNA, 25 bp, Homo sapien
tacatatggctagatacgtagagtc

SEQ ID NO: 1749820 - DNA, 25 bp, Homo sapien
tttttgtacatatggctagatacgt

SEQ ID NO: 1749821 - DNA, 25 bp, Homo sapien
ttcatctaaaacgtcaggtacgtgt

SEQ ID NO: 1749822 - DNA, 25 bp, Homo sapien
ccaggactgctgcagggtctctata

SEQ ID NO: 1749823 - DNA, 25 bp, Homo sapien
aggactgctgcagggtctctatagt

SEQ ID NO: 1749824 - DNA, 25 bp, Homo sapien
ctgctgcagggtctctatagtccat

SEQ ID NO: 1749825 - DNA, 25 bp, Homo sapien
gactgctgcagggtctctatagtcc

SEQ ID NO: 1749826 - DNA, 25 bp, Homo sapien
ctttcatttagtccatgtggtggcc

SEQ ID NO: 1749827 - DNA, 25 bp, Homo sapien
tttcatttagtccatgtggtggcct

SEQ ID NO: 1749828 - DNA, 25 bp, Homo sapien
aagacaccaagcaggccaaagcttc

SEQ ID NO: 1749829 - DNA, 25 bp, Homo sapien
tgactagggaagtcgaaagggctat

SEQ ID NO: 1749830 - DNA, 25 bp, Homo sapien
cccacgggcataaggtccaccttct

SEQ ID NO: 1749831 - DNA, 25 bp, Homo sapien
tcgaaagggctatccagggacctcg

SEQ ID NO: 1749832 - DNA, 25 bp, Homo sapien
ctcaaacttcagagaagtgtaatgc

SEQ ID NO: 1749833 - DNA, 25 bp, Homo sapien
tgtaatgcactccagctaagcttgt

SEQ ID NO: 1749834 - DNA, 25 bp, Homo sapien
cagcagtaacatttgggcagtccca

SEQ ID NO: 1749835 - DNA, 25 bp, Homo sapien
gtcctcacattcctactcacatttt

SEQ ID NO: 1749836 - DNA, 25 bp, Homo sapien
actcccagctgactcctttggacag

SEQ ID NO: 1749837 - DNA, 25 bp, Homo sapien
ccttcctggcaagaatatgtctgct

SEQ ID NO: 1749838 - DNA, 25 bp, Homo sapien
ccagctgactcctttggacagccat

SEQ ID NO: 1749839 - DNA, 25 bp, Homo sapien
aagaatatgtctgctgcaatgccag

SEQ ID NO: 1749840 - DNA, 25 bp, Homo sapien
tgctctacatttggcatgccatagc

SEQ ID NO: 1749841 - DNA, 25 bp, Homo sapien
ccaaatctgtttctacagacaggaa

SEQ ID NO: 1749842 - DNA, 25 bp, Homo sapien
tgtgggccaggtgaaaacttgcatg

SEQ ID NO: 1749843 - DNA, 25 bp, Homo sapien
tcaacctgctgatacctgtgggcca

SEQ ID NO: 1749844 - DNA, 25 bp, Homo sapien
catgattcagacaggtggttgccac

SEQ ID NO: 1749845 - DNA, 25 bp, Homo sapien
cagacaggtggttgccacatagctg

SEQ ID NO: 1749846 - DNA, 25 bp, Homo sapien
ggcttaaacaggaaatcatgattca

SEQ ID NO: 1749847 - DNA, 25 bp, Homo sapien
ggaaatcatgattcagacaggtggt

SEQ ID NO: 1749848 - DNA, 25 bp, Homo sapien
agaagcatacatctccaagtttaca

SEQ ID NO: 1749849 - DNA, 25 bp, Homo sapien
ccattggccatgttgacagcaatga

SEQ ID NO: 1749850 - DNA, 25 bp, Homo sapien
gaaagggagtccatacactctctgt

SEQ ID NO: 1749851 - DNA, 25 bp, Homo sapien
gcaatgatgcagtaagaagcataca

SEQ ID NO: 1749852 - DNA, 25 bp, Homo sapien
tggcttctaggagcatttgtctttg

SEQ ID NO: 1749853 - DNA, 25 bp, Homo sapien
tgtctttgtggtaccatttctgcat

SEQ ID NO: 1749854 - DNA, 25 bp, Homo sapien
tctgcattcctcttgtctatctcac

SEQ ID NO: 1749855 - DNA, 25 bp, Homo sapien
tccgtttggcttctaggagcatttg

SEQ ID NO: 1749856 - DNA, 25 bp, Homo sapien
gtcgagcagcatttggaagtaacag

SEQ ID NO: 1749857 - DNA, 25 bp, Homo sapien
taccgagcagggacacagttacatc

SEQ ID NO: 1749858 - DNA, 25 bp, Homo sapien
gcaggacaactatctttagacagaa

SEQ ID NO: 1749859 - DNA, 25 bp, Homo sapien
gacactgtgaactgctgagcctacc

SEQ ID NO: 1749860 - DNA, 25 bp, Homo sapien
cagcggagggtcactgtgccagtat

SEQ ID NO: 1749861 - DNA, 25 bp, Homo sapien
tcccccatatgtttctttgtctgct

SEQ ID NO: 1749862 - DNA, 25 bp, Homo sapien
tagacctattaatcccactgcagcg

SEQ ID NO: 1749863 - DNA, 25 bp, Homo sapien
gggtcactgtgccagtattcattaa

SEQ ID NO: 1749864 - DNA, 25 bp, Homo sapien
caacccatgttggtttgaagtatgg

SEQ ID NO: 1749865 - DNA, 25 bp, Homo sapien
aaccaagacgccgtctgccttgtaa

SEQ ID NO: 1749866 - DNA, 25 bp, Homo sapien
gacgccgtctgccttgtaaaattcc

SEQ ID NO: 1749867 - DNA, 25 bp, Homo sapien
gagaaaaaccaagacgccgtctgcc

SEQ ID NO: 1749868 - DNA, 25 bp, Homo sapien
gacacatattcttaacagcggtccc

SEQ ID NO: 1749869 - DNA, 25 bp, Homo sapien
gaatgagctccttctttagacacat

SEQ ID NO: 1749870 - DNA, 25 bp, Homo sapien
tcttaacagcggtcccaacagacat

SEQ ID NO: 1749871 - DNA, 25 bp, Homo sapien
agaatgagctccttctttagacaca

SEQ ID NO: 1749872 - DNA, 25 bp, Homo sapien
tagctgcccgaaaagcaggtgtttt

SEQ ID NO: 1749873 - DNA, 25 bp, Homo sapien
ccgaaaagcaggtgttttgaattgc

SEQ ID NO: 1749874 - DNA, 25 bp, Homo sapien
tcatatagctgcccgaaaagcaggt

SEQ ID NO: 1749875 - DNA, 25 bp, Homo sapien
tgcccgaaaagcaggtgttttgaat

SEQ ID NO: 1749876 - DNA, 25 bp, Homo sapien
tcttatctttagagagccatataca

SEQ ID NO: 1749877 - DNA, 25 bp, Homo sapien
agaaaggaggtgccatttcttccca

SEQ ID NO: 1749878 - DNA, 25 bp, Homo sapien
tttagagagccatatacaagtggag

SEQ ID NO: 1749879 - DNA, 25 bp, Homo sapien
taagagattaacagtacccctactg

SEQ ID NO: 1749880 - DNA, 25 bp, Homo sapien
tctgttttcttctcaggtgtctgca

SEQ ID NO: 1749881 - DNA, 25 bp, Homo sapien
ctgttttcttctcaggtgtctgcat

SEQ ID NO: 1749882 - DNA, 25 bp, Homo sapien
ctctgttttcttctcaggtgtctgc

SEQ ID NO: 1749883 - DNA, 25 bp, Homo sapien
aaggcccagcagacctggtccagga

SEQ ID NO: 1749884 - DNA, 25 bp, Homo sapien
cccaggtcccatccctttggagaag

SEQ ID NO: 1749885 - DNA, 25 bp, Homo sapien
cacattcctttgaaaggcccagcag

SEQ ID NO: 1749886 - DNA, 25 bp, Homo sapien
gagttataattagattcacattcct

SEQ ID NO: 1749887 - DNA, 25 bp, Homo sapien
ttgtctgctccattccaatttactt

SEQ ID NO: 1749888 - DNA, 25 bp, Homo sapien
agaaaaccagcccaatagcatgtag

SEQ ID NO: 1749889 - DNA, 25 bp, Homo sapien
ccagcccaatagcatgtagctgctg

SEQ ID NO: 1749890 - DNA, 25 bp, Homo sapien
gcatgtagctgctgtgatgattcac

SEQ ID NO: 1749891 - DNA, 25 bp, Homo sapien
tgtagctgctgtgatgattcaccac

SEQ ID NO: 1749892 - DNA, 25 bp, Homo sapien
ctcccatgatgctaaaaaggtctct

SEQ ID NO: 1749893 - DNA, 25 bp, Homo sapien
aaggatggtgaatccaactgccctg

SEQ ID NO: 1749894 - DNA, 25 bp, Homo sapien
ccctcccatgatgctaaaaaggtct

SEQ ID NO: 1749895 - DNA, 25 bp, Homo sapien
tggtgaatccaactgccctgatccc

SEQ ID NO: 1749896 - DNA, 25 bp, Homo sapien
aacgtggcgattaggcaccagctgc

SEQ ID NO: 1749897 - DNA, 25 bp, Homo sapien
tttggagaatgctaagcccctctga

SEQ ID NO: 1749898 - DNA, 25 bp, Homo sapien
gaaaatcctagttcctctagcgaag

SEQ ID NO: 1749899 - DNA, 25 bp, Homo sapien
tagctgaaggcctcaaacgtggcga

SEQ ID NO: 1749900 - DNA, 25 bp, Homo sapien
tcatcttatccgttcccttctgatc

SEQ ID NO: 1749901 - DNA, 25 bp, Homo sapien
tttccaatatcatcttatccgttcc

SEQ ID NO: 1749902 - DNA, 25 bp, Homo sapien
tccaatatcatcttatccgttccct

SEQ ID NO: 1749903 - DNA, 25 bp, Homo sapien
atatcatcttatccgttcccttctg

SEQ ID NO: 1749904 - DNA, 25 bp, Homo sapien
caggctgtttgacttaggatgagga

SEQ ID NO: 1749905 - DNA, 25 bp, Homo sapien
gagaaaggcagccaccactttagta

SEQ ID NO: 1749906 - DNA, 25 bp, Homo sapien
aacaggcagcctaaagtctcataag

SEQ ID NO: 1749907 - DNA, 25 bp, Homo sapien
tatttctgatatctcaacaggcagc

SEQ ID NO: 1749908 - DNA, 25 bp, Homo sapien
caagtcctactgaatttgccattat

SEQ ID NO: 1749909 - DNA, 25 bp, Homo sapien
ctgaatttgccattatctgctgtac

SEQ ID NO: 1749910 - DNA, 25 bp, Homo sapien
cctactgaatttgccattatctgct

SEQ ID NO: 1749911 - DNA, 25 bp, Homo sapien
gtcctactgaatttgccattatctg

SEQ ID NO: 1749912 - DNA, 25 bp, Homo sapien
tagaggtaacgagctaccccattgc

SEQ ID NO: 1749913 - DNA, 25 bp, Homo sapien
cacattcacgtttctgtaggagttg

SEQ ID NO: 1749914 - DNA, 25 bp, Homo sapien
taggagttgatcctgcgcaaccaca

SEQ ID NO: 1749915 - DNA, 25 bp, Homo sapien
cacagagctgcttcgcaaacatagc

SEQ ID NO: 1749916 - DNA, 25 bp, Homo sapien
atgtctacactcataagcaagcagc

SEQ ID NO: 1749917 - DNA, 25 bp, Homo sapien
catgtctacactcataagcaagcag

SEQ ID NO: 1749918 - DNA, 25 bp, Homo sapien
tgtctacactcataagcaagcagcc

SEQ ID NO: 1749919 - DNA, 25 bp, Homo sapien
gattagccagttcttcaatgtgtaa

SEQ ID NO: 1749920 - DNA, 25 bp, Homo sapien
gtttcctctgaggtagttcagtgat

SEQ ID NO: 1749921 - DNA, 25 bp, Homo sapien
cctttggataagtatactctttgga

SEQ ID NO: 1749922 - DNA, 25 bp, Homo sapien
gtgatgtggaactgaatgattagcc

SEQ ID NO: 1749923 - DNA, 25 bp, Homo sapien
cccaaatgttggttgatatgctttc

SEQ ID NO: 1749924 - DNA, 25 bp, Homo sapien
aagaactcatttgaataacaggtcc

SEQ ID NO: 1749925 - DNA, 25 bp, Homo sapien
agtcccatagttcataggataattt

SEQ ID NO: 1749926 - DNA, 25 bp, Homo sapien
gagtttcaaagccaagtcccatagt

SEQ ID NO: 1749927 - DNA, 25 bp, Homo sapien
tttgggaaaaatgatatacagcagc

SEQ ID NO: 1749928 - DNA, 25 bp, Homo sapien
ttgaaaggaacttctctctgttttg

SEQ ID NO: 1749929 - DNA, 25 bp, Homo sapien
tgggaaaaatgatatacagcagcat

SEQ ID NO: 1749930 - DNA, 25 bp, Homo sapien
acttctctctgttttgggaaaaatg

SEQ ID NO: 1749931 - DNA, 25 bp, Homo sapien
agcaaaattctcattgccatttagt

SEQ ID NO: 1749932 - DNA, 25 bp, Homo sapien
tcattgccatttagttcggacaaaa

SEQ ID NO: 1749933 - DNA, 25 bp, Homo sapien
catttagttcggacaaaatcatgtc

SEQ ID NO: 1749934 - DNA, 25 bp, Homo sapien
aattctcattgccatttagttcgga

SEQ ID NO: 1749935 - DNA, 25 bp, Homo sapien
ggagaaccatgaccaactcccctgg

SEQ ID NO: 1749936 - DNA, 25 bp, Homo sapien
cccctgggagccgaaggcaggagac

SEQ ID NO: 1749937 - DNA, 25 bp, Homo sapien
ctgggagccgaaggcaggagacagc

SEQ ID NO: 1749938 - DNA, 25 bp, Homo sapien
ggttttctgcttcatgggatgggtt

SEQ ID NO: 1749939 - DNA, 25 bp, Homo sapien
tagcccctctcactgcatctggtaa

SEQ ID NO: 1749940 - DNA, 25 bp, Homo sapien
taacccataccagctgtgcagagat

SEQ ID NO: 1749941 - DNA, 25 bp, Homo sapien
gcagatcctgaagttggtccaatct

SEQ ID NO: 1749942 - DNA, 25 bp, Homo sapien
catctggtaacccataccagctgtg

SEQ ID NO: 1749943 - DNA, 25 bp, Homo sapien
cacaacagatctgaagggggcccat

SEQ ID NO: 1749944 - DNA, 25 bp, Homo sapien
ctgaagggggcccattctcagctct

SEQ ID NO: 1749945 - DNA, 25 bp, Homo sapien
caacagatctgaagggggcccattc

SEQ ID NO: 1749946 - DNA, 25 bp, Homo sapien
aagggggcccattctcagctctggc

SEQ ID NO: 1749947 - DNA, 25 bp, Homo sapien
taaataagtatccaactcaccatag

SEQ ID NO: 1749948 - DNA, 25 bp, Homo sapien
ctccagcctagtttcaggtgcatta

SEQ ID NO: 1749949 - DNA, 25 bp, Homo sapien
gtatccaactcaccatagtgtagaa

SEQ ID NO: 1749950 - DNA, 25 bp, Homo sapien
aagtatccaactcaccatagtgtag

SEQ ID NO: 1749951 - DNA, 25 bp, Homo sapien
cgccgatatggtcatctgcaacaga

SEQ ID NO: 1749952 - DNA, 25 bp, Homo sapien
taagggccacactctgggagtaact

SEQ ID NO: 1749953 - DNA, 25 bp, Homo sapien
acaggccaaggatagtcagttccca

SEQ ID NO: 1749954 - DNA, 25 bp, Homo sapien
tcagaggcactcaagatatgaggat

SEQ ID NO: 1749955 - DNA, 25 bp, Homo sapien
gctgcagctcctgctgctggctctg

SEQ ID NO: 1749956 - DNA, 25 bp, Homo sapien
cagctcctgctgctggctctgcatc

SEQ ID NO: 1749957 - DNA, 25 bp, Homo sapien
ctaataagtaagggctgctgcagct

SEQ ID NO: 1749958 - DNA, 25 bp, Homo sapien
taataagtaagggctgctgcagctc

SEQ ID NO: 1749959 - DNA, 25 bp, Homo sapien
ccccagagaggcatggaagatcact

SEQ ID NO: 1749960 - DNA, 25 bp, Homo sapien
aaactgaagtgattgcgcactggca

SEQ ID NO: 1749961 - DNA, 25 bp, Homo sapien
ggcattctggaaaccagcgttgtct

SEQ ID NO: 1749962 - DNA, 25 bp, Homo sapien
cactgccagtggtgagggcacatga

SEQ ID NO: 1749963 - DNA, 25 bp, Homo sapien
tgcgggcggtcctgtcagcatcatt

SEQ ID NO: 1749964 - DNA, 25 bp, Homo sapien
taccatagagtactgaaagccaggg

SEQ ID NO: 1749965 - DNA, 25 bp, Homo sapien
gaatagatggcctttgagtgaagac

SEQ ID NO: 1749966 - DNA, 25 bp, Homo sapien
caaaccatgctttcgtgagctctgt

SEQ ID NO: 1749967 - DNA, 25 bp, Homo sapien
cagccatctgtggactgcaaacgct

SEQ ID NO: 1749968 - DNA, 25 bp, Homo sapien
tgcatggatgcccacttggcaccag

SEQ ID NO: 1749969 - DNA, 25 bp, Homo sapien
tgtggactgcaaacgctgagaggat

SEQ ID NO: 1749970 - DNA, 25 bp, Homo sapien
tgtttttgcatggatgcccacttgg

SEQ ID NO: 1749971 - DNA, 25 bp, Homo sapien
cttttcaacacatttagaagctagt

SEQ ID NO: 1749972 - DNA, 25 bp, Homo sapien
tttcaacacatttagaagctagttc

SEQ ID NO: 1749973 - DNA, 25 bp, Homo sapien
gcttttcaacacatttagaagctag

SEQ ID NO: 1749974 - DNA, 25 bp, Homo sapien
tggcttttcaacacatttagaagct

SEQ ID NO: 1749975 - DNA, 25 bp, Homo sapien
atgttcctcctcatcctttggtgta

SEQ ID NO: 1749976 - DNA, 25 bp, Homo sapien
ttaagaaaaatgttcctcctcatcc

SEQ ID NO: 1749977 - DNA, 25 bp, Homo sapien
aaaaatgttcctcctcatcctttgg

SEQ ID NO: 1749978 - DNA, 25 bp, Homo sapien
aaatgttcctcctcatcctttggtg

SEQ ID NO: 1749979 - DNA, 25 bp, Homo sapien
cagttaaactcagtgatttttattg

SEQ ID NO: 1749980 - DNA, 25 bp, Homo sapien
tacttagtcctctaatatagagaga

SEQ ID NO: 1749981 - DNA, 25 bp, Homo sapien
ggctcatgtttacttagtcctctaa

SEQ ID NO: 1749982 - DNA, 25 bp, Homo sapien
gtacagatctccagaccgtctttgg

SEQ ID NO: 1749983 - DNA, 25 bp, Homo sapien
tacccacactgtatagggttttaca

SEQ ID NO: 1749984 - DNA, 25 bp, Homo sapien
tagacgtaacacttttctacccaca

SEQ ID NO: 1749985 - DNA, 25 bp, Homo sapien
tcagtggcctcagacattagacgta

SEQ ID NO: 1749986 - DNA, 25 bp, Homo sapien
tcctccaggagttgttgagccctga

SEQ ID NO: 1749987 - DNA, 25 bp, Homo sapien
tcagaggctatgacctcttctagct

SEQ ID NO: 1749988 - DNA, 25 bp, Homo sapien
ggctatgacctcttctagctcacca

SEQ ID NO: 1749989 - DNA, 25 bp, Homo sapien
attcctcagaggctatgacctcttc

SEQ ID NO: 1749990 - DNA, 25 bp, Homo sapien
tccagaccatccacgcagccagtca

SEQ ID NO: 1749991 - DNA, 25 bp, Homo sapien
ccccagagctgctataagccttgcc

SEQ ID NO: 1749992 - DNA, 25 bp, Homo sapien
tgcccaatggttgcccacagctgaa

SEQ ID NO: 1749993 - DNA, 25 bp, Homo sapien
cctagtcctgcgagtgactgggaat

SEQ ID NO: 1749994 - DNA, 25 bp, Homo sapien
gaatcctagtcctgcgagtgactgg

SEQ ID NO: 1749995 - DNA, 25 bp, Homo sapien
tcatcatgcaaaggatactagttac

SEQ ID NO: 1749996 - DNA, 25 bp, Homo sapien
gattagcaatagatgcattttcccc

SEQ ID NO: 1749997 - DNA, 25 bp, Homo sapien
gaacggctaaacacctgcaacagct

SEQ ID NO: 1749998 - DNA, 25 bp, Homo sapien
tagcaacaccatgttccagaacggc

SEQ ID NO: 1749999 - DNA, 25 bp, Homo sapien
caataaagaccaattagttggagta

SEQ ID NO: 1750000 - DNA, 25 bp, Homo sapien
aacagctctaggatatgaactccac

SEQ ID NO: 1750001 - DNA, 25 bp, Homo sapien
tggagtaactctaacagctctagga

SEQ ID NO: 1750002 - DNA, 25 bp, Homo sapien
cacaccgagaccttttggtggtagg

SEQ ID NO: 1750003 - DNA, 25 bp, Homo sapien
gggaagctgttactaaccttcatgc

SEQ ID NO: 1750004 - DNA, 25 bp, Homo sapien
tctaatcgctgcttcaaatgtcagt

SEQ ID NO: 1750005 - DNA, 25 bp, Homo sapien
gaaagacatcgaatgtgtcccctga

SEQ ID NO: 1750006 - DNA, 25 bp, Homo sapien
cacaagggagcaattaatgggaagc

SEQ ID NO: 1750007 - DNA, 25 bp, Homo sapien
ctattccgacgataaagaaacagat

SEQ ID NO: 1750008 - DNA, 25 bp, Homo sapien
ggcctattccgacgataaagaaaca

SEQ ID NO: 1750009 - DNA, 25 bp, Homo sapien
caaaaggcctattccgacgataaag

SEQ ID NO: 1750010 - DNA, 25 bp, Homo sapien
tttcaaaaggcctattccgacgata

SEQ ID NO: 1750011 - DNA, 25 bp, Homo sapien
gtccagcgtgcacactgttttcaga

SEQ ID NO: 1750012 - DNA, 25 bp, Homo sapien
agcgtgcacactgttttcagaacaa

SEQ ID NO: 1750013 - DNA, 25 bp, Homo sapien
cagcgtgcacactgttttcagaaca

SEQ ID NO: 1750014 - DNA, 25 bp, Homo sapien
tccagcgtgcacactgttttcagaa

SEQ ID NO: 1750015 - DNA, 25 bp, Homo sapien
ttcccattagtttgaaagacaagac

SEQ ID NO: 1750016 - DNA, 25 bp, Homo sapien
tagtttgaaagacaagacagtgaca

SEQ ID NO: 1750017 - DNA, 25 bp, Homo sapien
ttgttcccattagtttgaaagacaa

SEQ ID NO: 1750018 - DNA, 25 bp, Homo sapien
tgttcccattagtttgaaagacaag

SEQ ID NO: 1750019 - DNA, 25 bp, Homo sapien
catacaatcaaacccatgagcttct

SEQ ID NO: 1750020 - DNA, 25 bp, Homo sapien
catactgatagatgttttgcccttg

SEQ ID NO: 1750021 - DNA, 25 bp, Homo sapien
aaacccatgagcttctacaaaacac

SEQ ID NO: 1750022 - DNA, 25 bp, Homo sapien
gcagtgtgctggctcaaacatacaa

SEQ ID NO: 1750023 - DNA, 25 bp, Homo sapien
tctattttctttatgccagccttcc

SEQ ID NO: 1750024 - DNA, 25 bp, Homo sapien
cagccttccacataagcagagttgc

SEQ ID NO: 1750025 - DNA, 25 bp, Homo sapien
ccacataagcagagttgcaggtcat

SEQ ID NO: 1750026 - DNA, 25 bp, Homo sapien
tattttctttatgccagccttccac

SEQ ID NO: 1750027 - DNA, 25 bp, Homo sapien
taaaagagtattgctttagcctttg

SEQ ID NO: 1750028 - DNA, 25 bp, Homo sapien
gagtattgctttagcctttggcctg

SEQ ID NO: 1750029 - DNA, 25 bp, Homo sapien
ctataaaagagtattgctttagcct

SEQ ID NO: 1750030 - DNA, 25 bp, Homo sapien
tattgctttagcctttggcctgtat

SEQ ID NO: 1750031 - DNA, 25 bp, Homo sapien
cagtgaaagctcgattatgttcaga

SEQ ID NO: 1750032 - DNA, 25 bp, Homo sapien
gttcagtgaaagctcgattatgttc

SEQ ID NO: 1750033 - DNA, 25 bp, Homo sapien
gaaagctcgattatgttcagaagcc

SEQ ID NO: 1750034 - DNA, 25 bp, Homo sapien
ctgttcagtgaaagctcgattatgt

SEQ ID NO: 1750035 - DNA, 25 bp, Homo sapien
gcacttgtcagcggaaacagcaaat

SEQ ID NO: 1750036 - DNA, 25 bp, Homo sapien
acttgtcagcggaaacagcaaatgc

SEQ ID NO: 1750037 - DNA, 25 bp, Homo sapien
cacttgtcagcggaaacagcaaatg

SEQ ID NO: 1750038 - DNA, 25 bp, Homo sapien
tgagcacttgaacctctgctatggc

SEQ ID NO: 1750039 - DNA, 25 bp, Homo sapien
aacgactgccaggacaacgccttgt

SEQ ID NO: 1750040 - DNA, 25 bp, Homo sapien
ttgagggaccagcacaacgactgcc

SEQ ID NO: 1750041 - DNA, 25 bp, Homo sapien
cacccatgggtttagaggatgagca

SEQ ID NO: 1750042 - DNA, 25 bp, Homo sapien
tgagacagccataggtgggctcctt

SEQ ID NO: 1750043 - DNA, 25 bp, Homo sapien
ggtgtgagtccctattgagacagcc

SEQ ID NO: 1750044 - DNA, 25 bp, Homo sapien
cagctgtgcccctgcaaagagtgag

SEQ ID NO: 1750045 - DNA, 25 bp, Homo sapien
cagcagtctgtctatagccgggtct

SEQ ID NO: 1750046 - DNA, 25 bp, Homo sapien
gaaaccagggtttcaatgctttcag

SEQ ID NO: 1750047 - DNA, 25 bp, Homo sapien
aggcactgctagactcatgggtgcc

SEQ ID NO: 1750048 - DNA, 25 bp, Homo sapien
cattttctagagagagcataagagg

SEQ ID NO: 1750049 - DNA, 25 bp, Homo sapien
tagagagagcataagaggcactgct

SEQ ID NO: 1750050 - DNA, 25 bp, Homo sapien
tgttcccacaactgaagatgaattg

SEQ ID NO: 1750051 - DNA, 25 bp, Homo sapien
gagttgaccttctgtctgagcaaga

SEQ ID NO: 1750052 - DNA, 25 bp, Homo sapien
gaaatgcagcactcaacacgaagat

SEQ ID NO: 1750053 - DNA, 25 bp, Homo sapien
tgcaggaaactgtgagaattcagtc

SEQ ID NO: 1750054 - DNA, 25 bp, Homo sapien
ggatacacgatctaatgccattata

SEQ ID NO: 1750055 - DNA, 25 bp, Homo sapien
gcattggatgtggatacacgatcta

SEQ ID NO: 1750056 - DNA, 25 bp, Homo sapien
ttgcctccaaatttggcattggatg

SEQ ID NO: 1750057 - DNA, 25 bp, Homo sapien
caaatttggcattggatgtggatac

SEQ ID NO: 1750058 - DNA, 25 bp, Homo sapien
cttagctgtgggctttgttgatcca

SEQ ID NO: 1750059 - DNA, 25 bp, Homo sapien
ccaagatcaaggtttagtgtgctta

SEQ ID NO: 1750060 - DNA, 25 bp, Homo sapien
tgtggcattcatagcacagctgtcc

SEQ ID NO: 1750061 - DNA, 25 bp, Homo sapien
acagctgtccaaatccaccttggaa

SEQ ID NO: 1750062 - DNA, 25 bp, Homo sapien
catgggatattccttctgattccac

SEQ ID NO: 1750063 - DNA, 25 bp, Homo sapien
atgggatattccttctgattccaca

SEQ ID NO: 1750064 - DNA, 25 bp, Homo sapien
atattccttctgattccacatttgc

SEQ ID NO: 1750065 - DNA, 25 bp, Homo sapien
tccttctgattccacatttgctcac

SEQ ID NO: 1750066 - DNA, 25 bp, Homo sapien
tattttctgcatattggccaggaag

SEQ ID NO: 1750067 - DNA, 25 bp, Homo sapien
tattggccaggaagctcataaaact

SEQ ID NO: 1750068 - DNA, 25 bp, Homo sapien
tgtgggcaccttattttctgcatat

SEQ ID NO: 1750069 - DNA, 25 bp, Homo sapien
ctatgtgggcaccttattttctgca

SEQ ID NO: 1750070 - DNA, 25 bp, Homo sapien
ttaatttggtggtgtccgttctgac

SEQ ID NO: 1750071 - DNA, 25 bp, Homo sapien
tcaagttcctccgtaagtccagaaa

SEQ ID NO: 1750072 - DNA, 25 bp, Homo sapien
aattctggcatcaagttcctccgta

SEQ ID NO: 1750073 - DNA, 25 bp, Homo sapien
aatttggtggtgtccgttctgacca

SEQ ID NO: 1750074 - DNA, 25 bp, Homo sapien
tatcgggtggatacaagcttgcttt

SEQ ID NO: 1750075 - DNA, 25 bp, Homo sapien
gatggttagctctgctgcatcacac

SEQ ID NO: 1750076 - DNA, 25 bp, Homo sapien
gatctggactcaagggctactattc

SEQ ID NO: 1750077 - DNA, 25 bp, Homo sapien
tgtgtcggttggttactagccagga

SEQ ID NO: 1750078 - DNA, 25 bp, Homo sapien
catccttctcgtaaaaggcaatcat

SEQ ID NO: 1750079 - DNA, 25 bp, Homo sapien
cagcgaatgctgcacccgttcttgg

SEQ ID NO: 1750080 - DNA, 25 bp, Homo sapien
gcacccgttcttggcatatcatcct

SEQ ID NO: 1750081 - DNA, 25 bp, Homo sapien
atcatccttctcgtaaaaggcaatc

SEQ ID NO: 1750082 - DNA, 25 bp, Homo sapien
aaggagaaactcaaatccaagaagc

SEQ ID NO: 1750083 - DNA, 25 bp, Homo sapien
cagaaaggagaaactcaaatccaag

SEQ ID NO: 1750084 - DNA, 25 bp, Homo sapien
gaaaggagaaactcaaatccaagaa

SEQ ID NO: 1750085 - DNA, 25 bp, Homo sapien
ctagaggacgaaatgaagacagaaa

SEQ ID NO: 1750086 - DNA, 25 bp, Homo sapien
accaaggataaagtggagagacctt

SEQ ID NO: 1750087 - DNA, 25 bp, Homo sapien
cacataaccaaggataaagtggaga

SEQ ID NO: 1750088 - DNA, 25 bp, Homo sapien
taaccaaggataaagtggagagacc

SEQ ID NO: 1750089 - DNA, 25 bp, Homo sapien
ttccacataaccaaggataaagtgg

SEQ ID NO: 1750090 - DNA, 25 bp, Homo sapien
ttatttgtcctctgatatcatccat

SEQ ID NO: 1750091 - DNA, 25 bp, Homo sapien
cgcttgcaatgcagagcagatcagt

SEQ ID NO: 1750092 - DNA, 25 bp, Homo sapien
gcagatcagtcagggcgaccaaaat

SEQ ID NO: 1750093 - DNA, 25 bp, Homo sapien
aacacctatctgatgtccctgaaag

SEQ ID NO: 1750094 - DNA, 25 bp, Homo sapien
gaaaaaaggccattgcgcttgcaat

SEQ ID NO: 1750095 - DNA, 25 bp, Homo sapien
actaatgcaccccacacatgaaccg

SEQ ID NO: 1750096 - DNA, 25 bp, Homo sapien
tttccactaatgcaccccacacatg

SEQ ID NO: 1750097 - DNA, 25 bp, Homo sapien
taatgcaccccacacatgaaccgag

SEQ ID NO: 1750098 - DNA, 25 bp, Homo sapien
tgcaccccacacatgaaccgagagg

SEQ ID NO: 1750099 - DNA, 25 bp, Homo sapien
ttctactgcaagattaattgcaggc

SEQ ID NO: 1750100 - DNA, 25 bp, Homo sapien
ctactgcaagattaattgcaggcac

SEQ ID NO: 1750101 - DNA, 25 bp, Homo sapien
agcttctactgcaagattaattgca

SEQ ID NO: 1750102 - DNA, 25 bp, Homo sapien
gcttctactgcaagattaattgcag

SEQ ID NO: 1750103 - DNA, 25 bp, Homo sapien
tgaaaagtcactccagaagaatgtc

SEQ ID NO: 1750104 - DNA, 25 bp, Homo sapien
tttgttcctggtaactcttttgaca

SEQ ID NO: 1750105 - DNA, 25 bp, Homo sapien
gaaaagtcactccagaagaatgtca

SEQ ID NO: 1750106 - DNA, 25 bp, Homo sapien
aactcttttgacatggacagtctct

SEQ ID NO: 1750107 - DNA, 25 bp, Homo sapien
gtgtaggcagatggcccaagcaggc

SEQ ID NO: 1750108 - DNA, 25 bp, Homo sapien
cacatatagccctttaaaggcagtg

SEQ ID NO: 1750109 - DNA, 25 bp, Homo sapien
tgtggaccacatggtgtaggcagat

SEQ ID NO: 1750110 - DNA, 25 bp, Homo sapien
cagacattgtcttatgtcccctaca

SEQ ID NO: 1750111 - DNA, 25 bp, Homo sapien
aattgttaagtttgctttctctgga

SEQ ID NO: 1750112 - DNA, 25 bp, Homo sapien
ccagatacctcccaattgttaagtt

SEQ ID NO: 1750113 - DNA, 25 bp, Homo sapien
tgacatgcaccagatacctcccaat

SEQ ID NO: 1750114 - DNA, 25 bp, Homo sapien
tgcaccagatacctcccaattgtta

SEQ ID NO: 1750115 - DNA, 25 bp, Homo sapien
gtttctcatgaattctaacacaggt

SEQ ID NO: 1750116 - DNA, 25 bp, Homo sapien
cacaggtcaaacctttctcctgggc

SEQ ID NO: 1750117 - DNA, 25 bp, Homo sapien
tctaacacaggtcaaacctttctcc

SEQ ID NO: 1750118 - DNA, 25 bp, Homo sapien
aacacaggtcaaacctttctcctgg

SEQ ID NO: 1750119 - DNA, 25 bp, Homo sapien
gaactgacagatacagcatgttgag

SEQ ID NO: 1750120 - DNA, 25 bp, Homo sapien
gcatgttgagtgctcctccacctgc

SEQ ID NO: 1750121 - DNA, 25 bp, Homo sapien
taaaagtgctaatttctgctcaaca

SEQ ID NO: 1750122 - DNA, 25 bp, Homo sapien
cacctgcaacgccaataaaagtgct

SEQ ID NO: 1750123 - DNA, 25 bp, Homo sapien
tactctctcacctccactctgtagc

SEQ ID NO: 1750124 - DNA, 25 bp, Homo sapien
agttcacatctacaatatgtagtac

SEQ ID NO: 1750125 - DNA, 25 bp, Homo sapien
tacaatatgtagtactctctcacct

SEQ ID NO: 1750126 - DNA, 25 bp, Homo sapien
cacatctacaatatgtagtactctc

SEQ ID NO: 1750127 - DNA, 25 bp, Homo sapien
gcgttgtggcactggcgaaatttag

SEQ ID NO: 1750128 - DNA, 25 bp, Homo sapien
ttagtacataagtccatagttcatt

SEQ ID NO: 1750129 - DNA, 25 bp, Homo sapien
tgttgctgtttaggcgttgtggcac

SEQ ID NO: 1750130 - DNA, 25 bp, Homo sapien
cataagtccatagttcattggttgt

SEQ ID NO: 1750131 - DNA, 25 bp, Homo sapien
tcctgcctgtacagtagccttcaag

SEQ ID NO: 1750132 - DNA, 25 bp, Homo sapien
ggaaaagatcgtatccaaatgtcag

SEQ ID NO: 1750133 - DNA, 25 bp, Homo sapien
aagagcaggccgaaagctttcttgc

SEQ ID NO: 1750134 - DNA, 25 bp, Homo sapien
ctctctatgactggatcccttggaa

SEQ ID NO: 1750135 - DNA, 25 bp, Homo sapien
gcatctgagttctcctcttgtacca

SEQ ID NO: 1750136 - DNA, 25 bp, Homo sapien
gttctcctcttgtaccaaactcaac

SEQ ID NO: 1750137 - DNA, 25 bp, Homo sapien
aacacctgcatctgagttctcctct

SEQ ID NO: 1750138 - DNA, 25 bp, Homo sapien
ctgaacacctgcatctgagttctcc

SEQ ID NO: 1750139 - DNA, 25 bp, Homo sapien
tcctactgggcatctagctagacaa

SEQ ID NO: 1750140 - DNA, 25 bp, Homo sapien
ttcaacttgcctagatcacagacgg

SEQ ID NO: 1750141 - DNA, 25 bp, Homo sapien
tcacagacggaaatttgctcaccaa

SEQ ID NO: 1750142 - DNA, 25 bp, Homo sapien
tataatgcttttggcctctgcctgc

SEQ ID NO: 1750143 - DNA, 25 bp, Homo sapien
gtctaagcgtgtggcaaaggtttcc

SEQ ID NO: 1750144 - DNA, 25 bp, Homo sapien
tgtctaagcgtgtggcaaaggtttc

SEQ ID NO: 1750145 - DNA, 25 bp, Homo sapien
tcagcattgactcagacagaaccaa

SEQ ID NO: 1750146 - DNA, 25 bp, Homo sapien
gaaatttaagtgtgaaagctgccag

SEQ ID NO: 1750147 - DNA, 25 bp, Homo sapien
gattattaccagtagagtcagcatt

SEQ ID NO: 1750148 - DNA, 25 bp, Homo sapien
gctgccatcttcttcgagattcaga

SEQ ID NO: 1750149 - DNA, 25 bp, Homo sapien
tggctcagcccatggaagaaaactt

SEQ ID NO: 1750150 - DNA, 25 bp, Homo sapien
caggcccgcattagcagatggctca

SEQ ID NO: 1750151 - DNA, 25 bp, Homo sapien
ttgtaaattactggcacaggcccgc

SEQ ID NO: 1750152 - DNA, 25 bp, Homo sapien
tagatgagcatattagagagggcca

SEQ ID NO: 1750153 - DNA, 25 bp, Homo sapien
tgggcacaacttagctgaatcctgt

SEQ ID NO: 1750154 - DNA, 25 bp, Homo sapien
tatggagtgtgtcaactgcattcct

SEQ ID NO: 1750155 - DNA, 25 bp, Homo sapien
tgtccctagagatccagtttccaat

SEQ ID NO: 1750156 - DNA, 25 bp, Homo sapien
ttccaatagctgtatgctccaggag

SEQ ID NO: 1750157 - DNA, 25 bp, Homo sapien
catcattaaagttgcccagaacgtg

SEQ ID NO: 1750158 - DNA, 25 bp, Homo sapien
cagaagctctaagcgccaatgtgag

SEQ ID NO: 1750159 - DNA, 25 bp, Homo sapien
tagcactaagaatacccatgggagc

SEQ ID NO: 1750160 - DNA, 25 bp, Homo sapien
gcctagctacacaacaaaacattga

SEQ ID NO: 1750161 - DNA, 25 bp, Homo sapien
cacagattttctcagtgcagaagaa

SEQ ID NO: 1750162 - DNA, 25 bp, Homo sapien
aaagcaatgatcttcacagattttc

SEQ ID NO: 1750163 - DNA, 25 bp, Homo sapien
gattttctcagtgcagaagaatgtc

SEQ ID NO: 1750164 - DNA, 25 bp, Homo sapien
tgcagaagaatgtccctgtggagag

SEQ ID NO: 1750165 - DNA, 25 bp, Homo sapien
gatttctccagtgctagcctaatgg

SEQ ID NO: 1750166 - DNA, 25 bp, Homo sapien
ctccagtgctagcctaatggtctgc

SEQ ID NO: 1750167 - DNA, 25 bp, Homo sapien
tctccagtgctagcctaatggtctg

SEQ ID NO: 1750168 - DNA, 25 bp, Homo sapien
tttctccagtgctagcctaatggtc

SEQ ID NO: 1750169 - DNA, 25 bp, Homo sapien
tggtgcttctggtcttgagaacatc

SEQ ID NO: 1750170 - DNA, 25 bp, Homo sapien
ggctgcatgctctggtcataggtgc

SEQ ID NO: 1750171 - DNA, 25 bp, Homo sapien
catgctctggtcataggtgccgatg

SEQ ID NO: 1750172 - DNA, 25 bp, Homo sapien
tggtcttgagaacatccctgacaag

SEQ ID NO: 1750173 - DNA, 25 bp, Homo sapien
aagtgactcactggggactttgaac

SEQ ID NO: 1750174 - DNA, 25 bp, Homo sapien
ccaagtgactcactggggactttga

SEQ ID NO: 1750175 - DNA, 25 bp, Homo sapien
caagtgactcactggggactttgaa

SEQ ID NO: 1750176 - DNA, 25 bp, Homo sapien
tccaagtgctccctaataactcggg

SEQ ID NO: 1750177 - DNA, 25 bp, Homo sapien
agtgctgcagagacgctccaagtgc

SEQ ID NO: 1750178 - DNA, 25 bp, Homo sapien
cctgtgtgttcaactgtcagtatca

SEQ ID NO: 1750179 - DNA, 25 bp, Homo sapien
cattgcggaggctgacagctgaaca

SEQ ID NO: 1750180 - DNA, 25 bp, Homo sapien
ttaggaaatggactttgtagtacca

SEQ ID NO: 1750181 - DNA, 25 bp, Homo sapien
catgtctgaatacatcagaaggtgt

SEQ ID NO: 1750182 - DNA, 25 bp, Homo sapien
tgtctgaatacatcagaaggtgtct

SEQ ID NO: 1750183 - DNA, 25 bp, Homo sapien
ctttgtagtaccatactgtgctggg

SEQ ID NO: 1750184 - DNA, 25 bp, Homo sapien
tttgcattcataaagtcataagtag

SEQ ID NO: 1750185 - DNA, 25 bp, Homo sapien
cccaagatattgatggatcttatat

SEQ ID NO: 1750186 - DNA, 25 bp, Homo sapien
tgggttcattttagttagctgcata

SEQ ID NO: 1750187 - DNA, 25 bp, Homo sapien
tataacttgccattaggcctgcata

SEQ ID NO: 1750188 - DNA, 25 bp, Homo sapien
tacattcccttatacagcctgctgc

SEQ ID NO: 1750189 - DNA, 25 bp, Homo sapien
gaccggcaatagtaataaatgacca

SEQ ID NO: 1750190 - DNA, 25 bp, Homo sapien
accctctgtctgctgtgaccaggac

SEQ ID NO: 1750191 - DNA, 25 bp, Homo sapien
ttttctgctaaaatacaacggtcca

SEQ ID NO: 1750192 - DNA, 25 bp, Homo sapien
cgtgagtactgcgtccctcttccag

SEQ ID NO: 1750193 - DNA, 25 bp, Homo sapien
tactgcgtccctcttccagagggag

SEQ ID NO: 1750194 - DNA, 25 bp, Homo sapien
gcgtccctcttccagagggagagag

SEQ ID NO: 1750195 - DNA, 25 bp, Homo sapien
tgagtactgcgtccctcttccagag

SEQ ID NO: 1750196 - DNA, 25 bp, Homo sapien
ccacagcctctctcttccgtcagct

SEQ ID NO: 1750197 - DNA, 25 bp, Homo sapien
agcctctctcttccgtcagctgcat

SEQ ID NO: 1750198 - DNA, 25 bp, Homo sapien
ctgcctgttggctcccacagcctct

SEQ ID NO: 1750199 - DNA, 25 bp, Homo sapien
tgttggctcccacagcctctctctt

SEQ ID NO: 1750200 - DNA, 25 bp, Homo sapien
tcttcttgatctcctacttccttca

SEQ ID NO: 1750201 - DNA, 25 bp, Homo sapien
cttcttgatctcctacttccttcat

SEQ ID NO: 1750202 - DNA, 25 bp, Homo sapien
agcatcttcttgatctcctacttcc

SEQ ID NO: 1750203 - DNA, 25 bp, Homo sapien
catcttcttgatctcctacttcctt

SEQ ID NO: 1750204 - DNA, 25 bp, Homo sapien
ccatgtgggatgcattgaagggcat

SEQ ID NO: 1750205 - DNA, 25 bp, Homo sapien
ggcatcttttgtctttgtagctgca

SEQ ID NO: 1750206 - DNA, 25 bp, Homo sapien
gcacgggtatgcacatgacaaggca

SEQ ID NO: 1750207 - DNA, 25 bp, Homo sapien
cattggttgagagtcattgtctgtt

SEQ ID NO: 1750208 - DNA, 25 bp, Homo sapien
tgaattccaaattggagctggtcca

SEQ ID NO: 1750209 - DNA, 25 bp, Homo sapien
gcatgaggacggaatgaattccaaa

SEQ ID NO: 1750210 - DNA, 25 bp, Homo sapien
ggaatgaattccaaattggagctgg

SEQ ID NO: 1750211 - DNA, 25 bp, Homo sapien
tggcagatgttggaaaggagttgat

SEQ ID NO: 1750212 - DNA, 25 bp, Homo sapien
tttgcatcaactgaacacaattagt

SEQ ID NO: 1750213 - DNA, 25 bp, Homo sapien
acacaattagttgcggcaataaaaa

SEQ ID NO: 1750214 - DNA, 25 bp, Homo sapien
gcatcaactgaacacaattagttgc

SEQ ID NO: 1750215 - DNA, 25 bp, Homo sapien
actttgcatcaactgaacacaatta

SEQ ID NO: 1750216 - DNA, 25 bp, Homo sapien
tgatgaatagtgatagcattatccc

SEQ ID NO: 1750217 - DNA, 25 bp, Homo sapien
tgtgagcagtagattagtattccca

SEQ ID NO: 1750218 - DNA, 25 bp, Homo sapien
gagatagtaaatgctagtgtaatgt

SEQ ID NO: 1750219 - DNA, 25 bp, Homo sapien
aggatattaggtgtgagcagtagat

SEQ ID NO: 1750220 - DNA, 25 bp, Homo sapien
ttccccattcttgggaggtcaacat

SEQ ID NO: 1750221 - DNA, 25 bp, Homo sapien
ctatatttatgccatagtccacttt

SEQ ID NO: 1750222 - DNA, 25 bp, Homo sapien
ttatgccatagtccactttattaaa

SEQ ID NO: 1750223 - DNA, 25 bp, Homo sapien
ccagcatatacggattcacaatcta

SEQ ID NO: 1750224 - DNA, 25 bp, Homo sapien
tcaattgtcccagcatatacggatt

SEQ ID NO: 1750225 - DNA, 25 bp, Homo sapien
ggctttgatagctcatctagttgca

SEQ ID NO: 1750226 - DNA, 25 bp, Homo sapien
aactactctctttgactgcatgagg

SEQ ID NO: 1750227 - DNA, 25 bp, Homo sapien
tattgtacctctttaaactactctc

SEQ ID NO: 1750228 - DNA, 25 bp, Homo sapien
gggctgtttgcaaatcgcctgttat

SEQ ID NO: 1750229 - DNA, 25 bp, Homo sapien
gttatcccctgcagccatgatggca

SEQ ID NO: 1750230 - DNA, 25 bp, Homo sapien
ctcctagagccaaagttatcccctg

SEQ ID NO: 1750231 - DNA, 25 bp, Homo sapien
cataaaatgtctgattgctctcccg

SEQ ID NO: 1750232 - DNA, 25 bp, Homo sapien
ttgctctcccggatgaacagtgctt

SEQ ID NO: 1750233 - DNA, 25 bp, Homo sapien
tcagattgcctgagcataagatggg

SEQ ID NO: 1750234 - DNA, 25 bp, Homo sapien
cagttcagacaactggactgtctgg

SEQ ID NO: 1750235 - DNA, 25 bp, Homo sapien
gacatagccattaacaaacatacca

SEQ ID NO: 1750236 - DNA, 25 bp, Homo sapien
gcaagacaaattgcacatactgtat

SEQ ID NO: 1750237 - DNA, 25 bp, Homo sapien
catgaaccttgccacagagttgctc

SEQ ID NO: 1750238 - DNA, 25 bp, Homo sapien
catcacttagtaagtcacaatcaat

SEQ ID NO: 1750239 - DNA, 25 bp, Homo sapien
aaaacatgaaccttgccacagagtt

SEQ ID NO: 1750240 - DNA, 25 bp, Homo sapien
tagtaagtcacaatcaatatgaaag

SEQ ID NO: 1750241 - DNA, 25 bp, Homo sapien
tagaggagaagaggtttccgtcatg

SEQ ID NO: 1750242 - DNA, 25 bp, Homo sapien
ttagaggagaagaggtttccgtcat

SEQ ID NO: 1750243 - DNA, 25 bp, Homo sapien
actatgccaggcaacttatttttcc

SEQ ID NO: 1750244 - DNA, 25 bp, Homo sapien
tgagctactatgccaggcaacttat

SEQ ID NO: 1750245 - DNA, 25 bp, Homo sapien
catcaggactgcgaggattggaaga

SEQ ID NO: 1750246 - DNA, 25 bp, Homo sapien
caccatggtttatgtgtgagtgcaa

SEQ ID NO: 1750247 - DNA, 25 bp, Homo sapien
tctgtgcaagtttggacgtcttctc

SEQ ID NO: 1750248 - DNA, 25 bp, Homo sapien
attcctgtgggatatgcacccttca

SEQ ID NO: 1750249 - DNA, 25 bp, Homo sapien
aaatcgtctttgtgtttctggctca

SEQ ID NO: 1750250 - DNA, 25 bp, Homo sapien
tgtctgccgcctgattcagtccaca

SEQ ID NO: 1750251 - DNA, 25 bp, Homo sapien
cctgcatggaagaatagccttggtt

SEQ ID NO: 1750252 - DNA, 25 bp, Homo sapien
cagctttgccttgtctgccgcctga

SEQ ID NO: 1750253 - DNA, 25 bp, Homo sapien
tcatccccattcataacagtcacca

SEQ ID NO: 1750254 - DNA, 25 bp, Homo sapien
tttgaccccttcacatctcaagtga

SEQ ID NO: 1750255 - DNA, 25 bp, Homo sapien
gcaaccttgtcattgaactctttga

SEQ ID NO: 1750256 - DNA, 25 bp, Homo sapien
catagtctcccttttgtttctcaga

SEQ ID NO: 1750257 - DNA, 25 bp, Homo sapien
aacatttctccattgaaaatgaata

SEQ ID NO: 1750258 - DNA, 25 bp, Homo sapien
tttctccattgaaaatgaatatgga

SEQ ID NO: 1750259 - DNA, 25 bp, Homo sapien
tctccattgaaaatgaatatggaac

SEQ ID NO: 1750260 - DNA, 25 bp, Homo sapien
ccattgaaaatgaatatggaactac

SEQ ID NO: 1750261 - DNA, 25 bp, Homo sapien
taacaaatcttagctcgattctcag

SEQ ID NO: 1750262 - DNA, 25 bp, Homo sapien
tctgagttcccacagtataccttat

SEQ ID NO: 1750263 - DNA, 25 bp, Homo sapien
tggtggctttacataggtgaaggat

SEQ ID NO: 1750264 - DNA, 25 bp, Homo sapien
tttctgcttagattggatttggctc

SEQ ID NO: 1750265 - DNA, 25 bp, Homo sapien
cagcatgggtcatgactcactcagc

SEQ ID NO: 1750266 - DNA, 25 bp, Homo sapien
ccaggtacctctaatggtacatggg

SEQ ID NO: 1750267 - DNA, 25 bp, Homo sapien
ccatcagatttcataagaacttgct

SEQ ID NO: 1750268 - DNA, 25 bp, Homo sapien
gggataatggtaaatacaattcaag

SEQ ID NO: 1750269 - DNA, 25 bp, Homo sapien
catatcataaccagtaatttgttta

SEQ ID NO: 1750270 - DNA, 25 bp, Homo sapien
cagggtagtcccagtcactttttct

SEQ ID NO: 1750271 - DNA, 25 bp, Homo sapien
attgcaattttcagggtagtcccag

SEQ ID NO: 1750272 - DNA, 25 bp, Homo sapien
caattttcagggtagtcccagtcac

SEQ ID NO: 1750273 - DNA, 25 bp, Homo sapien
tgtacttatgtagtgcttgcatttc

SEQ ID NO: 1750274 - DNA, 25 bp, Homo sapien
caaagtactccttattatcactctg

SEQ ID NO: 1750275 - DNA, 25 bp, Homo sapien
ttattatcactctgccgtagatttg

SEQ ID NO: 1750276 - DNA, 25 bp, Homo sapien
tacttatgtagtgcttgcatttcaa

SEQ ID NO: 1750277 - DNA, 25 bp, Homo sapien
cttccagcccactgaaatgtatatc

SEQ ID NO: 1750278 - DNA, 25 bp, Homo sapien
tgttgcttgcatgcttccagcccac

SEQ ID NO: 1750279 - DNA, 25 bp, Homo sapien
gtttgttgcttgcatgcttccagcc

SEQ ID NO: 1750280 - DNA, 25 bp, Homo sapien
gggtttgttgcttgcatgcttccag

SEQ ID NO: 1750281 - DNA, 25 bp, Homo sapien
catgtattcttctaatggtgccatc

SEQ ID NO: 1750282 - DNA, 25 bp, Homo sapien
caggagcctgtttttcgtggaccag

SEQ ID NO: 1750283 - DNA, 25 bp, Homo sapien
ttttcgtggaccagagccctcgtcc

SEQ ID NO: 1750284 - DNA, 25 bp, Homo sapien
catactctccggatctctgttctca

SEQ ID NO: 1750285 - DNA, 25 bp, Homo sapien
tatcctggactactaagggcttcta

SEQ ID NO: 1750286 - DNA, 25 bp, Homo sapien
tcctgtggtagttttggcaagccct

SEQ ID NO: 1750287 - DNA, 25 bp, Homo sapien
tgatctgcaacatactggcccatgg

SEQ ID NO: 1750288 - DNA, 25 bp, Homo sapien
gaggtcagaataacacgctgctgga

SEQ ID NO: 1750289 - DNA, 25 bp, Homo sapien
ggagtttaggggacatgcaacaaat

SEQ ID NO: 1750290 - DNA, 25 bp, Homo sapien
aataatactttgctaaagcatgcaa

SEQ ID NO: 1750291 - DNA, 25 bp, Homo sapien
gaataatactttgctaaagcatgca

SEQ ID NO: 1750292 - DNA, 25 bp, Homo sapien
atatgacagccattagaatactgga

SEQ ID NO: 1750293 - DNA, 25 bp, Homo sapien
ctgcagctctcccataaagcattag

SEQ ID NO: 1750294 - DNA, 25 bp, Homo sapien
taaagcattagggaatgagaactgc

SEQ ID NO: 1750295 - DNA, 25 bp, Homo sapien
gccctcttttactctagtgttgtca

SEQ ID NO: 1750296 - DNA, 25 bp, Homo sapien
cattagggaatgagaactgcttttc

SEQ ID NO: 1750297 - DNA, 25 bp, Homo sapien
ccagatatttgtatggcaggcagct

SEQ ID NO: 1750298 - DNA, 25 bp, Homo sapien
taatcactggtcctaatacaaatcc

SEQ ID NO: 1750299 - DNA, 25 bp, Homo sapien
gcaggcagctacacagcagcaactt

SEQ ID NO: 1750300 - DNA, 25 bp, Homo sapien
ttcattaccaggtcagcttcttggg

SEQ ID NO: 1750301 - DNA, 25 bp, Homo sapien
tcctggccaggttctaaagctggca

SEQ ID NO: 1750302 - DNA, 25 bp, Homo sapien
caacagccacaggagaatcaaatac

SEQ ID NO: 1750303 - DNA, 25 bp, Homo sapien
ataaatttgattgagcagcaacagc

SEQ ID NO: 1750304 - DNA, 25 bp, Homo sapien
tcttctgccataaggacggattttt

SEQ ID NO: 1750305 - DNA, 25 bp, Homo sapien
tttgccatcctccattggacaacca

SEQ ID NO: 1750306 - DNA, 25 bp, Homo sapien
ctccattggacaaccattgcatgtg

SEQ ID NO: 1750307 - DNA, 25 bp, Homo sapien
attgcatgtggtatttgttgggcag

SEQ ID NO: 1750308 - DNA, 25 bp, Homo sapien
gccatcctccattggacaaccattg

SEQ ID NO: 1750309 - DNA, 25 bp, Homo sapien
ccacctgatggctatgctctgccat

SEQ ID NO: 1750310 - DNA, 25 bp, Homo sapien
caattaggatgacaggacatgttct

SEQ ID NO: 1750311 - DNA, 25 bp, Homo sapien
aataagcagaaacaaatcttcgcac

SEQ ID NO: 1750312 - DNA, 25 bp, Homo sapien
acacccacctgatggctatgctctg

SEQ ID NO: 1750313 - DNA, 25 bp, Homo sapien
ctcgtcctcgtcgtggtttctggtg

SEQ ID NO: 1750314 - DNA, 25 bp, Homo sapien
atgctgtgccttctcgtcctcgtcg

SEQ ID NO: 1750315 - DNA, 25 bp, Homo sapien
ttaatggcaagtggcagttgaagca

SEQ ID NO: 1750316 - DNA, 25 bp, Homo sapien
tcccagtgggaaagaagaactgtca

SEQ ID NO: 1750317 - DNA, 25 bp, Homo sapien
gaagccaaatgctgtccgtcagcct

SEQ ID NO: 1750318 - DNA, 25 bp, Homo sapien
aatgctgtccgtcagcctgttacag

SEQ ID NO: 1750319 - DNA, 25 bp, Homo sapien
tgctctcatgtacggccacactttt

SEQ ID NO: 1750320 - DNA, 25 bp, Homo sapien
cagcctgttacagcatgtgctctca

SEQ ID NO: 1750321 - DNA, 25 bp, Homo sapien
gcaaaataaggccttggagctgagt

SEQ ID NO: 1750322 - DNA, 25 bp, Homo sapien
ttgggaatagcaaacagaaggagct

SEQ ID NO: 1750323 - DNA, 25 bp, Homo sapien
ggagctgaacgctctgcttagtgga

SEQ ID NO: 1750324 - DNA, 25 bp, Homo sapien
ctgcttagtggagtgagaggaattc

SEQ ID NO: 1750325 - DNA, 25 bp, Homo sapien
gagacatgactgtcagcacgttctg

SEQ ID NO: 1750326 - DNA, 25 bp, Homo sapien
gagagacatgactgtcagcacgttc

SEQ ID NO: 1750327 - DNA, 25 bp, Homo sapien
ggcatcaacagacatctgctgatga

SEQ ID NO: 1750328 - DNA, 25 bp, Homo sapien
gatgaaagcatgctgtaggagagac

SEQ ID NO: 1750329 - DNA, 25 bp, Homo sapien
ttgctggagatttctctttgttctc

SEQ ID NO: 1750330 - DNA, 25 bp, Homo sapien
ctcttgtccctcgctttctgtccca

SEQ ID NO: 1750331 - DNA, 25 bp, Homo sapien
cactcttgtccctcgctttctgtcc

SEQ ID NO: 1750332 - DNA, 25 bp, Homo sapien
tccactcttgtccctcgctttctgt

SEQ ID NO: 1750333 - DNA, 25 bp, Homo sapien
atatccagaatagcaccaattcctg

SEQ ID NO: 1750334 - DNA, 25 bp, Homo sapien
gatatccagaatagcaccaattcct

SEQ ID NO: 1750335 - DNA, 25 bp, Homo sapien
agatatccagaatagcaccaattcc

SEQ ID NO: 1750336 - DNA, 25 bp, Homo sapien
ctttgagcctatggacatccttttc

SEQ ID NO: 1750337 - DNA, 25 bp, Homo sapien
gacatccttttcacaggtcacctga

SEQ ID NO: 1750338 - DNA, 25 bp, Homo sapien
gagcctatggacatccttttcacag

SEQ ID NO: 1750339 - DNA, 25 bp, Homo sapien
tcacaggtcacctgataacattcac

SEQ ID NO: 1750340 - DNA, 25 bp, Homo sapien
tctgtacattttaccccctctatct

SEQ ID NO: 1750341 - DNA, 25 bp, Homo sapien
ctagctctcgaatcagctttaacta

SEQ ID NO: 1750342 - DNA, 25 bp, Homo sapien
tcaacttttgtctggattccttctg

SEQ ID NO: 1750343 - DNA, 25 bp, Homo sapien
tttcaccatggccatatcttctagc

SEQ ID NO: 1750344 - DNA, 25 bp, Homo sapien
gggaatctatattctgcgacagctg

SEQ ID NO: 1750345 - DNA, 25 bp, Homo sapien
tcactgtaggttaacgatggaatag

SEQ ID NO: 1750346 - DNA, 25 bp, Homo sapien
ccaagttgggaatctatattctgcg

SEQ ID NO: 1750347 - DNA, 25 bp, Homo sapien
tagtaatgagatctaatgagctgtc

SEQ ID NO: 1750348 - DNA, 25 bp, Homo sapien
ctagctttgctataattgcatacat

SEQ ID NO: 1750349 - DNA, 25 bp, Homo sapien
gttttctctagctttgctataattg

SEQ ID NO: 1750350 - DNA, 25 bp, Homo sapien
ttccattacctttgttttctctagc

SEQ ID NO: 1750351 - DNA, 25 bp, Homo sapien
ctctagctttgctataattgcatac

SEQ ID NO: 1750352 - DNA, 25 bp, Homo sapien
tggaaaaagccagtggacatcgtgc

SEQ ID NO: 1750353 - DNA, 25 bp, Homo sapien
tttattggaaaaagccagtggacat

SEQ ID NO: 1750354 - DNA, 25 bp, Homo sapien
tcatttattggaaaaagccagtgga

SEQ ID NO: 1750355 - DNA, 25 bp, Homo sapien
aaaaagccagtggacatcgtgcttt

SEQ ID NO: 1750356 - DNA, 25 bp, Homo sapien
attactgatacaactgctgtggttg

SEQ ID NO: 1750357 - DNA, 25 bp, Homo sapien
ttattactgatacaactgctgtggt

SEQ ID NO: 1750358 - DNA, 25 bp, Homo sapien
ttttattactgatacaactgctgtg

SEQ ID NO: 1750359 - DNA, 25 bp, Homo sapien
tttattactgatacaactgctgtgg

SEQ ID NO: 1750360 - DNA, 25 bp, Homo sapien
taattcaatatccttagaaacaaag

SEQ ID NO: 1750361 - DNA, 25 bp, Homo sapien
agagccaaaacaactctcgttttga

SEQ ID NO: 1750362 - DNA, 25 bp, Homo sapien
cgttttgatcagaaactatgtctgt

SEQ ID NO: 1750363 - DNA, 25 bp, Homo sapien
tgctaattcaatatccttagaaaca

SEQ ID NO: 1750364 - DNA, 25 bp, Homo sapien
ctaaattgttgggaacgtgcaactg

SEQ ID NO: 1750365 - DNA, 25 bp, Homo sapien
gcaactggtattgttcagatgtaca

SEQ ID NO: 1750366 - DNA, 25 bp, Homo sapien
gaacgtgcaactggtattgttcaga

SEQ ID NO: 1750367 - DNA, 25 bp, Homo sapien
cagatgtacaagatgacagtgaata

SEQ ID NO: 1750368 - DNA, 25 bp, Homo sapien
ctttattagtatgtggatgtaactg

SEQ ID NO: 1750369 - DNA, 25 bp, Homo sapien
tgagttctccaaagagcccctttaa

SEQ ID NO: 1750370 - DNA, 25 bp, Homo sapien
tttgtctttattagtatgtggatgt

SEQ ID NO: 1750371 - DNA, 25 bp, Homo sapien
aaatgttgagttctccaaagagccc

SEQ ID NO: 1750372 - DNA, 25 bp, Homo sapien
tttgcagttgacaactcttcaagga

SEQ ID NO: 1750373 - DNA, 25 bp, Homo sapien
tttctttgcgttttgcagttgacaa

SEQ ID NO: 1750374 - DNA, 25 bp, Homo sapien
tgcgttttgcagttgacaactcttc

SEQ ID NO: 1750375 - DNA, 25 bp, Homo sapien
tgcagttgacaactcttcaaggaca

SEQ ID NO: 1750376 - DNA, 25 bp, Homo sapien
cacattcaaacgtgctctgaggtta

SEQ ID NO: 1750377 - DNA, 25 bp, Homo sapien
tgctaccgccctacaaattcaaaag

SEQ ID NO: 1750378 - DNA, 25 bp, Homo sapien
tttcctggagagagtactgcgcaca

SEQ ID NO: 1750379 - DNA, 25 bp, Homo sapien
tattattggtacacctgctaccgcc

SEQ ID NO: 1750380 - DNA, 25 bp, Homo sapien
tattcttctaggaagttctcactgt

SEQ ID NO: 1750381 - DNA, 25 bp, Homo sapien
taaaacatctgctttaactttgaaa

SEQ ID NO: 1750382 - DNA, 25 bp, Homo sapien
ttaactttgaaacccaacactgaca

SEQ ID NO: 1750383 - DNA, 25 bp, Homo sapien
gctttatattcttctaggaagttct

SEQ ID NO: 1750384 - DNA, 25 bp, Homo sapien
ccatttgctccaccggtaattgtca

SEQ ID NO: 1750385 - DNA, 25 bp, Homo sapien
gtgtcgtctcctctagctgtacttg

SEQ ID NO: 1750386 - DNA, 25 bp, Homo sapien
gctgtacttgttacactgccaaaag

SEQ ID NO: 1750387 - DNA, 25 bp, Homo sapien
taattgtcacagttgtgtcgtctcc

SEQ ID NO: 1750388 - DNA, 25 bp, Homo sapien
tagtgaacccacagttcgtttgtca

SEQ ID NO: 1750389 - DNA, 25 bp, Homo sapien
ctctagaagtacataagccttttcg

SEQ ID NO: 1750390 - DNA, 25 bp, Homo sapien
cataatactgccaccagagccaagt

SEQ ID NO: 1750391 - DNA, 25 bp, Homo sapien
taaaagggccacagtagactatttg

SEQ ID NO: 1750392 - DNA, 25 bp, Homo sapien
tgtccaaggtccagctgccttgtgc

SEQ ID NO: 1750393 - DNA, 25 bp, Homo sapien
ctgtccaaggtccagctgccttgtg

SEQ ID NO: 1750394 - DNA, 25 bp, Homo sapien
tcaaaactccaattgacttcagtgg

SEQ ID NO: 1750395 - DNA, 25 bp, Homo sapien
aaaactccaattgacttcagtggga

SEQ ID NO: 1750396 - DNA, 25 bp, Homo sapien
aactccaattgacttcagtgggaac

SEQ ID NO: 1750397 - DNA, 25 bp, Homo sapien
agtcaaaactccaattgacttcagt

SEQ ID NO: 1750398 - DNA, 25 bp, Homo sapien
ttgtagaaagggtctttggtgacca

SEQ ID NO: 1750399 - DNA, 25 bp, Homo sapien
tttactaagatatactgcatttctc

SEQ ID NO: 1750400 - DNA, 25 bp, Homo sapien
cacactgcctgagcagaaaaacaat

SEQ ID NO: 1750401 - DNA, 25 bp, Homo sapien
gtctttggtgaccattataactccc

SEQ ID NO: 1750402 - DNA, 25 bp, Homo sapien
ttctctctaagtttggttttcagca

SEQ ID NO: 1750403 - DNA, 25 bp, Homo sapien
tctctctaagtttggttttcagcat

SEQ ID NO: 1750404 - DNA, 25 bp, Homo sapien
gttctctctaagtttggttttcagc

SEQ ID NO: 1750405 - DNA, 25 bp, Homo sapien
caatccaagattccaacattgcaat

SEQ ID NO: 1750406 - DNA, 25 bp, Homo sapien
tatcagtctcctcatagtctttatg

SEQ ID NO: 1750407 - DNA, 25 bp, Homo sapien
cagttgagctgttttaatatgatct

SEQ ID NO: 1750408 - DNA, 25 bp, Homo sapien
ggctttcttggttctcccaatccaa

SEQ ID NO: 1750409 - DNA, 25 bp, Homo sapien
gaatcactggtagtactgtcattac

SEQ ID NO: 1750410 - DNA, 25 bp, Homo sapien
taacatgaattgcagggacattttc

SEQ ID NO: 1750411 - DNA, 25 bp, Homo sapien
tttatcaaggttttcaagtcaagag

SEQ ID NO: 1750412 - DNA, 25 bp, Homo sapien
caagtcaagagttattgacctaaca

SEQ ID NO: 1750413 - DNA, 25 bp, Homo sapien
agtgataatcacaagaatataaaca

SEQ ID NO: 1750414 - DNA, 25 bp, Homo sapien
gaggagaagtgataatcacaagaat

SEQ ID NO: 1750415 - DNA, 25 bp, Homo sapien
tgtagaggagaagtgataatcacaa

SEQ ID NO: 1750416 - DNA, 25 bp, Homo sapien
gaagtgataatcacaagaatataaa

SEQ ID NO: 1750417 - DNA, 25 bp, Homo sapien
ctcagaacacggtgaatgacaccag

SEQ ID NO: 1750418 - DNA, 25 bp, Homo sapien
agaacacggtgaatgacaccaggga

SEQ ID NO: 1750419 - DNA, 25 bp, Homo sapien
tcaggatggaataaaggcagcagca

SEQ ID NO: 1750420 - DNA, 25 bp, Homo sapien
caggatggaataaaggcagcagcaa

SEQ ID NO: 1750421 - DNA, 25 bp, Homo sapien
cggagaatgaattaagggagtagcc

SEQ ID NO: 1750422 - DNA, 25 bp, Homo sapien
gaacggagaatgaattaagggagta

SEQ ID NO: 1750423 - DNA, 25 bp, Homo sapien
ttggaaggaacggagaatgaattaa

SEQ ID NO: 1750424 - DNA, 25 bp, Homo sapien
gagaatgaattaagggagtagccat

SEQ ID NO: 1750425 - DNA, 25 bp, Homo sapien
tcttgcatgatgttctttcattaac

SEQ ID NO: 1750426 - DNA, 25 bp, Homo sapien
acattttctcattatggttctggca

SEQ ID NO: 1750427 - DNA, 25 bp, Homo sapien
tttctcattatggttctggcactgt

SEQ ID NO: 1750428 - DNA, 25 bp, Homo sapien
cttgcatgatgttctttcattaaca

SEQ ID NO: 1750429 - DNA, 25 bp, Homo sapien
cagcttctctgtgttacagaattta

SEQ ID NO: 1750430 - DNA, 25 bp, Homo sapien
tacttcagcttctctgtgttacaga

SEQ ID NO: 1750431 - DNA, 25 bp, Homo sapien
cttctctgtgttacagaatttatac

SEQ ID NO: 1750432 - DNA, 25 bp, Homo sapien
cagtacttcagcttctctgtgttac

SEQ ID NO: 1750433 - DNA, 25 bp, Homo sapien
caccgaacaaagaaaactctgtaag

SEQ ID NO: 1750434 - DNA, 25 bp, Homo sapien
ctcccgcagacggactgccttcttc

SEQ ID NO: 1750435 - DNA, 25 bp, Homo sapien
acagaaggtggatggcgctgcggcc

SEQ ID NO: 1750436 - DNA, 25 bp, Homo sapien
atgtattactaaagaagacatggac

SEQ ID NO: 1750437 - DNA, 25 bp, Homo sapien
cgcgaattgttatggcgaggaagat

SEQ ID NO: 1750438 - DNA, 25 bp, Homo sapien
cctttttatgtcgaaattgagattc

SEQ ID NO: 1750439 - DNA, 25 bp, Homo sapien
agaaaatgatggccgcttttccttt

SEQ ID NO: 1750440 - DNA, 25 bp, Homo sapien
ttcctttttatgtcgaaattgagat

SEQ ID NO: 1750441 - DNA, 25 bp, Homo sapien
tttttatgtcgaaattgagattctg

SEQ ID NO: 1750442 - DNA, 25 bp, Homo sapien
agtagaaaacatgacaactgaaagt

SEQ ID NO: 1750443 - DNA, 25 bp, Homo sapien
gaaaacatgacaactgaaagtgcca

SEQ ID NO: 1750444 - DNA, 25 bp, Homo sapien
tagaaaacatgacaactgaaagtgc

SEQ ID NO: 1750445 - DNA, 25 bp, Homo sapien
acatgacaactgaaagtgccaacat

SEQ ID NO: 1750446 - DNA, 25 bp, Homo sapien
tccactcagccattggcaatcaggt

SEQ ID NO: 1750447 - DNA, 25 bp, Homo sapien
caaatctagaggcttcgctgtgttt

SEQ ID NO: 1750448 - DNA, 25 bp, Homo sapien
tactggcaccgggaatcctccactc

SEQ ID NO: 1750449 - DNA, 25 bp, Homo sapien
gcttcgctgtgtttgccatccactc

SEQ ID NO: 1750450 - DNA, 25 bp, Homo sapien
tctgtagctggagcttgtcatcctg

SEQ ID NO: 1750451 - DNA, 25 bp, Homo sapien
agcttgtcatcctggctcctggcca

SEQ ID NO: 1750452 - DNA, 25 bp, Homo sapien
gtagctggagcttgtcatcctggct

SEQ ID NO: 1750453 - DNA, 25 bp, Homo sapien
tgctctgtagctggagcttgtcatc

SEQ ID NO: 1750454 - DNA, 25 bp, Homo sapien
aagcgttagtgcaggtgctagtgct

SEQ ID NO: 1750455 - DNA, 25 bp, Homo sapien
gagtagtgcatgtattggcattaga

SEQ ID NO: 1750456 - DNA, 25 bp, Homo sapien
ggtgttcacactgggaagcgttagt

SEQ ID NO: 1750457 - DNA, 25 bp, Homo sapien
cattagaaaggtagttagtgcaggt

SEQ ID NO: 1750458 - DNA, 25 bp, Homo sapien
catgatgtcttcacagacaattttt

SEQ ID NO: 1750459 - DNA, 25 bp, Homo sapien
tctcattctctactcttgtcatgat

SEQ ID NO: 1750460 - DNA, 25 bp, Homo sapien
tctactcttgtcatgatgtcttcac

SEQ ID NO: 1750461 - DNA, 25 bp, Homo sapien
tgtcatgatgtcttcacagacaatt

SEQ ID NO: 1750462 - DNA, 25 bp, Homo sapien
gaagcctctctagtaggaactaaag

SEQ ID NO: 1750463 - DNA, 25 bp, Homo sapien
acttagaactgaatgctgcacctcc

SEQ ID NO: 1750464 - DNA, 25 bp, Homo sapien
ggtttccagcgctccacatgttaag

SEQ ID NO: 1750465 - DNA, 25 bp, Homo sapien
gaaaagcaaggtcatcattagcaaa

SEQ ID NO: 1750466 - DNA, 25 bp, Homo sapien
tcatcatccattatccatttttctg

SEQ ID NO: 1750467 - DNA, 25 bp, Homo sapien
catcatccattatccatttttctgc

SEQ ID NO: 1750468 - DNA, 25 bp, Homo sapien
gatcaattcccaggcgggtaggtcc

SEQ ID NO: 1750469 - DNA, 25 bp, Homo sapien
tcccaggcgggtaggtcctgagtta

SEQ ID NO: 1750470 - DNA, 25 bp, Homo sapien
ctcatggctaggatgatcaattccc

SEQ ID NO: 1750471 - DNA, 25 bp, Homo sapien
taggatgatcaattcccaggcgggt

SEQ ID NO: 1750472 - DNA, 25 bp, Homo sapien
caagtctatgtcagcaggtgtcaca

SEQ ID NO: 1750473 - DNA, 25 bp, Homo sapien
aagacaagtctatgtcagcaggtgt

SEQ ID NO: 1750474 - DNA, 25 bp, Homo sapien
tctatgtcagcaggtgtcacacggg

SEQ ID NO: 1750475 - DNA, 25 bp, Homo sapien
agtctatgtcagcaggtgtcacacg

SEQ ID NO: 1750476 - DNA, 25 bp, Homo sapien
tgatttcgactcatattcttccatg

SEQ ID NO: 1750477 - DNA, 25 bp, Homo sapien
ctgctttagaaatgatttcgactca

SEQ ID NO: 1750478 - DNA, 25 bp, Homo sapien
gctttagaaatgatttcgactcata

SEQ ID NO: 1750479 - DNA, 25 bp, Homo sapien
gaaatgatttcgactcatattcttc

SEQ ID NO: 1750480 - DNA, 25 bp, Homo sapien
gaacagcggattgagtcgttgttgt

SEQ ID NO: 1750481 - DNA, 25 bp, Homo sapien
gttgtcagaacagcggattgagtcg

SEQ ID NO: 1750482 - DNA, 25 bp, Homo sapien
tcagaacagcggattgagtcgttgt

SEQ ID NO: 1750483 - DNA, 25 bp, Homo sapien
cagcggattgagtcgttgttgtgca

SEQ ID NO: 1750484 - DNA, 25 bp, Homo sapien
cattgggctggtatttcacaggcct

SEQ ID NO: 1750485 - DNA, 25 bp, Homo sapien
tcaaaagtccttgaggcagtcgttc

SEQ ID NO: 1750486 - DNA, 25 bp, Homo sapien
ctgatgacaacatacccaagatgac

SEQ ID NO: 1750487 - DNA, 25 bp, Homo sapien
tcctgatgacaacatacccaagatg

SEQ ID NO: 1750488 - DNA, 25 bp, Homo sapien
ggcagtcgttcatgaactgctcctt

SEQ ID NO: 1750489 - DNA, 25 bp, Homo sapien
gggtgcttttaatgataggatcagg

SEQ ID NO: 1750490 - DNA, 25 bp, Homo sapien
tgtagtaaaatatgccctccaaatt

SEQ ID NO: 1750491 - DNA, 25 bp, Homo sapien
caggtcctcaggctcttgtagtaaa

SEQ ID NO: 1750492 - DNA, 25 bp, Homo sapien
tatgagttgtttccgcaaaggtcag

SEQ ID NO: 1750493 - DNA, 25 bp, Homo sapien
ccagactctgacattaggtttccca

SEQ ID NO: 1750494 - DNA, 25 bp, Homo sapien
caccatgcatgctctgtttgcttca

SEQ ID NO: 1750495 - DNA, 25 bp, Homo sapien
gtttgcttcacttgactgcctccta

SEQ ID NO: 1750496 - DNA, 25 bp, Homo sapien
catacagatctacacttgtcccaga

SEQ ID NO: 1750497 - DNA, 25 bp, Homo sapien
agcatgtacttcaaaacctctgtta

SEQ ID NO: 1750498 - DNA, 25 bp, Homo sapien
ggaatccatcagcatgtacttcaaa

SEQ ID NO: 1750499 - DNA, 25 bp, Homo sapien
caggaatccatcagcatgtacttca

SEQ ID NO: 1750500 - DNA, 25 bp, Homo sapien
tcagcatgtacttcaaaacctctgt

SEQ ID NO: 1750501 - DNA, 25 bp, Homo sapien
caagtttttcactcccttcagattg

SEQ ID NO: 1750502 - DNA, 25 bp, Homo sapien
tactaacagtgtgggattttccaag

SEQ ID NO: 1750503 - DNA, 25 bp, Homo sapien
tattggagcttgctaggatgttcct

SEQ ID NO: 1750504 - DNA, 25 bp, Homo sapien
ctctagctgtgaagacctataatac

SEQ ID NO: 1750505 - DNA, 25 bp, Homo sapien
ggatattacatgcatatagcccctt

SEQ ID NO: 1750506 - DNA, 25 bp, Homo sapien
cattgtaagggatgaaagttcatgc

SEQ ID NO: 1750507 - DNA, 25 bp, Homo sapien
gaaagctttcaccatggatattaca

SEQ ID NO: 1750508 - DNA, 25 bp, Homo sapien
gatgctctcagctggagtagtcaca

SEQ ID NO: 1750509 - DNA, 25 bp, Homo sapien
gcagcacttcacctgtttttggaca

SEQ ID NO: 1750510 - DNA, 25 bp, Homo sapien
gcttgtctatgcagcagcacttcac

SEQ ID NO: 1750511 - DNA, 25 bp, Homo sapien
cctttccttgtgttagcatcactca

SEQ ID NO: 1750512 - DNA, 25 bp, Homo sapien
ctgacttgtgccctcaacagcttgt

SEQ ID NO: 1750513 - DNA, 25 bp, Homo sapien
cgaataaaggtatgggtccagcaag

SEQ ID NO: 1750514 - DNA, 25 bp, Homo sapien
gccgacggtatagtgagaaggctct

SEQ ID NO: 1750515 - DNA, 25 bp, Homo sapien
gaggattgtttctgtgctgccacca

SEQ ID NO: 1750516 - DNA, 25 bp, Homo sapien
cttctccagggcgaataaaggtatg

SEQ ID NO: 1750517 - DNA, 25 bp, Homo sapien
caggcaaagcgattccagatgctgc

SEQ ID NO: 1750518 - DNA, 25 bp, Homo sapien
gataaaatatgctgttaactgcagg

SEQ ID NO: 1750519 - DNA, 25 bp, Homo sapien
tctggcctccttgaagtgtcactca

SEQ ID NO: 1750520 - DNA, 25 bp, Homo sapien
tggctccactatcacttcacacaaa

SEQ ID NO: 1750521 - DNA, 25 bp, Homo sapien
tggcagaaaccaatagtggattttc

SEQ ID NO: 1750522 - DNA, 25 bp, Homo sapien
tgtggtggcagaaaccaatagtgga

SEQ ID NO: 1750523 - DNA, 25 bp, Homo sapien
ttggttgggaggaaacacacgaata

SEQ ID NO: 1750524 - DNA, 25 bp, Homo sapien
cacacgaatatttgtggtggcagaa

SEQ ID NO: 1750525 - DNA, 25 bp, Homo sapien
taaacgaggaaacatgagagtagct

SEQ ID NO: 1750526 - DNA, 25 bp, Homo sapien
ttaggagcataaacgaggaaacatg

SEQ ID NO: 1750527 - DNA, 25 bp, Homo sapien
gagagtagctgtccgtttagcttgt

SEQ ID NO: 1750528 - DNA, 25 bp, Homo sapien
ggaaacatgagagtagctgtccgtt

SEQ ID NO: 1750529 - DNA, 25 bp, Homo sapien
tgaatcctttgctttgttgacaagg

SEQ ID NO: 1750530 - DNA, 25 bp, Homo sapien
tgttgacaaggtcgttgccctgctt

SEQ ID NO: 1750531 - DNA, 25 bp, Homo sapien
tgggaatctgtactggtgacttttc

SEQ ID NO: 1750532 - DNA, 25 bp, Homo sapien
gccctgctttactgattaacaggtg

SEQ ID NO: 1750533 - DNA, 25 bp, Homo sapien
tctcctggaatgttttctaggctcc

SEQ ID NO: 1750534 - DNA, 25 bp, Homo sapien
acatggtcagtgaacttgggttttc

SEQ ID NO: 1750535 - DNA, 25 bp, Homo sapien
caaaagaaggatgactacaggaagt

SEQ ID NO: 1750536 - DNA, 25 bp, Homo sapien
gaaatactactcacacataacttgg

SEQ ID NO: 1750537 - DNA, 25 bp, Homo sapien
gtcaggattttgtttagtggagaat

SEQ ID NO: 1750538 - DNA, 25 bp, Homo sapien
tcattatgaactcagagcaatttca

SEQ ID NO: 1750539 - DNA, 25 bp, Homo sapien
tagatgttggtcattcttcattatg

SEQ ID NO: 1750540 - DNA, 25 bp, Homo sapien
tcaccgtttccaatgagtagcatat

SEQ ID NO: 1750541 - DNA, 25 bp, Homo sapien
gaagttgtagagagccactcaaggg

SEQ ID NO: 1750542 - DNA, 25 bp, Homo sapien
tgtagagagccactcaagggttttt

SEQ ID NO: 1750543 - DNA, 25 bp, Homo sapien
tgcagaagttgtagagagccactca

SEQ ID NO: 1750544 - DNA, 25 bp, Homo sapien
gttgtagagagccactcaagggttt

SEQ ID NO: 1750545 - DNA, 25 bp, Homo sapien
tcccgaggccagaagtaatccagat

SEQ ID NO: 1750546 - DNA, 25 bp, Homo sapien
tctgaggatcagatagagtttctct

SEQ ID NO: 1750547 - DNA, 25 bp, Homo sapien
cacctccttctagaaacttggtagg

SEQ ID NO: 1750548 - DNA, 25 bp, Homo sapien
ccagatttcttctgaggatcagata

SEQ ID NO: 1750549 - DNA, 25 bp, Homo sapien
aagagctagttagcactatgtaagt

SEQ ID NO: 1750550 - DNA, 25 bp, Homo sapien
aaagagctagttagcactatgtaag

SEQ ID NO: 1750551 - DNA, 25 bp, Homo sapien
agagctagttagcactatgtaagta

SEQ ID NO: 1750552 - DNA, 25 bp, Homo sapien
tacagcgtaggtccgttgattgaaa

SEQ ID NO: 1750553 - DNA, 25 bp, Homo sapien
caaatacagcgtaggtccgttgatt

SEQ ID NO: 1750554 - DNA, 25 bp, Homo sapien
ggtccgttgattgaaaacctgattc

SEQ ID NO: 1750555 - DNA, 25 bp, Homo sapien
catttcaaatacagcgtaggtccgt

SEQ ID NO: 1750556 - DNA, 25 bp, Homo sapien
taggaagagttgtcttcctaaaagc

SEQ ID NO: 1750557 - DNA, 25 bp, Homo sapien
gctattttgagcatatcactaggcc

SEQ ID NO: 1750558 - DNA, 25 bp, Homo sapien
cagctattttgagcatatcactagg

SEQ ID NO: 1750559 - DNA, 25 bp, Homo sapien
tttgagcatatcactaggccagttt

SEQ ID NO: 1750560 - DNA, 25 bp, Homo sapien
tattttgagcatatcactaggccag

SEQ ID NO: 1750561 - DNA, 25 bp, Homo sapien
tgaagatatgttgtcgttcagcagc

SEQ ID NO: 1750562 - DNA, 25 bp, Homo sapien
atgaaatgcagcgtggctttccatt

SEQ ID NO: 1750563 - DNA, 25 bp, Homo sapien
aagatatgttgtcgttcagcagcca

SEQ ID NO: 1750564 - DNA, 25 bp, Homo sapien
caaatgaaatgcagcgtggctttcc

SEQ ID NO: 1750565 - DNA, 25 bp, Homo sapien
tgcttccaggatctttgcttcctag

SEQ ID NO: 1750566 - DNA, 25 bp, Homo sapien
tctgcttccaggatctttgcttcct

SEQ ID NO: 1750567 - DNA, 25 bp, Homo sapien
ctgcttccaggatctttgcttccta

SEQ ID NO: 1750568 - DNA, 25 bp, Homo sapien
ttactacgggcagctaccctttctg

SEQ ID NO: 1750569 - DNA, 25 bp, Homo sapien
taccaaatgatgcacaggaagaagg

SEQ ID NO: 1750570 - DNA, 25 bp, Homo sapien
tgacaatgagaggaagctaccaaat

SEQ ID NO: 1750571 - DNA, 25 bp, Homo sapien
taaactgagtgtgtgagaaacgcca

SEQ ID NO: 1750572 - DNA, 25 bp, Homo sapien
ttccctctgtagagtgcacatgcaa

SEQ ID NO: 1750573 - DNA, 25 bp, Homo sapien
agcacagccagtatgtctctgttcc

SEQ ID NO: 1750574 - DNA, 25 bp, Homo sapien
gtagggtgcattcagccacactgcc

SEQ ID NO: 1750575 - DNA, 25 bp, Homo sapien
tggaacttgttagccagtggctctc

SEQ ID NO: 1750576 - DNA, 25 bp, Homo sapien
ttaaatgtctctcggttaccaacag

SEQ ID NO: 1750577 - DNA, 25 bp, Homo sapien
tctctcggttaccaacagttttgac

SEQ ID NO: 1750578 - DNA, 25 bp, Homo sapien
tcataggtatttaaatgtctctcgg

SEQ ID NO: 1750579 - DNA, 25 bp, Homo sapien
tggcagactcataggtatttaaatg

SEQ ID NO: 1750580 - DNA, 25 bp, Homo sapien
ttctgtgatggactggggaagcagg

SEQ ID NO: 1750581 - DNA, 25 bp, Homo sapien
gggaagcaggaacgccctgaggggc

SEQ ID NO: 1750582 - DNA, 25 bp, Homo sapien
atggatggatgcttctgtgatggac

SEQ ID NO: 1750583 - DNA, 25 bp, Homo sapien
tcagagcatggatggatgcttctgt

SEQ ID NO: 1750584 - DNA, 25 bp, Homo sapien
tctaatcagtagcattggcctttgt

SEQ ID NO: 1750585 - DNA, 25 bp, Homo sapien
gtacaagtgtttatactaagtccag

SEQ ID NO: 1750586 - DNA, 25 bp, Homo sapien
caatgtgcttgagggttatttttca

SEQ ID NO: 1750587 - DNA, 25 bp, Homo sapien
tacatgcaaacggtgtctttcctgc

SEQ ID NO: 1750588 - DNA, 25 bp, Homo sapien
tgtctgcttgcacgggaaatgattt

SEQ ID NO: 1750589 - DNA, 25 bp, Homo sapien
gcctttgggagtcatttacaaacag

SEQ ID NO: 1750590 - DNA, 25 bp, Homo sapien
gaaagtaaatgagtagcccacctgg

SEQ ID NO: 1750591 - DNA, 25 bp, Homo sapien
gcgggccagtttttatccataagca

SEQ ID NO: 1750592 - DNA, 25 bp, Homo sapien
aaacccaggctatgttgtcatcttc

SEQ ID NO: 1750593 - DNA, 25 bp, Homo sapien
acccaggctatgttgtcatcttcac

SEQ ID NO: 1750594 - DNA, 25 bp, Homo sapien
ccttgaggttgacatcttcttgtga

SEQ ID NO: 1750595 - DNA, 25 bp, Homo sapien
catagctaacatccttgaggttgac

SEQ ID NO: 1750596 - DNA, 25 bp, Homo sapien
cttccaccgggtccactgagctcca

SEQ ID NO: 1750597 - DNA, 25 bp, Homo sapien
accgggtccactgagctccactgta

SEQ ID NO: 1750598 - DNA, 25 bp, Homo sapien
tgagctccactgtactacacttaat

SEQ ID NO: 1750599 - DNA, 25 bp, Homo sapien
ctgtactacacttaatcttagccat

SEQ ID NO: 1750600 - DNA, 25 bp, Homo sapien
tctcttccacttgtatttggcactt

SEQ ID NO: 1750601 - DNA, 25 bp, Homo sapien
tccacttgtatttggcacttcagcc

SEQ ID NO: 1750602 - DNA, 25 bp, Homo sapien
ctcttccacttgtatttggcacttc

SEQ ID NO: 1750603 - DNA, 25 bp, Homo sapien
ccacttgtatttggcacttcagcca

SEQ ID NO: 1750604 - DNA, 25 bp, Homo sapien
gattttctgagtttcacggaaggta

SEQ ID NO: 1750605 - DNA, 25 bp, Homo sapien
gagaatcaccaggacagatctgcat

SEQ ID NO: 1750606 - DNA, 25 bp, Homo sapien
gataggttaaagcatagcactggat

SEQ ID NO: 1750607 - DNA, 25 bp, Homo sapien
tatctgacacggtagatttcctgag

SEQ ID NO: 1750608 - DNA, 25 bp, Homo sapien
ttcccgactccttctcgagcgaggg

SEQ ID NO: 1750609 - DNA, 25 bp, Homo sapien
tcttcccgactccttctcgagcgag

SEQ ID NO: 1750610 - DNA, 25 bp, Homo sapien
gactccttctcgagcgagggcgcca

SEQ ID NO: 1750611 - DNA, 25 bp, Homo sapien
agaggagatgcttcccgaaagccac

SEQ ID NO: 1750612 - DNA, 25 bp, Homo sapien
agctcgtccgcggcgctgccggccg

SEQ ID NO: 1750613 - DNA, 25 bp, Homo sapien
aatccactaagagcaccgaacatgt

SEQ ID NO: 1750614 - DNA, 25 bp, Homo sapien
tagtgggttcagaaacagccctttg

SEQ ID NO: 1750615 - DNA, 25 bp, Homo sapien
gaaaatttcagtggtacctcagcaa

SEQ ID NO: 1750616 - DNA, 25 bp, Homo sapien
gagcctccccatgcaaaatcaagtt

SEQ ID NO: 1750617 - DNA, 25 bp, Homo sapien
taagtgcagaagtgtcagtgttgaa

SEQ ID NO: 1750618 - DNA, 25 bp, Homo sapien
tccagagatgcattccgaaacccgc

SEQ ID NO: 1750619 - DNA, 25 bp, Homo sapien
tgatcattcttggaggaccagtcta

SEQ ID NO: 1750620 - DNA, 25 bp, Homo sapien
tcagtgttgaagagttctgcacgga

SEQ ID NO: 1750621 - DNA, 25 bp, Homo sapien
ctaacctggtcccacagtaatggca

SEQ ID NO: 1750622 - DNA, 25 bp, Homo sapien
attcatgaggtcatcacctcttaaa

SEQ ID NO: 1750623 - DNA, 25 bp, Homo sapien
tcaggagcctaatcccaagataact

SEQ ID NO: 1750624 - DNA, 25 bp, Homo sapien
gaagggtaagcaaatacatgagaca

SEQ ID NO: 1750625 - DNA, 25 bp, Homo sapien
gacatagtggtgtatctttatgacc

SEQ ID NO: 1750626 - DNA, 25 bp, Homo sapien
gaatagtctaggacatccacatgca

SEQ ID NO: 1750627 - DNA, 25 bp, Homo sapien
cactctcatgaggatagacatctag

SEQ ID NO: 1750628 - DNA, 25 bp, Homo sapien
taaatctggacctctatgttacacc

SEQ ID NO: 1750629 - DNA, 25 bp, Homo sapien
tgtccatgacatttggacttatcat

SEQ ID NO: 1750630 - DNA, 25 bp, Homo sapien
tcaccttccgggatgtccatgacat

SEQ ID NO: 1750631 - DNA, 25 bp, Homo sapien
cgtactagccctgtttgtagcctca

SEQ ID NO: 1750632 - DNA, 25 bp, Homo sapien
actagccctgtttgtagcctcacct

SEQ ID NO: 1750633 - DNA, 25 bp, Homo sapien
aaggcggaatgtgctgtggagttga

SEQ ID NO: 1750634 - DNA, 25 bp, Homo sapien
ctggcagcagaaatagagagctcag

SEQ ID NO: 1750635 - DNA, 25 bp, Homo sapien
caggctggcagcagaaatagagagc

SEQ ID NO: 1750636 - DNA, 25 bp, Homo sapien
caggaagcttagaataaggcggaat

SEQ ID NO: 1750637 - DNA, 25 bp, Homo sapien
caatcatctgagttaagcagagcat

SEQ ID NO: 1750638 - DNA, 25 bp, Homo sapien
gcagagcattgtactatttcattcc

SEQ ID NO: 1750639 - DNA, 25 bp, Homo sapien
ttacataacgtactgtgctgtttcc

SEQ ID NO: 1750640 - DNA, 25 bp, Homo sapien
tccacatagtagtaatcccttccac

SEQ ID NO: 1750641 - DNA, 25 bp, Homo sapien
tgtagtcactttgtaatatacacct

SEQ ID NO: 1750642 - DNA, 25 bp, Homo sapien
tgggcagttgttgaatgtagtcact

SEQ ID NO: 1750643 - DNA, 25 bp, Homo sapien
cagtaggacaggaagcaagccagta

SEQ ID NO: 1750644 - DNA, 25 bp, Homo sapien
tcaggctttgcaatatagcaagaga

SEQ ID NO: 1750645 - DNA, 25 bp, Homo sapien
aagaaaatagatggtgttttttcag

SEQ ID NO: 1750646 - DNA, 25 bp, Homo sapien
gtttcaaatggaattttcagagaat

SEQ ID NO: 1750647 - DNA, 25 bp, Homo sapien
tgtttcaaatggaattttcagagaa

SEQ ID NO: 1750648 - DNA, 25 bp, Homo sapien
aaaatagatggtgttttttcagtgt

SEQ ID NO: 1750649 - DNA, 25 bp, Homo sapien
tgtaagtgagaaaaagtggtgtttg

SEQ ID NO: 1750650 - DNA, 25 bp, Homo sapien
ctcccatttgtaagtgagaaaaagt

SEQ ID NO: 1750651 - DNA, 25 bp, Homo sapien
atttgtaagtgagaaaaagtggtgt

SEQ ID NO: 1750652 - DNA, 25 bp, Homo sapien
cccatttgtaagtgagaaaaagtgg

SEQ ID NO: 1750653 - DNA, 25 bp, Homo sapien
catgttaaaacacgtgattatcggg

SEQ ID NO: 1750654 - DNA, 25 bp, Homo sapien
gaagttccatgtgtagctatgcact

SEQ ID NO: 1750655 - DNA, 25 bp, Homo sapien
tgggaacctctgatattgaccagga

SEQ ID NO: 1750656 - DNA, 25 bp, Homo sapien
tgaggtttgccgtgctacttatagc

SEQ ID NO: 1750657 - DNA, 25 bp, Homo sapien
cacagtagctatccacatttgagta

SEQ ID NO: 1750658 - DNA, 25 bp, Homo sapien
tgaagtggccattgctgcagaaaac

SEQ ID NO: 1750659 - DNA, 25 bp, Homo sapien
tgttcctgacacaaaattgactgga

SEQ ID NO: 1750660 - DNA, 25 bp, Homo sapien
taccctgttaaattatgaagtggcc

SEQ ID NO: 1750661 - DNA, 25 bp, Homo sapien
tctagacctggaactagcacaatgt

SEQ ID NO: 1750662 - DNA, 25 bp, Homo sapien
cctggatggcttaactgggactaga

SEQ ID NO: 1750663 - DNA, 25 bp, Homo sapien
tactaaacctctacagggaagcgtg

SEQ ID NO: 1750664 - DNA, 25 bp, Homo sapien
gctgagactctctccgacaagtggt

SEQ ID NO: 1750665 - DNA, 25 bp, Homo sapien
ttatttgcatctttactctcatgca

SEQ ID NO: 1750666 - DNA, 25 bp, Homo sapien
cttatttgcatctttactctcatgc

SEQ ID NO: 1750667 - DNA, 25 bp, Homo sapien
tatttgcatctttactctcatgcat

SEQ ID NO: 1750668 - DNA, 25 bp, Homo sapien
aacagctgggtgactatgcccaggg

SEQ ID NO: 1750669 - DNA, 25 bp, Homo sapien
cagctgggtgactatgcccagggca

SEQ ID NO: 1750670 - DNA, 25 bp, Homo sapien
gctgggtgactatgcccagggcatt

SEQ ID NO: 1750671 - DNA, 25 bp, Homo sapien
ctgggtgactatgcccagggcattc

SEQ ID NO: 1750672 - DNA, 25 bp, Homo sapien
ctcctcttaggaacaaagacaattt

SEQ ID NO: 1750673 - DNA, 25 bp, Homo sapien
gtgatctctgtccattgagtgtgct

SEQ ID NO: 1750674 - DNA, 25 bp, Homo sapien
tctctgtccattgagtgtgcttttg

SEQ ID NO: 1750675 - DNA, 25 bp, Homo sapien
atctggtctcctcttaggaacaaag

SEQ ID NO: 1750676 - DNA, 25 bp, Homo sapien
gaggcaaagtgtctgactgaagtca

SEQ ID NO: 1750677 - DNA, 25 bp, Homo sapien
ggcaatggagatatgacccagagag

SEQ ID NO: 1750678 - DNA, 25 bp, Homo sapien
cagggagaagtctaatatcttgtgg

SEQ ID NO: 1750679 - DNA, 25 bp, Homo sapien
catgatgcatgagaacaattttagg

SEQ ID NO: 1750680 - DNA, 25 bp, Homo sapien
acattccatcattctatcaagccag

SEQ ID NO: 1750681 - DNA, 25 bp, Homo sapien
attgaggaggattagttcaatttcc

SEQ ID NO: 1750682 - DNA, 25 bp, Homo sapien
ttcaatttccccttcgtcatcagga

SEQ ID NO: 1750683 - DNA, 25 bp, Homo sapien
caggattaataatcccagccaacac

SEQ ID NO: 1750684 - DNA, 25 bp, Homo sapien
ggcagtcttaacatccaacacaatg

SEQ ID NO: 1750685 - DNA, 25 bp, Homo sapien
taagactattactaaaaacagtgcc

SEQ ID NO: 1750686 - DNA, 25 bp, Homo sapien
gtaagactattactaaaaacagtgc

SEQ ID NO: 1750687 - DNA, 25 bp, Homo sapien
cagggagataaaggttgtaagcttc

SEQ ID NO: 1750688 - DNA, 25 bp, Homo sapien
tgtgactttactgtttagatagttg

SEQ ID NO: 1750689 - DNA, 25 bp, Homo sapien
gaattttgtgttcctacagggagat

SEQ ID NO: 1750690 - DNA, 25 bp, Homo sapien
tagttcttgtgactttactgtttag

SEQ ID NO: 1750691 - DNA, 25 bp, Homo sapien
gataatctccatattgaaccgagat

SEQ ID NO: 1750692 - DNA, 25 bp, Homo sapien
tgaaccgagatctcctagatccagt

SEQ ID NO: 1750693 - DNA, 25 bp, Homo sapien
ctggctccaacagtagaatctctgg

SEQ ID NO: 1750694 - DNA, 25 bp, Homo sapien
aaccctcttcagttatagcatctgg

SEQ ID NO: 1750695 - DNA, 25 bp, Homo sapien
ctcttcccgggcaggcttctatgtt

SEQ ID NO: 1750696 - DNA, 25 bp, Homo sapien
tcttcccgggcaggcttctatgttt

SEQ ID NO: 1750697 - DNA, 25 bp, Homo sapien
agaatataagttctaccctgctctt

SEQ ID NO: 1750698 - DNA, 25 bp, Homo sapien
aacatggaattgttcagtatgtttc

SEQ ID NO: 1750699 - DNA, 25 bp, Homo sapien
acatggaattgttcagtatgtttca

SEQ ID NO: 1750700 - DNA, 25 bp, Homo sapien
gtctctttggtgtgaagtaagttca

SEQ ID NO: 1750701 - DNA, 25 bp, Homo sapien
cttgtctctttggtgtgaagtaagt

SEQ ID NO: 1750702 - DNA, 25 bp, Homo sapien
tctctttggtgtgaagtaagttcat

SEQ ID NO: 1750703 - DNA, 25 bp, Homo sapien
tgtctctttggtgtgaagtaagttc

SEQ ID NO: 1750704 - DNA, 25 bp, Homo sapien
tttctctggcaatattgcttgaggt

SEQ ID NO: 1750705 - DNA, 25 bp, Homo sapien
tctctggcaatattgcttgaggtaa

SEQ ID NO: 1750706 - DNA, 25 bp, Homo sapien
tctgtatgtgcagataaattttcac

SEQ ID NO: 1750707 - DNA, 25 bp, Homo sapien
tctggcaatattgcttgaggtaatg

SEQ ID NO: 1750708 - DNA, 25 bp, Homo sapien
gcctgctacattagaagcaatatgt

SEQ ID NO: 1750709 - DNA, 25 bp, Homo sapien
cttgtggatctatatgtacaccagg

SEQ ID NO: 1750710 - DNA, 25 bp, Homo sapien
tatatgtacaccaggcactgccact

SEQ ID NO: 1750711 - DNA, 25 bp, Homo sapien
ctgccactgcctgctacattagaag

SEQ ID NO: 1750712 - DNA, 25 bp, Homo sapien
tttttcatttcttgtttgagaatcc

SEQ ID NO: 1750713 - DNA, 25 bp, Homo sapien
tttcatttcttgtttgagaatccat

SEQ ID NO: 1750714 - DNA, 25 bp, Homo sapien
ctttttcatttcttgtttgagaatc

SEQ ID NO: 1750715 - DNA, 25 bp, Homo sapien
ttttcatttcttgtttgagaatcca

SEQ ID NO: 1750716 - DNA, 25 bp, Homo sapien
gcaggcacttggaaatctcaacaca

SEQ ID NO: 1750717 - DNA, 25 bp, Homo sapien
tcaacacaaaccagctcatttgtga

SEQ ID NO: 1750718 - DNA, 25 bp, Homo sapien
tagtagtgcagatgaaaccctaatc

SEQ ID NO: 1750719 - DNA, 25 bp, Homo sapien
cctctttggagctgaagttgttagt

SEQ ID NO: 1750720 - DNA, 25 bp, Homo sapien
caggatataattggaacactttgat

SEQ ID NO: 1750721 - DNA, 25 bp, Homo sapien
agatcaaacaacagcctcctcagga

SEQ ID NO: 1750722 - DNA, 25 bp, Homo sapien
acagcctcctcaggatataattgga

SEQ ID NO: 1750723 - DNA, 25 bp, Homo sapien
attattgatgttattaaggaccatc

SEQ ID NO: 1750724 - DNA, 25 bp, Homo sapien
ctatgggatggtcacctttgtctaa

SEQ ID NO: 1750725 - DNA, 25 bp, Homo sapien
caaaccgtcaaataagcagaatcag

SEQ ID NO: 1750726 - DNA, 25 bp, Homo sapien
ctgcatcgctatctctatgggatgg

SEQ ID NO: 1750727 - DNA, 25 bp, Homo sapien
catgcaatagggaaagccgccctct

SEQ ID NO: 1750728 - DNA, 25 bp, Homo sapien
catggtagcttatgttccaacagca

SEQ ID NO: 1750729 - DNA, 25 bp, Homo sapien
gattcgtagtgctggacaaggcttg

SEQ ID NO: 1750730 - DNA, 25 bp, Homo sapien
tgtaatcactactgcttctaaggag

SEQ ID NO: 1750731 - DNA, 25 bp, Homo sapien
tgcactgtaagtctgtcctccaagg

SEQ ID NO: 1750732 - DNA, 25 bp, Homo sapien
cgccaccgcactccaacctgaccac

SEQ ID NO: 1750733 - DNA, 25 bp, Homo sapien
ccgcactccaacctgaccacagagc

SEQ ID NO: 1750734 - DNA, 25 bp, Homo sapien
ccaccgcactccaacctgaccacag

SEQ ID NO: 1750735 - DNA, 25 bp, Homo sapien
accgcactccaacctgaccacagag

SEQ ID NO: 1750736 - DNA, 25 bp, Homo sapien
cttgtaaacgagtaggagaagctgc

SEQ ID NO: 1750737 - DNA, 25 bp, Homo sapien
ggtaaccaagtagacgtgaatgccc

SEQ ID NO: 1750738 - DNA, 25 bp, Homo sapien
tcaggacaactttgaggacttgtaa

SEQ ID NO: 1750739 - DNA, 25 bp, Homo sapien
tagaagaaatcatcaggcctaatca

SEQ ID NO: 1750740 - DNA, 25 bp, Homo sapien
cagagttacactagatgtttccaga

SEQ ID NO: 1750741 - DNA, 25 bp, Homo sapien
aaatcacagagttacactagatgtt

SEQ ID NO: 1750742 - DNA, 25 bp, Homo sapien
aagccctatcgtgttagacctcaac

SEQ ID NO: 1750743 - DNA, 25 bp, Homo sapien
tccagatggtgtggctacagataaa

SEQ ID NO: 1750744 - DNA, 25 bp, Homo sapien
tactgttgccatcttaggccaccaa

SEQ ID NO: 1750745 - DNA, 25 bp, Homo sapien
tcataccaaacgtgacccaaaacaa

SEQ ID NO: 1750746 - DNA, 25 bp, Homo sapien
gatgatatggagctgttcttcatac

SEQ ID NO: 1750747 - DNA, 25 bp, Homo sapien
gagaagtaagaatactgttgacatc

SEQ ID NO: 1750748 - DNA, 25 bp, Homo sapien
gaattggagagcacctatttcatta

SEQ ID NO: 1750749 - DNA, 25 bp, Homo sapien
gagctctggtttccctagtctcaaa

SEQ ID NO: 1750750 - DNA, 25 bp, Homo sapien
tccctagtctcaaattgaattggag

SEQ ID NO: 1750751 - DNA, 25 bp, Homo sapien
cttgtatagagctctggtttcccta

SEQ ID NO: 1750752 - DNA, 25 bp, Homo sapien
caatagtacttttccggtcttgctc

SEQ ID NO: 1750753 - DNA, 25 bp, Homo sapien
gtcctaatagccctggaattcgtat

SEQ ID NO: 1750754 - DNA, 25 bp, Homo sapien
taatgtttgtccagacccactcagg

SEQ ID NO: 1750755 - DNA, 25 bp, Homo sapien
tagtcaccttgagcctgaaacttgg

SEQ ID NO: 1750756 - DNA, 25 bp, Homo sapien
tatgttgtaggaccggtgtttctcc

SEQ ID NO: 1750757 - DNA, 25 bp, Homo sapien
ctagtctatgttgtaggaccggtgt

SEQ ID NO: 1750758 - DNA, 25 bp, Homo sapien
tctatgttgtaggaccggtgtttct

SEQ ID NO: 1750759 - DNA, 25 bp, Homo sapien
tagtctatgttgtaggaccggtgtt

SEQ ID NO: 1750760 - DNA, 25 bp, Homo sapien
aattctgttgaaatccatttgctac

SEQ ID NO: 1750761 - DNA, 25 bp, Homo sapien
catgatcagctatttccaagtaatt

SEQ ID NO: 1750762 - DNA, 25 bp, Homo sapien
ccaagtaattctgttgaaatccatt

SEQ ID NO: 1750763 - DNA, 25 bp, Homo sapien
atccatttgctacatgtttattcat

SEQ ID NO: 1750764 - DNA, 25 bp, Homo sapien
tcattctgtacttattgtgcaaaca

SEQ ID NO: 1750765 - DNA, 25 bp, Homo sapien
cattctgtacttattgtgcaaacag

SEQ ID NO: 1750766 - DNA, 25 bp, Homo sapien
cagaatttctgatgatggatctcca

SEQ ID NO: 1750767 - DNA, 25 bp, Homo sapien
ctgggtttctttgagtcagctatgc

SEQ ID NO: 1750768 - DNA, 25 bp, Homo sapien
cagctatgctatcattcagtccctg

SEQ ID NO: 1750769 - DNA, 25 bp, Homo sapien
ttgagtcagctatgctatcattcag

SEQ ID NO: 1750770 - DNA, 25 bp, Homo sapien
tcagaggagcagttggatattgtac

SEQ ID NO: 1750771 - DNA, 25 bp, Homo sapien
cctgagagctatgtctatgtgaacc

SEQ ID NO: 1750772 - DNA, 25 bp, Homo sapien
gagagctatgtctatgtgaaccttt

SEQ ID NO: 1750773 - DNA, 25 bp, Homo sapien
tcacctgagagctatgtctatgtga

SEQ ID NO: 1750774 - DNA, 25 bp, Homo sapien
acctgagagctatgtctatgtgaac

SEQ ID NO: 1750775 - DNA, 25 bp, Homo sapien
gaaacagctaagggaccactaagac

SEQ ID NO: 1750776 - DNA, 25 bp, Homo sapien
aacagctaagggaccactaagacac

SEQ ID NO: 1750777 - DNA, 25 bp, Homo sapien
acagctaagggaccactaagacact

SEQ ID NO: 1750778 - DNA, 25 bp, Homo sapien
cagctaagggaccactaagacactg

SEQ ID NO: 1750779 - DNA, 25 bp, Homo sapien
caaggtggaattggcatgcatctgt

SEQ ID NO: 1750780 - DNA, 25 bp, Homo sapien
gtccttcatatacatgagtggaatg

SEQ ID NO: 1750781 - DNA, 25 bp, Homo sapien
ttcatatacatgagtggaatgaaga

SEQ ID NO: 1750782 - DNA, 25 bp, Homo sapien
catatacatgagtggaatgaagaga

SEQ ID NO: 1750783 - DNA, 25 bp, Homo sapien
catcttctaatatgtaagtgccttc

SEQ ID NO: 1750784 - DNA, 25 bp, Homo sapien
cttctaatatgtaagtgccttctag

SEQ ID NO: 1750785 - DNA, 25 bp, Homo sapien
tacatcttctaatatgtaagtgcct

SEQ ID NO: 1750786 - DNA, 25 bp, Homo sapien
ctaatatgtaagtgccttctagtct

SEQ ID NO: 1750787 - DNA, 25 bp, Homo sapien
tatttcttgcatttagaatatccac

SEQ ID NO: 1750788 - DNA, 25 bp, Homo sapien
tttagaatatccacattgtggtcac

SEQ ID NO: 1750789 - DNA, 25 bp, Homo sapien
tctatttattatcagtgtagtattc

SEQ ID NO: 1750790 - DNA, 25 bp, Homo sapien
atctatttattatcagtgtagtatt

SEQ ID NO: 1750791 - DNA, 25 bp, Homo sapien
agtgtagtattcctttgagtatcag

SEQ ID NO: 1750792 - DNA, 25 bp, Homo sapien
gtagtattcctttgagtatcaggtt

SEQ ID NO: 1750793 - DNA, 25 bp, Homo sapien
cttgatgtcaaagcagcacagtcca

SEQ ID NO: 1750794 - DNA, 25 bp, Homo sapien
ttgatgtcaaagcagcacagtccat

SEQ ID NO: 1750795 - DNA, 25 bp, Homo sapien
ggacaaatgggaagagggcgtggat

SEQ ID NO: 1750796 - DNA, 25 bp, Homo sapien
tttaaagaaaggttacacatgcagt

SEQ ID NO: 1750797 - DNA, 25 bp, Homo sapien
ggtgagcagaattatagacacaaaa

SEQ ID NO: 1750798 - DNA, 25 bp, Homo sapien
tgattagcaattggcagcatgaaaa

SEQ ID NO: 1750799 - DNA, 25 bp, Homo sapien
tcagctgacatctgaaggatgcaat

SEQ ID NO: 1750800 - DNA, 25 bp, Homo sapien
gttgtattcatcagctgacatctga

SEQ ID NO: 1750801 - DNA, 25 bp, Homo sapien
tcatcagctgacatctgaaggatgc

SEQ ID NO: 1750802 - DNA, 25 bp, Homo sapien
ttgtattcatcagctgacatctgaa

SEQ ID NO: 1750803 - DNA, 25 bp, Homo sapien
ctccaattgtcccttaataaggtgc

SEQ ID NO: 1750804 - DNA, 25 bp, Homo sapien
ccaattgtcccttaataaggtgcat

SEQ ID NO: 1750805 - DNA, 25 bp, Homo sapien
tccaattgtcccttaataaggtgca

SEQ ID NO: 1750806 - DNA, 25 bp, Homo sapien
aaagactgctcagtagctttcgtta

SEQ ID NO: 1750807 - DNA, 25 bp, Homo sapien
agactgctcagtagctttcgttata

SEQ ID NO: 1750808 - DNA, 25 bp, Homo sapien
gactgctcagtagctttcgttataa

SEQ ID NO: 1750809 - DNA, 25 bp, Homo sapien
acaaagactgctcagtagctttcgt

SEQ ID NO: 1750810 - DNA, 25 bp, Homo sapien
ttctgcggactttgacacagtagca

SEQ ID NO: 1750811 - DNA, 25 bp, Homo sapien
cttttattggaatgatgcactttaa

SEQ ID NO: 1750812 - DNA, 25 bp, Homo sapien
ccatccatttctgcggactttgaca

SEQ ID NO: 1750813 - DNA, 25 bp, Homo sapien
gcttacaaggctttttccatccatt

SEQ ID NO: 1750814 - DNA, 25 bp, Homo sapien
aggaggaaagacgttgtttgtcaag

SEQ ID NO: 1750815 - DNA, 25 bp, Homo sapien
aatcaaatctatcccaggaggagga

SEQ ID NO: 1750816 - DNA, 25 bp, Homo sapien
ttcaatcaaatctatcccaggagga

SEQ ID NO: 1750817 - DNA, 25 bp, Homo sapien
gttgtttgtcaagccaaacagcaga

SEQ ID NO: 1750818 - DNA, 25 bp, Homo sapien
tcaacttttcctgcccattcagtgt

SEQ ID NO: 1750819 - DNA, 25 bp, Homo sapien
tctggtgacactgcacgacttccaa

SEQ ID NO: 1750820 - DNA, 25 bp, Homo sapien
gactctccctccgtattatttatca

SEQ ID NO: 1750821 - DNA, 25 bp, Homo sapien
gcagcagcacaacagatgtaaaaca

SEQ ID NO: 1750822 - DNA, 25 bp, Homo sapien
cagtgaggtcaatgaaaattctgaa

SEQ ID NO: 1750823 - DNA, 25 bp, Homo sapien
tgaacatgtgaagtttatgctgggc

SEQ ID NO: 1750824 - DNA, 25 bp, Homo sapien
gctgggctgctctagattggcatcc

SEQ ID NO: 1750825 - DNA, 25 bp, Homo sapien
tttactcggtacatccattctcatg

SEQ ID NO: 1750826 - DNA, 25 bp, Homo sapien
tggaggcactcacaaccttactgga

SEQ ID NO: 1750827 - DNA, 25 bp, Homo sapien
tgaaatagcactagatataaagcct

SEQ ID NO: 1750828 - DNA, 25 bp, Homo sapien
tcaagcagaatataaatggaggcac

SEQ ID NO: 1750829 - DNA, 25 bp, Homo sapien
gaatctcacagttagatcggtggca

SEQ ID NO: 1750830 - DNA, 25 bp, Homo sapien
gaggatattacacatcagggagcag

SEQ ID NO: 1750831 - DNA, 25 bp, Homo sapien
ggaccactgctccatagcatatcct

SEQ ID NO: 1750832 - DNA, 25 bp, Homo sapien
ccatttagattcctagtagccaaca

SEQ ID NO: 1750833 - DNA, 25 bp, Homo sapien
tacagcttgtatgaccgtctgccaa

SEQ ID NO: 1750834 - DNA, 25 bp, Homo sapien
catgtccattattccagttcttcaa

SEQ ID NO: 1750835 - DNA, 25 bp, Homo sapien
tggctctaacatctatcctttctac

SEQ ID NO: 1750836 - DNA, 25 bp, Homo sapien
aaaaatggctctaacatctatcctt

SEQ ID NO: 1750837 - DNA, 25 bp, Homo sapien
tcatgtccattattccagttcttca

SEQ ID NO: 1750838 - DNA, 25 bp, Homo sapien
atataaggatatcttcaatactgtg

SEQ ID NO: 1750839 - DNA, 25 bp, Homo sapien
atatcttcaatactgtggacagggg

SEQ ID NO: 1750840 - DNA, 25 bp, Homo sapien
acaggggctggtccaatatggatgc

SEQ ID NO: 1750841 - DNA, 25 bp, Homo sapien
caggggctggtccaatatggatgcc

SEQ ID NO: 1750842 - DNA, 25 bp, Homo sapien
tatatgtactcctcagtatatttct

SEQ ID NO: 1750843 - DNA, 25 bp, Homo sapien
ggtctgccaccgtgtgtctatatat

SEQ ID NO: 1750844 - DNA, 25 bp, Homo sapien
aatagctgaaatggcatcgtgcctg

SEQ ID NO: 1750845 - DNA, 25 bp, Homo sapien
gtgcctgcaactcatcactgactta

SEQ ID NO: 1750846 - DNA, 25 bp, Homo sapien
caagttggatagacgctgaaggctc

SEQ ID NO: 1750847 - DNA, 25 bp, Homo sapien
tggatagacgctgaaggctccagtc

SEQ ID NO: 1750848 - DNA, 25 bp, Homo sapien
tttcaagttggatagacgctgaagg

SEQ ID NO: 1750849 - DNA, 25 bp, Homo sapien
gacgctgaaggctccagtcctcctt

SEQ ID NO: 1750850 - DNA, 25 bp, Homo sapien
tccattcttaagtaagaaagccctc

SEQ ID NO: 1750851 - DNA, 25 bp, Homo sapien
tctccttggctctcggaccatctcc

SEQ ID NO: 1750852 - DNA, 25 bp, Homo sapien
ttggctctcggaccatctcctacta

SEQ ID NO: 1750853 - DNA, 25 bp, Homo sapien
ttcttaagtaagaaagccctctcca

SEQ ID NO: 1750854 - DNA, 25 bp, Homo sapien
aacactctcaggattgttggacagt

SEQ ID NO: 1750855 - DNA, 25 bp, Homo sapien
ctaaaagagatgctcactcatgatc

SEQ ID NO: 1750856 - DNA, 25 bp, Homo sapien
actcatgatctagccactgccactg

SEQ ID NO: 1750857 - DNA, 25 bp, Homo sapien
tccctctgtgtagacttgctctaaa

SEQ ID NO: 1750858 - DNA, 25 bp, Homo sapien
ttacaatggcttgaatttggaacac

SEQ ID NO: 1750859 - DNA, 25 bp, Homo sapien
cgctccatatgtcgcatcgtgcaag

SEQ ID NO: 1750860 - DNA, 25 bp, Homo sapien
ctgcacaaatctgccgctccatatg

SEQ ID NO: 1750861 - DNA, 25 bp, Homo sapien
catcgtgcaaggagattacaatggc

SEQ ID NO: 1750862 - DNA, 25 bp, Homo sapien
actttcatcaggaacctttgtcttt

SEQ ID NO: 1750863 - DNA, 25 bp, Homo sapien
ggcaatctggaggtataattccact

SEQ ID NO: 1750864 - DNA, 25 bp, Homo sapien
gcatgtgctggtaggctagcaggct

SEQ ID NO: 1750865 - DNA, 25 bp, Homo sapien
taaggaatgggctcacataattgtg

SEQ ID NO: 1750866 - DNA, 25 bp, Homo sapien
ttaagaaggccacaactgggctgct

SEQ ID NO: 1750867 - DNA, 25 bp, Homo sapien
gcttaagaaggccacaactgggctg

SEQ ID NO: 1750868 - DNA, 25 bp, Homo sapien
cttaagaaggccacaactgggctgc

SEQ ID NO: 1750869 - DNA, 25 bp, Homo sapien
tgcttaagaaggccacaactgggct

SEQ ID NO: 1750870 - DNA, 25 bp, Homo sapien
gcagcttgcaggtggctctaggcat

SEQ ID NO: 1750871 - DNA, 25 bp, Homo sapien
gtactgaggcagcaaagatctttgg

SEQ ID NO: 1750872 - DNA, 25 bp, Homo sapien
gcaaagatctttggcagcttgcagg

SEQ ID NO: 1750873 - DNA, 25 bp, Homo sapien
caggtggctctaggcattcccttca

SEQ ID NO: 1750874 - DNA, 25 bp, Homo sapien
catactgctccacatttgaataatt

SEQ ID NO: 1750875 - DNA, 25 bp, Homo sapien
tcatactgctccacatttgaataat

SEQ ID NO: 1750876 - DNA, 25 bp, Homo sapien
tactgctccacatttgaataattca

SEQ ID NO: 1750877 - DNA, 25 bp, Homo sapien
ccacatttgaataattcaaatttac

SEQ ID NO: 1750878 - DNA, 25 bp, Homo sapien
ttagcacatctagcagagcttcgaa

SEQ ID NO: 1750879 - DNA, 25 bp, Homo sapien
tagcacatctagcagagcttcgaaa

SEQ ID NO: 1750880 - DNA, 25 bp, Homo sapien
agcacatctagcagagcttcgaaac

SEQ ID NO: 1750881 - DNA, 25 bp, Homo sapien
tttactctccgcatgtggctccaca

SEQ ID NO: 1750882 - DNA, 25 bp, Homo sapien
ctatactgaacgtttactctccgca

SEQ ID NO: 1750883 - DNA, 25 bp, Homo sapien
gaacgtttactctccgcatgtggct

SEQ ID NO: 1750884 - DNA, 25 bp, Homo sapien
tactgaacgtttactctccgcatgt

SEQ ID NO: 1750885 - DNA, 25 bp, Homo sapien
ctggaaaatttacagtcttatcaaa

SEQ ID NO: 1750886 - DNA, 25 bp, Homo sapien
cctggaaaatttacagtcttatcaa

SEQ ID NO: 1750887 - DNA, 25 bp, Homo sapien
tggaaaatttacagtcttatcaaag

SEQ ID NO: 1750888 - DNA, 25 bp, Homo sapien
ccctggaaaatttacagtcttatca

SEQ ID NO: 1750889 - DNA, 25 bp, Homo sapien
tgcctgactgtaaaggaaacatggt

SEQ ID NO: 1750890 - DNA, 25 bp, Homo sapien
ttggaaatgttgtcggcagccaagc

SEQ ID NO: 1750891 - DNA, 25 bp, Homo sapien
gagttccgttggaaatgttgtcggc

SEQ ID NO: 1750892 - DNA, 25 bp, Homo sapien
gaaacatggtgagttccgttggaaa

SEQ ID NO: 1750893 - DNA, 25 bp, Homo sapien
ctgatggacccataaacatttggcc

SEQ ID NO: 1750894 - DNA, 25 bp, Homo sapien
gatggacccataaacatttggcctc

SEQ ID NO: 1750895 - DNA, 25 bp, Homo sapien
tggacccataaacatttggcctcat

SEQ ID NO: 1750896 - DNA, 25 bp, Homo sapien
tgatggacccataaacatttggcct

SEQ ID NO: 1750897 - DNA, 25 bp, Homo sapien
catagccactgtgtgcatatagggc

SEQ ID NO: 1750898 - DNA, 25 bp, Homo sapien
catatagggcctcttcacgttagtg

SEQ ID NO: 1750899 - DNA, 25 bp, Homo sapien
cacgttagtgcttcgcattccatca

SEQ ID NO: 1750900 - DNA, 25 bp, Homo sapien
tgcaaccaggcataacatagccact

SEQ ID NO: 1750901 - DNA, 25 bp, Homo sapien
atttcaacaagactttagggcctct

SEQ ID NO: 1750902 - DNA, 25 bp, Homo sapien
caatggctctctgtctaagatcctc

SEQ ID NO: 1750903 - DNA, 25 bp, Homo sapien
gattcccacagcactatactgatca

SEQ ID NO: 1750904 - DNA, 25 bp, Homo sapien
aagatcctctttatgtttggttcca

SEQ ID NO: 1750905 - DNA, 25 bp, Homo sapien
tcaaaagcacagtggatggcctttc

SEQ ID NO: 1750906 - DNA, 25 bp, Homo sapien
cagatgcttaaggttcttgaaacag

SEQ ID NO: 1750907 - DNA, 25 bp, Homo sapien
tctctggatgacttccccagatgct

SEQ ID NO: 1750908 - DNA, 25 bp, Homo sapien
aaaagcacagtggatggcctttctc

SEQ ID NO: 1750909 - DNA, 25 bp, Homo sapien
cattctccctggatagggtgaccta

SEQ ID NO: 1750910 - DNA, 25 bp, Homo sapien
tcaaagaaaacaccgtcaggtcacc

SEQ ID NO: 1750911 - DNA, 25 bp, Homo sapien
tgtgggttctggtctactggtgacc

SEQ ID NO: 1750912 - DNA, 25 bp, Homo sapien
tcaggtcaccggagaagttgggcct

SEQ ID NO: 1750913 - DNA, 25 bp, Homo sapien
ttctaatagaatctggatttctccc

SEQ ID NO: 1750914 - DNA, 25 bp, Homo sapien
ctgtcgttcctgttttctaatagaa

SEQ ID NO: 1750915 - DNA, 25 bp, Homo sapien
cgttcctgttttctaatagaatctg

SEQ ID NO: 1750916 - DNA, 25 bp, Homo sapien
tgttttctaatagaatctggatttc

SEQ ID NO: 1750917 - DNA, 25 bp, Homo sapien
aggacatcgccttcccagtgccggc

SEQ ID NO: 1750918 - DNA, 25 bp, Homo sapien
gacttgtaacccaggacatcgcctt

SEQ ID NO: 1750919 - DNA, 25 bp, Homo sapien
tgtaacccaggacatcgccttccca

SEQ ID NO: 1750920 - DNA, 25 bp, Homo sapien
taacccaggacatcgccttcccagt

SEQ ID NO: 1750921 - DNA, 25 bp, Homo sapien
tatgtacagaaaactcaatagtata

SEQ ID NO: 1750922 - DNA, 25 bp, Homo sapien
tttatgtacagaaaactcaatagta

SEQ ID NO: 1750923 - DNA, 25 bp, Homo sapien
tgtacagaaaactcaatagtataca

SEQ ID NO: 1750924 - DNA, 25 bp, Homo sapien
gtacagaaaactcaatagtatacat

SEQ ID NO: 1750925 - DNA, 25 bp, Homo sapien
gaagaagacctttccgtagagatag

SEQ ID NO: 1750926 - DNA, 25 bp, Homo sapien
tccgtagagatagtttagtaagtaa

SEQ ID NO: 1750927 - DNA, 25 bp, Homo sapien
ctgaacatcagtgttgccaagaaga

SEQ ID NO: 1750928 - DNA, 25 bp, Homo sapien
ttagtaagtaaatcctccaatactg

SEQ ID NO: 1750929 - DNA, 25 bp, Homo sapien
taccatggaattgaagagagggacc

SEQ ID NO: 1750930 - DNA, 25 bp, Homo sapien
gagggaccgcatctttgataattct

SEQ ID NO: 1750931 - DNA, 25 bp, Homo sapien
ggaattgaagagagggaccgcatct

SEQ ID NO: 1750932 - DNA, 25 bp, Homo sapien
caaaatataccatggaattgaagag

SEQ ID NO: 1750933 - DNA, 25 bp, Homo sapien
tgaacaagcaggaaagatgggttcc

SEQ ID NO: 1750934 - DNA, 25 bp, Homo sapien
tcttgcttgtattgttctctgtggg

SEQ ID NO: 1750935 - DNA, 25 bp, Homo sapien
caaaagcccaaatcttgcttgtatt

SEQ ID NO: 1750936 - DNA, 25 bp, Homo sapien
gaggttcgcaaattgtgaacaagca

SEQ ID NO: 1750937 - DNA, 25 bp, Homo sapien
tccaggtctgtggctagtctcctcc

SEQ ID NO: 1750938 - DNA, 25 bp, Homo sapien
tctgctaatgtcaagtataggtctc

SEQ ID NO: 1750939 - DNA, 25 bp, Homo sapien
cataattagtgtacacagctggact

SEQ ID NO: 1750940 - DNA, 25 bp, Homo sapien
tcatggtgtcgtttttcttcacctc

SEQ ID NO: 1750941 - DNA, 25 bp, Homo sapien
caattcttacataacgctcccgtgg

SEQ ID NO: 1750942 - DNA, 25 bp, Homo sapien
cagctagttggatactgataatctc

SEQ ID NO: 1750943 - DNA, 25 bp, Homo sapien
tgtgagagggactgattcagctagt

SEQ ID NO: 1750944 - DNA, 25 bp, Homo sapien
tatacaaaggataggttagacttct

SEQ ID NO: 1750945 - DNA, 25 bp, Homo sapien
tgaattccacttggtagatagatgg

SEQ ID NO: 1750946 - DNA, 25 bp, Homo sapien
tccttctcaagaaacctatctgtat

SEQ ID NO: 1750947 - DNA, 25 bp, Homo sapien
gatagatggaaggagagcttgttcc

SEQ ID NO: 1750948 - DNA, 25 bp, Homo sapien
aattgacaagtagccttcaaagctg

SEQ ID NO: 1750949 - DNA, 25 bp, Homo sapien
aactgcttaggtgtgctgtattgaa

SEQ ID NO: 1750950 - DNA, 25 bp, Homo sapien
tctcctcattagttcaggtgaactg

SEQ ID NO: 1750951 - DNA, 25 bp, Homo sapien
tgtgctgtattgaaatctttcctcc

SEQ ID NO: 1750952 - DNA, 25 bp, Homo sapien
tctgacttagttgttgcaggtgaag

SEQ ID NO: 1750953 - DNA, 25 bp, Homo sapien
tagatcaggccgaagaaattatcag

SEQ ID NO: 1750954 - DNA, 25 bp, Homo sapien
aaattatcagtaaactcaaagacag

SEQ ID NO: 1750955 - DNA, 25 bp, Homo sapien
gggtggttaaaattagactagatca

SEQ ID NO: 1750956 - DNA, 25 bp, Homo sapien
tactttaagtgagctgaaaatatca

SEQ ID NO: 1750957 - DNA, 25 bp, Homo sapien
caaaaagcggctgcgatggtgtctg

SEQ ID NO: 1750958 - DNA, 25 bp, Homo sapien
aacagaagcaaaaagcggctgcgat

SEQ ID NO: 1750959 - DNA, 25 bp, Homo sapien
agcaaaaagcggctgcgatggtgtc

SEQ ID NO: 1750960 - DNA, 25 bp, Homo sapien
cagaagcaaaaagcggctgcgatgg

SEQ ID NO: 1750961 - DNA, 25 bp, Homo sapien
taaacatccctaacttgaaaatctg

SEQ ID NO: 1750962 - DNA, 25 bp, Homo sapien
tatagtgagagaggcaagtgttaca

SEQ ID NO: 1750963 - DNA, 25 bp, Homo sapien
gttcctttgggcataccatttcgga

SEQ ID NO: 1750964 - DNA, 25 bp, Homo sapien
catttcggaatcacatcggtgctcc

SEQ ID NO: 1750965 - DNA, 25 bp, Homo sapien
ttggaaccattgaaactggcaccca

SEQ ID NO: 1750966 - DNA, 25 bp, Homo sapien
agctgtcaggcgagagcccatggtt

SEQ ID NO: 1750967 - DNA, 25 bp, Homo sapien
cccatggttggcttcaagtaaacaa

SEQ ID NO: 1750968 - DNA, 25 bp, Homo sapien
gcagagctgcatgtgtagcagtgca

SEQ ID NO: 1750969 - DNA, 25 bp, Homo sapien
ttgtactggattcaaagctttcctg

SEQ ID NO: 1750970 - DNA, 25 bp, Homo sapien
tctgttggcacaacatgtggcttaa

SEQ ID NO: 1750971 - DNA, 25 bp, Homo sapien
agctttcctgtcctctgttggcaca

SEQ ID NO: 1750972 - DNA, 25 bp, Homo sapien
ggcacaacatgtggcttaagagaga

SEQ ID NO: 1750973 - DNA, 25 bp, Homo sapien
attagaggaattgaaccaacccctg

SEQ ID NO: 1750974 - DNA, 25 bp, Homo sapien
attatctgtgctacccaatatacca

SEQ ID NO: 1750975 - DNA, 25 bp, Homo sapien
ttatctgtgctacccaatataccac

SEQ ID NO: 1750976 - DNA, 25 bp, Homo sapien
atctgtgctacccaatataccacat

SEQ ID NO: 1750977 - DNA, 25 bp, Homo sapien
ttctggaaatgtctaccagatacca

SEQ ID NO: 1750978 - DNA, 25 bp, Homo sapien
tcagttcttatagttcactatgaat

SEQ ID NO: 1750979 - DNA, 25 bp, Homo sapien
tatagttcactatgaataagcaaga

SEQ ID NO: 1750980 - DNA, 25 bp, Homo sapien
tctggaaatgtctaccagataccaa

SEQ ID NO: 1750981 - DNA, 25 bp, Homo sapien
ctcttggtcaggtggtttgttttag

SEQ ID NO: 1750982 - DNA, 25 bp, Homo sapien
ttctgcaccagtttgcacataagtc

SEQ ID NO: 1750983 - DNA, 25 bp, Homo sapien
cataagtcagtgattacaaaactgg

SEQ ID NO: 1750984 - DNA, 25 bp, Homo sapien
tttgagaactgatttggtttgtcca

SEQ ID NO: 1750985 - DNA, 25 bp, Homo sapien
ttatctgctctattgacctctatgt

SEQ ID NO: 1750986 - DNA, 25 bp, Homo sapien
tatctgctctattgacctctatgtt

SEQ ID NO: 1750987 - DNA, 25 bp, Homo sapien
tctgctctattgacctctatgttct

SEQ ID NO: 1750988 - DNA, 25 bp, Homo sapien
gctctattgacctctatgttctttt

SEQ ID NO: 1750989 - DNA, 25 bp, Homo sapien
ctaggaccgtcctccactgagcggc

SEQ ID NO: 1750990 - DNA, 25 bp, Homo sapien
taggaccgtcctccactgagcggct

SEQ ID NO: 1750991 - DNA, 25 bp, Homo sapien
gtcctccactgagcggctccactgg

SEQ ID NO: 1750992 - DNA, 25 bp, Homo sapien
accgtcctccactgagcggctccac

SEQ ID NO: 1750993 - DNA, 25 bp, Homo sapien
atcctcaatcaggctggcataagta

SEQ ID NO: 1750994 - DNA, 25 bp, Homo sapien
tcctcaatcaggctggcataagtag

SEQ ID NO: 1750995 - DNA, 25 bp, Homo sapien
ctggcataagtagaatctatttctt

SEQ ID NO: 1750996 - DNA, 25 bp, Homo sapien
taattgtctgatccatcatattgaa

SEQ ID NO: 1750997 - DNA, 25 bp, Homo sapien
gtctgatccatcatattgaaattca

SEQ ID NO: 1750998 - DNA, 25 bp, Homo sapien
tagtttagatgcactaattgtctga

SEQ ID NO: 1750999 - DNA, 25 bp, Homo sapien
cacatgcaggctttagtttagatgc

SEQ ID NO: 1751000 - DNA, 25 bp, Homo sapien
aactagaaacacctccagagatccc

SEQ ID NO: 1751001 - DNA, 25 bp, Homo sapien
ggattggattggtgcttggctctca

SEQ ID NO: 1751002 - DNA, 25 bp, Homo sapien
tgctgtagtttctggggattggatt

SEQ ID NO: 1751003 - DNA, 25 bp, Homo sapien
ggtgcttggctctcaactagaaaca

SEQ ID NO: 1751004 - DNA, 25 bp, Homo sapien
tttgcctactagctcaattccacca

SEQ ID NO: 1751005 - DNA, 25 bp, Homo sapien
aaggatattggaaccgaggttgatg

SEQ ID NO: 1751006 - DNA, 25 bp, Homo sapien
aaattggcaattccatgttgacatt

SEQ ID NO: 1751007 - DNA, 25 bp, Homo sapien
ccgaggttgatgatttaaattggca

SEQ ID NO: 1751008 - DNA, 25 bp, Homo sapien
tcctgtcctctgtggtgtacttagt

SEQ ID NO: 1751009 - DNA, 25 bp, Homo sapien
tggtgtacttagtttctgtgaacat

SEQ ID NO: 1751010 - DNA, 25 bp, Homo sapien
tgtggtgtacttagtttctgtgaac

SEQ ID NO: 1751011 - DNA, 25 bp, Homo sapien
tcctctgtggtgtacttagtttctg

SEQ ID NO: 1751012 - DNA, 25 bp, Homo sapien
catgtggaaattttgattgatggca

SEQ ID NO: 1751013 - DNA, 25 bp, Homo sapien
tattcccaaaggtcacaatcatcct

SEQ ID NO: 1751014 - DNA, 25 bp, Homo sapien
caatcatccttccacatgtctacta

SEQ ID NO: 1751015 - DNA, 25 bp, Homo sapien
tactaatgcgaatggcatgtggaaa

SEQ ID NO: 1751016 - DNA, 25 bp, Homo sapien
ggcaccaatgtactgggcataagca

SEQ ID NO: 1751017 - DNA, 25 bp, Homo sapien
cctgtgttccagctatgggtgtttg

SEQ ID NO: 1751018 - DNA, 25 bp, Homo sapien
gcatccgttgatgccaagttggtac

SEQ ID NO: 1751019 - DNA, 25 bp, Homo sapien
ggtccgtggtagcaatggcaccaat

SEQ ID NO: 1751020 - DNA, 25 bp, Homo sapien
tagttattgcaccttcacttaaaaa

SEQ ID NO: 1751021 - DNA, 25 bp, Homo sapien
ttggtagaacgtgctgtgagctcaa

SEQ ID NO: 1751022 - DNA, 25 bp, Homo sapien
gagctcaatagttattgcaccttca

SEQ ID NO: 1751023 - DNA, 25 bp, Homo sapien
ctgtgagctcaatagttattgcacc

SEQ ID NO: 1751024 - DNA, 25 bp, Homo sapien
acactgactacattactaaccatta

SEQ ID NO: 1751025 - DNA, 25 bp, Homo sapien
tacattactaaccattagtctccaa

SEQ ID NO: 1751026 - DNA, 25 bp, Homo sapien
taaccattagtctccaagttggttc

SEQ ID NO: 1751027 - DNA, 25 bp, Homo sapien
tactaaccattagtctccaagttgg

SEQ ID NO: 1751028 - DNA, 25 bp, Homo sapien
tggctgctgtctctagagcctcctc

SEQ ID NO: 1751029 - DNA, 25 bp, Homo sapien
acttatgattgtgggtatcctctgc

SEQ ID NO: 1751030 - DNA, 25 bp, Homo sapien
ttttgtcacaacagacagtgctgcc

SEQ ID NO: 1751031 - DNA, 25 bp, Homo sapien
tccagagaaagttcttcacttatga

SEQ ID NO: 1751032 - DNA, 25 bp, Homo sapien
aggggcatctcttaagctcttcaac

SEQ ID NO: 1751033 - DNA, 25 bp, Homo sapien
ggcatctcttaagctcttcaacttc

SEQ ID NO: 1751034 - DNA, 25 bp, Homo sapien
tctgtatgcttgaggggcatctctt

SEQ ID NO: 1751035 - DNA, 25 bp, Homo sapien
tctcttaagctcttcaacttccaca

SEQ ID NO: 1751036 - DNA, 25 bp, Homo sapien
ttcggggaaatcaaagaggaggaca

SEQ ID NO: 1751037 - DNA, 25 bp, Homo sapien
agggctcctgatccccggtgccctg

SEQ ID NO: 1751038 - DNA, 25 bp, Homo sapien
taggtagcaccatcgtgaggccatg

SEQ ID NO: 1751039 - DNA, 25 bp, Homo sapien
catttacttgggatcagggtggtca

SEQ ID NO: 1751040 - DNA, 25 bp, Homo sapien
ggtttggtgtctctagcacgtggtt

SEQ ID NO: 1751041 - DNA, 25 bp, Homo sapien
ttggtgtctctagcacgtggttttc

SEQ ID NO: 1751042 - DNA, 25 bp, Homo sapien
cctcgtaagtagattcatatgagca

SEQ ID NO: 1751043 - DNA, 25 bp, Homo sapien
cacgtggttttcctcgtaagtagat

SEQ ID NO: 1751044 - DNA, 25 bp, Homo sapien
cactgcttgttcatttctaccttca

SEQ ID NO: 1751045 - DNA, 25 bp, Homo sapien
aaataaatgaggcactgcttgttca

SEQ ID NO: 1751046 - DNA, 25 bp, Homo sapien
tttaaataaatgaggcactgcttgt

SEQ ID NO: 1751047 - DNA, 25 bp, Homo sapien
aatgaggcactgcttgttcatttct

SEQ ID NO: 1751048 - DNA, 25 bp, Homo sapien
gctgagtctgggatcatgtggcttc

SEQ ID NO: 1751049 - DNA, 25 bp, Homo sapien
agctgagtctgggatcatgtggctt

SEQ ID NO: 1751050 - DNA, 25 bp, Homo sapien
ttttccaagataagtgatcaagtct

SEQ ID NO: 1751051 - DNA, 25 bp, Homo sapien
tttccaagataagtgatcaagtctg

SEQ ID NO: 1751052 - DNA, 25 bp, Homo sapien
ttccaagataagtgatcaagtctgc

SEQ ID NO: 1751053 - DNA, 25 bp, Homo sapien
ctttttccaagataagtgatcaagt

SEQ ID NO: 1751054 - DNA, 25 bp, Homo sapien
cagtattatcaattgagctgtcagt

SEQ ID NO: 1751055 - DNA, 25 bp, Homo sapien
gagatagtatttagtagcaaggcaa

SEQ ID NO: 1751056 - DNA, 25 bp, Homo sapien
ttttggagtgtatgagcttttagcc

SEQ ID NO: 1751057 - DNA, 25 bp, Homo sapien
ggcaaacttcgagtcctgaatcttg

SEQ ID NO: 1751058 - DNA, 25 bp, Homo sapien
ttcacgaactattatcagaccaagg

SEQ ID NO: 1751059 - DNA, 25 bp, Homo sapien
taagaattgatgtacataacccaga

SEQ ID NO: 1751060 - DNA, 25 bp, Homo sapien
ggcctcgtagtggtcacaggtttta

SEQ ID NO: 1751061 - DNA, 25 bp, Homo sapien
tgattaaaattcactggcctcgtag

SEQ ID NO: 1751062 - DNA, 25 bp, Homo sapien
ccaatagtgccatgagtaaaacact

SEQ ID NO: 1751063 - DNA, 25 bp, Homo sapien
ttcccctaatgctctgatcctttca

SEQ ID NO: 1751064 - DNA, 25 bp, Homo sapien
aaggtattccttgacacagtttggg

SEQ ID NO: 1751065 - DNA, 25 bp, Homo sapien
gataattcagagagccaaactcatt

SEQ ID NO: 1751066 - DNA, 25 bp, Homo sapien
gcgaacatagagctgactgccgccg

SEQ ID NO: 1751067 - DNA, 25 bp, Homo sapien
ccagaggagaggttaagaccgcgaa

SEQ ID NO: 1751068 - DNA, 25 bp, Homo sapien
cagggtcgggtaattcacttcttgc

SEQ ID NO: 1751069 - DNA, 25 bp, Homo sapien
cttgcaaggactcggccagaggaga

SEQ ID NO: 1751070 - DNA, 25 bp, Homo sapien
gagacaaggaaaatccgaggcgaca

SEQ ID NO: 1751071 - DNA, 25 bp, Homo sapien
cgaggcgacaggaggtaccgtttca

SEQ ID NO: 1751072 - DNA, 25 bp, Homo sapien
tgctgaaaaaggcttccatccgacc

SEQ ID NO: 1751073 - DNA, 25 bp, Homo sapien
ctaaaacaggcctaagagtgacagc

SEQ ID NO: 1751074 - DNA, 25 bp, Homo sapien
tgttacctactccataaactgtgcc

SEQ ID NO: 1751075 - DNA, 25 bp, Homo sapien
taatcacctagcaaggagcagatcg

SEQ ID NO: 1751076 - DNA, 25 bp, Homo sapien
caccagttatttttgtgacacaaga

SEQ ID NO: 1751077 - DNA, 25 bp, Homo sapien
gagcagatcgagtctggctcaagaa

SEQ ID NO: 1751078 - DNA, 25 bp, Homo sapien
aaaatgatgcaagtccttctccgaa

SEQ ID NO: 1751079 - DNA, 25 bp, Homo sapien
gccaaaatgatgcaagtccttctcc

SEQ ID NO: 1751080 - DNA, 25 bp, Homo sapien
aatgatgcaagtccttctccgaaac

SEQ ID NO: 1751081 - DNA, 25 bp, Homo sapien
caaaatgatgcaagtccttctccga

SEQ ID NO: 1751082 - DNA, 25 bp, Homo sapien
caaaagtagctgtatttggtctcag

SEQ ID NO: 1751083 - DNA, 25 bp, Homo sapien
catgtagataattgttcagaggtgg

SEQ ID NO: 1751084 - DNA, 25 bp, Homo sapien
tccccaaatgaatagttcgttgatg

SEQ ID NO: 1751085 - DNA, 25 bp, Homo sapien
agttcatccaagttaagttcagagg

SEQ ID NO: 1751086 - DNA, 25 bp, Homo sapien
ttctagggtcccaatgctctaacac

SEQ ID NO: 1751087 - DNA, 25 bp, Homo sapien
caatgtcatctggagggttgtgtct

SEQ ID NO: 1751088 - DNA, 25 bp, Homo sapien
gaaggatcccgagaactgtaacttc

SEQ ID NO: 1751089 - DNA, 25 bp, Homo sapien
ccttgtggataattcttggctattc

SEQ ID NO: 1751090 - DNA, 25 bp, Homo sapien
ttgaagctgagcgcatttgtctcat

SEQ ID NO: 1751091 - DNA, 25 bp, Homo sapien
caattgaagctgagcgcatttgtct

SEQ ID NO: 1751092 - DNA, 25 bp, Homo sapien
attgaagctgagcgcatttgtctca

SEQ ID NO: 1751093 - DNA, 25 bp, Homo sapien
aattgaagctgagcgcatttgtctc

SEQ ID NO: 1751094 - DNA, 25 bp, Homo sapien
atatacagacacaaacacacatata

SEQ ID NO: 1751095 - DNA, 25 bp, Homo sapien
atatatacagacacaaacacacata

SEQ ID NO: 1751096 - DNA, 25 bp, Homo sapien
cacacatatatatatatacaataat

SEQ ID NO: 1751097 - DNA, 25 bp, Homo sapien
aaacaatatacactaagggcagtgt

SEQ ID NO: 1751098 - DNA, 25 bp, Homo sapien
tggttgcctggatgtttaagatcat

SEQ ID NO: 1751099 - DNA, 25 bp, Homo sapien
tggaggtatgagcttaacaatataa

SEQ ID NO: 1751100 - DNA, 25 bp, Homo sapien
ttaagatcatacatacagtttaatt

SEQ ID NO: 1751101 - DNA, 25 bp, Homo sapien
taacatcaatgagctataaacttaa

SEQ ID NO: 1751102 - DNA, 25 bp, Homo sapien
tgagtaacatcaatgagctataaac

SEQ ID NO: 1751103 - DNA, 25 bp, Homo sapien
tacttttgagtaacatcaatgagct

SEQ ID NO: 1751104 - DNA, 25 bp, Homo sapien
caatgagctataaacttaaagtggg

SEQ ID NO: 1751105 - DNA, 25 bp, Homo sapien
tttatgtagagctggaaaaatgtaa

SEQ ID NO: 1751106 - DNA, 25 bp, Homo sapien
agctggaaaaatgtaagaataccca

SEQ ID NO: 1751107 - DNA, 25 bp, Homo sapien
ctggaaaaatgtaagaatacccaat

SEQ ID NO: 1751108 - DNA, 25 bp, Homo sapien
tatgtagagctggaaaaatgtaaga

SEQ ID NO: 1751109 - DNA, 25 bp, Homo sapien
gccattaggatttatgccaaccaca

SEQ ID NO: 1751110 - DNA, 25 bp, Homo sapien
gaaaatcaaccaacttgtactctgc

SEQ ID NO: 1751111 - DNA, 25 bp, Homo sapien
tgtactctgcgatataacagcataa

SEQ ID NO: 1751112 - DNA, 25 bp, Homo sapien
gatacaaatctaccatatgccattg

SEQ ID NO: 1751113 - DNA, 25 bp, Homo sapien
ttgtagaggctaccacattctttgg

SEQ ID NO: 1751114 - DNA, 25 bp, Homo sapien
tgctaagatcaaggccaggtattgg

SEQ ID NO: 1751115 - DNA, 25 bp, Homo sapien
tccttgccattcaagcttgtagagg

SEQ ID NO: 1751116 - DNA, 25 bp, Homo sapien
caggtattggactggatgacattcc

SEQ ID NO: 1751117 - DNA, 25 bp, Homo sapien
tgggtaccaagttatcagtaggttc

SEQ ID NO: 1751118 - DNA, 25 bp, Homo sapien
tgggtaccaagagagggctagtaca

SEQ ID NO: 1751119 - DNA, 25 bp, Homo sapien
gctttatccaaaatagtgggtacca

SEQ ID NO: 1751120 - DNA, 25 bp, Homo sapien
gggtaccaagagagggctagtacac

SEQ ID NO: 1751121 - DNA, 25 bp, Homo sapien
tgtgccagacagcaatctatgtttt

SEQ ID NO: 1751122 - DNA, 25 bp, Homo sapien
ctacaggtgtagtatatccatcaga

SEQ ID NO: 1751123 - DNA, 25 bp, Homo sapien
taagagacaccctttatcaagctaa

SEQ ID NO: 1751124 - DNA, 25 bp, Homo sapien
ccattctgtgtgtaaggaaggtttt

SEQ ID NO: 1751125 - DNA, 25 bp, Homo sapien
taattaatgatgtgatctagtctcc

SEQ ID NO: 1751126 - DNA, 25 bp, Homo sapien
tataaacattccctcatttcatgtt

SEQ ID NO: 1751127 - DNA, 25 bp, Homo sapien
gcccggccattactttgcaatttta

SEQ ID NO: 1751128 - DNA, 25 bp, Homo sapien
tcttccctaccctgcattttaataa

SEQ ID NO: 1751129 - DNA, 25 bp, Homo sapien
aagtaactgatttaatcaccttaat

SEQ ID NO: 1751130 - DNA, 25 bp, Homo sapien
gtctataatatacttgacatttttg

SEQ ID NO: 1751131 - DNA, 25 bp, Homo sapien
catgttttgatcatctcgattgcta

SEQ ID NO: 1751132 - DNA, 25 bp, Homo sapien
gatcatctcgattgctatatggttc

SEQ ID NO: 1751133 - DNA, 25 bp, Homo sapien
tgctatatggttctatgtgaaaagt

SEQ ID NO: 1751134 - DNA, 25 bp, Homo sapien
gcaatgttcttcgaaatgatggtga

SEQ ID NO: 1751135 - DNA, 25 bp, Homo sapien
tcataaatagcctataaacctgtaa

SEQ ID NO: 1751136 - DNA, 25 bp, Homo sapien
gaaaatatcagctctgggtctactg

SEQ ID NO: 1751137 - DNA, 25 bp, Homo sapien
aaaagataaagctatattctgaagg

SEQ ID NO: 1751138 - DNA, 25 bp, Homo sapien
tatgaggacggtaatctaggtacac

SEQ ID NO: 1751139 - DNA, 25 bp, Homo sapien
gaatactccgagaccctgaggtggt

SEQ ID NO: 1751140 - DNA, 25 bp, Homo sapien
taaaacataggaagagcattgccag

SEQ ID NO: 1751141 - DNA, 25 bp, Homo sapien
gaagtgcggcactcagaccaatttc

SEQ ID NO: 1751142 - DNA, 25 bp, Homo sapien
tatggaattcagcactgtaaagcag

SEQ ID NO: 1751143 - DNA, 25 bp, Homo sapien
tgtcaaaacacctagcgtggtatag

SEQ ID NO: 1751144 - DNA, 25 bp, Homo sapien
gcaggccgtcctaacacaatttggt

SEQ ID NO: 1751145 - DNA, 25 bp, Homo sapien
taggtaaccacaaatctgcaaatga

SEQ ID NO: 1751146 - DNA, 25 bp, Homo sapien
tactttctgtcatggtgggttcaaa

SEQ ID NO: 1751147 - DNA, 25 bp, Homo sapien
tctgaaatctgttactgctggctgg

SEQ ID NO: 1751148 - DNA, 25 bp, Homo sapien
tacatccatggccaagaaattgccg

SEQ ID NO: 1751149 - DNA, 25 bp, Homo sapien
gaaattgccgactgaaactctgaag

SEQ ID NO: 1751150 - DNA, 25 bp, Homo sapien
tttgtgaccaccagcatagcaatgt

SEQ ID NO: 1751151 - DNA, 25 bp, Homo sapien
catactgggctcaatgtggactcaa

SEQ ID NO: 1751152 - DNA, 25 bp, Homo sapien
agagcccctcatggattcactttca

SEQ ID NO: 1751153 - DNA, 25 bp, Homo sapien
taacagctgaaggaaactatcccaa

SEQ ID NO: 1751154 - DNA, 25 bp, Homo sapien
cctgtctactctgtcaatgcccatt

SEQ ID NO: 1751155 - DNA, 25 bp, Homo sapien
gtcctgctcagagtgtgaggtccac

SEQ ID NO: 1751156 - DNA, 25 bp, Homo sapien
agtgtgaggtccactgggcaaaatg

SEQ ID NO: 1751157 - DNA, 25 bp, Homo sapien
cacatccctgtctactctgtcaatg

SEQ ID NO: 1751158 - DNA, 25 bp, Homo sapien
tcctgtcccctcacatgctcttagc

SEQ ID NO: 1751159 - DNA, 25 bp, Homo sapien
tgtcccctcacatgctcttagccca

SEQ ID NO: 1751160 - DNA, 25 bp, Homo sapien
agcccaccttttacttcagccattg

SEQ ID NO: 1751161 - DNA, 25 bp, Homo sapien
ttctgtgttaagaatagtttgcccc

SEQ ID NO: 1751162 - DNA, 25 bp, Homo sapien
acaagatgaggtactctgatttctg

SEQ ID NO: 1751163 - DNA, 25 bp, Homo sapien
tacatctgccatagttgtaggccat

SEQ ID NO: 1751164 - DNA, 25 bp, Homo sapien
tgggtatgcaagcagtcttattaat

SEQ ID NO: 1751165 - DNA, 25 bp, Homo sapien
tgtaggccattctaaacgatacaca

SEQ ID NO: 1751166 - DNA, 25 bp, Homo sapien
tggtttttccatgtcccattgagtt

SEQ ID NO: 1751167 - DNA, 25 bp, Homo sapien
ttgagtctgctatatttttctaaga

SEQ ID NO: 1751168 - DNA, 25 bp, Homo sapien
tcttttattggagccaccaaagtca

SEQ ID NO: 1751169 - DNA, 25 bp, Homo sapien
tttccatgtcccattgagtttcttc

SEQ ID NO: 1751170 - DNA, 25 bp, Homo sapien
gcttttaaatcgtgcaatccattca

SEQ ID NO: 1751171 - DNA, 25 bp, Homo sapien
ttaaagcttttaaatcgtgcaatcc

SEQ ID NO: 1751172 - DNA, 25 bp, Homo sapien
aaagcttttaaatcgtgcaatccat

SEQ ID NO: 1751173 - DNA, 25 bp, Homo sapien
agcttttaaatcgtgcaatccattc

SEQ ID NO: 1751174 - DNA, 25 bp, Homo sapien
aagatcctggactgcttttcccttt

SEQ ID NO: 1751175 - DNA, 25 bp, Homo sapien
gagcttactcacctgaagatcctgg

SEQ ID NO: 1751176 - DNA, 25 bp, Homo sapien
aaagcttgagcttcaaaccagctgc

SEQ ID NO: 1751177 - DNA, 25 bp, Homo sapien
gtcacttctatagccaaagcttgag

SEQ ID NO: 1751178 - DNA, 25 bp, Homo sapien
caaatctgtgaagtaacttcttgtg

SEQ ID NO: 1751179 - DNA, 25 bp, Homo sapien
tccaaatctgtgaagtaacttcttg

SEQ ID NO: 1751180 - DNA, 25 bp, Homo sapien
gtaattagctctttccaaatctgtg

SEQ ID NO: 1751181 - DNA, 25 bp, Homo sapien
gaaatggtgtcactagaagtaatta

SEQ ID NO: 1751182 - DNA, 25 bp, Homo sapien
aacacatgtgcccaccaatttccct

SEQ ID NO: 1751183 - DNA, 25 bp, Homo sapien
cacatgtgcccaccaatttccctct

SEQ ID NO: 1751184 - DNA, 25 bp, Homo sapien
catgtgcccaccaatttccctcttc

SEQ ID NO: 1751185 - DNA, 25 bp, Homo sapien
acaacacatgtgcccaccaatttcc

SEQ ID NO: 1751186 - DNA, 25 bp, Homo sapien
catcctaagggataaatagttttca

SEQ ID NO: 1751187 - DNA, 25 bp, Homo sapien
ttgtgatcacagctgaagtaatgca

SEQ ID NO: 1751188 - DNA, 25 bp, Homo sapien
tgatcacagctgaagtaatgcacag

SEQ ID NO: 1751189 - DNA, 25 bp, Homo sapien
tgtgatcacagctgaagtaatgcac

SEQ ID NO: 1751190 - DNA, 25 bp, Homo sapien
catattgttgccgaccatctctgcc

SEQ ID NO: 1751191 - DNA, 25 bp, Homo sapien
cttgtcggggtcacatattgttgcc

SEQ ID NO: 1751192 - DNA, 25 bp, Homo sapien
tgcctctgtaggtctacttgtcggg

SEQ ID NO: 1751193 - DNA, 25 bp, Homo sapien
ctgcctctgtaggtctacttgtcgg

SEQ ID NO: 1751194 - DNA, 25 bp, Homo sapien
acaccctggtcatcccacttgagca

SEQ ID NO: 1751195 - DNA, 25 bp, Homo sapien
ttgtcccacacttgaagacaccctg

SEQ ID NO: 1751196 - DNA, 25 bp, Homo sapien
caccactctgtttgagctcagactc

SEQ ID NO: 1751197 - DNA, 25 bp, Homo sapien
atcccacttgagcacccagatcttt

SEQ ID NO: 1751198 - DNA, 25 bp, Homo sapien
cagtcatggattctctccaaaggac

SEQ ID NO: 1751199 - DNA, 25 bp, Homo sapien
tctccaaaggactagcttctaatgc

SEQ ID NO: 1751200 - DNA, 25 bp, Homo sapien
ggactagcttctaatgctgatgtca

SEQ ID NO: 1751201 - DNA, 25 bp, Homo sapien
tcagtcatggattctctccaaagga

SEQ ID NO: 1751202 - DNA, 25 bp, Homo sapien
agttttattccggcagttataagct

SEQ ID NO: 1751203 - DNA, 25 bp, Homo sapien
ttattccggcagttataagctgcat

SEQ ID NO: 1751204 - DNA, 25 bp, Homo sapien
ttttattccggcagttataagctgc

SEQ ID NO: 1751205 - DNA, 25 bp, Homo sapien
tttattccggcagttataagctgca

SEQ ID NO: 1751206 - DNA, 25 bp, Homo sapien
gacagctgctttccatcgaccttta

SEQ ID NO: 1751207 - DNA, 25 bp, Homo sapien
aaatcatcctcgtcagcaataaggg

SEQ ID NO: 1751208 - DNA, 25 bp, Homo sapien
tatcatggagactgtcagtgttctc

SEQ ID NO: 1751209 - DNA, 25 bp, Homo sapien
gatgatatgctgacctcattgtgga

SEQ ID NO: 1751210 - DNA, 25 bp, Homo sapien
actggccgaccaggagaacatttgt

SEQ ID NO: 1751211 - DNA, 25 bp, Homo sapien
attcctttagaaactggccgaccag

SEQ ID NO: 1751212 - DNA, 25 bp, Homo sapien
tggccgaccaggagaacatttgttc

SEQ ID NO: 1751213 - DNA, 25 bp, Homo sapien
gccgaccaggagaacatttgttcct

SEQ ID NO: 1751214 - DNA, 25 bp, Homo sapien
cgcatcaatacatttttgcaaccaa

SEQ ID NO: 1751215 - DNA, 25 bp, Homo sapien
ccaatttgaagttccaatacatcca

SEQ ID NO: 1751216 - DNA, 25 bp, Homo sapien
cctttgccagcatttcgcatcaata

SEQ ID NO: 1751217 - DNA, 25 bp, Homo sapien
gcaaccaatttgaagttccaataca

SEQ ID NO: 1751218 - DNA, 25 bp, Homo sapien
tccatccttgtttactgtctctgtg

SEQ ID NO: 1751219 - DNA, 25 bp, Homo sapien
ctccaataatcctgacagtaaagaa

SEQ ID NO: 1751220 - DNA, 25 bp, Homo sapien
ctggaaaatatccatccttgtttac

SEQ ID NO: 1751221 - DNA, 25 bp, Homo sapien
caggttgcatcgtatatgttttata

SEQ ID NO: 1751222 - DNA, 25 bp, Homo sapien
cagaattcgtaagtgtgagtcctcc

SEQ ID NO: 1751223 - DNA, 25 bp, Homo sapien
cctttcctcatctgggacaactaaa

SEQ ID NO: 1751224 - DNA, 25 bp, Homo sapien
tagtgacataacgatgcagaattcg

SEQ ID NO: 1751225 - DNA, 25 bp, Homo sapien
gacaactaaattttcaagtgtgaga

SEQ ID NO: 1751226 - DNA, 25 bp, Homo sapien
gagcctcagacacttccatctgttt

SEQ ID NO: 1751227 - DNA, 25 bp, Homo sapien
ggttgcagtttgtgacatctggcag

SEQ ID NO: 1751228 - DNA, 25 bp, Homo sapien
gtttatcagggttgcagtttgtgac

SEQ ID NO: 1751229 - DNA, 25 bp, Homo sapien
aactgcactgtgtttatcagggttg

SEQ ID NO: 1751230 - DNA, 25 bp, Homo sapien
ctggttgaactaaaacatgtactga

SEQ ID NO: 1751231 - DNA, 25 bp, Homo sapien
cctggttgaactaaaacatgtactg

SEQ ID NO: 1751232 - DNA, 25 bp, Homo sapien
tgtactgataaagttattgcttctc

SEQ ID NO: 1751233 - DNA, 25 bp, Homo sapien
gtacctggttgaactaaaacatgta

SEQ ID NO: 1751234 - DNA, 25 bp, Homo sapien
gagatctccaatctctctcacactg

SEQ ID NO: 1751235 - DNA, 25 bp, Homo sapien
catgagcttctgagatctccaatct

SEQ ID NO: 1751236 - DNA, 25 bp, Homo sapien
agcttcctccactcaccatgagctt

SEQ ID NO: 1751237 - DNA, 25 bp, Homo sapien
tctccaatctctctcacactgaata

SEQ ID NO: 1751238 - DNA, 25 bp, Homo sapien
aaggtggtggagtgggtgatgaatc

SEQ ID NO: 1751239 - DNA, 25 bp, Homo sapien
gggcaggcagttagtggagaaggtg

SEQ ID NO: 1751240 - DNA, 25 bp, Homo sapien
tggtggagtgggtgatgaatctcat

SEQ ID NO: 1751241 - DNA, 25 bp, Homo sapien
gagaaggtggtggagtgggtgatga

SEQ ID NO: 1751242 - DNA, 25 bp, Homo sapien
aagaaaagatccaggagctagagcc

SEQ ID NO: 1751243 - DNA, 25 bp, Homo sapien
gagcccatggcatttgcataaagga

SEQ ID NO: 1751244 - DNA, 25 bp, Homo sapien
cactatttctaccagatccccagtc

SEQ ID NO: 1751245 - DNA, 25 bp, Homo sapien
tggcaagcaactggatggaccccat

SEQ ID NO: 1751246 - DNA, 25 bp, Homo sapien
ctaggcagttattcaggcctgtcat

SEQ ID NO: 1751247 - DNA, 25 bp, Homo sapien
aggaggctaggcagttattcaggcc

SEQ ID NO: 1751248 - DNA, 25 bp, Homo sapien
ggctaggcagttattcaggcctgtc

SEQ ID NO: 1751249 - DNA, 25 bp, Homo sapien
gaggctaggcagttattcaggcctg

SEQ ID NO: 1751250 - DNA, 25 bp, Homo sapien
aagtcctctgtggtcttaacataat

SEQ ID NO: 1751251 - DNA, 25 bp, Homo sapien
gcaaaagtctgagccctgaagtcct

SEQ ID NO: 1751252 - DNA, 25 bp, Homo sapien
gattttgatttctagcctccgattc

SEQ ID NO: 1751253 - DNA, 25 bp, Homo sapien
gcaagataggccttgccaatctgca

SEQ ID NO: 1751254 - DNA, 25 bp, Homo sapien
tcagctgcagatgactgacattggt

SEQ ID NO: 1751255 - DNA, 25 bp, Homo sapien
agagccgagatctgtcttcagctgc

SEQ ID NO: 1751256 - DNA, 25 bp, Homo sapien
tttgagagccgagatctgtcttcag

SEQ ID NO: 1751257 - DNA, 25 bp, Homo sapien
ttcagctgcagatgactgacattgg

SEQ ID NO: 1751258 - DNA, 25 bp, Homo sapien
gctccgtgagcatcaccttgcattt

SEQ ID NO: 1751259 - DNA, 25 bp, Homo sapien
caaggactgaactctacctctcagc

SEQ ID NO: 1751260 - DNA, 25 bp, Homo sapien
tcaaaccagacctggcaaactgggc

SEQ ID NO: 1751261 - DNA, 25 bp, Homo sapien
tgagccagctcgtcacactgatctg

SEQ ID NO: 1751262 - DNA, 25 bp, Homo sapien
cattggtgggagatgctactttgcc

SEQ ID NO: 1751263 - DNA, 25 bp, Homo sapien
ggcatcaccgggattgaagtccctc

SEQ ID NO: 1751264 - DNA, 25 bp, Homo sapien
tttcagatggcttgcatgggattgc

SEQ ID NO: 1751265 - DNA, 25 bp, Homo sapien
gtaaggtggccagcttagccgacac

SEQ ID NO: 1751266 - DNA, 25 bp, Homo sapien
taagatgaggcgatgggtctctccc

SEQ ID NO: 1751267 - DNA, 25 bp, Homo sapien
tgctacagctactgccgctggaggg

SEQ ID NO: 1751268 - DNA, 25 bp, Homo sapien
gcagaggttcccactaaatgagctt

SEQ ID NO: 1751269 - DNA, 25 bp, Homo sapien
tgggctcttcctctcgtggctcagg

SEQ ID NO: 1751270 - DNA, 25 bp, Homo sapien
gaaaccaggatcacagcgtgtctgt

SEQ ID NO: 1751271 - DNA, 25 bp, Homo sapien
cactaaggaccattcaccctgggaa

SEQ ID NO: 1751272 - DNA, 25 bp, Homo sapien
gcaagtcctccgttcttaacctgga

SEQ ID NO: 1751273 - DNA, 25 bp, Homo sapien
gaaagagattcaccacctaggcaag

SEQ ID NO: 1751274 - DNA, 25 bp, Homo sapien
tcttgacttttaatgcggctatcca

SEQ ID NO: 1751275 - DNA, 25 bp, Homo sapien
tttgaatgttctcagtcaagcccta

SEQ ID NO: 1751276 - DNA, 25 bp, Homo sapien
caccccttgtcagtggacttgctca

SEQ ID NO: 1751277 - DNA, 25 bp, Homo sapien
tgcctatgtcttacacaaaagggaa

SEQ ID NO: 1751278 - DNA, 25 bp, Homo sapien
tcacttcagttcttgccccataggc

SEQ ID NO: 1751279 - DNA, 25 bp, Homo sapien
gagccttagaagtgtagttttcctc

SEQ ID NO: 1751280 - DNA, 25 bp, Homo sapien
aagagaggctgaattgcactccaaa

SEQ ID NO: 1751281 - DNA, 25 bp, Homo sapien
gaaactatgtcaggggagccttaga

SEQ ID NO: 1751282 - DNA, 25 bp, Homo sapien
tttttgcttaatgattttgatttac

SEQ ID NO: 1751283 - DNA, 25 bp, Homo sapien
gacacccttcaaactataaagcatt

SEQ ID NO: 1751284 - DNA, 25 bp, Homo sapien
ttggacacccttcaaactataaagc

SEQ ID NO: 1751285 - DNA, 25 bp, Homo sapien
ggacacccttcaaactataaagcat

SEQ ID NO: 1751286 - DNA, 25 bp, Homo sapien
tggacacccttcaaactataaagca

SEQ ID NO: 1751287 - DNA, 25 bp, Homo sapien
ggatactcaccatgcttcagttggg

SEQ ID NO: 1751288 - DNA, 25 bp, Homo sapien
taggcactaggagtacgaagagtaa

SEQ ID NO: 1751289 - DNA, 25 bp, Homo sapien
cataattgtctggaatatctgaaag

SEQ ID NO: 1751290 - DNA, 25 bp, Homo sapien
tactttcagttcatctctactagca

SEQ ID NO: 1751291 - DNA, 25 bp, Homo sapien
tctaaaagtataaaagcgatataaa

SEQ ID NO: 1751292 - DNA, 25 bp, Homo sapien
tcttctgcacaagattgccactggc

SEQ ID NO: 1751293 - DNA, 25 bp, Homo sapien
gcagaaaaatacagcccttgaagtg

SEQ ID NO: 1751294 - DNA, 25 bp, Homo sapien
tggtgacagaaaccgcaaaggtaga

SEQ ID NO: 1751295 - DNA, 25 bp, Homo sapien
ggagaagtacaccagatttcagggt

SEQ ID NO: 1751296 - DNA, 25 bp, Homo sapien
tacagtgccagtcagtgtttcaaag

SEQ ID NO: 1751297 - DNA, 25 bp, Homo sapien
taggaaaaagagtctcagatatact

SEQ ID NO: 1751298 - DNA, 25 bp, Homo sapien
tctcagctaaatagttgatattaag

SEQ ID NO: 1751299 - DNA, 25 bp, Homo sapien
aatttgactttaatctctcagctaa

SEQ ID NO: 1751300 - DNA, 25 bp, Homo sapien
catgactcgtttctcagtggaggaa

SEQ ID NO: 1751301 - DNA, 25 bp, Homo sapien
ccttgcgtcagggattaccagagtt

SEQ ID NO: 1751302 - DNA, 25 bp, Homo sapien
tcatacgtacctagtggaagtccac

SEQ ID NO: 1751303 - DNA, 25 bp, Homo sapien
tatcatcgcttgtatgacagccagg

SEQ ID NO: 1751304 - DNA, 25 bp, Homo sapien
gacagtctagtacaatcaaagcccc

SEQ ID NO: 1751305 - DNA, 25 bp, Homo sapien
tgtcccagagattcgcaggctcttg

SEQ ID NO: 1751306 - DNA, 25 bp, Homo sapien
tcaaagcccctggattaggcaccag

SEQ ID NO: 1751307 - DNA, 25 bp, Homo sapien
tgtgaacctcgcagataatttagct

SEQ ID NO: 1751308 - DNA, 25 bp, Homo sapien
taaactgtgcttaatgaataacaga

SEQ ID NO: 1751309 - DNA, 25 bp, Homo sapien
gcagcttaagaaggaactaatatac

SEQ ID NO: 1751310 - DNA, 25 bp, Homo sapien
tctgccttgacttaatcaattggga

SEQ ID NO: 1751311 - DNA, 25 bp, Homo sapien
tacttggaaccttgtgatgcatttt

SEQ ID NO: 1751312 - DNA, 25 bp, Homo sapien
ccatcgttaagtcagagagtgtata

SEQ ID NO: 1751313 - DNA, 25 bp, Homo sapien
cataattatcgtattcagtggttca

SEQ ID NO: 1751314 - DNA, 25 bp, Homo sapien
gcgatcatagctctgcctactcgaa

SEQ ID NO: 1751315 - DNA, 25 bp, Homo sapien
taaaattgttgtgtgggtacttgca

SEQ ID NO: 1751316 - DNA, 25 bp, Homo sapien
aaataaggagatcagttaccgcccg

SEQ ID NO: 1751317 - DNA, 25 bp, Homo sapien
gcccgtctgctattgacccgttata

SEQ ID NO: 1751318 - DNA, 25 bp, Homo sapien
tgctcagtgaggaatcaaacccttt

SEQ ID NO: 1751319 - DNA, 25 bp, Homo sapien
tgacaaacgggagtagcataacaga

SEQ ID NO: 1751320 - DNA, 25 bp, Homo sapien
taagagctccttgctctaatgacgc

SEQ ID NO: 1751321 - DNA, 25 bp, Homo sapien
actatgcacctgcaagtcagtcaca

SEQ ID NO: 1751322 - DNA, 25 bp, Homo sapien
gctccttgctctaatgacgccatca

SEQ ID NO: 1751323 - DNA, 25 bp, Homo sapien
tctctttgtacattgccagtatggg

SEQ ID NO: 1751324 - DNA, 25 bp, Homo sapien
caggtattcagatttgcagcccatt

SEQ ID NO: 1751325 - DNA, 25 bp, Homo sapien
aaaatgccgtgagtcttgctccttt

SEQ ID NO: 1751326 - DNA, 25 bp, Homo sapien
cactaaaacgacatttaagcttcat

SEQ ID NO: 1751327 - DNA, 25 bp, Homo sapien
tggttaaactgccatagcttccagg

SEQ ID NO: 1751328 - DNA, 25 bp, Homo sapien
gcgtcttcacttcttggcttatcga

SEQ ID NO: 1751329 - DNA, 25 bp, Homo sapien
gtcttcacttcttggcttatcgatc

SEQ ID NO: 1751330 - DNA, 25 bp, Homo sapien
ctgcgtcttcacttcttggcttatc

SEQ ID NO: 1751331 - DNA, 25 bp, Homo sapien
cttcacttcttggcttatcgatcat

SEQ ID NO: 1751332 - DNA, 25 bp, Homo sapien
tcatgggaagcacgtagacagttgt

SEQ ID NO: 1751333 - DNA, 25 bp, Homo sapien
tagacagttgttatactacttcact

SEQ ID NO: 1751334 - DNA, 25 bp, Homo sapien
tagagaacatatcatgggaagcacg

SEQ ID NO: 1751335 - DNA, 25 bp, Homo sapien
atatagagaacatatcatgggaagc

SEQ ID NO: 1751336 - DNA, 25 bp, Homo sapien
gctgctgcccagcttcgaagttgct

SEQ ID NO: 1751337 - DNA, 25 bp, Homo sapien
gaaaatggaccaatatacacctgta

SEQ ID NO: 1751338 - DNA, 25 bp, Homo sapien
ttttccaaaagggtgatctctgcct

SEQ ID NO: 1751339 - DNA, 25 bp, Homo sapien
agccaattaagtcctggatgctgct

SEQ ID NO: 1751340 - DNA, 25 bp, Homo sapien
tgtgtgctctcacctctggtagctc

SEQ ID NO: 1751341 - DNA, 25 bp, Homo sapien
tgctctcacctctggtagctcttgc

SEQ ID NO: 1751342 - DNA, 25 bp, Homo sapien
ctttgtgtgctctcacctctggtag

SEQ ID NO: 1751343 - DNA, 25 bp, Homo sapien
tgtgctctcacctctggtagctctt

SEQ ID NO: 1751344 - DNA, 25 bp, Homo sapien
aaaggaaatcggcggtgaggtacag

SEQ ID NO: 1751345 - DNA, 25 bp, Homo sapien
gcagattgagtgagactccagagat

SEQ ID NO: 1751346 - DNA, 25 bp, Homo sapien
cagttcatccgcaataactcaaata

SEQ ID NO: 1751347 - DNA, 25 bp, Homo sapien
ttgagtgagactccagagatgcttc

SEQ ID NO: 1751348 - DNA, 25 bp, Homo sapien
caacatagagttgcactgaggttct

SEQ ID NO: 1751349 - DNA, 25 bp, Homo sapien
gggcatatattgtcaggatctcctg

SEQ ID NO: 1751350 - DNA, 25 bp, Homo sapien
aatagccacatatggaaattctggt

SEQ ID NO: 1751351 - DNA, 25 bp, Homo sapien
gccaaactgtagcttgaccaccttg

SEQ ID NO: 1751352 - DNA, 25 bp, Homo sapien
taaaccagaaacacgagttcaggcc

SEQ ID NO: 1751353 - DNA, 25 bp, Homo sapien
gagaattcctctagcccatctctga

SEQ ID NO: 1751354 - DNA, 25 bp, Homo sapien
ttgtgattctagttgccccatgaga

SEQ ID NO: 1751355 - DNA, 25 bp, Homo sapien
ggatccctcctcttggacaaggaca

SEQ ID NO: 1751356 - DNA, 25 bp, Homo sapien
ccacaagccgaagctagaattttag

SEQ ID NO: 1751357 - DNA, 25 bp, Homo sapien
ctcaaaaccacaagccgaagctaga

SEQ ID NO: 1751358 - DNA, 25 bp, Homo sapien
ggctgaatcaccatatgtccttggg

SEQ ID NO: 1751359 - DNA, 25 bp, Homo sapien
attaaataattcctggggctgaatc

SEQ ID NO: 1751360 - DNA, 25 bp, Homo sapien
caactgacagtggattgagaatatt

SEQ ID NO: 1751361 - DNA, 25 bp, Homo sapien
tacaaagttaatgtacagtcaaccc

SEQ ID NO: 1751362 - DNA, 25 bp, Homo sapien
ttattagggattaaggatcacatcc

SEQ ID NO: 1751363 - DNA, 25 bp, Homo sapien
gatgcagtatgacaactattcacat

SEQ ID NO: 1751364 - DNA, 25 bp, Homo sapien
tcttgaaagacacttgatatcttgc

SEQ ID NO: 1751365 - DNA, 25 bp, Homo sapien
gtaatgtctggtaactgggagccac

SEQ ID NO: 1751366 - DNA, 25 bp, Homo sapien
gacacttgatatcttgctgaggaca

SEQ ID NO: 1751367 - DNA, 25 bp, Homo sapien
taaactgtaatgtctggtaactggg

SEQ ID NO: 1751368 - DNA, 25 bp, Homo sapien
aaggagaagcaggtgacggggccat

SEQ ID NO: 1751369 - DNA, 25 bp, Homo sapien
gacagagctaaatgttctactggga

SEQ ID NO: 1751370 - DNA, 25 bp, Homo sapien
aaagacagagctaaatgttctactg

SEQ ID NO: 1751371 - DNA, 25 bp, Homo sapien
ggtgacggggccatggacttggaga

SEQ ID NO: 1751372 - DNA, 25 bp, Homo sapien
tcgtgcctggatattgaattgaccc

SEQ ID NO: 1751373 - DNA, 25 bp, Homo sapien
tggattattcaaagcctagagctgg

SEQ ID NO: 1751374 - DNA, 25 bp, Homo sapien
gcatttgagccgaggacaatagaaa

SEQ ID NO: 1751375 - DNA, 25 bp, Homo sapien
tgttgactaaagacgaagagactca

SEQ ID NO: 1751376 - DNA, 25 bp, Homo sapien
tgatcgcaagccaaacatgcatgtg

SEQ ID NO: 1751377 - DNA, 25 bp, Homo sapien
gaacggtccgttgtgagatggcatc

SEQ ID NO: 1751378 - DNA, 25 bp, Homo sapien
gaatcacggcggtaagtcagagtca

SEQ ID NO: 1751379 - DNA, 25 bp, Homo sapien
gatgtaaggtcaaaggtctgcccaa

SEQ ID NO: 1751380 - DNA, 25 bp, Homo sapien
aaccatttctctaaattaccaacag

SEQ ID NO: 1751381 - DNA, 25 bp, Homo sapien
catttctctaaattaccaacagact

SEQ ID NO: 1751382 - DNA, 25 bp, Homo sapien
aattaccaacagacttatattcttg

SEQ ID NO: 1751383 - DNA, 25 bp, Homo sapien
aacagacttatattcttgatgcctt

SEQ ID NO: 1751384 - DNA, 25 bp, Homo sapien
tagcttcccgaatagaacagttctg

SEQ ID NO: 1751385 - DNA, 25 bp, Homo sapien
tatggaggagaatgctataggcagc

SEQ ID NO: 1751386 - DNA, 25 bp, Homo sapien
tctcacaagatagtctggatagctg

SEQ ID NO: 1751387 - DNA, 25 bp, Homo sapien
aatatacacgttaccctagagaggg

SEQ ID NO: 1751388 - DNA, 25 bp, Homo sapien
gagttgacaaagtttgcagctcaga

SEQ ID NO: 1751389 - DNA, 25 bp, Homo sapien
tagaagagataatacggagagaata

SEQ ID NO: 1751390 - DNA, 25 bp, Homo sapien
ctaaacttgttagcagtgtatcctc

SEQ ID NO: 1751391 - DNA, 25 bp, Homo sapien
tcagaaacatgtcaaacagctaagc

SEQ ID NO: 1751392 - DNA, 25 bp, Homo sapien
tatatgactgtcaggctctcatgtc

SEQ ID NO: 1751393 - DNA, 25 bp, Homo sapien
taaaccagaacgaatgctaacaagt

SEQ ID NO: 1751394 - DNA, 25 bp, Homo sapien
aatactctggatgtggacaattcag

SEQ ID NO: 1751395 - DNA, 25 bp, Homo sapien
catgaggtgtaccattctataggcc

SEQ ID NO: 1751396 - DNA, 25 bp, Homo sapien
taactccagtgctaaatcagcgagg

SEQ ID NO: 1751397 - DNA, 25 bp, Homo sapien
taaagtcggcgtctacagtgctagg

SEQ ID NO: 1751398 - DNA, 25 bp, Homo sapien
tcaggtgacctaggaagcatgcttt

SEQ ID NO: 1751399 - DNA, 25 bp, Homo sapien
catgcatacggattgagacagagcc

SEQ ID NO: 1751400 - DNA, 25 bp, Homo sapien
cagtctgtacaagagcagttccttc

SEQ ID NO: 1751401 - DNA, 25 bp, Homo sapien
gtggctctttggacccgacctcaaa

SEQ ID NO: 1751402 - DNA, 25 bp, Homo sapien
cccaagacttgcgatgatgttaaaa

SEQ ID NO: 1751403 - DNA, 25 bp, Homo sapien
ccagacagtgaagtgtagcaggatt

SEQ ID NO: 1751404 - DNA, 25 bp, Homo sapien
tctgaagttcgtggaagtcaataca

SEQ ID NO: 1751405 - DNA, 25 bp, Homo sapien
tgaccactatggtggtgatcagctg

SEQ ID NO: 1751406 - DNA, 25 bp, Homo sapien
taagcaatggcatagataaatctca

SEQ ID NO: 1751407 - DNA, 25 bp, Homo sapien
tacattccctgaagtcatacatggc

SEQ ID NO: 1751408 - DNA, 25 bp, Homo sapien
tcagaacacctaggcttgagcaatc

SEQ ID NO: 1751409 - DNA, 25 bp, Homo sapien
agctcagaacacctaggcttgagca

SEQ ID NO: 1751410 - DNA, 25 bp, Homo sapien
ctcagaacacctaggcttgagcaat

SEQ ID NO: 1751411 - DNA, 25 bp, Homo sapien
gctcagaacacctaggcttgagcaa

SEQ ID NO: 1751412 - DNA, 25 bp, Homo sapien
ctcttgaaatctgatcatagacgcc

SEQ ID NO: 1751413 - DNA, 25 bp, Homo sapien
cttgaaatctgatcatagacgccat

SEQ ID NO: 1751414 - DNA, 25 bp, Homo sapien
tcttgaaatctgatcatagacgcca

SEQ ID NO: 1751415 - DNA, 25 bp, Homo sapien
gtaacaccaccttaggcagactgag

SEQ ID NO: 1751416 - DNA, 25 bp, Homo sapien
tatcaccaggaagcatgagacaaat

SEQ ID NO: 1751417 - DNA, 25 bp, Homo sapien
gctgcagacccatatagattcatcg

SEQ ID NO: 1751418 - DNA, 25 bp, Homo sapien
tgtcaggcaatctatagaacaactg

SEQ ID NO: 1751419 - DNA, 25 bp, Homo sapien
tgggcaaaaaggctataaatcaatt

SEQ ID NO: 1751420 - DNA, 25 bp, Homo sapien
cattgagctggtcaaagcacgtgag

SEQ ID NO: 1751421 - DNA, 25 bp, Homo sapien
ggttgtctcttgaggccacttcctg

SEQ ID NO: 1751422 - DNA, 25 bp, Homo sapien
ctgatggtctagtctgtgggcaaaa

SEQ ID NO: 1751423 - DNA, 25 bp, Homo sapien
ctctggcacagcaattcaactgcag

SEQ ID NO: 1751424 - DNA, 25 bp, Homo sapien
gatcataggcagctattttcctcgc

SEQ ID NO: 1751425 - DNA, 25 bp, Homo sapien
tcctcgctgtaaccaaacctacaaa

SEQ ID NO: 1751426 - DNA, 25 bp, Homo sapien
tgccccgttgctgttttgaaagatt

SEQ ID NO: 1751427 - DNA, 25 bp, Homo sapien
ttctggtagttggaggagacttaac

SEQ ID NO: 1751428 - DNA, 25 bp, Homo sapien
ggtagttggaggagacttaaccagc

SEQ ID NO: 1751429 - DNA, 25 bp, Homo sapien
tagttggaggagacttaaccagctc

SEQ ID NO: 1751430 - DNA, 25 bp, Homo sapien
taaccagctcttttagtttcttcat

SEQ ID NO: 1751431 - DNA, 25 bp, Homo sapien
agcccctgtagatcccgcatcatgt

SEQ ID NO: 1751432 - DNA, 25 bp, Homo sapien
tttcagcggtcagtcctctggccag

SEQ ID NO: 1751433 - DNA, 25 bp, Homo sapien
agatatgtccatttgtttcagcggt

SEQ ID NO: 1751434 - DNA, 25 bp, Homo sapien
ccatttgtttcagcggtcagtcctc

SEQ ID NO: 1751435 - DNA, 25 bp, Homo sapien
tatttccatatctatggcatcactg

SEQ ID NO: 1751436 - DNA, 25 bp, Homo sapien
tatctatggcatcactgcaagtcat

SEQ ID NO: 1751437 - DNA, 25 bp, Homo sapien
ctatttccatatctatggcatcact

SEQ ID NO: 1751438 - DNA, 25 bp, Homo sapien
ccatatctatggcatcactgcaagt

SEQ ID NO: 1751439 - DNA, 25 bp, Homo sapien
gggtctttcattctcaagcgccttt

SEQ ID NO: 1751440 - DNA, 25 bp, Homo sapien
attctcaagcgccttttgactgatt

SEQ ID NO: 1751441 - DNA, 25 bp, Homo sapien
tggggttgagctaagtgtaaaaaca

SEQ ID NO: 1751442 - DNA, 25 bp, Homo sapien
caagcgccttttgactgattcctgc

SEQ ID NO: 1751443 - DNA, 25 bp, Homo sapien
taatcaggagactagtttaaaatat

SEQ ID NO: 1751444 - DNA, 25 bp, Homo sapien
tagctggcggcagtgtaagtcagga

SEQ ID NO: 1751445 - DNA, 25 bp, Homo sapien
taggcgtgtcaaataggtaattctg

SEQ ID NO: 1751446 - DNA, 25 bp, Homo sapien
tcctaagcactgaagtaggcgtgtc

SEQ ID NO: 1751447 - DNA, 25 bp, Homo sapien
gaaatacggatgcagcagatctgag

SEQ ID NO: 1751448 - DNA, 25 bp, Homo sapien
cccgagtggcacaaagtacagagtt

SEQ ID NO: 1751449 - DNA, 25 bp, Homo sapien
gacagacaaaatccatgcccacatg

SEQ ID NO: 1751450 - DNA, 25 bp, Homo sapien
tacaaacgagatctaacccgagtgg

SEQ ID NO: 1751451 - DNA, 25 bp, Homo sapien
agtccaagagggatttgtgtagaaa

SEQ ID NO: 1751452 - DNA, 25 bp, Homo sapien
tccaagagggatttgtgtagaaact

SEQ ID NO: 1751453 - DNA, 25 bp, Homo sapien
cagtccaagagggatttgtgtagaa

SEQ ID NO: 1751454 - DNA, 25 bp, Homo sapien
gtccaagagggatttgtgtagaaac

SEQ ID NO: 1751455 - DNA, 25 bp, Homo sapien
tcttcacataacagtaccgctcatt

SEQ ID NO: 1751456 - DNA, 25 bp, Homo sapien
tactcttcacataacagtaccgctc

SEQ ID NO: 1751457 - DNA, 25 bp, Homo sapien
aaatactcttcacataacagtaccg

SEQ ID NO: 1751458 - DNA, 25 bp, Homo sapien
cacataacagtaccgctcatttttc

SEQ ID NO: 1751459 - DNA, 25 bp, Homo sapien
caccagacggttccttttactccag

SEQ ID NO: 1751460 - DNA, 25 bp, Homo sapien
ggagctttggcctttgcaaggtaac

SEQ ID NO: 1751461 - DNA, 25 bp, Homo sapien
caaagtgaagctagaggagggtttc

SEQ ID NO: 1751462 - DNA, 25 bp, Homo sapien
ctgatttccctttaacgaagcaggt

SEQ ID NO: 1751463 - DNA, 25 bp, Homo sapien
ggttcaagaatagcccaaggaacta

SEQ ID NO: 1751464 - DNA, 25 bp, Homo sapien
tgtaacctatattcagactcaccaa

SEQ ID NO: 1751465 - DNA, 25 bp, Homo sapien
acagaaaaggttcaagaatagccca

SEQ ID NO: 1751466 - DNA, 25 bp, Homo sapien
gaactaggaatacccatgtaaccta

SEQ ID NO: 1751467 - DNA, 25 bp, Homo sapien
tggcaccatagcgtcctccccgtat

SEQ ID NO: 1751468 - DNA, 25 bp, Homo sapien
taaattttggcgctaaaatggacat

SEQ ID NO: 1751469 - DNA, 25 bp, Homo sapien
caccatagcgtcctccccgtattta

SEQ ID NO: 1751470 - DNA, 25 bp, Homo sapien
ttttggcgctaaaatggacatcctc

SEQ ID NO: 1751471 - DNA, 25 bp, Homo sapien
gatcccacagcgtctctcattcttg

SEQ ID NO: 1751472 - DNA, 25 bp, Homo sapien
tgtacttgcccctcgaagttcccag

SEQ ID NO: 1751473 - DNA, 25 bp, Homo sapien
ttgtacttgcccctcgaagttccca

SEQ ID NO: 1751474 - DNA, 25 bp, Homo sapien
caggatcccacagcgtctctcattc

SEQ ID NO: 1751475 - DNA, 25 bp, Homo sapien
ctagtttaattggaagcttgaggac

SEQ ID NO: 1751476 - DNA, 25 bp, Homo sapien
aaaagtttgcattctccgtggagaa

SEQ ID NO: 1751477 - DNA, 25 bp, Homo sapien
ggtaaaagtttgcattctccgtgga

SEQ ID NO: 1751478 - DNA, 25 bp, Homo sapien
aagcttgaggacatgggtaaaagtt

SEQ ID NO: 1751479 - DNA, 25 bp, Homo sapien
taagcctgtgtctaagattggcgcc

SEQ ID NO: 1751480 - DNA, 25 bp, Homo sapien
gactcgcagtagacgcggaggaact

SEQ ID NO: 1751481 - DNA, 25 bp, Homo sapien
cagaactttgtttgcgctaccccta

SEQ ID NO: 1751482 - DNA, 25 bp, Homo sapien
gacgcagacacaccaaacgcttgcg

SEQ ID NO: 1751483 - DNA, 25 bp, Homo sapien
cgcctaatctcttcccaggcgtccg

SEQ ID NO: 1751484 - DNA, 25 bp, Homo sapien
ctctgcgtggcctcggcgaactgcg

SEQ ID NO: 1751485 - DNA, 25 bp, Homo sapien
aagtcggccgccaaccgcctaatct

SEQ ID NO: 1751486 - DNA, 25 bp, Homo sapien
cctcggcgaactgcgcccgctggaa

SEQ ID NO: 1751487 - DNA, 25 bp, Homo sapien
ttggtacacatcatcccatcacaaa

SEQ ID NO: 1751488 - DNA, 25 bp, Homo sapien
ggtacacatcatcccatcacaaatt

SEQ ID NO: 1751489 - DNA, 25 bp, Homo sapien
tgttgtctcttacaggcctgcttcc

SEQ ID NO: 1751490 - DNA, 25 bp, Homo sapien
tacaggcctgcttccaatcttcaaa

SEQ ID NO: 1751491 - DNA, 25 bp, Homo sapien
tctcaatgcagttccgctcggacaa

SEQ ID NO: 1751492 - DNA, 25 bp, Homo sapien
cacctcggacatgtagctcatctct

SEQ ID NO: 1751493 - DNA, 25 bp, Homo sapien
tattcctttccatcgagtgtatgaa

SEQ ID NO: 1751494 - DNA, 25 bp, Homo sapien
agtgtatgaactacttctagctgtt

SEQ ID NO: 1751495 - DNA, 25 bp, Homo sapien
caaattggctctatctatgaagggt

SEQ ID NO: 1751496 - DNA, 25 bp, Homo sapien
gacaaagaccaatgttacactctga

SEQ ID NO: 1751497 - DNA, 25 bp, Homo sapien
aaaggtaggcttctacatatcagca

SEQ ID NO: 1751498 - DNA, 25 bp, Homo sapien
caccacactggattgagttacctaa

SEQ ID NO: 1751499 - DNA, 25 bp, Homo sapien
ttgtagatcaacaatgtttactcga

SEQ ID NO: 1751500 - DNA, 25 bp, Homo sapien
ctgttgtagatcaacaatgtttact

SEQ ID NO: 1751501 - DNA, 25 bp, Homo sapien
gttgtagatcaacaatgtttactcg

SEQ ID NO: 1751502 - DNA, 25 bp, Homo sapien
tgtagatcaacaatgtttactcgac

SEQ ID NO: 1751503 - DNA, 25 bp, Homo sapien
catgaaactggtgacttttctccca

SEQ ID NO: 1751504 - DNA, 25 bp, Homo sapien
gcattttacagaaaattcgctggct

SEQ ID NO: 1751505 - DNA, 25 bp, Homo sapien
caactagggaagagttggccaactc

SEQ ID NO: 1751506 - DNA, 25 bp, Homo sapien
gctggcttcttgtttatagtgtacc

SEQ ID NO: 1751507 - DNA, 25 bp, Homo sapien
gttgtcccaacactaactgaacatg

SEQ ID NO: 1751508 - DNA, 25 bp, Homo sapien
gatttaataatgtcaccaattctat

SEQ ID NO: 1751509 - DNA, 25 bp, Homo sapien
acactaactgaacatgcttttctga

SEQ ID NO: 1751510 - DNA, 25 bp, Homo sapien
ttttcaatatgaatcaggtccacat

SEQ ID NO: 1751511 - DNA, 25 bp, Homo sapien
aaatgtctaactggccataattggc

SEQ ID NO: 1751512 - DNA, 25 bp, Homo sapien
gtacatgccaccatatgtggcttaa

SEQ ID NO: 1751513 - DNA, 25 bp, Homo sapien
catatgtggcttaaacacttacttt

SEQ ID NO: 1751514 - DNA, 25 bp, Homo sapien
ccttatcatgaaaatcaacactgta

SEQ ID NO: 1751515 - DNA, 25 bp, Homo sapien
cagttctgatatggtgacctgacca

SEQ ID NO: 1751516 - DNA, 25 bp, Homo sapien
cccaggaagatcataagttttacac

SEQ ID NO: 1751517 - DNA, 25 bp, Homo sapien
ttctgccaaccgatccaaataattc

SEQ ID NO: 1751518 - DNA, 25 bp, Homo sapien
ggtgacctgaccactttcttgcaat

SEQ ID NO: 1751519 - DNA, 25 bp, Homo sapien
tatgtcgagctacaaaagcttccgt

SEQ ID NO: 1751520 - DNA, 25 bp, Homo sapien
gataattctaccaagtcgctgagtt

SEQ ID NO: 1751521 - DNA, 25 bp, Homo sapien
cacggatacgtgctttatgtcgagc

SEQ ID NO: 1751522 - DNA, 25 bp, Homo sapien
tagcactgaatagtccacggatacg

SEQ ID NO: 1751523 - DNA, 25 bp, Homo sapien
atacatcattcttctcactaactgc

SEQ ID NO: 1751524 - DNA, 25 bp, Homo sapien
gaagctgctcctgaaatccatattt

SEQ ID NO: 1751525 - DNA, 25 bp, Homo sapien
agtaaagaagctgctcctgaaatcc

SEQ ID NO: 1751526 - DNA, 25 bp, Homo sapien
aatcaaagaattcacagctgtaggc

SEQ ID NO: 1751527 - DNA, 25 bp, Homo sapien
taaagaagctgctcctgaaatccat

SEQ ID NO: 1751528 - DNA, 25 bp, Homo sapien
ctattaacaagttcctcaagcacag

SEQ ID NO: 1751529 - DNA, 25 bp, Homo sapien
aaccacagtgcctcgtaagcgtccg

SEQ ID NO: 1751530 - DNA, 25 bp, Homo sapien
tactgaggaagtaatctgttatgca

SEQ ID NO: 1751531 - DNA, 25 bp, Homo sapien
tagagatgtctaccttcttaactcc

SEQ ID NO: 1751532 - DNA, 25 bp, Homo sapien
tgacagtagaatttcagacacagaa

SEQ ID NO: 1751533 - DNA, 25 bp, Homo sapien
tcaggaagtcaagaaaacgtaagga

SEQ ID NO: 1751534 - DNA, 25 bp, Homo sapien
ttgaccaacacaagctgctttcaaa

SEQ ID NO: 1751535 - DNA, 25 bp, Homo sapien
caacccatgttccagagctgatggc

SEQ ID NO: 1751536 - DNA, 25 bp, Homo sapien
tatgtagcttacagcatctgggatt

SEQ ID NO: 1751537 - DNA, 25 bp, Homo sapien
tactgatgcttccacttgatccaca

SEQ ID NO: 1751538 - DNA, 25 bp, Homo sapien
tgtccacatgtagaaggtcacccga

SEQ ID NO: 1751539 - DNA, 25 bp, Homo sapien
aagtattaatagaacggtgcctggc

SEQ ID NO: 1751540 - DNA, 25 bp, Homo sapien
ccagtacggctgtgaatgcgtggaa

SEQ ID NO: 1751541 - DNA, 25 bp, Homo sapien
tctttttggcatactgaagggcaga

SEQ ID NO: 1751542 - DNA, 25 bp, Homo sapien
cacggaacagttctgtacagtcatt

SEQ ID NO: 1751543 - DNA, 25 bp, Homo sapien
gctttctggtgcatcagctcacgga

SEQ ID NO: 1751544 - DNA, 25 bp, Homo sapien
ttttcactgactacaacagtgtcgc

SEQ ID NO: 1751545 - DNA, 25 bp, Homo sapien
aagactacagttgaggcctgtttgc

SEQ ID NO: 1751546 - DNA, 25 bp, Homo sapien
tttaccacagcttaattgatgcccc

SEQ ID NO: 1751547 - DNA, 25 bp, Homo sapien
taaagataatgaaccctccatcccc

SEQ ID NO: 1751548 - DNA, 25 bp, Homo sapien
gatgatgctgccaactagaaacatg

SEQ ID NO: 1751549 - DNA, 25 bp, Homo sapien
gacagttcacatgacagaatcacct

SEQ ID NO: 1751550 - DNA, 25 bp, Homo sapien
tcagtgattaaatgcacaggattat

SEQ ID NO: 1751551 - DNA, 25 bp, Homo sapien
cagtgattaaatgcacaggattatt

SEQ ID NO: 1751552 - DNA, 25 bp, Homo sapien
agtgattaaatgcacaggattattt

SEQ ID NO: 1751553 - DNA, 25 bp, Homo sapien
gctttgaggtgaatatgaccctggc

SEQ ID NO: 1751554 - DNA, 25 bp, Homo sapien
tgactgtggctactattccgaaggg

SEQ ID NO: 1751555 - DNA, 25 bp, Homo sapien
tactgggctggaacatagacagagg

SEQ ID NO: 1751556 - DNA, 25 bp, Homo sapien
tccgaagggttaggaggcctctcta

SEQ ID NO: 1751557 - DNA, 25 bp, Homo sapien
tgtgggatgattgagattcatcatc

SEQ ID NO: 1751558 - DNA, 25 bp, Homo sapien
gatgattgagattcatcatcactat

SEQ ID NO: 1751559 - DNA, 25 bp, Homo sapien
tgggatgattgagattcatcatcac

SEQ ID NO: 1751560 - DNA, 25 bp, Homo sapien
cagtgtgggatgattgagattcatc

SEQ ID NO: 1751561 - DNA, 25 bp, Homo sapien
tggaacataaaactgatctctggct

SEQ ID NO: 1751562 - DNA, 25 bp, Homo sapien
tcagcaagttccgaaataaactcct

SEQ ID NO: 1751563 - DNA, 25 bp, Homo sapien
tcaggggcatcttgtatgtgttttc

SEQ ID NO: 1751564 - DNA, 25 bp, Homo sapien
tccgaaataaactcctcaggggcat

SEQ ID NO: 1751565 - DNA, 25 bp, Homo sapien
tagccattcataaggtaggagtgcc

SEQ ID NO: 1751566 - DNA, 25 bp, Homo sapien
gttgaattaaactgccactgtaggc

SEQ ID NO: 1751567 - DNA, 25 bp, Homo sapien
gaaactaacttgagggatgaccagg

SEQ ID NO: 1751568 - DNA, 25 bp, Homo sapien
gctatagaagagaccagccagtggt

SEQ ID NO: 1751569 - DNA, 25 bp, Homo sapien
ctcgagataagttttattaagaggt

SEQ ID NO: 1751570 - DNA, 25 bp, Homo sapien
aagacatgaatactgaacgtaccac

SEQ ID NO: 1751571 - DNA, 25 bp, Homo sapien
gattgtgcgttttctgcccgtccca

SEQ ID NO: 1751572 - DNA, 25 bp, Homo sapien
cctaatgttattgtacaggtttgaa

SEQ ID NO: 1751573 - DNA, 25 bp, Homo sapien
aaacttcttcttgcaagtccttgat

SEQ ID NO: 1751574 - DNA, 25 bp, Homo sapien
taaatccgaagctaagaagttgaaa

SEQ ID NO: 1751575 - DNA, 25 bp, Homo sapien
tactgccatcattaaatccgaagct

SEQ ID NO: 1751576 - DNA, 25 bp, Homo sapien
ggttagtgatatcagtacacactga

SEQ ID NO: 1751577 - DNA, 25 bp, Homo sapien
aatggctgcaggatcgtctactgcc

SEQ ID NO: 1751578 - DNA, 25 bp, Homo sapien
gagagttatggagttttgtaagagc

SEQ ID NO: 1751579 - DNA, 25 bp, Homo sapien
tttcattcagagagttatggagttt

SEQ ID NO: 1751580 - DNA, 25 bp, Homo sapien
ttcagagagttatggagttttgtaa

SEQ ID NO: 1751581 - DNA, 25 bp, Homo sapien
cttttcattcagagagttatggagt

SEQ ID NO: 1751582 - DNA, 25 bp, Homo sapien
ccttttcaccataatatcacaagct

SEQ ID NO: 1751583 - DNA, 25 bp, Homo sapien
ttttcaccataatatcacaagcttc

SEQ ID NO: 1751584 - DNA, 25 bp, Homo sapien
tttcaccataatatcacaagcttct

SEQ ID NO: 1751585 - DNA, 25 bp, Homo sapien
tccccttttcaccataatatcacaa

SEQ ID NO: 1751586 - DNA, 25 bp, Homo sapien
cagccagtgcttgtcgatgttggaa

SEQ ID NO: 1751587 - DNA, 25 bp, Homo sapien
catggagcatgctgtgggttgaaaa

SEQ ID NO: 1751588 - DNA, 25 bp, Homo sapien
taagaaaagcaatgatctgtgggac

SEQ ID NO: 1751589 - DNA, 25 bp, Homo sapien
cttctgtgacctttagctgttcagc

SEQ ID NO: 1751590 - DNA, 25 bp, Homo sapien
tattcaagggataatctccctgccc

SEQ ID NO: 1751591 - DNA, 25 bp, Homo sapien
tttcctagatttgagaacaaggtct

SEQ ID NO: 1751592 - DNA, 25 bp, Homo sapien
gactagctgctttacaaccaaacct

SEQ ID NO: 1751593 - DNA, 25 bp, Homo sapien
gaagctctttacgagtagtactggc

SEQ ID NO: 1751594 - DNA, 25 bp, Homo sapien
tgtaaaggcatccttgcagccccaa

SEQ ID NO: 1751595 - DNA, 25 bp, Homo sapien
tgcatgggccactctagcgttcttg

SEQ ID NO: 1751596 - DNA, 25 bp, Homo sapien
cagatgctcctaccactggaaaagg

SEQ ID NO: 1751597 - DNA, 25 bp, Homo sapien
tactggcactcgcaacaaatgaatc

SEQ ID NO: 1751598 - DNA, 25 bp, Homo sapien
tttcttaaccctgcccattaagatc

SEQ ID NO: 1751599 - DNA, 25 bp, Homo sapien
ctttcttaaccctgcccattaagat

SEQ ID NO: 1751600 - DNA, 25 bp, Homo sapien
tctttgtgttaattaatagaagctt

SEQ ID NO: 1751601 - DNA, 25 bp, Homo sapien
atctttgtgttaattaatagaagct

SEQ ID NO: 1751602 - DNA, 25 bp, Homo sapien
tttgtgttaattaatagaagcttca

SEQ ID NO: 1751603 - DNA, 25 bp, Homo sapien
ctttgtgttaattaatagaagcttc

SEQ ID NO: 1751604 - DNA, 25 bp, Homo sapien
tctggacttgcagtgtggactcagc

SEQ ID NO: 1751605 - DNA, 25 bp, Homo sapien
ctgcaaaattattggtaccttaaga

SEQ ID NO: 1751606 - DNA, 25 bp, Homo sapien
tagaatactcaaggtagttccctgc

SEQ ID NO: 1751607 - DNA, 25 bp, Homo sapien
cccctggattgtggcctctatctct

SEQ ID NO: 1751608 - DNA, 25 bp, Homo sapien
tgaaaaagcactatttgtcaatttt

SEQ ID NO: 1751609 - DNA, 25 bp, Homo sapien
ctgaaaaagcactatttgtcaattt

SEQ ID NO: 1751610 - DNA, 25 bp, Homo sapien
aaagcactatttgtcaatttttact

SEQ ID NO: 1751611 - DNA, 25 bp, Homo sapien
gtcttaaagccgcttcttcctgtga

SEQ ID NO: 1751612 - DNA, 25 bp, Homo sapien
tgatttaaacagtacgaaaggagaa

SEQ ID NO: 1751613 - DNA, 25 bp, Homo sapien
tcttataccgtgtacatgactccta

SEQ ID NO: 1751614 - DNA, 25 bp, Homo sapien
cacatgcatgtcaactccaaaagga

SEQ ID NO: 1751615 - DNA, 25 bp, Homo sapien
gttacctccacatgcaagttataag

SEQ ID NO: 1751616 - DNA, 25 bp, Homo sapien
tcaagaggcaattccaaggagttat

SEQ ID NO: 1751617 - DNA, 25 bp, Homo sapien
tacctctgtttcaagaagtagcact

SEQ ID NO: 1751618 - DNA, 25 bp, Homo sapien
gctttttgcctgaataacactacct

SEQ ID NO: 1751619 - DNA, 25 bp, Homo sapien
aattaggcagcaggacctattctct

SEQ ID NO: 1751620 - DNA, 25 bp, Homo sapien
tatacatgattaagtggaactttcc

SEQ ID NO: 1751621 - DNA, 25 bp, Homo sapien
tactcccgcattaacaataatgagg

SEQ ID NO: 1751622 - DNA, 25 bp, Homo sapien
gcacgttttgttttctactcccgca

SEQ ID NO: 1751623 - DNA, 25 bp, Homo sapien
gaccaagtaacagcttcataagcat

SEQ ID NO: 1751624 - DNA, 25 bp, Homo sapien
tccttatttgcatctatccttctaa

SEQ ID NO: 1751625 - DNA, 25 bp, Homo sapien
ttttaattgttgaccaagtaacagc

SEQ ID NO: 1751626 - DNA, 25 bp, Homo sapien
tgacagctttagttaggctgtaatt

SEQ ID NO: 1751627 - DNA, 25 bp, Homo sapien
aaatatatctatgctcagctgggat

SEQ ID NO: 1751628 - DNA, 25 bp, Homo sapien
aatatatctatgctcagctgggatt

SEQ ID NO: 1751629 - DNA, 25 bp, Homo sapien
taaatatatctatgctcagctggga

SEQ ID NO: 1751630 - DNA, 25 bp, Homo sapien
ataaatatatctatgctcagctggg

SEQ ID NO: 1751631 - DNA, 25 bp, Homo sapien
tagaaaatacacgatcataacatgt

SEQ ID NO: 1751632 - DNA, 25 bp, Homo sapien
tgtaacacagtatggactgtcatcc

SEQ ID NO: 1751633 - DNA, 25 bp, Homo sapien
tcctcgcaatagttagaaaatacac

SEQ ID NO: 1751634 - DNA, 25 bp, Homo sapien
tattgacagtaaaagtgagcagttg

SEQ ID NO: 1751635 - DNA, 25 bp, Homo sapien
agcaggcgctcatccttggcagcaa

SEQ ID NO: 1751636 - DNA, 25 bp, Homo sapien
aagcacttggaggagcactcgttag

SEQ ID NO: 1751637 - DNA, 25 bp, Homo sapien
actcgttagaatagcactccgtgca

SEQ ID NO: 1751638 - DNA, 25 bp, Homo sapien
gattgcatttggtgcacttgaagca

SEQ ID NO: 1751639 - DNA, 25 bp, Homo sapien
gagatcaaaggctttgtccctatag

SEQ ID NO: 1751640 - DNA, 25 bp, Homo sapien
ggttgtcggcaattctcacacacaa

SEQ ID NO: 1751641 - DNA, 25 bp, Homo sapien
ataattgccactctctttggagatc

SEQ ID NO: 1751642 - DNA, 25 bp, Homo sapien
tgccagtagtttcccttaaattcca

SEQ ID NO: 1751643 - DNA, 25 bp, Homo sapien
gatagtcgtctctggacatgaactg

SEQ ID NO: 1751644 - DNA, 25 bp, Homo sapien
cactaatgggtttggaacaggctac

SEQ ID NO: 1751645 - DNA, 25 bp, Homo sapien
gatggttgtagcagtccacgcagaa

SEQ ID NO: 1751646 - DNA, 25 bp, Homo sapien
caggctacacacttgttggcataaa

SEQ ID NO: 1751647 - DNA, 25 bp, Homo sapien
tgttagagtcagtaccattaggttt

SEQ ID NO: 1751648 - DNA, 25 bp, Homo sapien
tcacagagtatagtcacccaaatta

SEQ ID NO: 1751649 - DNA, 25 bp, Homo sapien
tccttgaatgttagagtcagtacca

SEQ ID NO: 1751650 - DNA, 25 bp, Homo sapien
ggtttagtatgtagttaccttcaca

SEQ ID NO: 1751651 - DNA, 25 bp, Homo sapien
tcaggaagcctttacccaccaagga

SEQ ID NO: 1751652 - DNA, 25 bp, Homo sapien
tgtcttgaaagcagataaacttggc

SEQ ID NO: 1751653 - DNA, 25 bp, Homo sapien
tttcccgcagttaaagcattcgcta

SEQ ID NO: 1751654 - DNA, 25 bp, Homo sapien
tgtcagtgtccattccggagccaca

SEQ ID NO: 1751655 - DNA, 25 bp, Homo sapien
tctggctttagtgacaacgaaggca

SEQ ID NO: 1751656 - DNA, 25 bp, Homo sapien
tatccctaggtagaaatgatcctct

SEQ ID NO: 1751657 - DNA, 25 bp, Homo sapien
cgtgttgaaacccatgctttggcta

SEQ ID NO: 1751658 - DNA, 25 bp, Homo sapien
attttaggtgggcaaggactgtctc

SEQ ID NO: 1751659 - DNA, 25 bp, Homo sapien
gggacaaagattatcctggttagct

SEQ ID NO: 1751660 - DNA, 25 bp, Homo sapien
ctttggggacaaagattatcctggt

SEQ ID NO: 1751661 - DNA, 25 bp, Homo sapien
gacaaagattatcctggttagctcc

SEQ ID NO: 1751662 - DNA, 25 bp, Homo sapien
caaagattatcctggttagctccac

SEQ ID NO: 1751663 - DNA, 25 bp, Homo sapien
tgatcatgtgcatactcactgcccc

SEQ ID NO: 1751664 - DNA, 25 bp, Homo sapien
tatctatctaaacctaagtggcttg

SEQ ID NO: 1751665 - DNA, 25 bp, Homo sapien
ggtagcaagatagggtcatgatcag

SEQ ID NO: 1751666 - DNA, 25 bp, Homo sapien
gcagaggttgctttccatttgtccc

SEQ ID NO: 1751667 - DNA, 25 bp, Homo sapien
caacaaatgtaactcgtggccttca

SEQ ID NO: 1751668 - DNA, 25 bp, Homo sapien
cacctttgaattactgggagcccac

SEQ ID NO: 1751669 - DNA, 25 bp, Homo sapien
tgtgttacgcaaagacctaaggagg

SEQ ID NO: 1751670 - DNA, 25 bp, Homo sapien
cagttggtaactttctatggccggt

SEQ ID NO: 1751671 - DNA, 25 bp, Homo sapien
aaccatttgtgattagtgttatgca

SEQ ID NO: 1751672 - DNA, 25 bp, Homo sapien
tattttactctaatgaacaatctag

SEQ ID NO: 1751673 - DNA, 25 bp, Homo sapien
tttaagttatagcaacgatgtaagc

SEQ ID NO: 1751674 - DNA, 25 bp, Homo sapien
tttttcataatggtaggccaatatt

SEQ ID NO: 1751675 - DNA, 25 bp, Homo sapien
tgtaatcgaagtagaaacactacag

SEQ ID NO: 1751676 - DNA, 25 bp, Homo sapien
tattaatgccctgaaataatatctg

SEQ ID NO: 1751677 - DNA, 25 bp, Homo sapien
gaaagagcatagctatggatcccct

SEQ ID NO: 1751678 - DNA, 25 bp, Homo sapien
cagatgggtaatagaaggtaaaagt

SEQ ID NO: 1751679 - DNA, 25 bp, Homo sapien
tttagagaaccctttatggacatcc

SEQ ID NO: 1751680 - DNA, 25 bp, Homo sapien
tacagaggcaaacaagggataggat

SEQ ID NO: 1751681 - DNA, 25 bp, Homo sapien
acttatcagtgatgctacagaggca

SEQ ID NO: 1751682 - DNA, 25 bp, Homo sapien
aaatactctttgctcctcggtgaca

SEQ ID NO: 1751683 - DNA, 25 bp, Homo sapien
ccccagtgtcagggcattcaataat

SEQ ID NO: 1751684 - DNA, 25 bp, Homo sapien
aataataaatgggatctggataaaa

SEQ ID NO: 1751685 - DNA, 25 bp, Homo sapien
ataaatgggatctggataaaatgca

SEQ ID NO: 1751686 - DNA, 25 bp, Homo sapien
ccagtgtcagggcattcaataataa

SEQ ID NO: 1751687 - DNA, 25 bp, Homo sapien
tctgctttgttgactcaacgtttat

SEQ ID NO: 1751688 - DNA, 25 bp, Homo sapien
tccagctgctgggtaactatagttc

SEQ ID NO: 1751689 - DNA, 25 bp, Homo sapien
tgactcaacgtttatctctattact

SEQ ID NO: 1751690 - DNA, 25 bp, Homo sapien
cagctgctgggtaactatagttctt

SEQ ID NO: 1751691 - DNA, 25 bp, Homo sapien
tgtgatgctaaaaagcaccagggcc

SEQ ID NO: 1751692 - DNA, 25 bp, Homo sapien
tctctgggtactgcagttggcctca

SEQ ID NO: 1751693 - DNA, 25 bp, Homo sapien
tgcacagggtgttagtgagtcctcc

SEQ ID NO: 1751694 - DNA, 25 bp, Homo sapien
tctggcccaagaaggtgaatgtcag

SEQ ID NO: 1751695 - DNA, 25 bp, Homo sapien
ggcttgatgacaacttcactggatc

SEQ ID NO: 1751696 - DNA, 25 bp, Homo sapien
tgggaatggctgagtaacaaagaca

SEQ ID NO: 1751697 - DNA, 25 bp, Homo sapien
caagggaattatctctaagaggcag

SEQ ID NO: 1751698 - DNA, 25 bp, Homo sapien
taacactatcatgtccatcacgatg

SEQ ID NO: 1751699 - DNA, 25 bp, Homo sapien
gtggggagcccaggacgctcatcat

SEQ ID NO: 1751700 - DNA, 25 bp, Homo sapien
agtggggagcccaggacgctcatca

SEQ ID NO: 1751701 - DNA, 25 bp, Homo sapien
tagtcctcacatgaacctctagcag

SEQ ID NO: 1751702 - DNA, 25 bp, Homo sapien
tagcatcaatcaggccatattcttg

SEQ ID NO: 1751703 - DNA, 25 bp, Homo sapien
caaggcagtgcagaattgagattga

SEQ ID NO: 1751704 - DNA, 25 bp, Homo sapien
tggatgcaggtaagaaacaaagggt

SEQ ID NO: 1751705 - DNA, 25 bp, Homo sapien
ttcttctttttgcatgggatctcct

SEQ ID NO: 1751706 - DNA, 25 bp, Homo sapien
tgattcttctttttgcatgggatct

SEQ ID NO: 1751707 - DNA, 25 bp, Homo sapien
ccttccctctcctgatgattgatga

SEQ ID NO: 1751708 - DNA, 25 bp, Homo sapien
gattcttctttttgcatgggatctc

SEQ ID NO: 1751709 - DNA, 25 bp, Homo sapien
gggaagatgaacaaaggtgtcctta

SEQ ID NO: 1751710 - DNA, 25 bp, Homo sapien
ccgtgattaggttaggactcgtaag

SEQ ID NO: 1751711 - DNA, 25 bp, Homo sapien
tatgatagcactgtagagagggtgc

SEQ ID NO: 1751712 - DNA, 25 bp, Homo sapien
gggagattttgcacctacactcatc

SEQ ID NO: 1751713 - DNA, 25 bp, Homo sapien
tacactcatccaacacgcaagtatt

SEQ ID NO: 1751714 - DNA, 25 bp, Homo sapien
gaaggcaatcttctggcccagagtc

SEQ ID NO: 1751715 - DNA, 25 bp, Homo sapien
ctaaagaggaagacactactgaagg

SEQ ID NO: 1751716 - DNA, 25 bp, Homo sapien
acttggactcagtgggaaggcaatc

SEQ ID NO: 1751717 - DNA, 25 bp, Homo sapien
ttttgccccaattgaagactctgcc

SEQ ID NO: 1751718 - DNA, 25 bp, Homo sapien
tgcaggaatcgtagaatttcatttg

SEQ ID NO: 1751719 - DNA, 25 bp, Homo sapien
ggaatcgtagaatttcatttgcagc

SEQ ID NO: 1751720 - DNA, 25 bp, Homo sapien
aatcgtagaatttcatttgcagcca

SEQ ID NO: 1751721 - DNA, 25 bp, Homo sapien
caggaatcgtagaatttcatttgca

SEQ ID NO: 1751722 - DNA, 25 bp, Homo sapien
tgttgaagcgctctgtaattccagt

SEQ ID NO: 1751723 - DNA, 25 bp, Homo sapien
gtattcctaacctaacaagtgtggc

SEQ ID NO: 1751724 - DNA, 25 bp, Homo sapien
ggagtctgaagttgatacagtcaca

SEQ ID NO: 1751725 - DNA, 25 bp, Homo sapien
aaacatccttgacaataagcatttt

SEQ ID NO: 1751726 - DNA, 25 bp, Homo sapien
taattttctgtccctcgttctccat

SEQ ID NO: 1751727 - DNA, 25 bp, Homo sapien
aggcgctgtactctttgggtagcca

SEQ ID NO: 1751728 - DNA, 25 bp, Homo sapien
tacaaagcataggtcactgtgccca

SEQ ID NO: 1751729 - DNA, 25 bp, Homo sapien
cataggtcactgtgcccaagctgtt

SEQ ID NO: 1751730 - DNA, 25 bp, Homo sapien
actacgttggcctccctagagtggc

SEQ ID NO: 1751731 - DNA, 25 bp, Homo sapien
tgtgaaatttatggatgaggcagaa

SEQ ID NO: 1751732 - DNA, 25 bp, Homo sapien
ctgtgaaatttatggatgaggcaga

SEQ ID NO: 1751733 - DNA, 25 bp, Homo sapien
tctgacacagtctaagtcctcaact

SEQ ID NO: 1751734 - DNA, 25 bp, Homo sapien
gagttagcccgtgtacagctccagc

SEQ ID NO: 1751735 - DNA, 25 bp, Homo sapien
tgtttgatagtagcccatgagagtt

SEQ ID NO: 1751736 - DNA, 25 bp, Homo sapien
catcttcagacccatgccaaaaaga

SEQ ID NO: 1751737 - DNA, 25 bp, Homo sapien
cctttctgtagcctgggtgcttatc

SEQ ID NO: 1751738 - DNA, 25 bp, Homo sapien
aatataattcccaaagtggccgaca

SEQ ID NO: 1751739 - DNA, 25 bp, Homo sapien
aattcccaaagtggccgacatagta

SEQ ID NO: 1751740 - DNA, 25 bp, Homo sapien
tctgtagcctgggtgcttatctggg

SEQ ID NO: 1751741 - DNA, 25 bp, Homo sapien
ctcattagcaaggtaactgcaaatg

SEQ ID NO: 1751742 - DNA, 25 bp, Homo sapien
ttctctgtggactcatctcattagc

SEQ ID NO: 1751743 - DNA, 25 bp, Homo sapien
tcattagcaaggtaactgcaaatgg

SEQ ID NO: 1751744 - DNA, 25 bp, Homo sapien
cattagcaaggtaactgcaaatggc

SEQ ID NO: 1751745 - DNA, 25 bp, Homo sapien
catgtttaagcatccccaagggagc

SEQ ID NO: 1751746 - DNA, 25 bp, Homo sapien
catgggtaatccacattgagaggaa

SEQ ID NO: 1751747 - DNA, 25 bp, Homo sapien
ccaagggagcttgttaacagtacag

SEQ ID NO: 1751748 - DNA, 25 bp, Homo sapien
tattgagcactctgcctgactctgg

SEQ ID NO: 1751749 - DNA, 25 bp, Homo sapien
tgcctcatttggtgagagctctgga

SEQ ID NO: 1751750 - DNA, 25 bp, Homo sapien
tatgggcagtctttaggtactttca

SEQ ID NO: 1751751 - DNA, 25 bp, Homo sapien
gctctggagtgcctgccgagacgct

SEQ ID NO: 1751752 - DNA, 25 bp, Homo sapien
catgctgcttaataggcagtgcctc

SEQ ID NO: 1751753 - DNA, 25 bp, Homo sapien
tggtcacacaaagcgacggatacgt

SEQ ID NO: 1751754 - DNA, 25 bp, Homo sapien
tgaggatccatagctaccctgaagg

SEQ ID NO: 1751755 - DNA, 25 bp, Homo sapien
tatgggcatactcaacacccttcgg

SEQ ID NO: 1751756 - DNA, 25 bp, Homo sapien
gaaggtatatgcctcagccaggcca

SEQ ID NO: 1751757 - DNA, 25 bp, Homo sapien
accatggtcttctcggcagtgttga

SEQ ID NO: 1751758 - DNA, 25 bp, Homo sapien
gaccgtgaatagtacagctgtgccc

SEQ ID NO: 1751759 - DNA, 25 bp, Homo sapien
ggtttaccaaaaagctgccatgagg

SEQ ID NO: 1751760 - DNA, 25 bp, Homo sapien
cagcctagcttttgcagacatgttg

SEQ ID NO: 1751761 - DNA, 25 bp, Homo sapien
cttttccatagagagtggcatacat

SEQ ID NO: 1751762 - DNA, 25 bp, Homo sapien
caggctctcggtttctcagctgcct

SEQ ID NO: 1751763 - DNA, 25 bp, Homo sapien
gataggagtttcgagtataagttga

SEQ ID NO: 1751764 - DNA, 25 bp, Homo sapien
ttcttgaatgataggagtttcgagt

SEQ ID NO: 1751765 - DNA, 25 bp, Homo sapien
gaatgataggagtttcgagtataag

SEQ ID NO: 1751766 - DNA, 25 bp, Homo sapien
cttgaatgataggagtttcgagtat

SEQ ID NO: 1751767 - DNA, 25 bp, Homo sapien
cttgtttgcgagagcgaaaggtcct

SEQ ID NO: 1751768 - DNA, 25 bp, Homo sapien
agcttgcggcgctgtgtgttgcatc

SEQ ID NO: 1751769 - DNA, 25 bp, Homo sapien
ggttttcaacgtcgccctgatttca

SEQ ID NO: 1751770 - DNA, 25 bp, Homo sapien
gtgttgcatccttggccggttttca

SEQ ID NO: 1751771 - DNA, 25 bp, Homo sapien
taaccaaagaagaaacgcgagtagc

SEQ ID NO: 1751772 - DNA, 25 bp, Homo sapien
aagaagaaacgcgagtagcctcggg

SEQ ID NO: 1751773 - DNA, 25 bp, Homo sapien
tcggggaacgcaaatccactgggca

SEQ ID NO: 1751774 - DNA, 25 bp, Homo sapien
tagcctcggggaacgcaaatccact

SEQ ID NO: 1751775 - DNA, 25 bp, Homo sapien
agttgtttggcatctttacagccca

SEQ ID NO: 1751776 - DNA, 25 bp, Homo sapien
tgaaagtgaatcgttttagaaatcc

SEQ ID NO: 1751777 - DNA, 25 bp, Homo sapien
gccccagctggcttttagttatttc

SEQ ID NO: 1751778 - DNA, 25 bp, Homo sapien
tggaagagaacagagcaccgggtaa

SEQ ID NO: 1751779 - DNA, 25 bp, Homo sapien
tttgtggacaatatcctctagtatg

SEQ ID NO: 1751780 - DNA, 25 bp, Homo sapien
ctctttgtaggtgatcagcctcttc

SEQ ID NO: 1751781 - DNA, 25 bp, Homo sapien
ctctagtatgtatttccaagttgct

SEQ ID NO: 1751782 - DNA, 25 bp, Homo sapien
catgacgaccttgggaaatctgatg

SEQ ID NO: 1751783 - DNA, 25 bp, Homo sapien
tcaccaacaaaaggagtatgtccca

SEQ ID NO: 1751784 - DNA, 25 bp, Homo sapien
aggagtatgtcccaaatttccactt

SEQ ID NO: 1751785 - DNA, 25 bp, Homo sapien
caacaaaaggagtatgtcccaaatt

SEQ ID NO: 1751786 - DNA, 25 bp, Homo sapien
aactcaccaacaaaaggagtatgtc

SEQ ID NO: 1751787 - DNA, 25 bp, Homo sapien
tctgttggcccattgattgctacct

SEQ ID NO: 1751788 - DNA, 25 bp, Homo sapien
ctctgttggcccattgattgctacc

SEQ ID NO: 1751789 - DNA, 25 bp, Homo sapien
ttggattgagggagttgatcccatt

SEQ ID NO: 1751790 - DNA, 25 bp, Homo sapien
gttgatcccattagtaaaacagaag

SEQ ID NO: 1751791 - DNA, 25 bp, Homo sapien
ttctccagacggaattgtttcctcc

SEQ ID NO: 1751792 - DNA, 25 bp, Homo sapien
cttctccagacggaattgtttcctc

SEQ ID NO: 1751793 - DNA, 25 bp, Homo sapien
gagccttctccagacggaattgttt

SEQ ID NO: 1751794 - DNA, 25 bp, Homo sapien
gccttctccagacggaattgtttcc

SEQ ID NO: 1751795 - DNA, 25 bp, Homo sapien
gagcgggcacggtgccacacatctt

SEQ ID NO: 1751796 - DNA, 25 bp, Homo sapien
tcagtatgctcaatgatggcacagg

SEQ ID NO: 1751797 - DNA, 25 bp, Homo sapien
tagtaagcatgggttctgaagtgca

SEQ ID NO: 1751798 - DNA, 25 bp, Homo sapien
cagcattactccttggagcgggcac

SEQ ID NO: 1751799 - DNA, 25 bp, Homo sapien
catcctttatgtagctgtcagtcat

SEQ ID NO: 1751800 - DNA, 25 bp, Homo sapien
aaaacatcctttatgtagctgtcag

SEQ ID NO: 1751801 - DNA, 25 bp, Homo sapien
aacatcctttatgtagctgtcagtc

SEQ ID NO: 1751802 - DNA, 25 bp, Homo sapien
acatcctttatgtagctgtcagtca

SEQ ID NO: 1751803 - DNA, 25 bp, Homo sapien
ttccctgaagtctcttaagcccgtc

SEQ ID NO: 1751804 - DNA, 25 bp, Homo sapien
taaagatgctccttgtctctgactt

SEQ ID NO: 1751805 - DNA, 25 bp, Homo sapien
gaagtctcttaagcccgtcacagga

SEQ ID NO: 1751806 - DNA, 25 bp, Homo sapien
acttagggtgatattcttttccctg

SEQ ID NO: 1751807 - DNA, 25 bp, Homo sapien
ggtgtctgtgatgccaactctgctc

SEQ ID NO: 1751808 - DNA, 25 bp, Homo sapien
tctccaaggattttccttgaccagg

SEQ ID NO: 1751809 - DNA, 25 bp, Homo sapien
ggtgaccagcagtgctcatagtgtt

SEQ ID NO: 1751810 - DNA, 25 bp, Homo sapien
cagtgctcatagtgttagaggatgg

SEQ ID NO: 1751811 - DNA, 25 bp, Homo sapien
tcaaaaggtcaggataggcccctct

SEQ ID NO: 1751812 - DNA, 25 bp, Homo sapien
tctcctcctggattttggaaggtgg

SEQ ID NO: 1751813 - DNA, 25 bp, Homo sapien
taacagttgtataggtcttagttga

SEQ ID NO: 1751814 - DNA, 25 bp, Homo sapien
aatgccatggaaaggaaaactaaca

SEQ ID NO: 1751815 - DNA, 25 bp, Homo sapien
cctcccgcctccagctagcccgcgc

SEQ ID NO: 1751816 - DNA, 25 bp, Homo sapien
ccgcctccagctagcccgcgcgctc

SEQ ID NO: 1751817 - DNA, 25 bp, Homo sapien
tcccgcctccagctagcccgcgcgc

SEQ ID NO: 1751818 - DNA, 25 bp, Homo sapien
cgcctccagctagcccgcgcgctcc

SEQ ID NO: 1751819 - DNA, 25 bp, Homo sapien
cccacgatgctgaggttaacagaac

SEQ ID NO: 1751820 - DNA, 25 bp, Homo sapien
gaagacgagcgtcctagcgtgtttg

SEQ ID NO: 1751821 - DNA, 25 bp, Homo sapien
tctccttgatgcacaatggctctgc

SEQ ID NO: 1751822 - DNA, 25 bp, Homo sapien
taacagaacccgcagtagcttcgct

SEQ ID NO: 1751823 - DNA, 25 bp, Homo sapien
tgaaatgtcaactccgggtctgccc

SEQ ID NO: 1751824 - DNA, 25 bp, Homo sapien
cataagtaacctgagtagtggctgc

SEQ ID NO: 1751825 - DNA, 25 bp, Homo sapien
tctttcaatagatgtcccacggctg

SEQ ID NO: 1751826 - DNA, 25 bp, Homo sapien
gaagttgaatgaaaccgccacctga

SEQ ID NO: 1751827 - DNA, 25 bp, Homo sapien
tatcagtgttccagtagaggaccca

SEQ ID NO: 1751828 - DNA, 25 bp, Homo sapien
ttttaaaggcaaggagactggatcc

SEQ ID NO: 1751829 - DNA, 25 bp, Homo sapien
taagctctagtaagccatggcacac

SEQ ID NO: 1751830 - DNA, 25 bp, Homo sapien
aagttcacccaatagacacccgaga

SEQ ID NO: 1751831 - DNA, 25 bp, Homo sapien
ataaaaaaaatccagaagcttctgt

SEQ ID NO: 1751832 - DNA, 25 bp, Homo sapien
ctcataaaaaaaatccagaagcttc

SEQ ID NO: 1751833 - DNA, 25 bp, Homo sapien
ctgttttccttaaaaaactgtcatg

SEQ ID NO: 1751834 - DNA, 25 bp, Homo sapien
aaaatccagaagcttctgttttcct

SEQ ID NO: 1751835 - DNA, 25 bp, Homo sapien
tgctctgctcagacaaagctggacc

SEQ ID NO: 1751836 - DNA, 25 bp, Homo sapien
aggtctgggatggtctgtgctctgc

SEQ ID NO: 1751837 - DNA, 25 bp, Homo sapien
gctcagacaaagctggaccacaggc

SEQ ID NO: 1751838 - DNA, 25 bp, Homo sapien
ctccaggtctgggatggtctgtgct

SEQ ID NO: 1751839 - DNA, 25 bp, Homo sapien
ttagaagtgtgcagaggaatcagca

SEQ ID NO: 1751840 - DNA, 25 bp, Homo sapien
gccttagaagtgtgcagaggaatca

SEQ ID NO: 1751841 - DNA, 25 bp, Homo sapien
tctcagccttagaagtgtgcagagg

SEQ ID NO: 1751842 - DNA, 25 bp, Homo sapien
tcagccttagaagtgtgcagaggaa

SEQ ID NO: 1751843 - DNA, 25 bp, Homo sapien
gtttctggaatgtgccaagctcctt

SEQ ID NO: 1751844 - DNA, 25 bp, Homo sapien
cagtgagactattcaaatgaatgcc

SEQ ID NO: 1751845 - DNA, 25 bp, Homo sapien
ttctcattggctgcccctcagtttc

SEQ ID NO: 1751846 - DNA, 25 bp, Homo sapien
cttcaaatctcaggtatacagcctt

SEQ ID NO: 1751847 - DNA, 25 bp, Homo sapien
gagcatggcccttatagagtgtcta

SEQ ID NO: 1751848 - DNA, 25 bp, Homo sapien
aaatgctacgatcctgtggcaggag

SEQ ID NO: 1751849 - DNA, 25 bp, Homo sapien
agaacacggtgcaggtaaggcccga

SEQ ID NO: 1751850 - DNA, 25 bp, Homo sapien
catatgtggtagcagccctcatgga

SEQ ID NO: 1751851 - DNA, 25 bp, Homo sapien
cagggagcaaccatttgatcagcca

SEQ ID NO: 1751852 - DNA, 25 bp, Homo sapien
aagatgaccttttagtaatgccagg

SEQ ID NO: 1751853 - DNA, 25 bp, Homo sapien
gactccctgaacagtaagatgacct

SEQ ID NO: 1751854 - DNA, 25 bp, Homo sapien
tgcaacaatggaaagccccagactc

SEQ ID NO: 1751855 - DNA, 25 bp, Homo sapien
gtctggacctgcaagcctctgtttc

SEQ ID NO: 1751856 - DNA, 25 bp, Homo sapien
ggtgtctggacctgcaagcctctgt

SEQ ID NO: 1751857 - DNA, 25 bp, Homo sapien
caggtgtctggacctgcaagcctct

SEQ ID NO: 1751858 - DNA, 25 bp, Homo sapien
tgggtcccgtcccttcagtgtgtga

SEQ ID NO: 1751859 - DNA, 25 bp, Homo sapien
gaggcaacacgggttccagtgcact

SEQ ID NO: 1751860 - DNA, 25 bp, Homo sapien
aacatcgactgaggcaacacgggtt

SEQ ID NO: 1751861 - DNA, 25 bp, Homo sapien
tcattccttgaacatcgactgaggc

SEQ ID NO: 1751862 - DNA, 25 bp, Homo sapien
tcgactgaggcaacacgggttccag

SEQ ID NO: 1751863 - DNA, 25 bp, Homo sapien
gcatgctgctaggactgccttgtga

SEQ ID NO: 1751864 - DNA, 25 bp, Homo sapien
caatcagggtgatgtcgcagaggat

SEQ ID NO: 1751865 - DNA, 25 bp, Homo sapien
ctgattcagcgctgccaggacactg

SEQ ID NO: 1751866 - DNA, 25 bp, Homo sapien
tgagattcggagtggcagagcctct

SEQ ID NO: 1751867 - DNA, 25 bp, Homo sapien
gctgttggaaatcaaccccaaagct

SEQ ID NO: 1751868 - DNA, 25 bp, Homo sapien
tttgctgttggaaatcaaccccaaa

SEQ ID NO: 1751869 - DNA, 25 bp, Homo sapien
tgctgttggaaatcaaccccaaagc

SEQ ID NO: 1751870 - DNA, 25 bp, Homo sapien
acagcaatcttattaccacatgtaa

SEQ ID NO: 1751871 - DNA, 25 bp, Homo sapien
tgctactcattataaaagactccgg

SEQ ID NO: 1751872 - DNA, 25 bp, Homo sapien
caaagggtagacatgtttgctactc

SEQ ID NO: 1751873 - DNA, 25 bp, Homo sapien
tacaatcctggaagatacagtatct

SEQ ID NO: 1751874 - DNA, 25 bp, Homo sapien
tctctatgtagagcaaagggtagca

SEQ ID NO: 1751875 - DNA, 25 bp, Homo sapien
ttttttgtcaaatcagtgcctgatc

SEQ ID NO: 1751876 - DNA, 25 bp, Homo sapien
agagtgtcctataaatatttttctg

SEQ ID NO: 1751877 - DNA, 25 bp, Homo sapien
ttttgtcaaatcagtgcctgatcct

SEQ ID NO: 1751878 - DNA, 25 bp, Homo sapien
gagcatggcatagagtgtcctataa

SEQ ID NO: 1751879 - DNA, 25 bp, Homo sapien
ttgcttctatcactttccactgatt

SEQ ID NO: 1751880 - DNA, 25 bp, Homo sapien
gcttctatcactttccactgattga

SEQ ID NO: 1751881 - DNA, 25 bp, Homo sapien
tacccattctgctgatccattgctt

SEQ ID NO: 1751882 - DNA, 25 bp, Homo sapien
ctctatacccattctgctgatccat

SEQ ID NO: 1751883 - DNA, 25 bp, Homo sapien
actgctgctgcaactgctgtcttac

SEQ ID NO: 1751884 - DNA, 25 bp, Homo sapien
cagagccaagcaccactgctgctgc

SEQ ID NO: 1751885 - DNA, 25 bp, Homo sapien
agagccaagcaccactgctgctgca

SEQ ID NO: 1751886 - DNA, 25 bp, Homo sapien
accactgctgctgcaactgctgtct

SEQ ID NO: 1751887 - DNA, 25 bp, Homo sapien
ctaatacagcaaccctgctccacca

SEQ ID NO: 1751888 - DNA, 25 bp, Homo sapien
aatacagcaaccctgctccaccagc

SEQ ID NO: 1751889 - DNA, 25 bp, Homo sapien
agcaaccctgctccaccagccctac

SEQ ID NO: 1751890 - DNA, 25 bp, Homo sapien
acagcaaccctgctccaccagccct

SEQ ID NO: 1751891 - DNA, 25 bp, Homo sapien
ctttccatgtttaggttttgcagct

SEQ ID NO: 1751892 - DNA, 25 bp, Homo sapien
tttccatgtttaggttttgcagctt

SEQ ID NO: 1751893 - DNA, 25 bp, Homo sapien
ttccatgtttaggttttgcagcttg

SEQ ID NO: 1751894 - DNA, 25 bp, Homo sapien
cctttccatgtttaggttttgcagc

SEQ ID NO: 1751895 - DNA, 25 bp, Homo sapien
tggtagccaaaacattgggtaagaa

SEQ ID NO: 1751896 - DNA, 25 bp, Homo sapien
gagggcattccctatggtagccaaa

SEQ ID NO: 1751897 - DNA, 25 bp, Homo sapien
ttccctatggtagccaaaacattgg

SEQ ID NO: 1751898 - DNA, 25 bp, Homo sapien
tcccaatgatgagggcattccctat

SEQ ID NO: 1751899 - DNA, 25 bp, Homo sapien
gttcacaaggtcctgtcccacagta

SEQ ID NO: 1751900 - DNA, 25 bp, Homo sapien
cagtacatcagaatcagccttatcc

SEQ ID NO: 1751901 - DNA, 25 bp, Homo sapien
ggttgaccgtatacctgagatcaaa

SEQ ID NO: 1751902 - DNA, 25 bp, Homo sapien
caccatgtgcagactctattacagc

SEQ ID NO: 1751903 - DNA, 25 bp, Homo sapien
gatattggtaatggcttcctgcagc

SEQ ID NO: 1751904 - DNA, 25 bp, Homo sapien
ctgcccaatctgatattggtaatgg

SEQ ID NO: 1751905 - DNA, 25 bp, Homo sapien
caatctgatattggtaatggcttcc

SEQ ID NO: 1751906 - DNA, 25 bp, Homo sapien
tctgatattggtaatggcttcctgc

SEQ ID NO: 1751907 - DNA, 25 bp, Homo sapien
gatctctcgcatatggcagccaatg

SEQ ID NO: 1751908 - DNA, 25 bp, Homo sapien
tcacaaacttctaaggacaccccaa

SEQ ID NO: 1751909 - DNA, 25 bp, Homo sapien
tgaatcgaattaattgaagaggctg

SEQ ID NO: 1751910 - DNA, 25 bp, Homo sapien
actgagacataacctagatttcctg

SEQ ID NO: 1751911 - DNA, 25 bp, Homo sapien
tgtggccatgtttcaacgacctggg

SEQ ID NO: 1751912 - DNA, 25 bp, Homo sapien
gaatgtggccatgtttcaacgacct

SEQ ID NO: 1751913 - DNA, 25 bp, Homo sapien
gccatgtttcaacgacctgggtctt

SEQ ID NO: 1751914 - DNA, 25 bp, Homo sapien
tggccatgtttcaacgacctgggtc

SEQ ID NO: 1751915 - DNA, 25 bp, Homo sapien
gaactatgcaggaagatacatctgg

SEQ ID NO: 1751916 - DNA, 25 bp, Homo sapien
tagaatagggatcctcatcagagag

SEQ ID NO: 1751917 - DNA, 25 bp, Homo sapien
caccaatcccgtatatacagcagga

SEQ ID NO: 1751918 - DNA, 25 bp, Homo sapien
ggactcaaaatagcttaaactgcag

SEQ ID NO: 1751919 - DNA, 25 bp, Homo sapien
cctgcccaataggacatgaaaagcc

SEQ ID NO: 1751920 - DNA, 25 bp, Homo sapien
ccaataggacatgaaaagccttcat

SEQ ID NO: 1751921 - DNA, 25 bp, Homo sapien
cccaataggacatgaaaagccttca

SEQ ID NO: 1751922 - DNA, 25 bp, Homo sapien
tgcccaataggacatgaaaagcctt

SEQ ID NO: 1751923 - DNA, 25 bp, Homo sapien
cattcctcaccatatacagtacttc

SEQ ID NO: 1751924 - DNA, 25 bp, Homo sapien
aggtgatagtatttaggcccaccga

SEQ ID NO: 1751925 - DNA, 25 bp, Homo sapien
taggcccaccgaacgctttctcttg

SEQ ID NO: 1751926 - DNA, 25 bp, Homo sapien
cttggtcctggattctcattgctac

SEQ ID NO: 1751927 - DNA, 25 bp, Homo sapien
aaggctggtcacaccgtgcaaatta

SEQ ID NO: 1751928 - DNA, 25 bp, Homo sapien
tccagagcctgctttaagccaaggc

SEQ ID NO: 1751929 - DNA, 25 bp, Homo sapien
gcaaattaacctcatcagctccact

SEQ ID NO: 1751930 - DNA, 25 bp, Homo sapien
cagctccactttccaccatacaaag

SEQ ID NO: 1751931 - DNA, 25 bp, Homo sapien
ttaaggtgctatatctgtctattca

SEQ ID NO: 1751932 - DNA, 25 bp, Homo sapien
ttgttcctactttgacagatacatg

SEQ ID NO: 1751933 - DNA, 25 bp, Homo sapien
tacatgatacatagagatgaatggc

SEQ ID NO: 1751934 - DNA, 25 bp, Homo sapien
gggctgtgccaagttgttcctactt

SEQ ID NO: 1751935 - DNA, 25 bp, Homo sapien
tcacgtcaacctctcaactagctgg

SEQ ID NO: 1751936 - DNA, 25 bp, Homo sapien
tctttcacgtcaacctctcaactag

SEQ ID NO: 1751937 - DNA, 25 bp, Homo sapien
aattctttcacgtcaacctctcaac

SEQ ID NO: 1751938 - DNA, 25 bp, Homo sapien
aagcaattctttcacgtcaacctct

SEQ ID NO: 1751939 - DNA, 25 bp, Homo sapien
gaaattagtgcagctcccatcagag

SEQ ID NO: 1751940 - DNA, 25 bp, Homo sapien
cattcacgaaattagtgcagctccc

SEQ ID NO: 1751941 - DNA, 25 bp, Homo sapien
aggaaggaggctttgactgacattc

SEQ ID NO: 1751942 - DNA, 25 bp, Homo sapien
gaggctttgactgacattcacgaaa

SEQ ID NO: 1751943 - DNA, 25 bp, Homo sapien
ggtgactgcccgctgctagcacatc

SEQ ID NO: 1751944 - DNA, 25 bp, Homo sapien
gcataaattgagaagctccaacagc

SEQ ID NO: 1751945 - DNA, 25 bp, Homo sapien
tccaacagctgtaggtgactgcccg

SEQ ID NO: 1751946 - DNA, 25 bp, Homo sapien
ctggatgagatagtgggagcataaa

SEQ ID NO: 1751947 - DNA, 25 bp, Homo sapien
tgatcaggcaactctggaagaggag

SEQ ID NO: 1751948 - DNA, 25 bp, Homo sapien
ggttcatcagttagcaagaagttgc

SEQ ID NO: 1751949 - DNA, 25 bp, Homo sapien
gaacctcatcctgaagactatgtga

SEQ ID NO: 1751950 - DNA, 25 bp, Homo sapien
taggtacagggaaatgcacaaagtt

SEQ ID NO: 1751951 - DNA, 25 bp, Homo sapien
aatctagagcgggagttctcaaact

SEQ ID NO: 1751952 - DNA, 25 bp, Homo sapien
gcagtgtggcaacagaatctagagc

SEQ ID NO: 1751953 - DNA, 25 bp, Homo sapien
cattattacgaataagagtgagacc

SEQ ID NO: 1751954 - DNA, 25 bp, Homo sapien
aaactgtgctccctagttcagacat

SEQ ID NO: 1751955 - DNA, 25 bp, Homo sapien
tggtactccaggagtagagaaagca

SEQ ID NO: 1751956 - DNA, 25 bp, Homo sapien
ctggtgtggatgtgcggtaaggtct

SEQ ID NO: 1751957 - DNA, 25 bp, Homo sapien
tgcaggaaaggttggtactccagga

SEQ ID NO: 1751958 - DNA, 25 bp, Homo sapien
agaaagcaacataaagggggctggt

SEQ ID NO: 1751959 - DNA, 25 bp, Homo sapien
cccaaggcaatgacaacatagcaca

SEQ ID NO: 1751960 - DNA, 25 bp, Homo sapien
catagcacacactcctccttttggg

SEQ ID NO: 1751961 - DNA, 25 bp, Homo sapien
ctttgtgagtcttaagcaaaaccat

SEQ ID NO: 1751962 - DNA, 25 bp, Homo sapien
gggcagatgggctttgtgagtctta

SEQ ID NO: 1751963 - DNA, 25 bp, Homo sapien
tcagattgactcactaaggttttca

SEQ ID NO: 1751964 - DNA, 25 bp, Homo sapien
ataaatccgagaaagagcaggcaag

SEQ ID NO: 1751965 - DNA, 25 bp, Homo sapien
cttagaaataaatccgagaaagagc

SEQ ID NO: 1751966 - DNA, 25 bp, Homo sapien
ggcaagaaattcagattgactcact

SEQ ID NO: 1751967 - DNA, 25 bp, Homo sapien
aggttaaagaggtcagcaagtctgt

SEQ ID NO: 1751968 - DNA, 25 bp, Homo sapien
ctgaagcaggcaatagggaagcgtt

SEQ ID NO: 1751969 - DNA, 25 bp, Homo sapien
gcaagtctgtacagatccaagtaat

SEQ ID NO: 1751970 - DNA, 25 bp, Homo sapien
tttcactaagaaatcgatcactgcc

SEQ ID NO: 1751971 - DNA, 25 bp, Homo sapien
aggtcaggcggtcgctcttcagcac

SEQ ID NO: 1751972 - DNA, 25 bp, Homo sapien
ggaggtcaggcggtcgctcttcagc

SEQ ID NO: 1751973 - DNA, 25 bp, Homo sapien
agggaggtcaggcggtcgctcttca

SEQ ID NO: 1751974 - DNA, 25 bp, Homo sapien
tcagggaggtcaggcggtcgctctt

SEQ ID NO: 1751975 - DNA, 25 bp, Homo sapien
caatcacggcatgctttttcagtgc

SEQ ID NO: 1751976 - DNA, 25 bp, Homo sapien
ttttcagtgccaaaagcgaccgtgc

SEQ ID NO: 1751977 - DNA, 25 bp, Homo sapien
aaagcgaccgtgcacagcgccctta

SEQ ID NO: 1751978 - DNA, 25 bp, Homo sapien
cctttaacttccaatcacggcatgc

SEQ ID NO: 1751979 - DNA, 25 bp, Homo sapien
ccagcctgtccatcaagtttcactt

SEQ ID NO: 1751980 - DNA, 25 bp, Homo sapien
tattgcattactagcataacctcag

SEQ ID NO: 1751981 - DNA, 25 bp, Homo sapien
tacttgaggcaaaatagcggtctga

SEQ ID NO: 1751982 - DNA, 25 bp, Homo sapien
tggcatacccaatctctactctggg

SEQ ID NO: 1751983 - DNA, 25 bp, Homo sapien
tccccaacaccttttgcttcacact

SEQ ID NO: 1751984 - DNA, 25 bp, Homo sapien
tcctccccaacaccttttgcttcac

SEQ ID NO: 1751985 - DNA, 25 bp, Homo sapien
caacaccttttgcttcacacttctt

SEQ ID NO: 1751986 - DNA, 25 bp, Homo sapien
ccaacaccttttgcttcacacttct

SEQ ID NO: 1751987 - DNA, 25 bp, Homo sapien
tggagtttcattctatcatcccagc

SEQ ID NO: 1751988 - DNA, 25 bp, Homo sapien
agctggagtttcattctatcatccc

SEQ ID NO: 1751989 - DNA, 25 bp, Homo sapien
cgcctacccagaaaaggactgttct

SEQ ID NO: 1751990 - DNA, 25 bp, Homo sapien
accgcgcctacccagaaaaggactg

SEQ ID NO: 1751991 - DNA, 25 bp, Homo sapien
aataggacataacttgggtttatgc

SEQ ID NO: 1751992 - DNA, 25 bp, Homo sapien
ctctttgccacactaaaataggaca

SEQ ID NO: 1751993 - DNA, 25 bp, Homo sapien
ctgctgaggtcttaccttgtttgac

SEQ ID NO: 1751994 - DNA, 25 bp, Homo sapien
gccactcacatagccagcaaatttt

SEQ ID NO: 1751995 - DNA, 25 bp, Homo sapien
tgttttcaatcaacagacggctgga

SEQ ID NO: 1751996 - DNA, 25 bp, Homo sapien
gccatcagagccttgattgttttca

SEQ ID NO: 1751997 - DNA, 25 bp, Homo sapien
aatggtgtcataaaccagaatagca

SEQ ID NO: 1751998 - DNA, 25 bp, Homo sapien
ctctttaacgtgaatcatgtaaggt

SEQ ID NO: 1751999 - DNA, 25 bp, Homo sapien
taatggtgtcataaaccagaatagc

SEQ ID NO: 1752000 - DNA, 25 bp, Homo sapien
catgtaaggtgaaataatggtgtca

SEQ ID NO: 1752001 - DNA, 25 bp, Homo sapien
cctcagtgcacaaaaggcagcacaa

SEQ ID NO: 1752002 - DNA, 25 bp, Homo sapien
agtcttgtcatcccattgaggtaag

SEQ ID NO: 1752003 - DNA, 25 bp, Homo sapien
ttgaggtaagccagggcaccagtct

SEQ ID NO: 1752004 - DNA, 25 bp, Homo sapien
cagtctcccctcagtgcacaaaagg

SEQ ID NO: 1752005 - DNA, 25 bp, Homo sapien
attaaagtagatctcccagacaatg

SEQ ID NO: 1752006 - DNA, 25 bp, Homo sapien
ttaaagtagatctcccagacaatgt

SEQ ID NO: 1752007 - DNA, 25 bp, Homo sapien
taaagtagatctcccagacaatgtg

SEQ ID NO: 1752008 - DNA, 25 bp, Homo sapien
gcggatgtattgcaggagctcgtcc

SEQ ID NO: 1752009 - DNA, 25 bp, Homo sapien
tagtggcagttgtgttccaaccacc

SEQ ID NO: 1752010 - DNA, 25 bp, Homo sapien
gagctcgtccatgtactggtagtgg

SEQ ID NO: 1752011 - DNA, 25 bp, Homo sapien
ggagagtatccacatccattaggcc

SEQ ID NO: 1752012 - DNA, 25 bp, Homo sapien
gggtcatagcgacaggcagtcctca

SEQ ID NO: 1752013 - DNA, 25 bp, Homo sapien
gcaatatcgctcaactgtaggcaga

SEQ ID NO: 1752014 - DNA, 25 bp, Homo sapien
tgagagcattctcctgatcaacagg

SEQ ID NO: 1752015 - DNA, 25 bp, Homo sapien
tattccagggcctcgttgacaaggg

SEQ ID NO: 1752016 - DNA, 25 bp, Homo sapien
ttttgataaatccaacatgaggtat

SEQ ID NO: 1752017 - DNA, 25 bp, Homo sapien
gaaagtgtgttttgataaatccaac

SEQ ID NO: 1752018 - DNA, 25 bp, Homo sapien
aaatccaacatgaggtatgttctac

SEQ ID NO: 1752019 - DNA, 25 bp, Homo sapien
atgaaagtgtgttttgataaatcca

SEQ ID NO: 1752020 - DNA, 25 bp, Homo sapien
taattagctaaaatggcatgcttgg

SEQ ID NO: 1752021 - DNA, 25 bp, Homo sapien
tattccattagtcactcagaaagtc

SEQ ID NO: 1752022 - DNA, 25 bp, Homo sapien
catggccacagtattaaagcttgac

SEQ ID NO: 1752023 - DNA, 25 bp, Homo sapien
aatctttcaattacacatggccaca

SEQ ID NO: 1752024 - DNA, 25 bp, Homo sapien
tctgggttacgatgccacatgctgc

SEQ ID NO: 1752025 - DNA, 25 bp, Homo sapien
ttcctggctttgaaagtcatcaagc

SEQ ID NO: 1752026 - DNA, 25 bp, Homo sapien
tcaagctgatttgtctgctctgggt

SEQ ID NO: 1752027 - DNA, 25 bp, Homo sapien
tatactgtcccctgcaatcaaagca

SEQ ID NO: 1752028 - DNA, 25 bp, Homo sapien
cattagcctgttctgatattgtgcc

SEQ ID NO: 1752029 - DNA, 25 bp, Homo sapien
ggttcatacaccattagcctgttct

SEQ ID NO: 1752030 - DNA, 25 bp, Homo sapien
cctgttctgatattgtgccgtatta

SEQ ID NO: 1752031 - DNA, 25 bp, Homo sapien
ctggttaggttcatacaccattagc

SEQ ID NO: 1752032 - DNA, 25 bp, Homo sapien
ccggtcattattgtagtctaggtca

SEQ ID NO: 1752033 - DNA, 25 bp, Homo sapien
cactggtcagtgtctatgttgtaag

SEQ ID NO: 1752034 - DNA, 25 bp, Homo sapien
tatggcgcacaaggatccggtcatt

SEQ ID NO: 1752035 - DNA, 25 bp, Homo sapien
gcagccatggaatggtagacccttc

SEQ ID NO: 1752036 - DNA, 25 bp, Homo sapien
atgcaggttcttctacaactatgca

SEQ ID NO: 1752037 - DNA, 25 bp, Homo sapien
aatgcaggttcttctacaactatgc

SEQ ID NO: 1752038 - DNA, 25 bp, Homo sapien
tgcaggttcttctacaactatgcac

SEQ ID NO: 1752039 - DNA, 25 bp, Homo sapien
atattctcccattatggacagcaac

SEQ ID NO: 1752040 - DNA, 25 bp, Homo sapien
tattctcccattatggacagcaact

SEQ ID NO: 1752041 - DNA, 25 bp, Homo sapien
tctcccattatggacagcaactcca

SEQ ID NO: 1752042 - DNA, 25 bp, Homo sapien
cccattatggacagcaactccagat

SEQ ID NO: 1752043 - DNA, 25 bp, Homo sapien
ctggatacaagccagaggctcattt

SEQ ID NO: 1752044 - DNA, 25 bp, Homo sapien
tttgtccaaattgaatatccaccaa

SEQ ID NO: 1752045 - DNA, 25 bp, Homo sapien
tggatacaagccagaggctcatttg

SEQ ID NO: 1752046 - DNA, 25 bp, Homo sapien
gctcatttgtccaaattgaatatcc

SEQ ID NO: 1752047 - DNA, 25 bp, Homo sapien
tcgccccatttgtcaaacctattag

SEQ ID NO: 1752048 - DNA, 25 bp, Homo sapien
aacctattaggctctttcaagtctg

SEQ ID NO: 1752049 - DNA, 25 bp, Homo sapien
attctttcttcaggagagctgctct

SEQ ID NO: 1752050 - DNA, 25 bp, Homo sapien
ggagagctgctctcgccccatttgt

SEQ ID NO: 1752051 - DNA, 25 bp, Homo sapien
tgtaggcccatagaatacttcttct

SEQ ID NO: 1752052 - DNA, 25 bp, Homo sapien
gcaaaagggagtgtaggcccataga

SEQ ID NO: 1752053 - DNA, 25 bp, Homo sapien
gatggtgccaatcctgtgatgaggc

SEQ ID NO: 1752054 - DNA, 25 bp, Homo sapien
aagagtttgaaggttagggcatgta

SEQ ID NO: 1752055 - DNA, 25 bp, Homo sapien
gaattccacaagcactcaagattga

SEQ ID NO: 1752056 - DNA, 25 bp, Homo sapien
gaatgttgacatacactgagaaggg

SEQ ID NO: 1752057 - DNA, 25 bp, Homo sapien
taagatcatcgatgccattgtgtcc

SEQ ID NO: 1752058 - DNA, 25 bp, Homo sapien
caaagaatgctctaaagacccatgg

SEQ ID NO: 1752059 - DNA, 25 bp, Homo sapien
gttaaaaatattgcctgtcaggcaa

SEQ ID NO: 1752060 - DNA, 25 bp, Homo sapien
tttttgatgtgccaatggctatcca

SEQ ID NO: 1752061 - DNA, 25 bp, Homo sapien
tttgatactgtgataacctgcattg

SEQ ID NO: 1752062 - DNA, 25 bp, Homo sapien
ggtttgggaagctagcaacatagca

SEQ ID NO: 1752063 - DNA, 25 bp, Homo sapien
gatgagccacctagtgctaattcat

SEQ ID NO: 1752064 - DNA, 25 bp, Homo sapien
ggcgtgatgagccacctagtgctaa

SEQ ID NO: 1752065 - DNA, 25 bp, Homo sapien
gagccacctagtgctaattcatctc

SEQ ID NO: 1752066 - DNA, 25 bp, Homo sapien
cacctagtgctaattcatctctaaa

SEQ ID NO: 1752067 - DNA, 25 bp, Homo sapien
tgtagtgatcccaatttttacgtag

SEQ ID NO: 1752068 - DNA, 25 bp, Homo sapien
tatagtggttatcattgaatggaga

SEQ ID NO: 1752069 - DNA, 25 bp, Homo sapien
aaatactcaagagcttgtatagtgg

SEQ ID NO: 1752070 - DNA, 25 bp, Homo sapien
tgtgagccgctgtacgcagctttta

SEQ ID NO: 1752071 - DNA, 25 bp, Homo sapien
tttttaatgatgtaatatgacagtg

SEQ ID NO: 1752072 - DNA, 25 bp, Homo sapien
ttttaatgatgtaatatgacagtga

SEQ ID NO: 1752073 - DNA, 25 bp, Homo sapien
gtgctctttcatggcaccacacggt

SEQ ID NO: 1752074 - DNA, 25 bp, Homo sapien
tttcttaaaccaaagacaggctgtc

SEQ ID NO: 1752075 - DNA, 25 bp, Homo sapien
gaagactggtaaatcccattcgtga

SEQ ID NO: 1752076 - DNA, 25 bp, Homo sapien
caatgagtttgtaggaagacatcac

SEQ ID NO: 1752077 - DNA, 25 bp, Homo sapien
tatatcttcttgtccaacgaagttg

SEQ ID NO: 1752078 - DNA, 25 bp, Homo sapien
tcttgtccaacgaagttgagggtca

SEQ ID NO: 1752079 - DNA, 25 bp, Homo sapien
accaattgagggttcaggccagaac

SEQ ID NO: 1752080 - DNA, 25 bp, Homo sapien
caagtttgacctcttgtcaaaacca

SEQ ID NO: 1752081 - DNA, 25 bp, Homo sapien
gatttaaaggtgctacagaacatgt

SEQ ID NO: 1752082 - DNA, 25 bp, Homo sapien
tttcataaaaggtctcgaatctggg

SEQ ID NO: 1752083 - DNA, 25 bp, Homo sapien
taccgaaatcactggaagcctaatt

SEQ ID NO: 1752084 - DNA, 25 bp, Homo sapien
taaaaatgatgtttaccgaaatcac

SEQ ID NO: 1752085 - DNA, 25 bp, Homo sapien
cttaagcggtaggtaaaactcagag

SEQ ID NO: 1752086 - DNA, 25 bp, Homo sapien
agcggtaggtaaaactcagagacat

SEQ ID NO: 1752087 - DNA, 25 bp, Homo sapien
aagcggtaggtaaaactcagagaca

SEQ ID NO: 1752088 - DNA, 25 bp, Homo sapien
taagcggtaggtaaaactcagagac

SEQ ID NO: 1752089 - DNA, 25 bp, Homo sapien
ccacagccagttggttgtgcatttt

SEQ ID NO: 1752090 - DNA, 25 bp, Homo sapien
gcccgacttagtggccggatttcga

SEQ ID NO: 1752091 - DNA, 25 bp, Homo sapien
ggctccgactgtttccgcgcagata

SEQ ID NO: 1752092 - DNA, 25 bp, Homo sapien
aaatgtgagcgggtacgacaggcac

SEQ ID NO: 1752093 - DNA, 25 bp, Homo sapien
aagcccgggacgctatgtcctgcag

SEQ ID NO: 1752094 - DNA, 25 bp, Homo sapien
tcttctctttggtccggccagagga

SEQ ID NO: 1752095 - DNA, 25 bp, Homo sapien
actgtgggtgtgaacgaggcactca

SEQ ID NO: 1752096 - DNA, 25 bp, Homo sapien
ctcacttcgcactcactggagtaaa

SEQ ID NO: 1752097 - DNA, 25 bp, Homo sapien
gccagaggataaacccatagtcctt

SEQ ID NO: 1752098 - DNA, 25 bp, Homo sapien
tattttatgagaagggaacgagaag

SEQ ID NO: 1752099 - DNA, 25 bp, Homo sapien
gaaacgatgacattgcaggcagaat

SEQ ID NO: 1752100 - DNA, 25 bp, Homo sapien
gcagaatatgagattgttcagcctc

SEQ ID NO: 1752101 - DNA, 25 bp, Homo sapien
ccttcctgtctagatattttatgag

SEQ ID NO: 1752102 - DNA, 25 bp, Homo sapien
ctttctcatcaaagcccagaaaggc

SEQ ID NO: 1752103 - DNA, 25 bp, Homo sapien
tttctcatcaaagcccagaaaggca

SEQ ID NO: 1752104 - DNA, 25 bp, Homo sapien
cctttctcatcaaagcccagaaagg

SEQ ID NO: 1752105 - DNA, 25 bp, Homo sapien
caggcacatctggcggcagtccctg

SEQ ID NO: 1752106 - DNA, 25 bp, Homo sapien
ccagtttatgctcggcatgatgatc

SEQ ID NO: 1752107 - DNA, 25 bp, Homo sapien
catgatgatcctacgcagagagtgt

SEQ ID NO: 1752108 - DNA, 25 bp, Homo sapien
aaagtccagtttatgctcggcatga

SEQ ID NO: 1752109 - DNA, 25 bp, Homo sapien
gctcggcatgatgatcctacgcaga

SEQ ID NO: 1752110 - DNA, 25 bp, Homo sapien
tgttcatttagcacgcagggatctg

SEQ ID NO: 1752111 - DNA, 25 bp, Homo sapien
catttagcacgcagggatctgtgtg

SEQ ID NO: 1752112 - DNA, 25 bp, Homo sapien
tagcacgcagggatctgtgtgactc

SEQ ID NO: 1752113 - DNA, 25 bp, Homo sapien
agatgttcatttagcacgcagggat

SEQ ID NO: 1752114 - DNA, 25 bp, Homo sapien
ggatgcctgctatgcatactacaga

SEQ ID NO: 1752115 - DNA, 25 bp, Homo sapien
ttaggaggatatattgcagggcttc

SEQ ID NO: 1752116 - DNA, 25 bp, Homo sapien
caatctccatttgggcatgtaaccc

SEQ ID NO: 1752117 - DNA, 25 bp, Homo sapien
tacagccaaacactattgtaacctg

SEQ ID NO: 1752118 - DNA, 25 bp, Homo sapien
gaatgaagatcctcaaccaggctga

SEQ ID NO: 1752119 - DNA, 25 bp, Homo sapien
gctacgactcagtaaggaacccagt

SEQ ID NO: 1752120 - DNA, 25 bp, Homo sapien
gagtcttgaccaacaactgagccag

SEQ ID NO: 1752121 - DNA, 25 bp, Homo sapien
tcccatcaggtcagagcatagcagg

SEQ ID NO: 1752122 - DNA, 25 bp, Homo sapien
gatcttaaccctactaggatgttaa

SEQ ID NO: 1752123 - DNA, 25 bp, Homo sapien
ccaactgagatcttaaccctactag

SEQ ID NO: 1752124 - DNA, 25 bp, Homo sapien
ctgagatcttaaccctactaggatg

SEQ ID NO: 1752125 - DNA, 25 bp, Homo sapien
tggcctccaactgagatcttaaccc

SEQ ID NO: 1752126 - DNA, 25 bp, Homo sapien
tgtctctgactagctctgtctctgg

SEQ ID NO: 1752127 - DNA, 25 bp, Homo sapien
cgtggaagagatcgtttaggtcagc

SEQ ID NO: 1752128 - DNA, 25 bp, Homo sapien
ggagtcacttgacccattcgagtta

SEQ ID NO: 1752129 - DNA, 25 bp, Homo sapien
tataatggacttcgttgggctccaa

SEQ ID NO: 1752130 - DNA, 25 bp, Homo sapien
ttgcattccatggatgaccacatga

SEQ ID NO: 1752131 - DNA, 25 bp, Homo sapien
gctcttgtcctcattgcacattgca

SEQ ID NO: 1752132 - DNA, 25 bp, Homo sapien
acatgaatatcaacgacagttgcca

SEQ ID NO: 1752133 - DNA, 25 bp, Homo sapien
tccatggatgaccacatgaatatca

SEQ ID NO: 1752134 - DNA, 25 bp, Homo sapien
tgctttcattcctactctgtaacta

SEQ ID NO: 1752135 - DNA, 25 bp, Homo sapien
gctttcattcctactctgtaactaa

SEQ ID NO: 1752136 - DNA, 25 bp, Homo sapien
ctttcattcctactctgtaactaag

SEQ ID NO: 1752137 - DNA, 25 bp, Homo sapien
tgttgaactgcagaacactgatatg

SEQ ID NO: 1752138 - DNA, 25 bp, Homo sapien
cattctgtggcttaaaagtgtatgc

SEQ ID NO: 1752139 - DNA, 25 bp, Homo sapien
tggatggctttgacctcaataagca

SEQ ID NO: 1752140 - DNA, 25 bp, Homo sapien
tggagttccccattggatggctttg

SEQ ID NO: 1752141 - DNA, 25 bp, Homo sapien
aacagtgtggcgattcctcaaagac

SEQ ID NO: 1752142 - DNA, 25 bp, Homo sapien
agtgtaaattagtttgacctttgtg

SEQ ID NO: 1752143 - DNA, 25 bp, Homo sapien
agtttgacctttgtggaaaacagtg

SEQ ID NO: 1752144 - DNA, 25 bp, Homo sapien
aaaacagtgtggcgattcctcaaag

SEQ ID NO: 1752145 - DNA, 25 bp, Homo sapien
tgtaaatggactaaatgctccaatt

SEQ ID NO: 1752146 - DNA, 25 bp, Homo sapien
ctaacaagcagatctctcggcagaa

SEQ ID NO: 1752147 - DNA, 25 bp, Homo sapien
actctacaatccagaagagagtggg

SEQ ID NO: 1752148 - DNA, 25 bp, Homo sapien
aatgtaaatggactaaatgctccaa

SEQ ID NO: 1752149 - DNA, 25 bp, Homo sapien
aagtggtccatgctgaatcttctcc

SEQ ID NO: 1752150 - DNA, 25 bp, Homo sapien
agcttgggatcatcagacagcccta

SEQ ID NO: 1752151 - DNA, 25 bp, Homo sapien
ttcagaaccgctcttctcttcaggt

SEQ ID NO: 1752152 - DNA, 25 bp, Homo sapien
tcagacagccctaaaagaaagctag

SEQ ID NO: 1752153 - DNA, 25 bp, Homo sapien
aagaaagaagggaggcaatttgctt

SEQ ID NO: 1752154 - DNA, 25 bp, Homo sapien
gaagggaggcaatttgcttacaata

SEQ ID NO: 1752155 - DNA, 25 bp, Homo sapien
gggacaatgagtacagtaatgaatt

SEQ ID NO: 1752156 - DNA, 25 bp, Homo sapien
atctgggacaatgagtacagtaatg

SEQ ID NO: 1752157 - DNA, 25 bp, Homo sapien
gctgttctgcaagttgagaccacac

SEQ ID NO: 1752158 - DNA, 25 bp, Homo sapien
ctggcctgtttcacactgacactca

SEQ ID NO: 1752159 - DNA, 25 bp, Homo sapien
actcattgtaacttagctgttctgc

SEQ ID NO: 1752160 - DNA, 25 bp, Homo sapien
gttctgcaagttgagaccacaccat

SEQ ID NO: 1752161 - DNA, 25 bp, Homo sapien
gtctgaatcagtatccaaaatatgg

SEQ ID NO: 1752162 - DNA, 25 bp, Homo sapien
gctgtttctccaatagtcaggattc

SEQ ID NO: 1752163 - DNA, 25 bp, Homo sapien
gtttctccaatagtcaggattcaag

SEQ ID NO: 1752164 - DNA, 25 bp, Homo sapien
tatatggtctgaatcagtatccaaa

SEQ ID NO: 1752165 - DNA, 25 bp, Homo sapien
ggattttgagtccacaccaagcctc

SEQ ID NO: 1752166 - DNA, 25 bp, Homo sapien
aagaggaaatagtgcaggattttga

SEQ ID NO: 1752167 - DNA, 25 bp, Homo sapien
agaagaggaaatagtgcaggatttt

SEQ ID NO: 1752168 - DNA, 25 bp, Homo sapien
aggattttgagtccacaccaagcct

SEQ ID NO: 1752169 - DNA, 25 bp, Homo sapien
gtcattaaactatctgtagcatttt

SEQ ID NO: 1752170 - DNA, 25 bp, Homo sapien
aacttctcttatacaatgagccaga

SEQ ID NO: 1752171 - DNA, 25 bp, Homo sapien
acttctcttatacaatgagccagaa

SEQ ID NO: 1752172 - DNA, 25 bp, Homo sapien
gtcaggaattcacaacggcacaagt

SEQ ID NO: 1752173 - DNA, 25 bp, Homo sapien
tcacaacggcacaagttctctagtc

SEQ ID NO: 1752174 - DNA, 25 bp, Homo sapien
aattcacaacggcacaagttctcta

SEQ ID NO: 1752175 - DNA, 25 bp, Homo sapien
acggcacaagttctctagtctaccc

SEQ ID NO: 1752176 - DNA, 25 bp, Homo sapien
gtataaggccatggaaatgacacag

SEQ ID NO: 1752177 - DNA, 25 bp, Homo sapien
tgtataaggccatggaaatgacaca

SEQ ID NO: 1752178 - DNA, 25 bp, Homo sapien
ttgtttggccaaggatctgactgtg

SEQ ID NO: 1752179 - DNA, 25 bp, Homo sapien
ctctggtggatgttgacagcatggc

SEQ ID NO: 1752180 - DNA, 25 bp, Homo sapien
tttgaaatgaactgcaatccgcgtt

SEQ ID NO: 1752181 - DNA, 25 bp, Homo sapien
tctgctctctggtggatgttgacag

SEQ ID NO: 1752182 - DNA, 25 bp, Homo sapien
tttttgttaaggcttccattaatgc

SEQ ID NO: 1752183 - DNA, 25 bp, Homo sapien
ttttgttaaggcttccattaatgca

SEQ ID NO: 1752184 - DNA, 25 bp, Homo sapien
tttgttaaggcttccattaatgcac

SEQ ID NO: 1752185 - DNA, 25 bp, Homo sapien
cctggagccactatgccactatctt

SEQ ID NO: 1752186 - DNA, 25 bp, Homo sapien
aagtacagccagtggcattgtttct

SEQ ID NO: 1752187 - DNA, 25 bp, Homo sapien
tgacatctccgttccaccagaaatt

SEQ ID NO: 1752188 - DNA, 25 bp, Homo sapien
acatggctttgaaagtacagccagt

SEQ ID NO: 1752189 - DNA, 25 bp, Homo sapien
tgtcgcatcgtgtcaggtcacagct

SEQ ID NO: 1752190 - DNA, 25 bp, Homo sapien
tcaagtaaatgactatccagaggat

SEQ ID NO: 1752191 - DNA, 25 bp, Homo sapien
gactatccagaggataattaggcac

SEQ ID NO: 1752192 - DNA, 25 bp, Homo sapien
gcactgtgctgtcgcatcgtgtcag

SEQ ID NO: 1752193 - DNA, 25 bp, Homo sapien
gcgccagccgtaggcaatggataaa

SEQ ID NO: 1752194 - DNA, 25 bp, Homo sapien
ttagcgccagccgtaggcaatggat

SEQ ID NO: 1752195 - DNA, 25 bp, Homo sapien
ggataaaatgaactagttagcaatt

SEQ ID NO: 1752196 - DNA, 25 bp, Homo sapien
ccgtaggcaatggataaaatgaact

SEQ ID NO: 1752197 - DNA, 25 bp, Homo sapien
ggcatgtgggctagatgtttaaatc

SEQ ID NO: 1752198 - DNA, 25 bp, Homo sapien
tctgcatagattcgagccaattaga

SEQ ID NO: 1752199 - DNA, 25 bp, Homo sapien
tccaatccagttgagagtgacccct

SEQ ID NO: 1752200 - DNA, 25 bp, Homo sapien
tgtcagagaggccaaaaggtgcccc

SEQ ID NO: 1752201 - DNA, 25 bp, Homo sapien
tcactaccctctagacgcttctgca

SEQ ID NO: 1752202 - DNA, 25 bp, Homo sapien
cactaccctctagacgcttctgcat

SEQ ID NO: 1752203 - DNA, 25 bp, Homo sapien
ttctcactaccctctagacgcttct

SEQ ID NO: 1752204 - DNA, 25 bp, Homo sapien
tctcactaccctctagacgcttctg

SEQ ID NO: 1752205 - DNA, 25 bp, Homo sapien
tggttccacagttactcttttctcc

SEQ ID NO: 1752206 - DNA, 25 bp, Homo sapien
cataggggttcacaataggcatttg

SEQ ID NO: 1752207 - DNA, 25 bp, Homo sapien
ttggttccacagttactcttttctc

SEQ ID NO: 1752208 - DNA, 25 bp, Homo sapien
gcacataggggttcacaataggcat

SEQ ID NO: 1752209 - DNA, 25 bp, Homo sapien
gggttcccagtaggaatagctcttg

SEQ ID NO: 1752210 - DNA, 25 bp, Homo sapien
tgggggttcccagtaggaatagctc

SEQ ID NO: 1752211 - DNA, 25 bp, Homo sapien
tgcagaaccctggtctggagtgtga

SEQ ID NO: 1752212 - DNA, 25 bp, Homo sapien
ccatggtctagcatcaaagcacaca

SEQ ID NO: 1752213 - DNA, 25 bp, Homo sapien
acttgcagaacagccatggtctagc

SEQ ID NO: 1752214 - DNA, 25 bp, Homo sapien
ctcaacagtggccacttcttgggca

SEQ ID NO: 1752215 - DNA, 25 bp, Homo sapien
cattcggctaactgctagaaccgcc

SEQ ID NO: 1752216 - DNA, 25 bp, Homo sapien
tagaaccgccatggtgtatcgctgc

SEQ ID NO: 1752217 - DNA, 25 bp, Homo sapien
caccagccatcccatttgggtgata

SEQ ID NO: 1752218 - DNA, 25 bp, Homo sapien
tgttttccccagtaagtaggtgcca

SEQ ID NO: 1752219 - DNA, 25 bp, Homo sapien
agatccaatgcttgaaattcttgct

SEQ ID NO: 1752220 - DNA, 25 bp, Homo sapien
cagcagtctgaagtctgaagaaaaa

SEQ ID NO: 1752221 - DNA, 25 bp, Homo sapien
gaagaaaaatactcattttatgatg

SEQ ID NO: 1752222 - DNA, 25 bp, Homo sapien
aaatactcattttatgatgccagca

SEQ ID NO: 1752223 - DNA, 25 bp, Homo sapien
gcccagcttgcagagcaaattgccc

SEQ ID NO: 1752224 - DNA, 25 bp, Homo sapien
tgctaggtgattttatcaagttctc

SEQ ID NO: 1752225 - DNA, 25 bp, Homo sapien
tctaccgagattgtctgtgctaggt

SEQ ID NO: 1752226 - DNA, 25 bp, Homo sapien
catccctattcccaggggaggctgc

SEQ ID NO: 1752227 - DNA, 25 bp, Homo sapien
caaagactgctttcagtaggggcaa

SEQ ID NO: 1752228 - DNA, 25 bp, Homo sapien
cacctgcatctggtgcagaagccca

SEQ ID NO: 1752229 - DNA, 25 bp, Homo sapien
tcagtgatggccaaataattggttg

SEQ ID NO: 1752230 - DNA, 25 bp, Homo sapien
cagatgccctgaacaatgctccaaa

SEQ ID NO: 1752231 - DNA, 25 bp, Homo sapien
tctgtcaaccaactttggaactgga

SEQ ID NO: 1752232 - DNA, 25 bp, Homo sapien
gttctgtcaaccaactttggaactg

SEQ ID NO: 1752233 - DNA, 25 bp, Homo sapien
ttgttctgtcaaccaactttggaac

SEQ ID NO: 1752234 - DNA, 25 bp, Homo sapien
tgtcaaccaactttggaactggagc

SEQ ID NO: 1752235 - DNA, 25 bp, Homo sapien
gggcaaagaaggcaaatgaactatg

SEQ ID NO: 1752236 - DNA, 25 bp, Homo sapien
cagggcaaagaaggcaaatgaacta

SEQ ID NO: 1752237 - DNA, 25 bp, Homo sapien
gcagggcaaagaaggcaaatgaact

SEQ ID NO: 1752238 - DNA, 25 bp, Homo sapien
caaagaaggcaaatgaactatgaaa

SEQ ID NO: 1752239 - DNA, 25 bp, Homo sapien
aatgacattgtagacttcactcggg

SEQ ID NO: 1752240 - DNA, 25 bp, Homo sapien
gggtctctgagtccttcttcagagt

SEQ ID NO: 1752241 - DNA, 25 bp, Homo sapien
ttccattgcataggccagtaagggt

SEQ ID NO: 1752242 - DNA, 25 bp, Homo sapien
cagtaagggtcattaaacaccaatg

SEQ ID NO: 1752243 - DNA, 25 bp, Homo sapien
aaagcaggcagtgcataaaagtgcc

SEQ ID NO: 1752244 - DNA, 25 bp, Homo sapien
gcctatctactgcattagaacatga

SEQ ID NO: 1752245 - DNA, 25 bp, Homo sapien
caaaccctaaggatgtaatcaaatt

SEQ ID NO: 1752246 - DNA, 25 bp, Homo sapien
gccaaagaaccatctatttctgaag

SEQ ID NO: 1752247 - DNA, 25 bp, Homo sapien
cagatagtcagcttggtaactgcca

SEQ ID NO: 1752248 - DNA, 25 bp, Homo sapien
gatattacatacgaggagagaaagg

SEQ ID NO: 1752249 - DNA, 25 bp, Homo sapien
cccaggagtgcgtgacatgtgttct

SEQ ID NO: 1752250 - DNA, 25 bp, Homo sapien
aaaagagccagcacaacagcttacc

SEQ ID NO: 1752251 - DNA, 25 bp, Homo sapien
tacagagttcttttgaaagtacttg

SEQ ID NO: 1752252 - DNA, 25 bp, Homo sapien
tttatgttaaaatgtacagagttct

SEQ ID NO: 1752253 - DNA, 25 bp, Homo sapien
ccaaaatggcccaacataatttatt

SEQ ID NO: 1752254 - DNA, 25 bp, Homo sapien
atgttaaatttagccaaataagtat

SEQ ID NO: 1752255 - DNA, 25 bp, Homo sapien
tagtcctgttcatgtagcagacacc

SEQ ID NO: 1752256 - DNA, 25 bp, Homo sapien
tctttggagaccagtgacatagaca

SEQ ID NO: 1752257 - DNA, 25 bp, Homo sapien
taattctaagaacaatcctgcgaag

SEQ ID NO: 1752258 - DNA, 25 bp, Homo sapien
caggtgctttgtctccataatctca

SEQ ID NO: 1752259 - DNA, 25 bp, Homo sapien
tacatgactattgcgctagattatg

SEQ ID NO: 1752260 - DNA, 25 bp, Homo sapien
gggcatgaccatagtacttgacaaa

SEQ ID NO: 1752261 - DNA, 25 bp, Homo sapien
aaatctattggtagcctaagcaaca

SEQ ID NO: 1752262 - DNA, 25 bp, Homo sapien
tgcatgcttagcattgggcatgacc

SEQ ID NO: 1752263 - DNA, 25 bp, Homo sapien
tatttctcactaggatatcagcttt

SEQ ID NO: 1752264 - DNA, 25 bp, Homo sapien
gccactttggccgtattcacgagcc

SEQ ID NO: 1752265 - DNA, 25 bp, Homo sapien
tagcacatagcctagactccactag

SEQ ID NO: 1752266 - DNA, 25 bp, Homo sapien
tatcagctttatgagggtagggaca

SEQ ID NO: 1752267 - DNA, 25 bp, Homo sapien
cagtccttacaccaacccaggagtt

SEQ ID NO: 1752268 - DNA, 25 bp, Homo sapien
tagtgttccagtccttacaccaacc

SEQ ID NO: 1752269 - DNA, 25 bp, Homo sapien
gtgaaacacctccatcagcaacatc

SEQ ID NO: 1752270 - DNA, 25 bp, Homo sapien
aaatgtgaaacacctccatcagcaa

SEQ ID NO: 1752271 - DNA, 25 bp, Homo sapien
aggaagatccagagacggttcccta

SEQ ID NO: 1752272 - DNA, 25 bp, Homo sapien
gaagatccagagacggttccctacc

SEQ ID NO: 1752273 - DNA, 25 bp, Homo sapien
tcacaggtacaaatgagcataggaa

SEQ ID NO: 1752274 - DNA, 25 bp, Homo sapien
ccattcacaggtacaaatgagcata

SEQ ID NO: 1752275 - DNA, 25 bp, Homo sapien
gttctgtggaaaaaactgataccca

SEQ ID NO: 1752276 - DNA, 25 bp, Homo sapien
ttctgcatcggttctgtggaaaaaa

SEQ ID NO: 1752277 - DNA, 25 bp, Homo sapien
tagtttctgcatcggttctgtggaa

SEQ ID NO: 1752278 - DNA, 25 bp, Homo sapien
gcatcggttctgtggaaaaaactga

SEQ ID NO: 1752279 - DNA, 25 bp, Homo sapien
ttcacttccgagctacatggtaagc

SEQ ID NO: 1752280 - DNA, 25 bp, Homo sapien
gaagctgctcctcatgtcattgcac

SEQ ID NO: 1752281 - DNA, 25 bp, Homo sapien
tgtcttaggtccagttccctaggag

SEQ ID NO: 1752282 - DNA, 25 bp, Homo sapien
catggtaagcttgatgggagcagaa

SEQ ID NO: 1752283 - DNA, 25 bp, Homo sapien
tttccacttccacagtcatcttgtc

SEQ ID NO: 1752284 - DNA, 25 bp, Homo sapien
tcaatttccacttccacagtcatct

SEQ ID NO: 1752285 - DNA, 25 bp, Homo sapien
caatttccacttccacagtcatctt

SEQ ID NO: 1752286 - DNA, 25 bp, Homo sapien
ccacttccacagtcatcttgtcttt

SEQ ID NO: 1752287 - DNA, 25 bp, Homo sapien
ggttgtgaaggctctccatgtggct

SEQ ID NO: 1752288 - DNA, 25 bp, Homo sapien
gctccccgacagattatagggcttc

SEQ ID NO: 1752289 - DNA, 25 bp, Homo sapien
taagtcatcaaatgcaacccacaat

SEQ ID NO: 1752290 - DNA, 25 bp, Homo sapien
gaagtatcatgtagccttccaatgc

SEQ ID NO: 1752291 - DNA, 25 bp, Homo sapien
gatagaccattagccagactagcaa

SEQ ID NO: 1752292 - DNA, 25 bp, Homo sapien
gaccattagccagactagcaaagaa

SEQ ID NO: 1752293 - DNA, 25 bp, Homo sapien
agatagagataggaaaaacccttga

SEQ ID NO: 1752294 - DNA, 25 bp, Homo sapien
tagatagaccattagccagactagc

SEQ ID NO: 1752295 - DNA, 25 bp, Homo sapien
catctgggtgtatacttggtgcaag

SEQ ID NO: 1752296 - DNA, 25 bp, Homo sapien
gctgtgaattgaatatgaagcgacc

SEQ ID NO: 1752297 - DNA, 25 bp, Homo sapien
gaattgaatatgaagcgacctaaca

SEQ ID NO: 1752298 - DNA, 25 bp, Homo sapien
cttctctttatagggctgtgaattg

SEQ ID NO: 1752299 - DNA, 25 bp, Homo sapien
cagtgggtgctgaggtaagagtttt

SEQ ID NO: 1752300 - DNA, 25 bp, Homo sapien
gaacagattactttctgacgatcaa

SEQ ID NO: 1752301 - DNA, 25 bp, Homo sapien
aagctcaacatgtccttggagagga

SEQ ID NO: 1752302 - DNA, 25 bp, Homo sapien
agtgaaccagtagggacaatgtaaa

SEQ ID NO: 1752303 - DNA, 25 bp, Homo sapien
cacaatttgtactggcatgccccca

SEQ ID NO: 1752304 - DNA, 25 bp, Homo sapien
tttgactgccaacctcctaaaaggc

SEQ ID NO: 1752305 - DNA, 25 bp, Homo sapien
catatgtcttgcaggtgatgcggga

SEQ ID NO: 1752306 - DNA, 25 bp, Homo sapien
ccatatggaaggttggacagtacca

SEQ ID NO: 1752307 - DNA, 25 bp, Homo sapien
agatccagacctcccaaccatatgg

SEQ ID NO: 1752308 - DNA, 25 bp, Homo sapien
tgtctttgggctgggactctctcct

SEQ ID NO: 1752309 - DNA, 25 bp, Homo sapien
ttctgctggctgattgctttccaag

SEQ ID NO: 1752310 - DNA, 25 bp, Homo sapien
tagagcatattgtacttgcagccct

SEQ ID NO: 1752311 - DNA, 25 bp, Homo sapien
gctaatttggtcagataactccaag

SEQ ID NO: 1752312 - DNA, 25 bp, Homo sapien
gactacagagcaagtagatgatgct

SEQ ID NO: 1752313 - DNA, 25 bp, Homo sapien
cagatcttgggtcttgaaagtatgt

SEQ ID NO: 1752314 - DNA, 25 bp, Homo sapien
tgtttccacctaaatgcctggcacc

SEQ ID NO: 1752315 - DNA, 25 bp, Homo sapien
aagtagatgatgctatgcatgtggg

SEQ ID NO: 1752316 - DNA, 25 bp, Homo sapien
ctagccataaaggatcaagccaagt

SEQ ID NO: 1752317 - DNA, 25 bp, Homo sapien
tccttgaagccatccatgacatcag

SEQ ID NO: 1752318 - DNA, 25 bp, Homo sapien
tcttcttgtgtatccattggtccaa

SEQ ID NO: 1752319 - DNA, 25 bp, Homo sapien
gacatcagaatccactggacatctg

SEQ ID NO: 1752320 - DNA, 25 bp, Homo sapien
ggcattcctgagtataagaattaag

SEQ ID NO: 1752321 - DNA, 25 bp, Homo sapien
ttcagttgatcataaggctcttccc

SEQ ID NO: 1752322 - DNA, 25 bp, Homo sapien
tgagtataagaattaagcagttttc

SEQ ID NO: 1752323 - DNA, 25 bp, Homo sapien
ttcctgagtataagaattaagcagt

SEQ ID NO: 1752324 - DNA, 25 bp, Homo sapien
ttagttgcagattacatattgccaa

SEQ ID NO: 1752325 - DNA, 25 bp, Homo sapien
cagattacatattgccaaaaaagaa

SEQ ID NO: 1752326 - DNA, 25 bp, Homo sapien
cagctctatgttttttagtatatca

SEQ ID NO: 1752327 - DNA, 25 bp, Homo sapien
cttaattgaattctttggtatgtta

SEQ ID NO: 1752328 - DNA, 25 bp, Homo sapien
tagtgacagtattaacagctagtat

SEQ ID NO: 1752329 - DNA, 25 bp, Homo sapien
tctgtagtgacagtattaacagcta

SEQ ID NO: 1752330 - DNA, 25 bp, Homo sapien
cttctgtagtgacagtattaacagc

SEQ ID NO: 1752331 - DNA, 25 bp, Homo sapien
tgtagtgacagtattaacagctagt

SEQ ID NO: 1752332 - DNA, 25 bp, Homo sapien
tgaagaaaagcgctgactcgaaagc

SEQ ID NO: 1752333 - DNA, 25 bp, Homo sapien
gcgctgactcgaaagctctgctgtc

SEQ ID NO: 1752334 - DNA, 25 bp, Homo sapien
tgacagccgctggatggattgagca

SEQ ID NO: 1752335 - DNA, 25 bp, Homo sapien
ctgtgacagccgctggatggattga

SEQ ID NO: 1752336 - DNA, 25 bp, Homo sapien
ctctatcggttttctcaccatatga

SEQ ID NO: 1752337 - DNA, 25 bp, Homo sapien
ttatcaaagatgcaaagagcatgca

SEQ ID NO: 1752338 - DNA, 25 bp, Homo sapien
ctatcggttttctcaccatatgaaa

SEQ ID NO: 1752339 - DNA, 25 bp, Homo sapien
gtatctgatgcacagcatggtgatt

SEQ ID NO: 1752340 - DNA, 25 bp, Homo sapien
ctgaaggtgcaaatatagaggtcac

SEQ ID NO: 1752341 - DNA, 25 bp, Homo sapien
tgaaggtgcaaatatagaggtcacc

SEQ ID NO: 1752342 - DNA, 25 bp, Homo sapien
agctgaaggtgcaaatatagaggtc

SEQ ID NO: 1752343 - DNA, 25 bp, Homo sapien
gaaggtgcaaatatagaggtcacct

SEQ ID NO: 1752344 - DNA, 25 bp, Homo sapien
tagtaacaaaaatatcaccacattc

SEQ ID NO: 1752345 - DNA, 25 bp, Homo sapien
agtctcatttcattggacatcagca

SEQ ID NO: 1752346 - DNA, 25 bp, Homo sapien
tcagcaccgtcaggagtttttctcc

SEQ ID NO: 1752347 - DNA, 25 bp, Homo sapien
caaattcttccagaacccagtctca

SEQ ID NO: 1752348 - DNA, 25 bp, Homo sapien
ttaaaatacggtcagccgcagagca

SEQ ID NO: 1752349 - DNA, 25 bp, Homo sapien
ccatgaatcatggtaggctactccg

SEQ ID NO: 1752350 - DNA, 25 bp, Homo sapien
aatgaaggattgaactgctaacggc

SEQ ID NO: 1752351 - DNA, 25 bp, Homo sapien
cagtaccaaaatgcctagaatgaag

SEQ ID NO: 1752352 - DNA, 25 bp, Homo sapien
aattactctacgtgatctctgacag

SEQ ID NO: 1752353 - DNA, 25 bp, Homo sapien
aatgcacaaccctttgacaagcagc

SEQ ID NO: 1752354 - DNA, 25 bp, Homo sapien
attcaattccctccgcccaatagga

SEQ ID NO: 1752355 - DNA, 25 bp, Homo sapien
tccgcccaataggattgttcctcca

SEQ ID NO: 1752356 - DNA, 25 bp, Homo sapien
ggcctcagcattctgacccaatgca

SEQ ID NO: 1752357 - DNA, 25 bp, Homo sapien
tgtaacagggaaaagctgctttgca

SEQ ID NO: 1752358 - DNA, 25 bp, Homo sapien
tacacctagcagtaattcctgagga

SEQ ID NO: 1752359 - DNA, 25 bp, Homo sapien
gagtgtgagttccagactctgtatg

SEQ ID NO: 1752360 - DNA, 25 bp, Homo sapien
gctttgcaaggattgctctaaattc

SEQ ID NO: 1752361 - DNA, 25 bp, Homo sapien
tatgtaaaattactcgaattaagag

SEQ ID NO: 1752362 - DNA, 25 bp, Homo sapien
aaattactcgaattaagagatgagg

SEQ ID NO: 1752363 - DNA, 25 bp, Homo sapien
gtaaaattactcgaattaagagatg

SEQ ID NO: 1752364 - DNA, 25 bp, Homo sapien
tgcttatgtaaaattactcgaatta

SEQ ID NO: 1752365 - DNA, 25 bp, Homo sapien
agataaaaatcctgatggtgttgaa

SEQ ID NO: 1752366 - DNA, 25 bp, Homo sapien
ttttctcctcgtccactctaatcat

SEQ ID NO: 1752367 - DNA, 25 bp, Homo sapien
gatggtgttgaataccattcttttc

SEQ ID NO: 1752368 - DNA, 25 bp, Homo sapien
cattcttttctcctcgtccactcta

SEQ ID NO: 1752369 - DNA, 25 bp, Homo sapien
gagaaatattgttgactacttgaag

SEQ ID NO: 1752370 - DNA, 25 bp, Homo sapien
acttgaagtaaaagttcatcctcgg

SEQ ID NO: 1752371 - DNA, 25 bp, Homo sapien
agttcatcctcggtgacagctgact

SEQ ID NO: 1752372 - DNA, 25 bp, Homo sapien
gaaagagaaatattgttgactactt

SEQ ID NO: 1752373 - DNA, 25 bp, Homo sapien
gaagtaatcttgagtgaacaggact

SEQ ID NO: 1752374 - DNA, 25 bp, Homo sapien
tgaacaggactagaagaggctggtg

SEQ ID NO: 1752375 - DNA, 25 bp, Homo sapien
catgaagtaatcttgagtgaacagg

SEQ ID NO: 1752376 - DNA, 25 bp, Homo sapien
tggtagaaacttaaaataagctgaa

SEQ ID NO: 1752377 - DNA, 25 bp, Homo sapien
ctatcaaagggttccagatcaatcc

SEQ ID NO: 1752378 - DNA, 25 bp, Homo sapien
caaagggttccagatcaatcctgtg

SEQ ID NO: 1752379 - DNA, 25 bp, Homo sapien
caatcctgtgtggtaagccattgac

SEQ ID NO: 1752380 - DNA, 25 bp, Homo sapien
agatcaatcctgtgtggtaagccat

SEQ ID NO: 1752381 - DNA, 25 bp, Homo sapien
gtccaatgtaagaaacactctttgt

SEQ ID NO: 1752382 - DNA, 25 bp, Homo sapien
cactctttgttaatgagatttgaag

SEQ ID NO: 1752383 - DNA, 25 bp, Homo sapien
tgcctagtccaatgtaagaaacact

SEQ ID NO: 1752384 - DNA, 25 bp, Homo sapien
aagaatagatgtccctgatccatcc

SEQ ID NO: 1752385 - DNA, 25 bp, Homo sapien
cactggaaagaccccatttatcttt

SEQ ID NO: 1752386 - DNA, 25 bp, Homo sapien
cttcactggaaagaccccatttatc

SEQ ID NO: 1752387 - DNA, 25 bp, Homo sapien
tggaaagaccccatttatctttcca

SEQ ID NO: 1752388 - DNA, 25 bp, Homo sapien
ttcactggaaagaccccatttatct

SEQ ID NO: 1752389 - DNA, 25 bp, Homo sapien
tgaaacactctttgaattcttcctc

SEQ ID NO: 1752390 - DNA, 25 bp, Homo sapien
ttacagaaacactttcaccaaagga

SEQ ID NO: 1752391 - DNA, 25 bp, Homo sapien
gatgatgaatagacccattggatga

SEQ ID NO: 1752392 - DNA, 25 bp, Homo sapien
caccaaaggacgatgatgaatagac

SEQ ID NO: 1752393 - DNA, 25 bp, Homo sapien
cattggatgaaacctttaccactgg

SEQ ID NO: 1752394 - DNA, 25 bp, Homo sapien
aggttccgtcatccccctcgcaggg

SEQ ID NO: 1752395 - DNA, 25 bp, Homo sapien
catttaaatacctatggtcatattg

SEQ ID NO: 1752396 - DNA, 25 bp, Homo sapien
tatggtcatattgaaacgggaaagg

SEQ ID NO: 1752397 - DNA, 25 bp, Homo sapien
aatacctatggtcatattgaaacgg

SEQ ID NO: 1752398 - DNA, 25 bp, Homo sapien
ccatctggagatttatactgaggga

SEQ ID NO: 1752399 - DNA, 25 bp, Homo sapien
gaaggtctgtagttatatctcatgt

SEQ ID NO: 1752400 - DNA, 25 bp, Homo sapien
taaacccgtcttccatcactagaat

SEQ ID NO: 1752401 - DNA, 25 bp, Homo sapien
tcatgagggatgttggcccgtagct

SEQ ID NO: 1752402 - DNA, 25 bp, Homo sapien
gccaggattcccgtagtgaaacaat

SEQ ID NO: 1752403 - DNA, 25 bp, Homo sapien
tcccgtagtgaaacaattgacttgg

SEQ ID NO: 1752404 - DNA, 25 bp, Homo sapien
ggccaagccaggattcccgtagtga

SEQ ID NO: 1752405 - DNA, 25 bp, Homo sapien
ggattcccgtagtgaaacaattgac

SEQ ID NO: 1752406 - DNA, 25 bp, Homo sapien
tatcataaagcccaatatcgccttc

SEQ ID NO: 1752407 - DNA, 25 bp, Homo sapien
tattgtatcataaagcccaatatcg

SEQ ID NO: 1752408 - DNA, 25 bp, Homo sapien
ttgtatcataaagcccaatatcgcc

SEQ ID NO: 1752409 - DNA, 25 bp, Homo sapien
tcataaagcccaatatcgccttcat

SEQ ID NO: 1752410 - DNA, 25 bp, Homo sapien
cagatacttcagaggatctttctcc

SEQ ID NO: 1752411 - DNA, 25 bp, Homo sapien
agatacttcagaggatctttctcca

SEQ ID NO: 1752412 - DNA, 25 bp, Homo sapien
gcagatacttcagaggatctttctc

SEQ ID NO: 1752413 - DNA, 25 bp, Homo sapien
tgcagatacttcagaggatctttct

SEQ ID NO: 1752414 - DNA, 25 bp, Homo sapien
caatctcagtgttctacggtaagca

SEQ ID NO: 1752415 - DNA, 25 bp, Homo sapien
gctagactggaaagtactgcattca

SEQ ID NO: 1752416 - DNA, 25 bp, Homo sapien
gctgtaacttcacagtgtttggaaa

SEQ ID NO: 1752417 - DNA, 25 bp, Homo sapien
gcattcagtgctatcttctacaaac

SEQ ID NO: 1752418 - DNA, 25 bp, Homo sapien
gccagctatgcaaacatagcactgg

SEQ ID NO: 1752419 - DNA, 25 bp, Homo sapien
tgccatatcggtgaagccagctatg

SEQ ID NO: 1752420 - DNA, 25 bp, Homo sapien
ttcttttgtgttaacagtgccatat

SEQ ID NO: 1752421 - DNA, 25 bp, Homo sapien
tggcttggtgttgctttttatggtt

SEQ ID NO: 1752422 - DNA, 25 bp, Homo sapien
cctgctttcctaacacaaacaagga

SEQ ID NO: 1752423 - DNA, 25 bp, Homo sapien
cttccatcaaaacgagttcctgctt

SEQ ID NO: 1752424 - DNA, 25 bp, Homo sapien
catcaaaacgagttcctgctttcct

SEQ ID NO: 1752425 - DNA, 25 bp, Homo sapien
caaacaaggattgctttgtcacaca

SEQ ID NO: 1752426 - DNA, 25 bp, Homo sapien
taaatgcgagcggtagtcaacatac

SEQ ID NO: 1752427 - DNA, 25 bp, Homo sapien
ttttgtagaattctgcagtcaccac

SEQ ID NO: 1752428 - DNA, 25 bp, Homo sapien
tgacactccacatcaagttccggat

SEQ ID NO: 1752429 - DNA, 25 bp, Homo sapien
tatggattagctgaacttgatgccc

SEQ ID NO: 1752430 - DNA, 25 bp, Homo sapien
tgtaccgaacatccatcactacctg

SEQ ID NO: 1752431 - DNA, 25 bp, Homo sapien
ttttgggtatcttgtaccgaacatc

SEQ ID NO: 1752432 - DNA, 25 bp, Homo sapien
gggtatcttgtaccgaacatccatc

SEQ ID NO: 1752433 - DNA, 25 bp, Homo sapien
tatcttgtaccgaacatccatcact

SEQ ID NO: 1752434 - DNA, 25 bp, Homo sapien
ttgccttgcttctgttggacacagg

SEQ ID NO: 1752435 - DNA, 25 bp, Homo sapien
gttggacacaggctttgctaatgca

SEQ ID NO: 1752436 - DNA, 25 bp, Homo sapien
caggctttgctaatgcagctttgct

SEQ ID NO: 1752437 - DNA, 25 bp, Homo sapien
atttctaaataggcaataatctgca

SEQ ID NO: 1752438 - DNA, 25 bp, Homo sapien
ctggccacagggtgatattcttcag

SEQ ID NO: 1752439 - DNA, 25 bp, Homo sapien
gagtatttgtgaaacaagctccaaa

SEQ ID NO: 1752440 - DNA, 25 bp, Homo sapien
tgccattcatgattcctggccacag

SEQ ID NO: 1752441 - DNA, 25 bp, Homo sapien
gatttggggaactcgcagtgctttt

SEQ ID NO: 1752442 - DNA, 25 bp, Homo sapien
catagatcttggcaatggttgctgt

SEQ ID NO: 1752443 - DNA, 25 bp, Homo sapien
ctcctgcccttgcatagatcttggc

SEQ ID NO: 1752444 - DNA, 25 bp, Homo sapien
agatcttggcaatggttgctgtttc

SEQ ID NO: 1752445 - DNA, 25 bp, Homo sapien
tcagtgccaatttagtaaaggcagt

SEQ ID NO: 1752446 - DNA, 25 bp, Homo sapien
gttaaatcaagtagtacatcaaata

SEQ ID NO: 1752447 - DNA, 25 bp, Homo sapien
catttggaagcatagatgttaaatc

SEQ ID NO: 1752448 - DNA, 25 bp, Homo sapien
taataaacatttggaagcatagatg

SEQ ID NO: 1752449 - DNA, 25 bp, Homo sapien
agatgttaaatcaagtagtacatca

SEQ ID NO: 1752450 - DNA, 25 bp, Homo sapien
aattgtaatagatttctcgtagatg

SEQ ID NO: 1752451 - DNA, 25 bp, Homo sapien
ttctcgtagatgtttagcagacaga

SEQ ID NO: 1752452 - DNA, 25 bp, Homo sapien
cataaaaggaccgagttagagtctt

SEQ ID NO: 1752453 - DNA, 25 bp, Homo sapien
cgtagatgtttagcagacagaaaaa

SEQ ID NO: 1752454 - DNA, 25 bp, Homo sapien
ctgtggtctaaaggtgcccctagcc

SEQ ID NO: 1752455 - DNA, 25 bp, Homo sapien
tgtggtctaaaggtgcccctagcct

SEQ ID NO: 1752456 - DNA, 25 bp, Homo sapien
gctgtggtctaaaggtgcccctagc

SEQ ID NO: 1752457 - DNA, 25 bp, Homo sapien
tggtctaaaggtgcccctagcctta

SEQ ID NO: 1752458 - DNA, 25 bp, Homo sapien
agttcacaatcctttgaaaaaccag

SEQ ID NO: 1752459 - DNA, 25 bp, Homo sapien
ggaacttgtttactattgctaagat

SEQ ID NO: 1752460 - DNA, 25 bp, Homo sapien
acttttaagtcctgatatactactg

SEQ ID NO: 1752461 - DNA, 25 bp, Homo sapien
tactactgaaagaaagttcacaatc

SEQ ID NO: 1752462 - DNA, 25 bp, Homo sapien
tgctcaataagagtcagagtggcag

SEQ ID NO: 1752463 - DNA, 25 bp, Homo sapien
gctcaataagagtcagagtggcagc

SEQ ID NO: 1752464 - DNA, 25 bp, Homo sapien
ctcaataagagtcagagtggcagca

SEQ ID NO: 1752465 - DNA, 25 bp, Homo sapien
tcaataagagtcagagtggcagcaa

SEQ ID NO: 1752466 - DNA, 25 bp, Homo sapien
cagagataattgatttcaggacaga

SEQ ID NO: 1752467 - DNA, 25 bp, Homo sapien
tgatttcaggacagatgtggttctt

SEQ ID NO: 1752468 - DNA, 25 bp, Homo sapien
ggttcttgatattgcccgaattcca

SEQ ID NO: 1752469 - DNA, 25 bp, Homo sapien
tattgcccgaattccaaactcttaa

SEQ ID NO: 1752470 - DNA, 25 bp, Homo sapien
ttttctgcagagtcttcaacaagat

SEQ ID NO: 1752471 - DNA, 25 bp, Homo sapien
agtaagtaagtctccaacctgtggc

SEQ ID NO: 1752472 - DNA, 25 bp, Homo sapien
cagtgtgggcaaaacaatcaagtgt

SEQ ID NO: 1752473 - DNA, 25 bp, Homo sapien
aacaatcaagtgttgcttagaaatt

SEQ ID NO: 1752474 - DNA, 25 bp, Homo sapien
gaatgtaatttagtcgcaccagcgg

SEQ ID NO: 1752475 - DNA, 25 bp, Homo sapien
actaaaagcgctggccccatgtgcg

SEQ ID NO: 1752476 - DNA, 25 bp, Homo sapien
aaggcacctggcgacgactaaaagc

SEQ ID NO: 1752477 - DNA, 25 bp, Homo sapien
gatcacgacagttctaagctgtggc

SEQ ID NO: 1752478 - DNA, 25 bp, Homo sapien
tgaacgcttttgtgcaaaacaatag

SEQ ID NO: 1752479 - DNA, 25 bp, Homo sapien
gcttttgtgcaaaacaatagtggag

SEQ ID NO: 1752480 - DNA, 25 bp, Homo sapien
ttttgtgcaaaacaatagtggaggt

SEQ ID NO: 1752481 - DNA, 25 bp, Homo sapien
cttttgaacgcttttgtgcaaaaca

SEQ ID NO: 1752482 - DNA, 25 bp, Homo sapien
ctcccgtgaccctgatgcagcttga

SEQ ID NO: 1752483 - DNA, 25 bp, Homo sapien
tcacgatattattgttgactgtgct

SEQ ID NO: 1752484 - DNA, 25 bp, Homo sapien
actgttctattgtgcagtctcacac

SEQ ID NO: 1752485 - DNA, 25 bp, Homo sapien
tgtgctaataaaacacctcccgtga

SEQ ID NO: 1752486 - DNA, 25 bp, Homo sapien
ggagtctgtctttcacggaagctga

SEQ ID NO: 1752487 - DNA, 25 bp, Homo sapien
tgtgaactacatcaggaactgtccc

SEQ ID NO: 1752488 - DNA, 25 bp, Homo sapien
gagctctgggagattcggaatactg

SEQ ID NO: 1752489 - DNA, 25 bp, Homo sapien
tggcctagtgccaggttcaggagct

SEQ ID NO: 1752490 - DNA, 25 bp, Homo sapien
tagacactctaggttctactagctg

SEQ ID NO: 1752491 - DNA, 25 bp, Homo sapien
ttacagcgtcatttagagacttggc

SEQ ID NO: 1752492 - DNA, 25 bp, Homo sapien
tagcacagagcctagtacaaagtaa

SEQ ID NO: 1752493 - DNA, 25 bp, Homo sapien
tctgtatcttgcaatgtgacaatgc

SEQ ID NO: 1752494 - DNA, 25 bp, Homo sapien
tgttgctgctctctagacccctaga

SEQ ID NO: 1752495 - DNA, 25 bp, Homo sapien
tattgtggctttaatgactgagaca

SEQ ID NO: 1752496 - DNA, 25 bp, Homo sapien
tctgatattgcctatctcttccctg

SEQ ID NO: 1752497 - DNA, 25 bp, Homo sapien
cccctagagaggcaattctgatctg

SEQ ID NO: 1752498 - DNA, 25 bp, Homo sapien
caaagttgtattccgcctgtcagca

SEQ ID NO: 1752499 - DNA, 25 bp, Homo sapien
tgaaaaactgtctctctgaacacgg

SEQ ID NO: 1752500 - DNA, 25 bp, Homo sapien
gagtcatgattcacttttcctagga

SEQ ID NO: 1752501 - DNA, 25 bp, Homo sapien
catatttgcatgagtctgtacctaa

SEQ ID NO: 1752502 - DNA, 25 bp, Homo sapien
catgaaatggacgagatgaagcccc

SEQ ID NO: 1752503 - DNA, 25 bp, Homo sapien
ggacgagatgaagcccctttgtcac

SEQ ID NO: 1752504 - DNA, 25 bp, Homo sapien
gagtaggtcgacacaggagcatgaa

SEQ ID NO: 1752505 - DNA, 25 bp, Homo sapien
tgtgactcccgcagatacccttaaa

SEQ ID NO: 1752506 - DNA, 25 bp, Homo sapien
gctgcctgatttacacaccctttga

SEQ ID NO: 1752507 - DNA, 25 bp, Homo sapien
catccttcccctgctacatctgctg

SEQ ID NO: 1752508 - DNA, 25 bp, Homo sapien
ttcccctgctacatctgctgcctga

SEQ ID NO: 1752509 - DNA, 25 bp, Homo sapien
catatctcattaggtaactctccat

SEQ ID NO: 1752510 - DNA, 25 bp, Homo sapien
ggatacagaggctttgtgtgtttaa

SEQ ID NO: 1752511 - DNA, 25 bp, Homo sapien
aagggatacagaggctttgtgtgtt

SEQ ID NO: 1752512 - DNA, 25 bp, Homo sapien
agggatacagaggctttgtgtgttt

SEQ ID NO: 1752513 - DNA, 25 bp, Homo sapien
gggatacagaggctttgtgtgttta

SEQ ID NO: 1752514 - DNA, 25 bp, Homo sapien
caatcatgagaggaaacacgcagtt

SEQ ID NO: 1752515 - DNA, 25 bp, Homo sapien
aacataaacaatcatgagaggaaac

SEQ ID NO: 1752516 - DNA, 25 bp, Homo sapien
taaacaatcatgagaggaaacacgc

SEQ ID NO: 1752517 - DNA, 25 bp, Homo sapien
tcatgagaggaaacacgcagttggg

SEQ ID NO: 1752518 - DNA, 25 bp, Homo sapien
gccacttctgggtatctgttcaaaa

SEQ ID NO: 1752519 - DNA, 25 bp, Homo sapien
gaggtctgctatacaatattgtgcc

SEQ ID NO: 1752520 - DNA, 25 bp, Homo sapien
gctattaccagcaatgccacttctg

SEQ ID NO: 1752521 - DNA, 25 bp, Homo sapien
gatgaataggttctagaggtctgct

SEQ ID NO: 1752522 - DNA, 25 bp, Homo sapien
taatggactagaccctgctgtgtcc

SEQ ID NO: 1752523 - DNA, 25 bp, Homo sapien
tgtacacataatggactagaccctg

SEQ ID NO: 1752524 - DNA, 25 bp, Homo sapien
gaaatgctgtacacataatggacta

SEQ ID NO: 1752525 - DNA, 25 bp, Homo sapien
gcaagtataatgaaatgctgtacac

SEQ ID NO: 1752526 - DNA, 25 bp, Homo sapien
tctgatgtagtaaaggaggcatgga

SEQ ID NO: 1752527 - DNA, 25 bp, Homo sapien
gatgtagtaaaggaggcatggacca

SEQ ID NO: 1752528 - DNA, 25 bp, Homo sapien
ccagggactaggtggatctgatgta

SEQ ID NO: 1752529 - DNA, 25 bp, Homo sapien
ctgattagtccagggactaggtgga

SEQ ID NO: 1752530 - DNA, 25 bp, Homo sapien
aggtgatggatagcagggcagctaa

SEQ ID NO: 1752531 - DNA, 25 bp, Homo sapien
gcacagcttgatgcataaattcatg

SEQ ID NO: 1752532 - DNA, 25 bp, Homo sapien
gctgttgcatatgatggagtatgct

SEQ ID NO: 1752533 - DNA, 25 bp, Homo sapien
ctcggcacgactggctgcacagctt

SEQ ID NO: 1752534 - DNA, 25 bp, Homo sapien
tgacagctgcaacacgtactcaggc

SEQ ID NO: 1752535 - DNA, 25 bp, Homo sapien
gcctgtcttgtctattaacgagcac

SEQ ID NO: 1752536 - DNA, 25 bp, Homo sapien
gctgcttttgatggagaactttgtg

SEQ ID NO: 1752537 - DNA, 25 bp, Homo sapien
tcagagcccattggcagatgagcat

SEQ ID NO: 1752538 - DNA, 25 bp, Homo sapien
gatttacagtcaggcaaattgtgta

SEQ ID NO: 1752539 - DNA, 25 bp, Homo sapien
acagtgacgcccaatgccactgggc

SEQ ID NO: 1752540 - DNA, 25 bp, Homo sapien
aaaggctgataatacagtgacgccc

SEQ ID NO: 1752541 - DNA, 25 bp, Homo sapien
ttaaacctccgatttacagtcaggc

SEQ ID NO: 1752542 - DNA, 25 bp, Homo sapien
cagagtgcttgcgacagggattttc

SEQ ID NO: 1752543 - DNA, 25 bp, Homo sapien
gcatttgagtccaaatcccagagtg

SEQ ID NO: 1752544 - DNA, 25 bp, Homo sapien
ttaaggctactctctgttcttctca

SEQ ID NO: 1752545 - DNA, 25 bp, Homo sapien
tgtataattagcatttgagtccaaa

SEQ ID NO: 1752546 - DNA, 25 bp, Homo sapien
gggctcctctggaagttggagagaa

SEQ ID NO: 1752547 - DNA, 25 bp, Homo sapien
aggatcataaatacagtgcacggga

SEQ ID NO: 1752548 - DNA, 25 bp, Homo sapien
taaatacagtgcacgggaagtacaa

SEQ ID NO: 1752549 - DNA, 25 bp, Homo sapien
gcttctgttctaaggcagttagtgc

SEQ ID NO: 1752550 - DNA, 25 bp, Homo sapien
gcaggaagcctaagaagcgaccact

SEQ ID NO: 1752551 - DNA, 25 bp, Homo sapien
gaagcgaccacttttgctgtccgaa

SEQ ID NO: 1752552 - DNA, 25 bp, Homo sapien
tccgaatttcctattccagtcatca

SEQ ID NO: 1752553 - DNA, 25 bp, Homo sapien
ttggcagaaacgactagttatagtg

SEQ ID NO: 1752554 - DNA, 25 bp, Homo sapien
tgagggagtgggactctgcaaattg

SEQ ID NO: 1752555 - DNA, 25 bp, Homo sapien
gagtgggactctgcaaattggctct

SEQ ID NO: 1752556 - DNA, 25 bp, Homo sapien
agggagtgggactctgcaaattggc

SEQ ID NO: 1752557 - DNA, 25 bp, Homo sapien
ggagtgggactctgcaaattggctc

SEQ ID NO: 1752558 - DNA, 25 bp, Homo sapien
gcaaagtgttgtacattggtttctt

SEQ ID NO: 1752559 - DNA, 25 bp, Homo sapien
cttcttccacccttatttggagagc

SEQ ID NO: 1752560 - DNA, 25 bp, Homo sapien
tcttccacccttatttggagagcaa

SEQ ID NO: 1752561 - DNA, 25 bp, Homo sapien
ctgcaaagtgttgtacattggtttc

SEQ ID NO: 1752562 - DNA, 25 bp, Homo sapien
atgtgggatcccgaatgccctttcc

SEQ ID NO: 1752563 - DNA, 25 bp, Homo sapien
gtgatgtgggatcccgaatgccctt

SEQ ID NO: 1752564 - DNA, 25 bp, Homo sapien
atggtgatgtgggatcccgaatgcc

SEQ ID NO: 1752565 - DNA, 25 bp, Homo sapien
tgggatcccgaatgccctttcccaa

SEQ ID NO: 1752566 - DNA, 25 bp, Homo sapien
tcctgatcccagtagtttgaggtta

SEQ ID NO: 1752567 - DNA, 25 bp, Homo sapien
tctcctgatcccagtagtttgaggt

SEQ ID NO: 1752568 - DNA, 25 bp, Homo sapien
tgagcaacagaacatgatcttgtct

SEQ ID NO: 1752569 - DNA, 25 bp, Homo sapien
ctgaggttgggggatctcctgatcc

SEQ ID NO: 1752570 - DNA, 25 bp, Homo sapien
tgaggacagccaacctcaagagtgg

SEQ ID NO: 1752571 - DNA, 25 bp, Homo sapien
cagaaatgtgagactgcatcgctga

SEQ ID NO: 1752572 - DNA, 25 bp, Homo sapien
agagtggttactggaccatttgttc

SEQ ID NO: 1752573 - DNA, 25 bp, Homo sapien
cgttccccatatgtctccagattgc

SEQ ID NO: 1752574 - DNA, 25 bp, Homo sapien
agtaaaaagcggcataatgcatcaa

SEQ ID NO: 1752575 - DNA, 25 bp, Homo sapien
acttgtgagtaaaaagcggcataat

SEQ ID NO: 1752576 - DNA, 25 bp, Homo sapien
ctagtgaagaacaaaacttgtgagt

SEQ ID NO: 1752577 - DNA, 25 bp, Homo sapien
aaaaagcggcataatgcatcaaatg

SEQ ID NO: 1752578 - DNA, 25 bp, Homo sapien
gctgtagtgggaacattggagctat

SEQ ID NO: 1752579 - DNA, 25 bp, Homo sapien
cattggagctattacatgaaaagct

SEQ ID NO: 1752580 - DNA, 25 bp, Homo sapien
tttgtttttgcaataggctctcttg

SEQ ID NO: 1752581 - DNA, 25 bp, Homo sapien
gttgagaagcttccaaggatagaat

SEQ ID NO: 1752582 - DNA, 25 bp, Homo sapien
catagaaccaccatagttcctttcc

SEQ ID NO: 1752583 - DNA, 25 bp, Homo sapien
accaccatagttcctttcctgtgag

SEQ ID NO: 1752584 - DNA, 25 bp, Homo sapien
gaaccaccatagttcctttcctgtg

SEQ ID NO: 1752585 - DNA, 25 bp, Homo sapien
cttttttgagaacatagaaccacca

SEQ ID NO: 1752586 - DNA, 25 bp, Homo sapien
gggtacgaaagggctgtagttctgc

SEQ ID NO: 1752587 - DNA, 25 bp, Homo sapien
gactccggcactgatcaaagccttt

SEQ ID NO: 1752588 - DNA, 25 bp, Homo sapien
cttcgactccggcactgatcaaagc

SEQ ID NO: 1752589 - DNA, 25 bp, Homo sapien
gtagttctgctcttcgactccggca

SEQ ID NO: 1752590 - DNA, 25 bp, Homo sapien
cattgagcatcgttcaccttctgtt

SEQ ID NO: 1752591 - DNA, 25 bp, Homo sapien
tctctgcattgagcatcgttcacct

SEQ ID NO: 1752592 - DNA, 25 bp, Homo sapien
tcccattgtagacaataggatacat

SEQ ID NO: 1752593 - DNA, 25 bp, Homo sapien
tctgtttcccattgtagacaatagg

SEQ ID NO: 1752594 - DNA, 25 bp, Homo sapien
tatgatatagcaaacatcccagagg

SEQ ID NO: 1752595 - DNA, 25 bp, Homo sapien
tcccagggtcctgaagactcaaaga

SEQ ID NO: 1752596 - DNA, 25 bp, Homo sapien
gctgcattgagtggttctaattaga

SEQ ID NO: 1752597 - DNA, 25 bp, Homo sapien
ttagaggctgaagtagtcctgctgc

SEQ ID NO: 1752598 - DNA, 25 bp, Homo sapien
cccctctttagtgccaagatttgaa

SEQ ID NO: 1752599 - DNA, 25 bp, Homo sapien
tctttagtgccaagatttgaaattc

SEQ ID NO: 1752600 - DNA, 25 bp, Homo sapien
tccccctctttagtgccaagatttg

SEQ ID NO: 1752601 - DNA, 25 bp, Homo sapien
cctctttagtgccaagatttgaaat

SEQ ID NO: 1752602 - DNA, 25 bp, Homo sapien
ttaaagcatagctttgtgtatctgc

SEQ ID NO: 1752603 - DNA, 25 bp, Homo sapien
tgtatctgccctaggattgtgtcac

SEQ ID NO: 1752604 - DNA, 25 bp, Homo sapien
tttagctatatgtgtagccacacag

SEQ ID NO: 1752605 - DNA, 25 bp, Homo sapien
cactgccagtagctttagctatatg

SEQ ID NO: 1752606 - DNA, 25 bp, Homo sapien
ttattctgactccactactatgtga

SEQ ID NO: 1752607 - DNA, 25 bp, Homo sapien
gactccactactatgtgacattatt

SEQ ID NO: 1752608 - DNA, 25 bp, Homo sapien
tattctgactccactactatgtgac

SEQ ID NO: 1752609 - DNA, 25 bp, Homo sapien
tctgactccactactatgtgacatt

SEQ ID NO: 1752610 - DNA, 25 bp, Homo sapien
tcccattaacaagtgtaaccaaagc

SEQ ID NO: 1752611 - DNA, 25 bp, Homo sapien
agcatattacgctattggtgaaggc

SEQ ID NO: 1752612 - DNA, 25 bp, Homo sapien
tgacagcgggataatgagagaaact

SEQ ID NO: 1752613 - DNA, 25 bp, Homo sapien
ccattggccttgctaatgggtaata

SEQ ID NO: 1752614 - DNA, 25 bp, Homo sapien
ggttggaatttactagtaacactga

SEQ ID NO: 1752615 - DNA, 25 bp, Homo sapien
atttactagtaacactgagaatgtc

SEQ ID NO: 1752616 - DNA, 25 bp, Homo sapien
catcatggggttgaatatagctttt

SEQ ID NO: 1752617 - DNA, 25 bp, Homo sapien
tggaatttactagtaacactgagaa

SEQ ID NO: 1752618 - DNA, 25 bp, Homo sapien
cctgccagtgcatacaagattcaca

SEQ ID NO: 1752619 - DNA, 25 bp, Homo sapien
tcatccctgccagtgcatacaagat

SEQ ID NO: 1752620 - DNA, 25 bp, Homo sapien
tccctgccagtgcatacaagattca

SEQ ID NO: 1752621 - DNA, 25 bp, Homo sapien
tgccagtgcatacaagattcacagc

SEQ ID NO: 1752622 - DNA, 25 bp, Homo sapien
cagtttcatgtcatgggtatcttcc

SEQ ID NO: 1752623 - DNA, 25 bp, Homo sapien
tttaaacagtttcatgtcatgggta

SEQ ID NO: 1752624 - DNA, 25 bp, Homo sapien
tgttttaaacagtttcatgtcatgg

SEQ ID NO: 1752625 - DNA, 25 bp, Homo sapien
taaacagtttcatgtcatgggtatc

SEQ ID NO: 1752626 - DNA, 25 bp, Homo sapien
tggaagttacaagcataggagctct

SEQ ID NO: 1752627 - DNA, 25 bp, Homo sapien
ctggaagttacaagcataggagctc

SEQ ID NO: 1752628 - DNA, 25 bp, Homo sapien
ggaagttacaagcataggagctctg

SEQ ID NO: 1752629 - DNA, 25 bp, Homo sapien
gaagttacaagcataggagctctgt

SEQ ID NO: 1752630 - DNA, 25 bp, Homo sapien
ctttggctgaactgccctgttctat

SEQ ID NO: 1752631 - DNA, 25 bp, Homo sapien
ccctgttctatgaacaaagagtggc

SEQ ID NO: 1752632 - DNA, 25 bp, Homo sapien
gggagaagtgattgacaaaaacttg

SEQ ID NO: 1752633 - DNA, 25 bp, Homo sapien
ttgagtgtgtaagcaatcagccatg

SEQ ID NO: 1752634 - DNA, 25 bp, Homo sapien
cactcttattgggtctgggacccat

SEQ ID NO: 1752635 - DNA, 25 bp, Homo sapien
ccttccatcaggtgggataagtgta

SEQ ID NO: 1752636 - DNA, 25 bp, Homo sapien
cataggtggacaggcaagcttaagc

SEQ ID NO: 1752637 - DNA, 25 bp, Homo sapien
taagtgtagagaatggacagcagct

SEQ ID NO: 1752638 - DNA, 25 bp, Homo sapien
gatactctttcatctatagtgatat

SEQ ID NO: 1752639 - DNA, 25 bp, Homo sapien
atactctttcatctatagtgatata

SEQ ID NO: 1752640 - DNA, 25 bp, Homo sapien
tactctttcatctatagtgatataa

SEQ ID NO: 1752641 - DNA, 25 bp, Homo sapien
tataaaaaggtgattccgttagcac

SEQ ID NO: 1752642 - DNA, 25 bp, Homo sapien
tacaaagtaattcttcaatcagtgt

SEQ ID NO: 1752643 - DNA, 25 bp, Homo sapien
gttctactttaattgggcacttaca

SEQ ID NO: 1752644 - DNA, 25 bp, Homo sapien
agtgtctctaatgtctcactgcttc

SEQ ID NO: 1752645 - DNA, 25 bp, Homo sapien
ctagaacggaatggagtaaacttct

SEQ ID NO: 1752646 - DNA, 25 bp, Homo sapien
cacaggctgatggtaaggctaggcc

SEQ ID NO: 1752647 - DNA, 25 bp, Homo sapien
tcacaggtcaggtgtgatgcctgaa

SEQ ID NO: 1752648 - DNA, 25 bp, Homo sapien
gggagcccacatttatccagaaagc

SEQ ID NO: 1752649 - DNA, 25 bp, Homo sapien
aagaaacaggaattcatctgaagga

SEQ ID NO: 1752650 - DNA, 25 bp, Homo sapien
aggaggtagaccaggataaggtaca

SEQ ID NO: 1752651 - DNA, 25 bp, Homo sapien
gaggtagaccaggataaggtacaca

SEQ ID NO: 1752652 - DNA, 25 bp, Homo sapien
caggataaggtacacaagtttggga

SEQ ID NO: 1752653 - DNA, 25 bp, Homo sapien
tagaccaggataaggtacacaagtt

SEQ ID NO: 1752654 - DNA, 25 bp, Homo sapien
atggaacaacagtgtagcacagcag

SEQ ID NO: 1752655 - DNA, 25 bp, Homo sapien
aaatgtggtatagattcatcctgaa

SEQ ID NO: 1752656 - DNA, 25 bp, Homo sapien
caaatgtggtatagattcatcctga

SEQ ID NO: 1752657 - DNA, 25 bp, Homo sapien
gccttcagtacttcagggttaagaa

SEQ ID NO: 1752658 - DNA, 25 bp, Homo sapien
tgccttcagtacttcagggttaaga

SEQ ID NO: 1752659 - DNA, 25 bp, Homo sapien
ccttcagtacttcagggttaagaag

SEQ ID NO: 1752660 - DNA, 25 bp, Homo sapien
ctttggagctttagatgacggactt

SEQ ID NO: 1752661 - DNA, 25 bp, Homo sapien
ttcatgcctggatggagatctggga

SEQ ID NO: 1752662 - DNA, 25 bp, Homo sapien
tatttggtgaatgaagctctggagc

SEQ ID NO: 1752663 - DNA, 25 bp, Homo sapien
tatcactgaagctatggagaacatg

SEQ ID NO: 1752664 - DNA, 25 bp, Homo sapien
tgtgcttacacagagagttagcttt

SEQ ID NO: 1752665 - DNA, 25 bp, Homo sapien
ctggagaaagggtccaaccactcca

SEQ ID NO: 1752666 - DNA, 25 bp, Homo sapien
agaaagggtccaaccactccaccat

SEQ ID NO: 1752667 - DNA, 25 bp, Homo sapien
tggagaaagggtccaaccactccac

SEQ ID NO: 1752668 - DNA, 25 bp, Homo sapien
gctgggatgatcagcccatgaggaa

SEQ ID NO: 1752669 - DNA, 25 bp, Homo sapien
agctgggatgatcagcccatgagga

SEQ ID NO: 1752670 - DNA, 25 bp, Homo sapien
gatacagtgataggcctcattccct

SEQ ID NO: 1752671 - DNA, 25 bp, Homo sapien
cacatttttcttgaaacgagggcaa

SEQ ID NO: 1752672 - DNA, 25 bp, Homo sapien
gataggcctcattccctcctaagta

SEQ ID NO: 1752673 - DNA, 25 bp, Homo sapien
tatcaagatacagtgataggcctca

SEQ ID NO: 1752674 - DNA, 25 bp, Homo sapien
gtctgctcatccaggctgttatttt

SEQ ID NO: 1752675 - DNA, 25 bp, Homo sapien
gctcatccaggctgttattttcctc

SEQ ID NO: 1752676 - DNA, 25 bp, Homo sapien
cctctcctgcattgttgattagcat

SEQ ID NO: 1752677 - DNA, 25 bp, Homo sapien
tctgtgtagtctgctcatccaggct

SEQ ID NO: 1752678 - DNA, 25 bp, Homo sapien
gagcaatcaagctttgctagtggta

SEQ ID NO: 1752679 - DNA, 25 bp, Homo sapien
tgactgcagtgactacacagagcaa

SEQ ID NO: 1752680 - DNA, 25 bp, Homo sapien
aggaaatacacaccagtctgactgc

SEQ ID NO: 1752681 - DNA, 25 bp, Homo sapien
tacggtgtaaagcatcagagttcct

SEQ ID NO: 1752682 - DNA, 25 bp, Homo sapien
tttagagctgagtgctcaaaagagg

SEQ ID NO: 1752683 - DNA, 25 bp, Homo sapien
tgcctggactcccattaatctcgca

SEQ ID NO: 1752684 - DNA, 25 bp, Homo sapien
ggtcagggacctcaggataatcata

SEQ ID NO: 1752685 - DNA, 25 bp, Homo sapien
tctcgcacagtcagatattagtgct

SEQ ID NO: 1752686 - DNA, 25 bp, Homo sapien
aaacccctacatgtgtggtcaggga

SEQ ID NO: 1752687 - DNA, 25 bp, Homo sapien
ctgatgaatgtttacatttgttgca

SEQ ID NO: 1752688 - DNA, 25 bp, Homo sapien
gctgatgaatgtttacatttgttgc

SEQ ID NO: 1752689 - DNA, 25 bp, Homo sapien
gatgaatgtttacatttgttgcatg

SEQ ID NO: 1752690 - DNA, 25 bp, Homo sapien
catttgttgcatgcagtcacgaaca

SEQ ID NO: 1752691 - DNA, 25 bp, Homo sapien
cgctgtagcgacgagcagtttccat

SEQ ID NO: 1752692 - DNA, 25 bp, Homo sapien
cacgctgtagcgacgagcagtttcc

SEQ ID NO: 1752693 - DNA, 25 bp, Homo sapien
catagcacacgctgtagcgacgagc

SEQ ID NO: 1752694 - DNA, 25 bp, Homo sapien
gcacacgctgtagcgacgagcagtt

SEQ ID NO: 1752695 - DNA, 25 bp, Homo sapien
tcacagcaattcagtgcttccaagc

SEQ ID NO: 1752696 - DNA, 25 bp, Homo sapien
acagcaattcagtgcttccaagcaa

SEQ ID NO: 1752697 - DNA, 25 bp, Homo sapien
agcaattcagtgcttccaagcaata

SEQ ID NO: 1752698 - DNA, 25 bp, Homo sapien
cacagcaattcagtgcttccaagca

SEQ ID NO: 1752699 - DNA, 25 bp, Homo sapien
gctggagtctgcatgatgatgacac

SEQ ID NO: 1752700 - DNA, 25 bp, Homo sapien
tgtcccatgctctacatctgtccct

SEQ ID NO: 1752701 - DNA, 25 bp, Homo sapien
tagctagaataaccttttgtcccat

SEQ ID NO: 1752702 - DNA, 25 bp, Homo sapien
ttaaaggctatagctagaataacct

SEQ ID NO: 1752703 - DNA, 25 bp, Homo sapien
ctgaaattgatcaggcactgggcat

SEQ ID NO: 1752704 - DNA, 25 bp, Homo sapien
tcactcatttgccttctgatcatct

SEQ ID NO: 1752705 - DNA, 25 bp, Homo sapien
ttctgaaattgatcaggcactgggc

SEQ ID NO: 1752706 - DNA, 25 bp, Homo sapien
cactcatttgccttctgatcatctc

SEQ ID NO: 1752707 - DNA, 25 bp, Homo sapien
acattaatgtttcactcaccaaact

SEQ ID NO: 1752708 - DNA, 25 bp, Homo sapien
aacattaatgtttcactcaccaaac

SEQ ID NO: 1752709 - DNA, 25 bp, Homo sapien
tgctctaaatctttcattcttctga

SEQ ID NO: 1752710 - DNA, 25 bp, Homo sapien
tgatttccttcacaaacattaatgt

SEQ ID NO: 1752711 - DNA, 25 bp, Homo sapien
atgcgttctgatggaccatctttgc

SEQ ID NO: 1752712 - DNA, 25 bp, Homo sapien
taagattccgtgatgttctcttcgt

SEQ ID NO: 1752713 - DNA, 25 bp, Homo sapien
gagtgaggggctcataagattccgt

SEQ ID NO: 1752714 - DNA, 25 bp, Homo sapien
tccgtgatgttctcttcgtatggct

SEQ ID NO: 1752715 - DNA, 25 bp, Homo sapien
gggctcataagattccgtgatgttc

SEQ ID NO: 1752716 - DNA, 25 bp, Homo sapien
gcagatggatgagtctcattagtat

SEQ ID NO: 1752717 - DNA, 25 bp, Homo sapien
ttcacagagctgtccaaaaagaggg

SEQ ID NO: 1752718 - DNA, 25 bp, Homo sapien
cattagtatggcgaggcagcgaacc

SEQ ID NO: 1752719 - DNA, 25 bp, Homo sapien
agcgaaccagactgccttcacagag

SEQ ID NO: 1752720 - DNA, 25 bp, Homo sapien
gactgaaacgatataaaatccctgg

SEQ ID NO: 1752721 - DNA, 25 bp, Homo sapien
tgactgaaacgatataaaatccctg

SEQ ID NO: 1752722 - DNA, 25 bp, Homo sapien
gaaacgatataaaatccctggcctc

SEQ ID NO: 1752723 - DNA, 25 bp, Homo sapien
ctgaaacgatataaaatccctggcc

SEQ ID NO: 1752724 - DNA, 25 bp, Homo sapien
catttctctgtgaggccaataatat

SEQ ID NO: 1752725 - DNA, 25 bp, Homo sapien
aaagaggtttatgctgctccttcag

SEQ ID NO: 1752726 - DNA, 25 bp, Homo sapien
gctccttcagttcttttgctttgca

SEQ ID NO: 1752727 - DNA, 25 bp, Homo sapien
ctctgtgaggccaataatattcttc

SEQ ID NO: 1752728 - DNA, 25 bp, Homo sapien
gatcaaggtgtacaccctctggccc

SEQ ID NO: 1752729 - DNA, 25 bp, Homo sapien
tcagcaatgatcaaggtgtacaccc

SEQ ID NO: 1752730 - DNA, 25 bp, Homo sapien
aatgatcaaggtgtacaccctctgg

SEQ ID NO: 1752731 - DNA, 25 bp, Homo sapien
gcaatgatcaaggtgtacaccctct

SEQ ID NO: 1752732 - DNA, 25 bp, Homo sapien
tatttaagtagcaaagggcttggga

SEQ ID NO: 1752733 - DNA, 25 bp, Homo sapien
tgaccacagggagtactgcagctaa

SEQ ID NO: 1752734 - DNA, 25 bp, Homo sapien
caacattgtaacagtaatcaagcac

SEQ ID NO: 1752735 - DNA, 25 bp, Homo sapien
tgcagctaacattcattaggcagcc

SEQ ID NO: 1752736 - DNA, 25 bp, Homo sapien
caggaacttgtatctgaagtccact

SEQ ID NO: 1752737 - DNA, 25 bp, Homo sapien
gaatcccagaggtctccctatcagc

SEQ ID NO: 1752738 - DNA, 25 bp, Homo sapien
gaacttgtatctgaagtccactgac

SEQ ID NO: 1752739 - DNA, 25 bp, Homo sapien
aatcccagaggtctccctatcagca

SEQ ID NO: 1752740 - DNA, 25 bp, Homo sapien
cctatttttgttcggcgtgagctaa

SEQ ID NO: 1752741 - DNA, 25 bp, Homo sapien
tccagggatcaacagacaatggcct

SEQ ID NO: 1752742 - DNA, 25 bp, Homo sapien
tattcattgtcttctaatccaggga

SEQ ID NO: 1752743 - DNA, 25 bp, Homo sapien
gccttaatccagaactagccaacca

SEQ ID NO: 1752744 - DNA, 25 bp, Homo sapien
caaggcctgacagccttccgtttag

SEQ ID NO: 1752745 - DNA, 25 bp, Homo sapien
ccgtttagatcccaagagtgggtcg

SEQ ID NO: 1752746 - DNA, 25 bp, Homo sapien
gtgggtcgtatagggctgcaccatc

SEQ ID NO: 1752747 - DNA, 25 bp, Homo sapien
tgacagccttccgtttagatcccaa

SEQ ID NO: 1752748 - DNA, 25 bp, Homo sapien
gcttgccttgagtttcttgaggaag

SEQ ID NO: 1752749 - DNA, 25 bp, Homo sapien
gctttccactgtgcttgccttgagt

SEQ ID NO: 1752750 - DNA, 25 bp, Homo sapien
tgcagagataaccagacacatctgt

SEQ ID NO: 1752751 - DNA, 25 bp, Homo sapien
gtgacatgaggcactcagtaagttg

SEQ ID NO: 1752752 - DNA, 25 bp, Homo sapien
gccttgttcatagcggcctgaacta

SEQ ID NO: 1752753 - DNA, 25 bp, Homo sapien
tttgccttgttcatagcggcctgaa

SEQ ID NO: 1752754 - DNA, 25 bp, Homo sapien
gttcatagcggcctgaactaggctg

SEQ ID NO: 1752755 - DNA, 25 bp, Homo sapien
ctttgccttgttcatagcggcctga

SEQ ID NO: 1752756 - DNA, 25 bp, Homo sapien
gaggtccctatccatggtcataaaa

SEQ ID NO: 1752757 - DNA, 25 bp, Homo sapien
gacacagtggagttgctaatagcct

SEQ ID NO: 1752758 - DNA, 25 bp, Homo sapien
caccctagtaagaagtaagtcctga

SEQ ID NO: 1752759 - DNA, 25 bp, Homo sapien
tgacttcttggataaaccctgtggc

SEQ ID NO: 1752760 - DNA, 25 bp, Homo sapien
agtgagccctccttaagggcttctt

SEQ ID NO: 1752761 - DNA, 25 bp, Homo sapien
ttctttcctcctatgcatatttgtg

SEQ ID NO: 1752762 - DNA, 25 bp, Homo sapien
tgagtgagccctccttaagggcttc

SEQ ID NO: 1752763 - DNA, 25 bp, Homo sapien
cttctttcctcctatgcatatttgt

SEQ ID NO: 1752764 - DNA, 25 bp, Homo sapien
tttttgcgtgagagtcaagtagcca

SEQ ID NO: 1752765 - DNA, 25 bp, Homo sapien
agaatttttgcgtgagagtcaagta

SEQ ID NO: 1752766 - DNA, 25 bp, Homo sapien
agccatggcttttagcttctgagaa

SEQ ID NO: 1752767 - DNA, 25 bp, Homo sapien
tagcttctgagaagaggtaaatcat

SEQ ID NO: 1752768 - DNA, 25 bp, Homo sapien
tcttcaagctcacagtatagaatga

SEQ ID NO: 1752769 - DNA, 25 bp, Homo sapien
caattttagtgggagactgtgggca

SEQ ID NO: 1752770 - DNA, 25 bp, Homo sapien
gcttagaatcatgttgcagctgatc

SEQ ID NO: 1752771 - DNA, 25 bp, Homo sapien
aatcaggaataccaaaagattggct

SEQ ID NO: 1752772 - DNA, 25 bp, Homo sapien
ctttcctactcatgtgttccacgtt

SEQ ID NO: 1752773 - DNA, 25 bp, Homo sapien
tcatctttcctactcatgtgttcca

SEQ ID NO: 1752774 - DNA, 25 bp, Homo sapien
cccatcatctttcctactcatgtgt

SEQ ID NO: 1752775 - DNA, 25 bp, Homo sapien
caacttcattgacatctagtccttt

SEQ ID NO: 1752776 - DNA, 25 bp, Homo sapien
ccgaggattcaacaggccagtttca

SEQ ID NO: 1752777 - DNA, 25 bp, Homo sapien
caggccagtttcaaccagctgctgt

SEQ ID NO: 1752778 - DNA, 25 bp, Homo sapien
tcctgaatccgaggattcaacaggc

SEQ ID NO: 1752779 - DNA, 25 bp, Homo sapien
cttcatcctgaatccgaggattcaa

SEQ ID NO: 1752780 - DNA, 25 bp, Homo sapien
gttgctcagtgcattcttgatgaac

SEQ ID NO: 1752781 - DNA, 25 bp, Homo sapien
agtgcattcttgatgaacagttgag

SEQ ID NO: 1752782 - DNA, 25 bp, Homo sapien
cagttgagtgacttttcctccttct

SEQ ID NO: 1752783 - DNA, 25 bp, Homo sapien
ttctcctcctgttggaaacactagt

SEQ ID NO: 1752784 - DNA, 25 bp, Homo sapien
tgtccaacagtcctgggaagagagc

SEQ ID NO: 1752785 - DNA, 25 bp, Homo sapien
tccaacagtcctgggaagagagcac

SEQ ID NO: 1752786 - DNA, 25 bp, Homo sapien
aacagtcctgggaagagagcacagc

SEQ ID NO: 1752787 - DNA, 25 bp, Homo sapien
cctgtccaacagtcctgggaagaga

SEQ ID NO: 1752788 - DNA, 25 bp, Homo sapien
ggctgcatggacatgggaatacatg

SEQ ID NO: 1752789 - DNA, 25 bp, Homo sapien
gagaactgggatcattcccccttgc

SEQ ID NO: 1752790 - DNA, 25 bp, Homo sapien
gatgatgctgtgtctacttccagcc

SEQ ID NO: 1752791 - DNA, 25 bp, Homo sapien
cagactccgtaggagcctcgggctg

SEQ ID NO: 1752792 - DNA, 25 bp, Homo sapien
ttatgctaggggcagtggagtcact

SEQ ID NO: 1752793 - DNA, 25 bp, Homo sapien
actgtcttcggctgacttggacaca

SEQ ID NO: 1752794 - DNA, 25 bp, Homo sapien
cggctgacttggacacaatcattga

SEQ ID NO: 1752795 - DNA, 25 bp, Homo sapien
aacagtagactgtcttcggctgact

SEQ ID NO: 1752796 - DNA, 25 bp, Homo sapien
aggaggaagcccacagtttcctcag

SEQ ID NO: 1752797 - DNA, 25 bp, Homo sapien
aggaggaggaagcccacagtttcct

SEQ ID NO: 1752798 - DNA, 25 bp, Homo sapien
aagcccacagtttcctcagtgctgc

SEQ ID NO: 1752799 - DNA, 25 bp, Homo sapien
cagtttcctcagtgctgctgaacat

SEQ ID NO: 1752800 - DNA, 25 bp, Homo sapien
cctgaaggctggttgaaaagagtag

SEQ ID NO: 1752801 - DNA, 25 bp, Homo sapien
aagagtaggcgaagctgagccacga

SEQ ID NO: 1752802 - DNA, 25 bp, Homo sapien
gcctttgaggtagcagaggcaattc

SEQ ID NO: 1752803 - DNA, 25 bp, Homo sapien
cctttgaggtagcagaggcaattcc

SEQ ID NO: 1752804 - DNA, 25 bp, Homo sapien
ttgtgccatgctgtttactggaggc

SEQ ID NO: 1752805 - DNA, 25 bp, Homo sapien
ggaggcggagtaaaatccattttga

SEQ ID NO: 1752806 - DNA, 25 bp, Homo sapien
catgctgtttactggaggcggagta

SEQ ID NO: 1752807 - DNA, 25 bp, Homo sapien
catagcacaatggacttttgtgcca

SEQ ID NO: 1752808 - DNA, 25 bp, Homo sapien
ttttttaagtctttgggctgcagaa

SEQ ID NO: 1752809 - DNA, 25 bp, Homo sapien
tttttttaagtctttgggctgcaga

SEQ ID NO: 1752810 - DNA, 25 bp, Homo sapien
tttaagtctttgggctgcagaaatt

SEQ ID NO: 1752811 - DNA, 25 bp, Homo sapien
tttttaagtctttgggctgcagaaa

SEQ ID NO: 1752812 - DNA, 25 bp, Homo sapien
caggtgtatcttccaggatagtcat

SEQ ID NO: 1752813 - DNA, 25 bp, Homo sapien
cccttgtctagagacttctgtgagg

SEQ ID NO: 1752814 - DNA, 25 bp, Homo sapien
ggtctgggccctcgcctggctgcat

SEQ ID NO: 1752815 - DNA, 25 bp, Homo sapien
gcatgcacggctggcccttttgctg

SEQ ID NO: 1752816 - DNA, 25 bp, Homo sapien
aacatctcccttgtctagagacttc

SEQ ID NO: 1752817 - DNA, 25 bp, Homo sapien
aattgaacagtttaacactctgaag

SEQ ID NO: 1752818 - DNA, 25 bp, Homo sapien
tcacatacactgtatttgtagctta

SEQ ID NO: 1752819 - DNA, 25 bp, Homo sapien
aatctagagaaaatagtgcaataag

SEQ ID NO: 1752820 - DNA, 25 bp, Homo sapien
gaaaatagtgcaataagatcatcac

SEQ ID NO: 1752821 - DNA, 25 bp, Homo sapien
cagagaggtaaaaataggcacaaag

SEQ ID NO: 1752822 - DNA, 25 bp, Homo sapien
ggctttatctgacaaatggtccttc

SEQ ID NO: 1752823 - DNA, 25 bp, Homo sapien
ctcagagaggtaaaaataggcacaa

SEQ ID NO: 1752824 - DNA, 25 bp, Homo sapien
atggtccttcacctggactttaaag

SEQ ID NO: 1752825 - DNA, 25 bp, Homo sapien
acagtgtgcttgctttcactgcgcc

SEQ ID NO: 1752826 - DNA, 25 bp, Homo sapien
gaggagctttcttgatacaccacat

SEQ ID NO: 1752827 - DNA, 25 bp, Homo sapien
aaggagtgggtggattagcactccc

SEQ ID NO: 1752828 - DNA, 25 bp, Homo sapien
gaaatcttgtcactgtttcttgctt

SEQ ID NO: 1752829 - DNA, 25 bp, Homo sapien
ctagccgcgtcagcacatgtatata

SEQ ID NO: 1752830 - DNA, 25 bp, Homo sapien
tattgcagagtgtgtccatatgcag

SEQ ID NO: 1752831 - DNA, 25 bp, Homo sapien
gagtgtgtccatatgcagttcaatc

SEQ ID NO: 1752832 - DNA, 25 bp, Homo sapien
agttcaatcaaggtcttcttggcag

SEQ ID NO: 1752833 - DNA, 25 bp, Homo sapien
agatactattaagttctggagctca

SEQ ID NO: 1752834 - DNA, 25 bp, Homo sapien
tacagatactattaagttctggagc

SEQ ID NO: 1752835 - DNA, 25 bp, Homo sapien
gattacttagccttacagatactat

SEQ ID NO: 1752836 - DNA, 25 bp, Homo sapien
ggaagcttcctgattacttagcctt

SEQ ID NO: 1752837 - DNA, 25 bp, Homo sapien
gccaggttaggctctctcactaagt

SEQ ID NO: 1752838 - DNA, 25 bp, Homo sapien
taggctctctcactaagtggtcagt

SEQ ID NO: 1752839 - DNA, 25 bp, Homo sapien
tgtcctctattgttggggtgggctc

SEQ ID NO: 1752840 - DNA, 25 bp, Homo sapien
gattgaggtagccaggttaggctct

SEQ ID NO: 1752841 - DNA, 25 bp, Homo sapien
ctcatgattcctcttgccaattttc

SEQ ID NO: 1752842 - DNA, 25 bp, Homo sapien
aaatgtgtaaatcaagcaggtaggt

SEQ ID NO: 1752843 - DNA, 25 bp, Homo sapien
taaatcaagcaggtaggttgagagt

SEQ ID NO: 1752844 - DNA, 25 bp, Homo sapien
tgcgtttggtttggaataaatgtgt

SEQ ID NO: 1752845 - DNA, 25 bp, Homo sapien
tctgagcccttttcgattgactggg

SEQ ID NO: 1752846 - DNA, 25 bp, Homo sapien
gcctgattcccattccgagccttgg

SEQ ID NO: 1752847 - DNA, 25 bp, Homo sapien
tgacaaactggcagtaatattagca

SEQ ID NO: 1752848 - DNA, 25 bp, Homo sapien
ccacagctagcctgggaagttgcta

SEQ ID NO: 1752849 - DNA, 25 bp, Homo sapien
ggcctgcactccgacaagctacagg

SEQ ID NO: 1752850 - DNA, 25 bp, Homo sapien
caagctacaggaagttgccggaaag

SEQ ID NO: 1752851 - DNA, 25 bp, Homo sapien
tgccggaaagaaccaccaataaata

SEQ ID NO: 1752852 - DNA, 25 bp, Homo sapien
tttatgctctctgatactgatttag

SEQ ID NO: 1752853 - DNA, 25 bp, Homo sapien
tgtaatggctccctttggaccttta

SEQ ID NO: 1752854 - DNA, 25 bp, Homo sapien
tgccagagtccagtgtagaacttaa

SEQ ID NO: 1752855 - DNA, 25 bp, Homo sapien
tcagtatcctgtaatggctcccttt

SEQ ID NO: 1752856 - DNA, 25 bp, Homo sapien
tgctatgaatccttatggaactgaa

SEQ ID NO: 1752857 - DNA, 25 bp, Homo sapien
agttgacttcctgacttgttgtgaa

SEQ ID NO: 1752858 - DNA, 25 bp, Homo sapien
gacttcctgacttgttgtgaagcct

SEQ ID NO: 1752859 - DNA, 25 bp, Homo sapien
tcctgacttgttgtgaagcctgttc

SEQ ID NO: 1752860 - DNA, 25 bp, Homo sapien
gttagttgacttcctgacttgttgt

SEQ ID NO: 1752861 - DNA, 25 bp, Homo sapien
tttctaagctgaaaaatcccttctg

SEQ ID NO: 1752862 - DNA, 25 bp, Homo sapien
tctaagctgaaaaatcccttctgtg

SEQ ID NO: 1752863 - DNA, 25 bp, Homo sapien
gacagaaacttttctaagctgaaaa

SEQ ID NO: 1752864 - DNA, 25 bp, Homo sapien
taagctgaaaaatcccttctgtgct

SEQ ID NO: 1752865 - DNA, 25 bp, Homo sapien
atgatagcccatagttcctgtttct

SEQ ID NO: 1752866 - DNA, 25 bp, Homo sapien
tgaactatgatagcccatagttcct

SEQ ID NO: 1752867 - DNA, 25 bp, Homo sapien
actatgatagcccatagttcctgtt

SEQ ID NO: 1752868 - DNA, 25 bp, Homo sapien
tttctgaactatgatagcccatagt

SEQ ID NO: 1752869 - DNA, 25 bp, Homo sapien
tcctgagattcctgcggcttgatag

SEQ ID NO: 1752870 - DNA, 25 bp, Homo sapien
cctgagattcctgcggcttgatagg

SEQ ID NO: 1752871 - DNA, 25 bp, Homo sapien
gagattcctgcggcttgataggctt

SEQ ID NO: 1752872 - DNA, 25 bp, Homo sapien
aatcctgagattcctgcggcttgat

SEQ ID NO: 1752873 - DNA, 25 bp, Homo sapien
ctgatccctggaagttgtaacctat

SEQ ID NO: 1752874 - DNA, 25 bp, Homo sapien
cctgatccctggaagttgtaaccta

SEQ ID NO: 1752875 - DNA, 25 bp, Homo sapien
tgatccctggaagttgtaacctatt

SEQ ID NO: 1752876 - DNA, 25 bp, Homo sapien
tagtaacctggcaccaagtaaactg

SEQ ID NO: 1752877 - DNA, 25 bp, Homo sapien
gcagacactatgttttgggaaagaa

SEQ ID NO: 1752878 - DNA, 25 bp, Homo sapien
gagtcatatttaaacctacccagta

SEQ ID NO: 1752879 - DNA, 25 bp, Homo sapien
tgtgtgagttatcgctgagcactca

SEQ ID NO: 1752880 - DNA, 25 bp, Homo sapien
tggaattgtccaggtgaaggtatat

SEQ ID NO: 1752881 - DNA, 25 bp, Homo sapien
ccattttcttgagtagacccttgac

SEQ ID NO: 1752882 - DNA, 25 bp, Homo sapien
gaagaaccatgactggaagacacag

SEQ ID NO: 1752883 - DNA, 25 bp, Homo sapien
gacatcgcatgggaagaaccatgac

SEQ ID NO: 1752884 - DNA, 25 bp, Homo sapien
tttttgttgtgaataggcttccttg

SEQ ID NO: 1752885 - DNA, 25 bp, Homo sapien
ctgcattaacattgcctcctttctc

SEQ ID NO: 1752886 - DNA, 25 bp, Homo sapien
atttttgttgtgaataggcttcctt

SEQ ID NO: 1752887 - DNA, 25 bp, Homo sapien
tgtctgcattaacattgcctccttt

SEQ ID NO: 1752888 - DNA, 25 bp, Homo sapien
taggttttgtgatactggttgtgtc

SEQ ID NO: 1752889 - DNA, 25 bp, Homo sapien
ttttgtgatactggttgtgtctttc

SEQ ID NO: 1752890 - DNA, 25 bp, Homo sapien
tccaagcttgtctaggttttgtgat

SEQ ID NO: 1752891 - DNA, 25 bp, Homo sapien
acatctccaagcttgtctaggtttt

SEQ ID NO: 1752892 - DNA, 25 bp, Homo sapien
tcagtgcctggataccaggtaaaaa

SEQ ID NO: 1752893 - DNA, 25 bp, Homo sapien
agttttttgtaatattgctgagagc

SEQ ID NO: 1752894 - DNA, 25 bp, Homo sapien
tgcctggataccaggtaaaaatagt

SEQ ID NO: 1752895 - DNA, 25 bp, Homo sapien
cagtgcctggataccaggtaaaaat

SEQ ID NO: 1752896 - DNA, 25 bp, Homo sapien
agcatctacgtttccgcttctgtag

SEQ ID NO: 1752897 - DNA, 25 bp, Homo sapien
ttctgtagaaattgcatgcacatga

SEQ ID NO: 1752898 - DNA, 25 bp, Homo sapien
gcacatgatcatgaggttctgaagc

SEQ ID NO: 1752899 - DNA, 25 bp, Homo sapien
aatcgtggggcttcatctcagaagc

SEQ ID NO: 1752900 - DNA, 25 bp, Homo sapien
tataattgcattgtcttgctcttta

SEQ ID NO: 1752901 - DNA, 25 bp, Homo sapien
gctatgtttgaagtaaccaagagtt

SEQ ID NO: 1752902 - DNA, 25 bp, Homo sapien
taacgtgctatgtttgaagtaacca

SEQ ID NO: 1752903 - DNA, 25 bp, Homo sapien
cttgtgctctgtgtaacgtgctatg

SEQ ID NO: 1752904 - DNA, 25 bp, Homo sapien
gtaaaatccattgccatggatcagg

SEQ ID NO: 1752905 - DNA, 25 bp, Homo sapien
ttgtggtgagtcactcctaagacca

SEQ ID NO: 1752906 - DNA, 25 bp, Homo sapien
tgatgtgatcttgttattgggaagg

SEQ ID NO: 1752907 - DNA, 25 bp, Homo sapien
cctaagaccaagagcgctctcacat

SEQ ID NO: 1752908 - DNA, 25 bp, Homo sapien
tgtgaggggacaagaataggctgca

SEQ ID NO: 1752909 - DNA, 25 bp, Homo sapien
aataggctgcacgtgtacatcaaaa

SEQ ID NO: 1752910 - DNA, 25 bp, Homo sapien
ccggcatagggcgctagtgtgaggg

SEQ ID NO: 1752911 - DNA, 25 bp, Homo sapien
tgcacgtgtacatcaaaacttcctg

SEQ ID NO: 1752912 - DNA, 25 bp, Homo sapien
ctttctggggcaggtgtctgctttt

SEQ ID NO: 1752913 - DNA, 25 bp, Homo sapien
cacatttctcgaggcacaaggcctt

SEQ ID NO: 1752914 - DNA, 25 bp, Homo sapien
ctggggcaggtgtctgcttttctct

SEQ ID NO: 1752915 - DNA, 25 bp, Homo sapien
ttctcctgacatgtcgtgcctttct

SEQ ID NO: 1752916 - DNA, 25 bp, Homo sapien
tcttttcgcggacctggagctcaga

SEQ ID NO: 1752917 - DNA, 25 bp, Homo sapien
gagctcccacggacagaagaatcca

SEQ ID NO: 1752918 - DNA, 25 bp, Homo sapien
gagctcagagctcccacggacagaa

SEQ ID NO: 1752919 - DNA, 25 bp, Homo sapien
ctaggaatcccataactttgtctag

SEQ ID NO: 1752920 - DNA, 25 bp, Homo sapien
gtgtcgctccgtcccagcgcaagcg

SEQ ID NO: 1752921 - DNA, 25 bp, Homo sapien
aggcgaggcgaggacacacacagcg

SEQ ID NO: 1752922 - DNA, 25 bp, Homo sapien
cgcgcgcctgggggctgctaggaat

SEQ ID NO: 1752923 - DNA, 25 bp, Homo sapien
tgagcatctgaatccagacagcaga

SEQ ID NO: 1752924 - DNA, 25 bp, Homo sapien
tttggggcctctgagcatctgaatc

SEQ ID NO: 1752925 - DNA, 25 bp, Homo sapien
ctgagcatctgaatccagacagcag

SEQ ID NO: 1752926 - DNA, 25 bp, Homo sapien
ggggcctctgagcatctgaatccag

SEQ ID NO: 1752927 - DNA, 25 bp, Homo sapien
ccggcggtcgtaggcttgagagggc

SEQ ID NO: 1752928 - DNA, 25 bp, Homo sapien
gccaaatcaacgctcagagggagca

SEQ ID NO: 1752929 - DNA, 25 bp, Homo sapien
ccaaatcaacgctcagagggagcat

SEQ ID NO: 1752930 - DNA, 25 bp, Homo sapien
ctcgctctatcgctggttttgccgg

SEQ ID NO: 1752931 - DNA, 25 bp, Homo sapien
tctgacagcgtagcggtctgaactg

SEQ ID NO: 1752932 - DNA, 25 bp, Homo sapien
aaagtctctccgtcagattcacacg

SEQ ID NO: 1752933 - DNA, 25 bp, Homo sapien
tcattcccatcaaggctcggagttg

SEQ ID NO: 1752934 - DNA, 25 bp, Homo sapien
aactagaagcctgcgtgggctccgt

SEQ ID NO: 1752935 - DNA, 25 bp, Homo sapien
accccgcggctagcacaggctctct

SEQ ID NO: 1752936 - DNA, 25 bp, Homo sapien
gcggacacttcggcccaaagctctt

SEQ ID NO: 1752937 - DNA, 25 bp, Homo sapien
tgtctcttgctccagggtgtgcgga

SEQ ID NO: 1752938 - DNA, 25 bp, Homo sapien
ttccaggcccaattgtctcccactc

SEQ ID NO: 1752939 - DNA, 25 bp, Homo sapien
gactctcggagccggactgagcgct

SEQ ID NO: 1752940 - DNA, 25 bp, Homo sapien
aaggagccgcgcatttgacagttac

SEQ ID NO: 1752941 - DNA, 25 bp, Homo sapien
cggactgagcgctccggttaaagga

SEQ ID NO: 1752942 - DNA, 25 bp, Homo sapien
tgacagttactttttcgcctcgggc

SEQ ID NO: 1752943 - DNA, 25 bp, Homo sapien
cgtgcacgatggaggcgctggaggt

SEQ ID NO: 1752944 - DNA, 25 bp, Homo sapien
gggcggctcggcgtgcacgatggag

SEQ ID NO: 1752945 - DNA, 25 bp, Homo sapien
agtggttagacgctgcggtcgccat

SEQ ID NO: 1752946 - DNA, 25 bp, Homo sapien
caggctctgcgcttcgcggtagccc

SEQ ID NO: 1752947 - DNA, 25 bp, Homo sapien
tgcagagcgccgtagtcgccctgca

SEQ ID NO: 1752948 - DNA, 25 bp, Homo sapien
ggctgagcgggtgtccgttgctctg

SEQ ID NO: 1752949 - DNA, 25 bp, Homo sapien
tctgcagagcgccgtagtcgccctg

SEQ ID NO: 1752950 - DNA, 25 bp, Homo sapien
gcgggtgtccgttgctctgcagagc

SEQ ID NO: 1752951 - DNA, 25 bp, Homo sapien
ccaccgagggcttgatgtccggctg

SEQ ID NO: 1752952 - DNA, 25 bp, Homo sapien
tggcccgtgcagctcgtctccgcgg

SEQ ID NO: 1752953 - DNA, 25 bp, Homo sapien
agggtgggaggtgcgctgcagccgc

SEQ ID NO: 1752954 - DNA, 25 bp, Homo sapien
tggttagcggcgtggtgcaccagat

SEQ ID NO: 1752955 - DNA, 25 bp, Homo sapien
cgagtagagcaagccgccgttggac

SEQ ID NO: 1752956 - DNA, 25 bp, Homo sapien
tagagcaagccgccgttggacgctc

SEQ ID NO: 1752957 - DNA, 25 bp, Homo sapien
gcaagccgccgttggacgctcccat

SEQ ID NO: 1752958 - DNA, 25 bp, Homo sapien
gctgcgagtagagcaagccgccgtt

SEQ ID NO: 1752959 - DNA, 25 bp, Homo sapien
atggtgtggctcgtcgtgcgcgtcc

SEQ ID NO: 1752960 - DNA, 25 bp, Homo sapien
gtggtggtcggcatggtgtggctcg

SEQ ID NO: 1752961 - DNA, 25 bp, Homo sapien
gccaggcggaccctgcgggggcggc

SEQ ID NO: 1752962 - DNA, 25 bp, Homo sapien
tgtggctcgtcgtgcgcgtcccgca

SEQ ID NO: 1752963 - DNA, 25 bp, Homo sapien
ccacgtccgcttgggtaaatcccag

SEQ ID NO: 1752964 - DNA, 25 bp, Homo sapien
gaggtccgctttttccgcttgcgcc

SEQ ID NO: 1752965 - DNA, 25 bp, Homo sapien
taaatcccagtttgatccgccgctg

SEQ ID NO: 1752966 - DNA, 25 bp, Homo sapien
ccagctgtaagctgtccgcgaggga

SEQ ID NO: 1752967 - DNA, 25 bp, Homo sapien
cgcccggcagagtccctccgggagg

SEQ ID NO: 1752968 - DNA, 25 bp, Homo sapien
tgtctcctgttacaaaaccaaactc

SEQ ID NO: 1752969 - DNA, 25 bp, Homo sapien
cgtctgcaccccgtggtgtggtgga

SEQ ID NO: 1752970 - DNA, 25 bp, Homo sapien
cgtacacatcctcggcgcccggcag

SEQ ID NO: 1752971 - DNA, 25 bp, Homo sapien
tgggcccgcctgataaaatgaagca

SEQ ID NO: 1752972 - DNA, 25 bp, Homo sapien
ggttactcgcctgcaaaggtcaaaa

SEQ ID NO: 1752973 - DNA, 25 bp, Homo sapien
gacaaaacctgtctactgcgtggag

SEQ ID NO: 1752974 - DNA, 25 bp, Homo sapien
ggattcttgccttcgataaagcggg

SEQ ID NO: 1752975 - DNA, 25 bp, Homo sapien
tccgtgcccatctccttgtgacatt

SEQ ID NO: 1752976 - DNA, 25 bp, Homo sapien
gttcccatacctcaggaacgagcag

SEQ ID NO: 1752977 - DNA, 25 bp, Homo sapien
gcagcgtgatgcacccgaagcagct

SEQ ID NO: 1752978 - DNA, 25 bp, Homo sapien
cagtggctatttgccctgctctgga

SEQ ID NO: 1752979 - DNA, 25 bp, Homo sapien
gctacaggcatagtgactgaaagat

SEQ ID NO: 1752980 - DNA, 25 bp, Homo sapien
taaatatacattgaggcaggccact

SEQ ID NO: 1752981 - DNA, 25 bp, Homo sapien
taagagtcagagaagctgtagacac

SEQ ID NO: 1752982 - DNA, 25 bp, Homo sapien
aactcagtcaatttaaggtctaggg

SEQ ID NO: 1752983 - DNA, 25 bp, Homo sapien
tgtctgaaacaatctgttattagca

SEQ ID NO: 1752984 - DNA, 25 bp, Homo sapien
ttagcatcacggcttgaatctctcc

SEQ ID NO: 1752985 - DNA, 25 bp, Homo sapien
aacggattttggtactgtttcatct

SEQ ID NO: 1752986 - DNA, 25 bp, Homo sapien
actgtttcatctaagattgtctgaa

SEQ ID NO: 1752987 - DNA, 25 bp, Homo sapien
gatgatcagatgtaataagcccaga

SEQ ID NO: 1752988 - DNA, 25 bp, Homo sapien
aacttgtaaactgatccaacactgc

SEQ ID NO: 1752989 - DNA, 25 bp, Homo sapien
ggctttaaatacatcagcaaacttg

SEQ ID NO: 1752990 - DNA, 25 bp, Homo sapien
caatgttccaaggagggctttaaat

SEQ ID NO: 1752991 - DNA, 25 bp, Homo sapien
ctgtttgagacccatgtaatattga

SEQ ID NO: 1752992 - DNA, 25 bp, Homo sapien
ccatcagcatatctgcggtcacaaa

SEQ ID NO: 1752993 - DNA, 25 bp, Homo sapien
ttctgtcgcttctcattcagactat

SEQ ID NO: 1752994 - DNA, 25 bp, Homo sapien
gcatatctgcggtcacaaaacactt

SEQ ID NO: 1752995 - DNA, 25 bp, Homo sapien
ctattgataagatcatttggtggaa

SEQ ID NO: 1752996 - DNA, 25 bp, Homo sapien
tggaggagaatattgacccagaact

SEQ ID NO: 1752997 - DNA, 25 bp, Homo sapien
ctgcagtggaggagaatattgaccc

SEQ ID NO: 1752998 - DNA, 25 bp, Homo sapien
cagtggaggagaatattgacccaga

SEQ ID NO: 1752999 - DNA, 25 bp, Homo sapien
gaggagaatattgacccagaactca

SEQ ID NO: 1753000 - DNA, 25 bp, Homo sapien
gaaagcatgggtcaaaaccatggtg

SEQ ID NO: 1753001 - DNA, 25 bp, Homo sapien
cacgtttaacatgtgatggtttcca

SEQ ID NO: 1753002 - DNA, 25 bp, Homo sapien
cagcccctgtggctaagaacaaaaa

SEQ ID NO: 1753003 - DNA, 25 bp, Homo sapien
aaatgccttctcaaggtccactaaa

SEQ ID NO: 1753004 - DNA, 25 bp, Homo sapien
aagggtttgttgtgacggctagcca

SEQ ID NO: 1753005 - DNA, 25 bp, Homo sapien
gggcaactgccccagaaatttctcc

SEQ ID NO: 1753006 - DNA, 25 bp, Homo sapien
ggcagtgatggggttttccacctta

SEQ ID NO: 1753007 - DNA, 25 bp, Homo sapien
caccttagtgtgtaatacattcccc

SEQ ID NO: 1753008 - DNA, 25 bp, Homo sapien
gaaccgagaatgtttaggacggcca

SEQ ID NO: 1753009 - DNA, 25 bp, Homo sapien
gcggctacttcgtgggaaccgagaa

SEQ ID NO: 1753010 - DNA, 25 bp, Homo sapien
tttgccaaccagtgtgtggcctcca

SEQ ID NO: 1753011 - DNA, 25 bp, Homo sapien
taccatctgaaatataaaggcggct

SEQ ID NO: 1753012 - DNA, 25 bp, Homo sapien
tagagaccactccagagcctaggct

SEQ ID NO: 1753013 - DNA, 25 bp, Homo sapien
cgtcgctcgacacacagagagttaa

SEQ ID NO: 1753014 - DNA, 25 bp, Homo sapien
gagcagagagctgtttgccgccaac

SEQ ID NO: 1753015 - DNA, 25 bp, Homo sapien
ggctcttcacgcacaaaccgcatat

SEQ ID NO: 1753016 - DNA, 25 bp, Homo sapien
gacggctatacccaagacatctgga

SEQ ID NO: 1753017 - DNA, 25 bp, Homo sapien
cctagcccgcttccttgggaagcga

SEQ ID NO: 1753018 - DNA, 25 bp, Homo sapien
gggcttgccaactcctgcgtctaga

SEQ ID NO: 1753019 - DNA, 25 bp, Homo sapien
tagagtggaacagctcgacgtccga

SEQ ID NO: 1753020 - DNA, 25 bp, Homo sapien
gctgctgcccttggtcgccttccca

SEQ ID NO: 1753021 - DNA, 25 bp, Homo sapien
cactcctctccggccagcttcccgc

SEQ ID NO: 1753022 - DNA, 25 bp, Homo sapien
tccggccagcttcccgcctctgcgg

SEQ ID NO: 1753023 - DNA, 25 bp, Homo sapien
ccttggtcgccttcccactcctctc

SEQ ID NO: 1753024 - DNA, 25 bp, Homo sapien
ggcgctgatttcattccggcgcggc

SEQ ID NO: 1753025 - DNA, 25 bp, Homo sapien
ggaggcgctgatttcattccggcgc

SEQ ID NO: 1753026 - DNA, 25 bp, Homo sapien
gctgatttcattccggcgcggcttt

SEQ ID NO: 1753027 - DNA, 25 bp, Homo sapien
ccaggatgctcagccgtcagctgcg

SEQ ID NO: 1753028 - DNA, 25 bp, Homo sapien
tccacgacctggtgaaagttcctct

SEQ ID NO: 1753029 - DNA, 25 bp, Homo sapien
gcattatcgacaccttgcagggagc

SEQ ID NO: 1753030 - DNA, 25 bp, Homo sapien
cgcttggcgagaagtccggctcttt

SEQ ID NO: 1753031 - DNA, 25 bp, Homo sapien
gagcagtgcccacatatcctggttc

SEQ ID NO: 1753032 - DNA, 25 bp, Homo sapien
taaggaagcgtatgtctggaagacc

SEQ ID NO: 1753033 - DNA, 25 bp, Homo sapien
gcttttacccctagtgacccatcag

SEQ ID NO: 1753034 - DNA, 25 bp, Homo sapien
gaccccttagggctggctcttagta

SEQ ID NO: 1753035 - DNA, 25 bp, Homo sapien
tagcagaactacgaatatcccagac

SEQ ID NO: 1753036 - DNA, 25 bp, Homo sapien
aagccactgtgtcaggccccatgta

SEQ ID NO: 1753037 - DNA, 25 bp, Homo sapien
tctttccatgttgcctatgttggtc

SEQ ID NO: 1753038 - DNA, 25 bp, Homo sapien
tatagagacacagtctttccatgtt

SEQ ID NO: 1753039 - DNA, 25 bp, Homo sapien
tttttatagagacacagtctttcca

SEQ ID NO: 1753040 - DNA, 25 bp, Homo sapien
caaaatggtcagagctagttggaga

SEQ ID NO: 1753041 - DNA, 25 bp, Homo sapien
taagcctgtgacctggcaagtgttt

SEQ ID NO: 1753042 - DNA, 25 bp, Homo sapien
cactgagcaataaagtatcgtggca

SEQ ID NO: 1753043 - DNA, 25 bp, Homo sapien
catgtaaggatgtcttattaagcct

SEQ ID NO: 1753044 - DNA, 25 bp, Homo sapien
cttgactccaagccaatcaatggtg

SEQ ID NO: 1753045 - DNA, 25 bp, Homo sapien
gcctctggggactcattaaatggca

SEQ ID NO: 1753046 - DNA, 25 bp, Homo sapien
cctctggggactcattaaatggcat

SEQ ID NO: 1753047 - DNA, 25 bp, Homo sapien
ttgactccaagccaatcaatggtgg

SEQ ID NO: 1753048 - DNA, 25 bp, Homo sapien
tgcagagcaggacctctataccttc

SEQ ID NO: 1753049 - DNA, 25 bp, Homo sapien
tcagaactgagctaagccttctact

SEQ ID NO: 1753050 - DNA, 25 bp, Homo sapien
tactggtcctgcagtatccgcagtg

SEQ ID NO: 1753051 - DNA, 25 bp, Homo sapien
tctataccttcagcagaagtcctgg

SEQ ID NO: 1753052 - DNA, 25 bp, Homo sapien
ggctttcaacttttattctatattc

SEQ ID NO: 1753053 - DNA, 25 bp, Homo sapien
tatattcttcttcaccaagtttatt

SEQ ID NO: 1753054 - DNA, 25 bp, Homo sapien
gagttactgcacctggctttcaact

SEQ ID NO: 1753055 - DNA, 25 bp, Homo sapien
tctatattcttcttcaccaagttta

SEQ ID NO: 1753056 - DNA, 25 bp, Homo sapien
ggttgttatgcaaattgatcagtcg

SEQ ID NO: 1753057 - DNA, 25 bp, Homo sapien
aaaataggcttcaaaatgagactgc

SEQ ID NO: 1753058 - DNA, 25 bp, Homo sapien
gatcagtcgagtatctgtgaggaaa

SEQ ID NO: 1753059 - DNA, 25 bp, Homo sapien
tctctgcatccattgtaggttgtta

SEQ ID NO: 1753060 - DNA, 25 bp, Homo sapien
gaacctagcctttacgctgtcctgg

SEQ ID NO: 1753061 - DNA, 25 bp, Homo sapien
tcccttcgaagtacaagccgacttc

SEQ ID NO: 1753062 - DNA, 25 bp, Homo sapien
tcatcgattccccatctcacttcaa

SEQ ID NO: 1753063 - DNA, 25 bp, Homo sapien
gaagtacaagccgacttctcggcag

SEQ ID NO: 1753064 - DNA, 25 bp, Homo sapien
gtatgcctgtgccttattgcctgtc

SEQ ID NO: 1753065 - DNA, 25 bp, Homo sapien
gtgggctcttttgcaagtaaatatt

SEQ ID NO: 1753066 - DNA, 25 bp, Homo sapien
atgcctgtgccttattgcctgtcct

SEQ ID NO: 1753067 - DNA, 25 bp, Homo sapien
gtgccttattgcctgtcctttttgt

SEQ ID NO: 1753068 - DNA, 25 bp, Homo sapien
aatgtattccagactttttggatta

SEQ ID NO: 1753069 - DNA, 25 bp, Homo sapien
cacagtctaatgtattccagacttt

SEQ ID NO: 1753070 - DNA, 25 bp, Homo sapien
ggtttttgcacagtctaatgtattc

SEQ ID NO: 1753071 - DNA, 25 bp, Homo sapien
aggtttttgcacagtctaatgtatt

SEQ ID NO: 1753072 - DNA, 25 bp, Homo sapien
tatcctcagccagatatctccaatt

SEQ ID NO: 1753073 - DNA, 25 bp, Homo sapien
ttgtttggcagggtgtaaatccact

SEQ ID NO: 1753074 - DNA, 25 bp, Homo sapien
tagttaaatatcattgcatatctgc

SEQ ID NO: 1753075 - DNA, 25 bp, Homo sapien
ctataatggcaagctatgacaggtg

SEQ ID NO: 1753076 - DNA, 25 bp, Homo sapien
gagaacagacaagtaagctagcgtg

SEQ ID NO: 1753077 - DNA, 25 bp, Homo sapien
gaacaagtgggcagaacatgccaac

SEQ ID NO: 1753078 - DNA, 25 bp, Homo sapien
gaaggtcactattctgttttccaga

SEQ ID NO: 1753079 - DNA, 25 bp, Homo sapien
gctagcgtgtgcataaccaaatcaa

SEQ ID NO: 1753080 - DNA, 25 bp, Homo sapien
tctgaacgttggtatggaaatgagc

SEQ ID NO: 1753081 - DNA, 25 bp, Homo sapien
gaggcttctgaacgttggtatggaa

SEQ ID NO: 1753082 - DNA, 25 bp, Homo sapien
ggcttctgaacgttggtatggaaat

SEQ ID NO: 1753083 - DNA, 25 bp, Homo sapien
cagaggcttctgaacgttggtatgg

SEQ ID NO: 1753084 - DNA, 25 bp, Homo sapien
actttgtctccctgtactctatacc

SEQ ID NO: 1753085 - DNA, 25 bp, Homo sapien
tgacaacacgttcagcaaaatgcct

SEQ ID NO: 1753086 - DNA, 25 bp, Homo sapien
agagcatgggaagcctttctatcag

SEQ ID NO: 1753087 - DNA, 25 bp, Homo sapien
tatctgtgcagtgttttctgctccc

SEQ ID NO: 1753088 - DNA, 25 bp, Homo sapien
aggatgggtagagaaagtaccagga

SEQ ID NO: 1753089 - DNA, 25 bp, Homo sapien
ttcctctaagagcaaggatgggtag

SEQ ID NO: 1753090 - DNA, 25 bp, Homo sapien
catagatggcatagtatcatcatca

SEQ ID NO: 1753091 - DNA, 25 bp, Homo sapien
catcatcactgatttgccagtcagt

SEQ ID NO: 1753092 - DNA, 25 bp, Homo sapien
catcactgatttgccagtcagtcat

SEQ ID NO: 1753093 - DNA, 25 bp, Homo sapien
atagctgtacatagatggcatagta

SEQ ID NO: 1753094 - DNA, 25 bp, Homo sapien
ggcctggtgcacttgggaaaagact

SEQ ID NO: 1753095 - DNA, 25 bp, Homo sapien
ttctctgactatcactttggggtac

SEQ ID NO: 1753096 - DNA, 25 bp, Homo sapien
cttttctctgactatcactttgggg

SEQ ID NO: 1753097 - DNA, 25 bp, Homo sapien
ctgactatcactttggggtacatct

SEQ ID NO: 1753098 - DNA, 25 bp, Homo sapien
aattgctctatgaaagctaaactta

SEQ ID NO: 1753099 - DNA, 25 bp, Homo sapien
caattgctctatgaaagctaaactt

SEQ ID NO: 1753100 - DNA, 25 bp, Homo sapien
acaattgctctatgaaagctaaact

SEQ ID NO: 1753101 - DNA, 25 bp, Homo sapien
gctctgtagtcttgcctatgattac

SEQ ID NO: 1753102 - DNA, 25 bp, Homo sapien
gggaaaatctgccaatcctggacta

SEQ ID NO: 1753103 - DNA, 25 bp, Homo sapien
caatcctggactattttgaggtttc

SEQ ID NO: 1753104 - DNA, 25 bp, Homo sapien
tttcataagcaccaaattctgttag

SEQ ID NO: 1753105 - DNA, 25 bp, Homo sapien
tatagccacttctttattcccttac

SEQ ID NO: 1753106 - DNA, 25 bp, Homo sapien
ctatagccacttctttattccctta

SEQ ID NO: 1753107 - DNA, 25 bp, Homo sapien
tagagtgacatggccgtgaaaaggc

SEQ ID NO: 1753108 - DNA, 25 bp, Homo sapien
ctagagtgacatggccgtgaaaagg

SEQ ID NO: 1753109 - DNA, 25 bp, Homo sapien
tctttaggattgtaaatctggcaag

SEQ ID NO: 1753110 - DNA, 25 bp, Homo sapien
tgtaaatctggcaaggttttcagca

SEQ ID NO: 1753111 - DNA, 25 bp, Homo sapien
taactatagatattataactgcaaa

SEQ ID NO: 1753112 - DNA, 25 bp, Homo sapien
taatgaactgatttaactatagata

SEQ ID NO: 1753113 - DNA, 25 bp, Homo sapien
aagaacccttcagagaatacagatc

SEQ ID NO: 1753114 - DNA, 25 bp, Homo sapien
ctggattgaaatgaattattggctc

SEQ ID NO: 1753115 - DNA, 25 bp, Homo sapien
aaatatttaggcaagttataaactg

SEQ ID NO: 1753116 - DNA, 25 bp, Homo sapien
ccttcagagaatacagatctggatt

SEQ ID NO: 1753117 - DNA, 25 bp, Homo sapien
gaaagtaacatgcttctggcagcgt

SEQ ID NO: 1753118 - DNA, 25 bp, Homo sapien
cagcagtgcattccctctatgtgga

SEQ ID NO: 1753119 - DNA, 25 bp, Homo sapien
aatggattccatttttgacagctac

SEQ ID NO: 1753120 - DNA, 25 bp, Homo sapien
gagctggaaccgacactgacagatg

SEQ ID NO: 1753121 - DNA, 25 bp, Homo sapien
gagtgctcccaacttgctgccttgg

SEQ ID NO: 1753122 - DNA, 25 bp, Homo sapien
gtaaacgtctgctgccacaagcact

SEQ ID NO: 1753123 - DNA, 25 bp, Homo sapien
acaagcactacccaccctcctatac

SEQ ID NO: 1753124 - DNA, 25 bp, Homo sapien
actatccagcaatgcccgacccaaa

SEQ ID NO: 1753125 - DNA, 25 bp, Homo sapien
caggacggctttactcatggaacat

SEQ ID NO: 1753126 - DNA, 25 bp, Homo sapien
gaccaggacggctttactcatggaa

SEQ ID NO: 1753127 - DNA, 25 bp, Homo sapien
gggaccaggacggctttactcatgg

SEQ ID NO: 1753128 - DNA, 25 bp, Homo sapien
ccaggacggctttactcatggaaca

SEQ ID NO: 1753129 - DNA, 25 bp, Homo sapien
ggtactttgcctatatgacttaggg

SEQ ID NO: 1753130 - DNA, 25 bp, Homo sapien
gctttatgagcttaggttcttccaa

SEQ ID NO: 1753131 - DNA, 25 bp, Homo sapien
gagaaatagcctctgagtagcttta

SEQ ID NO: 1753132 - DNA, 25 bp, Homo sapien
tctgggagtccacagaggtaggtac

SEQ ID NO: 1753133 - DNA, 25 bp, Homo sapien
ccatagttgttttctgaaggaattt

SEQ ID NO: 1753134 - DNA, 25 bp, Homo sapien
cctcaaattcaaaacttccatagtt

SEQ ID NO: 1753135 - DNA, 25 bp, Homo sapien
caaattcaaaacttccatagttgtt

SEQ ID NO: 1753136 - DNA, 25 bp, Homo sapien
tagttgttttctgaaggaatttgga

SEQ ID NO: 1753137 - DNA, 25 bp, Homo sapien
ctgtaagagaggtgaagcaaaatgt

SEQ ID NO: 1753138 - DNA, 25 bp, Homo sapien
gtaagagaggtgaagcaaaatgtca

SEQ ID NO: 1753139 - DNA, 25 bp, Homo sapien
ataataactgtcagaaacaatttct

SEQ ID NO: 1753140 - DNA, 25 bp, Homo sapien
acaaaatgcaagcgctgtgtctttt

SEQ ID NO: 1753141 - DNA, 25 bp, Homo sapien
taaccacagcagtgaattcccttta

SEQ ID NO: 1753142 - DNA, 25 bp, Homo sapien
tagtaaccacagcagtgaattccct

SEQ ID NO: 1753143 - DNA, 25 bp, Homo sapien
gtaaccacagcagtgaattcccttt

SEQ ID NO: 1753144 - DNA, 25 bp, Homo sapien
ccacagcagtgaattccctttactg

SEQ ID NO: 1753145 - DNA, 25 bp, Homo sapien
ttctcttctcttactgttttctttc

SEQ ID NO: 1753146 - DNA, 25 bp, Homo sapien
ctcttactgttttctttcactgctt

SEQ ID NO: 1753147 - DNA, 25 bp, Homo sapien
ttctcttactgttttctttcactgc

SEQ ID NO: 1753148 - DNA, 25 bp, Homo sapien
ctcttctcttactgttttctttcac

SEQ ID NO: 1753149 - DNA, 25 bp, Homo sapien
ccctctgtttatatcaatgaattgt

SEQ ID NO: 1753150 - DNA, 25 bp, Homo sapien
cctctgtttatatcaatgaattgtt

SEQ ID NO: 1753151 - DNA, 25 bp, Homo sapien
cccctctgtttatatcaatgaattg

SEQ ID NO: 1753152 - DNA, 25 bp, Homo sapien
cagaattctgcaactgattgtaggg

SEQ ID NO: 1753153 - DNA, 25 bp, Homo sapien
tcagaattctgcaactgattgtagg

SEQ ID NO: 1753154 - DNA, 25 bp, Homo sapien
cccaagagagtcttgctccctcgtg

SEQ ID NO: 1753155 - DNA, 25 bp, Homo sapien
tccttttggagtgtaggacccaaga

SEQ ID NO: 1753156 - DNA, 25 bp, Homo sapien
ttggagtgtaggacccaagagagtc

SEQ ID NO: 1753157 - DNA, 25 bp, Homo sapien
caggggtaaagtggctgtaacctct

SEQ ID NO: 1753158 - DNA, 25 bp, Homo sapien
taaatccgtcatcagagatgacagc

SEQ ID NO: 1753159 - DNA, 25 bp, Homo sapien
ggccatccgaagtcagtaaatccgt

SEQ ID NO: 1753160 - DNA, 25 bp, Homo sapien
tactgcgactttgagcaagttggtg

SEQ ID NO: 1753161 - DNA, 25 bp, Homo sapien
tattaaaaagagaagcggccatccg

SEQ ID NO: 1753162 - DNA, 25 bp, Homo sapien
ggagaccaagtagcaaaccagtggg

SEQ ID NO: 1753163 - DNA, 25 bp, Homo sapien
gcctgactctacataatgaaacagc

SEQ ID NO: 1753164 - DNA, 25 bp, Homo sapien
tccagggacatttcagaagtacgga

SEQ ID NO: 1753165 - DNA, 25 bp, Homo sapien
tcttttgcctgactctacataatga

SEQ ID NO: 1753166 - DNA, 25 bp, Homo sapien
aagcacagatcaagccaggcactga

SEQ ID NO: 1753167 - DNA, 25 bp, Homo sapien
ccagatggaagctctggaatgcctc

SEQ ID NO: 1753168 - DNA, 25 bp, Homo sapien
gatggaagctctggaatgcctcctt

SEQ ID NO: 1753169 - DNA, 25 bp, Homo sapien
aaagcacagatcaagccaggcactg

SEQ ID NO: 1753170 - DNA, 25 bp, Homo sapien
gcttccaatcatatgcctgcctggc

SEQ ID NO: 1753171 - DNA, 25 bp, Homo sapien
cctgcctggcttacgggaaaggctg

SEQ ID NO: 1753172 - DNA, 25 bp, Homo sapien
gcaataaaggcacacgaggaaccga

SEQ ID NO: 1753173 - DNA, 25 bp, Homo sapien
gctgactgcaggtgataaagctgtc

SEQ ID NO: 1753174 - DNA, 25 bp, Homo sapien
cacaaaaggtgccagcatagtaagc

SEQ ID NO: 1753175 - DNA, 25 bp, Homo sapien
catcaataccgagtcaggagctgtc

SEQ ID NO: 1753176 - DNA, 25 bp, Homo sapien
taagcacatgataacggcctgaata

SEQ ID NO: 1753177 - DNA, 25 bp, Homo sapien
tcacatcctggaaatataagcacat

SEQ ID NO: 1753178 - DNA, 25 bp, Homo sapien
gctggtgcacgcttcattaaactca

SEQ ID NO: 1753179 - DNA, 25 bp, Homo sapien
gaaggataagtgcaaagtaaaatgg

SEQ ID NO: 1753180 - DNA, 25 bp, Homo sapien
gctttgctgaaggataagtgcaaag

SEQ ID NO: 1753181 - DNA, 25 bp, Homo sapien
gcagagaaacaaacgttagacttga

SEQ ID NO: 1753182 - DNA, 25 bp, Homo sapien
taccaagggatccaaggtagaactg

SEQ ID NO: 1753183 - DNA, 25 bp, Homo sapien
tttagtcgccaggatttaacaagcc

SEQ ID NO: 1753184 - DNA, 25 bp, Homo sapien
taactgaaggcacaggttgtctctg

SEQ ID NO: 1753185 - DNA, 25 bp, Homo sapien
gacttatgaggactgccactgcagc

SEQ ID NO: 1753186 - DNA, 25 bp, Homo sapien
gaaaggcagctgccgaaagccttgt

SEQ ID NO: 1753187 - DNA, 25 bp, Homo sapien
ggcagctgccgaaagccttgtctgg

SEQ ID NO: 1753188 - DNA, 25 bp, Homo sapien
gcagctgccgaaagccttgtctggg

SEQ ID NO: 1753189 - DNA, 25 bp, Homo sapien
cagctgccgaaagccttgtctgggt

SEQ ID NO: 1753190 - DNA, 25 bp, Homo sapien
tccctgtaaactactggcagtgtta

SEQ ID NO: 1753191 - DNA, 25 bp, Homo sapien
taaatgtctgtgtctacaggtaacc

SEQ ID NO: 1753192 - DNA, 25 bp, Homo sapien
acaggtaaccacagtccccaaatgc

SEQ ID NO: 1753193 - DNA, 25 bp, Homo sapien
caaatgccgccttctttgtgacttc

SEQ ID NO: 1753194 - DNA, 25 bp, Homo sapien
ctttaacggtttgacaataaggctg

SEQ ID NO: 1753195 - DNA, 25 bp, Homo sapien
gcttctgagggtttccttcacttaa

SEQ ID NO: 1753196 - DNA, 25 bp, Homo sapien
tgtcccatcaacatggattgatcca

SEQ ID NO: 1753197 - DNA, 25 bp, Homo sapien
gattgatccacacgtgggcttctga

SEQ ID NO: 1753198 - DNA, 25 bp, Homo sapien
tagagctcagaagtcagtttattcc

SEQ ID NO: 1753199 - DNA, 25 bp, Homo sapien
tggtgattcttggtatactcgagtt

SEQ ID NO: 1753200 - DNA, 25 bp, Homo sapien
tttccgaactgctgtcttagggccc

SEQ ID NO: 1753201 - DNA, 25 bp, Homo sapien
gtatactcgagtttccgaactgctg

SEQ ID NO: 1753202 - DNA, 25 bp, Homo sapien
aactgctgtcttagggcccctaggg

SEQ ID NO: 1753203 - DNA, 25 bp, Homo sapien
gatctaatatcaggacatattctgg

SEQ ID NO: 1753204 - DNA, 25 bp, Homo sapien
cccctaatctaggacattgctgatc

SEQ ID NO: 1753205 - DNA, 25 bp, Homo sapien
cattttgtttagaccaggctttaca

SEQ ID NO: 1753206 - DNA, 25 bp, Homo sapien
ggccaagaaatattgaaccagaatc

SEQ ID NO: 1753207 - DNA, 25 bp, Homo sapien
taaaactggaaagcacgctgaaagc

SEQ ID NO: 1753208 - DNA, 25 bp, Homo sapien
ttttgccaggcaccagtaaaactgg

SEQ ID NO: 1753209 - DNA, 25 bp, Homo sapien
atcctgggaactggcccatgcttcc

SEQ ID NO: 1753210 - DNA, 25 bp, Homo sapien
actggcccatgcttccagggcaagt

SEQ ID NO: 1753211 - DNA, 25 bp, Homo sapien
tctgtcgtgcaattcctgtagcgcc

SEQ ID NO: 1753212 - DNA, 25 bp, Homo sapien
ggcaaacaataggtgtttgtaatga

SEQ ID NO: 1753213 - DNA, 25 bp, Homo sapien
cagtgatggcagataaatatggcaa

SEQ ID NO: 1753214 - DNA, 25 bp, Homo sapien
gcctttgcactattctgagggcagg

SEQ ID NO: 1753215 - DNA, 25 bp, Homo sapien
tgcttccattctccatgctcattgg

SEQ ID NO: 1753216 - DNA, 25 bp, Homo sapien
gcttccattctccatgctcattggc

SEQ ID NO: 1753217 - DNA, 25 bp, Homo sapien
cctgcttccattctccatgctcatt

SEQ ID NO: 1753218 - DNA, 25 bp, Homo sapien
tccattctccatgctcattggccat

SEQ ID NO: 1753219 - DNA, 25 bp, Homo sapien
gtattctcatttcttgtacttcttg

SEQ ID NO: 1753220 - DNA, 25 bp, Homo sapien
aaggtaagtgagattcccgccttct

SEQ ID NO: 1753221 - DNA, 25 bp, Homo sapien
tgttttccagtaaagttagtgctga

SEQ ID NO: 1753222 - DNA, 25 bp, Homo sapien
tgagattcccgccttctgtattctc

SEQ ID NO: 1753223 - DNA, 25 bp, Homo sapien
taggacaaaagctcccgacagtagt

SEQ ID NO: 1753224 - DNA, 25 bp, Homo sapien
tcctagaggacggttagtccatgcc

SEQ ID NO: 1753225 - DNA, 25 bp, Homo sapien
cacatggtttgtcagcttcggatcc

SEQ ID NO: 1753226 - DNA, 25 bp, Homo sapien
ccgagagttaagagacagccaagga

SEQ ID NO: 1753227 - DNA, 25 bp, Homo sapien
gtttaattttaagcagcgagctgct

SEQ ID NO: 1753228 - DNA, 25 bp, Homo sapien
ctgtggtttaattttaagcagcgag

SEQ ID NO: 1753229 - DNA, 25 bp, Homo sapien
gtggtttaattttaagcagcgagct

SEQ ID NO: 1753230 - DNA, 25 bp, Homo sapien
agcgagctgctggcgttcttcagaa

SEQ ID NO: 1753231 - DNA, 25 bp, Homo sapien
agtctttctcctcacaatccaggac

SEQ ID NO: 1753232 - DNA, 25 bp, Homo sapien
tctttgtgacatcaaggacacgagt

SEQ ID NO: 1753233 - DNA, 25 bp, Homo sapien
tctgtggctatgactttggcacctt

SEQ ID NO: 1753234 - DNA, 25 bp, Homo sapien
cattgagattcatcgagaagtccca

SEQ ID NO: 1753235 - DNA, 25 bp, Homo sapien
ttaggaaggaatgccttgatcatca

SEQ ID NO: 1753236 - DNA, 25 bp, Homo sapien
aggaaggaatgccttgatcatcagg

SEQ ID NO: 1753237 - DNA, 25 bp, Homo sapien
aaggaatgccttgatcatcaggtac

SEQ ID NO: 1753238 - DNA, 25 bp, Homo sapien
gaaggaatgccttgatcatcaggta

SEQ ID NO: 1753239 - DNA, 25 bp, Homo sapien
agatggcgtatcaaccgttcctggg

SEQ ID NO: 1753240 - DNA, 25 bp, Homo sapien
atggcgtatcaaccgttcctgggca

SEQ ID NO: 1753241 - DNA, 25 bp, Homo sapien
gcaaatcgtcccatcttttgtctct

SEQ ID NO: 1753242 - DNA, 25 bp, Homo sapien
tcttctgcagttgcaaatcgtccca

SEQ ID NO: 1753243 - DNA, 25 bp, Homo sapien
atcctccatcaatgatgacagggtt

SEQ ID NO: 1753244 - DNA, 25 bp, Homo sapien
tcctccatcaatgatgacagggtta

SEQ ID NO: 1753245 - DNA, 25 bp, Homo sapien
cctccatcaatgatgacagggttac

SEQ ID NO: 1753246 - DNA, 25 bp, Homo sapien
atcagactcttgcaaacagtgacat

SEQ ID NO: 1753247 - DNA, 25 bp, Homo sapien
gaatcagactcttgcaaacagtgac

SEQ ID NO: 1753248 - DNA, 25 bp, Homo sapien
agaatcagactcttgcaaacagtga

SEQ ID NO: 1753249 - DNA, 25 bp, Homo sapien
aatcagactcttgcaaacagtgaca

SEQ ID NO: 1753250 - DNA, 25 bp, Homo sapien
gcttacaaattgagatttattttaa

SEQ ID NO: 1753251 - DNA, 25 bp, Homo sapien
tgcttacaaattgagatttatttta

SEQ ID NO: 1753252 - DNA, 25 bp, Homo sapien
tattttaaaaactattctcttgctg

SEQ ID NO: 1753253 - DNA, 25 bp, Homo sapien
aatctgattgttgtgctaagtgccc

SEQ ID NO: 1753254 - DNA, 25 bp, Homo sapien
gccttgagccttcatcatgcagatg

SEQ ID NO: 1753255 - DNA, 25 bp, Homo sapien
taagtgccctatcattcctgctgcc

SEQ ID NO: 1753256 - DNA, 25 bp, Homo sapien
ctactagaaacacccaacaaagtgg

SEQ ID NO: 1753257 - DNA, 25 bp, Homo sapien
tgatcatgtcagcactgtttgttct

SEQ ID NO: 1753258 - DNA, 25 bp, Homo sapien
tgcgggcatcgctgttcaggtgtga

SEQ ID NO: 1753259 - DNA, 25 bp, Homo sapien
tttgttcttatcatgcgggcatcgc

SEQ ID NO: 1753260 - DNA, 25 bp, Homo sapien
catttccttcttatgatcatgtcag

SEQ ID NO: 1753261 - DNA, 25 bp, Homo sapien
gattgagggaatagttcagatagca

SEQ ID NO: 1753262 - DNA, 25 bp, Homo sapien
ttgagggaatagttcagatagcaag

SEQ ID NO: 1753263 - DNA, 25 bp, Homo sapien
tgagggaatagttcagatagcaagt

SEQ ID NO: 1753264 - DNA, 25 bp, Homo sapien
gagattgagggaatagttcagatag

SEQ ID NO: 1753265 - DNA, 25 bp, Homo sapien
gcccattgtccctatctgcagtctg

SEQ ID NO: 1753266 - DNA, 25 bp, Homo sapien
tcgattcctgggtctacattctgcc

SEQ ID NO: 1753267 - DNA, 25 bp, Homo sapien
catctgccctacatgaagctggtaa

SEQ ID NO: 1753268 - DNA, 25 bp, Homo sapien
tgcaagctttatgccctggagtgag

SEQ ID NO: 1753269 - DNA, 25 bp, Homo sapien
caatctggcctttgattccagtcat

SEQ ID NO: 1753270 - DNA, 25 bp, Homo sapien
gagagcccatcaccacagatctcaa

SEQ ID NO: 1753271 - DNA, 25 bp, Homo sapien
cagatctcaatctggcctttgattc

SEQ ID NO: 1753272 - DNA, 25 bp, Homo sapien
tttcctttataagtagtggaagctg

SEQ ID NO: 1753273 - DNA, 25 bp, Homo sapien
cctgcagacatctgattgtccctgt

SEQ ID NO: 1753274 - DNA, 25 bp, Homo sapien
tagttctgcaacagccaaggggcaa

SEQ ID NO: 1753275 - DNA, 25 bp, Homo sapien
gaagtgacacacctgatgaagacat

SEQ ID NO: 1753276 - DNA, 25 bp, Homo sapien
tacttgggctatagggagacattct

SEQ ID NO: 1753277 - DNA, 25 bp, Homo sapien
ctgacatttcacatctctggtgttt

SEQ ID NO: 1753278 - DNA, 25 bp, Homo sapien
ttcctgtcatttctcaggatccaca

SEQ ID NO: 1753279 - DNA, 25 bp, Homo sapien
tggtgttttgatgcttcctgtcatt

SEQ ID NO: 1753280 - DNA, 25 bp, Homo sapien
catttcacatctctggtgttttgat

SEQ ID NO: 1753281 - DNA, 25 bp, Homo sapien
gggtgatctagcactggtgctggtg

SEQ ID NO: 1753282 - DNA, 25 bp, Homo sapien
tgatctagcactggtgctggtgaag

SEQ ID NO: 1753283 - DNA, 25 bp, Homo sapien
actgaatccttgtcatgaaagcttc

SEQ ID NO: 1753284 - DNA, 25 bp, Homo sapien
gctggtgaaggggacacactgaatc

SEQ ID NO: 1753285 - DNA, 25 bp, Homo sapien
tctcatgacagtgcatgtgaaggat

SEQ ID NO: 1753286 - DNA, 25 bp, Homo sapien
ctctcatgacagtgcatgtgaagga

SEQ ID NO: 1753287 - DNA, 25 bp, Homo sapien
ctcatgacagtgcatgtgaaggatt

SEQ ID NO: 1753288 - DNA, 25 bp, Homo sapien
tcatgacagtgcatgtgaaggattt

SEQ ID NO: 1753289 - DNA, 25 bp, Homo sapien
taatgatctgccactgtaggtctct

SEQ ID NO: 1753290 - DNA, 25 bp, Homo sapien
tgtttgcctcaagggcatcattctg

SEQ ID NO: 1753291 - DNA, 25 bp, Homo sapien
aaatctaactcttggctatactgca

SEQ ID NO: 1753292 - DNA, 25 bp, Homo sapien
tcataggaactctggtagctgggat

SEQ ID NO: 1753293 - DNA, 25 bp, Homo sapien
cctggctctggaaagctcgagcctt

SEQ ID NO: 1753294 - DNA, 25 bp, Homo sapien
ttgttagacctatattctgcctcag

SEQ ID NO: 1753295 - DNA, 25 bp, Homo sapien
tttgttagacctatattctgcctca

SEQ ID NO: 1753296 - DNA, 25 bp, Homo sapien
tgttagacctatattctgcctcagg

SEQ ID NO: 1753297 - DNA, 25 bp, Homo sapien
cagccagatgcgggtattgctgcat

SEQ ID NO: 1753298 - DNA, 25 bp, Homo sapien
agccagatgcgggtattgctgcatc

SEQ ID NO: 1753299 - DNA, 25 bp, Homo sapien
atctgttttgcgtaatgaagttgag

SEQ ID NO: 1753300 - DNA, 25 bp, Homo sapien
taggtgctccctatctgagaaggat

SEQ ID NO: 1753301 - DNA, 25 bp, Homo sapien
cactcccaggtattgtaggtgctcc

SEQ ID NO: 1753302 - DNA, 25 bp, Homo sapien
ccagggcactgctaatggaatcagg

SEQ ID NO: 1753303 - DNA, 25 bp, Homo sapien
ctggacagctcttactttaggaaca

SEQ ID NO: 1753304 - DNA, 25 bp, Homo sapien
ttttcctttagcgttgagaggtgag

SEQ ID NO: 1753305 - DNA, 25 bp, Homo sapien
ttgtatagttgatcaggtcgtgggt

SEQ ID NO: 1753306 - DNA, 25 bp, Homo sapien
caggtcgtgggtgtgttgcttttcc

SEQ ID NO: 1753307 - DNA, 25 bp, Homo sapien
ctaatgagcaatgattgtatagttg

SEQ ID NO: 1753308 - DNA, 25 bp, Homo sapien
gttggtccacgctgcactcacctaa

SEQ ID NO: 1753309 - DNA, 25 bp, Homo sapien
gatgctgattggctgcacgttgctg

SEQ ID NO: 1753310 - DNA, 25 bp, Homo sapien
gcagggctttatgttgaactctgaa

SEQ ID NO: 1753311 - DNA, 25 bp, Homo sapien
gcatctctagttcatcagcctcagg

SEQ ID NO: 1753312 - DNA, 25 bp, Homo sapien
catatacacccatactcctgtgcaa

SEQ ID NO: 1753313 - DNA, 25 bp, Homo sapien
tatttgtcctaaattgccctttata

SEQ ID NO: 1753314 - DNA, 25 bp, Homo sapien
taaattgccctttatactgatgatc

SEQ ID NO: 1753315 - DNA, 25 bp, Homo sapien
tatacacccatactcctgtgcaagg

SEQ ID NO: 1753316 - DNA, 25 bp, Homo sapien
caaagacttctaatatcctgttcct

SEQ ID NO: 1753317 - DNA, 25 bp, Homo sapien
tccttattgctccttggcagaacct

SEQ ID NO: 1753318 - DNA, 25 bp, Homo sapien
acttgggtccttattgctccttggc

SEQ ID NO: 1753319 - DNA, 25 bp, Homo sapien
cctcaccattacagaatagtctcaa

SEQ ID NO: 1753320 - DNA, 25 bp, Homo sapien
ttctgctgcaactcttcgccgctat

SEQ ID NO: 1753321 - DNA, 25 bp, Homo sapien
gtttttagccctcgttcctgtgctg

SEQ ID NO: 1753322 - DNA, 25 bp, Homo sapien
actcttcgccgctattaagaatttg

SEQ ID NO: 1753323 - DNA, 25 bp, Homo sapien
gaatttgaactcatagtaatatgct

SEQ ID NO: 1753324 - DNA, 25 bp, Homo sapien
caagtggtttatgcagtcctcagca

SEQ ID NO: 1753325 - DNA, 25 bp, Homo sapien
tcacaagtgactgaactatggggta

SEQ ID NO: 1753326 - DNA, 25 bp, Homo sapien
ggtagtaatttctgaaggctcaagt

SEQ ID NO: 1753327 - DNA, 25 bp, Homo sapien
tcccttgacggaattatagcaccat

SEQ ID NO: 1753328 - DNA, 25 bp, Homo sapien
tgatctcagagtcgttaaaatacat

SEQ ID NO: 1753329 - DNA, 25 bp, Homo sapien
tgctgtgatctcagagtcgttaaaa

SEQ ID NO: 1753330 - DNA, 25 bp, Homo sapien
tgtgatctcagagtcgttaaaatac

SEQ ID NO: 1753331 - DNA, 25 bp, Homo sapien
gctgtgatctcagagtcgttaaaat

SEQ ID NO: 1753332 - DNA, 25 bp, Homo sapien
tttcaagtgagtggcttttaagaag

SEQ ID NO: 1753333 - DNA, 25 bp, Homo sapien
agagtgttacgaagtgtgagaacca

SEQ ID NO: 1753334 - DNA, 25 bp, Homo sapien
agttgtaaggctcttgtataattaa

SEQ ID NO: 1753335 - DNA, 25 bp, Homo sapien
tttttaggcatataactttgataga

SEQ ID NO: 1753336 - DNA, 25 bp, Homo sapien
gaatgatgaccccaatgtgaagatg

SEQ ID NO: 1753337 - DNA, 25 bp, Homo sapien
tgactactgtatataaatgtggaaa

SEQ ID NO: 1753338 - DNA, 25 bp, Homo sapien
gaattgtgcactatgttgactactg

SEQ ID NO: 1753339 - DNA, 25 bp, Homo sapien
gccatatttaaacttgtacacttga

SEQ ID NO: 1753340 - DNA, 25 bp, Homo sapien
aatccatgcactttacttgaaaaaa

SEQ ID NO: 1753341 - DNA, 25 bp, Homo sapien
tcttaaaagactgctgtagattcac

SEQ ID NO: 1753342 - DNA, 25 bp, Homo sapien
taggagagccaagatttacaattgc

SEQ ID NO: 1753343 - DNA, 25 bp, Homo sapien
tgcttctgaccaacataaggattgc

SEQ ID NO: 1753344 - DNA, 25 bp, Homo sapien
cactcttgacgccactgtctttgga

SEQ ID NO: 1753345 - DNA, 25 bp, Homo sapien
gacacttggcacaggcaatgtggac

SEQ ID NO: 1753346 - DNA, 25 bp, Homo sapien
gggcccaagctttccactcttgacg

SEQ ID NO: 1753347 - DNA, 25 bp, Homo sapien
tgtggaccttaccagggacaagacc

SEQ ID NO: 1753348 - DNA, 25 bp, Homo sapien
cttccactcagtttttggtcatcct

SEQ ID NO: 1753349 - DNA, 25 bp, Homo sapien
tacaatatggccttcctcacagaga

SEQ ID NO: 1753350 - DNA, 25 bp, Homo sapien
ggttccttcatctacaatatggcct

SEQ ID NO: 1753351 - DNA, 25 bp, Homo sapien
cccagtggttccttcatctacaata

SEQ ID NO: 1753352 - DNA, 25 bp, Homo sapien
taaaagctcaggattgaatgttgaa

SEQ ID NO: 1753353 - DNA, 25 bp, Homo sapien
tgaagatctactttaacatatctcc

SEQ ID NO: 1753354 - DNA, 25 bp, Homo sapien
tttctttgaagatctactttaacat

SEQ ID NO: 1753355 - DNA, 25 bp, Homo sapien
tcaggattgaatgttgaagctccaa

SEQ ID NO: 1753356 - DNA, 25 bp, Homo sapien
ctttctgccccgcaaccatggtaga

SEQ ID NO: 1753357 - DNA, 25 bp, Homo sapien
gggtgctcactaggtacctgaatct

SEQ ID NO: 1753358 - DNA, 25 bp, Homo sapien
tggctctaattcatcaccggggtgc

SEQ ID NO: 1753359 - DNA, 25 bp, Homo sapien
tacctgaatctctaggtacttcctt

SEQ ID NO: 1753360 - DNA, 25 bp, Homo sapien
gataaaataatcctgtcgtttgtgg

SEQ ID NO: 1753361 - DNA, 25 bp, Homo sapien
tgactgctgtagacctgtctttacc

SEQ ID NO: 1753362 - DNA, 25 bp, Homo sapien
ttcaagccgtcaagccctgactgct

SEQ ID NO: 1753363 - DNA, 25 bp, Homo sapien
taatcctgtcgtttgtggtggctgc

SEQ ID NO: 1753364 - DNA, 25 bp, Homo sapien
tttgctgccattcccccaaatggct

SEQ ID NO: 1753365 - DNA, 25 bp, Homo sapien
tttagactcttataaagcaccaaca

SEQ ID NO: 1753366 - DNA, 25 bp, Homo sapien
ttgctttgctgccattcccccaaat

SEQ ID NO: 1753367 - DNA, 25 bp, Homo sapien
tgcagctccggggttcacctttaga

SEQ ID NO: 1753368 - DNA, 25 bp, Homo sapien
gcatactccaatatttcagggccct

SEQ ID NO: 1753369 - DNA, 25 bp, Homo sapien
ttagaatactagagctttacagagg

SEQ ID NO: 1753370 - DNA, 25 bp, Homo sapien
gtagctatgtctacaggtgctcagc

SEQ ID NO: 1753371 - DNA, 25 bp, Homo sapien
aaatgtgtgataatatagtgtatga

SEQ ID NO: 1753372 - DNA, 25 bp, Homo sapien
taaacctcgcatagtcccgttggcg

SEQ ID NO: 1753373 - DNA, 25 bp, Homo sapien
tcctgtctggaaaagcgcaggccgc

SEQ ID NO: 1753374 - DNA, 25 bp, Homo sapien
tgtaatacaaaagctgcgcgtccct

SEQ ID NO: 1753375 - DNA, 25 bp, Homo sapien
ggtcagcgcgaaacctaaggcttgg

SEQ ID NO: 1753376 - DNA, 25 bp, Homo sapien
tgtaggcgagctaacacagtgtacc

SEQ ID NO: 1753377 - DNA, 25 bp, Homo sapien
tatagtgtgctcttgtacctctaca

SEQ ID NO: 1753378 - DNA, 25 bp, Homo sapien
tagacatcgatcacatctggagaca

SEQ ID NO: 1753379 - DNA, 25 bp, Homo sapien
gatcagtgtttcctcaacatgaaga

SEQ ID NO: 1753380 - DNA, 25 bp, Homo sapien
caatcaagccagtgcaccagtagag

SEQ ID NO: 1753381 - DNA, 25 bp, Homo sapien
tgaaattgctggaatcaatcaagcc

SEQ ID NO: 1753382 - DNA, 25 bp, Homo sapien
tatgaaagagggctagaaatagacc

SEQ ID NO: 1753383 - DNA, 25 bp, Homo sapien
aattgtacccatggacttttgccag

SEQ ID NO: 1753384 - DNA, 25 bp, Homo sapien
gaaatcggagtccttcccgagagag

SEQ ID NO: 1753385 - DNA, 25 bp, Homo sapien
catacagttctagctcaggtagtag

SEQ ID NO: 1753386 - DNA, 25 bp, Homo sapien
tagaagtagaagtcgctcaagggat

SEQ ID NO: 1753387 - DNA, 25 bp, Homo sapien
tagacgaaccaatcgtgccagtcgc

SEQ ID NO: 1753388 - DNA, 25 bp, Homo sapien
cttccatggcttgtgttattccttt

SEQ ID NO: 1753389 - DNA, 25 bp, Homo sapien
aatagtcacttgaaactatggagga

SEQ ID NO: 1753390 - DNA, 25 bp, Homo sapien
tatttcacagtatgatgtagatttc

SEQ ID NO: 1753391 - DNA, 25 bp, Homo sapien
aatcagcctctcatttgggtatgct

SEQ ID NO: 1753392 - DNA, 25 bp, Homo sapien
cattcctttaaagcgctgcggtccg

SEQ ID NO: 1753393 - DNA, 25 bp, Homo sapien
cttaaaataggctgcgtacgctgct

SEQ ID NO: 1753394 - DNA, 25 bp, Homo sapien
taaagagagtgctcacggtcccatc

SEQ ID NO: 1753395 - DNA, 25 bp, Homo sapien
acaattatacgtgggcacttgccgg

SEQ ID NO: 1753396 - DNA, 25 bp, Homo sapien
ccgggtgagacaaatcgggcgccat

SEQ ID NO: 1753397 - DNA, 25 bp, Homo sapien
gcttcagatgacaaacggatgttat

SEQ ID NO: 1753398 - DNA, 25 bp, Homo sapien
ctggatgagagatggtatggcttca

SEQ ID NO: 1753399 - DNA, 25 bp, Homo sapien
tattattctttacttccgggtgaga

SEQ ID NO: 1753400 - DNA, 25 bp, Homo sapien
aatggcgccgaaacatgtcaatccg

SEQ ID NO: 1753401 - DNA, 25 bp, Homo sapien
tgaaggcgccctatgtgtagaacac

SEQ ID NO: 1753402 - DNA, 25 bp, Homo sapien
tgcccggtgttgaccagagtagaga

SEQ ID NO: 1753403 - DNA, 25 bp, Homo sapien
gaatggcgccagctacgttaaaaag

SEQ ID NO: 1753404 - DNA, 25 bp, Homo sapien
gcttccagcgcactaagtaacttga

SEQ ID NO: 1753405 - DNA, 25 bp, Homo sapien
gaatactccgagaaggttcgagcca

SEQ ID NO: 1753406 - DNA, 25 bp, Homo sapien
ccctcggcagcgctcaagtgagagt

SEQ ID NO: 1753407 - DNA, 25 bp, Homo sapien
tgaactgcgctaagcaactggccag

SEQ ID NO: 1753408 - DNA, 25 bp, Homo sapien
tgttgaggttaacaaagagaaagac

SEQ ID NO: 1753409 - DNA, 25 bp, Homo sapien
ggcgcgatgtgttgaggttaacaaa

SEQ ID NO: 1753410 - DNA, 25 bp, Homo sapien
gggtcagctaaggtctccgctttcg

SEQ ID NO: 1753411 - DNA, 25 bp, Homo sapien
ccgggactagttaagccaaggagag

SEQ ID NO: 1753412 - DNA, 25 bp, Homo sapien
gaatggcattgcatgcgtccttttg

SEQ ID NO: 1753413 - DNA, 25 bp, Homo sapien
ggaaagcagcaggacggaaaccaga

SEQ ID NO: 1753414 - DNA, 25 bp, Homo sapien
gcagcaggacggaaaccagacttcc

SEQ ID NO: 1753415 - DNA, 25 bp, Homo sapien
ttttgagaagccatcttgtagttga

SEQ ID NO: 1753416 - DNA, 25 bp, Homo sapien
tccttttaacttgtagctcctagcc

SEQ ID NO: 1753417 - DNA, 25 bp, Homo sapien
gacacttgaacgttgttcatataaa

SEQ ID NO: 1753418 - DNA, 25 bp, Homo sapien
cacgcagaagttttcatgttactct

SEQ ID NO: 1753419 - DNA, 25 bp, Homo sapien
gctcctagcctggaaattgatactt

SEQ ID NO: 1753420 - DNA, 25 bp, Homo sapien
tcttttgcacgacaattgcccaatg

SEQ ID NO: 1753421 - DNA, 25 bp, Homo sapien
taatgctaattcaggagtatctggg

SEQ ID NO: 1753422 - DNA, 25 bp, Homo sapien
ctgaattttcatgcaaagggcatct

SEQ ID NO: 1753423 - DNA, 25 bp, Homo sapien
tatctgggtctctagtgctgaggaa

SEQ ID NO: 1753424 - DNA, 25 bp, Homo sapien
gtagtatcctcatgaacctgcgtca

SEQ ID NO: 1753425 - DNA, 25 bp, Homo sapien
taaacttgaaaatcagacctgatgc

SEQ ID NO: 1753426 - DNA, 25 bp, Homo sapien
tcacctttactagggaaacaagcaa

SEQ ID NO: 1753427 - DNA, 25 bp, Homo sapien
aatgttattttgaggaccacgtccg

SEQ ID NO: 1753428 - DNA, 25 bp, Homo sapien
taagcatttgatgatccaggcgcag

SEQ ID NO: 1753429 - DNA, 25 bp, Homo sapien
gaaggtgacatgtcctcccctagaa

SEQ ID NO: 1753430 - DNA, 25 bp, Homo sapien
gcagcagatcatgcacgtgacagct

SEQ ID NO: 1753431 - DNA, 25 bp, Homo sapien
ccaggcgcaggatgatcaaactgca

SEQ ID NO: 1753432 - DNA, 25 bp, Homo sapien
cactactatctaggaaatgcttaag

SEQ ID NO: 1753433 - DNA, 25 bp, Homo sapien
cctggcctaaatggacaatacctgc

SEQ ID NO: 1753434 - DNA, 25 bp, Homo sapien
caatacctgcataaagcccaatggg

SEQ ID NO: 1753435 - DNA, 25 bp, Homo sapien
gaacaggcagtcattgaacataagt

SEQ ID NO: 1753436 - DNA, 25 bp, Homo sapien
tagccacaagttgttgtagccaagg

SEQ ID NO: 1753437 - DNA, 25 bp, Homo sapien
cagctactgagggatatatatgcca

SEQ ID NO: 1753438 - DNA, 25 bp, Homo sapien
gagaccatttcttagatgactaggg

SEQ ID NO: 1753439 - DNA, 25 bp, Homo sapien
tgccaactttgggagttgcacagct

SEQ ID NO: 1753440 - DNA, 25 bp, Homo sapien
tgtgctgcagtacaaccccaaatcc

SEQ ID NO: 1753441 - DNA, 25 bp, Homo sapien
gagggcccacttctgttcataaaga

SEQ ID NO: 1753442 - DNA, 25 bp, Homo sapien
tcttctggcaatatagagacggaga

SEQ ID NO: 1753443 - DNA, 25 bp, Homo sapien
catgggaaaagtacaaggcatctct

SEQ ID NO: 1753444 - DNA, 25 bp, Homo sapien
tttacgtagaaatcatgaattcaaa

SEQ ID NO: 1753445 - DNA, 25 bp, Homo sapien
tctagtgcattgttaaaaaagatta

SEQ ID NO: 1753446 - DNA, 25 bp, Homo sapien
agctgtgtaacttattgagcgttat

SEQ ID NO: 1753447 - DNA, 25 bp, Homo sapien
gagcgttattttggtgttactgtat

SEQ ID NO: 1753448 - DNA, 25 bp, Homo sapien
tttaaatgtaccaacagagctattt

SEQ ID NO: 1753449 - DNA, 25 bp, Homo sapien
cagttggtatcaattcaaagaatag

SEQ ID NO: 1753450 - DNA, 25 bp, Homo sapien
taccaacagagctattttactgtat

SEQ ID NO: 1753451 - DNA, 25 bp, Homo sapien
acagttggtatcaattcaaagaata

SEQ ID NO: 1753452 - DNA, 25 bp, Homo sapien
ggtatcaatttgttagccaggcatg

SEQ ID NO: 1753453 - DNA, 25 bp, Homo sapien
tgttcttaaaacttgtgaagaccac

SEQ ID NO: 1753454 - DNA, 25 bp, Homo sapien
gctgagaagagtgatagttggtatc

SEQ ID NO: 1753455 - DNA, 25 bp, Homo sapien
tgaagaccacctttttaggtagctg

SEQ ID NO: 1753456 - DNA, 25 bp, Homo sapien
gaggcatgcacttttcatcggatgg

SEQ ID NO: 1753457 - DNA, 25 bp, Homo sapien
catggagatctcagtaccagagcag

SEQ ID NO: 1753458 - DNA, 25 bp, Homo sapien
caagtcagccatcttggtaagagca

SEQ ID NO: 1753459 - DNA, 25 bp, Homo sapien
tgttatcaaggttaccagtgctgcc

SEQ ID NO: 1753460 - DNA, 25 bp, Homo sapien
ggttcaagcatcctaatcattagtg

SEQ ID NO: 1753461 - DNA, 25 bp, Homo sapien
caagtgccaggtaaatgcctagtcc

SEQ ID NO: 1753462 - DNA, 25 bp, Homo sapien
aagaaaggataagaatagtggctgc

SEQ ID NO: 1753463 - DNA, 25 bp, Homo sapien
cattagtgccaatgaatgatagtgc

SEQ ID NO: 1753464 - DNA, 25 bp, Homo sapien
gaatcaagagcacttagtgcacaag

SEQ ID NO: 1753465 - DNA, 25 bp, Homo sapien
gccagtgggtccatgttagtgacac

SEQ ID NO: 1753466 - DNA, 25 bp, Homo sapien
cttctgtaggaatagcatgttcctc

SEQ ID NO: 1753467 - DNA, 25 bp, Homo sapien
ttacaggtggttccagaatcaagag

SEQ ID NO: 1753468 - DNA, 25 bp, Homo sapien
gactgtacccttctaggtcatatga

SEQ ID NO: 1753469 - DNA, 25 bp, Homo sapien
acacccggctaatgtctgttgtttt

SEQ ID NO: 1753470 - DNA, 25 bp, Homo sapien
tatgggtcatccaactaactttgct

SEQ ID NO: 1753471 - DNA, 25 bp, Homo sapien
gaattccctctaggagtgcctagaa

SEQ ID NO: 1753472 - DNA, 25 bp, Homo sapien
tcagcggagtgtgatacttcaaaac

SEQ ID NO: 1753473 - DNA, 25 bp, Homo sapien
catgtgtactactgagagtggtgta

SEQ ID NO: 1753474 - DNA, 25 bp, Homo sapien
gatgacttggtcttccttgaaggaa

SEQ ID NO: 1753475 - DNA, 25 bp, Homo sapien
agaagtgaattgtctttcgtgccac

SEQ ID NO: 1753476 - DNA, 25 bp, Homo sapien
ttcgagcttcctggccggccgcttt

SEQ ID NO: 1753477 - DNA, 25 bp, Homo sapien
ccttttgttgggctgtgccctgacc

SEQ ID NO: 1753478 - DNA, 25 bp, Homo sapien
ctttgtctcagatgggtacccggcc

SEQ ID NO: 1753479 - DNA, 25 bp, Homo sapien
gctgaatagcaaatgttgctacctg

SEQ ID NO: 1753480 - DNA, 25 bp, Homo sapien
ctgattattctagtcagccctttgt

SEQ ID NO: 1753481 - DNA, 25 bp, Homo sapien
actgattattctagtcagccctttg

SEQ ID NO: 1753482 - DNA, 25 bp, Homo sapien
agaacttccaacacttgttaaatag

SEQ ID NO: 1753483 - DNA, 25 bp, Homo sapien
tctgcctatccatgagtatggaagg

SEQ ID NO: 1753484 - DNA, 25 bp, Homo sapien
ttccaacacttgttaaataggagtg

SEQ ID NO: 1753485 - DNA, 25 bp, Homo sapien
gcctatccatgagtatggaaggttc

SEQ ID NO: 1753486 - DNA, 25 bp, Homo sapien
acttcccacagtagtcagggtattt

SEQ ID NO: 1753487 - DNA, 25 bp, Homo sapien
gacttcccacagtagtcagggtatt

SEQ ID NO: 1753488 - DNA, 25 bp, Homo sapien
ttcccttcctaatgagcctgggagc

SEQ ID NO: 1753489 - DNA, 25 bp, Homo sapien
cataagagacggctacgcccagggg

SEQ ID NO: 1753490 - DNA, 25 bp, Homo sapien
tgggtattttcccttcctaatgagc

SEQ ID NO: 1753491 - DNA, 25 bp, Homo sapien
cgaccataagagacggctacgccca

SEQ ID NO: 1753492 - DNA, 25 bp, Homo sapien
gattaattggattctggacacagct

SEQ ID NO: 1753493 - DNA, 25 bp, Homo sapien
caacaagccctcttaggtgagtctg

SEQ ID NO: 1753494 - DNA, 25 bp, Homo sapien
aatttcttagtggtaatgcctcgga

SEQ ID NO: 1753495 - DNA, 25 bp, Homo sapien
tatcatgatcaagtcaggtatcggg

SEQ ID NO: 1753496 - DNA, 25 bp, Homo sapien
ttctgtggtactggccaaagtagtt

SEQ ID NO: 1753497 - DNA, 25 bp, Homo sapien
catccgctatccaaatgtatgagag

SEQ ID NO: 1753498 - DNA, 25 bp, Homo sapien
gtacctcaaagatctggacaccaca

SEQ ID NO: 1753499 - DNA, 25 bp, Homo sapien
ccacacagtattggttaggaactga

SEQ ID NO: 1753500 - DNA, 25 bp, Homo sapien
gagacatttagatctagaggcctag

SEQ ID NO: 1753501 - DNA, 25 bp, Homo sapien
tgcgcccagcactaaccgagggata

SEQ ID NO: 1753502 - DNA, 25 bp, Homo sapien
cagcagcatggtgttaacagattcc

SEQ ID NO: 1753503 - DNA, 25 bp, Homo sapien
aaagaggtctatggattgcagtgcc

SEQ ID NO: 1753504 - DNA, 25 bp, Homo sapien
gaaactcggtttcacaattgttgga

SEQ ID NO: 1753505 - DNA, 25 bp, Homo sapien
gaattcctcctaaccatgctcctgg

SEQ ID NO: 1753506 - DNA, 25 bp, Homo sapien
tatttcaggacttgtgtcacacggt

SEQ ID NO: 1753507 - DNA, 25 bp, Homo sapien
taagtctcattgctccaatctgggt

SEQ ID NO: 1753508 - DNA, 25 bp, Homo sapien
gatttatgtccctatctgtcagctt

SEQ ID NO: 1753509 - DNA, 25 bp, Homo sapien
tagtgtggcagtgtctctttactcc

SEQ ID NO: 1753510 - DNA, 25 bp, Homo sapien
tctttactcctagtgaccagtttcc

SEQ ID NO: 1753511 - DNA, 25 bp, Homo sapien
tactatgtattgtctctgtcctgtg

SEQ ID NO: 1753512 - DNA, 25 bp, Homo sapien
taccccaaagcctacactgtcttga

SEQ ID NO: 1753513 - DNA, 25 bp, Homo sapien
caagtaaagatttaagccacatgtg

SEQ ID NO: 1753514 - DNA, 25 bp, Homo sapien
gccacatgtgtttgggtttatttct

SEQ ID NO: 1753515 - DNA, 25 bp, Homo sapien
gatctacatgtcttgtctttacccc

SEQ ID NO: 1753516 - DNA, 25 bp, Homo sapien
aaatgggttaatccttcacccaatg

SEQ ID NO: 1753517 - DNA, 25 bp, Homo sapien
tccttcacccaatgttagctgcttt

SEQ ID NO: 1753518 - DNA, 25 bp, Homo sapien
gttaatccttcacccaatgttagct

SEQ ID NO: 1753519 - DNA, 25 bp, Homo sapien
agctgcttttgtcaagctttatgtc

SEQ ID NO: 1753520 - DNA, 25 bp, Homo sapien
cttgaggtaactttcagttaacatg

SEQ ID NO: 1753521 - DNA, 25 bp, Homo sapien
ccactgcgccaggtctaaatgtact

SEQ ID NO: 1753522 - DNA, 25 bp, Homo sapien
aaagggaagtgcaacttggtacttg

SEQ ID NO: 1753523 - DNA, 25 bp, Homo sapien
cagttaacatggcagaaaacacttt

SEQ ID NO: 1753524 - DNA, 25 bp, Homo sapien
tcttcagtagaagctataagctgct

SEQ ID NO: 1753525 - DNA, 25 bp, Homo sapien
tgcactgccagattgaaaaatgctt

SEQ ID NO: 1753526 - DNA, 25 bp, Homo sapien
tacctttttgactatgcagaccact

SEQ ID NO: 1753527 - DNA, 25 bp, Homo sapien
tatttcccaaggtgagataaatccc

SEQ ID NO: 1753528 - DNA, 25 bp, Homo sapien
tcattgagaagtaagtcagcaacca

SEQ ID NO: 1753529 - DNA, 25 bp, Homo sapien
gatcattgagaagtaagtcagcaac

SEQ ID NO: 1753530 - DNA, 25 bp, Homo sapien
cattgagaagtaagtcagcaaccat

SEQ ID NO: 1753531 - DNA, 25 bp, Homo sapien
cttgatcattgagaagtaagtcagc

SEQ ID NO: 1753532 - DNA, 25 bp, Homo sapien
cgggcggtcaccgagggccgtgtga

SEQ ID NO: 1753533 - DNA, 25 bp, Homo sapien
tgccggctccgggtccatgcggctg

SEQ ID NO: 1753534 - DNA, 25 bp, Homo sapien
tccatgcggctgcgggagaagccct

SEQ ID NO: 1753535 - DNA, 25 bp, Homo sapien
ccgagggccgtgtgagcgccgctct

SEQ ID NO: 1753536 - DNA, 25 bp, Homo sapien
cggcggtatggtcgccgcagtttct

SEQ ID NO: 1753537 - DNA, 25 bp, Homo sapien
cggtcttcgcttcggcgaccttgac

SEQ ID NO: 1753538 - DNA, 25 bp, Homo sapien
ttgagaacgcggcgctttggtcgca

SEQ ID NO: 1753539 - DNA, 25 bp, Homo sapien
aggttgtagacgctgcggcccggcc

SEQ ID NO: 1753540 - DNA, 25 bp, Homo sapien
ctatgagtcttagattatcagggac

SEQ ID NO: 1753541 - DNA, 25 bp, Homo sapien
ctagtcggtggctatgagtcttaga

SEQ ID NO: 1753542 - DNA, 25 bp, Homo sapien
tggctatgagtcttagattatcagg

SEQ ID NO: 1753543 - DNA, 25 bp, Homo sapien
cggtggctatgagtcttagattatc

SEQ ID NO: 1753544 - DNA, 25 bp, Homo sapien
tctgatttctacgccaatgctctta

SEQ ID NO: 1753545 - DNA, 25 bp, Homo sapien
tgatttctacgccaatgctcttatc

SEQ ID NO: 1753546 - DNA, 25 bp, Homo sapien
ctgatttctacgccaatgctcttat

SEQ ID NO: 1753547 - DNA, 25 bp, Homo sapien
gcctttccatatatagcacactgct

SEQ ID NO: 1753548 - DNA, 25 bp, Homo sapien
tgtagattcatgtagtctctgtggc

SEQ ID NO: 1753549 - DNA, 25 bp, Homo sapien
gaaacaatatacttggcctcactga

SEQ ID NO: 1753550 - DNA, 25 bp, Homo sapien
tactcatgtgttagtgaaaggctat

SEQ ID NO: 1753551 - DNA, 25 bp, Homo sapien
gaaagcaaaaagtgtgacacattta

SEQ ID NO: 1753552 - DNA, 25 bp, Homo sapien
gactacatggataacttttctagga

SEQ ID NO: 1753553 - DNA, 25 bp, Homo sapien
cgggtagtgccgcaaggtgtaatta

SEQ ID NO: 1753554 - DNA, 25 bp, Homo sapien
tgtttaaaacagactgactacatgg

SEQ ID NO: 1753555 - DNA, 25 bp, Homo sapien
tctcgagcagcaaccagggtagcac

SEQ ID NO: 1753556 - DNA, 25 bp, Homo sapien
gcagcctccgcggacccgaggaccg

SEQ ID NO: 1753557 - DNA, 25 bp, Homo sapien
tgcgcgcagtctcgagcagcaacca

SEQ ID NO: 1753558 - DNA, 25 bp, Homo sapien
gaggaccgccctgcgcgcagtctcg

SEQ ID NO: 1753559 - DNA, 25 bp, Homo sapien
tgaagtctaaggttaggcgctctcc

SEQ ID NO: 1753560 - DNA, 25 bp, Homo sapien
ccaccaatgttaacccttgcctgaa

SEQ ID NO: 1753561 - DNA, 25 bp, Homo sapien
caccaatgttaacccttgcctgaag

SEQ ID NO: 1753562 - DNA, 25 bp, Homo sapien
agtctaaggttaggcgctctccctt

SEQ ID NO: 1753563 - DNA, 25 bp, Homo sapien
cacaggttcgggtagcccgaaatct

SEQ ID NO: 1753564 - DNA, 25 bp, Homo sapien
ccagagcgcccacaggttcgggtag

SEQ ID NO: 1753565 - DNA, 25 bp, Homo sapien
tgccaagagtgatgggtctgacttt

SEQ ID NO: 1753566 - DNA, 25 bp, Homo sapien
ccccaggtgggtgttacatccccag

SEQ ID NO: 1753567 - DNA, 25 bp, Homo sapien
aagctgtgttaatgctgggtccctg

SEQ ID NO: 1753568 - DNA, 25 bp, Homo sapien
gctgtgttaatgctgggtccctgta

SEQ ID NO: 1753569 - DNA, 25 bp, Homo sapien
ggtaagctgtgttaatgctgggtcc

SEQ ID NO: 1753570 - DNA, 25 bp, Homo sapien
taagctgtgttaatgctgggtccct

SEQ ID NO: 1753571 - DNA, 25 bp, Homo sapien
gccaccacgccagtcccagagctca

SEQ ID NO: 1753572 - DNA, 25 bp, Homo sapien
ccaccacgccagtcccagagctcaa

SEQ ID NO: 1753573 - DNA, 25 bp, Homo sapien
agccaccacgccagtcccagagctc

SEQ ID NO: 1753574 - DNA, 25 bp, Homo sapien
tatgtatattcatagacaagtgttt

SEQ ID NO: 1753575 - DNA, 25 bp, Homo sapien
tatataaaggagcaatatgttgtgt

SEQ ID NO: 1753576 - DNA, 25 bp, Homo sapien
tttcatatgaggatagaatcattta

SEQ ID NO: 1753577 - DNA, 25 bp, Homo sapien
gaaggatgtgtatcaagccatatct

SEQ ID NO: 1753578 - DNA, 25 bp, Homo sapien
atgtgccgccatggaaggcttctga

SEQ ID NO: 1753579 - DNA, 25 bp, Homo sapien
tgtgccgccatggaaggcttctgaa

SEQ ID NO: 1753580 - DNA, 25 bp, Homo sapien
gccgccatggaaggcttctgaatac

SEQ ID NO: 1753581 - DNA, 25 bp, Homo sapien
tgccgccatggaaggcttctgaata

SEQ ID NO: 1753582 - DNA, 25 bp, Homo sapien
caacattagatcttaacctggaatc

SEQ ID NO: 1753583 - DNA, 25 bp, Homo sapien
aactgtttctcatccagctagctgt

SEQ ID NO: 1753584 - DNA, 25 bp, Homo sapien
tatgttaaactcaagattctggctc

SEQ ID NO: 1753585 - DNA, 25 bp, Homo sapien
gccagcaggctgaattaatgctcat

SEQ ID NO: 1753586 - DNA, 25 bp, Homo sapien
aacgaacaggtttccagctattcca

SEQ ID NO: 1753587 - DNA, 25 bp, Homo sapien
gctcaaatgaaaacaggggctcaaa

SEQ ID NO: 1753588 - DNA, 25 bp, Homo sapien
tccactcccatgtatatgctcaaat

SEQ ID NO: 1753589 - DNA, 25 bp, Homo sapien
taggaaagtaacataaaaatggaca

SEQ ID NO: 1753590 - DNA, 25 bp, Homo sapien
ctattttcatctgtcattttcatgg

SEQ ID NO: 1753591 - DNA, 25 bp, Homo sapien
cacttttctattttcatctgtcatt

SEQ ID NO: 1753592 - DNA, 25 bp, Homo sapien
cttttctattttcatctgtcatttt

SEQ ID NO: 1753593 - DNA, 25 bp, Homo sapien
tttctattttcatctgtcattttca

SEQ ID NO: 1753594 - DNA, 25 bp, Homo sapien
aaagagtagaacaagttcgatctgt

SEQ ID NO: 1753595 - DNA, 25 bp, Homo sapien
ctgactggacaatcaattgaggtaa

SEQ ID NO: 1753596 - DNA, 25 bp, Homo sapien
taactgactggacaatcaattgagg

SEQ ID NO: 1753597 - DNA, 25 bp, Homo sapien
gaacaagttcgatctgtaactgact

SEQ ID NO: 1753598 - DNA, 25 bp, Homo sapien
gcagtttccctttattgacgtcaaa

SEQ ID NO: 1753599 - DNA, 25 bp, Homo sapien
tcagggattttttgatactccagaa

SEQ ID NO: 1753600 - DNA, 25 bp, Homo sapien
agactcagggattttttgatactcc

SEQ ID NO: 1753601 - DNA, 25 bp, Homo sapien
ggcagtttccctttattgacgtcaa

SEQ ID NO: 1753602 - DNA, 25 bp, Homo sapien
attaatttaagacacatgtcactta

SEQ ID NO: 1753603 - DNA, 25 bp, Homo sapien
ttaatttaagacacatgtcacttac

SEQ ID NO: 1753604 - DNA, 25 bp, Homo sapien
ctgtcagatttggatggttttactt

SEQ ID NO: 1753605 - DNA, 25 bp, Homo sapien
ttgcttctcactccggctaaataag

SEQ ID NO: 1753606 - DNA, 25 bp, Homo sapien
gcttctcactccggctaaataagaa

SEQ ID NO: 1753607 - DNA, 25 bp, Homo sapien
cttgcttctcactccggctaaataa

SEQ ID NO: 1753608 - DNA, 25 bp, Homo sapien
tctcactccggctaaataagaaaac

SEQ ID NO: 1753609 - DNA, 25 bp, Homo sapien
tatcctaggctgcatgtacacaagg

SEQ ID NO: 1753610 - DNA, 25 bp, Homo sapien
tccatcctctggcatagtgttaagc

SEQ ID NO: 1753611 - DNA, 25 bp, Homo sapien
taatctgcaggtctagctcatagcc

SEQ ID NO: 1753612 - DNA, 25 bp, Homo sapien
ccagtggtgccaggactagattttt

SEQ ID NO: 1753613 - DNA, 25 bp, Homo sapien
gaactctgaggctatccactgttgc

SEQ ID NO: 1753614 - DNA, 25 bp, Homo sapien
tactggacggtaggataagcattca

SEQ ID NO: 1753615 - DNA, 25 bp, Homo sapien
cactgttgccagttttttcaggaca

SEQ ID NO: 1753616 - DNA, 25 bp, Homo sapien
gaaaccccactgagatcataagcac

SEQ ID NO: 1753617 - DNA, 25 bp, Homo sapien
cagtaaggagtccactgccatttcg

SEQ ID NO: 1753618 - DNA, 25 bp, Homo sapien
tcacacagtaagaatagcagcaaag

SEQ ID NO: 1753619 - DNA, 25 bp, Homo sapien
gaaatctatctcaggtagtaggagc

SEQ ID NO: 1753620 - DNA, 25 bp, Homo sapien
cagagacgaaataaggcaagaagct

SEQ ID NO: 1753621 - DNA, 25 bp, Homo sapien
cttaaaacgtggctagtgtgaattg

SEQ ID NO: 1753622 - DNA, 25 bp, Homo sapien
catagttgtccagtatgatagctac

SEQ ID NO: 1753623 - DNA, 25 bp, Homo sapien
ccacatgtggttattgaacacttaa

SEQ ID NO: 1753624 - DNA, 25 bp, Homo sapien
taatcaggagacataaagtggctgg

SEQ ID NO: 1753625 - DNA, 25 bp, Homo sapien
tgctgattgcatccttgacatgcca

SEQ ID NO: 1753626 - DNA, 25 bp, Homo sapien
gagtctctcaccatctggattttgc

SEQ ID NO: 1753627 - DNA, 25 bp, Homo sapien
taattgaatctacaggcttgatcag

SEQ ID NO: 1753628 - DNA, 25 bp, Homo sapien
tgcttgtctactaagagtctctcac

SEQ ID NO: 1753629 - DNA, 25 bp, Homo sapien
gaagtcagaactctagctacagcca

SEQ ID NO: 1753630 - DNA, 25 bp, Homo sapien
taaaagtcagtaggcttatcagggt

SEQ ID NO: 1753631 - DNA, 25 bp, Homo sapien
tttactacaggtattctgaaccagg

SEQ ID NO: 1753632 - DNA, 25 bp, Homo sapien
tagtggaccacttggaaataaacca

SEQ ID NO: 1753633 - DNA, 25 bp, Homo sapien
caagatagatttatggattgctact

SEQ ID NO: 1753634 - DNA, 25 bp, Homo sapien
tgaccctaaggtccatggcacataa

SEQ ID NO: 1753635 - DNA, 25 bp, Homo sapien
agtaagatgtgttcatttagttcag

SEQ ID NO: 1753636 - DNA, 25 bp, Homo sapien
aaaatgaatcacctgtgctaagagg

SEQ ID NO: 1753637 - DNA, 25 bp, Homo sapien
ttggccttcttacatcagggctgac

SEQ ID NO: 1753638 - DNA, 25 bp, Homo sapien
gaagggataacagaacatgtgtcac

SEQ ID NO: 1753639 - DNA, 25 bp, Homo sapien
tgtcacatctttgccatccctgctg

SEQ ID NO: 1753640 - DNA, 25 bp, Homo sapien
tgagtggtgtcctacccagtgggta

SEQ ID NO: 1753641 - DNA, 25 bp, Homo sapien
gctcctccagttgggaattatgaat

SEQ ID NO: 1753642 - DNA, 25 bp, Homo sapien
tttaaaaccatccacctaatatgtg

SEQ ID NO: 1753643 - DNA, 25 bp, Homo sapien
tgaaaggattacaaacagacaagtc

SEQ ID NO: 1753644 - DNA, 25 bp, Homo sapien
gacaagtcaggacattaaaccacca

SEQ ID NO: 1753645 - DNA, 25 bp, Homo sapien
agtatatgatataaaatggaacaat

SEQ ID NO: 1753646 - DNA, 25 bp, Homo sapien
atttccttataggatgaatcatgta

SEQ ID NO: 1753647 - DNA, 25 bp, Homo sapien
gaatttccttataggatgaatcatg

SEQ ID NO: 1753648 - DNA, 25 bp, Homo sapien
aggaatttccttataggatgaatca

SEQ ID NO: 1753649 - DNA, 25 bp, Homo sapien
ctgggaagtcaataacggtgggtat

SEQ ID NO: 1753650 - DNA, 25 bp, Homo sapien
cagttttagcatggagtaacagaca

SEQ ID NO: 1753651 - DNA, 25 bp, Homo sapien
catgatctcagtgtttgagtctaca

SEQ ID NO: 1753652 - DNA, 25 bp, Homo sapien
cggtgggtataagagaactgtgcat

SEQ ID NO: 1753653 - DNA, 25 bp, Homo sapien
tgtcaaaaggatataggagctaact

SEQ ID NO: 1753654 - DNA, 25 bp, Homo sapien
gagctcacctagtacccatatcttg

SEQ ID NO: 1753655 - DNA, 25 bp, Homo sapien
tctcagctgaaagggtctataagca

SEQ ID NO: 1753656 - DNA, 25 bp, Homo sapien
gggcaagaaatacacaagatggacc

SEQ ID NO: 1753657 - DNA, 25 bp, Homo sapien
tgatcctaagcatgtcagataaggg

SEQ ID NO: 1753658 - DNA, 25 bp, Homo sapien
ctgacactgtaaccttaaggcttgg

SEQ ID NO: 1753659 - DNA, 25 bp, Homo sapien
gagaggtaatacaggcagaatatcc

SEQ ID NO: 1753660 - DNA, 25 bp, Homo sapien
accatagaatggcatgaagtatctg

SEQ ID NO: 1753661 - DNA, 25 bp, Homo sapien
aagaaggcagaatcagttaaggtcc

SEQ ID NO: 1753662 - DNA, 25 bp, Homo sapien
gacatctttcccaactgttacctaa

SEQ ID NO: 1753663 - DNA, 25 bp, Homo sapien
taagcacaggcagtatggaggacca

SEQ ID NO: 1753664 - DNA, 25 bp, Homo sapien
ttgtgagtggtagtttaagaaggca

SEQ ID NO: 1753665 - DNA, 25 bp, Homo sapien
tgcaaatcctagaattagaccactg

SEQ ID NO: 1753666 - DNA, 25 bp, Homo sapien
catagagcatgtgtaggttttttcc

SEQ ID NO: 1753667 - DNA, 25 bp, Homo sapien
gatttaaccacatggaagttactgt

SEQ ID NO: 1753668 - DNA, 25 bp, Homo sapien
tagaccactgtgactcacatagagc

SEQ ID NO: 1753669 - DNA, 25 bp, Homo sapien
ggatattcttttttaggactcgaca

SEQ ID NO: 1753670 - DNA, 25 bp, Homo sapien
cataaagcatcagcagtggtgaaac

SEQ ID NO: 1753671 - DNA, 25 bp, Homo sapien
taccaatatgctagtcaatacagtt

SEQ ID NO: 1753672 - DNA, 25 bp, Homo sapien
taaaagtccatagtggcacatacag

SEQ ID NO: 1753673 - DNA, 25 bp, Homo sapien
agttcttgtttctgtcagtgaccat

SEQ ID NO: 1753674 - DNA, 25 bp, Homo sapien
aacctttttcatgaataagttcttg

SEQ ID NO: 1753675 - DNA, 25 bp, Homo sapien
ataagttcttgtttctgtcagtgac

SEQ ID NO: 1753676 - DNA, 25 bp, Homo sapien
acctttttcatgaataagttcttgt

SEQ ID NO: 1753677 - DNA, 25 bp, Homo sapien
gatttgatcgaggagcgcggttacc

SEQ ID NO: 1753678 - DNA, 25 bp, Homo sapien
agaattctcaagacgctctcgcgag

SEQ ID NO: 1753679 - DNA, 25 bp, Homo sapien
ccgcgagctctcgtgaacactagtt

SEQ ID NO: 1753680 - DNA, 25 bp, Homo sapien
cgcgggccggaacttttgtcgatag

SEQ ID NO: 1753681 - DNA, 25 bp, Homo sapien
ttgaagataccatcaatgacaaact

SEQ ID NO: 1753682 - DNA, 25 bp, Homo sapien
tgtggcacaccagtgaaaggaaagg

SEQ ID NO: 1753683 - DNA, 25 bp, Homo sapien
tgctgtggcacaccagtgaaaggaa

SEQ ID NO: 1753684 - DNA, 25 bp, Homo sapien
tcagccagctcctgaatgagaactt

SEQ ID NO: 1753685 - DNA, 25 bp, Homo sapien
aaagatttctgtcctagctggtgta

SEQ ID NO: 1753686 - DNA, 25 bp, Homo sapien
ctaaggtaaagatttctgtcctagc

SEQ ID NO: 1753687 - DNA, 25 bp, Homo sapien
ctgtcctagctggtgtaactcagac

SEQ ID NO: 1753688 - DNA, 25 bp, Homo sapien
ttctggtggctaaggtaaagatttc

SEQ ID NO: 1753689 - DNA, 25 bp, Homo sapien
attcccaaatatgccagcccttctc

SEQ ID NO: 1753690 - DNA, 25 bp, Homo sapien
aactacagcagtcaattcccaaata

SEQ ID NO: 1753691 - DNA, 25 bp, Homo sapien
tctactttaccctctgaaaagccaa

SEQ ID NO: 1753692 - DNA, 25 bp, Homo sapien
gcataaagctctactttaccctctg

SEQ ID NO: 1753693 - DNA, 25 bp, Homo sapien
caatggcacatatctcttgtagaca

SEQ ID NO: 1753694 - DNA, 25 bp, Homo sapien
gacaatggcacatatctcttgtaga

SEQ ID NO: 1753695 - DNA, 25 bp, Homo sapien
aatggcacatatctcttgtagacac

SEQ ID NO: 1753696 - DNA, 25 bp, Homo sapien
acaatggcacatatctcttgtagac

SEQ ID NO: 1753697 - DNA, 25 bp, Homo sapien
gaagcctttagtcccacactccatg

SEQ ID NO: 1753698 - DNA, 25 bp, Homo sapien
ttgaagcctttagtcccacactcca

SEQ ID NO: 1753699 - DNA, 25 bp, Homo sapien
gcctttagtcccacactccatgatg

SEQ ID NO: 1753700 - DNA, 25 bp, Homo sapien
tagtcccacactccatgatgaaccg

SEQ ID NO: 1753701 - DNA, 25 bp, Homo sapien
acatagtattaacagggtcccagct

SEQ ID NO: 1753702 - DNA, 25 bp, Homo sapien
gtcaacatagtattaacagggtccc

SEQ ID NO: 1753703 - DNA, 25 bp, Homo sapien
ggtgcacagcggtgtcaacatagta

SEQ ID NO: 1753704 - DNA, 25 bp, Homo sapien
tggtgcacagcggtgtcaacatagt

SEQ ID NO: 1753705 - DNA, 25 bp, Homo sapien
gttcccagggaagcatgaccttcac

SEQ ID NO: 1753706 - DNA, 25 bp, Homo sapien
gctggttcccagggaagcatgacct

SEQ ID NO: 1753707 - DNA, 25 bp, Homo sapien
accttcaccttgatgcccagcacag

SEQ ID NO: 1753708 - DNA, 25 bp, Homo sapien
tggttcccagggaagcatgaccttc

SEQ ID NO: 1753709 - DNA, 25 bp, Homo sapien
ccctggtcgggcagggacttcctag

SEQ ID NO: 1753710 - DNA, 25 bp, Homo sapien
cacgaacccaaagatgggtcccctg

SEQ ID NO: 1753711 - DNA, 25 bp, Homo sapien
ccctgcccctggtcgggcagggact

SEQ ID NO: 1753712 - DNA, 25 bp, Homo sapien
ctggtcgggcagggacttcctaggg

SEQ ID NO: 1753713 - DNA, 25 bp, Homo sapien
gactggctgggacatggcaggtggc

SEQ ID NO: 1753714 - DNA, 25 bp, Homo sapien
atgggagtggtggagagtatctcat

SEQ ID NO: 1753715 - DNA, 25 bp, Homo sapien
tctcttctgagatgggagtggtgga

SEQ ID NO: 1753716 - DNA, 25 bp, Homo sapien
tggctgggacatggcaggtggctct

SEQ ID NO: 1753717 - DNA, 25 bp, Homo sapien
gatgctaaccttgatcgctttgttc

SEQ ID NO: 1753718 - DNA, 25 bp, Homo sapien
cgctttgttcaggtagtgtgtgcca

SEQ ID NO: 1753719 - DNA, 25 bp, Homo sapien
tacagacttttaagaggaagaccac

SEQ ID NO: 1753720 - DNA, 25 bp, Homo sapien
accacagaggtaaaggtagagttct

SEQ ID NO: 1753721 - DNA, 25 bp, Homo sapien
aggaattacaatactacataaactt

SEQ ID NO: 1753722 - DNA, 25 bp, Homo sapien
agagtccactgatgcagcaagcttc

SEQ ID NO: 1753723 - DNA, 25 bp, Homo sapien
ttagttgagaaagtattggcaaggc

SEQ ID NO: 1753724 - DNA, 25 bp, Homo sapien
ttggcaaggcctgagaggactgact

SEQ ID NO: 1753725 - DNA, 25 bp, Homo sapien
tagagttgacccacggttcttcagt

SEQ ID NO: 1753726 - DNA, 25 bp, Homo sapien
caaggactgccaatcaaaggaacta

SEQ ID NO: 1753727 - DNA, 25 bp, Homo sapien
tgtcctgtggacaaattacctgctt

SEQ ID NO: 1753728 - DNA, 25 bp, Homo sapien
gcccatagccaagcacggtagcatg

SEQ ID NO: 1753729 - DNA, 25 bp, Homo sapien
gatcctggcgctcacattcgtctgt

SEQ ID NO: 1753730 - DNA, 25 bp, Homo sapien
acaatgcgcagtgaaccggccttag

SEQ ID NO: 1753731 - DNA, 25 bp, Homo sapien
tcgtctgtaagagtttggtagcccc

SEQ ID NO: 1753732 - DNA, 25 bp, Homo sapien
agatgccctctgtgactgtaccaag

SEQ ID NO: 1753733 - DNA, 25 bp, Homo sapien
caggcatgtgaaacaattatggcaa

SEQ ID NO: 1753734 - DNA, 25 bp, Homo sapien
tctgtaacctaaatgtgagatgtgg

SEQ ID NO: 1753735 - DNA, 25 bp, Homo sapien
taattaggcaatagtttctgtaacc

SEQ ID NO: 1753736 - DNA, 25 bp, Homo sapien
taatgttttgcctcctatgcttgca

SEQ ID NO: 1753737 - DNA, 25 bp, Homo sapien
cctagtagggatgaagtagtgtctc

SEQ ID NO: 1753738 - DNA, 25 bp, Homo sapien
aattctgggcttaaagtccaggcca

SEQ ID NO: 1753739 - DNA, 25 bp, Homo sapien
ttaaatgcccaacacataacaggct

SEQ ID NO: 1753740 - DNA, 25 bp, Homo sapien
ccaccaggagtgtataagggcttca

SEQ ID NO: 1753741 - DNA, 25 bp, Homo sapien
gcactcaattcgattttccttgctg

SEQ ID NO: 1753742 - DNA, 25 bp, Homo sapien
gctgccgaatgagcccgcactcaat

SEQ ID NO: 1753743 - DNA, 25 bp, Homo sapien
gagcccgcactcaattcgattttcc

SEQ ID NO: 1753744 - DNA, 25 bp, Homo sapien
tctgccggccgctgccgaatgagcc

SEQ ID NO: 1753745 - DNA, 25 bp, Homo sapien
cagcgttagggggcggccccgcctg

SEQ ID NO: 1753746 - DNA, 25 bp, Homo sapien
tagggggcggccccgcctggcgcat

SEQ ID NO: 1753747 - DNA, 25 bp, Homo sapien
ttagggggcggccccgcctggcgca

SEQ ID NO: 1753748 - DNA, 25 bp, Homo sapien
agctcgccgagttttattctgtcct

SEQ ID NO: 1753749 - DNA, 25 bp, Homo sapien
cagctcgccgagttttattctgtcc

SEQ ID NO: 1753750 - DNA, 25 bp, Homo sapien
gctcgccgagttttattctgtcctg

SEQ ID NO: 1753751 - DNA, 25 bp, Homo sapien
ctggcctggcgactctgggatgaca

SEQ ID NO: 1753752 - DNA, 25 bp, Homo sapien
catgtaaaggccgactgtgaggaaa

SEQ ID NO: 1753753 - DNA, 25 bp, Homo sapien
tgaacgacacgcgaacaattttatc

SEQ ID NO: 1753754 - DNA, 25 bp, Homo sapien
aatgagtgaaaaagcgtgaacgaca

SEQ ID NO: 1753755 - DNA, 25 bp, Homo sapien
ccaattggcgtgagaacatttattt

SEQ ID NO: 1753756 - DNA, 25 bp, Homo sapien
aagcctccaattggcgtgagaacat

SEQ ID NO: 1753757 - DNA, 25 bp, Homo sapien
ttgtgaactaacaagacgttgtact

SEQ ID NO: 1753758 - DNA, 25 bp, Homo sapien
ttcagagttaaaccggagagctacc

SEQ ID NO: 1753759 - DNA, 25 bp, Homo sapien
tcacgtcccctagaagatgtccttg

SEQ ID NO: 1753760 - DNA, 25 bp, Homo sapien
taccagtgggttattgatcacgtcc

SEQ ID NO: 1753761 - DNA, 25 bp, Homo sapien
gatgtccttggactaacttccctaa

SEQ ID NO: 1753762 - DNA, 25 bp, Homo sapien
tctctggagaatgggaaacagcccc

SEQ ID NO: 1753763 - DNA, 25 bp, Homo sapien
aatcgaggccgctgaatggctagca

SEQ ID NO: 1753764 - DNA, 25 bp, Homo sapien
ggctagcacacaatggtccaggcga

SEQ ID NO: 1753765 - DNA, 25 bp, Homo sapien
aatggtccaggcgaccttcccattc

SEQ ID NO: 1753766 - DNA, 25 bp, Homo sapien
gctgaatggctagcacacaatggtc

SEQ ID NO: 1753767 - DNA, 25 bp, Homo sapien
cgcaagggcgcggagtttggtgaga

SEQ ID NO: 1753768 - DNA, 25 bp, Homo sapien
agttgcgctgcgaagcagctgcaga

SEQ ID NO: 1753769 - DNA, 25 bp, Homo sapien
agagtcccacccgagagggtcacat

SEQ ID NO: 1753770 - DNA, 25 bp, Homo sapien
ccacccgagagggtcacatggagtg

SEQ ID NO: 1753771 - DNA, 25 bp, Homo sapien
tcaatcggggcgggagccttttggc

SEQ ID NO: 1753772 - DNA, 25 bp, Homo sapien
caatcggggcgggagccttttggca

SEQ ID NO: 1753773 - DNA, 25 bp, Homo sapien
gcgtcctccgcccgcggagtgacgc

SEQ ID NO: 1753774 - DNA, 25 bp, Homo sapien
ccgcggagtgacgcgggcgggcatg

SEQ ID NO: 1753775 - DNA, 25 bp, Homo sapien
gcggagtgacgcgggcgggcatgca

SEQ ID NO: 1753776 - DNA, 25 bp, Homo sapien
gtgcgtcctccgcccgcggagtgac

SEQ ID NO: 1753777 - DNA, 25 bp, Homo sapien
gctgcgcgctagccagagagccgcg

SEQ ID NO: 1753778 - DNA, 25 bp, Homo sapien
tgcgcgctagccagagagccgcgcc

SEQ ID NO: 1753779 - DNA, 25 bp, Homo sapien
ctgcgcgctagccagagagccgcgc

SEQ ID NO: 1753780 - DNA, 25 bp, Homo sapien
agctgcgcgctagccagagagccgc

SEQ ID NO: 1753781 - DNA, 25 bp, Homo sapien
tgttgccgccgccaccaggcaggcg

SEQ ID NO: 1753782 - DNA, 25 bp, Homo sapien
ggatgcagcagtcggcactcacgct

SEQ ID NO: 1753783 - DNA, 25 bp, Homo sapien
cggtccgaggcgcaagccggccggg

SEQ ID NO: 1753784 - DNA, 25 bp, Homo sapien
tccgaggcgcaagccggccgggatg

SEQ ID NO: 1753785 - DNA, 25 bp, Homo sapien
gccgggatgcagcagtcggcactca

SEQ ID NO: 1753786 - DNA, 25 bp, Homo sapien
gggctccctgcggtctgacaggtac

SEQ ID NO: 1753787 - DNA, 25 bp, Homo sapien
gtgggcagaggtctgaatggtcaat

SEQ ID NO: 1753788 - DNA, 25 bp, Homo sapien
tgggcagaggtctgaatggtcaata

SEQ ID NO: 1753789 - DNA, 25 bp, Homo sapien
gggcagaggtctgaatggtcaatac

SEQ ID NO: 1753790 - DNA, 25 bp, Homo sapien
cagccgtaacaccacggtagagaca

SEQ ID NO: 1753791 - DNA, 25 bp, Homo sapien
ctgagagcagccgtaacaccacggt

SEQ ID NO: 1753792 - DNA, 25 bp, Homo sapien
gccgtaacaccacggtagagacatt

SEQ ID NO: 1753793 - DNA, 25 bp, Homo sapien
gagcagccgtaacaccacggtagag

SEQ ID NO: 1753794 - DNA, 25 bp, Homo sapien
ttaggcacatcttgtaccaagttgt

SEQ ID NO: 1753795 - DNA, 25 bp, Homo sapien
tgagtgcttaggcacatcttgtacc

SEQ ID NO: 1753796 - DNA, 25 bp, Homo sapien
gttgagagcatcctccctgagtgct

SEQ ID NO: 1753797 - DNA, 25 bp, Homo sapien
gagcatcctccctgagtgcttaggc

SEQ ID NO: 1753798 - DNA, 25 bp, Homo sapien
tttggtttggccagaccactatggg

SEQ ID NO: 1753799 - DNA, 25 bp, Homo sapien
tttttggtttggccagaccactatg

SEQ ID NO: 1753800 - DNA, 25 bp, Homo sapien
tgtttttggtttggccagaccacta

SEQ ID NO: 1753801 - DNA, 25 bp, Homo sapien
ccaacccaacacaggaaagtggttg

SEQ ID NO: 1753802 - DNA, 25 bp, Homo sapien
cggattaaccctatccactccagag

SEQ ID NO: 1753803 - DNA, 25 bp, Homo sapien
ctgggagtttctggctgcccggatt

SEQ ID NO: 1753804 - DNA, 25 bp, Homo sapien
gagtttctggctgcccggattaacc

SEQ ID NO: 1753805 - DNA, 25 bp, Homo sapien
tggctgcccggattaaccctatcca

SEQ ID NO: 1753806 - DNA, 25 bp, Homo sapien
cgtctcgcaatgctcggtagaagat

SEQ ID NO: 1753807 - DNA, 25 bp, Homo sapien
ttctcgtcgtgagtcggagtcgctg

SEQ ID NO: 1753808 - DNA, 25 bp, Homo sapien
ctttctcgtcgtgagtcggagtcgc

SEQ ID NO: 1753809 - DNA, 25 bp, Homo sapien
tcccctggctggacgtctcgcaatg

SEQ ID NO: 1753810 - DNA, 25 bp, Homo sapien
ggacttttgcccatccacgcttttg

SEQ ID NO: 1753811 - DNA, 25 bp, Homo sapien
tagggactcgcttcaagacaggagg

SEQ ID NO: 1753812 - DNA, 25 bp, Homo sapien
tagatcgagctatgtctagggactc

SEQ ID NO: 1753813 - DNA, 25 bp, Homo sapien
taaggaggtagtggcgacctctctc

SEQ ID NO: 1753814 - DNA, 25 bp, Homo sapien
caaagcccaagtttcgactagcggt

SEQ ID NO: 1753815 - DNA, 25 bp, Homo sapien
gacataaagaaagcgccagtgcacc

SEQ ID NO: 1753816 - DNA, 25 bp, Homo sapien
tcttcgttggaagggcagcactcag

SEQ ID NO: 1753817 - DNA, 25 bp, Homo sapien
aagaatggaaaagcgacccggtgag

SEQ ID NO: 1753818 - DNA, 25 bp, Homo sapien
gggtcgcaaagttcctgcctgggaa

SEQ ID NO: 1753819 - DNA, 25 bp, Homo sapien
gcagtaccagcagatgtagcgctcc

SEQ ID NO: 1753820 - DNA, 25 bp, Homo sapien
gaaacgcaggtgtgccttaaggctg

SEQ ID NO: 1753821 - DNA, 25 bp, Homo sapien
gggtatctaaacgtcctccagcagt

SEQ ID NO: 1753822 - DNA, 25 bp, Homo sapien
ccggggtagaaagccaggctgccga

SEQ ID NO: 1753823 - DNA, 25 bp, Homo sapien
gccggggtagaaagccaggctgccg

SEQ ID NO: 1753824 - DNA, 25 bp, Homo sapien
cggggtagaaagccaggctgccgac

SEQ ID NO: 1753825 - DNA, 25 bp, Homo sapien
tgatggtggtgacccgcgccgcccg

SEQ ID NO: 1753826 - DNA, 25 bp, Homo sapien
gcgaggccggctccttgcttgctgc

SEQ ID NO: 1753827 - DNA, 25 bp, Homo sapien
taggccggcgggcttgaaagctgag

SEQ ID NO: 1753828 - DNA, 25 bp, Homo sapien
cagcctgcccaaagcgaggccggct

SEQ ID NO: 1753829 - DNA, 25 bp, Homo sapien
gcggcgggtccccagcgagcaggca

SEQ ID NO: 1753830 - DNA, 25 bp, Homo sapien
cggcggcgggtccccagcgagcagg

SEQ ID NO: 1753831 - DNA, 25 bp, Homo sapien
ggcggcgggtccccagcgagcaggc

SEQ ID NO: 1753832 - DNA, 25 bp, Homo sapien
gggcagctgcgcataacgcgctcct

SEQ ID NO: 1753833 - DNA, 25 bp, Homo sapien
agctgcgcataacgcgctcctggca

SEQ ID NO: 1753834 - DNA, 25 bp, Homo sapien
ctcgaggggcaaccccggcgcaggg

SEQ ID NO: 1753835 - DNA, 25 bp, Homo sapien
cagggggcagctgcgcataacgcgc

SEQ ID NO: 1753836 - DNA, 25 bp, Homo sapien
taggctttgagaccgcccgggtcga

SEQ ID NO: 1753837 - DNA, 25 bp, Homo sapien
gataggctttgagaccgcccgggtc

SEQ ID NO: 1753838 - DNA, 25 bp, Homo sapien
ccggataggctttgagaccgcccgg

SEQ ID NO: 1753839 - DNA, 25 bp, Homo sapien
cacccggataggctttgagaccgcc

SEQ ID NO: 1753840 - DNA, 25 bp, Homo sapien
ctgtaaaggccggcatgacggcggg

SEQ ID NO: 1753841 - DNA, 25 bp, Homo sapien
taaaggccggcatgacggcgggcag

SEQ ID NO: 1753842 - DNA, 25 bp, Homo sapien
tgtaaaggccggcatgacggcgggc

SEQ ID NO: 1753843 - DNA, 25 bp, Homo sapien
aggccggcatgacggcgggcaggtg

SEQ ID NO: 1753844 - DNA, 25 bp, Homo sapien
atggactccggatacttcagcagcc

SEQ ID NO: 1753845 - DNA, 25 bp, Homo sapien
tgtgcatggcgatctctcggtcgat

SEQ ID NO: 1753846 - DNA, 25 bp, Homo sapien
cccgctgaagtaggagatggactcc

SEQ ID NO: 1753847 - DNA, 25 bp, Homo sapien
gcagcccgccgaagtgcaatttgag

SEQ ID NO: 1753848 - DNA, 25 bp, Homo sapien
cggtggcaacgtccccgagtccagg

SEQ ID NO: 1753849 - DNA, 25 bp, Homo sapien
gtccccgagtccaggcgtccgcgac

SEQ ID NO: 1753850 - DNA, 25 bp, Homo sapien
cgccgcgacggccggtggcaacgtc

SEQ ID NO: 1753851 - DNA, 25 bp, Homo sapien
gccggtggcaacgtccccgagtcca

SEQ ID NO: 1753852 - DNA, 25 bp, Homo sapien
ctcgcagcggtagggcgtattgccc

SEQ ID NO: 1753853 - DNA, 25 bp, Homo sapien
ttgtagcccgtgtgcgtccgcatgt

SEQ ID NO: 1753854 - DNA, 25 bp, Homo sapien
tgcgcgagtacagcttgccacagta

SEQ ID NO: 1753855 - DNA, 25 bp, Homo sapien
gatcttgagcccatacttgcgcgag

SEQ ID NO: 1753856 - DNA, 25 bp, Homo sapien
gattctgaacaccaagagcagaccg

SEQ ID NO: 1753857 - DNA, 25 bp, Homo sapien
gatttacgccacctctgaactgttg

SEQ ID NO: 1753858 - DNA, 25 bp, Homo sapien
ggcggttcagggtgagctcatccaa

SEQ ID NO: 1753859 - DNA, 25 bp, Homo sapien
cagttaaaatctgcgccctcgaagg

SEQ ID NO: 1753860 - DNA, 25 bp, Homo sapien
cctcttcccgttgggaaggcggcag

SEQ ID NO: 1753861 - DNA, 25 bp, Homo sapien
aaggcggcagatggcgagagcgcac

SEQ ID NO: 1753862 - DNA, 25 bp, Homo sapien
tttccacaaagaccagttacgcctg

SEQ ID NO: 1753863 - DNA, 25 bp, Homo sapien
gtcacgcttgacctcgcgatggcgc

SEQ ID NO: 1753864 - DNA, 25 bp, Homo sapien
gagggtggatggctgaccactccca

SEQ ID NO: 1753865 - DNA, 25 bp, Homo sapien
ggtggatggctgaccactcccaagc

SEQ ID NO: 1753866 - DNA, 25 bp, Homo sapien
agggtggatggctgaccactcccaa

SEQ ID NO: 1753867 - DNA, 25 bp, Homo sapien
tggatggctgaccactcccaagcca

SEQ ID NO: 1753868 - DNA, 25 bp, Homo sapien
tttccactggtttgcctgaattctg

SEQ ID NO: 1753869 - DNA, 25 bp, Homo sapien
caggcgaagaacatggccagctggt

SEQ ID NO: 1753870 - DNA, 25 bp, Homo sapien
gcttgcattgggtctgacaggcgaa

SEQ ID NO: 1753871 - DNA, 25 bp, Homo sapien
gatcacgttttttgatcaagagcct

SEQ ID NO: 1753872 - DNA, 25 bp, Homo sapien
caaagatttgtaggatgccagttga

SEQ ID NO: 1753873 - DNA, 25 bp, Homo sapien
gattgtaccacaatgcgcatcaaag

SEQ ID NO: 1753874 - DNA, 25 bp, Homo sapien
aagtggtagtgactgccctttctgg

SEQ ID NO: 1753875 - DNA, 25 bp, Homo sapien
gagtaggaatcttaagccaaaggca

SEQ ID NO: 1753876 - DNA, 25 bp, Homo sapien
tatgcagacaagagagggtgtagca

SEQ ID NO: 1753877 - DNA, 25 bp, Homo sapien
tgtaccaggtaatttaaggagcagc

SEQ ID NO: 1753878 - DNA, 25 bp, Homo sapien
taatgaggcccagtagtggatagca

SEQ ID NO: 1753879 - DNA, 25 bp, Homo sapien
tcttcagactggataggagtggtag

SEQ ID NO: 1753880 - DNA, 25 bp, Homo sapien
agtcaatattcaaggtcactggaaa

SEQ ID NO: 1753881 - DNA, 25 bp, Homo sapien
ggaaagaagctagagcatgaagtct

SEQ ID NO: 1753882 - DNA, 25 bp, Homo sapien
aagtcaatattcaaggtcactggaa

SEQ ID NO: 1753883 - DNA, 25 bp, Homo sapien
gctagagcatgaagtcttacagaca

SEQ ID NO: 1753884 - DNA, 25 bp, Homo sapien
acttgttcaagggttcagcaggaac

SEQ ID NO: 1753885 - DNA, 25 bp, Homo sapien
agcaggaacaagcagagcattctgt

SEQ ID NO: 1753886 - DNA, 25 bp, Homo sapien
cttgttcaagggttcagcaggaaca

SEQ ID NO: 1753887 - DNA, 25 bp, Homo sapien
tgttcaagggttcagcaggaacaag

SEQ ID NO: 1753888 - DNA, 25 bp, Homo sapien
cctccagtgcccaaccatcccgcaa

SEQ ID NO: 1753889 - DNA, 25 bp, Homo sapien
ccatcccgcaaatggccctcataca

SEQ ID NO: 1753890 - DNA, 25 bp, Homo sapien
catcccgcaaatggccctcatacat

SEQ ID NO: 1753891 - DNA, 25 bp, Homo sapien
aaccatcccgcaaatggccctcata

SEQ ID NO: 1753892 - DNA, 25 bp, Homo sapien
ttcttggtctctcgtctgtcttcat

SEQ ID NO: 1753893 - DNA, 25 bp, Homo sapien
tttcttggtctctcgtctgtcttca

SEQ ID NO: 1753894 - DNA, 25 bp, Homo sapien
ctttcttggtctctcgtctgtcttc

SEQ ID NO: 1753895 - DNA, 25 bp, Homo sapien
catgcacattatgtagagcataatg

SEQ ID NO: 1753896 - DNA, 25 bp, Homo sapien
tgtagagcataatgcttcagagagc

SEQ ID NO: 1753897 - DNA, 25 bp, Homo sapien
tgcaaacagctccaaatgaactcga

SEQ ID NO: 1753898 - DNA, 25 bp, Homo sapien
cgaccaaattataccatctgacagc

SEQ ID NO: 1753899 - DNA, 25 bp, Homo sapien
ccattaccaatttgtgatccagctg

SEQ ID NO: 1753900 - DNA, 25 bp, Homo sapien
actcctgacatcgaaacaggcagaa

SEQ ID NO: 1753901 - DNA, 25 bp, Homo sapien
cttcttatgtggataactcctgaca

SEQ ID NO: 1753902 - DNA, 25 bp, Homo sapien
tcaaacatcacaggtacgttcactc

SEQ ID NO: 1753903 - DNA, 25 bp, Homo sapien
cgactaattctattaagccactgtt

SEQ ID NO: 1753904 - DNA, 25 bp, Homo sapien
gatgtatcgtgctccaatggaattc

SEQ ID NO: 1753905 - DNA, 25 bp, Homo sapien
tattctgtgtggaattggatgtatc

SEQ ID NO: 1753906 - DNA, 25 bp, Homo sapien
aaatgaggtcaacttctggcaggtc

SEQ ID NO: 1753907 - DNA, 25 bp, Homo sapien
gatgagagcagggaacatgataaaa

SEQ ID NO: 1753908 - DNA, 25 bp, Homo sapien
gagcagggaacatgataaaagcatg

SEQ ID NO: 1753909 - DNA, 25 bp, Homo sapien
taggcaatgtgggagatgagagcag

SEQ ID NO: 1753910 - DNA, 25 bp, Homo sapien
ggaacatgataaaagcatgatgatg

SEQ ID NO: 1753911 - DNA, 25 bp, Homo sapien
ctactcttttgactcattgagggct

SEQ ID NO: 1753912 - DNA, 25 bp, Homo sapien
tgagggtccagagagataatgtgta

SEQ ID NO: 1753913 - DNA, 25 bp, Homo sapien
taatgtgtatgaaagtatgctgcca

SEQ ID NO: 1753914 - DNA, 25 bp, Homo sapien
tttgactcattgagggctgttgtga

SEQ ID NO: 1753915 - DNA, 25 bp, Homo sapien
tatcatcagctactccactccgtga

SEQ ID NO: 1753916 - DNA, 25 bp, Homo sapien
tactccactccgtgaaatcctctgg

SEQ ID NO: 1753917 - DNA, 25 bp, Homo sapien
ctccactccgtgaaatcctctggtg

SEQ ID NO: 1753918 - DNA, 25 bp, Homo sapien
catcagctactccactccgtgaaat

SEQ ID NO: 1753919 - DNA, 25 bp, Homo sapien
tcagagtagatgctaacacccacta

SEQ ID NO: 1753920 - DNA, 25 bp, Homo sapien
gctaccaccatcatcagatcagagt

SEQ ID NO: 1753921 - DNA, 25 bp, Homo sapien
tcatcaatggctggatgtgtattgt

SEQ ID NO: 1753922 - DNA, 25 bp, Homo sapien
ggatgtgtattgttactttgaagcc

SEQ ID NO: 1753923 - DNA, 25 bp, Homo sapien
agtccactggacttttataatgaaa

SEQ ID NO: 1753924 - DNA, 25 bp, Homo sapien
aattgaaaaacagactaagtccact

SEQ ID NO: 1753925 - DNA, 25 bp, Homo sapien
cagactaagtccactggacttttat

SEQ ID NO: 1753926 - DNA, 25 bp, Homo sapien
aaaacagactaagtccactggactt

SEQ ID NO: 1753927 - DNA, 25 bp, Homo sapien
tgctgcacacgtgaaacagccgtgc

SEQ ID NO: 1753928 - DNA, 25 bp, Homo sapien
aataatagtgcagagcgcctgctgc

SEQ ID NO: 1753929 - DNA, 25 bp, Homo sapien
tatgcctattgtcatggcagtccca

SEQ ID NO: 1753930 - DNA, 25 bp, Homo sapien
ttaataatcgtcttttgttgaccag

SEQ ID NO: 1753931 - DNA, 25 bp, Homo sapien
aatggacttcaaagactgcgctatg

SEQ ID NO: 1753932 - DNA, 25 bp, Homo sapien
cagcagaatgtgattatacctctga

SEQ ID NO: 1753933 - DNA, 25 bp, Homo sapien
tcctgttcattctatgggcaccgat

SEQ ID NO: 1753934 - DNA, 25 bp, Homo sapien
aaagactgcgctatgttcctgttca

SEQ ID NO: 1753935 - DNA, 25 bp, Homo sapien
tatcatacatatgaagactaggtgg

SEQ ID NO: 1753936 - DNA, 25 bp, Homo sapien
tgaacttgagactgtccccaaaacc

SEQ ID NO: 1753937 - DNA, 25 bp, Homo sapien
catgggagtaatacgatatgtgaac

SEQ ID NO: 1753938 - DNA, 25 bp, Homo sapien
taatacgatatgtgaacttgagact

SEQ ID NO: 1753939 - DNA, 25 bp, Homo sapien
gattttggaggctttgcattgatca

SEQ ID NO: 1753940 - DNA, 25 bp, Homo sapien
catgttgttgtatgattttggaggc

SEQ ID NO: 1753941 - DNA, 25 bp, Homo sapien
tgttgtatgattttggaggctttgc

SEQ ID NO: 1753942 - DNA, 25 bp, Homo sapien
tatgattttggaggctttgcattga

SEQ ID NO: 1753943 - DNA, 25 bp, Homo sapien
cacttgcttgaggtcccctaaagat

SEQ ID NO: 1753944 - DNA, 25 bp, Homo sapien
ccacagagcatgtgactctttttat

SEQ ID NO: 1753945 - DNA, 25 bp, Homo sapien
aacacttgcttgaggtcccctaaag

SEQ ID NO: 1753946 - DNA, 25 bp, Homo sapien
aaagtgatccacagagcatgtgact

SEQ ID NO: 1753947 - DNA, 25 bp, Homo sapien
tggagagccttactaccaacaggca

SEQ ID NO: 1753948 - DNA, 25 bp, Homo sapien
gagccttactaccaacaggcacctt

SEQ ID NO: 1753949 - DNA, 25 bp, Homo sapien
gtgaactggagagccttactaccaa

SEQ ID NO: 1753950 - DNA, 25 bp, Homo sapien
caggcaccttacaatctgaagaaaa

SEQ ID NO: 1753951 - DNA, 25 bp, Homo sapien
cgtaaatttgcggactgttcttcct

SEQ ID NO: 1753952 - DNA, 25 bp, Homo sapien
gcattctactggtatccactgctgg

SEQ ID NO: 1753953 - DNA, 25 bp, Homo sapien
catattggatgtgttgactggtcca

SEQ ID NO: 1753954 - DNA, 25 bp, Homo sapien
gactggtccatccatgagcattcta

SEQ ID NO: 1753955 - DNA, 25 bp, Homo sapien
ctagtctcgtatttccatttcctct

SEQ ID NO: 1753956 - DNA, 25 bp, Homo sapien
tagtctcgtatttccatttcctcta

SEQ ID NO: 1753957 - DNA, 25 bp, Homo sapien
gaatagcatgaagtcaaggactgga

SEQ ID NO: 1753958 - DNA, 25 bp, Homo sapien
tctgcagaagagtcttagggccacc

SEQ ID NO: 1753959 - DNA, 25 bp, Homo sapien
tagtgatgttgaaattccctccctg

SEQ ID NO: 1753960 - DNA, 25 bp, Homo sapien
caccccatgggatggtgtaagggca

SEQ ID NO: 1753961 - DNA, 25 bp, Homo sapien
tcaacagggctggttggcaacatcc

SEQ ID NO: 1753962 - DNA, 25 bp, Homo sapien
gacctaggccaatgcttactgctgg

SEQ ID NO: 1753963 - DNA, 25 bp, Homo sapien
catcttgttggaacacctctgccga

SEQ ID NO: 1753964 - DNA, 25 bp, Homo sapien
ctataataaggtaaggaatggctcc

SEQ ID NO: 1753965 - DNA, 25 bp, Homo sapien
gcattcctctatacctttgccacat

SEQ ID NO: 1753966 - DNA, 25 bp, Homo sapien
agagaggcccatcggctgcacttcc

SEQ ID NO: 1753967 - DNA, 25 bp, Homo sapien
ttcctctatacctttgccacatcat

SEQ ID NO: 1753968 - DNA, 25 bp, Homo sapien
ttgcattcctctatacctttgccac

SEQ ID NO: 1753969 - DNA, 25 bp, Homo sapien
ccgaacagccatcctgagtagggtt

SEQ ID NO: 1753970 - DNA, 25 bp, Homo sapien
ccatcctgagtagggttggggaagg

SEQ ID NO: 1753971 - DNA, 25 bp, Homo sapien
aacagccatcctgagtagggttggg

SEQ ID NO: 1753972 - DNA, 25 bp, Homo sapien
gccatcctgagtagggttggggaag

SEQ ID NO: 1753973 - DNA, 25 bp, Homo sapien
tcccgcagagaggaagggcgcccgg

SEQ ID NO: 1753974 - DNA, 25 bp, Homo sapien
gcagtcccgcagagaggaagggcgc

SEQ ID NO: 1753975 - DNA, 25 bp, Homo sapien
cgcagagaggaagggcgcccgggct

SEQ ID NO: 1753976 - DNA, 25 bp, Homo sapien
ctgcagtcccgcagagaggaagggc

SEQ ID NO: 1753977 - DNA, 25 bp, Homo sapien
ccgtcagctgggacccgctgagagc

SEQ ID NO: 1753978 - DNA, 25 bp, Homo sapien
cgtcagctgggacccgctgagagcc

SEQ ID NO: 1753979 - DNA, 25 bp, Homo sapien
cttccgtcagctgggacccgctgag

SEQ ID NO: 1753980 - DNA, 25 bp, Homo sapien
tccgtcagctgggacccgctgagag

SEQ ID NO: 1753981 - DNA, 25 bp, Homo sapien
ctggttcgggcgtttggctgttcct

SEQ ID NO: 1753982 - DNA, 25 bp, Homo sapien
tgctcggattggatgaagtggcaaa

SEQ ID NO: 1753983 - DNA, 25 bp, Homo sapien
gctggctcccaacctgtctcagaga

SEQ ID NO: 1753984 - DNA, 25 bp, Homo sapien
ctggacccccgctttggaaatggag

SEQ ID NO: 1753985 - DNA, 25 bp, Homo sapien
taacctgaagagctttgtctgacaa

SEQ ID NO: 1753986 - DNA, 25 bp, Homo sapien
tctgtagccatagcaggacaacacc

SEQ ID NO: 1753987 - DNA, 25 bp, Homo sapien
ggacaacaccaggtcagccggagct

SEQ ID NO: 1753988 - DNA, 25 bp, Homo sapien
cacataaattgccagtaacctgaag

SEQ ID NO: 1753989 - DNA, 25 bp, Homo sapien
tttgtcaatctctgccccggtctga

SEQ ID NO: 1753990 - DNA, 25 bp, Homo sapien
ttgtcaatctctgccccggtctgat

SEQ ID NO: 1753991 - DNA, 25 bp, Homo sapien
atgaggtgggcacagcggccgttgg

SEQ ID NO: 1753992 - DNA, 25 bp, Homo sapien
gcacagcggccgttggcagctgctg

SEQ ID NO: 1753993 - DNA, 25 bp, Homo sapien
agtccgttttgctaagtgtctccac

SEQ ID NO: 1753994 - DNA, 25 bp, Homo sapien
tcattagtagcagcaccatcgaaca

SEQ ID NO: 1753995 - DNA, 25 bp, Homo sapien
tttcattagtagcagcaccatcgaa

SEQ ID NO: 1753996 - DNA, 25 bp, Homo sapien
attagtagcagcaccatcgaacact

SEQ ID NO: 1753997 - DNA, 25 bp, Homo sapien
ctttcattagtagcagcaccatcga

SEQ ID NO: 1753998 - DNA, 25 bp, Homo sapien
tagtgttagaccacaatagcagagt

SEQ ID NO: 1753999 - DNA, 25 bp, Homo sapien
gatgaccagaattacgactgacagt

SEQ ID NO: 1754000 - DNA, 25 bp, Homo sapien
cacacgtagtgagatgcagtaaaaa

SEQ ID NO: 1754001 - DNA, 25 bp, Homo sapien
tccatgattatgagtgtacacccta

SEQ ID NO: 1754002 - DNA, 25 bp, Homo sapien
attgttgtacactggagggacctta

SEQ ID NO: 1754003 - DNA, 25 bp, Homo sapien
aattgttgtacactggagggacctt

SEQ ID NO: 1754004 - DNA, 25 bp, Homo sapien
caaattgttgtacactggagggacc

SEQ ID NO: 1754005 - DNA, 25 bp, Homo sapien
aaattgttgtacactggagggacct

SEQ ID NO: 1754006 - DNA, 25 bp, Homo sapien
tattttaattctgttcacagtatat

SEQ ID NO: 1754007 - DNA, 25 bp, Homo sapien
aatattttaattctgttcacagtat

SEQ ID NO: 1754008 - DNA, 25 bp, Homo sapien
aaatattttaattctgttcacagta

SEQ ID NO: 1754009 - DNA, 25 bp, Homo sapien
ttttaattctgttcacagtatattt

SEQ ID NO: 1754010 - DNA, 25 bp, Homo sapien
cctttgatgtagtgaggtgaatatt

SEQ ID NO: 1754011 - DNA, 25 bp, Homo sapien
aggtacattgttttagcacctttga

SEQ ID NO: 1754012 - DNA, 25 bp, Homo sapien
gcacctttgatgtagtgaggtgaat

SEQ ID NO: 1754013 - DNA, 25 bp, Homo sapien
gcaggtacattgttttagcaccttt

SEQ ID NO: 1754014 - DNA, 25 bp, Homo sapien
aagagactttgccatccagtgaggc

SEQ ID NO: 1754015 - DNA, 25 bp, Homo sapien
gcaatcagcagggagtaatctaggg

SEQ ID NO: 1754016 - DNA, 25 bp, Homo sapien
tggaagccagaggacaaagtacccc

SEQ ID NO: 1754017 - DNA, 25 bp, Homo sapien
catgggcaatgaaagagtgttttcc

SEQ ID NO: 1754018 - DNA, 25 bp, Homo sapien
agtgacaagaaagtgtcgggaatga

SEQ ID NO: 1754019 - DNA, 25 bp, Homo sapien
cttggaagagcagttgttgagaaaa

SEQ ID NO: 1754020 - DNA, 25 bp, Homo sapien
gctcatgagtaaaacatggctctga

SEQ ID NO: 1754021 - DNA, 25 bp, Homo sapien
aaagtgtcgggaatgagcattggct

SEQ ID NO: 1754022 - DNA, 25 bp, Homo sapien
caattatgtgaagaattgcttgtgg

SEQ ID NO: 1754023 - DNA, 25 bp, Homo sapien
aagaattgcttgtggatgactgacc

SEQ ID NO: 1754024 - DNA, 25 bp, Homo sapien
gacatagttctgtagaaaacaaagc

SEQ ID NO: 1754025 - DNA, 25 bp, Homo sapien
ttgcttgtggatgactgaccaggag

SEQ ID NO: 1754026 - DNA, 25 bp, Homo sapien
tccacagagaaaagtaaaacttgct

SEQ ID NO: 1754027 - DNA, 25 bp, Homo sapien
ctggaggtggtagcaagcttccaca

SEQ ID NO: 1754028 - DNA, 25 bp, Homo sapien
aggtggtagcaagcttccacagaga

SEQ ID NO: 1754029 - DNA, 25 bp, Homo sapien
ccacagagaaaagtaaaacttgctg

SEQ ID NO: 1754030 - DNA, 25 bp, Homo sapien
tattactggacagcactgactagtt

SEQ ID NO: 1754031 - DNA, 25 bp, Homo sapien
actgactagttgtggaggaagatgc

SEQ ID NO: 1754032 - DNA, 25 bp, Homo sapien
caggatcagtgcatattactggaca

SEQ ID NO: 1754033 - DNA, 25 bp, Homo sapien
ggtcttataattgaagcgttgttca

SEQ ID NO: 1754034 - DNA, 25 bp, Homo sapien
gaatatccagatatcttttactgct

SEQ ID NO: 1754035 - DNA, 25 bp, Homo sapien
ttactgctaaagaagcttctgctgc

SEQ ID NO: 1754036 - DNA, 25 bp, Homo sapien
gttctcatgagggtcttctgttgtt

SEQ ID NO: 1754037 - DNA, 25 bp, Homo sapien
tctgttgttagagggttgttttagc

SEQ ID NO: 1754038 - DNA, 25 bp, Homo sapien
tattgctgctctcccctccaggcat

SEQ ID NO: 1754039 - DNA, 25 bp, Homo sapien
catagttattgctgctctcccctcc

SEQ ID NO: 1754040 - DNA, 25 bp, Homo sapien
tagttattgctgctctcccctccag

SEQ ID NO: 1754041 - DNA, 25 bp, Homo sapien
agttattgctgctctcccctccagg

SEQ ID NO: 1754042 - DNA, 25 bp, Homo sapien
tgaagctgggggcaacacatgtttc

SEQ ID NO: 1754043 - DNA, 25 bp, Homo sapien
ggcagatgcaacttccgaggatgaa

SEQ ID NO: 1754044 - DNA, 25 bp, Homo sapien
tgggggcaacacatgtttcacagag

SEQ ID NO: 1754045 - DNA, 25 bp, Homo sapien
tgcaacttccgaggatgaagctggg

SEQ ID NO: 1754046 - DNA, 25 bp, Homo sapien
tccattttccggcagcactttattc

SEQ ID NO: 1754047 - DNA, 25 bp, Homo sapien
gcactttattcccagtattaatgtg

SEQ ID NO: 1754048 - DNA, 25 bp, Homo sapien
ccattttccggcagcactttattcc

SEQ ID NO: 1754049 - DNA, 25 bp, Homo sapien
ctggcgtctaaaagagtcattttct

SEQ ID NO: 1754050 - DNA, 25 bp, Homo sapien
ttttcaagagaacttcagcaggatc

SEQ ID NO: 1754051 - DNA, 25 bp, Homo sapien
gctccataagtgaagagttttcaag

SEQ ID NO: 1754052 - DNA, 25 bp, Homo sapien
taggcattgctccataagtgaagag

SEQ ID NO: 1754053 - DNA, 25 bp, Homo sapien
gcagttgacttgctcaacctagcaa

SEQ ID NO: 1754054 - DNA, 25 bp, Homo sapien
aggtgccatggcagaaatttgagta

SEQ ID NO: 1754055 - DNA, 25 bp, Homo sapien
taggggggatatggtgaagaaggca

SEQ ID NO: 1754056 - DNA, 25 bp, Homo sapien
gacttgctcaacctagcaatattca

SEQ ID NO: 1754057 - DNA, 25 bp, Homo sapien
gaatatctgagacagtgccttctcc

SEQ ID NO: 1754058 - DNA, 25 bp, Homo sapien
ctattggtgggaaattcttataact

SEQ ID NO: 1754059 - DNA, 25 bp, Homo sapien
tttcttcagcagaggtaggtgatta

SEQ ID NO: 1754060 - DNA, 25 bp, Homo sapien
tcttataacttctatgcttcttcct

SEQ ID NO: 1754061 - DNA, 25 bp, Homo sapien
acttcccatgaacaatatagaatgc

SEQ ID NO: 1754062 - DNA, 25 bp, Homo sapien
cacttcccatgaacaatatagaatg

SEQ ID NO: 1754063 - DNA, 25 bp, Homo sapien
gtttatcactcagcattctaataga

SEQ ID NO: 1754064 - DNA, 25 bp, Homo sapien
ttatcactcagcattctaatagaag

SEQ ID NO: 1754065 - DNA, 25 bp, Homo sapien
tgtttatcactcagcattctaatag

SEQ ID NO: 1754066 - DNA, 25 bp, Homo sapien
ctgtttatcactcagcattctaata

SEQ ID NO: 1754067 - DNA, 25 bp, Homo sapien
agctggaagatttggactctcatgc

SEQ ID NO: 1754068 - DNA, 25 bp, Homo sapien
gccatagaggtccactctgcaagcc

SEQ ID NO: 1754069 - DNA, 25 bp, Homo sapien
gctgcagcatcaaatccaatctggc

SEQ ID NO: 1754070 - DNA, 25 bp, Homo sapien
ggaagatttggactctcatgcacca

SEQ ID NO: 1754071 - DNA, 25 bp, Homo sapien
cagtggctctgccttacttacactc

SEQ ID NO: 1754072 - DNA, 25 bp, Homo sapien
ctgccttacttacactcagagaaag

SEQ ID NO: 1754073 - DNA, 25 bp, Homo sapien
cctcaactccggtggagccttcttt

SEQ ID NO: 1754074 - DNA, 25 bp, Homo sapien
tccggtggagccttctttaccagtg

SEQ ID NO: 1754075 - DNA, 25 bp, Homo sapien
atctttgttgtcaaacaggtattta

SEQ ID NO: 1754076 - DNA, 25 bp, Homo sapien
ttgaaagcgctatccatccaccacg

SEQ ID NO: 1754077 - DNA, 25 bp, Homo sapien
tgccatgcgcgcgattacggaggcc

SEQ ID NO: 1754078 - DNA, 25 bp, Homo sapien
tcacttctttgaaagcgctatccat

SEQ ID NO: 1754079 - DNA, 25 bp, Homo sapien
gcgggctatgccatgcgcgcgatta

SEQ ID NO: 1754080 - DNA, 25 bp, Homo sapien
cttgcggaagtcctcggcatggtcg

SEQ ID NO: 1754081 - DNA, 25 bp, Homo sapien
tcctcggcatggtcgctgaacgcga

SEQ ID NO: 1754082 - DNA, 25 bp, Homo sapien
aagtcctcggcatggtcgctgaacg

SEQ ID NO: 1754083 - DNA, 25 bp, Homo sapien
tgcggaagtcctcggcatggtcgct

SEQ ID NO: 1754084 - DNA, 25 bp, Homo sapien
ctctgggggttgttgatccaagcca

SEQ ID NO: 1754085 - DNA, 25 bp, Homo sapien
cactgagatgcccagcacttcgcag

SEQ ID NO: 1754086 - DNA, 25 bp, Homo sapien
tctccctccctctgggggttgttga

SEQ ID NO: 1754087 - DNA, 25 bp, Homo sapien
gggtgaactgagagtccactgagat

SEQ ID NO: 1754088 - DNA, 25 bp, Homo sapien
atcactgataaagcggcccctgtag

SEQ ID NO: 1754089 - DNA, 25 bp, Homo sapien
catcactgataaagcggcccctgta

SEQ ID NO: 1754090 - DNA, 25 bp, Homo sapien
gccatcactgataaagcggcccctg

SEQ ID NO: 1754091 - DNA, 25 bp, Homo sapien
tgccatcactgataaagcggcccct

SEQ ID NO: 1754092 - DNA, 25 bp, Homo sapien
ggagcgtcccacaggcaaatcatta

SEQ ID NO: 1754093 - DNA, 25 bp, Homo sapien
atccacggagcgtcccacaggcaaa

SEQ ID NO: 1754094 - DNA, 25 bp, Homo sapien
agagcctcatccacggagcgtccca

SEQ ID NO: 1754095 - DNA, 25 bp, Homo sapien
gaaggcctggaccagccgcagagcc

SEQ ID NO: 1754096 - DNA, 25 bp, Homo sapien
gcgggacaaacttccgcgtgctctt

SEQ ID NO: 1754097 - DNA, 25 bp, Homo sapien
cgggacaaacttccgcgtgctcttc

SEQ ID NO: 1754098 - DNA, 25 bp, Homo sapien
aacttccgcgtgctcttctgcgtac

SEQ ID NO: 1754099 - DNA, 25 bp, Homo sapien
acaaacttccgcgtgctcttctgcg

SEQ ID NO: 1754100 - DNA, 25 bp, Homo sapien
ctatttactagttcccaggtggagg

SEQ ID NO: 1754101 - DNA, 25 bp, Homo sapien
gcatgagacggccttggtctagcct

SEQ ID NO: 1754102 - DNA, 25 bp, Homo sapien
gacggccttggtctagccttccagt

SEQ ID NO: 1754103 - DNA, 25 bp, Homo sapien
tgggcttgtaggagggcatcactat

SEQ ID NO: 1754104 - DNA, 25 bp, Homo sapien
aactgtgcagaccattgcaggagac

SEQ ID NO: 1754105 - DNA, 25 bp, Homo sapien
aacctatggccagtccaggttgtcg

SEQ ID NO: 1754106 - DNA, 25 bp, Homo sapien
gtgctgccgtcctgccaaacctatg

SEQ ID NO: 1754107 - DNA, 25 bp, Homo sapien
ccaggttgtcgcacaactgtgcaga

SEQ ID NO: 1754108 - DNA, 25 bp, Homo sapien
cagattcagccaatgaaagagcttc

SEQ ID NO: 1754109 - DNA, 25 bp, Homo sapien
cttgcaaaactgaatgagcattggc

SEQ ID NO: 1754110 - DNA, 25 bp, Homo sapien
tgttttggtcaatctagaagacctg

SEQ ID NO: 1754111 - DNA, 25 bp, Homo sapien
catcccctaagagtaaatccagttt

SEQ ID NO: 1754112 - DNA, 25 bp, Homo sapien
agcttttccaccagtggcttcccac

SEQ ID NO: 1754113 - DNA, 25 bp, Homo sapien
cagcttttccaccagtggcttccca

SEQ ID NO: 1754114 - DNA, 25 bp, Homo sapien
tgcagcttttccaccagtggcttcc

SEQ ID NO: 1754115 - DNA, 25 bp, Homo sapien
ctgcagcttttccaccagtggcttc

SEQ ID NO: 1754116 - DNA, 25 bp, Homo sapien
gaagaacatcacttttgccagcagc

SEQ ID NO: 1754117 - DNA, 25 bp, Homo sapien
ggtccctgtggaaactgttgcctca

SEQ ID NO: 1754118 - DNA, 25 bp, Homo sapien
tatatgcggtaatagcagcactgtc

SEQ ID NO: 1754119 - DNA, 25 bp, Homo sapien
tcaaattggtgtaggaaatacggcc

SEQ ID NO: 1754120 - DNA, 25 bp, Homo sapien
gccatgatcactttttcatcttgct

SEQ ID NO: 1754121 - DNA, 25 bp, Homo sapien
gacagccatgatcactttttcatct

SEQ ID NO: 1754122 - DNA, 25 bp, Homo sapien
ttgctggagtgtgagtatgaagcat

SEQ ID NO: 1754123 - DNA, 25 bp, Homo sapien
catcttgctttgctggagtgtgagt

SEQ ID NO: 1754124 - DNA, 25 bp, Homo sapien
gacaatttagccatttccatacagt

SEQ ID NO: 1754125 - DNA, 25 bp, Homo sapien
tagttgtatcctgcaggggagtccc

SEQ ID NO: 1754126 - DNA, 25 bp, Homo sapien
aggtctcagtaaagacaatttagcc

SEQ ID NO: 1754127 - DNA, 25 bp, Homo sapien
tccatacagtttatgcttgtgttag

SEQ ID NO: 1754128 - DNA, 25 bp, Homo sapien
tgttcgccattaaaatgagttttcc

SEQ ID NO: 1754129 - DNA, 25 bp, Homo sapien
caactgtatgtctttcggcacactt

SEQ ID NO: 1754130 - DNA, 25 bp, Homo sapien
ttcgtctttctgttcgccattaaaa

SEQ ID NO: 1754131 - DNA, 25 bp, Homo sapien
gaaagagagtgacactgaatccact

SEQ ID NO: 1754132 - DNA, 25 bp, Homo sapien
catgatagcagttacaattggatcc

SEQ ID NO: 1754133 - DNA, 25 bp, Homo sapien
ggcttgtcagattcatattaccttc

SEQ ID NO: 1754134 - DNA, 25 bp, Homo sapien
tcaggaagctgagacgtgagggtgg

SEQ ID NO: 1754135 - DNA, 25 bp, Homo sapien
acgtgagggtggataaatctgcccc

SEQ ID NO: 1754136 - DNA, 25 bp, Homo sapien
aagatcggtatgtttaatggctttg

SEQ ID NO: 1754137 - DNA, 25 bp, Homo sapien
cggtatgtttaatggctttggtgta

SEQ ID NO: 1754138 - DNA, 25 bp, Homo sapien
tgtattcttggtaggtgtatggccg

SEQ ID NO: 1754139 - DNA, 25 bp, Homo sapien
tgtatggccgggacaggacctgtgc

SEQ ID NO: 1754140 - DNA, 25 bp, Homo sapien
gggctcctatcacaaccagacttct

SEQ ID NO: 1754141 - DNA, 25 bp, Homo sapien
ggggctcctatcacaaccagacttc

SEQ ID NO: 1754142 - DNA, 25 bp, Homo sapien
cactgtagggttgttgaagagctca

SEQ ID NO: 1754143 - DNA, 25 bp, Homo sapien
cccttttcatcaatccaatttttct

SEQ ID NO: 1754144 - DNA, 25 bp, Homo sapien
gacaacactgctctgctaaccaact

SEQ ID NO: 1754145 - DNA, 25 bp, Homo sapien
gacgcagctgtagccagacaacact

SEQ ID NO: 1754146 - DNA, 25 bp, Homo sapien
aaaaatgttccagagggtccatgtc

SEQ ID NO: 1754147 - DNA, 25 bp, Homo sapien
ttccaggcatgaccactaatggtac

SEQ ID NO: 1754148 - DNA, 25 bp, Homo sapien
tagatcagaatacgctatacttggg

SEQ ID NO: 1754149 - DNA, 25 bp, Homo sapien
aaatgaaactgatagtccatggaga

SEQ ID NO: 1754150 - DNA, 25 bp, Homo sapien
tcctgggtgccaaatggattgatgt

SEQ ID NO: 1754151 - DNA, 25 bp, Homo sapien
tgggtgccaaatggattgatgtctc

SEQ ID NO: 1754152 - DNA, 25 bp, Homo sapien
tgccaaatggattgatgtctctcac

SEQ ID NO: 1754153 - DNA, 25 bp, Homo sapien
ccaaatggattgatgtctctcacgg

SEQ ID NO: 1754154 - DNA, 25 bp, Homo sapien
gatggacagacctttgtcttttgcc

SEQ ID NO: 1754155 - DNA, 25 bp, Homo sapien
caatagggattcctgcagctggagc

SEQ ID NO: 1754156 - DNA, 25 bp, Homo sapien
tttccccagtaatatagatgccttc

SEQ ID NO: 1754157 - DNA, 25 bp, Homo sapien
ctaaagtgcccagttgaggattgac

SEQ ID NO: 1754158 - DNA, 25 bp, Homo sapien
gggaaacgagaaaatctggccatgg

SEQ ID NO: 1754159 - DNA, 25 bp, Homo sapien
tgggaaacgagaaaatctggccatg

SEQ ID NO: 1754160 - DNA, 25 bp, Homo sapien
ttggctgggaaacgagaaaatctgg

SEQ ID NO: 1754161 - DNA, 25 bp, Homo sapien
attctcacacacacttcattttctg

SEQ ID NO: 1754162 - DNA, 25 bp, Homo sapien
aattctcacacacacttcattttct

SEQ ID NO: 1754163 - DNA, 25 bp, Homo sapien
ttctcacacacacttcattttctga

SEQ ID NO: 1754164 - DNA, 25 bp, Homo sapien
tctcacacacacttcattttctgac

SEQ ID NO: 1754165 - DNA, 25 bp, Homo sapien
ttcatgtaagtgagtgaaaaaagga

SEQ ID NO: 1754166 - DNA, 25 bp, Homo sapien
ttcttctattggaaagcttgagcag

SEQ ID NO: 1754167 - DNA, 25 bp, Homo sapien
aaagcagggtccagtcgagaggctt

SEQ ID NO: 1754168 - DNA, 25 bp, Homo sapien
ccagccaggatgctgatacgcgtct

SEQ ID NO: 1754169 - DNA, 25 bp, Homo sapien
tagaccagcacgtggacataggggt

SEQ ID NO: 1754170 - DNA, 25 bp, Homo sapien
gctgagctgcatttgctccacttgg

SEQ ID NO: 1754171 - DNA, 25 bp, Homo sapien
acttggacaggaagtaggagaagcc

SEQ ID NO: 1754172 - DNA, 25 bp, Homo sapien
gggcagtagcaactcaggaaccagc

SEQ ID NO: 1754173 - DNA, 25 bp, Homo sapien
tcagactttacatgttcgtgaggtc

SEQ ID NO: 1754174 - DNA, 25 bp, Homo sapien
taggtgcacccattaaaagagtccc

SEQ ID NO: 1754175 - DNA, 25 bp, Homo sapien
gatgtctgaagaaggcaggtacttg

SEQ ID NO: 1754176 - DNA, 25 bp, Homo sapien
tatcttatcttctaggactccgctc

SEQ ID NO: 1754177 - DNA, 25 bp, Homo sapien
gagactcagtggcaactgctcggcc

SEQ ID NO: 1754178 - DNA, 25 bp, Homo sapien
ggcccagtataacactggctgtgac

SEQ ID NO: 1754179 - DNA, 25 bp, Homo sapien
catcttagttgtatctcggatctta

SEQ ID NO: 1754180 - DNA, 25 bp, Homo sapien
tgtatctcggatcttaaagcctttg

SEQ ID NO: 1754181 - DNA, 25 bp, Homo sapien
tgatgacagttcactccttttgtgg

SEQ ID NO: 1754182 - DNA, 25 bp, Homo sapien
ggtactgcctgtgtcgatctcttgt

SEQ ID NO: 1754183 - DNA, 25 bp, Homo sapien
ttgctgtagattctctaagatgagg

SEQ ID NO: 1754184 - DNA, 25 bp, Homo sapien
tggcttggcccagttatccctttct

SEQ ID NO: 1754185 - DNA, 25 bp, Homo sapien
ggtatctgcacgtgggttttagcaa

SEQ ID NO: 1754186 - DNA, 25 bp, Homo sapien
tactgaacttttaggtatctgcacg

SEQ ID NO: 1754187 - DNA, 25 bp, Homo sapien
gttgattacatacatagcagctaga

SEQ ID NO: 1754188 - DNA, 25 bp, Homo sapien
gcagctagaaactcattatactgaa

SEQ ID NO: 1754189 - DNA, 25 bp, Homo sapien
tgccaaagtgtatgttgcatttttt

SEQ ID NO: 1754190 - DNA, 25 bp, Homo sapien
gctcaggctggagaggaatattttt

SEQ ID NO: 1754191 - DNA, 25 bp, Homo sapien
ctgccaaagtgtatgttgcattttt

SEQ ID NO: 1754192 - DNA, 25 bp, Homo sapien
tctttggaatctgacgaagcctcaa

SEQ ID NO: 1754193 - DNA, 25 bp, Homo sapien
tctgtgataaatgacgtatctttgg

SEQ ID NO: 1754194 - DNA, 25 bp, Homo sapien
cgtatctttggaatctgacgaagcc

SEQ ID NO: 1754195 - DNA, 25 bp, Homo sapien
aaatgacgtatctttggaatctgac

SEQ ID NO: 1754196 - DNA, 25 bp, Homo sapien
caaaaccccacaaaacagagctcct

SEQ ID NO: 1754197 - DNA, 25 bp, Homo sapien
gagctcctctccaaccctgctttcc

SEQ ID NO: 1754198 - DNA, 25 bp, Homo sapien
accccacaaaacagagctcctctcc

SEQ ID NO: 1754199 - DNA, 25 bp, Homo sapien
tcctctccaaccctgctttccccat

SEQ ID NO: 1754200 - DNA, 25 bp, Homo sapien
ttttggaacttggaacatcccatca

SEQ ID NO: 1754201 - DNA, 25 bp, Homo sapien
gtcattaccatatattgctccggga

SEQ ID NO: 1754202 - DNA, 25 bp, Homo sapien
cagcctggtgttgtgttttggaact

SEQ ID NO: 1754203 - DNA, 25 bp, Homo sapien
tccgggaaattaactgtgtagctgt

SEQ ID NO: 1754204 - DNA, 25 bp, Homo sapien
tatcagaatatttaaaaccctgctg

SEQ ID NO: 1754205 - DNA, 25 bp, Homo sapien
tcagaatatttaaaaccctgctgga

SEQ ID NO: 1754206 - DNA, 25 bp, Homo sapien
aactatcagaatatttaaaaccctg

SEQ ID NO: 1754207 - DNA, 25 bp, Homo sapien
cagaatatttaaaaccctgctggac

SEQ ID NO: 1754208 - DNA, 25 bp, Homo sapien
ccatagttggccatctttcgtggca

SEQ ID NO: 1754209 - DNA, 25 bp, Homo sapien
tttggaggagtgaaaagccatccct

SEQ ID NO: 1754210 - DNA, 25 bp, Homo sapien
gtttcccatagttggccatctttcg

SEQ ID NO: 1754211 - DNA, 25 bp, Homo sapien
atccctttcttacatcgctcacttt

SEQ ID NO: 1754212 - DNA, 25 bp, Homo sapien
agcaggtagaatcctatcagtgccc

SEQ ID NO: 1754213 - DNA, 25 bp, Homo sapien
ttgaagctatagagcctcttgctcc

SEQ ID NO: 1754214 - DNA, 25 bp, Homo sapien
gtttgaagctatagagcctcttgct

SEQ ID NO: 1754215 - DNA, 25 bp, Homo sapien
tttgaagctatagagcctcttgctc

SEQ ID NO: 1754216 - DNA, 25 bp, Homo sapien
ttggattttccggtggacaatcaga

SEQ ID NO: 1754217 - DNA, 25 bp, Homo sapien
ggattttccggtggacaatcagaag

SEQ ID NO: 1754218 - DNA, 25 bp, Homo sapien
gcaaagagtctaaagggagaaggat

SEQ ID NO: 1754219 - DNA, 25 bp, Homo sapien
gggaagtgagtaagacagcaaagag

SEQ ID NO: 1754220 - DNA, 25 bp, Homo sapien
taatattagaggcagccgagtcagg

SEQ ID NO: 1754221 - DNA, 25 bp, Homo sapien
gagtcattagtcagccttctttggg

SEQ ID NO: 1754222 - DNA, 25 bp, Homo sapien
cccttggtgagtgagcctttgtcaa

SEQ ID NO: 1754223 - DNA, 25 bp, Homo sapien
tattaagtacgaaccatgtgctcgg

SEQ ID NO: 1754224 - DNA, 25 bp, Homo sapien
gcaggtgataatcctcactattttg

SEQ ID NO: 1754225 - DNA, 25 bp, Homo sapien
cagcaggtgataatcctcactattt

SEQ ID NO: 1754226 - DNA, 25 bp, Homo sapien
ggtgataatcctcactattttgtaa

SEQ ID NO: 1754227 - DNA, 25 bp, Homo sapien
tacagcaggtgataatcctcactat

SEQ ID NO: 1754228 - DNA, 25 bp, Homo sapien
gaggtttgtgtaatctgcctcacac

SEQ ID NO: 1754229 - DNA, 25 bp, Homo sapien
gtgtaatctgcctcacactgtagtt

SEQ ID NO: 1754230 - DNA, 25 bp, Homo sapien
ctgaggtttgtgtaatctgcctcac

SEQ ID NO: 1754231 - DNA, 25 bp, Homo sapien
tttgtgtaatctgcctcacactgta

SEQ ID NO: 1754232 - DNA, 25 bp, Homo sapien
tctttgttaagcccatggtgggtat

SEQ ID NO: 1754233 - DNA, 25 bp, Homo sapien
tatctttgttaagcccatggtgggt

SEQ ID NO: 1754234 - DNA, 25 bp, Homo sapien
ccagaacaggtatttggtatcctac

SEQ ID NO: 1754235 - DNA, 25 bp, Homo sapien
aattatctttgttaagcccatggtg

SEQ ID NO: 1754236 - DNA, 25 bp, Homo sapien
gaagttgggagcagtctttattttg

SEQ ID NO: 1754237 - DNA, 25 bp, Homo sapien
gatagcagatgggatgcagaccctg

SEQ ID NO: 1754238 - DNA, 25 bp, Homo sapien
tacagcagcatgtgatctttgccga

SEQ ID NO: 1754239 - DNA, 25 bp, Homo sapien
ttctgccagatagcagatgggatgc

SEQ ID NO: 1754240 - DNA, 25 bp, Homo sapien
cccttgtacaagtcttcttctccat

SEQ ID NO: 1754241 - DNA, 25 bp, Homo sapien
tcaagtcctgactgtctttgtacca

SEQ ID NO: 1754242 - DNA, 25 bp, Homo sapien
tctttgtaccattgaatttcaactg

SEQ ID NO: 1754243 - DNA, 25 bp, Homo sapien
tcaactgtatactgctgtttctctt

SEQ ID NO: 1754244 - DNA, 25 bp, Homo sapien
tggagttttgatctttcaagtcctg

SEQ ID NO: 1754245 - DNA, 25 bp, Homo sapien
gacgatcgtatccaaccttcactag

SEQ ID NO: 1754246 - DNA, 25 bp, Homo sapien
aaacagaagactgcgagaaaccaac

SEQ ID NO: 1754247 - DNA, 25 bp, Homo sapien
aacatggcatccagttccacaccaa

SEQ ID NO: 1754248 - DNA, 25 bp, Homo sapien
gataatcacatcgagaacattggca

SEQ ID NO: 1754249 - DNA, 25 bp, Homo sapien
tcactgcgtgttgcgataatttgca

SEQ ID NO: 1754250 - DNA, 25 bp, Homo sapien
ctatgatgttctgcttatcatgctc

SEQ ID NO: 1754251 - DNA, 25 bp, Homo sapien
tgttgcgataatttgcagaggagtc

SEQ ID NO: 1754252 - DNA, 25 bp, Homo sapien
tttgcagaggagtctatgatgttct

SEQ ID NO: 1754253 - DNA, 25 bp, Homo sapien
catcagttgatgaggtgtcacctag

SEQ ID NO: 1754254 - DNA, 25 bp, Homo sapien
cacctagtttggtacacagctgagg

SEQ ID NO: 1754255 - DNA, 25 bp, Homo sapien
gagtcctctgactgtatgtctcatg

SEQ ID NO: 1754256 - DNA, 25 bp, Homo sapien
tctcatgggatcgtcatcagttgat

SEQ ID NO: 1754257 - DNA, 25 bp, Homo sapien
tcatgtggctgaacatgtagacctg

SEQ ID NO: 1754258 - DNA, 25 bp, Homo sapien
tgtggctgaacatgtagacctggag

SEQ ID NO: 1754259 - DNA, 25 bp, Homo sapien
gccatgagtcatgggtgaggagtgg

SEQ ID NO: 1754260 - DNA, 25 bp, Homo sapien
catgagtcatgggtgaggagtggag

SEQ ID NO: 1754261 - DNA, 25 bp, Homo sapien
tccattatccgtttatcccatattg

SEQ ID NO: 1754262 - DNA, 25 bp, Homo sapien
atccatccattatccgtttatccca

SEQ ID NO: 1754263 - DNA, 25 bp, Homo sapien
aaagaaccaaggacatttgaatatc

SEQ ID NO: 1754264 - DNA, 25 bp, Homo sapien
attatccgtttatcccatattgcaa

SEQ ID NO: 1754265 - DNA, 25 bp, Homo sapien
tatttctgagacctgagagggtcac

SEQ ID NO: 1754266 - DNA, 25 bp, Homo sapien
caagtgtcagttgatggtattcaga

SEQ ID NO: 1754267 - DNA, 25 bp, Homo sapien
tgcaattgctttcaccaaggtgcct

SEQ ID NO: 1754268 - DNA, 25 bp, Homo sapien
gagtctccctcgactcaggctcagg

SEQ ID NO: 1754269 - DNA, 25 bp, Homo sapien
actgttagggtagacgaagaacctg

SEQ ID NO: 1754270 - DNA, 25 bp, Homo sapien
tagacgaagaacctgggtctgaatc

SEQ ID NO: 1754271 - DNA, 25 bp, Homo sapien
tctctctttggcaatactgttaggg

SEQ ID NO: 1754272 - DNA, 25 bp, Homo sapien
atctctctttggcaatactgttagg

SEQ ID NO: 1754273 - DNA, 25 bp, Homo sapien
gaagagcaaatactctctagctcat

SEQ ID NO: 1754274 - DNA, 25 bp, Homo sapien
cagtttctcagctttaagtataaga

SEQ ID NO: 1754275 - DNA, 25 bp, Homo sapien
tctagctcataaagcatgactgttt

SEQ ID NO: 1754276 - DNA, 25 bp, Homo sapien
tgaaaacagtcaataccggccgggc

SEQ ID NO: 1754277 - DNA, 25 bp, Homo sapien
acatatctcaggagggttcttttcc

SEQ ID NO: 1754278 - DNA, 25 bp, Homo sapien
tactcctgtttgagggaagcatccc

SEQ ID NO: 1754279 - DNA, 25 bp, Homo sapien
gttcagctacgttatcacaggcaca

SEQ ID NO: 1754280 - DNA, 25 bp, Homo sapien
tttccaatgtgtgtaagccaaagcc

SEQ ID NO: 1754281 - DNA, 25 bp, Homo sapien
taggtctctctgctgcggaggttta

SEQ ID NO: 1754282 - DNA, 25 bp, Homo sapien
tcttagtctgtgagcccctcgcagt

SEQ ID NO: 1754283 - DNA, 25 bp, Homo sapien
tcgcagtattcctccttgtcagctc

SEQ ID NO: 1754284 - DNA, 25 bp, Homo sapien
gctgcggaggtttacccagtggcca

SEQ ID NO: 1754285 - DNA, 25 bp, Homo sapien
gctcaattgccagtcgatatcctga

SEQ ID NO: 1754286 - DNA, 25 bp, Homo sapien
aattgccagtcgatatcctgagccc

SEQ ID NO: 1754287 - DNA, 25 bp, Homo sapien
ctgctcaattgccagtcgatatcct

SEQ ID NO: 1754288 - DNA, 25 bp, Homo sapien
tcaattgccagtcgatatcctgagc

SEQ ID NO: 1754289 - DNA, 25 bp, Homo sapien
tccagatttgcagggtcagagagtc

SEQ ID NO: 1754290 - DNA, 25 bp, Homo sapien
gagagtctcatttgatattataatc

SEQ ID NO: 1754291 - DNA, 25 bp, Homo sapien
cctgttgttattagaatatgatgca

SEQ ID NO: 1754292 - DNA, 25 bp, Homo sapien
aaagtccctatacagctggttccag

SEQ ID NO: 1754293 - DNA, 25 bp, Homo sapien
gaggaatttagcattctggcttgcc

SEQ ID NO: 1754294 - DNA, 25 bp, Homo sapien
tggcttgcctgagggagtaaactcc

SEQ ID NO: 1754295 - DNA, 25 bp, Homo sapien
cctgagggagtaaactccctgactc

SEQ ID NO: 1754296 - DNA, 25 bp, Homo sapien
ctttctcctcgccttggcattgcaa

SEQ ID NO: 1754297 - DNA, 25 bp, Homo sapien
tcactcctactgcatcctgctgttc

SEQ ID NO: 1754298 - DNA, 25 bp, Homo sapien
atatgctgagtaagtagtgaagcca

SEQ ID NO: 1754299 - DNA, 25 bp, Homo sapien
atgctgagtaagtagtgaagccaga

SEQ ID NO: 1754300 - DNA, 25 bp, Homo sapien
gtcactcctactgcatcctgctgtt

SEQ ID NO: 1754301 - DNA, 25 bp, Homo sapien
ttaataagcagttgcaacagggcat

SEQ ID NO: 1754302 - DNA, 25 bp, Homo sapien
tgggtctccgaggttcagtgaagct

SEQ ID NO: 1754303 - DNA, 25 bp, Homo sapien
tagaggcaggtggtatacgccttga

SEQ ID NO: 1754304 - DNA, 25 bp, Homo sapien
tatgcccaccatatgttctgaaaat

SEQ ID NO: 1754305 - DNA, 25 bp, Homo sapien
tggcatttgataccctgaacgaccc

SEQ ID NO: 1754306 - DNA, 25 bp, Homo sapien
gattttccgaggaccagggttcgca

SEQ ID NO: 1754307 - DNA, 25 bp, Homo sapien
cttaaatgccgcgagactgaagagc

SEQ ID NO: 1754308 - DNA, 25 bp, Homo sapien
gcccaaattcggtggatcgcccaaa

SEQ ID NO: 1754309 - DNA, 25 bp, Homo sapien
agaacagttaagagatgggcgcccc

SEQ ID NO: 1754310 - DNA, 25 bp, Homo sapien
gacggtaggcatgagaacagttaag

SEQ ID NO: 1754311 - DNA, 25 bp, Homo sapien
gagaggccggcggtgtcgctgggtt

SEQ ID NO: 1754312 - DNA, 25 bp, Homo sapien
tcgctgggttggacggtaggcatga

SEQ ID NO: 1754313 - DNA, 25 bp, Homo sapien
caagccatttcgaaaaagacgcact

SEQ ID NO: 1754314 - DNA, 25 bp, Homo sapien
ttccgtgtcgccatggtttcagaga

SEQ ID NO: 1754315 - DNA, 25 bp, Homo sapien
ctcattaggagtccagcggtcccgc

SEQ ID NO: 1754316 - DNA, 25 bp, Homo sapien
ggtagtaagattcagagcccggagc

SEQ ID NO: 1754317 - DNA, 25 bp, Homo sapien
tgagcgtttgtttaaacagctccta

SEQ ID NO: 1754318 - DNA, 25 bp, Homo sapien
gactgttgggagctatgtatctcta

SEQ ID NO: 1754319 - DNA, 25 bp, Homo sapien
taattagtcagcaagagtcctggtg

SEQ ID NO: 1754320 - DNA, 25 bp, Homo sapien
tcctattagggaaccgcgagcatcg

SEQ ID NO: 1754321 - DNA, 25 bp, Homo sapien
gcaattagcgccacaaacgagagga

SEQ ID NO: 1754322 - DNA, 25 bp, Homo sapien
tatggtagatgaaacaactccctcc

SEQ ID NO: 1754323 - DNA, 25 bp, Homo sapien
aaaccaagccgggagtcgagtctgt

SEQ ID NO: 1754324 - DNA, 25 bp, Homo sapien
gactatcttactgccatcgggcggc

SEQ ID NO: 1754325 - DNA, 25 bp, Homo sapien
taattcactctctcggtaaacgcgg

SEQ ID NO: 1754326 - DNA, 25 bp, Homo sapien
taaacgcggctcagacagttgtgtg

SEQ ID NO: 1754327 - DNA, 25 bp, Homo sapien
ttaaaatttcccgtgctagaggcga

SEQ ID NO: 1754328 - DNA, 25 bp, Homo sapien
taaattcgcagaacacgtgggaggc

SEQ ID NO: 1754329 - DNA, 25 bp, Homo sapien
tagacattgctcacaaaggcgcgtt

SEQ ID NO: 1754330 - DNA, 25 bp, Homo sapien
gcctggagcaaagaagagtcattag

SEQ ID NO: 1754331 - DNA, 25 bp, Homo sapien
aaggcgcgttggttccagaatctac

SEQ ID NO: 1754332 - DNA, 25 bp, Homo sapien
ggtagagtcacggacgcctgcatgt

SEQ ID NO: 1754333 - DNA, 25 bp, Homo sapien
tgtatgtgtgcgtccctagcagtct

SEQ ID NO: 1754334 - DNA, 25 bp, Homo sapien
catactgagatgttcgagtgaccat

SEQ ID NO: 1754335 - DNA, 25 bp, Homo sapien
catcctgaccttggacattgagcaa

SEQ ID NO: 1754336 - DNA, 25 bp, Homo sapien
catgtgggatgtgcgagcatgcaaa

SEQ ID NO: 1754337 - DNA, 25 bp, Homo sapien
gcttttggctcagttcctgtggcaa

SEQ ID NO: 1754338 - DNA, 25 bp, Homo sapien
tacacccacagtgtttatgcatgct

SEQ ID NO: 1754339 - DNA, 25 bp, Homo sapien
ccatcacaagagacaaggaacaaaa

SEQ ID NO: 1754340 - DNA, 25 bp, Homo sapien
agtgctaatctctgccatgccatca

SEQ ID NO: 1754341 - DNA, 25 bp, Homo sapien
cagaccattattgagtctgtctcct

SEQ ID NO: 1754342 - DNA, 25 bp, Homo sapien
cttggctggtattaaggacatgggt

SEQ ID NO: 1754343 - DNA, 25 bp, Homo sapien
tttgccagcacgtccccataaagca

SEQ ID NO: 1754344 - DNA, 25 bp, Homo sapien
ttcctttgccagcacgtccccataa

SEQ ID NO: 1754345 - DNA, 25 bp, Homo sapien
cacttcgaattgttctcgggttgac

SEQ ID NO: 1754346 - DNA, 25 bp, Homo sapien
tgtaattttccacttcgaattgttc

SEQ ID NO: 1754347 - DNA, 25 bp, Homo sapien
tcaggctacagaatttgccgggtgt

SEQ ID NO: 1754348 - DNA, 25 bp, Homo sapien
gctacagaatttgccgggtgtaatt

SEQ ID NO: 1754349 - DNA, 25 bp, Homo sapien
gctgtacatctgagaggtccgtgga

SEQ ID NO: 1754350 - DNA, 25 bp, Homo sapien
gctgcttcactagctgtacatctga

SEQ ID NO: 1754351 - DNA, 25 bp, Homo sapien
catctgagaggtccgtggagagtta

SEQ ID NO: 1754352 - DNA, 25 bp, Homo sapien
tttacaagctgcttcactagctgta

SEQ ID NO: 1754353 - DNA, 25 bp, Homo sapien
catctgtttgccaaacacttgaacc

SEQ ID NO: 1754354 - DNA, 25 bp, Homo sapien
tccctcatttccgacatctgtttgc

SEQ ID NO: 1754355 - DNA, 25 bp, Homo sapien
ttccgacatctgtttgccaaacact

SEQ ID NO: 1754356 - DNA, 25 bp, Homo sapien
tttctccctcatttccgacatctgt

SEQ ID NO: 1754357 - DNA, 25 bp, Homo sapien
ctgaagttttagctctctgtcttct

SEQ ID NO: 1754358 - DNA, 25 bp, Homo sapien
tgaagttttagctctctgtcttctc

SEQ ID NO: 1754359 - DNA, 25 bp, Homo sapien
gtcttctctcaccagaccctttcct

SEQ ID NO: 1754360 - DNA, 25 bp, Homo sapien
ctctgtcttctctcaccagaccctt

SEQ ID NO: 1754361 - DNA, 25 bp, Homo sapien
tgacgaagaacattctgagagtgga

SEQ ID NO: 1754362 - DNA, 25 bp, Homo sapien
gaagaacattctgagagtggaacag

SEQ ID NO: 1754363 - DNA, 25 bp, Homo sapien
cgaagaacattctgagagtggaaca

SEQ ID NO: 1754364 - DNA, 25 bp, Homo sapien
ttatgacgaagaacattctgagagt

SEQ ID NO: 1754365 - DNA, 25 bp, Homo sapien
ttgattaacttgtaggcttgctagc

SEQ ID NO: 1754366 - DNA, 25 bp, Homo sapien
taggcttgctagcacacttgaagcg

SEQ ID NO: 1754367 - DNA, 25 bp, Homo sapien
taatttgtactgcattagcattttg

SEQ ID NO: 1754368 - DNA, 25 bp, Homo sapien
agcacacttgaagcgcttttactca

SEQ ID NO: 1754369 - DNA, 25 bp, Homo sapien
gctctgagcgaatgagcagcaatat

SEQ ID NO: 1754370 - DNA, 25 bp, Homo sapien
ggctctgagcgaatgagcagcaata

SEQ ID NO: 1754371 - DNA, 25 bp, Homo sapien
ctctgagcgaatgagcagcaatatt

SEQ ID NO: 1754372 - DNA, 25 bp, Homo sapien
tctgagcgaatgagcagcaatattc

SEQ ID NO: 1754373 - DNA, 25 bp, Homo sapien
actttatccttctgcgatgatttca

SEQ ID NO: 1754374 - DNA, 25 bp, Homo sapien
aactttatccttctgcgatgatttc

SEQ ID NO: 1754375 - DNA, 25 bp, Homo sapien
caggccatcacagaactgctatata

SEQ ID NO: 1754376 - DNA, 25 bp, Homo sapien
gccatcacagaactgctatatacca

SEQ ID NO: 1754377 - DNA, 25 bp, Homo sapien
aggccatcacagaactgctatatac

SEQ ID NO: 1754378 - DNA, 25 bp, Homo sapien
ggccatcacagaactgctatatacc

SEQ ID NO: 1754379 - DNA, 25 bp, Homo sapien
tcacactgtattgctgctctgaaca

SEQ ID NO: 1754380 - DNA, 25 bp, Homo sapien
ttagacacgtgatttgcaatcactg

SEQ ID NO: 1754381 - DNA, 25 bp, Homo sapien
catcataattagacacgtgatttgc

SEQ ID NO: 1754382 - DNA, 25 bp, Homo sapien
gacacgtgatttgcaatcactgtac

SEQ ID NO: 1754383 - DNA, 25 bp, Homo sapien
ataattagacacgtgatttgcaatc

SEQ ID NO: 1754384 - DNA, 25 bp, Homo sapien
gactatgtacgttctagaagattcc

SEQ ID NO: 1754385 - DNA, 25 bp, Homo sapien
tacagactatgtacgttctagaaga

SEQ ID NO: 1754386 - DNA, 25 bp, Homo sapien
tacgttctagaagattcctttagtg

SEQ ID NO: 1754387 - DNA, 25 bp, Homo sapien
ttattgtacagactatgtacgttct

SEQ ID NO: 1754388 - DNA, 25 bp, Homo sapien
gaaatgcatttataacctcccaagg

SEQ ID NO: 1754389 - DNA, 25 bp, Homo sapien
tgaagccaagtcaagtgagtaagtt

SEQ ID NO: 1754390 - DNA, 25 bp, Homo sapien
acagtatgttgagtagtgaatgccc

SEQ ID NO: 1754391 - DNA, 25 bp, Homo sapien
tgtgtagttcctaaagtcattctga

SEQ ID NO: 1754392 - DNA, 25 bp, Homo sapien
gggattgttctgagtctggcttcgg

SEQ ID NO: 1754393 - DNA, 25 bp, Homo sapien
ggcttcggcattgggcagagtgaga

SEQ ID NO: 1754394 - DNA, 25 bp, Homo sapien
gtctggcttcggcattgggcagagt

SEQ ID NO: 1754395 - DNA, 25 bp, Homo sapien
ttcggcattgggcagagtgagaata

SEQ ID NO: 1754396 - DNA, 25 bp, Homo sapien
tgttctttcttttggggctaagcag

SEQ ID NO: 1754397 - DNA, 25 bp, Homo sapien
gaggaagctgtgttcgtaagaaaaa

SEQ ID NO: 1754398 - DNA, 25 bp, Homo sapien
ggcttgaaagctatgaggaagctgt

SEQ ID NO: 1754399 - DNA, 25 bp, Homo sapien
aatctgcaaaacagtcgggaaccca

SEQ ID NO: 1754400 - DNA, 25 bp, Homo sapien
gcctgaatactctggacaaagggat

SEQ ID NO: 1754401 - DNA, 25 bp, Homo sapien
gactacaagtaattggaagcgtgga

SEQ ID NO: 1754402 - DNA, 25 bp, Homo sapien
tcgccaagaccaacatcgaggagct

SEQ ID NO: 1754403 - DNA, 25 bp, Homo sapien
tgtgagattccatcatgctacttag

SEQ ID NO: 1754404 - DNA, 25 bp, Homo sapien
gggtccttcgtctgctccaatctga

SEQ ID NO: 1754405 - DNA, 25 bp, Homo sapien
agccagtctcttacgcctacatacg

SEQ ID NO: 1754406 - DNA, 25 bp, Homo sapien
tgatcagggctctcatctgggcagc

SEQ ID NO: 1754407 - DNA, 25 bp, Homo sapien
tgggcagcgtgctaacagccagtct

SEQ ID NO: 1754408 - DNA, 25 bp, Homo sapien
tcaaaagaaaacagacgtagattgt

SEQ ID NO: 1754409 - DNA, 25 bp, Homo sapien
gccaagttgagttctgatcatgctc

SEQ ID NO: 1754410 - DNA, 25 bp, Homo sapien
gatcatgctctgctacttaatggtg

SEQ ID NO: 1754411 - DNA, 25 bp, Homo sapien
taataaaagcgcaccagtcagccag

SEQ ID NO: 1754412 - DNA, 25 bp, Homo sapien
tcctgtctgaactacttcagtagtc

SEQ ID NO: 1754413 - DNA, 25 bp, Homo sapien
gtatatttaccattgccccatttca

SEQ ID NO: 1754414 - DNA, 25 bp, Homo sapien
tactctgtatatttaccattgcccc

SEQ ID NO: 1754415 - DNA, 25 bp, Homo sapien
cagtagtcgtttgctttagccttcc

SEQ ID NO: 1754416 - DNA, 25 bp, Homo sapien
gctaaaatttcctggcatctaagta

SEQ ID NO: 1754417 - DNA, 25 bp, Homo sapien
cagcgagcttcggatagagagtgac

SEQ ID NO: 1754418 - DNA, 25 bp, Homo sapien
tatgaaagacagtcctggccaggcg

SEQ ID NO: 1754419 - DNA, 25 bp, Homo sapien
gacagtccgtatctatcagcgagct

SEQ ID NO: 1754420 - DNA, 25 bp, Homo sapien
cttaaccatgttataaccatatgca

SEQ ID NO: 1754421 - DNA, 25 bp, Homo sapien
gcttaaccatgttataaccatatgc

SEQ ID NO: 1754422 - DNA, 25 bp, Homo sapien
tcccagaggctcatggattagggtg

SEQ ID NO: 1754423 - DNA, 25 bp, Homo sapien
tactgcctaatatgtgctgggtctg

SEQ ID NO: 1754424 - DNA, 25 bp, Homo sapien
aagagggcaggcgtaaattccttca

SEQ ID NO: 1754425 - DNA, 25 bp, Homo sapien
tcagacataatctgtgctaggccct

SEQ ID NO: 1754426 - DNA, 25 bp, Homo sapien
cgaacccagcggactagaggctgga

SEQ ID NO: 1754427 - DNA, 25 bp, Homo sapien
tcgacgagtcgacgtgccgacgttg

SEQ ID NO: 1754428 - DNA, 25 bp, Homo sapien
cagccagggtaaagtggagcgtccc

SEQ ID NO: 1754429 - DNA, 25 bp, Homo sapien
tcctcgccgggtctgtgcgtctttg

SEQ ID NO: 1754430 - DNA, 25 bp, Homo sapien
gaagtaaatgcagggaaaaaactca

SEQ ID NO: 1754431 - DNA, 25 bp, Homo sapien
aagggcggggagaagacgcggcaga

SEQ ID NO: 1754432 - DNA, 25 bp, Homo sapien
gagaagacgcggcagactgaagtaa

SEQ ID NO: 1754433 - DNA, 25 bp, Homo sapien
gggagaagacgcggcagactgaagt

SEQ ID NO: 1754434 - DNA, 25 bp, Homo sapien
ttcttcattcaaattgctctccttt

SEQ ID NO: 1754435 - DNA, 25 bp, Homo sapien
cattcaaattgctctcctttccttt

SEQ ID NO: 1754436 - DNA, 25 bp, Homo sapien
tttaataggaattatttcctccaca

SEQ ID NO: 1754437 - DNA, 25 bp, Homo sapien
ctgtttcttcattcaaattgctctc

SEQ ID NO: 1754438 - DNA, 25 bp, Homo sapien
tttggctgaaaacgacgatagcaac

SEQ ID NO: 1754439 - DNA, 25 bp, Homo sapien
gggctttggctgaaaacgacgatag

SEQ ID NO: 1754440 - DNA, 25 bp, Homo sapien
ggctgaaaacgacgatagcaactac

SEQ ID NO: 1754441 - DNA, 25 bp, Homo sapien
agagggctttggctgaaaacgacga

SEQ ID NO: 1754442 - DNA, 25 bp, Homo sapien
ttaccttgaggaagcgggaatggca

SEQ ID NO: 1754443 - DNA, 25 bp, Homo sapien
gaaaacaggccttgacaccagagaa

SEQ ID NO: 1754444 - DNA, 25 bp, Homo sapien
ctttgggtcgtgctacaagggcatc

SEQ ID NO: 1754445 - DNA, 25 bp, Homo sapien
tcaagagacgtatttaactggtggc

SEQ ID NO: 1754446 - DNA, 25 bp, Homo sapien
ggcgatgtgtccaagggactgggcc

SEQ ID NO: 1754447 - DNA, 25 bp, Homo sapien
ctagaagcggcgatgtgtccaaggg

SEQ ID NO: 1754448 - DNA, 25 bp, Homo sapien
gaagcggcgatgtgtccaagggact

SEQ ID NO: 1754449 - DNA, 25 bp, Homo sapien
cggcgatgtgtccaagggactgggc

SEQ ID NO: 1754450 - DNA, 25 bp, Homo sapien
ttcccagcaatatccgagactgcag

SEQ ID NO: 1754451 - DNA, 25 bp, Homo sapien
gtgcatctgccaacgaaaattcatc

SEQ ID NO: 1754452 - DNA, 25 bp, Homo sapien
agtgcatctgccaacgaaaattcat

SEQ ID NO: 1754453 - DNA, 25 bp, Homo sapien
ggtataggatatggccctatgggcc

SEQ ID NO: 1754454 - DNA, 25 bp, Homo sapien
tgttggtactggtccaaaaggcaca

SEQ ID NO: 1754455 - DNA, 25 bp, Homo sapien
ggcatgatggttcagaaggagtaaa

SEQ ID NO: 1754456 - DNA, 25 bp, Homo sapien
ttgaggctggataaggaccaccagg

SEQ ID NO: 1754457 - DNA, 25 bp, Homo sapien
gacctaaaggaccagctgcagctgg

SEQ ID NO: 1754458 - DNA, 25 bp, Homo sapien
tagagtcctggtgtgggatacgatc

SEQ ID NO: 1754459 - DNA, 25 bp, Homo sapien
caaggtccagaagacatggatcccc

SEQ ID NO: 1754460 - DNA, 25 bp, Homo sapien
tggaacggtgccccatggaacaggt

SEQ ID NO: 1754461 - DNA, 25 bp, Homo sapien
aattctgtcaaagagctagtgaata

SEQ ID NO: 1754462 - DNA, 25 bp, Homo sapien
ttctgtcaaagagctagtgaatata

SEQ ID NO: 1754463 - DNA, 25 bp, Homo sapien
tctgtcaaagagctagtgaatatac

SEQ ID NO: 1754464 - DNA, 25 bp, Homo sapien
tgtcaaagagctagtgaatatactt

SEQ ID NO: 1754465 - DNA, 25 bp, Homo sapien
ggcactctgctggtactcgtggata

SEQ ID NO: 1754466 - DNA, 25 bp, Homo sapien
ctctgctggtactcgtggatacaac

SEQ ID NO: 1754467 - DNA, 25 bp, Homo sapien
tcaggcactctgctggtactcgtgg

SEQ ID NO: 1754468 - DNA, 25 bp, Homo sapien
cactctgctggtactcgtggataca

SEQ ID NO: 1754469 - DNA, 25 bp, Homo sapien
actcttgtgttgcttggtatcagtg

SEQ ID NO: 1754470 - DNA, 25 bp, Homo sapien
tcttgtgttgcttggtatcagtgaa

SEQ ID NO: 1754471 - DNA, 25 bp, Homo sapien
taactcttgtgttgcttggtatcag

SEQ ID NO: 1754472 - DNA, 25 bp, Homo sapien
gttaactcttgtgttgcttggtatc

SEQ ID NO: 1754473 - DNA, 25 bp, Homo sapien
actgtctttgttcagtggctgcttc

SEQ ID NO: 1754474 - DNA, 25 bp, Homo sapien
ataactgtctttgttcagtggctgc

SEQ ID NO: 1754475 - DNA, 25 bp, Homo sapien
gaccataactgtctttgttcagtgg

SEQ ID NO: 1754476 - DNA, 25 bp, Homo sapien
cactgaccataactgtctttgttca

SEQ ID NO: 1754477 - DNA, 25 bp, Homo sapien
cagataaaactacacgaccattacc

SEQ ID NO: 1754478 - DNA, 25 bp, Homo sapien
tcatcagataaaactacacgaccat

SEQ ID NO: 1754479 - DNA, 25 bp, Homo sapien
ctttcatcagataaaactacacgac

SEQ ID NO: 1754480 - DNA, 25 bp, Homo sapien
catcagataaaactacacgaccatt

SEQ ID NO: 1754481 - DNA, 25 bp, Homo sapien
tgttgatgtcctaacaatgtttgag

SEQ ID NO: 1754482 - DNA, 25 bp, Homo sapien
ggctcagctcacatatgagcattaa

SEQ ID NO: 1754483 - DNA, 25 bp, Homo sapien
aaatcctaaccatgatgcttataaa

SEQ ID NO: 1754484 - DNA, 25 bp, Homo sapien
tattgtgttgatgtcctaacaatgt

SEQ ID NO: 1754485 - DNA, 25 bp, Homo sapien
gatggtcttgtttctcaattctcca

SEQ ID NO: 1754486 - DNA, 25 bp, Homo sapien
ctgttgatgcagatggtcttgtttc

SEQ ID NO: 1754487 - DNA, 25 bp, Homo sapien
tgatgcagatggtcttgtttctcaa

SEQ ID NO: 1754488 - DNA, 25 bp, Homo sapien
caaattcctgttgatgcagatggtc

SEQ ID NO: 1754489 - DNA, 25 bp, Homo sapien
gtccacaatgacctggctgtctgct

SEQ ID NO: 1754490 - DNA, 25 bp, Homo sapien
ctggctgtaggcattcccacctaaa

SEQ ID NO: 1754491 - DNA, 25 bp, Homo sapien
tcaatgaccatgggataatgtaatg

SEQ ID NO: 1754492 - DNA, 25 bp, Homo sapien
caatgaccatgggataatgtaatga

SEQ ID NO: 1754493 - DNA, 25 bp, Homo sapien
cacatatctctcctggcatctcccc

SEQ ID NO: 1754494 - DNA, 25 bp, Homo sapien
tgcattattaagaacagaacacctt

SEQ ID NO: 1754495 - DNA, 25 bp, Homo sapien
gcattattaagaacagaacacctta

SEQ ID NO: 1754496 - DNA, 25 bp, Homo sapien
ctgcattattaagaacagaacacct

SEQ ID NO: 1754497 - DNA, 25 bp, Homo sapien
cagtgaactaatggaggcctcctct

SEQ ID NO: 1754498 - DNA, 25 bp, Homo sapien
cgaagcctgcgcaagctgaaaggct

SEQ ID NO: 1754499 - DNA, 25 bp, Homo sapien
tattccgaagcctgcgcaagctgaa

SEQ ID NO: 1754500 - DNA, 25 bp, Homo sapien
tgcattcttagaggtggagtctctg

SEQ ID NO: 1754501 - DNA, 25 bp, Homo sapien
ttcaaaggaacgaagtatcctcagg

SEQ ID NO: 1754502 - DNA, 25 bp, Homo sapien
tatcctcaggaattaaaagaccacc

SEQ ID NO: 1754503 - DNA, 25 bp, Homo sapien
cagttcaagtgatgtggctcacgta

SEQ ID NO: 1754504 - DNA, 25 bp, Homo sapien
ggctcacgtactctaaaagcagaat

SEQ ID NO: 1754505 - DNA, 25 bp, Homo sapien
gagaagctccctaaactattgatga

SEQ ID NO: 1754506 - DNA, 25 bp, Homo sapien
gagaagcctacctgacattacctat

SEQ ID NO: 1754507 - DNA, 25 bp, Homo sapien
catctctggtaatatctgctgtggc

SEQ ID NO: 1754508 - DNA, 25 bp, Homo sapien
tgtatgccaaacactatcccgagaa

SEQ ID NO: 1754509 - DNA, 25 bp, Homo sapien
aacacagccctaacagaagtccaag

SEQ ID NO: 1754510 - DNA, 25 bp, Homo sapien
ccaagtcagcactggtaaaatcaac

SEQ ID NO: 1754511 - DNA, 25 bp, Homo sapien
cattaaattgcctgctccaagtttc

SEQ ID NO: 1754512 - DNA, 25 bp, Homo sapien
tgcttatcctcagttggcaaaaagc

SEQ ID NO: 1754513 - DNA, 25 bp, Homo sapien
tctttgatgtcactgatttcacaac

SEQ ID NO: 1754514 - DNA, 25 bp, Homo sapien
ccatcattccttaccacacaagatt

SEQ ID NO: 1754515 - DNA, 25 bp, Homo sapien
agggcattggtcagagggctcccat

SEQ ID NO: 1754516 - DNA, 25 bp, Homo sapien
acaagattccgctttctcttctggc

SEQ ID NO: 1754517 - DNA, 25 bp, Homo sapien
catgcattggtatatcaaaaggtgg

SEQ ID NO: 1754518 - DNA, 25 bp, Homo sapien
aatctgtgtactggctaaatcgcaa

SEQ ID NO: 1754519 - DNA, 25 bp, Homo sapien
ttaccaagtagcctaagaacagcac

SEQ ID NO: 1754520 - DNA, 25 bp, Homo sapien
gaacagcactatgtagagctacaca

SEQ ID NO: 1754521 - DNA, 25 bp, Homo sapien
aggaagtagctgctaaaagttccaa

SEQ ID NO: 1754522 - DNA, 25 bp, Homo sapien
ggaagtagctgctaaaagttccaac

SEQ ID NO: 1754523 - DNA, 25 bp, Homo sapien
caggaagtagctgctaaaagttcca

SEQ ID NO: 1754524 - DNA, 25 bp, Homo sapien
tctggccacaagctctggactttgc

SEQ ID NO: 1754525 - DNA, 25 bp, Homo sapien
gactttgctctgacaagagatcctt

SEQ ID NO: 1754526 - DNA, 25 bp, Homo sapien
caagagatccttgtactgaatctta

SEQ ID NO: 1754527 - DNA, 25 bp, Homo sapien
tggccacaagctctggactttgctc

SEQ ID NO: 1754528 - DNA, 25 bp, Homo sapien
cagagtcaaatgttcactatgccca

SEQ ID NO: 1754529 - DNA, 25 bp, Homo sapien
cagataagaggttgtagcagagtca

SEQ ID NO: 1754530 - DNA, 25 bp, Homo sapien
gaaccaacatattagggctttgacc

SEQ ID NO: 1754531 - DNA, 25 bp, Homo sapien
gttcactatgcccatttagaaccaa

SEQ ID NO: 1754532 - DNA, 25 bp, Homo sapien
gcagcttccgtaactgcaactccta

SEQ ID NO: 1754533 - DNA, 25 bp, Homo sapien
gatttgcactaactgtgatggcagc

SEQ ID NO: 1754534 - DNA, 25 bp, Homo sapien
gggttgttgagatttaaatgcagat

SEQ ID NO: 1754535 - DNA, 25 bp, Homo sapien
ttcaaacagtaggtgactatgtgcc

SEQ ID NO: 1754536 - DNA, 25 bp, Homo sapien
cacaggatctgccttcttttacatt

SEQ ID NO: 1754537 - DNA, 25 bp, Homo sapien
ggatctgccttcttttacattttta

SEQ ID NO: 1754538 - DNA, 25 bp, Homo sapien
gatctgccttcttttacatttttaa

SEQ ID NO: 1754539 - DNA, 25 bp, Homo sapien
caggatctgccttcttttacatttt

SEQ ID NO: 1754540 - DNA, 25 bp, Homo sapien
taagttattttgctactgtccatgt

SEQ ID NO: 1754541 - DNA, 25 bp, Homo sapien
aatacaaggttagattcctagaagc

SEQ ID NO: 1754542 - DNA, 25 bp, Homo sapien
agattactcactgatacaatgtagc

SEQ ID NO: 1754543 - DNA, 25 bp, Homo sapien
taattgcattgttcagggaaatatc

SEQ ID NO: 1754544 - DNA, 25 bp, Homo sapien
catatggcataaaagcaagctgcag

SEQ ID NO: 1754545 - DNA, 25 bp, Homo sapien
catgaattttgcctctgatacccca

SEQ ID NO: 1754546 - DNA, 25 bp, Homo sapien
gataccccagccgaccaaatgtaaa

SEQ ID NO: 1754547 - DNA, 25 bp, Homo sapien
ttgtctttgccaactcgccagatga

SEQ ID NO: 1754548 - DNA, 25 bp, Homo sapien
ttccattcaagcaaaccaactgagt

SEQ ID NO: 1754549 - DNA, 25 bp, Homo sapien
tgtgaactgaaaagaatcttggtcc

SEQ ID NO: 1754550 - DNA, 25 bp, Homo sapien
tcttggtccttcatagaattaaact

SEQ ID NO: 1754551 - DNA, 25 bp, Homo sapien
tacttggtattaacgcattgatcct

SEQ ID NO: 1754552 - DNA, 25 bp, Homo sapien
taatggcacaccgaggccttctgaa

SEQ ID NO: 1754553 - DNA, 25 bp, Homo sapien
tgatgagactctggtgacatggccc

SEQ ID NO: 1754554 - DNA, 25 bp, Homo sapien
tctgaaaggccctgataaaggttgc

SEQ ID NO: 1754555 - DNA, 25 bp, Homo sapien
tatttccagggtaacacatcctcat

SEQ ID NO: 1754556 - DNA, 25 bp, Homo sapien
tggcgggggttcctcgcctcttgct

SEQ ID NO: 1754557 - DNA, 25 bp, Homo sapien
cgaagacggtgaccgaggagcagca

SEQ ID NO: 1754558 - DNA, 25 bp, Homo sapien
ggcagcggcgaagacggtgaccgag

SEQ ID NO: 1754559 - DNA, 25 bp, Homo sapien
ctcttgctttaaaggcgccgcgctc

SEQ ID NO: 1754560 - DNA, 25 bp, Homo sapien
tggagctaggggtgaggtgggcggg

SEQ ID NO: 1754561 - DNA, 25 bp, Homo sapien
ctggagctaggggtgaggtgggcgg

SEQ ID NO: 1754562 - DNA, 25 bp, Homo sapien
tgagataagcccgacaaagactcgc

SEQ ID NO: 1754563 - DNA, 25 bp, Homo sapien
aacaaacacctcgtgaaggagcccg

SEQ ID NO: 1754564 - DNA, 25 bp, Homo sapien
gagccacttgcatgcttgacgggaa

SEQ ID NO: 1754565 - DNA, 25 bp, Homo sapien
aaagactcgcagtgaatccgtccag

SEQ ID NO: 1754566 - DNA, 25 bp, Homo sapien
gaggtttatgatccaccctggtaac

SEQ ID NO: 1754567 - DNA, 25 bp, Homo sapien
cagctcggtcgtgttgtttggtaaa

SEQ ID NO: 1754568 - DNA, 25 bp, Homo sapien
aatctgtgcattaccaaaaggctac

SEQ ID NO: 1754569 - DNA, 25 bp, Homo sapien
tgaaccaatcatctctcgtgaaatg

SEQ ID NO: 1754570 - DNA, 25 bp, Homo sapien
cactgcaaggaatggtgggacatcc

SEQ ID NO: 1754571 - DNA, 25 bp, Homo sapien
gacgagatgtcgatagcgagccaca

SEQ ID NO: 1754572 - DNA, 25 bp, Homo sapien
ccagccttggtaacggacgagatgt

SEQ ID NO: 1754573 - DNA, 25 bp, Homo sapien
cacgatcacggcatggtcatagaga

SEQ ID NO: 1754574 - DNA, 25 bp, Homo sapien
caaatcttaatacatgtgtggttcc

SEQ ID NO: 1754575 - DNA, 25 bp, Homo sapien
ttgagaatatccaatccacagtaaa

SEQ ID NO: 1754576 - DNA, 25 bp, Homo sapien
gcaggagtttaacggtgcgcctgaa

SEQ ID NO: 1754577 - DNA, 25 bp, Homo sapien
gaagactggattacttagaatcggg

SEQ ID NO: 1754578 - DNA, 25 bp, Homo sapien
gtggtcatcttccaatgagaacatt

SEQ ID NO: 1754579 - DNA, 25 bp, Homo sapien
cgaagtggtcatcttccaatgagaa

SEQ ID NO: 1754580 - DNA, 25 bp, Homo sapien
ggtcatcttccaatgagaacattat

SEQ ID NO: 1754581 - DNA, 25 bp, Homo sapien
aagtggtcatcttccaatgagaaca

SEQ ID NO: 1754582 - DNA, 25 bp, Homo sapien
cagaaagaatctcacagcgaggacc

SEQ ID NO: 1754583 - DNA, 25 bp, Homo sapien
gaaagaatctcacagcgaggaccaa

SEQ ID NO: 1754584 - DNA, 25 bp, Homo sapien
gaccaacctgcatggggttactggc

SEQ ID NO: 1754585 - DNA, 25 bp, Homo sapien
gaatctcacagcgaggaccaacctg

SEQ ID NO: 1754586 - DNA, 25 bp, Homo sapien
ctttgctttcagagtagtagccaca

SEQ ID NO: 1754587 - DNA, 25 bp, Homo sapien
tttgctttcagagtagtagccacag

SEQ ID NO: 1754588 - DNA, 25 bp, Homo sapien
tagtagccacaggattctgtggcat

SEQ ID NO: 1754589 - DNA, 25 bp, Homo sapien
agagtagtagccacaggattctgtg

SEQ ID NO: 1754590 - DNA, 25 bp, Homo sapien
tggctttgacactgtcgtggcacaa

SEQ ID NO: 1754591 - DNA, 25 bp, Homo sapien
tttgacactgtcgtggcacaactag

SEQ ID NO: 1754592 - DNA, 25 bp, Homo sapien
tgtggctttgacactgtcgtggcac

SEQ ID NO: 1754593 - DNA, 25 bp, Homo sapien
tgacactgtcgtggcacaactagac

SEQ ID NO: 1754594 - DNA, 25 bp, Homo sapien
caatgcgagaactagactggccact

SEQ ID NO: 1754595 - DNA, 25 bp, Homo sapien
gaactgagattgaaaaccaggcagc

SEQ ID NO: 1754596 - DNA, 25 bp, Homo sapien
tcctgaaaatccctaatgagtgctg

SEQ ID NO: 1754597 - DNA, 25 bp, Homo sapien
tacaaccacgatgaacagaatgcca

SEQ ID NO: 1754598 - DNA, 25 bp, Homo sapien
taatttgtcatattgctccacttaa

SEQ ID NO: 1754599 - DNA, 25 bp, Homo sapien
tctgaaatctttaagatggctaacc

SEQ ID NO: 1754600 - DNA, 25 bp, Homo sapien
tctcagcataactcagatgttccaa

SEQ ID NO: 1754601 - DNA, 25 bp, Homo sapien
aaacactttgatagatgatttgtca

SEQ ID NO: 1754602 - DNA, 25 bp, Homo sapien
aagcttgcatttgaatcattgtgca

SEQ ID NO: 1754603 - DNA, 25 bp, Homo sapien
cttaagcttgcatttgaatcattgt

SEQ ID NO: 1754604 - DNA, 25 bp, Homo sapien
taagcttgcatttgaatcattgtgc

SEQ ID NO: 1754605 - DNA, 25 bp, Homo sapien
agcttgcatttgaatcattgtgcat

SEQ ID NO: 1754606 - DNA, 25 bp, Homo sapien
atggttactctatgatcaggttttt

SEQ ID NO: 1754607 - DNA, 25 bp, Homo sapien
tggttactctatgatcaggtttttt

SEQ ID NO: 1754608 - DNA, 25 bp, Homo sapien
tcaatttctcaacaattgatcccat

SEQ ID NO: 1754609 - DNA, 25 bp, Homo sapien
actgctttcaatttctcaacaattg

SEQ ID NO: 1754610 - DNA, 25 bp, Homo sapien
cacaagaacgtattatttaacaccg

SEQ ID NO: 1754611 - DNA, 25 bp, Homo sapien
taacaccgagctggtataaccttct

SEQ ID NO: 1754612 - DNA, 25 bp, Homo sapien
ggaaagccaaactgcccagtgtgga

SEQ ID NO: 1754613 - DNA, 25 bp, Homo sapien
ggtataaccttctctgggaaagcca

SEQ ID NO: 1754614 - DNA, 25 bp, Homo sapien
tgtgtctagggacacatcattttca

SEQ ID NO: 1754615 - DNA, 25 bp, Homo sapien
caggattgtgtctagggacacatca

SEQ ID NO: 1754616 - DNA, 25 bp, Homo sapien
ggattgtgtctagggacacatcatt

SEQ ID NO: 1754617 - DNA, 25 bp, Homo sapien
attgtgtctagggacacatcatttt

SEQ ID NO: 1754618 - DNA, 25 bp, Homo sapien
tagctcaaatgcactttatcaaatg

SEQ ID NO: 1754619 - DNA, 25 bp, Homo sapien
tataaaatgatgcttagtctaccta

SEQ ID NO: 1754620 - DNA, 25 bp, Homo sapien
ttcaaaaagtactgacttaacaaca

SEQ ID NO: 1754621 - DNA, 25 bp, Homo sapien
aatgcaatcctcaacaatttaagat

SEQ ID NO: 1754622 - DNA, 25 bp, Homo sapien
tgaggaaagcttcggcaagtcattt

SEQ ID NO: 1754623 - DNA, 25 bp, Homo sapien
tttgcaactgacataagtttgagca

SEQ ID NO: 1754624 - DNA, 25 bp, Homo sapien
ggcagcaacaaacgaatttctcttg

SEQ ID NO: 1754625 - DNA, 25 bp, Homo sapien
tgccagctgcttaactgaggaaagc

SEQ ID NO: 1754626 - DNA, 25 bp, Homo sapien
tcttcaaggttctatcagagaagtg

SEQ ID NO: 1754627 - DNA, 25 bp, Homo sapien
tttgggactttgtcaaactagacca

SEQ ID NO: 1754628 - DNA, 25 bp, Homo sapien
ccattgctaataactacaggagcca

SEQ ID NO: 1754629 - DNA, 25 bp, Homo sapien
cattagctacttacacctttgggac

SEQ ID NO: 1754630 - DNA, 25 bp, Homo sapien
gcacgattcacattgtctctgcact

SEQ ID NO: 1754631 - DNA, 25 bp, Homo sapien
ccagagcacgattcacattgtctct

SEQ ID NO: 1754632 - DNA, 25 bp, Homo sapien
gagcacgattcacattgtctctgca

SEQ ID NO: 1754633 - DNA, 25 bp, Homo sapien
agagcacgattcacattgtctctgc

SEQ ID NO: 1754634 - DNA, 25 bp, Homo sapien
tcctctgctatgaagcttcatcaag

SEQ ID NO: 1754635 - DNA, 25 bp, Homo sapien
catcaagttggaaaaatcttctaga

SEQ ID NO: 1754636 - DNA, 25 bp, Homo sapien
catcgaatcagctgacctattcctc

SEQ ID NO: 1754637 - DNA, 25 bp, Homo sapien
tgtttaatatcacatcgaatcagct

SEQ ID NO: 1754638 - DNA, 25 bp, Homo sapien
taaggtactcaaagatgtgtcctgc

SEQ ID NO: 1754639 - DNA, 25 bp, Homo sapien
atcgatgatcctccaagtttaggta

SEQ ID NO: 1754640 - DNA, 25 bp, Homo sapien
caaattagtggttctatcgatgatc

SEQ ID NO: 1754641 - DNA, 25 bp, Homo sapien
ggagaccatattgtcccttcagaga

SEQ ID NO: 1754642 - DNA, 25 bp, Homo sapien
ctacgttgttcccatccattcccca

SEQ ID NO: 1754643 - DNA, 25 bp, Homo sapien
cttctacgttgttcccatccattcc

SEQ ID NO: 1754644 - DNA, 25 bp, Homo sapien
ttctacgttgttcccatccattccc

SEQ ID NO: 1754645 - DNA, 25 bp, Homo sapien
tctacgttgttcccatccattcccc

SEQ ID NO: 1754646 - DNA, 25 bp, Homo sapien
ggagacaaaacctcattcatctgag

SEQ ID NO: 1754647 - DNA, 25 bp, Homo sapien
ttggccttgcctgattgtctcctta

SEQ ID NO: 1754648 - DNA, 25 bp, Homo sapien
gagaacagggctttccacaacaggc

SEQ ID NO: 1754649 - DNA, 25 bp, Homo sapien
tcattgttcaattttccaggagaca

SEQ ID NO: 1754650 - DNA, 25 bp, Homo sapien
tttgtatttatgcacatgacatcaa

SEQ ID NO: 1754651 - DNA, 25 bp, Homo sapien
tatttatgcacatgacatcaactgc

SEQ ID NO: 1754652 - DNA, 25 bp, Homo sapien
tgtatttatgcacatgacatcaact

SEQ ID NO: 1754653 - DNA, 25 bp, Homo sapien
atttatgcacatgacatcaactgca

SEQ ID NO: 1754654 - DNA, 25 bp, Homo sapien
tagcaagaccgtgaaacaggtctag

SEQ ID NO: 1754655 - DNA, 25 bp, Homo sapien
tctgctttagcaagaccgtgaaaca

SEQ ID NO: 1754656 - DNA, 25 bp, Homo sapien
gcttcactgagcttattgaattctg

SEQ ID NO: 1754657 - DNA, 25 bp, Homo sapien
ttgaattctgctttagcaagaccgt

SEQ ID NO: 1754658 - DNA, 25 bp, Homo sapien
tgggccagattccacatattcaaaa

SEQ ID NO: 1754659 - DNA, 25 bp, Homo sapien
agcaaatctgaatgcaagttcctca

SEQ ID NO: 1754660 - DNA, 25 bp, Homo sapien
gtttctgttaattgtgttcacagca

SEQ ID NO: 1754661 - DNA, 25 bp, Homo sapien
taagggtagtattgggtagcaatgt

SEQ ID NO: 1754662 - DNA, 25 bp, Homo sapien
ttctgggtatcataggtaagggtag

SEQ ID NO: 1754663 - DNA, 25 bp, Homo sapien
caggtctaaaatggcacggctgagt

SEQ ID NO: 1754664 - DNA, 25 bp, Homo sapien
tctgacacctggtgcttccagcggg

SEQ ID NO: 1754665 - DNA, 25 bp, Homo sapien
tgtcatcatacacaaccgtgacggt

SEQ ID NO: 1754666 - DNA, 25 bp, Homo sapien
tgtgaaggcccgaagatggcagcca

SEQ ID NO: 1754667 - DNA, 25 bp, Homo sapien
cctttgggatgtgtttggagagacc

SEQ ID NO: 1754668 - DNA, 25 bp, Homo sapien
tgtgacacccaagccggatggtatg

SEQ ID NO: 1754669 - DNA, 25 bp, Homo sapien
acctattccagacttgaaagcaggg

SEQ ID NO: 1754670 - DNA, 25 bp, Homo sapien
cattcagagtgtgataagagttctc

SEQ ID NO: 1754671 - DNA, 25 bp, Homo sapien
caagaaatcctgactagccaaaaca

SEQ ID NO: 1754672 - DNA, 25 bp, Homo sapien
taaactctcacatatgtggtaaaat

SEQ ID NO: 1754673 - DNA, 25 bp, Homo sapien
gaatctatgttagttgattggctac

SEQ ID NO: 1754674 - DNA, 25 bp, Homo sapien
caataaactctaacatatgtggtca

SEQ ID NO: 1754675 - DNA, 25 bp, Homo sapien
tttagtcttatatggttatatgctc

SEQ ID NO: 1754676 - DNA, 25 bp, Homo sapien
tatatggttatatgctctgattttc

SEQ ID NO: 1754677 - DNA, 25 bp, Homo sapien
ggttatatgctctgattttcagtct

SEQ ID NO: 1754678 - DNA, 25 bp, Homo sapien
gtcttatatggttatatgctctgat

SEQ ID NO: 1754679 - DNA, 25 bp, Homo sapien
tttcctctccaaactctgttcatct

SEQ ID NO: 1754680 - DNA, 25 bp, Homo sapien
atttcctctccaaactctgttcatc

SEQ ID NO: 1754681 - DNA, 25 bp, Homo sapien
ttcctctccaaactctgttcatctc

SEQ ID NO: 1754682 - DNA, 25 bp, Homo sapien
gaaacagtttttggtacagcttctc

SEQ ID NO: 1754683 - DNA, 25 bp, Homo sapien
agcttctctttgtcgactgagtatt

SEQ ID NO: 1754684 - DNA, 25 bp, Homo sapien
ttctgggcacagctgattatggatg

SEQ ID NO: 1754685 - DNA, 25 bp, Homo sapien
cagctgattatggatgaaacagttt

SEQ ID NO: 1754686 - DNA, 25 bp, Homo sapien
ctgactttctgctaatgcacctcac

SEQ ID NO: 1754687 - DNA, 25 bp, Homo sapien
ttgcttggggcttgacctgactttc

SEQ ID NO: 1754688 - DNA, 25 bp, Homo sapien
ttgacctgactttctgctaatgcac

SEQ ID NO: 1754689 - DNA, 25 bp, Homo sapien
gacctgactttctgctaatgcacct

SEQ ID NO: 1754690 - DNA, 25 bp, Homo sapien
aaacaatgctccactaatgggtctt

SEQ ID NO: 1754691 - DNA, 25 bp, Homo sapien
actaatgggtcttttgtttaatgca

SEQ ID NO: 1754692 - DNA, 25 bp, Homo sapien
tgcatatgcgatggctgttactagg

SEQ ID NO: 1754693 - DNA, 25 bp, Homo sapien
gtctgcagaagtgcaaaacaatgct

SEQ ID NO: 1754694 - DNA, 25 bp, Homo sapien
ctctgagggtgaggaagctggagta

SEQ ID NO: 1754695 - DNA, 25 bp, Homo sapien
ctgagggtgaggaagctggagtatt

SEQ ID NO: 1754696 - DNA, 25 bp, Homo sapien
tctgagggtgaggaagctggagtat

SEQ ID NO: 1754697 - DNA, 25 bp, Homo sapien
cctcagtgggaccaacacacttcat

SEQ ID NO: 1754698 - DNA, 25 bp, Homo sapien
caggtttcctcccatacccaggtat

SEQ ID NO: 1754699 - DNA, 25 bp, Homo sapien
cacttctacggcaggcctcgactac

SEQ ID NO: 1754700 - DNA, 25 bp, Homo sapien
tctacggcaggcctcgactacccta

SEQ ID NO: 1754701 - DNA, 25 bp, Homo sapien
tacggcaggcctcgactaccctatc

SEQ ID NO: 1754702 - DNA, 25 bp, Homo sapien
atctctgctggcattaatgtaacag

SEQ ID NO: 1754703 - DNA, 25 bp, Homo sapien
tctctgctggcattaatgtaacaga

SEQ ID NO: 1754704 - DNA, 25 bp, Homo sapien
ctgcacacatttgtaaagtaagcat

SEQ ID NO: 1754705 - DNA, 25 bp, Homo sapien
tataccttgatggagctttgatgag

SEQ ID NO: 1754706 - DNA, 25 bp, Homo sapien
tgatgagctcttgcaaacgaatgag

SEQ ID NO: 1754707 - DNA, 25 bp, Homo sapien
aatgcctgctgccatttcatggcta

SEQ ID NO: 1754708 - DNA, 25 bp, Homo sapien
gtaactgacgaattttgagtcgaag

SEQ ID NO: 1754709 - DNA, 25 bp, Homo sapien
taatgatagtattctgtcatcattc

SEQ ID NO: 1754710 - DNA, 25 bp, Homo sapien
gatataatgatagtattctgtcatc

SEQ ID NO: 1754711 - DNA, 25 bp, Homo sapien
aagatataatgatagtattctgtca

SEQ ID NO: 1754712 - DNA, 25 bp, Homo sapien
tataatgatagtattctgtcatcat

SEQ ID NO: 1754713 - DNA, 25 bp, Homo sapien
tcaatgatggaggagacttgggtat

SEQ ID NO: 1754714 - DNA, 25 bp, Homo sapien
aatcgggtttcggaggtgcctgcaa

SEQ ID NO: 1754715 - DNA, 25 bp, Homo sapien
taacaccactgtatcggtagggctc

SEQ ID NO: 1754716 - DNA, 25 bp, Homo sapien
ggctcaacatcaagagcaaagaggt

SEQ ID NO: 1754717 - DNA, 25 bp, Homo sapien
atctcagaatgttgtcagttctcag

SEQ ID NO: 1754718 - DNA, 25 bp, Homo sapien
gtcttaaatctcagaatgttgtcag

SEQ ID NO: 1754719 - DNA, 25 bp, Homo sapien
ttaaatctcagaatgttgtcagttc

SEQ ID NO: 1754720 - DNA, 25 bp, Homo sapien
aaatctcagaatgttgtcagttctc

SEQ ID NO: 1754721 - DNA, 25 bp, Homo sapien
aaatactggcaactcttttaggtct

SEQ ID NO: 1754722 - DNA, 25 bp, Homo sapien
tctcaagtgggccataaacccagaa

SEQ ID NO: 1754723 - DNA, 25 bp, Homo sapien
ctaagactaactccctctaagtgtc

SEQ ID NO: 1754724 - DNA, 25 bp, Homo sapien
catttctgctggtatactcacttca

SEQ ID NO: 1754725 - DNA, 25 bp, Homo sapien
ccatacttgcttataagtttcttcc

SEQ ID NO: 1754726 - DNA, 25 bp, Homo sapien
tttccatacttgcttataagtttct

SEQ ID NO: 1754727 - DNA, 25 bp, Homo sapien
tgactgactgtattattttccatac

SEQ ID NO: 1754728 - DNA, 25 bp, Homo sapien
ctgactgactgtattattttccata

SEQ ID NO: 1754729 - DNA, 25 bp, Homo sapien
ccatctagaccaactgcgtatttca

SEQ ID NO: 1754730 - DNA, 25 bp, Homo sapien
actgcgtatttcagcagcacggcaa

SEQ ID NO: 1754731 - DNA, 25 bp, Homo sapien
tagaccaactgcgtatttcagcagc

SEQ ID NO: 1754732 - DNA, 25 bp, Homo sapien
attttccatctagaccaactgcgta

SEQ ID NO: 1754733 - DNA, 25 bp, Homo sapien
gaccaagaaagccatagtactgttt

SEQ ID NO: 1754734 - DNA, 25 bp, Homo sapien
caagaaagccatagtactgtttaac

SEQ ID NO: 1754735 - DNA, 25 bp, Homo sapien
aggatgaccaagaaagccatagtac

SEQ ID NO: 1754736 - DNA, 25 bp, Homo sapien
aagccatagtactgtttaacaagtc

SEQ ID NO: 1754737 - DNA, 25 bp, Homo sapien
tatatccttaggtttatattctgct

SEQ ID NO: 1754738 - DNA, 25 bp, Homo sapien
ataattgcagaaacttttctccatt

SEQ ID NO: 1754739 - DNA, 25 bp, Homo sapien
gctttatatatccttaggtttatat

SEQ ID NO: 1754740 - DNA, 25 bp, Homo sapien
ttatatatccttaggtttatattct

SEQ ID NO: 1754741 - DNA, 25 bp, Homo sapien
attacttccctccagtgagctgtta

SEQ ID NO: 1754742 - DNA, 25 bp, Homo sapien
taatcgcctcctatgctggcagaaa

SEQ ID NO: 1754743 - DNA, 25 bp, Homo sapien
cacagcagtgccattagtgcatcta

SEQ ID NO: 1754744 - DNA, 25 bp, Homo sapien
gaaaaccttcatgcatttagcacag

SEQ ID NO: 1754745 - DNA, 25 bp, Homo sapien
taatcgccagcttgcttaatgatca

SEQ ID NO: 1754746 - DNA, 25 bp, Homo sapien
aaatgcaaatgctaagattctggcc

SEQ ID NO: 1754747 - DNA, 25 bp, Homo sapien
tcagtgttgctatgcttaatcgcca

SEQ ID NO: 1754748 - DNA, 25 bp, Homo sapien
tttaagatgaaggaacctagacatc

SEQ ID NO: 1754749 - DNA, 25 bp, Homo sapien
tatgtcagaattccatagggttaag

SEQ ID NO: 1754750 - DNA, 25 bp, Homo sapien
tatgtgttccatgtaagtatgtcag

SEQ ID NO: 1754751 - DNA, 25 bp, Homo sapien
agggttaagaaaagtcaaaggcatg

SEQ ID NO: 1754752 - DNA, 25 bp, Homo sapien
aaagtcaaaggcatgaaatgcaaac

SEQ ID NO: 1754753 - DNA, 25 bp, Homo sapien
aaatccaaataggaagttgattgtc

SEQ ID NO: 1754754 - DNA, 25 bp, Homo sapien
tccaaataggaagttgattgtctca

SEQ ID NO: 1754755 - DNA, 25 bp, Homo sapien
taaaatccaaataggaagttgattg

SEQ ID NO: 1754756 - DNA, 25 bp, Homo sapien
atccaaataggaagttgattgtctc

SEQ ID NO: 1754757 - DNA, 25 bp, Homo sapien
gccttacctacaaggaagcttagaa

SEQ ID NO: 1754758 - DNA, 25 bp, Homo sapien
cagtgctcacaatttgcagttgcaa

SEQ ID NO: 1754759 - DNA, 25 bp, Homo sapien
tccctttagttatgggaattgccta

SEQ ID NO: 1754760 - DNA, 25 bp, Homo sapien
gttgtttattaatccttatgttagc

SEQ ID NO: 1754761 - DNA, 25 bp, Homo sapien
tgcttcatctgatgactagcaacag

SEQ ID NO: 1754762 - DNA, 25 bp, Homo sapien
ctgcttcatctgatgactagcaaca

SEQ ID NO: 1754763 - DNA, 25 bp, Homo sapien
atgcatagtgaaaactagtagtgtt

SEQ ID NO: 1754764 - DNA, 25 bp, Homo sapien
cctgaaggatgcatagtgaaaacta

SEQ ID NO: 1754765 - DNA, 25 bp, Homo sapien
catagtgaaaactagtagtgttcat

SEQ ID NO: 1754766 - DNA, 25 bp, Homo sapien
ctgaaggatgcatagtgaaaactag

SEQ ID NO: 1754767 - DNA, 25 bp, Homo sapien
catcatacattagagcagcatcagt

SEQ ID NO: 1754768 - DNA, 25 bp, Homo sapien
taattagactcataaagcgggtccc

SEQ ID NO: 1754769 - DNA, 25 bp, Homo sapien
gaaactgttgaacggccacagacac

SEQ ID NO: 1754770 - DNA, 25 bp, Homo sapien
tcccgaagcgccagggtttatgtcg

SEQ ID NO: 1754771 - DNA, 25 bp, Homo sapien
caaatcaaaatctgttctcaagcca

SEQ ID NO: 1754772 - DNA, 25 bp, Homo sapien
tccaaatcaaaatctgttctcaagc

SEQ ID NO: 1754773 - DNA, 25 bp, Homo sapien
tgatcacatccaaatcaaaatctgt

SEQ ID NO: 1754774 - DNA, 25 bp, Homo sapien
gatcacatccaaatcaaaatctgtt

SEQ ID NO: 1754775 - DNA, 25 bp, Homo sapien
gtaaacaacagaagcatagacttcc

SEQ ID NO: 1754776 - DNA, 25 bp, Homo sapien
attcatcagaagcatactggtttct

SEQ ID NO: 1754777 - DNA, 25 bp, Homo sapien
tcttcctggtttatctgctccacag

SEQ ID NO: 1754778 - DNA, 25 bp, Homo sapien
catcagaagcatactggtttcttcc

SEQ ID NO: 1754779 - DNA, 25 bp, Homo sapien
ggctgggttccaattaaggcttctg

SEQ ID NO: 1754780 - DNA, 25 bp, Homo sapien
gaccacagtgaattgggctgggttc

SEQ ID NO: 1754781 - DNA, 25 bp, Homo sapien
cacagaagtggctggctgtgtatac

SEQ ID NO: 1754782 - DNA, 25 bp, Homo sapien
gctgtgtatacagtatcggtgatct

SEQ ID NO: 1754783 - DNA, 25 bp, Homo sapien
aggccactggctggatcccacgttc

SEQ ID NO: 1754784 - DNA, 25 bp, Homo sapien
attcaggccactggctggatcccac

SEQ ID NO: 1754785 - DNA, 25 bp, Homo sapien
tcaggccactggctggatcccacgt

SEQ ID NO: 1754786 - DNA, 25 bp, Homo sapien
cactggctggatcccacgttccaat

SEQ ID NO: 1754787 - DNA, 25 bp, Homo sapien
caatcaaagaacgattggataagga

SEQ ID NO: 1754788 - DNA, 25 bp, Homo sapien
ctgtgatgttcgctggctttccctt

SEQ ID NO: 1754789 - DNA, 25 bp, Homo sapien
tcaaagaacgattggataaggaatc

SEQ ID NO: 1754790 - DNA, 25 bp, Homo sapien
tggataaggaatctgtgatgttcgc

SEQ ID NO: 1754791 - DNA, 25 bp, Homo sapien
ttctgtagagctaagaaccttcttg

SEQ ID NO: 1754792 - DNA, 25 bp, Homo sapien
agaaccttcttgtcattgtctgagt

SEQ ID NO: 1754793 - DNA, 25 bp, Homo sapien
tctgtagagctaagaaccttcttgt

SEQ ID NO: 1754794 - DNA, 25 bp, Homo sapien
ctaagaaccttcttgtcattgtctg

SEQ ID NO: 1754795 - DNA, 25 bp, Homo sapien
aaagtatctgtccagccacgtcttc

SEQ ID NO: 1754796 - DNA, 25 bp, Homo sapien
ctaaagtatctgtccagccacgtct

SEQ ID NO: 1754797 - DNA, 25 bp, Homo sapien
tcttcagcttgacagctggcatagg

SEQ ID NO: 1754798 - DNA, 25 bp, Homo sapien
agcttgacagctggcataggagtgc

SEQ ID NO: 1754799 - DNA, 25 bp, Homo sapien
catacttccttgattaaataattct

SEQ ID NO: 1754800 - DNA, 25 bp, Homo sapien
cctcccatacttccttgattaaata

SEQ ID NO: 1754801 - DNA, 25 bp, Homo sapien
tcccatacttccttgattaaataat

SEQ ID NO: 1754802 - DNA, 25 bp, Homo sapien
cttccttgattaaataattcttact

SEQ ID NO: 1754803 - DNA, 25 bp, Homo sapien
cccaacccctggagaacaacagtca

SEQ ID NO: 1754804 - DNA, 25 bp, Homo sapien
aacccctggagaacaacagtcatcc

SEQ ID NO: 1754805 - DNA, 25 bp, Homo sapien
ccaacccctggagaacaacagtcat

SEQ ID NO: 1754806 - DNA, 25 bp, Homo sapien
caacccctggagaacaacagtcatc

SEQ ID NO: 1754807 - DNA, 25 bp, Homo sapien
tcgatcattaccatagagaggtttg

SEQ ID NO: 1754808 - DNA, 25 bp, Homo sapien
gcaatagccttcaaatcgatcatta

SEQ ID NO: 1754809 - DNA, 25 bp, Homo sapien
taaagccaaggattgtagataactc

SEQ ID NO: 1754810 - DNA, 25 bp, Homo sapien
tctgaggagatcaatgcaatagcct

SEQ ID NO: 1754811 - DNA, 25 bp, Homo sapien
ttaagtgccagaggtagtagtttta

SEQ ID NO: 1754812 - DNA, 25 bp, Homo sapien
gtgtcgaagaaagtaggcttttcag

SEQ ID NO: 1754813 - DNA, 25 bp, Homo sapien
agtgccagaggtagtagttttatag

SEQ ID NO: 1754814 - DNA, 25 bp, Homo sapien
tttataggtgtcgaagaaagtaggc

SEQ ID NO: 1754815 - DNA, 25 bp, Homo sapien
acaaaatacttattccaagtgtcat

SEQ ID NO: 1754816 - DNA, 25 bp, Homo sapien
ccttctctcgaacataggtaatagc

SEQ ID NO: 1754817 - DNA, 25 bp, Homo sapien
aggtaatagccagtggagcaactgc

SEQ ID NO: 1754818 - DNA, 25 bp, Homo sapien
tgggcttgcggtacaaaatacttat

SEQ ID NO: 1754819 - DNA, 25 bp, Homo sapien
acccaagtaagccagcagaatatac

SEQ ID NO: 1754820 - DNA, 25 bp, Homo sapien
gaatatacatccagatatcagggga

SEQ ID NO: 1754821 - DNA, 25 bp, Homo sapien
gagcacacaactgacacccaagtaa

SEQ ID NO: 1754822 - DNA, 25 bp, Homo sapien
catccagatatcaggggagagagga

SEQ ID NO: 1754823 - DNA, 25 bp, Homo sapien
tcagaaatcttcgaagtgaggcaat

SEQ ID NO: 1754824 - DNA, 25 bp, Homo sapien
tagcttactgacacaaccagcatgc

SEQ ID NO: 1754825 - DNA, 25 bp, Homo sapien
ttagataaaggaggtaacaattgcc

SEQ ID NO: 1754826 - DNA, 25 bp, Homo sapien
cattatttctcagcaccccatggaa

SEQ ID NO: 1754827 - DNA, 25 bp, Homo sapien
ctacatgtcaatgacaataaagtac

SEQ ID NO: 1754828 - DNA, 25 bp, Homo sapien
cctacatgtcaatgacaataaagta

SEQ ID NO: 1754829 - DNA, 25 bp, Homo sapien
tgtatcacagattttaaaggccact

SEQ ID NO: 1754830 - DNA, 25 bp, Homo sapien
tcaatagagtcatcagtcctgaggc

SEQ ID NO: 1754831 - DNA, 25 bp, Homo sapien
ttataaatttacacctccgagagta

SEQ ID NO: 1754832 - DNA, 25 bp, Homo sapien
ccggccaatattatgctacttctaa

SEQ ID NO: 1754833 - DNA, 25 bp, Homo sapien
taaattctaacagatagtgattcca

SEQ ID NO: 1754834 - DNA, 25 bp, Homo sapien
tatgatatcaacaattatgtcaatg

SEQ ID NO: 1754835 - DNA, 25 bp, Homo sapien
cagtgacctctatatgacataagac

SEQ ID NO: 1754836 - DNA, 25 bp, Homo sapien
taaaagttcaatactatgtcagagt

SEQ ID NO: 1754837 - DNA, 25 bp, Homo sapien
tattgccagatatatgcactgattg

SEQ ID NO: 1754838 - DNA, 25 bp, Homo sapien
tggcacaactcttagtacttacggg

SEQ ID NO: 1754839 - DNA, 25 bp, Homo sapien
tacttacgggtagccaatagatatt

SEQ ID NO: 1754840 - DNA, 25 bp, Homo sapien
tgggattcaagcatttggcacaact

SEQ ID NO: 1754841 - DNA, 25 bp, Homo sapien
tttacagtgctatcttcaggtggac

SEQ ID NO: 1754842 - DNA, 25 bp, Homo sapien
taggattacatcctctgcaggcaat

SEQ ID NO: 1754843 - DNA, 25 bp, Homo sapien
aaaattgctacttgttgtactccgg

SEQ ID NO: 1754844 - DNA, 25 bp, Homo sapien
taccacactctagtgcggaccagta

SEQ ID NO: 1754845 - DNA, 25 bp, Homo sapien
cttccaaatcattaatgagcaggat

SEQ ID NO: 1754846 - DNA, 25 bp, Homo sapien
taatgagcaggatgttagttaaggc

SEQ ID NO: 1754847 - DNA, 25 bp, Homo sapien
gctataatgcgttttctatacttag

SEQ ID NO: 1754848 - DNA, 25 bp, Homo sapien
tagttaaggctataatgcgttttct

SEQ ID NO: 1754849 - DNA, 25 bp, Homo sapien
gaaaagattttcctagctataatta

SEQ ID NO: 1754850 - DNA, 25 bp, Homo sapien
gcattagttttgagtcacacagccc

SEQ ID NO: 1754851 - DNA, 25 bp, Homo sapien
caaatacgtagtttatgtaacctgc

SEQ ID NO: 1754852 - DNA, 25 bp, Homo sapien
cacacagcccgtatcattttttctt

SEQ ID NO: 1754853 - DNA, 25 bp, Homo sapien
taaaccaaattagaatatgtccgct

SEQ ID NO: 1754854 - DNA, 25 bp, Homo sapien
tgttggccatcagtctttatacaag

SEQ ID NO: 1754855 - DNA, 25 bp, Homo sapien
taatgtatccgtcacttcagagagc

SEQ ID NO: 1754856 - DNA, 25 bp, Homo sapien
tgtgtctgactgaaatagaactagc

SEQ ID NO: 1754857 - DNA, 25 bp, Homo sapien
cgccgagccatcaaagcagttttag

SEQ ID NO: 1754858 - DNA, 25 bp, Homo sapien
cttatctgaaccactattttaagat

SEQ ID NO: 1754859 - DNA, 25 bp, Homo sapien
tagaagcaggaattcatactgaggc

SEQ ID NO: 1754860 - DNA, 25 bp, Homo sapien
gaattcatactgaggctcactgttt

SEQ ID NO: 1754861 - DNA, 25 bp, Homo sapien
gatttcatatacgtgcctgcaagtg

SEQ ID NO: 1754862 - DNA, 25 bp, Homo sapien
ttttacaagatttcatatacgtgcc

SEQ ID NO: 1754863 - DNA, 25 bp, Homo sapien
tatacgtgcctgcaagtgttcgatt

SEQ ID NO: 1754864 - DNA, 25 bp, Homo sapien
tacaagatttcatatacgtgcctgc

SEQ ID NO: 1754865 - DNA, 25 bp, Homo sapien
ggattataccactcataaggactaa

SEQ ID NO: 1754866 - DNA, 25 bp, Homo sapien
tgcaagggtgtggattataccactc

SEQ ID NO: 1754867 - DNA, 25 bp, Homo sapien
agtcagggttgcaagggtgtggatt

SEQ ID NO: 1754868 - DNA, 25 bp, Homo sapien
gattataccactcataaggactaaa

SEQ ID NO: 1754869 - DNA, 25 bp, Homo sapien
ggaaatagcaggctgaatcgtatac

SEQ ID NO: 1754870 - DNA, 25 bp, Homo sapien
agcgacttgtgccagcaagagctgt

SEQ ID NO: 1754871 - DNA, 25 bp, Homo sapien
catggtgcccaaaggaaatagcagg

SEQ ID NO: 1754872 - DNA, 25 bp, Homo sapien
ccatgcaagcgacttgtgccagcaa

SEQ ID NO: 1754873 - DNA, 25 bp, Homo sapien
gcctaaatgcattaggtcgatggaa

SEQ ID NO: 1754874 - DNA, 25 bp, Homo sapien
gagaaggcctaaatgcattaggtcg

SEQ ID NO: 1754875 - DNA, 25 bp, Homo sapien
cattaggtcgatggaaaagctggat

SEQ ID NO: 1754876 - DNA, 25 bp, Homo sapien
tctatgtggatttgcaaaagctaat

SEQ ID NO: 1754877 - DNA, 25 bp, Homo sapien
gcaatagcacgatgccttttttaga

SEQ ID NO: 1754878 - DNA, 25 bp, Homo sapien
gtagttatgtattttcactttagga

SEQ ID NO: 1754879 - DNA, 25 bp, Homo sapien
tcttcagatctgtaatgcaatcact

SEQ ID NO: 1754880 - DNA, 25 bp, Homo sapien
aacatttcaatttagtaggccatgc

SEQ ID NO: 1754881 - DNA, 25 bp, Homo sapien
tactcaaggtaacgtcatgtccagc

SEQ ID NO: 1754882 - DNA, 25 bp, Homo sapien
catcagccagaatagtatgggttcc

SEQ ID NO: 1754883 - DNA, 25 bp, Homo sapien
tctgatgtagttgctcctaggccct

SEQ ID NO: 1754884 - DNA, 25 bp, Homo sapien
catgtatccaccagcagtgacgtag

SEQ ID NO: 1754885 - DNA, 25 bp, Homo sapien
tagcagtatacgaagaaatgatgat

SEQ ID NO: 1754886 - DNA, 25 bp, Homo sapien
caccaaatgcctcccactatcctgg

SEQ ID NO: 1754887 - DNA, 25 bp, Homo sapien
tcctggtggacagtgctttgggcat

SEQ ID NO: 1754888 - DNA, 25 bp, Homo sapien
taagttagcagtatacgaagaaatg

SEQ ID NO: 1754889 - DNA, 25 bp, Homo sapien
tatcttggtttgtttagctaaatca

SEQ ID NO: 1754890 - DNA, 25 bp, Homo sapien
tgaaaaaagtcatggttgcaccatc

SEQ ID NO: 1754891 - DNA, 25 bp, Homo sapien
catgcgttccactgtcagaaaggcg

SEQ ID NO: 1754892 - DNA, 25 bp, Homo sapien
tttagctaaatcatcagcagagtca

SEQ ID NO: 1754893 - DNA, 25 bp, Homo sapien
ttgtaaattttaggtaaccagcaga

SEQ ID NO: 1754894 - DNA, 25 bp, Homo sapien
tgtaaattttaggtaaccagcagaa

SEQ ID NO: 1754895 - DNA, 25 bp, Homo sapien
tttcctgtagtccttatgcaaatcc

SEQ ID NO: 1754896 - DNA, 25 bp, Homo sapien
tcatatgctttcatgccaactagcc

SEQ ID NO: 1754897 - DNA, 25 bp, Homo sapien
cttggcatgctgaactagtgtctga

SEQ ID NO: 1754898 - DNA, 25 bp, Homo sapien
tcatgccaactagccttcacatctg

SEQ ID NO: 1754899 - DNA, 25 bp, Homo sapien
gccacagccactaatatcacagcat

SEQ ID NO: 1754900 - DNA, 25 bp, Homo sapien
taggcaattaaacaattctaggcac

SEQ ID NO: 1754901 - DNA, 25 bp, Homo sapien
tattaaagtacttctctgaatacac

SEQ ID NO: 1754902 - DNA, 25 bp, Homo sapien
aatcaaagtgctcacctttgtgcat

SEQ ID NO: 1754903 - DNA, 25 bp, Homo sapien
gcctgtgttaacttgttctggtgca

SEQ ID NO: 1754904 - DNA, 25 bp, Homo sapien
agtcatggcttcgatgaagacactg

SEQ ID NO: 1754905 - DNA, 25 bp, Homo sapien
tactacaataatcgccttgcctgtg

SEQ ID NO: 1754906 - DNA, 25 bp, Homo sapien
tggcatctcctctttactacaataa

SEQ ID NO: 1754907 - DNA, 25 bp, Homo sapien
ttatagaaatggcatgatgagagtg

SEQ ID NO: 1754908 - DNA, 25 bp, Homo sapien
tgatgagagtgacagatttggatat

SEQ ID NO: 1754909 - DNA, 25 bp, Homo sapien
aatggcatgatgagagtgacagatt

SEQ ID NO: 1754910 - DNA, 25 bp, Homo sapien
gcatgatgagagtgacagatttgga

SEQ ID NO: 1754911 - DNA, 25 bp, Homo sapien
tgtaagcttcactatccaggaccag

SEQ ID NO: 1754912 - DNA, 25 bp, Homo sapien
tgagggcttatgtaagtggtgccac

SEQ ID NO: 1754913 - DNA, 25 bp, Homo sapien
aattctggattctcgtacacattga

SEQ ID NO: 1754914 - DNA, 25 bp, Homo sapien
cattcatcctgtaaggtaacgggta

SEQ ID NO: 1754915 - DNA, 25 bp, Homo sapien
gtttggctcccatgctgtctctaag

SEQ ID NO: 1754916 - DNA, 25 bp, Homo sapien
tttggctcccatgctgtctctaagt

SEQ ID NO: 1754917 - DNA, 25 bp, Homo sapien
tcacagtactgagttatttgaagca

SEQ ID NO: 1754918 - DNA, 25 bp, Homo sapien
agtactgagttatttgaagcagtag

SEQ ID NO: 1754919 - DNA, 25 bp, Homo sapien
cacagtactgagttatttgaagcag

SEQ ID NO: 1754920 - DNA, 25 bp, Homo sapien
acagtactgagttatttgaagcagt

SEQ ID NO: 1754921 - DNA, 25 bp, Homo sapien
cctggaaatatagtttaccatgtca

SEQ ID NO: 1754922 - DNA, 25 bp, Homo sapien
gaagcatgcatatatagcctaatat

SEQ ID NO: 1754923 - DNA, 25 bp, Homo sapien
gatggaagagattaatcataggtca

SEQ ID NO: 1754924 - DNA, 25 bp, Homo sapien
tcataggtcatgtaatgacacagta

SEQ ID NO: 1754925 - DNA, 25 bp, Homo sapien
ggcaaaaggcccataatactcaatt

SEQ ID NO: 1754926 - DNA, 25 bp, Homo sapien
tagtcacctaatctttgacggagga

SEQ ID NO: 1754927 - DNA, 25 bp, Homo sapien
tatatgcattgtggcaaactgatcc

SEQ ID NO: 1754928 - DNA, 25 bp, Homo sapien
agttacagtgatcaacatagtgtgg

SEQ ID NO: 1754929 - DNA, 25 bp, Homo sapien
taaacgacacccaagtagaaagaga

SEQ ID NO: 1754930 - DNA, 25 bp, Homo sapien
gaaccagattaggaatgcaatccca

SEQ ID NO: 1754931 - DNA, 25 bp, Homo sapien
aagtcgtgacaagagcaatgtggca

SEQ ID NO: 1754932 - DNA, 25 bp, Homo sapien
tcctatacacaagcaacagccaagg

SEQ ID NO: 1754933 - DNA, 25 bp, Homo sapien
ttctgttgattctaaaaaggctgca

SEQ ID NO: 1754934 - DNA, 25 bp, Homo sapien
acttcccatatgagtgttgtgacca

SEQ ID NO: 1754935 - DNA, 25 bp, Homo sapien
ttacttcccatatgagtgttgtgac

SEQ ID NO: 1754936 - DNA, 25 bp, Homo sapien
ctttacttcccatatgagtgttgtg

SEQ ID NO: 1754937 - DNA, 25 bp, Homo sapien
atctttacttcccatatgagtgttg

SEQ ID NO: 1754938 - DNA, 25 bp, Homo sapien
tctgagaaaatatgccaatgatcac

SEQ ID NO: 1754939 - DNA, 25 bp, Homo sapien
taattagcccactagattccttagt

SEQ ID NO: 1754940 - DNA, 25 bp, Homo sapien
ttttggacacaggttacttggccac

SEQ ID NO: 1754941 - DNA, 25 bp, Homo sapien
catactttccacagtagttgccata

SEQ ID NO: 1754942 - DNA, 25 bp, Homo sapien
aacagctgagccctatctggactca

SEQ ID NO: 1754943 - DNA, 25 bp, Homo sapien
aacatatgtgctaggtaagaacagc

SEQ ID NO: 1754944 - DNA, 25 bp, Homo sapien
tactggaacatatgtgctaggtaag

SEQ ID NO: 1754945 - DNA, 25 bp, Homo sapien
caacaatactggaacatatgtgcta

SEQ ID NO: 1754946 - DNA, 25 bp, Homo sapien
taaggactaagctgatcagccaaaa

SEQ ID NO: 1754947 - DNA, 25 bp, Homo sapien
atgtccacagtctttgaaggtcctc

SEQ ID NO: 1754948 - DNA, 25 bp, Homo sapien
aacataaggactaagctgatcagcc

SEQ ID NO: 1754949 - DNA, 25 bp, Homo sapien
gactaagctgatcagccaaaatgtc

SEQ ID NO: 1754950 - DNA, 25 bp, Homo sapien
tataaggccgccaatctgtgtcagg

SEQ ID NO: 1754951 - DNA, 25 bp, Homo sapien
tgggagtgccaacgccataaccttt

SEQ ID NO: 1754952 - DNA, 25 bp, Homo sapien
ttccgctgggtaacaaactcgatgg

SEQ ID NO: 1754953 - DNA, 25 bp, Homo sapien
cataatcagaggtgaggactcgctg

SEQ ID NO: 1754954 - DNA, 25 bp, Homo sapien
agaaaggagaggttatgttaagtat

SEQ ID NO: 1754955 - DNA, 25 bp, Homo sapien
gaagatgccaccaatattctgaacc

SEQ ID NO: 1754956 - DNA, 25 bp, Homo sapien
ttcctcttgcagctgaagaattgct

SEQ ID NO: 1754957 - DNA, 25 bp, Homo sapien
cttcatcatatgcagtttgccttcc

SEQ ID NO: 1754958 - DNA, 25 bp, Homo sapien
aaaactgaaagcaccaagccggctg

SEQ ID NO: 1754959 - DNA, 25 bp, Homo sapien
tagaatctgaatgaggtgacaaact

SEQ ID NO: 1754960 - DNA, 25 bp, Homo sapien
aagtatcatgtagcatctgaaagag

SEQ ID NO: 1754961 - DNA, 25 bp, Homo sapien
tggttttgtcatatccagagcaatg

SEQ ID NO: 1754962 - DNA, 25 bp, Homo sapien
tctcactctgccacagtggttaaag

SEQ ID NO: 1754963 - DNA, 25 bp, Homo sapien
tgtctggatggtatggtggcactaa

SEQ ID NO: 1754964 - DNA, 25 bp, Homo sapien
aacagtgtctggatggtatggtggc

SEQ ID NO: 1754965 - DNA, 25 bp, Homo sapien
tggtatggtggcactaaccaaatag

SEQ ID NO: 1754966 - DNA, 25 bp, Homo sapien
ggatggtatggtggcactaaccaaa

SEQ ID NO: 1754967 - DNA, 25 bp, Homo sapien
gaggaatacatagtcttgaggtaac

SEQ ID NO: 1754968 - DNA, 25 bp, Homo sapien
cttgaggtaacttagtcttggctct

SEQ ID NO: 1754969 - DNA, 25 bp, Homo sapien
ctgactccaaaatagggaggaatac

SEQ ID NO: 1754970 - DNA, 25 bp, Homo sapien
ccaaaatagggaggaatacatagtc

SEQ ID NO: 1754971 - DNA, 25 bp, Homo sapien
acagacttgtcacataacatccttg

SEQ ID NO: 1754972 - DNA, 25 bp, Homo sapien
tcctcaacagacttgtcacataaca

SEQ ID NO: 1754973 - DNA, 25 bp, Homo sapien
cttgtcacataacatccttgaaggt

SEQ ID NO: 1754974 - DNA, 25 bp, Homo sapien
ttaaaatcatcctcaacagacttgt

SEQ ID NO: 1754975 - DNA, 25 bp, Homo sapien
gctggcacttcagggacatcctcaa

SEQ ID NO: 1754976 - DNA, 25 bp, Homo sapien
ttctgtcgttaaatgtgtgcatgtt

SEQ ID NO: 1754977 - DNA, 25 bp, Homo sapien
tgttttcacaataactggggcctgt

SEQ ID NO: 1754978 - DNA, 25 bp, Homo sapien
tctaccatggcactacagaaggacc

SEQ ID NO: 1754979 - DNA, 25 bp, Homo sapien
gcacaggttgcatatttccacagga

SEQ ID NO: 1754980 - DNA, 25 bp, Homo sapien
tagacacagcggcatgaggtaactc

SEQ ID NO: 1754981 - DNA, 25 bp, Homo sapien
tcatttacagcaggaacaagggttt

SEQ ID NO: 1754982 - DNA, 25 bp, Homo sapien
tattgataaacgcagtccacttcca

SEQ ID NO: 1754983 - DNA, 25 bp, Homo sapien
caccaaacgttggtggtgcacacgc

SEQ ID NO: 1754984 - DNA, 25 bp, Homo sapien
tgcattggattcaaacagcaaactg

SEQ ID NO: 1754985 - DNA, 25 bp, Homo sapien
atgcttgacatcacacccctgacag

SEQ ID NO: 1754986 - DNA, 25 bp, Homo sapien
gttgtcagcctcgtggaaaccaggg

SEQ ID NO: 1754987 - DNA, 25 bp, Homo sapien
catacaagagaaaaatgaaagacaa

SEQ ID NO: 1754988 - DNA, 25 bp, Homo sapien
cattacacatacaagagaaaaatga

SEQ ID NO: 1754989 - DNA, 25 bp, Homo sapien
acaagagaaaaatgaaagacaaagc

SEQ ID NO: 1754990 - DNA, 25 bp, Homo sapien
attacacatacaagagaaaaatgaa

SEQ ID NO: 1754991 - DNA, 25 bp, Homo sapien
gaaagtattccctatctacattgta

SEQ ID NO: 1754992 - DNA, 25 bp, Homo sapien
tgtaatgcattaaaaaggagtctta

SEQ ID NO: 1754993 - DNA, 25 bp, Homo sapien
taaaaatcttacagttcagcatggt

SEQ ID NO: 1754994 - DNA, 25 bp, Homo sapien
caagatacagtgtaatgtaatgcat

SEQ ID NO: 1754995 - DNA, 25 bp, Homo sapien
cttccaggctagaaccccctatggt

SEQ ID NO: 1754996 - DNA, 25 bp, Homo sapien
gaaccccctatggtgcttgtgaacc

SEQ ID NO: 1754997 - DNA, 25 bp, Homo sapien
ggctagaaccccctatggtgcttgt

SEQ ID NO: 1754998 - DNA, 25 bp, Homo sapien
tccaggctagaaccccctatggtgc

SEQ ID NO: 1754999 - DNA, 25 bp, Homo sapien
gagcttccttattgtgcagtatggc

SEQ ID NO: 1755000 - DNA, 25 bp, Homo sapien
ctagaagtgaagtgcaagtaccaac

SEQ ID NO: 1755001 - DNA, 25 bp, Homo sapien
tatgccgtagatagggaagacttcc

SEQ ID NO: 1755002 - DNA, 25 bp, Homo sapien
gaagacttcctaggccagcatcaac

SEQ ID NO: 1755003 - DNA, 25 bp, Homo sapien
gcccccgtctgggttggatgccttc

SEQ ID NO: 1755004 - DNA, 25 bp, Homo sapien
gaggaggcttttcccattcgtgctt

SEQ ID NO: 1755005 - DNA, 25 bp, Homo sapien
ctcctgaggaggcttttcccattcg

SEQ ID NO: 1755006 - DNA, 25 bp, Homo sapien
gatgccttccctgcaaggtcataca

SEQ ID NO: 1755007 - DNA, 25 bp, Homo sapien
tccactacagttgtcataatgggcc

SEQ ID NO: 1755008 - DNA, 25 bp, Homo sapien
ccctaggcttagaggttgtggcaaa

SEQ ID NO: 1755009 - DNA, 25 bp, Homo sapien
ggcctgtgtactggaactccttggg

SEQ ID NO: 1755010 - DNA, 25 bp, Homo sapien
gagaatccacgcttaataccgcaat

SEQ ID NO: 1755011 - DNA, 25 bp, Homo sapien
tgtgtatcaattctctggacatccc

SEQ ID NO: 1755012 - DNA, 25 bp, Homo sapien
gtgtatcaattctctggacatcccc

SEQ ID NO: 1755013 - DNA, 25 bp, Homo sapien
tctaataccagtattccagtaccga

SEQ ID NO: 1755014 - DNA, 25 bp, Homo sapien
ccagtattccagtaccgatttttag

SEQ ID NO: 1755015 - DNA, 25 bp, Homo sapien
tgatgatctaataccagtattccag

SEQ ID NO: 1755016 - DNA, 25 bp, Homo sapien
accgtgttctgatgatctaatacca

SEQ ID NO: 1755017 - DNA, 25 bp, Homo sapien
cactgacaactctagctgtcattat

SEQ ID NO: 1755018 - DNA, 25 bp, Homo sapien
tcaggatcactgacaactctagctg

SEQ ID NO: 1755019 - DNA, 25 bp, Homo sapien
gatcactgacaactctagctgtcat

SEQ ID NO: 1755020 - DNA, 25 bp, Homo sapien
caggatcactgacaactctagctgt

SEQ ID NO: 1755021 - DNA, 25 bp, Homo sapien
ctttaatctacttaggatgtgtata

SEQ ID NO: 1755022 - DNA, 25 bp, Homo sapien
cctttaatctacttaggatgtgtat

SEQ ID NO: 1755023 - DNA, 25 bp, Homo sapien
ttaatctacttaggatgtgtataac

SEQ ID NO: 1755024 - DNA, 25 bp, Homo sapien
tcctttaatctacttaggatgtgta

SEQ ID NO: 1755025 - DNA, 25 bp, Homo sapien
tcttttatgtcggtgtccctgctgc

SEQ ID NO: 1755026 - DNA, 25 bp, Homo sapien
cttttatgtcggtgtccctgctgcc

SEQ ID NO: 1755027 - DNA, 25 bp, Homo sapien
tcttcttttatgtcggtgtccctgc

SEQ ID NO: 1755028 - DNA, 25 bp, Homo sapien
cttcttttatgtcggtgtccctgct

SEQ ID NO: 1755029 - DNA, 25 bp, Homo sapien
gctaaactaagagggcttgacaatg

SEQ ID NO: 1755030 - DNA, 25 bp, Homo sapien
caatgaagcttgctgcaaccgctgc

SEQ ID NO: 1755031 - DNA, 25 bp, Homo sapien
tccacggggctagctaaactaagag

SEQ ID NO: 1755032 - DNA, 25 bp, Homo sapien
ctcatgcagagatgtacagagcaga

SEQ ID NO: 1755033 - DNA, 25 bp, Homo sapien
ccatagatagaagggtcataaccca

SEQ ID NO: 1755034 - DNA, 25 bp, Homo sapien
gccatagatagaagggtcataaccc

SEQ ID NO: 1755035 - DNA, 25 bp, Homo sapien
tagatagaagggtcataacccacta

SEQ ID NO: 1755036 - DNA, 25 bp, Homo sapien
atagatagaagggtcataacccact

SEQ ID NO: 1755037 - DNA, 25 bp, Homo sapien
tatgattatttcgactctgttgaca

SEQ ID NO: 1755038 - DNA, 25 bp, Homo sapien
ttcctggttgtaaggatgtggcatc

SEQ ID NO: 1755039 - DNA, 25 bp, Homo sapien
gtggcatctttcaggtactgtggca

SEQ ID NO: 1755040 - DNA, 25 bp, Homo sapien
ggtactgtggcactatatatagtat

SEQ ID NO: 1755041 - DNA, 25 bp, Homo sapien
tagattcccaacaactctagccagc

SEQ ID NO: 1755042 - DNA, 25 bp, Homo sapien
ggcttccagagaatttttgcaatac

SEQ ID NO: 1755043 - DNA, 25 bp, Homo sapien
caatactcgatatgggctatggcac

SEQ ID NO: 1755044 - DNA, 25 bp, Homo sapien
ggacgctttctgctctccactacag

SEQ ID NO: 1755045 - DNA, 25 bp, Homo sapien
tgtgagatggcagcattcagtttac

SEQ ID NO: 1755046 - DNA, 25 bp, Homo sapien
gagtgatatgcaagttttgtgagat

SEQ ID NO: 1755047 - DNA, 25 bp, Homo sapien
aaataaactctgagtgatatgcaag

SEQ ID NO: 1755048 - DNA, 25 bp, Homo sapien
aagttttgtgagatggcagcattca

SEQ ID NO: 1755049 - DNA, 25 bp, Homo sapien
ggttatcaaccactatgtcataaca

SEQ ID NO: 1755050 - DNA, 25 bp, Homo sapien
cctgttatacccactggcagaagag

SEQ ID NO: 1755051 - DNA, 25 bp, Homo sapien
gatatccagttctccaaaccagtgg

SEQ ID NO: 1755052 - DNA, 25 bp, Homo sapien
caagcttctgtgatatccagttctc

SEQ ID NO: 1755053 - DNA, 25 bp, Homo sapien
ccctgcttcctacactcttctccta

SEQ ID NO: 1755054 - DNA, 25 bp, Homo sapien
cttccttcctgcgattttccctgct

SEQ ID NO: 1755055 - DNA, 25 bp, Homo sapien
cttcctacactcttctcctaagggc

SEQ ID NO: 1755056 - DNA, 25 bp, Homo sapien
tccttcctgcgattttccctgcttc

SEQ ID NO: 1755057 - DNA, 25 bp, Homo sapien
gagttacctgaagctccgcgtccct

SEQ ID NO: 1755058 - DNA, 25 bp, Homo sapien
gttacctgaagctccgcgtccctga

SEQ ID NO: 1755059 - DNA, 25 bp, Homo sapien
gagagttacctgaagctccgcgtcc

SEQ ID NO: 1755060 - DNA, 25 bp, Homo sapien
tagggggcttctgaggcaatcgggc

SEQ ID NO: 1755061 - DNA, 25 bp, Homo sapien
gtttcttcagggcatctgggcatat

SEQ ID NO: 1755062 - DNA, 25 bp, Homo sapien
tcttcagggcatctgggcatatacg

SEQ ID NO: 1755063 - DNA, 25 bp, Homo sapien
cagtttcttcagggcatctgggcat

SEQ ID NO: 1755064 - DNA, 25 bp, Homo sapien
ttatcagttaaggcgggacagggtc

SEQ ID NO: 1755065 - DNA, 25 bp, Homo sapien
tctctgatcacaatttcctctgcca

SEQ ID NO: 1755066 - DNA, 25 bp, Homo sapien
acttctctgatcacaatttcctctg

SEQ ID NO: 1755067 - DNA, 25 bp, Homo sapien
tgaacttctctgatcacaatttcct

SEQ ID NO: 1755068 - DNA, 25 bp, Homo sapien
ctgaacttctctgatcacaatttcc

SEQ ID NO: 1755069 - DNA, 25 bp, Homo sapien
gccataactgtgaactctagtgcta

SEQ ID NO: 1755070 - DNA, 25 bp, Homo sapien
actctagtgctatgttataaatctc

SEQ ID NO: 1755071 - DNA, 25 bp, Homo sapien
gctgcaatgtctgccataactgtga

SEQ ID NO: 1755072 - DNA, 25 bp, Homo sapien
gcagccatagctgcaatgtctgcca

SEQ ID NO: 1755073 - DNA, 25 bp, Homo sapien
tagggaatgttcaaacagctccagg

SEQ ID NO: 1755074 - DNA, 25 bp, Homo sapien
tagtgctgtggctactaaggtggct

SEQ ID NO: 1755075 - DNA, 25 bp, Homo sapien
gggagctttcagtaggttcttgata

SEQ ID NO: 1755076 - DNA, 25 bp, Homo sapien
cagaatcatcggtgcccatggtaat

SEQ ID NO: 1755077 - DNA, 25 bp, Homo sapien
tcttatctcaatatagactaaattc

SEQ ID NO: 1755078 - DNA, 25 bp, Homo sapien
tatcttatctcaatatagactaaat

SEQ ID NO: 1755079 - DNA, 25 bp, Homo sapien
cccaaatatcttatctcaatataga

SEQ ID NO: 1755080 - DNA, 25 bp, Homo sapien
tatctcaatatagactaaattctgt

SEQ ID NO: 1755081 - DNA, 25 bp, Homo sapien
gataccattgaattcttgaccaaat

SEQ ID NO: 1755082 - DNA, 25 bp, Homo sapien
aatgataccattgaattcttgacca

SEQ ID NO: 1755083 - DNA, 25 bp, Homo sapien
caatgataccattgaattcttgacc

SEQ ID NO: 1755084 - DNA, 25 bp, Homo sapien
tgataccattgaattcttgaccaaa

SEQ ID NO: 1755085 - DNA, 25 bp, Homo sapien
cttggacaatgtcccgttgcatctt

SEQ ID NO: 1755086 - DNA, 25 bp, Homo sapien
caatgtcccgttgcatcttcacact

SEQ ID NO: 1755087 - DNA, 25 bp, Homo sapien
atgtcccgttgcatcttcacactca

SEQ ID NO: 1755088 - DNA, 25 bp, Homo sapien
ggacaatgtcccgttgcatcttcac

SEQ ID NO: 1755089 - DNA, 25 bp, Homo sapien
tgtccataattctttacacagaggg

SEQ ID NO: 1755090 - DNA, 25 bp, Homo sapien
tgaagcccagatatgtcgaaaatca

SEQ ID NO: 1755091 - DNA, 25 bp, Homo sapien
gagtgaaaggatgttgatcaaagac

SEQ ID NO: 1755092 - DNA, 25 bp, Homo sapien
tcaaagacataattgtgtccataat

SEQ ID NO: 1755093 - DNA, 25 bp, Homo sapien
tatttgagttataaacgatccaatt

SEQ ID NO: 1755094 - DNA, 25 bp, Homo sapien
tttccagtggcatgcaaatatatat

SEQ ID NO: 1755095 - DNA, 25 bp, Homo sapien
ttccagtggcatgcaaatatatatt

SEQ ID NO: 1755096 - DNA, 25 bp, Homo sapien
atttgagttataaacgatccaatta

SEQ ID NO: 1755097 - DNA, 25 bp, Homo sapien
ctagtaattacagctgtaagcaaaa

SEQ ID NO: 1755098 - DNA, 25 bp, Homo sapien
attacagctgtaagcaaaatgtgag

SEQ ID NO: 1755099 - DNA, 25 bp, Homo sapien
aataatcaagctgatctacagaaaa

SEQ ID NO: 1755100 - DNA, 25 bp, Homo sapien
aagcaaaatgtgagagtaatttcca

SEQ ID NO: 1755101 - DNA, 25 bp, Homo sapien
tgggttttgtcctccttgaatacac

SEQ ID NO: 1755102 - DNA, 25 bp, Homo sapien
aatgcattatccaggatcactcagc

SEQ ID NO: 1755103 - DNA, 25 bp, Homo sapien
aaaacctatatttgtctgatactag

SEQ ID NO: 1755104 - DNA, 25 bp, Homo sapien
gcaaattccttctaacatgacctat

SEQ ID NO: 1755105 - DNA, 25 bp, Homo sapien
ctcagctttgagtaaaaaagccaag

SEQ ID NO: 1755106 - DNA, 25 bp, Homo sapien
cacaggagtgtgattactgagccat

SEQ ID NO: 1755107 - DNA, 25 bp, Homo sapien
tctggaaactattgatggcatctgt

SEQ ID NO: 1755108 - DNA, 25 bp, Homo sapien
tacaacaatcagtgtgcagaacgga

SEQ ID NO: 1755109 - DNA, 25 bp, Homo sapien
gcagaacggattcattaccacaaag

SEQ ID NO: 1755110 - DNA, 25 bp, Homo sapien
agaagtcagccagctcatttgccat

SEQ ID NO: 1755111 - DNA, 25 bp, Homo sapien
tctggagaagtcagccagctcattt

SEQ ID NO: 1755112 - DNA, 25 bp, Homo sapien
tgaaagtctctggagaagtcagcca

SEQ ID NO: 1755113 - DNA, 25 bp, Homo sapien
ggagaagtcagccagctcatttgcc

SEQ ID NO: 1755114 - DNA, 25 bp, Homo sapien
cccccgatgtctgcctttgggccat

SEQ ID NO: 1755115 - DNA, 25 bp, Homo sapien
catctgcccccgatgtctgcctttg

SEQ ID NO: 1755116 - DNA, 25 bp, Homo sapien
ctcttttccatctgcccccgatgtc

SEQ ID NO: 1755117 - DNA, 25 bp, Homo sapien
tttatccttgcctcttttccatctg

SEQ ID NO: 1755118 - DNA, 25 bp, Homo sapien
gaatttatgacctgactacaaggac

SEQ ID NO: 1755119 - DNA, 25 bp, Homo sapien
ggactctcatctataacaactaaaa

SEQ ID NO: 1755120 - DNA, 25 bp, Homo sapien
ttacaaataaaacgtggtcatgtct

SEQ ID NO: 1755121 - DNA, 25 bp, Homo sapien
aaacgtggtcatgtctttcagtgtc

SEQ ID NO: 1755122 - DNA, 25 bp, Homo sapien
tgtttatggtctgccactggcataa

SEQ ID NO: 1755123 - DNA, 25 bp, Homo sapien
tttctttggtattgccgaacaattg

SEQ ID NO: 1755124 - DNA, 25 bp, Homo sapien
tgccgaacaattgtttatggtctgc

SEQ ID NO: 1755125 - DNA, 25 bp, Homo sapien
tatggtctgccactggcataacatg

SEQ ID NO: 1755126 - DNA, 25 bp, Homo sapien
ttagggaattatgaagataaggatg

SEQ ID NO: 1755127 - DNA, 25 bp, Homo sapien
atctctggagagattagggaattat

SEQ ID NO: 1755128 - DNA, 25 bp, Homo sapien
ctccaatctctggagagattaggga

SEQ ID NO: 1755129 - DNA, 25 bp, Homo sapien
caatctctggagagattagggaatt

SEQ ID NO: 1755130 - DNA, 25 bp, Homo sapien
ttccctaggatgaagtctgattatc

SEQ ID NO: 1755131 - DNA, 25 bp, Homo sapien
gatggtcaaaaccagacaataaact

SEQ ID NO: 1755132 - DNA, 25 bp, Homo sapien
aaggctgtgttacatgtataggcca

SEQ ID NO: 1755133 - DNA, 25 bp, Homo sapien
tatatttgttccctaggatgaagtc

SEQ ID NO: 1755134 - DNA, 25 bp, Homo sapien
ttgtatttgccaacagaggaacact

SEQ ID NO: 1755135 - DNA, 25 bp, Homo sapien
tgcactcagccttgaggtactctag

SEQ ID NO: 1755136 - DNA, 25 bp, Homo sapien
ggtttcccatagtgaaactgcactc

SEQ ID NO: 1755137 - DNA, 25 bp, Homo sapien
gcagctgagcaggaattaccactaa

SEQ ID NO: 1755138 - DNA, 25 bp, Homo sapien
aatctcattaaattcaggaagcttt

SEQ ID NO: 1755139 - DNA, 25 bp, Homo sapien
tattaatctcattaaattcaggaag

SEQ ID NO: 1755140 - DNA, 25 bp, Homo sapien
ttaatctcattaaattcaggaagct

SEQ ID NO: 1755141 - DNA, 25 bp, Homo sapien
ctctaggcactgactcattttatta

SEQ ID NO: 1755142 - DNA, 25 bp, Homo sapien
tgatgagatatgaccatgcgccatg

SEQ ID NO: 1755143 - DNA, 25 bp, Homo sapien
tagttgtagtgcacctaaggcatta

SEQ ID NO: 1755144 - DNA, 25 bp, Homo sapien
taaaacacatatatggcacacaggg

SEQ ID NO: 1755145 - DNA, 25 bp, Homo sapien
tattttgctcaaacagggatttacc

SEQ ID NO: 1755146 - DNA, 25 bp, Homo sapien
taccattggcaagtgggtgcagttt

SEQ ID NO: 1755147 - DNA, 25 bp, Homo sapien
tctttcagaagacacactgtacttt

SEQ ID NO: 1755148 - DNA, 25 bp, Homo sapien
tatcttcagttaggcagtagagcca

SEQ ID NO: 1755149 - DNA, 25 bp, Homo sapien
tacttttccgcattaccattggcaa

SEQ ID NO: 1755150 - DNA, 25 bp, Homo sapien
ttaataagccttgctaaactctttc

SEQ ID NO: 1755151 - DNA, 25 bp, Homo sapien
taagccttgctaaactctttctcta

SEQ ID NO: 1755152 - DNA, 25 bp, Homo sapien
aataagccttgctaaactctttctc

SEQ ID NO: 1755153 - DNA, 25 bp, Homo sapien
ctactactgttaaatgcttgacata

SEQ ID NO: 1755154 - DNA, 25 bp, Homo sapien
ttctatgatactgcgtgcagttcct

SEQ ID NO: 1755155 - DNA, 25 bp, Homo sapien
tcttctatgatactgcgtgcagttc

SEQ ID NO: 1755156 - DNA, 25 bp, Homo sapien
tatcttctatgatactgcgtgcagt

SEQ ID NO: 1755157 - DNA, 25 bp, Homo sapien
tatgatactgcgtgcagttcctctg

SEQ ID NO: 1755158 - DNA, 25 bp, Homo sapien
cttagctgtagcttgttaggagtca

SEQ ID NO: 1755159 - DNA, 25 bp, Homo sapien
aactggatgggagatggatatctta

SEQ ID NO: 1755160 - DNA, 25 bp, Homo sapien
caggatcgtagggacagaactggat

SEQ ID NO: 1755161 - DNA, 25 bp, Homo sapien
ttttagaagaggcaggatcgtaggg

SEQ ID NO: 1755162 - DNA, 25 bp, Homo sapien
ggaggtgctctgcatgaacgaacta

SEQ ID NO: 1755163 - DNA, 25 bp, Homo sapien
tgacagacagaaacgttgtaactct

SEQ ID NO: 1755164 - DNA, 25 bp, Homo sapien
tgtagaaagcagacatcgccatatt

SEQ ID NO: 1755165 - DNA, 25 bp, Homo sapien
gaacgaactacctctaatgatccca

SEQ ID NO: 1755166 - DNA, 25 bp, Homo sapien
gcaggtggcgctctaattcttcccc

SEQ ID NO: 1755167 - DNA, 25 bp, Homo sapien
agccccaccgccactcaacagccat

SEQ ID NO: 1755168 - DNA, 25 bp, Homo sapien
caagatggtgtgaaccgagtccagg

SEQ ID NO: 1755169 - DNA, 25 bp, Homo sapien
ccccaagatggtgtgaaccgagtcc

SEQ ID NO: 1755170 - DNA, 25 bp, Homo sapien
aggaggcagcgttccaatcacacca

SEQ ID NO: 1755171 - DNA, 25 bp, Homo sapien
actgtgaaaacaggaggcagcgttc

SEQ ID NO: 1755172 - DNA, 25 bp, Homo sapien
aatcacaccaatgtctggtgctggc

SEQ ID NO: 1755173 - DNA, 25 bp, Homo sapien
tccaatcacaccaatgtctggtgct

SEQ ID NO: 1755174 - DNA, 25 bp, Homo sapien
cagaatcaaaagtgtttccatacca

SEQ ID NO: 1755175 - DNA, 25 bp, Homo sapien
agaatcaaaagtgtttccataccat

SEQ ID NO: 1755176 - DNA, 25 bp, Homo sapien
gaatcaaaagtgtttccataccatt

SEQ ID NO: 1755177 - DNA, 25 bp, Homo sapien
aatgcagaatcaaaagtgtttccat

SEQ ID NO: 1755178 - DNA, 25 bp, Homo sapien
gcctttttgactattgagttgctga

SEQ ID NO: 1755179 - DNA, 25 bp, Homo sapien
ttttgactattgagttgctgacatt

SEQ ID NO: 1755180 - DNA, 25 bp, Homo sapien
cctttttgactattgagttgctgac

SEQ ID NO: 1755181 - DNA, 25 bp, Homo sapien
gactattgagttgctgacatttatt

SEQ ID NO: 1755182 - DNA, 25 bp, Homo sapien
cttcagaaagttattgctttggtca

SEQ ID NO: 1755183 - DNA, 25 bp, Homo sapien
tcagaaagttattgctttggtcatc

SEQ ID NO: 1755184 - DNA, 25 bp, Homo sapien
aagttattgctttggtcatctagca

SEQ ID NO: 1755185 - DNA, 25 bp, Homo sapien
gttgtcttcagaaagttattgcttt

SEQ ID NO: 1755186 - DNA, 25 bp, Homo sapien
ccttgaataatctgaagatcttgct

SEQ ID NO: 1755187 - DNA, 25 bp, Homo sapien
cttctgcattgatctaagatttcct

SEQ ID NO: 1755188 - DNA, 25 bp, Homo sapien
tttgtaaagtcacactgcaactctt

SEQ ID NO: 1755189 - DNA, 25 bp, Homo sapien
tcttgcttcagggttaattgtttac

SEQ ID NO: 1755190 - DNA, 25 bp, Homo sapien
caagttctgcctcagagaaggccat

SEQ ID NO: 1755191 - DNA, 25 bp, Homo sapien
ttagcaagttctgcctcagagaagg

SEQ ID NO: 1755192 - DNA, 25 bp, Homo sapien
agcaagttctgcctcagagaaggcc

SEQ ID NO: 1755193 - DNA, 25 bp, Homo sapien
gcaagttctgcctcagagaaggcca

SEQ ID NO: 1755194 - DNA, 25 bp, Homo sapien
gagggacagccatgaacctgaactc

SEQ ID NO: 1755195 - DNA, 25 bp, Homo sapien
gccatgaacctgaactcgatgccct

SEQ ID NO: 1755196 - DNA, 25 bp, Homo sapien
acctgaactcgatgcccttctcaaa

SEQ ID NO: 1755197 - DNA, 25 bp, Homo sapien
gacagccatgaacctgaactcgatg

SEQ ID NO: 1755198 - DNA, 25 bp, Homo sapien
caaagcactcaaatttctaagcagc

SEQ ID NO: 1755199 - DNA, 25 bp, Homo sapien
aacaaagcactcaaatttctaagca

SEQ ID NO: 1755200 - DNA, 25 bp, Homo sapien
atctcatttccaaacaaagcactca

SEQ ID NO: 1755201 - DNA, 25 bp, Homo sapien
tttccaaacaaagcactcaaatttc

SEQ ID NO: 1755202 - DNA, 25 bp, Homo sapien
taaggctgggtatgcactctgaggc

SEQ ID NO: 1755203 - DNA, 25 bp, Homo sapien
tccccttctgtgagcaagctgacag

SEQ ID NO: 1755204 - DNA, 25 bp, Homo sapien
tattccactgtggagagtccccttc

SEQ ID NO: 1755205 - DNA, 25 bp, Homo sapien
tctgcttcgacacatagctgcccag

SEQ ID NO: 1755206 - DNA, 25 bp, Homo sapien
tcttctaattatgatccatttctcc

SEQ ID NO: 1755207 - DNA, 25 bp, Homo sapien
ttggatgacatcaccctgattttca

SEQ ID NO: 1755208 - DNA, 25 bp, Homo sapien
gcttctcttctaattatgatccatt

SEQ ID NO: 1755209 - DNA, 25 bp, Homo sapien
caccctgattttcagcggcttctct

SEQ ID NO: 1755210 - DNA, 25 bp, Homo sapien
gggctcagaaatgaggctttgcctg

SEQ ID NO: 1755211 - DNA, 25 bp, Homo sapien
gccagctttttctgcgatatttgga

SEQ ID NO: 1755212 - DNA, 25 bp, Homo sapien
caaggatcattggagaaacagtcca

SEQ ID NO: 1755213 - DNA, 25 bp, Homo sapien
gctttgcctggaggtataagcagtg

SEQ ID NO: 1755214 - DNA, 25 bp, Homo sapien
ctcgcctacatacccaattacccat

SEQ ID NO: 1755215 - DNA, 25 bp, Homo sapien
ctagaaagttatcacttgggtttct

SEQ ID NO: 1755216 - DNA, 25 bp, Homo sapien
taaaagcatacttcccgattttgaa

SEQ ID NO: 1755217 - DNA, 25 bp, Homo sapien
aagcatacttcccgattttgaactt

SEQ ID NO: 1755218 - DNA, 25 bp, Homo sapien
tacttcccgattttgaacttcatat

SEQ ID NO: 1755219 - DNA, 25 bp, Homo sapien
ttcagattaaaattcagcaacaatt

SEQ ID NO: 1755220 - DNA, 25 bp, Homo sapien
tcctcgactttcaaacatgagtttt

SEQ ID NO: 1755221 - DNA, 25 bp, Homo sapien
aattcagcaacaatttccctggcat

SEQ ID NO: 1755222 - DNA, 25 bp, Homo sapien
tttccacttctgatttttcctatat

SEQ ID NO: 1755223 - DNA, 25 bp, Homo sapien
gtttccaccaagttctctgtctgaa

SEQ ID NO: 1755224 - DNA, 25 bp, Homo sapien
ttgaggtttccaccaagttctctgt

SEQ ID NO: 1755225 - DNA, 25 bp, Homo sapien
aatccttatgtgcttttgattccat

SEQ ID NO: 1755226 - DNA, 25 bp, Homo sapien
ccaccaagttctctgtctgaatcct

SEQ ID NO: 1755227 - DNA, 25 bp, Homo sapien
ataaactctgagaacactggtgaga

SEQ ID NO: 1755228 - DNA, 25 bp, Homo sapien
aaaagtctgcaagattttgtaaact

SEQ ID NO: 1755229 - DNA, 25 bp, Homo sapien
ctaatttttcgatattctagagttc

SEQ ID NO: 1755230 - DNA, 25 bp, Homo sapien
tcccctaatttttcgatattctaga

SEQ ID NO: 1755231 - DNA, 25 bp, Homo sapien
ttttgtttcctaggagagctaaaca

SEQ ID NO: 1755232 - DNA, 25 bp, Homo sapien
cagaaggatccttgcaaagtcggtg

SEQ ID NO: 1755233 - DNA, 25 bp, Homo sapien
cagttctggttgttctttgccccca

SEQ ID NO: 1755234 - DNA, 25 bp, Homo sapien
atccttgcaaagtcggtggccctcc

SEQ ID NO: 1755235 - DNA, 25 bp, Homo sapien
ctgaatgagagagaacttcaaacat

SEQ ID NO: 1755236 - DNA, 25 bp, Homo sapien
aaggtttttgaaggctatccctgat

SEQ ID NO: 1755237 - DNA, 25 bp, Homo sapien
tgaccaacacgtgaatgttttctaa

SEQ ID NO: 1755238 - DNA, 25 bp, Homo sapien
atgaccaacacgtgaatgttttcta

SEQ ID NO: 1755239 - DNA, 25 bp, Homo sapien
ggtttttgaaggctatccctgatat

SEQ ID NO: 1755240 - DNA, 25 bp, Homo sapien
tgaggttacggccaggaagaataca

SEQ ID NO: 1755241 - DNA, 25 bp, Homo sapien
agtcagaaaatgaggttacggccag

SEQ ID NO: 1755242 - DNA, 25 bp, Homo sapien
gaaaatgaggttacggccaggaaga

SEQ ID NO: 1755243 - DNA, 25 bp, Homo sapien
tacggccaggaagaatacatcattg

SEQ ID NO: 1755244 - DNA, 25 bp, Homo sapien
tgacccaggccctcgggtttggcta

SEQ ID NO: 1755245 - DNA, 25 bp, Homo sapien
aagagccgcatgagctgattttcac

SEQ ID NO: 1755246 - DNA, 25 bp, Homo sapien
tatcttcagctggatttaagagccg

SEQ ID NO: 1755247 - DNA, 25 bp, Homo sapien
cgggtttggctatcttcagctggat

SEQ ID NO: 1755248 - DNA, 25 bp, Homo sapien
tccatgaccacatgagctaaatcat

SEQ ID NO: 1755249 - DNA, 25 bp, Homo sapien
tacagattgaacttgcctgcctcca

SEQ ID NO: 1755250 - DNA, 25 bp, Homo sapien
ggaacgtcagttcttccagggcctc

SEQ ID NO: 1755251 - DNA, 25 bp, Homo sapien
gggaacccttactaatatatgctgt

SEQ ID NO: 1755252 - DNA, 25 bp, Homo sapien
tagaatgaactgattccctcacagc

SEQ ID NO: 1755253 - DNA, 25 bp, Homo sapien
ctagaatgaactgattccctcacag

SEQ ID NO: 1755254 - DNA, 25 bp, Homo sapien
tgtgcttgctgatattcgacaaggg

SEQ ID NO: 1755255 - DNA, 25 bp, Homo sapien
tattcgacaagggataagttgggat

SEQ ID NO: 1755256 - DNA, 25 bp, Homo sapien
caagggataagttgggattgatttc

SEQ ID NO: 1755257 - DNA, 25 bp, Homo sapien
tgctgatattcgacaagggataagt

SEQ ID NO: 1755258 - DNA, 25 bp, Homo sapien
actccatttcttcacattggttttg

SEQ ID NO: 1755259 - DNA, 25 bp, Homo sapien
atgtcaccaggaaatccatactcca

SEQ ID NO: 1755260 - DNA, 25 bp, Homo sapien
catactccatttcttcacattggtt

SEQ ID NO: 1755261 - DNA, 25 bp, Homo sapien
tccatttcttcacattggttttgtg

SEQ ID NO: 1755262 - DNA, 25 bp, Homo sapien
ttcagcatggtggtctaatttctca

SEQ ID NO: 1755263 - DNA, 25 bp, Homo sapien
gactatgacggcatttggaattcca

SEQ ID NO: 1755264 - DNA, 25 bp, Homo sapien
atttctcatgaatacttaaagggac

SEQ ID NO: 1755265 - DNA, 25 bp, Homo sapien
gaattccatacttacgtacttggca

SEQ ID NO: 1755266 - DNA, 25 bp, Homo sapien
tctgcatgttcaactaccatgctca

SEQ ID NO: 1755267 - DNA, 25 bp, Homo sapien
ttctccagtgtttacatattctctt

SEQ ID NO: 1755268 - DNA, 25 bp, Homo sapien
tttcttcaccaaattctccagtgtt

SEQ ID NO: 1755269 - DNA, 25 bp, Homo sapien
tctctttctgcatgttcaactacca

SEQ ID NO: 1755270 - DNA, 25 bp, Homo sapien
gctttgaacaatcagacataataca

SEQ ID NO: 1755271 - DNA, 25 bp, Homo sapien
tacaatactcagagccttcattgat

SEQ ID NO: 1755272 - DNA, 25 bp, Homo sapien
ttcagcattcctacaggtatgagaa

SEQ ID NO: 1755273 - DNA, 25 bp, Homo sapien
cctacaggtatgagaatgctttgaa

SEQ ID NO: 1755274 - DNA, 25 bp, Homo sapien
agttcaaaattgtggcagcatatct

SEQ ID NO: 1755275 - DNA, 25 bp, Homo sapien
aagttcaaaattgtggcagcatatc

SEQ ID NO: 1755276 - DNA, 25 bp, Homo sapien
gttcaaaattgtggcagcatatctc

SEQ ID NO: 1755277 - DNA, 25 bp, Homo sapien
tcaaaattgtggcagcatatctcat

SEQ ID NO: 1755278 - DNA, 25 bp, Homo sapien
ctcaaaatggattcactcaggatct

SEQ ID NO: 1755279 - DNA, 25 bp, Homo sapien
taatttctatgaactctcaaaatgg

SEQ ID NO: 1755280 - DNA, 25 bp, Homo sapien
cagctatagccgtaggtatggcatg

SEQ ID NO: 1755281 - DNA, 25 bp, Homo sapien
tgccagcagctatagccgtaggtat

SEQ ID NO: 1755282 - DNA, 25 bp, Homo sapien
tagtgatcagctggccctatgaact

SEQ ID NO: 1755283 - DNA, 25 bp, Homo sapien
ttagtgatcagctggccctatgaac

SEQ ID NO: 1755284 - DNA, 25 bp, Homo sapien
cttagttctgaaggattgttctcca

SEQ ID NO: 1755285 - DNA, 25 bp, Homo sapien
tgttctccatactgatgctcttgca

SEQ ID NO: 1755286 - DNA, 25 bp, Homo sapien
ttctgaaggattgttctccatactg

SEQ ID NO: 1755287 - DNA, 25 bp, Homo sapien
gttctccatactgatgctcttgcat

SEQ ID NO: 1755288 - DNA, 25 bp, Homo sapien
tcatgccaactctgttatctggatg

SEQ ID NO: 1755289 - DNA, 25 bp, Homo sapien
caactctgttatctggatgggtcca

SEQ ID NO: 1755290 - DNA, 25 bp, Homo sapien
tgccaactctgttatctggatgggt

SEQ ID NO: 1755291 - DNA, 25 bp, Homo sapien
tctgttatctggatgggtccaaaat

SEQ ID NO: 1755292 - DNA, 25 bp, Homo sapien
aaacatgtttaggtaagcagattca

SEQ ID NO: 1755293 - DNA, 25 bp, Homo sapien
acttaaggctcataaatggctttac

SEQ ID NO: 1755294 - DNA, 25 bp, Homo sapien
taacaacttcaatatacttaaggct

SEQ ID NO: 1755295 - DNA, 25 bp, Homo sapien
cagaaacatgtttaggtaagcagat

SEQ ID NO: 1755296 - DNA, 25 bp, Homo sapien
tcagtgaaatgagctatatcaacag

SEQ ID NO: 1755297 - DNA, 25 bp, Homo sapien
cagtgaaatgagctatatcaacaga

SEQ ID NO: 1755298 - DNA, 25 bp, Homo sapien
agtgaaatgagctatatcaacagaa

SEQ ID NO: 1755299 - DNA, 25 bp, Homo sapien
gtgaaatgagctatatcaacagaat

SEQ ID NO: 1755300 - DNA, 25 bp, Homo sapien
catccaggtatattgctgggcctag

SEQ ID NO: 1755301 - DNA, 25 bp, Homo sapien
tacgtggagcttccgtgtgcagcat

SEQ ID NO: 1755302 - DNA, 25 bp, Homo sapien
cagtgaactttgtcctacgtggagc

SEQ ID NO: 1755303 - DNA, 25 bp, Homo sapien
gcacttatttctgctacagccctaa

SEQ ID NO: 1755304 - DNA, 25 bp, Homo sapien
ggcccatgggttagttgcttcagat

SEQ ID NO: 1755305 - DNA, 25 bp, Homo sapien
aagggcccatgggttagttgcttca

SEQ ID NO: 1755306 - DNA, 25 bp, Homo sapien
cccatgggttagttgcttcagatgc

SEQ ID NO: 1755307 - DNA, 25 bp, Homo sapien
gggcccatgggttagttgcttcaga

SEQ ID NO: 1755308 - DNA, 25 bp, Homo sapien
ggctctccgggttgtactctgcttt

SEQ ID NO: 1755309 - DNA, 25 bp, Homo sapien
tggagcaaagtcctggtttaaggct

SEQ ID NO: 1755310 - DNA, 25 bp, Homo sapien
aaggctctccgggttgtactctgct

SEQ ID NO: 1755311 - DNA, 25 bp, Homo sapien
caaagtcctggtttaaggctctccg

SEQ ID NO: 1755312 - DNA, 25 bp, Homo sapien
gagaaaatccaggaaacatccctac

SEQ ID NO: 1755313 - DNA, 25 bp, Homo sapien
gcgttggtaatgagtgagaggtgtg

SEQ ID NO: 1755314 - DNA, 25 bp, Homo sapien
gtgtggagggatgatcatttatgat

SEQ ID NO: 1755315 - DNA, 25 bp, Homo sapien
tgcgttggtaatgagtgagaggtgt

SEQ ID NO: 1755316 - DNA, 25 bp, Homo sapien
ctgcgttggtaatgagtgagaggtg

SEQ ID NO: 1755317 - DNA, 25 bp, Homo sapien
ttgtgggagaagactgttcctcacc

SEQ ID NO: 1755318 - DNA, 25 bp, Homo sapien
tgtgggagaagactgttcctcacct

SEQ ID NO: 1755319 - DNA, 25 bp, Homo sapien
tgggagaagactgttcctcacctct

SEQ ID NO: 1755320 - DNA, 25 bp, Homo sapien
gtgggagaagactgttcctcacctc

SEQ ID NO: 1755321 - DNA, 25 bp, Homo sapien
gttctatgaggttcagagagtgagc

SEQ ID NO: 1755322 - DNA, 25 bp, Homo sapien
ttctcagttctatgaggttcagaga

SEQ ID NO: 1755323 - DNA, 25 bp, Homo sapien
tttataaggaatatagccattttca

SEQ ID NO: 1755324 - DNA, 25 bp, Homo sapien
tacttctcagttctatgaggttcag

SEQ ID NO: 1755325 - DNA, 25 bp, Homo sapien
taagagtaaggcaagtatgactgtc

SEQ ID NO: 1755326 - DNA, 25 bp, Homo sapien
tatggtgctcccaacttaaggacaa

SEQ ID NO: 1755327 - DNA, 25 bp, Homo sapien
cattcctatcagtggtgtgtgaggg

SEQ ID NO: 1755328 - DNA, 25 bp, Homo sapien
gtttaccaatttgagcacactgtca

SEQ ID NO: 1755329 - DNA, 25 bp, Homo sapien
ttgcctatgttttgataaggttgtt

SEQ ID NO: 1755330 - DNA, 25 bp, Homo sapien
ctttgcctatgttttgataaggttg

SEQ ID NO: 1755331 - DNA, 25 bp, Homo sapien
tcctttgcctatgttttgataaggt

SEQ ID NO: 1755332 - DNA, 25 bp, Homo sapien
cctttgcctatgttttgataaggtt

SEQ ID NO: 1755333 - DNA, 25 bp, Homo sapien
ctacacacaacaccaacaattacca

SEQ ID NO: 1755334 - DNA, 25 bp, Homo sapien
acaacaccaacaattaccattgcca

SEQ ID NO: 1755335 - DNA, 25 bp, Homo sapien
tacacacaacaccaacaattaccat

SEQ ID NO: 1755336 - DNA, 25 bp, Homo sapien
cacacaacaccaacaattaccattg

SEQ ID NO: 1755337 - DNA, 25 bp, Homo sapien
tccagctggttgaccatgtttccaa

SEQ ID NO: 1755338 - DNA, 25 bp, Homo sapien
gggaaacttagcaacataccacaaa

SEQ ID NO: 1755339 - DNA, 25 bp, Homo sapien
tttttgagaaattggccacttggtc

SEQ ID NO: 1755340 - DNA, 25 bp, Homo sapien
gacgtatgcacgtacattagggaaa

SEQ ID NO: 1755341 - DNA, 25 bp, Homo sapien
ggagctagtaatagggtttctagga

SEQ ID NO: 1755342 - DNA, 25 bp, Homo sapien
ctagtaatagggtttctaggatagg

SEQ ID NO: 1755343 - DNA, 25 bp, Homo sapien
tagggtttctaggataggtcccaca

SEQ ID NO: 1755344 - DNA, 25 bp, Homo sapien
tttctaggataggtcccacatccat

SEQ ID NO: 1755345 - DNA, 25 bp, Homo sapien
tacccaagctttgatttgacttcat

SEQ ID NO: 1755346 - DNA, 25 bp, Homo sapien
ggtgtgacctcagttttaggagata

SEQ ID NO: 1755347 - DNA, 25 bp, Homo sapien
gtggtgtgacctcagttttaggaga

SEQ ID NO: 1755348 - DNA, 25 bp, Homo sapien
actacccaagctttgatttgacttc

SEQ ID NO: 1755349 - DNA, 25 bp, Homo sapien
ctacaaaccaattgcatctgtcatc

SEQ ID NO: 1755350 - DNA, 25 bp, Homo sapien
tctgtcatcccctgcttgatccact

SEQ ID NO: 1755351 - DNA, 25 bp, Homo sapien
ctgcttgatccactgagtcccagag

SEQ ID NO: 1755352 - DNA, 25 bp, Homo sapien
aatacttgttggaacaaattcattt

SEQ ID NO: 1755353 - DNA, 25 bp, Homo sapien
gccaagagtatctttgtatgctcct

SEQ ID NO: 1755354 - DNA, 25 bp, Homo sapien
aacttcagccaagagtatctttgta

SEQ ID NO: 1755355 - DNA, 25 bp, Homo sapien
aagagtatctttgtatgctcctcac

SEQ ID NO: 1755356 - DNA, 25 bp, Homo sapien
ttcagccaagagtatctttgtatgc

SEQ ID NO: 1755357 - DNA, 25 bp, Homo sapien
tgtggatatcgagaaagtccagaga

SEQ ID NO: 1755358 - DNA, 25 bp, Homo sapien
caggattagtgctccgattcttagt

SEQ ID NO: 1755359 - DNA, 25 bp, Homo sapien
ctgtggatatcgagaaagtccagag

SEQ ID NO: 1755360 - DNA, 25 bp, Homo sapien
agcaaagagcaggattagtgctccg

SEQ ID NO: 1755361 - DNA, 25 bp, Homo sapien
gagatgcagtgctactctggcagac

SEQ ID NO: 1755362 - DNA, 25 bp, Homo sapien
ctgagatgcagtgctactctggcag

SEQ ID NO: 1755363 - DNA, 25 bp, Homo sapien
agatgcagtgctactctggcagaca

SEQ ID NO: 1755364 - DNA, 25 bp, Homo sapien
gatgcagtgctactctggcagacag

SEQ ID NO: 1755365 - DNA, 25 bp, Homo sapien
tttctcatggctatagggttgaata

SEQ ID NO: 1755366 - DNA, 25 bp, Homo sapien
gactccttagctgaagtgacaagga

SEQ ID NO: 1755367 - DNA, 25 bp, Homo sapien
tatagggttgaatatggagctcatc

SEQ ID NO: 1755368 - DNA, 25 bp, Homo sapien
tgcctgtggctctcgtggggttttc

SEQ ID NO: 1755369 - DNA, 25 bp, Homo sapien
ttagcacattgccagtagggttctc

SEQ ID NO: 1755370 - DNA, 25 bp, Homo sapien
acattgccagtagggttctccataa

SEQ ID NO: 1755371 - DNA, 25 bp, Homo sapien
cataaagcactccatcttttagcgt

SEQ ID NO: 1755372 - DNA, 25 bp, Homo sapien
tccataaagcactccatcttttagc

SEQ ID NO: 1755373 - DNA, 25 bp, Homo sapien
tcccctgtaactcatattcagttgt

SEQ ID NO: 1755374 - DNA, 25 bp, Homo sapien
tgcatcccctgtaactcatattcag

SEQ ID NO: 1755375 - DNA, 25 bp, Homo sapien
atttctcttgcatcccctgtaactc

SEQ ID NO: 1755376 - DNA, 25 bp, Homo sapien
tcttgcatcccctgtaactcatatt

SEQ ID NO: 1755377 - DNA, 25 bp, Homo sapien
tattcctcgaaagggtccagggtca

SEQ ID NO: 1755378 - DNA, 25 bp, Homo sapien
ttcttgggttgcacaagtagtgttc

SEQ ID NO: 1755379 - DNA, 25 bp, Homo sapien
caagtagtgttctggtattcctcga

SEQ ID NO: 1755380 - DNA, 25 bp, Homo sapien
catagtatcttggttaaggacattc

SEQ ID NO: 1755381 - DNA, 25 bp, Homo sapien
ttcaatatcaatcttccggtgctta

SEQ ID NO: 1755382 - DNA, 25 bp, Homo sapien
tgcttaaatcttccgttttctccta

SEQ ID NO: 1755383 - DNA, 25 bp, Homo sapien
tcttcattcagatccaataccacca

SEQ ID NO: 1755384 - DNA, 25 bp, Homo sapien
cgttttctcctaactttagctgtct

SEQ ID NO: 1755385 - DNA, 25 bp, Homo sapien
cctgaagaccttctttgtcgtcact

SEQ ID NO: 1755386 - DNA, 25 bp, Homo sapien
tccagactgtatcttcttcctgaag

SEQ ID NO: 1755387 - DNA, 25 bp, Homo sapien
gaagaccttctttgtcgtcactctc

SEQ ID NO: 1755388 - DNA, 25 bp, Homo sapien
atccagactgtatcttcttcctgaa

SEQ ID NO: 1755389 - DNA, 25 bp, Homo sapien
gtagtgggatcggaattataaacac

SEQ ID NO: 1755390 - DNA, 25 bp, Homo sapien
tgtgctgttccaagtagtgggatcg

SEQ ID NO: 1755391 - DNA, 25 bp, Homo sapien
tgtgcttgtgctgttccaagtagtg

SEQ ID NO: 1755392 - DNA, 25 bp, Homo sapien
gaattataaacactggcggcaagca

SEQ ID NO: 1755393 - DNA, 25 bp, Homo sapien
ccttagctccatcttgcattgtgtt

SEQ ID NO: 1755394 - DNA, 25 bp, Homo sapien
catttggagaatcagttggttgaaa

SEQ ID NO: 1755395 - DNA, 25 bp, Homo sapien
tctatgccctgattcacttctactg

SEQ ID NO: 1755396 - DNA, 25 bp, Homo sapien
tttgttttacagtctaagcacagag

SEQ ID NO: 1755397 - DNA, 25 bp, Homo sapien
tgaatagcttcacactttgaatggc

SEQ ID NO: 1755398 - DNA, 25 bp, Homo sapien
cttgctgccttttacaccatcatgg

SEQ ID NO: 1755399 - DNA, 25 bp, Homo sapien
gctgtgttccctaacctgctggctg

SEQ ID NO: 1755400 - DNA, 25 bp, Homo sapien
ctgaggatcccggagtgagccagca

SEQ ID NO: 1755401 - DNA, 25 bp, Homo sapien
gggccggaggtaacagatctcccta

SEQ ID NO: 1755402 - DNA, 25 bp, Homo sapien
taagggcatcacctgtaccgaggca

SEQ ID NO: 1755403 - DNA, 25 bp, Homo sapien
gacaaactctttaagcagcttgcca

SEQ ID NO: 1755404 - DNA, 25 bp, Homo sapien
agcactcaaatctgccttctctgac

SEQ ID NO: 1755405 - DNA, 25 bp, Homo sapien
tctgtccagaacatgcgaccctctg

SEQ ID NO: 1755406 - DNA, 25 bp, Homo sapien
cagcaggttcagcagaatctctgtc

SEQ ID NO: 1755407 - DNA, 25 bp, Homo sapien
acgaacgctggtggctctgtccaga

SEQ ID NO: 1755408 - DNA, 25 bp, Homo sapien
atggccttggagcagcacgaacgct

SEQ ID NO: 1755409 - DNA, 25 bp, Homo sapien
atttgtggattggtttctaaagtgt

SEQ ID NO: 1755410 - DNA, 25 bp, Homo sapien
agatgctagtaatatctccttcctt

SEQ ID NO: 1755411 - DNA, 25 bp, Homo sapien
gctttcatctcagtaggagggatat

SEQ ID NO: 1755412 - DNA, 25 bp, Homo sapien
aaagaataggacagatgctagtaat

SEQ ID NO: 1755413 - DNA, 25 bp, Homo sapien
tttcatctcagtaggagggatatag

SEQ ID NO: 1755414 - DNA, 25 bp, Homo sapien
caaaacatggagttatcagcctggc

SEQ ID NO: 1755415 - DNA, 25 bp, Homo sapien
tctactaggcaggaggtaatagtct

SEQ ID NO: 1755416 - DNA, 25 bp, Homo sapien
ggatgtccacagaaaaacattagtg

SEQ ID NO: 1755417 - DNA, 25 bp, Homo sapien
taggtgtgcagattcaaagaaagac

SEQ ID NO: 1755418 - DNA, 25 bp, Homo sapien
gataatgttcataatgggcctgcat

SEQ ID NO: 1755419 - DNA, 25 bp, Homo sapien
ccaatattccctttgagagataatg

SEQ ID NO: 1755420 - DNA, 25 bp, Homo sapien
attccctttgagagataatgttcat

SEQ ID NO: 1755421 - DNA, 25 bp, Homo sapien
ggttaccaatattccctttgagaga

SEQ ID NO: 1755422 - DNA, 25 bp, Homo sapien
ggttgatgataacattgtattgcag

SEQ ID NO: 1755423 - DNA, 25 bp, Homo sapien
tcttctggcttcagcaatgtatctg

SEQ ID NO: 1755424 - DNA, 25 bp, Homo sapien
caaagaatgagggttgatgataaca

SEQ ID NO: 1755425 - DNA, 25 bp, Homo sapien
cacttttcaccaggattccaataga

SEQ ID NO: 1755426 - DNA, 25 bp, Homo sapien
taggtactcctcaagatcagagaaa

SEQ ID NO: 1755427 - DNA, 25 bp, Homo sapien
cccagacagttggtggctaagttct

SEQ ID NO: 1755428 - DNA, 25 bp, Homo sapien
gctaagttctaggtactcctcaaga

SEQ ID NO: 1755429 - DNA, 25 bp, Homo sapien
cagttggtggctaagttctaggtac

SEQ ID NO: 1755430 - DNA, 25 bp, Homo sapien
tcagaacaactagcttcaaatcctg

SEQ ID NO: 1755431 - DNA, 25 bp, Homo sapien
gttgactcaggcaagaagctcaccc

SEQ ID NO: 1755432 - DNA, 25 bp, Homo sapien
ggacatatcgaatgtcaccatggac

SEQ ID NO: 1755433 - DNA, 25 bp, Homo sapien
gaaaaagaacactcatatcggcact

SEQ ID NO: 1755434 - DNA, 25 bp, Homo sapien
acatatgtctctgatgaaagaccat

SEQ ID NO: 1755435 - DNA, 25 bp, Homo sapien
gtacatatgtctctgatgaaagacc

SEQ ID NO: 1755436 - DNA, 25 bp, Homo sapien
atgtacatatgtctctgatgaaaga

SEQ ID NO: 1755437 - DNA, 25 bp, Homo sapien
cttttcaatgtacatatgtctctga

SEQ ID NO: 1755438 - DNA, 25 bp, Homo sapien
gcatcattacgtaaacttccatacc

SEQ ID NO: 1755439 - DNA, 25 bp, Homo sapien
tctattgccacaagctcccaagcat

SEQ ID NO: 1755440 - DNA, 25 bp, Homo sapien
gtgctccaggaatctttctattgcc

SEQ ID NO: 1755441 - DNA, 25 bp, Homo sapien
tccataatgttttcatggtgctcca

SEQ ID NO: 1755442 - DNA, 25 bp, Homo sapien
tggaaagttcactgttgactccctg

SEQ ID NO: 1755443 - DNA, 25 bp, Homo sapien
caacaaccagcttgggtatagagct

SEQ ID NO: 1755444 - DNA, 25 bp, Homo sapien
ggttagagactaccaacaggacaac

SEQ ID NO: 1755445 - DNA, 25 bp, Homo sapien
tgaatggcacatctaaccaactgaa

SEQ ID NO: 1755446 - DNA, 25 bp, Homo sapien
ctccaggtgaaaagtagcaccaaag

SEQ ID NO: 1755447 - DNA, 25 bp, Homo sapien
tccctcttctgaaatggtcaggtac

SEQ ID NO: 1755448 - DNA, 25 bp, Homo sapien
ctccctcttctgaaatggtcaggta

SEQ ID NO: 1755449 - DNA, 25 bp, Homo sapien
gtccccatatacacttatgacaaga

SEQ ID NO: 1755450 - DNA, 25 bp, Homo sapien
ccaacgtccccatatacacttatga

SEQ ID NO: 1755451 - DNA, 25 bp, Homo sapien
aacgtccccatatacacttatgaca

SEQ ID NO: 1755452 - DNA, 25 bp, Homo sapien
atccaacgtccccatatacacttat

SEQ ID NO: 1755453 - DNA, 25 bp, Homo sapien
ctgaacaggctgtggcaatgcaccc

SEQ ID NO: 1755454 - DNA, 25 bp, Homo sapien
tgaacaggctgtggcaatgcaccca

SEQ ID NO: 1755455 - DNA, 25 bp, Homo sapien
cccagtacctgctaggtgaggcctt

SEQ ID NO: 1755456 - DNA, 25 bp, Homo sapien
ctttcccagtacctgctaggtgagg

SEQ ID NO: 1755457 - DNA, 25 bp, Homo sapien
tcccagtacctgctaggtgaggcct

SEQ ID NO: 1755458 - DNA, 25 bp, Homo sapien
cacctttcccagtacctgctaggtg

SEQ ID NO: 1755459 - DNA, 25 bp, Homo sapien
gaaattctagtgaaacacccatagg

SEQ ID NO: 1755460 - DNA, 25 bp, Homo sapien
ctgccaaggaatacattaaagaatg

SEQ ID NO: 1755461 - DNA, 25 bp, Homo sapien
ggaattttttcttgcgataaatgac

SEQ ID NO: 1755462 - DNA, 25 bp, Homo sapien
aacaaaaggagtgagctgtaaacgc

SEQ ID NO: 1755463 - DNA, 25 bp, Homo sapien
tcaaatccataatcagtaataaagc

SEQ ID NO: 1755464 - DNA, 25 bp, Homo sapien
aatgaagtgaatttcaggcacggaa

SEQ ID NO: 1755465 - DNA, 25 bp, Homo sapien
tttcatgtgcaactttccatcaatg

SEQ ID NO: 1755466 - DNA, 25 bp, Homo sapien
catgattttgtttagacaggagtga

SEQ ID NO: 1755467 - DNA, 25 bp, Homo sapien
gagaggtagttataagctttcaaat

SEQ ID NO: 1755468 - DNA, 25 bp, Homo sapien
ctgaaagaaaatcgctgctaagatg

SEQ ID NO: 1755469 - DNA, 25 bp, Homo sapien
gatctttgcggtacttttctattga

SEQ ID NO: 1755470 - DNA, 25 bp, Homo sapien
ctaagatgattttgcgtaatgatcc

SEQ ID NO: 1755471 - DNA, 25 bp, Homo sapien
taatgatcctagatctttgcggtac

SEQ ID NO: 1755472 - DNA, 25 bp, Homo sapien
tgtaaaggctgatttccacggacca

SEQ ID NO: 1755473 - DNA, 25 bp, Homo sapien
ttgtaaaggctgatttccacggacc

SEQ ID NO: 1755474 - DNA, 25 bp, Homo sapien
gtaaaggctgatttccacggaccat

SEQ ID NO: 1755475 - DNA, 25 bp, Homo sapien
attgtaaaggctgatttccacggac

SEQ ID NO: 1755476 - DNA, 25 bp, Homo sapien
ttcctgagtggtctgatcccttccc

SEQ ID NO: 1755477 - DNA, 25 bp, Homo sapien
gcatagcagattgggcaggttgcca

SEQ ID NO: 1755478 - DNA, 25 bp, Homo sapien
tgttgcgtactccaaatctcatgaa

SEQ ID NO: 1755479 - DNA, 25 bp, Homo sapien
cctactcctgtgttgcgtactccaa

SEQ ID NO: 1755480 - DNA, 25 bp, Homo sapien
attgactgccaagaaaagttggcca

SEQ ID NO: 1755481 - DNA, 25 bp, Homo sapien
gttggccattttcaattaaagccat

SEQ ID NO: 1755482 - DNA, 25 bp, Homo sapien
tgccaagaaaagttggccattttca

SEQ ID NO: 1755483 - DNA, 25 bp, Homo sapien
tgaattgactgccaagaaaagttgg

SEQ ID NO: 1755484 - DNA, 25 bp, Homo sapien
tgtgaccaacaatacctcttcttct

SEQ ID NO: 1755485 - DNA, 25 bp, Homo sapien
tacgccacgctgctccatttgtgga

SEQ ID NO: 1755486 - DNA, 25 bp, Homo sapien
tctcctttctcacttacgccacgct

SEQ ID NO: 1755487 - DNA, 25 bp, Homo sapien
cagaattcagcagcaaggtattatt

SEQ ID NO: 1755488 - DNA, 25 bp, Homo sapien
tgagaacaccgcagagcgacaatga

SEQ ID NO: 1755489 - DNA, 25 bp, Homo sapien
cctttctgagaacaccgcagagcga

SEQ ID NO: 1755490 - DNA, 25 bp, Homo sapien
gagcgacaatgagagaactgaactt

SEQ ID NO: 1755491 - DNA, 25 bp, Homo sapien
accgcagagcgacaatgagagaact

SEQ ID NO: 1755492 - DNA, 25 bp, Homo sapien
gaattcttacggtgtctgagtgctc

SEQ ID NO: 1755493 - DNA, 25 bp, Homo sapien
tcagcccacgaggttaacctgtcca

SEQ ID NO: 1755494 - DNA, 25 bp, Homo sapien
tcttacggtgtctgagtgctctgtg

SEQ ID NO: 1755495 - DNA, 25 bp, Homo sapien
caggcttatcgtacagaattcttac

SEQ ID NO: 1755496 - DNA, 25 bp, Homo sapien
cctgagcatagcctgacttctccat

SEQ ID NO: 1755497 - DNA, 25 bp, Homo sapien
tgtccatttggccactccaggctga

SEQ ID NO: 1755498 - DNA, 25 bp, Homo sapien
ttggccactccaggctgacaagatg

SEQ ID NO: 1755499 - DNA, 25 bp, Homo sapien
ccaggctgacaagatggcaagttgc

SEQ ID NO: 1755500 - DNA, 25 bp, Homo sapien
tgtaaagtgtccatttggccactcc

SEQ ID NO: 1755501 - DNA, 25 bp, Homo sapien
tttatgcagtaaggttctgaagcag

SEQ ID NO: 1755502 - DNA, 25 bp, Homo sapien
tgtatcattaggagtttcaccagaa

SEQ ID NO: 1755503 - DNA, 25 bp, Homo sapien
tccagtcttatgtatcattaggagt

SEQ ID NO: 1755504 - DNA, 25 bp, Homo sapien
gtttttatgcagtaaggttctgaag

SEQ ID NO: 1755505 - DNA, 25 bp, Homo sapien
tccctgaggcttgttaagtatttaa

SEQ ID NO: 1755506 - DNA, 25 bp, Homo sapien
tatgggcaatggaatgggatgtctt

SEQ ID NO: 1755507 - DNA, 25 bp, Homo sapien
gacaaaaccatgcatctcctttttc

SEQ ID NO: 1755508 - DNA, 25 bp, Homo sapien
tttccaggcgccctgtgggtcatgc

SEQ ID NO: 1755509 - DNA, 25 bp, Homo sapien
gatattttatgaatagccaacagtt

SEQ ID NO: 1755510 - DNA, 25 bp, Homo sapien
tcacttctgttggaaataaacagca

SEQ ID NO: 1755511 - DNA, 25 bp, Homo sapien
gcatgagcagaaggctgccaagtta

SEQ ID NO: 1755512 - DNA, 25 bp, Homo sapien
gaagattctttgatgacaacaagta

SEQ ID NO: 1755513 - DNA, 25 bp, Homo sapien
tgaaagattagaatgctttttgcct

SEQ ID NO: 1755514 - DNA, 25 bp, Homo sapien
atgaaagattagaatgctttttgcc

SEQ ID NO: 1755515 - DNA, 25 bp, Homo sapien
gatgaaagattagaatgctttttgc

SEQ ID NO: 1755516 - DNA, 25 bp, Homo sapien
aaagctgtagtgaatctgaagtgta

SEQ ID NO: 1755517 - DNA, 25 bp, Homo sapien
gaatctgaagtgtagatataaccat

SEQ ID NO: 1755518 - DNA, 25 bp, Homo sapien
ctctggagaaagctgtagtgaatct

SEQ ID NO: 1755519 - DNA, 25 bp, Homo sapien
tggagaaagctgtagtgaatctgaa

SEQ ID NO: 1755520 - DNA, 25 bp, Homo sapien
agtcagatctgtccactgcttcctg

SEQ ID NO: 1755521 - DNA, 25 bp, Homo sapien
cgctgcctcacatcaaacttggctt

SEQ ID NO: 1755522 - DNA, 25 bp, Homo sapien
tttgagcgctgcctcacatcaaact

SEQ ID NO: 1755523 - DNA, 25 bp, Homo sapien
tttcctagtccttaagccagtccac

SEQ ID NO: 1755524 - DNA, 25 bp, Homo sapien
tgtttgacatgatggaatcccttac

SEQ ID NO: 1755525 - DNA, 25 bp, Homo sapien
tcgatttggaccagcacgctgcata

SEQ ID NO: 1755526 - DNA, 25 bp, Homo sapien
ctgtttgacatgatggaatccctta

SEQ ID NO: 1755527 - DNA, 25 bp, Homo sapien
catgtcgatttggaccagcacgctg

SEQ ID NO: 1755528 - DNA, 25 bp, Homo sapien
ccagcagagctttgtccatatccga

SEQ ID NO: 1755529 - DNA, 25 bp, Homo sapien
ttcagggactgttcagtgaaagcag

SEQ ID NO: 1755530 - DNA, 25 bp, Homo sapien
tatccgacaaatgcttgctgtcaga

SEQ ID NO: 1755531 - DNA, 25 bp, Homo sapien
tcagtgaaagcaggctccagcagag

SEQ ID NO: 1755532 - DNA, 25 bp, Homo sapien
tagtgctagtgtggttacatgacat

SEQ ID NO: 1755533 - DNA, 25 bp, Homo sapien
tgtcttctttagtgctagtgtggtt

SEQ ID NO: 1755534 - DNA, 25 bp, Homo sapien
caacctgcaaaagtgtcatccaggt

SEQ ID NO: 1755535 - DNA, 25 bp, Homo sapien
cctgcaaaagtgtcatccaggtctt

SEQ ID NO: 1755536 - DNA, 25 bp, Homo sapien
agtaggtgttcaccttagtggctgt

SEQ ID NO: 1755537 - DNA, 25 bp, Homo sapien
tcaccttagtggctgttgaggtcat

SEQ ID NO: 1755538 - DNA, 25 bp, Homo sapien
ctgggctgacggtgagtaggtgttc

SEQ ID NO: 1755539 - DNA, 25 bp, Homo sapien
tgttcaccttagtggctgttgaggt

SEQ ID NO: 1755540 - DNA, 25 bp, Homo sapien
gataaccatctgaactgacttctga

SEQ ID NO: 1755541 - DNA, 25 bp, Homo sapien
gaaagcccagtggagttaagtgtgc

SEQ ID NO: 1755542 - DNA, 25 bp, Homo sapien
ggatttgacctcgaatagcactaca

SEQ ID NO: 1755543 - DNA, 25 bp, Homo sapien
tgacttctgaagcttgtagttctgg

SEQ ID NO: 1755544 - DNA, 25 bp, Homo sapien
tggtggtcttcgttgccagccttgg

SEQ ID NO: 1755545 - DNA, 25 bp, Homo sapien
gcattgtccgatcgcctagggctta

SEQ ID NO: 1755546 - DNA, 25 bp, Homo sapien
cctttaacctaggtgtgagcgctgg

SEQ ID NO: 1755547 - DNA, 25 bp, Homo sapien
taggtgtaaagtgccggcttctcca

SEQ ID NO: 1755548 - DNA, 25 bp, Homo sapien
tgctccccataggttgaggactcct

SEQ ID NO: 1755549 - DNA, 25 bp, Homo sapien
gctccccataggttgaggactcctc

SEQ ID NO: 1755550 - DNA, 25 bp, Homo sapien
gggtgctccccataggttgaggact

SEQ ID NO: 1755551 - DNA, 25 bp, Homo sapien
ctgggtgctccccataggttgagga

SEQ ID NO: 1755552 - DNA, 25 bp, Homo sapien
tccaatgacggcatccacagatgag

SEQ ID NO: 1755553 - DNA, 25 bp, Homo sapien
gaatgcccttggagcctatactgct

SEQ ID NO: 1755554 - DNA, 25 bp, Homo sapien
aaagtgcaattaccaacaatgaata

SEQ ID NO: 1755555 - DNA, 25 bp, Homo sapien
catttttggcaggtccaatgacggc

SEQ ID NO: 1755556 - DNA, 25 bp, Homo sapien
ccaacctgagcttgtagacatcagc

SEQ ID NO: 1755557 - DNA, 25 bp, Homo sapien
cccaacctgagcttgtagacatcag

SEQ ID NO: 1755558 - DNA, 25 bp, Homo sapien
ccccaacctgagcttgtagacatca

SEQ ID NO: 1755559 - DNA, 25 bp, Homo sapien
tagctgtctgggcacttttataatg

SEQ ID NO: 1755560 - DNA, 25 bp, Homo sapien
attggcagcatgtttccctttgtac

SEQ ID NO: 1755561 - DNA, 25 bp, Homo sapien
ctttgtacacccaaatatggattca

SEQ ID NO: 1755562 - DNA, 25 bp, Homo sapien
caatagtgggctctactgcattttt

SEQ ID NO: 1755563 - DNA, 25 bp, Homo sapien
caaatcgatgatatttgcgatgaca

SEQ ID NO: 1755564 - DNA, 25 bp, Homo sapien
gaaatcaaatcgatgatatttgcga

SEQ ID NO: 1755565 - DNA, 25 bp, Homo sapien
tgatatttgcgatgacaaaatgcag

SEQ ID NO: 1755566 - DNA, 25 bp, Homo sapien
gagactttcatgaaatcaaatcgat

SEQ ID NO: 1755567 - DNA, 25 bp, Homo sapien
actcctgaaagtgatggctgagcct

SEQ ID NO: 1755568 - DNA, 25 bp, Homo sapien
gatggctgagcctgataaatgaact

SEQ ID NO: 1755569 - DNA, 25 bp, Homo sapien
ggctgagcctgataaatgaactcac

SEQ ID NO: 1755570 - DNA, 25 bp, Homo sapien
gactcctgaaagtgatggctgagcc

SEQ ID NO: 1755571 - DNA, 25 bp, Homo sapien
cggtttactaagggcggggctgcag

SEQ ID NO: 1755572 - DNA, 25 bp, Homo sapien
acactggtaatcagctgtttggagc

SEQ ID NO: 1755573 - DNA, 25 bp, Homo sapien
aacagcatgttaatgggcttccagg

SEQ ID NO: 1755574 - DNA, 25 bp, Homo sapien
ttctggtgaggaaatccacagctgg

SEQ ID NO: 1755575 - DNA, 25 bp, Homo sapien
tcccgagagtgcgagcaaaattttg

SEQ ID NO: 1755576 - DNA, 25 bp, Homo sapien
ggctatgttccagaagtttattttg

SEQ ID NO: 1755577 - DNA, 25 bp, Homo sapien
atgttccagaagtttattttggatc

SEQ ID NO: 1755578 - DNA, 25 bp, Homo sapien
gttccagaagtttattttggatcag

SEQ ID NO: 1755579 - DNA, 25 bp, Homo sapien
ctatgttccagaagtttattttgga

SEQ ID NO: 1755580 - DNA, 25 bp, Homo sapien
cctgcataacctccctttgctttat

SEQ ID NO: 1755581 - DNA, 25 bp, Homo sapien
cctcctgcataacctccctttgctt

SEQ ID NO: 1755582 - DNA, 25 bp, Homo sapien
tcctgcataacctccctttgcttta

SEQ ID NO: 1755583 - DNA, 25 bp, Homo sapien
gcctcctgcataacctccctttgct

SEQ ID NO: 1755584 - DNA, 25 bp, Homo sapien
tgatgagtgatgagcgcacacgtga

SEQ ID NO: 1755585 - DNA, 25 bp, Homo sapien
cacacgtgatgatgggtgattttcc

SEQ ID NO: 1755586 - DNA, 25 bp, Homo sapien
gagtgctgaggacacatgtgatgat

SEQ ID NO: 1755587 - DNA, 25 bp, Homo sapien
cccctttagaggatgtaaatgcaga

SEQ ID NO: 1755588 - DNA, 25 bp, Homo sapien
tgacaccaagtaggattggatcccc

SEQ ID NO: 1755589 - DNA, 25 bp, Homo sapien
agtctggaacatttcggttctgttt

SEQ ID NO: 1755590 - DNA, 25 bp, Homo sapien
tgcacctctcttaaattgtctctct

SEQ ID NO: 1755591 - DNA, 25 bp, Homo sapien
ggagaccgaacactttcagctggca

SEQ ID NO: 1755592 - DNA, 25 bp, Homo sapien
cggtgttaagtacggcatcaaacca

SEQ ID NO: 1755593 - DNA, 25 bp, Homo sapien
gtgcccggtgttaagtacggcatca

SEQ ID NO: 1755594 - DNA, 25 bp, Homo sapien
aagggacatcgagtgcccggtgtta

SEQ ID NO: 1755595 - DNA, 25 bp, Homo sapien
atcgagtgcccggtgttaagtacgg

SEQ ID NO: 1755596 - DNA, 25 bp, Homo sapien
ttaaaatgcgttcataaccttgtac

SEQ ID NO: 1755597 - DNA, 25 bp, Homo sapien
taaccttgtactctgctttaatgac

SEQ ID NO: 1755598 - DNA, 25 bp, Homo sapien
aaccttgtactctgctttaatgaca

SEQ ID NO: 1755599 - DNA, 25 bp, Homo sapien
tgcgttcataaccttgtactctgct

SEQ ID NO: 1755600 - DNA, 25 bp, Homo sapien
tctgatctttctttgatgcctccaa

SEQ ID NO: 1755601 - DNA, 25 bp, Homo sapien
tcttaaaatatgctctgagatccat

SEQ ID NO: 1755602 - DNA, 25 bp, Homo sapien
ctccaatctcttggttttagaattc

SEQ ID NO: 1755603 - DNA, 25 bp, Homo sapien
ttcttaaaatatgctctgagatcca

SEQ ID NO: 1755604 - DNA, 25 bp, Homo sapien
ttacaaggttgttagctaatgctgc

SEQ ID NO: 1755605 - DNA, 25 bp, Homo sapien
tgtgaggaaagaccatactataaca

SEQ ID NO: 1755606 - DNA, 25 bp, Homo sapien
ctggtattttgttgtgaggaaagac

SEQ ID NO: 1755607 - DNA, 25 bp, Homo sapien
gaccatactataacactcattctac

SEQ ID NO: 1755608 - DNA, 25 bp, Homo sapien
tagtgggtgttgagcactgaataag

SEQ ID NO: 1755609 - DNA, 25 bp, Homo sapien
ctctctctgaagttagtgggtgttg

SEQ ID NO: 1755610 - DNA, 25 bp, Homo sapien
tccaggctagaagctctctctgaag

SEQ ID NO: 1755611 - DNA, 25 bp, Homo sapien
tgcctggctgatccaggctagaagc

SEQ ID NO: 1755612 - DNA, 25 bp, Homo sapien
ccttttatggcagtgaattccatca

SEQ ID NO: 1755613 - DNA, 25 bp, Homo sapien
tgtgtgtgaagctaaaggcttttgt

SEQ ID NO: 1755614 - DNA, 25 bp, Homo sapien
ctaaaggcttttgtggtggggtcag

SEQ ID NO: 1755615 - DNA, 25 bp, Homo sapien
acatgtgtgtgaagctaaaggcttt

SEQ ID NO: 1755616 - DNA, 25 bp, Homo sapien
tctccggcaaagtgtggtgtaccat

SEQ ID NO: 1755617 - DNA, 25 bp, Homo sapien
tgccagacaatataaaccagtcaac

SEQ ID NO: 1755618 - DNA, 25 bp, Homo sapien
agtcaacactaatccatctccggca

SEQ ID NO: 1755619 - DNA, 25 bp, Homo sapien
tgtgcattaactttcaaatttccct

SEQ ID NO: 1755620 - DNA, 25 bp, Homo sapien
tctgcattaattccccagatctcat

SEQ ID NO: 1755621 - DNA, 25 bp, Homo sapien
gtcagcaccgtgcagctcatttcca

SEQ ID NO: 1755622 - DNA, 25 bp, Homo sapien
ctggtcagcaccgtgcagctcattt

SEQ ID NO: 1755623 - DNA, 25 bp, Homo sapien
attaattccccagatctcattcctg

SEQ ID NO: 1755624 - DNA, 25 bp, Homo sapien
tgtatgactgcattgggcctccttc

SEQ ID NO: 1755625 - DNA, 25 bp, Homo sapien
gttgtatgactgcattgggcctcct

SEQ ID NO: 1755626 - DNA, 25 bp, Homo sapien
tgaggttgtatgactgcattgggcc

SEQ ID NO: 1755627 - DNA, 25 bp, Homo sapien
aggttgtatgactgcattgggcctc

SEQ ID NO: 1755628 - DNA, 25 bp, Homo sapien
atttcgtccaccatttccatcttca

SEQ ID NO: 1755629 - DNA, 25 bp, Homo sapien
gattcactcaaatttcgtccaccat

SEQ ID NO: 1755630 - DNA, 25 bp, Homo sapien
gagattcactcaaatttcgtccacc

SEQ ID NO: 1755631 - DNA, 25 bp, Homo sapien
actgagattcactcaaatttcgtcc

SEQ ID NO: 1755632 - DNA, 25 bp, Homo sapien
aattggagtagaaatcggctgcagc

SEQ ID NO: 1755633 - DNA, 25 bp, Homo sapien
gcagctttgtcccatgtccagaatt

SEQ ID NO: 1755634 - DNA, 25 bp, Homo sapien
gatcaggactgctcttcccatggag

SEQ ID NO: 1755635 - DNA, 25 bp, Homo sapien
tacagggtagtgctctgctttcgct

SEQ ID NO: 1755636 - DNA, 25 bp, Homo sapien
tctttctcagttgcagtatgtcgga

SEQ ID NO: 1755637 - DNA, 25 bp, Homo sapien
tctgtttatattcacaagtcccctg

SEQ ID NO: 1755638 - DNA, 25 bp, Homo sapien
gaccttgactgcatgggcaaagcca

SEQ ID NO: 1755639 - DNA, 25 bp, Homo sapien
cagtatgtcggagggcattgttttc

SEQ ID NO: 1755640 - DNA, 25 bp, Homo sapien
gagtaatggagctgattctgaaaca

SEQ ID NO: 1755641 - DNA, 25 bp, Homo sapien
gtaatggtgcagagacatcccttga

SEQ ID NO: 1755642 - DNA, 25 bp, Homo sapien
gagacatcccttgagtaatggagct

SEQ ID NO: 1755643 - DNA, 25 bp, Homo sapien
aacagaactgattctccagcaaaac

SEQ ID NO: 1755644 - DNA, 25 bp, Homo sapien
gtgatttgtgtgataggattatttt

SEQ ID NO: 1755645 - DNA, 25 bp, Homo sapien
cagtgacactatttgtggcagtgat

SEQ ID NO: 1755646 - DNA, 25 bp, Homo sapien
ctccagtgacactatttgtggcagt

SEQ ID NO: 1755647 - DNA, 25 bp, Homo sapien
ccagtgacactatttgtggcagtga

SEQ ID NO: 1755648 - DNA, 25 bp, Homo sapien
gatgtgttggtcctgcagagtgata

SEQ ID NO: 1755649 - DNA, 25 bp, Homo sapien
ttaattggtgggatcctcgtgggag

SEQ ID NO: 1755650 - DNA, 25 bp, Homo sapien
tcttcttgaaggactatggcctgac

SEQ ID NO: 1755651 - DNA, 25 bp, Homo sapien
gagtgatattcctctcgccatcttc

SEQ ID NO: 1755652 - DNA, 25 bp, Homo sapien
gttgcttggtttcctcaggatttta

SEQ ID NO: 1755653 - DNA, 25 bp, Homo sapien
ccctctgctggtgaagttgcctggc

SEQ ID NO: 1755654 - DNA, 25 bp, Homo sapien
aagttgcctggctttctcgttgctt

SEQ ID NO: 1755655 - DNA, 25 bp, Homo sapien
ggtttcctcaggattttatctccat

SEQ ID NO: 1755656 - DNA, 25 bp, Homo sapien
agtgtccatatggaccatcttgcct

SEQ ID NO: 1755657 - DNA, 25 bp, Homo sapien
cactgcagtgtccatatggaccatc

SEQ ID NO: 1755658 - DNA, 25 bp, Homo sapien
tgcagtgtccatatggaccatcttg

SEQ ID NO: 1755659 - DNA, 25 bp, Homo sapien
cagtgtccatatggaccatcttgcc

SEQ ID NO: 1755660 - DNA, 25 bp, Homo sapien
cattgccgatcctcacgtgttcagc

SEQ ID NO: 1755661 - DNA, 25 bp, Homo sapien
tcacgtgttcagcttcccattccag

SEQ ID NO: 1755662 - DNA, 25 bp, Homo sapien
tgggaattccattgccgatcctcac

SEQ ID NO: 1755663 - DNA, 25 bp, Homo sapien
agcttcccattccagcaatgacttc

SEQ ID NO: 1755664 - DNA, 25 bp, Homo sapien
tataccgtttgatgagcactctgtg

SEQ ID NO: 1755665 - DNA, 25 bp, Homo sapien
tctgtggagatttgcgagtaaagtc

SEQ ID NO: 1755666 - DNA, 25 bp, Homo sapien
tgattacaaccagactcccagcatg

SEQ ID NO: 1755667 - DNA, 25 bp, Homo sapien
gaactgtgtatgtttgcacaccaaa

SEQ ID NO: 1755668 - DNA, 25 bp, Homo sapien
cttagaagctgcctttatggcaatt

SEQ ID NO: 1755669 - DNA, 25 bp, Homo sapien
ctgggtcccaaaatgcctgcagctc

SEQ ID NO: 1755670 - DNA, 25 bp, Homo sapien
agcctggtctttctgacctataatc

SEQ ID NO: 1755671 - DNA, 25 bp, Homo sapien
aagctgcctttatggcaatttgtgc

SEQ ID NO: 1755672 - DNA, 25 bp, Homo sapien
ttctcagaatattcttgactgttca

SEQ ID NO: 1755673 - DNA, 25 bp, Homo sapien
ttttctcagaatattcttgactgtt

SEQ ID NO: 1755674 - DNA, 25 bp, Homo sapien
tctcagaatattcttgactgttcat

SEQ ID NO: 1755675 - DNA, 25 bp, Homo sapien
tttctcagaatattcttgactgttc

SEQ ID NO: 1755676 - DNA, 25 bp, Homo sapien
gagttctctgctccatggccagctg

SEQ ID NO: 1755677 - DNA, 25 bp, Homo sapien
gggctgtgtccctttgtgtttaaca

SEQ ID NO: 1755678 - DNA, 25 bp, Homo sapien
ctggaaaaggcttgtcagagttttc

SEQ ID NO: 1755679 - DNA, 25 bp, Homo sapien
cttgtcagagttttctgcctttcac

SEQ ID NO: 1755680 - DNA, 25 bp, Homo sapien
ggatgttctgaatttgatcactaga

SEQ ID NO: 1755681 - DNA, 25 bp, Homo sapien
gctggaggcatttagagggcttttc

SEQ ID NO: 1755682 - DNA, 25 bp, Homo sapien
cagctggaggcatttagagggcttt

SEQ ID NO: 1755683 - DNA, 25 bp, Homo sapien
tttgatcactagaagtgacaacttt

SEQ ID NO: 1755684 - DNA, 25 bp, Homo sapien
ttcaacacggttcttgatgtcatca

SEQ ID NO: 1755685 - DNA, 25 bp, Homo sapien
tcaaggacgtaactgctcccttctt

SEQ ID NO: 1755686 - DNA, 25 bp, Homo sapien
tttgaaacggatgtcaaggacgtaa

SEQ ID NO: 1755687 - DNA, 25 bp, Homo sapien
cccttcttcaacacggttcttgatg

SEQ ID NO: 1755688 - DNA, 25 bp, Homo sapien
gccagattctttgggtgctgccctg

SEQ ID NO: 1755689 - DNA, 25 bp, Homo sapien
tccacttcgtttggtgcttgagaaa

SEQ ID NO: 1755690 - DNA, 25 bp, Homo sapien
tgtgagctctcaatacatggaaagc

SEQ ID NO: 1755691 - DNA, 25 bp, Homo sapien
tagtgaaaatgaacagcctggtgga

SEQ ID NO: 1755692 - DNA, 25 bp, Homo sapien
ggcatatgtgcatgagggccctcac

SEQ ID NO: 1755693 - DNA, 25 bp, Homo sapien
taggcttgtgtatgtgaggctctct

SEQ ID NO: 1755694 - DNA, 25 bp, Homo sapien
ttgtgacacatatagcaagctgcaa

SEQ ID NO: 1755695 - DNA, 25 bp, Homo sapien
gggcttatttcaggagtcgaagtca

SEQ ID NO: 1755696 - DNA, 25 bp, Homo sapien
accacaccagaccagttcgccattt

SEQ ID NO: 1755697 - DNA, 25 bp, Homo sapien
agaccagttcgccattttcttagcc

SEQ ID NO: 1755698 - DNA, 25 bp, Homo sapien
acaccagaccagttcgccattttct

SEQ ID NO: 1755699 - DNA, 25 bp, Homo sapien
ccagttcgccattttcttagcccag

SEQ ID NO: 1755700 - DNA, 25 bp, Homo sapien
gactgatgatactaacagttgatga

SEQ ID NO: 1755701 - DNA, 25 bp, Homo sapien
cctaatatcacttggatgttggtgg

SEQ ID NO: 1755702 - DNA, 25 bp, Homo sapien
caagttcaagtgatatgtgcctaat

SEQ ID NO: 1755703 - DNA, 25 bp, Homo sapien
aatttatatatgaaagcttacgcta

SEQ ID NO: 1755704 - DNA, 25 bp, Homo sapien
ccttttatcagcacagggtatagtc

SEQ ID NO: 1755705 - DNA, 25 bp, Homo sapien
attttgtgcttctatccttgtggga

SEQ ID NO: 1755706 - DNA, 25 bp, Homo sapien
ccttgtgggacagtctgattataga

SEQ ID NO: 1755707 - DNA, 25 bp, Homo sapien
tcttctagaagggtattgatgtcag

SEQ ID NO: 1755708 - DNA, 25 bp, Homo sapien
aaagtagtgtttaatcattgtagaa

SEQ ID NO: 1755709 - DNA, 25 bp, Homo sapien
tattcagagatacatacaattaaca

SEQ ID NO: 1755710 - DNA, 25 bp, Homo sapien
gttggactcacactataaatctaat

SEQ ID NO: 1755711 - DNA, 25 bp, Homo sapien
tccttaatgttaagtgatcccacta

SEQ ID NO: 1755712 - DNA, 25 bp, Homo sapien
tatacgtgctgctgagacaagcact

SEQ ID NO: 1755713 - DNA, 25 bp, Homo sapien
tgtatggttccaatattagtatacg

SEQ ID NO: 1755714 - DNA, 25 bp, Homo sapien
tgtgcaggggccatccagtcttctc

SEQ ID NO: 1755715 - DNA, 25 bp, Homo sapien
tagtatacgtgctgctgagacaagc

SEQ ID NO: 1755716 - DNA, 25 bp, Homo sapien
tggccctgatagtttgctagttact

SEQ ID NO: 1755717 - DNA, 25 bp, Homo sapien
tggttcctaaaaaatcgagagcact

SEQ ID NO: 1755718 - DNA, 25 bp, Homo sapien
tgggatccagtaagtttgttcgacc

SEQ ID NO: 1755719 - DNA, 25 bp, Homo sapien
cttcagctgatagtataaattgggc

SEQ ID NO: 1755720 - DNA, 25 bp, Homo sapien
gaaactgtacattgtcatccatggg

SEQ ID NO: 1755721 - DNA, 25 bp, Homo sapien
tgtctgaggtagcaattgatcccta

SEQ ID NO: 1755722 - DNA, 25 bp, Homo sapien
gctgtgatgttagactggaaatacc

SEQ ID NO: 1755723 - DNA, 25 bp, Homo sapien
aatcagatctcctgttcattgtggg

SEQ ID NO: 1755724 - DNA, 25 bp, Homo sapien
gagtataggtctagaagcccaggta

SEQ ID NO: 1755725 - DNA, 25 bp, Homo sapien
tggaagcaaagtagagaaatcaccc

SEQ ID NO: 1755726 - DNA, 25 bp, Homo sapien
gatcgaccaggtacctcatttggaa

SEQ ID NO: 1755727 - DNA, 25 bp, Homo sapien
tatggaacaagcctactgtcaggaa

SEQ ID NO: 1755728 - DNA, 25 bp, Homo sapien
tactgacttatccagtatgctgttg

SEQ ID NO: 1755729 - DNA, 25 bp, Homo sapien
gagttgcttattgttggaatcccca

SEQ ID NO: 1755730 - DNA, 25 bp, Homo sapien
cccatttgtgggcagttagacttca

SEQ ID NO: 1755731 - DNA, 25 bp, Homo sapien
tgctaagtcagttactatttctcca

SEQ ID NO: 1755732 - DNA, 25 bp, Homo sapien
actgccttatataaagatggagggc

SEQ ID NO: 1755733 - DNA, 25 bp, Homo sapien
tctcattaagagactttactgcctt

SEQ ID NO: 1755734 - DNA, 25 bp, Homo sapien
agatggagggcttaagattttagat

SEQ ID NO: 1755735 - DNA, 25 bp, Homo sapien
ttgttttatgacaatgctttcctgt

SEQ ID NO: 1755736 - DNA, 25 bp, Homo sapien
cttgtgcctcagcctcctaagtagc

SEQ ID NO: 1755737 - DNA, 25 bp, Homo sapien
ctgggattacaggtgtgtgccacca

SEQ ID NO: 1755738 - DNA, 25 bp, Homo sapien
tgccaccacacccagctactttttg

SEQ ID NO: 1755739 - DNA, 25 bp, Homo sapien
cccaggtttaagtgatccttgtgcc

SEQ ID NO: 1755740 - DNA, 25 bp, Homo sapien
taagcttccacagagcacttgggtg

SEQ ID NO: 1755741 - DNA, 25 bp, Homo sapien
tattgagtggaagccttgtacaact

SEQ ID NO: 1755742 - DNA, 25 bp, Homo sapien
ggttgccataagctccctataattg

SEQ ID NO: 1755743 - DNA, 25 bp, Homo sapien
taattggtgcaatatctgagcagga

SEQ ID NO: 1755744 - DNA, 25 bp, Homo sapien
cagaagcttaggagtacgcccagtc

SEQ ID NO: 1755745 - DNA, 25 bp, Homo sapien
tgtagggtacctgaaacaaaggcac

SEQ ID NO: 1755746 - DNA, 25 bp, Homo sapien
ggaaactgctcctgtacaactttgg

SEQ ID NO: 1755747 - DNA, 25 bp, Homo sapien
gagcagggcgtgagaatgcctttcc

SEQ ID NO: 1755748 - DNA, 25 bp, Homo sapien
ttttggtacaacttgaaggactctc

SEQ ID NO: 1755749 - DNA, 25 bp, Homo sapien
tgctgtgtattactgtcagatttgt

SEQ ID NO: 1755750 - DNA, 25 bp, Homo sapien
tacaacttgaaggactctccacagt

SEQ ID NO: 1755751 - DNA, 25 bp, Homo sapien
cagtttgctgtgtattactgtcaga

SEQ ID NO: 1755752 - DNA, 25 bp, Homo sapien
ccagaaacagggtggtcagaatcat

SEQ ID NO: 1755753 - DNA, 25 bp, Homo sapien
tcatagaatcctctgacagaaagct

SEQ ID NO: 1755754 - DNA, 25 bp, Homo sapien
ggtggtcagaatcatagaatcctct

SEQ ID NO: 1755755 - DNA, 25 bp, Homo sapien
gaatcatagaatcctctgacagaaa

SEQ ID NO: 1755756 - DNA, 25 bp, Homo sapien
attttgctattcagaggcagctcaa

SEQ ID NO: 1755757 - DNA, 25 bp, Homo sapien
gcagctcaagagagatttttgtgtc

SEQ ID NO: 1755758 - DNA, 25 bp, Homo sapien
aggcagctcaagagagatttttgtg

SEQ ID NO: 1755759 - DNA, 25 bp, Homo sapien
ttcattttgctattcagaggcagct

SEQ ID NO: 1755760 - DNA, 25 bp, Homo sapien
gagagtagtaacagggacaagcagc

SEQ ID NO: 1755761 - DNA, 25 bp, Homo sapien
ctgaaatcactgcttcaaacctgtc

SEQ ID NO: 1755762 - DNA, 25 bp, Homo sapien
aaatcactgcttcaaacctgtcaag

SEQ ID NO: 1755763 - DNA, 25 bp, Homo sapien
gaaatcactgcttcaaacctgtcaa

SEQ ID NO: 1755764 - DNA, 25 bp, Homo sapien
aatcactgcttcaaacctgtcaagc

SEQ ID NO: 1755765 - DNA, 25 bp, Homo sapien
tctcctctaggagtaccagtgctca

SEQ ID NO: 1755766 - DNA, 25 bp, Homo sapien
aacaactctcctctaggagtaccag

SEQ ID NO: 1755767 - DNA, 25 bp, Homo sapien
tctaggagtaccagtgctcacatca

SEQ ID NO: 1755768 - DNA, 25 bp, Homo sapien
tcaggtaacaactctcctctaggag

SEQ ID NO: 1755769 - DNA, 25 bp, Homo sapien
tcacactctcaaagagatccataac

SEQ ID NO: 1755770 - DNA, 25 bp, Homo sapien
ttcatcacactctcaaagagatcca

SEQ ID NO: 1755771 - DNA, 25 bp, Homo sapien
ccttcatcacactctcaaagagatc

SEQ ID NO: 1755772 - DNA, 25 bp, Homo sapien
catcacactctcaaagagatccata

SEQ ID NO: 1755773 - DNA, 25 bp, Homo sapien
caagcttagaaatggtcttcaaggg

SEQ ID NO: 1755774 - DNA, 25 bp, Homo sapien
tgcttttagtgggatgagagctcac

SEQ ID NO: 1755775 - DNA, 25 bp, Homo sapien
tgagtatatgcttttagtgggatga

SEQ ID NO: 1755776 - DNA, 25 bp, Homo sapien
ttaactcaatccaaagataccaagc

SEQ ID NO: 1755777 - DNA, 25 bp, Homo sapien
taatatctccaatgcctacaacggt

SEQ ID NO: 1755778 - DNA, 25 bp, Homo sapien
tctggtggcaagatatccttgcagt

SEQ ID NO: 1755779 - DNA, 25 bp, Homo sapien
tctgaatgcaccctgattatatttt

SEQ ID NO: 1755780 - DNA, 25 bp, Homo sapien
caacggttcctagaatatggtagtg

SEQ ID NO: 1755781 - DNA, 25 bp, Homo sapien
gagagggtgtgaggacgtgtgtggc

SEQ ID NO: 1755782 - DNA, 25 bp, Homo sapien
tgtggcgttcagtcccgaaggacgg

SEQ ID NO: 1755783 - DNA, 25 bp, Homo sapien
tcatggtcgcgtcgctagcctgggt

SEQ ID NO: 1755784 - DNA, 25 bp, Homo sapien
gtgaggacgtgtgtggcgttcagtc

SEQ ID NO: 1755785 - DNA, 25 bp, Homo sapien
tgaaacctggttgaatgacctcatc

SEQ ID NO: 1755786 - DNA, 25 bp, Homo sapien
gatgaaacctggttgaatgacctca

SEQ ID NO: 1755787 - DNA, 25 bp, Homo sapien
atgaaacctggttgaatgacctcat

SEQ ID NO: 1755788 - DNA, 25 bp, Homo sapien
tcagctccaaactcgtgagatgaaa

SEQ ID NO: 1755789 - DNA, 25 bp, Homo sapien
tgtgcgatcacaaatttagctcgca

SEQ ID NO: 1755790 - DNA, 25 bp, Homo sapien
taacatcttgattttgtgcgatcac

SEQ ID NO: 1755791 - DNA, 25 bp, Homo sapien
ttccctttggaacggagtgatcttc

SEQ ID NO: 1755792 - DNA, 25 bp, Homo sapien
taacaataggtttgcagaaagcccc

SEQ ID NO: 1755793 - DNA, 25 bp, Homo sapien
ggttgggaggtaatgcccagtattg

SEQ ID NO: 1755794 - DNA, 25 bp, Homo sapien
gaggtaatgcccagtattggggtaa

SEQ ID NO: 1755795 - DNA, 25 bp, Homo sapien
ttttggagatctataacaataggtt

SEQ ID NO: 1755796 - DNA, 25 bp, Homo sapien
cactcacacaattcaaacaatagcc

SEQ ID NO: 1755797 - DNA, 25 bp, Homo sapien
gaaactgcgcttaatcacactcaca

SEQ ID NO: 1755798 - DNA, 25 bp, Homo sapien
gtgaatcagtgtgggcggtacaaaa

SEQ ID NO: 1755799 - DNA, 25 bp, Homo sapien
aattcaaacaatagccccctgaaag

SEQ ID NO: 1755800 - DNA, 25 bp, Homo sapien
agagaaattttcagcgaaactattc

SEQ ID NO: 1755801 - DNA, 25 bp, Homo sapien
tgatttaatactgatcccattgaca

SEQ ID NO: 1755802 - DNA, 25 bp, Homo sapien
aaactattctctccggcgggcacga

SEQ ID NO: 1755803 - DNA, 25 bp, Homo sapien
tattgctgatttaatactgatccca

SEQ ID NO: 1755804 - DNA, 25 bp, Homo sapien
cagttccgcgcaaaacctgggattc

SEQ ID NO: 1755805 - DNA, 25 bp, Homo sapien
ttccgcgcaaaacctgggattcctc

SEQ ID NO: 1755806 - DNA, 25 bp, Homo sapien
gccagttccgcgcaaaacctgggat

SEQ ID NO: 1755807 - DNA, 25 bp, Homo sapien
agtggccagttccgcgcaaaacctg

SEQ ID NO: 1755808 - DNA, 25 bp, Homo sapien
gtgtacaaatacatcgactggaata

SEQ ID NO: 1755809 - DNA, 25 bp, Homo sapien
gtacaaatacatcgactggaatatc

SEQ ID NO: 1755810 - DNA, 25 bp, Homo sapien
tgtacaaatacatcgactggaatat

SEQ ID NO: 1755811 - DNA, 25 bp, Homo sapien
tcacagcatttatcaacatgtctaa

SEQ ID NO: 1755812 - DNA, 25 bp, Homo sapien
catttatcaacatgtctaaagagag

SEQ ID NO: 1755813 - DNA, 25 bp, Homo sapien
tcaaatagcagaatctcacagcatt

SEQ ID NO: 1755814 - DNA, 25 bp, Homo sapien
gcagaatctcacagcatttatcaac

SEQ ID NO: 1755815 - DNA, 25 bp, Homo sapien
tactgcaggctttatacatgtccaa

SEQ ID NO: 1755816 - DNA, 25 bp, Homo sapien
agtgggcctgcaacctgagccaaag

SEQ ID NO: 1755817 - DNA, 25 bp, Homo sapien
gaaagcaggctttacaagtggccca

SEQ ID NO: 1755818 - DNA, 25 bp, Homo sapien
cagtttaatcaacccctgaaaggag

SEQ ID NO: 1755819 - DNA, 25 bp, Homo sapien
taaaccagtggctttggataatcag

SEQ ID NO: 1755820 - DNA, 25 bp, Homo sapien
taaaagttacactatcatcactgtg

SEQ ID NO: 1755821 - DNA, 25 bp, Homo sapien
tacttggcacatgcaagcactctgt

SEQ ID NO: 1755822 - DNA, 25 bp, Homo sapien
tgtctatagttgaacagttctctca

SEQ ID NO: 1755823 - DNA, 25 bp, Homo sapien
cagcttttctggatgccttgaatat

SEQ ID NO: 1755824 - DNA, 25 bp, Homo sapien
taaatattcacctgctgttagctca

SEQ ID NO: 1755825 - DNA, 25 bp, Homo sapien
ccttttaagatacccagatgcatgg

SEQ ID NO: 1755826 - DNA, 25 bp, Homo sapien
gtttagaaagaccaggtgttatggc

SEQ ID NO: 1755827 - DNA, 25 bp, Homo sapien
tctagacacctaggaaagtaatgga

SEQ ID NO: 1755828 - DNA, 25 bp, Homo sapien
tgttagtccaacttacaagctccag

SEQ ID NO: 1755829 - DNA, 25 bp, Homo sapien
tcctatgaatgcttctgtgtcacat

SEQ ID NO: 1755830 - DNA, 25 bp, Homo sapien
tcaggcttaacagttgcttcaggtc

SEQ ID NO: 1755831 - DNA, 25 bp, Homo sapien
catttttgcaggtaaactcttattt

SEQ ID NO: 1755832 - DNA, 25 bp, Homo sapien
tgcaggtaaactcttatttgaaact

SEQ ID NO: 1755833 - DNA, 25 bp, Homo sapien
ttttgcaggtaaactcttatttgaa

SEQ ID NO: 1755834 - DNA, 25 bp, Homo sapien
ttgcaggtaaactcttatttgaaac

SEQ ID NO: 1755835 - DNA, 25 bp, Homo sapien
tcatctttcagtaatactgatttca

SEQ ID NO: 1755836 - DNA, 25 bp, Homo sapien
tttgttcatcgcagttcactgacct

SEQ ID NO: 1755837 - DNA, 25 bp, Homo sapien
aataattcttccgttctcttacaca

SEQ ID NO: 1755838 - DNA, 25 bp, Homo sapien
tcttaattagctcatctttcagtaa

SEQ ID NO: 1755839 - DNA, 25 bp, Homo sapien
caatgaatcacaagaaatgggtgct

SEQ ID NO: 1755840 - DNA, 25 bp, Homo sapien
ccactacagtatctggcatggtatt

SEQ ID NO: 1755841 - DNA, 25 bp, Homo sapien
gcatggtattgcctctacaagaact

SEQ ID NO: 1755842 - DNA, 25 bp, Homo sapien
catggagtggcagaatagtacatct

SEQ ID NO: 1755843 - DNA, 25 bp, Homo sapien
taaatgtgaattccactggttctcc

SEQ ID NO: 1755844 - DNA, 25 bp, Homo sapien
taaatccttccatgaatagtttgct

SEQ ID NO: 1755845 - DNA, 25 bp, Homo sapien
tgttacccgtattgactcaaggcct

SEQ ID NO: 1755846 - DNA, 25 bp, Homo sapien
tctttcacttcctaaacaggggctc

SEQ ID NO: 1755847 - DNA, 25 bp, Homo sapien
tcagtcttcatcttgatcagctctt

SEQ ID NO: 1755848 - DNA, 25 bp, Homo sapien
gtcttcatcttgatcagctcttact

SEQ ID NO: 1755849 - DNA, 25 bp, Homo sapien
agtcttcatcttgatcagctcttac

SEQ ID NO: 1755850 - DNA, 25 bp, Homo sapien
cagtcttcatcttgatcagctctta

SEQ ID NO: 1755851 - DNA, 25 bp, Homo sapien
tgagaacagttcaagttgtaactct

SEQ ID NO: 1755852 - DNA, 25 bp, Homo sapien
tgagtggttttatctgtctgactga

SEQ ID NO: 1755853 - DNA, 25 bp, Homo sapien
cctaagatcacaggaatattatcct

SEQ ID NO: 1755854 - DNA, 25 bp, Homo sapien
ggtccaatcttactctttctctaca

SEQ ID NO: 1755855 - DNA, 25 bp, Homo sapien
ggctagcacctgtatttcacagaaa

SEQ ID NO: 1755856 - DNA, 25 bp, Homo sapien
tgtcagtttggttacggctagcacc

SEQ ID NO: 1755857 - DNA, 25 bp, Homo sapien
gtcattattcttggacctggccaga

SEQ ID NO: 1755858 - DNA, 25 bp, Homo sapien
tggtccactcggaggcagcagtttc

SEQ ID NO: 1755859 - DNA, 25 bp, Homo sapien
ctacaaggaaaaaagatgaaaacat

SEQ ID NO: 1755860 - DNA, 25 bp, Homo sapien
tctttggctgaggaggtagactaca

SEQ ID NO: 1755861 - DNA, 25 bp, Homo sapien
actcgcgggtggctgtgcaacattt

SEQ ID NO: 1755862 - DNA, 25 bp, Homo sapien
gaggtgacctgcctgaccgttctga

SEQ ID NO: 1755863 - DNA, 25 bp, Homo sapien
aaacggtggtgatgtacagccatgc

SEQ ID NO: 1755864 - DNA, 25 bp, Homo sapien
tggttcacacaaaaggtaacagtcg

SEQ ID NO: 1755865 - DNA, 25 bp, Homo sapien
tagtaccccataattggcagctctg

SEQ ID NO: 1755866 - DNA, 25 bp, Homo sapien
tttaaaacagtgaaatatcggccca

SEQ ID NO: 1755867 - DNA, 25 bp, Homo sapien
caatagtagttaaaatcccaggtca

SEQ ID NO: 1755868 - DNA, 25 bp, Homo sapien
tttgcccataacatctagagccagg

SEQ ID NO: 1755869 - DNA, 25 bp, Homo sapien
aaatacttctagctctctggtggga

SEQ ID NO: 1755870 - DNA, 25 bp, Homo sapien
tatctgagcttacaccaacaggccc

SEQ ID NO: 1755871 - DNA, 25 bp, Homo sapien
gtaaaggactggcaacccaacctga

SEQ ID NO: 1755872 - DNA, 25 bp, Homo sapien
gcaaggaagtacttctctacagcta

SEQ ID NO: 1755873 - DNA, 25 bp, Homo sapien
tgtataccacgcagattctcacaat

SEQ ID NO: 1755874 - DNA, 25 bp, Homo sapien
gcatcacagcacaccgatatttcag

SEQ ID NO: 1755875 - DNA, 25 bp, Homo sapien
cattcaatatcgtcaaaggtaagct

SEQ ID NO: 1755876 - DNA, 25 bp, Homo sapien
taaaacccagagtgtacagaaaggc

SEQ ID NO: 1755877 - DNA, 25 bp, Homo sapien
tacagggctaagagactggcaatgc

SEQ ID NO: 1755878 - DNA, 25 bp, Homo sapien
tctgccatgtagcaaaagatcagct

SEQ ID NO: 1755879 - DNA, 25 bp, Homo sapien
tggaacagcatacatacaggtgtgc

SEQ ID NO: 1755880 - DNA, 25 bp, Homo sapien
tcacttagactacatttattcagca

SEQ ID NO: 1755881 - DNA, 25 bp, Homo sapien
ccttcacttagactacatttattca

SEQ ID NO: 1755882 - DNA, 25 bp, Homo sapien
ttcagcatctgtattgttggagtaa

SEQ ID NO: 1755883 - DNA, 25 bp, Homo sapien
cagcatctgtattgttggagtaagt

SEQ ID NO: 1755884 - DNA, 25 bp, Homo sapien
gcgtggaccgggcacatcgtcagaa

SEQ ID NO: 1755885 - DNA, 25 bp, Homo sapien
ctaaggaagtagagcgtggaccggg

SEQ ID NO: 1755886 - DNA, 25 bp, Homo sapien
aagtagagcgtggaccgggcacatc

SEQ ID NO: 1755887 - DNA, 25 bp, Homo sapien
tggaccgggcacatcgtcagaacac

SEQ ID NO: 1755888 - DNA, 25 bp, Homo sapien
agccttgtaaaggtcagtgccagga

SEQ ID NO: 1755889 - DNA, 25 bp, Homo sapien
taaagagccttgtaaaggtcagtgc

SEQ ID NO: 1755890 - DNA, 25 bp, Homo sapien
gcaggggattattaccaaggctcct

SEQ ID NO: 1755891 - DNA, 25 bp, Homo sapien
cttgtaaagagccttgtaaaggtca

SEQ ID NO: 1755892 - DNA, 25 bp, Homo sapien
catacctgacttcaaaggtcctgcc

SEQ ID NO: 1755893 - DNA, 25 bp, Homo sapien
aaaggtcctgccatcttggctgctt

SEQ ID NO: 1755894 - DNA, 25 bp, Homo sapien
ggcggtgcttgtgggtcggtcatac

SEQ ID NO: 1755895 - DNA, 25 bp, Homo sapien
gcttgtgggtcggtcatacctgact

SEQ ID NO: 1755896 - DNA, 25 bp, Homo sapien
cgggcgtggcgtcgtcctcttcaca

SEQ ID NO: 1755897 - DNA, 25 bp, Homo sapien
taatgacttggcactccagagaaag

SEQ ID NO: 1755898 - DNA, 25 bp, Homo sapien
ctcttcacagatgccacgttgcagc

SEQ ID NO: 1755899 - DNA, 25 bp, Homo sapien
catgctgttgcgtgtggtggctcca

SEQ ID NO: 1755900 - DNA, 25 bp, Homo sapien
gagtcacttggttgctgagtcactt

SEQ ID NO: 1755901 - DNA, 25 bp, Homo sapien
agagtcacttggttgctgagtcact

SEQ ID NO: 1755902 - DNA, 25 bp, Homo sapien
aaaatggtctgcaaaagttactcca

SEQ ID NO: 1755903 - DNA, 25 bp, Homo sapien
gcatagacactatataaatccgcag

SEQ ID NO: 1755904 - DNA, 25 bp, Homo sapien
ggacacctttgcgttttgctgctaa

SEQ ID NO: 1755905 - DNA, 25 bp, Homo sapien
ctcagttgtatgaatctggagtgta

SEQ ID NO: 1755906 - DNA, 25 bp, Homo sapien
gagagactctgctggccgtatctga

SEQ ID NO: 1755907 - DNA, 25 bp, Homo sapien
ccatctggcaggagcaaaggtgtcc

SEQ ID NO: 1755908 - DNA, 25 bp, Homo sapien
aaaggtgtccactgtttcgctcagg

SEQ ID NO: 1755909 - DNA, 25 bp, Homo sapien
acctgaacatactgcgagtgtggca

SEQ ID NO: 1755910 - DNA, 25 bp, Homo sapien
tcatgcccaaacaaggatagaatct

SEQ ID NO: 1755911 - DNA, 25 bp, Homo sapien
gcacttctcgaattatccccgtaag

SEQ ID NO: 1755912 - DNA, 25 bp, Homo sapien
gatagaatcttgtagcgaggcgaca

SEQ ID NO: 1755913 - DNA, 25 bp, Homo sapien
gtaaggaggaacgacgaatgccgcc

SEQ ID NO: 1755914 - DNA, 25 bp, Homo sapien
aaacagtggcgcgtgtcagaagtcc

SEQ ID NO: 1755915 - DNA, 25 bp, Homo sapien
gctttgcctacgatggagggccttg

SEQ ID NO: 1755916 - DNA, 25 bp, Homo sapien
gccttgtaccgcctgggattgctag

SEQ ID NO: 1755917 - DNA, 25 bp, Homo sapien
tattttccaacgtatggcccaaatc

SEQ ID NO: 1755918 - DNA, 25 bp, Homo sapien
tgtccagtgaacagtaaaagttgat

SEQ ID NO: 1755919 - DNA, 25 bp, Homo sapien
gaacagtaaaagttgatcggagcat

SEQ ID NO: 1755920 - DNA, 25 bp, Homo sapien
cagtgaacagtaaaagttgatcgga

SEQ ID NO: 1755921 - DNA, 25 bp, Homo sapien
tccagtgaacagtaaaagttgatcg

SEQ ID NO: 1755922 - DNA, 25 bp, Homo sapien
tcagagactaaatggttgtcagcat

SEQ ID NO: 1755923 - DNA, 25 bp, Homo sapien
gtgttgtcctcagagactaaatggt

SEQ ID NO: 1755924 - DNA, 25 bp, Homo sapien
taaatggttgtcagcatttctcttc

SEQ ID NO: 1755925 - DNA, 25 bp, Homo sapien
tgtcctcagagactaaatggttgtc

SEQ ID NO: 1755926 - DNA, 25 bp, Homo sapien
attcatttgctctccgctcatctgg

SEQ ID NO: 1755927 - DNA, 25 bp, Homo sapien
catctggataagctctggatgccac

SEQ ID NO: 1755928 - DNA, 25 bp, Homo sapien
tctccgctcatctggataagctctg

SEQ ID NO: 1755929 - DNA, 25 bp, Homo sapien
tctcctcttcaacaggggagcagaa

SEQ ID NO: 1755930 - DNA, 25 bp, Homo sapien
gctgcaaaatttccacaagcttcat

SEQ ID NO: 1755931 - DNA, 25 bp, Homo sapien
gatgagtgtacggaaggaaaacgtc

SEQ ID NO: 1755932 - DNA, 25 bp, Homo sapien
ttcaccgaggtaaaggatggaagtg

SEQ ID NO: 1755933 - DNA, 25 bp, Homo sapien
gcttcatccctcttggactgatgag

SEQ ID NO: 1755934 - DNA, 25 bp, Homo sapien
gccttggtggcgtcacacaatttga

SEQ ID NO: 1755935 - DNA, 25 bp, Homo sapien
gtaattcccagggtctctcataggg

SEQ ID NO: 1755936 - DNA, 25 bp, Homo sapien
tggtgactacctgactatgaaagga

SEQ ID NO: 1755937 - DNA, 25 bp, Homo sapien
cttccagtaggagcacatcaatcac

SEQ ID NO: 1755938 - DNA, 25 bp, Homo sapien
aacaggccagttttgcaagggagaa

SEQ ID NO: 1755939 - DNA, 25 bp, Homo sapien
gacccctgaagaacgcgagtcgtat

SEQ ID NO: 1755940 - DNA, 25 bp, Homo sapien
cctagaggcttctgggcgaatattc

SEQ ID NO: 1755941 - DNA, 25 bp, Homo sapien
caggcaccctggagccgaaataaac

SEQ ID NO: 1755942 - DNA, 25 bp, Homo sapien
gtccgccgccttccggtgctgtccg

SEQ ID NO: 1755943 - DNA, 25 bp, Homo sapien
tgcgtccgccgccttccggtgctgt

SEQ ID NO: 1755944 - DNA, 25 bp, Homo sapien
gccgccttccggtgctgtccgcacc

SEQ ID NO: 1755945 - DNA, 25 bp, Homo sapien
gccttccggtgctgtccgcaccctc

SEQ ID NO: 1755946 - DNA, 25 bp, Homo sapien
cacccgggtcaagcgcgctccgccg

SEQ ID NO: 1755947 - DNA, 25 bp, Homo sapien
cgccgggctgaagctccgggcaggg

SEQ ID NO: 1755948 - DNA, 25 bp, Homo sapien
cgggccacccgggtcaagcgcgctc

SEQ ID NO: 1755949 - DNA, 25 bp, Homo sapien
ggcgccgggctgaagctccgggcag

SEQ ID NO: 1755950 - DNA, 25 bp, Homo sapien
aaactggatttccaacatttgagta

SEQ ID NO: 1755951 - DNA, 25 bp, Homo sapien
tcaaactggatttccaacatttgag

SEQ ID NO: 1755952 - DNA, 25 bp, Homo sapien
ggatttccaacatttgagtaaatcc

SEQ ID NO: 1755953 - DNA, 25 bp, Homo sapien
ctggatttccaacatttgagtaaat

SEQ ID NO: 1755954 - DNA, 25 bp, Homo sapien
ctcaacaggtcattagtgttttctg

SEQ ID NO: 1755955 - DNA, 25 bp, Homo sapien
tatcttacttgaagtgtgtcgtagg

SEQ ID NO: 1755956 - DNA, 25 bp, Homo sapien
ggccacatacatgttgacaagctct

SEQ ID NO: 1755957 - DNA, 25 bp, Homo sapien
tctttctcaacaggtcattagtgtt

SEQ ID NO: 1755958 - DNA, 25 bp, Homo sapien
gagcacatgaaaagcccgggcttgc

SEQ ID NO: 1755959 - DNA, 25 bp, Homo sapien
tgaactgtcaccatgaggagagtgg

SEQ ID NO: 1755960 - DNA, 25 bp, Homo sapien
tctgcccagaatggaataaagaggc

SEQ ID NO: 1755961 - DNA, 25 bp, Homo sapien
tactctcggctagttgggtctgccc

SEQ ID NO: 1755962 - DNA, 25 bp, Homo sapien
ggctgaagtgcaatgggtctatctc

SEQ ID NO: 1755963 - DNA, 25 bp, Homo sapien
ctcactgcaacttccacctcccaga

SEQ ID NO: 1755964 - DNA, 25 bp, Homo sapien
ctgaagtgcaatgggtctatctcag

SEQ ID NO: 1755965 - DNA, 25 bp, Homo sapien
agattcaagtgattctcctgcctca

SEQ ID NO: 1755966 - DNA, 25 bp, Homo sapien
agtttccagccacttgtttaatgga

SEQ ID NO: 1755967 - DNA, 25 bp, Homo sapien
actgctactgtgtcggcctcccgag

SEQ ID NO: 1755968 - DNA, 25 bp, Homo sapien
tgtcggcctcccgagtcaagggctg

SEQ ID NO: 1755969 - DNA, 25 bp, Homo sapien
gccacttgtttaatggacatcccca

SEQ ID NO: 1755970 - DNA, 25 bp, Homo sapien
taatcagcttgcagatctaccaggt

SEQ ID NO: 1755971 - DNA, 25 bp, Homo sapien
gacttcaggaccaaaagatatttcc

SEQ ID NO: 1755972 - DNA, 25 bp, Homo sapien
tcctcgtcctagaagatacagccac

SEQ ID NO: 1755973 - DNA, 25 bp, Homo sapien
agatatttcccactactaattaggg

SEQ ID NO: 1755974 - DNA, 25 bp, Homo sapien
atcaataaaaatgcgatgaaagttt

SEQ ID NO: 1755975 - DNA, 25 bp, Homo sapien
gatcatcaataaaaatgcgatgaaa

SEQ ID NO: 1755976 - DNA, 25 bp, Homo sapien
tcatcaataaaaatgcgatgaaagt

SEQ ID NO: 1755977 - DNA, 25 bp, Homo sapien
caataaaaatgcgatgaaagttttc

SEQ ID NO: 1755978 - DNA, 25 bp, Homo sapien
ttctggtcaagtgcaggaagctgaa

SEQ ID NO: 1755979 - DNA, 25 bp, Homo sapien
gaaccatcatggtccaagtctgttg

SEQ ID NO: 1755980 - DNA, 25 bp, Homo sapien
tctctatgccaagcttcgttaaaag

SEQ ID NO: 1755981 - DNA, 25 bp, Homo sapien
gctgaagtgctaggaagacccacag

SEQ ID NO: 1755982 - DNA, 25 bp, Homo sapien
tattataatctagtccaccaggaca

SEQ ID NO: 1755983 - DNA, 25 bp, Homo sapien
tgtcattggctacttctctctgtcc

SEQ ID NO: 1755984 - DNA, 25 bp, Homo sapien
ctagcgcttttctgcagacccggaa

SEQ ID NO: 1755985 - DNA, 25 bp, Homo sapien
taagactgaatcctagactcgaatc

SEQ ID NO: 1755986 - DNA, 25 bp, Homo sapien
gctcttgtttactgtgcaagagaaa

SEQ ID NO: 1755987 - DNA, 25 bp, Homo sapien
ccaagtaagtgactaaggaagctct

SEQ ID NO: 1755988 - DNA, 25 bp, Homo sapien
cacgtgaccgcagcactgagaagca

SEQ ID NO: 1755989 - DNA, 25 bp, Homo sapien
cacgggcaaggagggttcgttcaat

SEQ ID NO: 1755990 - DNA, 25 bp, Homo sapien
tcactgctgaccatgatgaccgcgt

SEQ ID NO: 1755991 - DNA, 25 bp, Homo sapien
tcagacatgtttgcgttcatcgcgc

SEQ ID NO: 1755992 - DNA, 25 bp, Homo sapien
gcggtgcctgaacgtcgactggatt

SEQ ID NO: 1755993 - DNA, 25 bp, Homo sapien
tgggcataatgcttccccacgggaa

SEQ ID NO: 1755994 - DNA, 25 bp, Homo sapien
ccaggaaacttgcctggtacttcgg

SEQ ID NO: 1755995 - DNA, 25 bp, Homo sapien
caggaaacttgcctggtacttcgga

SEQ ID NO: 1755996 - DNA, 25 bp, Homo sapien
caacatcccgagactgcaagtaggt

SEQ ID NO: 1755997 - DNA, 25 bp, Homo sapien
gaattctacagatggcctcccaaga

SEQ ID NO: 1755998 - DNA, 25 bp, Homo sapien
gaggagatgggactacctacttgtc

SEQ ID NO: 1755999 - DNA, 25 bp, Homo sapien
cagactgctggcttacagaactgtg

SEQ ID NO: 1756000 - DNA, 25 bp, Homo sapien
tagcattcaaaccattgagaacctt

SEQ ID NO: 1756001 - DNA, 25 bp, Homo sapien
gaaccttcagtttatagaagcccat

SEQ ID NO: 1756002 - DNA, 25 bp, Homo sapien
ttcaaaccattgagaaccttcagtt

SEQ ID NO: 1756003 - DNA, 25 bp, Homo sapien
ccattgagaaccttcagtttataga

SEQ ID NO: 1756004 - DNA, 25 bp, Homo sapien
tgcatagagcagattgttggagctc

SEQ ID NO: 1756005 - DNA, 25 bp, Homo sapien
acatggaggtcctttgcatagagca

SEQ ID NO: 1756006 - DNA, 25 bp, Homo sapien
gacttccaggaaacacatgtctggc

SEQ ID NO: 1756007 - DNA, 25 bp, Homo sapien
catgtctggctatgggcctgcagat

SEQ ID NO: 1756008 - DNA, 25 bp, Homo sapien
tagtcccgcttatgagatcttaccg

SEQ ID NO: 1756009 - DNA, 25 bp, Homo sapien
tgaaggcttcatatcgatgtactct

SEQ ID NO: 1756010 - DNA, 25 bp, Homo sapien
gaactggatctattgtacaactcat

SEQ ID NO: 1756011 - DNA, 25 bp, Homo sapien
gatcttaccgatgcttccaaagaca

SEQ ID NO: 1756012 - DNA, 25 bp, Homo sapien
ctggatgtagcagggtcacttgaca

SEQ ID NO: 1756013 - DNA, 25 bp, Homo sapien
ggatgtagcagggtcacttgacaaa

SEQ ID NO: 1756014 - DNA, 25 bp, Homo sapien
tgtagcagggtcacttgacaaagca

SEQ ID NO: 1756015 - DNA, 25 bp, Homo sapien
gcagggtcacttgacaaagcaggtg

SEQ ID NO: 1756016 - DNA, 25 bp, Homo sapien
gtttagaggacagccctttgtcacc

SEQ ID NO: 1756017 - DNA, 25 bp, Homo sapien
agaggacagccctttgtcaccgcag

SEQ ID NO: 1756018 - DNA, 25 bp, Homo sapien
tagaggacagccctttgtcaccgca

SEQ ID NO: 1756019 - DNA, 25 bp, Homo sapien
tttagaggacagccctttgtcaccg

SEQ ID NO: 1756020 - DNA, 25 bp, Homo sapien
gacgaactggttgctcatgaaggca

SEQ ID NO: 1756021 - DNA, 25 bp, Homo sapien
ggcctggacgaactggttgctcatg

SEQ ID NO: 1756022 - DNA, 25 bp, Homo sapien
cctggacgaactggttgctcatgaa

SEQ ID NO: 1756023 - DNA, 25 bp, Homo sapien
gaactggttgctcatgaaggcactt

SEQ ID NO: 1756024 - DNA, 25 bp, Homo sapien
ggccagcagccatcagttcttctct

SEQ ID NO: 1756025 - DNA, 25 bp, Homo sapien
tcttctcttgcactgtctctggtca

SEQ ID NO: 1756026 - DNA, 25 bp, Homo sapien
cccgggccagcagccatcagttctt

SEQ ID NO: 1756027 - DNA, 25 bp, Homo sapien
caggtggtctccagtggggacctcc

SEQ ID NO: 1756028 - DNA, 25 bp, Homo sapien
ggccgttcctttgatgatgtagtag

SEQ ID NO: 1756029 - DNA, 25 bp, Homo sapien
tctcccacaaggtagcaacagtgtc

SEQ ID NO: 1756030 - DNA, 25 bp, Homo sapien
gaaaggatccatgtcgtgcgcagtc

SEQ ID NO: 1756031 - DNA, 25 bp, Homo sapien
tagatgtcccagtctggccgttcct

SEQ ID NO: 1756032 - DNA, 25 bp, Homo sapien
cagaaactcagcagtatatatttaa

SEQ ID NO: 1756033 - DNA, 25 bp, Homo sapien
tacccattattgtaactggtcctgg

SEQ ID NO: 1756034 - DNA, 25 bp, Homo sapien
gcaagcctcagatttatgaccccag

SEQ ID NO: 1756035 - DNA, 25 bp, Homo sapien
ccccggtgacagtgatcttagcata

SEQ ID NO: 1756036 - DNA, 25 bp, Homo sapien
gtcaccgtgccccataaagagacca

SEQ ID NO: 1756037 - DNA, 25 bp, Homo sapien
tagacaagttgaccagtaaaaaggc

SEQ ID NO: 1756038 - DNA, 25 bp, Homo sapien
tcagttgacccattccgtattgtgt

SEQ ID NO: 1756039 - DNA, 25 bp, Homo sapien
aagtgaggccccagaagtcaccgtg

SEQ ID NO: 1756040 - DNA, 25 bp, Homo sapien
cctcgtttctccatgacccatcctg

SEQ ID NO: 1756041 - DNA, 25 bp, Homo sapien
attccacacatctttcaatattcat

SEQ ID NO: 1756042 - DNA, 25 bp, Homo sapien
gcctcgtttctccatgacccatcct

SEQ ID NO: 1756043 - DNA, 25 bp, Homo sapien
aaattccacacatctttcaatattc

SEQ ID NO: 1756044 - DNA, 25 bp, Homo sapien
tgctcctccacacaacttttgatgc

SEQ ID NO: 1756045 - DNA, 25 bp, Homo sapien
ctcatagaaacacatgcaagttcct

SEQ ID NO: 1756046 - DNA, 25 bp, Homo sapien
gctcctccacacaacttttgatgct

SEQ ID NO: 1756047 - DNA, 25 bp, Homo sapien
tcttcttcatacagccgcgccccag

SEQ ID NO: 1756048 - DNA, 25 bp, Homo sapien
gcctggggtgaccaactcccaactg

SEQ ID NO: 1756049 - DNA, 25 bp, Homo sapien
ggcctggtgtttggaatggaagcat

SEQ ID NO: 1756050 - DNA, 25 bp, Homo sapien
tggaatggaagcatggcacgaaccc

SEQ ID NO: 1756051 - DNA, 25 bp, Homo sapien
gatgtggacacagtccatccttggg

SEQ ID NO: 1756052 - DNA, 25 bp, Homo sapien
tcatgcaggcattctagcttgagag

SEQ ID NO: 1756053 - DNA, 25 bp, Homo sapien
tatgtggctgaagtctgtagttgct

SEQ ID NO: 1756054 - DNA, 25 bp, Homo sapien
gagagcgtagtgttcatattcagag

SEQ ID NO: 1756055 - DNA, 25 bp, Homo sapien
tatttctgatattacgcttcatggc

SEQ ID NO: 1756056 - DNA, 25 bp, Homo sapien
gcttgaggtcctgcccagccgtggt

SEQ ID NO: 1756057 - DNA, 25 bp, Homo sapien
ctgcccagccgtggtctgggggagg

SEQ ID NO: 1756058 - DNA, 25 bp, Homo sapien
ttgaggtcctgcccagccgtggtct

SEQ ID NO: 1756059 - DNA, 25 bp, Homo sapien
gaggtcctgcccagccgtggtctgg

SEQ ID NO: 1756060 - DNA, 25 bp, Homo sapien
tcactgagaatgctcaattgcagat

SEQ ID NO: 1756061 - DNA, 25 bp, Homo sapien
ggtataactgtcaccgttccagcca

SEQ ID NO: 1756062 - DNA, 25 bp, Homo sapien
ctcaaactttctgaaggtataactg

SEQ ID NO: 1756063 - DNA, 25 bp, Homo sapien
gatgatacgatctgatggagaaaga

SEQ ID NO: 1756064 - DNA, 25 bp, Homo sapien
taaattgcttattgatgtcaacaca

SEQ ID NO: 1756065 - DNA, 25 bp, Homo sapien
cttgaagaccccgacagtgaacaga

SEQ ID NO: 1756066 - DNA, 25 bp, Homo sapien
taaggcagccttagtagctagcacc

SEQ ID NO: 1756067 - DNA, 25 bp, Homo sapien
cccagagaagatcacctaagtgttt

SEQ ID NO: 1756068 - DNA, 25 bp, Homo sapien
gaggcagggcgctagggaaggcgcg

SEQ ID NO: 1756069 - DNA, 25 bp, Homo sapien
ggaaggacttgtccccggcgcagag

SEQ ID NO: 1756070 - DNA, 25 bp, Homo sapien
tgcgagcgcggccaaagagaggcag

SEQ ID NO: 1756071 - DNA, 25 bp, Homo sapien
gggcttcactctcctacaggcggtc

SEQ ID NO: 1756072 - DNA, 25 bp, Homo sapien
cggatgctaaaccacccagtgtcca

SEQ ID NO: 1756073 - DNA, 25 bp, Homo sapien
ttcttcccataaacagtaggtgctc

SEQ ID NO: 1756074 - DNA, 25 bp, Homo sapien
ggcccgaggatgatgacatgtaact

SEQ ID NO: 1756075 - DNA, 25 bp, Homo sapien
tcaaataagggctcaaccgtagtcc

SEQ ID NO: 1756076 - DNA, 25 bp, Homo sapien
aggactttttggaagccagggatag

SEQ ID NO: 1756077 - DNA, 25 bp, Homo sapien
gcacacactatacccctgatggctg

SEQ ID NO: 1756078 - DNA, 25 bp, Homo sapien
caggactttttggaagccagggata

SEQ ID NO: 1756079 - DNA, 25 bp, Homo sapien
agaaaacacactgggcacacactat

SEQ ID NO: 1756080 - DNA, 25 bp, Homo sapien
cagtgatttgaagggtcctgccatt

SEQ ID NO: 1756081 - DNA, 25 bp, Homo sapien
ctatgctcctattgcagcagacttc

SEQ ID NO: 1756082 - DNA, 25 bp, Homo sapien
agtccacaggccatttgaaattgct

SEQ ID NO: 1756083 - DNA, 25 bp, Homo sapien
tgccggaacctaagctaaaagagaa

SEQ ID NO: 1756084 - DNA, 25 bp, Homo sapien
tttaaactcttggtgaggagtggta

SEQ ID NO: 1756085 - DNA, 25 bp, Homo sapien
actcttggtgaggagtggtatctcc

SEQ ID NO: 1756086 - DNA, 25 bp, Homo sapien
ctccgctcaatgtcggttttaaact

SEQ ID NO: 1756087 - DNA, 25 bp, Homo sapien
caatgtcggttttaaactcttggtg

SEQ ID NO: 1756088 - DNA, 25 bp, Homo sapien
acaagtgcgggtatgtctggccgaa

SEQ ID NO: 1756089 - DNA, 25 bp, Homo sapien
ggtccaccagttggctgtttgcatg

SEQ ID NO: 1756090 - DNA, 25 bp, Homo sapien
gagcaattgaacagccttctgggaa

SEQ ID NO: 1756091 - DNA, 25 bp, Homo sapien
taatgtgacattcaaacaagtgcgg

SEQ ID NO: 1756092 - DNA, 25 bp, Homo sapien
tttgaggtggaagaatatagtatca

SEQ ID NO: 1756093 - DNA, 25 bp, Homo sapien
gaatatagtatcactaatcatcttc

SEQ ID NO: 1756094 - DNA, 25 bp, Homo sapien
ggtggaagaatatagtatcactaat

SEQ ID NO: 1756095 - DNA, 25 bp, Homo sapien
ggaagaatatagtatcactaatcat

SEQ ID NO: 1756096 - DNA, 25 bp, Homo sapien
cagtgaggagagcttgtgttggaga

SEQ ID NO: 1756097 - DNA, 25 bp, Homo sapien
agtggaagaggcaaatatatttggc

SEQ ID NO: 1756098 - DNA, 25 bp, Homo sapien
tatatttggctgtgaggttgatcag

SEQ ID NO: 1756099 - DNA, 25 bp, Homo sapien
aaatatatttggctgtgaggttgat

SEQ ID NO: 1756100 - DNA, 25 bp, Homo sapien
agaaatccatgtatccttacagtaa

SEQ ID NO: 1756101 - DNA, 25 bp, Homo sapien
ttagctagtcatctagatttctggt

SEQ ID NO: 1756102 - DNA, 25 bp, Homo sapien
gtttagctttagctagtcatctaga

SEQ ID NO: 1756103 - DNA, 25 bp, Homo sapien
gcattttctcataaagaaatccatg

SEQ ID NO: 1756104 - DNA, 25 bp, Homo sapien
gatagtgaggcagatccttgacctc

SEQ ID NO: 1756105 - DNA, 25 bp, Homo sapien
aggtggaaggatagtgaggcagatc

SEQ ID NO: 1756106 - DNA, 25 bp, Homo sapien
tggaaggatagtgaggcagatcctt

SEQ ID NO: 1756107 - DNA, 25 bp, Homo sapien
gatccttgacctcaatgctccctaa

SEQ ID NO: 1756108 - DNA, 25 bp, Homo sapien
tcctgctttacagaatttgcaggct

SEQ ID NO: 1756109 - DNA, 25 bp, Homo sapien
ggcttagtaaaagcatggatagaac

SEQ ID NO: 1756110 - DNA, 25 bp, Homo sapien
gaatttgcaggcttagtaaaagcat

SEQ ID NO: 1756111 - DNA, 25 bp, Homo sapien
ttcctgctttacagaatttgcaggc

SEQ ID NO: 1756112 - DNA, 25 bp, Homo sapien
gcaaaaggttgaattaatcgccaga

SEQ ID NO: 1756113 - DNA, 25 bp, Homo sapien
taaatggacctattctctctaagtt

SEQ ID NO: 1756114 - DNA, 25 bp, Homo sapien
gacattatggcctctcctaaatgga

SEQ ID NO: 1756115 - DNA, 25 bp, Homo sapien
agcaaaacatttccatgggactttt

SEQ ID NO: 1756116 - DNA, 25 bp, Homo sapien
tctctcacagtttcggggctaaaag

SEQ ID NO: 1756117 - DNA, 25 bp, Homo sapien
gaaatcaaggtaccatcagtgctgt

SEQ ID NO: 1756118 - DNA, 25 bp, Homo sapien
gacagctttggggagaatcctttct

SEQ ID NO: 1756119 - DNA, 25 bp, Homo sapien
tctggtgatacttgccagcaatcct

SEQ ID NO: 1756120 - DNA, 25 bp, Homo sapien
tgtcatcattaaagtagagatacag

SEQ ID NO: 1756121 - DNA, 25 bp, Homo sapien
gataaaccatttcatgtctgtagcc

SEQ ID NO: 1756122 - DNA, 25 bp, Homo sapien
tatttcttgcaatatacttgggaag

SEQ ID NO: 1756123 - DNA, 25 bp, Homo sapien
ggcacacacatgtatccaatcatat

SEQ ID NO: 1756124 - DNA, 25 bp, Homo sapien
tcatcagtcgatacagtagcagcag

SEQ ID NO: 1756125 - DNA, 25 bp, Homo sapien
tgcacccggtcagaagaagcctatt

SEQ ID NO: 1756126 - DNA, 25 bp, Homo sapien
gaaaaggctcttggtcactcatcag

SEQ ID NO: 1756127 - DNA, 25 bp, Homo sapien
tagcataagttccacaatcagagac

SEQ ID NO: 1756128 - DNA, 25 bp, Homo sapien
tgtctattgtcaggggtgtttcccc

SEQ ID NO: 1756129 - DNA, 25 bp, Homo sapien
tctggaagtccgttctcatgggtag

SEQ ID NO: 1756130 - DNA, 25 bp, Homo sapien
tatgaaccacccttgtctggaagtc

SEQ ID NO: 1756131 - DNA, 25 bp, Homo sapien
catgggtagtttttcgtgagctgtt

SEQ ID NO: 1756132 - DNA, 25 bp, Homo sapien
ggatctcagtgtgacctttggacat

SEQ ID NO: 1756133 - DNA, 25 bp, Homo sapien
cctaaggatctcagtgtgacctttg

SEQ ID NO: 1756134 - DNA, 25 bp, Homo sapien
ttttctccctaaggatctcagtgtg

SEQ ID NO: 1756135 - DNA, 25 bp, Homo sapien
ttctaccctgagctttttctcccta

SEQ ID NO: 1756136 - DNA, 25 bp, Homo sapien
gcttgatgagtaagaagctgagcta

SEQ ID NO: 1756137 - DNA, 25 bp, Homo sapien
ttcttcactgagatcagctgtctcc

SEQ ID NO: 1756138 - DNA, 25 bp, Homo sapien
ccaacccagcgtgtggatgaggaga

SEQ ID NO: 1756139 - DNA, 25 bp, Homo sapien
gctgagctatggtttcttcactgag

SEQ ID NO: 1756140 - DNA, 25 bp, Homo sapien
ctgtcctcgagctgtgttcccacaa

SEQ ID NO: 1756141 - DNA, 25 bp, Homo sapien
gtgtttactgtgtctgtgtcgtgtc

SEQ ID NO: 1756142 - DNA, 25 bp, Homo sapien
cacaattcatacaaaggccagcctc

SEQ ID NO: 1756143 - DNA, 25 bp, Homo sapien
tgtaccagcatgcagatggtctgag

SEQ ID NO: 1756144 - DNA, 25 bp, Homo sapien
cagccacacacttgtaactttgtca

SEQ ID NO: 1756145 - DNA, 25 bp, Homo sapien
agccacacacttgtaactttgtcat

SEQ ID NO: 1756146 - DNA, 25 bp, Homo sapien
cacagccacacacttgtaactttgt

SEQ ID NO: 1756147 - DNA, 25 bp, Homo sapien
agtcatcttggtccctaatttcaca

SEQ ID NO: 1756148 - DNA, 25 bp, Homo sapien
atatttggccaacttttaacatgtt

SEQ ID NO: 1756149 - DNA, 25 bp, Homo sapien
catatttggccaacttttaacatgt

SEQ ID NO: 1756150 - DNA, 25 bp, Homo sapien
tatttggccaacttttaacatgttc

SEQ ID NO: 1756151 - DNA, 25 bp, Homo sapien
ctctgggtgggatgaaaactgaaat

SEQ ID NO: 1756152 - DNA, 25 bp, Homo sapien
tagatggatctaaagcggacagttc

SEQ ID NO: 1756153 - DNA, 25 bp, Homo sapien
tgcagaccatctgacgaaaagaaac

SEQ ID NO: 1756154 - DNA, 25 bp, Homo sapien
tgggatgaaaactgaaatgtagatg

SEQ ID NO: 1756155 - DNA, 25 bp, Homo sapien
gcctgagattcaacactaagggttt

SEQ ID NO: 1756156 - DNA, 25 bp, Homo sapien
tctatctgcctgagattcaacacta

SEQ ID NO: 1756157 - DNA, 25 bp, Homo sapien
taaagtaaactctatctgcctgaga

SEQ ID NO: 1756158 - DNA, 25 bp, Homo sapien
cctttgttaaagtaaactctatctg

SEQ ID NO: 1756159 - DNA, 25 bp, Homo sapien
aatctgatggagttatggaagcttt

SEQ ID NO: 1756160 - DNA, 25 bp, Homo sapien
gatggagttatggaagcttttccca

SEQ ID NO: 1756161 - DNA, 25 bp, Homo sapien
tgatggagttatggaagcttttccc

SEQ ID NO: 1756162 - DNA, 25 bp, Homo sapien
tctgatggagttatggaagcttttc

SEQ ID NO: 1756163 - DNA, 25 bp, Homo sapien
tgcaccagtgcttccctaaattctc

SEQ ID NO: 1756164 - DNA, 25 bp, Homo sapien
tccattgaagggtatcccactcatt

SEQ ID NO: 1756165 - DNA, 25 bp, Homo sapien
tcagaaagcgggatccacttctcct

SEQ ID NO: 1756166 - DNA, 25 bp, Homo sapien
gggtatcccactcattaactgaaat

SEQ ID NO: 1756167 - DNA, 25 bp, Homo sapien
ttttatccaatctataacctattgt

SEQ ID NO: 1756168 - DNA, 25 bp, Homo sapien
tctacctgaagatactttgctccca

SEQ ID NO: 1756169 - DNA, 25 bp, Homo sapien
catatgtgatgttttctcatctaaa

SEQ ID NO: 1756170 - DNA, 25 bp, Homo sapien
aagaaagcaggttctacaatgatgt

SEQ ID NO: 1756171 - DNA, 25 bp, Homo sapien
ggatgatccaacacatccagtatga

SEQ ID NO: 1756172 - DNA, 25 bp, Homo sapien
gaagagtaagccctaggtaatggtc

SEQ ID NO: 1756173 - DNA, 25 bp, Homo sapien
gccattatcacaagagtggattcat

SEQ ID NO: 1756174 - DNA, 25 bp, Homo sapien
taatggtcattgcaaaaaagagggt

SEQ ID NO: 1756175 - DNA, 25 bp, Homo sapien
ttaggaatgagtaagccccagacat

SEQ ID NO: 1756176 - DNA, 25 bp, Homo sapien
aagtgatacctaaatgcagttaggt

SEQ ID NO: 1756177 - DNA, 25 bp, Homo sapien
taggtcatagactccctcaaaatta

SEQ ID NO: 1756178 - DNA, 25 bp, Homo sapien
gagattttctaggtctaaatgaatc

SEQ ID NO: 1756179 - DNA, 25 bp, Homo sapien
tctcttccacatcatcaccctcgtc

SEQ ID NO: 1756180 - DNA, 25 bp, Homo sapien
ctcttccacatcatcaccctcgtca

SEQ ID NO: 1756181 - DNA, 25 bp, Homo sapien
tcttctcttccacatcatcaccctc

SEQ ID NO: 1756182 - DNA, 25 bp, Homo sapien
cctcttctcttccacatcatcaccc

SEQ ID NO: 1756183 - DNA, 25 bp, Homo sapien
ttcctcctcccgagtgaatcacagc

SEQ ID NO: 1756184 - DNA, 25 bp, Homo sapien
ttccctgggtccgtcttcgattggc

SEQ ID NO: 1756185 - DNA, 25 bp, Homo sapien
ggtccgtcttcgattggctgccctc

SEQ ID NO: 1756186 - DNA, 25 bp, Homo sapien
cgagtgaatcacagcccgctcagtg

SEQ ID NO: 1756187 - DNA, 25 bp, Homo sapien
ttccctcccacgctctaatgcacat

SEQ ID NO: 1756188 - DNA, 25 bp, Homo sapien
taagttcaatacatctctttgctct

SEQ ID NO: 1756189 - DNA, 25 bp, Homo sapien
gccaaggcatgaaagcgtggcctct

SEQ ID NO: 1756190 - DNA, 25 bp, Homo sapien
tttcgagcccgcaaacagttgcagg

SEQ ID NO: 1756191 - DNA, 25 bp, Homo sapien
gtggctccaatccttttcaaaacta

SEQ ID NO: 1756192 - DNA, 25 bp, Homo sapien
aatgtggctccaatccttttcaaaa

SEQ ID NO: 1756193 - DNA, 25 bp, Homo sapien
aactgtgtctaacctgaaaatgtgg

SEQ ID NO: 1756194 - DNA, 25 bp, Homo sapien
ctaacaactgtgtctaacctgaaaa

SEQ ID NO: 1756195 - DNA, 25 bp, Homo sapien
tcaacgagctaggaaagaaagtgaa

SEQ ID NO: 1756196 - DNA, 25 bp, Homo sapien
caattcgctggtggtatcaaaggtt

SEQ ID NO: 1756197 - DNA, 25 bp, Homo sapien
caaaattccacaattcgctggtggt

SEQ ID NO: 1756198 - DNA, 25 bp, Homo sapien
tccacaattcgctggtggtatcaaa

SEQ ID NO: 1756199 - DNA, 25 bp, Homo sapien
tcattatcaaaattccacaattcgc

SEQ ID NO: 1756200 - DNA, 25 bp, Homo sapien
ttctgcgcacaaagcctgttcccag

SEQ ID NO: 1756201 - DNA, 25 bp, Homo sapien
agggcttctgcgcacaaagcctgtt

SEQ ID NO: 1756202 - DNA, 25 bp, Homo sapien
tcctgaatccccaactttcccagca

SEQ ID NO: 1756203 - DNA, 25 bp, Homo sapien
tgaatccccaactttcccagcacca

SEQ ID NO: 1756204 - DNA, 25 bp, Homo sapien
caggttactgggagtgactcaggca

SEQ ID NO: 1756205 - DNA, 25 bp, Homo sapien
ggaacaggcaggttactgggagtga

SEQ ID NO: 1756206 - DNA, 25 bp, Homo sapien
caggcaggttactgggagtgactca

SEQ ID NO: 1756207 - DNA, 25 bp, Homo sapien
ctgggaacaggcaggttactgggag

SEQ ID NO: 1756208 - DNA, 25 bp, Homo sapien
ggaggacaaccaagtggccaggagg

SEQ ID NO: 1756209 - DNA, 25 bp, Homo sapien
gaggacaaccaagtggccaggagga

SEQ ID NO: 1756210 - DNA, 25 bp, Homo sapien
aggacaaccaagtggccaggaggaa

SEQ ID NO: 1756211 - DNA, 25 bp, Homo sapien
cgggaggacaaccaagtggccagga

SEQ ID NO: 1756212 - DNA, 25 bp, Homo sapien
taaaatacatggacgagtcagaagg

SEQ ID NO: 1756213 - DNA, 25 bp, Homo sapien
tttataaaatacatggacgagtcag

SEQ ID NO: 1756214 - DNA, 25 bp, Homo sapien
aatacatggacgagtcagaaggagc

SEQ ID NO: 1756215 - DNA, 25 bp, Homo sapien
tataaaatacatggacgagtcagaa

SEQ ID NO: 1756216 - DNA, 25 bp, Homo sapien
tttgtcacgtaaatggtctcagaaa

SEQ ID NO: 1756217 - DNA, 25 bp, Homo sapien
tcacaacaatgccacattttcctga

SEQ ID NO: 1756218 - DNA, 25 bp, Homo sapien
ctttgtcacgtaaatggtctcagaa

SEQ ID NO: 1756219 - DNA, 25 bp, Homo sapien
agataatcacaacaatgccacattt

SEQ ID NO: 1756220 - DNA, 25 bp, Homo sapien
ttggcaggcttgtctgtactttcac

SEQ ID NO: 1756221 - DNA, 25 bp, Homo sapien
acacagcagcaagctcttgcatgat

SEQ ID NO: 1756222 - DNA, 25 bp, Homo sapien
tcattttgaattggcccgaatctgg

SEQ ID NO: 1756223 - DNA, 25 bp, Homo sapien
catgatggagttcgccttggcaggc

SEQ ID NO: 1756224 - DNA, 25 bp, Homo sapien
ttccttgtgatttatgtgccaactg

SEQ ID NO: 1756225 - DNA, 25 bp, Homo sapien
ttatgtgccaactgcctgtagccag

SEQ ID NO: 1756226 - DNA, 25 bp, Homo sapien
tgatttatgtgccaactgcctgtag

SEQ ID NO: 1756227 - DNA, 25 bp, Homo sapien
tgtgatttatgtgccaactgcctgt

SEQ ID NO: 1756228 - DNA, 25 bp, Homo sapien
tgtccctatcaaaacagttctgttt

SEQ ID NO: 1756229 - DNA, 25 bp, Homo sapien
gtcttgtccacgcagaggatctgaa

SEQ ID NO: 1756230 - DNA, 25 bp, Homo sapien
ttaaatcccgtctggaggacccatc

SEQ ID NO: 1756231 - DNA, 25 bp, Homo sapien
tggcccagagctggtcttgtccacg

SEQ ID NO: 1756232 - DNA, 25 bp, Homo sapien
gaagtttaattggagcgaagcaacc

SEQ ID NO: 1756233 - DNA, 25 bp, Homo sapien
tggacactgtgttaatgcaattcta

SEQ ID NO: 1756234 - DNA, 25 bp, Homo sapien
taccaccagggacctctatctgagg

SEQ ID NO: 1756235 - DNA, 25 bp, Homo sapien
ccatagaaatgtagagttgtgagcc

SEQ ID NO: 1756236 - DNA, 25 bp, Homo sapien
tgctggttgtactcattggaatctg

SEQ ID NO: 1756237 - DNA, 25 bp, Homo sapien
tgccatgatgtgaaaccacagagcc

SEQ ID NO: 1756238 - DNA, 25 bp, Homo sapien
agagcccaagttctgtgtggatgtc

SEQ ID NO: 1756239 - DNA, 25 bp, Homo sapien
atgtcccgtgtctggagagtggctc

SEQ ID NO: 1756240 - DNA, 25 bp, Homo sapien
ctctctaagcttggaatctccttcg

SEQ ID NO: 1756241 - DNA, 25 bp, Homo sapien
taaaccttcagctatgtcaaagacc

SEQ ID NO: 1756242 - DNA, 25 bp, Homo sapien
gcttggaatctccttcgcagaatga

SEQ ID NO: 1756243 - DNA, 25 bp, Homo sapien
tcgcagaatgatataaaccttcagc

SEQ ID NO: 1756244 - DNA, 25 bp, Homo sapien
gggaagagcagggtgattgcaggtc

SEQ ID NO: 1756245 - DNA, 25 bp, Homo sapien
tgtaatggaaactcctcctcattat

SEQ ID NO: 1756246 - DNA, 25 bp, Homo sapien
cttggtgggcacacgacgaatatgg

SEQ ID NO: 1756247 - DNA, 25 bp, Homo sapien
ttatgaagctactgccttggtgggc

SEQ ID NO: 1756248 - DNA, 25 bp, Homo sapien
tcatctatcaataaatcatcagcca

SEQ ID NO: 1756249 - DNA, 25 bp, Homo sapien
tctttggcaatacaattcccttaaa

SEQ ID NO: 1756250 - DNA, 25 bp, Homo sapien
taatagacttaaaatccagttgctt

SEQ ID NO: 1756251 - DNA, 25 bp, Homo sapien
tgctttccgtcagttccagatgcca

SEQ ID NO: 1756252 - DNA, 25 bp, Homo sapien
aaattaacacttccacaagcttgat

SEQ ID NO: 1756253 - DNA, 25 bp, Homo sapien
tccaaaattaacacttccacaagct

SEQ ID NO: 1756254 - DNA, 25 bp, Homo sapien
acacttccacaagcttgatgaatgg

SEQ ID NO: 1756255 - DNA, 25 bp, Homo sapien
aagcttgatgaatggggaccttgtg

SEQ ID NO: 1756256 - DNA, 25 bp, Homo sapien
ctgcacagataccatttggacaaag

SEQ ID NO: 1756257 - DNA, 25 bp, Homo sapien
gcacagataccatttggacaaagtg

SEQ ID NO: 1756258 - DNA, 25 bp, Homo sapien
tgcacagataccatttggacaaagt

SEQ ID NO: 1756259 - DNA, 25 bp, Homo sapien
ccaggatggtcagcggtgctgtcac

SEQ ID NO: 1756260 - DNA, 25 bp, Homo sapien
gatggtcagcggtgctgtcacctcc

SEQ ID NO: 1756261 - DNA, 25 bp, Homo sapien
gaccaggatggtcagcggtgctgtc

SEQ ID NO: 1756262 - DNA, 25 bp, Homo sapien
aggatggtcagcggtgctgtcacct

SEQ ID NO: 1756263 - DNA, 25 bp, Homo sapien
gaaggtgcaaaacgtttctccggca

SEQ ID NO: 1756264 - DNA, 25 bp, Homo sapien
gtcttgaaggtgcaaaacgtttctc

SEQ ID NO: 1756265 - DNA, 25 bp, Homo sapien
cttgaaggtgcaaaacgtttctccg

SEQ ID NO: 1756266 - DNA, 25 bp, Homo sapien
gagtcttgaaggtgcaaaacgtttc

SEQ ID NO: 1756267 - DNA, 25 bp, Homo sapien
gttccagatcctgacaacggagtcc

SEQ ID NO: 1756268 - DNA, 25 bp, Homo sapien
tcatgccaggctacttcacaagtga

SEQ ID NO: 1756269 - DNA, 25 bp, Homo sapien
tacacaggctctttgtcatgccagg

SEQ ID NO: 1756270 - DNA, 25 bp, Homo sapien
catgcctgcagacatcagtctgtgc

SEQ ID NO: 1756271 - DNA, 25 bp, Homo sapien
gacattgaaggctttggtatgacaa

SEQ ID NO: 1756272 - DNA, 25 bp, Homo sapien
attccatgatgtcgtttccatctag

SEQ ID NO: 1756273 - DNA, 25 bp, Homo sapien
catgatgtcgtttccatctagtccc

SEQ ID NO: 1756274 - DNA, 25 bp, Homo sapien
aaaaattccatgatgtcgtttccat

SEQ ID NO: 1756275 - DNA, 25 bp, Homo sapien
ccagctctttgttatcattcacctt

SEQ ID NO: 1756276 - DNA, 25 bp, Homo sapien
ctccagctctttgttatcattcacc

SEQ ID NO: 1756277 - DNA, 25 bp, Homo sapien
tccagctctttgttatcattcacct

SEQ ID NO: 1756278 - DNA, 25 bp, Homo sapien
atcttctaagtggccccgcagagtc

SEQ ID NO: 1756279 - DNA, 25 bp, Homo sapien
agtggccccgcagagtcttcacaac

SEQ ID NO: 1756280 - DNA, 25 bp, Homo sapien
tccttgttcaactgggcctcgtcct

SEQ ID NO: 1756281 - DNA, 25 bp, Homo sapien
cgtcctcatcctgaaaagaaatctg

SEQ ID NO: 1756282 - DNA, 25 bp, Homo sapien
ccatatgatggctgtgtcatccaca

SEQ ID NO: 1756283 - DNA, 25 bp, Homo sapien
cataaaattcccatcagttgcccac

SEQ ID NO: 1756284 - DNA, 25 bp, Homo sapien
atggctgtgtcatccacagagggag

SEQ ID NO: 1756285 - DNA, 25 bp, Homo sapien
aagccataaaattcccatcagttgc

SEQ ID NO: 1756286 - DNA, 25 bp, Homo sapien
aattgatattttttgtcctttattg

SEQ ID NO: 1756287 - DNA, 25 bp, Homo sapien
ttgatattttttgtcctttattgac

SEQ ID NO: 1756288 - DNA, 25 bp, Homo sapien
atgttaattgatattttttgtcctt

SEQ ID NO: 1756289 - DNA, 25 bp, Homo sapien
ttatgttaattgatattttttgtcc

SEQ ID NO: 1756290 - DNA, 25 bp, Homo sapien
tatacctgcagcaccgtgtcacagc

SEQ ID NO: 1756291 - DNA, 25 bp, Homo sapien
tgtcatcatgaaacatgcggtagct

SEQ ID NO: 1756292 - DNA, 25 bp, Homo sapien
catcatgaaacatgcggtagcttct

SEQ ID NO: 1756293 - DNA, 25 bp, Homo sapien
tcatcatgaaacatgcggtagcttc

SEQ ID NO: 1756294 - DNA, 25 bp, Homo sapien
aggagcaaagatccattgggagtga

SEQ ID NO: 1756295 - DNA, 25 bp, Homo sapien
gtgaggagcaaagatccattgggag

SEQ ID NO: 1756296 - DNA, 25 bp, Homo sapien
tgaggagcaaagatccattgggagt

SEQ ID NO: 1756297 - DNA, 25 bp, Homo sapien
gagcaaagatccattgggagtgaaa

SEQ ID NO: 1756298 - DNA, 25 bp, Homo sapien
ggagaaaacgtaagtgatgttcatt

SEQ ID NO: 1756299 - DNA, 25 bp, Homo sapien
ccggagaaaacgtaagtgatgttca

SEQ ID NO: 1756300 - DNA, 25 bp, Homo sapien
cttcccggagaaaacgtaagtgatg

SEQ ID NO: 1756301 - DNA, 25 bp, Homo sapien
agaaaacgtaagtgatgttcattac

SEQ ID NO: 1756302 - DNA, 25 bp, Homo sapien
agttcaaaatagaccagacagctgc

SEQ ID NO: 1756303 - DNA, 25 bp, Homo sapien
tcagttcaaaatagaccagacagct

SEQ ID NO: 1756304 - DNA, 25 bp, Homo sapien
cagttcaaaatagaccagacagctg

SEQ ID NO: 1756305 - DNA, 25 bp, Homo sapien
caggcggtagggcagactcattagc

SEQ ID NO: 1756306 - DNA, 25 bp, Homo sapien
tagggcagactcattagctccgcac

SEQ ID NO: 1756307 - DNA, 25 bp, Homo sapien
ggtagggcagactcattagctccgc

SEQ ID NO: 1756308 - DNA, 25 bp, Homo sapien
gcggtagggcagactcattagctcc

SEQ ID NO: 1756309 - DNA, 25 bp, Homo sapien
cgctagaccatgaaatgtcattgag

SEQ ID NO: 1756310 - DNA, 25 bp, Homo sapien
caggaaggcgccatcgctagaccat

SEQ ID NO: 1756311 - DNA, 25 bp, Homo sapien
aggcgccatcgctagaccatgaaat

SEQ ID NO: 1756312 - DNA, 25 bp, Homo sapien
tcgctagaccatgaaatgtcattga

SEQ ID NO: 1756313 - DNA, 25 bp, Homo sapien
gtttctcaaatgtcacaaacgagca

SEQ ID NO: 1756314 - DNA, 25 bp, Homo sapien
aatgtcacaaacgagcagtaactgt

SEQ ID NO: 1756315 - DNA, 25 bp, Homo sapien
tcaaatgtcacaaacgagcagtaac

SEQ ID NO: 1756316 - DNA, 25 bp, Homo sapien
tctcaaatgtcacaaacgagcagta

SEQ ID NO: 1756317 - DNA, 25 bp, Homo sapien
ttgacagcagaatgatagagggagg

SEQ ID NO: 1756318 - DNA, 25 bp, Homo sapien
cagttgttccctctacgggtctggg

SEQ ID NO: 1756319 - DNA, 25 bp, Homo sapien
gaatgatagagggagggtccctggt

SEQ ID NO: 1756320 - DNA, 25 bp, Homo sapien
tgctggcagttgttccctctacggg

SEQ ID NO: 1756321 - DNA, 25 bp, Homo sapien
tagctctacgggactgtcctgagca

SEQ ID NO: 1756322 - DNA, 25 bp, Homo sapien
tctgggctgttttagctctacggga

SEQ ID NO: 1756323 - DNA, 25 bp, Homo sapien
gggtggagattacattgattggtac

SEQ ID NO: 1756324 - DNA, 25 bp, Homo sapien
tggagattacattgattggtacaga

SEQ ID NO: 1756325 - DNA, 25 bp, Homo sapien
ctggaggtccaggagaccttcgggt

SEQ ID NO: 1756326 - DNA, 25 bp, Homo sapien
ggaggtccaggagaccttcgggtca

SEQ ID NO: 1756327 - DNA, 25 bp, Homo sapien
tggaggtccaggagaccttcgggtc

SEQ ID NO: 1756328 - DNA, 25 bp, Homo sapien
gaggtccaggagaccttcgggtcat

SEQ ID NO: 1756329 - DNA, 25 bp, Homo sapien
ttgttgagtggaaatccaaattaaa

SEQ ID NO: 1756330 - DNA, 25 bp, Homo sapien
aaagccattctgttttgcagcaatg

SEQ ID NO: 1756331 - DNA, 25 bp, Homo sapien
tagttcttttgtgtgagggtggtaa

SEQ ID NO: 1756332 - DNA, 25 bp, Homo sapien
aatgcttgtcaatgtgatgccgttc

SEQ ID NO: 1756333 - DNA, 25 bp, Homo sapien
tctcatcgtacattggcagctcaaa

SEQ ID NO: 1756334 - DNA, 25 bp, Homo sapien
ttctgtcatgtcaatgagtggattt

SEQ ID NO: 1756335 - DNA, 25 bp, Homo sapien
ttctcatcgtacattggcagctcaa

SEQ ID NO: 1756336 - DNA, 25 bp, Homo sapien
tctgtcatgtcaatgagtggatttc

SEQ ID NO: 1756337 - DNA, 25 bp, Homo sapien
cagaaaataagagttgattcccagt

SEQ ID NO: 1756338 - DNA, 25 bp, Homo sapien
ttttaaatggattatgctcaggaac

SEQ ID NO: 1756339 - DNA, 25 bp, Homo sapien
gattcccagtctgatccgtctgcag

SEQ ID NO: 1756340 - DNA, 25 bp, Homo sapien
tagctaattgcatgagggccgcctc

SEQ ID NO: 1756341 - DNA, 25 bp, Homo sapien
gcagtgagagttcttttaggatcaa

SEQ ID NO: 1756342 - DNA, 25 bp, Homo sapien
gaaacacctcggacgcctacttgta

SEQ ID NO: 1756343 - DNA, 25 bp, Homo sapien
tagcctctatgattgctccttgcag

SEQ ID NO: 1756344 - DNA, 25 bp, Homo sapien
tcagaggtacagaattcgaaagcag

SEQ ID NO: 1756345 - DNA, 25 bp, Homo sapien
ttttcccaggagaagcagcgtcgcc

SEQ ID NO: 1756346 - DNA, 25 bp, Homo sapien
tcagcaattgcccagctgactagct

SEQ ID NO: 1756347 - DNA, 25 bp, Homo sapien
gcgtcgccagggtatgacggcacca

SEQ ID NO: 1756348 - DNA, 25 bp, Homo sapien
ttctaccggcttttcagtaccagct

SEQ ID NO: 1756349 - DNA, 25 bp, Homo sapien
ccttatttattgttcgctcttttga

SEQ ID NO: 1756350 - DNA, 25 bp, Homo sapien
taatatcccctatcgtgtcaaactg

SEQ ID NO: 1756351 - DNA, 25 bp, Homo sapien
tctgcacgtatttatcgaggatctg

SEQ ID NO: 1756352 - DNA, 25 bp, Homo sapien
gctttgcaaaacagacggtagtggg

SEQ ID NO: 1756353 - DNA, 25 bp, Homo sapien
ctcgaattgaccaggagccaagctg

SEQ ID NO: 1756354 - DNA, 25 bp, Homo sapien
ccttcaacagaggaatgaattaatc

SEQ ID NO: 1756355 - DNA, 25 bp, Homo sapien
actgctgggtggagtagtgggaggc

SEQ ID NO: 1756356 - DNA, 25 bp, Homo sapien
ttcccagtgtcctcgaattgaccag

SEQ ID NO: 1756357 - DNA, 25 bp, Homo sapien
tgctaattctaaagcgaatgtattc

SEQ ID NO: 1756358 - DNA, 25 bp, Homo sapien
aattctaaagcgaatgtattccatg

SEQ ID NO: 1756359 - DNA, 25 bp, Homo sapien
ccctgctaattctaaagcgaatgta

SEQ ID NO: 1756360 - DNA, 25 bp, Homo sapien
ggcaatctgaatccacccaaccctc

SEQ ID NO: 1756361 - DNA, 25 bp, Homo sapien
ccttggtaagctttgaagagatggt

SEQ ID NO: 1756362 - DNA, 25 bp, Homo sapien
tctttagaacatgggagtagttatc

SEQ ID NO: 1756363 - DNA, 25 bp, Homo sapien
tagttatcacctatgattctcagct

SEQ ID NO: 1756364 - DNA, 25 bp, Homo sapien
tcttcctcgtctgatcagactgagg

SEQ ID NO: 1756365 - DNA, 25 bp, Homo sapien
tgttttgaattagggggagcacctc

SEQ ID NO: 1756366 - DNA, 25 bp, Homo sapien
catttgttttgaattagggggagca

SEQ ID NO: 1756367 - DNA, 25 bp, Homo sapien
cctctcctctaacagggctcttcaa

SEQ ID NO: 1756368 - DNA, 25 bp, Homo sapien
aatgaggccctcattgtagcaggaa

SEQ ID NO: 1756369 - DNA, 25 bp, Homo sapien
tgctgtgttgggaaatccgaatcac

SEQ ID NO: 1756370 - DNA, 25 bp, Homo sapien
gaaatccgaatcacccactaagcct

SEQ ID NO: 1756371 - DNA, 25 bp, Homo sapien
caatgctgctgttatctggcaatga

SEQ ID NO: 1756372 - DNA, 25 bp, Homo sapien
ctcaggcctgacacagtctcagaaa

SEQ ID NO: 1756373 - DNA, 25 bp, Homo sapien
tcaggcctgacacagtctcagaaac

SEQ ID NO: 1756374 - DNA, 25 bp, Homo sapien
tcacccctccataccactcaggcct

SEQ ID NO: 1756375 - DNA, 25 bp, Homo sapien
cctccataccactcaggcctgacac

SEQ ID NO: 1756376 - DNA, 25 bp, Homo sapien
cacagtagacgtttggcttttgttg

SEQ ID NO: 1756377 - DNA, 25 bp, Homo sapien
ggccattcaagtcacagtagacgtt

SEQ ID NO: 1756378 - DNA, 25 bp, Homo sapien
tcaagtcacagtagacgtttggctt

SEQ ID NO: 1756379 - DNA, 25 bp, Homo sapien
ttttcaggccattcaagtcacagta

SEQ ID NO: 1756380 - DNA, 25 bp, Homo sapien
ccaagcatgtcatggataagtgttt

SEQ ID NO: 1756381 - DNA, 25 bp, Homo sapien
gccaagcatgtcatggataagtgtt

SEQ ID NO: 1756382 - DNA, 25 bp, Homo sapien
tgcagctctggctggtgtctctgcc

SEQ ID NO: 1756383 - DNA, 25 bp, Homo sapien
ctcaactgtttctttgggcaccacc

SEQ ID NO: 1756384 - DNA, 25 bp, Homo sapien
aactgtttctttgggcaccaccctg

SEQ ID NO: 1756385 - DNA, 25 bp, Homo sapien
caccctgcagctctggctggtgtct

SEQ ID NO: 1756386 - DNA, 25 bp, Homo sapien
gagttaccctggctgaagtaccgag

SEQ ID NO: 1756387 - DNA, 25 bp, Homo sapien
tctaactttgattccctgaaggtca

SEQ ID NO: 1756388 - DNA, 25 bp, Homo sapien
ggctgaagtaccgagtacatcctac

SEQ ID NO: 1756389 - DNA, 25 bp, Homo sapien
catgtatgggagtagagagttaccc

SEQ ID NO: 1756390 - DNA, 25 bp, Homo sapien
tcagacaatccagtcctacaggtca

SEQ ID NO: 1756391 - DNA, 25 bp, Homo sapien
atcacgccaactggattcagtcgca

SEQ ID NO: 1756392 - DNA, 25 bp, Homo sapien
cagtcgcaaggactgtaattcagac

SEQ ID NO: 1756393 - DNA, 25 bp, Homo sapien
tgtaattcagacaatccagtcctac

SEQ ID NO: 1756394 - DNA, 25 bp, Homo sapien
ctgctccaaactgcccaaggctgat

SEQ ID NO: 1756395 - DNA, 25 bp, Homo sapien
ccctttaggaaatgtagtctcatgg

SEQ ID NO: 1756396 - DNA, 25 bp, Homo sapien
agatactccccttgcaacacagagg

SEQ ID NO: 1756397 - DNA, 25 bp, Homo sapien
gaggaagcttcatacccttggcagc

SEQ ID NO: 1756398 - DNA, 25 bp, Homo sapien
tcaagtaggtttgcaaacaagttgg

SEQ ID NO: 1756399 - DNA, 25 bp, Homo sapien
tatcaagtaggtttgcaaacaagtt

SEQ ID NO: 1756400 - DNA, 25 bp, Homo sapien
caagtaggtttgcaaacaagttggg

SEQ ID NO: 1756401 - DNA, 25 bp, Homo sapien
ctatcaagtaggtttgcaaacaagt

SEQ ID NO: 1756402 - DNA, 25 bp, Homo sapien
acacgcctggccttccgtgagcaga

SEQ ID NO: 1756403 - DNA, 25 bp, Homo sapien
gagcagaagtttcactactgaaatc

SEQ ID NO: 1756404 - DNA, 25 bp, Homo sapien
tctcatttttcataccgccggaaga

SEQ ID NO: 1756405 - DNA, 25 bp, Homo sapien
taccgccggaagaagagacaatttg

SEQ ID NO: 1756406 - DNA, 25 bp, Homo sapien
gtaattttatgacacatggcttcct

SEQ ID NO: 1756407 - DNA, 25 bp, Homo sapien
gacaagtaattttatgacacatggc

SEQ ID NO: 1756408 - DNA, 25 bp, Homo sapien
ctccggcttcgtgaaggacaagtaa

SEQ ID NO: 1756409 - DNA, 25 bp, Homo sapien
gcttcgtgaaggacaagtaatttta

SEQ ID NO: 1756410 - DNA, 25 bp, Homo sapien
acaggtcgctttcactgggagccac

SEQ ID NO: 1756411 - DNA, 25 bp, Homo sapien
tgaaagatctctaaagccctcctcg

SEQ ID NO: 1756412 - DNA, 25 bp, Homo sapien
tcgtgaaacgtgatgccaacacagc

SEQ ID NO: 1756413 - DNA, 25 bp, Homo sapien
ttctccgtggtcacagacagactgg

SEQ ID NO: 1756414 - DNA, 25 bp, Homo sapien
aatgcagctagaactggcaaatgct

SEQ ID NO: 1756415 - DNA, 25 bp, Homo sapien
ttagaatgcagctagaactggcaaa

SEQ ID NO: 1756416 - DNA, 25 bp, Homo sapien
gaatgcagctagaactggcaaatgc

SEQ ID NO: 1756417 - DNA, 25 bp, Homo sapien
gcagctagaactggcaaatgctcac

SEQ ID NO: 1756418 - DNA, 25 bp, Homo sapien
ttcttggtgccagttgcacccgata

SEQ ID NO: 1756419 - DNA, 25 bp, Homo sapien
gctgacccatattggcgcagttgtc

SEQ ID NO: 1756420 - DNA, 25 bp, Homo sapien
tgaggaggtgagatgctgacccata

SEQ ID NO: 1756421 - DNA, 25 bp, Homo sapien
tcacctgggcatgggtgttgttctt

SEQ ID NO: 1756422 - DNA, 25 bp, Homo sapien
caactccctggaaggctcaaggctc

SEQ ID NO: 1756423 - DNA, 25 bp, Homo sapien
taaaacacaagtgatccatgaggct

SEQ ID NO: 1756424 - DNA, 25 bp, Homo sapien
ctaaaagctgaggttgtgcaactcc

SEQ ID NO: 1756425 - DNA, 25 bp, Homo sapien
agcctcattgcctgtaattgtaaac

SEQ ID NO: 1756426 - DNA, 25 bp, Homo sapien
atgccaatgatctagcaggctctgt

SEQ ID NO: 1756427 - DNA, 25 bp, Homo sapien
ctctgtgcctgtttcggactgtcct

SEQ ID NO: 1756428 - DNA, 25 bp, Homo sapien
taacgtaacaatgccaatgatctag

SEQ ID NO: 1756429 - DNA, 25 bp, Homo sapien
tttcggactgtcctaggccagtcac

SEQ ID NO: 1756430 - DNA, 25 bp, Homo sapien
ttaagggaaacatataggcacacca

SEQ ID NO: 1756431 - DNA, 25 bp, Homo sapien
gggaaacatataggcacaccaaggc

SEQ ID NO: 1756432 - DNA, 25 bp, Homo sapien
tataaggttgtgatagggtgaaagc

SEQ ID NO: 1756433 - DNA, 25 bp, Homo sapien
accaaggctctgacactagatggac

SEQ ID NO: 1756434 - DNA, 25 bp, Homo sapien
aaagataagtaagacctgggctctc

SEQ ID NO: 1756435 - DNA, 25 bp, Homo sapien
caaagataagtaagacctgggctct

SEQ ID NO: 1756436 - DNA, 25 bp, Homo sapien
tccaaagataagtaagacctgggct

SEQ ID NO: 1756437 - DNA, 25 bp, Homo sapien
ccaaagataagtaagacctgggctc

SEQ ID NO: 1756438 - DNA, 25 bp, Homo sapien
gtaaacagagttggcctgggggtca

SEQ ID NO: 1756439 - DNA, 25 bp, Homo sapien
tcaaagtaaacagagttggcctggg

SEQ ID NO: 1756440 - DNA, 25 bp, Homo sapien
cctgggggtcagtgcaatttagtac

SEQ ID NO: 1756441 - DNA, 25 bp, Homo sapien
tttctcaaagtaaacagagttggcc

SEQ ID NO: 1756442 - DNA, 25 bp, Homo sapien
ccccagatcctccaactccaccctt

SEQ ID NO: 1756443 - DNA, 25 bp, Homo sapien
agatcctccaactccacccttcctt

SEQ ID NO: 1756444 - DNA, 25 bp, Homo sapien
cagatcctccaactccacccttcct

SEQ ID NO: 1756445 - DNA, 25 bp, Homo sapien
tacagccccagatcctccaactcca

SEQ ID NO: 1756446 - DNA, 25 bp, Homo sapien
cactttgtctactgatggaacttgc

SEQ ID NO: 1756447 - DNA, 25 bp, Homo sapien
ttcccacacatacgcaggctttgtt

SEQ ID NO: 1756448 - DNA, 25 bp, Homo sapien
aggctttgttcccacagtctgggtc

SEQ ID NO: 1756449 - DNA, 25 bp, Homo sapien
tcaaaatatcctctgcataacagct

SEQ ID NO: 1756450 - DNA, 25 bp, Homo sapien
tctacatgggtggtgatgggtacat

SEQ ID NO: 1756451 - DNA, 25 bp, Homo sapien
tctttacaaggtgagcgtttgcgtc

SEQ ID NO: 1756452 - DNA, 25 bp, Homo sapien
cgtttgcgtcttctacatgggtggt

SEQ ID NO: 1756453 - DNA, 25 bp, Homo sapien
tgatgggtacatgcttatgttcacc

SEQ ID NO: 1756454 - DNA, 25 bp, Homo sapien
tactgatgcaattttcctggtgctc

SEQ ID NO: 1756455 - DNA, 25 bp, Homo sapien
tgtctgattcttccctactgatgca

SEQ ID NO: 1756456 - DNA, 25 bp, Homo sapien
gctgtctgattcttccctactgatg

SEQ ID NO: 1756457 - DNA, 25 bp, Homo sapien
tcggagtctgtaggctcagtcactg

SEQ ID NO: 1756458 - DNA, 25 bp, Homo sapien
tctctcccactgtgctgtttcttgt

SEQ ID NO: 1756459 - DNA, 25 bp, Homo sapien
tctcccagctcatctcgtcctccat

SEQ ID NO: 1756460 - DNA, 25 bp, Homo sapien
cccagctcatctcgtcctccatcca

SEQ ID NO: 1756461 - DNA, 25 bp, Homo sapien
gtgtctcccagctcatctcgtcctc

SEQ ID NO: 1756462 - DNA, 25 bp, Homo sapien
aaaatatatcgaattgagttgttct

SEQ ID NO: 1756463 - DNA, 25 bp, Homo sapien
aaaaatatatcgaattgagttgttc

SEQ ID NO: 1756464 - DNA, 25 bp, Homo sapien
taaaaatatatcgaattgagttgtt

SEQ ID NO: 1756465 - DNA, 25 bp, Homo sapien
ataaaaatatatcgaattgagttgt

SEQ ID NO: 1756466 - DNA, 25 bp, Homo sapien
cattcccgtcttgggttcttgatgc

SEQ ID NO: 1756467 - DNA, 25 bp, Homo sapien
agagaaagcttggatcaaagtgaaa

SEQ ID NO: 1756468 - DNA, 25 bp, Homo sapien
ttgactggtagcattcccgtcttgg

SEQ ID NO: 1756469 - DNA, 25 bp, Homo sapien
taaacatcttcctacagataggacc

SEQ ID NO: 1756470 - DNA, 25 bp, Homo sapien
aggcactggggatgtaaccttcagg

SEQ ID NO: 1756471 - DNA, 25 bp, Homo sapien
acccaggaatgggggtaggcactgg

SEQ ID NO: 1756472 - DNA, 25 bp, Homo sapien
cactggggatgtaaccttcagggaa

SEQ ID NO: 1756473 - DNA, 25 bp, Homo sapien
gtaggcactggggatgtaaccttca

SEQ ID NO: 1756474 - DNA, 25 bp, Homo sapien
caggaccataagtgttcaccagtgt

SEQ ID NO: 1756475 - DNA, 25 bp, Homo sapien
tcttcgggtgggctaatcttccttc

SEQ ID NO: 1756476 - DNA, 25 bp, Homo sapien
tcaccagtgttattgggtcttcggg

SEQ ID NO: 1756477 - DNA, 25 bp, Homo sapien
tctcaaggagtaagggttgtaaaca

SEQ ID NO: 1756478 - DNA, 25 bp, Homo sapien
tgctggctttgaatgttcccaatca

SEQ ID NO: 1756479 - DNA, 25 bp, Homo sapien
tagtctgtgaggaagtgttatttga

SEQ ID NO: 1756480 - DNA, 25 bp, Homo sapien
cacttgctgccacttttagtctgtg

SEQ ID NO: 1756481 - DNA, 25 bp, Homo sapien
tgaaggatgattgctcatgttgagt

SEQ ID NO: 1756482 - DNA, 25 bp, Homo sapien
cactggggtatgtgtgactgagcaa

SEQ ID NO: 1756483 - DNA, 25 bp, Homo sapien
caagcggaaacttctccctgtgcat

SEQ ID NO: 1756484 - DNA, 25 bp, Homo sapien
gagagtcagggctgtgtatcccaga

SEQ ID NO: 1756485 - DNA, 25 bp, Homo sapien
tcacctgccacatgagcaagcggaa

SEQ ID NO: 1756486 - DNA, 25 bp, Homo sapien
ggtgcacagtcccacgactcgggac

SEQ ID NO: 1756487 - DNA, 25 bp, Homo sapien
gagagaggttaaggagccagcaacg

SEQ ID NO: 1756488 - DNA, 25 bp, Homo sapien
cgggaccccatctgcgttgctttgg

SEQ ID NO: 1756489 - DNA, 25 bp, Homo sapien
tcaagttcctggtgcacagtcccac

SEQ ID NO: 1756490 - DNA, 25 bp, Homo sapien
gtgaggatgtcacccagtgcagctg

SEQ ID NO: 1756491 - DNA, 25 bp, Homo sapien
tgtgaggatgtcacccagtgcagct

SEQ ID NO: 1756492 - DNA, 25 bp, Homo sapien
ggctggagtgactgatggtgccaga

SEQ ID NO: 1756493 - DNA, 25 bp, Homo sapien
agtggctggagtgactgatggtgcc

SEQ ID NO: 1756494 - DNA, 25 bp, Homo sapien
tgtgcagtggctggagtgactgatg

SEQ ID NO: 1756495 - DNA, 25 bp, Homo sapien
ctggagtgactgatggtgccagaac

SEQ ID NO: 1756496 - DNA, 25 bp, Homo sapien
gtacaatttgaatgattaagagagc

SEQ ID NO: 1756497 - DNA, 25 bp, Homo sapien
tgtacaatttgaatgattaagagag

SEQ ID NO: 1756498 - DNA, 25 bp, Homo sapien
tacaatttgaatgattaagagagcc

SEQ ID NO: 1756499 - DNA, 25 bp, Homo sapien
ctgtacaatttgaatgattaagaga

SEQ ID NO: 1756500 - DNA, 25 bp, Homo sapien
aaggccagcatattgttcacacaac

SEQ ID NO: 1756501 - DNA, 25 bp, Homo sapien
agaggaatcactcataggcccaaag

SEQ ID NO: 1756502 - DNA, 25 bp, Homo sapien
gtaagtgccactgacagttattgcc

SEQ ID NO: 1756503 - DNA, 25 bp, Homo sapien
gaatcactcataggcccaaaggcca

SEQ ID NO: 1756504 - DNA, 25 bp, Homo sapien
gaggctctattggtacataatcaaa

SEQ ID NO: 1756505 - DNA, 25 bp, Homo sapien
tgagaaaagtcgaagcaatcaagac

SEQ ID NO: 1756506 - DNA, 25 bp, Homo sapien
taaagatttcaactgtgaggctcta

SEQ ID NO: 1756507 - DNA, 25 bp, Homo sapien
catatccttactgtaattggcagaa

SEQ ID NO: 1756508 - DNA, 25 bp, Homo sapien
cactgtaggcgattaaaactgtaga

SEQ ID NO: 1756509 - DNA, 25 bp, Homo sapien
gacacccaggataattggcgatgaa

SEQ ID NO: 1756510 - DNA, 25 bp, Homo sapien
gagtgtcagtagtagaagtccagga

SEQ ID NO: 1756511 - DNA, 25 bp, Homo sapien
cagttaatagtgtgatgccgtaggg

SEQ ID NO: 1756512 - DNA, 25 bp, Homo sapien
ctgtggctgttgttgccctccctga

SEQ ID NO: 1756513 - DNA, 25 bp, Homo sapien
cctgagaacctgaccatctgggctg

SEQ ID NO: 1756514 - DNA, 25 bp, Homo sapien
ctgttgttgccctccctgagaacct

SEQ ID NO: 1756515 - DNA, 25 bp, Homo sapien
cttgttgcttgagggtgtctggtgg

SEQ ID NO: 1756516 - DNA, 25 bp, Homo sapien
ctctggcccgttctgattctcccac

SEQ ID NO: 1756517 - DNA, 25 bp, Homo sapien
taaccaagggaaccaattgactgcc

SEQ ID NO: 1756518 - DNA, 25 bp, Homo sapien
cactgccaccaagcgttaaccaagg

SEQ ID NO: 1756519 - DNA, 25 bp, Homo sapien
caattgactgccgactctggatagg

SEQ ID NO: 1756520 - DNA, 25 bp, Homo sapien
gccgactctggataggtagggtaaa

SEQ ID NO: 1756521 - DNA, 25 bp, Homo sapien
tctccctatcgaaaagatgttgttc

SEQ ID NO: 1756522 - DNA, 25 bp, Homo sapien
cagcagtcagtgatggacaagtgaa

SEQ ID NO: 1756523 - DNA, 25 bp, Homo sapien
aatggaaggtaacttgtgccagcag

SEQ ID NO: 1756524 - DNA, 25 bp, Homo sapien
gatgttgttcaagggctttgcttga

SEQ ID NO: 1756525 - DNA, 25 bp, Homo sapien
cttgtgctcagtccctcttggcttg

SEQ ID NO: 1756526 - DNA, 25 bp, Homo sapien
tgcccctccgtgtgttgcccactct

SEQ ID NO: 1756527 - DNA, 25 bp, Homo sapien
cgtgtgttgcccactcttgtgctca

SEQ ID NO: 1756528 - DNA, 25 bp, Homo sapien
cactcttgtgctcagtccctcttgg

SEQ ID NO: 1756529 - DNA, 25 bp, Homo sapien
tatgctggcagcttggctacacttg

SEQ ID NO: 1756530 - DNA, 25 bp, Homo sapien
tgcctactgggagaatggagccccg

SEQ ID NO: 1756531 - DNA, 25 bp, Homo sapien
ttctgaggctcttgaatcccctgtg

SEQ ID NO: 1756532 - DNA, 25 bp, Homo sapien
tgacaagaacttagactgaagccct

SEQ ID NO: 1756533 - DNA, 25 bp, Homo sapien
caggggaacgcagttactcttgtta

SEQ ID NO: 1756534 - DNA, 25 bp, Homo sapien
caatcccatggccagatgctgtttc

SEQ ID NO: 1756535 - DNA, 25 bp, Homo sapien
tacaaggcagttccacttggagttc

SEQ ID NO: 1756536 - DNA, 25 bp, Homo sapien
tcctttggggtaaatactcagatcc

SEQ ID NO: 1756537 - DNA, 25 bp, Homo sapien
agtttgccacggacgctcctccttt

SEQ ID NO: 1756538 - DNA, 25 bp, Homo sapien
tctcttctgctaattgcatttacat

SEQ ID NO: 1756539 - DNA, 25 bp, Homo sapien
atttacatgcctgccattagcttcc

SEQ ID NO: 1756540 - DNA, 25 bp, Homo sapien
ttacatgcctgccattagcttccac

SEQ ID NO: 1756541 - DNA, 25 bp, Homo sapien
ttctcttctgctaattgcatttaca

SEQ ID NO: 1756542 - DNA, 25 bp, Homo sapien
caccatcatcatccgtacactgatt

SEQ ID NO: 1756543 - DNA, 25 bp, Homo sapien
tccgtacactgattgtcatctagga

SEQ ID NO: 1756544 - DNA, 25 bp, Homo sapien
actggcacacgaatgcgctttccca

SEQ ID NO: 1756545 - DNA, 25 bp, Homo sapien
tgcctgcaaacctaaccaccctttg

SEQ ID NO: 1756546 - DNA, 25 bp, Homo sapien
cttcggaagagagacagttcacagc

SEQ ID NO: 1756547 - DNA, 25 bp, Homo sapien
agacagttcacagccacagcagtag

SEQ ID NO: 1756548 - DNA, 25 bp, Homo sapien
gcttcggaagagagacagttcacag

SEQ ID NO: 1756549 - DNA, 25 bp, Homo sapien
ggcttcggaagagagacagttcaca

SEQ ID NO: 1756550 - DNA, 25 bp, Homo sapien
tacatgttttcatctttgcttgtat

SEQ ID NO: 1756551 - DNA, 25 bp, Homo sapien
acatgttttcatctttgcttgtatc

SEQ ID NO: 1756552 - DNA, 25 bp, Homo sapien
ttacatgttttcatctttgcttgta

SEQ ID NO: 1756553 - DNA, 25 bp, Homo sapien
ctcttgcccatcataatagattctt

SEQ ID NO: 1756554 - DNA, 25 bp, Homo sapien
tcttgcccatcataatagattcttt

SEQ ID NO: 1756555 - DNA, 25 bp, Homo sapien
cttgcccatcataatagattctttt

SEQ ID NO: 1756556 - DNA, 25 bp, Homo sapien
acgtggtctctcatatcctcttatc

SEQ ID NO: 1756557 - DNA, 25 bp, Homo sapien
cgtggtctctcatatcctcttatct

SEQ ID NO: 1756558 - DNA, 25 bp, Homo sapien
tggtctctcatatcctcttatcttc

SEQ ID NO: 1756559 - DNA, 25 bp, Homo sapien
gtctctcatatcctcttatcttcat

SEQ ID NO: 1756560 - DNA, 25 bp, Homo sapien
tcagttaatttctgagcatggagga

SEQ ID NO: 1756561 - DNA, 25 bp, Homo sapien
cagttaatttctgagcatggaggag

SEQ ID NO: 1756562 - DNA, 25 bp, Homo sapien
gacccaccattgaggctcgcactat

SEQ ID NO: 1756563 - DNA, 25 bp, Homo sapien
aattgacagcgttcactcctggccg

SEQ ID NO: 1756564 - DNA, 25 bp, Homo sapien
aaggtgcttgcctgagtccggagac

SEQ ID NO: 1756565 - DNA, 25 bp, Homo sapien
cccttaagggcaagatgaattgaca

SEQ ID NO: 1756566 - DNA, 25 bp, Homo sapien
gctcgcgcgtccacaaaacgttctg

SEQ ID NO: 1756567 - DNA, 25 bp, Homo sapien
cgttctgcgaaattgtaagggcctc

SEQ ID NO: 1756568 - DNA, 25 bp, Homo sapien
acggcactcgctgaaaaaacaaact

SEQ ID NO: 1756569 - DNA, 25 bp, Homo sapien
tagtttattagggtagcgagagcga

SEQ ID NO: 1756570 - DNA, 25 bp, Homo sapien
cagcccgctcctgaagacttcgaag

SEQ ID NO: 1756571 - DNA, 25 bp, Homo sapien
tgaagacttcgaagcaggaaaccca

SEQ ID NO: 1756572 - DNA, 25 bp, Homo sapien
agcaatcttccaagtggcaccttcc

SEQ ID NO: 1756573 - DNA, 25 bp, Homo sapien
tcgaagcaggaaacccagcaatctt

SEQ ID NO: 1756574 - DNA, 25 bp, Homo sapien
cctcattgcagtcctaagcggcaca

SEQ ID NO: 1756575 - DNA, 25 bp, Homo sapien
ctcctcattgcagtcctaagcggca

SEQ ID NO: 1756576 - DNA, 25 bp, Homo sapien
ccctcctcattgcagtcctaagcgg

SEQ ID NO: 1756577 - DNA, 25 bp, Homo sapien
ctcattgcagtcctaagcggcacac

SEQ ID NO: 1756578 - DNA, 25 bp, Homo sapien
caagaaacgtaatagaaaagctatc

SEQ ID NO: 1756579 - DNA, 25 bp, Homo sapien
ggctcgagctcggagaacaagaaac

SEQ ID NO: 1756580 - DNA, 25 bp, Homo sapien
agcattcggaaacttctcgtcccca

SEQ ID NO: 1756581 - DNA, 25 bp, Homo sapien
cgctcgtcttccagcggaagcgtcg

SEQ ID NO: 1756582 - DNA, 25 bp, Homo sapien
agatgtcgttaggaagttacgggca

SEQ ID NO: 1756583 - DNA, 25 bp, Homo sapien
cccgccgcggaatctgctccaagaa

SEQ ID NO: 1756584 - DNA, 25 bp, Homo sapien
actgttttcggtttgcacacccagc

SEQ ID NO: 1756585 - DNA, 25 bp, Homo sapien
ggcgggactggagggctgacaaact

SEQ ID NO: 1756586 - DNA, 25 bp, Homo sapien
tctggctttcaaaaccgggaagtgc

SEQ ID NO: 1756587 - DNA, 25 bp, Homo sapien
tatgcacttgtcacgaaccgaagac

SEQ ID NO: 1756588 - DNA, 25 bp, Homo sapien
cggcggagaaaacgcgcgctctaat

SEQ ID NO: 1756589 - DNA, 25 bp, Homo sapien
caaaagctcgcattgtcactccgga

SEQ ID NO: 1756590 - DNA, 25 bp, Homo sapien
tactgagaggacacttgctttgccc

SEQ ID NO: 1756591 - DNA, 25 bp, Homo sapien
ggttgagctcagtgacatcctggga

SEQ ID NO: 1756592 - DNA, 25 bp, Homo sapien
ttaaacctgtagtcctgagcaagtc

SEQ ID NO: 1756593 - DNA, 25 bp, Homo sapien
tggatctccagtacccacaggttga

SEQ ID NO: 1756594 - DNA, 25 bp, Homo sapien
tgtgactcgtttagatttagcgctg

SEQ ID NO: 1756595 - DNA, 25 bp, Homo sapien
cgtttagatttagcgctgcttcctg

SEQ ID NO: 1756596 - DNA, 25 bp, Homo sapien
tgactcgtttagatttagcgctgct

SEQ ID NO: 1756597 - DNA, 25 bp, Homo sapien
tgctgtgactcgtttagatttagcg

SEQ ID NO: 1756598 - DNA, 25 bp, Homo sapien
tctctttcccatttgctgaaactta

SEQ ID NO: 1756599 - DNA, 25 bp, Homo sapien
ctctttcccatttgctgaaacttac

SEQ ID NO: 1756600 - DNA, 25 bp, Homo sapien
ttctctttcccatttgctgaaactt

SEQ ID NO: 1756601 - DNA, 25 bp, Homo sapien
attctctttcccatttgctgaaact

SEQ ID NO: 1756602 - DNA, 25 bp, Homo sapien
ttcagactgatcacacaagcccagc

SEQ ID NO: 1756603 - DNA, 25 bp, Homo sapien
tcatgtggcctgtgatttacagtct

SEQ ID NO: 1756604 - DNA, 25 bp, Homo sapien
ggaccatccgcattctgtcgtatac

SEQ ID NO: 1756605 - DNA, 25 bp, Homo sapien
gctttggtgtaggtattcagactga

SEQ ID NO: 1756606 - DNA, 25 bp, Homo sapien
ttttccactcaagccgcctggaaac

SEQ ID NO: 1756607 - DNA, 25 bp, Homo sapien
cagaatgtggatcttcacaagaggc

SEQ ID NO: 1756608 - DNA, 25 bp, Homo sapien
tggaaacttcctcgggacctctgaa

SEQ ID NO: 1756609 - DNA, 25 bp, Homo sapien
tgtcaacagccctatcaggaagatc

SEQ ID NO: 1756610 - DNA, 25 bp, Homo sapien
tattggcaagttagggagacacaag

SEQ ID NO: 1756611 - DNA, 25 bp, Homo sapien
caactagcttttttcaacggcagca

SEQ ID NO: 1756612 - DNA, 25 bp, Homo sapien
ggtcccttacgtattaactgtgctg

SEQ ID NO: 1756613 - DNA, 25 bp, Homo sapien
aatctaatctgcaggcttttcaagg

SEQ ID NO: 1756614 - DNA, 25 bp, Homo sapien
gttagtttacattgaccttcgcgtg

SEQ ID NO: 1756615 - DNA, 25 bp, Homo sapien
gagttagtttacattgaccttcgcg

SEQ ID NO: 1756616 - DNA, 25 bp, Homo sapien
ttagtttacattgaccttcgcgtga

SEQ ID NO: 1756617 - DNA, 25 bp, Homo sapien
tagtttacattgaccttcgcgtgac

SEQ ID NO: 1756618 - DNA, 25 bp, Homo sapien
ctttacaattctgaacaatgtgagt

SEQ ID NO: 1756619 - DNA, 25 bp, Homo sapien
tacaattctgaacaatgtgagtata

SEQ ID NO: 1756620 - DNA, 25 bp, Homo sapien
tttacaattctgaacaatgtgagta

SEQ ID NO: 1756621 - DNA, 25 bp, Homo sapien
ttacaattctgaacaatgtgagtat

SEQ ID NO: 1756622 - DNA, 25 bp, Homo sapien
cttccacgtgtttggcacgtgtcat

SEQ ID NO: 1756623 - DNA, 25 bp, Homo sapien
cgtgtcatttggagtatctgagaag

SEQ ID NO: 1756624 - DNA, 25 bp, Homo sapien
tctttctccacggtatctgagcagt

SEQ ID NO: 1756625 - DNA, 25 bp, Homo sapien
tatctgagaagctcgtccctctttc

SEQ ID NO: 1756626 - DNA, 25 bp, Homo sapien
gcaattttcatcagcaccactgcca

SEQ ID NO: 1756627 - DNA, 25 bp, Homo sapien
tgaattacagccttcccatggtcct

SEQ ID NO: 1756628 - DNA, 25 bp, Homo sapien
caccagaattatcactctgaattac

SEQ ID NO: 1756629 - DNA, 25 bp, Homo sapien
agttttactcctttgcaattttcat

SEQ ID NO: 1756630 - DNA, 25 bp, Homo sapien
tagtctgagcaagcctctggcagca

SEQ ID NO: 1756631 - DNA, 25 bp, Homo sapien
gtcaaacacaaaccatttgtcaact

SEQ ID NO: 1756632 - DNA, 25 bp, Homo sapien
ttctctacagtagtctgagcaagcc

SEQ ID NO: 1756633 - DNA, 25 bp, Homo sapien
acaaaccatttgtcaactcccaaga

SEQ ID NO: 1756634 - DNA, 25 bp, Homo sapien
ctgcatgtgctctccttccagaatc

SEQ ID NO: 1756635 - DNA, 25 bp, Homo sapien
gcatgtgctctccttccagaatctc

SEQ ID NO: 1756636 - DNA, 25 bp, Homo sapien
tgcatgtgctctccttccagaatct

SEQ ID NO: 1756637 - DNA, 25 bp, Homo sapien
cccgcttcctgtaagttaggcatct

SEQ ID NO: 1756638 - DNA, 25 bp, Homo sapien
cttcctgtaagttaggcatcttcat

SEQ ID NO: 1756639 - DNA, 25 bp, Homo sapien
ccacacccatttcccgcttcctgta

SEQ ID NO: 1756640 - DNA, 25 bp, Homo sapien
ccatttcccgcttcctgtaagttag

SEQ ID NO: 1756641 - DNA, 25 bp, Homo sapien
cccagagggcctgagcagtgcacct

SEQ ID NO: 1756642 - DNA, 25 bp, Homo sapien
gagcagtgcacctttttactgctga

SEQ ID NO: 1756643 - DNA, 25 bp, Homo sapien
gaacttcactcggtcctcccagagg

SEQ ID NO: 1756644 - DNA, 25 bp, Homo sapien
aacttcactcggtcctcccagaggg

SEQ ID NO: 1756645 - DNA, 25 bp, Homo sapien
tcagaggtggtgaaatgggcttgag

SEQ ID NO: 1756646 - DNA, 25 bp, Homo sapien
cttcagaggtggtgaaatgggcttg

SEQ ID NO: 1756647 - DNA, 25 bp, Homo sapien
cagaggtggtgaaatgggcttgagt

SEQ ID NO: 1756648 - DNA, 25 bp, Homo sapien
ttcagaggtggtgaaatgggcttga

SEQ ID NO: 1756649 - DNA, 25 bp, Homo sapien
acttccttcaatggtcttgtgcctt

SEQ ID NO: 1756650 - DNA, 25 bp, Homo sapien
tgtttattattaagagcgtggacct

SEQ ID NO: 1756651 - DNA, 25 bp, Homo sapien
cttccttcaatggtcttgtgccttc

SEQ ID NO: 1756652 - DNA, 25 bp, Homo sapien
gtttgtttattattaagagcgtgga

SEQ ID NO: 1756653 - DNA, 25 bp, Homo sapien
agtgtcacggcagcactttgtctgt

SEQ ID NO: 1756654 - DNA, 25 bp, Homo sapien
tgtctgtgttaaccgtctggcttcc

SEQ ID NO: 1756655 - DNA, 25 bp, Homo sapien
tccgcaacactggagggccgagtgt

SEQ ID NO: 1756656 - DNA, 25 bp, Homo sapien
gtgccgcggtcgctgctcttgcctc

SEQ ID NO: 1756657 - DNA, 25 bp, Homo sapien
ccagtccacattctccccgcgtccc

SEQ ID NO: 1756658 - DNA, 25 bp, Homo sapien
acccagtccacattctccccgcgtc

SEQ ID NO: 1756659 - DNA, 25 bp, Homo sapien
cccagtccacattctccccgcgtcc

SEQ ID NO: 1756660 - DNA, 25 bp, Homo sapien
cccacacgtttttccaagcaaatat

SEQ ID NO: 1756661 - DNA, 25 bp, Homo sapien
tcgtacccacacgtttttccaagca

SEQ ID NO: 1756662 - DNA, 25 bp, Homo sapien
agtccagtgtcccagaatgcctggg

SEQ ID NO: 1756663 - DNA, 25 bp, Homo sapien
tggggtcatggccgccagaccctcg

SEQ ID NO: 1756664 - DNA, 25 bp, Homo sapien
ccagaccctcggcactgtggaaaag

SEQ ID NO: 1756665 - DNA, 25 bp, Homo sapien
gaaaagctgcctcagaaaagtgtca

SEQ ID NO: 1756666 - DNA, 25 bp, Homo sapien
ctctgaacaatccctggctttacct

SEQ ID NO: 1756667 - DNA, 25 bp, Homo sapien
ctggctttacctctcatggcagaaa

SEQ ID NO: 1756668 - DNA, 25 bp, Homo sapien
tctgaacaatccctggctttacctc

SEQ ID NO: 1756669 - DNA, 25 bp, Homo sapien
cctggctttacctctcatggcagaa

SEQ ID NO: 1756670 - DNA, 25 bp, Homo sapien
gaaagagccaagaagccgtataaag

SEQ ID NO: 1756671 - DNA, 25 bp, Homo sapien
ttggtacagttgagaaagagccaag

SEQ ID NO: 1756672 - DNA, 25 bp, Homo sapien
actgccttgaaaagaagcaaggttt

SEQ ID NO: 1756673 - DNA, 25 bp, Homo sapien
caagaagccgtataaagtaaactgc

SEQ ID NO: 1756674 - DNA, 25 bp, Homo sapien
tccccttggtcccctctgccaatcc

SEQ ID NO: 1756675 - DNA, 25 bp, Homo sapien
ctctgccaatccctgaaacctcaca

SEQ ID NO: 1756676 - DNA, 25 bp, Homo sapien
tgctggagttacacttgggggcagc

SEQ ID NO: 1756677 - DNA, 25 bp, Homo sapien
caatccctgaaacctcacagtgctg

SEQ ID NO: 1756678 - DNA, 25 bp, Homo sapien
gcctgaaccgaagtaccgccatcag

SEQ ID NO: 1756679 - DNA, 25 bp, Homo sapien
gtccacagagtcatatccgcatcct

SEQ ID NO: 1756680 - DNA, 25 bp, Homo sapien
gattccttggtaaggatgcctccgc

SEQ ID NO: 1756681 - DNA, 25 bp, Homo sapien
gggtggtcgttcacaatgtatgtac

SEQ ID NO: 1756682 - DNA, 25 bp, Homo sapien
cccgaatcccactctataagaatga

SEQ ID NO: 1756683 - DNA, 25 bp, Homo sapien
cacagcgtgggtttgaagcagaaac

SEQ ID NO: 1756684 - DNA, 25 bp, Homo sapien
ttccttctttagagagtatgcaaac

SEQ ID NO: 1756685 - DNA, 25 bp, Homo sapien
gagaactagaactcagtagtgacca

SEQ ID NO: 1756686 - DNA, 25 bp, Homo sapien
ggttgagttggagcgcttaatggaa

SEQ ID NO: 1756687 - DNA, 25 bp, Homo sapien
gagatttgacagcttaggatgggtt

SEQ ID NO: 1756688 - DNA, 25 bp, Homo sapien
ttgacagcttaggatgggttgagtt

SEQ ID NO: 1756689 - DNA, 25 bp, Homo sapien
cacagcttccggacaaaacacaggg

SEQ ID NO: 1756690 - DNA, 25 bp, Homo sapien
ccatgcacagattgttcacagtgga

SEQ ID NO: 1756691 - DNA, 25 bp, Homo sapien
caaatatgtgaatcgatccatgcac

SEQ ID NO: 1756692 - DNA, 25 bp, Homo sapien
ggcacacctacatgcctgtgacaga

SEQ ID NO: 1756693 - DNA, 25 bp, Homo sapien
cattcatgtacctgaaatggtagac

SEQ ID NO: 1756694 - DNA, 25 bp, Homo sapien
ctcaagagtggtcaaaggccctcgt

SEQ ID NO: 1756695 - DNA, 25 bp, Homo sapien
tctactttgttcttctcgagtcttc

SEQ ID NO: 1756696 - DNA, 25 bp, Homo sapien
tgttcttctcgagtcttctactcaa

SEQ ID NO: 1756697 - DNA, 25 bp, Homo sapien
agagtggtcaaaggccctcgtgtgt

SEQ ID NO: 1756698 - DNA, 25 bp, Homo sapien
aacgtgtgccctttggtatgtattc

SEQ ID NO: 1756699 - DNA, 25 bp, Homo sapien
aactgtgtcattggtgtagatttca

SEQ ID NO: 1756700 - DNA, 25 bp, Homo sapien
tagatttcacctattaggggtccaa

SEQ ID NO: 1756701 - DNA, 25 bp, Homo sapien
caaaaatatttcctgttggcgttct

SEQ ID NO: 1756702 - DNA, 25 bp, Homo sapien
tgccataacaaagcgaacactcggg

SEQ ID NO: 1756703 - DNA, 25 bp, Homo sapien
tgataaacatgtccagacttgcact

SEQ ID NO: 1756704 - DNA, 25 bp, Homo sapien
gacagtctattactgagaagtcact

SEQ ID NO: 1756705 - DNA, 25 bp, Homo sapien
gaacactcgggcagcagcccgaatt

SEQ ID NO: 1756706 - DNA, 25 bp, Homo sapien
tatcgtcttttcatgttcgggaaaa

SEQ ID NO: 1756707 - DNA, 25 bp, Homo sapien
gagctgcctcaaaccgattaaccca

SEQ ID NO: 1756708 - DNA, 25 bp, Homo sapien
gattaacccaccacagagtactact

SEQ ID NO: 1756709 - DNA, 25 bp, Homo sapien
tactgcagtgaatggcaaatgggcg

SEQ ID NO: 1756710 - DNA, 25 bp, Homo sapien
ctcagaataaacacagccggtaccg

SEQ ID NO: 1756711 - DNA, 25 bp, Homo sapien
tgatcccctactgcctagttagaaa

SEQ ID NO: 1756712 - DNA, 25 bp, Homo sapien
caggcatgtaaaaggaagtcagacc

SEQ ID NO: 1756713 - DNA, 25 bp, Homo sapien
agccggtaccgtgtgtgatttctga

SEQ ID NO: 1756714 - DNA, 25 bp, Homo sapien
gatgttcatcccgttctgacacgca

SEQ ID NO: 1756715 - DNA, 25 bp, Homo sapien
tgaagtggtgaagctcccctctgga

SEQ ID NO: 1756716 - DNA, 25 bp, Homo sapien
cattaaagccgtcaatgaagtggtg

SEQ ID NO: 1756717 - DNA, 25 bp, Homo sapien
gagtgtgctggattcacatagcgca

SEQ ID NO: 1756718 - DNA, 25 bp, Homo sapien
gattcatcattgtcagctctccggg

SEQ ID NO: 1756719 - DNA, 25 bp, Homo sapien
tgcaaagtcccgacaataccacaca

SEQ ID NO: 1756720 - DNA, 25 bp, Homo sapien
gacaataccacacaagaagttcctg

SEQ ID NO: 1756721 - DNA, 25 bp, Homo sapien
tctccgggataagggtagtgaagcc

SEQ ID NO: 1756722 - DNA, 25 bp, Homo sapien
tattttgatgcagtctaagccctgc

SEQ ID NO: 1756723 - DNA, 25 bp, Homo sapien
gagggctataccttgcatacgcagc

SEQ ID NO: 1756724 - DNA, 25 bp, Homo sapien
caagttagccttctggtaaagcaaa

SEQ ID NO: 1756725 - DNA, 25 bp, Homo sapien
cacacaaccatagttacagcagagg

SEQ ID NO: 1756726 - DNA, 25 bp, Homo sapien
aagaaaaaggggcgattacacagag

SEQ ID NO: 1756727 - DNA, 25 bp, Homo sapien
tgctcggttgctttagactgctctg

SEQ ID NO: 1756728 - DNA, 25 bp, Homo sapien
ttcacgctgtactctctctttggga

SEQ ID NO: 1756729 - DNA, 25 bp, Homo sapien
tgaaatgttagaacggtagaggtcc

SEQ ID NO: 1756730 - DNA, 25 bp, Homo sapien
gatgtacgtgggtctctcgatcccg

SEQ ID NO: 1756731 - DNA, 25 bp, Homo sapien
tcaagtaagcgtaggagtcccggtg

SEQ ID NO: 1756732 - DNA, 25 bp, Homo sapien
cccaccgaggagattgctgtagaca

SEQ ID NO: 1756733 - DNA, 25 bp, Homo sapien
gggacaccgtattcccagggctgct

SEQ ID NO: 1756734 - DNA, 25 bp, Homo sapien
tccgtgccgtaggacgcgttcaagt

SEQ ID NO: 1756735 - DNA, 25 bp, Homo sapien
tgcaccacatgttctgccgtggcgg

SEQ ID NO: 1756736 - DNA, 25 bp, Homo sapien
gattcatggcttcgtcgctgctggg

SEQ ID NO: 1756737 - DNA, 25 bp, Homo sapien
tgccatcgctgctgaggtagctttg

SEQ ID NO: 1756738 - DNA, 25 bp, Homo sapien
agagctggccgaaagtcttggcgca

SEQ ID NO: 1756739 - DNA, 25 bp, Homo sapien
gccccttggactgctctctctcaag

SEQ ID NO: 1756740 - DNA, 25 bp, Homo sapien
cccttggactgctctctctcaaggc

SEQ ID NO: 1756741 - DNA, 25 bp, Homo sapien
ccttggactgctctctctcaaggcc

SEQ ID NO: 1756742 - DNA, 25 bp, Homo sapien
agccccttggactgctctctctcaa

SEQ ID NO: 1756743 - DNA, 25 bp, Homo sapien
aagaagccacatgtgttagctctgc

SEQ ID NO: 1756744 - DNA, 25 bp, Homo sapien
tcaagctggctctgagacctaacat

SEQ ID NO: 1756745 - DNA, 25 bp, Homo sapien
tccaagactcaagtgttgatgcaaa

SEQ ID NO: 1756746 - DNA, 25 bp, Homo sapien
tggctctgagacctaacatttctgc

SEQ ID NO: 1756747 - DNA, 25 bp, Homo sapien
agtaaagcccttgttgcaagtctga

SEQ ID NO: 1756748 - DNA, 25 bp, Homo sapien
tttgaaaggccgttctccactgtgc

SEQ ID NO: 1756749 - DNA, 25 bp, Homo sapien
tgggcgagctgagtaaagcccttgt

SEQ ID NO: 1756750 - DNA, 25 bp, Homo sapien
tgtaccaggtagtgtttctgcaggt

SEQ ID NO: 1756751 - DNA, 25 bp, Homo sapien
tgatgactcataaaggctgcaccct

SEQ ID NO: 1756752 - DNA, 25 bp, Homo sapien
cgcagcgcagttccctttcaggtga

SEQ ID NO: 1756753 - DNA, 25 bp, Homo sapien
gattcgggtcagatcttccaagggc

SEQ ID NO: 1756754 - DNA, 25 bp, Homo sapien
gtgaacttggcagggcacaccttgc

SEQ ID NO: 1756755 - DNA, 25 bp, Homo sapien
gaaaccatttgctgtcgagagagct

SEQ ID NO: 1756756 - DNA, 25 bp, Homo sapien
gcagagctgggattatgtacaagcc

SEQ ID NO: 1756757 - DNA, 25 bp, Homo sapien
ggaaggctatgcaaacatgtccaca

SEQ ID NO: 1756758 - DNA, 25 bp, Homo sapien
taatagtcttagtaatgggaaggct

SEQ ID NO: 1756759 - DNA, 25 bp, Homo sapien
tctcttacagtaggcaagggtgccc

SEQ ID NO: 1756760 - DNA, 25 bp, Homo sapien
ctctgaatggccacaggactcggtg

SEQ ID NO: 1756761 - DNA, 25 bp, Homo sapien
gatgcaaaagtcatgtggccgctct

SEQ ID NO: 1756762 - DNA, 25 bp, Homo sapien
taccgacgtgattgtgaggtcacca

SEQ ID NO: 1756763 - DNA, 25 bp, Homo sapien
gatggggactgctccctcccatggg

SEQ ID NO: 1756764 - DNA, 25 bp, Homo sapien
ctgtgctttcaaacacacggattcc

SEQ ID NO: 1756765 - DNA, 25 bp, Homo sapien
tgcaaggatggggactgctccctcc

SEQ ID NO: 1756766 - DNA, 25 bp, Homo sapien
aaacacacggattcctctctaagcc

SEQ ID NO: 1756767 - DNA, 25 bp, Homo sapien
agagacttgtccaacgggccatacc

SEQ ID NO: 1756768 - DNA, 25 bp, Homo sapien
gaagcttgctatggttggcgtctca

SEQ ID NO: 1756769 - DNA, 25 bp, Homo sapien
aacgcacctccaggaatgaccaggg

SEQ ID NO: 1756770 - DNA, 25 bp, Homo sapien
taagaagggcaatctgttggctctc

SEQ ID NO: 1756771 - DNA, 25 bp, Homo sapien
cccagccaactttatgagatttttt

SEQ ID NO: 1756772 - DNA, 25 bp, Homo sapien
ttggtggtgcaaataacaactccat

SEQ ID NO: 1756773 - DNA, 25 bp, Homo sapien
caatagcccaggaggcttgtaaaca

SEQ ID NO: 1756774 - DNA, 25 bp, Homo sapien
gttgattgttattttcattcctgac

SEQ ID NO: 1756775 - DNA, 25 bp, Homo sapien
tcattcctgactggtttggtggtgc

SEQ ID NO: 1756776 - DNA, 25 bp, Homo sapien
actagacaattcaggttgaggagcc

SEQ ID NO: 1756777 - DNA, 25 bp, Homo sapien
caccttgctaccaaagaggacttca

SEQ ID NO: 1756778 - DNA, 25 bp, Homo sapien
gaggacttcagccaagccttgacta

SEQ ID NO: 1756779 - DNA, 25 bp, Homo sapien
gagcaatgagaacccaaacaccttg

SEQ ID NO: 1756780 - DNA, 25 bp, Homo sapien
tgcctcctgctctgcttccaaggac

SEQ ID NO: 1756781 - DNA, 25 bp, Homo sapien
ctcctgctctgcttccaaggacaac

SEQ ID NO: 1756782 - DNA, 25 bp, Homo sapien
gcctcctgctctgcttccaaggaca

SEQ ID NO: 1756783 - DNA, 25 bp, Homo sapien
ctgcctcctgctctgcttccaagga

SEQ ID NO: 1756784 - DNA, 25 bp, Homo sapien
gagacattccagagttcatgactgt

SEQ ID NO: 1756785 - DNA, 25 bp, Homo sapien
gagttcatgactgttgtttaacaac

SEQ ID NO: 1756786 - DNA, 25 bp, Homo sapien
gactgttgtttaacaacaacacttc

SEQ ID NO: 1756787 - DNA, 25 bp, Homo sapien
cattccagagttcatgactgttgtt

SEQ ID NO: 1756788 - DNA, 25 bp, Homo sapien
gagaacacccatgagtgtgacaaca

SEQ ID NO: 1756789 - DNA, 25 bp, Homo sapien
tgtgacaacacaggttctcagggaa

SEQ ID NO: 1756790 - DNA, 25 bp, Homo sapien
gaaggaggaatcttccggctttctc

SEQ ID NO: 1756791 - DNA, 25 bp, Homo sapien
tgtccaggtgacagagaacacccat

SEQ ID NO: 1756792 - DNA, 25 bp, Homo sapien
ttgactgcccggagtcctaagagca

SEQ ID NO: 1756793 - DNA, 25 bp, Homo sapien
ttccttgactgcccggagtcctaag

SEQ ID NO: 1756794 - DNA, 25 bp, Homo sapien
ccttgactgcccggagtcctaagag

SEQ ID NO: 1756795 - DNA, 25 bp, Homo sapien
tgactgcccggagtcctaagagcat

SEQ ID NO: 1756796 - DNA, 25 bp, Homo sapien
gagtccgtgccctgatatggttgaa

SEQ ID NO: 1756797 - DNA, 25 bp, Homo sapien
tactgaaagttgagtccgtgccctg

SEQ ID NO: 1756798 - DNA, 25 bp, Homo sapien
aagttgagtccgtgccctgatatgg

SEQ ID NO: 1756799 - DNA, 25 bp, Homo sapien
ttcctgttactgaaagttgagtccg

SEQ ID NO: 1756800 - DNA, 25 bp, Homo sapien
tcagcagtgcatacctaacagtttc

SEQ ID NO: 1756801 - DNA, 25 bp, Homo sapien
gaacacaactctagcttaatcccat

SEQ ID NO: 1756802 - DNA, 25 bp, Homo sapien
gctgtgtcaggatttcacaaaaagg

SEQ ID NO: 1756803 - DNA, 25 bp, Homo sapien
gcaagcttatgttctggtattaccc

SEQ ID NO: 1756804 - DNA, 25 bp, Homo sapien
gatcagaatcacagccctgactcgg

SEQ ID NO: 1756805 - DNA, 25 bp, Homo sapien
tgactcggggctcccagatgagttt

SEQ ID NO: 1756806 - DNA, 25 bp, Homo sapien
tctggttccttcagcgtcagcactc

SEQ ID NO: 1756807 - DNA, 25 bp, Homo sapien
gctttgctacccatgccagtctctg

SEQ ID NO: 1756808 - DNA, 25 bp, Homo sapien
caggaccccacatggagaagatcca

SEQ ID NO: 1756809 - DNA, 25 bp, Homo sapien
tccagtccctagacgatgcttgtcc

SEQ ID NO: 1756810 - DNA, 25 bp, Homo sapien
tgctgcccaactgcgtggcctgact

SEQ ID NO: 1756811 - DNA, 25 bp, Homo sapien
catggagaagatccagtccctagac

SEQ ID NO: 1756812 - DNA, 25 bp, Homo sapien
tgtgagtcaagctcaagggccacgc

SEQ ID NO: 1756813 - DNA, 25 bp, Homo sapien
tctacaggctgactttgggctctgc

SEQ ID NO: 1756814 - DNA, 25 bp, Homo sapien
ggtcaaatactctccctgtgaggca

SEQ ID NO: 1756815 - DNA, 25 bp, Homo sapien
gagtgaaagtgattgccagcctgag

SEQ ID NO: 1756816 - DNA, 25 bp, Homo sapien
gccagggcagctggaacaacctgga

SEQ ID NO: 1756817 - DNA, 25 bp, Homo sapien
atcagccagggcagctggaacaacc

SEQ ID NO: 1756818 - DNA, 25 bp, Homo sapien
ctggagggccagacatcagccaggg

SEQ ID NO: 1756819 - DNA, 25 bp, Homo sapien
cagccagggcagctggaacaacctg

SEQ ID NO: 1756820 - DNA, 25 bp, Homo sapien
gcaaaatcgtccaagtggaggatgg

SEQ ID NO: 1756821 - DNA, 25 bp, Homo sapien
gaaggtttgcaaaatcgtccaagtg

SEQ ID NO: 1756822 - DNA, 25 bp, Homo sapien
tctgttcttatgtgaaggtttgcaa

SEQ ID NO: 1756823 - DNA, 25 bp, Homo sapien
atctgttcttatgtgaaggtttgca

SEQ ID NO: 1756824 - DNA, 25 bp, Homo sapien
cttgtcactggtggaacccggagga

SEQ ID NO: 1756825 - DNA, 25 bp, Homo sapien
tcactggtggaacccggaggagaaa

SEQ ID NO: 1756826 - DNA, 25 bp, Homo sapien
cttggcactgcttttctcgtcaggc

SEQ ID NO: 1756827 - DNA, 25 bp, Homo sapien
gcttttctcgtcaggctgatgctgg

SEQ ID NO: 1756828 - DNA, 25 bp, Homo sapien
tccagagaccatctggaaagctttg

SEQ ID NO: 1756829 - DNA, 25 bp, Homo sapien
gctttgaagcctctgctaactccat

SEQ ID NO: 1756830 - DNA, 25 bp, Homo sapien
gaaagctttgaagcctctgctaact

SEQ ID NO: 1756831 - DNA, 25 bp, Homo sapien
ctggaaagctttgaagcctctgcta

SEQ ID NO: 1756832 - DNA, 25 bp, Homo sapien
aagttattgatgacatctgaaggta

SEQ ID NO: 1756833 - DNA, 25 bp, Homo sapien
ttattgatgacatctgaaggtatca

SEQ ID NO: 1756834 - DNA, 25 bp, Homo sapien
gtactgtatcgatgctgatattcag

SEQ ID NO: 1756835 - DNA, 25 bp, Homo sapien
gtttcttgtactgtatcgatgctga

SEQ ID NO: 1756836 - DNA, 25 bp, Homo sapien
gattgaattacagtaaacccatctt

SEQ ID NO: 1756837 - DNA, 25 bp, Homo sapien
tttacagtctgtctattggtatgca

SEQ ID NO: 1756838 - DNA, 25 bp, Homo sapien
gtgaccatggttgaactttagctca

SEQ ID NO: 1756839 - DNA, 25 bp, Homo sapien
gctcatgaaagtggaaacattggtt

SEQ ID NO: 1756840 - DNA, 25 bp, Homo sapien
tatgtgccactcgatttgtatttct

SEQ ID NO: 1756841 - DNA, 25 bp, Homo sapien
tgtgccactcgatttgtatttctga

SEQ ID NO: 1756842 - DNA, 25 bp, Homo sapien
gaagtatgtgccactcgatttgtat

SEQ ID NO: 1756843 - DNA, 25 bp, Homo sapien
agtatgtgccactcgatttgtattt

SEQ ID NO: 1756844 - DNA, 25 bp, Homo sapien
atataatgaagctgaaacctttggc

SEQ ID NO: 1756845 - DNA, 25 bp, Homo sapien
ccactgaaggtcttctgtaaaatat

SEQ ID NO: 1756846 - DNA, 25 bp, Homo sapien
gtaaaatataatgaagctgaaacct

SEQ ID NO: 1756847 - DNA, 25 bp, Homo sapien
cggaccactgaaggtcttctgtaaa

SEQ ID NO: 1756848 - DNA, 25 bp, Homo sapien
catcccacagccaacagattgaagg

SEQ ID NO: 1756849 - DNA, 25 bp, Homo sapien
tgaacatctgagctacccggataat

SEQ ID NO: 1756850 - DNA, 25 bp, Homo sapien
tccatgtcagataaggcaactgggc

SEQ ID NO: 1756851 - DNA, 25 bp, Homo sapien
tctgcagtggctgagtgaacatctg

SEQ ID NO: 1756852 - DNA, 25 bp, Homo sapien
tgggtgatacatactgcaacatttg

SEQ ID NO: 1756853 - DNA, 25 bp, Homo sapien
tttgggtgatacatactgcaacatt

SEQ ID NO: 1756854 - DNA, 25 bp, Homo sapien
ggtgatacatactgcaacatttgaa

SEQ ID NO: 1756855 - DNA, 25 bp, Homo sapien
ttttgggtgatacatactgcaacat

SEQ ID NO: 1756856 - DNA, 25 bp, Homo sapien
agttgcttgattccctgtttccttg

SEQ ID NO: 1756857 - DNA, 25 bp, Homo sapien
tcagctcattttgcccagaccttag

SEQ ID NO: 1756858 - DNA, 25 bp, Homo sapien
ttatagagttgcttgattccctgtt

SEQ ID NO: 1756859 - DNA, 25 bp, Homo sapien
gaccttagagcacttacagattcaa

SEQ ID NO: 1756860 - DNA, 25 bp, Homo sapien
gtgtgacagacttctccccatgcaa

SEQ ID NO: 1756861 - DNA, 25 bp, Homo sapien
ttcaggtgctgtaggtgagtacatc

SEQ ID NO: 1756862 - DNA, 25 bp, Homo sapien
gatggtatctttcataccaggagga

SEQ ID NO: 1756863 - DNA, 25 bp, Homo sapien
tagagtatccaaaacatcgagtcac

SEQ ID NO: 1756864 - DNA, 25 bp, Homo sapien
tattgactaacaaaatgatgactcg

SEQ ID NO: 1756865 - DNA, 25 bp, Homo sapien
tatcttacagcgaaaagtcttttca

SEQ ID NO: 1756866 - DNA, 25 bp, Homo sapien
caaaatgatgactcgactggcgaaa

SEQ ID NO: 1756867 - DNA, 25 bp, Homo sapien
gatattttcatatcttacagcgaaa

SEQ ID NO: 1756868 - DNA, 25 bp, Homo sapien
tcagcttagttcctgtccaaagaat

SEQ ID NO: 1756869 - DNA, 25 bp, Homo sapien
catagagaatgtcggcatccagaat

SEQ ID NO: 1756870 - DNA, 25 bp, Homo sapien
tttcagtccctttccatcatagaga

SEQ ID NO: 1756871 - DNA, 25 bp, Homo sapien
cccttagggtgattattgagtctgc

SEQ ID NO: 1756872 - DNA, 25 bp, Homo sapien
tggtctgagattaagctgcagttgg

SEQ ID NO: 1756873 - DNA, 25 bp, Homo sapien
gattaagctgcagttggcacttcat

SEQ ID NO: 1756874 - DNA, 25 bp, Homo sapien
taaaaagagcttaattggtctgaga

SEQ ID NO: 1756875 - DNA, 25 bp, Homo sapien
ttggcacttcataagtgccagttcc

SEQ ID NO: 1756876 - DNA, 25 bp, Homo sapien
tatttcatgatcatggatgcaagag

SEQ ID NO: 1756877 - DNA, 25 bp, Homo sapien
cctgatactgaaacctgataaagac

SEQ ID NO: 1756878 - DNA, 25 bp, Homo sapien
tgttagaggccagaataaccctgat

SEQ ID NO: 1756879 - DNA, 25 bp, Homo sapien
tactgggagtgcacctgtgagtagc

SEQ ID NO: 1756880 - DNA, 25 bp, Homo sapien
gggtgtcatcgttgtgcagggccat

SEQ ID NO: 1756881 - DNA, 25 bp, Homo sapien
ctgtggagcgcttcacaaatttggg

SEQ ID NO: 1756882 - DNA, 25 bp, Homo sapien
tttgggtgtcatcgttgtgcagggc

SEQ ID NO: 1756883 - DNA, 25 bp, Homo sapien
actgtggagcgcttcacaaatttgg

SEQ ID NO: 1756884 - DNA, 25 bp, Homo sapien
cgccgagggtgactggacttgtggt

SEQ ID NO: 1756885 - DNA, 25 bp, Homo sapien
tgactggacttgtggtgcgctgcca

SEQ ID NO: 1756886 - DNA, 25 bp, Homo sapien
cgggcgccgagggtgactggacttg

SEQ ID NO: 1756887 - DNA, 25 bp, Homo sapien
tcatctccgggcgccgagggtgact

SEQ ID NO: 1756888 - DNA, 25 bp, Homo sapien
cttcaacctaagtagcagcggcaca

SEQ ID NO: 1756889 - DNA, 25 bp, Homo sapien
acctaagtagcagcggcacaagcat

SEQ ID NO: 1756890 - DNA, 25 bp, Homo sapien
accttcaacctaagtagcagcggca

SEQ ID NO: 1756891 - DNA, 25 bp, Homo sapien
tcaacctaagtagcagcggcacaag

SEQ ID NO: 1756892 - DNA, 25 bp, Homo sapien
ctgcattaggtgaattaaaaatcta

SEQ ID NO: 1756893 - DNA, 25 bp, Homo sapien
gattaatttcctgcctcacacccat

SEQ ID NO: 1756894 - DNA, 25 bp, Homo sapien
cagaagattaatttcctgcctcaca

SEQ ID NO: 1756895 - DNA, 25 bp, Homo sapien
agattaatttcctgcctcacaccca

SEQ ID NO: 1756896 - DNA, 25 bp, Homo sapien
gaagattaatttcctgcctcacacc

SEQ ID NO: 1756897 - DNA, 25 bp, Homo sapien
cccaggctctaagatgggacccaga

SEQ ID NO: 1756898 - DNA, 25 bp, Homo sapien
ccagagccgggtcgggcttccacag

SEQ ID NO: 1756899 - DNA, 25 bp, Homo sapien
agttgttggccgctcttggcctgtg

SEQ ID NO: 1756900 - DNA, 25 bp, Homo sapien
agcggccattgtcgcctgcggagtt

SEQ ID NO: 1756901 - DNA, 25 bp, Homo sapien
aagaacacacctgagcgccagctcg

SEQ ID NO: 1756902 - DNA, 25 bp, Homo sapien
agaacacacctgagcgccagctcgc

SEQ ID NO: 1756903 - DNA, 25 bp, Homo sapien
gaagaacacacctgagcgccagctc

SEQ ID NO: 1756904 - DNA, 25 bp, Homo sapien
ggaagaacacacctgagcgccagct

SEQ ID NO: 1756905 - DNA, 25 bp, Homo sapien
ctcccgctccgactgccgggacgcg

SEQ ID NO: 1756906 - DNA, 25 bp, Homo sapien
ctcctcccgctccgactgccgggac

SEQ ID NO: 1756907 - DNA, 25 bp, Homo sapien
cctcccgctccgactgccgggacgc

SEQ ID NO: 1756908 - DNA, 25 bp, Homo sapien
tcctcccgctccgactgccgggacg

SEQ ID NO: 1756909 - DNA, 25 bp, Homo sapien
gccgggagcgggtgcggaacgaaca

SEQ ID NO: 1756910 - DNA, 25 bp, Homo sapien
gcttctttttggagcgccagaggtg

SEQ ID NO: 1756911 - DNA, 25 bp, Homo sapien
ggtgtgcttcttagggggcctgcac

SEQ ID NO: 1756912 - DNA, 25 bp, Homo sapien
cgggtgcggaacgaacaccccacag

SEQ ID NO: 1756913 - DNA, 25 bp, Homo sapien
tttcataatccttttgcatcaaact

SEQ ID NO: 1756914 - DNA, 25 bp, Homo sapien
caaactctgtagatctacatctttc

SEQ ID NO: 1756915 - DNA, 25 bp, Homo sapien
gatctacatctttcacgccaactgt

SEQ ID NO: 1756916 - DNA, 25 bp, Homo sapien
aactgtatcgcctacaaatttgaag

SEQ ID NO: 1756917 - DNA, 25 bp, Homo sapien
tctgcaaagtgcatatagttgtact

SEQ ID NO: 1756918 - DNA, 25 bp, Homo sapien
cacttctgcaaagtgcatatagttg

SEQ ID NO: 1756919 - DNA, 25 bp, Homo sapien
tcctccacttctgcaaagtgcatat

SEQ ID NO: 1756920 - DNA, 25 bp, Homo sapien
agtgcatatagttgtactcctccaa

SEQ ID NO: 1756921 - DNA, 25 bp, Homo sapien
tcatagtgtttccaggtgacttttg

SEQ ID NO: 1756922 - DNA, 25 bp, Homo sapien
ttcatagtgtttccaggtgactttt

SEQ ID NO: 1756923 - DNA, 25 bp, Homo sapien
ttttgcctgcagagaaagtgataaa

SEQ ID NO: 1756924 - DNA, 25 bp, Homo sapien
tttcatagtgtttccaggtgacttt

SEQ ID NO: 1756925 - DNA, 25 bp, Homo sapien
catgcctggcatactaagcagaagg

SEQ ID NO: 1756926 - DNA, 25 bp, Homo sapien
cctactaagtagaccaccatgcctg

SEQ ID NO: 1756927 - DNA, 25 bp, Homo sapien
attattttattcgagtaagaagctg

SEQ ID NO: 1756928 - DNA, 25 bp, Homo sapien
gaaagagcgctggagattactttta

SEQ ID NO: 1756929 - DNA, 25 bp, Homo sapien
gacacagagggtagtgctggcttcc

SEQ ID NO: 1756930 - DNA, 25 bp, Homo sapien
agagggtagtgctggcttcctgcca

SEQ ID NO: 1756931 - DNA, 25 bp, Homo sapien
agacacagagggtagtgctggcttc

SEQ ID NO: 1756932 - DNA, 25 bp, Homo sapien
cacagagggtagtgctggcttcctg

SEQ ID NO: 1756933 - DNA, 25 bp, Homo sapien
ggccctggaactccgtgggtccaca

SEQ ID NO: 1756934 - DNA, 25 bp, Homo sapien
cacagtgggagtggtattgagagag

SEQ ID NO: 1756935 - DNA, 25 bp, Homo sapien
gagagtttggccagtatgttctgga

SEQ ID NO: 1756936 - DNA, 25 bp, Homo sapien
ctggaactccgtgggtccacagtgg

SEQ ID NO: 1756937 - DNA, 25 bp, Homo sapien
gcagtaggagtggggaaggaacaat

SEQ ID NO: 1756938 - DNA, 25 bp, Homo sapien
ctgtaactggttgtgatcaattagt

SEQ ID NO: 1756939 - DNA, 25 bp, Homo sapien
aggagtggggaaggaacaatgaaat

SEQ ID NO: 1756940 - DNA, 25 bp, Homo sapien
tgtaaacaccactgcactcagacca

SEQ ID NO: 1756941 - DNA, 25 bp, Homo sapien
actcttaccctgactcctctggtat

SEQ ID NO: 1756942 - DNA, 25 bp, Homo sapien
cctctggtatttggcattatcagca

SEQ ID NO: 1756943 - DNA, 25 bp, Homo sapien
gctctgttggcacatttcactctta

SEQ ID NO: 1756944 - DNA, 25 bp, Homo sapien
acaatcgcaggaagctcagaggtct

SEQ ID NO: 1756945 - DNA, 25 bp, Homo sapien
cattccaaagggcccctttgtcact

SEQ ID NO: 1756946 - DNA, 25 bp, Homo sapien
tgcatctgatgacgatatctggttc

SEQ ID NO: 1756947 - DNA, 25 bp, Homo sapien
ttctgtgaagctagagtgggcccat

SEQ ID NO: 1756948 - DNA, 25 bp, Homo sapien
tcaacatagccttgtgggtggcaaa

SEQ ID NO: 1756949 - DNA, 25 bp, Homo sapien
gatgttagccttgatagaattccca

SEQ ID NO: 1756950 - DNA, 25 bp, Homo sapien
caggtgcatttagggtggtgtggcc

SEQ ID NO: 1756951 - DNA, 25 bp, Homo sapien
catttagggtggtgtggccatagat

SEQ ID NO: 1756952 - DNA, 25 bp, Homo sapien
aagatcaggtgcatttagggtggtg

SEQ ID NO: 1756953 - DNA, 25 bp, Homo sapien
agacaagatcaggtgcatttagggt

SEQ ID NO: 1756954 - DNA, 25 bp, Homo sapien
ggaaccaagcgcctcactggtggtg

SEQ ID NO: 1756955 - DNA, 25 bp, Homo sapien
gggagtctcgaaccacatattttcc

SEQ ID NO: 1756956 - DNA, 25 bp, Homo sapien
ttttaaatattccagactctagaag

SEQ ID NO: 1756957 - DNA, 25 bp, Homo sapien
tattttccatcgactacatccaaag

SEQ ID NO: 1756958 - DNA, 25 bp, Homo sapien
caattagttacaaacaccactgcac

SEQ ID NO: 1756959 - DNA, 25 bp, Homo sapien
attagttacaaacaccactgcactc

SEQ ID NO: 1756960 - DNA, 25 bp, Homo sapien
tagttacaaacaccactgcactcgg

SEQ ID NO: 1756961 - DNA, 25 bp, Homo sapien
atcaattagttacaaacaccactgc

SEQ ID NO: 1756962 - DNA, 25 bp, Homo sapien
acagccacacccacagcaggttgaa

SEQ ID NO: 1756963 - DNA, 25 bp, Homo sapien
acccacagcaggttgaaccccccat

SEQ ID NO: 1756964 - DNA, 25 bp, Homo sapien
cacacccacagcaggttgaaccccc

SEQ ID NO: 1756965 - DNA, 25 bp, Homo sapien
agccacacccacagcaggttgaacc

SEQ ID NO: 1756966 - DNA, 25 bp, Homo sapien
tcaagatcccggtcatagtacctgt

SEQ ID NO: 1756967 - DNA, 25 bp, Homo sapien
cctgctgcgattattagcacaccca

SEQ ID NO: 1756968 - DNA, 25 bp, Homo sapien
ccgagagtcaatgttcctgctgcga

SEQ ID NO: 1756969 - DNA, 25 bp, Homo sapien
ttccaggagtcaggacgcctatgcc

SEQ ID NO: 1756970 - DNA, 25 bp, Homo sapien
tctccaactgtcacttcagcattca

SEQ ID NO: 1756971 - DNA, 25 bp, Homo sapien
ccatctccaactgtcacttcagcat

SEQ ID NO: 1756972 - DNA, 25 bp, Homo sapien
catctccaactgtcacttcagcatt

SEQ ID NO: 1756973 - DNA, 25 bp, Homo sapien
tccaactgtcacttcagcattcaga

SEQ ID NO: 1756974 - DNA, 25 bp, Homo sapien
gctctagactcatctttttatagtg

SEQ ID NO: 1756975 - DNA, 25 bp, Homo sapien
tttatagtgcagaagtatttatata

SEQ ID NO: 1756976 - DNA, 25 bp, Homo sapien
tttttatagtgcagaagtatttata

SEQ ID NO: 1756977 - DNA, 25 bp, Homo sapien
ctctagactcatctttttatagtgc

SEQ ID NO: 1756978 - DNA, 25 bp, Homo sapien
caggattctttattgagcccagcca

SEQ ID NO: 1756979 - DNA, 25 bp, Homo sapien
tgtacagtgccaactctaaagatgc

SEQ ID NO: 1756980 - DNA, 25 bp, Homo sapien
gagtctaggcaccaacacccttgat

SEQ ID NO: 1756981 - DNA, 25 bp, Homo sapien
aacccaagttcaggctaagagtcag

SEQ ID NO: 1756982 - DNA, 25 bp, Homo sapien
tttcttctgagatttaccaggagca

SEQ ID NO: 1756983 - DNA, 25 bp, Homo sapien
tcttctgagatttaccaggagcatc

SEQ ID NO: 1756984 - DNA, 25 bp, Homo sapien
ttcttctgagatttaccaggagcat

SEQ ID NO: 1756985 - DNA, 25 bp, Homo sapien
ttttcttctgagatttaccaggagc

SEQ ID NO: 1756986 - DNA, 25 bp, Homo sapien
gagaaaccagaccagcattagctat

SEQ ID NO: 1756987 - DNA, 25 bp, Homo sapien
gcaaagaagacccacacattggtgt

SEQ ID NO: 1756988 - DNA, 25 bp, Homo sapien
tgcagcctgcttgggagagtaactt

SEQ ID NO: 1756989 - DNA, 25 bp, Homo sapien
ggctgccacgtcacttccaggatga

SEQ ID NO: 1756990 - DNA, 25 bp, Homo sapien
acacccacttctgatgaaccccaca

SEQ ID NO: 1756991 - DNA, 25 bp, Homo sapien
ggtgtgagatcctttacacaggaag

SEQ ID NO: 1756992 - DNA, 25 bp, Homo sapien
tgtgagatcctttacacaggaagaa

SEQ ID NO: 1756993 - DNA, 25 bp, Homo sapien
tgatgaaccccacaaaaatggttcc

SEQ ID NO: 1756994 - DNA, 25 bp, Homo sapien
tgtactgacatttggctccttgcca

SEQ ID NO: 1756995 - DNA, 25 bp, Homo sapien
ggcacagtctggcacttgtactgac

SEQ ID NO: 1756996 - DNA, 25 bp, Homo sapien
cagggagaacaacagccgtgccctc

SEQ ID NO: 1756997 - DNA, 25 bp, Homo sapien
tggcaatggaactggcgccttggca

SEQ ID NO: 1756998 - DNA, 25 bp, Homo sapien
aatcctaacttagtcacagggccag

SEQ ID NO: 1756999 - DNA, 25 bp, Homo sapien
taaacttcaggctacagtgtgcaat

SEQ ID NO: 1757000 - DNA, 25 bp, Homo sapien
aatatccaaatcctctaaacttcag

SEQ ID NO: 1757001 - DNA, 25 bp, Homo sapien
gcatcacttttatggcctgcatcac

SEQ ID NO: 1757002 - DNA, 25 bp, Homo sapien
tcctgctcctgactctatgactgag

SEQ ID NO: 1757003 - DNA, 25 bp, Homo sapien
aatctgtattcctgctcctgactct

SEQ ID NO: 1757004 - DNA, 25 bp, Homo sapien
ttagccaaatttgccaggggtcaat

SEQ ID NO: 1757005 - DNA, 25 bp, Homo sapien
ggtcaattctagcttgaggactttc

SEQ ID NO: 1757006 - DNA, 25 bp, Homo sapien
taataagggtgtgtttgattcaaga

SEQ ID NO: 1757007 - DNA, 25 bp, Homo sapien
gggtgtgtttgattcaagagttgaa

SEQ ID NO: 1757008 - DNA, 25 bp, Homo sapien
gttgaaagtgttaaagaggtgtgcc

SEQ ID NO: 1757009 - DNA, 25 bp, Homo sapien
agaggtgtgcccttttttgggtgtg

SEQ ID NO: 1757010 - DNA, 25 bp, Homo sapien
ggctctctcccagagctgaatgaca

SEQ ID NO: 1757011 - DNA, 25 bp, Homo sapien
tctcccagagctgaatgacagacac

SEQ ID NO: 1757012 - DNA, 25 bp, Homo sapien
agccggctctctcccagagctgaat

SEQ ID NO: 1757013 - DNA, 25 bp, Homo sapien
ttcggcagtgctgctctctcccaga

SEQ ID NO: 1757014 - DNA, 25 bp, Homo sapien
ctcctccttccagcataccctggtg

SEQ ID NO: 1757015 - DNA, 25 bp, Homo sapien
cctccttccagcataccctggtgag

SEQ ID NO: 1757016 - DNA, 25 bp, Homo sapien
accctggtgagctctcatcagctca

SEQ ID NO: 1757017 - DNA, 25 bp, Homo sapien
tccttccagcataccctggtgagct

SEQ ID NO: 1757018 - DNA, 25 bp, Homo sapien
agttcttaagaacctgcatgtgcca

SEQ ID NO: 1757019 - DNA, 25 bp, Homo sapien
caacggtcacacatagctggtggga

SEQ ID NO: 1757020 - DNA, 25 bp, Homo sapien
actgcagggtgaaaagggatttgcc

SEQ ID NO: 1757021 - DNA, 25 bp, Homo sapien
cacacacgtaaacatgaacagggat

SEQ ID NO: 1757022 - DNA, 25 bp, Homo sapien
tctctccccatattcccgagccgct

SEQ ID NO: 1757023 - DNA, 25 bp, Homo sapien
ccatattcccgagccgctttcccct

SEQ ID NO: 1757024 - DNA, 25 bp, Homo sapien
gcccacttccgccgctgttctctct

SEQ ID NO: 1757025 - DNA, 25 bp, Homo sapien
aggcagcccacttccgccgctgttc

SEQ ID NO: 1757026 - DNA, 25 bp, Homo sapien
ggaacattcaggacagtaccgacta

SEQ ID NO: 1757027 - DNA, 25 bp, Homo sapien
aaaggaacattcaggacagtaccga

SEQ ID NO: 1757028 - DNA, 25 bp, Homo sapien
gaacattcaggacagtaccgactac

SEQ ID NO: 1757029 - DNA, 25 bp, Homo sapien
cattcaggacagtaccgactacggg

SEQ ID NO: 1757030 - DNA, 25 bp, Homo sapien
gcagtgaatagagtgccaagtttcc

SEQ ID NO: 1757031 - DNA, 25 bp, Homo sapien
ctgcagtgaatagagtgccaagttt

SEQ ID NO: 1757032 - DNA, 25 bp, Homo sapien
gaatagagtgccaagtttccccaaa

SEQ ID NO: 1757033 - DNA, 25 bp, Homo sapien
agtgaatagagtgccaagtttcccc

SEQ ID NO: 1757034 - DNA, 25 bp, Homo sapien
gaaagcctcctgttcgtggccagca

SEQ ID NO: 1757035 - DNA, 25 bp, Homo sapien
tccaaagttagcaccttagcagggt

SEQ ID NO: 1757036 - DNA, 25 bp, Homo sapien
taggagaggctaccacatctttggg

SEQ ID NO: 1757037 - DNA, 25 bp, Homo sapien
tctgggagtaatcacgaccggctcg

SEQ ID NO: 1757038 - DNA, 25 bp, Homo sapien
ggagtcggtggatttctgcgacccc

SEQ ID NO: 1757039 - DNA, 25 bp, Homo sapien
tcttttccgccgaggcgttatcgct

SEQ ID NO: 1757040 - DNA, 25 bp, Homo sapien
tttggcgccacctcgtcgtcgaaca

SEQ ID NO: 1757041 - DNA, 25 bp, Homo sapien
agcgctctcagggagctcggcgtcc

SEQ ID NO: 1757042 - DNA, 25 bp, Homo sapien
tcgagggctgcccgcggagatttca

SEQ ID NO: 1757043 - DNA, 25 bp, Homo sapien
ctgtttgctccggtccgactcccct

SEQ ID NO: 1757044 - DNA, 25 bp, Homo sapien
gcctcgagggcacggctcctgccct

SEQ ID NO: 1757045 - DNA, 25 bp, Homo sapien
gcttggactctgggctcgcagcgga

SEQ ID NO: 1757046 - DNA, 25 bp, Homo sapien
ggccgctggcgggcggggcgggcac

SEQ ID NO: 1757047 - DNA, 25 bp, Homo sapien
cttggcgggagcccgggggccgctg

SEQ ID NO: 1757048 - DNA, 25 bp, Homo sapien
gggccgctggcgggcggggcgggca

SEQ ID NO: 1757049 - DNA, 25 bp, Homo sapien
tggcgggagcccgggggccgctggc

SEQ ID NO: 1757050 - DNA, 25 bp, Homo sapien
cagcgagctgctcttgaccgggagc

SEQ ID NO: 1757051 - DNA, 25 bp, Homo sapien
ctctgcccggccgttgaagtggttg

SEQ ID NO: 1757052 - DNA, 25 bp, Homo sapien
ccacgccgaaatggttcctgggctt

SEQ ID NO: 1757053 - DNA, 25 bp, Homo sapien
tagtggtcactgtcgacctgcccac

SEQ ID NO: 1757054 - DNA, 25 bp, Homo sapien
tagaggcaggagtattcctttggcc

SEQ ID NO: 1757055 - DNA, 25 bp, Homo sapien
cgaatgtcagtgtgtcttgggctac

SEQ ID NO: 1757056 - DNA, 25 bp, Homo sapien
ctggctggctaaatggattgtgctc

SEQ ID NO: 1757057 - DNA, 25 bp, Homo sapien
gctactgtttgtccgtttgttttca

SEQ ID NO: 1757058 - DNA, 25 bp, Homo sapien
tctttgggaacatccccaggagcgg

SEQ ID NO: 1757059 - DNA, 25 bp, Homo sapien
ggcagaatctcttcttccgagacgg

SEQ ID NO: 1757060 - DNA, 25 bp, Homo sapien
agaaggcccaggagatgactcagca

SEQ ID NO: 1757061 - DNA, 25 bp, Homo sapien
cattgttctgacgagacacaggcaa

SEQ ID NO: 1757062 - DNA, 25 bp, Homo sapien
cctggacgaggactctggatggaca

SEQ ID NO: 1757063 - DNA, 25 bp, Homo sapien
ggagcacgaaggacctgacctggac

SEQ ID NO: 1757064 - DNA, 25 bp, Homo sapien
gcacttctctaacttcagagctctc

SEQ ID NO: 1757065 - DNA, 25 bp, Homo sapien
gctctctgggatgacctgggagctc

SEQ ID NO: 1757066 - DNA, 25 bp, Homo sapien
tatcctggccatttgtaacagtctg

SEQ ID NO: 1757067 - DNA, 25 bp, Homo sapien
tggctaagtgatttccgctgctggg

SEQ ID NO: 1757068 - DNA, 25 bp, Homo sapien
aacagtctgatctggcctttgagga

SEQ ID NO: 1757069 - DNA, 25 bp, Homo sapien
agattttgccgcgagctctgctgtg

SEQ ID NO: 1757070 - DNA, 25 bp, Homo sapien
taaatggtcttcgtgaataggaggc

SEQ ID NO: 1757071 - DNA, 25 bp, Homo sapien
tctgagaagtactgaaagccgtggt

SEQ ID NO: 1757072 - DNA, 25 bp, Homo sapien
gaagaggacgctctgttcagcagat

SEQ ID NO: 1757073 - DNA, 25 bp, Homo sapien
attgatttccggcatcaccagaggc

SEQ ID NO: 1757074 - DNA, 25 bp, Homo sapien
gacctttaaggagttgtcgggcaga

SEQ ID NO: 1757075 - DNA, 25 bp, Homo sapien
aaagaaatgcttgggtcataccggc

SEQ ID NO: 1757076 - DNA, 25 bp, Homo sapien
caagtgtaggttgcttcgtgaatcc

SEQ ID NO: 1757077 - DNA, 25 bp, Homo sapien
tttgaaaagacccatgaagtcggtg

SEQ ID NO: 1757078 - DNA, 25 bp, Homo sapien
caggtcggggattgagtttattttg

SEQ ID NO: 1757079 - DNA, 25 bp, Homo sapien
caacttttatgagtatcactggaga

SEQ ID NO: 1757080 - DNA, 25 bp, Homo sapien
acttctcagagacgtcgggttcact

SEQ ID NO: 1757081 - DNA, 25 bp, Homo sapien
gagacgtcgggttcactatatatca

SEQ ID NO: 1757082 - DNA, 25 bp, Homo sapien
tccaagaactgcaatcctgaatgtc

SEQ ID NO: 1757083 - DNA, 25 bp, Homo sapien
ctgaaccacatgtctgatggaacca

SEQ ID NO: 1757084 - DNA, 25 bp, Homo sapien
ccactggcttatcagactctgcttc

SEQ ID NO: 1757085 - DNA, 25 bp, Homo sapien
cccagagaccagagagttccaattc

SEQ ID NO: 1757086 - DNA, 25 bp, Homo sapien
tgatggaaccaatcaccactggctt

SEQ ID NO: 1757087 - DNA, 25 bp, Homo sapien
caatgtactttcatggaacaagtct

SEQ ID NO: 1757088 - DNA, 25 bp, Homo sapien
cagtaaataagtcaatgtgactaac

SEQ ID NO: 1757089 - DNA, 25 bp, Homo sapien
tctggttcagtaaataagtcaatgt

SEQ ID NO: 1757090 - DNA, 25 bp, Homo sapien
ccaatgtactttcatggaacaagtc

SEQ ID NO: 1757091 - DNA, 25 bp, Homo sapien
tcccagtgactagaaaagcacctgg

SEQ ID NO: 1757092 - DNA, 25 bp, Homo sapien
gtagcctttgccatctgacacatta

SEQ ID NO: 1757093 - DNA, 25 bp, Homo sapien
ttcagagcctttcaaggactacggg

SEQ ID NO: 1757094 - DNA, 25 bp, Homo sapien
tattcctgctagactgacagctcca

SEQ ID NO: 1757095 - DNA, 25 bp, Homo sapien
ctggtaactaccacccaggaggcaa

SEQ ID NO: 1757096 - DNA, 25 bp, Homo sapien
actaccacccaggaggcaaagctaa

SEQ ID NO: 1757097 - DNA, 25 bp, Homo sapien
tgtcataaattgtaagctgtgacag

SEQ ID NO: 1757098 - DNA, 25 bp, Homo sapien
taaattgtaagctgtgacaggctgg

SEQ ID NO: 1757099 - DNA, 25 bp, Homo sapien
atcactgtgagcattatttaatgca

SEQ ID NO: 1757100 - DNA, 25 bp, Homo sapien
tcactgtgagcattatttaatgcac

SEQ ID NO: 1757101 - DNA, 25 bp, Homo sapien
agtgcattgaacacagtttactctt

SEQ ID NO: 1757102 - DNA, 25 bp, Homo sapien
tgttagaatcacactagactcaagg

SEQ ID NO: 1757103 - DNA, 25 bp, Homo sapien
tccctagagcttacaaggaatgcca

SEQ ID NO: 1757104 - DNA, 25 bp, Homo sapien
catggtgccaaacattagtaacagc

SEQ ID NO: 1757105 - DNA, 25 bp, Homo sapien
ggccacacagctataagtatgaaag

SEQ ID NO: 1757106 - DNA, 25 bp, Homo sapien
tctgtatcccagaaggacaagtcag

SEQ ID NO: 1757107 - DNA, 25 bp, Homo sapien
ggatccaatgtacgcttcttctgta

SEQ ID NO: 1757108 - DNA, 25 bp, Homo sapien
tttcagaggccgcatggatccaatg

SEQ ID NO: 1757109 - DNA, 25 bp, Homo sapien
gacaagtcagggtattcaccaggtt

SEQ ID NO: 1757110 - DNA, 25 bp, Homo sapien
aagaatcaccacaaggacatttgga

SEQ ID NO: 1757111 - DNA, 25 bp, Homo sapien
cgtcaagctgacaaagaatcaccac

SEQ ID NO: 1757112 - DNA, 25 bp, Homo sapien
gcaataggtccaatctactacaaat

SEQ ID NO: 1757113 - DNA, 25 bp, Homo sapien
tcacaccctgtgaattaccacgtca

SEQ ID NO: 1757114 - DNA, 25 bp, Homo sapien
gacaagacagatgcggcctgcttcc

SEQ ID NO: 1757115 - DNA, 25 bp, Homo sapien
tcactgtgggtatttagggaacaac

SEQ ID NO: 1757116 - DNA, 25 bp, Homo sapien
caaagctgacagtctagcggaagaa

SEQ ID NO: 1757117 - DNA, 25 bp, Homo sapien
aaacatgtttgtaatgggagcctca

SEQ ID NO: 1757118 - DNA, 25 bp, Homo sapien
cacaggcccggggttgccgtctcta

SEQ ID NO: 1757119 - DNA, 25 bp, Homo sapien
tgccgtctctaccattcccttcggt

SEQ ID NO: 1757120 - DNA, 25 bp, Homo sapien
ggcacaggcccggggttgccgtctc

SEQ ID NO: 1757121 - DNA, 25 bp, Homo sapien
gttgccgtctctaccattcccttcg

SEQ ID NO: 1757122 - DNA, 25 bp, Homo sapien
caggccactgtcttcggcttctgca

SEQ ID NO: 1757123 - DNA, 25 bp, Homo sapien
aggccactgtcttcggcttctgcat

SEQ ID NO: 1757124 - DNA, 25 bp, Homo sapien
gatctgtagggaattcaactttacg

SEQ ID NO: 1757125 - DNA, 25 bp, Homo sapien
gatcgtctccagtcgcctcttctgt

SEQ ID NO: 1757126 - DNA, 25 bp, Homo sapien
tgcctcttagaactttcatagaccc

SEQ ID NO: 1757127 - DNA, 25 bp, Homo sapien
tccctccatgacaaaactacacatt

SEQ ID NO: 1757128 - DNA, 25 bp, Homo sapien
tcatagaccccactgacgtaaacgg

SEQ ID NO: 1757129 - DNA, 25 bp, Homo sapien
tgatgaccggtaaatccaggtttct

SEQ ID NO: 1757130 - DNA, 25 bp, Homo sapien
tcttctagcaaatactgatgaccgg

SEQ ID NO: 1757131 - DNA, 25 bp, Homo sapien
gactgaagctctccattgtaacctc

SEQ ID NO: 1757132 - DNA, 25 bp, Homo sapien
taatataggtcgtaaagactgaagc

SEQ ID NO: 1757133 - DNA, 25 bp, Homo sapien
tttcactgtacattatcatgtgagc

SEQ ID NO: 1757134 - DNA, 25 bp, Homo sapien
tgtacattatcatgtgagcatttga

SEQ ID NO: 1757135 - DNA, 25 bp, Homo sapien
cactgtacattatcatgtgagcatt

SEQ ID NO: 1757136 - DNA, 25 bp, Homo sapien
gtcttcactccatatccagtctcct

SEQ ID NO: 1757137 - DNA, 25 bp, Homo sapien
aagtcaggattttcataggctaccc

SEQ ID NO: 1757138 - DNA, 25 bp, Homo sapien
agtcaggattttcataggctaccca

SEQ ID NO: 1757139 - DNA, 25 bp, Homo sapien
gtcaggattttcataggctacccat

SEQ ID NO: 1757140 - DNA, 25 bp, Homo sapien
acatataggttgaacagaagagatc

SEQ ID NO: 1757141 - DNA, 25 bp, Homo sapien
caaacatataggttgaacagaagag

SEQ ID NO: 1757142 - DNA, 25 bp, Homo sapien
ataggttgaacagaagagatcttac

SEQ ID NO: 1757143 - DNA, 25 bp, Homo sapien
catataggttgaacagaagagatct

SEQ ID NO: 1757144 - DNA, 25 bp, Homo sapien
tttccatagcaattactattacatg

SEQ ID NO: 1757145 - DNA, 25 bp, Homo sapien
gcaattactattacatgaaccagga

SEQ ID NO: 1757146 - DNA, 25 bp, Homo sapien
cttctagattattagcaattactgc

SEQ ID NO: 1757147 - DNA, 25 bp, Homo sapien
ttactattacatgaaccaggaacac

SEQ ID NO: 1757148 - DNA, 25 bp, Homo sapien
ttcgtctccttgggccagtgaaaga

SEQ ID NO: 1757149 - DNA, 25 bp, Homo sapien
tttcgtctccttgggccagtgaaag

SEQ ID NO: 1757150 - DNA, 25 bp, Homo sapien
ctgatttcgtctccttgggccagtg

SEQ ID NO: 1757151 - DNA, 25 bp, Homo sapien
gatttcgtctccttgggccagtgaa

SEQ ID NO: 1757152 - DNA, 25 bp, Homo sapien
caatggaaggccctttatatattaa

SEQ ID NO: 1757153 - DNA, 25 bp, Homo sapien
gaaacataagttcagcttttcaatg

SEQ ID NO: 1757154 - DNA, 25 bp, Homo sapien
acacccggccccaaatgtctgacat

SEQ ID NO: 1757155 - DNA, 25 bp, Homo sapien
gttcagcttttcaatggaaggccct

SEQ ID NO: 1757156 - DNA, 25 bp, Homo sapien
cattcagaaagcttgagtgagacca

SEQ ID NO: 1757157 - DNA, 25 bp, Homo sapien
taacaaatgtacaccccagttgatg

SEQ ID NO: 1757158 - DNA, 25 bp, Homo sapien
gacacttgctgacttatcggaatcc

SEQ ID NO: 1757159 - DNA, 25 bp, Homo sapien
cctgtgaatgccaataaaggaggct

SEQ ID NO: 1757160 - DNA, 25 bp, Homo sapien
gcgccattcgtgactatttatttaa

SEQ ID NO: 1757161 - DNA, 25 bp, Homo sapien
tcaattagaaacatgttagctgcgc

SEQ ID NO: 1757162 - DNA, 25 bp, Homo sapien
tatagaacaccctgttgtgaagctg

SEQ ID NO: 1757163 - DNA, 25 bp, Homo sapien
tgacctgctgacttttgttacagta

SEQ ID NO: 1757164 - DNA, 25 bp, Homo sapien
aagacttggtagaaaatgaatcatc

SEQ ID NO: 1757165 - DNA, 25 bp, Homo sapien
gcaagacttggtagaaaatgaatca

SEQ ID NO: 1757166 - DNA, 25 bp, Homo sapien
tgcaagacttggtagaaaatgaatc

SEQ ID NO: 1757167 - DNA, 25 bp, Homo sapien
ctgcaagacttggtagaaaatgaat

SEQ ID NO: 1757168 - DNA, 25 bp, Homo sapien
ctaagatggtggtttcgcatagtgc

SEQ ID NO: 1757169 - DNA, 25 bp, Homo sapien
tggtttcgcatagtgccaagcacct

SEQ ID NO: 1757170 - DNA, 25 bp, Homo sapien
tgccaagcacctaacaggcatcact

SEQ ID NO: 1757171 - DNA, 25 bp, Homo sapien
caagcacctaacaggcatcactata

SEQ ID NO: 1757172 - DNA, 25 bp, Homo sapien
tctggcgtctggtactcagatatca

SEQ ID NO: 1757173 - DNA, 25 bp, Homo sapien
tggtactcagatatcacgaagcacg

SEQ ID NO: 1757174 - DNA, 25 bp, Homo sapien
gaagcccgtgtcctctggcgtctgg

SEQ ID NO: 1757175 - DNA, 25 bp, Homo sapien
agatatcacgaagcacgccattgga

SEQ ID NO: 1757176 - DNA, 25 bp, Homo sapien
gcagagtgccgatcctgtcctttga

SEQ ID NO: 1757177 - DNA, 25 bp, Homo sapien
tgtcctttgaacaatccaccttggg

SEQ ID NO: 1757178 - DNA, 25 bp, Homo sapien
gaggtaccttggattaactagagcc

SEQ ID NO: 1757179 - DNA, 25 bp, Homo sapien
gactggtatgctccctgattcgcgt

SEQ ID NO: 1757180 - DNA, 25 bp, Homo sapien
gaaattttctccatcatatacaacc

SEQ ID NO: 1757181 - DNA, 25 bp, Homo sapien
gctccaggcgggcatcccattgcag

SEQ ID NO: 1757182 - DNA, 25 bp, Homo sapien
acatctataaaacgaagagacttga

SEQ ID NO: 1757183 - DNA, 25 bp, Homo sapien
ttccaacacgtattgattaccagtg

SEQ ID NO: 1757184 - DNA, 25 bp, Homo sapien
gagataccagcctcactaatagtga

SEQ ID NO: 1757185 - DNA, 25 bp, Homo sapien
tagatgtacacagagccaaatggac

SEQ ID NO: 1757186 - DNA, 25 bp, Homo sapien
taacaaccaaaggtagaggaagcca

SEQ ID NO: 1757187 - DNA, 25 bp, Homo sapien
tttaagagcaggttctaccggctgg

SEQ ID NO: 1757188 - DNA, 25 bp, Homo sapien
caaagagaataattgttggttcaga

SEQ ID NO: 1757189 - DNA, 25 bp, Homo sapien
tgccaccaataacctgaacagagcg

SEQ ID NO: 1757190 - DNA, 25 bp, Homo sapien
ggatcggagattgacagtttctgca

SEQ ID NO: 1757191 - DNA, 25 bp, Homo sapien
cagagcgtatttgtgtgttgaatcc

SEQ ID NO: 1757192 - DNA, 25 bp, Homo sapien
ggcttttcttgaatccctggattca

SEQ ID NO: 1757193 - DNA, 25 bp, Homo sapien
aggcttttcttgaatccctggattc

SEQ ID NO: 1757194 - DNA, 25 bp, Homo sapien
atgatctattttattgagtcaacaa

SEQ ID NO: 1757195 - DNA, 25 bp, Homo sapien
ttttattgagtcaacaagtaggtaa

SEQ ID NO: 1757196 - DNA, 25 bp, Homo sapien
tagagaacctatttggcgacagcca

SEQ ID NO: 1757197 - DNA, 25 bp, Homo sapien
tacttctgcaggtgacaataggaac

SEQ ID NO: 1757198 - DNA, 25 bp, Homo sapien
caataggaactgtcgccctctgtaa

SEQ ID NO: 1757199 - DNA, 25 bp, Homo sapien
cataccaattaggtacttctgcagg

SEQ ID NO: 1757200 - DNA, 25 bp, Homo sapien
ggtgcctgcctgtggataactgcgt

SEQ ID NO: 1757201 - DNA, 25 bp, Homo sapien
ccccagcagttgttataccagatgt

SEQ ID NO: 1757202 - DNA, 25 bp, Homo sapien
taagggtaattaccatactcaagag

SEQ ID NO: 1757203 - DNA, 25 bp, Homo sapien
gctggaagcactgaacaagcatgaa

SEQ ID NO: 1757204 - DNA, 25 bp, Homo sapien
tatcctcagaagcttcagatcctct

SEQ ID NO: 1757205 - DNA, 25 bp, Homo sapien
ccttcttgatagatccaaatctgat

SEQ ID NO: 1757206 - DNA, 25 bp, Homo sapien
caaatctgatcatcggccccgacat

SEQ ID NO: 1757207 - DNA, 25 bp, Homo sapien
atcctctaagtttccattggttgac

SEQ ID NO: 1757208 - DNA, 25 bp, Homo sapien
ttttatctaccatagaagcatgagc

SEQ ID NO: 1757209 - DNA, 25 bp, Homo sapien
tagactggttctatcagagctagga

SEQ ID NO: 1757210 - DNA, 25 bp, Homo sapien
ctgtgcagcacacagagggatctct

SEQ ID NO: 1757211 - DNA, 25 bp, Homo sapien
aaatcaggagccaacggtcaagctc

SEQ ID NO: 1757212 - DNA, 25 bp, Homo sapien
ttgctgtaaatcctgccatcggact

SEQ ID NO: 1757213 - DNA, 25 bp, Homo sapien
cccacaatcgtcaggcagcagtctt

SEQ ID NO: 1757214 - DNA, 25 bp, Homo sapien
aggcctagcttggagccagatgtta

SEQ ID NO: 1757215 - DNA, 25 bp, Homo sapien
gatgttaccaggctgcccacaatcg

SEQ ID NO: 1757216 - DNA, 25 bp, Homo sapien
taatgtaggcctcatagggcggctg

SEQ ID NO: 1757217 - DNA, 25 bp, Homo sapien
tctaccgaactaagtgcaatcacgg

SEQ ID NO: 1757218 - DNA, 25 bp, Homo sapien
tgtactgaaagtggctagcacagca

SEQ ID NO: 1757219 - DNA, 25 bp, Homo sapien
cagattctggttcagcagttacagc

SEQ ID NO: 1757220 - DNA, 25 bp, Homo sapien
tactttctctaacattgtgtcaaaa

SEQ ID NO: 1757221 - DNA, 25 bp, Homo sapien
ctttctctaacattgtgtcaaaaac

SEQ ID NO: 1757222 - DNA, 25 bp, Homo sapien
ctactttctctaacattgtgtcaaa

SEQ ID NO: 1757223 - DNA, 25 bp, Homo sapien
actttctctaacattgtgtcaaaaa

SEQ ID NO: 1757224 - DNA, 25 bp, Homo sapien
aagctctagctaaggatcatagtgt

SEQ ID NO: 1757225 - DNA, 25 bp, Homo sapien
gctaaggatcatagtgttgtccacc

SEQ ID NO: 1757226 - DNA, 25 bp, Homo sapien
ggatcatagtgttgtccaccctgga

SEQ ID NO: 1757227 - DNA, 25 bp, Homo sapien
tgtgtaccccgtgaatacatgttga

SEQ ID NO: 1757228 - DNA, 25 bp, Homo sapien
tatgcttactcagcaggcacttgag

SEQ ID NO: 1757229 - DNA, 25 bp, Homo sapien
tggtccgctgctaatgtaacaagtc

SEQ ID NO: 1757230 - DNA, 25 bp, Homo sapien
aaaaagactgttgttgctaccgtgc

SEQ ID NO: 1757231 - DNA, 25 bp, Homo sapien
tagagtcccacggttcatgtcagag

SEQ ID NO: 1757232 - DNA, 25 bp, Homo sapien
ttatagttgaggaaggaaatcgtct

SEQ ID NO: 1757233 - DNA, 25 bp, Homo sapien
caaggatgtatcaacaaagacccca

SEQ ID NO: 1757234 - DNA, 25 bp, Homo sapien
tctacacagctagatgtatggctag

SEQ ID NO: 1757235 - DNA, 25 bp, Homo sapien
cattttgatgcagggagtgactggt

SEQ ID NO: 1757236 - DNA, 25 bp, Homo sapien
ttttctacccagttcttaagagcta

SEQ ID NO: 1757237 - DNA, 25 bp, Homo sapien
tctacccagttcttaagagctagtc

SEQ ID NO: 1757238 - DNA, 25 bp, Homo sapien
tcttaagagctagtccacagtcact

SEQ ID NO: 1757239 - DNA, 25 bp, Homo sapien
cagttcttaagagctagtccacagt

SEQ ID NO: 1757240 - DNA, 25 bp, Homo sapien
tcccacacttgtgtaaacttctctt

SEQ ID NO: 1757241 - DNA, 25 bp, Homo sapien
gcttcccacacttgtgtaaacttct

SEQ ID NO: 1757242 - DNA, 25 bp, Homo sapien
catggcttcccacacttgtgtaaac

SEQ ID NO: 1757243 - DNA, 25 bp, Homo sapien
tggcttcccacacttgtgtaaactt

SEQ ID NO: 1757244 - DNA, 25 bp, Homo sapien
aatcaatgaaggaggagtcgatcca

SEQ ID NO: 1757245 - DNA, 25 bp, Homo sapien
caaaagctgctaattaggcaacctg

SEQ ID NO: 1757246 - DNA, 25 bp, Homo sapien
ggcaacctgtttaagcagctaccaa

SEQ ID NO: 1757247 - DNA, 25 bp, Homo sapien
tccagaaagtgtttaaggccaagaa

SEQ ID NO: 1757248 - DNA, 25 bp, Homo sapien
tttgtgacattctagggcagcccat

SEQ ID NO: 1757249 - DNA, 25 bp, Homo sapien
gaaacaagctgttctacctgtgaca

SEQ ID NO: 1757250 - DNA, 25 bp, Homo sapien
ctataccctgaagcatggctgcaga

SEQ ID NO: 1757251 - DNA, 25 bp, Homo sapien
taattgcctaccatagactccagag

SEQ ID NO: 1757252 - DNA, 25 bp, Homo sapien
aaccagaagcaagtttatttaagag

SEQ ID NO: 1757253 - DNA, 25 bp, Homo sapien
gttcagcacaggctactgtagaatg

SEQ ID NO: 1757254 - DNA, 25 bp, Homo sapien
aagagatcagttcagcacaggctac

SEQ ID NO: 1757255 - DNA, 25 bp, Homo sapien
gatcagttcagcacaggctactgta

SEQ ID NO: 1757256 - DNA, 25 bp, Homo sapien
tccagattagattatacattccatg

SEQ ID NO: 1757257 - DNA, 25 bp, Homo sapien
ctttgcaggttgttgtggcaccttc

SEQ ID NO: 1757258 - DNA, 25 bp, Homo sapien
ggtgagtgcctgtgagcccaaattt

SEQ ID NO: 1757259 - DNA, 25 bp, Homo sapien
tgtctgtagtcagtagaaattcgaa

SEQ ID NO: 1757260 - DNA, 25 bp, Homo sapien
ttttggcatgttagaacaggctgtt

SEQ ID NO: 1757261 - DNA, 25 bp, Homo sapien
tttagtttagatgtaagaagttgaa

SEQ ID NO: 1757262 - DNA, 25 bp, Homo sapien
aaaaaggaattcatcaactgatttg

SEQ ID NO: 1757263 - DNA, 25 bp, Homo sapien
tggattccattatggctgaattttt

SEQ ID NO: 1757264 - DNA, 25 bp, Homo sapien
gcatgtcattcttgctcagggacca

SEQ ID NO: 1757265 - DNA, 25 bp, Homo sapien
agtatatgtgctgcctaagtaagcc

SEQ ID NO: 1757266 - DNA, 25 bp, Homo sapien
tatatgtgctgcctaagtaagccct

SEQ ID NO: 1757267 - DNA, 25 bp, Homo sapien
gaccatgctaatctttgtgtcattc

SEQ ID NO: 1757268 - DNA, 25 bp, Homo sapien
tcatatgcgaagagcggaataacag

SEQ ID NO: 1757269 - DNA, 25 bp, Homo sapien
ttagattagcttcattttcgaatgc

SEQ ID NO: 1757270 - DNA, 25 bp, Homo sapien
aacagttccgtattcttctttcagt

SEQ ID NO: 1757271 - DNA, 25 bp, Homo sapien
taattcgagcatttcatatgcgaag

SEQ ID NO: 1757272 - DNA, 25 bp, Homo sapien
gaattgcagcccgaggaaatgatct

SEQ ID NO: 1757273 - DNA, 25 bp, Homo sapien
gagcccttcaacaccgagtacttgg

SEQ ID NO: 1757274 - DNA, 25 bp, Homo sapien
tagtgatgttacatgggcgcagcca

SEQ ID NO: 1757275 - DNA, 25 bp, Homo sapien
tctttgtaggcgattggttggcgcc

SEQ ID NO: 1757276 - DNA, 25 bp, Homo sapien
tgcccagcctgccaccacaggagcc

SEQ ID NO: 1757277 - DNA, 25 bp, Homo sapien
ctgccaccacaggagccaggcaagg

SEQ ID NO: 1757278 - DNA, 25 bp, Homo sapien
accacaggagccaggcaagggggaa

SEQ ID NO: 1757279 - DNA, 25 bp, Homo sapien
cagcctgccaccacaggagccaggc

SEQ ID NO: 1757280 - DNA, 25 bp, Homo sapien
acatagctaaaaagcagtagagctg

SEQ ID NO: 1757281 - DNA, 25 bp, Homo sapien
cacatagctaaaaagcagtagagct

SEQ ID NO: 1757282 - DNA, 25 bp, Homo sapien
tgaaggatggctgagggcagattct

SEQ ID NO: 1757283 - DNA, 25 bp, Homo sapien
cagattctgtacagagggtagctta

SEQ ID NO: 1757284 - DNA, 25 bp, Homo sapien
ctgtacaaacaacggcagtaagtta

SEQ ID NO: 1757285 - DNA, 25 bp, Homo sapien
ggagttgaggcccagcatgggtgaa

SEQ ID NO: 1757286 - DNA, 25 bp, Homo sapien
tgaagggtgatgcactgatcagctt

SEQ ID NO: 1757287 - DNA, 25 bp, Homo sapien
ggacatgacattcttctccttagcc

SEQ ID NO: 1757288 - DNA, 25 bp, Homo sapien
tggatgaagggtgatgcactgatca

SEQ ID NO: 1757289 - DNA, 25 bp, Homo sapien
ctctacacttagtgtagtggatgaa

SEQ ID NO: 1757290 - DNA, 25 bp, Homo sapien
tgacacagtaatgtaggcatttaga

SEQ ID NO: 1757291 - DNA, 25 bp, Homo sapien
gacacagtaatgtaggcatttagaa

SEQ ID NO: 1757292 - DNA, 25 bp, Homo sapien
acacagtaatgtaggcatttagaaa

SEQ ID NO: 1757293 - DNA, 25 bp, Homo sapien
cacagtaatgtaggcatttagaaac

SEQ ID NO: 1757294 - DNA, 25 bp, Homo sapien
cattcttatatctcttttctgattc

SEQ ID NO: 1757295 - DNA, 25 bp, Homo sapien
ttctgattcttcagcttgttttaag

SEQ ID NO: 1757296 - DNA, 25 bp, Homo sapien
gattcttcagcttgttttaaggcca

SEQ ID NO: 1757297 - DNA, 25 bp, Homo sapien
ctgattcttcagcttgttttaaggc

SEQ ID NO: 1757298 - DNA, 25 bp, Homo sapien
ttccatctaaatccccaagtgactg

SEQ ID NO: 1757299 - DNA, 25 bp, Homo sapien
taggaattccatctaaatccccaag

SEQ ID NO: 1757300 - DNA, 25 bp, Homo sapien
tgtcttttactgcaataggaattcc

SEQ ID NO: 1757301 - DNA, 25 bp, Homo sapien
gatgcacatgttgtctcaatgccag

SEQ ID NO: 1757302 - DNA, 25 bp, Homo sapien
gatgatggtggttcccgccaaaagg

SEQ ID NO: 1757303 - DNA, 25 bp, Homo sapien
atgatggtggttcccgccaaaaggc

SEQ ID NO: 1757304 - DNA, 25 bp, Homo sapien
atggtggttcccgccaaaaggccag

SEQ ID NO: 1757305 - DNA, 25 bp, Homo sapien
tggatgatggtggttcccgccaaaa

SEQ ID NO: 1757306 - DNA, 25 bp, Homo sapien
cttataggttcacatgtacatggca

SEQ ID NO: 1757307 - DNA, 25 bp, Homo sapien
ttataggttcacatgtacatggcaa

SEQ ID NO: 1757308 - DNA, 25 bp, Homo sapien
tataggttcacatgtacatggcaaa

SEQ ID NO: 1757309 - DNA, 25 bp, Homo sapien
cttacagtacttactgtgctcaata

SEQ ID NO: 1757310 - DNA, 25 bp, Homo sapien
acagtacttactgtgctcaatatgc

SEQ ID NO: 1757311 - DNA, 25 bp, Homo sapien
tcattctcttggcaagaatcttgcc

SEQ ID NO: 1757312 - DNA, 25 bp, Homo sapien
acattcattctcttggcaagaatct

SEQ ID NO: 1757313 - DNA, 25 bp, Homo sapien
tcctcatcattttcctcaatgcgtt

SEQ ID NO: 1757314 - DNA, 25 bp, Homo sapien
ctcatcattttcctcaatgcgtttc

SEQ ID NO: 1757315 - DNA, 25 bp, Homo sapien
ttttcctcatcattttcctcaatgc

SEQ ID NO: 1757316 - DNA, 25 bp, Homo sapien
catcattttcctcaatgcgtttcag

SEQ ID NO: 1757317 - DNA, 25 bp, Homo sapien
ctccaacagctcaggagccttccca

SEQ ID NO: 1757318 - DNA, 25 bp, Homo sapien
ggctccaacagctcaggagccttcc

SEQ ID NO: 1757319 - DNA, 25 bp, Homo sapien
gctccaacagctcaggagccttccc

SEQ ID NO: 1757320 - DNA, 25 bp, Homo sapien
gtagcattataaggtggtatataac

SEQ ID NO: 1757321 - DNA, 25 bp, Homo sapien
tgaactactgtagcattataaggtg

SEQ ID NO: 1757322 - DNA, 25 bp, Homo sapien
aacttctgaactactgtagcattat

SEQ ID NO: 1757323 - DNA, 25 bp, Homo sapien
ctactgtagcattataaggtggtat

SEQ ID NO: 1757324 - DNA, 25 bp, Homo sapien
ttgcattccagcgtggatgacaaga

SEQ ID NO: 1757325 - DNA, 25 bp, Homo sapien
ccattgcattccagcgtggatgaca

SEQ ID NO: 1757326 - DNA, 25 bp, Homo sapien
cattccagcgtggatgacaagagca

SEQ ID NO: 1757327 - DNA, 25 bp, Homo sapien
gcattccagcgtggatgacaagagc

SEQ ID NO: 1757328 - DNA, 25 bp, Homo sapien
gaagtgaagcaagataccttagtaa

SEQ ID NO: 1757329 - DNA, 25 bp, Homo sapien
tgacgaagtgaagcaagatacctta

SEQ ID NO: 1757330 - DNA, 25 bp, Homo sapien
tcttctgagtatattatttgcttct

SEQ ID NO: 1757331 - DNA, 25 bp, Homo sapien
gcaagataccttagtaaaactttca

SEQ ID NO: 1757332 - DNA, 25 bp, Homo sapien
tggtccaaatacaccatctgtgctc

SEQ ID NO: 1757333 - DNA, 25 bp, Homo sapien
gcgtagcatgtgaacgccgatacag

SEQ ID NO: 1757334 - DNA, 25 bp, Homo sapien
tgaacgccgatacagcagctgcact

SEQ ID NO: 1757335 - DNA, 25 bp, Homo sapien
gtagcatgtgaacgccgatacagca

SEQ ID NO: 1757336 - DNA, 25 bp, Homo sapien
catgtgaacgccgatacagcagctg

SEQ ID NO: 1757337 - DNA, 25 bp, Homo sapien
tgaaaccaacaagcccacagtgggc

SEQ ID NO: 1757338 - DNA, 25 bp, Homo sapien
tctggtcgatcctcctgtatctgat

SEQ ID NO: 1757339 - DNA, 25 bp, Homo sapien
gcaggatttctggtcgatcctcctg

SEQ ID NO: 1757340 - DNA, 25 bp, Homo sapien
gaaactaagccatagcttggtttga

SEQ ID NO: 1757341 - DNA, 25 bp, Homo sapien
gattcctggcacatccatcgaattc

SEQ ID NO: 1757342 - DNA, 25 bp, Homo sapien
gttaagattcctggcacatccatcg

SEQ ID NO: 1757343 - DNA, 25 bp, Homo sapien
ttcctggcacatccatcgaattcac

SEQ ID NO: 1757344 - DNA, 25 bp, Homo sapien
taagattcctggcacatccatcgaa

SEQ ID NO: 1757345 - DNA, 25 bp, Homo sapien
catgtactgtggtagagtccctggg

SEQ ID NO: 1757346 - DNA, 25 bp, Homo sapien
gttcatgtactgtggtagagtccct

SEQ ID NO: 1757347 - DNA, 25 bp, Homo sapien
ggtttattaataggttcatgtactg

SEQ ID NO: 1757348 - DNA, 25 bp, Homo sapien
tgggaagcatgaatggtttattaat

SEQ ID NO: 1757349 - DNA, 25 bp, Homo sapien
gagattcaaacccacccaatccgcc

SEQ ID NO: 1757350 - DNA, 25 bp, Homo sapien
ccaagtctgtgctctctattggact

SEQ ID NO: 1757351 - DNA, 25 bp, Homo sapien
acccaatccgcctcccaagtctgtg

SEQ ID NO: 1757352 - DNA, 25 bp, Homo sapien
tgtgctctctattggacttgacagt

SEQ ID NO: 1757353 - DNA, 25 bp, Homo sapien
cctaaccaggagacacttgacaatg

SEQ ID NO: 1757354 - DNA, 25 bp, Homo sapien
ggtgtacgcacctggccttacatat

SEQ ID NO: 1757355 - DNA, 25 bp, Homo sapien
gataaagactgcatggtccacaaaa

SEQ ID NO: 1757356 - DNA, 25 bp, Homo sapien
tattctgcagggtaacttatcttcc

SEQ ID NO: 1757357 - DNA, 25 bp, Homo sapien
ctttggaccaaagagactgtacttc

SEQ ID NO: 1757358 - DNA, 25 bp, Homo sapien
ctgtacttcacttgataattccggt

SEQ ID NO: 1757359 - DNA, 25 bp, Homo sapien
ttgataattccggtacaagatattc

SEQ ID NO: 1757360 - DNA, 25 bp, Homo sapien
tgaggaagggatacttcaattactt

SEQ ID NO: 1757361 - DNA, 25 bp, Homo sapien
gccatattcgatgccacttctgatg

SEQ ID NO: 1757362 - DNA, 25 bp, Homo sapien
ttcgatgccacttctgatgtgcaca

SEQ ID NO: 1757363 - DNA, 25 bp, Homo sapien
tattcgatgccacttctgatgtgca

SEQ ID NO: 1757364 - DNA, 25 bp, Homo sapien
cttgccatattcgatgccacttctg

SEQ ID NO: 1757365 - DNA, 25 bp, Homo sapien
tagcgggactgagcatatgacaaca

SEQ ID NO: 1757366 - DNA, 25 bp, Homo sapien
cagtcctgagaagcaaaccaaacat

SEQ ID NO: 1757367 - DNA, 25 bp, Homo sapien
tattgagctctacattagcgggact

SEQ ID NO: 1757368 - DNA, 25 bp, Homo sapien
caagttctgcctcccttgtcaagtg

SEQ ID NO: 1757369 - DNA, 25 bp, Homo sapien
cacatcattaaacccttctcgtctg

SEQ ID NO: 1757370 - DNA, 25 bp, Homo sapien
agaaaaagtttcctgagagaattct

SEQ ID NO: 1757371 - DNA, 25 bp, Homo sapien
aaagtttcctgagagaattcttcct

SEQ ID NO: 1757372 - DNA, 25 bp, Homo sapien
ttcctgagagaattcttcctctcac

SEQ ID NO: 1757373 - DNA, 25 bp, Homo sapien
taataagaaaaagtttcctgagaga

SEQ ID NO: 1757374 - DNA, 25 bp, Homo sapien
gaggactgcctgtaatctgtaccaa

SEQ ID NO: 1757375 - DNA, 25 bp, Homo sapien
tgaataccaggacccaaaagtgcca

SEQ ID NO: 1757376 - DNA, 25 bp, Homo sapien
taagacctgataagagacatgttac

SEQ ID NO: 1757377 - DNA, 25 bp, Homo sapien
gaagaaaattcctaaatgagttgtc

SEQ ID NO: 1757378 - DNA, 25 bp, Homo sapien
taatggaaactagccaaaaggaagc

SEQ ID NO: 1757379 - DNA, 25 bp, Homo sapien
ccaccgcacgcagcctaaatatgtt

SEQ ID NO: 1757380 - DNA, 25 bp, Homo sapien
tgtactggaaagaatcaacataaca

SEQ ID NO: 1757381 - DNA, 25 bp, Homo sapien
ggataagaagacctacatggaactt

SEQ ID NO: 1757382 - DNA, 25 bp, Homo sapien
cgggttctgttgtcctctttgatga

SEQ ID NO: 1757383 - DNA, 25 bp, Homo sapien
tgggcacttcgggttctgttgtcct

SEQ ID NO: 1757384 - DNA, 25 bp, Homo sapien
catcctgggcacttcgggttctgtt

SEQ ID NO: 1757385 - DNA, 25 bp, Homo sapien
gcacttcgggttctgttgtcctctt

SEQ ID NO: 1757386 - DNA, 25 bp, Homo sapien
tcttcttagatgaggaggagattgc

SEQ ID NO: 1757387 - DNA, 25 bp, Homo sapien
tcccctgcaaagaagttgtaccatt

SEQ ID NO: 1757388 - DNA, 25 bp, Homo sapien
gctattttatacaatgccccagaga

SEQ ID NO: 1757389 - DNA, 25 bp, Homo sapien
ggagattgcttcatcaaacgacaaa

SEQ ID NO: 1757390 - DNA, 25 bp, Homo sapien
ggtcacaaaacgcacgtccaataaa

SEQ ID NO: 1757391 - DNA, 25 bp, Homo sapien
ctgctggtcacaaaacgcacgtcca

SEQ ID NO: 1757392 - DNA, 25 bp, Homo sapien
gcacgtccaataaactgcagtccta

SEQ ID NO: 1757393 - DNA, 25 bp, Homo sapien
ccaataaactgcagtcctattggca

SEQ ID NO: 1757394 - DNA, 25 bp, Homo sapien
tactgttttagagagacagaggcta

SEQ ID NO: 1757395 - DNA, 25 bp, Homo sapien
ctgttttagagagacagaggctaac

SEQ ID NO: 1757396 - DNA, 25 bp, Homo sapien
actgttttagagagacagaggctaa

SEQ ID NO: 1757397 - DNA, 25 bp, Homo sapien
ttactgttttagagagacagaggct

SEQ ID NO: 1757398 - DNA, 25 bp, Homo sapien
tgaccaggctgttctagatcttctg

SEQ ID NO: 1757399 - DNA, 25 bp, Homo sapien
gaccaggctgttctagatcttctga

SEQ ID NO: 1757400 - DNA, 25 bp, Homo sapien
cagcctaaaagtcattttaatttgt

SEQ ID NO: 1757401 - DNA, 25 bp, Homo sapien
gcacccagcctaaaagtcattttaa

SEQ ID NO: 1757402 - DNA, 25 bp, Homo sapien
aaaggagtccctgcaagtggagctc

SEQ ID NO: 1757403 - DNA, 25 bp, Homo sapien
aatatctctgggctcgagggtccca

SEQ ID NO: 1757404 - DNA, 25 bp, Homo sapien
gattctgggccctgactggttgcat

SEQ ID NO: 1757405 - DNA, 25 bp, Homo sapien
tctaggcatgggctccggaatagca

SEQ ID NO: 1757406 - DNA, 25 bp, Homo sapien
tagtgcagctcatgtagagatacag

SEQ ID NO: 1757407 - DNA, 25 bp, Homo sapien
ctaacaggtgacgatgaaacattcc

SEQ ID NO: 1757408 - DNA, 25 bp, Homo sapien
cagtgacttggcaaaatgagaccta

SEQ ID NO: 1757409 - DNA, 25 bp, Homo sapien
tataggaatattactaagcctggca

SEQ ID NO: 1757410 - DNA, 25 bp, Homo sapien
gagcagtcccagacctatgtatata

SEQ ID NO: 1757411 - DNA, 25 bp, Homo sapien
tctccatagagtgctgaggtgggac

SEQ ID NO: 1757412 - DNA, 25 bp, Homo sapien
tgaggctcttttagacagtgaggac

SEQ ID NO: 1757413 - DNA, 25 bp, Homo sapien
ggaatacattcacaccacagcactg

SEQ ID NO: 1757414 - DNA, 25 bp, Homo sapien
gacacaaagtccctttctagccgac

SEQ ID NO: 1757415 - DNA, 25 bp, Homo sapien
caaagtccctttctagccgactcca

SEQ ID NO: 1757416 - DNA, 25 bp, Homo sapien
agtccctttctagccgactccacat

SEQ ID NO: 1757417 - DNA, 25 bp, Homo sapien
cacaaagtccctttctagccgactc

SEQ ID NO: 1757418 - DNA, 25 bp, Homo sapien
aaacccgtgggaggtcacattacag

SEQ ID NO: 1757419 - DNA, 25 bp, Homo sapien
gaattgtacagggagctttcgtagc

SEQ ID NO: 1757420 - DNA, 25 bp, Homo sapien
cagagttggattcccctcaggtctc

SEQ ID NO: 1757421 - DNA, 25 bp, Homo sapien
tcagtcagattacattagggcccca

SEQ ID NO: 1757422 - DNA, 25 bp, Homo sapien
catatcaggtaacagctggccaggc

SEQ ID NO: 1757423 - DNA, 25 bp, Homo sapien
cttcttacaatgtggccagcttccc

SEQ ID NO: 1757424 - DNA, 25 bp, Homo sapien
tttctgtgtgatctctccacctggc

SEQ ID NO: 1757425 - DNA, 25 bp, Homo sapien
gacagtctcagcatagtccgacttc

SEQ ID NO: 1757426 - DNA, 25 bp, Homo sapien
gcatctcttagtttaacctctgtcc

SEQ ID NO: 1757427 - DNA, 25 bp, Homo sapien
atctcttagtttaacctctgtcctt

SEQ ID NO: 1757428 - DNA, 25 bp, Homo sapien
catctcttagtttaacctctgtcct

SEQ ID NO: 1757429 - DNA, 25 bp, Homo sapien
tccgcttgattcacttgatttcctt

SEQ ID NO: 1757430 - DNA, 25 bp, Homo sapien
tcgtcagtattgttccttggattaa

SEQ ID NO: 1757431 - DNA, 25 bp, Homo sapien
gtattttgtccgtgaaattcgtcag

SEQ ID NO: 1757432 - DNA, 25 bp, Homo sapien
tccttcttagtattttgtccgtgaa

SEQ ID NO: 1757433 - DNA, 25 bp, Homo sapien
ctctgagcaacagaagcacttttgt

SEQ ID NO: 1757434 - DNA, 25 bp, Homo sapien
acttttgtctgcatttaggttgctc

SEQ ID NO: 1757435 - DNA, 25 bp, Homo sapien
cttttctctgagcaacagaagcact

SEQ ID NO: 1757436 - DNA, 25 bp, Homo sapien
ttttgtctgcatttaggttgctcat

SEQ ID NO: 1757437 - DNA, 25 bp, Homo sapien
tatagaggaaacaggaagagaatgg

SEQ ID NO: 1757438 - DNA, 25 bp, Homo sapien
gaggaaacaggaagagaatggggat

SEQ ID NO: 1757439 - DNA, 25 bp, Homo sapien
gaaacaggaagagaatggggattct

SEQ ID NO: 1757440 - DNA, 25 bp, Homo sapien
ctatagaggaaacaggaagagaatg

SEQ ID NO: 1757441 - DNA, 25 bp, Homo sapien
gaagtggagtggtgaacattatttg

SEQ ID NO: 1757442 - DNA, 25 bp, Homo sapien
aagtggagtggtgaacattatttgt

SEQ ID NO: 1757443 - DNA, 25 bp, Homo sapien
aaggaagtggagtggtgaacattat

SEQ ID NO: 1757444 - DNA, 25 bp, Homo sapien
ggaagtggagtggtgaacattattt

SEQ ID NO: 1757445 - DNA, 25 bp, Homo sapien
tcccatcgaagtgggttgagatcca

SEQ ID NO: 1757446 - DNA, 25 bp, Homo sapien
tctgcaaaccagagtcatgctgtgg

SEQ ID NO: 1757447 - DNA, 25 bp, Homo sapien
gctggtctggacagaggttctgcaa

SEQ ID NO: 1757448 - DNA, 25 bp, Homo sapien
tgagatccaggatgtgtcactttcc

SEQ ID NO: 1757449 - DNA, 25 bp, Homo sapien
tacacagcttatccaaggttgcact

SEQ ID NO: 1757450 - DNA, 25 bp, Homo sapien
ttttaggtgctagagatgacactgc

SEQ ID NO: 1757451 - DNA, 25 bp, Homo sapien
gagagggccagtataagcaagagta

SEQ ID NO: 1757452 - DNA, 25 bp, Homo sapien
gatgactacaccatattgctcccag

SEQ ID NO: 1757453 - DNA, 25 bp, Homo sapien
tttataacattaatacgacttttga

SEQ ID NO: 1757454 - DNA, 25 bp, Homo sapien
catatatactgttatgccagaaaaa

SEQ ID NO: 1757455 - DNA, 25 bp, Homo sapien
ggaatagataataacaatgtccagg

SEQ ID NO: 1757456 - DNA, 25 bp, Homo sapien
cctacatgtttgttgtagtatgaga

SEQ ID NO: 1757457 - DNA, 25 bp, Homo sapien
gatcaaacagggaccaagctacatt

SEQ ID NO: 1757458 - DNA, 25 bp, Homo sapien
atgatcaaacagggaccaagctaca

SEQ ID NO: 1757459 - DNA, 25 bp, Homo sapien
tcaaacagggaccaagctacatttc

SEQ ID NO: 1757460 - DNA, 25 bp, Homo sapien
aaacagggaccaagctacatttctg

SEQ ID NO: 1757461 - DNA, 25 bp, Homo sapien
ccttccattggcattgactcagctg

SEQ ID NO: 1757462 - DNA, 25 bp, Homo sapien
tgaaacttggcacatcttgtcctct

SEQ ID NO: 1757463 - DNA, 25 bp, Homo sapien
ttgtcctcttagtcatgcgctggca

SEQ ID NO: 1757464 - DNA, 25 bp, Homo sapien
ggcatctaccacttgtgcccaaatc

SEQ ID NO: 1757465 - DNA, 25 bp, Homo sapien
tgcagcacccaggcgctggtgagag

SEQ ID NO: 1757466 - DNA, 25 bp, Homo sapien
ctccctgaaggctgtcacagttcct

SEQ ID NO: 1757467 - DNA, 25 bp, Homo sapien
ccctgaaggctgtcacagttcctgt

SEQ ID NO: 1757468 - DNA, 25 bp, Homo sapien
ctgaaggctgtcacagttcctgtgc

SEQ ID NO: 1757469 - DNA, 25 bp, Homo sapien
catttgcaccactaggaatcgtttg

SEQ ID NO: 1757470 - DNA, 25 bp, Homo sapien
caatatgcacgttctataagacaga

SEQ ID NO: 1757471 - DNA, 25 bp, Homo sapien
ttgtgactgatatatgtcctcagag

SEQ ID NO: 1757472 - DNA, 25 bp, Homo sapien
gaatcgtttgtgttattgtgactga

SEQ ID NO: 1757473 - DNA, 25 bp, Homo sapien
ttctgtcttctgtagcctcttagcc

SEQ ID NO: 1757474 - DNA, 25 bp, Homo sapien
tttctgtcttctgtagcctcttagc

SEQ ID NO: 1757475 - DNA, 25 bp, Homo sapien
tctgtcttctgtagcctcttagcca

SEQ ID NO: 1757476 - DNA, 25 bp, Homo sapien
ctgtcttctgtagcctcttagccat

SEQ ID NO: 1757477 - DNA, 25 bp, Homo sapien
taaatacatacgttaaggtcagctg

SEQ ID NO: 1757478 - DNA, 25 bp, Homo sapien
tgaagaagaggatgacttagccctg

SEQ ID NO: 1757479 - DNA, 25 bp, Homo sapien
tagctatgtaggtgatttcaggccc

SEQ ID NO: 1757480 - DNA, 25 bp, Homo sapien
gagttgtctgtgataattgccctga

SEQ ID NO: 1757481 - DNA, 25 bp, Homo sapien
tttgtccacactctacatgaaaggg

SEQ ID NO: 1757482 - DNA, 25 bp, Homo sapien
atttccagccctctgaacttttcag

SEQ ID NO: 1757483 - DNA, 25 bp, Homo sapien
cagctggttctgtaagcttggcaaa

SEQ ID NO: 1757484 - DNA, 25 bp, Homo sapien
gatccaaaatcgttcatgcagctgg

SEQ ID NO: 1757485 - DNA, 25 bp, Homo sapien
gccatcttagcgtctattccttctg

SEQ ID NO: 1757486 - DNA, 25 bp, Homo sapien
tgcccccaacatcagcggaaaaact

SEQ ID NO: 1757487 - DNA, 25 bp, Homo sapien
ttcccctgccatcttagcgtctatt

SEQ ID NO: 1757488 - DNA, 25 bp, Homo sapien
gcggaaaaacttaatctggttgcca

SEQ ID NO: 1757489 - DNA, 25 bp, Homo sapien
cagtatgaaagcttttgtcagggtg

SEQ ID NO: 1757490 - DNA, 25 bp, Homo sapien
gttctgggcgaccactcctttagag

SEQ ID NO: 1757491 - DNA, 25 bp, Homo sapien
tcagggtggttctgggcgaccactc

SEQ ID NO: 1757492 - DNA, 25 bp, Homo sapien
ccactcctttagagcaggaacctgc

SEQ ID NO: 1757493 - DNA, 25 bp, Homo sapien
ggggcatagaggcaggcagttccag

SEQ ID NO: 1757494 - DNA, 25 bp, Homo sapien
gggcatagaggcaggcagttccagc

SEQ ID NO: 1757495 - DNA, 25 bp, Homo sapien
tgcgagtggtccaaggtccagtctt

SEQ ID NO: 1757496 - DNA, 25 bp, Homo sapien
tttggcggcatccctggtttgtagg

SEQ ID NO: 1757497 - DNA, 25 bp, Homo sapien
ttgacagaccttggcctgagtgggt

SEQ ID NO: 1757498 - DNA, 25 bp, Homo sapien
ggctcaggaataaggatttctggta

SEQ ID NO: 1757499 - DNA, 25 bp, Homo sapien
tctcttttattgtccaaatcctggc

SEQ ID NO: 1757500 - DNA, 25 bp, Homo sapien
tattgtccaaatcctggccaccctt

SEQ ID NO: 1757501 - DNA, 25 bp, Homo sapien
cttttattgtccaaatcctggccac

SEQ ID NO: 1757502 - DNA, 25 bp, Homo sapien
ggccacccttcaagacccatttcaa

SEQ ID NO: 1757503 - DNA, 25 bp, Homo sapien
aactcttcccttgatcaaggagtgt

SEQ ID NO: 1757504 - DNA, 25 bp, Homo sapien
gtgtaagtccttcgctttagcctga

SEQ ID NO: 1757505 - DNA, 25 bp, Homo sapien
gatcaaggagtgtaagtccttcgct

SEQ ID NO: 1757506 - DNA, 25 bp, Homo sapien
cttcgctttagcctgatttaaccaa

SEQ ID NO: 1757507 - DNA, 25 bp, Homo sapien
tgggaagccaagatggaaggattac

SEQ ID NO: 1757508 - DNA, 25 bp, Homo sapien
gaagccaagatggaaggattacttg

SEQ ID NO: 1757509 - DNA, 25 bp, Homo sapien
tttgggaagccaagatggaaggatt

SEQ ID NO: 1757510 - DNA, 25 bp, Homo sapien
ggaagccaagatggaaggattactt

SEQ ID NO: 1757511 - DNA, 25 bp, Homo sapien
gtgggataatatcaagcagtctaac

SEQ ID NO: 1757512 - DNA, 25 bp, Homo sapien
aattgctggagccaagtaggcagaa

SEQ ID NO: 1757513 - DNA, 25 bp, Homo sapien
tatgtatatttagagctccagaaag

SEQ ID NO: 1757514 - DNA, 25 bp, Homo sapien
tgaacttgaagaccagtcaacggat

SEQ ID NO: 1757515 - DNA, 25 bp, Homo sapien
tcttctaaggaagatagtagactcc

SEQ ID NO: 1757516 - DNA, 25 bp, Homo sapien
gatactggactgcacagactacaga

SEQ ID NO: 1757517 - DNA, 25 bp, Homo sapien
gaatggcattgctctataggatcaa

SEQ ID NO: 1757518 - DNA, 25 bp, Homo sapien
gactcacaagtgacccagatgttag

SEQ ID NO: 1757519 - DNA, 25 bp, Homo sapien
aactctcaggcgagatctgccagtg

SEQ ID NO: 1757520 - DNA, 25 bp, Homo sapien
caggcgagatctgccagtgacgttc

SEQ ID NO: 1757521 - DNA, 25 bp, Homo sapien
ttacaagcgtcaaaactctcaggcg

SEQ ID NO: 1757522 - DNA, 25 bp, Homo sapien
tttccagggcagagttacaagcgtc

SEQ ID NO: 1757523 - DNA, 25 bp, Homo sapien
tgggatggacaaaggtaggcatggc

SEQ ID NO: 1757524 - DNA, 25 bp, Homo sapien
cctgcactgagtagatggtcctgga

SEQ ID NO: 1757525 - DNA, 25 bp, Homo sapien
tgtggtgcggcttggtttccagcaa

SEQ ID NO: 1757526 - DNA, 25 bp, Homo sapien
cagcaatcttgctggtgggtgttca

SEQ ID NO: 1757527 - DNA, 25 bp, Homo sapien
aaagccactcgccaggaagtatggg

SEQ ID NO: 1757528 - DNA, 25 bp, Homo sapien
aagtatgggaccaacggaggccaga

SEQ ID NO: 1757529 - DNA, 25 bp, Homo sapien
caacaactggcgatggtaaagggcc

SEQ ID NO: 1757530 - DNA, 25 bp, Homo sapien
ggctgggctgccgtgcaaagccact

SEQ ID NO: 1757531 - DNA, 25 bp, Homo sapien
tgaattgtatattgaccccacagga

SEQ ID NO: 1757532 - DNA, 25 bp, Homo sapien
ggagacttggagtaagaactgatga

SEQ ID NO: 1757533 - DNA, 25 bp, Homo sapien
gaactgatgagggaggctcaaatgt

SEQ ID NO: 1757534 - DNA, 25 bp, Homo sapien
ccccacaggaaattagatcatagac

SEQ ID NO: 1757535 - DNA, 25 bp, Homo sapien
cctctgctgcgggtggtcccttttt

SEQ ID NO: 1757536 - DNA, 25 bp, Homo sapien
agtctttgcctctgctgcgggtggt

SEQ ID NO: 1757537 - DNA, 25 bp, Homo sapien
cagagggaggtaagtactgtccatc

SEQ ID NO: 1757538 - DNA, 25 bp, Homo sapien
tgatgtagacggcaggaaagagtct

SEQ ID NO: 1757539 - DNA, 25 bp, Homo sapien
ttcgcgggaacgtggaggtagtatc

SEQ ID NO: 1757540 - DNA, 25 bp, Homo sapien
gacgtgtctcagcttcgcgggaacg

SEQ ID NO: 1757541 - DNA, 25 bp, Homo sapien
cgtgtctcagcttcgcgggaacgtg

SEQ ID NO: 1757542 - DNA, 25 bp, Homo sapien
ctgacgtgtctcagcttcgcgggaa

SEQ ID NO: 1757543 - DNA, 25 bp, Homo sapien
tcttcctgtgccttgaggcctgcgc

SEQ ID NO: 1757544 - DNA, 25 bp, Homo sapien
ttcctgtgccttgaggcctgcgctc

SEQ ID NO: 1757545 - DNA, 25 bp, Homo sapien
tcctgtgccttgaggcctgcgctcc

SEQ ID NO: 1757546 - DNA, 25 bp, Homo sapien
cctcttcctgtgccttgaggcctgc

SEQ ID NO: 1757547 - DNA, 25 bp, Homo sapien
ccttcacactggaaacaagcttcat

SEQ ID NO: 1757548 - DNA, 25 bp, Homo sapien
tgcctgcagttgtaaagtctggctc

SEQ ID NO: 1757549 - DNA, 25 bp, Homo sapien
cagttgtaaagtctggctcatgaaa

SEQ ID NO: 1757550 - DNA, 25 bp, Homo sapien
gaaaccatggtttcctgaccaggtc

SEQ ID NO: 1757551 - DNA, 25 bp, Homo sapien
caccagagagtataattattctcca

SEQ ID NO: 1757552 - DNA, 25 bp, Homo sapien
tttgagagaaagttgtattaactca

SEQ ID NO: 1757553 - DNA, 25 bp, Homo sapien
ttctctgtttcaccagagagtataa

SEQ ID NO: 1757554 - DNA, 25 bp, Homo sapien
tgtattaactcaaatctattcagtc

SEQ ID NO: 1757555 - DNA, 25 bp, Homo sapien
tgaatcatctggtggtgactgcttg

SEQ ID NO: 1757556 - DNA, 25 bp, Homo sapien
gactgcttggccgttgggccagcca

SEQ ID NO: 1757557 - DNA, 25 bp, Homo sapien
ggagttcacagtctgaggaaagaga

SEQ ID NO: 1757558 - DNA, 25 bp, Homo sapien
tgggccagccagatggtcaaaaaga

SEQ ID NO: 1757559 - DNA, 25 bp, Homo sapien
tagacgggtaggtagcactgttgat

SEQ ID NO: 1757560 - DNA, 25 bp, Homo sapien
agagatgtaggtgtccctgggcatt

SEQ ID NO: 1757561 - DNA, 25 bp, Homo sapien
tccctgggcattaagaggtctccca

SEQ ID NO: 1757562 - DNA, 25 bp, Homo sapien
ccaagtagacgggtaggtagcactg

SEQ ID NO: 1757563 - DNA, 25 bp, Homo sapien
gtttccactgcaagttggcagcatt

SEQ ID NO: 1757564 - DNA, 25 bp, Homo sapien
tttccactgcaagttggcagcatta

SEQ ID NO: 1757565 - DNA, 25 bp, Homo sapien
ccactgcaagttggcagcattataa

SEQ ID NO: 1757566 - DNA, 25 bp, Homo sapien
cgcagtttccactgcaagttggcag

SEQ ID NO: 1757567 - DNA, 25 bp, Homo sapien
cagcgctgacgggatttgtgggagc

SEQ ID NO: 1757568 - DNA, 25 bp, Homo sapien
ggctgagcagcgctgacgggatttg

SEQ ID NO: 1757569 - DNA, 25 bp, Homo sapien
tagagcagaggccacttggaaacgg

SEQ ID NO: 1757570 - DNA, 25 bp, Homo sapien
tggaaacgggactttgggcctgaga

SEQ ID NO: 1757571 - DNA, 25 bp, Homo sapien
caactcataccacaacctgaagggc

SEQ ID NO: 1757572 - DNA, 25 bp, Homo sapien
caggacaatctttcacactgccctt

SEQ ID NO: 1757573 - DNA, 25 bp, Homo sapien
ttctggcccccaactcataccacaa

SEQ ID NO: 1757574 - DNA, 25 bp, Homo sapien
ctgaagggcaggtcagcaaaggaac

SEQ ID NO: 1757575 - DNA, 25 bp, Homo sapien
ggttccacggagatcatgcaggaca

SEQ ID NO: 1757576 - DNA, 25 bp, Homo sapien
tcaggatctgtacgggttccacgga

SEQ ID NO: 1757577 - DNA, 25 bp, Homo sapien
tagtcctcaggatctgtacgggttc

SEQ ID NO: 1757578 - DNA, 25 bp, Homo sapien
gcaggacataaaacgctaattcaat

SEQ ID NO: 1757579 - DNA, 25 bp, Homo sapien
cagggatggtaagagataagacgtt

SEQ ID NO: 1757580 - DNA, 25 bp, Homo sapien
agggatggtaagagataagacgttt

SEQ ID NO: 1757581 - DNA, 25 bp, Homo sapien
tggatgctgaagagtctgttgtttt

SEQ ID NO: 1757582 - DNA, 25 bp, Homo sapien
tggattctggatgctgaagagtctg

SEQ ID NO: 1757583 - DNA, 25 bp, Homo sapien
aaaaagagaaacttcagtctctctt

SEQ ID NO: 1757584 - DNA, 25 bp, Homo sapien
agtctctcttctgctggattctgga

SEQ ID NO: 1757585 - DNA, 25 bp, Homo sapien
tctccagagtcagtcgatctcttgt

SEQ ID NO: 1757586 - DNA, 25 bp, Homo sapien
cagagtcagtcgatctcttgtttct

SEQ ID NO: 1757587 - DNA, 25 bp, Homo sapien
tccagagtcagtcgatctcttgttt

SEQ ID NO: 1757588 - DNA, 25 bp, Homo sapien
gaagtccttcccctgtttagatgac

SEQ ID NO: 1757589 - DNA, 25 bp, Homo sapien
gagaattgcttggaaaatctcccca

SEQ ID NO: 1757590 - DNA, 25 bp, Homo sapien
tcttcagactgccactcatgctcag

SEQ ID NO: 1757591 - DNA, 25 bp, Homo sapien
aaggatcgattctttctgttgactg

SEQ ID NO: 1757592 - DNA, 25 bp, Homo sapien
catgcagggaaaaggatcgattctt

SEQ ID NO: 1757593 - DNA, 25 bp, Homo sapien
gcttcggttgaaatggagacagaaa

SEQ ID NO: 1757594 - DNA, 25 bp, Homo sapien
ctttggaacctgagaacttgttttg

SEQ ID NO: 1757595 - DNA, 25 bp, Homo sapien
tgagcttcggttgaaatggagacag

SEQ ID NO: 1757596 - DNA, 25 bp, Homo sapien
gggcgcttggcacctcactttggaa

SEQ ID NO: 1757597 - DNA, 25 bp, Homo sapien
tgggagcccacgtctggaacgtaga

SEQ ID NO: 1757598 - DNA, 25 bp, Homo sapien
taagagcacctctcactggactggg

SEQ ID NO: 1757599 - DNA, 25 bp, Homo sapien
ggagaaagcgcctttgctctgcagt

SEQ ID NO: 1757600 - DNA, 25 bp, Homo sapien
tgtctctcccgttattcccctaaga

SEQ ID NO: 1757601 - DNA, 25 bp, Homo sapien
tgtgtgatggaacagacagttgtct

SEQ ID NO: 1757602 - DNA, 25 bp, Homo sapien
cttcccatctccgagtcaagggttt

SEQ ID NO: 1757603 - DNA, 25 bp, Homo sapien
acaatgaatgcaagttcttcccatc

SEQ ID NO: 1757604 - DNA, 25 bp, Homo sapien
cagacagttgtctaaggggtgcaca

SEQ ID NO: 1757605 - DNA, 25 bp, Homo sapien
ctgggatccacatgggtagaagtat

SEQ ID NO: 1757606 - DNA, 25 bp, Homo sapien
tctgggtcatggattggaataaacc

SEQ ID NO: 1757607 - DNA, 25 bp, Homo sapien
gtataagcatttgtctgtcctccca

SEQ ID NO: 1757608 - DNA, 25 bp, Homo sapien
ctctgcaggaaacgcctgggatcca

SEQ ID NO: 1757609 - DNA, 25 bp, Homo sapien
agaaagctgtccctctgtgcacagg

SEQ ID NO: 1757610 - DNA, 25 bp, Homo sapien
ggtagcaaagtgagtgtcctgccag

SEQ ID NO: 1757611 - DNA, 25 bp, Homo sapien
caggtaactggaatcaatggaaaga

SEQ ID NO: 1757612 - DNA, 25 bp, Homo sapien
aagacttttgagatatttgccctgg

SEQ ID NO: 1757613 - DNA, 25 bp, Homo sapien
cggccgcgcggactgcaggcctcca

SEQ ID NO: 1757614 - DNA, 25 bp, Homo sapien
gcggccgcgcggactgcaggcctcc

SEQ ID NO: 1757615 - DNA, 25 bp, Homo sapien
cgcggccgcgcggactgcaggcctc

SEQ ID NO: 1757616 - DNA, 25 bp, Homo sapien
cctttacttggagacctcggaggct

SEQ ID NO: 1757617 - DNA, 25 bp, Homo sapien
caaaggaaatggacaactgcgtccc

SEQ ID NO: 1757618 - DNA, 25 bp, Homo sapien
tcgcagtctgcattcggagccagca

SEQ ID NO: 1757619 - DNA, 25 bp, Homo sapien
gctgactttgacctgcttgacgcca

SEQ ID NO: 1757620 - DNA, 25 bp, Homo sapien
tacgaagattcctattcttgtagag

SEQ ID NO: 1757621 - DNA, 25 bp, Homo sapien
cgaagattcctattcttgtagagtt

SEQ ID NO: 1757622 - DNA, 25 bp, Homo sapien
aaatacgaagattcctattcttgta

SEQ ID NO: 1757623 - DNA, 25 bp, Homo sapien
aatacgaagattcctattcttgtag

SEQ ID NO: 1757624 - DNA, 25 bp, Homo sapien
tctagccccgtcttcaggacaacat

SEQ ID NO: 1757625 - DNA, 25 bp, Homo sapien
ggagatagtaaaagccctgggagtc

SEQ ID NO: 1757626 - DNA, 25 bp, Homo sapien
tacagtaggatcatcctcaagctcc

SEQ ID NO: 1757627 - DNA, 25 bp, Homo sapien
ggacaacatcataccgaaaagactg

SEQ ID NO: 1757628 - DNA, 25 bp, Homo sapien
aaatcaatggttcatcttacagtca

SEQ ID NO: 1757629 - DNA, 25 bp, Homo sapien
gaggtaccgtctcacattatagcat

SEQ ID NO: 1757630 - DNA, 25 bp, Homo sapien
catgctgttaattctaagaggtacc

SEQ ID NO: 1757631 - DNA, 25 bp, Homo sapien
ggcacataggatttgcaggcagtca

SEQ ID NO: 1757632 - DNA, 25 bp, Homo sapien
gcatagatgtcaagctccattctgg

SEQ ID NO: 1757633 - DNA, 25 bp, Homo sapien
gactcccagtgcagagactacatgg

SEQ ID NO: 1757634 - DNA, 25 bp, Homo sapien
ccaggcaccacatgtatggcaaggc

SEQ ID NO: 1757635 - DNA, 25 bp, Homo sapien
tctctgaacttaacgcactagggca

SEQ ID NO: 1757636 - DNA, 25 bp, Homo sapien
cacttgtaccctcaaatctattttt

SEQ ID NO: 1757637 - DNA, 25 bp, Homo sapien
gtatatccacgtaacaaaactacac

SEQ ID NO: 1757638 - DNA, 25 bp, Homo sapien
cactatacagtatatccacgtaaca

SEQ ID NO: 1757639 - DNA, 25 bp, Homo sapien
aaagcaacaatgtacacaatttggg

SEQ ID NO: 1757640 - DNA, 25 bp, Homo sapien
gcctgagttcacctttgtagaaagc

SEQ ID NO: 1757641 - DNA, 25 bp, Homo sapien
cctgagttcacctttgtagaaagca

SEQ ID NO: 1757642 - DNA, 25 bp, Homo sapien
gagttcacctttgtagaaagcatct

SEQ ID NO: 1757643 - DNA, 25 bp, Homo sapien
cagcctgagttcacctttgtagaaa

SEQ ID NO: 1757644 - DNA, 25 bp, Homo sapien
tctgctcagataccactggccaaag

SEQ ID NO: 1757645 - DNA, 25 bp, Homo sapien
taactgctctgcacacaaagccgtg

SEQ ID NO: 1757646 - DNA, 25 bp, Homo sapien
tatgaggattccatgagggctaaca

SEQ ID NO: 1757647 - DNA, 25 bp, Homo sapien
actcactgggtactgctgagctgta

SEQ ID NO: 1757648 - DNA, 25 bp, Homo sapien
tttcaagagaatccgcataactgtc

SEQ ID NO: 1757649 - DNA, 25 bp, Homo sapien
ttcaagagaatccgcataactgtct

SEQ ID NO: 1757650 - DNA, 25 bp, Homo sapien
caagagaatccgcataactgtctct

SEQ ID NO: 1757651 - DNA, 25 bp, Homo sapien
tcaagagaatccgcataactgtctc

SEQ ID NO: 1757652 - DNA, 25 bp, Homo sapien
ctttaccactagaaagcagctctat

SEQ ID NO: 1757653 - DNA, 25 bp, Homo sapien
cccttcctttaccactagaaagcag

SEQ ID NO: 1757654 - DNA, 25 bp, Homo sapien
ttcctttaccactagaaagcagctc

SEQ ID NO: 1757655 - DNA, 25 bp, Homo sapien
taccactagaaagcagctctattgc

SEQ ID NO: 1757656 - DNA, 25 bp, Homo sapien
aggcaagccattaaaaccctctggg

SEQ ID NO: 1757657 - DNA, 25 bp, Homo sapien
aggaggtcaaaggagcatggatcaa

SEQ ID NO: 1757658 - DNA, 25 bp, Homo sapien
agtgtctccagatatggatcccaat

SEQ ID NO: 1757659 - DNA, 25 bp, Homo sapien
tcattctgcacacgtctcactctgg

SEQ ID NO: 1757660 - DNA, 25 bp, Homo sapien
tgctgttgggaaatacttgcctctc

SEQ ID NO: 1757661 - DNA, 25 bp, Homo sapien
ggtaaaagttgctggtctgaccaca

SEQ ID NO: 1757662 - DNA, 25 bp, Homo sapien
cgcctggctgtgtagatcgactgta

SEQ ID NO: 1757663 - DNA, 25 bp, Homo sapien
tctggtgtcatttgcgctagcgtgc

SEQ ID NO: 1757664 - DNA, 25 bp, Homo sapien
gagctcttcgaccaccgcaagctgg

SEQ ID NO: 1757665 - DNA, 25 bp, Homo sapien
ctcaccaggcgagtttgccgtcttc

SEQ ID NO: 1757666 - DNA, 25 bp, Homo sapien
tgagttcctggacgaagcctcctca

SEQ ID NO: 1757667 - DNA, 25 bp, Homo sapien
accgcaagctgggtgaacagtacag

SEQ ID NO: 1757668 - DNA, 25 bp, Homo sapien
tctttgagaaggcaaacgccagcaa

SEQ ID NO: 1757669 - DNA, 25 bp, Homo sapien
tacatgctcccaaggttgacctcgg

SEQ ID NO: 1757670 - DNA, 25 bp, Homo sapien
tgaggtgagccgcatcaagaagcag

SEQ ID NO: 1757671 - DNA, 25 bp, Homo sapien
tcagccctctgacggaaaggaagtc

SEQ ID NO: 1757672 - DNA, 25 bp, Homo sapien
gtggagttggcatcagacagccgct

SEQ ID NO: 1757673 - DNA, 25 bp, Homo sapien
gatttatcatgagtactttgtgtac

SEQ ID NO: 1757674 - DNA, 25 bp, Homo sapien
gtttctactgtctcacagttgcaca

SEQ ID NO: 1757675 - DNA, 25 bp, Homo sapien
tgggccggctttttctggtctaaga

SEQ ID NO: 1757676 - DNA, 25 bp, Homo sapien
ttttcttttgcatggttgtcctcat

SEQ ID NO: 1757677 - DNA, 25 bp, Homo sapien
ctttataaggtcactaagggagtag

SEQ ID NO: 1757678 - DNA, 25 bp, Homo sapien
aagggagtagtttttcttttgcatg

SEQ ID NO: 1757679 - DNA, 25 bp, Homo sapien
gtttttcttttgcatggttgtcctc

SEQ ID NO: 1757680 - DNA, 25 bp, Homo sapien
ggtggctggccacccctgacaggct

SEQ ID NO: 1757681 - DNA, 25 bp, Homo sapien
actctggtatgtccttggtcctctg

SEQ ID NO: 1757682 - DNA, 25 bp, Homo sapien
tcatgcagtttgacaggatggggac

SEQ ID NO: 1757683 - DNA, 25 bp, Homo sapien
caggtggctggccacccctgacagg

SEQ ID NO: 1757684 - DNA, 25 bp, Homo sapien
gtacagcagagttcccatatggttg

SEQ ID NO: 1757685 - DNA, 25 bp, Homo sapien
cctgatcaagatccgggctagacgc

SEQ ID NO: 1757686 - DNA, 25 bp, Homo sapien
ggctgaatgaaacgccctgatcaag

SEQ ID NO: 1757687 - DNA, 25 bp, Homo sapien
tctctctgggttctacgggtgctgg

SEQ ID NO: 1757688 - DNA, 25 bp, Homo sapien
tgaactaaattcagtgaccactctt

SEQ ID NO: 1757689 - DNA, 25 bp, Homo sapien
gactctcagggcacttttgagccac

SEQ ID NO: 1757690 - DNA, 25 bp, Homo sapien
gggttgcgatgaagacgtctagcac

SEQ ID NO: 1757691 - DNA, 25 bp, Homo sapien
gatgaagacgtctagcacttggagc

SEQ ID NO: 1757692 - DNA, 25 bp, Homo sapien
cccctttgcatgtctaggataaatc

SEQ ID NO: 1757693 - DNA, 25 bp, Homo sapien
gaacccctttgcatgtctaggataa

SEQ ID NO: 1757694 - DNA, 25 bp, Homo sapien
cctttgcatgtctaggataaatcta

SEQ ID NO: 1757695 - DNA, 25 bp, Homo sapien
tctcactatctcctaggcgggagtg

SEQ ID NO: 1757696 - DNA, 25 bp, Homo sapien
gtatatgtgctgccaaagcgagcat

SEQ ID NO: 1757697 - DNA, 25 bp, Homo sapien
catgctaatctctgcatcattccag

SEQ ID NO: 1757698 - DNA, 25 bp, Homo sapien
ctaatctctgcatcattccagtttt

SEQ ID NO: 1757699 - DNA, 25 bp, Homo sapien
tagtatatgtgctgccaaagcgagc

SEQ ID NO: 1757700 - DNA, 25 bp, Homo sapien
gcagcattaaatctgtgtcgtagtt

SEQ ID NO: 1757701 - DNA, 25 bp, Homo sapien
tgtgtcgtagttgcttcacaaccat

SEQ ID NO: 1757702 - DNA, 25 bp, Homo sapien
gatgagtagcagcattaaatctgtg

SEQ ID NO: 1757703 - DNA, 25 bp, Homo sapien
tgtcatctggatgagtagcagcatt

SEQ ID NO: 1757704 - DNA, 25 bp, Homo sapien
tttaggtactcaaagaatacttgct

SEQ ID NO: 1757705 - DNA, 25 bp, Homo sapien
tacaatcggtcattcactagcaggt

SEQ ID NO: 1757706 - DNA, 25 bp, Homo sapien
tgctgcgctgctctactgagatgga

SEQ ID NO: 1757707 - DNA, 25 bp, Homo sapien
agcaggtccccattatctagatcag

SEQ ID NO: 1757708 - DNA, 25 bp, Homo sapien
aagtcatactttgcgttaggtgtgc

SEQ ID NO: 1757709 - DNA, 25 bp, Homo sapien
ttttactaagcagatggtcgggcac

SEQ ID NO: 1757710 - DNA, 25 bp, Homo sapien
gggcgcctcttattctgcgttagca

SEQ ID NO: 1757711 - DNA, 25 bp, Homo sapien
tggttggatgtgcaggaacttcagc

SEQ ID NO: 1757712 - DNA, 25 bp, Homo sapien
tggagacagcgaatacagcaaacag

SEQ ID NO: 1757713 - DNA, 25 bp, Homo sapien
catgcaatttgagaacaccgttgac

SEQ ID NO: 1757714 - DNA, 25 bp, Homo sapien
tatcagggcccaacatgtggcatgc

SEQ ID NO: 1757715 - DNA, 25 bp, Homo sapien
tctcacaggcctgcaatcggacact

SEQ ID NO: 1757716 - DNA, 25 bp, Homo sapien
tcaaaataataagagctatttatga

SEQ ID NO: 1757717 - DNA, 25 bp, Homo sapien
gttggaaactggcacaagacaggga

SEQ ID NO: 1757718 - DNA, 25 bp, Homo sapien
aatgggcaaaactggaagcattccc

SEQ ID NO: 1757719 - DNA, 25 bp, Homo sapien
aaattaggtattgatgggacatatc

SEQ ID NO: 1757720 - DNA, 25 bp, Homo sapien
ccacgaccacttccttgggttcagt

SEQ ID NO: 1757721 - DNA, 25 bp, Homo sapien
catattttgacacgatctacctgga

SEQ ID NO: 1757722 - DNA, 25 bp, Homo sapien
tctgattgacctgctataaagtggg

SEQ ID NO: 1757723 - DNA, 25 bp, Homo sapien
gggacaacaggcacgtaccatattt

SEQ ID NO: 1757724 - DNA, 25 bp, Homo sapien
caggaacaattctctaggactccca

SEQ ID NO: 1757725 - DNA, 25 bp, Homo sapien
ttaagcaccgcatgataagcactga

SEQ ID NO: 1757726 - DNA, 25 bp, Homo sapien
tcagtgttgagctgtttgacctcag

SEQ ID NO: 1757727 - DNA, 25 bp, Homo sapien
taagcactgaacgatgagaatattg

SEQ ID NO: 1757728 - DNA, 25 bp, Homo sapien
tgtggactctcgcacaagctgcaga

SEQ ID NO: 1757729 - DNA, 25 bp, Homo sapien
gctgcagaattccaggagctccgtc

SEQ ID NO: 1757730 - DNA, 25 bp, Homo sapien
gggtagccaccatccttaaaggaga

SEQ ID NO: 1757731 - DNA, 25 bp, Homo sapien
aattggttgggttaatctgaggctc

SEQ ID NO: 1757732 - DNA, 25 bp, Homo sapien
atatggctatagatgagccttaggc

SEQ ID NO: 1757733 - DNA, 25 bp, Homo sapien
tttgtggattaaacagatcggagag

SEQ ID NO: 1757734 - DNA, 25 bp, Homo sapien
gatatttcttggtgatatatggcta

SEQ ID NO: 1757735 - DNA, 25 bp, Homo sapien
ttaggtaccagtagtaattagtgga

SEQ ID NO: 1757736 - DNA, 25 bp, Homo sapien
tctttcaagtccatatctgggttca

SEQ ID NO: 1757737 - DNA, 25 bp, Homo sapien
ttttcttgccgccaccaatgtgagc

SEQ ID NO: 1757738 - DNA, 25 bp, Homo sapien
tgacctttgcagtctccctgactga

SEQ ID NO: 1757739 - DNA, 25 bp, Homo sapien
ccagcgagtcgtacatcatgccaaa

SEQ ID NO: 1757740 - DNA, 25 bp, Homo sapien
cgcaagaagtacttcagatgccaga

SEQ ID NO: 1757741 - DNA, 25 bp, Homo sapien
gagcactgcccccacatggagtgct

SEQ ID NO: 1757742 - DNA, 25 bp, Homo sapien
ccccacatggagtgctttcaaggtt

SEQ ID NO: 1757743 - DNA, 25 bp, Homo sapien
tttctaacagcgcaagaagtacttc

SEQ ID NO: 1757744 - DNA, 25 bp, Homo sapien
caggatggatgaccacagtggacct

SEQ ID NO: 1757745 - DNA, 25 bp, Homo sapien
gacaacagctaagcaaataaccctg

SEQ ID NO: 1757746 - DNA, 25 bp, Homo sapien
caagtaaccacagttcctagtaggc

SEQ ID NO: 1757747 - DNA, 25 bp, Homo sapien
aatcctgagagataggtactactgc

SEQ ID NO: 1757748 - DNA, 25 bp, Homo sapien
ctagcaggtagcagtgtcacaggca

SEQ ID NO: 1757749 - DNA, 25 bp, Homo sapien
cacagtctgttcaatctgcagcagc

SEQ ID NO: 1757750 - DNA, 25 bp, Homo sapien
tggaccttgagcctaagaagatgac

SEQ ID NO: 1757751 - DNA, 25 bp, Homo sapien
ggccatacgcttactacatagcaga

SEQ ID NO: 1757752 - DNA, 25 bp, Homo sapien
tgaaacaaaatcctttaattcaatc

SEQ ID NO: 1757753 - DNA, 25 bp, Homo sapien
ctgtattctttggcttaataatgtc

SEQ ID NO: 1757754 - DNA, 25 bp, Homo sapien
tgtattctttggcttaataatgtct

SEQ ID NO: 1757755 - DNA, 25 bp, Homo sapien
agctgaaacaaaatcctttaattca

SEQ ID NO: 1757756 - DNA, 25 bp, Homo sapien
gatagtgtatggctttgctgtagag

SEQ ID NO: 1757757 - DNA, 25 bp, Homo sapien
ttcactggaaattgaaggatagtgt

SEQ ID NO: 1757758 - DNA, 25 bp, Homo sapien
tgctgtagagtcgtatttcaacata

SEQ ID NO: 1757759 - DNA, 25 bp, Homo sapien
ggttgccacttcaggttcactggaa

SEQ ID NO: 1757760 - DNA, 25 bp, Homo sapien
cacactgtagtaaatccatcattaa

SEQ ID NO: 1757761 - DNA, 25 bp, Homo sapien
ccacactgtagtaaatccatcatta

SEQ ID NO: 1757762 - DNA, 25 bp, Homo sapien
acactgtagtaaatccatcattaaa

SEQ ID NO: 1757763 - DNA, 25 bp, Homo sapien
tccacactgtagtaaatccatcatt

SEQ ID NO: 1757764 - DNA, 25 bp, Homo sapien
ttgctactacttcatgcattgctgt

SEQ ID NO: 1757765 - DNA, 25 bp, Homo sapien
tactacttcatgcattgctgtttgt

SEQ ID NO: 1757766 - DNA, 25 bp, Homo sapien
ctttgctactacttcatgcattgct

SEQ ID NO: 1757767 - DNA, 25 bp, Homo sapien
gctactacttcatgcattgctgttt

SEQ ID NO: 1757768 - DNA, 25 bp, Homo sapien
tcagaagtcgtttctccactgaggc

SEQ ID NO: 1757769 - DNA, 25 bp, Homo sapien
agattcacccctcatttggccactg

SEQ ID NO: 1757770 - DNA, 25 bp, Homo sapien
catctgggtagttcgtgcccaggtg

SEQ ID NO: 1757771 - DNA, 25 bp, Homo sapien
tggtgggtgagtagattcacccctc

SEQ ID NO: 1757772 - DNA, 25 bp, Homo sapien
aatggcaaggataattctctcagaa

SEQ ID NO: 1757773 - DNA, 25 bp, Homo sapien
agtttacatcactgagagggtctcc

SEQ ID NO: 1757774 - DNA, 25 bp, Homo sapien
aaatgggcccaacactaaaatggca

SEQ ID NO: 1757775 - DNA, 25 bp, Homo sapien
cattgaataaaaatgggcccaacac

SEQ ID NO: 1757776 - DNA, 25 bp, Homo sapien
cctttttcttagcacgagagaaatc

SEQ ID NO: 1757777 - DNA, 25 bp, Homo sapien
ttttcttagcacgagagaaatcttg

SEQ ID NO: 1757778 - DNA, 25 bp, Homo sapien
tcttagcacgagagaaatcttgctt

SEQ ID NO: 1757779 - DNA, 25 bp, Homo sapien
tagcacgagagaaatcttgctttcc

SEQ ID NO: 1757780 - DNA, 25 bp, Homo sapien
gtctaaacacccaagagcattgtca

SEQ ID NO: 1757781 - DNA, 25 bp, Homo sapien
tatacttccggataaccagtggcac

SEQ ID NO: 1757782 - DNA, 25 bp, Homo sapien
gtcatgatgtcactcctggaggttg

SEQ ID NO: 1757783 - DNA, 25 bp, Homo sapien
gacctattgctatatatcagatggg

SEQ ID NO: 1757784 - DNA, 25 bp, Homo sapien
tccagggagctgcaacagtgaaaaa

SEQ ID NO: 1757785 - DNA, 25 bp, Homo sapien
gcagagctcagtggtagagtacgga

SEQ ID NO: 1757786 - DNA, 25 bp, Homo sapien
cagtggtagagtacggagggctttc

SEQ ID NO: 1757787 - DNA, 25 bp, Homo sapien
tgtgctcatcactagggattcccat

SEQ ID NO: 1757788 - DNA, 25 bp, Homo sapien
ctatgggagggcaagtgatagaatc

SEQ ID NO: 1757789 - DNA, 25 bp, Homo sapien
ttggaaaactttgacacagaatgtg

SEQ ID NO: 1757790 - DNA, 25 bp, Homo sapien
aagcatgagcactatgggagggcaa

SEQ ID NO: 1757791 - DNA, 25 bp, Homo sapien
catgtaaaactgtgctgcagtcaga

SEQ ID NO: 1757792 - DNA, 25 bp, Homo sapien
aaaaattgctaatgctgccactgta

SEQ ID NO: 1757793 - DNA, 25 bp, Homo sapien
taaccttgcgtactaatttgactgt

SEQ ID NO: 1757794 - DNA, 25 bp, Homo sapien
taatgagcactgtgtaataaaccat

SEQ ID NO: 1757795 - DNA, 25 bp, Homo sapien
gggcagatccttaaatgagacgcaa

SEQ ID NO: 1757796 - DNA, 25 bp, Homo sapien
ctttgaggcacttctcgtctatttt

SEQ ID NO: 1757797 - DNA, 25 bp, Homo sapien
gaggcacttctcgtctattttatag

SEQ ID NO: 1757798 - DNA, 25 bp, Homo sapien
catatttatcttgtccctctgctag

SEQ ID NO: 1757799 - DNA, 25 bp, Homo sapien
tatttatcttgtccctctgctagat

SEQ ID NO: 1757800 - DNA, 25 bp, Homo sapien
ccactgcttcagaattgcagcatag

SEQ ID NO: 1757801 - DNA, 25 bp, Homo sapien
cagaattgcagcatagggacctgct

SEQ ID NO: 1757802 - DNA, 25 bp, Homo sapien
ccaactgcgagacacacctgccaat

SEQ ID NO: 1757803 - DNA, 25 bp, Homo sapien
gaccacatccaactgcgagacacac

SEQ ID NO: 1757804 - DNA, 25 bp, Homo sapien
gcttcaattctggtatctataagtc

SEQ ID NO: 1757805 - DNA, 25 bp, Homo sapien
ttctggtatctataagtcttgaagt

SEQ ID NO: 1757806 - DNA, 25 bp, Homo sapien
tctgcagcttcaattctggtatcta

SEQ ID NO: 1757807 - DNA, 25 bp, Homo sapien
agtcttgaagttttactgataggtt

SEQ ID NO: 1757808 - DNA, 25 bp, Homo sapien
acagccctagaaactcatatatgag

SEQ ID NO: 1757809 - DNA, 25 bp, Homo sapien
actgtgaagggcctgaggaattagg

SEQ ID NO: 1757810 - DNA, 25 bp, Homo sapien
gaaaggttgaagtcacactgtgaag

SEQ ID NO: 1757811 - DNA, 25 bp, Homo sapien
gggcctgaggaattagggcgatatc

SEQ ID NO: 1757812 - DNA, 25 bp, Homo sapien
gcattgtactgttgtagttctctgc

SEQ ID NO: 1757813 - DNA, 25 bp, Homo sapien
ggtttctgtgcattgtactgttgta

SEQ ID NO: 1757814 - DNA, 25 bp, Homo sapien
tctgtgcattgtactgttgtagttc

SEQ ID NO: 1757815 - DNA, 25 bp, Homo sapien
gtgtgtatacatacttcattatcca

SEQ ID NO: 1757816 - DNA, 25 bp, Homo sapien
gagtagttctcttgcatttgaatgg

SEQ ID NO: 1757817 - DNA, 25 bp, Homo sapien
aaagcactgagtactaagggaatac

SEQ ID NO: 1757818 - DNA, 25 bp, Homo sapien
ggaactgcaagttgaggaaagcact

SEQ ID NO: 1757819 - DNA, 25 bp, Homo sapien
gaatactcattcacattcggttgat

SEQ ID NO: 1757820 - DNA, 25 bp, Homo sapien
tataaagcaggagcctgcacacctc

SEQ ID NO: 1757821 - DNA, 25 bp, Homo sapien
gggagccttgttgaacatgcctata

SEQ ID NO: 1757822 - DNA, 25 bp, Homo sapien
tgatccctggttcatgggccaccaa

SEQ ID NO: 1757823 - DNA, 25 bp, Homo sapien
tctgttgtgtgctgcctgggagcct

SEQ ID NO: 1757824 - DNA, 25 bp, Homo sapien
ctgttggtgataggttttaaggtca

SEQ ID NO: 1757825 - DNA, 25 bp, Homo sapien
ctccttctccaaacacctgaatttt

SEQ ID NO: 1757826 - DNA, 25 bp, Homo sapien
ccttctccaaacacctgaattttca

SEQ ID NO: 1757827 - DNA, 25 bp, Homo sapien
ttctccttctccaaacacctgaatt

SEQ ID NO: 1757828 - DNA, 25 bp, Homo sapien
gcttctccttctccaaacacctgaa

SEQ ID NO: 1757829 - DNA, 25 bp, Homo sapien
gaatgtggcacaagaagtgtagaat

SEQ ID NO: 1757830 - DNA, 25 bp, Homo sapien
gcacaagaagtgtagaataatcacc

SEQ ID NO: 1757831 - DNA, 25 bp, Homo sapien
gaagtgtagaataatcacctaacac

SEQ ID NO: 1757832 - DNA, 25 bp, Homo sapien
tggatatagatcaaatgttgtacca

SEQ ID NO: 1757833 - DNA, 25 bp, Homo sapien
tgaggtactgctattaccaagcagt

SEQ ID NO: 1757834 - DNA, 25 bp, Homo sapien
ggtactgctattaccaagcagttgt

SEQ ID NO: 1757835 - DNA, 25 bp, Homo sapien
ttaatgaggtactgctattaccaag

SEQ ID NO: 1757836 - DNA, 25 bp, Homo sapien
actgctattaccaagcagttgttca

SEQ ID NO: 1757837 - DNA, 25 bp, Homo sapien
caagacggtgggagcctacctctta

SEQ ID NO: 1757838 - DNA, 25 bp, Homo sapien
tacctcttatatcagcgtgacctgg

SEQ ID NO: 1757839 - DNA, 25 bp, Homo sapien
gactttataggctcctaggcggaag

SEQ ID NO: 1757840 - DNA, 25 bp, Homo sapien
tgactgccttgttggatttcggact

SEQ ID NO: 1757841 - DNA, 25 bp, Homo sapien
cctcaaatgtctgtgccgagtctct

SEQ ID NO: 1757842 - DNA, 25 bp, Homo sapien
gtccttctcacagaaatccttagcc

SEQ ID NO: 1757843 - DNA, 25 bp, Homo sapien
acctggatgcgacctttccctgggt

SEQ ID NO: 1757844 - DNA, 25 bp, Homo sapien
atttcagtagcagtccttctcacag

SEQ ID NO: 1757845 - DNA, 25 bp, Homo sapien
tcagttaactactaccacctggatg

SEQ ID NO: 1757846 - DNA, 25 bp, Homo sapien
cccttgatgagttgacacaaaagat

SEQ ID NO: 1757847 - DNA, 25 bp, Homo sapien
gacttgtggttaatgagctaccaca

SEQ ID NO: 1757848 - DNA, 25 bp, Homo sapien
gaagtctgaaacatggaccctgtcc

SEQ ID NO: 1757849 - DNA, 25 bp, Homo sapien
ccacatagagagatggcttggaata

SEQ ID NO: 1757850 - DNA, 25 bp, Homo sapien
tgcttcctgcaggtgtaacctgaga

SEQ ID NO: 1757851 - DNA, 25 bp, Homo sapien
tgtaacctgagagcatctctcctca

SEQ ID NO: 1757852 - DNA, 25 bp, Homo sapien
tactaaagccattgatgcagcaacc

SEQ ID NO: 1757853 - DNA, 25 bp, Homo sapien
ttttactaaagccattgatgcagca

SEQ ID NO: 1757854 - DNA, 25 bp, Homo sapien
tcaattccacaagtcaattccacac

SEQ ID NO: 1757855 - DNA, 25 bp, Homo sapien
ttccacaagtcaattccacactgct

SEQ ID NO: 1757856 - DNA, 25 bp, Homo sapien
cacaagtcaattccacactgctgcc

SEQ ID NO: 1757857 - DNA, 25 bp, Homo sapien
caattccacaagtcaattccacact

SEQ ID NO: 1757858 - DNA, 25 bp, Homo sapien
gctagtggggcagcacggtatttat

SEQ ID NO: 1757859 - DNA, 25 bp, Homo sapien
taggcatatggagcaacgtcctgac

SEQ ID NO: 1757860 - DNA, 25 bp, Homo sapien
ctataggcatatggagcaacgtcct

SEQ ID NO: 1757861 - DNA, 25 bp, Homo sapien
atggagcaacgtcctgacaccaggc

SEQ ID NO: 1757862 - DNA, 25 bp, Homo sapien
tggtcttgttgggatatataacctt

SEQ ID NO: 1757863 - DNA, 25 bp, Homo sapien
tgttgggatatataaccttgccttc

SEQ ID NO: 1757864 - DNA, 25 bp, Homo sapien
tcttgttgggatatataaccttgcc

SEQ ID NO: 1757865 - DNA, 25 bp, Homo sapien
gatatataaccttgccttccactgt

SEQ ID NO: 1757866 - DNA, 25 bp, Homo sapien
tagacattagatttccgaccaggtc

SEQ ID NO: 1757867 - DNA, 25 bp, Homo sapien
cattagatttccgaccaggtcccag

SEQ ID NO: 1757868 - DNA, 25 bp, Homo sapien
agacattagatttccgaccaggtcc

SEQ ID NO: 1757869 - DNA, 25 bp, Homo sapien
gacattagatttccgaccaggtccc

SEQ ID NO: 1757870 - DNA, 25 bp, Homo sapien
aggcgaggggaagctgcaccctgct

SEQ ID NO: 1757871 - DNA, 25 bp, Homo sapien
tggctgcctagatcctgggcaagcc

SEQ ID NO: 1757872 - DNA, 25 bp, Homo sapien
gaggcgaggggaagctgcaccctgc

SEQ ID NO: 1757873 - DNA, 25 bp, Homo sapien
gagtcgtcagccatcttccgtcgct

SEQ ID NO: 1757874 - DNA, 25 bp, Homo sapien
gcgtgcgcggctgtgtgtgagcccg

SEQ ID NO: 1757875 - DNA, 25 bp, Homo sapien
ctgtcacgggtaaggatagtgcgga

SEQ ID NO: 1757876 - DNA, 25 bp, Homo sapien
tctcttctagcggcggaggacgtca

SEQ ID NO: 1757877 - DNA, 25 bp, Homo sapien
tcccttttcactgggtgagccggct

SEQ ID NO: 1757878 - DNA, 25 bp, Homo sapien
tcatctcctcattgatctccctttt

SEQ ID NO: 1757879 - DNA, 25 bp, Homo sapien
tttcactgggtgagccggcttcctg

SEQ ID NO: 1757880 - DNA, 25 bp, Homo sapien
ccttttcactgggtgagccggcttc

SEQ ID NO: 1757881 - DNA, 25 bp, Homo sapien
acagaaactgacaagcgcgccccgg

SEQ ID NO: 1757882 - DNA, 25 bp, Homo sapien
agaaactgacaagcgcgccccggta

SEQ ID NO: 1757883 - DNA, 25 bp, Homo sapien
tctgggcatcctacagaaactgaca

SEQ ID NO: 1757884 - DNA, 25 bp, Homo sapien
agccgttctgggcatcctacagaaa

SEQ ID NO: 1757885 - DNA, 25 bp, Homo sapien
tccgtgccaacctgggattcgtaag

SEQ ID NO: 1757886 - DNA, 25 bp, Homo sapien
gggaccctgaggatgattctcaaaa

SEQ ID NO: 1757887 - DNA, 25 bp, Homo sapien
tcgtaaggttaaatagtatgtggtc

SEQ ID NO: 1757888 - DNA, 25 bp, Homo sapien
gggatgcagccctcgagttggcctc

SEQ ID NO: 1757889 - DNA, 25 bp, Homo sapien
acgggctcttcacgccgtcgcagct

SEQ ID NO: 1757890 - DNA, 25 bp, Homo sapien
tcacgccgtcgcagctggttggttg

SEQ ID NO: 1757891 - DNA, 25 bp, Homo sapien
cagctcgccgggcactgacgggctc

SEQ ID NO: 1757892 - DNA, 25 bp, Homo sapien
gggggaagcgggattgaggagcagg

SEQ ID NO: 1757893 - DNA, 25 bp, Homo sapien
tggacaggcgccctgcaaaggccgc

SEQ ID NO: 1757894 - DNA, 25 bp, Homo sapien
agagcggtcaggaccgtgcccagac

SEQ ID NO: 1757895 - DNA, 25 bp, Homo sapien
cgaggagagcggtcaggaccgtgcc

SEQ ID NO: 1757896 - DNA, 25 bp, Homo sapien
cttagcgaacaatggacaggcgccc

SEQ ID NO: 1757897 - DNA, 25 bp, Homo sapien
tctggtgcaccgctggcctggcggg

SEQ ID NO: 1757898 - DNA, 25 bp, Homo sapien
ctgctgcgctctccacctctggtgc

SEQ ID NO: 1757899 - DNA, 25 bp, Homo sapien
cccagcctcgccgagaggactccgg

SEQ ID NO: 1757900 - DNA, 25 bp, Homo sapien
cgaacagctggagcgccaggctgct

SEQ ID NO: 1757901 - DNA, 25 bp, Homo sapien
gcagcatcggctaaaaattgtgtaa

SEQ ID NO: 1757902 - DNA, 25 bp, Homo sapien
caaacatctgttatactgcagaagg

SEQ ID NO: 1757903 - DNA, 25 bp, Homo sapien
gttaattccatacttagtcctgcag

SEQ ID NO: 1757904 - DNA, 25 bp, Homo sapien
aggaaattctgtgcaccaaggttaa

SEQ ID NO: 1757905 - DNA, 25 bp, Homo sapien
tggtccagatgaaagccgttcagat

SEQ ID NO: 1757906 - DNA, 25 bp, Homo sapien
aggccacattgtgttctcggtgaca

SEQ ID NO: 1757907 - DNA, 25 bp, Homo sapien
accgatatgaagctgcacaaggcca

SEQ ID NO: 1757908 - DNA, 25 bp, Homo sapien
agggcttagtttacactggtccaga

SEQ ID NO: 1757909 - DNA, 25 bp, Homo sapien
cttattagcttgagagtacaagtgt

SEQ ID NO: 1757910 - DNA, 25 bp, Homo sapien
aatcttattagcttgagagtacaag

SEQ ID NO: 1757911 - DNA, 25 bp, Homo sapien
tattcaataatcttattagcttgag

SEQ ID NO: 1757912 - DNA, 25 bp, Homo sapien
ataatcttattagcttgagagtaca

SEQ ID NO: 1757913 - DNA, 25 bp, Homo sapien
tttgaagatggttcctatgctccat

SEQ ID NO: 1757914 - DNA, 25 bp, Homo sapien
tacagctttcgagcctgaaattctt

SEQ ID NO: 1757915 - DNA, 25 bp, Homo sapien
gaactacagctttcgagcctgaaat

SEQ ID NO: 1757916 - DNA, 25 bp, Homo sapien
ctgaactacagctttcgagcctgaa

SEQ ID NO: 1757917 - DNA, 25 bp, Homo sapien
tcaaccttatcatagccataccagc

SEQ ID NO: 1757918 - DNA, 25 bp, Homo sapien
ccataccagccaaggagttcattca

SEQ ID NO: 1757919 - DNA, 25 bp, Homo sapien
atctgtagggtagctcctgaattca

SEQ ID NO: 1757920 - DNA, 25 bp, Homo sapien
gaacagaaatgtgctgccggctctc

SEQ ID NO: 1757921 - DNA, 25 bp, Homo sapien
aaggtacaataatgggcacactgcc

SEQ ID NO: 1757922 - DNA, 25 bp, Homo sapien
gctttatgaaaggtggtggaattaa

SEQ ID NO: 1757923 - DNA, 25 bp, Homo sapien
cagtggcaagccctgaatagcctgt

SEQ ID NO: 1757924 - DNA, 25 bp, Homo sapien
tattgtatggtgaaataacactgtc

SEQ ID NO: 1757925 - DNA, 25 bp, Homo sapien
tctatgaattgttatcactgaaaac

SEQ ID NO: 1757926 - DNA, 25 bp, Homo sapien
tataaggtccctaaaacagcctcta

SEQ ID NO: 1757927 - DNA, 25 bp, Homo sapien
ttctcatttaaacaggtgatttcag

SEQ ID NO: 1757928 - DNA, 25 bp, Homo sapien
taacagtaatactctaagtgatgcc

SEQ ID NO: 1757929 - DNA, 25 bp, Homo sapien
acattaacattaacgatagctgacg

SEQ ID NO: 1757930 - DNA, 25 bp, Homo sapien
tatgtaattttcaggggtgtccaac

SEQ ID NO: 1757931 - DNA, 25 bp, Homo sapien
cactctgttggagaagatatgtaat

SEQ ID NO: 1757932 - DNA, 25 bp, Homo sapien
ttttagggcccggaatggtggctca

SEQ ID NO: 1757933 - DNA, 25 bp, Homo sapien
gccactgggcatatattcaaacgta

SEQ ID NO: 1757934 - DNA, 25 bp, Homo sapien
tcacagggtggtacatgacaaagcc

SEQ ID NO: 1757935 - DNA, 25 bp, Homo sapien
ccacatgaggtagggctgggatccc

SEQ ID NO: 1757936 - DNA, 25 bp, Homo sapien
caagcaaaagaatgtagcgggaacc

SEQ ID NO: 1757937 - DNA, 25 bp, Homo sapien
ccagagcagggtcaatgctgtggta

SEQ ID NO: 1757938 - DNA, 25 bp, Homo sapien
gtggtaaccaccaagacacgggagc

SEQ ID NO: 1757939 - DNA, 25 bp, Homo sapien
gaagtaagctacacccacaattctg

SEQ ID NO: 1757940 - DNA, 25 bp, Homo sapien
tccaggcccagaagtaagctacacc

SEQ ID NO: 1757941 - DNA, 25 bp, Homo sapien
cctgtgctgtcacaaaccataccaa

SEQ ID NO: 1757942 - DNA, 25 bp, Homo sapien
caaaccataccaagggccagaggct

SEQ ID NO: 1757943 - DNA, 25 bp, Homo sapien
gcctgtgctgtcacaaaccatacca

SEQ ID NO: 1757944 - DNA, 25 bp, Homo sapien
ctgtgctgtcacaaaccataccaag

SEQ ID NO: 1757945 - DNA, 25 bp, Homo sapien
gatcgatcttatgttgctccacaca

SEQ ID NO: 1757946 - DNA, 25 bp, Homo sapien
catagaggttagcagatcacgtgac

SEQ ID NO: 1757947 - DNA, 25 bp, Homo sapien
tattctccgttaagctaatggttcc

SEQ ID NO: 1757948 - DNA, 25 bp, Homo sapien
caaacctgtctgtgccgtatggaca

SEQ ID NO: 1757949 - DNA, 25 bp, Homo sapien
ccagtggttaaggatataggctaag

SEQ ID NO: 1757950 - DNA, 25 bp, Homo sapien
tttaattgcccttgtagtcctacca

SEQ ID NO: 1757951 - DNA, 25 bp, Homo sapien
actgccatagtgttttggataatcc

SEQ ID NO: 1757952 - DNA, 25 bp, Homo sapien
cactcagtatctgtgtaacctcagg

SEQ ID NO: 1757953 - DNA, 25 bp, Homo sapien
cttgtcccaagcagtataaatcttt

SEQ ID NO: 1757954 - DNA, 25 bp, Homo sapien
gttaaactaatgtgacgtctctgtc

SEQ ID NO: 1757955 - DNA, 25 bp, Homo sapien
aatctttcatcagacttctggctgt

SEQ ID NO: 1757956 - DNA, 25 bp, Homo sapien
cgtctctgtcaaagaaactctggga

SEQ ID NO: 1757957 - DNA, 25 bp, Homo sapien
taacctgtagattgactgtagggag

SEQ ID NO: 1757958 - DNA, 25 bp, Homo sapien
tatggctggaatacagagatatcat

SEQ ID NO: 1757959 - DNA, 25 bp, Homo sapien
tacagactaggttttgccgtgaagg

SEQ ID NO: 1757960 - DNA, 25 bp, Homo sapien
taatttccggtacagaagtgggtga

SEQ ID NO: 1757961 - DNA, 25 bp, Homo sapien
tgattctctgtgtaaccatcttaca

SEQ ID NO: 1757962 - DNA, 25 bp, Homo sapien
tggtatgtccctctattgatttagg

SEQ ID NO: 1757963 - DNA, 25 bp, Homo sapien
gatcaatttaggaggaatcttcctc

SEQ ID NO: 1757964 - DNA, 25 bp, Homo sapien
gtttgaactattcttgctcctttgc

SEQ ID NO: 1757965 - DNA, 25 bp, Homo sapien
tatggcgaattcaaggccttcagtg

SEQ ID NO: 1757966 - DNA, 25 bp, Homo sapien
attcaagatcataaattcccctagg

SEQ ID NO: 1757967 - DNA, 25 bp, Homo sapien
tattgatatattgcactatggcgaa

SEQ ID NO: 1757968 - DNA, 25 bp, Homo sapien
tcccctaggcattctctagaagctc

SEQ ID NO: 1757969 - DNA, 25 bp, Homo sapien
tgactgtagtaggcaggtgtaagca

SEQ ID NO: 1757970 - DNA, 25 bp, Homo sapien
agagcaagccaagtccctcctcgct

SEQ ID NO: 1757971 - DNA, 25 bp, Homo sapien
catgaaggatcataggagccagatg

SEQ ID NO: 1757972 - DNA, 25 bp, Homo sapien
cacaagcagcccatcatgacagaag

SEQ ID NO: 1757973 - DNA, 25 bp, Homo sapien
tgtctgttacttgcatcaaatacag

SEQ ID NO: 1757974 - DNA, 25 bp, Homo sapien
gaaggcaatccttttcctatagagc

SEQ ID NO: 1757975 - DNA, 25 bp, Homo sapien
gttcagattgactaaagacacccat

SEQ ID NO: 1757976 - DNA, 25 bp, Homo sapien
cagtatgcatgttcagattgactaa

SEQ ID NO: 1757977 - DNA, 25 bp, Homo sapien
aatgagccttccttagaacgagtgg

SEQ ID NO: 1757978 - DNA, 25 bp, Homo sapien
caaatacgattaaatatgcacattc

SEQ ID NO: 1757979 - DNA, 25 bp, Homo sapien
ggtgtcagctgtatgcaatctggag

SEQ ID NO: 1757980 - DNA, 25 bp, Homo sapien
gaacgagtggcaattagaaccacaa

SEQ ID NO: 1757981 - DNA, 25 bp, Homo sapien
cacacatccagataatcaatgaaag

SEQ ID NO: 1757982 - DNA, 25 bp, Homo sapien
cacatccagataatcaatgaaagac

SEQ ID NO: 1757983 - DNA, 25 bp, Homo sapien
gcacacatccagataatcaatgaaa

SEQ ID NO: 1757984 - DNA, 25 bp, Homo sapien
acacatccagataatcaatgaaaga

SEQ ID NO: 1757985 - DNA, 25 bp, Homo sapien
taactttcatgggagtccaagactg

SEQ ID NO: 1757986 - DNA, 25 bp, Homo sapien
tggactccaggcaattaaactgtag

SEQ ID NO: 1757987 - DNA, 25 bp, Homo sapien
tcagtagggcattaatggactccag

SEQ ID NO: 1757988 - DNA, 25 bp, Homo sapien
ccagtgcccaaagaaaatcagtagg

SEQ ID NO: 1757989 - DNA, 25 bp, Homo sapien
atttgtacatttgacacatcatctt

SEQ ID NO: 1757990 - DNA, 25 bp, Homo sapien
tatttgtacatttgacacatcatct

SEQ ID NO: 1757991 - DNA, 25 bp, Homo sapien
gtcggcaggccgcaaagcacttctc

SEQ ID NO: 1757992 - DNA, 25 bp, Homo sapien
agcgcttgattcccactttctggca

SEQ ID NO: 1757993 - DNA, 25 bp, Homo sapien
ccatactcagggaatagcgcttgat

SEQ ID NO: 1757994 - DNA, 25 bp, Homo sapien
tatttctcttgaagtaggctcgtcg

SEQ ID NO: 1757995 - DNA, 25 bp, Homo sapien
tgaggataccagctgtgatcacagt

SEQ ID NO: 1757996 - DNA, 25 bp, Homo sapien
agtctgcactctactgctggaaaga

SEQ ID NO: 1757997 - DNA, 25 bp, Homo sapien
tcatgtactcagagtgcagtctgca

SEQ ID NO: 1757998 - DNA, 25 bp, Homo sapien
taccagctgtgatcacagtgtcctc

SEQ ID NO: 1757999 - DNA, 25 bp, Homo sapien
gggtttgttactccagtgctcggca

SEQ ID NO: 1758000 - DNA, 25 bp, Homo sapien
caagttaccgcagtagttggtggca

SEQ ID NO: 1758001 - DNA, 25 bp, Homo sapien
tgctcggcattcaaaacgggagccc

SEQ ID NO: 1758002 - DNA, 25 bp, Homo sapien
tggtggcaaaggctacagcagttct

SEQ ID NO: 1758003 - DNA, 25 bp, Homo sapien
cactgtgtattgatccccaggtgac

SEQ ID NO: 1758004 - DNA, 25 bp, Homo sapien
tgatttaagtgaacagcattagcct

SEQ ID NO: 1758005 - DNA, 25 bp, Homo sapien
ccttcaccagaaggatggccagaga

SEQ ID NO: 1758006 - DNA, 25 bp, Homo sapien
cccaggtgaccggattctgatttat

SEQ ID NO: 1758007 - DNA, 25 bp, Homo sapien
tcagtctcaactgctgggacagaaa

SEQ ID NO: 1758008 - DNA, 25 bp, Homo sapien
ggattgtaacatagggaatttccca

SEQ ID NO: 1758009 - DNA, 25 bp, Homo sapien
actgtgtgcacagccaccctaagag

SEQ ID NO: 1758010 - DNA, 25 bp, Homo sapien
gtctcaactgctgggacagaaatga

SEQ ID NO: 1758011 - DNA, 25 bp, Homo sapien
ctgtatggagcttgccttctgaggc

SEQ ID NO: 1758012 - DNA, 25 bp, Homo sapien
ctctcagagcaagagttagattctg

SEQ ID NO: 1758013 - DNA, 25 bp, Homo sapien
aaggcccgtggatgctgtaggtctc

SEQ ID NO: 1758014 - DNA, 25 bp, Homo sapien
aaggctagagcttgagaaggcccgt

SEQ ID NO: 1758015 - DNA, 25 bp, Homo sapien
tctgtgcaatctcatgttctaaagt

SEQ ID NO: 1758016 - DNA, 25 bp, Homo sapien
agttctgtgcaatctcatgttctaa

SEQ ID NO: 1758017 - DNA, 25 bp, Homo sapien
ttagttctgtgcaatctcatgttct

SEQ ID NO: 1758018 - DNA, 25 bp, Homo sapien
ttctgtgcaatctcatgttctaaag

SEQ ID NO: 1758019 - DNA, 25 bp, Homo sapien
tccgttttatcacgattgtcttgcc

SEQ ID NO: 1758020 - DNA, 25 bp, Homo sapien
cccaaagtttctgtctgcccttgta

SEQ ID NO: 1758021 - DNA, 25 bp, Homo sapien
gccgtgccagcaaacatgctgttct

SEQ ID NO: 1758022 - DNA, 25 bp, Homo sapien
cgattgtcttgcctagggacctgag

SEQ ID NO: 1758023 - DNA, 25 bp, Homo sapien
catgctcatgggaagatacctggag

SEQ ID NO: 1758024 - DNA, 25 bp, Homo sapien
gcatgctcatgggaagatacctgga

SEQ ID NO: 1758025 - DNA, 25 bp, Homo sapien
gctcatgggaagatacctggaggac

SEQ ID NO: 1758026 - DNA, 25 bp, Homo sapien
ccagcatgctcatgggaagatacct

SEQ ID NO: 1758027 - DNA, 25 bp, Homo sapien
ttaactatcacggttgttttgacat

SEQ ID NO: 1758028 - DNA, 25 bp, Homo sapien
actatcacggttgttttgacatagg

SEQ ID NO: 1758029 - DNA, 25 bp, Homo sapien
tgataggggttaactatcacggttg

SEQ ID NO: 1758030 - DNA, 25 bp, Homo sapien
agtgcaggtgataggggttaactat

SEQ ID NO: 1758031 - DNA, 25 bp, Homo sapien
cacagctgggttagagtaacatgac

SEQ ID NO: 1758032 - DNA, 25 bp, Homo sapien
ccatgcacagctgggttagagtaac

SEQ ID NO: 1758033 - DNA, 25 bp, Homo sapien
gaagctgccaacttccttcctgtcc

SEQ ID NO: 1758034 - DNA, 25 bp, Homo sapien
gttagagtaacatgaccatacctta

SEQ ID NO: 1758035 - DNA, 25 bp, Homo sapien
aaaccccagtctggccacgctgtcc

SEQ ID NO: 1758036 - DNA, 25 bp, Homo sapien
aggcagtacaagtcaaaccccagtc

SEQ ID NO: 1758037 - DNA, 25 bp, Homo sapien
ggcagtacaagtcaaaccccagtct

SEQ ID NO: 1758038 - DNA, 25 bp, Homo sapien
agtacaagtcaaaccccagtctggc

SEQ ID NO: 1758039 - DNA, 25 bp, Homo sapien
tagagcacagtctacttcagacaga

SEQ ID NO: 1758040 - DNA, 25 bp, Homo sapien
gtacttgaacaaggccttccatctg

SEQ ID NO: 1758041 - DNA, 25 bp, Homo sapien
taaaaccactaactgcagcacaagg

SEQ ID NO: 1758042 - DNA, 25 bp, Homo sapien
tttttccagaacagaagtgggagtc

SEQ ID NO: 1758043 - DNA, 25 bp, Homo sapien
tgcaaggcgcttacagctgcaccgt

SEQ ID NO: 1758044 - DNA, 25 bp, Homo sapien
tgcagctgcgcttggaaggtgccct

SEQ ID NO: 1758045 - DNA, 25 bp, Homo sapien
ttctgaaggaacattgcttacctac

SEQ ID NO: 1758046 - DNA, 25 bp, Homo sapien
cgtagggcgcagtgccttggagagc

SEQ ID NO: 1758047 - DNA, 25 bp, Homo sapien
gcagttctgtctgggtcatgcgcta

SEQ ID NO: 1758048 - DNA, 25 bp, Homo sapien
aattgcagttctgtctgggtcatgc

SEQ ID NO: 1758049 - DNA, 25 bp, Homo sapien
ctaaccaattgcagttctgtctggg

SEQ ID NO: 1758050 - DNA, 25 bp, Homo sapien
ccaattgcagttctgtctgggtcat

SEQ ID NO: 1758051 - DNA, 25 bp, Homo sapien
gaaccaagtttgcaaggaagatcaa

SEQ ID NO: 1758052 - DNA, 25 bp, Homo sapien
ttacactctagatacaatgaatggc

SEQ ID NO: 1758053 - DNA, 25 bp, Homo sapien
gcaatataacatgggagaatacagg

SEQ ID NO: 1758054 - DNA, 25 bp, Homo sapien
tcaggattaatcttgtggatcaaca

SEQ ID NO: 1758055 - DNA, 25 bp, Homo sapien
tctctgtctcaagctgtgagggcct

SEQ ID NO: 1758056 - DNA, 25 bp, Homo sapien
cggacatactggagaatcactgaaa

SEQ ID NO: 1758057 - DNA, 25 bp, Homo sapien
ggcctccctgtactttcttgaagcg

SEQ ID NO: 1758058 - DNA, 25 bp, Homo sapien
tcttgaagcgctacattcatgggaa

SEQ ID NO: 1758059 - DNA, 25 bp, Homo sapien
tccacgaagaggtggagcaacgtag

SEQ ID NO: 1758060 - DNA, 25 bp, Homo sapien
tggagcaacgtagaactctaccatg

SEQ ID NO: 1758061 - DNA, 25 bp, Homo sapien
cttgtactggattccacgaagaggt

SEQ ID NO: 1758062 - DNA, 25 bp, Homo sapien
tctgaccttggtctgactgaacctg

SEQ ID NO: 1758063 - DNA, 25 bp, Homo sapien
gcaatctgggtccaatcctttgcac

SEQ ID NO: 1758064 - DNA, 25 bp, Homo sapien
tgcaatctgggtccaatcctttgca

SEQ ID NO: 1758065 - DNA, 25 bp, Homo sapien
catgcaatctgggtccaatcctttg

SEQ ID NO: 1758066 - DNA, 25 bp, Homo sapien
tcatgcaatctgggtccaatccttt

SEQ ID NO: 1758067 - DNA, 25 bp, Homo sapien
cgtgggcactgcagtatggtgaatt

SEQ ID NO: 1758068 - DNA, 25 bp, Homo sapien
attcgtgggcactgcagtatggtga

SEQ ID NO: 1758069 - DNA, 25 bp, Homo sapien
caggattcgtgggcactgcagtatg

SEQ ID NO: 1758070 - DNA, 25 bp, Homo sapien
ggcactgcagtatggtgaattccat

SEQ ID NO: 1758071 - DNA, 25 bp, Homo sapien
tccttgcaggtccttgtgggtgaga

SEQ ID NO: 1758072 - DNA, 25 bp, Homo sapien
atccttgcaggtccttgtgggtgag

SEQ ID NO: 1758073 - DNA, 25 bp, Homo sapien
ctggtctctccccttcgtggtaaat

SEQ ID NO: 1758074 - DNA, 25 bp, Homo sapien
ggtaaattattggtgtccaacacag

SEQ ID NO: 1758075 - DNA, 25 bp, Homo sapien
tgttctggcccgtccatatgctaag

SEQ ID NO: 1758076 - DNA, 25 bp, Homo sapien
tatttgtgacaagagctcagcactc

SEQ ID NO: 1758077 - DNA, 25 bp, Homo sapien
taatcagggtatgggtataaccagg

SEQ ID NO: 1758078 - DNA, 25 bp, Homo sapien
caaatggtgtccgtgaattagttac

SEQ ID NO: 1758079 - DNA, 25 bp, Homo sapien
ggtggagcaccaaaagccagttggc

SEQ ID NO: 1758080 - DNA, 25 bp, Homo sapien
agggggtggagcaccaaaagccagt

SEQ ID NO: 1758081 - DNA, 25 bp, Homo sapien
tgagggggtggagcaccaaaagcca

SEQ ID NO: 1758082 - DNA, 25 bp, Homo sapien
ggggtggagcaccaaaagccagttg

SEQ ID NO: 1758083 - DNA, 25 bp, Homo sapien
accaatcagtgaaactgagtccctg

SEQ ID NO: 1758084 - DNA, 25 bp, Homo sapien
ctggatgtgccttgttgagaaacct

SEQ ID NO: 1758085 - DNA, 25 bp, Homo sapien
catcaaggcagtggatatccctgga

SEQ ID NO: 1758086 - DNA, 25 bp, Homo sapien
gtccctggatgtgccttgttgagaa

SEQ ID NO: 1758087 - DNA, 25 bp, Homo sapien
ggtctgtctgagactccttggttac

SEQ ID NO: 1758088 - DNA, 25 bp, Homo sapien
tgtctgagactccttggttaccatc

SEQ ID NO: 1758089 - DNA, 25 bp, Homo sapien
ccaggtctgtctgagactccttggt

SEQ ID NO: 1758090 - DNA, 25 bp, Homo sapien
tctgagactccttggttaccatcca

SEQ ID NO: 1758091 - DNA, 25 bp, Homo sapien
cttgttccctgtttctgatatctca

SEQ ID NO: 1758092 - DNA, 25 bp, Homo sapien
ttgttccctgtttctgatatctcac

SEQ ID NO: 1758093 - DNA, 25 bp, Homo sapien
gttctgcctctgaacctcaggagtc

SEQ ID NO: 1758094 - DNA, 25 bp, Homo sapien
ctgcctctgaacctcaggagtcttc

SEQ ID NO: 1758095 - DNA, 25 bp, Homo sapien
tctgcctctgaacctcaggagtctt

SEQ ID NO: 1758096 - DNA, 25 bp, Homo sapien
ctctgaacctcaggagtcttctcca

SEQ ID NO: 1758097 - DNA, 25 bp, Homo sapien
gatgaactaactctctccttgtgtg

SEQ ID NO: 1758098 - DNA, 25 bp, Homo sapien
ctgtcggctctagatatccactggg

SEQ ID NO: 1758099 - DNA, 25 bp, Homo sapien
caaggagggtggacataggacacca

SEQ ID NO: 1758100 - DNA, 25 bp, Homo sapien
cagacaatggcttaacaaggagggt

SEQ ID NO: 1758101 - DNA, 25 bp, Homo sapien
tggagtttccttagcatagtgctgc

SEQ ID NO: 1758102 - DNA, 25 bp, Homo sapien
gagtttccttagcatagtgctgctg

SEQ ID NO: 1758103 - DNA, 25 bp, Homo sapien
ccttggagtttccttagcatagtgc

SEQ ID NO: 1758104 - DNA, 25 bp, Homo sapien
ttggagtttccttagcatagtgctg

SEQ ID NO: 1758105 - DNA, 25 bp, Homo sapien
cttgttgtaagtatgttattcttac

SEQ ID NO: 1758106 - DNA, 25 bp, Homo sapien
tagacttgttgtaagtatgttattc

SEQ ID NO: 1758107 - DNA, 25 bp, Homo sapien
ctagacttgttgtaagtatgttatt

SEQ ID NO: 1758108 - DNA, 25 bp, Homo sapien
gacttgttgtaagtatgttattctt

SEQ ID NO: 1758109 - DNA, 25 bp, Homo sapien
aattctaaagggagtactgcgtgtc

SEQ ID NO: 1758110 - DNA, 25 bp, Homo sapien
tcctaatgcagagacctggcagagc

SEQ ID NO: 1758111 - DNA, 25 bp, Homo sapien
tgactggaaggacgaagattgtacc

SEQ ID NO: 1758112 - DNA, 25 bp, Homo sapien
tggtcaagggactacacacacagaa

SEQ ID NO: 1758113 - DNA, 25 bp, Homo sapien
ccagggcactttctgtcagtgtctg

SEQ ID NO: 1758114 - DNA, 25 bp, Homo sapien
ggactagtcgtccagccatgtgctc

SEQ ID NO: 1758115 - DNA, 25 bp, Homo sapien
ctcctgatcatctgggggcccagaa

SEQ ID NO: 1758116 - DNA, 25 bp, Homo sapien
tgtggcacagaggactagtcgtcca

SEQ ID NO: 1758117 - DNA, 25 bp, Homo sapien
taagggcatcctaatctatagaaac

SEQ ID NO: 1758118 - DNA, 25 bp, Homo sapien
cacatggttaagtctgaggcataac

SEQ ID NO: 1758119 - DNA, 25 bp, Homo sapien
taggttgggaagctctctaagagat

SEQ ID NO: 1758120 - DNA, 25 bp, Homo sapien
tcactggcggcagaaatacaatcca

SEQ ID NO: 1758121 - DNA, 25 bp, Homo sapien
tatgaaagccttatcctagcacacg

SEQ ID NO: 1758122 - DNA, 25 bp, Homo sapien
ggtgtttcactggagcatctttaca

SEQ ID NO: 1758123 - DNA, 25 bp, Homo sapien
aatagctatctaatgaagggcccca

SEQ ID NO: 1758124 - DNA, 25 bp, Homo sapien
tctacatgggatatgtaaatctgcc

SEQ ID NO: 1758125 - DNA, 25 bp, Homo sapien
tgcatgatgcgcacccctctcatca

SEQ ID NO: 1758126 - DNA, 25 bp, Homo sapien
agaatgacgctagcacaggctgtct

SEQ ID NO: 1758127 - DNA, 25 bp, Homo sapien
aactggcccccatatgcatgatgcg

SEQ ID NO: 1758128 - DNA, 25 bp, Homo sapien
tagcacaggctgtctcccaactggc

SEQ ID NO: 1758129 - DNA, 25 bp, Homo sapien
tcataacagtacttcctggctcagg

SEQ ID NO: 1758130 - DNA, 25 bp, Homo sapien
gctcaggtacctaacagagattcct

SEQ ID NO: 1758131 - DNA, 25 bp, Homo sapien
tggactgttctaaccgccttctaga

SEQ ID NO: 1758132 - DNA, 25 bp, Homo sapien
tcatcacagggtgcctggactgttc

SEQ ID NO: 1758133 - DNA, 25 bp, Homo sapien
tagcttttacagcaaccctaaatgg

SEQ ID NO: 1758134 - DNA, 25 bp, Homo sapien
gtactgatccctgaatcactctgga

SEQ ID NO: 1758135 - DNA, 25 bp, Homo sapien
tctcaagaccacaaagccggtaacc

SEQ ID NO: 1758136 - DNA, 25 bp, Homo sapien
cagggtatacacactagatggtctc

SEQ ID NO: 1758137 - DNA, 25 bp, Homo sapien
tgctcctctgaaacactttaacagt

SEQ ID NO: 1758138 - DNA, 25 bp, Homo sapien
caagccaagcaaatttgcctgaatg

SEQ ID NO: 1758139 - DNA, 25 bp, Homo sapien
gctatgcagaggcttagcgctcctg

SEQ ID NO: 1758140 - DNA, 25 bp, Homo sapien
actgctcggatagacaacccctgct

SEQ ID NO: 1758141 - DNA, 25 bp, Homo sapien
tgtccatggccagtggccgtagcag

SEQ ID NO: 1758142 - DNA, 25 bp, Homo sapien
agtgtccatggccagtggccgtagc

SEQ ID NO: 1758143 - DNA, 25 bp, Homo sapien
caagtgtcagcggagtgtccatggc

SEQ ID NO: 1758144 - DNA, 25 bp, Homo sapien
gctttgcccaagtgtcagcggagtg

SEQ ID NO: 1758145 - DNA, 25 bp, Homo sapien
tgcaggtctgggtccggaaacctca

SEQ ID NO: 1758146 - DNA, 25 bp, Homo sapien
gaatcttcagcgaaacttgctgcat

SEQ ID NO: 1758147 - DNA, 25 bp, Homo sapien
tacatgcacgcacccatgaagacgc

SEQ ID NO: 1758148 - DNA, 25 bp, Homo sapien
atgaagacgcacacatgccactgcc

SEQ ID NO: 1758149 - DNA, 25 bp, Homo sapien
caacaacaggcgaaacccaaggcca

SEQ ID NO: 1758150 - DNA, 25 bp, Homo sapien
attctctcccaacaacaggcgaaac

SEQ ID NO: 1758151 - DNA, 25 bp, Homo sapien
gacagattctctcccaacaacaggc

SEQ ID NO: 1758152 - DNA, 25 bp, Homo sapien
cagattctctcccaacaacaggcga

SEQ ID NO: 1758153 - DNA, 25 bp, Homo sapien
tgtgcaacaaattgtcaccaattgc

SEQ ID NO: 1758154 - DNA, 25 bp, Homo sapien
tgtccacttcctgttgtgcaacaaa

SEQ ID NO: 1758155 - DNA, 25 bp, Homo sapien
tgttgtgcaacaaattgtcaccaat

SEQ ID NO: 1758156 - DNA, 25 bp, Homo sapien
cctgttgtgcaacaaattgtcacca

SEQ ID NO: 1758157 - DNA, 25 bp, Homo sapien
gctggccccgtaaagaggcccatag

SEQ ID NO: 1758158 - DNA, 25 bp, Homo sapien
gtaaagaggcccatagctccagcag

SEQ ID NO: 1758159 - DNA, 25 bp, Homo sapien
ctctctagagctggccccgtaaaga

SEQ ID NO: 1758160 - DNA, 25 bp, Homo sapien
catagctccagcagccattaagatt

SEQ ID NO: 1758161 - DNA, 25 bp, Homo sapien
gatgccaaatcgaacaaactcactg

SEQ ID NO: 1758162 - DNA, 25 bp, Homo sapien
catgcagcacttacccggctttaga

SEQ ID NO: 1758163 - DNA, 25 bp, Homo sapien
gatgtcgatttctacagccaggtca

SEQ ID NO: 1758164 - DNA, 25 bp, Homo sapien
taactcatctcgtgaggaccttgca

SEQ ID NO: 1758165 - DNA, 25 bp, Homo sapien
gaccctcaagatcaagcaggaagtc

SEQ ID NO: 1758166 - DNA, 25 bp, Homo sapien
gtacaaattctacaccatgagttga

SEQ ID NO: 1758167 - DNA, 25 bp, Homo sapien
aagacaaagaatctctgcattgtgc

SEQ ID NO: 1758168 - DNA, 25 bp, Homo sapien
cagttactgacttgttaagtacaaa

SEQ ID NO: 1758169 - DNA, 25 bp, Homo sapien
ctgggtgggctgtcttgctcacgga

SEQ ID NO: 1758170 - DNA, 25 bp, Homo sapien
cctgggtgggctgtcttgctcacgg

SEQ ID NO: 1758171 - DNA, 25 bp, Homo sapien
gtgggctgtcttgctcacggagacc

SEQ ID NO: 1758172 - DNA, 25 bp, Homo sapien
gggtgggctgtcttgctcacggaga

SEQ ID NO: 1758173 - DNA, 25 bp, Homo sapien
aatgattctggccatgaaacgtctt

SEQ ID NO: 1758174 - DNA, 25 bp, Homo sapien
tgattctggccatgaaacgtcttac

SEQ ID NO: 1758175 - DNA, 25 bp, Homo sapien
gcaatgattctggccatgaaacgtc

SEQ ID NO: 1758176 - DNA, 25 bp, Homo sapien
atgattctggccatgaaacgtctta

SEQ ID NO: 1758177 - DNA, 25 bp, Homo sapien
ctgctaaaaataggcttgctttctc

SEQ ID NO: 1758178 - DNA, 25 bp, Homo sapien
cattctgcactcagactgacctgaa

SEQ ID NO: 1758179 - DNA, 25 bp, Homo sapien
tctgtgaatgtatagcaaggtcaac

SEQ ID NO: 1758180 - DNA, 25 bp, Homo sapien
tctgctaggcaaaataaaccagact

SEQ ID NO: 1758181 - DNA, 25 bp, Homo sapien
tatactaaaacatgtaggaaccttg

SEQ ID NO: 1758182 - DNA, 25 bp, Homo sapien
gctgagcttgcagattacatggatc

SEQ ID NO: 1758183 - DNA, 25 bp, Homo sapien
tgtgattgttgaaaaggcctcccct

SEQ ID NO: 1758184 - DNA, 25 bp, Homo sapien
tcataacatccagaccatcatgggc

SEQ ID NO: 1758185 - DNA, 25 bp, Homo sapien
tgcacctcagagattgctagagctg

SEQ ID NO: 1758186 - DNA, 25 bp, Homo sapien
ggacaagtagatcccaagagtgcac

SEQ ID NO: 1758187 - DNA, 25 bp, Homo sapien
gaggtggctgtactagactttgcaa

SEQ ID NO: 1758188 - DNA, 25 bp, Homo sapien
ctggtccaggaaagctaaagtccta

SEQ ID NO: 1758189 - DNA, 25 bp, Homo sapien
tggtcccaggatgctaagtgtctcc

SEQ ID NO: 1758190 - DNA, 25 bp, Homo sapien
tgtctgttcttagtctcagaaggga

SEQ ID NO: 1758191 - DNA, 25 bp, Homo sapien
gttcttagtctcagaagggagcctg

SEQ ID NO: 1758192 - DNA, 25 bp, Homo sapien
tctgttcttagtctcagaagggagc

SEQ ID NO: 1758193 - DNA, 25 bp, Homo sapien
aatgtctgttcttagtctcagaagg

SEQ ID NO: 1758194 - DNA, 25 bp, Homo sapien
ccagagaggaagctagatgtactga

SEQ ID NO: 1758195 - DNA, 25 bp, Homo sapien
tagatgtactgaaagtcccaagaaa

SEQ ID NO: 1758196 - DNA, 25 bp, Homo sapien
gctatcaatggcatatgcaaaatac

SEQ ID NO: 1758197 - DNA, 25 bp, Homo sapien
tcagtgctatcaatggcatatgcaa

SEQ ID NO: 1758198 - DNA, 25 bp, Homo sapien
taagacaaagcgagcagtgcagacc

SEQ ID NO: 1758199 - DNA, 25 bp, Homo sapien
cttttaagacaaagcgagcagtgca

SEQ ID NO: 1758200 - DNA, 25 bp, Homo sapien
agaccagccatattacaaggctatt

SEQ ID NO: 1758201 - DNA, 25 bp, Homo sapien
agcagtgcagaccagccatattaca

SEQ ID NO: 1758202 - DNA, 25 bp, Homo sapien
tgggccaaccgtcgctgtgagtgtc

SEQ ID NO: 1758203 - DNA, 25 bp, Homo sapien
gaatagggattctaggccaggcaag

SEQ ID NO: 1758204 - DNA, 25 bp, Homo sapien
tgtctaaatcaaaggactgggccaa

SEQ ID NO: 1758205 - DNA, 25 bp, Homo sapien
gcctgaggccagacttcaatggaat

SEQ ID NO: 1758206 - DNA, 25 bp, Homo sapien
ggtcacaggagcagatccttccttc

SEQ ID NO: 1758207 - DNA, 25 bp, Homo sapien
gcttatcatggacccaagtctctga

SEQ ID NO: 1758208 - DNA, 25 bp, Homo sapien
ggttctagaaatcttggcccaggtc

SEQ ID NO: 1758209 - DNA, 25 bp, Homo sapien
ggttttcaggatctcaatgagcttt

SEQ ID NO: 1758210 - DNA, 25 bp, Homo sapien
agggctaacagaggagctgtctgca

SEQ ID NO: 1758211 - DNA, 25 bp, Homo sapien
cccagggctaacagaggagctgtct

SEQ ID NO: 1758212 - DNA, 25 bp, Homo sapien
ctgtccccagggctaacagaggagc

SEQ ID NO: 1758213 - DNA, 25 bp, Homo sapien
tccccagggctaacagaggagctgt

SEQ ID NO: 1758214 - DNA, 25 bp, Homo sapien
gttttgaaggctttggggtctgctc

SEQ ID NO: 1758215 - DNA, 25 bp, Homo sapien
tcattcaagtgaagcaaaggaggat

SEQ ID NO: 1758216 - DNA, 25 bp, Homo sapien
agtgaagcaaaggaggatggaggga

SEQ ID NO: 1758217 - DNA, 25 bp, Homo sapien
tgggcaggggtgctcagtgttttga

SEQ ID NO: 1758218 - DNA, 25 bp, Homo sapien
tggttccacttctctcactaacagg

SEQ ID NO: 1758219 - DNA, 25 bp, Homo sapien
ggctgaagctgtttaacgatgccaa

SEQ ID NO: 1758220 - DNA, 25 bp, Homo sapien
aagctgtttaacgatgccaatctgg

SEQ ID NO: 1758221 - DNA, 25 bp, Homo sapien
aacaggtcctagattggacagaggc

SEQ ID NO: 1758222 - DNA, 25 bp, Homo sapien
tccttgattgtaaacagtggtggca

SEQ ID NO: 1758223 - DNA, 25 bp, Homo sapien
tgatcatgggcgaacacgcacttgg

SEQ ID NO: 1758224 - DNA, 25 bp, Homo sapien
tgtttagtctcatcaaattgcccgt

SEQ ID NO: 1758225 - DNA, 25 bp, Homo sapien
tagtgtgagactgaacaacatgttg

SEQ ID NO: 1758226 - DNA, 25 bp, Homo sapien
cagctggaagattggcctgggtctc

SEQ ID NO: 1758227 - DNA, 25 bp, Homo sapien
tcttttgtgtgtcttatgtgcttac

SEQ ID NO: 1758228 - DNA, 25 bp, Homo sapien
tgattgagacattttgcactgcaga

SEQ ID NO: 1758229 - DNA, 25 bp, Homo sapien
ggtgtaatgtgctgcacagcccagc

SEQ ID NO: 1758230 - DNA, 25 bp, Homo sapien
cagagcagttggcagtgtcagatgg

SEQ ID NO: 1758231 - DNA, 25 bp, Homo sapien
cccgatgctagcaggtggctggacg

SEQ ID NO: 1758232 - DNA, 25 bp, Homo sapien
gggccttcctccgagcatctgttag

SEQ ID NO: 1758233 - DNA, 25 bp, Homo sapien
cgggccgcggttggtcatcaccatg

SEQ ID NO: 1758234 - DNA, 25 bp, Homo sapien
cccgcggatgaagggcgggcggatc

SEQ ID NO: 1758235 - DNA, 25 bp, Homo sapien
gggttggaggcatggtgcggaggcc

SEQ ID NO: 1758236 - DNA, 25 bp, Homo sapien
cgggggcccgatgccgggaagcatg

SEQ ID NO: 1758237 - DNA, 25 bp, Homo sapien
gggcgatagcatgggccggtgcatg

SEQ ID NO: 1758238 - DNA, 25 bp, Homo sapien
agggaagactcggcagcggggcgcc

SEQ ID NO: 1758239 - DNA, 25 bp, Homo sapien
aagggaagactcggcagcggggcgc

SEQ ID NO: 1758240 - DNA, 25 bp, Homo sapien
ggaagggaagactcggcagcggggc

SEQ ID NO: 1758241 - DNA, 25 bp, Homo sapien
gaagggaagactcggcagcggggcg

SEQ ID NO: 1758242 - DNA, 25 bp, Homo sapien
atcgggccatttggcatcatgctca

SEQ ID NO: 1758243 - DNA, 25 bp, Homo sapien
caagcgacggcagcccgaaattcat

SEQ ID NO: 1758244 - DNA, 25 bp, Homo sapien
acgatcacggggtacggcacgagca

SEQ ID NO: 1758245 - DNA, 25 bp, Homo sapien
catcatctggggcaccggcatcggg

SEQ ID NO: 1758246 - DNA, 25 bp, Homo sapien
tagggatggggatggggatgggcac

SEQ ID NO: 1758247 - DNA, 25 bp, Homo sapien
atagggatggggatggggatgggca

SEQ ID NO: 1758248 - DNA, 25 bp, Homo sapien
gagtgtccgcttggcttgccgcccg

SEQ ID NO: 1758249 - DNA, 25 bp, Homo sapien
gagtccgcggacttggacgagccct

SEQ ID NO: 1758250 - DNA, 25 bp, Homo sapien
gaatgaagttctccccgttgctgga

SEQ ID NO: 1758251 - DNA, 25 bp, Homo sapien
ctccggccatgctcggcgggcgtgg

SEQ ID NO: 1758252 - DNA, 25 bp, Homo sapien
cggcgcgccgcgtcaggtccaccac

SEQ ID NO: 1758253 - DNA, 25 bp, Homo sapien
ccacggtcaggtcgatgacgccgtc

SEQ ID NO: 1758254 - DNA, 25 bp, Homo sapien
tggcccacggtcaggtcgatgacgc

SEQ ID NO: 1758255 - DNA, 25 bp, Homo sapien
acggtcaggtcgatgacgccgtcct

SEQ ID NO: 1758256 - DNA, 25 bp, Homo sapien
ggtggcccacggtcaggtcgatgac

SEQ ID NO: 1758257 - DNA, 25 bp, Homo sapien
gcgcgtgcagcgcgcggtggatcac

SEQ ID NO: 1758258 - DNA, 25 bp, Homo sapien
cggcgccgcgcgtgccgttcacgat

SEQ ID NO: 1758259 - DNA, 25 bp, Homo sapien
gggcgggctgcagtggccgtccctg

SEQ ID NO: 1758260 - DNA, 25 bp, Homo sapien
gccgcgcgtgccgttcacgatgacg

SEQ ID NO: 1758261 - DNA, 25 bp, Homo sapien
cgtgccgttcacgatgacgttgcag

SEQ ID NO: 1758262 - DNA, 25 bp, Homo sapien
gcggctgctcgggaggcggctccgc

SEQ ID NO: 1758263 - DNA, 25 bp, Homo sapien
gcggcggctgctcgggaggcggctc

SEQ ID NO: 1758264 - DNA, 25 bp, Homo sapien
cggcggcggctgctcgggaggcggc

SEQ ID NO: 1758265 - DNA, 25 bp, Homo sapien
ggcggctgctcgggaggcggctccg

SEQ ID NO: 1758266 - DNA, 25 bp, Homo sapien
tccttgaccgactctagctcgctca

SEQ ID NO: 1758267 - DNA, 25 bp, Homo sapien
tcgcccatcagctttttggccgcct

SEQ ID NO: 1758268 - DNA, 25 bp, Homo sapien
tcaccgccggttcctcaggcgacag

SEQ ID NO: 1758269 - DNA, 25 bp, Homo sapien
ccgtccaggtggcagttggaagcac

SEQ ID NO: 1758270 - DNA, 25 bp, Homo sapien
gatgatgcacggtgccatggcagcc

SEQ ID NO: 1758271 - DNA, 25 bp, Homo sapien
taaggttcgggtctgacttgtcgcc

SEQ ID NO: 1758272 - DNA, 25 bp, Homo sapien
gaggcacctccttttgagcggcggc

SEQ ID NO: 1758273 - DNA, 25 bp, Homo sapien
catccgcagagcataggcatggtcc

SEQ ID NO: 1758274 - DNA, 25 bp, Homo sapien
tgggaatgatgctactgaacaactc

SEQ ID NO: 1758275 - DNA, 25 bp, Homo sapien
tgatagcgtgaccacaccgtgtgca

SEQ ID NO: 1758276 - DNA, 25 bp, Homo sapien
tctatttagtaggtggcccagctca

SEQ ID NO: 1758277 - DNA, 25 bp, Homo sapien
gtcagtgacgcttgaggcctaccct

SEQ ID NO: 1758278 - DNA, 25 bp, Homo sapien
gaaactttcccctatgacaactgag

SEQ ID NO: 1758279 - DNA, 25 bp, Homo sapien
gaaacctcgaacgatggtggctgag

SEQ ID NO: 1758280 - DNA, 25 bp, Homo sapien
tccttggtgagatacagatgatgcc

SEQ ID NO: 1758281 - DNA, 25 bp, Homo sapien
tcttggcggctcacttggcattagg

SEQ ID NO: 1758282 - DNA, 25 bp, Homo sapien
tattgtttcgaatgtatggactgac

SEQ ID NO: 1758283 - DNA, 25 bp, Homo sapien
tttggcttccccaatgaagtgaact

SEQ ID NO: 1758284 - DNA, 25 bp, Homo sapien
taaaagtaggcacctatagtattgt

SEQ ID NO: 1758285 - DNA, 25 bp, Homo sapien
tccttttgtcactctcagttttcct

SEQ ID NO: 1758286 - DNA, 25 bp, Homo sapien
tgattgaacatggtgcacaggcagc

SEQ ID NO: 1758287 - DNA, 25 bp, Homo sapien
tggttaatagctggccgaacgcgtc

SEQ ID NO: 1758288 - DNA, 25 bp, Homo sapien
caagtgcagtctctccaagtaaaga

SEQ ID NO: 1758289 - DNA, 25 bp, Homo sapien
gaatgggaccctgttaaacgatgcc

SEQ ID NO: 1758290 - DNA, 25 bp, Homo sapien
taagtcccatgtttatgatgccatc

SEQ ID NO: 1758291 - DNA, 25 bp, Homo sapien
tggatatgttttaccctctagggaa

SEQ ID NO: 1758292 - DNA, 25 bp, Homo sapien
cctgatcggacagtgagaagtgctg

SEQ ID NO: 1758293 - DNA, 25 bp, Homo sapien
tattattgctatgcataggccacac

SEQ ID NO: 1758294 - DNA, 25 bp, Homo sapien
tgaccagcccattagcagagagagg

SEQ ID NO: 1758295 - DNA, 25 bp, Homo sapien
gactgcggccttccaaaaattctgc

SEQ ID NO: 1758296 - DNA, 25 bp, Homo sapien
gtcagatcccatgttccaccgagag

SEQ ID NO: 1758297 - DNA, 25 bp, Homo sapien
gaggtctgggaaagcagtcttctcc

SEQ ID NO: 1758298 - DNA, 25 bp, Homo sapien
ggtctacaggcatgcccagttaatt

SEQ ID NO: 1758299 - DNA, 25 bp, Homo sapien
agccgctgtgcccagactaggagtc

SEQ ID NO: 1758300 - DNA, 25 bp, Homo sapien
gtgggggcggggcaaggtcttgctc

SEQ ID NO: 1758301 - DNA, 25 bp, Homo sapien
tggaggacagctgcatgatcatagc

SEQ ID NO: 1758302 - DNA, 25 bp, Homo sapien
cctaggtcctatgccctggctttca

SEQ ID NO: 1758303 - DNA, 25 bp, Homo sapien
cagaactaagtacttcccattgtgg

SEQ ID NO: 1758304 - DNA, 25 bp, Homo sapien
agcagatggctctgttcactcccaa

SEQ ID NO: 1758305 - DNA, 25 bp, Homo sapien
aattttgaacaagagcctaggtcct

SEQ ID NO: 1758306 - DNA, 25 bp, Homo sapien
gttaggctctggtctgaatcgcagc

SEQ ID NO: 1758307 - DNA, 25 bp, Homo sapien
gaatcgcagcttcatcactgtgatg

SEQ ID NO: 1758308 - DNA, 25 bp, Homo sapien
cattgatagacttgacagggttgcc

SEQ ID NO: 1758309 - DNA, 25 bp, Homo sapien
caaaggcaatattcgtgaagcgtaa

SEQ ID NO: 1758310 - DNA, 25 bp, Homo sapien
caataagcgaaacagagacccgagt

SEQ ID NO: 1758311 - DNA, 25 bp, Homo sapien
ccttgccaagcagaagaatcttacg

SEQ ID NO: 1758312 - DNA, 25 bp, Homo sapien
gaaggtatgaaatccaacagagtgg

SEQ ID NO: 1758313 - DNA, 25 bp, Homo sapien
tacagtacaaatgcctctgactggc

SEQ ID NO: 1758314 - DNA, 25 bp, Homo sapien
aagatgcgcgggcttctctgggcta

SEQ ID NO: 1758315 - DNA, 25 bp, Homo sapien
tccatgagcgtaccctgtgagtgaa

SEQ ID NO: 1758316 - DNA, 25 bp, Homo sapien
tctagaggacttctggactcgcagc

SEQ ID NO: 1758317 - DNA, 25 bp, Homo sapien
cgtgacatggtttgctctgcgccct

SEQ ID NO: 1758318 - DNA, 25 bp, Homo sapien
gaggagaatgttgtgacccagcaga

SEQ ID NO: 1758319 - DNA, 25 bp, Homo sapien
gatgaatctgacaccagtcagggag

SEQ ID NO: 1758320 - DNA, 25 bp, Homo sapien
tacagtatgtacaccgcatccttgg

SEQ ID NO: 1758321 - DNA, 25 bp, Homo sapien
ttataaatctctccccgggcttgcg

SEQ ID NO: 1758322 - DNA, 25 bp, Homo sapien
taagtgcgagactctgaacaggtcg

SEQ ID NO: 1758323 - DNA, 25 bp, Homo sapien
tcggcagagttcagacggagtcacc

SEQ ID NO: 1758324 - DNA, 25 bp, Homo sapien
cacaggatgatcacttcaagggagc

SEQ ID NO: 1758325 - DNA, 25 bp, Homo sapien
gaaaatcaggtctccggaatccaca

SEQ ID NO: 1758326 - DNA, 25 bp, Homo sapien
cacatggtgctctggcatgagagga

SEQ ID NO: 1758327 - DNA, 25 bp, Homo sapien
cacggtagccgtccttaccctcctg

SEQ ID NO: 1758328 - DNA, 25 bp, Homo sapien
gcagcacggcacttccaagttggtt

SEQ ID NO: 1758329 - DNA, 25 bp, Homo sapien
ctcctgctcgttcctgtgccaggaa

SEQ ID NO: 1758330 - DNA, 25 bp, Homo sapien
tatggaacaggaataacaggagaca

SEQ ID NO: 1758331 - DNA, 25 bp, Homo sapien
acttggtatggaacaggaataacag

SEQ ID NO: 1758332 - DNA, 25 bp, Homo sapien
agaaaatgctacttggtatggaaca

SEQ ID NO: 1758333 - DNA, 25 bp, Homo sapien
gaacaggaataacaggagacacaga

SEQ ID NO: 1758334 - DNA, 25 bp, Homo sapien
tgatggagaaagttttccttagtgg

SEQ ID NO: 1758335 - DNA, 25 bp, Homo sapien
tccttagtggcacctgatgagacaa

SEQ ID NO: 1758336 - DNA, 25 bp, Homo sapien
gcacctgatgagacaactcttcctg

SEQ ID NO: 1758337 - DNA, 25 bp, Homo sapien
tggagaaagttttccttagtggcac

SEQ ID NO: 1758338 - DNA, 25 bp, Homo sapien
cacaggtctttcgtagccttcacaa

SEQ ID NO: 1758339 - DNA, 25 bp, Homo sapien
tctgacctcaatgtggaagtgactc

SEQ ID NO: 1758340 - DNA, 25 bp, Homo sapien
aaatggttaatcagggccggccctg

SEQ ID NO: 1758341 - DNA, 25 bp, Homo sapien
cacaacgttgggcaggaaatggtta

SEQ ID NO: 1758342 - DNA, 25 bp, Homo sapien
ctgagggatggcctacaagagatta

SEQ ID NO: 1758343 - DNA, 25 bp, Homo sapien
taacctgagggatggcctacaagag

SEQ ID NO: 1758344 - DNA, 25 bp, Homo sapien
tacaagagattaatagcgaacttgt

SEQ ID NO: 1758345 - DNA, 25 bp, Homo sapien
gctccctaacctgagggatggccta

SEQ ID NO: 1758346 - DNA, 25 bp, Homo sapien
taatcacgctttttcccctcagaga

SEQ ID NO: 1758347 - DNA, 25 bp, Homo sapien
cattcggagagttcatgaagacccg

SEQ ID NO: 1758348 - DNA, 25 bp, Homo sapien
ttcccacatgtgcaaaaatgagggc

SEQ ID NO: 1758349 - DNA, 25 bp, Homo sapien
cagagagcccacagttaaacacgtt

SEQ ID NO: 1758350 - DNA, 25 bp, Homo sapien
cagttcaggcttggttgaggtgtcc

SEQ ID NO: 1758351 - DNA, 25 bp, Homo sapien
cttggttgaggtgtccggcggcggc

SEQ ID NO: 1758352 - DNA, 25 bp, Homo sapien
tgtccggcggcggcaattttaccca

SEQ ID NO: 1758353 - DNA, 25 bp, Homo sapien
ctgcagttcaggcttggttgaggtg

SEQ ID NO: 1758354 - DNA, 25 bp, Homo sapien
ttgtgtggtgttatccccaaatctc

SEQ ID NO: 1758355 - DNA, 25 bp, Homo sapien
tgccagctttccagttggacacgag

SEQ ID NO: 1758356 - DNA, 25 bp, Homo sapien
gacacgagccatgcaaaggcatcca

SEQ ID NO: 1758357 - DNA, 25 bp, Homo sapien
gggaagagcgagcatccactgccag

SEQ ID NO: 1758358 - DNA, 25 bp, Homo sapien
ccagtatggaaaagcgggctcagtg

SEQ ID NO: 1758359 - DNA, 25 bp, Homo sapien
gctggtttgagccatcactaccaac

SEQ ID NO: 1758360 - DNA, 25 bp, Homo sapien
tgcccaccagtgaatgaggatagct

SEQ ID NO: 1758361 - DNA, 25 bp, Homo sapien
ttcctgcccaccagtgaatgaggat

SEQ ID NO: 1758362 - DNA, 25 bp, Homo sapien
ggatagctggtttgagccatcacta

SEQ ID NO: 1758363 - DNA, 25 bp, Homo sapien
tccagatgagatcagcacttgaatc

SEQ ID NO: 1758364 - DNA, 25 bp, Homo sapien
ggcgtgagggatcaaacaatctgca

SEQ ID NO: 1758365 - DNA, 25 bp, Homo sapien
tatatgtgggctttgggtccacggc

SEQ ID NO: 1758366 - DNA, 25 bp, Homo sapien
gaatcagatggtcctccccagtgtg

SEQ ID NO: 1758367 - DNA, 25 bp, Homo sapien
taactcaagtactgccaaccgcagg

SEQ ID NO: 1758368 - DNA, 25 bp, Homo sapien
ccttgtccagtgatttagtgatggg

SEQ ID NO: 1758369 - DNA, 25 bp, Homo sapien
tgtaaaagcctaactcaagtactgc

SEQ ID NO: 1758370 - DNA, 25 bp, Homo sapien
tggccaccaagagtaaattcacagg

SEQ ID NO: 1758371 - DNA, 25 bp, Homo sapien
ttctcactagctgtccctcttcatt

SEQ ID NO: 1758372 - DNA, 25 bp, Homo sapien
aatgcccttctcactagctgtccct

SEQ ID NO: 1758373 - DNA, 25 bp, Homo sapien
gcccttctcactagctgtccctctt

SEQ ID NO: 1758374 - DNA, 25 bp, Homo sapien
cttctcactagctgtccctcttcat

SEQ ID NO: 1758375 - DNA, 25 bp, Homo sapien
accgagaggcctcttgaatcttcat

SEQ ID NO: 1758376 - DNA, 25 bp, Homo sapien
ccaccgagaggcctcttgaatcttc

SEQ ID NO: 1758377 - DNA, 25 bp, Homo sapien
caccgagaggcctcttgaatcttca

SEQ ID NO: 1758378 - DNA, 25 bp, Homo sapien
tagagtcagttccatgcactaggcg

SEQ ID NO: 1758379 - DNA, 25 bp, Homo sapien
cgtggtctgagccttagagtcagtt

SEQ ID NO: 1758380 - DNA, 25 bp, Homo sapien
tggctccaactttagaatacacccg

SEQ ID NO: 1758381 - DNA, 25 bp, Homo sapien
ttgcacaggccaacagcaacctctt

SEQ ID NO: 1758382 - DNA, 25 bp, Homo sapien
tcacggtgctttcgcaagtgaggcc

SEQ ID NO: 1758383 - DNA, 25 bp, Homo sapien
agatctgcgctcttcaaatcctaca

SEQ ID NO: 1758384 - DNA, 25 bp, Homo sapien
caagtgaggcctcagatctgcgctc

SEQ ID NO: 1758385 - DNA, 25 bp, Homo sapien
aaatcctacataaagagcccagagg

SEQ ID NO: 1758386 - DNA, 25 bp, Homo sapien
cctgcaggtagagcgctgggcacct

SEQ ID NO: 1758387 - DNA, 25 bp, Homo sapien
caatggttgtcctaatccaagatga

SEQ ID NO: 1758388 - DNA, 25 bp, Homo sapien
gcttctggggtatcatccactccaa

SEQ ID NO: 1758389 - DNA, 25 bp, Homo sapien
tcctgcaggtagagcgctgggcacc

SEQ ID NO: 1758390 - DNA, 25 bp, Homo sapien
tcttcaaaatgaattcgcctttgcc

SEQ ID NO: 1758391 - DNA, 25 bp, Homo sapien
aggacatcaacagtgttggagatga

SEQ ID NO: 1758392 - DNA, 25 bp, Homo sapien
tcaaaatgaattcgcctttgccatg

SEQ ID NO: 1758393 - DNA, 25 bp, Homo sapien
ttaaaaggacatcaacagtgttgga

SEQ ID NO: 1758394 - DNA, 25 bp, Homo sapien
gaaactctgctaccacattgacaaa

SEQ ID NO: 1758395 - DNA, 25 bp, Homo sapien
tgggacctgcactgaaactctgcta

SEQ ID NO: 1758396 - DNA, 25 bp, Homo sapien
gtcatgaagtacctgggcctgaagc

SEQ ID NO: 1758397 - DNA, 25 bp, Homo sapien
caggagattgatggcaacgctctgc

SEQ ID NO: 1758398 - DNA, 25 bp, Homo sapien
aggttctagggagaatccgcttggt

SEQ ID NO: 1758399 - DNA, 25 bp, Homo sapien
tcttttctggcttctagatccacca

SEQ ID NO: 1758400 - DNA, 25 bp, Homo sapien
caagctgaggcctgttcggctgctc

SEQ ID NO: 1758401 - DNA, 25 bp, Homo sapien
taaagcctgtaacatcaagctgagg

SEQ ID NO: 1758402 - DNA, 25 bp, Homo sapien
cctgattaacgccaatgttctgatg

SEQ ID NO: 1758403 - DNA, 25 bp, Homo sapien
gggcaggatccaaaggcaatgtgat

SEQ ID NO: 1758404 - DNA, 25 bp, Homo sapien
aaggcaatgtgatttccgtgattcc

SEQ ID NO: 1758405 - DNA, 25 bp, Homo sapien
gatttccgtgattcctcgtccccat

SEQ ID NO: 1758406 - DNA, 25 bp, Homo sapien
tgcaccaggctccacccatctgtct

SEQ ID NO: 1758407 - DNA, 25 bp, Homo sapien
tgttgatctatcacatctgcctgct

SEQ ID NO: 1758408 - DNA, 25 bp, Homo sapien
atctgtcttcctgacaccttcgctg

SEQ ID NO: 1758409 - DNA, 25 bp, Homo sapien
tgtcttcctgacaccttcgctgcag

SEQ ID NO: 1758410 - DNA, 25 bp, Homo sapien
tgagaatcaggattgctttgaaaca

SEQ ID NO: 1758411 - DNA, 25 bp, Homo sapien
ctgtgagaatcaggattgctttgaa

SEQ ID NO: 1758412 - DNA, 25 bp, Homo sapien
gtgagaatcaggattgctttgaaac

SEQ ID NO: 1758413 - DNA, 25 bp, Homo sapien
gctgtgagaatcaggattgctttga

SEQ ID NO: 1758414 - DNA, 25 bp, Homo sapien
aagaaggaatctcgctcagctcagc

SEQ ID NO: 1758415 - DNA, 25 bp, Homo sapien
taacagtgcttgctaggaggtcaca

SEQ ID NO: 1758416 - DNA, 25 bp, Homo sapien
gagcctacccttcggagtctggaaa

SEQ ID NO: 1758417 - DNA, 25 bp, Homo sapien
tgagggtttgcaactccagggagac

SEQ ID NO: 1758418 - DNA, 25 bp, Homo sapien
tttagcttcctgcagttgtgatata

SEQ ID NO: 1758419 - DNA, 25 bp, Homo sapien
tccaaggggatgtgttcacagggca

SEQ ID NO: 1758420 - DNA, 25 bp, Homo sapien
tctccgctgccagtgggctccaagg

SEQ ID NO: 1758421 - DNA, 25 bp, Homo sapien
gatatatcacgtctgtctccgctgc

SEQ ID NO: 1758422 - DNA, 25 bp, Homo sapien
ttttccaaaggagagcaacattgtt

SEQ ID NO: 1758423 - DNA, 25 bp, Homo sapien
aggcagattaagtgagcagagccct

SEQ ID NO: 1758424 - DNA, 25 bp, Homo sapien
ccaaaggagagcaacattgttccat

SEQ ID NO: 1758425 - DNA, 25 bp, Homo sapien
ggagagcaacattgttccatttgat

SEQ ID NO: 1758426 - DNA, 25 bp, Homo sapien
cagatgtggtaatgtaatgcatgca

SEQ ID NO: 1758427 - DNA, 25 bp, Homo sapien
ttaacatcccttgcccttgcgcggg

SEQ ID NO: 1758428 - DNA, 25 bp, Homo sapien
cagccccaagagaaacacgacctct

SEQ ID NO: 1758429 - DNA, 25 bp, Homo sapien
tgctgccaccgctggtggtccccgc

SEQ ID NO: 1758430 - DNA, 25 bp, Homo sapien
gtgccagcagcctctatacatcctc

SEQ ID NO: 1758431 - DNA, 25 bp, Homo sapien
ggatgtgccagcagcctctatacat

SEQ ID NO: 1758432 - DNA, 25 bp, Homo sapien
tgcggatgtgccagcagcctctata

SEQ ID NO: 1758433 - DNA, 25 bp, Homo sapien
cctctgcggatgtgccagcagcctc

SEQ ID NO: 1758434 - DNA, 25 bp, Homo sapien
tccgaatcctgtcccacatcatttg

SEQ ID NO: 1758435 - DNA, 25 bp, Homo sapien
agcatctgaacccataggatccgaa

SEQ ID NO: 1758436 - DNA, 25 bp, Homo sapien
cataggatccgaatcctgtcccaca

SEQ ID NO: 1758437 - DNA, 25 bp, Homo sapien
tctgaacccataggatccgaatcct

SEQ ID NO: 1758438 - DNA, 25 bp, Homo sapien
gcaccatgtgggcaaacagccaaga

SEQ ID NO: 1758439 - DNA, 25 bp, Homo sapien
ccaagaatctagagaaacagatggc

SEQ ID NO: 1758440 - DNA, 25 bp, Homo sapien
agggagccaactctgccagcgggca

SEQ ID NO: 1758441 - DNA, 25 bp, Homo sapien
agcgggcaggcggttcattctcatg

SEQ ID NO: 1758442 - DNA, 25 bp, Homo sapien
tctctttggcctctttgactggaaa

SEQ ID NO: 1758443 - DNA, 25 bp, Homo sapien
ctgtgaatttgtgcccagactgccc

SEQ ID NO: 1758444 - DNA, 25 bp, Homo sapien
ccataaaggaagctggacgttttca

SEQ ID NO: 1758445 - DNA, 25 bp, Homo sapien
tggaaatgtcattgcagaacagaaa

SEQ ID NO: 1758446 - DNA, 25 bp, Homo sapien
atcatagacgccacgactggtccat

SEQ ID NO: 1758447 - DNA, 25 bp, Homo sapien
tatgacatcatagacgccacgactg

SEQ ID NO: 1758448 - DNA, 25 bp, Homo sapien
acatcatagacgccacgactggtcc

SEQ ID NO: 1758449 - DNA, 25 bp, Homo sapien
tgacatcatagacgccacgactggt

SEQ ID NO: 1758450 - DNA, 25 bp, Homo sapien
gagctctttcatgctgtagcgccag

SEQ ID NO: 1758451 - DNA, 25 bp, Homo sapien
aaagagctctttcatgctgtagcgc

SEQ ID NO: 1758452 - DNA, 25 bp, Homo sapien
caggtccggcaggttccagaaagga

SEQ ID NO: 1758453 - DNA, 25 bp, Homo sapien
ctttcatgctgtagcgccagcctct

SEQ ID NO: 1758454 - DNA, 25 bp, Homo sapien
cctctcctccctggagatgttcttc

SEQ ID NO: 1758455 - DNA, 25 bp, Homo sapien
gcctcctctcctccctggagatgtt

SEQ ID NO: 1758456 - DNA, 25 bp, Homo sapien
ctcctctcctccctggagatgttct

SEQ ID NO: 1758457 - DNA, 25 bp, Homo sapien
ggcatccccgagcctcctctcctcc

SEQ ID NO: 1758458 - DNA, 25 bp, Homo sapien
ggaaccgcacggattccagttcaga

SEQ ID NO: 1758459 - DNA, 25 bp, Homo sapien
ccagttcagaaaagccattttcatg

SEQ ID NO: 1758460 - DNA, 25 bp, Homo sapien
tccatctaaatggaaccgcacggat

SEQ ID NO: 1758461 - DNA, 25 bp, Homo sapien
gttcagaaaagccattttcatggcc

SEQ ID NO: 1758462 - DNA, 25 bp, Homo sapien
tgttgatacgcccataccaagtccg

SEQ ID NO: 1758463 - DNA, 25 bp, Homo sapien
tctgcatttgcaagagcgcagtgct

SEQ ID NO: 1758464 - DNA, 25 bp, Homo sapien
ctgccagcccgtgggttctaagcgt

SEQ ID NO: 1758465 - DNA, 25 bp, Homo sapien
taagcgtttttcattgttgcactcg

SEQ ID NO: 1758466 - DNA, 25 bp, Homo sapien
caataaggtgataattaactttctc

SEQ ID NO: 1758467 - DNA, 25 bp, Homo sapien
tggtcttttggcaaacctactggat

SEQ ID NO: 1758468 - DNA, 25 bp, Homo sapien
ggaattagcagttctctcagccccg

SEQ ID NO: 1758469 - DNA, 25 bp, Homo sapien
gtacacagcctagtaagttctctgg

SEQ ID NO: 1758470 - DNA, 25 bp, Homo sapien
cccaggtggagcactgtgacttgaa

SEQ ID NO: 1758471 - DNA, 25 bp, Homo sapien
gattccatgacggtactcatgaggg

SEQ ID NO: 1758472 - DNA, 25 bp, Homo sapien
ccactatctgtgatcgtgaacgaga

SEQ ID NO: 1758473 - DNA, 25 bp, Homo sapien
gagggttagacaatcagtggctttc

SEQ ID NO: 1758474 - DNA, 25 bp, Homo sapien
tatggagtattagcggcagttttcc

SEQ ID NO: 1758475 - DNA, 25 bp, Homo sapien
ctatggagtattagcggcagttttc

SEQ ID NO: 1758476 - DNA, 25 bp, Homo sapien
ggagtattagcggcagttttcccaa

SEQ ID NO: 1758477 - DNA, 25 bp, Homo sapien
gtattagcggcagttttcccaagct

SEQ ID NO: 1758478 - DNA, 25 bp, Homo sapien
taggtaagggagatgcacaattgga

SEQ ID NO: 1758479 - DNA, 25 bp, Homo sapien
cgtgccgttgacacgggatctttct

SEQ ID NO: 1758480 - DNA, 25 bp, Homo sapien
ctctggtgaacaagctgtaggtaag

SEQ ID NO: 1758481 - DNA, 25 bp, Homo sapien
gatgcacaattggaggcgtgccgtt

SEQ ID NO: 1758482 - DNA, 25 bp, Homo sapien
gaggacaaggacaacagtagcccat

SEQ ID NO: 1758483 - DNA, 25 bp, Homo sapien
cttgaggacaaggacaacagtagcc

SEQ ID NO: 1758484 - DNA, 25 bp, Homo sapien
ttgaggacaaggacaacagtagccc

SEQ ID NO: 1758485 - DNA, 25 bp, Homo sapien
tgaggacaaggacaacagtagccca

SEQ ID NO: 1758486 - DNA, 25 bp, Homo sapien
tccaaagctctagtttactaggtct

SEQ ID NO: 1758487 - DNA, 25 bp, Homo sapien
tactaggtcttatcctaatgagaga

SEQ ID NO: 1758488 - DNA, 25 bp, Homo sapien
cccctttgtaattatggccatatcc

SEQ ID NO: 1758489 - DNA, 25 bp, Homo sapien
tttgctccaaattgatatccaaagc

SEQ ID NO: 1758490 - DNA, 25 bp, Homo sapien
ttttgggcccaagagaatttgagtg

SEQ ID NO: 1758491 - DNA, 25 bp, Homo sapien
agaggagccatgttttgggcccaag

SEQ ID NO: 1758492 - DNA, 25 bp, Homo sapien
tttgggcccaagagaatttgagtga

SEQ ID NO: 1758493 - DNA, 25 bp, Homo sapien
ctgagaggagccatgttttgggccc

SEQ ID NO: 1758494 - DNA, 25 bp, Homo sapien
tccttgagtatcagccagggtcaca

SEQ ID NO: 1758495 - DNA, 25 bp, Homo sapien
cataatctttttggtcctggcccct

SEQ ID NO: 1758496 - DNA, 25 bp, Homo sapien
tctcttcatgagtttctgcaagaaa

SEQ ID NO: 1758497 - DNA, 25 bp, Homo sapien
catttcctaatttctgtggctcttc

SEQ ID NO: 1758498 - DNA, 25 bp, Homo sapien
ggtttcacctgcatcaacccaggat

SEQ ID NO: 1758499 - DNA, 25 bp, Homo sapien
tgattcaggtaaggcccggctctta

SEQ ID NO: 1758500 - DNA, 25 bp, Homo sapien
gttcaagcggagagaacggaccctc

SEQ ID NO: 1758501 - DNA, 25 bp, Homo sapien
ctaggtccccagtgcttgcctgcag

SEQ ID NO: 1758502 - DNA, 25 bp, Homo sapien
tcctaccaatttcctgattcaggta

SEQ ID NO: 1758503 - DNA, 25 bp, Homo sapien
ctgtttgaggtgtcaccacagctgc

SEQ ID NO: 1758504 - DNA, 25 bp, Homo sapien
ggttcctaatggttccataccattg

SEQ ID NO: 1758505 - DNA, 25 bp, Homo sapien
taatggttccataccattgcctctc

SEQ ID NO: 1758506 - DNA, 25 bp, Homo sapien
ggttccataccattgcctctcaatg

SEQ ID NO: 1758507 - DNA, 25 bp, Homo sapien
gatggttcctaatggttccatacca

SEQ ID NO: 1758508 - DNA, 25 bp, Homo sapien
acatgcacccttgtaaggctactcc

SEQ ID NO: 1758509 - DNA, 25 bp, Homo sapien
aagacatgcacccttgtaaggctac

SEQ ID NO: 1758510 - DNA, 25 bp, Homo sapien
caagacatgcacccttgtaaggcta

SEQ ID NO: 1758511 - DNA, 25 bp, Homo sapien
gcacccttgtaaggctactcccttg

SEQ ID NO: 1758512 - DNA, 25 bp, Homo sapien
ccatccagagctcggcatctggttt

SEQ ID NO: 1758513 - DNA, 25 bp, Homo sapien
aatgcggctcaagttcctgtgcttt

SEQ ID NO: 1758514 - DNA, 25 bp, Homo sapien
tcaatgcggctcaagttcctgtgct

SEQ ID NO: 1758515 - DNA, 25 bp, Homo sapien
tcacgaaagccccatccagagctcg

SEQ ID NO: 1758516 - DNA, 25 bp, Homo sapien
gaggccggaagtctggcctgacaac

SEQ ID NO: 1758517 - DNA, 25 bp, Homo sapien
caagccttcggggacaatgggggag

SEQ ID NO: 1758518 - DNA, 25 bp, Homo sapien
gaagtctggcctgacaacgcgcctg

SEQ ID NO: 1758519 - DNA, 25 bp, Homo sapien
ggccggaagtctggcctgacaacgc

SEQ ID NO: 1758520 - DNA, 25 bp, Homo sapien
cagcaccttacataatttttgagag

SEQ ID NO: 1758521 - DNA, 25 bp, Homo sapien
tctctgtgtagaacaataccttctg

SEQ ID NO: 1758522 - DNA, 25 bp, Homo sapien
tttaagttagggagcacattgagtg

SEQ ID NO: 1758523 - DNA, 25 bp, Homo sapien
acaggcctgtccagctgtactgtcc

SEQ ID NO: 1758524 - DNA, 25 bp, Homo sapien
gatagtgggactgtatgttttctga

SEQ ID NO: 1758525 - DNA, 25 bp, Homo sapien
gactctatcaggagctttttaagga

SEQ ID NO: 1758526 - DNA, 25 bp, Homo sapien
gcccagagttatcagacagattata

SEQ ID NO: 1758527 - DNA, 25 bp, Homo sapien
ccacatgatatagagggctacgttt

SEQ ID NO: 1758528 - DNA, 25 bp, Homo sapien
tctcactgtgttacctaggcttgag

SEQ ID NO: 1758529 - DNA, 25 bp, Homo sapien
acacggtctcactgtgttacctagg

SEQ ID NO: 1758530 - DNA, 25 bp, Homo sapien
cactgtgttacctaggcttgagtgc

SEQ ID NO: 1758531 - DNA, 25 bp, Homo sapien
gttgcaggcatgagcaactgcgccc

SEQ ID NO: 1758532 - DNA, 25 bp, Homo sapien
taaggattaaagacatcaaggcacc

SEQ ID NO: 1758533 - DNA, 25 bp, Homo sapien
tcatcgaaaactaatgaatgtcctt

SEQ ID NO: 1758534 - DNA, 25 bp, Homo sapien
tacattgcctcttaagttttgagaa

SEQ ID NO: 1758535 - DNA, 25 bp, Homo sapien
tcatcaaatagtgtaagtggagtta

SEQ ID NO: 1758536 - DNA, 25 bp, Homo sapien
tctctgtattgctccggttttagcg

SEQ ID NO: 1758537 - DNA, 25 bp, Homo sapien
tattgctccggttttagcgtatgtc

SEQ ID NO: 1758538 - DNA, 25 bp, Homo sapien
gcgtgtcatctttgggtgagggcca

SEQ ID NO: 1758539 - DNA, 25 bp, Homo sapien
gctccggttttagcgtatgtcctgc

SEQ ID NO: 1758540 - DNA, 25 bp, Homo sapien
gaactgcctttggagctgcgttgtc

SEQ ID NO: 1758541 - DNA, 25 bp, Homo sapien
cctgatgagtatgtttaccttggcc

SEQ ID NO: 1758542 - DNA, 25 bp, Homo sapien
tgcgttgtcttaggccactggaagg

SEQ ID NO: 1758543 - DNA, 25 bp, Homo sapien
ttggccatgccagtgtcatagagct

SEQ ID NO: 1758544 - DNA, 25 bp, Homo sapien
ggtcacctgcccctccctttctaca

SEQ ID NO: 1758545 - DNA, 25 bp, Homo sapien
cctgcccctccctttctacacccat

SEQ ID NO: 1758546 - DNA, 25 bp, Homo sapien
tccagtgtggtcacctgcccctccc

SEQ ID NO: 1758547 - DNA, 25 bp, Homo sapien
ccagtgtggtcacctgcccctccct

SEQ ID NO: 1758548 - DNA, 25 bp, Homo sapien
ctgactgacatgtgagcagcggggt

SEQ ID NO: 1758549 - DNA, 25 bp, Homo sapien
ggagatggttgtggcccgaggcaag

SEQ ID NO: 1758550 - DNA, 25 bp, Homo sapien
aacaacagctgacccgtcatgagac

SEQ ID NO: 1758551 - DNA, 25 bp, Homo sapien
gcggggtgatgtcaacaacagctga

SEQ ID NO: 1758552 - DNA, 25 bp, Homo sapien
tgtctgacaagagcaccaatcctct

SEQ ID NO: 1758553 - DNA, 25 bp, Homo sapien
tggtgcagatgaaacggcaggctct

SEQ ID NO: 1758554 - DNA, 25 bp, Homo sapien
gcagcaggtaaatgtgaaccaagtg

SEQ ID NO: 1758555 - DNA, 25 bp, Homo sapien
ctggggagaaaggctaccgtcaccg

SEQ ID NO: 1758556 - DNA, 25 bp, Homo sapien
ccagaagaaggcccacctgatggag

SEQ ID NO: 1758557 - DNA, 25 bp, Homo sapien
caggatgaggatgtcaagaagcagc

SEQ ID NO: 1758558 - DNA, 25 bp, Homo sapien
aagaaatactgccacgtcatccgcg

SEQ ID NO: 1758559 - DNA, 25 bp, Homo sapien
acgaagtactgcaagaaatggcagg

SEQ ID NO: 1758560 - DNA, 25 bp, Homo sapien
gcgtcattgcccacacccagatgcg

SEQ ID NO: 1758561 - DNA, 25 bp, Homo sapien
taaggatgatccgtccaagccggtc

SEQ ID NO: 1758562 - DNA, 25 bp, Homo sapien
cagtaatgaatgcaagaggcgtttc

SEQ ID NO: 1758563 - DNA, 25 bp, Homo sapien
atgtggaaaccccttgaggcctccg

SEQ ID NO: 1758564 - DNA, 25 bp, Homo sapien
cacatcatgagggaagtcgacagcc

SEQ ID NO: 1758565 - DNA, 25 bp, Homo sapien
caggcatcgtgggaaggtgaagagc

SEQ ID NO: 1758566 - DNA, 25 bp, Homo sapien
gtcatcaccactgacagggaccatg

SEQ ID NO: 1758567 - DNA, 25 bp, Homo sapien
ctgtcatcaccactgacagggacca

SEQ ID NO: 1758568 - DNA, 25 bp, Homo sapien
gtatctgctcactggtgtcatctcc

SEQ ID NO: 1758569 - DNA, 25 bp, Homo sapien
ggcagtatctgctcactggtgtcat

SEQ ID NO: 1758570 - DNA, 25 bp, Homo sapien
tcctcttagaatttcaaaagcagaa

SEQ ID NO: 1758571 - DNA, 25 bp, Homo sapien
tcttagaatttcaaaagcagaaact

SEQ ID NO: 1758572 - DNA, 25 bp, Homo sapien
ttttcctcttagaatttcaaaagca

SEQ ID NO: 1758573 - DNA, 25 bp, Homo sapien
cttagaatttcaaaagcagaaacta

SEQ ID NO: 1758574 - DNA, 25 bp, Homo sapien
tgtggtttgatctgagcttgggtct

SEQ ID NO: 1758575 - DNA, 25 bp, Homo sapien
cttcacagctatgaatccaatagtg

SEQ ID NO: 1758576 - DNA, 25 bp, Homo sapien
tagtgatgatccctaatcctttgct

SEQ ID NO: 1758577 - DNA, 25 bp, Homo sapien
gatgcctgtggtttgatctgagctt

SEQ ID NO: 1758578 - DNA, 25 bp, Homo sapien
gattgcattcctggccaaagacatg

SEQ ID NO: 1758579 - DNA, 25 bp, Homo sapien
tattttaaagtgtagcccagagtct

SEQ ID NO: 1758580 - DNA, 25 bp, Homo sapien
cagagctggatggatccctagggac

SEQ ID NO: 1758581 - DNA, 25 bp, Homo sapien
ctgatgatagattcccagagctgga

SEQ ID NO: 1758582 - DNA, 25 bp, Homo sapien
agtcctagctacttgggaggctgag

SEQ ID NO: 1758583 - DNA, 25 bp, Homo sapien
gatgggaggatgtcttgagcccggg

SEQ ID NO: 1758584 - DNA, 25 bp, Homo sapien
catagtgaaacactgtctctgcaaa

SEQ ID NO: 1758585 - DNA, 25 bp, Homo sapien
gctgggtatggtggtaagtgcctgt

SEQ ID NO: 1758586 - DNA, 25 bp, Homo sapien
catagtactgaatgttgacacacag

SEQ ID NO: 1758587 - DNA, 25 bp, Homo sapien
tttagacctagcatcagcaatagat

SEQ ID NO: 1758588 - DNA, 25 bp, Homo sapien
tattaagcgctaccctaaagtgtgt

SEQ ID NO: 1758589 - DNA, 25 bp, Homo sapien
taaggctcttggatgtataacatac

SEQ ID NO: 1758590 - DNA, 25 bp, Homo sapien
gctatggaagccacaaaccttgtag

SEQ ID NO: 1758591 - DNA, 25 bp, Homo sapien
tatgcagtagctcaggtccttaaag

SEQ ID NO: 1758592 - DNA, 25 bp, Homo sapien
gcaaaatattgtgggcacctcacca

SEQ ID NO: 1758593 - DNA, 25 bp, Homo sapien
cattagcaagtatgctgccagttct

SEQ ID NO: 1758594 - DNA, 25 bp, Homo sapien
gttcgatctgtaaccaactgtgaac

SEQ ID NO: 1758595 - DNA, 25 bp, Homo sapien
aaccaactgtgaacaattaattgag

SEQ ID NO: 1758596 - DNA, 25 bp, Homo sapien
ctgtaaccaactgtgaacaattaat

SEQ ID NO: 1758597 - DNA, 25 bp, Homo sapien
gtaaccaactgtgaacaattaattg

SEQ ID NO: 1758598 - DNA, 25 bp, Homo sapien
taaaaggctatatggactggtttgg

SEQ ID NO: 1758599 - DNA, 25 bp, Homo sapien
ccccagtagagctggatatgattca

SEQ ID NO: 1758600 - DNA, 25 bp, Homo sapien
catcctaggccttggtctcggctcg

SEQ ID NO: 1758601 - DNA, 25 bp, Homo sapien
gctcaaaagtgtgacatctacagtt

SEQ ID NO: 1758602 - DNA, 25 bp, Homo sapien
tattgcctcgggcatgtcagaaact

SEQ ID NO: 1758603 - DNA, 25 bp, Homo sapien
tggcaacggtatcaggacgcttttt

SEQ ID NO: 1758604 - DNA, 25 bp, Homo sapien
catcctgggcagtctagcgagacta

SEQ ID NO: 1758605 - DNA, 25 bp, Homo sapien
aattctttttacagactggcaacgg

SEQ ID NO: 1758606 - DNA, 25 bp, Homo sapien
cattttccattaagagggaagagag

SEQ ID NO: 1758607 - DNA, 25 bp, Homo sapien
cacctattaggtttggcacccagtt

SEQ ID NO: 1758608 - DNA, 25 bp, Homo sapien
ttgcactggacacctattaggtttg

SEQ ID NO: 1758609 - DNA, 25 bp, Homo sapien
tggacacctattaggtttggcaccc

SEQ ID NO: 1758610 - DNA, 25 bp, Homo sapien
cgctctgcaggccaacttgtgcttc

SEQ ID NO: 1758611 - DNA, 25 bp, Homo sapien
tctcccggagaggaacttcgagggc

SEQ ID NO: 1758612 - DNA, 25 bp, Homo sapien
tctccttgcaccgtgtctgggaggg

SEQ ID NO: 1758613 - DNA, 25 bp, Homo sapien
gaagcccaaactcctcgggctgaga

SEQ ID NO: 1758614 - DNA, 25 bp, Homo sapien
gcccacagtcaatgcggagtagagt

SEQ ID NO: 1758615 - DNA, 25 bp, Homo sapien
ggatgcgggtgcctctagaacaaga

SEQ ID NO: 1758616 - DNA, 25 bp, Homo sapien
tctttaggctggttctcggcgggaa

SEQ ID NO: 1758617 - DNA, 25 bp, Homo sapien
tgcagccttctacgtgcaacaaggg

SEQ ID NO: 1758618 - DNA, 25 bp, Homo sapien
ctgcaaacaccagcaccggcagtct

SEQ ID NO: 1758619 - DNA, 25 bp, Homo sapien
cagcaccggcagtctctgctcttgt

SEQ ID NO: 1758620 - DNA, 25 bp, Homo sapien
cggcagtctctgctcttgtactcac

SEQ ID NO: 1758621 - DNA, 25 bp, Homo sapien
caccggcagtctctgctcttgtact

SEQ ID NO: 1758622 - DNA, 25 bp, Homo sapien
gatattgaatgaatattgcacaaaa

SEQ ID NO: 1758623 - DNA, 25 bp, Homo sapien
atattgcacaaaaccttgcctcgac

SEQ ID NO: 1758624 - DNA, 25 bp, Homo sapien
gcacaaaaccttgcctcgacggtaa

SEQ ID NO: 1758625 - DNA, 25 bp, Homo sapien
accttgcctcgacggtaaattgcca

SEQ ID NO: 1758626 - DNA, 25 bp, Homo sapien
gtctgacaagctgtttgcgaatgga

SEQ ID NO: 1758627 - DNA, 25 bp, Homo sapien
accgaaacaccagctgaacgaagga

SEQ ID NO: 1758628 - DNA, 25 bp, Homo sapien
agttccagtctgacaagctgtttgc

SEQ ID NO: 1758629 - DNA, 25 bp, Homo sapien
tttcctttgattgtctggcaccgaa

SEQ ID NO: 1758630 - DNA, 25 bp, Homo sapien
tgcattgaaactttgaagaacttcc

SEQ ID NO: 1758631 - DNA, 25 bp, Homo sapien
tgaaaacttgtgaccagataaatga

SEQ ID NO: 1758632 - DNA, 25 bp, Homo sapien
gaaaatcttgcgcttttccccattg

SEQ ID NO: 1758633 - DNA, 25 bp, Homo sapien
gcaaaacacttcctcgctcatcgtt

SEQ ID NO: 1758634 - DNA, 25 bp, Homo sapien
tcatgggccattcagtacaaagcgt

SEQ ID NO: 1758635 - DNA, 25 bp, Homo sapien
tacacgctggtggagccaaagctct

SEQ ID NO: 1758636 - DNA, 25 bp, Homo sapien
caatagctggtcttacaaaggcacc

SEQ ID NO: 1758637 - DNA, 25 bp, Homo sapien
gaaactactgtgttcccgatggcga

SEQ ID NO: 1758638 - DNA, 25 bp, Homo sapien
taaaacttggatctggcccgaggtg

SEQ ID NO: 1758639 - DNA, 25 bp, Homo sapien
gacggtgcggctcgtaataaaaatg

SEQ ID NO: 1758640 - DNA, 25 bp, Homo sapien
tattaatgaacctccaagcggctcc

SEQ ID NO: 1758641 - DNA, 25 bp, Homo sapien
tccagagtgccagatagattcgcgg

SEQ ID NO: 1758642 - DNA, 25 bp, Homo sapien
atatctccagaagcgctctgacagg

SEQ ID NO: 1758643 - DNA, 25 bp, Homo sapien
cctggcggggtctgacgtcagccat

SEQ ID NO: 1758644 - DNA, 25 bp, Homo sapien
tgtgcctgtcgctgcgggctgggtc

SEQ ID NO: 1758645 - DNA, 25 bp, Homo sapien
cattaccccgtgactttgtgcctgt

SEQ ID NO: 1758646 - DNA, 25 bp, Homo sapien
gattgctgggaaatcttccgaggga

SEQ ID NO: 1758647 - DNA, 25 bp, Homo sapien
ctagattgctgggaaatcttccgag

SEQ ID NO: 1758648 - DNA, 25 bp, Homo sapien
tagattgctgggaaatcttccgagg

SEQ ID NO: 1758649 - DNA, 25 bp, Homo sapien
tgctgggaaatcttccgagggaaga

SEQ ID NO: 1758650 - DNA, 25 bp, Homo sapien
aacactaccgcagtctcagaggcag

SEQ ID NO: 1758651 - DNA, 25 bp, Homo sapien
cgctcagaattcgtccaacagtgga

SEQ ID NO: 1758652 - DNA, 25 bp, Homo sapien
gctcttgcaaaaccgcagctgctgg

SEQ ID NO: 1758653 - DNA, 25 bp, Homo sapien
cagagatggagacacgaaaatggcc

SEQ ID NO: 1758654 - DNA, 25 bp, Homo sapien
gagcggttggtgggcgctgcccgag

SEQ ID NO: 1758655 - DNA, 25 bp, Homo sapien
cggttggtgggcgctgcccgagtcc

SEQ ID NO: 1758656 - DNA, 25 bp, Homo sapien
gttggtgggcgctgcccgagtcccg

SEQ ID NO: 1758657 - DNA, 25 bp, Homo sapien
tggctgtcccggggcggagcggttg

SEQ ID NO: 1758658 - DNA, 25 bp, Homo sapien
ttgttgatccggctggcttgctcat

SEQ ID NO: 1758659 - DNA, 25 bp, Homo sapien
cgctctgcattccggccgcggtgag

SEQ ID NO: 1758660 - DNA, 25 bp, Homo sapien
tggagattccaacagcgagggccag

SEQ ID NO: 1758661 - DNA, 25 bp, Homo sapien
tccggccgcggtgagggctccttct

SEQ ID NO: 1758662 - DNA, 25 bp, Homo sapien
cctggagattccaacagcgagggcc

SEQ ID NO: 1758663 - DNA, 25 bp, Homo sapien
cgggaatgcgggcaacaaaaatcga

SEQ ID NO: 1758664 - DNA, 25 bp, Homo sapien
gcaacaaaaatcgaggtcgctttac

SEQ ID NO: 1758665 - DNA, 25 bp, Homo sapien
cgggcaacaaaaatcgaggtcgctt

SEQ ID NO: 1758666 - DNA, 25 bp, Homo sapien
aatgcgggcaacaaaaatcgaggtc

SEQ ID NO: 1758667 - DNA, 25 bp, Homo sapien
tccaggggtgtaggcgagggcctgt

SEQ ID NO: 1758668 - DNA, 25 bp, Homo sapien
tacttccaggggtgtaggcgagggc

SEQ ID NO: 1758669 - DNA, 25 bp, Homo sapien
cttccaggggtgtaggcgagggcct

SEQ ID NO: 1758670 - DNA, 25 bp, Homo sapien
caggggtgtaggcgagggcctgtcc

SEQ ID NO: 1758671 - DNA, 25 bp, Homo sapien
ccctccctcgcctctgaggcctcac

SEQ ID NO: 1758672 - DNA, 25 bp, Homo sapien
ggcagattagaaacaggcaaccggg

SEQ ID NO: 1758673 - DNA, 25 bp, Homo sapien
gggcagattagaaacaggcaaccgg

SEQ ID NO: 1758674 - DNA, 25 bp, Homo sapien
ccggggcagattagaaacaggcaac

SEQ ID NO: 1758675 - DNA, 25 bp, Homo sapien
ctcccggggcagattagaaacaggc

SEQ ID NO: 1758676 - DNA, 25 bp, Homo sapien
catctctggagaacccgatgagggt

SEQ ID NO: 1758677 - DNA, 25 bp, Homo sapien
aggaggcccatgacaacatctctgg

SEQ ID NO: 1758678 - DNA, 25 bp, Homo sapien
ccagtgcgagtcctgcctctgagca

SEQ ID NO: 1758679 - DNA, 25 bp, Homo sapien
cgagcttccggactgttgccctcta

SEQ ID NO: 1758680 - DNA, 25 bp, Homo sapien
tgagtgagtgggaggagcagtggtg

SEQ ID NO: 1758681 - DNA, 25 bp, Homo sapien
ttgaagatgccaagatgagtgagtg

SEQ ID NO: 1758682 - DNA, 25 bp, Homo sapien
tgttgaagatgccaagatgagtgag

SEQ ID NO: 1758683 - DNA, 25 bp, Homo sapien
gagcagtggtggggtctctttttcc

SEQ ID NO: 1758684 - DNA, 25 bp, Homo sapien
atcctctgcttaacacgcgccctct

SEQ ID NO: 1758685 - DNA, 25 bp, Homo sapien
ttccatatcttacaaccatcctctg

SEQ ID NO: 1758686 - DNA, 25 bp, Homo sapien
cagggtccacgtttggggcccagca

SEQ ID NO: 1758687 - DNA, 25 bp, Homo sapien
tttggggcccagcagtactgtcacc

SEQ ID NO: 1758688 - DNA, 25 bp, Homo sapien
cgatgggattgaggtgggaaggggc

SEQ ID NO: 1758689 - DNA, 25 bp, Homo sapien
atgggattgaggtgggaaggggcgg

SEQ ID NO: 1758690 - DNA, 25 bp, Homo sapien
ctacgatgggattgaggtgggaagg

SEQ ID NO: 1758691 - DNA, 25 bp, Homo sapien
tacgatgggattgaggtgggaaggg

SEQ ID NO: 1758692 - DNA, 25 bp, Homo sapien
tcaggcctccctgaaattcgacagc

SEQ ID NO: 1758693 - DNA, 25 bp, Homo sapien
aggcctccagtttgggccccagcgg

SEQ ID NO: 1758694 - DNA, 25 bp, Homo sapien
ctatccgaaggcctccagtttgggc

SEQ ID NO: 1758695 - DNA, 25 bp, Homo sapien
cctgaaattcgacagctgctgccga

SEQ ID NO: 1758696 - DNA, 25 bp, Homo sapien
cggatgctccgtttgaaaaaacctg

SEQ ID NO: 1758697 - DNA, 25 bp, Homo sapien
cgcaggcgtagaccccgtagtgctt

SEQ ID NO: 1758698 - DNA, 25 bp, Homo sapien
tttccagatttgcagacataggtcc

SEQ ID NO: 1758699 - DNA, 25 bp, Homo sapien
tagtgcttccccgagctgcggtcgc

SEQ ID NO: 1758700 - DNA, 25 bp, Homo sapien
tccaaacacttcttcagccgacacg

SEQ ID NO: 1758701 - DNA, 25 bp, Homo sapien
tctttgttcatgttgacttccaaac

SEQ ID NO: 1758702 - DNA, 25 bp, Homo sapien
cactggtttctgtgcgtcttgtcca

SEQ ID NO: 1758703 - DNA, 25 bp, Homo sapien
tgtgcgtcttgtccaccggacagcc

SEQ ID NO: 1758704 - DNA, 25 bp, Homo sapien
gaaattccgcgttttcgcgtctctg

SEQ ID NO: 1758705 - DNA, 25 bp, Homo sapien
tcacatcggcccaatggccgtactg

SEQ ID NO: 1758706 - DNA, 25 bp, Homo sapien
catcttggagaatttgcacacgggc

SEQ ID NO: 1758707 - DNA, 25 bp, Homo sapien
caatggccgtactgattttggcatc

SEQ ID NO: 1758708 - DNA, 25 bp, Homo sapien
acttgcttgcggatggtggacgtcc

SEQ ID NO: 1758709 - DNA, 25 bp, Homo sapien
ctggagtggtggacaccgcggccag

SEQ ID NO: 1758710 - DNA, 25 bp, Homo sapien
tcctccttgtgtccacggaagtaga

SEQ ID NO: 1758711 - DNA, 25 bp, Homo sapien
ccagctgcgtgaccgcggtgaagaa

SEQ ID NO: 1758712 - DNA, 25 bp, Homo sapien
ttgggcgtgggctgagccaggctca

SEQ ID NO: 1758713 - DNA, 25 bp, Homo sapien
cttgggcgtgggctgagccaggctc

SEQ ID NO: 1758714 - DNA, 25 bp, Homo sapien
tgggcgtgggctgagccaggctcac

SEQ ID NO: 1758715 - DNA, 25 bp, Homo sapien
ctcagaagaactgggtgcgtccctc

SEQ ID NO: 1758716 - DNA, 25 bp, Homo sapien
tccattcgctggcacgagtctcttt

SEQ ID NO: 1758717 - DNA, 25 bp, Homo sapien
aactgggtgcgtccctctccattcg

SEQ ID NO: 1758718 - DNA, 25 bp, Homo sapien
tggcacgagtctctttgggcccagc

SEQ ID NO: 1758719 - DNA, 25 bp, Homo sapien
tggcacactcttagcccacttgatg

SEQ ID NO: 1758720 - DNA, 25 bp, Homo sapien
tgctcatgaagagaagtctggcagc

SEQ ID NO: 1758721 - DNA, 25 bp, Homo sapien
tcttgcaaagacagcgtggagaagg

SEQ ID NO: 1758722 - DNA, 25 bp, Homo sapien
tggcagctgattcacacaccgactc

SEQ ID NO: 1758723 - DNA, 25 bp, Homo sapien
tgtgaatgcactggtaacagccaat

SEQ ID NO: 1758724 - DNA, 25 bp, Homo sapien
taattctggccatatttgaaagggc

SEQ ID NO: 1758725 - DNA, 25 bp, Homo sapien
cattgcccgatctttccgtaggaaa

SEQ ID NO: 1758726 - DNA, 25 bp, Homo sapien
gaaatgcttttagcacattgcccga

SEQ ID NO: 1758727 - DNA, 25 bp, Homo sapien
gctcctctagagagcgaggctttat

SEQ ID NO: 1758728 - DNA, 25 bp, Homo sapien
gctgctattagcagggttgaggatt

SEQ ID NO: 1758729 - DNA, 25 bp, Homo sapien
ttgaggattcctcagacgcttgcag

SEQ ID NO: 1758730 - DNA, 25 bp, Homo sapien
tctagagagcgaggctttatgaaat

SEQ ID NO: 1758731 - DNA, 25 bp, Homo sapien
cagatacagccagtagagtgttagc

SEQ ID NO: 1758732 - DNA, 25 bp, Homo sapien
tacagccagtagagtgttagcatca

SEQ ID NO: 1758733 - DNA, 25 bp, Homo sapien
ggaatggcccattgtgctattccta

SEQ ID NO: 1758734 - DNA, 25 bp, Homo sapien
gcatcaaccggaatggcccattgtg

SEQ ID NO: 1758735 - DNA, 25 bp, Homo sapien
gaatctgtgttgtcaccgttcatgc

SEQ ID NO: 1758736 - DNA, 25 bp, Homo sapien
aagtgacgatgcattttagacaggc

SEQ ID NO: 1758737 - DNA, 25 bp, Homo sapien
taaccggagttgtctaaatcgagcc

SEQ ID NO: 1758738 - DNA, 25 bp, Homo sapien
gcaaattcagtagcatctaaccgga

SEQ ID NO: 1758739 - DNA, 25 bp, Homo sapien
tcagttcagaaccactatgtgtagg

SEQ ID NO: 1758740 - DNA, 25 bp, Homo sapien
gttagctgagcctcatcttgaaggg

SEQ ID NO: 1758741 - DNA, 25 bp, Homo sapien
gatgtagctgttgagcgttagctga

SEQ ID NO: 1758742 - DNA, 25 bp, Homo sapien
tgcaatggcggcagcattccggaaa

SEQ ID NO: 1758743 - DNA, 25 bp, Homo sapien
taattggcacattgccgatggtttt

SEQ ID NO: 1758744 - DNA, 25 bp, Homo sapien
tatcactggatttgtacatatctga

SEQ ID NO: 1758745 - DNA, 25 bp, Homo sapien
aaacacttcttctatagttgatggg

SEQ ID NO: 1758746 - DNA, 25 bp, Homo sapien
taatagaacgtaaagctggcaaaag

SEQ ID NO: 1758747 - DNA, 25 bp, Homo sapien
cataacgtagttttgaaggccgcag

SEQ ID NO: 1758748 - DNA, 25 bp, Homo sapien
tcagcactatgttaacgggacagca

SEQ ID NO: 1758749 - DNA, 25 bp, Homo sapien
tatagagtcataccaaaggagcagc

SEQ ID NO: 1758750 - DNA, 25 bp, Homo sapien
tagcaatggatcagtcaagaaccct

SEQ ID NO: 1758751 - DNA, 25 bp, Homo sapien
aaattatcatgcctataatcacaga

SEQ ID NO: 1758752 - DNA, 25 bp, Homo sapien
gggcagatcacttgagtccaggagt

SEQ ID NO: 1758753 - DNA, 25 bp, Homo sapien
gcagatcacttgagtccaggagttc

SEQ ID NO: 1758754 - DNA, 25 bp, Homo sapien
ctttgggaggctgagatgggcagat

SEQ ID NO: 1758755 - DNA, 25 bp, Homo sapien
cagagggtgcattgcatcaggttca

SEQ ID NO: 1758756 - DNA, 25 bp, Homo sapien
gagccgcagagggtgcattgcatca

SEQ ID NO: 1758757 - DNA, 25 bp, Homo sapien
gggtgcattgcatcaggttcagctg

SEQ ID NO: 1758758 - DNA, 25 bp, Homo sapien
gcattgcatcaggttcagctgccat

SEQ ID NO: 1758759 - DNA, 25 bp, Homo sapien
atgtgggcccttcgtactaccccat

SEQ ID NO: 1758760 - DNA, 25 bp, Homo sapien
agctgcaaaatgtgggcccttcgta

SEQ ID NO: 1758761 - DNA, 25 bp, Homo sapien
tctgagtattgagttactggaacaa

SEQ ID NO: 1758762 - DNA, 25 bp, Homo sapien
actaccccatcatctgagtattgag

SEQ ID NO: 1758763 - DNA, 25 bp, Homo sapien
aaaaattcaaactgtccagatcttg

SEQ ID NO: 1758764 - DNA, 25 bp, Homo sapien
tccagatcttgtcttgcaggcctgc

SEQ ID NO: 1758765 - DNA, 25 bp, Homo sapien
ctgtccagatcttgtcttgcaggcc

SEQ ID NO: 1758766 - DNA, 25 bp, Homo sapien
ccagatcttgtcttgcaggcctgct

SEQ ID NO: 1758767 - DNA, 25 bp, Homo sapien
ctgcggggaagcagttggcaagagc

SEQ ID NO: 1758768 - DNA, 25 bp, Homo sapien
tgcggggaagcagttggcaagagca

SEQ ID NO: 1758769 - DNA, 25 bp, Homo sapien
catttcagcaccaaacagaagcttg

SEQ ID NO: 1758770 - DNA, 25 bp, Homo sapien
cttgcctggtgcactttgtcctcag

SEQ ID NO: 1758771 - DNA, 25 bp, Homo sapien
gaagcttgcctggtgcactttgtcc

SEQ ID NO: 1758772 - DNA, 25 bp, Homo sapien
atttcagcaccaaacagaagcttgc

SEQ ID NO: 1758773 - DNA, 25 bp, Homo sapien
aataccagttcactctcagaccaca

SEQ ID NO: 1758774 - DNA, 25 bp, Homo sapien
tgaataccagttcactctcagacca

SEQ ID NO: 1758775 - DNA, 25 bp, Homo sapien
ctgaggtaagtgaataccagttcac

SEQ ID NO: 1758776 - DNA, 25 bp, Homo sapien
ggtaagtgaataccagttcactctc

SEQ ID NO: 1758777 - DNA, 25 bp, Homo sapien
ttgagagttgacagtctgacttaaa

SEQ ID NO: 1758778 - DNA, 25 bp, Homo sapien
ttttttcaagagcactttgagagtt

SEQ ID NO: 1758779 - DNA, 25 bp, Homo sapien
tttcaagagcactttgagagttgac

SEQ ID NO: 1758780 - DNA, 25 bp, Homo sapien
ctttgagagttgacagtctgactta

SEQ ID NO: 1758781 - DNA, 25 bp, Homo sapien
gcctctactccctcgagaatggagc

SEQ ID NO: 1758782 - DNA, 25 bp, Homo sapien
taatcatttggcaagcgcttcttca

SEQ ID NO: 1758783 - DNA, 25 bp, Homo sapien
tttggcaagcgcttcttcatggcct

SEQ ID NO: 1758784 - DNA, 25 bp, Homo sapien
tccctcgagaatggagccgccattt

SEQ ID NO: 1758785 - DNA, 25 bp, Homo sapien
tgatatcaccactgtttaaagggaa

SEQ ID NO: 1758786 - DNA, 25 bp, Homo sapien
tacgacactgcagattacactggaa

SEQ ID NO: 1758787 - DNA, 25 bp, Homo sapien
taaataatccctctcaacaagtgac

SEQ ID NO: 1758788 - DNA, 25 bp, Homo sapien
tccatgtgaagggtattacaagcct

SEQ ID NO: 1758789 - DNA, 25 bp, Homo sapien
tgcaaataagaccaagccagtaact

SEQ ID NO: 1758790 - DNA, 25 bp, Homo sapien
tggaaaccaatggtgtagtgctcct

SEQ ID NO: 1758791 - DNA, 25 bp, Homo sapien
cataagatacatacttgtgtgcaga

SEQ ID NO: 1758792 - DNA, 25 bp, Homo sapien
agttactggcttggtcttatttgca

SEQ ID NO: 1758793 - DNA, 25 bp, Homo sapien
ggagcactacaccattggtttccaa

SEQ ID NO: 1758794 - DNA, 25 bp, Homo sapien
tattccagtgtaatctgcagtgtcg

SEQ ID NO: 1758795 - DNA, 25 bp, Homo sapien
gcttgtaatacccttcacatggaag

SEQ ID NO: 1758796 - DNA, 25 bp, Homo sapien
tgaccccatttatgtgtaggagcac

SEQ ID NO: 1758797 - DNA, 25 bp, Homo sapien
taaatatggggctaaggtgactacc

SEQ ID NO: 1758798 - DNA, 25 bp, Homo sapien
taaattgcactctaaatatggggct

SEQ ID NO: 1758799 - DNA, 25 bp, Homo sapien
gtttaaattgcactctaaatatggg

SEQ ID NO: 1758800 - DNA, 25 bp, Homo sapien
tgcactctaaatatggggctaaggt

SEQ ID NO: 1758801 - DNA, 25 bp, Homo sapien
cactctaaatatggggctaaggtga

SEQ ID NO: 1758802 - DNA, 25 bp, Homo sapien
aaatatggggctaaggtgactacct

SEQ ID NO: 1758803 - DNA, 25 bp, Homo sapien
gccccatatttagagtgcaatttaa

SEQ ID NO: 1758804 - DNA, 25 bp, Homo sapien
accttagccccatatttagagtgca

SEQ ID NO: 1758805 - DNA, 25 bp, Homo sapien
tcaccttagccccatatttagagtg

SEQ ID NO: 1758806 - DNA, 25 bp, Homo sapien
gtagtcaccttagccccatatttag

SEQ ID NO: 1758807 - DNA, 25 bp, Homo sapien
tagccccatatttagagtgcaattt

SEQ ID NO: 1758808 - DNA, 25 bp, Homo sapien
aggtagtcaccttagccccatattt

SEQ ID NO: 1758809 - DNA, 25 bp, Homo sapien
taaatatggggctaaggtgactacc

SEQ ID NO: 1758810 - DNA, 25 bp, Homo sapien
actgaaaagtttaaattgcactcta

SEQ ID NO: 1758811 - DNA, 25 bp, Homo sapien
taaattgcactctaaatatggggct

SEQ ID NO: 1758812 - DNA, 25 bp, Homo sapien
gtttaaattgcactctaaatatggg

SEQ ID NO: 1758813 - DNA, 25 bp, Homo sapien
tgcactctaaatatggggctaaggt

SEQ ID NO: 1758814 - DNA, 25 bp, Homo sapien
aaatatggggctaaggtgactacct

SEQ ID NO: 1758815 - DNA, 25 bp, Homo sapien
atgtgggcacagtgatcacagacag

SEQ ID NO: 1758816 - DNA, 25 bp, Homo sapien
aatagatcagccgatgtgggcacag

SEQ ID NO: 1758817 - DNA, 25 bp, Homo sapien
taacaatagatcagccgatgtgggc

SEQ ID NO: 1758818 - DNA, 25 bp, Homo sapien
tgtgggaaataacaatagatcagcc

SEQ ID NO: 1758819 - DNA, 25 bp, Homo sapien
tagatcagccgatgtgggcacagtg

SEQ ID NO: 1758820 - DNA, 25 bp, Homo sapien
ggaaataacaatagatcagccgatg

SEQ ID NO: 1758821 - DNA, 25 bp, Homo sapien
tgcccacatcggctgatctattgtt

SEQ ID NO: 1758822 - DNA, 25 bp, Homo sapien
cactgtgcccacatcggctgatcta

SEQ ID NO: 1758823 - DNA, 25 bp, Homo sapien
ctgtctgtgatcactgtgcccacat

SEQ ID NO: 1758824 - DNA, 25 bp, Homo sapien
gcccacatcggctgatctattgtta

SEQ ID NO: 1758825 - DNA, 25 bp, Homo sapien
catcggctgatctattgttatttcc

SEQ ID NO: 1758826 - DNA, 25 bp, Homo sapien
ggctgatctattgttatttcccaca

SEQ ID NO: 1758827 - DNA, 25 bp, Homo sapien
tcaactcagttatgaagagcagaag

SEQ ID NO: 1758828 - DNA, 25 bp, Homo sapien
ccaggatgtggcaagctgtgaaaac

SEQ ID NO: 1758829 - DNA, 25 bp, Homo sapien
ctaccaggatgtggcaagctgtgaa

SEQ ID NO: 1758830 - DNA, 25 bp, Homo sapien
caccagctctatcaatggtagttct

SEQ ID NO: 1758831 - DNA, 25 bp, Homo sapien
gaaaaactactcaactcagttatga

SEQ ID NO: 1758832 - DNA, 25 bp, Homo sapien
attgttaccatgctccaccagctct

SEQ ID NO: 1758833 - DNA, 25 bp, Homo sapien
ttcacagcttgccacatcctggtag

SEQ ID NO: 1758834 - DNA, 25 bp, Homo sapien
gttttcacagcttgccacatcctgg

SEQ ID NO: 1758835 - DNA, 25 bp, Homo sapien
cataactgagttgagtagtttttct

SEQ ID NO: 1758836 - DNA, 25 bp, Homo sapien
agagctggtggagcatggtaacaat

SEQ ID NO: 1758837 - DNA, 25 bp, Homo sapien
agacttctgctcttcataactgagt

SEQ ID NO: 1758838 - DNA, 25 bp, Homo sapien
gaactaccattgatagagctggtgg

SEQ ID NO: 1758839 - DNA, 25 bp, Homo sapien
gaagacggcacgaagtaaaagctgg

SEQ ID NO: 1758840 - DNA, 25 bp, Homo sapien
ccatggacatgagaagacggcacga

SEQ ID NO: 1758841 - DNA, 25 bp, Homo sapien
cactggctcaagtagctacgcataa

SEQ ID NO: 1758842 - DNA, 25 bp, Homo sapien
tagttatctaaacatccatggctga

SEQ ID NO: 1758843 - DNA, 25 bp, Homo sapien
gaccactgagataagctgacaaact

SEQ ID NO: 1758844 - DNA, 25 bp, Homo sapien
tggagagaaccctagttatctaaac

SEQ ID NO: 1758845 - DNA, 25 bp, Homo sapien
tgtcagcttatctcagtggtcagaa

SEQ ID NO: 1758846 - DNA, 25 bp, Homo sapien
tcgtgccgtcttctcatgtccatgg

SEQ ID NO: 1758847 - DNA, 25 bp, Homo sapien
gtttagataactagggttctctcca

SEQ ID NO: 1758848 - DNA, 25 bp, Homo sapien
ggcagtttacaagttcgccccagct

SEQ ID NO: 1758849 - DNA, 25 bp, Homo sapien
cagccatggatgtttagataactag

SEQ ID NO: 1758850 - DNA, 25 bp, Homo sapien
tatgcgtagctacttgagccagtga

SEQ ID NO: 1758851 - DNA, 25 bp, Homo sapien
cttctgtagtttgtaagcatgatga

SEQ ID NO: 1758852 - DNA, 25 bp, Homo sapien
aatccttctgtagtttgtaagcatg

SEQ ID NO: 1758853 - DNA, 25 bp, Homo sapien
ctcatgtgtgtgacatgcctccttc

SEQ ID NO: 1758854 - DNA, 25 bp, Homo sapien
tcatgtgtgtgacatgcctccttca

SEQ ID NO: 1758855 - DNA, 25 bp, Homo sapien
tgtgtgtgacatgcctccttcaaac

SEQ ID NO: 1758856 - DNA, 25 bp, Homo sapien
gtgacatgcctccttcaaaccttgt

SEQ ID NO: 1758857 - DNA, 25 bp, Homo sapien
gtttgaaggaggcatgtcacacaca

SEQ ID NO: 1758858 - DNA, 25 bp, Homo sapien
gaaggaggcatgtcacacacatgag

SEQ ID NO: 1758859 - DNA, 25 bp, Homo sapien
aaggtttgaaggaggcatgtcacac

SEQ ID NO: 1758860 - DNA, 25 bp, Homo sapien
tgaaggaggcatgtcacacacatga

SEQ ID NO: 1758861 - DNA, 25 bp, Homo sapien
catgcttacaaactacagaaggatt

SEQ ID NO: 1758862 - DNA, 25 bp, Homo sapien
tcatcatgcttacaaactacagaag

SEQ ID NO: 1758863 - DNA, 25 bp, Homo sapien
tttcaatgttacatgagcaaactct

SEQ ID NO: 1758864 - DNA, 25 bp, Homo sapien
caactactcagttctgcccttatag

SEQ ID NO: 1758865 - DNA, 25 bp, Homo sapien
cccggcctcatgttttgataataga

SEQ ID NO: 1758866 - DNA, 25 bp, Homo sapien
tctccaagtgccttttgatttccat

SEQ ID NO: 1758867 - DNA, 25 bp, Homo sapien
catgatattttttagggtttgagac

SEQ ID NO: 1758868 - DNA, 25 bp, Homo sapien
aaagggcaagatagtaaacatactg

SEQ ID NO: 1758869 - DNA, 25 bp, Homo sapien
atggaaatcaaaaggcacttggaga

SEQ ID NO: 1758870 - DNA, 25 bp, Homo sapien
gtctcaaaccctaaaaaatatcatg

SEQ ID NO: 1758871 - DNA, 25 bp, Homo sapien
gcagaactgagtagttgaaacagta

SEQ ID NO: 1758872 - DNA, 25 bp, Homo sapien
agagtttgctcatgtaacattgaaa

SEQ ID NO: 1758873 - DNA, 25 bp, Homo sapien
tctattatcaaaacatgaggccggg

SEQ ID NO: 1758874 - DNA, 25 bp, Homo sapien
actctataagggcagaactgagtag

SEQ ID NO: 1758875 - DNA, 25 bp, Homo sapien
agggatggcaggcaccacgtccagc

SEQ ID NO: 1758876 - DNA, 25 bp, Homo sapien
ggatggcaggcaccacgtccagctt

SEQ ID NO: 1758877 - DNA, 25 bp, Homo sapien
aagggatggcaggcaccacgtccag

SEQ ID NO: 1758878 - DNA, 25 bp, Homo sapien
gggatggcaggcaccacgtccagct

SEQ ID NO: 1758879 - DNA, 25 bp, Homo sapien
gctggacgtggtgcctgccatccct

SEQ ID NO: 1758880 - DNA, 25 bp, Homo sapien
ctggacgtggtgcctgccatccctt

SEQ ID NO: 1758881 - DNA, 25 bp, Homo sapien
aagctggacgtggtgcctgccatcc

SEQ ID NO: 1758882 - DNA, 25 bp, Homo sapien
agctggacgtggtgcctgccatccc

SEQ ID NO: 1758883 - DNA, 25 bp, Homo sapien
agggatggcaggcaccacgtccagc

SEQ ID NO: 1758884 - DNA, 25 bp, Homo sapien
gatggcaggcaccacgtccagcttc

SEQ ID NO: 1758885 - DNA, 25 bp, Homo sapien
ggatggcaggcaccacgtccagctt

SEQ ID NO: 1758886 - DNA, 25 bp, Homo sapien
gaagggatggcaggcaccacgtcca

SEQ ID NO: 1758887 - DNA, 25 bp, Homo sapien
gggatggcaggcaccacgtccagct

SEQ ID NO: 1758888 - DNA, 25 bp, Homo sapien
ggcaccacgtccagcttcctgacag

SEQ ID NO: 1758889 - DNA, 25 bp, Homo sapien
gctggacgtggtgcctgccatccct

SEQ ID NO: 1758890 - DNA, 25 bp, Homo sapien
agctggacgtggtgcctgccatccc

SEQ ID NO: 1758891 - DNA, 25 bp, Homo sapien
gaagctggacgtggtgcctgccatc

SEQ ID NO: 1758892 - DNA, 25 bp, Homo sapien
aagctggacgtggtgcctgccatcc

SEQ ID NO: 1758893 - DNA, 25 bp, Homo sapien
ctgtcaggaagctggacgtggtgcc

SEQ ID NO: 1758894 - DNA, 25 bp, Homo sapien
tcaggaagctggacgtggtgcctgc

SEQ ID NO: 1758895 - DNA, 25 bp, Homo sapien
agcccctgacgagaaacaggccaag

SEQ ID NO: 1758896 - DNA, 25 bp, Homo sapien
gcccctgacgagaaacaggccaagg

SEQ ID NO: 1758897 - DNA, 25 bp, Homo sapien
gaagcccctgacgagaaacaggcca

SEQ ID NO: 1758898 - DNA, 25 bp, Homo sapien
aagcccctgacgagaaacaggccaa

SEQ ID NO: 1758899 - DNA, 25 bp, Homo sapien
cttggcctgtttctcgtcaggggct

SEQ ID NO: 1758900 - DNA, 25 bp, Homo sapien
ccttggcctgtttctcgtcaggggc

SEQ ID NO: 1758901 - DNA, 25 bp, Homo sapien
tggcctgtttctcgtcaggggcttc

SEQ ID NO: 1758902 - DNA, 25 bp, Homo sapien
ttggcctgtttctcgtcaggggctt

SEQ ID NO: 1758903 - DNA, 25 bp, Homo sapien
gctaaaagcaaaggccacagggaag

SEQ ID NO: 1758904 - DNA, 25 bp, Homo sapien
ccacagggaagggttccctggatag

SEQ ID NO: 1758905 - DNA, 25 bp, Homo sapien
gatgtatgaggaagacaaggatttc

SEQ ID NO: 1758906 - DNA, 25 bp, Homo sapien
gaaacaggccaaggagatgtatgag

SEQ ID NO: 1758907 - DNA, 25 bp, Homo sapien
gaaaaaacttgaggagctaaaagca

SEQ ID NO: 1758908 - DNA, 25 bp, Homo sapien
gaagcccctgacgagaaacaggcca

SEQ ID NO: 1758909 - DNA, 25 bp, Homo sapien
tgcttttagctcctcaagttttttc

SEQ ID NO: 1758910 - DNA, 25 bp, Homo sapien
ctatccagggaacccttccctgtgg

SEQ ID NO: 1758911 - DNA, 25 bp, Homo sapien
gaaatccttgtcttcctcatacatc

SEQ ID NO: 1758912 - DNA, 25 bp, Homo sapien
tccctgtggcctttgcttttagctc

SEQ ID NO: 1758913 - DNA, 25 bp, Homo sapien
tctccttggcctgtttctcgtcagg

SEQ ID NO: 1758914 - DNA, 25 bp, Homo sapien
tcctcatacatctccttggcctgtt

SEQ ID NO: 1758915 - DNA, 25 bp, Homo sapien
atcctgaatgcaattgctcgtctga

SEQ ID NO: 1758916 - DNA, 25 bp, Homo sapien
ctatcctgaatgcaattgctcgtct

SEQ ID NO: 1758917 - DNA, 25 bp, Homo sapien
gaatgcaattgctcgtctgatctca

SEQ ID NO: 1758918 - DNA, 25 bp, Homo sapien
tatcctgaatgcaattgctcgtctg

SEQ ID NO: 1758919 - DNA, 25 bp, Homo sapien
tctatcctgaatgcaattgctcgtc

SEQ ID NO: 1758920 - DNA, 25 bp, Homo sapien
tcctgaatgcaattgctcgtctgat

SEQ ID NO: 1758921 - DNA, 25 bp, Homo sapien
tgagatcagacgagcaattgcattc

SEQ ID NO: 1758922 - DNA, 25 bp, Homo sapien
agacgagcaattgcattcaggatag

SEQ ID NO: 1758923 - DNA, 25 bp, Homo sapien
tcagacgagcaattgcattcaggat

SEQ ID NO: 1758924 - DNA, 25 bp, Homo sapien
cagacgagcaattgcattcaggata

SEQ ID NO: 1758925 - DNA, 25 bp, Homo sapien
gacgagcaattgcattcaggataga

SEQ ID NO: 1758926 - DNA, 25 bp, Homo sapien
atcagacgagcaattgcattcagga

SEQ ID NO: 1758927 - DNA, 25 bp, Homo sapien
aaatgtcattccctgatcagctgct

SEQ ID NO: 1758928 - DNA, 25 bp, Homo sapien
gatgtgttctcgaaagatctacccc

SEQ ID NO: 1758929 - DNA, 25 bp, Homo sapien
tgtcattccctgatcagctgctgga

SEQ ID NO: 1758930 - DNA, 25 bp, Homo sapien
acgccctcctcttcgagcaccttct

SEQ ID NO: 1758931 - DNA, 25 bp, Homo sapien
aagggatgtgttctcgaaagatcta

SEQ ID NO: 1758932 - DNA, 25 bp, Homo sapien
tgttctcgaaagatctacccctttc

SEQ ID NO: 1758933 - DNA, 25 bp, Homo sapien
gggtagatctttcgagaacacatcc

SEQ ID NO: 1758934 - DNA, 25 bp, Homo sapien
ggcgtgggttgagcgccgcttgccc

SEQ ID NO: 1758935 - DNA, 25 bp, Homo sapien
tagatctttcgagaacacatccctt

SEQ ID NO: 1758936 - DNA, 25 bp, Homo sapien
cagcagctgatcagggaatgacatt

SEQ ID NO: 1758937 - DNA, 25 bp, Homo sapien
tccagcagctgatcagggaatgaca

SEQ ID NO: 1758938 - DNA, 25 bp, Homo sapien
gagaaggtgctcgaagaggagggcg

SEQ ID NO: 1758939 - DNA, 25 bp, Homo sapien
ggccgaggctggcgcagagagacag

SEQ ID NO: 1758940 - DNA, 25 bp, Homo sapien
ggtcctcgcctcctcggccgcagcc

SEQ ID NO: 1758941 - DNA, 25 bp, Homo sapien
gctctgggcgtctgggtcctcgcct

SEQ ID NO: 1758942 - DNA, 25 bp, Homo sapien
cccgcggcggcgcgctcgcggtgca

SEQ ID NO: 1758943 - DNA, 25 bp, Homo sapien
ctgccctgagtggtcgccaaggaat

SEQ ID NO: 1758944 - DNA, 25 bp, Homo sapien
gccctgagtggtcgccaaggaatca

SEQ ID NO: 1758945 - DNA, 25 bp, Homo sapien
ctgagtggtcgccaaggaatcagac

SEQ ID NO: 1758946 - DNA, 25 bp, Homo sapien
gctgtccctcctagccgcttcccca

SEQ ID NO: 1758947 - DNA, 25 bp, Homo sapien
acagtggcccgtgactgtcatctca

SEQ ID NO: 1758948 - DNA, 25 bp, Homo sapien
agtggcccgtgactgtcatctcagc

SEQ ID NO: 1758949 - DNA, 25 bp, Homo sapien
gcacagtggcccgtgactgtcatct

SEQ ID NO: 1758950 - DNA, 25 bp, Homo sapien
tggcccgtgactgtcatctcagcag

SEQ ID NO: 1758951 - DNA, 25 bp, Homo sapien
catggctgaaatcacacactgtgca

SEQ ID NO: 1758952 - DNA, 25 bp, Homo sapien
catctatcaaaggaatgagcctgcc

SEQ ID NO: 1758953 - DNA, 25 bp, Homo sapien
tgtgcatgatatcaggtgctcccct

SEQ ID NO: 1758954 - DNA, 25 bp, Homo sapien
cctgacttgagactagaattgcaca

SEQ ID NO: 1758955 - DNA, 25 bp, Homo sapien
ggtatggctaggtggcttactcctg

SEQ ID NO: 1758956 - DNA, 25 bp, Homo sapien
ttttacaaggtccaggtgatctgta

SEQ ID NO: 1758957 - DNA, 25 bp, Homo sapien
gaaaaaacattgctctggtatggct

SEQ ID NO: 1758958 - DNA, 25 bp, Homo sapien
cagcagcattggcattacctggaac

SEQ ID NO: 1758959 - DNA, 25 bp, Homo sapien
tgttcctcttcttgtagccacctcc

SEQ ID NO: 1758960 - DNA, 25 bp, Homo sapien
tcaatactcttgttcctcttcttgt

SEQ ID NO: 1758961 - DNA, 25 bp, Homo sapien
tcttgttcctcttcttgtagccacc

SEQ ID NO: 1758962 - DNA, 25 bp, Homo sapien
actcttgttcctcttcttgtagcca

SEQ ID NO: 1758963 - DNA, 25 bp, Homo sapien
tgcgcagagatcatgctaatctctg

SEQ ID NO: 1758964 - DNA, 25 bp, Homo sapien
aaaacatggactacttcacgaattt

SEQ ID NO: 1758965 - DNA, 25 bp, Homo sapien
gtcatccttgcgcagagatcatgct

SEQ ID NO: 1758966 - DNA, 25 bp, Homo sapien
aaaaacatggactacttcacgaatt

SEQ ID NO: 1758967 - DNA, 25 bp, Homo sapien
gctccacccgagagaaccaagggat

SEQ ID NO: 1758968 - DNA, 25 bp, Homo sapien
cttgaactccgtacgaggagaggaa

SEQ ID NO: 1758969 - DNA, 25 bp, Homo sapien
gaacgtgacctccagtagccacatg

SEQ ID NO: 1758970 - DNA, 25 bp, Homo sapien
ccagaagagagacggtggcaaagtc

SEQ ID NO: 1758971 - DNA, 25 bp, Homo sapien
ccaagagcgaccaggaggccgccat

SEQ ID NO: 1758972 - DNA, 25 bp, Homo sapien
tccctctcagcgggctctgtgctaa

SEQ ID NO: 1758973 - DNA, 25 bp, Homo sapien
tgctaaggggcgcagggtaaccaag

SEQ ID NO: 1758974 - DNA, 25 bp, Homo sapien
cctctcagcgggctctgtgctaagg

SEQ ID NO: 1758975 - DNA, 25 bp, Homo sapien
ggttcagctctctaaacgtcccgga

SEQ ID NO: 1758976 - DNA, 25 bp, Homo sapien
tagaatcacgagagacatcagggcc

SEQ ID NO: 1758977 - DNA, 25 bp, Homo sapien
agtgctcagggctcattcacagaca

SEQ ID NO: 1758978 - DNA, 25 bp, Homo sapien
cagggagggtaatcccagaggcttc

SEQ ID NO: 1758979 - DNA, 25 bp, Homo sapien
agaaactagtatcacagattgcctc

SEQ ID NO: 1758980 - DNA, 25 bp, Homo sapien
aaacacgaggcagttctattcatat

SEQ ID NO: 1758981 - DNA, 25 bp, Homo sapien
tctgaggagaaaaactaagcagcta

SEQ ID NO: 1758982 - DNA, 25 bp, Homo sapien
aaagccttacattttgccatattct

SEQ ID NO: 1758983 - DNA, 25 bp, Homo sapien
ctaaatagtagacttcaaaagatga

SEQ ID NO: 1758984 - DNA, 25 bp, Homo sapien
aaatcgatttgtaaatcagactctg

SEQ ID NO: 1758985 - DNA, 25 bp, Homo sapien
ctgaatactgaacaaaatttcaact

SEQ ID NO: 1758986 - DNA, 25 bp, Homo sapien
gccacattacactgtactaaatagt

SEQ ID NO: 1758987 - DNA, 25 bp, Homo sapien
taagccatcatcaaggaatgcactg

SEQ ID NO: 1758988 - DNA, 25 bp, Homo sapien
aaatgtttacccaactgctgtgaga

SEQ ID NO: 1758989 - DNA, 25 bp, Homo sapien
taacaaaccataaacagtggccact

SEQ ID NO: 1758990 - DNA, 25 bp, Homo sapien
catgctaaggtcataggcagcccat

SEQ ID NO: 1758991 - DNA, 25 bp, Homo sapien
ctgtgaaatcaggatacctggactg

SEQ ID NO: 1758992 - DNA, 25 bp, Homo sapien
gaaatcaggatacctggactgctgc

SEQ ID NO: 1758993 - DNA, 25 bp, Homo sapien
aatcaggatacctggactgctgcat

SEQ ID NO: 1758994 - DNA, 25 bp, Homo sapien
tgaaatcaggatacctggactgctg

SEQ ID NO: 1758995 - DNA, 25 bp, Homo sapien
gaagttggtacttggcacatgccac

SEQ ID NO: 1758996 - DNA, 25 bp, Homo sapien
cttgcccttcttatcctgatcttgg

SEQ ID NO: 1758997 - DNA, 25 bp, Homo sapien
ttgggctcaacgcattcaagctcag

SEQ ID NO: 1758998 - DNA, 25 bp, Homo sapien
gcttagtctgcctatgatgatgata

SEQ ID NO: 1758999 - DNA, 25 bp, Homo sapien
ctctcggatgtctgaaccgtatagg

SEQ ID NO: 1759000 - DNA, 25 bp, Homo sapien
gctctcggatgtctgaaccgtatag

SEQ ID NO: 1759001 - DNA, 25 bp, Homo sapien
agaggtccatggcaaacggccaaag

SEQ ID NO: 1759002 - DNA, 25 bp, Homo sapien
ttagctcatgagctttgatcagaaa

SEQ ID NO: 1759003 - DNA, 25 bp, Homo sapien
gaaaatcatagtggtccagaggtcc

SEQ ID NO: 1759004 - DNA, 25 bp, Homo sapien
gtaatttctgcaaacactgtatgac

SEQ ID NO: 1759005 - DNA, 25 bp, Homo sapien
ccttgttctgaacgctgttgttgtt

SEQ ID NO: 1759006 - DNA, 25 bp, Homo sapien
ctattgagatacgagcattactctc

SEQ ID NO: 1759007 - DNA, 25 bp, Homo sapien
gccaatctgcgcttcatcaaaagaa

SEQ ID NO: 1759008 - DNA, 25 bp, Homo sapien
gagaaattaaactggccttccaggc

SEQ ID NO: 1759009 - DNA, 25 bp, Homo sapien
agggagtttgtaaagtaggatgatg

SEQ ID NO: 1759010 - DNA, 25 bp, Homo sapien
tgtatcttagggagtttgtaaagta

SEQ ID NO: 1759011 - DNA, 25 bp, Homo sapien
ctgtatcttagggagtttgtaaagt

SEQ ID NO: 1759012 - DNA, 25 bp, Homo sapien
cttagggagtttgtaaagtaggatg

SEQ ID NO: 1759013 - DNA, 25 bp, Homo sapien
atagaaagggatgggtcgttctctc

SEQ ID NO: 1759014 - DNA, 25 bp, Homo sapien
agggatgggtcgttctctcccatcc

SEQ ID NO: 1759015 - DNA, 25 bp, Homo sapien
gaaagggatgggtcgttctctccca

SEQ ID NO: 1759016 - DNA, 25 bp, Homo sapien
aaagggatgggtcgttctctcccat

SEQ ID NO: 1759017 - DNA, 25 bp, Homo sapien
ttgaattttgttacacttagacgag

SEQ ID NO: 1759018 - DNA, 25 bp, Homo sapien
taaccttcatactctgcagcagttc

SEQ ID NO: 1759019 - DNA, 25 bp, Homo sapien
tacacttagacgagtaaccttcata

SEQ ID NO: 1759020 - DNA, 25 bp, Homo sapien
gacgagtaaccttcatactctgcag

SEQ ID NO: 1759021 - DNA, 25 bp, Homo sapien
ggccccttggaggtttgctccttga

SEQ ID NO: 1759022 - DNA, 25 bp, Homo sapien
ctccataaacatacaggccccttgg

SEQ ID NO: 1759023 - DNA, 25 bp, Homo sapien
aacatctccataaacatacaggccc

SEQ ID NO: 1759024 - DNA, 25 bp, Homo sapien
cataaacatacaggccccttggagg

SEQ ID NO: 1759025 - DNA, 25 bp, Homo sapien
catctagcatgaaaccatgaaaatg

SEQ ID NO: 1759026 - DNA, 25 bp, Homo sapien
tgtgcacatctagcatgaaaccatg

SEQ ID NO: 1759027 - DNA, 25 bp, Homo sapien
gcacatctagcatgaaaccatgaaa

SEQ ID NO: 1759028 - DNA, 25 bp, Homo sapien
tttgtgcacatctagcatgaaacca

SEQ ID NO: 1759029 - DNA, 25 bp, Homo sapien
gatttagccatgaatcctggtttcc

SEQ ID NO: 1759030 - DNA, 25 bp, Homo sapien
agctattgggtcatatgatttagcc

SEQ ID NO: 1759031 - DNA, 25 bp, Homo sapien
cttcgctgatttcttcggctatggg

SEQ ID NO: 1759032 - DNA, 25 bp, Homo sapien
cataggagacatgcttcttcgctga

SEQ ID NO: 1759033 - DNA, 25 bp, Homo sapien
ggagagctggctttttcagtaccca

SEQ ID NO: 1759034 - DNA, 25 bp, Homo sapien
tcttttgatcttgtccccgcacttg

SEQ ID NO: 1759035 - DNA, 25 bp, Homo sapien
gctgtagccgggtgccaatgtatac

SEQ ID NO: 1759036 - DNA, 25 bp, Homo sapien
tcattaccaccacgaacaaaagaga

SEQ ID NO: 1759037 - DNA, 25 bp, Homo sapien
atgttgccacaacgacgaccccgtt

SEQ ID NO: 1759038 - DNA, 25 bp, Homo sapien
ctgtttcagaatcatggcatcagca

SEQ ID NO: 1759039 - DNA, 25 bp, Homo sapien
ctgttggatgttgccacaacgacga

SEQ ID NO: 1759040 - DNA, 25 bp, Homo sapien
aagctgtttcagaatcatggcatca

SEQ ID NO: 1759041 - DNA, 25 bp, Homo sapien
ttttttaatacagtactttgagctg

SEQ ID NO: 1759042 - DNA, 25 bp, Homo sapien
tttgagctgctgttttaagaaaagg

SEQ ID NO: 1759043 - DNA, 25 bp, Homo sapien
ttttaatacagtactttgagctgct

SEQ ID NO: 1759044 - DNA, 25 bp, Homo sapien
ttaatacagtactttgagctgctgt

SEQ ID NO: 1759045 - DNA, 25 bp, Homo sapien
actggcagtcacataggcctgcctc

SEQ ID NO: 1759046 - DNA, 25 bp, Homo sapien
ccactggcagtcacataggcctgcc

SEQ ID NO: 1759047 - DNA, 25 bp, Homo sapien
gcagtcacataggcctgcctcagca

SEQ ID NO: 1759048 - DNA, 25 bp, Homo sapien
acccactggcagtcacataggcctg

SEQ ID NO: 1759049 - DNA, 25 bp, Homo sapien
taatatatgtgcttccaaagcaagc

SEQ ID NO: 1759050 - DNA, 25 bp, Homo sapien
aattttaatatatgtgcttccaaag

SEQ ID NO: 1759051 - DNA, 25 bp, Homo sapien
ttttaatatatgtgcttccaaagca

SEQ ID NO: 1759052 - DNA, 25 bp, Homo sapien
ttaatatatgtgcttccaaagcaag

SEQ ID NO: 1759053 - DNA, 25 bp, Homo sapien
ctgagatgtagtttaacaagtatgc

SEQ ID NO: 1759054 - DNA, 25 bp, Homo sapien
tgtagtttaacaagtatgcaccttt

SEQ ID NO: 1759055 - DNA, 25 bp, Homo sapien
ttttatggatgtataaggctctgag

SEQ ID NO: 1759056 - DNA, 25 bp, Homo sapien
cattaatgacaatgagagatgtaaa

SEQ ID NO: 1759057 - DNA, 25 bp, Homo sapien
tacaaagttagctctttggagtcca

SEQ ID NO: 1759058 - DNA, 25 bp, Homo sapien
caaagttagctctttggagtccatt

SEQ ID NO: 1759059 - DNA, 25 bp, Homo sapien
tatgaatggtacaaagttagctctt

SEQ ID NO: 1759060 - DNA, 25 bp, Homo sapien
aagactgctatgaatggtacaaagt

SEQ ID NO: 1759061 - DNA, 25 bp, Homo sapien
tcagctaggccagaatgaagaagta

SEQ ID NO: 1759062 - DNA, 25 bp, Homo sapien
agctaggccagaatgaagaagtaac

SEQ ID NO: 1759063 - DNA, 25 bp, Homo sapien
gccagaatgaagaagtaacactagc

SEQ ID NO: 1759064 - DNA, 25 bp, Homo sapien
cagaatgaagaagtaacactagcat

SEQ ID NO: 1759065 - DNA, 25 bp, Homo sapien
ggtacacaccgcaatgcctagctaa

SEQ ID NO: 1759066 - DNA, 25 bp, Homo sapien
aggtacacaccgcaatgcctagcta

SEQ ID NO: 1759067 - DNA, 25 bp, Homo sapien
ggacaggtacacaccgcaatgccta

SEQ ID NO: 1759068 - DNA, 25 bp, Homo sapien
cagttgagataggaatagatgtacc

SEQ ID NO: 1759069 - DNA, 25 bp, Homo sapien
tgttatatcccctcatgtgactgca

SEQ ID NO: 1759070 - DNA, 25 bp, Homo sapien
taaaatatggctctaagttcctaaa

SEQ ID NO: 1759071 - DNA, 25 bp, Homo sapien
tcctgtgcccacaactgtcttttta

SEQ ID NO: 1759072 - DNA, 25 bp, Homo sapien
caagtaaacagactagtgacagtta

SEQ ID NO: 1759073 - DNA, 25 bp, Homo sapien
taaatctgccaacctcaagtaaaca

SEQ ID NO: 1759074 - DNA, 25 bp, Homo sapien
tacagacttattgaaggaggcacaa

SEQ ID NO: 1759075 - DNA, 25 bp, Homo sapien
gatactatgtcatatgatcagaagg

SEQ ID NO: 1759076 - DNA, 25 bp, Homo sapien
ttatgctgccaagccacaatgactc

SEQ ID NO: 1759077 - DNA, 25 bp, Homo sapien
gattcatacacgctaattacgccta

SEQ ID NO: 1759078 - DNA, 25 bp, Homo sapien
gggcagagagacaacgattcataca

SEQ ID NO: 1759079 - DNA, 25 bp, Homo sapien
cagcttcggccagtgttatttggta

SEQ ID NO: 1759080 - DNA, 25 bp, Homo sapien
caaaagtccttggtctaaagcagac

SEQ ID NO: 1759081 - DNA, 25 bp, Homo sapien
ccatctcttattggaggtgcaagca

SEQ ID NO: 1759082 - DNA, 25 bp, Homo sapien
tctgagccctgatgaggtccgctac

SEQ ID NO: 1759083 - DNA, 25 bp, Homo sapien
cccagtagtggatatcggacaaatt

SEQ ID NO: 1759084 - DNA, 25 bp, Homo sapien
aatcagccataattatccagttttg

SEQ ID NO: 1759085 - DNA, 25 bp, Homo sapien
agatgttcaggtgttgcctttcaga

SEQ ID NO: 1759086 - DNA, 25 bp, Homo sapien
gaaaaacacaatcagccataattat

SEQ ID NO: 1759087 - DNA, 25 bp, Homo sapien
gatgttcaggtgttgcctttcagag

SEQ ID NO: 1759088 - DNA, 25 bp, Homo sapien
ataagagcaattgggaatataatta

SEQ ID NO: 1759089 - DNA, 25 bp, Homo sapien
aataagagcaattgggaatataatt

SEQ ID NO: 1759090 - DNA, 25 bp, Homo sapien
tccaagaaaatcagagtcctcattc

SEQ ID NO: 1759091 - DNA, 25 bp, Homo sapien
aaggatcaagtattttgatctctat

SEQ ID NO: 1759092 - DNA, 25 bp, Homo sapien
tatctgtctagagttattaagcctg

SEQ ID NO: 1759093 - DNA, 25 bp, Homo sapien
ctctatctgtctagagttattaagc

SEQ ID NO: 1759094 - DNA, 25 bp, Homo sapien
aggatcaagtattttgatctctatc

SEQ ID NO: 1759095 - DNA, 25 bp, Homo sapien
gtgtatcactgaagaccagcacaga

SEQ ID NO: 1759096 - DNA, 25 bp, Homo sapien
gcacagagagttgtagggtctccct

SEQ ID NO: 1759097 - DNA, 25 bp, Homo sapien
cagatcgaactacaagtgtatcact

SEQ ID NO: 1759098 - DNA, 25 bp, Homo sapien
cagcacagagagttgtagggtctcc

SEQ ID NO: 1759099 - DNA, 25 bp, Homo sapien
tgtctataaaacgaaagtcctgagc

SEQ ID NO: 1759100 - DNA, 25 bp, Homo sapien
caggatttcctcataacaaagagag

SEQ ID NO: 1759101 - DNA, 25 bp, Homo sapien
ttgtaaccacgacaaccagttcctg

SEQ ID NO: 1759102 - DNA, 25 bp, Homo sapien
cagggccctggttctattctcttca

SEQ ID NO: 1759103 - DNA, 25 bp, Homo sapien
taataagcatacagaaaggcatttt

SEQ ID NO: 1759104 - DNA, 25 bp, Homo sapien
cagtaataagcatacagaaaggcat

SEQ ID NO: 1759105 - DNA, 25 bp, Homo sapien
cttgctccagtaataagcatacaga

SEQ ID NO: 1759106 - DNA, 25 bp, Homo sapien
ttgctccagtaataagcatacagaa

SEQ ID NO: 1759107 - DNA, 25 bp, Homo sapien
tatcccagaatctagctggactgta

SEQ ID NO: 1759108 - DNA, 25 bp, Homo sapien
ggtaatctatcccagaatctagctg

SEQ ID NO: 1759109 - DNA, 25 bp, Homo sapien
ctagctggactgtattacaatattc

SEQ ID NO: 1759110 - DNA, 25 bp, Homo sapien
cttttccggtaatctatcccagaat

SEQ ID NO: 1759111 - DNA, 25 bp, Homo sapien
caggaaatgactgggctagctgtct

SEQ ID NO: 1759112 - DNA, 25 bp, Homo sapien
gggctagctgtctaactggtaagaa

SEQ ID NO: 1759113 - DNA, 25 bp, Homo sapien
ttgcactggtgaatgtttcagaggt

SEQ ID NO: 1759114 - DNA, 25 bp, Homo sapien
ctggtgaatgtttcagaggttcttc

SEQ ID NO: 1759115 - DNA, 25 bp, Homo sapien
tacactctactagatgactgtggcc

SEQ ID NO: 1759116 - DNA, 25 bp, Homo sapien
gatttagtgggccagctctattctg

SEQ ID NO: 1759117 - DNA, 25 bp, Homo sapien
gcatactaaactgactggtggaacc

SEQ ID NO: 1759118 - DNA, 25 bp, Homo sapien
tgctgtaccactttataggtgctgt

SEQ ID NO: 1759119 - DNA, 25 bp, Homo sapien
aagaccacagcatgaagacggcact

SEQ ID NO: 1759120 - DNA, 25 bp, Homo sapien
gatattccagcctaaccagtaaaat

SEQ ID NO: 1759121 - DNA, 25 bp, Homo sapien
tcaacagtagttgtatggaaagacc

SEQ ID NO: 1759122 - DNA, 25 bp, Homo sapien
gaagtagagacatctggtagtcaac

SEQ ID NO: 1759123 - DNA, 25 bp, Homo sapien
ttcagtccacaacaatgagcatttg

SEQ ID NO: 1759124 - DNA, 25 bp, Homo sapien
caggatcgatttttggtgagggctc

SEQ ID NO: 1759125 - DNA, 25 bp, Homo sapien
ggccctatccttatgacttcagtta

SEQ ID NO: 1759126 - DNA, 25 bp, Homo sapien
tctgccttttcttatgagaacacca

SEQ ID NO: 1759127 - DNA, 25 bp, Homo sapien
gacagtcctgatctttgctggttga

SEQ ID NO: 1759128 - DNA, 25 bp, Homo sapien
gacattggtcaaatctctaagagtg

SEQ ID NO: 1759129 - DNA, 25 bp, Homo sapien
cctaaatcaatttcaagctgggcat

SEQ ID NO: 1759130 - DNA, 25 bp, Homo sapien
gctggttgacaaatattccagacac

SEQ ID NO: 1759131 - DNA, 25 bp, Homo sapien
gaagagttgaaacgattctgtcagc

SEQ ID NO: 1759132 - DNA, 25 bp, Homo sapien
tgaaacgattctgtcagcatgccct

SEQ ID NO: 1759133 - DNA, 25 bp, Homo sapien
taggaagatgatcaattgagaagag

SEQ ID NO: 1759134 - DNA, 25 bp, Homo sapien
tgatcaattgagaagagttgaaacg

SEQ ID NO: 1759135 - DNA, 25 bp, Homo sapien
caaacaacttatccatgacagcctc

SEQ ID NO: 1759136 - DNA, 25 bp, Homo sapien
gcacatgattcaacacataaattag

SEQ ID NO: 1759137 - DNA, 25 bp, Homo sapien
tacaatgactgccacttgagcgtgg

SEQ ID NO: 1759138 - DNA, 25 bp, Homo sapien
tacagataggaaatgcatagcttga

SEQ ID NO: 1759139 - DNA, 25 bp, Homo sapien
tgagcgtggcatcaacccatataca

SEQ ID NO: 1759140 - DNA, 25 bp, Homo sapien
ctatgggaacatgaacaaagactca

SEQ ID NO: 1759141 - DNA, 25 bp, Homo sapien
gactcaatcttgtctggataattac

SEQ ID NO: 1759142 - DNA, 25 bp, Homo sapien
ggaacatgaacaaagactcaatctt

SEQ ID NO: 1759143 - DNA, 25 bp, Homo sapien
aaagactcaatcttgtctggataat

SEQ ID NO: 1759144 - DNA, 25 bp, Homo sapien
agtcggcaacggttccacaggcttt

SEQ ID NO: 1759145 - DNA, 25 bp, Homo sapien
gctcttcaaatgtgcagtcggcaac

SEQ ID NO: 1759146 - DNA, 25 bp, Homo sapien
caaatgtgcagtcggcaacggttcc

SEQ ID NO: 1759147 - DNA, 25 bp, Homo sapien
tgccttgcacttttagaatccttgg

SEQ ID NO: 1759148 - DNA, 25 bp, Homo sapien
ctgcagaaagtggaggagcttcatc

SEQ ID NO: 1759149 - DNA, 25 bp, Homo sapien
cagaaagtggaggagcttcatcttt

SEQ ID NO: 1759150 - DNA, 25 bp, Homo sapien
cttttggatatacaagattcttctc

SEQ ID NO: 1759151 - DNA, 25 bp, Homo sapien
tttggatatacaagattcttctcaa

SEQ ID NO: 1759152 - DNA, 25 bp, Homo sapien
ggagactcttactcacatcttggta

SEQ ID NO: 1759153 - DNA, 25 bp, Homo sapien
catagcattctggtcatactgatcc

SEQ ID NO: 1759154 - DNA, 25 bp, Homo sapien
ctgtgtctgttaccctgcataaggg

SEQ ID NO: 1759155 - DNA, 25 bp, Homo sapien
ggatcttcccaagaggagacactac

SEQ ID NO: 1759156 - DNA, 25 bp, Homo sapien
gatacaagcatatgtcggcagcagg

SEQ ID NO: 1759157 - DNA, 25 bp, Homo sapien
gacaaccttgaattatctgctgccc

SEQ ID NO: 1759158 - DNA, 25 bp, Homo sapien
gactgaatatctccccgtgctgctg

SEQ ID NO: 1759159 - DNA, 25 bp, Homo sapien
aaaacatccatgaaaggccggaata

SEQ ID NO: 1759160 - DNA, 25 bp, Homo sapien
cttgagatcataaaagttatcgatg

SEQ ID NO: 1759161 - DNA, 25 bp, Homo sapien
ccagagtaaattgcggaatgtttcg

SEQ ID NO: 1759162 - DNA, 25 bp, Homo sapien
tcttcgaccttgagtcctgtttgcc

SEQ ID NO: 1759163 - DNA, 25 bp, Homo sapien
tatcgatgagagttatgaatcttcg

SEQ ID NO: 1759164 - DNA, 25 bp, Homo sapien
tttcacattcggcccatcccagaga

SEQ ID NO: 1759165 - DNA, 25 bp, Homo sapien
cagagaggttgctgcaaactcccca

SEQ ID NO: 1759166 - DNA, 25 bp, Homo sapien
tttgatagcactcccttaggtgggc

SEQ ID NO: 1759167 - DNA, 25 bp, Homo sapien
cagattacccatcacatgtgtgtgg

SEQ ID NO: 1759168 - DNA, 25 bp, Homo sapien
taagcttgatataggagtcgacgca

SEQ ID NO: 1759169 - DNA, 25 bp, Homo sapien
tttgctccaactcactgtcatgatg

SEQ ID NO: 1759170 - DNA, 25 bp, Homo sapien
catgatgttgatgcaaaaataagct

SEQ ID NO: 1759171 - DNA, 25 bp, Homo sapien
tcagccccaaatcatccatcagtat

SEQ ID NO: 1759172 - DNA, 25 bp, Homo sapien
ggactagccagcctacatgcttgga

SEQ ID NO: 1759173 - DNA, 25 bp, Homo sapien
caaagtcacttctagttggcctggg

SEQ ID NO: 1759174 - DNA, 25 bp, Homo sapien
tggtgataccaacacagactcatgg

SEQ ID NO: 1759175 - DNA, 25 bp, Homo sapien
cagcatggtatagcagagcaagccc

SEQ ID NO: 1759176 - DNA, 25 bp, Homo sapien
tcattccagtactgttcagtctgca

SEQ ID NO: 1759177 - DNA, 25 bp, Homo sapien
gaaattgtgcgctgaaatgcaaaga

SEQ ID NO: 1759178 - DNA, 25 bp, Homo sapien
tcagtctgcatttccgtgagtcggg

SEQ ID NO: 1759179 - DNA, 25 bp, Homo sapien
gcaaagatttcctcttctccggtaa

SEQ ID NO: 1759180 - DNA, 25 bp, Homo sapien
tctagagttttatttatgcaaaagt

SEQ ID NO: 1759181 - DNA, 25 bp, Homo sapien
tgtctagagttttatttatgcaaaa

SEQ ID NO: 1759182 - DNA, 25 bp, Homo sapien
agttttatttatgcaaaagtggcag

SEQ ID NO: 1759183 - DNA, 25 bp, Homo sapien
ccatttgtctagagttttatttatg

SEQ ID NO: 1759184 - DNA, 25 bp, Homo sapien
ggcctcatgtgagcgggagtctcct

SEQ ID NO: 1759185 - DNA, 25 bp, Homo sapien
caaagcttgaaggtatccagacgtc

SEQ ID NO: 1759186 - DNA, 25 bp, Homo sapien
tattaggtccatctcacggcagagt

SEQ ID NO: 1759187 - DNA, 25 bp, Homo sapien
cccacaataaggagttctgcctgcg

SEQ ID NO: 1759188 - DNA, 25 bp, Homo sapien
gacattatagggaagctacactgag

SEQ ID NO: 1759189 - DNA, 25 bp, Homo sapien
gacaggtctgtctatcggtcatact

SEQ ID NO: 1759190 - DNA, 25 bp, Homo sapien
cccggtctgtgttttgaattgagca

SEQ ID NO: 1759191 - DNA, 25 bp, Homo sapien
tggagagcacccttggcacatgatg

SEQ ID NO: 1759192 - DNA, 25 bp, Homo sapien
acccaggcgcccaatccttctgcat

SEQ ID NO: 1759193 - DNA, 25 bp, Homo sapien
tgatcaagaacccaaatgtcaggga

SEQ ID NO: 1759194 - DNA, 25 bp, Homo sapien
gctgcaagacagattcccgtaactg

SEQ ID NO: 1759195 - DNA, 25 bp, Homo sapien
tcccgtaactgatcaagaacccaaa

SEQ ID NO: 1759196 - DNA, 25 bp, Homo sapien
gaattttccaatgccagatctcaag

SEQ ID NO: 1759197 - DNA, 25 bp, Homo sapien
gcttttcaccaacaatcctcatagt

SEQ ID NO: 1759198 - DNA, 25 bp, Homo sapien
tccactgcatcattagagaccagca

SEQ ID NO: 1759199 - DNA, 25 bp, Homo sapien
gaggctcagagcactatcttggtcg

SEQ ID NO: 1759200 - DNA, 25 bp, Homo sapien
gctccagtgggcacatgggaatcct

SEQ ID NO: 1759201 - DNA, 25 bp, Homo sapien
cagtgggctccagtgggcacatggg

SEQ ID NO: 1759202 - DNA, 25 bp, Homo sapien
ggctccagtgggcacatgggaatcc

SEQ ID NO: 1759203 - DNA, 25 bp, Homo sapien
tgggctccagtgggcacatgggaat

SEQ ID NO: 1759204 - DNA, 25 bp, Homo sapien
gattgggttgggtaactatttgaga

SEQ ID NO: 1759205 - DNA, 25 bp, Homo sapien
tatttgagacacactgagtttacgc

SEQ ID NO: 1759206 - DNA, 25 bp, Homo sapien
tgagtttacgcaacattcaaaagga

SEQ ID NO: 1759207 - DNA, 25 bp, Homo sapien
tccagtaggcaattggaagtacaga

SEQ ID NO: 1759208 - DNA, 25 bp, Homo sapien
cagtatcactgcaaaaggtgtagca

SEQ ID NO: 1759209 - DNA, 25 bp, Homo sapien
ggccagtggcagagtattagagtac

SEQ ID NO: 1759210 - DNA, 25 bp, Homo sapien
gagtactgcagctgtgtgagtgcct

SEQ ID NO: 1759211 - DNA, 25 bp, Homo sapien
gacagtatcactgcaaaaggtgtag

SEQ ID NO: 1759212 - DNA, 25 bp, Homo sapien
gatacttatcttgaaccctttctcc

SEQ ID NO: 1759213 - DNA, 25 bp, Homo sapien
caagtcctgtcctgcactgatactt

SEQ ID NO: 1759214 - DNA, 25 bp, Homo sapien
tgtcttcagattgttggatttgcca

SEQ ID NO: 1759215 - DNA, 25 bp, Homo sapien
ttccaataactaaccattctccaag

SEQ ID NO: 1759216 - DNA, 25 bp, Homo sapien
tgggagactccagaactgatccagt

SEQ ID NO: 1759217 - DNA, 25 bp, Homo sapien
ttatgtcccacatagcatctagcag

SEQ ID NO: 1759218 - DNA, 25 bp, Homo sapien
gcagagtgccttgtcataagaagca

SEQ ID NO: 1759219 - DNA, 25 bp, Homo sapien
gatccagtcactgtagacgaaaccg

SEQ ID NO: 1759220 - DNA, 25 bp, Homo sapien
tcactgccaactaactgctcagaaa

SEQ ID NO: 1759221 - DNA, 25 bp, Homo sapien
agcatttgccatgggtagtttggca

SEQ ID NO: 1759222 - DNA, 25 bp, Homo sapien
ggtgtctctgtctcaacatggtatt

SEQ ID NO: 1759223 - DNA, 25 bp, Homo sapien
gctagtaagagcttcaccttggaaa

SEQ ID NO: 1759224 - DNA, 25 bp, Homo sapien
agggctttgcctgaatttcctgatc

SEQ ID NO: 1759225 - DNA, 25 bp, Homo sapien
tttctttaagttggagcagaagggc

SEQ ID NO: 1759226 - DNA, 25 bp, Homo sapien
ccagaaaagcaagctggccaggtgc

SEQ ID NO: 1759227 - DNA, 25 bp, Homo sapien
gtgctggctggttgtggtttcttta

SEQ ID NO: 1759228 - DNA, 25 bp, Homo sapien
taatccctttgctgtgggctcccca

SEQ ID NO: 1759229 - DNA, 25 bp, Homo sapien
cagcaagttgtgctgcaagccagca

SEQ ID NO: 1759230 - DNA, 25 bp, Homo sapien
gcattcagccacatggcgggaggca

SEQ ID NO: 1759231 - DNA, 25 bp, Homo sapien
ggatctttgcaaaatggccagtgtc

SEQ ID NO: 1759232 - DNA, 25 bp, Homo sapien
tccagctgcgttgggttctgtttac

SEQ ID NO: 1759233 - DNA, 25 bp, Homo sapien
catttctccagctgcgttgggttct

SEQ ID NO: 1759234 - DNA, 25 bp, Homo sapien
ttctccagctgcgttgggttctgtt

SEQ ID NO: 1759235 - DNA, 25 bp, Homo sapien
tcatttctccagctgcgttgggttc

SEQ ID NO: 1759236 - DNA, 25 bp, Homo sapien
ggacgcggcgggacgacgcacgatc

SEQ ID NO: 1759237 - DNA, 25 bp, Homo sapien
aacctcggcgaaggagaagcgctcg

SEQ ID NO: 1759238 - DNA, 25 bp, Homo sapien
gaggaaccgcctgtcagctcgcgcg

SEQ ID NO: 1759239 - DNA, 25 bp, Homo sapien
gggacgacgcacgatcccgcgcggg

SEQ ID NO: 1759240 - DNA, 25 bp, Homo sapien
cggccgcgcctttaaagcgggcagc

SEQ ID NO: 1759241 - DNA, 25 bp, Homo sapien
gcgccgccgctcaagtctgtgctgt

SEQ ID NO: 1759242 - DNA, 25 bp, Homo sapien
ggtttgcattctcgcggacgtcgtc

SEQ ID NO: 1759243 - DNA, 25 bp, Homo sapien
ttgtttatgtttcgctcgggcccgc

SEQ ID NO: 1759244 - DNA, 25 bp, Homo sapien
ggccaggccgcgatggagccgcgag

SEQ ID NO: 1759245 - DNA, 25 bp, Homo sapien
aagacgtgcggccagcgaacctggc

SEQ ID NO: 1759246 - DNA, 25 bp, Homo sapien
agccgcgagcgaatcgacggcctcg

SEQ ID NO: 1759247 - DNA, 25 bp, Homo sapien
gccagcgaacctggcgcagcagaca

SEQ ID NO: 1759248 - DNA, 25 bp, Homo sapien
acctcccagtcctgccgcgcccgcc

SEQ ID NO: 1759249 - DNA, 25 bp, Homo sapien
ctcggcgagtcctcgcccgctgccg

SEQ ID NO: 1759250 - DNA, 25 bp, Homo sapien
cgcccgcctcccaggaacaggagga

SEQ ID NO: 1759251 - DNA, 25 bp, Homo sapien
ccgccacctcccagtcctgccgcgc

SEQ ID NO: 1759252 - DNA, 25 bp, Homo sapien
agagaaggagagttggttatcccgg

SEQ ID NO: 1759253 - DNA, 25 bp, Homo sapien
gagagaaggagagttggttatcccg

SEQ ID NO: 1759254 - DNA, 25 bp, Homo sapien
cagcgggggagggacgtggacgccg

SEQ ID NO: 1759255 - DNA, 25 bp, Homo sapien
gtggacgccgcgaaggctccggctc

SEQ ID NO: 1759256 - DNA, 25 bp, Homo sapien
gtgcagcgggggagggacgtggacg

SEQ ID NO: 1759257 - DNA, 25 bp, Homo sapien
gagggacgtggacgccgcgaaggct

SEQ ID NO: 1759258 - DNA, 25 bp, Homo sapien
ccgcggctggggctctcgcgctctc

SEQ ID NO: 1759259 - DNA, 25 bp, Homo sapien
gcggctggggctctcgcgctctcct

SEQ ID NO: 1759260 - DNA, 25 bp, Homo sapien
ccgcccgcggctggggctctcgcgc

SEQ ID NO: 1759261 - DNA, 25 bp, Homo sapien
gcccgcccgcggctggggctctcgc

SEQ ID NO: 1759262 - DNA, 25 bp, Homo sapien
ccggggaagccggtgcctctgccat

SEQ ID NO: 1759263 - DNA, 25 bp, Homo sapien
tttgcaggggccacgtacaggatcg

SEQ ID NO: 1759264 - DNA, 25 bp, Homo sapien
cttggcagggctcgcttggagctcc

SEQ ID NO: 1759265 - DNA, 25 bp, Homo sapien
cacgtacaggatcgcggacggctct

SEQ ID NO: 1759266 - DNA, 25 bp, Homo sapien
gccgccgatcgccatggccgagccg

SEQ ID NO: 1759267 - DNA, 25 bp, Homo sapien
gccgatcgccatggccgagccggcc

SEQ ID NO: 1759268 - DNA, 25 bp, Homo sapien
cctcctcctcggggatcatggagtc

SEQ ID NO: 1759269 - DNA, 25 bp, Homo sapien
atcatggagtcggcggccgtctccc

SEQ ID NO: 1759270 - DNA, 25 bp, Homo sapien
cggtggcagcggttgctgaggctgc

SEQ ID NO: 1759271 - DNA, 25 bp, Homo sapien
ctgcagcagcgcctgtgtacccccg

SEQ ID NO: 1759272 - DNA, 25 bp, Homo sapien
gcagcgcctgtgtacccccgctcag

SEQ ID NO: 1759273 - DNA, 25 bp, Homo sapien
gggtcttgccctccgggtgccagca

SEQ ID NO: 1759274 - DNA, 25 bp, Homo sapien
aggcgttccgccgcgacgaacattt

SEQ ID NO: 1759275 - DNA, 25 bp, Homo sapien
tcgatggcgcgggtgatcaggtccg

SEQ ID NO: 1759276 - DNA, 25 bp, Homo sapien
tcaggtccgcgtaggacaggtttcc

SEQ ID NO: 1759277 - DNA, 25 bp, Homo sapien
gtagatctgggacagagtgagccgt

SEQ ID NO: 1759278 - DNA, 25 bp, Homo sapien
ctgccagcccggggtgggtacgcac

SEQ ID NO: 1759279 - DNA, 25 bp, Homo sapien
gctgccagcccggggtgggtacgca

SEQ ID NO: 1759280 - DNA, 25 bp, Homo sapien
cccaaagcctcgcagcggaggctcc

SEQ ID NO: 1759281 - DNA, 25 bp, Homo sapien
agcccgcaagcgcactccgacgaat

SEQ ID NO: 1759282 - DNA, 25 bp, Homo sapien
aagcgcactccgacgaatccgagac

SEQ ID NO: 1759283 - DNA, 25 bp, Homo sapien
caggtgccccgactccggggatcaa

SEQ ID NO: 1759284 - DNA, 25 bp, Homo sapien
agcgctacttatgtgagactatcca

SEQ ID NO: 1759285 - DNA, 25 bp, Homo sapien
gaactgtggctactaattacctctc

SEQ ID NO: 1759286 - DNA, 25 bp, Homo sapien
gggttgaactagatcagaaaacttc

SEQ ID NO: 1759287 - DNA, 25 bp, Homo sapien
cctttcaggaaagcaagcgctactt

SEQ ID NO: 1759288 - DNA, 25 bp, Homo sapien
tcacagatcaaagtctaaaagggcc

SEQ ID NO: 1759289 - DNA, 25 bp, Homo sapien
ggtcaagtctgtccctataggcaaa

SEQ ID NO: 1759290 - DNA, 25 bp, Homo sapien
tgatgcacctgctctgggtaagtgg

SEQ ID NO: 1759291 - DNA, 25 bp, Homo sapien
caggacccctcaatttgtgatgcag

SEQ ID NO: 1759292 - DNA, 25 bp, Homo sapien
ttttaggcaacaagtaatacagatg

SEQ ID NO: 1759293 - DNA, 25 bp, Homo sapien
tcttttagttctgagttttaggcaa

SEQ ID NO: 1759294 - DNA, 25 bp, Homo sapien
gttactccacccctactagctgtgg

SEQ ID NO: 1759295 - DNA, 25 bp, Homo sapien
actgactggacacacccgttactcc

SEQ ID NO: 1759296 - DNA, 25 bp, Homo sapien
atttagctcatgcaaaaatcaaggg

SEQ ID NO: 1759297 - DNA, 25 bp, Homo sapien
gcccggccaatatcataagtcttta

SEQ ID NO: 1759298 - DNA, 25 bp, Homo sapien
cacagagaggtgctgttactcagag

SEQ ID NO: 1759299 - DNA, 25 bp, Homo sapien
ggaaggagcctaaataacggagcca

SEQ ID NO: 1759300 - DNA, 25 bp, Homo sapien
ggcagcctgctcttaaacccgtcag

SEQ ID NO: 1759301 - DNA, 25 bp, Homo sapien
cttcaggcttgtacccagagttgtc

SEQ ID NO: 1759302 - DNA, 25 bp, Homo sapien
gtccctttaaaagtccacagtggca

SEQ ID NO: 1759303 - DNA, 25 bp, Homo sapien
tacattttatcttacggcactgcct

SEQ ID NO: 1759304 - DNA, 25 bp, Homo sapien
cctgtttaaggcagaacaatgaaca

SEQ ID NO: 1759305 - DNA, 25 bp, Homo sapien
caatagctgcaatcatcctcccagt

SEQ ID NO: 1759306 - DNA, 25 bp, Homo sapien
gctagaactactcagtcaatggaaa

SEQ ID NO: 1759307 - DNA, 25 bp, Homo sapien
gcacagacacatgaggtaacaagct

SEQ ID NO: 1759308 - DNA, 25 bp, Homo sapien
ccaaggtattctgactgggctgcct

SEQ ID NO: 1759309 - DNA, 25 bp, Homo sapien
ttgcctccccaaagtgtctcaatgg

SEQ ID NO: 1759310 - DNA, 25 bp, Homo sapien
tgtcctgggcctaatttaaactgtg

SEQ ID NO: 1759311 - DNA, 25 bp, Homo sapien
tggcttccaagcacgatgtcgctgt

SEQ ID NO: 1759312 - DNA, 25 bp, Homo sapien
tatgggttgcccagcattaagactg

SEQ ID NO: 1759313 - DNA, 25 bp, Homo sapien
ccagtgcctgaagaagagcttagca

SEQ ID NO: 1759314 - DNA, 25 bp, Homo sapien
gccactgatccagcttatgtgccca

SEQ ID NO: 1759315 - DNA, 25 bp, Homo sapien
gacctttcaataatcggcaatgaga

SEQ ID NO: 1759316 - DNA, 25 bp, Homo sapien
tctgtaaatcctagtcactcctaag

SEQ ID NO: 1759317 - DNA, 25 bp, Homo sapien
gaaactgatccatactgcttcatct

SEQ ID NO: 1759318 - DNA, 25 bp, Homo sapien
tttcctcccatagggtcctccaaga

SEQ ID NO: 1759319 - DNA, 25 bp, Homo sapien
tcctaagtttggagccattcatact

SEQ ID NO: 1759320 - DNA, 25 bp, Homo sapien
ctcacacctttgagaggcactttga

SEQ ID NO: 1759321 - DNA, 25 bp, Homo sapien
cacactggagggtcgagtacaccaa

SEQ ID NO: 1759322 - DNA, 25 bp, Homo sapien
aaatgttaatgtaatttcctcacca

SEQ ID NO: 1759323 - DNA, 25 bp, Homo sapien
caggtttatagtgagaatggtgctc

SEQ ID NO: 1759324 - DNA, 25 bp, Homo sapien
cgactgctagtgtttccaagggaat

SEQ ID NO: 1759325 - DNA, 25 bp, Homo sapien
ctgaatgcctgaccgaaaagtgaac

SEQ ID NO: 1759326 - DNA, 25 bp, Homo sapien
taactgcccaaatgatgcacgactg

SEQ ID NO: 1759327 - DNA, 25 bp, Homo sapien
caaatcatggagctaggaggaaggc

SEQ ID NO: 1759328 - DNA, 25 bp, Homo sapien
gtggacacaccaggaaaacgtctct

SEQ ID NO: 1759329 - DNA, 25 bp, Homo sapien
tgactagacatggagaacttgaact

SEQ ID NO: 1759330 - DNA, 25 bp, Homo sapien
cagctgtggccgacaaatgccagaa

SEQ ID NO: 1759331 - DNA, 25 bp, Homo sapien
tcagtattcgcacagaagcttggac

SEQ ID NO: 1759332 - DNA, 25 bp, Homo sapien
ctcactgctttggtagttttaagaa

SEQ ID NO: 1759333 - DNA, 25 bp, Homo sapien
atttaaacatctcaagctgcccttt

SEQ ID NO: 1759334 - DNA, 25 bp, Homo sapien
tcctcactgctttggtagttttaag

SEQ ID NO: 1759335 - DNA, 25 bp, Homo sapien
caaagccaaaagatgtccaaaagaa

SEQ ID NO: 1759336 - DNA, 25 bp, Homo sapien
gggctggatcatacctttattctac

SEQ ID NO: 1759337 - DNA, 25 bp, Homo sapien
cattagcgggaggtaaaggtgggag

SEQ ID NO: 1759338 - DNA, 25 bp, Homo sapien
ttggcttccaaaccttaggagtatg

SEQ ID NO: 1759339 - DNA, 25 bp, Homo sapien
aactactatgttaacttcacagttt

SEQ ID NO: 1759340 - DNA, 25 bp, Homo sapien
gggagagctgcctacaaaactttgc

SEQ ID NO: 1759341 - DNA, 25 bp, Homo sapien
tagagatcaggcaacacacatttcc

SEQ ID NO: 1759342 - DNA, 25 bp, Homo sapien
tgttttaggcctcgacaacctgtag

SEQ ID NO: 1759343 - DNA, 25 bp, Homo sapien
catttaggccattaaccaggagtcc

SEQ ID NO: 1759344 - DNA, 25 bp, Homo sapien
tacaggtctacagtatgagttacca

SEQ ID NO: 1759345 - DNA, 25 bp, Homo sapien
gccacatacaggtctacagtatgag

SEQ ID NO: 1759346 - DNA, 25 bp, Homo sapien
ggtctacagtatgagttaccaaagc

SEQ ID NO: 1759347 - DNA, 25 bp, Homo sapien
acagccacatacaggtctacagtat

SEQ ID NO: 1759348 - DNA, 25 bp, Homo sapien
gaattagagaaactccttgccggcc

SEQ ID NO: 1759349 - DNA, 25 bp, Homo sapien
gaccaccaggtcaaggagttatcaa

SEQ ID NO: 1759350 - DNA, 25 bp, Homo sapien
cattctagacataggtgagagctga

SEQ ID NO: 1759351 - DNA, 25 bp, Homo sapien
ttgccggccatcatgctaagtcagc

SEQ ID NO: 1759352 - DNA, 25 bp, Homo sapien
ataatggaaaagaccacgaagaagc

SEQ ID NO: 1759353 - DNA, 25 bp, Homo sapien
aatgtgcgtaaattttctagacact

SEQ ID NO: 1759354 - DNA, 25 bp, Homo sapien
cctcaacttgttcttcaatactgta

SEQ ID NO: 1759355 - DNA, 25 bp, Homo sapien
tcaccaataccataagaatcatgat

SEQ ID NO: 1759356 - DNA, 25 bp, Homo sapien
tctttcctaggccaaaatgtgcgta

SEQ ID NO: 1759357 - DNA, 25 bp, Homo sapien
gattactatgcagaaaacaccgccc

SEQ ID NO: 1759358 - DNA, 25 bp, Homo sapien
cattgccatgtgtgtcaagaaccca

SEQ ID NO: 1759359 - DNA, 25 bp, Homo sapien
tgcagacacttggaactcgagaaga

SEQ ID NO: 1759360 - DNA, 25 bp, Homo sapien
gaatatcacaattgcagaggcctga

SEQ ID NO: 1759361 - DNA, 25 bp, Homo sapien
caaagacaacagagtatgaatgcgt

SEQ ID NO: 1759362 - DNA, 25 bp, Homo sapien
gtcctatcacttctatctacttgca

SEQ ID NO: 1759363 - DNA, 25 bp, Homo sapien
acactgtatttaaatgcctcagact

SEQ ID NO: 1759364 - DNA, 25 bp, Homo sapien
aaatgcctcagacttcacccagtcc

SEQ ID NO: 1759365 - DNA, 25 bp, Homo sapien
gaccacgattaccttctcaagtaga

SEQ ID NO: 1759366 - DNA, 25 bp, Homo sapien
tggtatatgtgcacaagcacactgc

SEQ ID NO: 1759367 - DNA, 25 bp, Homo sapien
aattaccaggcatagcaaaggaaca

SEQ ID NO: 1759368 - DNA, 25 bp, Homo sapien
tgatgggactagcagacaagggcac

SEQ ID NO: 1759369 - DNA, 25 bp, Homo sapien
gagaatgaagatacgattgacgtgt

SEQ ID NO: 1759370 - DNA, 25 bp, Homo sapien
aatggagaatgaagatacgattgac

SEQ ID NO: 1759371 - DNA, 25 bp, Homo sapien
aatgaagatacgattgacgtgttcc

SEQ ID NO: 1759372 - DNA, 25 bp, Homo sapien
tggagaatgaagatacgattgacgt

SEQ ID NO: 1759373 - DNA, 25 bp, Homo sapien
cattttggataacgtgggaggctac

SEQ ID NO: 1759374 - DNA, 25 bp, Homo sapien
cagactctgatttgaccggcaacca

SEQ ID NO: 1759375 - DNA, 25 bp, Homo sapien
tactgccaggaggtagtgtccaagc

SEQ ID NO: 1759376 - DNA, 25 bp, Homo sapien
tacgagcaccagaaagcagttggcc

SEQ ID NO: 1759377 - DNA, 25 bp, Homo sapien
tgcaggcagagcgaggacatacaag

SEQ ID NO: 1759378 - DNA, 25 bp, Homo sapien
caggcagagcgaggacatacaagca

SEQ ID NO: 1759379 - DNA, 25 bp, Homo sapien
aggcagagcgaggacatacaagcat

SEQ ID NO: 1759380 - DNA, 25 bp, Homo sapien
ctgcaggcagagcgaggacatacaa

SEQ ID NO: 1759381 - DNA, 25 bp, Homo sapien
acaggcaggggttccacgagtcacc

SEQ ID NO: 1759382 - DNA, 25 bp, Homo sapien
accccaatgactacagcctgaatga

SEQ ID NO: 1759383 - DNA, 25 bp, Homo sapien
agcgggcttactcacacaggcaggg

SEQ ID NO: 1759384 - DNA, 25 bp, Homo sapien
cagttggcaaggcagcgggcttact

SEQ ID NO: 1759385 - DNA, 25 bp, Homo sapien
ttgattctttcttccagacgttgcc

SEQ ID NO: 1759386 - DNA, 25 bp, Homo sapien
tgaattggattttgaactgtgctcc

SEQ ID NO: 1759387 - DNA, 25 bp, Homo sapien
agtccttgtggcttgatgacatctg

SEQ ID NO: 1759388 - DNA, 25 bp, Homo sapien
ctttcttccagacgttgccttgtga

SEQ ID NO: 1759389 - DNA, 25 bp, Homo sapien
tcactacagtagctgaggtacatca

SEQ ID NO: 1759390 - DNA, 25 bp, Homo sapien
caggatatttagcactgcacaccag

SEQ ID NO: 1759391 - DNA, 25 bp, Homo sapien
gaggcttcaggtaggtttctcagcc

SEQ ID NO: 1759392 - DNA, 25 bp, Homo sapien
tgtgggcctctcctatgcactgcag

SEQ ID NO: 1759393 - DNA, 25 bp, Homo sapien
tctctcccacatacttctgaaacgg

SEQ ID NO: 1759394 - DNA, 25 bp, Homo sapien
tctcccacatacttctgaaacggac

SEQ ID NO: 1759395 - DNA, 25 bp, Homo sapien
tcccacatacttctgaaacggacca

SEQ ID NO: 1759396 - DNA, 25 bp, Homo sapien
cccacatacttctgaaacggaccat

SEQ ID NO: 1759397 - DNA, 25 bp, Homo sapien
cagttactccttagctgcctgaggc

SEQ ID NO: 1759398 - DNA, 25 bp, Homo sapien
tagtacatccctgtcactaggcact

SEQ ID NO: 1759399 - DNA, 25 bp, Homo sapien
taggcactacctacctggcaaagta

SEQ ID NO: 1759400 - DNA, 25 bp, Homo sapien
gaacatgtctgcacgagacccaagg

SEQ ID NO: 1759401 - DNA, 25 bp, Homo sapien
gggcagaaaggctcctgtcaggatt

SEQ ID NO: 1759402 - DNA, 25 bp, Homo sapien
aaggctcctgtcaggatttgtgtgg

SEQ ID NO: 1759403 - DNA, 25 bp, Homo sapien
ctcctgtcaggatttgtgtggtagt

SEQ ID NO: 1759404 - DNA, 25 bp, Homo sapien
gcagaaaggctcctgtcaggatttg

SEQ ID NO: 1759405 - DNA, 25 bp, Homo sapien
cacccttgctcagagtaaatgagga

SEQ ID NO: 1759406 - DNA, 25 bp, Homo sapien
tgagtcactgcatctacgtcttctg

SEQ ID NO: 1759407 - DNA, 25 bp, Homo sapien
atgcctgaacgagagccacagcaca

SEQ ID NO: 1759408 - DNA, 25 bp, Homo sapien
gacaactgattcacatgggatccgt

SEQ ID NO: 1759409 - DNA, 25 bp, Homo sapien
tgacctgggtgtacaaacttagacc

SEQ ID NO: 1759410 - DNA, 25 bp, Homo sapien
gcctttggctcagatgcaggataaa

SEQ ID NO: 1759411 - DNA, 25 bp, Homo sapien
gctcactaggcaggtcaaagaattt

SEQ ID NO: 1759412 - DNA, 25 bp, Homo sapien
gaaagcccagggtacaatgtgacct

SEQ ID NO: 1759413 - DNA, 25 bp, Homo sapien
caaagtccacatgcaaggatgtgcc

SEQ ID NO: 1759414 - DNA, 25 bp, Homo sapien
taaagcttcaccaaagtacaatacg

SEQ ID NO: 1759415 - DNA, 25 bp, Homo sapien
tccactcagttaagaatgcacttgt

SEQ ID NO: 1759416 - DNA, 25 bp, Homo sapien
tgtgcccaacaactacaaataatct

SEQ ID NO: 1759417 - DNA, 25 bp, Homo sapien
tatttcagaaaacagcgtccacttg

SEQ ID NO: 1759418 - DNA, 25 bp, Homo sapien
tatgtcagcacatgagagggcatct

SEQ ID NO: 1759419 - DNA, 25 bp, Homo sapien
tgagtccggcagtcagtcattgagg

SEQ ID NO: 1759420 - DNA, 25 bp, Homo sapien
tactggcatggccaactagggaaca

SEQ ID NO: 1759421 - DNA, 25 bp, Homo sapien
tatgtgagggcagactaggacagtc

SEQ ID NO: 1759422 - DNA, 25 bp, Homo sapien
tcagtattatgagccagctaggcag

SEQ ID NO: 1759423 - DNA, 25 bp, Homo sapien
caagccactggagagcaaactcaca

SEQ ID NO: 1759424 - DNA, 25 bp, Homo sapien
taagactggatactcttgaggacca

SEQ ID NO: 1759425 - DNA, 25 bp, Homo sapien
ctcagatgggtcctctataatgtag

SEQ ID NO: 1759426 - DNA, 25 bp, Homo sapien
gatggtctcagatgggtcctctata

SEQ ID NO: 1759427 - DNA, 25 bp, Homo sapien
tctataatgtagagggcaatttcca

SEQ ID NO: 1759428 - DNA, 25 bp, Homo sapien
ctctataatgtagagggcaatttcc

SEQ ID NO: 1759429 - DNA, 25 bp, Homo sapien
cttacttgaatccactgtgctcaga

SEQ ID NO: 1759430 - DNA, 25 bp, Homo sapien
ttacttgaatccactgtgctcagat

SEQ ID NO: 1759431 - DNA, 25 bp, Homo sapien
tatcatggtgcctcaaataatgcaa

SEQ ID NO: 1759432 - DNA, 25 bp, Homo sapien
gaaattactcaagaattatgtgaga

SEQ ID NO: 1759433 - DNA, 25 bp, Homo sapien
taatgcaacgcacagtgggttaggg

SEQ ID NO: 1759434 - DNA, 25 bp, Homo sapien
tgacccaggtgcacgaaaaggcatc

SEQ ID NO: 1759435 - DNA, 25 bp, Homo sapien
ctaaatatgggaaggaggagggatt

SEQ ID NO: 1759436 - DNA, 25 bp, Homo sapien
gaggagggatttccgcaggtcccat

SEQ ID NO: 1759437 - DNA, 25 bp, Homo sapien
gaaggaggagggatttccgcaggtc

SEQ ID NO: 1759438 - DNA, 25 bp, Homo sapien
tatgggaaggaggagggatttccgc

SEQ ID NO: 1759439 - DNA, 25 bp, Homo sapien
agggtcaagcaggatgacctgaaaa

SEQ ID NO: 1759440 - DNA, 25 bp, Homo sapien
aaaaaacactgccagttgacaccag

SEQ ID NO: 1759441 - DNA, 25 bp, Homo sapien
cagcagatcactagctcaaacgtag

SEQ ID NO: 1759442 - DNA, 25 bp, Homo sapien
caccaggaagttgacgttttctaca

SEQ ID NO: 1759443 - DNA, 25 bp, Homo sapien
cttaatgcctgaaaacacgtgacct

SEQ ID NO: 1759444 - DNA, 25 bp, Homo sapien
ggagcactgagtatcaagcactatg

SEQ ID NO: 1759445 - DNA, 25 bp, Homo sapien
tctctctctagtgcacgagtgaaag

SEQ ID NO: 1759446 - DNA, 25 bp, Homo sapien
tcaacagccacttataacagggaac

SEQ ID NO: 1759447 - DNA, 25 bp, Homo sapien
tagtattgtgccgtatttgcttcaa

SEQ ID NO: 1759448 - DNA, 25 bp, Homo sapien
cagatacaggtgaaatacccttcgt

SEQ ID NO: 1759449 - DNA, 25 bp, Homo sapien
tctcagaagcaaccacgaccactat

SEQ ID NO: 1759450 - DNA, 25 bp, Homo sapien
tgtgtacccactgctcgactttagc

SEQ ID NO: 1759451 - DNA, 25 bp, Homo sapien
ctggcatatgtcaaaggaaggtccc

SEQ ID NO: 1759452 - DNA, 25 bp, Homo sapien
tcttccagggatgcaaatcaggctg

SEQ ID NO: 1759453 - DNA, 25 bp, Homo sapien
tctctagagcatacgaaacagtgat

SEQ ID NO: 1759454 - DNA, 25 bp, Homo sapien
catgtcagaaagatctgcaggtcca

SEQ ID NO: 1759455 - DNA, 25 bp, Homo sapien
aactgtcattaatactcctgaggat

SEQ ID NO: 1759456 - DNA, 25 bp, Homo sapien
actcctgaggatttcaagatgttct

SEQ ID NO: 1759457 - DNA, 25 bp, Homo sapien
tactcctgaggatttcaagatgttc

SEQ ID NO: 1759458 - DNA, 25 bp, Homo sapien
ttaaactgtcattaatactcctgag

SEQ ID NO: 1759459 - DNA, 25 bp, Homo sapien
gagcagggtttttcatcccagggaa

SEQ ID NO: 1759460 - DNA, 25 bp, Homo sapien
agggtttttcatcccagggaatgcg

SEQ ID NO: 1759461 - DNA, 25 bp, Homo sapien
gcagggtttttcatcccagggaatg

SEQ ID NO: 1759462 - DNA, 25 bp, Homo sapien
gggtcactgtacccaggcttgagca

SEQ ID NO: 1759463 - DNA, 25 bp, Homo sapien
aaattctgatgtgaaacctactacc

SEQ ID NO: 1759464 - DNA, 25 bp, Homo sapien
ctttcttatccaatgaaaggaattt

SEQ ID NO: 1759465 - DNA, 25 bp, Homo sapien
cagcaagactggctccaccctgttt

SEQ ID NO: 1759466 - DNA, 25 bp, Homo sapien
gaaacctactacctgcagcaagact

SEQ ID NO: 1759467 - DNA, 25 bp, Homo sapien
ttgtgcttcaagtctcatgcattct

SEQ ID NO: 1759468 - DNA, 25 bp, Homo sapien
tccacttagctctcccacataaatt

SEQ ID NO: 1759469 - DNA, 25 bp, Homo sapien
tcgccacagtgactttgctgttgta

SEQ ID NO: 1759470 - DNA, 25 bp, Homo sapien
aatgtagacacctaggattccctcc

SEQ ID NO: 1759471 - DNA, 25 bp, Homo sapien
gctgttgtaaagtgtcgtgaatgta

SEQ ID NO: 1759472 - DNA, 25 bp, Homo sapien
cagaataccccatgttggctactgc

SEQ ID NO: 1759473 - DNA, 25 bp, Homo sapien
ccccatgttggctactgcaaacaaa

SEQ ID NO: 1759474 - DNA, 25 bp, Homo sapien
ccatgttggctactgcaaacaaaac

SEQ ID NO: 1759475 - DNA, 25 bp, Homo sapien
ataccccatgttggctactgcaaac

SEQ ID NO: 1759476 - DNA, 25 bp, Homo sapien
catggggcccccattacttggtaat

SEQ ID NO: 1759477 - DNA, 25 bp, Homo sapien
ctgtcatgggatgccatggggcccc

SEQ ID NO: 1759478 - DNA, 25 bp, Homo sapien
aataacacattctggttctaaagtc

SEQ ID NO: 1759479 - DNA, 25 bp, Homo sapien
tctaaagtctcctctacacaagcac

SEQ ID NO: 1759480 - DNA, 25 bp, Homo sapien
aggcagccccaacttcacagtcgca

SEQ ID NO: 1759481 - DNA, 25 bp, Homo sapien
tcatgacatatgacaagcaaccagg

SEQ ID NO: 1759482 - DNA, 25 bp, Homo sapien
cctctttctatgaaacaggcagccc

SEQ ID NO: 1759483 - DNA, 25 bp, Homo sapien
ataggaaacatgcatccagaactca

SEQ ID NO: 1759484 - DNA, 25 bp, Homo sapien
gaagcatctaaaggcgtgcagtcag

SEQ ID NO: 1759485 - DNA, 25 bp, Homo sapien
tgcagtcagcgagatgacagtccca

SEQ ID NO: 1759486 - DNA, 25 bp, Homo sapien
ggtccctctccccatagactgagga

SEQ ID NO: 1759487 - DNA, 25 bp, Homo sapien
tcccagaaagtaggttaaagctgca

SEQ ID NO: 1759488 - DNA, 25 bp, Homo sapien
gtctttcaatacagtgctcacccac

SEQ ID NO: 1759489 - DNA, 25 bp, Homo sapien
cagcatttcaagtgggtctcactgc

SEQ ID NO: 1759490 - DNA, 25 bp, Homo sapien
cttgtgggtactgacaattcagaat

SEQ ID NO: 1759491 - DNA, 25 bp, Homo sapien
tcacccactttgtgtacaggaccag

SEQ ID NO: 1759492 - DNA, 25 bp, Homo sapien
tttctcagcaacgacaacaagaaat

SEQ ID NO: 1759493 - DNA, 25 bp, Homo sapien
aacacagagaggtttttgtctggaa

SEQ ID NO: 1759494 - DNA, 25 bp, Homo sapien
tttatctttctcagcaacgacaaca

SEQ ID NO: 1759495 - DNA, 25 bp, Homo sapien
gaacacagagaggtttttgtctgga

SEQ ID NO: 1759496 - DNA, 25 bp, Homo sapien
gcttcagcccttccaaaccatgttt

SEQ ID NO: 1759497 - DNA, 25 bp, Homo sapien
tccgcttcagcccttccaaaccatg

SEQ ID NO: 1759498 - DNA, 25 bp, Homo sapien
ttcagcccttccaaaccatgtttac

SEQ ID NO: 1759499 - DNA, 25 bp, Homo sapien
cgcttcagcccttccaaaccatgtt

SEQ ID NO: 1759500 - DNA, 25 bp, Homo sapien
ctttctttagtaaagtggccatgat

SEQ ID NO: 1759501 - DNA, 25 bp, Homo sapien
ctttagtaaagtggccatgatcaca

SEQ ID NO: 1759502 - DNA, 25 bp, Homo sapien
taaagtggccatgatcacattcatt

SEQ ID NO: 1759503 - DNA, 25 bp, Homo sapien
tagtaaagtggccatgatcacattc

SEQ ID NO: 1759504 - DNA, 25 bp, Homo sapien
tacaggtggatctacaattcaggtc

SEQ ID NO: 1759505 - DNA, 25 bp, Homo sapien
tattaagcttctacaagggcatgtg

SEQ ID NO: 1759506 - DNA, 25 bp, Homo sapien
aatggcatctctactaatggtccgg

SEQ ID NO: 1759507 - DNA, 25 bp, Homo sapien
tgttcagaaagcaggcaagtacagg

SEQ ID NO: 1759508 - DNA, 25 bp, Homo sapien
tgaacatgtccaggtccaagtcgct

SEQ ID NO: 1759509 - DNA, 25 bp, Homo sapien
taagtgagtccgaagtgagcaggtc

SEQ ID NO: 1759510 - DNA, 25 bp, Homo sapien
ttccggcgggaattctgggcagaca

SEQ ID NO: 1759511 - DNA, 25 bp, Homo sapien
tgacagaattcgacaaggcacggct

SEQ ID NO: 1759512 - DNA, 25 bp, Homo sapien
gatgaggcctgcttagcaccagtga

SEQ ID NO: 1759513 - DNA, 25 bp, Homo sapien
tgaggcctgcttagcaccagtgaag

SEQ ID NO: 1759514 - DNA, 25 bp, Homo sapien
gaggcctgcttagcaccagtgaagt

SEQ ID NO: 1759515 - DNA, 25 bp, Homo sapien
tgagatgaggcctgcttagcaccag

SEQ ID NO: 1759516 - DNA, 25 bp, Homo sapien
tgcccacttccccttcctcagtgat

SEQ ID NO: 1759517 - DNA, 25 bp, Homo sapien
tttgcccacttccccttcctcagtg

SEQ ID NO: 1759518 - DNA, 25 bp, Homo sapien
ctgctttgcccacttccccttcctc

SEQ ID NO: 1759519 - DNA, 25 bp, Homo sapien
ccacttccccttcctcagtgatcct

SEQ ID NO: 1759520 - DNA, 25 bp, Homo sapien
ttatgccatagcattcggcactgac

SEQ ID NO: 1759521 - DNA, 25 bp, Homo sapien
ttttatgccatagcattcggcactg

SEQ ID NO: 1759522 - DNA, 25 bp, Homo sapien
tgttatttttatgccatagcattcg

SEQ ID NO: 1759523 - DNA, 25 bp, Homo sapien
atttttatgccatagcattcggcac

SEQ ID NO: 1759524 - DNA, 25 bp, Homo sapien
ggagccatattatgtgcaccactgc

SEQ ID NO: 1759525 - DNA, 25 bp, Homo sapien
cacctgacagccctatttggtttgc

SEQ ID NO: 1759526 - DNA, 25 bp, Homo sapien
ggtttgcaggtaaaaccctgagatg

SEQ ID NO: 1759527 - DNA, 25 bp, Homo sapien
gtaaaaccctgagatggaactggct

SEQ ID NO: 1759528 - DNA, 25 bp, Homo sapien
gtgttctcttcacgagcagtagatt

SEQ ID NO: 1759529 - DNA, 25 bp, Homo sapien
tctcttcacgagcagtagatttctg

SEQ ID NO: 1759530 - DNA, 25 bp, Homo sapien
gttctcttcacgagcagtagatttc

SEQ ID NO: 1759531 - DNA, 25 bp, Homo sapien
ctcttcacgagcagtagatttctga

SEQ ID NO: 1759532 - DNA, 25 bp, Homo sapien
gaagattgacaaaagcggtgacgga

SEQ ID NO: 1759533 - DNA, 25 bp, Homo sapien
gcaaattagaagtacctgccgatca

SEQ ID NO: 1759534 - DNA, 25 bp, Homo sapien
tctcatccatccatcaagtagggca

SEQ ID NO: 1759535 - DNA, 25 bp, Homo sapien
cggtgacggaccagagagtctttct

SEQ ID NO: 1759536 - DNA, 25 bp, Homo sapien
tctgctgttcaaccaaaagggaaac

SEQ ID NO: 1759537 - DNA, 25 bp, Homo sapien
tccaacgaactagaaagtggcctcc

SEQ ID NO: 1759538 - DNA, 25 bp, Homo sapien
ttacacatatacgagaaagatctgc

SEQ ID NO: 1759539 - DNA, 25 bp, Homo sapien
tcagagttcaccagataaactttaa

SEQ ID NO: 1759540 - DNA, 25 bp, Homo sapien
gcaactcttgggaagctgggacagt

SEQ ID NO: 1759541 - DNA, 25 bp, Homo sapien
tgaccttcttctgtgagcaagccag

SEQ ID NO: 1759542 - DNA, 25 bp, Homo sapien
cacaaggcggctcagattcagcatc

SEQ ID NO: 1759543 - DNA, 25 bp, Homo sapien
tgaatgacgtgtgaaacacccagcc

SEQ ID NO: 1759544 - DNA, 25 bp, Homo sapien
gatgggtacccatgctaagcagagc

SEQ ID NO: 1759545 - DNA, 25 bp, Homo sapien
taagcgataaaccaccagctctggg

SEQ ID NO: 1759546 - DNA, 25 bp, Homo sapien
tgctccaagacagccctaagaggga

SEQ ID NO: 1759547 - DNA, 25 bp, Homo sapien
gtccagtggctctacagggcgatgt

SEQ ID NO: 1759548 - DNA, 25 bp, Homo sapien
tccagggtggctccacaactgaggg

SEQ ID NO: 1759549 - DNA, 25 bp, Homo sapien
gggagacaaaggagtgccctggcca

SEQ ID NO: 1759550 - DNA, 25 bp, Homo sapien
ggccaggtgtgcagattccggtagt

SEQ ID NO: 1759551 - DNA, 25 bp, Homo sapien
tgcaccttggtgtaagtgccggctg

SEQ ID NO: 1759552 - DNA, 25 bp, Homo sapien
agatggtggccatgtaacaaccatc

SEQ ID NO: 1759553 - DNA, 25 bp, Homo sapien
cacagatggtggccatgtaacaacc

SEQ ID NO: 1759554 - DNA, 25 bp, Homo sapien
aggtgacacagatggtggccatgta

SEQ ID NO: 1759555 - DNA, 25 bp, Homo sapien
ggtgacacagatggtggccatgtaa

SEQ ID NO: 1759556 - DNA, 25 bp, Homo sapien
tgggtgtgaccctatcctgtatgac

SEQ ID NO: 1759557 - DNA, 25 bp, Homo sapien
tgtgcaggctgggatgccctagatc

SEQ ID NO: 1759558 - DNA, 25 bp, Homo sapien
gtgtaattgccagtccatctcaggg

SEQ ID NO: 1759559 - DNA, 25 bp, Homo sapien
tacaggaggaaatgttcagtcatca

SEQ ID NO: 1759560 - DNA, 25 bp, Homo sapien
tgcataatgggaaggtgacacactt

SEQ ID NO: 1759561 - DNA, 25 bp, Homo sapien
taccgtagggtcatcaggaattctc

SEQ ID NO: 1759562 - DNA, 25 bp, Homo sapien
gacttactgtaagcgccgagggaga

SEQ ID NO: 1759563 - DNA, 25 bp, Homo sapien
catctgtgaagaccgtagcttgcta

SEQ ID NO: 1759564 - DNA, 25 bp, Homo sapien
tctgttctagacttccggactgagg

SEQ ID NO: 1759565 - DNA, 25 bp, Homo sapien
taagtaattactaagcgggccatct

SEQ ID NO: 1759566 - DNA, 25 bp, Homo sapien
tccatgctaaaacaaggagagccgc

SEQ ID NO: 1759567 - DNA, 25 bp, Homo sapien
ggagagccgctcatcctaagtagat

SEQ ID NO: 1759568 - DNA, 25 bp, Homo sapien
tgagagaggctagctttttcgtacc

SEQ ID NO: 1759569 - DNA, 25 bp, Homo sapien
tcagcattgacttgggtttttactc

SEQ ID NO: 1759570 - DNA, 25 bp, Homo sapien
tccttttgcctatgcacggttctgt

SEQ ID NO: 1759571 - DNA, 25 bp, Homo sapien
gcagatcagattatatagcaaggct

SEQ ID NO: 1759572 - DNA, 25 bp, Homo sapien
ggcattaggagacggtgaagtttta

SEQ ID NO: 1759573 - DNA, 25 bp, Homo sapien
tacccatccccagtaggctttggca

SEQ ID NO: 1759574 - DNA, 25 bp, Homo sapien
ccttgatctgaagtaagaacctatc

SEQ ID NO: 1759575 - DNA, 25 bp, Homo sapien
taatctcaagtgaaatacccatccc

SEQ ID NO: 1759576 - DNA, 25 bp, Homo sapien
gtcataactggtattagagttccat

SEQ ID NO: 1759577 - DNA, 25 bp, Homo sapien
gcatttttacctggttgtggagaac

SEQ ID NO: 1759578 - DNA, 25 bp, Homo sapien
ttggttgcatttttacctggttgtg

SEQ ID NO: 1759579 - DNA, 25 bp, Homo sapien
aactggtattagagttccatcttta

SEQ ID NO: 1759580 - DNA, 25 bp, Homo sapien
tctttggaattcatcacttcagcca

SEQ ID NO: 1759581 - DNA, 25 bp, Homo sapien
tcagtttcctgagcatgttccaatc

SEQ ID NO: 1759582 - DNA, 25 bp, Homo sapien
tgtctttggaattcatcacttcagc

SEQ ID NO: 1759583 - DNA, 25 bp, Homo sapien
atgttccaatccttcctgtctttgg

SEQ ID NO: 1759584 - DNA, 25 bp, Homo sapien
ggtgaagagttgaaatccaaacgcc

SEQ ID NO: 1759585 - DNA, 25 bp, Homo sapien
tactccctccagtctgagtcaaagc

SEQ ID NO: 1759586 - DNA, 25 bp, Homo sapien
cagtgagattccttcaacagtatag

SEQ ID NO: 1759587 - DNA, 25 bp, Homo sapien
tctaagcatgtgtccaaaatgagtg

SEQ ID NO: 1759588 - DNA, 25 bp, Homo sapien
ggtgtgaggggtggagtctgtggcc

SEQ ID NO: 1759589 - DNA, 25 bp, Homo sapien
tgtgaggggtggagtctgtggccag

SEQ ID NO: 1759590 - DNA, 25 bp, Homo sapien
gtggtgtgaggggtggagtctgtgg

SEQ ID NO: 1759591 - DNA, 25 bp, Homo sapien
ctggtggtgtgaggggtggagtctg

SEQ ID NO: 1759592 - DNA, 25 bp, Homo sapien
gtcaggcttctgaccctgaagctgg

SEQ ID NO: 1759593 - DNA, 25 bp, Homo sapien
agaagaccagacttgtttccttcgg

SEQ ID NO: 1759594 - DNA, 25 bp, Homo sapien
gcaatctcgctatgaataggtctgg

SEQ ID NO: 1759595 - DNA, 25 bp, Homo sapien
gctcccctctggaattgtgggaggt

SEQ ID NO: 1759596 - DNA, 25 bp, Homo sapien
gctgaccatgagcacggttgctgtc

SEQ ID NO: 1759597 - DNA, 25 bp, Homo sapien
catgagcacggttgctgtcaacagg

SEQ ID NO: 1759598 - DNA, 25 bp, Homo sapien
gcagctgaccatgagcacggttgct

SEQ ID NO: 1759599 - DNA, 25 bp, Homo sapien
accatgagcacggttgctgtcaaca

SEQ ID NO: 1759600 - DNA, 25 bp, Homo sapien
tctgggaagagcaatcaggccatct

SEQ ID NO: 1759601 - DNA, 25 bp, Homo sapien
caggccctcttggttgagatgagaa

SEQ ID NO: 1759602 - DNA, 25 bp, Homo sapien
tgttcccatcttaagggaatccagg

SEQ ID NO: 1759603 - DNA, 25 bp, Homo sapien
gagagccccactctggttaggaggc

SEQ ID NO: 1759604 - DNA, 25 bp, Homo sapien
cgggggaggtaaggatggcaaggca

SEQ ID NO: 1759605 - DNA, 25 bp, Homo sapien
catggaaatcccacgccaacttcag

SEQ ID NO: 1759606 - DNA, 25 bp, Homo sapien
cctcggtgtcaagaatcagctttat

SEQ ID NO: 1759607 - DNA, 25 bp, Homo sapien
gcctaagaccctatccaagagaagt

SEQ ID NO: 1759608 - DNA, 25 bp, Homo sapien
caaaaaattgcaggtttaagccact

SEQ ID NO: 1759609 - DNA, 25 bp, Homo sapien
acaaaggtcgtttcttccagtgtgg

SEQ ID NO: 1759610 - DNA, 25 bp, Homo sapien
agtttgcaaaccacacctccaggta

SEQ ID NO: 1759611 - DNA, 25 bp, Homo sapien
tagtgtcacacccattgtacggagg

SEQ ID NO: 1759612 - DNA, 25 bp, Homo sapien
gagacagcgtgttagcccaatgcca

SEQ ID NO: 1759613 - DNA, 25 bp, Homo sapien
ggacactaaggagggatctggcatc

SEQ ID NO: 1759614 - DNA, 25 bp, Homo sapien
tgacacaggattggtagccagctca

SEQ ID NO: 1759615 - DNA, 25 bp, Homo sapien
gaaacatgagctgcttaacgtggct

SEQ ID NO: 1759616 - DNA, 25 bp, Homo sapien
tctggtttcgactactctggaggct

SEQ ID NO: 1759617 - DNA, 25 bp, Homo sapien
cctgagccttagacggtgagggaac

SEQ ID NO: 1759618 - DNA, 25 bp, Homo sapien
tcctgttctggaagaagtccctgag

SEQ ID NO: 1759619 - DNA, 25 bp, Homo sapien
tcagccagtgtcagatgcgtgagcc

SEQ ID NO: 1759620 - DNA, 25 bp, Homo sapien
gcatcatttgaagtataagacccag

SEQ ID NO: 1759621 - DNA, 25 bp, Homo sapien
tcacaggtggggcttcggaagaggg

SEQ ID NO: 1759622 - DNA, 25 bp, Homo sapien
ttgagctccctgaacaaaagggctt

SEQ ID NO: 1759623 - DNA, 25 bp, Homo sapien
cacaggtggggcttcggaagaggga

SEQ ID NO: 1759624 - DNA, 25 bp, Homo sapien
agctccctgaacaaaagggctttgt

SEQ ID NO: 1759625 - DNA, 25 bp, Homo sapien
tcaccagagggttgcatcgggttag

SEQ ID NO: 1759626 - DNA, 25 bp, Homo sapien
tctccaatgggagatggttcaattc

SEQ ID NO: 1759627 - DNA, 25 bp, Homo sapien
gaagagctatgaccccaggtggcat

SEQ ID NO: 1759628 - DNA, 25 bp, Homo sapien
tctgtgctttcaggacactgggctt

SEQ ID NO: 1759629 - DNA, 25 bp, Homo sapien
cctttgcacccaggtacattgtgga

SEQ ID NO: 1759630 - DNA, 25 bp, Homo sapien
cattagcagaggatgcctttgcacc

SEQ ID NO: 1759631 - DNA, 25 bp, Homo sapien
gcagggctatttttccttcagggat

SEQ ID NO: 1759632 - DNA, 25 bp, Homo sapien
agcaatccttgagagccagctctgg

SEQ ID NO: 1759633 - DNA, 25 bp, Homo sapien
tcctctcttagacccttgcctggcc

SEQ ID NO: 1759634 - DNA, 25 bp, Homo sapien
gcagcatgcacagataaggatttct

SEQ ID NO: 1759635 - DNA, 25 bp, Homo sapien
cttgcctggccctaacctctctgga

SEQ ID NO: 1759636 - DNA, 25 bp, Homo sapien
gagtctacatattcctgaggttaac

SEQ ID NO: 1759637 - DNA, 25 bp, Homo sapien
aactgctgagtgttacttcggcccc

SEQ ID NO: 1759638 - DNA, 25 bp, Homo sapien
ggcaaattagcaaagtatccaggtg

SEQ ID NO: 1759639 - DNA, 25 bp, Homo sapien
tgtgagatcaccctctgtttggtac

SEQ ID NO: 1759640 - DNA, 25 bp, Homo sapien
cttcggccccaataagaaatgactt

SEQ ID NO: 1759641 - DNA, 25 bp, Homo sapien
tttgtagtcatgcaccaagtgacag

SEQ ID NO: 1759642 - DNA, 25 bp, Homo sapien
cagcaaaatctactcaacacgaaag

SEQ ID NO: 1759643 - DNA, 25 bp, Homo sapien
cacgaaagcaattctgatgagtaag

SEQ ID NO: 1759644 - DNA, 25 bp, Homo sapien
caagtgacagagtaacagttccagt

SEQ ID NO: 1759645 - DNA, 25 bp, Homo sapien
cgtgcatgacattgcaatacaatca

SEQ ID NO: 1759646 - DNA, 25 bp, Homo sapien
cacacatgcttgcttgtggatacca

SEQ ID NO: 1759647 - DNA, 25 bp, Homo sapien
gcatgtgaatgtactccaacacacg

SEQ ID NO: 1759648 - DNA, 25 bp, Homo sapien
tttccacccaaagtagattagctag

SEQ ID NO: 1759649 - DNA, 25 bp, Homo sapien
cttgttgctggccagtgtaacaagg

SEQ ID NO: 1759650 - DNA, 25 bp, Homo sapien
ctggccagtgtaacaagggggacct

SEQ ID NO: 1759651 - DNA, 25 bp, Homo sapien
ggccaccagcctgaactagacttca

SEQ ID NO: 1759652 - DNA, 25 bp, Homo sapien
gccaccagcctgaactagacttcat

SEQ ID NO: 1759653 - DNA, 25 bp, Homo sapien
catatggtgcataacacaggcacca

SEQ ID NO: 1759654 - DNA, 25 bp, Homo sapien
gcacacagctggaaccgaaattcag

SEQ ID NO: 1759655 - DNA, 25 bp, Homo sapien
caggcaccaaggattcggggttagc

SEQ ID NO: 1759656 - DNA, 25 bp, Homo sapien
agcatatggtgcataacacaggcac

SEQ ID NO: 1759657 - DNA, 25 bp, Homo sapien
ggattctgcccagagctgtggagcc

SEQ ID NO: 1759658 - DNA, 25 bp, Homo sapien
agtgggactgcggttcccctggtct

SEQ ID NO: 1759659 - DNA, 25 bp, Homo sapien
ttcctctttgccagatcagacccag

SEQ ID NO: 1759660 - DNA, 25 bp, Homo sapien
tggtcttctctgtgtgggagcagca

SEQ ID NO: 1759661 - DNA, 25 bp, Homo sapien
tgttacctgaagtcttggcaagggt

SEQ ID NO: 1759662 - DNA, 25 bp, Homo sapien
tacctgaagtcttggcaagggttgg

SEQ ID NO: 1759663 - DNA, 25 bp, Homo sapien
ccgggcccagcatgtgcccatccat

SEQ ID NO: 1759664 - DNA, 25 bp, Homo sapien
tgaggaacagggggacgagctgggt

SEQ ID NO: 1759665 - DNA, 25 bp, Homo sapien
gctgtctgagagttttacctgcact

SEQ ID NO: 1759666 - DNA, 25 bp, Homo sapien
tgtttatcgatttagcaatatccca

SEQ ID NO: 1759667 - DNA, 25 bp, Homo sapien
ccattttgtggaaatgctgtctgag

SEQ ID NO: 1759668 - DNA, 25 bp, Homo sapien
ccatctgtttgccttagtgttattg

SEQ ID NO: 1759669 - DNA, 25 bp, Homo sapien
acccagacgtcccatggtacctgag

SEQ ID NO: 1759670 - DNA, 25 bp, Homo sapien
actcttgctctcgtgggcacccaga

SEQ ID NO: 1759671 - DNA, 25 bp, Homo sapien
gaacctgatccctccagagtcagct

SEQ ID NO: 1759672 - DNA, 25 bp, Homo sapien
cgtcccatggtacctgagtgtgcac

SEQ ID NO: 1759673 - DNA, 25 bp, Homo sapien
cacagagagtgtagagattgcatcc

SEQ ID NO: 1759674 - DNA, 25 bp, Homo sapien
caaaagaaacttcgtctggaaccag

SEQ ID NO: 1759675 - DNA, 25 bp, Homo sapien
tccctggaggctagcaaacgacaaa

SEQ ID NO: 1759676 - DNA, 25 bp, Homo sapien
aaccagtcaaagtcgggagacctgc

SEQ ID NO: 1759677 - DNA, 25 bp, Homo sapien
ccagtggaaatgccaggaagtgcct

SEQ ID NO: 1759678 - DNA, 25 bp, Homo sapien
agggagagacactgaagtctccagc

SEQ ID NO: 1759679 - DNA, 25 bp, Homo sapien
agtggggtcgtctggaattcctgcc

SEQ ID NO: 1759680 - DNA, 25 bp, Homo sapien
gtctccagcggggatccttgctcca

SEQ ID NO: 1759681 - DNA, 25 bp, Homo sapien
ccctaaatagcgctgggcagtgaaa

SEQ ID NO: 1759682 - DNA, 25 bp, Homo sapien
atccctcgggccctaaatagcgctg

SEQ ID NO: 1759683 - DNA, 25 bp, Homo sapien
ctcgggccctaaatagcgctgggca

SEQ ID NO: 1759684 - DNA, 25 bp, Homo sapien
ggcagtgaaaggtgctctgtcagtc

SEQ ID NO: 1759685 - DNA, 25 bp, Homo sapien
gacgactcctaccttcttggtgcat

SEQ ID NO: 1759686 - DNA, 25 bp, Homo sapien
ttactgacgactcctaccttcttgg

SEQ ID NO: 1759687 - DNA, 25 bp, Homo sapien
gactcctaccttcttggtgcattta

SEQ ID NO: 1759688 - DNA, 25 bp, Homo sapien
tcccatatttactgacgactcctac

SEQ ID NO: 1759689 - DNA, 25 bp, Homo sapien
cagaaggagcaaaatgttacttgca

SEQ ID NO: 1759690 - DNA, 25 bp, Homo sapien
gaggcttatatatcggtcatgcaca

SEQ ID NO: 1759691 - DNA, 25 bp, Homo sapien
taaaggcattcaagagacaccagag

SEQ ID NO: 1759692 - DNA, 25 bp, Homo sapien
aatgtggagccagggccactaggca

SEQ ID NO: 1759693 - DNA, 25 bp, Homo sapien
cagtctgttgcacataccatcaggg

SEQ ID NO: 1759694 - DNA, 25 bp, Homo sapien
gtatcttgaggtcttgctgaattca

SEQ ID NO: 1759695 - DNA, 25 bp, Homo sapien
acatttttatgcttatatatcttta

SEQ ID NO: 1759696 - DNA, 25 bp, Homo sapien
catttttatgcttatatatctttat

SEQ ID NO: 1759697 - DNA, 25 bp, Homo sapien
gatcatagtttactccaggcttgaa

SEQ ID NO: 1759698 - DNA, 25 bp, Homo sapien
agtacattaaatggccaccacggtg

SEQ ID NO: 1759699 - DNA, 25 bp, Homo sapien
caaggtcaaactgtgctgaggcagc

SEQ ID NO: 1759700 - DNA, 25 bp, Homo sapien
ttcaatgatgcagggccagggttgc

SEQ ID NO: 1759701 - DNA, 25 bp, Homo sapien
tgagcaggagaaggagattccagtc

SEQ ID NO: 1759702 - DNA, 25 bp, Homo sapien
attccagtctaggtctcccgtggcc

SEQ ID NO: 1759703 - DNA, 25 bp, Homo sapien
ctaggtctcccgtggccaatcgttt

SEQ ID NO: 1759704 - DNA, 25 bp, Homo sapien
caatcgttttttgttcgtgcatcat

SEQ ID NO: 1759705 - DNA, 25 bp, Homo sapien
tgtgatgagcactggagatagcagc

SEQ ID NO: 1759706 - DNA, 25 bp, Homo sapien
gggtcccgccaacgcatgcgtagaa

SEQ ID NO: 1759707 - DNA, 25 bp, Homo sapien
cgcatgcgtagaagctccgaggcgt

SEQ ID NO: 1759708 - DNA, 25 bp, Homo sapien
cagcggctgcgaggttcaattcatc

SEQ ID NO: 1759709 - DNA, 25 bp, Homo sapien
aggcgggccggggaatgagcttggc

SEQ ID NO: 1759710 - DNA, 25 bp, Homo sapien
ggccggggaatgagcttggcgaggg

SEQ ID NO: 1759711 - DNA, 25 bp, Homo sapien
agaggcgggccggggaatgagcttg

SEQ ID NO: 1759712 - DNA, 25 bp, Homo sapien
cgggccggggaatgagcttggcgag

SEQ ID NO: 1759713 - DNA, 25 bp, Homo sapien
gccgccccggcagccagaccgcagg

SEQ ID NO: 1759714 - DNA, 25 bp, Homo sapien
cgccccggcagccagaccgcagggc

SEQ ID NO: 1759715 - DNA, 25 bp, Homo sapien
gccgccgccccggcagccagaccgc

SEQ ID NO: 1759716 - DNA, 25 bp, Homo sapien
cgccgccccggcagccagaccgcag

SEQ ID NO: 1759717 - DNA, 25 bp, Homo sapien
tccatggtaaccgtacacaaactac

SEQ ID NO: 1759718 - DNA, 25 bp, Homo sapien
tctccatggtaaccgtacacaaact

SEQ ID NO: 1759719 - DNA, 25 bp, Homo sapien
gcagcatcctcaccccgcccggcca

SEQ ID NO: 1759720 - DNA, 25 bp, Homo sapien
gtctccatggtaaccgtacacaaac

SEQ ID NO: 1759721 - DNA, 25 bp, Homo sapien
tctaccccatccgaggacacacagg

SEQ ID NO: 1759722 - DNA, 25 bp, Homo sapien
ccatccgaggacacacaggcggacg

SEQ ID NO: 1759723 - DNA, 25 bp, Homo sapien
ctctctaccccatccgaggacacac

SEQ ID NO: 1759724 - DNA, 25 bp, Homo sapien
tccgaggacacacaggcggacgacg

SEQ ID NO: 1759725 - DNA, 25 bp, Homo sapien
taaaatattcttcagatagacacca

SEQ ID NO: 1759726 - DNA, 25 bp, Homo sapien
aaatattcttcagatagacaccaca

SEQ ID NO: 1759727 - DNA, 25 bp, Homo sapien
atattcttcagatagacaccacacc

SEQ ID NO: 1759728 - DNA, 25 bp, Homo sapien
gtaaaatattcttcagatagacacc

SEQ ID NO: 1759729 - DNA, 25 bp, Homo sapien
tagttttctttgagcctcctgtggt

SEQ ID NO: 1759730 - DNA, 25 bp, Homo sapien
gggttctaactgttcttaatgcatt

SEQ ID NO: 1759731 - DNA, 25 bp, Homo sapien
tgttcttgaggatgcaggtccgaat

SEQ ID NO: 1759732 - DNA, 25 bp, Homo sapien
tctgcttggacactgaaggttgata

SEQ ID NO: 1759733 - DNA, 25 bp, Homo sapien
tgactcaaaactggatgcatggagg

SEQ ID NO: 1759734 - DNA, 25 bp, Homo sapien
gaatcagatgactcaaaactggatg

SEQ ID NO: 1759735 - DNA, 25 bp, Homo sapien
ccagagataggcctggaatcagatg

SEQ ID NO: 1759736 - DNA, 25 bp, Homo sapien
cagctctagtggactaagacgtgtg

SEQ ID NO: 1759737 - DNA, 25 bp, Homo sapien
caataaggtagagccaccgagctgc

SEQ ID NO: 1759738 - DNA, 25 bp, Homo sapien
taacaagccatgtgtcaacaatagc

SEQ ID NO: 1759739 - DNA, 25 bp, Homo sapien
cgagctgccgaactgggtcctcagg

SEQ ID NO: 1759740 - DNA, 25 bp, Homo sapien
caagtggttcccaaggttgtagacg

SEQ ID NO: 1759741 - DNA, 25 bp, Homo sapien
cagagtagctggggttagaggcatg

SEQ ID NO: 1759742 - DNA, 25 bp, Homo sapien
ccagagtagctggggttagaggcat

SEQ ID NO: 1759743 - DNA, 25 bp, Homo sapien
cgccaccacacctggctaatgttta

SEQ ID NO: 1759744 - DNA, 25 bp, Homo sapien
gctcttccagatcacccaacagggt

SEQ ID NO: 1759745 - DNA, 25 bp, Homo sapien
caagcaccgtcaccttggccaattt

SEQ ID NO: 1759746 - DNA, 25 bp, Homo sapien
cacaattcttccaagcaccgtcacc

SEQ ID NO: 1759747 - DNA, 25 bp, Homo sapien
ggtctcccccgatcctatgtgacaa

SEQ ID NO: 1759748 - DNA, 25 bp, Homo sapien
gagaaggacccactcactagttatg

SEQ ID NO: 1759749 - DNA, 25 bp, Homo sapien
gacagtagtctccttcttacagggc

SEQ ID NO: 1759750 - DNA, 25 bp, Homo sapien
ctagttatgtgaacttgtgcaggcc

SEQ ID NO: 1759751 - DNA, 25 bp, Homo sapien
gaaactgcccagctataacacagag

SEQ ID NO: 1759752 - DNA, 25 bp, Homo sapien
tgggagatgctggaactttcggttt

SEQ ID NO: 1759753 - DNA, 25 bp, Homo sapien
tcttctaatcttcgcagggtccact

SEQ ID NO: 1759754 - DNA, 25 bp, Homo sapien
taatcttcgcagggtccactggggg

SEQ ID NO: 1759755 - DNA, 25 bp, Homo sapien
tctaatcttcgcagggtccactggg

SEQ ID NO: 1759756 - DNA, 25 bp, Homo sapien
ttctaatcttcgcagggtccactgg

SEQ ID NO: 1759757 - DNA, 25 bp, Homo sapien
gaggaagggatctgtccggcagaag

SEQ ID NO: 1759758 - DNA, 25 bp, Homo sapien
gaggcagccctgaataagcgagccc

SEQ ID NO: 1759759 - DNA, 25 bp, Homo sapien
aataagcgagccctggcgttgctta

SEQ ID NO: 1759760 - DNA, 25 bp, Homo sapien
agccctgaataagcgagccctggcg

SEQ ID NO: 1759761 - DNA, 25 bp, Homo sapien
tgcaaattcaagaagcatgcctgtc

SEQ ID NO: 1759762 - DNA, 25 bp, Homo sapien
tttgtgtgcaaattcaagaagcatg

SEQ ID NO: 1759763 - DNA, 25 bp, Homo sapien
gcctgtccccagagattacaggatg

SEQ ID NO: 1759764 - DNA, 25 bp, Homo sapien
cccagagattacaggatgttacatg

SEQ ID NO: 1759765 - DNA, 25 bp, Homo sapien
cagacggtggtttaagagcagcaaa

SEQ ID NO: 1759766 - DNA, 25 bp, Homo sapien
caggcctcttgtctggcttgaataa

SEQ ID NO: 1759767 - DNA, 25 bp, Homo sapien
gaatgcagactcgagagctagtcag

SEQ ID NO: 1759768 - DNA, 25 bp, Homo sapien
gaggaggtggtactgctctcaggcc

SEQ ID NO: 1759769 - DNA, 25 bp, Homo sapien
ggataaagggataaggctgctgctc

SEQ ID NO: 1759770 - DNA, 25 bp, Homo sapien
gctcacagccatgtcgtgttgggag

SEQ ID NO: 1759771 - DNA, 25 bp, Homo sapien
catggtcccctgggataaagggata

SEQ ID NO: 1759772 - DNA, 25 bp, Homo sapien
cagccatgtcgtgttgggagctcag

SEQ ID NO: 1759773 - DNA, 25 bp, Homo sapien
tttctttggattccactgtcttctt

SEQ ID NO: 1759774 - DNA, 25 bp, Homo sapien
ctgtttctttggattccactgtctt

SEQ ID NO: 1759775 - DNA, 25 bp, Homo sapien
tctttggattccactgtcttctttg

SEQ ID NO: 1759776 - DNA, 25 bp, Homo sapien
aactgtttctttggattccactgtc

SEQ ID NO: 1759777 - DNA, 25 bp, Homo sapien
cctccatcatcagttagctgaagtg

SEQ ID NO: 1759778 - DNA, 25 bp, Homo sapien
ggtgactctttaagtggcaaatagc

SEQ ID NO: 1759779 - DNA, 25 bp, Homo sapien
atgagatggtaaagatgttgttcct

SEQ ID NO: 1759780 - DNA, 25 bp, Homo sapien
tgttgttcctttgaacatttcttgc

SEQ ID NO: 1759781 - DNA, 25 bp, Homo sapien
ataaatgaaaatgcccctgctgtcc

SEQ ID NO: 1759782 - DNA, 25 bp, Homo sapien
gccacatctgaaggtttgcaaataa

SEQ ID NO: 1759783 - DNA, 25 bp, Homo sapien
tgaggaagaagtgctaactgatttg

SEQ ID NO: 1759784 - DNA, 25 bp, Homo sapien
tatatgatgcaaaagccgtcctaac

SEQ ID NO: 1759785 - DNA, 25 bp, Homo sapien
ttgtgcctttaaccagaagccctct

SEQ ID NO: 1759786 - DNA, 25 bp, Homo sapien
gaaggcctgtttgctagacagacca

SEQ ID NO: 1759787 - DNA, 25 bp, Homo sapien
gtgtagttcagggtcgtagccattt

SEQ ID NO: 1759788 - DNA, 25 bp, Homo sapien
caaaaatcaagcctatactgcagtg

SEQ ID NO: 1759789 - DNA, 25 bp, Homo sapien
tagtttgtgaacctggagaaagagc

SEQ ID NO: 1759790 - DNA, 25 bp, Homo sapien
tggtgaaagtcccatgaaggaatgc

SEQ ID NO: 1759791 - DNA, 25 bp, Homo sapien
cacagggaagacagggctaaccctt

SEQ ID NO: 1759792 - DNA, 25 bp, Homo sapien
cacagctggatctagaggtttatat

SEQ ID NO: 1759793 - DNA, 25 bp, Homo sapien
agaaaagaaagcaagccagccacgg

SEQ ID NO: 1759794 - DNA, 25 bp, Homo sapien
aaagaaagcaagccagccacggtgg

SEQ ID NO: 1759795 - DNA, 25 bp, Homo sapien
aaagaaaagaaagcaagccagccac

SEQ ID NO: 1759796 - DNA, 25 bp, Homo sapien
aaaagaaagcaagccagccacggtg

SEQ ID NO: 1759797 - DNA, 25 bp, Homo sapien
taaggatccatagagagagcgaacg

SEQ ID NO: 1759798 - DNA, 25 bp, Homo sapien
tagctggctcacatgtaaccaggag

SEQ ID NO: 1759799 - DNA, 25 bp, Homo sapien
gcaggtcgctgtgatgcacacaaaa

SEQ ID NO: 1759800 - DNA, 25 bp, Homo sapien
cattacctttgctgacctgggagta

SEQ ID NO: 1759801 - DNA, 25 bp, Homo sapien
agggagtctcactccatcgcctagg

SEQ ID NO: 1759802 - DNA, 25 bp, Homo sapien
ctacaggtgcctgtcactatgccca

SEQ ID NO: 1759803 - DNA, 25 bp, Homo sapien
actacaggtgcctgtcactatgccc

SEQ ID NO: 1759804 - DNA, 25 bp, Homo sapien
gagagggagtctcactccatcgcct

SEQ ID NO: 1759805 - DNA, 25 bp, Homo sapien
catagacattactgccttctggcac

SEQ ID NO: 1759806 - DNA, 25 bp, Homo sapien
gccgggagagccatatgaaactttc

SEQ ID NO: 1759807 - DNA, 25 bp, Homo sapien
caactggactggcaatacaattctt

SEQ ID NO: 1759808 - DNA, 25 bp, Homo sapien
gatgaatgggtcttcacaaagagag

SEQ ID NO: 1759809 - DNA, 25 bp, Homo sapien
cctttctttcctccagcatttgagt

SEQ ID NO: 1759810 - DNA, 25 bp, Homo sapien
tctttcctccagcatttgagttcat

SEQ ID NO: 1759811 - DNA, 25 bp, Homo sapien
tttctttcctccagcatttgagttc

SEQ ID NO: 1759812 - DNA, 25 bp, Homo sapien
ccctttctttcctccagcatttgag

SEQ ID NO: 1759813 - DNA, 25 bp, Homo sapien
ctgtgttaaccagtgccatgcaggg

SEQ ID NO: 1759814 - DNA, 25 bp, Homo sapien
gctactgtgttaaccagtgccatgc

SEQ ID NO: 1759815 - DNA, 25 bp, Homo sapien
ctgtgaggatttcgttcagtacagg

SEQ ID NO: 1759816 - DNA, 25 bp, Homo sapien
agtggctgtgactggcctcttctgc

SEQ ID NO: 1759817 - DNA, 25 bp, Homo sapien
gatttcgttcagtacagggagcagt

SEQ ID NO: 1759818 - DNA, 25 bp, Homo sapien
gaggatttcgttcagtacagggagc

SEQ ID NO: 1759819 - DNA, 25 bp, Homo sapien
tgatgaggccctcgcatgtctcttc

SEQ ID NO: 1759820 - DNA, 25 bp, Homo sapien
gggcatgatgaggccctcgcatgtc

SEQ ID NO: 1759821 - DNA, 25 bp, Homo sapien
catgatgaggccctcgcatgtctct

SEQ ID NO: 1759822 - DNA, 25 bp, Homo sapien
gtctgagctactggggcatgatgag

SEQ ID NO: 1759823 - DNA, 25 bp, Homo sapien
tatttctgcgtcctcttcttgcagg

SEQ ID NO: 1759824 - DNA, 25 bp, Homo sapien
ccaaaagacttcgtctacttctatt

SEQ ID NO: 1759825 - DNA, 25 bp, Homo sapien
cacgcaaaatcggtacaatccttgt

SEQ ID NO: 1759826 - DNA, 25 bp, Homo sapien
tccttgtattccaaaagacttcgtc

SEQ ID NO: 1759827 - DNA, 25 bp, Homo sapien
gccagtttatgagactcagcttcca

SEQ ID NO: 1759828 - DNA, 25 bp, Homo sapien
ggacagataccagttggaccaagga

SEQ ID NO: 1759829 - DNA, 25 bp, Homo sapien
cacacctgtcaaggacgccagttta

SEQ ID NO: 1759830 - DNA, 25 bp, Homo sapien
ttggaccaaggaaaccacgggcaca

SEQ ID NO: 1759831 - DNA, 25 bp, Homo sapien
cctggttaacttcagaaagagaatc

SEQ ID NO: 1759832 - DNA, 25 bp, Homo sapien
tctccctagggctatgaccactgct

SEQ ID NO: 1759833 - DNA, 25 bp, Homo sapien
ccagaggagcctggttaacttcaga

SEQ ID NO: 1759834 - DNA, 25 bp, Homo sapien
ctgggctctccctagggctatgacc

SEQ ID NO: 1759835 - DNA, 25 bp, Homo sapien
catgatgaagttgtgtgcaagcagc

SEQ ID NO: 1759836 - DNA, 25 bp, Homo sapien
gagtctgaaccaacatcaactagtt

SEQ ID NO: 1759837 - DNA, 25 bp, Homo sapien
ttgcaagtttaaggctgagcgagtc

SEQ ID NO: 1759838 - DNA, 25 bp, Homo sapien
ttccttcctctaaagcatgatgaag

SEQ ID NO: 1759839 - DNA, 25 bp, Homo sapien
gatatagtctactagaccagaggaa

SEQ ID NO: 1759840 - DNA, 25 bp, Homo sapien
agtctactagaccagaggaaagaaa

SEQ ID NO: 1759841 - DNA, 25 bp, Homo sapien
tgtgatatagtctactagaccagag

SEQ ID NO: 1759842 - DNA, 25 bp, Homo sapien
tatagtctactagaccagaggaaag

SEQ ID NO: 1759843 - DNA, 25 bp, Homo sapien
caaagcttgtacttgtatgaaacca

SEQ ID NO: 1759844 - DNA, 25 bp, Homo sapien
gagctgaataagaatgtagcctccc

SEQ ID NO: 1759845 - DNA, 25 bp, Homo sapien
ccagagccctggagtgatatcacta

SEQ ID NO: 1759846 - DNA, 25 bp, Homo sapien
taactaacagtaagtacgccaacac

SEQ ID NO: 1759847 - DNA, 25 bp, Homo sapien
cagtcagtgcaaatttgtaccgctt

SEQ ID NO: 1759848 - DNA, 25 bp, Homo sapien
tgtaccgcttctccattgttaaccg

SEQ ID NO: 1759849 - DNA, 25 bp, Homo sapien
ctccattgttaaccgtaaaattatg

SEQ ID NO: 1759850 - DNA, 25 bp, Homo sapien
agtgcaaatttgtaccgcttctcca

SEQ ID NO: 1759851 - DNA, 25 bp, Homo sapien
tcagttgtaccagtgaaggacaaga

SEQ ID NO: 1759852 - DNA, 25 bp, Homo sapien
tacaagcatctcaagcacgagtggc

SEQ ID NO: 1759853 - DNA, 25 bp, Homo sapien
cctagtggcattttcggagcgtttc

SEQ ID NO: 1759854 - DNA, 25 bp, Homo sapien
gagctgccaagctggatcttgatgg

SEQ ID NO: 1759855 - DNA, 25 bp, Homo sapien
cggacaccaggactctaagatagcg

SEQ ID NO: 1759856 - DNA, 25 bp, Homo sapien
cacctgggcatgtattaggaatgca

SEQ ID NO: 1759857 - DNA, 25 bp, Homo sapien
taacacatggcagaatggagattcc

SEQ ID NO: 1759858 - DNA, 25 bp, Homo sapien
gaaacactgttgtggaagcttcaga

SEQ ID NO: 1759859 - DNA, 25 bp, Homo sapien
tttactgggcacctgatgtgtacca

SEQ ID NO: 1759860 - DNA, 25 bp, Homo sapien
gcagtgatgccgccattacagctca

SEQ ID NO: 1759861 - DNA, 25 bp, Homo sapien
tgatgtgtaccaggcgctatgctgc

SEQ ID NO: 1759862 - DNA, 25 bp, Homo sapien
cagcctcccacattttattaatgag

SEQ ID NO: 1759863 - DNA, 25 bp, Homo sapien
attaagaagattctttctactcact

SEQ ID NO: 1759864 - DNA, 25 bp, Homo sapien
gtactggttttgtccctatctgcca

SEQ ID NO: 1759865 - DNA, 25 bp, Homo sapien
tatcctatgttgcaaaaagagaact

SEQ ID NO: 1759866 - DNA, 25 bp, Homo sapien
tagtcatccctagtatattaaaaga

SEQ ID NO: 1759867 - DNA, 25 bp, Homo sapien
catgttgatgtcaggtttctataac

SEQ ID NO: 1759868 - DNA, 25 bp, Homo sapien
gcccgaattaggcaaaaatgtacca

SEQ ID NO: 1759869 - DNA, 25 bp, Homo sapien
ccagaaatgaactttatagacccca

SEQ ID NO: 1759870 - DNA, 25 bp, Homo sapien
aggtcttcacttcttagtacctcca

SEQ ID NO: 1759871 - DNA, 25 bp, Homo sapien
ctggactagcaagtggcccgaatta

SEQ ID NO: 1759872 - DNA, 25 bp, Homo sapien
cgctttgacttgatgcacaggtggc

SEQ ID NO: 1759873 - DNA, 25 bp, Homo sapien
cctccttggtggtgcaatttactac

SEQ ID NO: 1759874 - DNA, 25 bp, Homo sapien
caagttccagggagctcaccctaaa

SEQ ID NO: 1759875 - DNA, 25 bp, Homo sapien
gcctgcccgactgtagctctttaaa

SEQ ID NO: 1759876 - DNA, 25 bp, Homo sapien
ttccgaggctgatcagtcacttcct

SEQ ID NO: 1759877 - DNA, 25 bp, Homo sapien
ctcttccgtgttaccaaagcatcct

SEQ ID NO: 1759878 - DNA, 25 bp, Homo sapien
cttccgtgttaccaaagcatcctgt

SEQ ID NO: 1759879 - DNA, 25 bp, Homo sapien
gtgaagtcctttccgaggctgatca

SEQ ID NO: 1759880 - DNA, 25 bp, Homo sapien
caccagggaatgtgagcctaggcac

SEQ ID NO: 1759881 - DNA, 25 bp, Homo sapien
tagctaagcaaagctcccgctatgc

SEQ ID NO: 1759882 - DNA, 25 bp, Homo sapien
tcttagtaagcaattggtatacccc

SEQ ID NO: 1759883 - DNA, 25 bp, Homo sapien
tgtgggacactacaggaaagctact

SEQ ID NO: 1759884 - DNA, 25 bp, Homo sapien
tattctggcaatattggtacagacg

SEQ ID NO: 1759885 - DNA, 25 bp, Homo sapien
agggcactgatgtttaggaacttac

SEQ ID NO: 1759886 - DNA, 25 bp, Homo sapien
tactgttccattgccgtgcagagct

SEQ ID NO: 1759887 - DNA, 25 bp, Homo sapien
ggtacagacgtccttgtcacccttg

SEQ ID NO: 1759888 - DNA, 25 bp, Homo sapien
gaaataaggcataacatctggaata

SEQ ID NO: 1759889 - DNA, 25 bp, Homo sapien
tctggaatagctggccaaggctgtg

SEQ ID NO: 1759890 - DNA, 25 bp, Homo sapien
gcagtcacggtaagaagtaagtttg

SEQ ID NO: 1759891 - DNA, 25 bp, Homo sapien
aaggctgtgcagcagtcacggtaag

SEQ ID NO: 1759892 - DNA, 25 bp, Homo sapien
tccccatccgctgataagatcagtt

SEQ ID NO: 1759893 - DNA, 25 bp, Homo sapien
tcctgtgaagctccccatccgctga

SEQ ID NO: 1759894 - DNA, 25 bp, Homo sapien
agcaaacggccctggtgctacctgg

SEQ ID NO: 1759895 - DNA, 25 bp, Homo sapien
ctgataagatcagttcaagaggcat

SEQ ID NO: 1759896 - DNA, 25 bp, Homo sapien
gttccacaagggcaaagccggcagg

SEQ ID NO: 1759897 - DNA, 25 bp, Homo sapien
aatcaggcatttgggttccgtgctg

SEQ ID NO: 1759898 - DNA, 25 bp, Homo sapien
gctgagcggggtaagagccagttcc

SEQ ID NO: 1759899 - DNA, 25 bp, Homo sapien
taagttctttttcaagccagcagac

SEQ ID NO: 1759900 - DNA, 25 bp, Homo sapien
gaagccatctcacaggaggtcagca

SEQ ID NO: 1759901 - DNA, 25 bp, Homo sapien
tgagcaagtcagctttctagggccc

SEQ ID NO: 1759902 - DNA, 25 bp, Homo sapien
ccatgccagggcttgtcttgactca

SEQ ID NO: 1759903 - DNA, 25 bp, Homo sapien
tctatttagagagagcaccaattcc

SEQ ID NO: 1759904 - DNA, 25 bp, Homo sapien
aaaatagatttccttagtggtcatc

SEQ ID NO: 1759905 - DNA, 25 bp, Homo sapien
aatagatttccttagtggtcatcat

SEQ ID NO: 1759906 - DNA, 25 bp, Homo sapien
aaatagatttccttagtggtcatca

SEQ ID NO: 1759907 - DNA, 25 bp, Homo sapien
aaaaatagatttccttagtggtcat

SEQ ID NO: 1759908 - DNA, 25 bp, Homo sapien
cagctatccgtgttgatttgccagg

SEQ ID NO: 1759909 - DNA, 25 bp, Homo sapien
ccgtgttgatttgccaggatttaga

SEQ ID NO: 1759910 - DNA, 25 bp, Homo sapien
ccacctccagctatccgtgttgatt

SEQ ID NO: 1759911 - DNA, 25 bp, Homo sapien
gttgatttgccaggatttagatcag

SEQ ID NO: 1759912 - DNA, 25 bp, Homo sapien
tatgggatatttatgggccttaagt

SEQ ID NO: 1759913 - DNA, 25 bp, Homo sapien
aagaagctatgggatatttatgggc

SEQ ID NO: 1759914 - DNA, 25 bp, Homo sapien
gctatgggatatttatgggccttaa

SEQ ID NO: 1759915 - DNA, 25 bp, Homo sapien
gaagctatgggatatttatgggcct

SEQ ID NO: 1759916 - DNA, 25 bp, Homo sapien
tgaagagcttctcacctactgagaa

SEQ ID NO: 1759917 - DNA, 25 bp, Homo sapien
aacatatgtggggaaacggcaaaga

SEQ ID NO: 1759918 - DNA, 25 bp, Homo sapien
caagtctgaaagtcagtgctatgaa

SEQ ID NO: 1759919 - DNA, 25 bp, Homo sapien
cctactgagaagacaaggctaacat

SEQ ID NO: 1759920 - DNA, 25 bp, Homo sapien
tgcacttttctgtatataggctata

SEQ ID NO: 1759921 - DNA, 25 bp, Homo sapien
ggtggtggttacatgagtgacacct

SEQ ID NO: 1759922 - DNA, 25 bp, Homo sapien
tacgtagctacactactttaaggca

SEQ ID NO: 1759923 - DNA, 25 bp, Homo sapien
tgctaaattgtgcatacccgtttta

SEQ ID NO: 1759924 - DNA, 25 bp, Homo sapien
tccttcatcttaaattctggctcgc

SEQ ID NO: 1759925 - DNA, 25 bp, Homo sapien
agaacaattagttgagtgggacagc

SEQ ID NO: 1759926 - DNA, 25 bp, Homo sapien
gagaacaattagttgagtgggacag

SEQ ID NO: 1759927 - DNA, 25 bp, Homo sapien
ttaaattctggctcgcctttcttta

SEQ ID NO: 1759928 - DNA, 25 bp, Homo sapien
tgcagatccagctgatggaacgtct

SEQ ID NO: 1759929 - DNA, 25 bp, Homo sapien
ggaaaattgttcacgagcctggtta

SEQ ID NO: 1759930 - DNA, 25 bp, Homo sapien
tattttttgccgtcaggttgccaag

SEQ ID NO: 1759931 - DNA, 25 bp, Homo sapien
tgttggccagcacacgagtcagctt

SEQ ID NO: 1759932 - DNA, 25 bp, Homo sapien
ccgcgggaaagttggttgtgtctgc

SEQ ID NO: 1759933 - DNA, 25 bp, Homo sapien
agacacagaactgtctttgggccgc

SEQ ID NO: 1759934 - DNA, 25 bp, Homo sapien
gcagccagtgggctgcggttctcac

SEQ ID NO: 1759935 - DNA, 25 bp, Homo sapien
cagaactgtctttgggccgcgggaa

SEQ ID NO: 1759936 - DNA, 25 bp, Homo sapien
gactttctcatagggagccacttgt

SEQ ID NO: 1759937 - DNA, 25 bp, Homo sapien
gccacttgtgataataaaatcctca

SEQ ID NO: 1759938 - DNA, 25 bp, Homo sapien
catagggagccacttgtgataataa

SEQ ID NO: 1759939 - DNA, 25 bp, Homo sapien
catacagctaagactttctcatagg

SEQ ID NO: 1759940 - DNA, 25 bp, Homo sapien
atgtggattgcccacaatatttggg

SEQ ID NO: 1759941 - DNA, 25 bp, Homo sapien
aattttaatcatgtggattgcccac

SEQ ID NO: 1759942 - DNA, 25 bp, Homo sapien
tgtggattgcccacaatatttggga

SEQ ID NO: 1759943 - DNA, 25 bp, Homo sapien
taatcatgtggattgcccacaatat

SEQ ID NO: 1759944 - DNA, 25 bp, Homo sapien
ccagtcccagcctgcgagggaggcc

SEQ ID NO: 1759945 - DNA, 25 bp, Homo sapien
tgtcgctgtagcattgatcaccagc

SEQ ID NO: 1759946 - DNA, 25 bp, Homo sapien
gttgattgtcgctgtagcattgatc

SEQ ID NO: 1759947 - DNA, 25 bp, Homo sapien
aagataaattgttgattgtcgctgt

SEQ ID NO: 1759948 - DNA, 25 bp, Homo sapien
tgtagcattgatcaccagctcctca

SEQ ID NO: 1759949 - DNA, 25 bp, Homo sapien
gatttccgaaaacacgcacagcctc

SEQ ID NO: 1759950 - DNA, 25 bp, Homo sapien
gacatcatggtcctgggagagattt

SEQ ID NO: 1759951 - DNA, 25 bp, Homo sapien
tccatgttgttactgacaagaagct

SEQ ID NO: 1759952 - DNA, 25 bp, Homo sapien
tgcacaatgaaatcgcagacatcat

SEQ ID NO: 1759953 - DNA, 25 bp, Homo sapien
ctttcaagatgacacgcttgtcttt

SEQ ID NO: 1759954 - DNA, 25 bp, Homo sapien
gatgacacgcttgtctttatccaca

SEQ ID NO: 1759955 - DNA, 25 bp, Homo sapien
ggcagaaaagcagatatcctgatgc

SEQ ID NO: 1759956 - DNA, 25 bp, Homo sapien
cagtgagattgaggagaacaccaca

SEQ ID NO: 1759957 - DNA, 25 bp, Homo sapien
caaaacatgacgaagcattagtgat

SEQ ID NO: 1759958 - DNA, 25 bp, Homo sapien
agtaggacccaaatctcttaaacag

SEQ ID NO: 1759959 - DNA, 25 bp, Homo sapien
gacgaagcattagtgatgttttcac

SEQ ID NO: 1759960 - DNA, 25 bp, Homo sapien
agcaggccagctgccaatcagtagg

SEQ ID NO: 1759961 - DNA, 25 bp, Homo sapien
gatcaaaactgccatccagtgctag

SEQ ID NO: 1759962 - DNA, 25 bp, Homo sapien
aaggtgtgatgtctctgaattcggt

SEQ ID NO: 1759963 - DNA, 25 bp, Homo sapien
tgaattctgtttcccaatggagttt

SEQ ID NO: 1759964 - DNA, 25 bp, Homo sapien
aattcggtttagaagctgctgtgcc

SEQ ID NO: 1759965 - DNA, 25 bp, Homo sapien
aatgttcacgtttgttaccagttct

SEQ ID NO: 1759966 - DNA, 25 bp, Homo sapien
taatacctaacaagaagaaatgctt

SEQ ID NO: 1759967 - DNA, 25 bp, Homo sapien
gctactcactaaaaccagttcttga

SEQ ID NO: 1759968 - DNA, 25 bp, Homo sapien
gagacgtgagttctcgtttctactg

SEQ ID NO: 1759969 - DNA, 25 bp, Homo sapien
tatttgacatagtaagaattagtac

SEQ ID NO: 1759970 - DNA, 25 bp, Homo sapien
gatcctatgttgtaacgtgttccac

SEQ ID NO: 1759971 - DNA, 25 bp, Homo sapien
taacagccttcattgcacagttcat

SEQ ID NO: 1759972 - DNA, 25 bp, Homo sapien
tgttccactcatgttgcctaccctt

SEQ ID NO: 1759973 - DNA, 25 bp, Homo sapien
cctacaaaggatggcaagctaagaa

SEQ ID NO: 1759974 - DNA, 25 bp, Homo sapien
cacatgatacactggactgggccat

SEQ ID NO: 1759975 - DNA, 25 bp, Homo sapien
gcatggattcagattcaggtatacc

SEQ ID NO: 1759976 - DNA, 25 bp, Homo sapien
aattaagttacttgctccaggccca

SEQ ID NO: 1759977 - DNA, 25 bp, Homo sapien
agacataaaggccaatgtgtaaggg

SEQ ID NO: 1759978 - DNA, 25 bp, Homo sapien
ggactcccaagctggtcacatctgg

SEQ ID NO: 1759979 - DNA, 25 bp, Homo sapien
agagagagtgaaagacataaaggcc

SEQ ID NO: 1759980 - DNA, 25 bp, Homo sapien
atttgaagaccacttgaatggctgc

SEQ ID NO: 1759981 - DNA, 25 bp, Homo sapien
gagatgccggtcaactcagcagaaa

SEQ ID NO: 1759982 - DNA, 25 bp, Homo sapien
caatcacagtgtggatgagatgccg

SEQ ID NO: 1759983 - DNA, 25 bp, Homo sapien
ttaagactgtggagatattgggccc

SEQ ID NO: 1759984 - DNA, 25 bp, Homo sapien
cacattcggctgtggaatcagtcca

SEQ ID NO: 1759985 - DNA, 25 bp, Homo sapien
actgcggccgcggtcatgtaaatga

SEQ ID NO: 1759986 - DNA, 25 bp, Homo sapien
tcttgagggtgaaacagcctgtgga

SEQ ID NO: 1759987 - DNA, 25 bp, Homo sapien
caagctctatgacgttatgcacagc

SEQ ID NO: 1759988 - DNA, 25 bp, Homo sapien
tgtcgtctggacaagtctccacaag

SEQ ID NO: 1759989 - DNA, 25 bp, Homo sapien
gatttttcacctcgccgcgtcagac

SEQ ID NO: 1759990 - DNA, 25 bp, Homo sapien
ggtgatttttcacctcgccgcgtca

SEQ ID NO: 1759991 - DNA, 25 bp, Homo sapien
cccaaggtgatttttcacctcgccg

SEQ ID NO: 1759992 - DNA, 25 bp, Homo sapien
tgagaattagctgttcgtggggaac

SEQ ID NO: 1759993 - DNA, 25 bp, Homo sapien
tataggccaaagtcctgcattctgc

SEQ ID NO: 1759994 - DNA, 25 bp, Homo sapien
ccgattcagcgtcgtttgggcatta

SEQ ID NO: 1759995 - DNA, 25 bp, Homo sapien
tgtcagaatcagtctcgaggttggc

SEQ ID NO: 1759996 - DNA, 25 bp, Homo sapien
tggttctaggtaaatggccgagcag

SEQ ID NO: 1759997 - DNA, 25 bp, Homo sapien
tcattttttatcgtgctctacatgt

SEQ ID NO: 1759998 - DNA, 25 bp, Homo sapien
cactggcatcactggtttatacctt

SEQ ID NO: 1759999 - DNA, 25 bp, Homo sapien
taacagtctgccttcttacatttac

SEQ ID NO: 1760000 - DNA, 25 bp, Homo sapien
tacttcttaaccagaccactgcact

SEQ ID NO: 1760001 - DNA, 25 bp, Homo sapien
catcactggtttatacctttgttac

SEQ ID NO: 1760002 - DNA, 25 bp, Homo sapien
tcctataagaaaatttgggaccaca

SEQ ID NO: 1760003 - DNA, 25 bp, Homo sapien
aacacacactagatgctcagcaggc

SEQ ID NO: 1760004 - DNA, 25 bp, Homo sapien
gcctttgtccccaagagtcctgaac

SEQ ID NO: 1760005 - DNA, 25 bp, Homo sapien
tatgatgtgaactatagcagtggtg

SEQ ID NO: 1760006 - DNA, 25 bp, Homo sapien
ctttgttcgactgtcttctgtcatg

SEQ ID NO: 1760007 - DNA, 25 bp, Homo sapien
ggagatagcaagaaggcccttatca

SEQ ID NO: 1760008 - DNA, 25 bp, Homo sapien
aagaaggcccttatcagaccaaatg

SEQ ID NO: 1760009 - DNA, 25 bp, Homo sapien
agcaagaaggcccttatcagaccaa

SEQ ID NO: 1760010 - DNA, 25 bp, Homo sapien
tactgagcaactacaaagtgccagg

SEQ ID NO: 1760011 - DNA, 25 bp, Homo sapien
ccaaaatttgggtgctgtcaatgtg

SEQ ID NO: 1760012 - DNA, 25 bp, Homo sapien
tttgcaccaagctaataagccattg

SEQ ID NO: 1760013 - DNA, 25 bp, Homo sapien
gaggcttcacacagggtttggctaa

SEQ ID NO: 1760014 - DNA, 25 bp, Homo sapien
tcatacgagtgaaaaccagttgcct

SEQ ID NO: 1760015 - DNA, 25 bp, Homo sapien
gggctgcattgcttctatctctcag

SEQ ID NO: 1760016 - DNA, 25 bp, Homo sapien
tttgccaagaattgctgacaactta

SEQ ID NO: 1760017 - DNA, 25 bp, Homo sapien
tcaagtgtggatcgggatttcctgt

SEQ ID NO: 1760018 - DNA, 25 bp, Homo sapien
aaggctctataacccattcgtttgg

SEQ ID NO: 1760019 - DNA, 25 bp, Homo sapien
tctacagggtgactcctgggactca

SEQ ID NO: 1760020 - DNA, 25 bp, Homo sapien
ctgcaggaaggctctataacccatt

SEQ ID NO: 1760021 - DNA, 25 bp, Homo sapien
cattcgtttggtatactttcagaca

SEQ ID NO: 1760022 - DNA, 25 bp, Homo sapien
cataagggtatagctgtttgaggat

SEQ ID NO: 1760023 - DNA, 25 bp, Homo sapien
tcaggaacataagggtatagctgtt

SEQ ID NO: 1760024 - DNA, 25 bp, Homo sapien
ggaacataagggtatagctgtttga

SEQ ID NO: 1760025 - DNA, 25 bp, Homo sapien
taatcaggaacataagggtatagct

SEQ ID NO: 1760026 - DNA, 25 bp, Homo sapien
ggagaggcctgcctggctctagcag

SEQ ID NO: 1760027 - DNA, 25 bp, Homo sapien
catcttcctcgttcttcctttcctc

SEQ ID NO: 1760028 - DNA, 25 bp, Homo sapien
catgcctcagtgggagaggcctgcc

SEQ ID NO: 1760029 - DNA, 25 bp, Homo sapien
agaggcctgcctggctctagcagct

SEQ ID NO: 1760030 - DNA, 25 bp, Homo sapien
gaaaaagaccctcagagtcattccc

SEQ ID NO: 1760031 - DNA, 25 bp, Homo sapien
ggaaaaagaccctcagagtcattcc

SEQ ID NO: 1760032 - DNA, 25 bp, Homo sapien
aaaaagaccctcagagtcattccct

SEQ ID NO: 1760033 - DNA, 25 bp, Homo sapien
ggagaggttgcagagaggcagctgc

SEQ ID NO: 1760034 - DNA, 25 bp, Homo sapien
ctggtatgccagcatggcaccagca

SEQ ID NO: 1760035 - DNA, 25 bp, Homo sapien
ggtatgccagcatggcaccagcagg

SEQ ID NO: 1760036 - DNA, 25 bp, Homo sapien
agaggttgcagagaggcagctgcat

SEQ ID NO: 1760037 - DNA, 25 bp, Homo sapien
tgccccagtgtaagtgttagtagtt

SEQ ID NO: 1760038 - DNA, 25 bp, Homo sapien
tagttgcccaaagtgacagcagatc

SEQ ID NO: 1760039 - DNA, 25 bp, Homo sapien
tgtcatagggtaccactgccccagt

SEQ ID NO: 1760040 - DNA, 25 bp, Homo sapien
ttaatacatcgtgtcatagggtacc

SEQ ID NO: 1760041 - DNA, 25 bp, Homo sapien
aactattgttgtgcagcaaagggtg

SEQ ID NO: 1760042 - DNA, 25 bp, Homo sapien
tctatcttctagactgtagtgactg

SEQ ID NO: 1760043 - DNA, 25 bp, Homo sapien
gtagtgactgtaacaaccatttttg

SEQ ID NO: 1760044 - DNA, 25 bp, Homo sapien
gccgtcaggatacttgactttggtc

SEQ ID NO: 1760045 - DNA, 25 bp, Homo sapien
ccgagtcttcggatgggttgaataa

SEQ ID NO: 1760046 - DNA, 25 bp, Homo sapien
tgctgaaaggtaactgaagaccgca

SEQ ID NO: 1760047 - DNA, 25 bp, Homo sapien
aactactagggagacagcattggaa

SEQ ID NO: 1760048 - DNA, 25 bp, Homo sapien
tcgttcggtgaaagaaacacctcat

SEQ ID NO: 1760049 - DNA, 25 bp, Homo sapien
ccgcgagacggaggagaacgcttcc

SEQ ID NO: 1760050 - DNA, 25 bp, Homo sapien
aacgtgaggatatccactgaccccg

SEQ ID NO: 1760051 - DNA, 25 bp, Homo sapien
gatttgacagctccacaacgtgagg

SEQ ID NO: 1760052 - DNA, 25 bp, Homo sapien
ccaaagccagcgctgcaaggttgca

SEQ ID NO: 1760053 - DNA, 25 bp, Homo sapien
ccgctgcggccagtgggccagggtt

SEQ ID NO: 1760054 - DNA, 25 bp, Homo sapien
agtgggccagggttcggcgagcctt

SEQ ID NO: 1760055 - DNA, 25 bp, Homo sapien
tgcacagacaaaaaagccccgaatg

SEQ ID NO: 1760056 - DNA, 25 bp, Homo sapien
aacgccggagagaacccggtggctg

SEQ ID NO: 1760057 - DNA, 25 bp, Homo sapien
agggctcagggatcggagaagtagc

SEQ ID NO: 1760058 - DNA, 25 bp, Homo sapien
ctggcgctcgaggattgccagggcc

SEQ ID NO: 1760059 - DNA, 25 bp, Homo sapien
gatcggagaagtagcgtcttcccgg

SEQ ID NO: 1760060 - DNA, 25 bp, Homo sapien
gcgaagggcgggctttgcgcctcgg

SEQ ID NO: 1760061 - DNA, 25 bp, Homo sapien
tcctaaggctttgcctcggcgggtc

SEQ ID NO: 1760062 - DNA, 25 bp, Homo sapien
gggcgcttggcccagttcgcagtca

SEQ ID NO: 1760063 - DNA, 25 bp, Homo sapien
agtcacgcatgcgtagcagccggca

SEQ ID NO: 1760064 - DNA, 25 bp, Homo sapien
caggacagagtccaaacgtccggga

SEQ ID NO: 1760065 - DNA, 25 bp, Homo sapien
taaatgtagactcaatttcttccag

SEQ ID NO: 1760066 - DNA, 25 bp, Homo sapien
ttcgcgccctctttctttgtcgtgc

SEQ ID NO: 1760067 - DNA, 25 bp, Homo sapien
tttggagtaatgaagaggccgtcac

SEQ ID NO: 1760068 - DNA, 25 bp, Homo sapien
tatgtgtgacgaagtctcagtgtac

SEQ ID NO: 1760069 - DNA, 25 bp, Homo sapien
gcacccacaggcaacgtcgcggtgg

SEQ ID NO: 1760070 - DNA, 25 bp, Homo sapien
tccccacaagtcaacgcgaagacgt

SEQ ID NO: 1760071 - DNA, 25 bp, Homo sapien
gcgccggcagcatcgaaactacatt

SEQ ID NO: 1760072 - DNA, 25 bp, Homo sapien
ttctgtcgcaaacaaaacgcgccgg

SEQ ID NO: 1760073 - DNA, 25 bp, Homo sapien
aagcagacgctctcagtcagcccct

SEQ ID NO: 1760074 - DNA, 25 bp, Homo sapien
agcagacgctctcagtcagcccctg

SEQ ID NO: 1760075 - DNA, 25 bp, Homo sapien
caagcagacgctctcagtcagcccc

SEQ ID NO: 1760076 - DNA, 25 bp, Homo sapien
gcagacgctctcagtcagcccctgc

SEQ ID NO: 1760077 - DNA, 25 bp, Homo sapien
tttgcccaggcatctacatggttta

SEQ ID NO: 1760078 - DNA, 25 bp, Homo sapien
aaatggactgtatggctgatctgga

SEQ ID NO: 1760079 - DNA, 25 bp, Homo sapien
gaatgcaagctctatgacagtagga

SEQ ID NO: 1760080 - DNA, 25 bp, Homo sapien
tctcaaatgcgcactcaggcttctg

SEQ ID NO: 1760081 - DNA, 25 bp, Homo sapien
tcattcctttattcttgcgtcacac

SEQ ID NO: 1760082 - DNA, 25 bp, Homo sapien
ttaagtttgtactaggtaccaggca

SEQ ID NO: 1760083 - DNA, 25 bp, Homo sapien
tcctttattcttgcgtcacacattt

SEQ ID NO: 1760084 - DNA, 25 bp, Homo sapien
cattcctttattcttgcgtcacaca

SEQ ID NO: 1760085 - DNA, 25 bp, Homo sapien
tgaaacactatacaccagctaaaat

SEQ ID NO: 1760086 - DNA, 25 bp, Homo sapien
caagagcactttcacaacctatgtg

SEQ ID NO: 1760087 - DNA, 25 bp, Homo sapien
gaaaacaagatctacatttagcaac

SEQ ID NO: 1760088 - DNA, 25 bp, Homo sapien
gacaatatatgactgtgccaagagc

SEQ ID NO: 1760089 - DNA, 25 bp, Homo sapien
agtgggatccctgagcttgtttttg

SEQ ID NO: 1760090 - DNA, 25 bp, Homo sapien
ggatccctgagcttgtttttgcaac

SEQ ID NO: 1760091 - DNA, 25 bp, Homo sapien
cgtaaagtagaatcagtgggatccc

SEQ ID NO: 1760092 - DNA, 25 bp, Homo sapien
tgggatccctgagcttgtttttgca

SEQ ID NO: 1760093 - DNA, 25 bp, Homo sapien
cagcctatgatgtcgaaatgtaaga

SEQ ID NO: 1760094 - DNA, 25 bp, Homo sapien
aaatgtaagagatcattatggctcc

SEQ ID NO: 1760095 - DNA, 25 bp, Homo sapien
gacgttgcctgtgactgtatctgca

SEQ ID NO: 1760096 - DNA, 25 bp, Homo sapien
gctgagggccttccaattaccacca

SEQ ID NO: 1760097 - DNA, 25 bp, Homo sapien
gagagagtgctagctactgattgta

SEQ ID NO: 1760098 - DNA, 25 bp, Homo sapien
taccattcagatcagagagagtgct

SEQ ID NO: 1760099 - DNA, 25 bp, Homo sapien
cagagcaatataaggtaaaaggaag

SEQ ID NO: 1760100 - DNA, 25 bp, Homo sapien
gctactgattgtagtgtctgagtta

SEQ ID NO: 1760101 - DNA, 25 bp, Homo sapien
tcccctctctgaagataatcatctt

SEQ ID NO: 1760102 - DNA, 25 bp, Homo sapien
aatcctggactgctgattcccaact

SEQ ID NO: 1760103 - DNA, 25 bp, Homo sapien
atcctggactgctgattcccaacta

SEQ ID NO: 1760104 - DNA, 25 bp, Homo sapien
tcctggactgctgattcccaactac

SEQ ID NO: 1760105 - DNA, 25 bp, Homo sapien
tttctagcagaacactcctttctaa

SEQ ID NO: 1760106 - DNA, 25 bp, Homo sapien
gtttctagcagaacactcctttcta

SEQ ID NO: 1760107 - DNA, 25 bp, Homo sapien
ttctagcagaacactcctttctaat

SEQ ID NO: 1760108 - DNA, 25 bp, Homo sapien
tgtttctagcagaacactcctttct

SEQ ID NO: 1760109 - DNA, 25 bp, Homo sapien
cacacacatattgtgctttaatatg

SEQ ID NO: 1760110 - DNA, 25 bp, Homo sapien
aaagggtttcaacattcttataatg

SEQ ID NO: 1760111 - DNA, 25 bp, Homo sapien
gtaaagcataattcttaggatttga

SEQ ID NO: 1760112 - DNA, 25 bp, Homo sapien
catctctatccacccgtctatcaat

SEQ ID NO: 1760113 - DNA, 25 bp, Homo sapien
cagttcccagaatgtcggcagtcta

SEQ ID NO: 1760114 - DNA, 25 bp, Homo sapien
ccaagtgaagaagtgaggatccatt

SEQ ID NO: 1760115 - DNA, 25 bp, Homo sapien
aattacagaatatctctggattggg

SEQ ID NO: 1760116 - DNA, 25 bp, Homo sapien
aagctggaagactgatcagttccca

SEQ ID NO: 1760117 - DNA, 25 bp, Homo sapien
atcacacttctgcatatgtattcag

SEQ ID NO: 1760118 - DNA, 25 bp, Homo sapien
acacttctgcatatgtattcagaag

SEQ ID NO: 1760119 - DNA, 25 bp, Homo sapien
atgtattcagaagaaccgaaagcag

SEQ ID NO: 1760120 - DNA, 25 bp, Homo sapien
tatgtattcagaagaaccgaaagca

SEQ ID NO: 1760121 - DNA, 25 bp, Homo sapien
gcatctggtcctcgacttgttttgg

SEQ ID NO: 1760122 - DNA, 25 bp, Homo sapien
tgaatgcatctggtcctcgacttgt

SEQ ID NO: 1760123 - DNA, 25 bp, Homo sapien
aatgcatctggtcctcgacttgttt

SEQ ID NO: 1760124 - DNA, 25 bp, Homo sapien
tgcatctggtcctcgacttgttttg

SEQ ID NO: 1760125 - DNA, 25 bp, Homo sapien
aactcgggaggcggacgttgcaggg

SEQ ID NO: 1760126 - DNA, 25 bp, Homo sapien
gcctgggtgacagagaaagactctg

SEQ ID NO: 1760127 - DNA, 25 bp, Homo sapien
ctcgggaggcggacgttgcagggag

SEQ ID NO: 1760128 - DNA, 25 bp, Homo sapien
ccgagatcgtgccactgtactccag

SEQ ID NO: 1760129 - DNA, 25 bp, Homo sapien
aattaatacaacatataaggccggg

SEQ ID NO: 1760130 - DNA, 25 bp, Homo sapien
taaccttagaataggtaagatattc

SEQ ID NO: 1760131 - DNA, 25 bp, Homo sapien
aatacaacatataaggccgggcgcg

SEQ ID NO: 1760132 - DNA, 25 bp, Homo sapien
ttaatacaacatataaggccgggcg

SEQ ID NO: 1760133 - DNA, 25 bp, Homo sapien
caaatttcagatagctacagagtca

SEQ ID NO: 1760134 - DNA, 25 bp, Homo sapien
taaggcttcatcttgccccatacat

SEQ ID NO: 1760135 - DNA, 25 bp, Homo sapien
gtcaaataaagaaaacgcagctggg

SEQ ID NO: 1760136 - DNA, 25 bp, Homo sapien
tgccccatacatcaatacaaatttc

SEQ ID NO: 1760137 - DNA, 25 bp, Homo sapien
taacttaccttaagagcaaacacag

SEQ ID NO: 1760138 - DNA, 25 bp, Homo sapien
cagtaaggctggactaactctttta

SEQ ID NO: 1760139 - DNA, 25 bp, Homo sapien
gataatttgtggtggtggaacttac

SEQ ID NO: 1760140 - DNA, 25 bp, Homo sapien
tacttcaatgggattcagctattca

SEQ ID NO: 1760141 - DNA, 25 bp, Homo sapien
cctaaagtacgtaaatcctgaagat

SEQ ID NO: 1760142 - DNA, 25 bp, Homo sapien
accacctcctcaattcacaaggcaa

SEQ ID NO: 1760143 - DNA, 25 bp, Homo sapien
tcaccacctcctcaattcacaaggc

SEQ ID NO: 1760144 - DNA, 25 bp, Homo sapien
ccacctcctcaattcacaaggcaaa

SEQ ID NO: 1760145 - DNA, 25 bp, Homo sapien
caccacctcctcaattcacaaggca

SEQ ID NO: 1760146 - DNA, 25 bp, Homo sapien
gggtgaatgagggaacaaatactct

SEQ ID NO: 1760147 - DNA, 25 bp, Homo sapien
gatagcttcctactatactatgcat

SEQ ID NO: 1760148 - DNA, 25 bp, Homo sapien
tatgaagtatcttaggagaggtaac

SEQ ID NO: 1760149 - DNA, 25 bp, Homo sapien
tgagatggttcattctgggtgaatg

SEQ ID NO: 1760150 - DNA, 25 bp, Homo sapien
taaggccttcttatactgtgctgct

SEQ ID NO: 1760151 - DNA, 25 bp, Homo sapien
tcctggtgtgccagatttctctcat

SEQ ID NO: 1760152 - DNA, 25 bp, Homo sapien
tctctccagctctaaacgatgaatt

SEQ ID NO: 1760153 - DNA, 25 bp, Homo sapien
tcagctcctggtgtgccagatttct

SEQ ID NO: 1760154 - DNA, 25 bp, Homo sapien
aacgagactgggctgagcttaactg

SEQ ID NO: 1760155 - DNA, 25 bp, Homo sapien
gactgggctgagcttaactgtatac

SEQ ID NO: 1760156 - DNA, 25 bp, Homo sapien
ctgggctgagcttaactgtatactt

SEQ ID NO: 1760157 - DNA, 25 bp, Homo sapien
cgagactgggctgagcttaactgta

SEQ ID NO: 1760158 - DNA, 25 bp, Homo sapien
gttgttctaggatcatgttcttttc

SEQ ID NO: 1760159 - DNA, 25 bp, Homo sapien
ggatcatgttcttttctcgctctac

SEQ ID NO: 1760160 - DNA, 25 bp, Homo sapien
ctaggatcatgttcttttctcgctc

SEQ ID NO: 1760161 - DNA, 25 bp, Homo sapien
taggatcatgttcttttctcgctct

SEQ ID NO: 1760162 - DNA, 25 bp, Homo sapien
tgcatacagcttcatctgatcttgt

SEQ ID NO: 1760163 - DNA, 25 bp, Homo sapien
ttctgagttgttgtaagtctgaaac

SEQ ID NO: 1760164 - DNA, 25 bp, Homo sapien
gagttgttgtaagtctgaaacactc

SEQ ID NO: 1760165 - DNA, 25 bp, Homo sapien
tttctaagacatcaagcttttcaag

SEQ ID NO: 1760166 - DNA, 25 bp, Homo sapien
gtcttgaaatagcttacgctgatgt

SEQ ID NO: 1760167 - DNA, 25 bp, Homo sapien
tgaaatagcttacgctgatgttctt

SEQ ID NO: 1760168 - DNA, 25 bp, Homo sapien
cttgaaatagcttacgctgatgttc

SEQ ID NO: 1760169 - DNA, 25 bp, Homo sapien
tcttgaaatagcttacgctgatgtt

SEQ ID NO: 1760170 - DNA, 25 bp, Homo sapien
tactgatttcaagtccagtttgaag

SEQ ID NO: 1760171 - DNA, 25 bp, Homo sapien
tgaagacattataattttactgatt

SEQ ID NO: 1760172 - DNA, 25 bp, Homo sapien
cttttccttggagtgctttagattt

SEQ ID NO: 1760173 - DNA, 25 bp, Homo sapien
tagatttgaaactgaagacattata

SEQ ID NO: 1760174 - DNA, 25 bp, Homo sapien
aagtattagcagtatttttgtttgg

SEQ ID NO: 1760175 - DNA, 25 bp, Homo sapien
tattagcagtatttttgtttgggaa

SEQ ID NO: 1760176 - DNA, 25 bp, Homo sapien
gtattagcagtatttttgtttggga

SEQ ID NO: 1760177 - DNA, 25 bp, Homo sapien
ataagtattagcagtatttttgttt

SEQ ID NO: 1760178 - DNA, 25 bp, Homo sapien
ccattacttgacacgcattattgca

SEQ ID NO: 1760179 - DNA, 25 bp, Homo sapien
taggtataaggattaagaggttata

SEQ ID NO: 1760180 - DNA, 25 bp, Homo sapien
aaaccatcatccattacttgacacg

SEQ ID NO: 1760181 - DNA, 25 bp, Homo sapien
gacacgcattattgcatgtctttta

SEQ ID NO: 1760182 - DNA, 25 bp, Homo sapien
cacaagctaagcatatggcagtggc

SEQ ID NO: 1760183 - DNA, 25 bp, Homo sapien
tatctactgtgttgtttactgcctc

SEQ ID NO: 1760184 - DNA, 25 bp, Homo sapien
gctaaattttgtacatgactgctgc

SEQ ID NO: 1760185 - DNA, 25 bp, Homo sapien
tttggttgtcaagcaaactcagagc

SEQ ID NO: 1760186 - DNA, 25 bp, Homo sapien
gagacatcattatttgcataccccg

SEQ ID NO: 1760187 - DNA, 25 bp, Homo sapien
gactattacttataggtccctggaa

SEQ ID NO: 1760188 - DNA, 25 bp, Homo sapien
tagaggttgccaatgttcagggaag

SEQ ID NO: 1760189 - DNA, 25 bp, Homo sapien
tacgacaacttggacggacctcaag

SEQ ID NO: 1760190 - DNA, 25 bp, Homo sapien
gaaatatcactgcacatctatcaga

SEQ ID NO: 1760191 - DNA, 25 bp, Homo sapien
cactgacatagacatacgtatgaca

SEQ ID NO: 1760192 - DNA, 25 bp, Homo sapien
gacccaacaattgttctcttacgca

SEQ ID NO: 1760193 - DNA, 25 bp, Homo sapien
gaaaacaatgcaactggaaaatggg

SEQ ID NO: 1760194 - DNA, 25 bp, Homo sapien
ggtggtcgtctctttatacatttag

SEQ ID NO: 1760195 - DNA, 25 bp, Homo sapien
aaatttgccaaggtggtcgtctctt

SEQ ID NO: 1760196 - DNA, 25 bp, Homo sapien
tgccaaggtggtcgtctctttatac

SEQ ID NO: 1760197 - DNA, 25 bp, Homo sapien
gccacaaaaggcagtgctccaaact

SEQ ID NO: 1760198 - DNA, 25 bp, Homo sapien
gagtttttttgaacgactatcttca

SEQ ID NO: 1760199 - DNA, 25 bp, Homo sapien
agtttttttgaacgactatcttcat

SEQ ID NO: 1760200 - DNA, 25 bp, Homo sapien
caggagtttttttgaacgactatct

SEQ ID NO: 1760201 - DNA, 25 bp, Homo sapien
tacttgcattcacagaacagcttgc

SEQ ID NO: 1760202 - DNA, 25 bp, Homo sapien
ttttgcatacttgcattcacagaac

SEQ ID NO: 1760203 - DNA, 25 bp, Homo sapien
ttcacagaacagcttgcactggtag

SEQ ID NO: 1760204 - DNA, 25 bp, Homo sapien
gcaaaaagttttgcatacttgcatt

SEQ ID NO: 1760205 - DNA, 25 bp, Homo sapien
atatgtgggtcacgatgttgcctca

SEQ ID NO: 1760206 - DNA, 25 bp, Homo sapien
ctgaaggatatgtgggtcacgatgt

SEQ ID NO: 1760207 - DNA, 25 bp, Homo sapien
aaggatatgtgggtcacgatgttgc

SEQ ID NO: 1760208 - DNA, 25 bp, Homo sapien
ggatatgtgggtcacgatgttgcct

SEQ ID NO: 1760209 - DNA, 25 bp, Homo sapien
tctagtctcagtcacgttaaaaggt

SEQ ID NO: 1760210 - DNA, 25 bp, Homo sapien
ctagtctcagtcacgttaaaaggtt

SEQ ID NO: 1760211 - DNA, 25 bp, Homo sapien
gaaatggacttttctgagtcaggag

SEQ ID NO: 1760212 - DNA, 25 bp, Homo sapien
aattgtcacaaatggaaatggactt

SEQ ID NO: 1760213 - DNA, 25 bp, Homo sapien
attgtcacaaatggaaatggacttt

SEQ ID NO: 1760214 - DNA, 25 bp, Homo sapien
aaattgtcacaaatggaaatggact

SEQ ID NO: 1760215 - DNA, 25 bp, Homo sapien
tcatttggtccagctcatcttgcat

SEQ ID NO: 1760216 - DNA, 25 bp, Homo sapien
ctcatttggtccagctcatcttgca

SEQ ID NO: 1760217 - DNA, 25 bp, Homo sapien
tttcttgagtaaacactctagttca

SEQ ID NO: 1760218 - DNA, 25 bp, Homo sapien
cacattctatgtcgtcacagactga

SEQ ID NO: 1760219 - DNA, 25 bp, Homo sapien
tctatgtcgtcacagactgaatgac

SEQ ID NO: 1760220 - DNA, 25 bp, Homo sapien
tcgtcacagactgaatgactttcag

SEQ ID NO: 1760221 - DNA, 25 bp, Homo sapien
tatgtgacaactagagaatactctg

SEQ ID NO: 1760222 - DNA, 25 bp, Homo sapien
tatatgtaagaaggccaaagtcgga

SEQ ID NO: 1760223 - DNA, 25 bp, Homo sapien
aaagtcggataaggtcaacatgggc

SEQ ID NO: 1760224 - DNA, 25 bp, Homo sapien
gagcttactgctcctattagtgaaa

SEQ ID NO: 1760225 - DNA, 25 bp, Homo sapien
gaactcgtattggatgaaagctgct

SEQ ID NO: 1760226 - DNA, 25 bp, Homo sapien
gaaaaaggttagtgtcagtcaaaca

SEQ ID NO: 1760227 - DNA, 25 bp, Homo sapien
tcttgctgaatacctgaagcttcac

SEQ ID NO: 1760228 - DNA, 25 bp, Homo sapien
ctcgtattggatgaaagctgctgtt

SEQ ID NO: 1760229 - DNA, 25 bp, Homo sapien
aagttcattaaggtgacagttttgc

SEQ ID NO: 1760230 - DNA, 25 bp, Homo sapien
cactttagacaattcaaggtctcac

SEQ ID NO: 1760231 - DNA, 25 bp, Homo sapien
tggaacccaccaggtcattaggcat

SEQ ID NO: 1760232 - DNA, 25 bp, Homo sapien
ctgcaacttcatgttttatagaaac

SEQ ID NO: 1760233 - DNA, 25 bp, Homo sapien
tctaagacaagatgaggttacgggc

SEQ ID NO: 1760234 - DNA, 25 bp, Homo sapien
catactaccgtgaatttctgctgga

SEQ ID NO: 1760235 - DNA, 25 bp, Homo sapien
gggtcctagaaattcacagtctcaa

SEQ ID NO: 1760236 - DNA, 25 bp, Homo sapien
ggttacgggcttcaatcaataagaa

SEQ ID NO: 1760237 - DNA, 25 bp, Homo sapien
tagttccccagttgcctcagaggat

SEQ ID NO: 1760238 - DNA, 25 bp, Homo sapien
gacaatttcaagcatcaatgtgccc

SEQ ID NO: 1760239 - DNA, 25 bp, Homo sapien
ggaatcaccatctcttaaactgcta

SEQ ID NO: 1760240 - DNA, 25 bp, Homo sapien
tgagaaaccaagagttcagaagagt

SEQ ID NO: 1760241 - DNA, 25 bp, Homo sapien
actgaggctccagaaagttatctga

SEQ ID NO: 1760242 - DNA, 25 bp, Homo sapien
gaaaccaagtttcctagctctgaag

SEQ ID NO: 1760243 - DNA, 25 bp, Homo sapien
caagctattaaatggtagagtccca

SEQ ID NO: 1760244 - DNA, 25 bp, Homo sapien
caaattagtatagtcctgtgaggga

SEQ ID NO: 1760245 - DNA, 25 bp, Homo sapien
tgtttcagcacaatgacaggactgt

SEQ ID NO: 1760246 - DNA, 25 bp, Homo sapien
tgtgatgaagcaacaagacaccatt

SEQ ID NO: 1760247 - DNA, 25 bp, Homo sapien
tgccaatgatccacccaagtacagt

SEQ ID NO: 1760248 - DNA, 25 bp, Homo sapien
tacactgaccatagactgactgctc

SEQ ID NO: 1760249 - DNA, 25 bp, Homo sapien
aagaactcttggctctcaaacctct

SEQ ID NO: 1760250 - DNA, 25 bp, Homo sapien
tactcactgatgaacaagtcaaaca

SEQ ID NO: 1760251 - DNA, 25 bp, Homo sapien
tctcctcaagactataagcaacttg

SEQ ID NO: 1760252 - DNA, 25 bp, Homo sapien
ggtgcccacagttggtggaaccaca

SEQ ID NO: 1760253 - DNA, 25 bp, Homo sapien
catctctactaaaatacaaaaaatt

SEQ ID NO: 1760254 - DNA, 25 bp, Homo sapien
cctgagctcaggagttcgtgaccag

SEQ ID NO: 1760255 - DNA, 25 bp, Homo sapien
tttgggacactgaggcgggcagatt

SEQ ID NO: 1760256 - DNA, 25 bp, Homo sapien
cctgggcaatacagtgaaaccccat

SEQ ID NO: 1760257 - DNA, 25 bp, Homo sapien
taaaaatgacaacccgtactcacaa

SEQ ID NO: 1760258 - DNA, 25 bp, Homo sapien
agtttcacaaaacataagctacctt

SEQ ID NO: 1760259 - DNA, 25 bp, Homo sapien
gtttcacaaaacataagctacctta

SEQ ID NO: 1760260 - DNA, 25 bp, Homo sapien
caacccgtactcacaaagtttcaca

SEQ ID NO: 1760261 - DNA, 25 bp, Homo sapien
cgacaaatctcacattcttattggt

SEQ ID NO: 1760262 - DNA, 25 bp, Homo sapien
tgttgatgctcggaaaaatagggtt

SEQ ID NO: 1760263 - DNA, 25 bp, Homo sapien
gcagatagtttttctccgacaaatc

SEQ ID NO: 1760264 - DNA, 25 bp, Homo sapien
tcagattggagacatgcagatagtt

SEQ ID NO: 1760265 - DNA, 25 bp, Homo sapien
taaacggatctacagtgatgaagag

SEQ ID NO: 1760266 - DNA, 25 bp, Homo sapien
gattctggacaattgccctgtaaac

SEQ ID NO: 1760267 - DNA, 25 bp, Homo sapien
tctgaccattgtccagagcagagtg

SEQ ID NO: 1760268 - DNA, 25 bp, Homo sapien
tattttagctgattggaaggtctgg

SEQ ID NO: 1760269 - DNA, 25 bp, Homo sapien
gggaccacccgagataaaacactga

SEQ ID NO: 1760270 - DNA, 25 bp, Homo sapien
gggccttaggccataccaggtagtc

SEQ ID NO: 1760271 - DNA, 25 bp, Homo sapien
gcaagactgacaccttaaccagagg

SEQ ID NO: 1760272 - DNA, 25 bp, Homo sapien
taaccagaggccatgataggtaagc

SEQ ID NO: 1760273 - DNA, 25 bp, Homo sapien
ccaagactcactctatggctcaggc

SEQ ID NO: 1760274 - DNA, 25 bp, Homo sapien
ggaacattatgacctctgcaagaaa

SEQ ID NO: 1760275 - DNA, 25 bp, Homo sapien
cctaacactgcttcattggagatgg

SEQ ID NO: 1760276 - DNA, 25 bp, Homo sapien
cattctacaaataagcctggatctg

SEQ ID NO: 1760277 - DNA, 25 bp, Homo sapien
tggtcgatccgttctttgtgaggca

SEQ ID NO: 1760278 - DNA, 25 bp, Homo sapien
tgtccatgaagagcaactcaagggc

SEQ ID NO: 1760279 - DNA, 25 bp, Homo sapien
tcctggccaagtctgcgtttgacac

SEQ ID NO: 1760280 - DNA, 25 bp, Homo sapien
tgtgtatgcatcaaccagggtaaag

SEQ ID NO: 1760281 - DNA, 25 bp, Homo sapien
gatttgtatttgctgtttttctgta

SEQ ID NO: 1760282 - DNA, 25 bp, Homo sapien
ttgtatttgctgtttttctgtatcc

SEQ ID NO: 1760283 - DNA, 25 bp, Homo sapien
tttgtatttgctgtttttctgtatc

SEQ ID NO: 1760284 - DNA, 25 bp, Homo sapien
atttgtatttgctgtttttctgtat

SEQ ID NO: 1760285 - DNA, 25 bp, Homo sapien
tgtaaactcgattagctgttccctg

SEQ ID NO: 1760286 - DNA, 25 bp, Homo sapien
cagtcagttgcacagccagtttttt

SEQ ID NO: 1760287 - DNA, 25 bp, Homo sapien
gtcagttgcacagccagttttttct

SEQ ID NO: 1760288 - DNA, 25 bp, Homo sapien
gttccctgaagagctccctgctctt

SEQ ID NO: 1760289 - DNA, 25 bp, Homo sapien
ttccttggtaagacttttgcttgga

SEQ ID NO: 1760290 - DNA, 25 bp, Homo sapien
tttgcttggatctgtcttaacaaat

SEQ ID NO: 1760291 - DNA, 25 bp, Homo sapien
ggtaagacttttgcttggatctgtc

SEQ ID NO: 1760292 - DNA, 25 bp, Homo sapien
cttggtaagacttttgcttggatct

SEQ ID NO: 1760293 - DNA, 25 bp, Homo sapien
gctctgtttggtgatctctcttgat

SEQ ID NO: 1760294 - DNA, 25 bp, Homo sapien
gctgctctgtttggtgatctctctt

SEQ ID NO: 1760295 - DNA, 25 bp, Homo sapien
ttggtgatctctcttgatttctatc

SEQ ID NO: 1760296 - DNA, 25 bp, Homo sapien
tgctgctctgtttggtgatctctct

SEQ ID NO: 1760297 - DNA, 25 bp, Homo sapien
gtaaggttttcttcagtgctagttc

SEQ ID NO: 1760298 - DNA, 25 bp, Homo sapien
taaatatcctttggcatttgaatag

SEQ ID NO: 1760299 - DNA, 25 bp, Homo sapien
tctctcttctaaagtaataaatatc

SEQ ID NO: 1760300 - DNA, 25 bp, Homo sapien
agtgctagttccctctctcttctaa

SEQ ID NO: 1760301 - DNA, 25 bp, Homo sapien
ggggtgtactcccttcttaggcagc

SEQ ID NO: 1760302 - DNA, 25 bp, Homo sapien
tcaggggtgtactcccttcttaggc

SEQ ID NO: 1760303 - DNA, 25 bp, Homo sapien
ccttcttaggcagctctctagctcc

SEQ ID NO: 1760304 - DNA, 25 bp, Homo sapien
cttcttaggcagctctctagctccc

SEQ ID NO: 1760305 - DNA, 25 bp, Homo sapien
ctgtgttggcaaaacctcttccacc

SEQ ID NO: 1760306 - DNA, 25 bp, Homo sapien
tgtgttggcaaaacctcttccacct

SEQ ID NO: 1760307 - DNA, 25 bp, Homo sapien
ctcttccacctaagcatgtgtaaat

SEQ ID NO: 1760308 - DNA, 25 bp, Homo sapien
ttccacctaagcatgtgtaaatatt

SEQ ID NO: 1760309 - DNA, 25 bp, Homo sapien
ttgtaaagaggataaagttgctcca

SEQ ID NO: 1760310 - DNA, 25 bp, Homo sapien
cttgtaaagaggataaagttgctcc

SEQ ID NO: 1760311 - DNA, 25 bp, Homo sapien
tgtaaagaggataaagttgctccat

SEQ ID NO: 1760312 - DNA, 25 bp, Homo sapien
catgaggaagttttctcgagcaaca

SEQ ID NO: 1760313 - DNA, 25 bp, Homo sapien
aatagtcagatcttcctgtgtcacc

SEQ ID NO: 1760314 - DNA, 25 bp, Homo sapien
tgcaggtggcacactaaccactttg

SEQ ID NO: 1760315 - DNA, 25 bp, Homo sapien
tgaacagtcccaagagagtgcaggt

SEQ ID NO: 1760316 - DNA, 25 bp, Homo sapien
ggttgaaagctacactcagcacttt

SEQ ID NO: 1760317 - DNA, 25 bp, Homo sapien
cactttggagatgggcaaatactgg

SEQ ID NO: 1760318 - DNA, 25 bp, Homo sapien
ggtcaatgtcattgacacagacatt

SEQ ID NO: 1760319 - DNA, 25 bp, Homo sapien
tttctgaccagcttcagcgactcgg

SEQ ID NO: 1760320 - DNA, 25 bp, Homo sapien
atttccttagcagagtcccagagct

SEQ ID NO: 1760321 - DNA, 25 bp, Homo sapien
cgtcatatgggatactgaaatggga

SEQ ID NO: 1760322 - DNA, 25 bp, Homo sapien
gagtcccagagctcttctacgtcat

SEQ ID NO: 1760323 - DNA, 25 bp, Homo sapien
tcttctacgtcatatgggatactga

SEQ ID NO: 1760324 - DNA, 25 bp, Homo sapien
tgctttagctattccagcttcacag

SEQ ID NO: 1760325 - DNA, 25 bp, Homo sapien
tgaagacgctttgaaatttttggga

SEQ ID NO: 1760326 - DNA, 25 bp, Homo sapien
tccatgaagacgctttgaaattttt

SEQ ID NO: 1760327 - DNA, 25 bp, Homo sapien
aattatctgctttagctattccagc

SEQ ID NO: 1760328 - DNA, 25 bp, Homo sapien
ttctttttcagggtcattctgggtc

SEQ ID NO: 1760329 - DNA, 25 bp, Homo sapien
tggctttctttttcagggtcattct

SEQ ID NO: 1760330 - DNA, 25 bp, Homo sapien
ctttatgaaggaaatccagttggct

SEQ ID NO: 1760331 - DNA, 25 bp, Homo sapien
gctttctttttcagggtcattctgg

SEQ ID NO: 1760332 - DNA, 25 bp, Homo sapien
gcttggagttgcaataatgcatctg

SEQ ID NO: 1760333 - DNA, 25 bp, Homo sapien
agcttcttttgccatggatcacatt

SEQ ID NO: 1760334 - DNA, 25 bp, Homo sapien
aactttgcttggagttgcaataatg

SEQ ID NO: 1760335 - DNA, 25 bp, Homo sapien
aatgcatctgttcttctccgttctt

SEQ ID NO: 1760336 - DNA, 25 bp, Homo sapien
tctttgcagcgtgatcttggagcac

SEQ ID NO: 1760337 - DNA, 25 bp, Homo sapien
gccctgatgcaaaccttgggaagcc

SEQ ID NO: 1760338 - DNA, 25 bp, Homo sapien
tgatgtggagccagcatgactgtct

SEQ ID NO: 1760339 - DNA, 25 bp, Homo sapien
gacttggtcataattgccctgatgc

SEQ ID NO: 1760340 - DNA, 25 bp, Homo sapien
cccatcagcatgttggctgagagtt

SEQ ID NO: 1760341 - DNA, 25 bp, Homo sapien
tcagcatgttggctgagagttatct

SEQ ID NO: 1760342 - DNA, 25 bp, Homo sapien
tatctgcttgagaggcccatcagca

SEQ ID NO: 1760343 - DNA, 25 bp, Homo sapien
tgtctcttgtatctgcttgagaggc

SEQ ID NO: 1760344 - DNA, 25 bp, Homo sapien
tggcacagatacagaaaggacaagt

SEQ ID NO: 1760345 - DNA, 25 bp, Homo sapien
cagttctctgattcgaaggtggcac

SEQ ID NO: 1760346 - DNA, 25 bp, Homo sapien
acaagtaggcccctctcatcagaac

SEQ ID NO: 1760347 - DNA, 25 bp, Homo sapien
tccaagcccagcagttgtagggtca

SEQ ID NO: 1760348 - DNA, 25 bp, Homo sapien
aaggtaaggcccgaagtattgattg

SEQ ID NO: 1760349 - DNA, 25 bp, Homo sapien
ggtaaggcccgaagtattgattgtc

SEQ ID NO: 1760350 - DNA, 25 bp, Homo sapien
cagggttcgctcaacagatctgaaa

SEQ ID NO: 1760351 - DNA, 25 bp, Homo sapien
agtattgattgtcagggttcgctca

SEQ ID NO: 1760352 - DNA, 25 bp, Homo sapien
aggtgtctcacggacatagtggtga

SEQ ID NO: 1760353 - DNA, 25 bp, Homo sapien
gaactatcttccatggtggggacca

SEQ ID NO: 1760354 - DNA, 25 bp, Homo sapien
cagcaggtgtctcacggacatagtg

SEQ ID NO: 1760355 - DNA, 25 bp, Homo sapien
tcacggacatagtggtgagcgccca

SEQ ID NO: 1760356 - DNA, 25 bp, Homo sapien
cattttaggagccttcctgaggtct

SEQ ID NO: 1760357 - DNA, 25 bp, Homo sapien
ggtaagcccagtggtttgctcccag

SEQ ID NO: 1760358 - DNA, 25 bp, Homo sapien
tgtccaagacagatggtaggtgcct

SEQ ID NO: 1760359 - DNA, 25 bp, Homo sapien
gcccaagactttcagcatgagatca

SEQ ID NO: 1760360 - DNA, 25 bp, Homo sapien
aacctctgctaccagcacgtcaagt

SEQ ID NO: 1760361 - DNA, 25 bp, Homo sapien
acgtcaagtcccagcagatcctgaa

SEQ ID NO: 1760362 - DNA, 25 bp, Homo sapien
gtcccagcagatcctgaacatgcca

SEQ ID NO: 1760363 - DNA, 25 bp, Homo sapien
taccagcacgtcaagtcccagcaga

SEQ ID NO: 1760364 - DNA, 25 bp, Homo sapien
actctaaggagagcctaacccttca

SEQ ID NO: 1760365 - DNA, 25 bp, Homo sapien
taacccttcatgatcgggcccactt

SEQ ID NO: 1760366 - DNA, 25 bp, Homo sapien
gagcctaacccttcatgatcgggcc

SEQ ID NO: 1760367 - DNA, 25 bp, Homo sapien
taaggagagcctaacccttcatgat

SEQ ID NO: 1760368 - DNA, 25 bp, Homo sapien
agctgattagcactcaagccatctg

SEQ ID NO: 1760369 - DNA, 25 bp, Homo sapien
tcaagccatctgcagacagcaaagc

SEQ ID NO: 1760370 - DNA, 25 bp, Homo sapien
actcaagccatctgcagacagcaaa

SEQ ID NO: 1760371 - DNA, 25 bp, Homo sapien
tgagctgattagcactcaagccatc

SEQ ID NO: 1760372 - DNA, 25 bp, Homo sapien
agaaggctgtcgcactggccgtctg

SEQ ID NO: 1760373 - DNA, 25 bp, Homo sapien
gacactgggcaagagctcgggatac

SEQ ID NO: 1760374 - DNA, 25 bp, Homo sapien
attcatccttcaagcctgcgtgtga

SEQ ID NO: 1760375 - DNA, 25 bp, Homo sapien
tccttcaagcctgcgtgtgatccga

SEQ ID NO: 1760376 - DNA, 25 bp, Homo sapien
tcctctgcgcgccactctccgccgc

SEQ ID NO: 1760377 - DNA, 25 bp, Homo sapien
aggaggagctcctctgcgcgccact

SEQ ID NO: 1760378 - DNA, 25 bp, Homo sapien
ctctgcgcgccactctccgccgcct

SEQ ID NO: 1760379 - DNA, 25 bp, Homo sapien
gctcctctgcgcgccactctccgcc

SEQ ID NO: 1760380 - DNA, 25 bp, Homo sapien
ctcaatgtaatggctagccacaagc

SEQ ID NO: 1760381 - DNA, 25 bp, Homo sapien
tgcagccagcttctgtgctgtagta

SEQ ID NO: 1760382 - DNA, 25 bp, Homo sapien
tggttctccacttccgagaactcca

SEQ ID NO: 1760383 - DNA, 25 bp, Homo sapien
tacatgacatgcaccccttgctggt

SEQ ID NO: 1760384 - DNA, 25 bp, Homo sapien
acgtgtcatacagcacagcaaatct

SEQ ID NO: 1760385 - DNA, 25 bp, Homo sapien
gcaaatctgtccacatctgcatggg

SEQ ID NO: 1760386 - DNA, 25 bp, Homo sapien
agagctgcttcccaagtccacgtgt

SEQ ID NO: 1760387 - DNA, 25 bp, Homo sapien
ctttggctggctgcccactttgtga

SEQ ID NO: 1760388 - DNA, 25 bp, Homo sapien
gctggttgaggatgcccctcactaa

SEQ ID NO: 1760389 - DNA, 25 bp, Homo sapien
tgagatcaaacctcgggcgtcggtg

SEQ ID NO: 1760390 - DNA, 25 bp, Homo sapien
caacgtgtgctggtaggcttcaaag

SEQ ID NO: 1760391 - DNA, 25 bp, Homo sapien
gcaggtgcattcctcttggtaggcc

SEQ ID NO: 1760392 - DNA, 25 bp, Homo sapien
tgcaaactatattaaggggaagtcc

SEQ ID NO: 1760393 - DNA, 25 bp, Homo sapien
tgtccagatgatcctctcgccaaag

SEQ ID NO: 1760394 - DNA, 25 bp, Homo sapien
aaagcctctggacatactcccgctg

SEQ ID NO: 1760395 - DNA, 25 bp, Homo sapien
gggaagtccaaatgtattgctattg

SEQ ID NO: 1760396 - DNA, 25 bp, Homo sapien
gggtggaactccagcagataaacat

SEQ ID NO: 1760397 - DNA, 25 bp, Homo sapien
actggctgatgtgggtctgcaggca

SEQ ID NO: 1760398 - DNA, 25 bp, Homo sapien
ctgatgtgggtctgcaggcatggca

SEQ ID NO: 1760399 - DNA, 25 bp, Homo sapien
ctggagctgtgtactgtaccaggcc

SEQ ID NO: 1760400 - DNA, 25 bp, Homo sapien
ctttctggagctgtgtactgtacca

SEQ ID NO: 1760401 - DNA, 25 bp, Homo sapien
gagcagcacgtgagagtcttggtct

SEQ ID NO: 1760402 - DNA, 25 bp, Homo sapien
ccccacgagaaagggatctcccata

SEQ ID NO: 1760403 - DNA, 25 bp, Homo sapien
ggaaaacatctccaagagcagcacg

SEQ ID NO: 1760404 - DNA, 25 bp, Homo sapien
tgtttctgtccttcgtctgctgcag

SEQ ID NO: 1760405 - DNA, 25 bp, Homo sapien
gaggttataaacacaggaggtggct

SEQ ID NO: 1760406 - DNA, 25 bp, Homo sapien
gtgaacaggcctcagatacaaatgg

SEQ ID NO: 1760407 - DNA, 25 bp, Homo sapien
tccccgtgtgatgcaaattcaaagt

SEQ ID NO: 1760408 - DNA, 25 bp, Homo sapien
tccagcagagaggttataaacacag

SEQ ID NO: 1760409 - DNA, 25 bp, Homo sapien
tcagcattctattttgagcagggat

SEQ ID NO: 1760410 - DNA, 25 bp, Homo sapien
gcagggatctgcattagcgaaacaa

SEQ ID NO: 1760411 - DNA, 25 bp, Homo sapien
ccaagaatctccagggatagaggtg

SEQ ID NO: 1760412 - DNA, 25 bp, Homo sapien
ggcatggagccagtaccaagaatct

SEQ ID NO: 1760413 - DNA, 25 bp, Homo sapien
cttaagaatggcttcctttgtgtaa

SEQ ID NO: 1760414 - DNA, 25 bp, Homo sapien
ccaatttggttatcatccacctcag

SEQ ID NO: 1760415 - DNA, 25 bp, Homo sapien
ctcagagatggctaagacaagagca

SEQ ID NO: 1760416 - DNA, 25 bp, Homo sapien
tggctaagacaagagcagtaggaga

SEQ ID NO: 1760417 - DNA, 25 bp, Homo sapien
cttgacattagcaggacagctccct

SEQ ID NO: 1760418 - DNA, 25 bp, Homo sapien
tagaagtacacctgctggacagccg

SEQ ID NO: 1760419 - DNA, 25 bp, Homo sapien
gacagctcccttgaggggtgcaata

SEQ ID NO: 1760420 - DNA, 25 bp, Homo sapien
tggacagccgccatcaaagcatttt

SEQ ID NO: 1760421 - DNA, 25 bp, Homo sapien
gcctgacattagctggtggaggtga

SEQ ID NO: 1760422 - DNA, 25 bp, Homo sapien
cagcctgacattagctggtggaggt

SEQ ID NO: 1760423 - DNA, 25 bp, Homo sapien
gcagcctgacattagctggtggagg

SEQ ID NO: 1760424 - DNA, 25 bp, Homo sapien
gggcagcctgacattagctggtgga

SEQ ID NO: 1760425 - DNA, 25 bp, Homo sapien
ttttatatcacatgaattatgtctc

SEQ ID NO: 1760426 - DNA, 25 bp, Homo sapien
gttttatatcacatgaattatgtct

SEQ ID NO: 1760427 - DNA, 25 bp, Homo sapien
atccaataaggatttggtcatacat

SEQ ID NO: 1760428 - DNA, 25 bp, Homo sapien
caataaggatttggtcatacattga

SEQ ID NO: 1760429 - DNA, 25 bp, Homo sapien
cttttgagagtgagtgataaaaatg

SEQ ID NO: 1760430 - DNA, 25 bp, Homo sapien
taagaaattgccagagacccctggc

SEQ ID NO: 1760431 - DNA, 25 bp, Homo sapien
aatttgcatggaaccgtctggaacc

SEQ ID NO: 1760432 - DNA, 25 bp, Homo sapien
tccatatcaaggtaagaccctccac

SEQ ID NO: 1760433 - DNA, 25 bp, Homo sapien
taatcggtcagcagccttccatatc

SEQ ID NO: 1760434 - DNA, 25 bp, Homo sapien
cacttaatggtgaaaggttgacggt

SEQ ID NO: 1760435 - DNA, 25 bp, Homo sapien
caatcttgtattggagggtctagcc

SEQ ID NO: 1760436 - DNA, 25 bp, Homo sapien
tagaagggaatgtcctcaaccggat

SEQ ID NO: 1760437 - DNA, 25 bp, Homo sapien
ggaaaacctctatgaactgatttgg

SEQ ID NO: 1760438 - DNA, 25 bp, Homo sapien
ccaccatgatttctcagatctgaac

SEQ ID NO: 1760439 - DNA, 25 bp, Homo sapien
gctatcagcgagctgtctatgccat

SEQ ID NO: 1760440 - DNA, 25 bp, Homo sapien
cttttggtagcctgaaatctttctg

SEQ ID NO: 1760441 - DNA, 25 bp, Homo sapien
tctggttgggcccattccaccatga

SEQ ID NO: 1760442 - DNA, 25 bp, Homo sapien
tgtcggccatggtttgtttcctcag

SEQ ID NO: 1760443 - DNA, 25 bp, Homo sapien
tctgtcggccatggtttgtttcctc

SEQ ID NO: 1760444 - DNA, 25 bp, Homo sapien
ctgtcggccatggtttgtttcctca

SEQ ID NO: 1760445 - DNA, 25 bp, Homo sapien
agggctcttcgttctgtcggccatg

SEQ ID NO: 1760446 - DNA, 25 bp, Homo sapien
tgacaatattcaaccataacatctc

SEQ ID NO: 1760447 - DNA, 25 bp, Homo sapien
gacaatattcaaccataacatctct

SEQ ID NO: 1760448 - DNA, 25 bp, Homo sapien
agtatgccatgatctgaccccgaag

SEQ ID NO: 1760449 - DNA, 25 bp, Homo sapien
ccctgatggtaggaaaatcttccag

SEQ ID NO: 1760450 - DNA, 25 bp, Homo sapien
tcttccagaagatctctcaggctat

SEQ ID NO: 1760451 - DNA, 25 bp, Homo sapien
cgaagagcatagtgagacatgcggt

SEQ ID NO: 1760452 - DNA, 25 bp, Homo sapien
ccctccttggagtctctcaacccct

SEQ ID NO: 1760453 - DNA, 25 bp, Homo sapien
tccttggagtctctcaaccccttct

SEQ ID NO: 1760454 - DNA, 25 bp, Homo sapien
ccttggagtctctcaaccccttctt

SEQ ID NO: 1760455 - DNA, 25 bp, Homo sapien
ttggagtctctcaaccccttcttct

SEQ ID NO: 1760456 - DNA, 25 bp, Homo sapien
ttggctccgagctcagctggccacc

SEQ ID NO: 1760457 - DNA, 25 bp, Homo sapien
ctccgagctcagctggccaccccag

SEQ ID NO: 1760458 - DNA, 25 bp, Homo sapien
tgaccctgcttggctccgagctcag

SEQ ID NO: 1760459 - DNA, 25 bp, Homo sapien
accctgcttggctccgagctcagct

SEQ ID NO: 1760460 - DNA, 25 bp, Homo sapien
tcgccgatgatgaggatcttcaggg

SEQ ID NO: 1760461 - DNA, 25 bp, Homo sapien
gggtggtcagcacgtcctcgtctat

SEQ ID NO: 1760462 - DNA, 25 bp, Homo sapien
tcttcagggtggtcagcacgtcctc

SEQ ID NO: 1760463 - DNA, 25 bp, Homo sapien
ccactctcgccgatgatgaggatct

SEQ ID NO: 1760464 - DNA, 25 bp, Homo sapien
tgtgagcctcaagaggaggctgaac

SEQ ID NO: 1760465 - DNA, 25 bp, Homo sapien
tctgtgagcctcaagaggaggctga

SEQ ID NO: 1760466 - DNA, 25 bp, Homo sapien
ttgaaagtatcatctgtgagcctca

SEQ ID NO: 1760467 - DNA, 25 bp, Homo sapien
tgcaagttctggattgaaagtatca

SEQ ID NO: 1760468 - DNA, 25 bp, Homo sapien
aggacaacgtgcagagcaagatggc

SEQ ID NO: 1760469 - DNA, 25 bp, Homo sapien
tgaggacaacgtgcagagcaagatg

SEQ ID NO: 1760470 - DNA, 25 bp, Homo sapien
tctggccttgaagaaaatcgaggta

SEQ ID NO: 1760471 - DNA, 25 bp, Homo sapien
cagtctggccttgaagaaaatcgag

SEQ ID NO: 1760472 - DNA, 25 bp, Homo sapien
tgagctacaaccacagtgagcatcc

SEQ ID NO: 1760473 - DNA, 25 bp, Homo sapien
catcttgggatgtaactggcctagg

SEQ ID NO: 1760474 - DNA, 25 bp, Homo sapien
gtgtgtcctccaacccgttcctgga

SEQ ID NO: 1760475 - DNA, 25 bp, Homo sapien
tggacaaaacgttcgacctgagcta

SEQ ID NO: 1760476 - DNA, 25 bp, Homo sapien
cccaaggacgaagaggaagatctgc

SEQ ID NO: 1760477 - DNA, 25 bp, Homo sapien
gcagggctatttcaccaccaacgat

SEQ ID NO: 1760478 - DNA, 25 bp, Homo sapien
ccaaggcggagagacgctttgtgca

SEQ ID NO: 1760479 - DNA, 25 bp, Homo sapien
tccaggaggtgcactcaggccaatt

SEQ ID NO: 1760480 - DNA, 25 bp, Homo sapien
cactgccacaccgactgcctggagg

SEQ ID NO: 1760481 - DNA, 25 bp, Homo sapien
acaccgactgcctggaggcgccgct

SEQ ID NO: 1760482 - DNA, 25 bp, Homo sapien
actgcctggaggcgccgctcttctt

SEQ ID NO: 1760483 - DNA, 25 bp, Homo sapien
tggcgccactgccacaccgactgcc

SEQ ID NO: 1760484 - DNA, 25 bp, Homo sapien
tgtgcttcccggaaatgggcttcag

SEQ ID NO: 1760485 - DNA, 25 bp, Homo sapien
tgtgtcgagtgagaacgccgcctgt

SEQ ID NO: 1760486 - DNA, 25 bp, Homo sapien
ccaggaagccgttggatagggcaga

SEQ ID NO: 1760487 - DNA, 25 bp, Homo sapien
tgcttcttcaccggctgtgtcgagt

SEQ ID NO: 1760488 - DNA, 25 bp, Homo sapien
ggcacgcatttgatggccttgaaga

SEQ ID NO: 1760489 - DNA, 25 bp, Homo sapien
ttagttaagcgacagggccaaccac

SEQ ID NO: 1760490 - DNA, 25 bp, Homo sapien
gacacgtggaatttctgtgccgttt

SEQ ID NO: 1760491 - DNA, 25 bp, Homo sapien
caatacattgcgagtcccacagaac

SEQ ID NO: 1760492 - DNA, 25 bp, Homo sapien
gaagacttttccatccgctgacagc

SEQ ID NO: 1760493 - DNA, 25 bp, Homo sapien
tgttagaaaaaaggacccatagcac

SEQ ID NO: 1760494 - DNA, 25 bp, Homo sapien
gctgaaatcttctgcaagtgttaga

SEQ ID NO: 1760495 - DNA, 25 bp, Homo sapien
gctgacagcaaacatcgtggccggg

SEQ ID NO: 1760496 - DNA, 25 bp, Homo sapien
gccaagcttagcaaaactgacaagg

SEQ ID NO: 1760497 - DNA, 25 bp, Homo sapien
ggtaggccacgatatcatgcagagg

SEQ ID NO: 1760498 - DNA, 25 bp, Homo sapien
catgcagaggagctatcagttgtag

SEQ ID NO: 1760499 - DNA, 25 bp, Homo sapien
tcagttgtagagttcgctttaaggc

SEQ ID NO: 1760500 - DNA, 25 bp, Homo sapien
tgcctgggccacccggatagggtct

SEQ ID NO: 1760501 - DNA, 25 bp, Homo sapien
ctgggccacccggatagggtcttgg

SEQ ID NO: 1760502 - DNA, 25 bp, Homo sapien
tgcaaaaatataacctccctccgga

SEQ ID NO: 1760503 - DNA, 25 bp, Homo sapien
gaggctgtcaatcatgttctgcagc

SEQ ID NO: 1760504 - DNA, 25 bp, Homo sapien
tacattcagactaaaggcatgtttc

SEQ ID NO: 1760505 - DNA, 25 bp, Homo sapien
ggaatgagaggctcgtgttgttttc

SEQ ID NO: 1760506 - DNA, 25 bp, Homo sapien
ttgctgcaggaaggattatattatc

SEQ ID NO: 1760507 - DNA, 25 bp, Homo sapien
tgatgtactcctaaagcaggcttgc

SEQ ID NO: 1760508 - DNA, 25 bp, Homo sapien
cacacccagctgtcaaagcacacat

SEQ ID NO: 1760509 - DNA, 25 bp, Homo sapien
cacccagctgtcaaagcacacataa

SEQ ID NO: 1760510 - DNA, 25 bp, Homo sapien
ctgcatgtttagagagagctgagta

SEQ ID NO: 1760511 - DNA, 25 bp, Homo sapien
acaaccatagctcacaacagtctca

SEQ ID NO: 1760512 - DNA, 25 bp, Homo sapien
gaagcagtgtgagtggagaaagaat

SEQ ID NO: 1760513 - DNA, 25 bp, Homo sapien
agcagtgtgagtggagaaagaataa

SEQ ID NO: 1760514 - DNA, 25 bp, Homo sapien
gtgtgagtggagaaagaataaagca

SEQ ID NO: 1760515 - DNA, 25 bp, Homo sapien
cagtgtgagtggagaaagaataaag

SEQ ID NO: 1760516 - DNA, 25 bp, Homo sapien
ggtaggcaggaacatttccagctgc

SEQ ID NO: 1760517 - DNA, 25 bp, Homo sapien
tgtgacagactggtaggcaggaaca

SEQ ID NO: 1760518 - DNA, 25 bp, Homo sapien
tctgtgacagactggtaggcaggaa

SEQ ID NO: 1760519 - DNA, 25 bp, Homo sapien
gtaggcaggaacatttccagctgcc

SEQ ID NO: 1760520 - DNA, 25 bp, Homo sapien
ctgagagagttgctcagtgctggta

SEQ ID NO: 1760521 - DNA, 25 bp, Homo sapien
gttgctcagtgctggtagcccatgg

SEQ ID NO: 1760522 - DNA, 25 bp, Homo sapien
agagagttgctcagtgctggtagcc

SEQ ID NO: 1760523 - DNA, 25 bp, Homo sapien
gagttgctcagtgctggtagcccat

SEQ ID NO: 1760524 - DNA, 25 bp, Homo sapien
tgcatattatattctagggtatctg

SEQ ID NO: 1760525 - DNA, 25 bp, Homo sapien
tatctgggctgttactcataactgg

SEQ ID NO: 1760526 - DNA, 25 bp, Homo sapien
ttccagaaatgctctccaaggaaac

SEQ ID NO: 1760527 - DNA, 25 bp, Homo sapien
tccagaaatgctctccaaggaaaca

SEQ ID NO: 1760528 - DNA, 25 bp, Homo sapien
caacaatggagaagacctatcctac

SEQ ID NO: 1760529 - DNA, 25 bp, Homo sapien
cacattattcatcgtgggtgagagt

SEQ ID NO: 1760530 - DNA, 25 bp, Homo sapien
tctttgcagtctgcgctcagttctc

SEQ ID NO: 1760531 - DNA, 25 bp, Homo sapien
gacctgtgaacccaatggcaaccat

SEQ ID NO: 1760532 - DNA, 25 bp, Homo sapien
catgactggagatgactggccattc

SEQ ID NO: 1760533 - DNA, 25 bp, Homo sapien
gcctgggagtttctctaagaggccc

SEQ ID NO: 1760534 - DNA, 25 bp, Homo sapien
aagaaattctccctacgagtcctgc

SEQ ID NO: 1760535 - DNA, 25 bp, Homo sapien
tgtttatggacaggtcaggagtcac

SEQ ID NO: 1760536 - DNA, 25 bp, Homo sapien
ttaacctgtggccagtgctacccca

SEQ ID NO: 1760537 - DNA, 25 bp, Homo sapien
cacacatatgcagagggaaaatacc

SEQ ID NO: 1760538 - DNA, 25 bp, Homo sapien
tgtatttacaagaacccattccctc

SEQ ID NO: 1760539 - DNA, 25 bp, Homo sapien
cagcagatctgtacatggtgaatgt

SEQ ID NO: 1760540 - DNA, 25 bp, Homo sapien
gagccaccttgcggtcacggtcact

SEQ ID NO: 1760541 - DNA, 25 bp, Homo sapien
accttgcggtcacggtcactcagcc

SEQ ID NO: 1760542 - DNA, 25 bp, Homo sapien
ttgcggtcacggtcactcagcccac

SEQ ID NO: 1760543 - DNA, 25 bp, Homo sapien
ccaccttgcggtcacggtcactcag

SEQ ID NO: 1760544 - DNA, 25 bp, Homo sapien
ggtcacatgatagctactcagaaca

SEQ ID NO: 1760545 - DNA, 25 bp, Homo sapien
cctccatggtcacatgatagctact

SEQ ID NO: 1760546 - DNA, 25 bp, Homo sapien
tcttccagtagcagttgcacaccca

SEQ ID NO: 1760547 - DNA, 25 bp, Homo sapien
gatagctactcagaacatcttccag

SEQ ID NO: 1760548 - DNA, 25 bp, Homo sapien
ctttgggctgcttcggaactgactt

SEQ ID NO: 1760549 - DNA, 25 bp, Homo sapien
tgcttcggaactgacttctgaatcc

SEQ ID NO: 1760550 - DNA, 25 bp, Homo sapien
ggctgcttcggaactgacttctgaa

SEQ ID NO: 1760551 - DNA, 25 bp, Homo sapien
tgggctgcttcggaactgacttctg

SEQ ID NO: 1760552 - DNA, 25 bp, Homo sapien
tgcttccacagtatcagaaatgatc

SEQ ID NO: 1760553 - DNA, 25 bp, Homo sapien
gatatcctggccttgcagcttgagt

SEQ ID NO: 1760554 - DNA, 25 bp, Homo sapien
aaaggacatcaccgcatcgcacagg

SEQ ID NO: 1760555 - DNA, 25 bp, Homo sapien
tgcagcttgagtcggccccagtgct

SEQ ID NO: 1760556 - DNA, 25 bp, Homo sapien
cagactgattatttactataaatcc

SEQ ID NO: 1760557 - DNA, 25 bp, Homo sapien
tggctatagctttcatgctggggta

SEQ ID NO: 1760558 - DNA, 25 bp, Homo sapien
catgctggggtagagaacgtcagtt

SEQ ID NO: 1760559 - DNA, 25 bp, Homo sapien
agtttttatttcaacttctgaggct

SEQ ID NO: 1760560 - DNA, 25 bp, Homo sapien
tttccatgtgaatacttgcatgcta

SEQ ID NO: 1760561 - DNA, 25 bp, Homo sapien
caacttctccacacagatcatctta

SEQ ID NO: 1760562 - DNA, 25 bp, Homo sapien
tcattcttatgaaggtacacatcaa

SEQ ID NO: 1760563 - DNA, 25 bp, Homo sapien
cgcgtgagtcccaggatcaagctga

SEQ ID NO: 1760564 - DNA, 25 bp, Homo sapien
ctcagaagggtaagcagtgagcttg

SEQ ID NO: 1760565 - DNA, 25 bp, Homo sapien
gtgcattgacaaccgaacagccgag

SEQ ID NO: 1760566 - DNA, 25 bp, Homo sapien
taaaactccatgtaggaccaacagt

SEQ ID NO: 1760567 - DNA, 25 bp, Homo sapien
gcttgcagagtgtaggtttctccct

SEQ ID NO: 1760568 - DNA, 25 bp, Homo sapien
tcttagtacctcttggatcatttga

SEQ ID NO: 1760569 - DNA, 25 bp, Homo sapien
tcctccttgcacttttctgataaaa

SEQ ID NO: 1760570 - DNA, 25 bp, Homo sapien
ctcctccttgcacttttctgataaa

SEQ ID NO: 1760571 - DNA, 25 bp, Homo sapien
ctccttgcacttttctgataaaacc

SEQ ID NO: 1760572 - DNA, 25 bp, Homo sapien
tggagatccaggtctccacactgag

SEQ ID NO: 1760573 - DNA, 25 bp, Homo sapien
agtagaggtggagatccaggtctcc

SEQ ID NO: 1760574 - DNA, 25 bp, Homo sapien
gatccaggtctccacactgagtcat

SEQ ID NO: 1760575 - DNA, 25 bp, Homo sapien
tccaggtctccacactgagtcatgc

SEQ ID NO: 1760576 - DNA, 25 bp, Homo sapien
tgctcttgtaagaactgttttgata

SEQ ID NO: 1760577 - DNA, 25 bp, Homo sapien
tataactacctacaacactaccaat

SEQ ID NO: 1760578 - DNA, 25 bp, Homo sapien
cttgaagcaaaacattgttgatctc

SEQ ID NO: 1760579 - DNA, 25 bp, Homo sapien
caacactaccaatagcgaatatcac

SEQ ID NO: 1760580 - DNA, 25 bp, Homo sapien
ttcttgccccacccagtctctggag

SEQ ID NO: 1760581 - DNA, 25 bp, Homo sapien
cagtctctggagagcaagcaccagg

SEQ ID NO: 1760582 - DNA, 25 bp, Homo sapien
gtctctggagagcaagcaccaggac

SEQ ID NO: 1760583 - DNA, 25 bp, Homo sapien
cccagtctctggagagcaagcacca

SEQ ID NO: 1760584 - DNA, 25 bp, Homo sapien
catggagtaggtctcaaagttgctg

SEQ ID NO: 1760585 - DNA, 25 bp, Homo sapien
aggcaggcctcaaggtgatctttcc

SEQ ID NO: 1760586 - DNA, 25 bp, Homo sapien
catcacaacccagggaaaggaggca

SEQ ID NO: 1760587 - DNA, 25 bp, Homo sapien
tgcaacacatgctcatagcacatgg

SEQ ID NO: 1760588 - DNA, 25 bp, Homo sapien
ctccactggacacttcccaagcaca

SEQ ID NO: 1760589 - DNA, 25 bp, Homo sapien
ttctccactggacacttcccaagca

SEQ ID NO: 1760590 - DNA, 25 bp, Homo sapien
ctttcgtattctccactggacactt

SEQ ID NO: 1760591 - DNA, 25 bp, Homo sapien
ttcgtattctccactggacacttcc

SEQ ID NO: 1760592 - DNA, 25 bp, Homo sapien
tgggcaggagaaagcagtacacaac

SEQ ID NO: 1760593 - DNA, 25 bp, Homo sapien
ggagaaagcagtacacaaccaaact

SEQ ID NO: 1760594 - DNA, 25 bp, Homo sapien
gcagtacacaaccaaactctaacat

SEQ ID NO: 1760595 - DNA, 25 bp, Homo sapien
gaaagcagtacacaaccaaactcta

SEQ ID NO: 1760596 - DNA, 25 bp, Homo sapien
ctggccagcactgtcttcaggtgga

SEQ ID NO: 1760597 - DNA, 25 bp, Homo sapien
tcaggtggaccctggcctctttgtg

SEQ ID NO: 1760598 - DNA, 25 bp, Homo sapien
agcactgtcttcaggtggaccctgg

SEQ ID NO: 1760599 - DNA, 25 bp, Homo sapien
ctggcctctttgtgtagcatctaat

SEQ ID NO: 1760600 - DNA, 25 bp, Homo sapien
tctcaaacaaagctcggactaatgc

SEQ ID NO: 1760601 - DNA, 25 bp, Homo sapien
gtaaacaggtctcaaacaaagctcg

SEQ ID NO: 1760602 - DNA, 25 bp, Homo sapien
ctcagagtggtgatttccatgatca

SEQ ID NO: 1760603 - DNA, 25 bp, Homo sapien
caaagctcggactaatgcttcatat

SEQ ID NO: 1760604 - DNA, 25 bp, Homo sapien
cacacactttctggatcaaattaag

SEQ ID NO: 1760605 - DNA, 25 bp, Homo sapien
tgttctcacttcaccgatgagctca

SEQ ID NO: 1760606 - DNA, 25 bp, Homo sapien
gatgagctcacacactttctggatc

SEQ ID NO: 1760607 - DNA, 25 bp, Homo sapien
ccttctgttctcacttcaccgatga

SEQ ID NO: 1760608 - DNA, 25 bp, Homo sapien
gcctggaagcacgcctgctgcacag

SEQ ID NO: 1760609 - DNA, 25 bp, Homo sapien
ctcgcgctgtcagcctgtgccctgg

SEQ ID NO: 1760610 - DNA, 25 bp, Homo sapien
gaaataaacccacttctcgctctgc

SEQ ID NO: 1760611 - DNA, 25 bp, Homo sapien
cagcttgatgcgcaaatactctttt

SEQ ID NO: 1760612 - DNA, 25 bp, Homo sapien
tgcttccacatcctcgcgctgtcag

SEQ ID NO: 1760613 - DNA, 25 bp, Homo sapien
acgttcagctttgcagagttaactg

SEQ ID NO: 1760614 - DNA, 25 bp, Homo sapien
gccacgttcagctttgcagagttaa

SEQ ID NO: 1760615 - DNA, 25 bp, Homo sapien
tggccacgttcagctttgcagagtt

SEQ ID NO: 1760616 - DNA, 25 bp, Homo sapien
ccacgttcagctttgcagagttaac

SEQ ID NO: 1760617 - DNA, 25 bp, Homo sapien
tgggtcactctatgttctaactcct

SEQ ID NO: 1760618 - DNA, 25 bp, Homo sapien
cactctatgttctaactccttcagc

SEQ ID NO: 1760619 - DNA, 25 bp, Homo sapien
tcctgggtcactctatgttctaact

SEQ ID NO: 1760620 - DNA, 25 bp, Homo sapien
gagcttcctgggtcactctatgttc

SEQ ID NO: 1760621 - DNA, 25 bp, Homo sapien
ctggtggaggtccctcttcattttt

SEQ ID NO: 1760622 - DNA, 25 bp, Homo sapien
cttcatttttttctgctgcagttgg

SEQ ID NO: 1760623 - DNA, 25 bp, Homo sapien
tcatttttttctgctgcagttggcc

SEQ ID NO: 1760624 - DNA, 25 bp, Homo sapien
ctcttcatttttttctgctgcagtt

SEQ ID NO: 1760625 - DNA, 25 bp, Homo sapien
gacagctgaccgctgggcatcgtga

SEQ ID NO: 1760626 - DNA, 25 bp, Homo sapien
ctgggcatcgtgaagctgaccctgc

SEQ ID NO: 1760627 - DNA, 25 bp, Homo sapien
tcctctgcacgctggagagcatcca

SEQ ID NO: 1760628 - DNA, 25 bp, Homo sapien
actgcgctcctgggcaagccggctt

SEQ ID NO: 1760629 - DNA, 25 bp, Homo sapien
cagaagttggggagtattgagcctg

SEQ ID NO: 1760630 - DNA, 25 bp, Homo sapien
gaagttggggagtattgagcctggg

SEQ ID NO: 1760631 - DNA, 25 bp, Homo sapien
aagcagaagttggggagtattgagc

SEQ ID NO: 1760632 - DNA, 25 bp, Homo sapien
gcagaagttggggagtattgagcct

SEQ ID NO: 1760633 - DNA, 25 bp, Homo sapien
tgagattagtctttaaaaagcgttg

SEQ ID NO: 1760634 - DNA, 25 bp, Homo sapien
ctttgagattagtctttaaaaagcg

SEQ ID NO: 1760635 - DNA, 25 bp, Homo sapien
tgtcctaaagggaattggtcaagaa

SEQ ID NO: 1760636 - DNA, 25 bp, Homo sapien
gccatatagtatgccttcttgtctg

SEQ ID NO: 1760637 - DNA, 25 bp, Homo sapien
cattgattcagtctgggttaggcca

SEQ ID NO: 1760638 - DNA, 25 bp, Homo sapien
gtggaaagccatttccagttaagga

SEQ ID NO: 1760639 - DNA, 25 bp, Homo sapien
ccatattgggtaggaaaacatcgtc

SEQ ID NO: 1760640 - DNA, 25 bp, Homo sapien
tgggtaggaaaacatcgtcagttct

SEQ ID NO: 1760641 - DNA, 25 bp, Homo sapien
tattgggtaggaaaacatcgtcagt

SEQ ID NO: 1760642 - DNA, 25 bp, Homo sapien
ctgccatattgggtaggaaaacatc

SEQ ID NO: 1760643 - DNA, 25 bp, Homo sapien
ctggatggagctgtttgaacctgaa

SEQ ID NO: 1760644 - DNA, 25 bp, Homo sapien
agctgtttgaacctgaaaagctgtc

SEQ ID NO: 1760645 - DNA, 25 bp, Homo sapien
gatggagctgtttgaacctgaaaag

SEQ ID NO: 1760646 - DNA, 25 bp, Homo sapien
ggagctgtttgaacctgaaaagctg

SEQ ID NO: 1760647 - DNA, 25 bp, Homo sapien
gatttaatggcatttggagtcattt

SEQ ID NO: 1760648 - DNA, 25 bp, Homo sapien
agatttaatggcatttggagtcatt

SEQ ID NO: 1760649 - DNA, 25 bp, Homo sapien
gagatttaatggcatttggagtcat

SEQ ID NO: 1760650 - DNA, 25 bp, Homo sapien
tttaatggcatttggagtcattttt

SEQ ID NO: 1760651 - DNA, 25 bp, Homo sapien
ttaggctcctaaaggcacatgcttc

SEQ ID NO: 1760652 - DNA, 25 bp, Homo sapien
ccactgcatgcaaagaatactaaca

SEQ ID NO: 1760653 - DNA, 25 bp, Homo sapien
gcaggtactttagcacaatcggcca

SEQ ID NO: 1760654 - DNA, 25 bp, Homo sapien
tcaatgtagtagcaatttaggctcc

SEQ ID NO: 1760655 - DNA, 25 bp, Homo sapien
tgtaactggtttacaattaatggat

SEQ ID NO: 1760656 - DNA, 25 bp, Homo sapien
ttttaatcctgtaatgttcattcac

SEQ ID NO: 1760657 - DNA, 25 bp, Homo sapien
cataattgtatgtacctttggaaaa

SEQ ID NO: 1760658 - DNA, 25 bp, Homo sapien
gtgatacagaggtaatcactgtaac

SEQ ID NO: 1760659 - DNA, 25 bp, Homo sapien
tatttgttgcacaggcagatactgc

SEQ ID NO: 1760660 - DNA, 25 bp, Homo sapien
gaaaggatttccaccagactgtctt

SEQ ID NO: 1760661 - DNA, 25 bp, Homo sapien
cattggactagtgcagaggctttaa

SEQ ID NO: 1760662 - DNA, 25 bp, Homo sapien
gagctcttgcaacagaactcacagc

SEQ ID NO: 1760663 - DNA, 25 bp, Homo sapien
taaggattggtcagaggatgtaact

SEQ ID NO: 1760664 - DNA, 25 bp, Homo sapien
aacttgatgtgagcagtagtaaacc

SEQ ID NO: 1760665 - DNA, 25 bp, Homo sapien
cttgtgcagacaacatcatggctct

SEQ ID NO: 1760666 - DNA, 25 bp, Homo sapien
tgagaagaacgtgccaaatgagaat

SEQ ID NO: 1760667 - DNA, 25 bp, Homo sapien
tatgccacctttttctcagtttcag

SEQ ID NO: 1760668 - DNA, 25 bp, Homo sapien
tttttctcagtttcagtgaagccat

SEQ ID NO: 1760669 - DNA, 25 bp, Homo sapien
atgcttatgccacctttttctcagt

SEQ ID NO: 1760670 - DNA, 25 bp, Homo sapien
acctttttctcagtttcagtgaagc

SEQ ID NO: 1760671 - DNA, 25 bp, Homo sapien
cctgggtcctcctgtgaattgccat

SEQ ID NO: 1760672 - DNA, 25 bp, Homo sapien
tgaattgccatgagtcttttgtgct

SEQ ID NO: 1760673 - DNA, 25 bp, Homo sapien
cctgtgaattgccatgagtcttttg

SEQ ID NO: 1760674 - DNA, 25 bp, Homo sapien
gggtcctcctgtgaattgccatgag

SEQ ID NO: 1760675 - DNA, 25 bp, Homo sapien
gaaggttgtgttgaaaactgtgtcc

SEQ ID NO: 1760676 - DNA, 25 bp, Homo sapien
tttgttaatacaagaggtagagcgc

SEQ ID NO: 1760677 - DNA, 25 bp, Homo sapien
taaagagaccttatgaaactgttgg

SEQ ID NO: 1760678 - DNA, 25 bp, Homo sapien
gagcgctaaagggacgtacattgaa

SEQ ID NO: 1760679 - DNA, 25 bp, Homo sapien
tgatgtcaggcaatcccgtgtccag

SEQ ID NO: 1760680 - DNA, 25 bp, Homo sapien
gcaaccgccgtctgaaatagcaatc

SEQ ID NO: 1760681 - DNA, 25 bp, Homo sapien
caaacttagttcttgagagccgcac

SEQ ID NO: 1760682 - DNA, 25 bp, Homo sapien
aaagtgacagagtagacgccctgcg

SEQ ID NO: 1760683 - DNA, 25 bp, Homo sapien
cataagattgctgtgagggttccat

SEQ ID NO: 1760684 - DNA, 25 bp, Homo sapien
tgctttatgctaagacctgaggtgg

SEQ ID NO: 1760685 - DNA, 25 bp, Homo sapien
tgggaggaagcagaccgcctatgtt

SEQ ID NO: 1760686 - DNA, 25 bp, Homo sapien
tataaagaacctataagagacctgg

SEQ ID NO: 1760687 - DNA, 25 bp, Homo sapien
agaaaatatagaacctttccagcac

SEQ ID NO: 1760688 - DNA, 25 bp, Homo sapien
gaaaatatagaacctttccagcacc

SEQ ID NO: 1760689 - DNA, 25 bp, Homo sapien
gagaaaatatagaacctttccagca

SEQ ID NO: 1760690 - DNA, 25 bp, Homo sapien
tgtcttgttggagaacaggcttcat

SEQ ID NO: 1760691 - DNA, 25 bp, Homo sapien
cttcatactctctttggacagaaat

SEQ ID NO: 1760692 - DNA, 25 bp, Homo sapien
catcactccaagaacagtccctgtg

SEQ ID NO: 1760693 - DNA, 25 bp, Homo sapien
tacacttggtgtcggcactgaccat

SEQ ID NO: 1760694 - DNA, 25 bp, Homo sapien
cagatcactcgagggcagaagttcc

SEQ ID NO: 1760695 - DNA, 25 bp, Homo sapien
ggctcacacctgtaatcccagcact

SEQ ID NO: 1760696 - DNA, 25 bp, Homo sapien
aataaataaataggccgggtgcagt

SEQ ID NO: 1760697 - DNA, 25 bp, Homo sapien
gcaggcagatcactcgagggcagaa

SEQ ID NO: 1760698 - DNA, 25 bp, Homo sapien
atttctctcatgggttcctacttcc

SEQ ID NO: 1760699 - DNA, 25 bp, Homo sapien
tttctctcatgggttcctacttcca

SEQ ID NO: 1760700 - DNA, 25 bp, Homo sapien
gtcccagtgcattcagtgaagtttt

SEQ ID NO: 1760701 - DNA, 25 bp, Homo sapien
atggagtcccagtgcattcagtgaa

SEQ ID NO: 1760702 - DNA, 25 bp, Homo sapien
tggagtcccagtgcattcagtgaag

SEQ ID NO: 1760703 - DNA, 25 bp, Homo sapien
ccagtgcattcagtgaagtttttat

SEQ ID NO: 1760704 - DNA, 25 bp, Homo sapien
atctcctcaagcagttattctgtgt

SEQ ID NO: 1760705 - DNA, 25 bp, Homo sapien
ctcctcaagcagttattctgtgtgt

SEQ ID NO: 1760706 - DNA, 25 bp, Homo sapien
tctcctcaagcagttattctgtgtg

SEQ ID NO: 1760707 - DNA, 25 bp, Homo sapien
cctgagttggccttctgagtcattg

SEQ ID NO: 1760708 - DNA, 25 bp, Homo sapien
aaaactggataatttaattccagca

SEQ ID NO: 1760709 - DNA, 25 bp, Homo sapien
tatgtgggcacaggatggctataag

SEQ ID NO: 1760710 - DNA, 25 bp, Homo sapien
cagcttttatgtgggcacaggatgg

SEQ ID NO: 1760711 - DNA, 25 bp, Homo sapien
tattgagcagaatgatgaagatgat

SEQ ID NO: 1760712 - DNA, 25 bp, Homo sapien
tcatattgagcagaatgatgaagat

SEQ ID NO: 1760713 - DNA, 25 bp, Homo sapien
atcatcatcatattgagcagaatga

SEQ ID NO: 1760714 - DNA, 25 bp, Homo sapien
agatgatgataatgagaaggggcat

SEQ ID NO: 1760715 - DNA, 25 bp, Homo sapien
ttcctctattcataagacgtttctt

SEQ ID NO: 1760716 - DNA, 25 bp, Homo sapien
tcctctattcataagacgtttcttc

SEQ ID NO: 1760717 - DNA, 25 bp, Homo sapien
aatgagcgctgctatggtgtgagtt

SEQ ID NO: 1760718 - DNA, 25 bp, Homo sapien
tgagcgctgctatggtgtgagttgg

SEQ ID NO: 1760719 - DNA, 25 bp, Homo sapien
atgagcgctgctatggtgtgagttg

SEQ ID NO: 1760720 - DNA, 25 bp, Homo sapien
cctgttactgcttcacctgtgttct

SEQ ID NO: 1760721 - DNA, 25 bp, Homo sapien
tcttttggaccatgacaggacctcc

SEQ ID NO: 1760722 - DNA, 25 bp, Homo sapien
caaacccactcagaaaagaggcctg

SEQ ID NO: 1760723 - DNA, 25 bp, Homo sapien
cctcttttggaccatgacaggacct

SEQ ID NO: 1760724 - DNA, 25 bp, Homo sapien
gctaggtgcggctcgccgtcgctgc

SEQ ID NO: 1760725 - DNA, 25 bp, Homo sapien
taaccacagagaaacctccgtcgtg

SEQ ID NO: 1760726 - DNA, 25 bp, Homo sapien
tctcggccgcgtggactgcaggcgc

SEQ ID NO: 1760727 - DNA, 25 bp, Homo sapien
tcagattgcgaagagcgccgctgag

SEQ ID NO: 1760728 - DNA, 25 bp, Homo sapien
cggccggctgttcccaatcaggcgg

SEQ ID NO: 1760729 - DNA, 25 bp, Homo sapien
ctaggcggctcgaactctccagcga

SEQ ID NO: 1760730 - DNA, 25 bp, Homo sapien
aggcgatccgctgccgaaatccggg

SEQ ID NO: 1760731 - DNA, 25 bp, Homo sapien
cagaccgttccttcttcgcaggcgg

SEQ ID NO: 1760732 - DNA, 25 bp, Homo sapien
agcagttgaggttgaagatccgcag

SEQ ID NO: 1760733 - DNA, 25 bp, Homo sapien
cagttgaggttgaagatccgcagtc

SEQ ID NO: 1760734 - DNA, 25 bp, Homo sapien
gcagttgaggttgaagatccgcagt

SEQ ID NO: 1760735 - DNA, 25 bp, Homo sapien
gttgaggttgaagatccgcagtcgc

SEQ ID NO: 1760736 - DNA, 25 bp, Homo sapien
aagtctcccaggcgcctcatgcggt

SEQ ID NO: 1760737 - DNA, 25 bp, Homo sapien
gtgcttgctcaagtacggaatgccc

SEQ ID NO: 1760738 - DNA, 25 bp, Homo sapien
cggtcggcccggtgcttgctcaagt

SEQ ID NO: 1760739 - DNA, 25 bp, Homo sapien
aaagccaggtcgaagctctcctggt

SEQ ID NO: 1760740 - DNA, 25 bp, Homo sapien
ctgggttccgcaccgtgctgcacaa

SEQ ID NO: 1760741 - DNA, 25 bp, Homo sapien
ggttccgcaccgtgctgcacaatct

SEQ ID NO: 1760742 - DNA, 25 bp, Homo sapien
agcctgggttccgcaccgtgctgca

SEQ ID NO: 1760743 - DNA, 25 bp, Homo sapien
gggttccgcaccgtgctgcacaatc

SEQ ID NO: 1760744 - DNA, 25 bp, Homo sapien
gaagtggtgtgcagctgggtaggta

SEQ ID NO: 1760745 - DNA, 25 bp, Homo sapien
cttctgtctcaggtactggaagtcc

SEQ ID NO: 1760746 - DNA, 25 bp, Homo sapien
ttctgtctcaggtactggaagtcct

SEQ ID NO: 1760747 - DNA, 25 bp, Homo sapien
ctccggaagtggtgtgcagctgggt

SEQ ID NO: 1760748 - DNA, 25 bp, Homo sapien
caaggcgacagcctttggaggagta

SEQ ID NO: 1760749 - DNA, 25 bp, Homo sapien
gagtatagggcagccagaaaacaaa

SEQ ID NO: 1760750 - DNA, 25 bp, Homo sapien
tgaaatgggctgaagtcataggacc

SEQ ID NO: 1760751 - DNA, 25 bp, Homo sapien
acaaagctgaaatgggctgaagtca

SEQ ID NO: 1760752 - DNA, 25 bp, Homo sapien
gatgtgctgggtaagctcctggatt

SEQ ID NO: 1760753 - DNA, 25 bp, Homo sapien
agtgtagatgtgctgggtaagctcc

SEQ ID NO: 1760754 - DNA, 25 bp, Homo sapien
acagaggccactgccaatgattccg

SEQ ID NO: 1760755 - DNA, 25 bp, Homo sapien
gtagccattgagagtgtagatgtgc

SEQ ID NO: 1760756 - DNA, 25 bp, Homo sapien
atgggtcacataggcgttgagcacc

SEQ ID NO: 1760757 - DNA, 25 bp, Homo sapien
gcaccatgccacttagatggagcac

SEQ ID NO: 1760758 - DNA, 25 bp, Homo sapien
atgccacttagatggagcaccagca

SEQ ID NO: 1760759 - DNA, 25 bp, Homo sapien
gtcacataggcgttgagcaccatgc

SEQ ID NO: 1760760 - DNA, 25 bp, Homo sapien
gtatgtctgaatcaagcctgtgtct

SEQ ID NO: 1760761 - DNA, 25 bp, Homo sapien
tcccaggggtatgtctgaatcaagc

SEQ ID NO: 1760762 - DNA, 25 bp, Homo sapien
tcatccccaggtatgagagctagag

SEQ ID NO: 1760763 - DNA, 25 bp, Homo sapien
ctgagcaagatagatgagatcacag

SEQ ID NO: 1760764 - DNA, 25 bp, Homo sapien
ccttctgtcgattgtattcggcatg

SEQ ID NO: 1760765 - DNA, 25 bp, Homo sapien
tctgtcgattgtattcggcatggag

SEQ ID NO: 1760766 - DNA, 25 bp, Homo sapien
ttctgtcgattgtattcggcatgga

SEQ ID NO: 1760767 - DNA, 25 bp, Homo sapien
gtccttctgtcgattgtattcggca

SEQ ID NO: 1760768 - DNA, 25 bp, Homo sapien
ggccaattcccaagcttgggccaca

SEQ ID NO: 1760769 - DNA, 25 bp, Homo sapien
gatgaactgggccaattcccaagct

SEQ ID NO: 1760770 - DNA, 25 bp, Homo sapien
gggccacacgatgtgctaggtagat

SEQ ID NO: 1760771 - DNA, 25 bp, Homo sapien
aagcttgggccacacgatgtgctag

SEQ ID NO: 1760772 - DNA, 25 bp, Homo sapien
ggttggtgaggcgggagttcttcca

SEQ ID NO: 1760773 - DNA, 25 bp, Homo sapien
accaggttggtgaggcgggagttct

SEQ ID NO: 1760774 - DNA, 25 bp, Homo sapien
caggttggtgaggcgggagttcttc

SEQ ID NO: 1760775 - DNA, 25 bp, Homo sapien
ttggtgaggcgggagttcttccatc

SEQ ID NO: 1760776 - DNA, 25 bp, Homo sapien
tgaagtcccgagtttcaagataggc

SEQ ID NO: 1760777 - DNA, 25 bp, Homo sapien
tctccacacaacagaaccacgtctg

SEQ ID NO: 1760778 - DNA, 25 bp, Homo sapien
gataggcatcatgaagccctgtcca

SEQ ID NO: 1760779 - DNA, 25 bp, Homo sapien
tcttctgggtgcatgttgaggtctc

SEQ ID NO: 1760780 - DNA, 25 bp, Homo sapien
cttgtaaagcacgtagtcaatgcgg

SEQ ID NO: 1760781 - DNA, 25 bp, Homo sapien
tagtcaatgcggacaccaaagggaa

SEQ ID NO: 1760782 - DNA, 25 bp, Homo sapien
agttcttgggtaccattgtgttgcc

SEQ ID NO: 1760783 - DNA, 25 bp, Homo sapien
tcctgctggctgacgtagcagttct

SEQ ID NO: 1760784 - DNA, 25 bp, Homo sapien
tcacaaacagagtagccatcagggc

SEQ ID NO: 1760785 - DNA, 25 bp, Homo sapien
gcccctgtgagggtcaaagcctgta

SEQ ID NO: 1760786 - DNA, 25 bp, Homo sapien
atcagggcttcatgatcagagaggg

SEQ ID NO: 1760787 - DNA, 25 bp, Homo sapien
ctcttacaggagatgtaaaacccag

SEQ ID NO: 1760788 - DNA, 25 bp, Homo sapien
gtggggcaggagagagtcaagagtg

SEQ ID NO: 1760789 - DNA, 25 bp, Homo sapien
tggggcaggagagagtcaagagtgg

SEQ ID NO: 1760790 - DNA, 25 bp, Homo sapien
agtggggcaggagagagtcaagagt

SEQ ID NO: 1760791 - DNA, 25 bp, Homo sapien
catcaacggcgacctctctgctggt

SEQ ID NO: 1760792 - DNA, 25 bp, Homo sapien
aggtggcccaccagcgagcctgagc

SEQ ID NO: 1760793 - DNA, 25 bp, Homo sapien
ctagcgaaggtggcccaccagcgag

SEQ ID NO: 1760794 - DNA, 25 bp, Homo sapien
ccaggcctcctttagcacacacatc

SEQ ID NO: 1760795 - DNA, 25 bp, Homo sapien
ggtccagagcagtatggcagcttcc

SEQ ID NO: 1760796 - DNA, 25 bp, Homo sapien
ccagagcagtatggcagcttccccg

SEQ ID NO: 1760797 - DNA, 25 bp, Homo sapien
ggggtccagagcagtatggcagctt

SEQ ID NO: 1760798 - DNA, 25 bp, Homo sapien
cagagcagtatggcagcttccccgg

SEQ ID NO: 1760799 - DNA, 25 bp, Homo sapien
tgtacgtggaagaggtagaatgcac

SEQ ID NO: 1760800 - DNA, 25 bp, Homo sapien
ttgcccttcctagcacatgctggag

SEQ ID NO: 1760801 - DNA, 25 bp, Homo sapien
tcagcctgggccctatataagccat

SEQ ID NO: 1760802 - DNA, 25 bp, Homo sapien
taagccattgacctcctgtacgtgg

SEQ ID NO: 1760803 - DNA, 25 bp, Homo sapien
agcgccagcggttgtcctcccttaa

SEQ ID NO: 1760804 - DNA, 25 bp, Homo sapien
aggagctccccacaccaagtgagaa

SEQ ID NO: 1760805 - DNA, 25 bp, Homo sapien
tgaatgaatgccaaggctcaccttt

SEQ ID NO: 1760806 - DNA, 25 bp, Homo sapien
cctttgctccgaaggggtggcctca

SEQ ID NO: 1760807 - DNA, 25 bp, Homo sapien
agctgggctccctatatgcctggga

SEQ ID NO: 1760808 - DNA, 25 bp, Homo sapien
gatagtcagctttaggctggtgccc

SEQ ID NO: 1760809 - DNA, 25 bp, Homo sapien
tgtgtgccctggtgtaccggctgca

SEQ ID NO: 1760810 - DNA, 25 bp, Homo sapien
gcatatccagttgaatcctagagac

SEQ ID NO: 1760811 - DNA, 25 bp, Homo sapien
tgcgtcagaaatagacccaggcctc

SEQ ID NO: 1760812 - DNA, 25 bp, Homo sapien
cccgccgtttgttgaggcagtttgg

SEQ ID NO: 1760813 - DNA, 25 bp, Homo sapien
aagtggaacctacgcggacagaggc

SEQ ID NO: 1760814 - DNA, 25 bp, Homo sapien
gctttgtctccggagattcctggga

SEQ ID NO: 1760815 - DNA, 25 bp, Homo sapien
taaaatgggactgttgcaagcactg

SEQ ID NO: 1760816 - DNA, 25 bp, Homo sapien
ttaactagctaaaagactggacgcg

SEQ ID NO: 1760817 - DNA, 25 bp, Homo sapien
gaatacgacgaagctgatcccaaag

SEQ ID NO: 1760818 - DNA, 25 bp, Homo sapien
aaagagctagccttgcacgcgcaag

SEQ ID NO: 1760819 - DNA, 25 bp, Homo sapien
acttgctgatgttagtgaagcctgg

SEQ ID NO: 1760820 - DNA, 25 bp, Homo sapien
aaacacactgaataagcacttgctg

SEQ ID NO: 1760821 - DNA, 25 bp, Homo sapien
tttctgaaatggcatgccaggccag

SEQ ID NO: 1760822 - DNA, 25 bp, Homo sapien
caggtgtgccactcccatgaagttc

SEQ ID NO: 1760823 - DNA, 25 bp, Homo sapien
gaaccaacacttaaacttaagcagc

SEQ ID NO: 1760824 - DNA, 25 bp, Homo sapien
tagcatagacactgagaatgtttcc

SEQ ID NO: 1760825 - DNA, 25 bp, Homo sapien
gcagcattgattagggcaggtcagt

SEQ ID NO: 1760826 - DNA, 25 bp, Homo sapien
taacagacacaaatgtagcatagac

SEQ ID NO: 1760827 - DNA, 25 bp, Homo sapien
tgcaccgtgtgcagcaaggctctga

SEQ ID NO: 1760828 - DNA, 25 bp, Homo sapien
tttgcccagaagcactcgctacagg

SEQ ID NO: 1760829 - DNA, 25 bp, Homo sapien
gcctagtatcatttccaacgtggtg

SEQ ID NO: 1760830 - DNA, 25 bp, Homo sapien
tgctggagcacatgagcctgcactc

SEQ ID NO: 1760831 - DNA, 25 bp, Homo sapien
tttgtaccaattaagtggctgtccc

SEQ ID NO: 1760832 - DNA, 25 bp, Homo sapien
cattatctcctctacagtgtttgaa

SEQ ID NO: 1760833 - DNA, 25 bp, Homo sapien
ccatgtatatgtaaagcctcaaggt

SEQ ID NO: 1760834 - DNA, 25 bp, Homo sapien
tgcacccgacctggcattgaccaat

SEQ ID NO: 1760835 - DNA, 25 bp, Homo sapien
caatctgccagattctccattgact

SEQ ID NO: 1760836 - DNA, 25 bp, Homo sapien
cattgactcaatacaactggaagct

SEQ ID NO: 1760837 - DNA, 25 bp, Homo sapien
aactggaagctagccggcacaggac

SEQ ID NO: 1760838 - DNA, 25 bp, Homo sapien
aagtccttgagtccctgtagcctcc

SEQ ID NO: 1760839 - DNA, 25 bp, Homo sapien
ctgtggtctctggaattacgtgtca

SEQ ID NO: 1760840 - DNA, 25 bp, Homo sapien
ggaatcttgccagcactgactactg

SEQ ID NO: 1760841 - DNA, 25 bp, Homo sapien
tgtcaggtagccaagggtcctcaga

SEQ ID NO: 1760842 - DNA, 25 bp, Homo sapien
tgccagcactgactactgtggtctc

SEQ ID NO: 1760843 - DNA, 25 bp, Homo sapien
caagtgggtagctctgcttgtgatg

SEQ ID NO: 1760844 - DNA, 25 bp, Homo sapien
caccatgggaagagaacaagtgggt

SEQ ID NO: 1760845 - DNA, 25 bp, Homo sapien
tgatgggctgaggaagtcccatcct

SEQ ID NO: 1760846 - DNA, 25 bp, Homo sapien
gaggaagtcccatcctgatggcttc

SEQ ID NO: 1760847 - DNA, 25 bp, Homo sapien
aaacggccaaaacattcaccaatag

SEQ ID NO: 1760848 - DNA, 25 bp, Homo sapien
taatagctaagaactaaaacggcca

SEQ ID NO: 1760849 - DNA, 25 bp, Homo sapien
agtgaactgagatcgagctacgcca

SEQ ID NO: 1760850 - DNA, 25 bp, Homo sapien
tggttgagtaaactacatgtatgtt

SEQ ID NO: 1760851 - DNA, 25 bp, Homo sapien
tgaattgagtgtgccttccaaggag

SEQ ID NO: 1760852 - DNA, 25 bp, Homo sapien
gctaggtcaatcattcccatggtca

SEQ ID NO: 1760853 - DNA, 25 bp, Homo sapien
tcaaatgaatctcttggaagctagg

SEQ ID NO: 1760854 - DNA, 25 bp, Homo sapien
tgttgtcatcgatggatatcctgta

SEQ ID NO: 1760855 - DNA, 25 bp, Homo sapien
ggaatgacagcacctgatgaactgg

SEQ ID NO: 1760856 - DNA, 25 bp, Homo sapien
gctattcaagccttagaactttctc

SEQ ID NO: 1760857 - DNA, 25 bp, Homo sapien
ctttctctgatggaaagtgtgtgca

SEQ ID NO: 1760858 - DNA, 25 bp, Homo sapien
cagagctggcacttatgttaaattg

SEQ ID NO: 1760859 - DNA, 25 bp, Homo sapien
ctgattgactccaaaagagttggac

SEQ ID NO: 1760860 - DNA, 25 bp, Homo sapien
gcttgaaaacaagagacagtctttg

SEQ ID NO: 1760861 - DNA, 25 bp, Homo sapien
tatcgtgatcaagagatatgtctca

SEQ ID NO: 1760862 - DNA, 25 bp, Homo sapien
agtaggccttagtatcagttgttcc

SEQ ID NO: 1760863 - DNA, 25 bp, Homo sapien
ggagactcggcgagaaaacccctca

SEQ ID NO: 1760864 - DNA, 25 bp, Homo sapien
aggcactaaacctatagatgatcag

SEQ ID NO: 1760865 - DNA, 25 bp, Homo sapien
ggaacaacacccattaggcactaaa

SEQ ID NO: 1760866 - DNA, 25 bp, Homo sapien
tcaggccctggacatcaagtccagc

SEQ ID NO: 1760867 - DNA, 25 bp, Homo sapien
gaccgagctgatgatgggggcggcg

SEQ ID NO: 1760868 - DNA, 25 bp, Homo sapien
tctagtctcatacagaaccagcttc

SEQ ID NO: 1760869 - DNA, 25 bp, Homo sapien
agcttctggaccgagctgatgatgg

SEQ ID NO: 1760870 - DNA, 25 bp, Homo sapien
tagtctcatacagaaccagcttctg

SEQ ID NO: 1760871 - DNA, 25 bp, Homo sapien
gagagagtcagccaacactttagca

SEQ ID NO: 1760872 - DNA, 25 bp, Homo sapien
gaccttgacggaagttagcttgaga

SEQ ID NO: 1760873 - DNA, 25 bp, Homo sapien
ggaccctcggttctttgtggatgaa

SEQ ID NO: 1760874 - DNA, 25 bp, Homo sapien
cctcatatacacacccagtagtggg

SEQ ID NO: 1760875 - DNA, 25 bp, Homo sapien
tgcatacatatatgctaacaatctt

SEQ ID NO: 1760876 - DNA, 25 bp, Homo sapien
atacatatatgctaacaatcttgaa

SEQ ID NO: 1760877 - DNA, 25 bp, Homo sapien
catacatatatgctaacaatcttga

SEQ ID NO: 1760878 - DNA, 25 bp, Homo sapien
acatatatgctaacaatcttgaaca

SEQ ID NO: 1760879 - DNA, 25 bp, Homo sapien
ttctgcattattgctcccaactaga

SEQ ID NO: 1760880 - DNA, 25 bp, Homo sapien
ggttctgttctatcaatcttcaaga

SEQ ID NO: 1760881 - DNA, 25 bp, Homo sapien
tattgctcccaactagaaagtatct

SEQ ID NO: 1760882 - DNA, 25 bp, Homo sapien
gacacgatatttcgtttctgcatta

SEQ ID NO: 1760883 - DNA, 25 bp, Homo sapien
tccaagcggccaagaagttccctta

SEQ ID NO: 1760884 - DNA, 25 bp, Homo sapien
tccaagatccaagcggccaagaagt

SEQ ID NO: 1760885 - DNA, 25 bp, Homo sapien
tctatttccaagatccaagcggcca

SEQ ID NO: 1760886 - DNA, 25 bp, Homo sapien
caagcggccaagaagttcccttact

SEQ ID NO: 1760887 - DNA, 25 bp, Homo sapien
aagctgaaaccgctcgaaataagcc

SEQ ID NO: 1760888 - DNA, 25 bp, Homo sapien
caccaaaagctgaaaccgctcgaaa

SEQ ID NO: 1760889 - DNA, 25 bp, Homo sapien
cgctcgaaataagcccgaggatcct

SEQ ID NO: 1760890 - DNA, 25 bp, Homo sapien
tgaaaccgctcgaaataagcccgag

SEQ ID NO: 1760891 - DNA, 25 bp, Homo sapien
aacacaatataatagccttctaaga

SEQ ID NO: 1760892 - DNA, 25 bp, Homo sapien
catatttgtatcttcgaccttatag

SEQ ID NO: 1760893 - DNA, 25 bp, Homo sapien
gaatcattgggtatatagatcatat

SEQ ID NO: 1760894 - DNA, 25 bp, Homo sapien
gaccttatagattgcatgacctcca

SEQ ID NO: 1760895 - DNA, 25 bp, Homo sapien
gcttcatcaggatgagtaacccgta

SEQ ID NO: 1760896 - DNA, 25 bp, Homo sapien
caccatgcccagccatcttttctta

SEQ ID NO: 1760897 - DNA, 25 bp, Homo sapien
gtacagtggcacaaacatggctcat

SEQ ID NO: 1760898 - DNA, 25 bp, Homo sapien
gctcaatcctcccacctcagcctcc

SEQ ID NO: 1760899 - DNA, 25 bp, Homo sapien
attgcagcctcaacctcctgggctc

SEQ ID NO: 1760900 - DNA, 25 bp, Homo sapien
taaaaattgctagataggtccacat

SEQ ID NO: 1760901 - DNA, 25 bp, Homo sapien
gctagataggtccacattttgaaat

SEQ ID NO: 1760902 - DNA, 25 bp, Homo sapien
aagtaaaaattgctagataggtcca

SEQ ID NO: 1760903 - DNA, 25 bp, Homo sapien
aattgctagataggtccacattttg

SEQ ID NO: 1760904 - DNA, 25 bp, Homo sapien
gggcattcgcaagacagtgagatta

SEQ ID NO: 1760905 - DNA, 25 bp, Homo sapien
tcaaagctctcttggcgattctggg

SEQ ID NO: 1760906 - DNA, 25 bp, Homo sapien
tattgaagtgagtgggacaaatcat

SEQ ID NO: 1760907 - DNA, 25 bp, Homo sapien
caccttgtgtaattaatccttcatc

SEQ ID NO: 1760908 - DNA, 25 bp, Homo sapien
agtggatatcattcctttcatgtcc

SEQ ID NO: 1760909 - DNA, 25 bp, Homo sapien
tttaacttcaaagtaacatgcttgg

SEQ ID NO: 1760910 - DNA, 25 bp, Homo sapien
gacaaggaaattgaggacatgttac

SEQ ID NO: 1760911 - DNA, 25 bp, Homo sapien
tttcatgtccagaacattgtgttga

SEQ ID NO: 1760912 - DNA, 25 bp, Homo sapien
cagaacccatgaataatatacaaaa

SEQ ID NO: 1760913 - DNA, 25 bp, Homo sapien
cagaagttcaccattccatacatat

SEQ ID NO: 1760914 - DNA, 25 bp, Homo sapien
caaaagccagtcacgatgcacagta

SEQ ID NO: 1760915 - DNA, 25 bp, Homo sapien
tacttttaattatatccagaagttc

SEQ ID NO: 1760916 - DNA, 25 bp, Homo sapien
ttggcaccactcctctcaaatgctc

SEQ ID NO: 1760917 - DNA, 25 bp, Homo sapien
gcccttggcaccactcctctcaaat

SEQ ID NO: 1760918 - DNA, 25 bp, Homo sapien
cttggcaccactcctctcaaatgct

SEQ ID NO: 1760919 - DNA, 25 bp, Homo sapien
tgtgcccttggcaccactcctctca

SEQ ID NO: 1760920 - DNA, 25 bp, Homo sapien
gccctatggccaagtaaggatgtaa

SEQ ID NO: 1760921 - DNA, 25 bp, Homo sapien
caacctgactaaggagtgctttcca

SEQ ID NO: 1760922 - DNA, 25 bp, Homo sapien
aagggaaggcaatatccaacctgac

SEQ ID NO: 1760923 - DNA, 25 bp, Homo sapien
ttactggccaaggaaagccctatgg

SEQ ID NO: 1760924 - DNA, 25 bp, Homo sapien
tacactggtcgtccatagatcaaca

SEQ ID NO: 1760925 - DNA, 25 bp, Homo sapien
gggtgccagcaaatttactggatct

SEQ ID NO: 1760926 - DNA, 25 bp, Homo sapien
tcttttaagaaaacgggtgccagca

SEQ ID NO: 1760927 - DNA, 25 bp, Homo sapien
tctagctattagagtgacatacact

SEQ ID NO: 1760928 - DNA, 25 bp, Homo sapien
aatgtcctgagaccagtataagggc

SEQ ID NO: 1760929 - DNA, 25 bp, Homo sapien
gcagagtatttgttcagtctccact

SEQ ID NO: 1760930 - DNA, 25 bp, Homo sapien
tataagggcacagatcctctaactt

SEQ ID NO: 1760931 - DNA, 25 bp, Homo sapien
catcacagaagcatcgcagagtatt

SEQ ID NO: 1760932 - DNA, 25 bp, Homo sapien
aacctaagcatttatgagatttctg

SEQ ID NO: 1760933 - DNA, 25 bp, Homo sapien
acctcctgaaaacctaagcatttat

SEQ ID NO: 1760934 - DNA, 25 bp, Homo sapien
cctgaaaacctaagcatttatgaga

SEQ ID NO: 1760935 - DNA, 25 bp, Homo sapien
acataagaataacggaaattcctct

SEQ ID NO: 1760936 - DNA, 25 bp, Homo sapien
tattacatttgaatgattcttacat

SEQ ID NO: 1760937 - DNA, 25 bp, Homo sapien
tacatttgaatgattcttacatttc

SEQ ID NO: 1760938 - DNA, 25 bp, Homo sapien
ttacatttgaatgattcttacattt

SEQ ID NO: 1760939 - DNA, 25 bp, Homo sapien
tttattacatttgaatgattcttac

SEQ ID NO: 1760940 - DNA, 25 bp, Homo sapien
catgtgcaaatggatctgcctgatc

SEQ ID NO: 1760941 - DNA, 25 bp, Homo sapien
acatgtgcaaatggatctgcctgat

SEQ ID NO: 1760942 - DNA, 25 bp, Homo sapien
atgtgcaaatggatctgcctgatcc

SEQ ID NO: 1760943 - DNA, 25 bp, Homo sapien
gcataataatctgcacgtctctcca

SEQ ID NO: 1760944 - DNA, 25 bp, Homo sapien
gcagagaagccacatggaatctgag

SEQ ID NO: 1760945 - DNA, 25 bp, Homo sapien
cccagcataataatctgcacgtctc

SEQ ID NO: 1760946 - DNA, 25 bp, Homo sapien
tgcagagaagccacatggaatctga

SEQ ID NO: 1760947 - DNA, 25 bp, Homo sapien
tttggtatacttggccatgtcccag

SEQ ID NO: 1760948 - DNA, 25 bp, Homo sapien
cttttggtatacttggccatgtccc

SEQ ID NO: 1760949 - DNA, 25 bp, Homo sapien
aacaatagtgtgctcaggaggcaaa

SEQ ID NO: 1760950 - DNA, 25 bp, Homo sapien
aatataaacaatagtgtgctcagga

SEQ ID NO: 1760951 - DNA, 25 bp, Homo sapien
cccgggcggcagagtctgcaataag

SEQ ID NO: 1760952 - DNA, 25 bp, Homo sapien
taaacaaacttatactctgagaaag

SEQ ID NO: 1760953 - DNA, 25 bp, Homo sapien
agaccttaagtaaacctacagcttg

SEQ ID NO: 1760954 - DNA, 25 bp, Homo sapien
gaagagatgagttttgaatcagatc

SEQ ID NO: 1760955 - DNA, 25 bp, Homo sapien
ttcatctggccgcaaaatgctacag

SEQ ID NO: 1760956 - DNA, 25 bp, Homo sapien
tgcaatcacatttagtcgatcaaga

SEQ ID NO: 1760957 - DNA, 25 bp, Homo sapien
tagtcgatcaagaacattacacagc

SEQ ID NO: 1760958 - DNA, 25 bp, Homo sapien
cagtaagaatcagggcggtttacaa

SEQ ID NO: 1760959 - DNA, 25 bp, Homo sapien
gttaacctaacaggcctaactgcta

SEQ ID NO: 1760960 - DNA, 25 bp, Homo sapien
cagtaccagatccttgttaagaatc

SEQ ID NO: 1760961 - DNA, 25 bp, Homo sapien
tggcccttggccaatgtctggcaac

SEQ ID NO: 1760962 - DNA, 25 bp, Homo sapien
tgaggcagactgcttaccacactct

SEQ ID NO: 1760963 - DNA, 25 bp, Homo sapien
gggaatcacacatcctcctagttca

SEQ ID NO: 1760964 - DNA, 25 bp, Homo sapien
gaccagtgggaatcacacatcctcc

SEQ ID NO: 1760965 - DNA, 25 bp, Homo sapien
caggcgaccagtgggaatcacacat

SEQ ID NO: 1760966 - DNA, 25 bp, Homo sapien
cagtgggaatcacacatcctcctag

SEQ ID NO: 1760967 - DNA, 25 bp, Homo sapien
cacacagttggttcgaaggatgcca

SEQ ID NO: 1760968 - DNA, 25 bp, Homo sapien
aatacagctgataggccagagcaca

SEQ ID NO: 1760969 - DNA, 25 bp, Homo sapien
caatcagtcccagtgaatacagctg

SEQ ID NO: 1760970 - DNA, 25 bp, Homo sapien
tgttggtgcgatctaaacagtccac

SEQ ID NO: 1760971 - DNA, 25 bp, Homo sapien
ttgcatgatgtctttggagtgctgg

SEQ ID NO: 1760972 - DNA, 25 bp, Homo sapien
accatgatcttcatagagttcctca

SEQ ID NO: 1760973 - DNA, 25 bp, Homo sapien
taatatctagacagggtttgcatga

SEQ ID NO: 1760974 - DNA, 25 bp, Homo sapien
catactgaagggatagggtatcacc

SEQ ID NO: 1760975 - DNA, 25 bp, Homo sapien
ctggatcttgctgctaaggtctctc

SEQ ID NO: 1760976 - DNA, 25 bp, Homo sapien
cttccttggctccttaggtatccag

SEQ ID NO: 1760977 - DNA, 25 bp, Homo sapien
taggtatccagtgtttacctcctgg

SEQ ID NO: 1760978 - DNA, 25 bp, Homo sapien
tgctgctaaggtctctctgtccttc

SEQ ID NO: 1760979 - DNA, 25 bp, Homo sapien
ttaaaactggtaggctctctgtggt

SEQ ID NO: 1760980 - DNA, 25 bp, Homo sapien
taacaagagggcgaaatgattagcc

SEQ ID NO: 1760981 - DNA, 25 bp, Homo sapien
gaagaaagaatatgcaccaaatacc

SEQ ID NO: 1760982 - DNA, 25 bp, Homo sapien
caaacaggttaaacattagccaatt

SEQ ID NO: 1760983 - DNA, 25 bp, Homo sapien
tcccttcagtgggatggaaaactcc

SEQ ID NO: 1760984 - DNA, 25 bp, Homo sapien
gttggcaaaagtctcatggtatttt

SEQ ID NO: 1760985 - DNA, 25 bp, Homo sapien
aaaactcccaggaagagattaatgg

SEQ ID NO: 1760986 - DNA, 25 bp, Homo sapien
aataaaaatctgttgggagctccca

SEQ ID NO: 1760987 - DNA, 25 bp, Homo sapien
tgatagttagaatctactctgctgt

SEQ ID NO: 1760988 - DNA, 25 bp, Homo sapien
tgccaccaggtgagtagtgggacct

SEQ ID NO: 1760989 - DNA, 25 bp, Homo sapien
gtgggaccttgacccaagtcctaca

SEQ ID NO: 1760990 - DNA, 25 bp, Homo sapien
acaaccaggattcccttgcgtgtag

SEQ ID NO: 1760991 - DNA, 25 bp, Homo sapien
gctttatcacctctggtgtccacca

SEQ ID NO: 1760992 - DNA, 25 bp, Homo sapien
ttcatcatagggcaatggtaaatgc

SEQ ID NO: 1760993 - DNA, 25 bp, Homo sapien
agggcaatggtaaatgctttatcac

SEQ ID NO: 1760994 - DNA, 25 bp, Homo sapien
atgctttatcacctctggtgtccac

SEQ ID NO: 1760995 - DNA, 25 bp, Homo sapien
cagattcgcaggagatcttgctagg

SEQ ID NO: 1760996 - DNA, 25 bp, Homo sapien
ggagcattccagattcgcaggagat

SEQ ID NO: 1760997 - DNA, 25 bp, Homo sapien
gcattccagattcgcaggagatctt

SEQ ID NO: 1760998 - DNA, 25 bp, Homo sapien
ttcgcaggagatcttgctaggaacc

SEQ ID NO: 1760999 - DNA, 25 bp, Homo sapien
tgctgaagcatgactagatggagtc

SEQ ID NO: 1761000 - DNA, 25 bp, Homo sapien
gggatgctgaagcatgactagatgg

SEQ ID NO: 1761001 - DNA, 25 bp, Homo sapien
gatgctgaagcatgactagatggag

SEQ ID NO: 1761002 - DNA, 25 bp, Homo sapien
gctgaagcatgactagatggagtcc

SEQ ID NO: 1761003 - DNA, 25 bp, Homo sapien
ctaagagagatactgcatgttactc

SEQ ID NO: 1761004 - DNA, 25 bp, Homo sapien
gggatacagccctgaccgagggtaa

SEQ ID NO: 1761005 - DNA, 25 bp, Homo sapien
tccaacacttacacagttagaaagg

SEQ ID NO: 1761006 - DNA, 25 bp, Homo sapien
caacaagctctaaggagccaggagg

SEQ ID NO: 1761007 - DNA, 25 bp, Homo sapien
ccgaaagaactcattgtggatatca

SEQ ID NO: 1761008 - DNA, 25 bp, Homo sapien
cattgtggatatcaatctcttcttc

SEQ ID NO: 1761009 - DNA, 25 bp, Homo sapien
tgctcaactcatatggccgaaagaa

SEQ ID NO: 1761010 - DNA, 25 bp, Homo sapien
catatggccgaaagaactcattgtg

SEQ ID NO: 1761011 - DNA, 25 bp, Homo sapien
ggatcaattccaacggtcttaggca

SEQ ID NO: 1761012 - DNA, 25 bp, Homo sapien
cagtaaatggacttggatcaattcc

SEQ ID NO: 1761013 - DNA, 25 bp, Homo sapien
tccaacggtcttaggcataaagtca

SEQ ID NO: 1761014 - DNA, 25 bp, Homo sapien
tttcatctggtttacgcacagtaaa

SEQ ID NO: 1761015 - DNA, 25 bp, Homo sapien
tgccaaattggaagagtagtaagaa

SEQ ID NO: 1761016 - DNA, 25 bp, Homo sapien
tgaccatgggttagatattgcagaa

SEQ ID NO: 1761017 - DNA, 25 bp, Homo sapien
aagttggtaacgtttctgtgacaca

SEQ ID NO: 1761018 - DNA, 25 bp, Homo sapien
tgtgacacacactaatatagctggt

SEQ ID NO: 1761019 - DNA, 25 bp, Homo sapien
ctcggtcactttggcactgtctcct

SEQ ID NO: 1761020 - DNA, 25 bp, Homo sapien
gtggagcgctgagacacagagccct

SEQ ID NO: 1761021 - DNA, 25 bp, Homo sapien
cctgcatcagtcatcttcacgggag

SEQ ID NO: 1761022 - DNA, 25 bp, Homo sapien
ttcttcccgatcagtcccagagtca

SEQ ID NO: 1761023 - DNA, 25 bp, Homo sapien
actgaaagcggagttgtaaagatca

SEQ ID NO: 1761024 - DNA, 25 bp, Homo sapien
ctgaaagcggagttgtaaagatcat

SEQ ID NO: 1761025 - DNA, 25 bp, Homo sapien
taactgaaagcggagttgtaaagat

SEQ ID NO: 1761026 - DNA, 25 bp, Homo sapien
gaaagcggagttgtaaagatcattt

SEQ ID NO: 1761027 - DNA, 25 bp, Homo sapien
agctccttcatgggttggaccacat

SEQ ID NO: 1761028 - DNA, 25 bp, Homo sapien
tagctccttcatgggttggaccaca

SEQ ID NO: 1761029 - DNA, 25 bp, Homo sapien
gctccttcatgggttggaccacatt

SEQ ID NO: 1761030 - DNA, 25 bp, Homo sapien
ttaggcgtccaaaggtgggcaaggc

SEQ ID NO: 1761031 - DNA, 25 bp, Homo sapien
gtttatgttgactctgccccagctg

SEQ ID NO: 1761032 - DNA, 25 bp, Homo sapien
tcttgtttatgttgactctgcccca

SEQ ID NO: 1761033 - DNA, 25 bp, Homo sapien
cttgtcttgtttatgttgactctgc

SEQ ID NO: 1761034 - DNA, 25 bp, Homo sapien
tatgttgactctgccccagctgaac

SEQ ID NO: 1761035 - DNA, 25 bp, Homo sapien
tcttcctttggtgacagctgctagc

SEQ ID NO: 1761036 - DNA, 25 bp, Homo sapien
tgctatcacagacccaatgaaaggg

SEQ ID NO: 1761037 - DNA, 25 bp, Homo sapien
tgcagaccaccttttgaggaccttt

SEQ ID NO: 1761038 - DNA, 25 bp, Homo sapien
ggcctacagaccacattttgagggt

SEQ ID NO: 1761039 - DNA, 25 bp, Homo sapien
taggtagggcatgcccctctcctct

SEQ ID NO: 1761040 - DNA, 25 bp, Homo sapien
ctctgttcccatagccttgtgcaca

SEQ ID NO: 1761041 - DNA, 25 bp, Homo sapien
ctgcctgatgcataggtagggcatg

SEQ ID NO: 1761042 - DNA, 25 bp, Homo sapien
tcccatagccttgtgcacacctatg

SEQ ID NO: 1761043 - DNA, 25 bp, Homo sapien
cacgtctactcttgccggacctgtt

SEQ ID NO: 1761044 - DNA, 25 bp, Homo sapien
tgttcccttcagagacaacgcatac

SEQ ID NO: 1761045 - DNA, 25 bp, Homo sapien
ggtggtaacactcttaatctcatgg

SEQ ID NO: 1761046 - DNA, 25 bp, Homo sapien
cagatggactggctatctgagtgat

SEQ ID NO: 1761047 - DNA, 25 bp, Homo sapien
gaatctgggttgtagagtttccctc

SEQ ID NO: 1761048 - DNA, 25 bp, Homo sapien
gttgtagagtttccctcagtttgga

SEQ ID NO: 1761049 - DNA, 25 bp, Homo sapien
cagtttggatttagctgcttgcata

SEQ ID NO: 1761050 - DNA, 25 bp, Homo sapien
gctgcttgcatagtcaagatgcagt

SEQ ID NO: 1761051 - DNA, 25 bp, Homo sapien
ggacccctgtggagattccctgtag

SEQ ID NO: 1761052 - DNA, 25 bp, Homo sapien
gctagggtgcatcttatcagaggaa

SEQ ID NO: 1761053 - DNA, 25 bp, Homo sapien
ggttgtctgctcatgaggcccttca

SEQ ID NO: 1761054 - DNA, 25 bp, Homo sapien
gaatcagaaatgcaccctggatgcc

SEQ ID NO: 1761055 - DNA, 25 bp, Homo sapien
tccctcacatgactgggagcaactt

SEQ ID NO: 1761056 - DNA, 25 bp, Homo sapien
acatctctgtgtacacccacgtctg

SEQ ID NO: 1761057 - DNA, 25 bp, Homo sapien
tttttccttggcacacgctagggac

SEQ ID NO: 1761058 - DNA, 25 bp, Homo sapien
gactgggagcaactttagctaaggc

SEQ ID NO: 1761059 - DNA, 25 bp, Homo sapien
cagtccttgcgaggctggttctctt

SEQ ID NO: 1761060 - DNA, 25 bp, Homo sapien
ctgacttttgacaagctgctgggat

SEQ ID NO: 1761061 - DNA, 25 bp, Homo sapien
tcagaagcacttgagagtcgctggc

SEQ ID NO: 1761062 - DNA, 25 bp, Homo sapien
aaagagagggctgcattaaagaaaa

SEQ ID NO: 1761063 - DNA, 25 bp, Homo sapien
gttatcttgcgagaaagccgagatg

SEQ ID NO: 1761064 - DNA, 25 bp, Homo sapien
ttcctaggggctgcatgataccttg

SEQ ID NO: 1761065 - DNA, 25 bp, Homo sapien
cacaggtagcggttcctgatgtact

SEQ ID NO: 1761066 - DNA, 25 bp, Homo sapien
tctcggtacatggaggagtcctctt

SEQ ID NO: 1761067 - DNA, 25 bp, Homo sapien
aagctaatcagacgtgtccaccagg

SEQ ID NO: 1761068 - DNA, 25 bp, Homo sapien
gaaaggcttcagacgcaaaggactt

SEQ ID NO: 1761069 - DNA, 25 bp, Homo sapien
ttaataagttaccttttgaagatga

SEQ ID NO: 1761070 - DNA, 25 bp, Homo sapien
gacaagacaggttctaagctaatca

SEQ ID NO: 1761071 - DNA, 25 bp, Homo sapien
gtgatagctcacaggtcattttggc

SEQ ID NO: 1761072 - DNA, 25 bp, Homo sapien
cccagcatgtcagggttggtgatag

SEQ ID NO: 1761073 - DNA, 25 bp, Homo sapien
aaaccttccatagaatcccagcatg

SEQ ID NO: 1761074 - DNA, 25 bp, Homo sapien
taatctttacttcatgatggcatca

SEQ ID NO: 1761075 - DNA, 25 bp, Homo sapien
tggaggcaatcgtgaggcacattac

SEQ ID NO: 1761076 - DNA, 25 bp, Homo sapien
gctaacctcgaaggcacgtgtggag

SEQ ID NO: 1761077 - DNA, 25 bp, Homo sapien
ggccactctaagcaatctcattctg

SEQ ID NO: 1761078 - DNA, 25 bp, Homo sapien
taagcaatacttatctcaacagaac

SEQ ID NO: 1761079 - DNA, 25 bp, Homo sapien
tagtgatgcttccaccagccaaata

SEQ ID NO: 1761080 - DNA, 25 bp, Homo sapien
caggcaagttgcttgttagtgatgc

SEQ ID NO: 1761081 - DNA, 25 bp, Homo sapien
gatgcttccaccagccaaatatggg

SEQ ID NO: 1761082 - DNA, 25 bp, Homo sapien
ttgttagtgatgcttccaccagcca

SEQ ID NO: 1761083 - DNA, 25 bp, Homo sapien
tcggaacagtgagcaacgcgtttct

SEQ ID NO: 1761084 - DNA, 25 bp, Homo sapien
tcatcgaaggaatcaggcactgcac

SEQ ID NO: 1761085 - DNA, 25 bp, Homo sapien
gaattgctggtcgataccttcatcg

SEQ ID NO: 1761086 - DNA, 25 bp, Homo sapien
aacatggattcctcagggccggtga

SEQ ID NO: 1761087 - DNA, 25 bp, Homo sapien
ttgctgtggactatgctggacaata

SEQ ID NO: 1761088 - DNA, 25 bp, Homo sapien
ttccccctttgctgtggactatgct

SEQ ID NO: 1761089 - DNA, 25 bp, Homo sapien
cccctttgctgtggactatgctgga

SEQ ID NO: 1761090 - DNA, 25 bp, Homo sapien
tggactatgctggacaatatggcgg

SEQ ID NO: 1761091 - DNA, 25 bp, Homo sapien
gctaaaatagttgatgccatctgag

SEQ ID NO: 1761092 - DNA, 25 bp, Homo sapien
tagttgatgccatctgaggttctaa

SEQ ID NO: 1761093 - DNA, 25 bp, Homo sapien
aaatagatgattgcacattggcatg

SEQ ID NO: 1761094 - DNA, 25 bp, Homo sapien
tggcatgatggcattgcacagaggc

SEQ ID NO: 1761095 - DNA, 25 bp, Homo sapien
ctgtcgctgtgccggctccgcgagt

SEQ ID NO: 1761096 - DNA, 25 bp, Homo sapien
tccgcgagtgagagatacagttggt

SEQ ID NO: 1761097 - DNA, 25 bp, Homo sapien
ggtggcagaaaaggcggctgcgagc

SEQ ID NO: 1761098 - DNA, 25 bp, Homo sapien
tgccggctccgcgagtgagagatac

SEQ ID NO: 1761099 - DNA, 25 bp, Homo sapien
gtcgctggtcatgggcgccgaggcg

SEQ ID NO: 1761100 - DNA, 25 bp, Homo sapien
gcgccgggctgagctccccgcgcaa

SEQ ID NO: 1761101 - DNA, 25 bp, Homo sapien
gctccccgcgcaaacagagcagctg

SEQ ID NO: 1761102 - DNA, 25 bp, Homo sapien
aagtcgctggtcatgggcgccgagg

SEQ ID NO: 1761103 - DNA, 25 bp, Homo sapien
aagtttctggcattgcgaagcctgg

SEQ ID NO: 1761104 - DNA, 25 bp, Homo sapien
ccgagtgcaccaagctaggagtgtc

SEQ ID NO: 1761105 - DNA, 25 bp, Homo sapien
ttgtggcggcgcgaccaggacatcc

SEQ ID NO: 1761106 - DNA, 25 bp, Homo sapien
gagtgtcatcctgggagagtcccgc

SEQ ID NO: 1761107 - DNA, 25 bp, Homo sapien
tttgcaccctgcatagggagggagt

SEQ ID NO: 1761108 - DNA, 25 bp, Homo sapien
cgcggccggatttgcaccctgcata

SEQ ID NO: 1761109 - DNA, 25 bp, Homo sapien
gatttgcaccctgcatagggaggga

SEQ ID NO: 1761110 - DNA, 25 bp, Homo sapien
ggccggatttgcaccctgcataggg

SEQ ID NO: 1761111 - DNA, 25 bp, Homo sapien
ccaccacctgggagtcgttgagcga

SEQ ID NO: 1761112 - DNA, 25 bp, Homo sapien
caccacctgggagtcgttgagcgag

SEQ ID NO: 1761113 - DNA, 25 bp, Homo sapien
ccacctgggagtcgttgagcgaggc

SEQ ID NO: 1761114 - DNA, 25 bp, Homo sapien
accacctgggagtcgttgagcgagg

SEQ ID NO: 1761115 - DNA, 25 bp, Homo sapien
agacccattagctccgccgccggct

SEQ ID NO: 1761116 - DNA, 25 bp, Homo sapien
gacccattagctccgccgccggctc

SEQ ID NO: 1761117 - DNA, 25 bp, Homo sapien
gagacccattagctccgccgccggc

SEQ ID NO: 1761118 - DNA, 25 bp, Homo sapien
agagacccattagctccgccgccgg

SEQ ID NO: 1761119 - DNA, 25 bp, Homo sapien
aggagcacgtcccacggattcaccg

SEQ ID NO: 1761120 - DNA, 25 bp, Homo sapien
tgcgcagcgccggagtggacgcgat

SEQ ID NO: 1761121 - DNA, 25 bp, Homo sapien
gagtggacgcgatgagcgccaccac

SEQ ID NO: 1761122 - DNA, 25 bp, Homo sapien
accagcgcgttttctccagcgatca

SEQ ID NO: 1761123 - DNA, 25 bp, Homo sapien
caatagatggcgaagggcagccagc

SEQ ID NO: 1761124 - DNA, 25 bp, Homo sapien
taggtgagcgcgttatacagggaca

SEQ ID NO: 1761125 - DNA, 25 bp, Homo sapien
tctccgagggcaccaagtactggaa

SEQ ID NO: 1761126 - DNA, 25 bp, Homo sapien
tggctgcccaccacgcaatagatgg

SEQ ID NO: 1761127 - DNA, 25 bp, Homo sapien
gcaggcaccgagcttaccaaaggct

SEQ ID NO: 1761128 - DNA, 25 bp, Homo sapien
aaagtcagactcacaccattgggat

SEQ ID NO: 1761129 - DNA, 25 bp, Homo sapien
ggatctcagagttcgtcagcaggca

SEQ ID NO: 1761130 - DNA, 25 bp, Homo sapien
tatgtaaagtgccaacaagcctctt

SEQ ID NO: 1761131 - DNA, 25 bp, Homo sapien
aggacctgaaccagtgtctggtgat

SEQ ID NO: 1761132 - DNA, 25 bp, Homo sapien
cctgaaccagtgtctggtgatgctg

SEQ ID NO: 1761133 - DNA, 25 bp, Homo sapien
gaaccagtgtctggtgatgctgaag

SEQ ID NO: 1761134 - DNA, 25 bp, Homo sapien
gacctgaaccagtgtctggtgatgc

SEQ ID NO: 1761135 - DNA, 25 bp, Homo sapien
aatgcaaatttaacacccttccagt

SEQ ID NO: 1761136 - DNA, 25 bp, Homo sapien
cagtaaaagtaacagtactgtctca

SEQ ID NO: 1761137 - DNA, 25 bp, Homo sapien
gcaaaatgcaaatttaacacccttc

SEQ ID NO: 1761138 - DNA, 25 bp, Homo sapien
ccttccagtaaaagtaacagtactg

SEQ ID NO: 1761139 - DNA, 25 bp, Homo sapien
cacccctaataatgctcggagctca

SEQ ID NO: 1761140 - DNA, 25 bp, Homo sapien
acccctaataatgctcggagctcag

SEQ ID NO: 1761141 - DNA, 25 bp, Homo sapien
tagccaaagagagttgtctacaaca

SEQ ID NO: 1761142 - DNA, 25 bp, Homo sapien
tcctggactaaattacagagctcag

SEQ ID NO: 1761143 - DNA, 25 bp, Homo sapien
tacaacaatagacctggaagctgcc

SEQ ID NO: 1761144 - DNA, 25 bp, Homo sapien
ctaaagaccttaggatggccaacag

SEQ ID NO: 1761145 - DNA, 25 bp, Homo sapien
gttgctacaaacatagcttaaaggc

SEQ ID NO: 1761146 - DNA, 25 bp, Homo sapien
ttgctacaaacatagcttaaaggca

SEQ ID NO: 1761147 - DNA, 25 bp, Homo sapien
tgctacaaacatagcttaaaggcat

SEQ ID NO: 1761148 - DNA, 25 bp, Homo sapien
cgatgtagaggatccgaagagaaaa

SEQ ID NO: 1761149 - DNA, 25 bp, Homo sapien
agtgcctggtatctcatgtatcctg

SEQ ID NO: 1761150 - DNA, 25 bp, Homo sapien
tctgagtgaagatgcaggggttccc

SEQ ID NO: 1761151 - DNA, 25 bp, Homo sapien
gcttggttcccagaactttccacga

SEQ ID NO: 1761152 - DNA, 25 bp, Homo sapien
gtacaaaggaggaacatgaactcta

SEQ ID NO: 1761153 - DNA, 25 bp, Homo sapien
ctgtacaaaggaggaacatgaactc

SEQ ID NO: 1761154 - DNA, 25 bp, Homo sapien
tgtacaaaggaggaacatgaactct

SEQ ID NO: 1761155 - DNA, 25 bp, Homo sapien
tacgaaggaggaacatgaacactaa

SEQ ID NO: 1761156 - DNA, 25 bp, Homo sapien
gaaggaggaacatgaacactaagat

SEQ ID NO: 1761157 - DNA, 25 bp, Homo sapien
ctgagtacgaaggaggaacatgaac

SEQ ID NO: 1761158 - DNA, 25 bp, Homo sapien
gagtacgaaggaggaacatgaacac

SEQ ID NO: 1761159 - DNA, 25 bp, Homo sapien
taagatctgagtacgaaggaggaac

SEQ ID NO: 1761160 - DNA, 25 bp, Homo sapien
tctaagatctgagtacgaaggagga

SEQ ID NO: 1761161 - DNA, 25 bp, Homo sapien
gtacgaaggaggaacatgaacacta

SEQ ID NO: 1761162 - DNA, 25 bp, Homo sapien
ctgagtacgaaggaggaacatgaac

SEQ ID NO: 1761163 - DNA, 25 bp, Homo sapien
tggaggaatatacaagctaagacct

SEQ ID NO: 1761164 - DNA, 25 bp, Homo sapien
gaggaatatacaagctaagacctga

SEQ ID NO: 1761165 - DNA, 25 bp, Homo sapien
aggaatatacaagctaagacctgag

SEQ ID NO: 1761166 - DNA, 25 bp, Homo sapien
ggaggaatatacaagctaagacctg

SEQ ID NO: 1761167 - DNA, 25 bp, Homo sapien
gacccgtagaaaggatgctgattag

SEQ ID NO: 1761168 - DNA, 25 bp, Homo sapien
caagctggagtgacattcttgtctt

SEQ ID NO: 1761169 - DNA, 25 bp, Homo sapien
aattgggtcccagattgataagggc

SEQ ID NO: 1761170 - DNA, 25 bp, Homo sapien
ctcttcagacccgtagaaaggatgc

SEQ ID NO: 1761171 - DNA, 25 bp, Homo sapien
tgtcatagggtacaggaggtatgtc

SEQ ID NO: 1761172 - DNA, 25 bp, Homo sapien
cttattagtgcataggtgggtgtca

SEQ ID NO: 1761173 - DNA, 25 bp, Homo sapien
gcaatttgttcgtcaagtgaaaagc

SEQ ID NO: 1761174 - DNA, 25 bp, Homo sapien
aattttgacgatttcttggcatgca

SEQ ID NO: 1761175 - DNA, 25 bp, Homo sapien
gttttgcgggcattaagcctctgca

SEQ ID NO: 1761176 - DNA, 25 bp, Homo sapien
cactctgggtccttttaagtgctgc

SEQ ID NO: 1761177 - DNA, 25 bp, Homo sapien
caggagagcactctcacctgagaga

SEQ ID NO: 1761178 - DNA, 25 bp, Homo sapien
tctgcagtctctgagtcactctggg

SEQ ID NO: 1761179 - DNA, 25 bp, Homo sapien
ctcagagtaaagaaatctagcacac

SEQ ID NO: 1761180 - DNA, 25 bp, Homo sapien
gcccatggtgttaatagatgctgga

SEQ ID NO: 1761181 - DNA, 25 bp, Homo sapien
cccatggtgttaatagatgctggaa

SEQ ID NO: 1761182 - DNA, 25 bp, Homo sapien
gattaccaaataacatagtgaaggg

SEQ ID NO: 1761183 - DNA, 25 bp, Homo sapien
taccagaatccagaactgtggacag

SEQ ID NO: 1761184 - DNA, 25 bp, Homo sapien
tctgagattaccaaataacatagtg

SEQ ID NO: 1761185 - DNA, 25 bp, Homo sapien
aagggtttaccagaatccagaactg

SEQ ID NO: 1761186 - DNA, 25 bp, Homo sapien
cccaagtgcagaacaccacagtctt

SEQ ID NO: 1761187 - DNA, 25 bp, Homo sapien
tgaagtcctgccccacgaccattcc

SEQ ID NO: 1761188 - DNA, 25 bp, Homo sapien
aagcctgacttgtccttcaccgggg

SEQ ID NO: 1761189 - DNA, 25 bp, Homo sapien
tgacttgtccttcaccggggaagcc

SEQ ID NO: 1761190 - DNA, 25 bp, Homo sapien
tgttgcaaggattgtgggaacccag

SEQ ID NO: 1761191 - DNA, 25 bp, Homo sapien
gattccagagaggaacggacttctc

SEQ ID NO: 1761192 - DNA, 25 bp, Homo sapien
gcctccggagtatccctttgttgaa

SEQ ID NO: 1761193 - DNA, 25 bp, Homo sapien
tacaaggctcttctggcattaggca

SEQ ID NO: 1761194 - DNA, 25 bp, Homo sapien
gaacgttggatgtttcagctcctga

SEQ ID NO: 1761195 - DNA, 25 bp, Homo sapien
cagaacgttggatgtttcagctcct

SEQ ID NO: 1761196 - DNA, 25 bp, Homo sapien
aacgttggatgtttcagctcctgac

SEQ ID NO: 1761197 - DNA, 25 bp, Homo sapien
tcagaacgttggatgtttcagctcc

SEQ ID NO: 1761198 - DNA, 25 bp, Homo sapien
ttgacggcactgatccacttcagca

SEQ ID NO: 1761199 - DNA, 25 bp, Homo sapien
gattgacggcactgatccacttcag

SEQ ID NO: 1761200 - DNA, 25 bp, Homo sapien
gcactgtctgtggtgggtaccaaag

SEQ ID NO: 1761201 - DNA, 25 bp, Homo sapien
tgacggcactgatccacttcagcag

SEQ ID NO: 1761202 - DNA, 25 bp, Homo sapien
gggctctccactctgcagatgctca

SEQ ID NO: 1761203 - DNA, 25 bp, Homo sapien
agggctctccactctgcagatgctc

SEQ ID NO: 1761204 - DNA, 25 bp, Homo sapien
tctgcagatgctcaccccagcaagg

SEQ ID NO: 1761205 - DNA, 25 bp, Homo sapien
gatgctcaccccagcaagggagtcc

SEQ ID NO: 1761206 - DNA, 25 bp, Homo sapien
aagagaaagacgtttcagtgtctgc

SEQ ID NO: 1761207 - DNA, 25 bp, Homo sapien
tggcgcaggactctcccagctaaca

SEQ ID NO: 1761208 - DNA, 25 bp, Homo sapien
agctgcctccttgctaagagaaaga

SEQ ID NO: 1761209 - DNA, 25 bp, Homo sapien
tctctcagaagaaggtgtgacagct

SEQ ID NO: 1761210 - DNA, 25 bp, Homo sapien
tggagagcggtgtgaggttatgagg

SEQ ID NO: 1761211 - DNA, 25 bp, Homo sapien
agagcggtgtgaggttatgagggag

SEQ ID NO: 1761212 - DNA, 25 bp, Homo sapien
gagagcggtgtgaggttatgaggga

SEQ ID NO: 1761213 - DNA, 25 bp, Homo sapien
cttggagagcggtgtgaggttatga

SEQ ID NO: 1761214 - DNA, 25 bp, Homo sapien
agaggcagttgggtccacagaatca

SEQ ID NO: 1761215 - DNA, 25 bp, Homo sapien
actttctcctttaccaagggcgcag

SEQ ID NO: 1761216 - DNA, 25 bp, Homo sapien
ctttaccaagggcgcagctgctctt

SEQ ID NO: 1761217 - DNA, 25 bp, Homo sapien
gttgggtccacagaatcagctgcct

SEQ ID NO: 1761218 - DNA, 25 bp, Homo sapien
ttcactatcatctggacctgggctc

SEQ ID NO: 1761219 - DNA, 25 bp, Homo sapien
tctggacctgggctccaaggccttg

SEQ ID NO: 1761220 - DNA, 25 bp, Homo sapien
ctttcactatcatctggacctgggc

SEQ ID NO: 1761221 - DNA, 25 bp, Homo sapien
catctggacctgggctccaaggcct

SEQ ID NO: 1761222 - DNA, 25 bp, Homo sapien
acctaggccaggatttggcaggaac

SEQ ID NO: 1761223 - DNA, 25 bp, Homo sapien
gaggtcagtgaggagccacgaccta

SEQ ID NO: 1761224 - DNA, 25 bp, Homo sapien
ccttccatttgaaactggagggatg

SEQ ID NO: 1761225 - DNA, 25 bp, Homo sapien
cttgcgacggttgccagactggaga

SEQ ID NO: 1761226 - DNA, 25 bp, Homo sapien
agcactgtggacagtctgcatggag

SEQ ID NO: 1761227 - DNA, 25 bp, Homo sapien
tgcatggagtcttgtggggtcctca

SEQ ID NO: 1761228 - DNA, 25 bp, Homo sapien
cactgtggacagtctgcatggagtc

SEQ ID NO: 1761229 - DNA, 25 bp, Homo sapien
gggggcccatcccagagggaaagca

SEQ ID NO: 1761230 - DNA, 25 bp, Homo sapien
ctgcagccaaggatagtttgagcac

SEQ ID NO: 1761231 - DNA, 25 bp, Homo sapien
gaggcagctgcagccaaggatagtt

SEQ ID NO: 1761232 - DNA, 25 bp, Homo sapien
cagctgcagccaaggatagtttgag

SEQ ID NO: 1761233 - DNA, 25 bp, Homo sapien
agccaaggatagtttgagcacaccc

SEQ ID NO: 1761234 - DNA, 25 bp, Homo sapien
caaaggtgacaaacctctctgggtc

SEQ ID NO: 1761235 - DNA, 25 bp, Homo sapien
cccctgtcttgccaggtgtgagaaa

SEQ ID NO: 1761236 - DNA, 25 bp, Homo sapien
gaggctgctccgctgactgcagact

SEQ ID NO: 1761237 - DNA, 25 bp, Homo sapien
ctggtggcctccagtctgagatgca

SEQ ID NO: 1761238 - DNA, 25 bp, Homo sapien
tccagctgactctccaactttcgag

SEQ ID NO: 1761239 - DNA, 25 bp, Homo sapien
ctttactgaggccacttctctcctg

SEQ ID NO: 1761240 - DNA, 25 bp, Homo sapien
cacttctctcctggtaagcttcagt

SEQ ID NO: 1761241 - DNA, 25 bp, Homo sapien
ttctctcctggtaagcttcagtgtc

SEQ ID NO: 1761242 - DNA, 25 bp, Homo sapien
acttctctcctggtaagcttcagtg

SEQ ID NO: 1761243 - DNA, 25 bp, Homo sapien
tcactgctaatttcctgaaggcctc

SEQ ID NO: 1761244 - DNA, 25 bp, Homo sapien
aacaccagcgtgtctaacttccctg

SEQ ID NO: 1761245 - DNA, 25 bp, Homo sapien
caatactcttgatagttggaaggca

SEQ ID NO: 1761246 - DNA, 25 bp, Homo sapien
aatcactgccgccttgccttcttag

SEQ ID NO: 1761247 - DNA, 25 bp, Homo sapien
gtacttgactgtgcagcaaggccca

SEQ ID NO: 1761248 - DNA, 25 bp, Homo sapien
agaggccttccgagcttcagagcat

SEQ ID NO: 1761249 - DNA, 25 bp, Homo sapien
aaagctgcaactccaaaccatgggt

SEQ ID NO: 1761250 - DNA, 25 bp, Homo sapien
tgcaagcgtgaaagccagatgccag

SEQ ID NO: 1761251 - DNA, 25 bp, Homo sapien
ggctgtttgcagctagttccaggcc

SEQ ID NO: 1761252 - DNA, 25 bp, Homo sapien
aggctgtttgcagctagttccaggc

SEQ ID NO: 1761253 - DNA, 25 bp, Homo sapien
cacccactcatgaggctgtttgcag

SEQ ID NO: 1761254 - DNA, 25 bp, Homo sapien
tcacccactcatgaggctgtttgca

SEQ ID NO: 1761255 - DNA, 25 bp, Homo sapien
ccccttcccacttatatattgtgtg

SEQ ID NO: 1761256 - DNA, 25 bp, Homo sapien
tgtagtgttgaattctcttaaagga

SEQ ID NO: 1761257 - DNA, 25 bp, Homo sapien
tgcttgcctataggagttaaaaact

SEQ ID NO: 1761258 - DNA, 25 bp, Homo sapien
tactctgacttaaacatacatgtaa

SEQ ID NO: 1761259 - DNA, 25 bp, Homo sapien
ttacagggcatagagaatggcaacg

SEQ ID NO: 1761260 - DNA, 25 bp, Homo sapien
tctctattctagaagtcaggtggac

SEQ ID NO: 1761261 - DNA, 25 bp, Homo sapien
tggcaacgatgtaggcgaacaaagc

SEQ ID NO: 1761262 - DNA, 25 bp, Homo sapien
caggctgaaataggtaaagcgggca

SEQ ID NO: 1761263 - DNA, 25 bp, Homo sapien
caatagcagcgaatgagagttcttc

SEQ ID NO: 1761264 - DNA, 25 bp, Homo sapien
tctctccatcatttggtattgccag

SEQ ID NO: 1761265 - DNA, 25 bp, Homo sapien
tgcttatttgcaatcatgcagtcag

SEQ ID NO: 1761266 - DNA, 25 bp, Homo sapien
tctaataggcatgtagcaatatctc

SEQ ID NO: 1761267 - DNA, 25 bp, Homo sapien
gggtgctatggagctttggtatgga

SEQ ID NO: 1761268 - DNA, 25 bp, Homo sapien
tttggtatggatgtgatggagctga

SEQ ID NO: 1761269 - DNA, 25 bp, Homo sapien
cagttttgttgtaagcgtttggttg

SEQ ID NO: 1761270 - DNA, 25 bp, Homo sapien
agctttggtatggatgtgatggagc

SEQ ID NO: 1761271 - DNA, 25 bp, Homo sapien
cttctcttgcacttgcggatgatga

SEQ ID NO: 1761272 - DNA, 25 bp, Homo sapien
gaaagaaagcacatccgatctcaac

SEQ ID NO: 1761273 - DNA, 25 bp, Homo sapien
tgatgaactggaataacgatgaaag

SEQ ID NO: 1761274 - DNA, 25 bp, Homo sapien
ctggaataacgatgaaagaaagcac

SEQ ID NO: 1761275 - DNA, 25 bp, Homo sapien
taacggtaaagcgagtgcgggcatc

SEQ ID NO: 1761276 - DNA, 25 bp, Homo sapien
tgtctgaaaacataacggtaaagcg

SEQ ID NO: 1761277 - DNA, 25 bp, Homo sapien
gctcggtaaagcgagctcgtgcgtt

SEQ ID NO: 1761278 - DNA, 25 bp, Homo sapien
tgcgtttgcgtgtttgctccgcgag

SEQ ID NO: 1761279 - DNA, 25 bp, Homo sapien
gggcgacagagaatcccctgctcgc

SEQ ID NO: 1761280 - DNA, 25 bp, Homo sapien
gtagccccgggcgacagagaatccc

SEQ ID NO: 1761281 - DNA, 25 bp, Homo sapien
cgggcgacagagaatcccctgctcg

SEQ ID NO: 1761282 - DNA, 25 bp, Homo sapien
ggaggcggtagccccgggcgacaga

SEQ ID NO: 1761283 - DNA, 25 bp, Homo sapien
agtgagaatctgaagttttgagacc

SEQ ID NO: 1761284 - DNA, 25 bp, Homo sapien
aagaggaaagtgagaatctgaagtt

SEQ ID NO: 1761285 - DNA, 25 bp, Homo sapien
agttttgagacctctgactggccag

SEQ ID NO: 1761286 - DNA, 25 bp, Homo sapien
gaatctgaagttttgagacctctga

SEQ ID NO: 1761287 - DNA, 25 bp, Homo sapien
tcctgcactcccagcgtgcagcgcg

SEQ ID NO: 1761288 - DNA, 25 bp, Homo sapien
aggcctcgcggtcctgcactcccag

SEQ ID NO: 1761289 - DNA, 25 bp, Homo sapien
cttgaggcctcgcggtcctgcactc

SEQ ID NO: 1761290 - DNA, 25 bp, Homo sapien
gcggtcctgcactcccagcgtgcag

SEQ ID NO: 1761291 - DNA, 25 bp, Homo sapien
ccagggcggaagaagaagaggctcc

SEQ ID NO: 1761292 - DNA, 25 bp, Homo sapien
gggcggaagaagaagaggctcccag

SEQ ID NO: 1761293 - DNA, 25 bp, Homo sapien
cagggcggaagaagaagaggctccc

SEQ ID NO: 1761294 - DNA, 25 bp, Homo sapien
cggaagaagaagaggctcccaggtc

SEQ ID NO: 1761295 - DNA, 25 bp, Homo sapien
gacggcaacaaatcttctgcggaga

SEQ ID NO: 1761296 - DNA, 25 bp, Homo sapien
cggcaacaaatcttctgcggagacc

SEQ ID NO: 1761297 - DNA, 25 bp, Homo sapien
acggcaacaaatcttctgcggagac

SEQ ID NO: 1761298 - DNA, 25 bp, Homo sapien
agcggacaccgactgctctcactgt

SEQ ID NO: 1761299 - DNA, 25 bp, Homo sapien
aagcggccagagctgcaatcgcagc

SEQ ID NO: 1761300 - DNA, 25 bp, Homo sapien
aacccgaaccataggaagcggccag

SEQ ID NO: 1761301 - DNA, 25 bp, Homo sapien
tgtccgagtccgattcggaccctga

SEQ ID NO: 1761302 - DNA, 25 bp, Homo sapien
cacctccggagccgagtccactgcc

SEQ ID NO: 1761303 - DNA, 25 bp, Homo sapien
acctccggagccgagtccactgcca

SEQ ID NO: 1761304 - DNA, 25 bp, Homo sapien
cggctttgatgaaggcgatttagtc

SEQ ID NO: 1761305 - DNA, 25 bp, Homo sapien
gacggctttgatgaaggcgatttag

SEQ ID NO: 1761306 - DNA, 25 bp, Homo sapien
ccccatggaagcgaaacggagagaa

SEQ ID NO: 1761307 - DNA, 25 bp, Homo sapien
gaatgctgagtagagccccatggaa

SEQ ID NO: 1761308 - DNA, 25 bp, Homo sapien
tactgggcctacactaccaattggt

SEQ ID NO: 1761309 - DNA, 25 bp, Homo sapien
tcttgagctgatcacctacctcggg

SEQ ID NO: 1761310 - DNA, 25 bp, Homo sapien
cataggtaggattatactgaacttc

SEQ ID NO: 1761311 - DNA, 25 bp, Homo sapien
gcaaacatggtctcataggtaggat

SEQ ID NO: 1761312 - DNA, 25 bp, Homo sapien
tatactgaacttctttgacggcagg

SEQ ID NO: 1761313 - DNA, 25 bp, Homo sapien
ttctttgacggcagggtcaaggtga

SEQ ID NO: 1761314 - DNA, 25 bp, Homo sapien
caaagccttgcgcaatgttatacaa

SEQ ID NO: 1761315 - DNA, 25 bp, Homo sapien
tgttatacaaagtaccatcctagtc

SEQ ID NO: 1761316 - DNA, 25 bp, Homo sapien
gattcggctcatgctgtttgttctc

SEQ ID NO: 1761317 - DNA, 25 bp, Homo sapien
tcttctggtaaggactcgggcattc

SEQ ID NO: 1761318 - DNA, 25 bp, Homo sapien
cgctacttagcaggactcagctctt

SEQ ID NO: 1761319 - DNA, 25 bp, Homo sapien
aagacattgaatattaacagaggaa

SEQ ID NO: 1761320 - DNA, 25 bp, Homo sapien
cattgaatattaacagaggaaggca

SEQ ID NO: 1761321 - DNA, 25 bp, Homo sapien
aggaaggcagcgaacgctacttagc

SEQ ID NO: 1761322 - DNA, 25 bp, Homo sapien
tgtgtcctaaagggattttctggtc

SEQ ID NO: 1761323 - DNA, 25 bp, Homo sapien
gctgtgtcctaaagggattttctgg

SEQ ID NO: 1761324 - DNA, 25 bp, Homo sapien
ttgctgtgtcctaaagggattttct

SEQ ID NO: 1761325 - DNA, 25 bp, Homo sapien
tgtcctaaagggattttctggtcca

SEQ ID NO: 1761326 - DNA, 25 bp, Homo sapien
tatgagctggttcggcatatccaga

SEQ ID NO: 1761327 - DNA, 25 bp, Homo sapien
tcattgatatgagctggttcggcat

SEQ ID NO: 1761328 - DNA, 25 bp, Homo sapien
catgaaatcattgatatgagctggt

SEQ ID NO: 1761329 - DNA, 25 bp, Homo sapien
ggttcggcatatccagaaagcatat

SEQ ID NO: 1761330 - DNA, 25 bp, Homo sapien
cacatattcttttacctacgtttgg

SEQ ID NO: 1761331 - DNA, 25 bp, Homo sapien
ggtagagtaggttgagagaattctt

SEQ ID NO: 1761332 - DNA, 25 bp, Homo sapien
gataatatataccaaaagcttttaa

SEQ ID NO: 1761333 - DNA, 25 bp, Homo sapien
gacttttatacactgtggtggtaga

SEQ ID NO: 1761334 - DNA, 25 bp, Homo sapien
accaatatatttagcagacacttga

SEQ ID NO: 1761335 - DNA, 25 bp, Homo sapien
tcttctacagaaccaatatatttag

SEQ ID NO: 1761336 - DNA, 25 bp, Homo sapien
cttgatgattatctaatgaagggtc

SEQ ID NO: 1761337 - DNA, 25 bp, Homo sapien
tctaatgaagggtctaatgcataac

SEQ ID NO: 1761338 - DNA, 25 bp, Homo sapien
gcccatggtcccaaaaaaccatcaa

SEQ ID NO: 1761339 - DNA, 25 bp, Homo sapien
tgcccatggtcccaaaaaaccatca

SEQ ID NO: 1761340 - DNA, 25 bp, Homo sapien
atccacatattttgcccatggtccc

SEQ ID NO: 1761341 - DNA, 25 bp, Homo sapien
catagagatacagcgtatacctgaa

SEQ ID NO: 1761342 - DNA, 25 bp, Homo sapien
gatacagcgtatacctgaattgaca

SEQ ID NO: 1761343 - DNA, 25 bp, Homo sapien
ccttcatagagatacagcgtatacc

SEQ ID NO: 1761344 - DNA, 25 bp, Homo sapien
cagcgtatacctgaattgacaatta

SEQ ID NO: 1761345 - DNA, 25 bp, Homo sapien
cttctcctccccaggtttctcttct

SEQ ID NO: 1761346 - DNA, 25 bp, Homo sapien
catgtaagattgtcttctcctcccc

SEQ ID NO: 1761347 - DNA, 25 bp, Homo sapien
tctgcctctttgctgtgatttcatc

SEQ ID NO: 1761348 - DNA, 25 bp, Homo sapien
ctttgctgtgatttcatccaattct

SEQ ID NO: 1761349 - DNA, 25 bp, Homo sapien
aaatgaagatgtacaaaaaatatgt

SEQ ID NO: 1761350 - DNA, 25 bp, Homo sapien
aaaatgaagatgtacaaaaaatatg

SEQ ID NO: 1761351 - DNA, 25 bp, Homo sapien
aatgaagatgtacaaaaaatatgtt

SEQ ID NO: 1761352 - DNA, 25 bp, Homo sapien
tgaagatgtacaaaaaatatgttac

SEQ ID NO: 1761353 - DNA, 25 bp, Homo sapien
ggaagataacacttctcaggtggca

SEQ ID NO: 1761354 - DNA, 25 bp, Homo sapien
tgaagataggacctgccttgatagt

SEQ ID NO: 1761355 - DNA, 25 bp, Homo sapien
ccgtagattaacaccaacatcctga

SEQ ID NO: 1761356 - DNA, 25 bp, Homo sapien
cttctcaggtggcatagttgaccgt

SEQ ID NO: 1761357 - DNA, 25 bp, Homo sapien
ggcgcatctaatctctgaagtgtga

SEQ ID NO: 1761358 - DNA, 25 bp, Homo sapien
tactgaagctaagcaggagacttgg

SEQ ID NO: 1761359 - DNA, 25 bp, Homo sapien
gagacttggtgctagtaccagccca

SEQ ID NO: 1761360 - DNA, 25 bp, Homo sapien
tagtttataaaccagggcgcatcta

SEQ ID NO: 1761361 - DNA, 25 bp, Homo sapien
gaaacaatctgactgcactgacgcc

SEQ ID NO: 1761362 - DNA, 25 bp, Homo sapien
cttaattttacagtccatggaacaa

SEQ ID NO: 1761363 - DNA, 25 bp, Homo sapien
acagcaataaatggccagagagagg

SEQ ID NO: 1761364 - DNA, 25 bp, Homo sapien
cagagagaggaaacaatctgactgc

SEQ ID NO: 1761365 - DNA, 25 bp, Homo sapien
gaactagctttgcagcactcctact

SEQ ID NO: 1761366 - DNA, 25 bp, Homo sapien
ggaccacagagccatagttgatttt

SEQ ID NO: 1761367 - DNA, 25 bp, Homo sapien
gcttctaattgcctaacaaacccaa

SEQ ID NO: 1761368 - DNA, 25 bp, Homo sapien
ggaagtagttcataaattgctgcat

SEQ ID NO: 1761369 - DNA, 25 bp, Homo sapien
gaaagcatttccttgccactggtgc

SEQ ID NO: 1761370 - DNA, 25 bp, Homo sapien
tgtagcatactaggaaacgacctct

SEQ ID NO: 1761371 - DNA, 25 bp, Homo sapien
tcagtcccctgcacataatagaatg

SEQ ID NO: 1761372 - DNA, 25 bp, Homo sapien
catcatggtccggacaaagagaaga

SEQ ID NO: 1761373 - DNA, 25 bp, Homo sapien
tacttttgtagcactacaaatgacg

SEQ ID NO: 1761374 - DNA, 25 bp, Homo sapien
gaataacaagtattacagaagctgt

SEQ ID NO: 1761375 - DNA, 25 bp, Homo sapien
gtcacacacgctcaaaactaaagag

SEQ ID NO: 1761376 - DNA, 25 bp, Homo sapien
ggtgctgccagtttgtgttatatta

SEQ ID NO: 1761377 - DNA, 25 bp, Homo sapien
atctgtgtgtgtaaacgcacagctt

SEQ ID NO: 1761378 - DNA, 25 bp, Homo sapien
tgtaaacgcacagcttcaatcatta

SEQ ID NO: 1761379 - DNA, 25 bp, Homo sapien
aacgcacagcttcaatcattaaata

SEQ ID NO: 1761380 - DNA, 25 bp, Homo sapien
tgtgtgtaaacgcacagcttcaatc

SEQ ID NO: 1761381 - DNA, 25 bp, Homo sapien
aaatgttctcagacagcgccgttct

SEQ ID NO: 1761382 - DNA, 25 bp, Homo sapien
gccgttctccataaacctcccatag

SEQ ID NO: 1761383 - DNA, 25 bp, Homo sapien
gcgccgttctccataaacctcccat

SEQ ID NO: 1761384 - DNA, 25 bp, Homo sapien
tgttctcagacagcgccgttctcca

SEQ ID NO: 1761385 - DNA, 25 bp, Homo sapien
taggcatccttttctacagctggag

SEQ ID NO: 1761386 - DNA, 25 bp, Homo sapien
taaaaacagagccactacgagtcac

SEQ ID NO: 1761387 - DNA, 25 bp, Homo sapien
tttaggctgcggtgacatcttaggc

SEQ ID NO: 1761388 - DNA, 25 bp, Homo sapien
gagacagatgcggaccaaatccact

SEQ ID NO: 1761389 - DNA, 25 bp, Homo sapien
gagtcaagatcactggaatgccacc

SEQ ID NO: 1761390 - DNA, 25 bp, Homo sapien
tacaagtgatgactagctagccaag

SEQ ID NO: 1761391 - DNA, 25 bp, Homo sapien
gaatgccaccgcctgatttactgac

SEQ ID NO: 1761392 - DNA, 25 bp, Homo sapien
taaagacaaacagcactaagcagtg

SEQ ID NO: 1761393 - DNA, 25 bp, Homo sapien
agcagatatccctaacagccttact

SEQ ID NO: 1761394 - DNA, 25 bp, Homo sapien
gtgtcccagagcttaagatacctgt

SEQ ID NO: 1761395 - DNA, 25 bp, Homo sapien
acctgtcataggctgcactgaggaa

SEQ ID NO: 1761396 - DNA, 25 bp, Homo sapien
tgtgttcctgcagtattgaagcaga

SEQ ID NO: 1761397 - DNA, 25 bp, Homo sapien
tttgcttatcttcatcaggattgaa

SEQ ID NO: 1761398 - DNA, 25 bp, Homo sapien
tcttatcagacatcccagccacaaa

SEQ ID NO: 1761399 - DNA, 25 bp, Homo sapien
cacaaagagattttgcttatcttca

SEQ ID NO: 1761400 - DNA, 25 bp, Homo sapien
tgaatttgacacaataaggtacttt

SEQ ID NO: 1761401 - DNA, 25 bp, Homo sapien
tgctcacaaatctcctattctcatc

SEQ ID NO: 1761402 - DNA, 25 bp, Homo sapien
aaatctcctattctcatccacaaaa

SEQ ID NO: 1761403 - DNA, 25 bp, Homo sapien
cccaaatgccgatcatattcctgca

SEQ ID NO: 1761404 - DNA, 25 bp, Homo sapien
gcacaatttctccacttcgaatgtc

SEQ ID NO: 1761405 - DNA, 25 bp, Homo sapien
tatctttgtagcaggacagaccctc

SEQ ID NO: 1761406 - DNA, 25 bp, Homo sapien
aaacaccacttgtctgaaggcccca

SEQ ID NO: 1761407 - DNA, 25 bp, Homo sapien
tcctaagcaagtggccagtatcact

SEQ ID NO: 1761408 - DNA, 25 bp, Homo sapien
ggccccagtgttgctaattttccca

SEQ ID NO: 1761409 - DNA, 25 bp, Homo sapien
gctagtaactcatatcttgcaaata

SEQ ID NO: 1761410 - DNA, 25 bp, Homo sapien
gcactaattggatactgtaattcag

SEQ ID NO: 1761411 - DNA, 25 bp, Homo sapien
ctgtaattcagtataataagctagt

SEQ ID NO: 1761412 - DNA, 25 bp, Homo sapien
aacacagcactaattggatactgta

SEQ ID NO: 1761413 - DNA, 25 bp, Homo sapien
aaaaacttctatcagggtcatggtc

SEQ ID NO: 1761414 - DNA, 25 bp, Homo sapien
tctatggtaccaatgagaactgaca

SEQ ID NO: 1761415 - DNA, 25 bp, Homo sapien
gaataacacagattatacagcagca

SEQ ID NO: 1761416 - DNA, 25 bp, Homo sapien
tctaaattaagcatagtccaggttc

SEQ ID NO: 1761417 - DNA, 25 bp, Homo sapien
ctgcttatggtaaatcctgtacttc

SEQ ID NO: 1761418 - DNA, 25 bp, Homo sapien
tagcatatcagaataagcaactttt

SEQ ID NO: 1761419 - DNA, 25 bp, Homo sapien
aaagtaccttcagaattatctctgg

SEQ ID NO: 1761420 - DNA, 25 bp, Homo sapien
aaatcacaagatgacactgtactgc

SEQ ID NO: 1761421 - DNA, 25 bp, Homo sapien
cattgagtgcatactgggttctgct

SEQ ID NO: 1761422 - DNA, 25 bp, Homo sapien
tctgctatgtacttgaaatccacag

SEQ ID NO: 1761423 - DNA, 25 bp, Homo sapien
agtcactgcaggcattgagtgcata

SEQ ID NO: 1761424 - DNA, 25 bp, Homo sapien
gggttctgctatgtacttgaaatcc

SEQ ID NO: 1761425 - DNA, 25 bp, Homo sapien
tatttaatctaaatctgttctgtgc

SEQ ID NO: 1761426 - DNA, 25 bp, Homo sapien
tccacctgacaagcatagcctgcta

SEQ ID NO: 1761427 - DNA, 25 bp, Homo sapien
aagatttggttgtccattgattggc

SEQ ID NO: 1761428 - DNA, 25 bp, Homo sapien
tagcctgctaccatatggcccttaa

SEQ ID NO: 1761429 - DNA, 25 bp, Homo sapien
tgtagagttttgtggtcttccagtc

SEQ ID NO: 1761430 - DNA, 25 bp, Homo sapien
atgtttaattttccatttccatctc

SEQ ID NO: 1761431 - DNA, 25 bp, Homo sapien
tggtcttccagtcccaaatgtttaa

SEQ ID NO: 1761432 - DNA, 25 bp, Homo sapien
aatgtttaattttccatttccatct

SEQ ID NO: 1761433 - DNA, 25 bp, Homo sapien
agaagtttcatgaggatgccacact

SEQ ID NO: 1761434 - DNA, 25 bp, Homo sapien
cttagaagtttcatgaggatgccac

SEQ ID NO: 1761435 - DNA, 25 bp, Homo sapien
ggatgccacactgcacctatacaca

SEQ ID NO: 1761436 - DNA, 25 bp, Homo sapien
aagtttcatgaggatgccacactgc

SEQ ID NO: 1761437 - DNA, 25 bp, Homo sapien
ttaatcccacaatttaatgagacca

SEQ ID NO: 1761438 - DNA, 25 bp, Homo sapien
gagaccatcccaaccacatgttatg

SEQ ID NO: 1761439 - DNA, 25 bp, Homo sapien
atttaatgagaccatcccaaccaca

SEQ ID NO: 1761440 - DNA, 25 bp, Homo sapien
taatgagaccatcccaaccacatgt

SEQ ID NO: 1761441 - DNA, 25 bp, Homo sapien
tcttggtgcattctcctgagctcca

SEQ ID NO: 1761442 - DNA, 25 bp, Homo sapien
gaagcaatgacctaggagatcctga

SEQ ID NO: 1761443 - DNA, 25 bp, Homo sapien
tgatttctcaaagcgtagccaggtc

SEQ ID NO: 1761444 - DNA, 25 bp, Homo sapien
gatttcagtaatcacagctgcgaag

SEQ ID NO: 1761445 - DNA, 25 bp, Homo sapien
caaagaaattacaagttgacatctt

SEQ ID NO: 1761446 - DNA, 25 bp, Homo sapien
actggggaaccctagccatcttcca

SEQ ID NO: 1761447 - DNA, 25 bp, Homo sapien
ccgcgtccggactatcttgatttta

SEQ ID NO: 1761448 - DNA, 25 bp, Homo sapien
aaaactatttttcaccatggccact

SEQ ID NO: 1761449 - DNA, 25 bp, Homo sapien
gggtgcctctgtgtcaaaaaatata

SEQ ID NO: 1761450 - DNA, 25 bp, Homo sapien
aaaacagacactccgtaagggcaag

SEQ ID NO: 1761451 - DNA, 25 bp, Homo sapien
tatagggcctggtcgtatgtcccac

SEQ ID NO: 1761452 - DNA, 25 bp, Homo sapien
tgggcagttacagaaatggcagcag

SEQ ID NO: 1761453 - DNA, 25 bp, Homo sapien
caactctaatggaaggagccatgag

SEQ ID NO: 1761454 - DNA, 25 bp, Homo sapien
tataggacatggagtagaaagtgca

SEQ ID NO: 1761455 - DNA, 25 bp, Homo sapien
gagacagcaagcctagaagccacaa

SEQ ID NO: 1761456 - DNA, 25 bp, Homo sapien
taaattacctagctcagagacagca

SEQ ID NO: 1761457 - DNA, 25 bp, Homo sapien
tcactttcgtaggatagttagacag

SEQ ID NO: 1761458 - DNA, 25 bp, Homo sapien
ggcctgaagaccatcgtctcacttt

SEQ ID NO: 1761459 - DNA, 25 bp, Homo sapien
cagtttttcaatagcaccgatcctt

SEQ ID NO: 1761460 - DNA, 25 bp, Homo sapien
agaccatcgtctcactttcgtagga

SEQ ID NO: 1761461 - DNA, 25 bp, Homo sapien
tgttcttgagcagattggacagctc

SEQ ID NO: 1761462 - DNA, 25 bp, Homo sapien
agtgacagcagcgttgtgcggttct

SEQ ID NO: 1761463 - DNA, 25 bp, Homo sapien
gggtttgaggtcagtggcagtgaca

SEQ ID NO: 1761464 - DNA, 25 bp, Homo sapien
cgttgtgcggttctggtacagcctt

SEQ ID NO: 1761465 - DNA, 25 bp, Homo sapien
tccttcagattctgaaagctctgag

SEQ ID NO: 1761466 - DNA, 25 bp, Homo sapien
tggggacctgcagtcacctccttca

SEQ ID NO: 1761467 - DNA, 25 bp, Homo sapien
agtcacctccttcagattctgaaag

SEQ ID NO: 1761468 - DNA, 25 bp, Homo sapien
cacctccttcagattctgaaagctc

SEQ ID NO: 1761469 - DNA, 25 bp, Homo sapien
tatctatatggccaccagaaggagg

SEQ ID NO: 1761470 - DNA, 25 bp, Homo sapien
tgaggtctggaccttcacccacttg

SEQ ID NO: 1761471 - DNA, 25 bp, Homo sapien
ccaaatatgtcaaggagatcaaagg

SEQ ID NO: 1761472 - DNA, 25 bp, Homo sapien
gcccagtttgttgataacatcagtt

SEQ ID NO: 1761473 - DNA, 25 bp, Homo sapien
ggctacagcagctcttaacttctct

SEQ ID NO: 1761474 - DNA, 25 bp, Homo sapien
tctccaaacctgcatatagtctcca

SEQ ID NO: 1761475 - DNA, 25 bp, Homo sapien
ttctctccaaacctgcatatagtct

SEQ ID NO: 1761476 - DNA, 25 bp, Homo sapien
cagcagctcttaacttctctccaaa

SEQ ID NO: 1761477 - DNA, 25 bp, Homo sapien
cttttgctcctgatttgttctctcc

SEQ ID NO: 1761478 - DNA, 25 bp, Homo sapien
tgctcctgatttgttctctcctgca

SEQ ID NO: 1761479 - DNA, 25 bp, Homo sapien
ctcctgatttgttctctcctgcaca

SEQ ID NO: 1761480 - DNA, 25 bp, Homo sapien
tttgctcctgatttgttctctcctg

SEQ ID NO: 1761481 - DNA, 25 bp, Homo sapien
acctcacaatggtttttaatgcggg

SEQ ID NO: 1761482 - DNA, 25 bp, Homo sapien
tccagaaagaatgacgtaaaattcc

SEQ ID NO: 1761483 - DNA, 25 bp, Homo sapien
tctgtgctttgatgtacttccgggt

SEQ ID NO: 1761484 - DNA, 25 bp, Homo sapien
ggccattttagccagataaggttct

SEQ ID NO: 1761485 - DNA, 25 bp, Homo sapien
agcttgatgagcgataatagagaat

SEQ ID NO: 1761486 - DNA, 25 bp, Homo sapien
tcagcttgatgagcgataatagaga

SEQ ID NO: 1761487 - DNA, 25 bp, Homo sapien
gcttgatgagcgataatagagaatt

SEQ ID NO: 1761488 - DNA, 25 bp, Homo sapien
cttgatgagcgataatagagaattt

SEQ ID NO: 1761489 - DNA, 25 bp, Homo sapien
ctctggatttgaatttcagcatgcc

SEQ ID NO: 1761490 - DNA, 25 bp, Homo sapien
ggcgctctggatttgaatttcagca

SEQ ID NO: 1761491 - DNA, 25 bp, Homo sapien
cagattggcgctctggatttgaatt

SEQ ID NO: 1761492 - DNA, 25 bp, Homo sapien
tgcagaggcggcagattggcgctct

SEQ ID NO: 1761493 - DNA, 25 bp, Homo sapien
tacttttggttccagaggagtccag

SEQ ID NO: 1761494 - DNA, 25 bp, Homo sapien
atgtccctgaaaaaggccacttcgt

SEQ ID NO: 1761495 - DNA, 25 bp, Homo sapien
gccacttcgtaataaagactgtgga

SEQ ID NO: 1761496 - DNA, 25 bp, Homo sapien
cagcagcaaacccaatcagaatgga

SEQ ID NO: 1761497 - DNA, 25 bp, Homo sapien
tatcagtgcaagacagccattttgg

SEQ ID NO: 1761498 - DNA, 25 bp, Homo sapien
cagtgcaagacagccattttggttt

SEQ ID NO: 1761499 - DNA, 25 bp, Homo sapien
ttatcagtgcaagacagccattttg

SEQ ID NO: 1761500 - DNA, 25 bp, Homo sapien
tctgaagtactactgggcatgccat

SEQ ID NO: 1761501 - DNA, 25 bp, Homo sapien
gaagctgtggacaagtgctccagaa

SEQ ID NO: 1761502 - DNA, 25 bp, Homo sapien
gaacagtggttctccatgcttttga

SEQ ID NO: 1761503 - DNA, 25 bp, Homo sapien
aaccaggacggtgaatacttgaacg

SEQ ID NO: 1761504 - DNA, 25 bp, Homo sapien
tacttgaacggtgttcagaacagtg

SEQ ID NO: 1761505 - DNA, 25 bp, Homo sapien
aggaaggctgtgtacgggggaatgc

SEQ ID NO: 1761506 - DNA, 25 bp, Homo sapien
tgtgttcagcctcatctcagatttc

SEQ ID NO: 1761507 - DNA, 25 bp, Homo sapien
gcaggaaggctgtgtacgggggaat

SEQ ID NO: 1761508 - DNA, 25 bp, Homo sapien
tgtgtacgggggaatgctgtgttca

SEQ ID NO: 1761509 - DNA, 25 bp, Homo sapien
gcttgctgacctcctagtgcattag

SEQ ID NO: 1761510 - DNA, 25 bp, Homo sapien
agagagcctcaagctgccatcgctg

SEQ ID NO: 1761511 - DNA, 25 bp, Homo sapien
cataggagcttgctgtttgccagag

SEQ ID NO: 1761512 - DNA, 25 bp, Homo sapien
caggcatggcagacgcattgcagaa

SEQ ID NO: 1761513 - DNA, 25 bp, Homo sapien
ttcagaatccgtccccaaatcagag

SEQ ID NO: 1761514 - DNA, 25 bp, Homo sapien
gaggcaatattcgtgttttatagca

SEQ ID NO: 1761515 - DNA, 25 bp, Homo sapien
gagctggttgaacgacctccaaaca

SEQ ID NO: 1761516 - DNA, 25 bp, Homo sapien
tgtgcacaatgcgacagcaagtcat

SEQ ID NO: 1761517 - DNA, 25 bp, Homo sapien
cacgttcgctgtttgggatgcctca

SEQ ID NO: 1761518 - DNA, 25 bp, Homo sapien
tacagcacgggagcctcttttcagg

SEQ ID NO: 1761519 - DNA, 25 bp, Homo sapien
gggatgcctcactgaatctgcacat

SEQ ID NO: 1761520 - DNA, 25 bp, Homo sapien
tgcacatttgacagtattgaataca

SEQ ID NO: 1761521 - DNA, 25 bp, Homo sapien
tcaatcatccgtgtctaaatggaca

SEQ ID NO: 1761522 - DNA, 25 bp, Homo sapien
catccgtgtctaaatggacatcgtc

SEQ ID NO: 1761523 - DNA, 25 bp, Homo sapien
taaatggacatcgtctaggtcatgt

SEQ ID NO: 1761524 - DNA, 25 bp, Homo sapien
cgtgtctaaatggacatcgtctagg

SEQ ID NO: 1761525 - DNA, 25 bp, Homo sapien
ttggagacgggtagcaagcaatgcc

SEQ ID NO: 1761526 - DNA, 25 bp, Homo sapien
ggtcagagccagttgctcagtccca

SEQ ID NO: 1761527 - DNA, 25 bp, Homo sapien
cacccaatgctagagggaccatcct

SEQ ID NO: 1761528 - DNA, 25 bp, Homo sapien
gctctggaggatctttgcatggcat

SEQ ID NO: 1761529 - DNA, 25 bp, Homo sapien
tcaggtcccgcaggccgcctcgatg

SEQ ID NO: 1761530 - DNA, 25 bp, Homo sapien
ctgtgctctcttaggcggctccacg

SEQ ID NO: 1761531 - DNA, 25 bp, Homo sapien
tccacgggtcgcatctttcagtgcc

SEQ ID NO: 1761532 - DNA, 25 bp, Homo sapien
atgggacctccggaggcttccgctt

SEQ ID NO: 1761533 - DNA, 25 bp, Homo sapien
tccggcctgtggggctacatccctg

SEQ ID NO: 1761534 - DNA, 25 bp, Homo sapien
agttcccacagttggccgctccggc

SEQ ID NO: 1761535 - DNA, 25 bp, Homo sapien
ccgcgggaccccgagtgtagcgcca

SEQ ID NO: 1761536 - DNA, 25 bp, Homo sapien
cgcgggaccccgagtgtagcgccat

SEQ ID NO: 1761537 - DNA, 25 bp, Homo sapien
tggggagcattttgccgaaagataa

SEQ ID NO: 1761538 - DNA, 25 bp, Homo sapien
cattttgccgaaagataaatttgtc

SEQ ID NO: 1761539 - DNA, 25 bp, Homo sapien
ggagcattttgccgaaagataaatt

SEQ ID NO: 1761540 - DNA, 25 bp, Homo sapien
ttgccgaaagataaatttgtccctc

SEQ ID NO: 1761541 - DNA, 25 bp, Homo sapien
gtttaattaaccagcctatgacaca

SEQ ID NO: 1761542 - DNA, 25 bp, Homo sapien
gcctatgacacagcggttaatgatt

SEQ ID NO: 1761543 - DNA, 25 bp, Homo sapien
ctgcttgtttaattaaccagcctat

SEQ ID NO: 1761544 - DNA, 25 bp, Homo sapien
gacacagcggttaatgattatctgc

SEQ ID NO: 1761545 - DNA, 25 bp, Homo sapien
cagcaacattcttgcagacagcatt

SEQ ID NO: 1761546 - DNA, 25 bp, Homo sapien
gggcttttctcctggatgccctttc

SEQ ID NO: 1761547 - DNA, 25 bp, Homo sapien
tccttctgtcttagcgacagcaaca

SEQ ID NO: 1761548 - DNA, 25 bp, Homo sapien
tgtcttagcgacagcaacattcttg

SEQ ID NO: 1761549 - DNA, 25 bp, Homo sapien
tctcatagtcggtggttgaagcagc

SEQ ID NO: 1761550 - DNA, 25 bp, Homo sapien
tggtaaacagtcaccgcagaggcag

SEQ ID NO: 1761551 - DNA, 25 bp, Homo sapien
gaagcagctaatgtgcacacgccgg

SEQ ID NO: 1761552 - DNA, 25 bp, Homo sapien
cacacgccggcaggaaaatagcaag

SEQ ID NO: 1761553 - DNA, 25 bp, Homo sapien
cctccctgtttagtgctacctgaga

SEQ ID NO: 1761554 - DNA, 25 bp, Homo sapien
cctgtttagtgctacctgagattcc

SEQ ID NO: 1761555 - DNA, 25 bp, Homo sapien
acaggctgtccgcatcacagccccc

SEQ ID NO: 1761556 - DNA, 25 bp, Homo sapien
caggagctcgtcttttcccctgtcc

SEQ ID NO: 1761557 - DNA, 25 bp, Homo sapien
ctttcagggcgagcatttcaggcgg

SEQ ID NO: 1761558 - DNA, 25 bp, Homo sapien
gatgtgagtgcctcagacagaaggc

SEQ ID NO: 1761559 - DNA, 25 bp, Homo sapien
gtttgtttgatacgcgtgcccgcca

SEQ ID NO: 1761560 - DNA, 25 bp, Homo sapien
cctggccatgcagattagctccctg

SEQ ID NO: 1761561 - DNA, 25 bp, Homo sapien
taagggccaaattgttgataaggcc

SEQ ID NO: 1761562 - DNA, 25 bp, Homo sapien
cattttgctttaagggccaaattgt

SEQ ID NO: 1761563 - DNA, 25 bp, Homo sapien
gctttaagggccaaattgttgataa

SEQ ID NO: 1761564 - DNA, 25 bp, Homo sapien
tcattttgctttaagggccaaattg

SEQ ID NO: 1761565 - DNA, 25 bp, Homo sapien
caatgggaatcagtttcgctttctc

SEQ ID NO: 1761566 - DNA, 25 bp, Homo sapien
cctgaatcaagtcaccaatgggaat

SEQ ID NO: 1761567 - DNA, 25 bp, Homo sapien
cagagacaggtacttgaattcttgc

SEQ ID NO: 1761568 - DNA, 25 bp, Homo sapien
acagagacagccatgcaggccaatg

SEQ ID NO: 1761569 - DNA, 25 bp, Homo sapien
ctacaaatcagctggagaaagccca

SEQ ID NO: 1761570 - DNA, 25 bp, Homo sapien
tgtttgtccatcgaaatcccactga

SEQ ID NO: 1761571 - DNA, 25 bp, Homo sapien
ggtcactttgaacttcctgcctctg

SEQ ID NO: 1761572 - DNA, 25 bp, Homo sapien
actgattgattagggccttcctcac

SEQ ID NO: 1761573 - DNA, 25 bp, Homo sapien
tacgctcctggactagccacttggg

SEQ ID NO: 1761574 - DNA, 25 bp, Homo sapien
tccgtggctcccattactttttgaa

SEQ ID NO: 1761575 - DNA, 25 bp, Homo sapien
ggctcccattactttttgaacacag

SEQ ID NO: 1761576 - DNA, 25 bp, Homo sapien
ttgaacacagtcttgcatcctagcc

SEQ ID NO: 1761577 - DNA, 25 bp, Homo sapien
cacagtcttgcatcctagccagatt

SEQ ID NO: 1761578 - DNA, 25 bp, Homo sapien
ggtaaaagatccactgtcagagatt

SEQ ID NO: 1761579 - DNA, 25 bp, Homo sapien
tcttaagcaattcttgggtaaaaga

SEQ ID NO: 1761580 - DNA, 25 bp, Homo sapien
tacagtgcaccaacgtttcactggc

SEQ ID NO: 1761581 - DNA, 25 bp, Homo sapien
ctcacccatgccagttggtgtcagc

SEQ ID NO: 1761582 - DNA, 25 bp, Homo sapien
tatggcagccaacgtctttggcaac

SEQ ID NO: 1761583 - DNA, 25 bp, Homo sapien
ttatcgaagatggtaaagctgacta

SEQ ID NO: 1761584 - DNA, 25 bp, Homo sapien
cccaacagaatgtctggaagtttcg

SEQ ID NO: 1761585 - DNA, 25 bp, Homo sapien
tctggaagtttcgatgtttgttgtt

SEQ ID NO: 1761586 - DNA, 25 bp, Homo sapien
gttgttagggaggttcatactcaaa

SEQ ID NO: 1761587 - DNA, 25 bp, Homo sapien
tcaaaatatgctccgaatgtactca

SEQ ID NO: 1761588 - DNA, 25 bp, Homo sapien
tgtacaaacttcagaccccacaaaa

SEQ ID NO: 1761589 - DNA, 25 bp, Homo sapien
agtgcaaaatggtgtaggcaaagca

SEQ ID NO: 1761590 - DNA, 25 bp, Homo sapien
cactaacttgactttgacaggctac

SEQ ID NO: 1761591 - DNA, 25 bp, Homo sapien
cgtgcaggaagccaaacatactttg

SEQ ID NO: 1761592 - DNA, 25 bp, Homo sapien
caggctacgaagtgtgagaggcaat

SEQ ID NO: 1761593 - DNA, 25 bp, Homo sapien
cacacaagtaggtaagattcagata

SEQ ID NO: 1761594 - DNA, 25 bp, Homo sapien
cttggcgctagtctaaaaggctgcc

SEQ ID NO: 1761595 - DNA, 25 bp, Homo sapien
ggaaattatatggatccctgcccca

SEQ ID NO: 1761596 - DNA, 25 bp, Homo sapien
gacagggttgactaagacagtccct

SEQ ID NO: 1761597 - DNA, 25 bp, Homo sapien
tttaaaagcaaacgccttggcgcta

SEQ ID NO: 1761598 - DNA, 25 bp, Homo sapien
gatgtttgttacctgctcatagaaa

SEQ ID NO: 1761599 - DNA, 25 bp, Homo sapien
tgccattgaggaatgtatcagctgc

SEQ ID NO: 1761600 - DNA, 25 bp, Homo sapien
tcattcagggatgtaggctgacaga

SEQ ID NO: 1761601 - DNA, 25 bp, Homo sapien
catgtatttgtacctagctggccaa

SEQ ID NO: 1761602 - DNA, 25 bp, Homo sapien
ccttatagagtggaatagcacgcca

SEQ ID NO: 1761603 - DNA, 25 bp, Homo sapien
ttctctgagaaagcgataggtgtgc

SEQ ID NO: 1761604 - DNA, 25 bp, Homo sapien
catttgctatggaactgaggctacc

SEQ ID NO: 1761605 - DNA, 25 bp, Homo sapien
caatatggcgtcttgactggctgcc

SEQ ID NO: 1761606 - DNA, 25 bp, Homo sapien
taagagtggttgctcaaggcgctgc

SEQ ID NO: 1761607 - DNA, 25 bp, Homo sapien
tctgttacttcgctatactctatac

SEQ ID NO: 1761608 - DNA, 25 bp, Homo sapien
atagaactaagagtggttgctcaag

SEQ ID NO: 1761609 - DNA, 25 bp, Homo sapien
gaaaccaaccagaccccacatctgt

SEQ ID NO: 1761610 - DNA, 25 bp, Homo sapien
agctctttcctggatttcagctcac

SEQ ID NO: 1761611 - DNA, 25 bp, Homo sapien
actgccattgtttctttgcttggag

SEQ ID NO: 1761612 - DNA, 25 bp, Homo sapien
tttgcttggagagtttgtttgccat

SEQ ID NO: 1761613 - DNA, 25 bp, Homo sapien
tcagctcactgccattgtttctttg

SEQ ID NO: 1761614 - DNA, 25 bp, Homo sapien
ggcctttgaatctgtgcccctgagg

SEQ ID NO: 1761615 - DNA, 25 bp, Homo sapien
ggcaggactccaactggtggtgtaa

SEQ ID NO: 1761616 - DNA, 25 bp, Homo sapien
tgtaagacttgctgtcctgatgtgg

SEQ ID NO: 1761617 - DNA, 25 bp, Homo sapien
agtgaagagcttctggcgacggcct

SEQ ID NO: 1761618 - DNA, 25 bp, Homo sapien
tggtcctggtgcctgcctttctctt

SEQ ID NO: 1761619 - DNA, 25 bp, Homo sapien
ggtcctggtgcctgcctttctcttc

SEQ ID NO: 1761620 - DNA, 25 bp, Homo sapien
cctggtgcctgcctttctcttccat

SEQ ID NO: 1761621 - DNA, 25 bp, Homo sapien
gtcctggtgcctgcctttctcttcc

SEQ ID NO: 1761622 - DNA, 25 bp, Homo sapien
ttggctgaatttctgagggctttga

SEQ ID NO: 1761623 - DNA, 25 bp, Homo sapien
ctgaatttctgagggctttgagtgc

SEQ ID NO: 1761624 - DNA, 25 bp, Homo sapien
tcagcgactgcagggacagaaatag

SEQ ID NO: 1761625 - DNA, 25 bp, Homo sapien
atctcagcgactgcagggacagaaa

SEQ ID NO: 1761626 - DNA, 25 bp, Homo sapien
tcctctgcagctgttttttagtgca

SEQ ID NO: 1761627 - DNA, 25 bp, Homo sapien
gttttttagtgcatggcctgtcctc

SEQ ID NO: 1761628 - DNA, 25 bp, Homo sapien
tgcagctgttttttagtgcatggcc

SEQ ID NO: 1761629 - DNA, 25 bp, Homo sapien
accttgctcctggtgactcccagca

SEQ ID NO: 1761630 - DNA, 25 bp, Homo sapien
ggtctgccgcagactcaggcaccat

SEQ ID NO: 1761631 - DNA, 25 bp, Homo sapien
agcgacttcaatctcaagttgggag

SEQ ID NO: 1761632 - DNA, 25 bp, Homo sapien
agggtctgccgcagactcaggcacc

SEQ ID NO: 1761633 - DNA, 25 bp, Homo sapien
tgctttcaaagcgacttcaatctca

SEQ ID NO: 1761634 - DNA, 25 bp, Homo sapien
agctctgtcccccaatgaactgcag

SEQ ID NO: 1761635 - DNA, 25 bp, Homo sapien
tgtgtgttaccccaagtggactttc

SEQ ID NO: 1761636 - DNA, 25 bp, Homo sapien
taaagaagagcagttgagtggctca

SEQ ID NO: 1761637 - DNA, 25 bp, Homo sapien
tacaaattgtgtgttaccccaagtg

SEQ ID NO: 1761638 - DNA, 25 bp, Homo sapien
cactgtgccgaacatcatgaatcag

SEQ ID NO: 1761639 - DNA, 25 bp, Homo sapien
catatgatcagcaccgttttcggga

SEQ ID NO: 1761640 - DNA, 25 bp, Homo sapien
tagagtcccggtagtacacatagga

SEQ ID NO: 1761641 - DNA, 25 bp, Homo sapien
tttaggaagcacatcaacctcccag

SEQ ID NO: 1761642 - DNA, 25 bp, Homo sapien
tctatggtggtttatggttgtaaac

SEQ ID NO: 1761643 - DNA, 25 bp, Homo sapien
tggtggtttatggttgtaaacagct

SEQ ID NO: 1761644 - DNA, 25 bp, Homo sapien
ttctatggtggtttatggttgtaaa

SEQ ID NO: 1761645 - DNA, 25 bp, Homo sapien
tatggtggtttatggttgtaaacag

SEQ ID NO: 1761646 - DNA, 25 bp, Homo sapien
tggacagaatcactggataggtggc

SEQ ID NO: 1761647 - DNA, 25 bp, Homo sapien
gatctggacagaatcactggatagg

SEQ ID NO: 1761648 - DNA, 25 bp, Homo sapien
aagataggggccataaactgacacc

SEQ ID NO: 1761649 - DNA, 25 bp, Homo sapien
cagaaagatctggacagaatcactg

SEQ ID NO: 1761650 - DNA, 25 bp, Homo sapien
gtctccaagagtgtggcccactggg

SEQ ID NO: 1761651 - DNA, 25 bp, Homo sapien
aagatctatggggaatgtcagataa

SEQ ID NO: 1761652 - DNA, 25 bp, Homo sapien
cagataaatggtgtcctgcccagcc

SEQ ID NO: 1761653 - DNA, 25 bp, Homo sapien
cacgtcagccgagtctccaagagtg

SEQ ID NO: 1761654 - DNA, 25 bp, Homo sapien
cacctctgctatagactcagcagga

SEQ ID NO: 1761655 - DNA, 25 bp, Homo sapien
tccagtctcatagaatctatgctcc

SEQ ID NO: 1761656 - DNA, 25 bp, Homo sapien
agcaggagcctgacctgctcttgac

SEQ ID NO: 1761657 - DNA, 25 bp, Homo sapien
tctccccaggtgtccatagagcgtt

SEQ ID NO: 1761658 - DNA, 25 bp, Homo sapien
tcccaaaccatgaactttgcccatg

SEQ ID NO: 1761659 - DNA, 25 bp, Homo sapien
ggttctgagtcaaagccataatcta

SEQ ID NO: 1761660 - DNA, 25 bp, Homo sapien
caagcttcctgcagaaactcccaaa

SEQ ID NO: 1761661 - DNA, 25 bp, Homo sapien
taaaacagctgaacgtccccaagct

SEQ ID NO: 1761662 - DNA, 25 bp, Homo sapien
ttcagctgggcctttattaaccagc

SEQ ID NO: 1761663 - DNA, 25 bp, Homo sapien
gctcttccactagctgtgagacatg

SEQ ID NO: 1761664 - DNA, 25 bp, Homo sapien
caggaaaacacaactcagatcttcc

SEQ ID NO: 1761665 - DNA, 25 bp, Homo sapien
tgagacatggggcaaggctccagat

SEQ ID NO: 1761666 - DNA, 25 bp, Homo sapien
aaaaggagccagtttgcttcctgaa

SEQ ID NO: 1761667 - DNA, 25 bp, Homo sapien
gaaaaggagccagtttgcttcctga

SEQ ID NO: 1761668 - DNA, 25 bp, Homo sapien
tgaaaaggagccagtttgcttcctg

SEQ ID NO: 1761669 - DNA, 25 bp, Homo sapien
cctgaaaaggagccagtttgcttcc

SEQ ID NO: 1761670 - DNA, 25 bp, Homo sapien
tagagacttagtgttgggacagctg

SEQ ID NO: 1761671 - DNA, 25 bp, Homo sapien
tcacaggcttgggtatccctgggcc

SEQ ID NO: 1761672 - DNA, 25 bp, Homo sapien
tatgtgcctcctcacgtacttgacg

SEQ ID NO: 1761673 - DNA, 25 bp, Homo sapien
ggtgagaacccgcagtcacaggctt

SEQ ID NO: 1761674 - DNA, 25 bp, Homo sapien
catattagctcatgttttctctacc

SEQ ID NO: 1761675 - DNA, 25 bp, Homo sapien
ccaccccattgaaagaaagtagtag

SEQ ID NO: 1761676 - DNA, 25 bp, Homo sapien
tgtggtttggcatttaattgtatac

SEQ ID NO: 1761677 - DNA, 25 bp, Homo sapien
tagatacccaggctgaaccatgtgg

SEQ ID NO: 1761678 - DNA, 25 bp, Homo sapien
cagtgaaatccgtaactaagtgctg

SEQ ID NO: 1761679 - DNA, 25 bp, Homo sapien
tgttcgcgtgctgcagtgcctaggc

SEQ ID NO: 1761680 - DNA, 25 bp, Homo sapien
tattgcaaggcactagaagaggttc

SEQ ID NO: 1761681 - DNA, 25 bp, Homo sapien
ggcagaacacgtttagcagccctgt

SEQ ID NO: 1761682 - DNA, 25 bp, Homo sapien
catagcagtttaggtccccataatc

SEQ ID NO: 1761683 - DNA, 25 bp, Homo sapien
tggcagttagaccaacagaggcttg

SEQ ID NO: 1761684 - DNA, 25 bp, Homo sapien
agtgaaatggcagttagaccaacag

SEQ ID NO: 1761685 - DNA, 25 bp, Homo sapien
gaattctatggaaattacaaatcca

SEQ ID NO: 1761686 - DNA, 25 bp, Homo sapien
tcaaaccgtgggacctctaaggaga

SEQ ID NO: 1761687 - DNA, 25 bp, Homo sapien
cacacgtaagggccctcaaaccgtg

SEQ ID NO: 1761688 - DNA, 25 bp, Homo sapien
ctcaaaccgtgggacctctaaggag

SEQ ID NO: 1761689 - DNA, 25 bp, Homo sapien
tccattccacacatgactgagttcc

SEQ ID NO: 1761690 - DNA, 25 bp, Homo sapien
gatttcgtcagttgctcccagtata

SEQ ID NO: 1761691 - DNA, 25 bp, Homo sapien
cagggttcgtgctacccactgattc

SEQ ID NO: 1761692 - DNA, 25 bp, Homo sapien
tgactgagttcctatccctgcactg

SEQ ID NO: 1761693 - DNA, 25 bp, Homo sapien
cagcattgttaaatagttcttacgc

SEQ ID NO: 1761694 - DNA, 25 bp, Homo sapien
ccttaatactttataagcagcattg

SEQ ID NO: 1761695 - DNA, 25 bp, Homo sapien
agttcttacgcttatacattcacag

SEQ ID NO: 1761696 - DNA, 25 bp, Homo sapien
aatactatgccccttaatactttat

SEQ ID NO: 1761697 - DNA, 25 bp, Homo sapien
catggctcacagtagtaccctggta

SEQ ID NO: 1761698 - DNA, 25 bp, Homo sapien
tagtaccctggtagcctcaatctgc

SEQ ID NO: 1761699 - DNA, 25 bp, Homo sapien
tggtagcctcaatctgctagactca

SEQ ID NO: 1761700 - DNA, 25 bp, Homo sapien
cacagtagtaccctggtagcctcaa

SEQ ID NO: 1761701 - DNA, 25 bp, Homo sapien
tgtccatgcattaccgtggacacca

SEQ ID NO: 1761702 - DNA, 25 bp, Homo sapien
gtccatgcattaccgtggacaccac

SEQ ID NO: 1761703 - DNA, 25 bp, Homo sapien
tccatgcattaccgtggacaccacc

SEQ ID NO: 1761704 - DNA, 25 bp, Homo sapien
cagaaactggaaaacagccgctcat

SEQ ID NO: 1761705 - DNA, 25 bp, Homo sapien
ataggcaccagaggccagaaactgg

SEQ ID NO: 1761706 - DNA, 25 bp, Homo sapien
ctagataggcaccagaggccagaaa

SEQ ID NO: 1761707 - DNA, 25 bp, Homo sapien
gataggcaccagaggccagaaactg

SEQ ID NO: 1761708 - DNA, 25 bp, Homo sapien
cacagttcgcaggactgagtcgccg

SEQ ID NO: 1761709 - DNA, 25 bp, Homo sapien
tgagtcgccgctgttttcgtctacg

SEQ ID NO: 1761710 - DNA, 25 bp, Homo sapien
tcggaccccgacgagttgctgagga

SEQ ID NO: 1761711 - DNA, 25 bp, Homo sapien
gatagcttcgtagatggcacgcagg

SEQ ID NO: 1761712 - DNA, 25 bp, Homo sapien
gcagaagtcgttggcgctgtcgccc

SEQ ID NO: 1761713 - DNA, 25 bp, Homo sapien
gggcagaagtcgttggcgctgtcgc

SEQ ID NO: 1761714 - DNA, 25 bp, Homo sapien
agaagtcgttggcgctgtcgcccac

SEQ ID NO: 1761715 - DNA, 25 bp, Homo sapien
cagaagtcgttggcgctgtcgccca

SEQ ID NO: 1761716 - DNA, 25 bp, Homo sapien
tggaggcgcacgtcggtttcccagg

SEQ ID NO: 1761717 - DNA, 25 bp, Homo sapien
caggtggaggcgcacgtcggtttcc

SEQ ID NO: 1761718 - DNA, 25 bp, Homo sapien
ggtggaggcgcacgtcggtttccca

SEQ ID NO: 1761719 - DNA, 25 bp, Homo sapien
ggcacagaacgagctgggctccgcc

SEQ ID NO: 1761720 - DNA, 25 bp, Homo sapien
tctctgtggggagtccttgcagcca

SEQ ID NO: 1761721 - DNA, 25 bp, Homo sapien
tgcagccacgaggatttcaggatcc

SEQ ID NO: 1761722 - DNA, 25 bp, Homo sapien
cagcgcagaaatagtgtcgggtcgt

SEQ ID NO: 1761723 - DNA, 25 bp, Homo sapien
gcaggagggtgtagacagcgcagaa

SEQ ID NO: 1761724 - DNA, 25 bp, Homo sapien
caccaccaggaggcggttgttccct

SEQ ID NO: 1761725 - DNA, 25 bp, Homo sapien
gacaccgtcgcatgcttcgaggtta

SEQ ID NO: 1761726 - DNA, 25 bp, Homo sapien
atgcttcgaggttactggccggccg

SEQ ID NO: 1761727 - DNA, 25 bp, Homo sapien
aggagagagacaccgtcgcatgctt

SEQ ID NO: 1761728 - DNA, 25 bp, Homo sapien
ggccggaccccagctggacggtgcg

SEQ ID NO: 1761729 - DNA, 25 bp, Homo sapien
ttttggtgaagtcgctggtctcttg

SEQ ID NO: 1761730 - DNA, 25 bp, Homo sapien
gtgaagtcgctggtctcttgctgca

SEQ ID NO: 1761731 - DNA, 25 bp, Homo sapien
catggctttctgttccattgttggg

SEQ ID NO: 1761732 - DNA, 25 bp, Homo sapien
ggattttggtgaagtcgctggtctc

SEQ ID NO: 1761733 - DNA, 25 bp, Homo sapien
ttccaagagggccagcttgcaagga

SEQ ID NO: 1761734 - DNA, 25 bp, Homo sapien
aatcccacttccaagagggccagct

SEQ ID NO: 1761735 - DNA, 25 bp, Homo sapien
caagaatcccacttccaagagggcc

SEQ ID NO: 1761736 - DNA, 25 bp, Homo sapien
agagggccagcttgcaaggagccat

SEQ ID NO: 1761737 - DNA, 25 bp, Homo sapien
ttaaactgtatgcttgctttataaa

SEQ ID NO: 1761738 - DNA, 25 bp, Homo sapien
tcactaatcttgagtcctgatatct

SEQ ID NO: 1761739 - DNA, 25 bp, Homo sapien
caattcttgattcactaatcttgag

SEQ ID NO: 1761740 - DNA, 25 bp, Homo sapien
gccaaagtactttcaggagtagatt

SEQ ID NO: 1761741 - DNA, 25 bp, Homo sapien
aaatctgaaccctgtttaaggacag

SEQ ID NO: 1761742 - DNA, 25 bp, Homo sapien
aggcttttaccttgagcaataatgt

SEQ ID NO: 1761743 - DNA, 25 bp, Homo sapien
gcttttaccttgagcaataatgtca

SEQ ID NO: 1761744 - DNA, 25 bp, Homo sapien
ctgtgaaatctgaaccctgtttaag

SEQ ID NO: 1761745 - DNA, 25 bp, Homo sapien
taaatatacactgctataagtgtcc

SEQ ID NO: 1761746 - DNA, 25 bp, Homo sapien
tataagtgtccagtagcattatgta

SEQ ID NO: 1761747 - DNA, 25 bp, Homo sapien
gtaagacaataatacagtttgctgc

SEQ ID NO: 1761748 - DNA, 25 bp, Homo sapien
tacttcagtggtgtttacagcatct

SEQ ID NO: 1761749 - DNA, 25 bp, Homo sapien
ttattctaattccatgaaccaccac

SEQ ID NO: 1761750 - DNA, 25 bp, Homo sapien
tggaaaccatcccagtgccttagaa

SEQ ID NO: 1761751 - DNA, 25 bp, Homo sapien
ttttcagagtcttggtaggcataca

SEQ ID NO: 1761752 - DNA, 25 bp, Homo sapien
tacagactggtccttttacttgaga

SEQ ID NO: 1761753 - DNA, 25 bp, Homo sapien
gaatcgattcctggcgcaacactga

SEQ ID NO: 1761754 - DNA, 25 bp, Homo sapien
ccttgtgatccatccgccttggcct

SEQ ID NO: 1761755 - DNA, 25 bp, Homo sapien
tgtgatccatccgccttggcctccc

SEQ ID NO: 1761756 - DNA, 25 bp, Homo sapien
cgcctctcaggttctaggaattctc

SEQ ID NO: 1761757 - DNA, 25 bp, Homo sapien
ccgcctctcaggttctaggaattct

SEQ ID NO: 1761758 - DNA, 25 bp, Homo sapien
atgctgttgacattgttgtaaacaa

SEQ ID NO: 1761759 - DNA, 25 bp, Homo sapien
tgttacccagcatgctgttgacatt

SEQ ID NO: 1761760 - DNA, 25 bp, Homo sapien
tacccagcatgctgttgacattgtt

SEQ ID NO: 1761761 - DNA, 25 bp, Homo sapien
tgctgttgacattgttgtaaacaac

SEQ ID NO: 1761762 - DNA, 25 bp, Homo sapien
ggaagagtctatcaacagtgttacc

SEQ ID NO: 1761763 - DNA, 25 bp, Homo sapien
ccacaatgttactctggcaaaactg

SEQ ID NO: 1761764 - DNA, 25 bp, Homo sapien
gagtgtcccacaatgttactctggc

SEQ ID NO: 1761765 - DNA, 25 bp, Homo sapien
tgtcccacaatgttactctggcaaa

SEQ ID NO: 1761766 - DNA, 25 bp, Homo sapien
gatacaggtatccaggtatccaaag

SEQ ID NO: 1761767 - DNA, 25 bp, Homo sapien
gctaagtgaaaaagggctggttaca

SEQ ID NO: 1761768 - DNA, 25 bp, Homo sapien
aaagattgtcattgtttggccaggc

SEQ ID NO: 1761769 - DNA, 25 bp, Homo sapien
aagcaatttcataccctggcagtgg

SEQ ID NO: 1761770 - DNA, 25 bp, Homo sapien
cttgcttagaggttggtcggagagc

SEQ ID NO: 1761771 - DNA, 25 bp, Homo sapien
gaaacttgcttagaggttggtcgga

SEQ ID NO: 1761772 - DNA, 25 bp, Homo sapien
aacttgcttagaggttggtcggaga

SEQ ID NO: 1761773 - DNA, 25 bp, Homo sapien
aaacttgcttagaggttggtcggag

SEQ ID NO: 1761774 - DNA, 25 bp, Homo sapien
tcatgatctgcctgcctcagcctcc

SEQ ID NO: 1761775 - DNA, 25 bp, Homo sapien
caccatgttggccaatctcctgacc

SEQ ID NO: 1761776 - DNA, 25 bp, Homo sapien
ctggttcaagcgagtctcctgtgtc

SEQ ID NO: 1761777 - DNA, 25 bp, Homo sapien
gagtctcctgtgtcagcctcctaag

SEQ ID NO: 1761778 - DNA, 25 bp, Homo sapien
aaaactccacaagtgtagggtattg

SEQ ID NO: 1761779 - DNA, 25 bp, Homo sapien
aaatccttgatttgtgatctgcctg

SEQ ID NO: 1761780 - DNA, 25 bp, Homo sapien
tagggtattgtggattgctagcata

SEQ ID NO: 1761781 - DNA, 25 bp, Homo sapien
gagaggaatcgtttaaaatttgcca

SEQ ID NO: 1761782 - DNA, 25 bp, Homo sapien
tggcgaagcacttctttccaaggat

SEQ ID NO: 1761783 - DNA, 25 bp, Homo sapien
ccttgctgaactttccggtcattct

SEQ ID NO: 1761784 - DNA, 25 bp, Homo sapien
caactgaatctcatgaaatgttttg

SEQ ID NO: 1761785 - DNA, 25 bp, Homo sapien
tcagctccaccctctaactgcagta

SEQ ID NO: 1761786 - DNA, 25 bp, Homo sapien
tgttgcaagtaagtctgacttaaga

SEQ ID NO: 1761787 - DNA, 25 bp, Homo sapien
tgcaagtaagtctgacttaagattc

SEQ ID NO: 1761788 - DNA, 25 bp, Homo sapien
caagtaagtctgacttaagattcat

SEQ ID NO: 1761789 - DNA, 25 bp, Homo sapien
cttctgttgcaagtaagtctgactt

SEQ ID NO: 1761790 - DNA, 25 bp, Homo sapien
tacagaaatgagcaagatagtctcc

SEQ ID NO: 1761791 - DNA, 25 bp, Homo sapien
tggagtgtggtagcgcaaacatgac

SEQ ID NO: 1761792 - DNA, 25 bp, Homo sapien
gagtattgaacaaagcgcttgctct

SEQ ID NO: 1761793 - DNA, 25 bp, Homo sapien
gcttgctctactagtgatgctctca

SEQ ID NO: 1761794 - DNA, 25 bp, Homo sapien
tgaacttcagatgtatcgtgctgtc

SEQ ID NO: 1761795 - DNA, 25 bp, Homo sapien
tttccattggattagcacagtcagg

SEQ ID NO: 1761796 - DNA, 25 bp, Homo sapien
tccattggattagcacagtcagggc

SEQ ID NO: 1761797 - DNA, 25 bp, Homo sapien
tttttccattggattagcacagtca

SEQ ID NO: 1761798 - DNA, 25 bp, Homo sapien
ccattggattagcacagtcagggca

SEQ ID NO: 1761799 - DNA, 25 bp, Homo sapien
gatgccatttgcagtccagagaaat

SEQ ID NO: 1761800 - DNA, 25 bp, Homo sapien
tctctctggtaagttggatgtagca

SEQ ID NO: 1761801 - DNA, 25 bp, Homo sapien
cacccatatggagtgccactaatca

SEQ ID NO: 1761802 - DNA, 25 bp, Homo sapien
gagctcaagtgttgcagatacacgc

SEQ ID NO: 1761803 - DNA, 25 bp, Homo sapien
cagaatctcttaggattttttactt

SEQ ID NO: 1761804 - DNA, 25 bp, Homo sapien
tctccagaatctcttaggatttttt

SEQ ID NO: 1761805 - DNA, 25 bp, Homo sapien
ccagaatctcttaggattttttact

SEQ ID NO: 1761806 - DNA, 25 bp, Homo sapien
tccagaatctcttaggattttttac

SEQ ID NO: 1761807 - DNA, 25 bp, Homo sapien
gagtctttggatgagtggcttagca

SEQ ID NO: 1761808 - DNA, 25 bp, Homo sapien
taaggctgaaatagcttgataaagc

SEQ ID NO: 1761809 - DNA, 25 bp, Homo sapien
aaatgtttaaatcagggtgtggata

SEQ ID NO: 1761810 - DNA, 25 bp, Homo sapien
aaaagtattttatggccggatgagg

SEQ ID NO: 1761811 - DNA, 25 bp, Homo sapien
tagtaaatgaagtagacatctgttt

SEQ ID NO: 1761812 - DNA, 25 bp, Homo sapien
gctcttttagaattgctagactagt

SEQ ID NO: 1761813 - DNA, 25 bp, Homo sapien
tagagatgcttagaaaataccagta

SEQ ID NO: 1761814 - DNA, 25 bp, Homo sapien
tgctagactagtaatctgtcttctg

SEQ ID NO: 1761815 - DNA, 25 bp, Homo sapien
aggaagatgccctgtccagcataga

SEQ ID NO: 1761816 - DNA, 25 bp, Homo sapien
cagcaggactggtggaaccagcttc

SEQ ID NO: 1761817 - DNA, 25 bp, Homo sapien
gataatgtactgagaatacctgtcc

SEQ ID NO: 1761818 - DNA, 25 bp, Homo sapien
tacggaagaggattgtaacggacca

SEQ ID NO: 1761819 - DNA, 25 bp, Homo sapien
gtgcaaagtgggacgcggcacctac

SEQ ID NO: 1761820 - DNA, 25 bp, Homo sapien
ttatgatttcaaggcgaagctggcg

SEQ ID NO: 1761821 - DNA, 25 bp, Homo sapien
ctacggtcacgtctacaaggcgagg

SEQ ID NO: 1761822 - DNA, 25 bp, Homo sapien
tagtgacggtcgttgtggaacttcc

SEQ ID NO: 1761823 - DNA, 25 bp, Homo sapien
tgtggccgccgaggagtcccttgct

SEQ ID NO: 1761824 - DNA, 25 bp, Homo sapien
cgggccagtgagttcgctaatgagc

SEQ ID NO: 1761825 - DNA, 25 bp, Homo sapien
agtcccttgctgaaggcggaccgcg

SEQ ID NO: 1761826 - DNA, 25 bp, Homo sapien
ctaatgagctcgaggaagccacggc

SEQ ID NO: 1761827 - DNA, 25 bp, Homo sapien
gagctgtatttcttacgccggcaaa

SEQ ID NO: 1761828 - DNA, 25 bp, Homo sapien
catccaatcaccaatcaagagcggg

SEQ ID NO: 1761829 - DNA, 25 bp, Homo sapien
cctatcaggaagaaccgagcacatc

SEQ ID NO: 1761830 - DNA, 25 bp, Homo sapien
ccaaagcctggttatgggaaccgca

SEQ ID NO: 1761831 - DNA, 25 bp, Homo sapien
tctcttgcctgatggatctggttag

SEQ ID NO: 1761832 - DNA, 25 bp, Homo sapien
cattgttgctgtataggactgctac

SEQ ID NO: 1761833 - DNA, 25 bp, Homo sapien
tccaattcggatgcctttcattcct

SEQ ID NO: 1761834 - DNA, 25 bp, Homo sapien
tagtttagtttaggcattgagttct

SEQ ID NO: 1761835 - DNA, 25 bp, Homo sapien
ggatggcccctcattcagtaacaga

SEQ ID NO: 1761836 - DNA, 25 bp, Homo sapien
ccattatgactagtgtctgtggaat

SEQ ID NO: 1761837 - DNA, 25 bp, Homo sapien
aatgctgttcccgtaaaatttatgt

SEQ ID NO: 1761838 - DNA, 25 bp, Homo sapien
taaaatgaggttatgctggactagt

SEQ ID NO: 1761839 - DNA, 25 bp, Homo sapien
catagggctttaacagcaggacaga

SEQ ID NO: 1761840 - DNA, 25 bp, Homo sapien
ccctgatctagattagactgtggta

SEQ ID NO: 1761841 - DNA, 25 bp, Homo sapien
taggattctatactcaggccaggca

SEQ ID NO: 1761842 - DNA, 25 bp, Homo sapien
tgaaaggcacccaacctagttgagg

SEQ ID NO: 1761843 - DNA, 25 bp, Homo sapien
gtatccattctgatatgtatcaaaa

SEQ ID NO: 1761844 - DNA, 25 bp, Homo sapien
tagtatccattctgatatgtatcaa

SEQ ID NO: 1761845 - DNA, 25 bp, Homo sapien
agtatccattctgatatgtatcaaa

SEQ ID NO: 1761846 - DNA, 25 bp, Homo sapien
aacatgggatgactcacaaatctgg

SEQ ID NO: 1761847 - DNA, 25 bp, Homo sapien
gatgactcacaaatctgggtgtcat

SEQ ID NO: 1761848 - DNA, 25 bp, Homo sapien
catccttgcgtagtgactatgctta

SEQ ID NO: 1761849 - DNA, 25 bp, Homo sapien
gtcatccttgcgtagtgactatgct

SEQ ID NO: 1761850 - DNA, 25 bp, Homo sapien
tgagtgtccataaactaatcccgtc

SEQ ID NO: 1761851 - DNA, 25 bp, Homo sapien
cttgttcatgagtgtccataaacta

SEQ ID NO: 1761852 - DNA, 25 bp, Homo sapien
cgttggcatcgaacaggtccacggt

SEQ ID NO: 1761853 - DNA, 25 bp, Homo sapien
ccgagtacttaaggccgatgtccac

SEQ ID NO: 1761854 - DNA, 25 bp, Homo sapien
ccgggtcccggagccgtcatgccca

SEQ ID NO: 1761855 - DNA, 25 bp, Homo sapien
tgtcaaccgggtcccggagccgtca

SEQ ID NO: 1761856 - DNA, 25 bp, Homo sapien
caaccgggtcccggagccgtcatgc

SEQ ID NO: 1761857 - DNA, 25 bp, Homo sapien
cgggtcccggagccgtcatgcccac

SEQ ID NO: 1761858 - DNA, 25 bp, Homo sapien
ctgcagcgacatggaggagttgtca

SEQ ID NO: 1761859 - DNA, 25 bp, Homo sapien
agttgtcacacttgtcggttcccag

SEQ ID NO: 1761860 - DNA, 25 bp, Homo sapien
gcagcgacatggaggagttgtcaca

SEQ ID NO: 1761861 - DNA, 25 bp, Homo sapien
ggagttgtcacacttgtcggttccc

SEQ ID NO: 1761862 - DNA, 25 bp, Homo sapien
tcccccgagcctgcgcgcccgaggg

SEQ ID NO: 1761863 - DNA, 25 bp, Homo sapien
ttctgggcagaacttggggtcatgt

SEQ ID NO: 1761864 - DNA, 25 bp, Homo sapien
gccttctgggcagaacttggggtca

SEQ ID NO: 1761865 - DNA, 25 bp, Homo sapien
ccccgagcctgcgcgcccgagggag

SEQ ID NO: 1761866 - DNA, 25 bp, Homo sapien
cagaaactcagacggggagatgata

SEQ ID NO: 1761867 - DNA, 25 bp, Homo sapien
aacccagaaactcagacggggagat

SEQ ID NO: 1761868 - DNA, 25 bp, Homo sapien
cccagaaactcagacggggagatga

SEQ ID NO: 1761869 - DNA, 25 bp, Homo sapien
aactcagacggggagatgatatggg

SEQ ID NO: 1761870 - DNA, 25 bp, Homo sapien
acaacgcagaattccacttccttct

SEQ ID NO: 1761871 - DNA, 25 bp, Homo sapien
aacaacgcagaattccacttccttc

SEQ ID NO: 1761872 - DNA, 25 bp, Homo sapien
agcactggcagctccgttgctccat

SEQ ID NO: 1761873 - DNA, 25 bp, Homo sapien
gaagcactggcagctccgttgctcc

SEQ ID NO: 1761874 - DNA, 25 bp, Homo sapien
cagcagcctccgggaagcactggca

SEQ ID NO: 1761875 - DNA, 25 bp, Homo sapien
agcagcctccgggaagcactggcag

SEQ ID NO: 1761876 - DNA, 25 bp, Homo sapien
cgaatgaaagcagtcctcggctggt

SEQ ID NO: 1761877 - DNA, 25 bp, Homo sapien
ggtttatacaatagccagaagcatt

SEQ ID NO: 1761878 - DNA, 25 bp, Homo sapien
ggctgatgtgcgaatgaaagcagtc

SEQ ID NO: 1761879 - DNA, 25 bp, Homo sapien
agtcctcggctggtttatacaatag

SEQ ID NO: 1761880 - DNA, 25 bp, Homo sapien
ccagctggggactagaaacctcgga

SEQ ID NO: 1761881 - DNA, 25 bp, Homo sapien
acctcggatcgaacgcagagtgggt

SEQ ID NO: 1761882 - DNA, 25 bp, Homo sapien
gggagagcgggaacggaatgaggaa

SEQ ID NO: 1761883 - DNA, 25 bp, Homo sapien
cgggaacggaatgaggaaaggctgt

SEQ ID NO: 1761884 - DNA, 25 bp, Homo sapien
tgctgccgcctgtcaatcactcgcg

SEQ ID NO: 1761885 - DNA, 25 bp, Homo sapien
tcgcggccgagtggcggctggctgg

SEQ ID NO: 1761886 - DNA, 25 bp, Homo sapien
ctgtcaatcactcgcggccgagtgg

SEQ ID NO: 1761887 - DNA, 25 bp, Homo sapien
gcctgtcaatcactcgcggccgagt

SEQ ID NO: 1761888 - DNA, 25 bp, Homo sapien
gtattccgctgctttcccgttagag

SEQ ID NO: 1761889 - DNA, 25 bp, Homo sapien
agagcgagcgctagctaatgtcgcc

SEQ ID NO: 1761890 - DNA, 25 bp, Homo sapien
aatgtcgccggccatactgtgtaag

SEQ ID NO: 1761891 - DNA, 25 bp, Homo sapien
tactgtgtaagcgagagcgctgcgt

SEQ ID NO: 1761892 - DNA, 25 bp, Homo sapien
attaaacctcttctcccgccgctgc

SEQ ID NO: 1761893 - DNA, 25 bp, Homo sapien
ttaaacctcttctcccgccgctgcc

SEQ ID NO: 1761894 - DNA, 25 bp, Homo sapien
taaacctcttctcccgccgctgccg

SEQ ID NO: 1761895 - DNA, 25 bp, Homo sapien
tgggatagtgcgaagatccccagat

SEQ ID NO: 1761896 - DNA, 25 bp, Homo sapien
cttgggatagtgcgaagatccccag

SEQ ID NO: 1761897 - DNA, 25 bp, Homo sapien
ggatagtgcgaagatccccagatcc

SEQ ID NO: 1761898 - DNA, 25 bp, Homo sapien
gatagtgcgaagatccccagatcct

SEQ ID NO: 1761899 - DNA, 25 bp, Homo sapien
actcgggctccacccgtggctggtg

SEQ ID NO: 1761900 - DNA, 25 bp, Homo sapien
gacttgcccccaactgaaagctgag

SEQ ID NO: 1761901 - DNA, 25 bp, Homo sapien
ccaggcccggatgtcagcgagcgcc

SEQ ID NO: 1761902 - DNA, 25 bp, Homo sapien
tccaaggccgccgaagcgaccccag

SEQ ID NO: 1761903 - DNA, 25 bp, Homo sapien
gcgcggcaaccacggcgggagaagc

SEQ ID NO: 1761904 - DNA, 25 bp, Homo sapien
ccccagggcaatgccaggcgcggca

SEQ ID NO: 1761905 - DNA, 25 bp, Homo sapien
agggcaatgccaggcgcggcaacca

SEQ ID NO: 1761906 - DNA, 25 bp, Homo sapien
ggcccgcgtggacatggccgctctc

SEQ ID NO: 1761907 - DNA, 25 bp, Homo sapien
ctgccggaggcaacccgcgcaggcg

SEQ ID NO: 1761908 - DNA, 25 bp, Homo sapien
tgccggaggcaacccgcgcaggcgc

SEQ ID NO: 1761909 - DNA, 25 bp, Homo sapien
gccggaggcaacccgcgcaggcgcc

SEQ ID NO: 1761910 - DNA, 25 bp, Homo sapien
ggtcagcccaagtatctctcgcgtg

SEQ ID NO: 1761911 - DNA, 25 bp, Homo sapien
cctaagcatccacgggatctctggg

SEQ ID NO: 1761912 - DNA, 25 bp, Homo sapien
gccgccaggaacaaggcctaagcat

SEQ ID NO: 1761913 - DNA, 25 bp, Homo sapien
taaaacgcctcttcggcgcggtcag

SEQ ID NO: 1761914 - DNA, 25 bp, Homo sapien
cccgaagcacacaattcttaggtgg

SEQ ID NO: 1761915 - DNA, 25 bp, Homo sapien
catgcctggcccgaagcacacaatt

SEQ ID NO: 1761916 - DNA, 25 bp, Homo sapien
agaaatatgtagattgagtatttcc

SEQ ID NO: 1761917 - DNA, 25 bp, Homo sapien
cacacaattcttaggtggttataaa

SEQ ID NO: 1761918 - DNA, 25 bp, Homo sapien
caagcccaggagaaatcagcgagga

SEQ ID NO: 1761919 - DNA, 25 bp, Homo sapien
tgctaaaggcctacaagaggattgg

SEQ ID NO: 1761920 - DNA, 25 bp, Homo sapien
ctttgcagaggagaactagagagcc

SEQ ID NO: 1761921 - DNA, 25 bp, Homo sapien
ctagagagcctttcttggaactatt

SEQ ID NO: 1761922 - DNA, 25 bp, Homo sapien
gatgtgctgtttagggtcagatcca

SEQ ID NO: 1761923 - DNA, 25 bp, Homo sapien
ttatttgccacccaatggccaggct

SEQ ID NO: 1761924 - DNA, 25 bp, Homo sapien
taatctctctgacaatgcctgactc

SEQ ID NO: 1761925 - DNA, 25 bp, Homo sapien
catgcaaaatggctaaggagtgttc

SEQ ID NO: 1761926 - DNA, 25 bp, Homo sapien
aggagactgaatgcgggagatggag

SEQ ID NO: 1761927 - DNA, 25 bp, Homo sapien
caggagactgaatgcgggagatgga

SEQ ID NO: 1761928 - DNA, 25 bp, Homo sapien
gagactgaatgcgggagatggagat

SEQ ID NO: 1761929 - DNA, 25 bp, Homo sapien
agactgaatgcgggagatggagatt

SEQ ID NO: 1761930 - DNA, 25 bp, Homo sapien
cttcaaaagtatgtcccactcagat

SEQ ID NO: 1761931 - DNA, 25 bp, Homo sapien
ccttcaaaagtatgtcccactcaga

SEQ ID NO: 1761932 - DNA, 25 bp, Homo sapien
tccttcaaaagtatgtcccactcag

SEQ ID NO: 1761933 - DNA, 25 bp, Homo sapien
atccttcaaaagtatgtcccactca

SEQ ID NO: 1761934 - DNA, 25 bp, Homo sapien
gatctcaaggaagcaagtaacacat

SEQ ID NO: 1761935 - DNA, 25 bp, Homo sapien
tccttttctagtatacaaaacatcc

SEQ ID NO: 1761936 - DNA, 25 bp, Homo sapien
tactactgagggtgcaatcaaccaa

SEQ ID NO: 1761937 - DNA, 25 bp, Homo sapien
ggcacatggtaagcattttgataaa

SEQ ID NO: 1761938 - DNA, 25 bp, Homo sapien
cagcaagagggtggtaccacatgtc

SEQ ID NO: 1761939 - DNA, 25 bp, Homo sapien
ctttcagcaagagggtggtaccaca

SEQ ID NO: 1761940 - DNA, 25 bp, Homo sapien
ttcagcaagagggtggtaccacatg

SEQ ID NO: 1761941 - DNA, 25 bp, Homo sapien
tcagcaagagggtggtaccacatgt

SEQ ID NO: 1761942 - DNA, 25 bp, Homo sapien
tattgtccacatatcaaaaactcgg

SEQ ID NO: 1761943 - DNA, 25 bp, Homo sapien
ccttaccacgtgtttgcatgcattg

SEQ ID NO: 1761944 - DNA, 25 bp, Homo sapien
taagcatcggttaagcacacattgc

SEQ ID NO: 1761945 - DNA, 25 bp, Homo sapien
tcgcatattacaggataagaacgct

SEQ ID NO: 1761946 - DNA, 25 bp, Homo sapien
tccggtgtgggtacccttggtgaga

SEQ ID NO: 1761947 - DNA, 25 bp, Homo sapien
caacactctgattagcctggtttgg

SEQ ID NO: 1761948 - DNA, 25 bp, Homo sapien
caggatcgactgacttggcgggtat

SEQ ID NO: 1761949 - DNA, 25 bp, Homo sapien
gctggagcagagcactaggcatttt

SEQ ID NO: 1761950 - DNA, 25 bp, Homo sapien
tctgtatgttaagaaccactgaggc

SEQ ID NO: 1761951 - DNA, 25 bp, Homo sapien
caacagtcagaattcatacgtccca

SEQ ID NO: 1761952 - DNA, 25 bp, Homo sapien
aacagtcagaattcatacgtcccat

SEQ ID NO: 1761953 - DNA, 25 bp, Homo sapien
ctgggaaatccagagtatataagta

SEQ ID NO: 1761954 - DNA, 25 bp, Homo sapien
tgggaaatccagagtatataagtac

SEQ ID NO: 1761955 - DNA, 25 bp, Homo sapien
gctcactcatcagaatttccaaggt

SEQ ID NO: 1761956 - DNA, 25 bp, Homo sapien
gaagagtccagcaacaattattact

SEQ ID NO: 1761957 - DNA, 25 bp, Homo sapien
attgagtccaaaatttagtcccagg

SEQ ID NO: 1761958 - DNA, 25 bp, Homo sapien
gacgaaatactgtgtacgacaaacc

SEQ ID NO: 1761959 - DNA, 25 bp, Homo sapien
aatttagtccccacgcagaagagtc

SEQ ID NO: 1761960 - DNA, 25 bp, Homo sapien
aacctggtatcaggtcacgaattcc

SEQ ID NO: 1761961 - DNA, 25 bp, Homo sapien
ttgaagacttctacaactttcctga

SEQ ID NO: 1761962 - DNA, 25 bp, Homo sapien
cataggaggtctgacttaagtttgt

SEQ ID NO: 1761963 - DNA, 25 bp, Homo sapien
tcataggaggtctgacttaagtttg

SEQ ID NO: 1761964 - DNA, 25 bp, Homo sapien
agcaagcactgtgcgacatttagaa

SEQ ID NO: 1761965 - DNA, 25 bp, Homo sapien
atcttctggggcgaagcaagcactg

SEQ ID NO: 1761966 - DNA, 25 bp, Homo sapien
cgaagcaagcactgtgcgacattta

SEQ ID NO: 1761967 - DNA, 25 bp, Homo sapien
tcttctggggcgaagcaagcactgt

SEQ ID NO: 1761968 - DNA, 25 bp, Homo sapien
accttctacatgtgttctctttttg

SEQ ID NO: 1761969 - DNA, 25 bp, Homo sapien
cattcatgcaagatatctaactcct

SEQ ID NO: 1761970 - DNA, 25 bp, Homo sapien
gcattcatgcaagatatctaactcc

SEQ ID NO: 1761971 - DNA, 25 bp, Homo sapien
gagagcattcatgcaagatatctaa

SEQ ID NO: 1761972 - DNA, 25 bp, Homo sapien
tcatgcaagatatctaactccttga

SEQ ID NO: 1761973 - DNA, 25 bp, Homo sapien
atgcagggtccaataatgttaaaat

SEQ ID NO: 1761974 - DNA, 25 bp, Homo sapien
aaatcaaaggactataaatgcaggg

SEQ ID NO: 1761975 - DNA, 25 bp, Homo sapien
aaatgagtaactggaatcattttct

SEQ ID NO: 1761976 - DNA, 25 bp, Homo sapien
tgcaaaatgagtaactggaatcatt

SEQ ID NO: 1761977 - DNA, 25 bp, Homo sapien
tcagccagtacaccctaatctcaat

SEQ ID NO: 1761978 - DNA, 25 bp, Homo sapien
tccctgctaaccaactattttccaa

SEQ ID NO: 1761979 - DNA, 25 bp, Homo sapien
gagcacattacaataaaagagaggc

SEQ ID NO: 1761980 - DNA, 25 bp, Homo sapien
taatctcaatctacaactctgggtc

SEQ ID NO: 1761981 - DNA, 25 bp, Homo sapien
gatgaagtcggaacactcacatgca

SEQ ID NO: 1761982 - DNA, 25 bp, Homo sapien
gatttaagtccaacaccagtgaaag

SEQ ID NO: 1761983 - DNA, 25 bp, Homo sapien
gaacaaagtccaccttaagcattgg

SEQ ID NO: 1761984 - DNA, 25 bp, Homo sapien
taagcattggtcctcaaaacagagc

SEQ ID NO: 1761985 - DNA, 25 bp, Homo sapien
tgagattgcaaagcctgaagcccgg

SEQ ID NO: 1761986 - DNA, 25 bp, Homo sapien
ttttctaacggaagcatattctgag

SEQ ID NO: 1761987 - DNA, 25 bp, Homo sapien
cacaattgtccatccaggagaataa

SEQ ID NO: 1761988 - DNA, 25 bp, Homo sapien
tggtgactgcttactaatgaacccc

SEQ ID NO: 1761989 - DNA, 25 bp, Homo sapien
ttggagtaagaatttggacacttga

SEQ ID NO: 1761990 - DNA, 25 bp, Homo sapien
ggagtaagaatttggacacttgacc

SEQ ID NO: 1761991 - DNA, 25 bp, Homo sapien
gtaagaatttggacacttgaccagg

SEQ ID NO: 1761992 - DNA, 25 bp, Homo sapien
gagtaagaatttggacacttgacca

SEQ ID NO: 1761993 - DNA, 25 bp, Homo sapien
cttttgtcctggtaaggtgtgggca

SEQ ID NO: 1761994 - DNA, 25 bp, Homo sapien
taattgcctgggtagagtaagctcc

SEQ ID NO: 1761995 - DNA, 25 bp, Homo sapien
gcaataaggactgttgaacctcaac

SEQ ID NO: 1761996 - DNA, 25 bp, Homo sapien
catgcccagaagtcacaatatttgt

SEQ ID NO: 1761997 - DNA, 25 bp, Homo sapien
ggaaacttctgctcaaaacactata

SEQ ID NO: 1761998 - DNA, 25 bp, Homo sapien
atcaagagtcaagacacacaatggg

SEQ ID NO: 1761999 - DNA, 25 bp, Homo sapien
ggaggtaggcagatttatttagaaa

SEQ ID NO: 1762000 - DNA, 25 bp, Homo sapien
agactccagtggaaacttctgctca

SEQ ID NO: 1762001 - DNA, 25 bp, Homo sapien
cagactgcagctgcgtgtcgatctc

SEQ ID NO: 1762002 - DNA, 25 bp, Homo sapien
gatctcctcagggcttgtatattgc

SEQ ID NO: 1762003 - DNA, 25 bp, Homo sapien
gcttctcagactgcagctgcgtgtc

SEQ ID NO: 1762004 - DNA, 25 bp, Homo sapien
ggcttgtatattgcctcgcccagcc

SEQ ID NO: 1762005 - DNA, 25 bp, Homo sapien
tcgatgtcaatgagcccttcaacac

SEQ ID NO: 1762006 - DNA, 25 bp, Homo sapien
gattctcgatgtcaatgagcccttc

SEQ ID NO: 1762007 - DNA, 25 bp, Homo sapien
acccggttgggattctcgatgtcaa

SEQ ID NO: 1762008 - DNA, 25 bp, Homo sapien
gttgggattctcgatgtcaatgagc

SEQ ID NO: 1762009 - DNA, 25 bp, Homo sapien
cattttcatgtaacgctcttttgcc

SEQ ID NO: 1762010 - DNA, 25 bp, Homo sapien
gcattttcatgtaacgctcttttgc

SEQ ID NO: 1762011 - DNA, 25 bp, Homo sapien
attttcatgtaacgctcttttgcct

SEQ ID NO: 1762012 - DNA, 25 bp, Homo sapien
tgcattttcatgtaacgctcttttg

SEQ ID NO: 1762013 - DNA, 25 bp, Homo sapien
cattcgttttcctgacaatgtggca

SEQ ID NO: 1762014 - DNA, 25 bp, Homo sapien
cactgagagtgacacttaactccat

SEQ ID NO: 1762015 - DNA, 25 bp, Homo sapien
catagaatttgttgtccacttccat

SEQ ID NO: 1762016 - DNA, 25 bp, Homo sapien
gtactgcatgactcctgccactgag

SEQ ID NO: 1762017 - DNA, 25 bp, Homo sapien
tccatctgtaggtgtgcatagaatt

SEQ ID NO: 1762018 - DNA, 25 bp, Homo sapien
aaaggtggccgatcgatggccttga

SEQ ID NO: 1762019 - DNA, 25 bp, Homo sapien
tcagtggaagggtaatttggcagct

SEQ ID NO: 1762020 - DNA, 25 bp, Homo sapien
ggcagcttgactcaggaaacttttc

SEQ ID NO: 1762021 - DNA, 25 bp, Homo sapien
gataaccaaaggtggccgatcgatg

SEQ ID NO: 1762022 - DNA, 25 bp, Homo sapien
ttgagtacgggcttcagctccgagg

SEQ ID NO: 1762023 - DNA, 25 bp, Homo sapien
ctcgtttctcggtgcctcagagcag

SEQ ID NO: 1762024 - DNA, 25 bp, Homo sapien
agcttattgggttcctgccgctccg

SEQ ID NO: 1762025 - DNA, 25 bp, Homo sapien
gaactcgagatgtcggcttccggcg

SEQ ID NO: 1762026 - DNA, 25 bp, Homo sapien
ccgcggcgcctcgccttctagtcac

SEQ ID NO: 1762027 - DNA, 25 bp, Homo sapien
tctccgtcctctggactccgctcgt

SEQ ID NO: 1762028 - DNA, 25 bp, Homo sapien
ccatcccaagtacggggtgacgatt

SEQ ID NO: 1762029 - DNA, 25 bp, Homo sapien
gtgcaggcttttggcgtagcgctta

SEQ ID NO: 1762030 - DNA, 25 bp, Homo sapien
tagggctaaggtcccaagctgcccg

SEQ ID NO: 1762031 - DNA, 25 bp, Homo sapien
accgccactgcggtgcaggcttttg

SEQ ID NO: 1762032 - DNA, 25 bp, Homo sapien
ccacatttgtgaaaaccggaccctg

SEQ ID NO: 1762033 - DNA, 25 bp, Homo sapien
cacatttgtgaaaaccggaccctgt

SEQ ID NO: 1762034 - DNA, 25 bp, Homo sapien
gaaagaggggttaacatgctagcac

SEQ ID NO: 1762035 - DNA, 25 bp, Homo sapien
atgctagcacgcgagcggccaagag

SEQ ID NO: 1762036 - DNA, 25 bp, Homo sapien
aagtctgaatcaataattcctgata

SEQ ID NO: 1762037 - DNA, 25 bp, Homo sapien
caagcaaagttagccattttctcct

SEQ ID NO: 1762038 - DNA, 25 bp, Homo sapien
catagtccccgctgtacttctacat

SEQ ID NO: 1762039 - DNA, 25 bp, Homo sapien
tagagttcactactttgtaaggtga

SEQ ID NO: 1762040 - DNA, 25 bp, Homo sapien
tacttgcggataggtatttcaccat

SEQ ID NO: 1762041 - DNA, 25 bp, Homo sapien
aaagacacagctgtccacttgcaga

SEQ ID NO: 1762042 - DNA, 25 bp, Homo sapien
gaatgggcctctcagtgtcaatgcc

SEQ ID NO: 1762043 - DNA, 25 bp, Homo sapien
cacttgcagaatgggcctctcagtg

SEQ ID NO: 1762044 - DNA, 25 bp, Homo sapien
cttcatactccccagcaaagacaca

SEQ ID NO: 1762045 - DNA, 25 bp, Homo sapien
agcccatatcagaaagagttccatc

SEQ ID NO: 1762046 - DNA, 25 bp, Homo sapien
agaagagctaccatctctgaaaagc

SEQ ID NO: 1762047 - DNA, 25 bp, Homo sapien
acaaaggcaaattgttgagaagagc

SEQ ID NO: 1762048 - DNA, 25 bp, Homo sapien
gttccatctatctgacatcctccta

SEQ ID NO: 1762049 - DNA, 25 bp, Homo sapien
tcttcaaatataacacaggtcccta

SEQ ID NO: 1762050 - DNA, 25 bp, Homo sapien
tttcttcaaatataacacaggtccc

SEQ ID NO: 1762051 - DNA, 25 bp, Homo sapien
cttcaaatataacacaggtccctag

SEQ ID NO: 1762052 - DNA, 25 bp, Homo sapien
tcaaatataacacaggtccctagag

SEQ ID NO: 1762053 - DNA, 25 bp, Homo sapien
gagagttcttgtcatgctgagcttc

SEQ ID NO: 1762054 - DNA, 25 bp, Homo sapien
tctctgtcaggagagttcttgtcat

SEQ ID NO: 1762055 - DNA, 25 bp, Homo sapien
tgctgagcttcttcattgtatggca

SEQ ID NO: 1762056 - DNA, 25 bp, Homo sapien
tgtcaggagagttcttgtcatgctg

SEQ ID NO: 1762057 - DNA, 25 bp, Homo sapien
acatcttacacatgaatgtaaaaac

SEQ ID NO: 1762058 - DNA, 25 bp, Homo sapien
cttacacatgaatgtaaaaacataa

SEQ ID NO: 1762059 - DNA, 25 bp, Homo sapien
gacaggtaatatgctgacatcataa

SEQ ID NO: 1762060 - DNA, 25 bp, Homo sapien
catcttacacatgaatgtaaaaaca

SEQ ID NO: 1762061 - DNA, 25 bp, Homo sapien
cattatcctttatttgcagccattc

SEQ ID NO: 1762062 - DNA, 25 bp, Homo sapien
tagaaagttacaaatcatgttgggt

SEQ ID NO: 1762063 - DNA, 25 bp, Homo sapien
gttgggtcgataggagaaatcatta

SEQ ID NO: 1762064 - DNA, 25 bp, Homo sapien
ttacaaatcatgttgggtcgatagg

SEQ ID NO: 1762065 - DNA, 25 bp, Homo sapien
cctcttccaattccaaagatttatc

SEQ ID NO: 1762066 - DNA, 25 bp, Homo sapien
tatcaataagaggaccagaatcttc

SEQ ID NO: 1762067 - DNA, 25 bp, Homo sapien
gaaggtatatcaataagaggaccag

SEQ ID NO: 1762068 - DNA, 25 bp, Homo sapien
tctcagaaggtatatcaataagagg

SEQ ID NO: 1762069 - DNA, 25 bp, Homo sapien
agactgaaagctacacagcaattat

SEQ ID NO: 1762070 - DNA, 25 bp, Homo sapien
gactgaaagctacacagcaattatt

SEQ ID NO: 1762071 - DNA, 25 bp, Homo sapien
tttagcccaggtaagacccgcgtca

SEQ ID NO: 1762072 - DNA, 25 bp, Homo sapien
ttcaaaatgggagagggacttcacc

SEQ ID NO: 1762073 - DNA, 25 bp, Homo sapien
tagaaatgaccctcagctaacagac

SEQ ID NO: 1762074 - DNA, 25 bp, Homo sapien
aagtgggcccagagtaatcaaatag

SEQ ID NO: 1762075 - DNA, 25 bp, Homo sapien
ggccagaattaatgttatacacctt

SEQ ID NO: 1762076 - DNA, 25 bp, Homo sapien
cagaattaatgttatacacctttgg

SEQ ID NO: 1762077 - DNA, 25 bp, Homo sapien
gccagaattaatgttatacaccttt

SEQ ID NO: 1762078 - DNA, 25 bp, Homo sapien
gaattaatgttatacacctttggct

SEQ ID NO: 1762079 - DNA, 25 bp, Homo sapien
ttaaatgacctagcaaaagagactt

SEQ ID NO: 1762080 - DNA, 25 bp, Homo sapien
taggttaaactataggaaattgctg

SEQ ID NO: 1762081 - DNA, 25 bp, Homo sapien
gatagagccagaacttgatttaaaa

SEQ ID NO: 1762082 - DNA, 25 bp, Homo sapien
cttcatcctagaacattagctcttt

SEQ ID NO: 1762083 - DNA, 25 bp, Homo sapien
cacagctcaacaaagtatcaaagta

SEQ ID NO: 1762084 - DNA, 25 bp, Homo sapien
aaaggtgtatatttactttgtactg

SEQ ID NO: 1762085 - DNA, 25 bp, Homo sapien
cagtaactaccagctacaaattgac

SEQ ID NO: 1762086 - DNA, 25 bp, Homo sapien
ttgaacccatataccaactatcagt

SEQ ID NO: 1762087 - DNA, 25 bp, Homo sapien
caaattgacattaacaaaggtgtat

SEQ ID NO: 1762088 - DNA, 25 bp, Homo sapien
cgcccagccttgaactaagaatttg

SEQ ID NO: 1762089 - DNA, 25 bp, Homo sapien
taagaatttgacctcctgaactgta

SEQ ID NO: 1762090 - DNA, 25 bp, Homo sapien
tcccaaatgggagcatgaaataaga

SEQ ID NO: 1762091 - DNA, 25 bp, Homo sapien
taatgatacacaagtatggccgggc

SEQ ID NO: 1762092 - DNA, 25 bp, Homo sapien
atgatctcagctcactgcaacctct

SEQ ID NO: 1762093 - DNA, 25 bp, Homo sapien
gcatgatctcagctcactgcaacct

SEQ ID NO: 1762094 - DNA, 25 bp, Homo sapien
ttgcttaggctggagtgtgcagtgg

SEQ ID NO: 1762095 - DNA, 25 bp, Homo sapien
catgatctcagctcactgcaacctc

SEQ ID NO: 1762096 - DNA, 25 bp, Homo sapien
tatcagaatacaaataggagtacac

SEQ ID NO: 1762097 - DNA, 25 bp, Homo sapien
taatttgtgaatagcatggtcccta

SEQ ID NO: 1762098 - DNA, 25 bp, Homo sapien
atggtccctatcattctccccttaa

SEQ ID NO: 1762099 - DNA, 25 bp, Homo sapien
tacatgtaatttgaactggcctctc

SEQ ID NO: 1762100 - DNA, 25 bp, Homo sapien
tggaatcgcgccctgttgtcttggt

SEQ ID NO: 1762101 - DNA, 25 bp, Homo sapien
tctagaggcgctggcggccatcttg

SEQ ID NO: 1762102 - DNA, 25 bp, Homo sapien
gacggcctcgtagagggcgtctaga

SEQ ID NO: 1762103 - DNA, 25 bp, Homo sapien
gaagctgcgcgtaacgccacttccg

SEQ ID NO: 1762104 - DNA, 25 bp, Homo sapien
accgctacctgcaactcttaaccag

SEQ ID NO: 1762105 - DNA, 25 bp, Homo sapien
ctaccgctacctgcaactcttaacc

SEQ ID NO: 1762106 - DNA, 25 bp, Homo sapien
ctacctgcaactcttaaccaggggg

SEQ ID NO: 1762107 - DNA, 25 bp, Homo sapien
cgctacctgcaactcttaaccaggg

SEQ ID NO: 1762108 - DNA, 25 bp, Homo sapien
tcactcagatctgtcggattccgag

SEQ ID NO: 1762109 - DNA, 25 bp, Homo sapien
cacaaagctttaagtggacgcgcca

SEQ ID NO: 1762110 - DNA, 25 bp, Homo sapien
tcaactggctaggataaaagcggcc

SEQ ID NO: 1762111 - DNA, 25 bp, Homo sapien
ggacgcgccagactgtcactcagat

SEQ ID NO: 1762112 - DNA, 25 bp, Homo sapien
tttacagaataagctaagatttaga

SEQ ID NO: 1762113 - DNA, 25 bp, Homo sapien
atgaagtatgactatggtgagcgct

SEQ ID NO: 1762114 - DNA, 25 bp, Homo sapien
gaagtatgactatggtgagcgctat

SEQ ID NO: 1762115 - DNA, 25 bp, Homo sapien
gtatgactatggtgagcgctatttt

SEQ ID NO: 1762116 - DNA, 25 bp, Homo sapien
ctcttggctcttttcgttttgggct

SEQ ID NO: 1762117 - DNA, 25 bp, Homo sapien
ttcattgagtttcggttctctcttc

SEQ ID NO: 1762118 - DNA, 25 bp, Homo sapien
tctctcttctcaaggaatctcttgg

SEQ ID NO: 1762119 - DNA, 25 bp, Homo sapien
ttttcattgagtttcggttctctct

SEQ ID NO: 1762120 - DNA, 25 bp, Homo sapien
tctttaagtacttttgtcactgttg

SEQ ID NO: 1762121 - DNA, 25 bp, Homo sapien
cacatctttaagtacttttgtcact

SEQ ID NO: 1762122 - DNA, 25 bp, Homo sapien
ttaagtacttttgtcactgttgcat

SEQ ID NO: 1762123 - DNA, 25 bp, Homo sapien
catctttaagtacttttgtcactgt

SEQ ID NO: 1762124 - DNA, 25 bp, Homo sapien
ttatagctttcaaaacaaaacacat

SEQ ID NO: 1762125 - DNA, 25 bp, Homo sapien
tatagctttcaaaacaaaacacatt

SEQ ID NO: 1762126 - DNA, 25 bp, Homo sapien
tgtaaaacaaaatttatagctttca

SEQ ID NO: 1762127 - DNA, 25 bp, Homo sapien
agtacaccgtatggttttttcagtg

SEQ ID NO: 1762128 - DNA, 25 bp, Homo sapien
tacaccgtatggttttttcagtgca

SEQ ID NO: 1762129 - DNA, 25 bp, Homo sapien
gtacaccgtatggttttttcagtgc

SEQ ID NO: 1762130 - DNA, 25 bp, Homo sapien
cagtgatgtctgatcctcaaaaggt

SEQ ID NO: 1762131 - DNA, 25 bp, Homo sapien
agtgatgtctgatcctcaaaaggtc

SEQ ID NO: 1762132 - DNA, 25 bp, Homo sapien
tgatgtctgatcctcaaaaggtctt

SEQ ID NO: 1762133 - DNA, 25 bp, Homo sapien
gtgatgtctgatcctcaaaaggtct

SEQ ID NO: 1762134 - DNA, 25 bp, Homo sapien
gacgccgaggcgagttgattacttg

SEQ ID NO: 1762135 - DNA, 25 bp, Homo sapien
ggacgccgaggcgagttgattactt

SEQ ID NO: 1762136 - DNA, 25 bp, Homo sapien
cgaggcgagttgattacttgagatc

SEQ ID NO: 1762137 - DNA, 25 bp, Homo sapien
cgccgaggcgagttgattacttgag

SEQ ID NO: 1762138 - DNA, 25 bp, Homo sapien
tactagattatttggccgcttctta

SEQ ID NO: 1762139 - DNA, 25 bp, Homo sapien
actagattatttggccgcttcttat

SEQ ID NO: 1762140 - DNA, 25 bp, Homo sapien
attactagattatttggccgcttct

SEQ ID NO: 1762141 - DNA, 25 bp, Homo sapien
ctattactagattatttggccgctt

SEQ ID NO: 1762142 - DNA, 25 bp, Homo sapien
tctcaatacctaattcaatcatatc

SEQ ID NO: 1762143 - DNA, 25 bp, Homo sapien
tacctaattcaatcatatccagcac

SEQ ID NO: 1762144 - DNA, 25 bp, Homo sapien
ttaatgtcttttagagagacaaaat

SEQ ID NO: 1762145 - DNA, 25 bp, Homo sapien
caatacctaattcaatcatatccag

SEQ ID NO: 1762146 - DNA, 25 bp, Homo sapien
gcatgggttttgttccctcaggaca

SEQ ID NO: 1762147 - DNA, 25 bp, Homo sapien
catgggttttgttccctcaggacat

SEQ ID NO: 1762148 - DNA, 25 bp, Homo sapien
atgggttttgttccctcaggacatt

SEQ ID NO: 1762149 - DNA, 25 bp, Homo sapien
agcatgggttttgttccctcaggac

SEQ ID NO: 1762150 - DNA, 25 bp, Homo sapien
ttcagtgcagtgaagtgcagaacat

SEQ ID NO: 1762151 - DNA, 25 bp, Homo sapien
tcagtgcagtgaagtgcagaacata

SEQ ID NO: 1762152 - DNA, 25 bp, Homo sapien
cattcagtgcagtgaagtgcagaac

SEQ ID NO: 1762153 - DNA, 25 bp, Homo sapien
attcagtgcagtgaagtgcagaaca

SEQ ID NO: 1762154 - DNA, 25 bp, Homo sapien
tcagcgacagtgcagcatcagatgc

SEQ ID NO: 1762155 - DNA, 25 bp, Homo sapien
acagtgcagcatcagatgctctggg

SEQ ID NO: 1762156 - DNA, 25 bp, Homo sapien
tctccaagaaaccttttggccagat

SEQ ID NO: 1762157 - DNA, 25 bp, Homo sapien
ttttggccagataccaattctaagt

SEQ ID NO: 1762158 - DNA, 25 bp, Homo sapien
aattcaatccgtggtgttctgcaac

SEQ ID NO: 1762159 - DNA, 25 bp, Homo sapien
tggtgttctgcaaccagatttcttc

SEQ ID NO: 1762160 - DNA, 25 bp, Homo sapien
tcaatccgtggtgttctgcaaccag

SEQ ID NO: 1762161 - DNA, 25 bp, Homo sapien
cttccaattcaatccgtggtgttct

SEQ ID NO: 1762162 - DNA, 25 bp, Homo sapien
tcttgcttctgcatatgaatccttc

SEQ ID NO: 1762163 - DNA, 25 bp, Homo sapien
cttgcttctgcatatgaatccttcc

SEQ ID NO: 1762164 - DNA, 25 bp, Homo sapien
tctcgtggtcttctgttatcctttc

SEQ ID NO: 1762165 - DNA, 25 bp, Homo sapien
tttttctcgtggtcttctgttatcc

SEQ ID NO: 1762166 - DNA, 25 bp, Homo sapien
ctcgtggtcttctgttatcctttct

SEQ ID NO: 1762167 - DNA, 25 bp, Homo sapien
tttctcgtggtcttctgttatcctt

SEQ ID NO: 1762168 - DNA, 25 bp, Homo sapien
tgtttacacagctcctgcgggtccg

SEQ ID NO: 1762169 - DNA, 25 bp, Homo sapien
gagagtaacagctatccggagagga

SEQ ID NO: 1762170 - DNA, 25 bp, Homo sapien
taaaggcatgtatacacaggcacgg

SEQ ID NO: 1762171 - DNA, 25 bp, Homo sapien
aacacaggtttcgtctcagagaagc

SEQ ID NO: 1762172 - DNA, 25 bp, Homo sapien
gatcttagcaatgggtttagtagtt

SEQ ID NO: 1762173 - DNA, 25 bp, Homo sapien
tgttcggatcttagcaatgggttta

SEQ ID NO: 1762174 - DNA, 25 bp, Homo sapien
tcctttgttgttcggatcttagcaa

SEQ ID NO: 1762175 - DNA, 25 bp, Homo sapien
tgttgttcggatcttagcaatgggt

SEQ ID NO: 1762176 - DNA, 25 bp, Homo sapien
ccaaggtcacccttaatggaggaag

SEQ ID NO: 1762177 - DNA, 25 bp, Homo sapien
agattctgtctaacctttccccaag

SEQ ID NO: 1762178 - DNA, 25 bp, Homo sapien
tctcctgcccgtatggtgatgctgc

SEQ ID NO: 1762179 - DNA, 25 bp, Homo sapien
gcttttgagctctcatgccacttga

SEQ ID NO: 1762180 - DNA, 25 bp, Homo sapien
gtgtctgagtccgatcacagatcat

SEQ ID NO: 1762181 - DNA, 25 bp, Homo sapien
tgtgtctgagtccgatcacagatca

SEQ ID NO: 1762182 - DNA, 25 bp, Homo sapien
gctgtgtctgagtccgatcacagat

SEQ ID NO: 1762183 - DNA, 25 bp, Homo sapien
gtgctgtgtctgagtccgatcacag

SEQ ID NO: 1762184 - DNA, 25 bp, Homo sapien
gaagattcaggagtcttggtgtctt

SEQ ID NO: 1762185 - DNA, 25 bp, Homo sapien
gagatgatgtcgtctgagaagattc

SEQ ID NO: 1762186 - DNA, 25 bp, Homo sapien
gggagatgatgtcgtctgagaagat

SEQ ID NO: 1762187 - DNA, 25 bp, Homo sapien
aagattcaggagtcttggtgtcttc

SEQ ID NO: 1762188 - DNA, 25 bp, Homo sapien
ttgagatgacattccgataaggcag

SEQ ID NO: 1762189 - DNA, 25 bp, Homo sapien
gatgacattccgataaggcagtggg

SEQ ID NO: 1762190 - DNA, 25 bp, Homo sapien
tgacattccgataaggcagtgggag

SEQ ID NO: 1762191 - DNA, 25 bp, Homo sapien
cctatttgagatgacattccgataa

SEQ ID NO: 1762192 - DNA, 25 bp, Homo sapien
cctcaggcgccggagaagcgcgagg

SEQ ID NO: 1762193 - DNA, 25 bp, Homo sapien
ggacgcgagttaccagcgggctccc

SEQ ID NO: 1762194 - DNA, 25 bp, Homo sapien
tcctggcgggctaacgaggccgagg

SEQ ID NO: 1762195 - DNA, 25 bp, Homo sapien
gggatcgacactgaagcctctaggt

SEQ ID NO: 1762196 - DNA, 25 bp, Homo sapien
cgcctcgctcgtgccccgcgcggag

SEQ ID NO: 1762197 - DNA, 25 bp, Homo sapien
ggctgcgcctcgctcgtgccccgcg

SEQ ID NO: 1762198 - DNA, 25 bp, Homo sapien
gcggctgcgcctcgctcgtgccccg

SEQ ID NO: 1762199 - DNA, 25 bp, Homo sapien
tgcgcctcgctcgtgccccgcgcgg

SEQ ID NO: 1762200 - DNA, 25 bp, Homo sapien
tccaccttctcgacagccgcctcgg

SEQ ID NO: 1762201 - DNA, 25 bp, Homo sapien
ctccaccttctcgacagccgcctcg

SEQ ID NO: 1762202 - DNA, 25 bp, Homo sapien
ccaccttctcgacagccgcctcggg

SEQ ID NO: 1762203 - DNA, 25 bp, Homo sapien
accagccagccccagccgccctcgg

SEQ ID NO: 1762204 - DNA, 25 bp, Homo sapien
caccagccagccccagccgccctcg

SEQ ID NO: 1762205 - DNA, 25 bp, Homo sapien
agccagccccagccgccctcggggg

SEQ ID NO: 1762206 - DNA, 25 bp, Homo sapien
ccagccagccccagccgccctcggg

SEQ ID NO: 1762207 - DNA, 25 bp, Homo sapien
cagcatggacacgaagagcaccccg

SEQ ID NO: 1762208 - DNA, 25 bp, Homo sapien
aagcgttctggatgccgaacaccga

SEQ ID NO: 1762209 - DNA, 25 bp, Homo sapien
tttggagccgaaggtttccagcatg

SEQ ID NO: 1762210 - DNA, 25 bp, Homo sapien
catcttgtcatcgtctttggagccg

SEQ ID NO: 1762211 - DNA, 25 bp, Homo sapien
ggacgatctcggcaagtaagttctg

SEQ ID NO: 1762212 - DNA, 25 bp, Homo sapien
tgtggactgttagcgtctgctctgc

SEQ ID NO: 1762213 - DNA, 25 bp, Homo sapien
ttccatataaagacgggcaccccga

SEQ ID NO: 1762214 - DNA, 25 bp, Homo sapien
gtaagttctgcgacctgcttgcaaa

SEQ ID NO: 1762215 - DNA, 25 bp, Homo sapien
tctgtcttatgtggtgggtctgcgc

SEQ ID NO: 1762216 - DNA, 25 bp, Homo sapien
tctgatgacttgagtaggagacact

SEQ ID NO: 1762217 - DNA, 25 bp, Homo sapien
ggtctgcgcagttcccaggtgtgct

SEQ ID NO: 1762218 - DNA, 25 bp, Homo sapien
tctagctaggcggtgataactctgg

SEQ ID NO: 1762219 - DNA, 25 bp, Homo sapien
aataaggcaagccatttcttcatcg

SEQ ID NO: 1762220 - DNA, 25 bp, Homo sapien
ggcaagccatttcttcatcgacttt

SEQ ID NO: 1762221 - DNA, 25 bp, Homo sapien
cattgctttggtccacattcagtat

SEQ ID NO: 1762222 - DNA, 25 bp, Homo sapien
taatctgtatttcatacttatgccc

SEQ ID NO: 1762223 - DNA, 25 bp, Homo sapien
gagtatgacattgtcttctgccact

SEQ ID NO: 1762224 - DNA, 25 bp, Homo sapien
cttggatgtgtgcaacaaaattctg

SEQ ID NO: 1762225 - DNA, 25 bp, Homo sapien
gaaaggcaaactacacttggatgtg

SEQ ID NO: 1762226 - DNA, 25 bp, Homo sapien
gagacttttatgtttatcaagaggg

SEQ ID NO: 1762227 - DNA, 25 bp, Homo sapien
attatatccacaacataactaaaag

SEQ ID NO: 1762228 - DNA, 25 bp, Homo sapien
ttatatccacaacataactaaaagt

SEQ ID NO: 1762229 - DNA, 25 bp, Homo sapien
tgaactgtagaccaatgcacctttc

SEQ ID NO: 1762230 - DNA, 25 bp, Homo sapien
cctttccgtaggtgcaatggacttt

SEQ ID NO: 1762231 - DNA, 25 bp, Homo sapien
gctgcaatttaatctttagcaaaaa

SEQ ID NO: 1762232 - DNA, 25 bp, Homo sapien
caaaaaataggtactagctgaactg

SEQ ID NO: 1762233 - DNA, 25 bp, Homo sapien
atgtcttgctgacccttaacgctcc

SEQ ID NO: 1762234 - DNA, 25 bp, Homo sapien
tcttgctgacccttaacgctccaca

SEQ ID NO: 1762235 - DNA, 25 bp, Homo sapien
ttgatgtcttgctgacccttaacgc

SEQ ID NO: 1762236 - DNA, 25 bp, Homo sapien
cttgctgacccttaacgctccacat

SEQ ID NO: 1762237 - DNA, 25 bp, Homo sapien
tcagtcacaacagagcaattcagga

SEQ ID NO: 1762238 - DNA, 25 bp, Homo sapien
cttcagctgggcttcagtcacaaca

SEQ ID NO: 1762239 - DNA, 25 bp, Homo sapien
ggcttcagtcacaacagagcaattc

SEQ ID NO: 1762240 - DNA, 25 bp, Homo sapien
caacagagcaattcaggacctgagt

SEQ ID NO: 1762241 - DNA, 25 bp, Homo sapien
caccatgaccagatgataaaatttt

SEQ ID NO: 1762242 - DNA, 25 bp, Homo sapien
ggagttacagtcatgtggtacatcc

SEQ ID NO: 1762243 - DNA, 25 bp, Homo sapien
ttttggagttacagtcatgtggtac

SEQ ID NO: 1762244 - DNA, 25 bp, Homo sapien
gtcatgtggtacatcctgctttcac

SEQ ID NO: 1762245 - DNA, 25 bp, Homo sapien
agcacattttggagttacagtcatg

SEQ ID NO: 1762246 - DNA, 25 bp, Homo sapien
cagaaaatttattgagcgggttata

SEQ ID NO: 1762247 - DNA, 25 bp, Homo sapien
gattgtcaacaagaagccctatgag

SEQ ID NO: 1762248 - DNA, 25 bp, Homo sapien
tctttacaggtgctagacagaactg

SEQ ID NO: 1762249 - DNA, 25 bp, Homo sapien
gcgggttatacttcgtcttttatca

SEQ ID NO: 1762250 - DNA, 25 bp, Homo sapien
gctgaacataagaacccgataagaa

SEQ ID NO: 1762251 - DNA, 25 bp, Homo sapien
caaggatctcaattgtgccctggaa

SEQ ID NO: 1762252 - DNA, 25 bp, Homo sapien
taggtctgcatggatgaactgtacc

SEQ ID NO: 1762253 - DNA, 25 bp, Homo sapien
taacaagagcccttacctaaagcag

SEQ ID NO: 1762254 - DNA, 25 bp, Homo sapien
tcagctgcaactgtacaagcatgaa

SEQ ID NO: 1762255 - DNA, 25 bp, Homo sapien
ttcagctgcaactgtacaagcatga

SEQ ID NO: 1762256 - DNA, 25 bp, Homo sapien
gacctggatcctcttttatatagaa

SEQ ID NO: 1762257 - DNA, 25 bp, Homo sapien
cctggatcctcttttatatagaaga

SEQ ID NO: 1762258 - DNA, 25 bp, Homo sapien
gatcctcttttatatagaagagttc

SEQ ID NO: 1762259 - DNA, 25 bp, Homo sapien
ctggatcctcttttatatagaagag

SEQ ID NO: 1762260 - DNA, 25 bp, Homo sapien
ttaataactgctacaccagccctca

SEQ ID NO: 1762261 - DNA, 25 bp, Homo sapien
aatttctcagtatagccttgttctg

SEQ ID NO: 1762262 - DNA, 25 bp, Homo sapien
tcagtatagccttgttctgtaagat

SEQ ID NO: 1762263 - DNA, 25 bp, Homo sapien
aataaccctgattcattaaggtgtt

SEQ ID NO: 1762264 - DNA, 25 bp, Homo sapien
ataaccctgattcattaaggtgttc

SEQ ID NO: 1762265 - DNA, 25 bp, Homo sapien
tctatcccctcggtccacaataagg

SEQ ID NO: 1762266 - DNA, 25 bp, Homo sapien
aagaaggctgtatccaaatctatcc

SEQ ID NO: 1762267 - DNA, 25 bp, Homo sapien
caataaggcattcctctcttactcc

SEQ ID NO: 1762268 - DNA, 25 bp, Homo sapien
tcctctcttactccaacagcatgtt

SEQ ID NO: 1762269 - DNA, 25 bp, Homo sapien
ctttgaaagggaagttactgctgga

SEQ ID NO: 1762270 - DNA, 25 bp, Homo sapien
aaaatgcccttctatggaggaatac

SEQ ID NO: 1762271 - DNA, 25 bp, Homo sapien
ggaggaatacttcagaacccagctc

SEQ ID NO: 1762272 - DNA, 25 bp, Homo sapien
cacaccttgtatccccaaatctggg

SEQ ID NO: 1762273 - DNA, 25 bp, Homo sapien
catggcagatgatgtttaggagcac

SEQ ID NO: 1762274 - DNA, 25 bp, Homo sapien
taagggctccctgctatttaaatgg

SEQ ID NO: 1762275 - DNA, 25 bp, Homo sapien
taaccaataatgatcaggaagccta

SEQ ID NO: 1762276 - DNA, 25 bp, Homo sapien
ggaaacttctagattcataccccag

SEQ ID NO: 1762277 - DNA, 25 bp, Homo sapien
tttgttatgtcattctctagatttt

SEQ ID NO: 1762278 - DNA, 25 bp, Homo sapien
tcagatcttcgaaaggttatttaca

SEQ ID NO: 1762279 - DNA, 25 bp, Homo sapien
tgtttaaaatatcgagtaaatacaa

SEQ ID NO: 1762280 - DNA, 25 bp, Homo sapien
tgttatgtcattctctagatttttg

SEQ ID NO: 1762281 - DNA, 25 bp, Homo sapien
tcactatagcctctggtcaattgac

SEQ ID NO: 1762282 - DNA, 25 bp, Homo sapien
taggatctgagtaaagagtagtgga

SEQ ID NO: 1762283 - DNA, 25 bp, Homo sapien
acagggttttgccttatagctcagg

SEQ ID NO: 1762284 - DNA, 25 bp, Homo sapien
aaactgagaatgttaggatctgagt

SEQ ID NO: 1762285 - DNA, 25 bp, Homo sapien
agctgttttccgacaaccaaatagg

SEQ ID NO: 1762286 - DNA, 25 bp, Homo sapien
gacatgagcccaacaaatccaacag

SEQ ID NO: 1762287 - DNA, 25 bp, Homo sapien
gactattgggcagcaaaagaaaatc

SEQ ID NO: 1762288 - DNA, 25 bp, Homo sapien
tctgtgaagacgctgactattgggc

SEQ ID NO: 1762289 - DNA, 25 bp, Homo sapien
ggacccgtaccagtctgtggcacag

SEQ ID NO: 1762290 - DNA, 25 bp, Homo sapien
atggacccgtaccagtctgtggcac

SEQ ID NO: 1762291 - DNA, 25 bp, Homo sapien
acccgtaccagtctgtggcacaggg

SEQ ID NO: 1762292 - DNA, 25 bp, Homo sapien
gacccgtaccagtctgtggcacagg

SEQ ID NO: 1762293 - DNA, 25 bp, Homo sapien
tccataggtaaggtacagaggctcg

SEQ ID NO: 1762294 - DNA, 25 bp, Homo sapien
taaaagaggcccacgctgtcaatca

SEQ ID NO: 1762295 - DNA, 25 bp, Homo sapien
cattcaccagtccaaggcgcttctt

SEQ ID NO: 1762296 - DNA, 25 bp, Homo sapien
caagaggtcggtaagtaaagccagc

SEQ ID NO: 1762297 - DNA, 25 bp, Homo sapien
ctttattaaatagtaatattcatga

SEQ ID NO: 1762298 - DNA, 25 bp, Homo sapien
tctttattaaatagtaatattcatg

SEQ ID NO: 1762299 - DNA, 25 bp, Homo sapien
ttattcgtatttcagtataacaaag

SEQ ID NO: 1762300 - DNA, 25 bp, Homo sapien
ttcgtatttcagtataacaaagctg

SEQ ID NO: 1762301 - DNA, 25 bp, Homo sapien
tcagtataacaaagctgaattttgc

SEQ ID NO: 1762302 - DNA, 25 bp, Homo sapien
cgtatttcagtataacaaagctgaa

SEQ ID NO: 1762303 - DNA, 25 bp, Homo sapien
tcatttacggtgaattgtaaataca

SEQ ID NO: 1762304 - DNA, 25 bp, Homo sapien
cacttttgaacaaacgttgccaggg

SEQ ID NO: 1762305 - DNA, 25 bp, Homo sapien
ggcaccaaccccagtctagacatta

SEQ ID NO: 1762306 - DNA, 25 bp, Homo sapien
tgccaggggcagatactttagacac

SEQ ID NO: 1762307 - DNA, 25 bp, Homo sapien
tgctgcattcggtgcgataacgggc

SEQ ID NO: 1762308 - DNA, 25 bp, Homo sapien
aacgggcaccgttatgagaaagaga

SEQ ID NO: 1762309 - DNA, 25 bp, Homo sapien
gaacaatgtcaacatattttgtaag

SEQ ID NO: 1762310 - DNA, 25 bp, Homo sapien
gcgataacgggcaccgttatgagaa

SEQ ID NO: 1762311 - DNA, 25 bp, Homo sapien
tgaacagtcaaattgcagcagatgt

SEQ ID NO: 1762312 - DNA, 25 bp, Homo sapien
gaacagtcaaattgcagcagatgtt

SEQ ID NO: 1762313 - DNA, 25 bp, Homo sapien
ctgaacagtcaaattgcagcagatg

SEQ ID NO: 1762314 - DNA, 25 bp, Homo sapien
agacaccccgttcttctggaagcag

SEQ ID NO: 1762315 - DNA, 25 bp, Homo sapien
gattcctaatcctgggcaattccca

SEQ ID NO: 1762316 - DNA, 25 bp, Homo sapien
aaaggaggcaccgagtatgacactg

SEQ ID NO: 1762317 - DNA, 25 bp, Homo sapien
cagaagcagagataacaagttggga

SEQ ID NO: 1762318 - DNA, 25 bp, Homo sapien
gctctgtaaatgtggactcctgttt

SEQ ID NO: 1762319 - DNA, 25 bp, Homo sapien
ctgtttgtgattcatgctcctttga

SEQ ID NO: 1762320 - DNA, 25 bp, Homo sapien
gatataaaagtggttgcaaaggctc

SEQ ID NO: 1762321 - DNA, 25 bp, Homo sapien
aaagtggttgcaaaggctctgtaaa

SEQ ID NO: 1762322 - DNA, 25 bp, Homo sapien
catgactgactgactccgatacttt

SEQ ID NO: 1762323 - DNA, 25 bp, Homo sapien
ctgactccgatactttggtagagca

SEQ ID NO: 1762324 - DNA, 25 bp, Homo sapien
ctgactgactccgatactttggtag

SEQ ID NO: 1762325 - DNA, 25 bp, Homo sapien
gactgactccgatactttggtagag

SEQ ID NO: 1762326 - DNA, 25 bp, Homo sapien
tcagatccttggttcctggcaagtt

SEQ ID NO: 1762327 - DNA, 25 bp, Homo sapien
cattctcagatccttggttcctggc

SEQ ID NO: 1762328 - DNA, 25 bp, Homo sapien
tatgctggtcatcaagacagctcct

SEQ ID NO: 1762329 - DNA, 25 bp, Homo sapien
tgaacacaacagaccgtgtctatgc

SEQ ID NO: 1762330 - DNA, 25 bp, Homo sapien
aaaaccagcttggatttagatgcca

SEQ ID NO: 1762331 - DNA, 25 bp, Homo sapien
tagatgccagtttaaataaccctgc

SEQ ID NO: 1762332 - DNA, 25 bp, Homo sapien
cagtttaaataaccctgcattttag

SEQ ID NO: 1762333 - DNA, 25 bp, Homo sapien
aacagtccatctatgacatagcatc

SEQ ID NO: 1762334 - DNA, 25 bp, Homo sapien
gatatttatcgattagaccagcccc

SEQ ID NO: 1762335 - DNA, 25 bp, Homo sapien
gatcaactgtgcctttagactaaag

SEQ ID NO: 1762336 - DNA, 25 bp, Homo sapien
ccagcaagccgagtgaggtgattaa

SEQ ID NO: 1762337 - DNA, 25 bp, Homo sapien
taaggactgacatcttttggtagcc

SEQ ID NO: 1762338 - DNA, 25 bp, Homo sapien
gcacatgagaacaacctctttattt

SEQ ID NO: 1762339 - DNA, 25 bp, Homo sapien
accaggcacataatctgcaatccgg

SEQ ID NO: 1762340 - DNA, 25 bp, Homo sapien
aaagagcagtcgtccaactcctgaa

SEQ ID NO: 1762341 - DNA, 25 bp, Homo sapien
gaagtgacgccaatgcacatgagaa

SEQ ID NO: 1762342 - DNA, 25 bp, Homo sapien
tagagggctcccttgacactagaga

SEQ ID NO: 1762343 - DNA, 25 bp, Homo sapien
ttgcatcaccctaacagcatctgag

SEQ ID NO: 1762344 - DNA, 25 bp, Homo sapien
tcaaggctctgtctaatctgaccca

SEQ ID NO: 1762345 - DNA, 25 bp, Homo sapien
taggaactcagggaccatgtctgtc

SEQ ID NO: 1762346 - DNA, 25 bp, Homo sapien
cagaccaatgaagaaaaaggagagt

SEQ ID NO: 1762347 - DNA, 25 bp, Homo sapien
agaccaatgaagaaaaaggagagta

SEQ ID NO: 1762348 - DNA, 25 bp, Homo sapien
gaccaatgaagaaaaaggagagtac

SEQ ID NO: 1762349 - DNA, 25 bp, Homo sapien
tgagggccccaaagatgctacacag

SEQ ID NO: 1762350 - DNA, 25 bp, Homo sapien
gaagcatccatcgaagagacccatg

SEQ ID NO: 1762351 - DNA, 25 bp, Homo sapien
tgatgaggcacacagcaatgagggc

SEQ ID NO: 1762352 - DNA, 25 bp, Homo sapien
tcctgggcaccaactaactcaaagg

SEQ ID NO: 1762353 - DNA, 25 bp, Homo sapien
tgccacatcataggagcccagtttg

SEQ ID NO: 1762354 - DNA, 25 bp, Homo sapien
caaagcacagcacctccaataaggg

SEQ ID NO: 1762355 - DNA, 25 bp, Homo sapien
actccagcgaggtagaatgccacat

SEQ ID NO: 1762356 - DNA, 25 bp, Homo sapien
gagcccagtttgtcacgaagtaacc

SEQ ID NO: 1762357 - DNA, 25 bp, Homo sapien
ttaaataatagagtcagattctttc

SEQ ID NO: 1762358 - DNA, 25 bp, Homo sapien
ccagatgaacttgacagcagagagt

SEQ ID NO: 1762359 - DNA, 25 bp, Homo sapien
cagatgaacttgacagcagagagtt

SEQ ID NO: 1762360 - DNA, 25 bp, Homo sapien
tccagatgaacttgacagcagagag

SEQ ID NO: 1762361 - DNA, 25 bp, Homo sapien
tgcaaacgcaaagggaacaacgctg

SEQ ID NO: 1762362 - DNA, 25 bp, Homo sapien
tggctacttgagtaaaacgcactgc

SEQ ID NO: 1762363 - DNA, 25 bp, Homo sapien
ggtattatctagaacccaggcttaa

SEQ ID NO: 1762364 - DNA, 25 bp, Homo sapien
gccctcagactcatggaaacatcag

SEQ ID NO: 1762365 - DNA, 25 bp, Homo sapien
tagaagtggtaaggtgcaactgcat

SEQ ID NO: 1762366 - DNA, 25 bp, Homo sapien
ggcaaattatctaagtcccctgaat

SEQ ID NO: 1762367 - DNA, 25 bp, Homo sapien
agcactaacttttaaaggcctcaag

SEQ ID NO: 1762368 - DNA, 25 bp, Homo sapien
ctagtgccaacaaatccagaagtca

SEQ ID NO: 1762369 - DNA, 25 bp, Homo sapien
tagcagagtattctccgtatgagtc

SEQ ID NO: 1762370 - DNA, 25 bp, Homo sapien
cagtgttatagatccagtttgattc

SEQ ID NO: 1762371 - DNA, 25 bp, Homo sapien
cagggttctgctcagttgaacaggc

SEQ ID NO: 1762372 - DNA, 25 bp, Homo sapien
caaacacatatgctgagatctaagt

SEQ ID NO: 1762373 - DNA, 25 bp, Homo sapien
gacttgacctgctatgctcaagcaa

SEQ ID NO: 1762374 - DNA, 25 bp, Homo sapien
tgacctaatgtaaaagttgctcctt

SEQ ID NO: 1762375 - DNA, 25 bp, Homo sapien
ggaaaagcaacaatctttgacctaa

SEQ ID NO: 1762376 - DNA, 25 bp, Homo sapien
tttcataacaagacaaaaagctggt

SEQ ID NO: 1762377 - DNA, 25 bp, Homo sapien
aacaactattgtgccaaaaatggcc

SEQ ID NO: 1762378 - DNA, 25 bp, Homo sapien
tggtcaaatccagcatgagcattca

SEQ ID NO: 1762379 - DNA, 25 bp, Homo sapien
tgagcattcagcatagtgatctaca

SEQ ID NO: 1762380 - DNA, 25 bp, Homo sapien
cagagctgcactgcggtgtatagca

SEQ ID NO: 1762381 - DNA, 25 bp, Homo sapien
tcacgtggcggaaatgtggcctctc

SEQ ID NO: 1762382 - DNA, 25 bp, Homo sapien
tcggcggctccggagaagtcgtctt

SEQ ID NO: 1762383 - DNA, 25 bp, Homo sapien
agcagaacttctggagctccgagaa

SEQ ID NO: 1762384 - DNA, 25 bp, Homo sapien
ttcgtggcaaaagacgctcgctctc

SEQ ID NO: 1762385 - DNA, 25 bp, Homo sapien
cggctccggctcattctccgccggg

SEQ ID NO: 1762386 - DNA, 25 bp, Homo sapien
tcccggtcccaccgctctgccagga

SEQ ID NO: 1762387 - DNA, 25 bp, Homo sapien
caaggtggtgaaccaccgcagcttg

SEQ ID NO: 1762388 - DNA, 25 bp, Homo sapien
ggtggtgaaccaccgcagcttgctc

SEQ ID NO: 1762389 - DNA, 25 bp, Homo sapien
agccccaggaaggaggcacacagca

SEQ ID NO: 1762390 - DNA, 25 bp, Homo sapien
cagccccaggaaggaggcacacagc

SEQ ID NO: 1762391 - DNA, 25 bp, Homo sapien
gccccaggaaggaggcacacagcat

SEQ ID NO: 1762392 - DNA, 25 bp, Homo sapien
caaatcttgaaacgtgggtcccact

SEQ ID NO: 1762393 - DNA, 25 bp, Homo sapien
cccaaggcacgacccacaaaaatga

SEQ ID NO: 1762394 - DNA, 25 bp, Homo sapien
cagactactgatatttcggttcacg

SEQ ID NO: 1762395 - DNA, 25 bp, Homo sapien
ggtcccactatagcaacactcaatc

SEQ ID NO: 1762396 - DNA, 25 bp, Homo sapien
acggtggtagccgacattgagattc

SEQ ID NO: 1762397 - DNA, 25 bp, Homo sapien
tattgctgtcttgcaaaaaggaaca

SEQ ID NO: 1762398 - DNA, 25 bp, Homo sapien
cagtgagtaatattgctgtcttgca

SEQ ID NO: 1762399 - DNA, 25 bp, Homo sapien
caagataaagaccaacggtggtagc

SEQ ID NO: 1762400 - DNA, 25 bp, Homo sapien
ccaattgaaacaccgaagatagaca

SEQ ID NO: 1762401 - DNA, 25 bp, Homo sapien
tatccagaatgccaattgaaacacc

SEQ ID NO: 1762402 - DNA, 25 bp, Homo sapien
ctgtatccagaatgccaattgaaac

SEQ ID NO: 1762403 - DNA, 25 bp, Homo sapien
gaatgccaattgaaacaccgaagat

SEQ ID NO: 1762404 - DNA, 25 bp, Homo sapien
tgaatagccaggattctggtatgcc

SEQ ID NO: 1762405 - DNA, 25 bp, Homo sapien
cacacgtccaggaacctgaatagcc

SEQ ID NO: 1762406 - DNA, 25 bp, Homo sapien
tatgtatgtaacagatgcaaaacac

SEQ ID NO: 1762407 - DNA, 25 bp, Homo sapien
atagccaggattctggtatgcccat

SEQ ID NO: 1762408 - DNA, 25 bp, Homo sapien
tagcagtggagccaaaaaggcaccc

SEQ ID NO: 1762409 - DNA, 25 bp, Homo sapien
tgtcggacccaaagccagtttagct

SEQ ID NO: 1762410 - DNA, 25 bp, Homo sapien
taagtaccgataacagcataagccc

SEQ ID NO: 1762411 - DNA, 25 bp, Homo sapien
taggtactccaaacagagcttctga

SEQ ID NO: 1762412 - DNA, 25 bp, Homo sapien
gctttttcttgctttgagctattct

SEQ ID NO: 1762413 - DNA, 25 bp, Homo sapien
cttcgaaatgtctcagcagatgctc

SEQ ID NO: 1762414 - DNA, 25 bp, Homo sapien
ttcttgctttgagctattctttaaa

SEQ ID NO: 1762415 - DNA, 25 bp, Homo sapien
cgaaatgtctcagcagatgctcttg

SEQ ID NO: 1762416 - DNA, 25 bp, Homo sapien
gatggagttcaacccagcagcttca

SEQ ID NO: 1762417 - DNA, 25 bp, Homo sapien
ccatggatggtcgtgtactgctcaa

SEQ ID NO: 1762418 - DNA, 25 bp, Homo sapien
tcatgccagcatgggtggttgcaaa

SEQ ID NO: 1762419 - DNA, 25 bp, Homo sapien
tgtggttgccattgaagccccatac

SEQ ID NO: 1762420 - DNA, 25 bp, Homo sapien
tgggctccgtcagactacttctaga

SEQ ID NO: 1762421 - DNA, 25 bp, Homo sapien
gtagctattgatgctcccaaagagg

SEQ ID NO: 1762422 - DNA, 25 bp, Homo sapien
catttagcccggagctagagagcag

SEQ ID NO: 1762423 - DNA, 25 bp, Homo sapien
ttttcgctggcgatcaagaggtgaa

SEQ ID NO: 1762424 - DNA, 25 bp, Homo sapien
taaggtcctgtactgaagcggccct

SEQ ID NO: 1762425 - DNA, 25 bp, Homo sapien
gagaaaccctggatcggtgacacaa

SEQ ID NO: 1762426 - DNA, 25 bp, Homo sapien
taatgctctgctctgaatggcgtcc

SEQ ID NO: 1762427 - DNA, 25 bp, Homo sapien
tattctgcaggtacccgagtgtggc

SEQ ID NO: 1762428 - DNA, 25 bp, Homo sapien
cactttcagtgaccgctgaagcttt

SEQ ID NO: 1762429 - DNA, 25 bp, Homo sapien
taagcactttcagtgaccgctgaag

SEQ ID NO: 1762430 - DNA, 25 bp, Homo sapien
ctgtaagcactttcagtgaccgctg

SEQ ID NO: 1762431 - DNA, 25 bp, Homo sapien
tcagtgaccgctgaagcttttttcc

SEQ ID NO: 1762432 - DNA, 25 bp, Homo sapien
ggcacagtgataagggacataaaat

SEQ ID NO: 1762433 - DNA, 25 bp, Homo sapien
tatgagatctgttggcctggctaat

SEQ ID NO: 1762434 - DNA, 25 bp, Homo sapien
gcataactctgcgataactcaccca

SEQ ID NO: 1762435 - DNA, 25 bp, Homo sapien
catttcagtaggttaaaggcacagt

SEQ ID NO: 1762436 - DNA, 25 bp, Homo sapien
catactgaggccccacctctattaa

SEQ ID NO: 1762437 - DNA, 25 bp, Homo sapien
cataatgcgcctaaagtctgagata

SEQ ID NO: 1762438 - DNA, 25 bp, Homo sapien
caagcacttgtgcaatgactgaaca

SEQ ID NO: 1762439 - DNA, 25 bp, Homo sapien
taatacttagtctacagagcctcac

SEQ ID NO: 1762440 - DNA, 25 bp, Homo sapien
cacttattcagtacatgggtgctac

SEQ ID NO: 1762441 - DNA, 25 bp, Homo sapien
agggatctctgtaaacgaatgagca

SEQ ID NO: 1762442 - DNA, 25 bp, Homo sapien
ccaaggtggttcagagggatctctg

SEQ ID NO: 1762443 - DNA, 25 bp, Homo sapien
gggatctctgtaaacgaatgagcac

SEQ ID NO: 1762444 - DNA, 25 bp, Homo sapien
tccaaggtggttcagagggatctct

SEQ ID NO: 1762445 - DNA, 25 bp, Homo sapien
cccatttatcgttctcagaccacac

SEQ ID NO: 1762446 - DNA, 25 bp, Homo sapien
gcccatttatcgttctcagaccaca

SEQ ID NO: 1762447 - DNA, 25 bp, Homo sapien
agcagcccatttatcgttctcagac

SEQ ID NO: 1762448 - DNA, 25 bp, Homo sapien
cagcccatttatcgttctcagacca

SEQ ID NO: 1762449 - DNA, 25 bp, Homo sapien
gagatatatagaagatgggccagga

SEQ ID NO: 1762450 - DNA, 25 bp, Homo sapien
cagaaaacgagtggtcccaaggagg

SEQ ID NO: 1762451 - DNA, 25 bp, Homo sapien
tccggaatctggaccagagatacac

SEQ ID NO: 1762452 - DNA, 25 bp, Homo sapien
aagggcaatggcatctattcaagtc

SEQ ID NO: 1762453 - DNA, 25 bp, Homo sapien
tatctcttgcaaactgggactcctc

SEQ ID NO: 1762454 - DNA, 25 bp, Homo sapien
gagcaatgtcatcaacccaaaggga

SEQ ID NO: 1762455 - DNA, 25 bp, Homo sapien
gatgataacagctcctgcatgcaga

SEQ ID NO: 1762456 - DNA, 25 bp, Homo sapien
taggctaaccagcaactcctgaggc

SEQ ID NO: 1762457 - DNA, 25 bp, Homo sapien
caagggtaaagattcatagagtgct

SEQ ID NO: 1762458 - DNA, 25 bp, Homo sapien
taggcaagccagtcattctcttgct

SEQ ID NO: 1762459 - DNA, 25 bp, Homo sapien
tttcttcaacaagggtaaagattca

SEQ ID NO: 1762460 - DNA, 25 bp, Homo sapien
gattcatagagtgcttggacacaga

SEQ ID NO: 1762461 - DNA, 25 bp, Homo sapien
aacaaaaatgatagggtcatctaac

SEQ ID NO: 1762462 - DNA, 25 bp, Homo sapien
cctgtactacatctgaagatttgcc

SEQ ID NO: 1762463 - DNA, 25 bp, Homo sapien
atacaataattacatgaggcagtta

SEQ ID NO: 1762464 - DNA, 25 bp, Homo sapien
tcaccgtgaacagtctaatgcaaac

SEQ ID NO: 1762465 - DNA, 25 bp, Homo sapien
gccaaactatatcaatcaccatcag

SEQ ID NO: 1762466 - DNA, 25 bp, Homo sapien
taataaccaaaagatctcgtgagac

SEQ ID NO: 1762467 - DNA, 25 bp, Homo sapien
caaaatgagggcttgtgcaggaaaa

SEQ ID NO: 1762468 - DNA, 25 bp, Homo sapien
tgcaggaaaactccctcttataata

SEQ ID NO: 1762469 - DNA, 25 bp, Homo sapien
cacattttgcaatcacgtttttccc

SEQ ID NO: 1762470 - DNA, 25 bp, Homo sapien
tctggagcttatgaattctggaggg

SEQ ID NO: 1762471 - DNA, 25 bp, Homo sapien
gcttcagtaagactaagaacttcct

SEQ ID NO: 1762472 - DNA, 25 bp, Homo sapien
ctggagggtgtagaagcaaaatgtc

SEQ ID NO: 1762473 - DNA, 25 bp, Homo sapien
tgaaaacctgcctagaagggcaacc

SEQ ID NO: 1762474 - DNA, 25 bp, Homo sapien
tttaagaaagtgcacaggctaggcg

SEQ ID NO: 1762475 - DNA, 25 bp, Homo sapien
gatcattcctactctgttaagcccc

SEQ ID NO: 1762476 - DNA, 25 bp, Homo sapien
gcaatatttcctgcactggaccaag

SEQ ID NO: 1762477 - DNA, 25 bp, Homo sapien
gttttgtctcaaagaagcatgggcc

SEQ ID NO: 1762478 - DNA, 25 bp, Homo sapien
ttttgtctcaaagaagcatgggcca

SEQ ID NO: 1762479 - DNA, 25 bp, Homo sapien
tgttttgtctcaaagaagcatgggc

SEQ ID NO: 1762480 - DNA, 25 bp, Homo sapien
cagaggttggccactaagtctatgc

SEQ ID NO: 1762481 - DNA, 25 bp, Homo sapien
cccagggagcctctagcagtgagtg

SEQ ID NO: 1762482 - DNA, 25 bp, Homo sapien
tgcccagtggcaagacttctagagt

SEQ ID NO: 1762483 - DNA, 25 bp, Homo sapien
gatgacagagtcagcccctaattcc

SEQ ID NO: 1762484 - DNA, 25 bp, Homo sapien
tgataatagttatagtagctaatat

SEQ ID NO: 1762485 - DNA, 25 bp, Homo sapien
gttatagtagctaatattgtttgct

SEQ ID NO: 1762486 - DNA, 25 bp, Homo sapien
tgtttgcttagtaagtatattagtt

SEQ ID NO: 1762487 - DNA, 25 bp, Homo sapien
taatagttatagtagctaatattgt

SEQ ID NO: 1762488 - DNA, 25 bp, Homo sapien
tatatgcactgatatctgtggaagg

SEQ ID NO: 1762489 - DNA, 25 bp, Homo sapien
gagatcacttttcaattcacctttg

SEQ ID NO: 1762490 - DNA, 25 bp, Homo sapien
gctactggactgcagctatcaaggc

SEQ ID NO: 1762491 - DNA, 25 bp, Homo sapien
tatcaaggctacttgattagagtcc

SEQ ID NO: 1762492 - DNA, 25 bp, Homo sapien
gctactgcgcctgccctaaaatatg

SEQ ID NO: 1762493 - DNA, 25 bp, Homo sapien
ctgcgcctgccctaaaatatgctct

SEQ ID NO: 1762494 - DNA, 25 bp, Homo sapien
agctactgcgcctgccctaaaatat

SEQ ID NO: 1762495 - DNA, 25 bp, Homo sapien
tactgcgcctgccctaaaatatgct

SEQ ID NO: 1762496 - DNA, 25 bp, Homo sapien
gtaaatgggcattagatacaagatg

SEQ ID NO: 1762497 - DNA, 25 bp, Homo sapien
gggagacacacataagtaaatgggc

SEQ ID NO: 1762498 - DNA, 25 bp, Homo sapien
cacacataagtaaatgggcattaga

SEQ ID NO: 1762499 - DNA, 25 bp, Homo sapien
tgggcattagatacaagatgatgtg

SEQ ID NO: 1762500 - DNA, 25 bp, Homo sapien
tttcactcatctggagataccgagg

SEQ ID NO: 1762501 - DNA, 25 bp, Homo sapien
ggagataccgaggtaatcccctgcc

SEQ ID NO: 1762502 - DNA, 25 bp, Homo sapien
tcccctgcccttgtgtatttcatag

SEQ ID NO: 1762503 - DNA, 25 bp, Homo sapien
tcatctggagataccgaggtaatcc

SEQ ID NO: 1762504 - DNA, 25 bp, Homo sapien
cagagagcttgtggactccgttcaa

SEQ ID NO: 1762505 - DNA, 25 bp, Homo sapien
cactgactgtcatgggttataccct

SEQ ID NO: 1762506 - DNA, 25 bp, Homo sapien
gaggtggccctcatcttgccaatgg

SEQ ID NO: 1762507 - DNA, 25 bp, Homo sapien
cacaacatagtgtctttgaggaagg

SEQ ID NO: 1762508 - DNA, 25 bp, Homo sapien
gctgtcaggacttccacacacatca

SEQ ID NO: 1762509 - DNA, 25 bp, Homo sapien
gcttaactgccttttagtgaggtcc

SEQ ID NO: 1762510 - DNA, 25 bp, Homo sapien
catgaatgcctaaaactagctcaca

SEQ ID NO: 1762511 - DNA, 25 bp, Homo sapien
gattgattataattggatacagcca

SEQ ID NO: 1762512 - DNA, 25 bp, Homo sapien
taatttagcactcatccttttagag

SEQ ID NO: 1762513 - DNA, 25 bp, Homo sapien
atatcctgtttgatattgcaatttc

SEQ ID NO: 1762514 - DNA, 25 bp, Homo sapien
tataagcctgtattggttacatctt

SEQ ID NO: 1762515 - DNA, 25 bp, Homo sapien
gatattgcaatttccttaccaaaac

SEQ ID NO: 1762516 - DNA, 25 bp, Homo sapien
gtaccacgtgtagcattttgaaaca

SEQ ID NO: 1762517 - DNA, 25 bp, Homo sapien
ggaactgtgcaaagacatttttgtt

SEQ ID NO: 1762518 - DNA, 25 bp, Homo sapien
gatcgttattttgatcaaactgtgc

SEQ ID NO: 1762519 - DNA, 25 bp, Homo sapien
aaaaaggaattatgtggtcagtgca

SEQ ID NO: 1762520 - DNA, 25 bp, Homo sapien
tctgttatctgaagactatgaagac

SEQ ID NO: 1762521 - DNA, 25 bp, Homo sapien
acttgttgatctctgaatagctcac

SEQ ID NO: 1762522 - DNA, 25 bp, Homo sapien
tatgaagacttctatgctaaccgaa

SEQ ID NO: 1762523 - DNA, 25 bp, Homo sapien
aatgcaggtgttggatttgctccag

SEQ ID NO: 1762524 - DNA, 25 bp, Homo sapien
tgtgtttctctgaactgcccagtac

SEQ ID NO: 1762525 - DNA, 25 bp, Homo sapien
attgtccaaggcaccatatctccgg

SEQ ID NO: 1762526 - DNA, 25 bp, Homo sapien
tacaggttgctttgatcgacacatc

SEQ ID NO: 1762527 - DNA, 25 bp, Homo sapien
caacatagggtagtctaggcttcca

SEQ ID NO: 1762528 - DNA, 25 bp, Homo sapien
aacagggttcgtgatcagacaacca

SEQ ID NO: 1762529 - DNA, 25 bp, Homo sapien
ggcatatttcatcccgtgtctacaa

SEQ ID NO: 1762530 - DNA, 25 bp, Homo sapien
gaaggtccatgtcgtgctgggcaca

SEQ ID NO: 1762531 - DNA, 25 bp, Homo sapien
ctgagaatgcattcgttttcccggg

SEQ ID NO: 1762532 - DNA, 25 bp, Homo sapien
cctacatgtatacccttggatcgaa

SEQ ID NO: 1762533 - DNA, 25 bp, Homo sapien
tgatgaacactagggattccaaaag

SEQ ID NO: 1762534 - DNA, 25 bp, Homo sapien
tactacatttactgcatgggcaaca

SEQ ID NO: 1762535 - DNA, 25 bp, Homo sapien
tgggcaacaggatcattagaagctc

SEQ ID NO: 1762536 - DNA, 25 bp, Homo sapien
tctgtagtaaatgtcggagccaacc

SEQ ID NO: 1762537 - DNA, 25 bp, Homo sapien
cctgaagggcggaaaggcactattt

SEQ ID NO: 1762538 - DNA, 25 bp, Homo sapien
gtcatcctcaaccaagaaatccggg

SEQ ID NO: 1762539 - DNA, 25 bp, Homo sapien
agctcctcgcgaagtgaacctgaag

SEQ ID NO: 1762540 - DNA, 25 bp, Homo sapien
gattctgcacaggtctagaagaccc

SEQ ID NO: 1762541 - DNA, 25 bp, Homo sapien
tgcgcacatgaagcctcactgaaag

SEQ ID NO: 1762542 - DNA, 25 bp, Homo sapien
gcttgtgtgccagcccttgaactta

SEQ ID NO: 1762543 - DNA, 25 bp, Homo sapien
tctttgccaaggaatacagaggaag

SEQ ID NO: 1762544 - DNA, 25 bp, Homo sapien
tctgtaggcagaattgtactcaagc

SEQ ID NO: 1762545 - DNA, 25 bp, Homo sapien
gtattcagaataagacacagagctt

SEQ ID NO: 1762546 - DNA, 25 bp, Homo sapien
taacttaatctacttggccgggcac

SEQ ID NO: 1762547 - DNA, 25 bp, Homo sapien
gggcctagactccttctatagcaaa

SEQ ID NO: 1762548 - DNA, 25 bp, Homo sapien
aaaggagtgagcaagtggtaacaac

SEQ ID NO: 1762549 - DNA, 25 bp, Homo sapien
aaataaacaaaactggtagcgcaag

SEQ ID NO: 1762550 - DNA, 25 bp, Homo sapien
tgttgggcccaaagtcatatataga

SEQ ID NO: 1762551 - DNA, 25 bp, Homo sapien
cattttgctcccacgtgttatatca

SEQ ID NO: 1762552 - DNA, 25 bp, Homo sapien
aatgtgtttgtaccaacaggttggc

SEQ ID NO: 1762553 - DNA, 25 bp, Homo sapien
tcttccaagaatccaacgtagctga

SEQ ID NO: 1762554 - DNA, 25 bp, Homo sapien
gaccttggaacgagctattaaactg

SEQ ID NO: 1762555 - DNA, 25 bp, Homo sapien
tagtattgttcacaaagccagagag

SEQ ID NO: 1762556 - DNA, 25 bp, Homo sapien
ttgtgcatttttaatcgaattattt

SEQ ID NO: 1762557 - DNA, 25 bp, Homo sapien
gatcccatttgtccagtaatcagcc

SEQ ID NO: 1762558 - DNA, 25 bp, Homo sapien
tgtgcatttttaatcgaattatttg

SEQ ID NO: 1762559 - DNA, 25 bp, Homo sapien
tattagcataaaatttcagtgccac

SEQ ID NO: 1762560 - DNA, 25 bp, Homo sapien
tcagtgccacctttgtagcagtttt

SEQ ID NO: 1762561 - DNA, 25 bp, Homo sapien
gcatacacctatttctgcatgatct

SEQ ID NO: 1762562 - DNA, 25 bp, Homo sapien
gattatagttatgttggcttgtcca

SEQ ID NO: 1762563 - DNA, 25 bp, Homo sapien
tctgaactcacatagaagtgctctg

SEQ ID NO: 1762564 - DNA, 25 bp, Homo sapien
ggttatgagtgatacaagtcccatg

SEQ ID NO: 1762565 - DNA, 25 bp, Homo sapien
gaaatacctagagtccctggaactg

SEQ ID NO: 1762566 - DNA, 25 bp, Homo sapien
gtttgaatgtcagcagagtcaaccc

SEQ ID NO: 1762567 - DNA, 25 bp, Homo sapien
cagatgaattcagctggccttgttg

SEQ ID NO: 1762568 - DNA, 25 bp, Homo sapien
cacaaaaagtaagatcataggattt

SEQ ID NO: 1762569 - DNA, 25 bp, Homo sapien
ctttgggagctcagataaggatttt

SEQ ID NO: 1762570 - DNA, 25 bp, Homo sapien
gagtaatttcaatgaactatcccat

SEQ ID NO: 1762571 - DNA, 25 bp, Homo sapien
gagctcaggcagccgaggttgcggt

SEQ ID NO: 1762572 - DNA, 25 bp, Homo sapien
gctcaggcagccgaggttgcggtga

SEQ ID NO: 1762573 - DNA, 25 bp, Homo sapien
tgagctcaggcagccgaggttgcgg

SEQ ID NO: 1762574 - DNA, 25 bp, Homo sapien
ttgagctcaggcagccgaggttgcg

SEQ ID NO: 1762575 - DNA, 25 bp, Homo sapien
gcacccaagcttgggcaatagaaca

SEQ ID NO: 1762576 - DNA, 25 bp, Homo sapien
caggtgtgatagcttgtgcctgtag

SEQ ID NO: 1762577 - DNA, 25 bp, Homo sapien
gactctgtcttataaaaagggaatg

SEQ ID NO: 1762578 - DNA, 25 bp, Homo sapien
aaaactatcccaggcaacaaagtga

SEQ ID NO: 1762579 - DNA, 25 bp, Homo sapien
ggatatcaggctacaaatattgcag

SEQ ID NO: 1762580 - DNA, 25 bp, Homo sapien
caaagtttcattctaactagaaggg

SEQ ID NO: 1762581 - DNA, 25 bp, Homo sapien
ggaacactagtagttaactaatcat

SEQ ID NO: 1762582 - DNA, 25 bp, Homo sapien
cattctaactagaagggaataataa

SEQ ID NO: 1762583 - DNA, 25 bp, Homo sapien
gagaatgcttcaagtctgcgacccc

SEQ ID NO: 1762584 - DNA, 25 bp, Homo sapien
taatgcctattctgagccactctga

SEQ ID NO: 1762585 - DNA, 25 bp, Homo sapien
cttaagatcaaggtcaactgtggcc

SEQ ID NO: 1762586 - DNA, 25 bp, Homo sapien
tgcgacccctgatgatccttagagc

SEQ ID NO: 1762587 - DNA, 25 bp, Homo sapien
tagaaccggatcctgaatttgaccc

SEQ ID NO: 1762588 - DNA, 25 bp, Homo sapien
aaatcttaccctaatcagtgtggag

SEQ ID NO: 1762589 - DNA, 25 bp, Homo sapien
gaactagacgagacttagaaccgga

SEQ ID NO: 1762590 - DNA, 25 bp, Homo sapien
tggagttgcatgctcgaactagacg

SEQ ID NO: 1762591 - DNA, 25 bp, Homo sapien
gctggccatggtgatatgtacctat

SEQ ID NO: 1762592 - DNA, 25 bp, Homo sapien
tggccatggtgatatgtacctatag

SEQ ID NO: 1762593 - DNA, 25 bp, Homo sapien
ggccatggtgatatgtacctatagt

SEQ ID NO: 1762594 - DNA, 25 bp, Homo sapien
ctggccatggtgatatgtacctata

SEQ ID NO: 1762595 - DNA, 25 bp, Homo sapien
ctctgtcacccaggctggaatgcaa

SEQ ID NO: 1762596 - DNA, 25 bp, Homo sapien
tggcacaatctcagctcactgcaac

SEQ ID NO: 1762597 - DNA, 25 bp, Homo sapien
ctccacctcccaggttcaagcagtt

SEQ ID NO: 1762598 - DNA, 25 bp, Homo sapien
ttgttttgtttgagacatagtctca

SEQ ID NO: 1762599 - DNA, 25 bp, Homo sapien
gataaccggctttcctcatctcaag

SEQ ID NO: 1762600 - DNA, 25 bp, Homo sapien
tcagtgcagaagacaagggttgtaa

SEQ ID NO: 1762601 - DNA, 25 bp, Homo sapien
aactgccgcccggtggttgaaacag

SEQ ID NO: 1762602 - DNA, 25 bp, Homo sapien
taaaatcactctggaggtctcactg

SEQ ID NO: 1762603 - DNA, 25 bp, Homo sapien
ccaaggagttgtcaataaagggtca

SEQ ID NO: 1762604 - DNA, 25 bp, Homo sapien
gaaactcgacttgcaaatgatctgg

SEQ ID NO: 1762605 - DNA, 25 bp, Homo sapien
aatgactcagaatccaaggccaggg

SEQ ID NO: 1762606 - DNA, 25 bp, Homo sapien
gaatgtacctgcacaatatagaggg

SEQ ID NO: 1762607 - DNA, 25 bp, Homo sapien
aaaccgaggtcgttatcagaagcaa

SEQ ID NO: 1762608 - DNA, 25 bp, Homo sapien
tagcggaacagtcaaagcacagtga

SEQ ID NO: 1762609 - DNA, 25 bp, Homo sapien
gctggaccaagcatatacccctaat

SEQ ID NO: 1762610 - DNA, 25 bp, Homo sapien
cagcagattgtgtgcatagcggaac

SEQ ID NO: 1762611 - DNA, 25 bp, Homo sapien
tctctgtgtaagtggttatttatta

SEQ ID NO: 1762612 - DNA, 25 bp, Homo sapien
aagatcacaggtttgtgccagcaac

SEQ ID NO: 1762613 - DNA, 25 bp, Homo sapien
tgtaagtggttatttattatagatc

SEQ ID NO: 1762614 - DNA, 25 bp, Homo sapien
attcaaagatcacaggtttgtgcca

SEQ ID NO: 1762615 - DNA, 25 bp, Homo sapien
gatcacattcatgagccaccaagcg

SEQ ID NO: 1762616 - DNA, 25 bp, Homo sapien
tctgtggtttaacaactaacatgta

SEQ ID NO: 1762617 - DNA, 25 bp, Homo sapien
caccaagcgcagctgacaatctata

SEQ ID NO: 1762618 - DNA, 25 bp, Homo sapien
tctctatcaatggtgaaaagatacg

SEQ ID NO: 1762619 - DNA, 25 bp, Homo sapien
tacattttctgtctactggtgctaa

SEQ ID NO: 1762620 - DNA, 25 bp, Homo sapien
ggaggcagtatattccaaatgcttg

SEQ ID NO: 1762621 - DNA, 25 bp, Homo sapien
gatttctctatttcaaagcagctat

SEQ ID NO: 1762622 - DNA, 25 bp, Homo sapien
tctctcaaatgtgctacttcgggaa

SEQ ID NO: 1762623 - DNA, 25 bp, Homo sapien
ctgaggtgaaaagtaggagatccca

SEQ ID NO: 1762624 - DNA, 25 bp, Homo sapien
gctgcaactgttatactgtcatcca

SEQ ID NO: 1762625 - DNA, 25 bp, Homo sapien
ggcagggaaccaacattagtcgtct

SEQ ID NO: 1762626 - DNA, 25 bp, Homo sapien
ggaaagttacagaccagagcagcct

SEQ ID NO: 1762627 - DNA, 25 bp, Homo sapien
gaaatccctggagttgttagagcct

SEQ ID NO: 1762628 - DNA, 25 bp, Homo sapien
cagacggattcctaagtcccttgag

SEQ ID NO: 1762629 - DNA, 25 bp, Homo sapien
tccctgatggtgtgaatagctgtag

SEQ ID NO: 1762630 - DNA, 25 bp, Homo sapien
ttagtggacgtgttggtctctcagc

SEQ ID NO: 1762631 - DNA, 25 bp, Homo sapien
tgagtacttcactgaagcacagctc

SEQ ID NO: 1762632 - DNA, 25 bp, Homo sapien
gcacgactgcccagaacatgaggtt

SEQ ID NO: 1762633 - DNA, 25 bp, Homo sapien
tagttttcttacatcctgcccttga

SEQ ID NO: 1762634 - DNA, 25 bp, Homo sapien
tctctgctagtaggtactgggttcc

SEQ ID NO: 1762635 - DNA, 25 bp, Homo sapien
cctgccagattcatgagagcaatgg

SEQ ID NO: 1762636 - DNA, 25 bp, Homo sapien
gagcaatggtgcatctgctttttgt

SEQ ID NO: 1762637 - DNA, 25 bp, Homo sapien
aactagggacaatgctctgaggaca

SEQ ID NO: 1762638 - DNA, 25 bp, Homo sapien
ggaactagggacaatgctctgagga

SEQ ID NO: 1762639 - DNA, 25 bp, Homo sapien
tgaacactctgaccataaagaaact

SEQ ID NO: 1762640 - DNA, 25 bp, Homo sapien
cactctgaccataaagaaactatta

SEQ ID NO: 1762641 - DNA, 25 bp, Homo sapien
ttgtgaacactctgaccataaagaa

SEQ ID NO: 1762642 - DNA, 25 bp, Homo sapien
acactctgaccataaagaaactatt

SEQ ID NO: 1762643 - DNA, 25 bp, Homo sapien
tgtacatcccaaaattgttgtagtt

SEQ ID NO: 1762644 - DNA, 25 bp, Homo sapien
tcctaaattgtacatcccaaaattg

SEQ ID NO: 1762645 - DNA, 25 bp, Homo sapien
ctgctgagtaaatcatttcttcctt

SEQ ID NO: 1762646 - DNA, 25 bp, Homo sapien
cccaaaattgttgtagttctgaagc

SEQ ID NO: 1762647 - DNA, 25 bp, Homo sapien
tctacatactcctggtagaggtgtt

SEQ ID NO: 1762648 - DNA, 25 bp, Homo sapien
tagaggtgtttgtccgacttgagct

SEQ ID NO: 1762649 - DNA, 25 bp, Homo sapien
gagttgtgccccgagctgcccacgg

SEQ ID NO: 1762650 - DNA, 25 bp, Homo sapien
tgcccacggagagttcggtgacttc

SEQ ID NO: 1762651 - DNA, 25 bp, Homo sapien
tcttgaaggggtggggtatctgttc

SEQ ID NO: 1762652 - DNA, 25 bp, Homo sapien
accgggcaagtctaatcccacaggg

SEQ ID NO: 1762653 - DNA, 25 bp, Homo sapien
tctctgcaattgtctcgccagttga

SEQ ID NO: 1762654 - DNA, 25 bp, Homo sapien
gtgagaggcttctcaccgggcaagt

SEQ ID NO: 1762655 - DNA, 25 bp, Homo sapien
gcaagtcagccatgaagtctatgct

SEQ ID NO: 1762656 - DNA, 25 bp, Homo sapien
ctgcaagtcagccatgaagtctatg

SEQ ID NO: 1762657 - DNA, 25 bp, Homo sapien
caagtcagccatgaagtctatgctc

SEQ ID NO: 1762658 - DNA, 25 bp, Homo sapien
aagtcagccatgaagtctatgctct

SEQ ID NO: 1762659 - DNA, 25 bp, Homo sapien
tctgcgaggtgtctgttctgtcttc

SEQ ID NO: 1762660 - DNA, 25 bp, Homo sapien
tgggactcttgaaggcgtgtgcttt

SEQ ID NO: 1762661 - DNA, 25 bp, Homo sapien
ttaaacttatcttcaagcatgtctt

SEQ ID NO: 1762662 - DNA, 25 bp, Homo sapien
tgaaggcgtgtgctttggcatctcc

SEQ ID NO: 1762663 - DNA, 25 bp, Homo sapien
cttatcttcaagcatgtctttgtct

SEQ ID NO: 1762664 - DNA, 25 bp, Homo sapien
acgatgcggtcaagctgctcctgcg

SEQ ID NO: 1762665 - DNA, 25 bp, Homo sapien
cttcacgatgcggtcaagctgctcc

SEQ ID NO: 1762666 - DNA, 25 bp, Homo sapien
gatgcggtcaagctgctcctgcgct

SEQ ID NO: 1762667 - DNA, 25 bp, Homo sapien
tcacgatgcggtcaagctgctcctg

SEQ ID NO: 1762668 - DNA, 25 bp, Homo sapien
agtctcacagggcagtagcctggct

SEQ ID NO: 1762669 - DNA, 25 bp, Homo sapien
ggagtgactttgttcttttgtcctc

SEQ ID NO: 1762670 - DNA, 25 bp, Homo sapien
tgactttgttcttttgtcctctttg

SEQ ID NO: 1762671 - DNA, 25 bp, Homo sapien
ctggagtgactttgttcttttgtcc

SEQ ID NO: 1762672 - DNA, 25 bp, Homo sapien
agtgactttgttcttttgtcctctt

SEQ ID NO: 1762673 - DNA, 25 bp, Homo sapien
tcatggctgctgagatcgcttggaa

SEQ ID NO: 1762674 - DNA, 25 bp, Homo sapien
gctgagatcgcttggaagatctgtg

SEQ ID NO: 1762675 - DNA, 25 bp, Homo sapien
ggctgctgagatcgcttggaagatc

SEQ ID NO: 1762676 - DNA, 25 bp, Homo sapien
gatcgcttggaagatctgtgtcttc

SEQ ID NO: 1762677 - DNA, 25 bp, Homo sapien
gtcctggaatgccctccttttgtta

SEQ ID NO: 1762678 - DNA, 25 bp, Homo sapien
tcctggaatgccctccttttgttaa

SEQ ID NO: 1762679 - DNA, 25 bp, Homo sapien
tgtagggtcctggaatgccctcctt

SEQ ID NO: 1762680 - DNA, 25 bp, Homo sapien
agggtcctggaatgccctccttttg

SEQ ID NO: 1762681 - DNA, 25 bp, Homo sapien
cttcaggcagtgacatctaaatctc

SEQ ID NO: 1762682 - DNA, 25 bp, Homo sapien
tcttcaggcagtgacatctaaatct

SEQ ID NO: 1762683 - DNA, 25 bp, Homo sapien
atcttcaggcagtgacatctaaatc

SEQ ID NO: 1762684 - DNA, 25 bp, Homo sapien
cagacatcctggtggctctacttct

SEQ ID NO: 1762685 - DNA, 25 bp, Homo sapien
aagtattggagtccagacatcctgg

SEQ ID NO: 1762686 - DNA, 25 bp, Homo sapien
cttgaagtattggagtccagacatc

SEQ ID NO: 1762687 - DNA, 25 bp, Homo sapien
tattggagtccagacatcctggtgg

SEQ ID NO: 1762688 - DNA, 25 bp, Homo sapien
cagcttcctcagaatcaaaaacttt

SEQ ID NO: 1762689 - DNA, 25 bp, Homo sapien
tggagctagctccctgagcaatctg

SEQ ID NO: 1762690 - DNA, 25 bp, Homo sapien
ctgggcttcctggagctagctccct

SEQ ID NO: 1762691 - DNA, 25 bp, Homo sapien
caatctggtggtctcatcaagtttc

SEQ ID NO: 1762692 - DNA, 25 bp, Homo sapien
tgcttttcaaactccgtatgtgctt

SEQ ID NO: 1762693 - DNA, 25 bp, Homo sapien
tccgtatgtgcttatgatatcacct

SEQ ID NO: 1762694 - DNA, 25 bp, Homo sapien
tgtgcttatgatatcacctgtagtt

SEQ ID NO: 1762695 - DNA, 25 bp, Homo sapien
tcaaactccgtatgtgcttatgata

SEQ ID NO: 1762696 - DNA, 25 bp, Homo sapien
cattcagcaacattcgtctttttag

SEQ ID NO: 1762697 - DNA, 25 bp, Homo sapien
ttcagcaacattcgtctttttaggt

SEQ ID NO: 1762698 - DNA, 25 bp, Homo sapien
ccacattcagcaacattcgtctttt

SEQ ID NO: 1762699 - DNA, 25 bp, Homo sapien
cacattcagcaacattcgtcttttt

SEQ ID NO: 1762700 - DNA, 25 bp, Homo sapien
catattctaaaaagcgtttctaagt

SEQ ID NO: 1762701 - DNA, 25 bp, Homo sapien
tcaaattcactgttgcaaagtttaa

SEQ ID NO: 1762702 - DNA, 25 bp, Homo sapien
tcctcaggtcccgctttattaccta

SEQ ID NO: 1762703 - DNA, 25 bp, Homo sapien
taacatattctaaaaagcgtttcta

SEQ ID NO: 1762704 - DNA, 25 bp, Homo sapien
tatgtaagtggttgtagtggcaaat

SEQ ID NO: 1762705 - DNA, 25 bp, Homo sapien
taaagccaggtacactggtgcacac

SEQ ID NO: 1762706 - DNA, 25 bp, Homo sapien
gcattttctctaatggtatattcaa

SEQ ID NO: 1762707 - DNA, 25 bp, Homo sapien
tactatatttagtgcatcattaaat

SEQ ID NO: 1762708 - DNA, 25 bp, Homo sapien
tgggcgacatagtctgtacaaaaca

SEQ ID NO: 1762709 - DNA, 25 bp, Homo sapien
gctttagaaaacagtccagttgact

SEQ ID NO: 1762710 - DNA, 25 bp, Homo sapien
taaaagctcccatgtcttaagttgg

SEQ ID NO: 1762711 - DNA, 25 bp, Homo sapien
ttaaaaagagggatattcagggctg

SEQ ID NO: 1762712 - DNA, 25 bp, Homo sapien
ccgggagagcgaaagccgcgggcgc

SEQ ID NO: 1762713 - DNA, 25 bp, Homo sapien
ggagagcgaaagccgcgggcgcccc

SEQ ID NO: 1762714 - DNA, 25 bp, Homo sapien
cgggagagcgaaagccgcgggcgcc

SEQ ID NO: 1762715 - DNA, 25 bp, Homo sapien
gggagagcgaaagccgcgggcgccc

SEQ ID NO: 1762716 - DNA, 25 bp, Homo sapien
tcctgcggccccttgccgggtgctc

SEQ ID NO: 1762717 - DNA, 25 bp, Homo sapien
tctcctgcggccccttgccgggtgc

SEQ ID NO: 1762718 - DNA, 25 bp, Homo sapien
tctctcctgcggccccttgccgggt

SEQ ID NO: 1762719 - DNA, 25 bp, Homo sapien
cttctctcctgcggccccttgccgg

SEQ ID NO: 1762720 - DNA, 25 bp, Homo sapien
gcagcaccagcaccgacgaaagctc

SEQ ID NO: 1762721 - DNA, 25 bp, Homo sapien
gcccgtgtgattcccggcggtggcg

SEQ ID NO: 1762722 - DNA, 25 bp, Homo sapien
accagcaccgacgaaagctcgaggg

SEQ ID NO: 1762723 - DNA, 25 bp, Homo sapien
agcccgtgtgattcccggcggtggc

SEQ ID NO: 1762724 - DNA, 25 bp, Homo sapien
cccccagtggttgcgtccgtgacat

SEQ ID NO: 1762725 - DNA, 25 bp, Homo sapien
ctccccccagtggttgcgtccgtga

SEQ ID NO: 1762726 - DNA, 25 bp, Homo sapien
cagtggttgcgtccgtgacatcatc

SEQ ID NO: 1762727 - DNA, 25 bp, Homo sapien
cccagtggttgcgtccgtgacatca

SEQ ID NO: 1762728 - DNA, 25 bp, Homo sapien
ctcggagcccatccatgagatcggt

SEQ ID NO: 1762729 - DNA, 25 bp, Homo sapien
gcccatccatgagatcggtgctccg

SEQ ID NO: 1762730 - DNA, 25 bp, Homo sapien
catccatgagatcggtgctccgccg

SEQ ID NO: 1762731 - DNA, 25 bp, Homo sapien
ggagcccatccatgagatcggtgct

SEQ ID NO: 1762732 - DNA, 25 bp, Homo sapien
gcatagccgccaaaacggccccgaa

SEQ ID NO: 1762733 - DNA, 25 bp, Homo sapien
tgcatagccgccaaaacggccccga

SEQ ID NO: 1762734 - DNA, 25 bp, Homo sapien
ctgcatagccgccaaaacggccccg

SEQ ID NO: 1762735 - DNA, 25 bp, Homo sapien
ggcggtcggcgaggcaagtgtgagc

SEQ ID NO: 1762736 - DNA, 25 bp, Homo sapien
ttgtgaaaaaccgtctcagcggctg

SEQ ID NO: 1762737 - DNA, 25 bp, Homo sapien
gtgaaatggcggtcggcgaggcaag

SEQ ID NO: 1762738 - DNA, 25 bp, Homo sapien
tcctctgctggatgtgaaatggcgg

SEQ ID NO: 1762739 - DNA, 25 bp, Homo sapien
gccaacccctcgcaaagctgagaag

SEQ ID NO: 1762740 - DNA, 25 bp, Homo sapien
gaagagccgtgcgtgaataaatctc

SEQ ID NO: 1762741 - DNA, 25 bp, Homo sapien
aatctcattaaatggcccggcgcag

SEQ ID NO: 1762742 - DNA, 25 bp, Homo sapien
ccaacgaaggatgtattaggacgag

SEQ ID NO: 1762743 - DNA, 25 bp, Homo sapien
gtacttgcgcgtgcccgggacgcag

SEQ ID NO: 1762744 - DNA, 25 bp, Homo sapien
tacttgcgcgtgcccgggacgcagc

SEQ ID NO: 1762745 - DNA, 25 bp, Homo sapien
ctgggggaggagcgacgagggagga

SEQ ID NO: 1762746 - DNA, 25 bp, Homo sapien
tcaccggcagctgacaagtccttac

SEQ ID NO: 1762747 - DNA, 25 bp, Homo sapien
ggtcaccggcagctgacaagtcctt

SEQ ID NO: 1762748 - DNA, 25 bp, Homo sapien
gaggtcaccggcagctgacaagtcc

SEQ ID NO: 1762749 - DNA, 25 bp, Homo sapien
ttagtgaaaaacacgaggaggccac

SEQ ID NO: 1762750 - DNA, 25 bp, Homo sapien
tctaacgcggtgactttcacaggcc

SEQ ID NO: 1762751 - DNA, 25 bp, Homo sapien
ccacggtggtgcttttatgccttcg

SEQ ID NO: 1762752 - DNA, 25 bp, Homo sapien
gaaagactgttaatcctacattccg

SEQ ID NO: 1762753 - DNA, 25 bp, Homo sapien
cgatctctacttggatgggttagaa

SEQ ID NO: 1762754 - DNA, 25 bp, Homo sapien
aaagaacgatctctacttggatggg

SEQ ID NO: 1762755 - DNA, 25 bp, Homo sapien
aattcaggggcaaatttcgaacttg

SEQ ID NO: 1762756 - DNA, 25 bp, Homo sapien
aaatgtaaaagaacgatctctactt

SEQ ID NO: 1762757 - DNA, 25 bp, Homo sapien
gagtagctctcacaccacttcaaat

SEQ ID NO: 1762758 - DNA, 25 bp, Homo sapien
tacgtggcaacctggtaaccactaa

SEQ ID NO: 1762759 - DNA, 25 bp, Homo sapien
cacttcaaatacgtggcaacctggt

SEQ ID NO: 1762760 - DNA, 25 bp, Homo sapien
tccacaacggttccaaacgagtagc

SEQ ID NO: 1762761 - DNA, 25 bp, Homo sapien
caatttgagcatcaacttaaaacta

SEQ ID NO: 1762762 - DNA, 25 bp, Homo sapien
cctcttctagaaatcgcaaatctgt

SEQ ID NO: 1762763 - DNA, 25 bp, Homo sapien
aactaaattacatgcaatgaacaca

SEQ ID NO: 1762764 - DNA, 25 bp, Homo sapien
cttggagttctagaaggatttgact

SEQ ID NO: 1762765 - DNA, 25 bp, Homo sapien
tcccctgtgttggaacaagaggcct

SEQ ID NO: 1762766 - DNA, 25 bp, Homo sapien
ggaaagtagggcaactcagcactcc

SEQ ID NO: 1762767 - DNA, 25 bp, Homo sapien
tatgacaagtggagagagcgacgac

SEQ ID NO: 1762768 - DNA, 25 bp, Homo sapien
gctattctagtggaaacccatccca

SEQ ID NO: 1762769 - DNA, 25 bp, Homo sapien
tgccagaagccccatttgagaaacc

SEQ ID NO: 1762770 - DNA, 25 bp, Homo sapien
tgagaaacccaagcgctcagagcca

SEQ ID NO: 1762771 - DNA, 25 bp, Homo sapien
tcatggttcatagctgtacacagtg

SEQ ID NO: 1762772 - DNA, 25 bp, Homo sapien
taactcaactctgtagtgctcatgg

SEQ ID NO: 1762773 - DNA, 25 bp, Homo sapien
caacactatgactccactaactcag

SEQ ID NO: 1762774 - DNA, 25 bp, Homo sapien
gcagtacagtggcaacactatgact

SEQ ID NO: 1762775 - DNA, 25 bp, Homo sapien
gcagtggtgcggcaaccttgacctc

SEQ ID NO: 1762776 - DNA, 25 bp, Homo sapien
ctctcaaccaagcagcctctcagtc

SEQ ID NO: 1762777 - DNA, 25 bp, Homo sapien
agaataatttcgcagggcatggtgg

SEQ ID NO: 1762778 - DNA, 25 bp, Homo sapien
gactcagacatttgccctacagtag

SEQ ID NO: 1762779 - DNA, 25 bp, Homo sapien
taggccagggtttttcaacacctgc

SEQ ID NO: 1762780 - DNA, 25 bp, Homo sapien
aacacctgcactattgacactttgg

SEQ ID NO: 1762781 - DNA, 25 bp, Homo sapien
aaatgcctctgaaagggaatgagtt

SEQ ID NO: 1762782 - DNA, 25 bp, Homo sapien
cttccaaatgcctctgaaagggaat

SEQ ID NO: 1762783 - DNA, 25 bp, Homo sapien
cctctgaaagggaatgagtttcttt

SEQ ID NO: 1762784 - DNA, 25 bp, Homo sapien
atgcctctgaaagggaatgagtttc

SEQ ID NO: 1762785 - DNA, 25 bp, Homo sapien
cttgtacccaggaaggttctatgga

SEQ ID NO: 1762786 - DNA, 25 bp, Homo sapien
gggaaactaccctgagatatgttga

SEQ ID NO: 1762787 - DNA, 25 bp, Homo sapien
tgcccagtctcagtaaaaagctttt

SEQ ID NO: 1762788 - DNA, 25 bp, Homo sapien
ggaaagctcaggcatcagttctaat

SEQ ID NO: 1762789 - DNA, 25 bp, Homo sapien
gagcaactctgtcccacacagcgtt

SEQ ID NO: 1762790 - DNA, 25 bp, Homo sapien
ctgtgaggttggatcgagcaactct

SEQ ID NO: 1762791 - DNA, 25 bp, Homo sapien
cattgtggcaaagactaatgtcctc

SEQ ID NO: 1762792 - DNA, 25 bp, Homo sapien
tcttctgtacaggtgcaatagtcct

SEQ ID NO: 1762793 - DNA, 25 bp, Homo sapien
ccaaaattctcctaatggtcagtct

SEQ ID NO: 1762794 - DNA, 25 bp, Homo sapien
gtcttacagctttggcatgatcctc

SEQ ID NO: 1762795 - DNA, 25 bp, Homo sapien
aaattctcctaatggtcagtcttac

SEQ ID NO: 1762796 - DNA, 25 bp, Homo sapien
atggtcagtcttacagctttggcat

SEQ ID NO: 1762797 - DNA, 25 bp, Homo sapien
gaggatgataggtaagtgtccagcc

SEQ ID NO: 1762798 - DNA, 25 bp, Homo sapien
ggtctgctgatgtatgagcaagccc

SEQ ID NO: 1762799 - DNA, 25 bp, Homo sapien
cctaagtgagctggacagtcacaga

SEQ ID NO: 1762800 - DNA, 25 bp, Homo sapien
gtgtccagcctagagcaaagctccc

SEQ ID NO: 1762801 - DNA, 25 bp, Homo sapien
taagtgagttcactactgctcagca

SEQ ID NO: 1762802 - DNA, 25 bp, Homo sapien
gactcattgtgactgccaaactctc

SEQ ID NO: 1762803 - DNA, 25 bp, Homo sapien
cagctagagccaaaccaaagtggtc

SEQ ID NO: 1762804 - DNA, 25 bp, Homo sapien
tcatttacagcctggactctagtca

SEQ ID NO: 1762805 - DNA, 25 bp, Homo sapien
gcttcaacaggtagataattgtgtt

SEQ ID NO: 1762806 - DNA, 25 bp, Homo sapien
agttgtgtgagcttcaacaggtaga

SEQ ID NO: 1762807 - DNA, 25 bp, Homo sapien
tgtgtgagcttcaacaggtagataa

SEQ ID NO: 1762808 - DNA, 25 bp, Homo sapien
gtgagcttcaacaggtagataattg

SEQ ID NO: 1762809 - DNA, 25 bp, Homo sapien
caccaccacagatcctaatagcagg

SEQ ID NO: 1762810 - DNA, 25 bp, Homo sapien
gaaacaactaaaaccagacaggcac

SEQ ID NO: 1762811 - DNA, 25 bp, Homo sapien
taatagcaggccagatcaagatgca

SEQ ID NO: 1762812 - DNA, 25 bp, Homo sapien
taactcgctgggtggtagagcccat

SEQ ID NO: 1762813 - DNA, 25 bp, Homo sapien
tgggagacatctgcagtaggggcca

SEQ ID NO: 1762814 - DNA, 25 bp, Homo sapien
ggagacatctgcagtaggggccaac

SEQ ID NO: 1762815 - DNA, 25 bp, Homo sapien
gagacatctgcagtaggggccaaca

SEQ ID NO: 1762816 - DNA, 25 bp, Homo sapien
actgggagacatctgcagtaggggc

SEQ ID NO: 1762817 - DNA, 25 bp, Homo sapien
ttctatcatagattaggaaatggag

SEQ ID NO: 1762818 - DNA, 25 bp, Homo sapien
aagccaaagcaaggcggggcatcac

SEQ ID NO: 1762819 - DNA, 25 bp, Homo sapien
tattctatcatagattaggaaatgg

SEQ ID NO: 1762820 - DNA, 25 bp, Homo sapien
tatattctatcatagattaggaaat

SEQ ID NO: 1762821 - DNA, 25 bp, Homo sapien
tcccttagctagtttgatgggcagg

SEQ ID NO: 1762822 - DNA, 25 bp, Homo sapien
ggcaggtttagtgaagggatccctg

SEQ ID NO: 1762823 - DNA, 25 bp, Homo sapien
ttccttcccttagctagtttgatgg

SEQ ID NO: 1762824 - DNA, 25 bp, Homo sapien
tagtttgatgggcaggtttagtgaa

SEQ ID NO: 1762825 - DNA, 25 bp, Homo sapien
tagggggagtcttgggcacatgagc

SEQ ID NO: 1762826 - DNA, 25 bp, Homo sapien
gcagaggagccacagttgcttgtca

SEQ ID NO: 1762827 - DNA, 25 bp, Homo sapien
gggtagggggagtcttgggcacatg

SEQ ID NO: 1762828 - DNA, 25 bp, Homo sapien
cagaggagccacagttgcttgtcat

SEQ ID NO: 1762829 - DNA, 25 bp, Homo sapien
gcagtttctgagcctgataatctta

SEQ ID NO: 1762830 - DNA, 25 bp, Homo sapien
agtttctgagcctgataatcttaaa

SEQ ID NO: 1762831 - DNA, 25 bp, Homo sapien
cagtttctgagcctgataatcttaa

SEQ ID NO: 1762832 - DNA, 25 bp, Homo sapien
catctcctgtcaggaattcggagat

SEQ ID NO: 1762833 - DNA, 25 bp, Homo sapien
gtttaccagttgatagacaataggg

SEQ ID NO: 1762834 - DNA, 25 bp, Homo sapien
tgctgctgcaattcatccatgtttt

SEQ ID NO: 1762835 - DNA, 25 bp, Homo sapien
gaatgttcgttgatctgtttaccag

SEQ ID NO: 1762836 - DNA, 25 bp, Homo sapien
tgccttttctacaatgctacataaa

SEQ ID NO: 1762837 - DNA, 25 bp, Homo sapien
ttgttcatactatagaaacattaga

SEQ ID NO: 1762838 - DNA, 25 bp, Homo sapien
aataaaataggccagatagggtggc

SEQ ID NO: 1762839 - DNA, 25 bp, Homo sapien
gttcatactatagaaacattagaaa

SEQ ID NO: 1762840 - DNA, 25 bp, Homo sapien
tagaaaatacaaataagcaaaaata

SEQ ID NO: 1762841 - DNA, 25 bp, Homo sapien
caaatccccttgttatggaatcttt

SEQ ID NO: 1762842 - DNA, 25 bp, Homo sapien
tatctcatcataccaaatccccttg

SEQ ID NO: 1762843 - DNA, 25 bp, Homo sapien
atcataccaaatccccttgttatgg

SEQ ID NO: 1762844 - DNA, 25 bp, Homo sapien
tatatctcatcataccaaatcccct

SEQ ID NO: 1762845 - DNA, 25 bp, Homo sapien
gaaagttgctgaatcactctttgag

SEQ ID NO: 1762846 - DNA, 25 bp, Homo sapien
gaggctactgcaagaatccgggagc

SEQ ID NO: 1762847 - DNA, 25 bp, Homo sapien
ccaagctggttgtgggaatgaccca

SEQ ID NO: 1762848 - DNA, 25 bp, Homo sapien
cacaagttgcaaggatacagctcgg

SEQ ID NO: 1762849 - DNA, 25 bp, Homo sapien
tatactgacaggagcatagtgtgca

SEQ ID NO: 1762850 - DNA, 25 bp, Homo sapien
taacttgtgcagctattggaccaac

SEQ ID NO: 1762851 - DNA, 25 bp, Homo sapien
tttaatgacctcgtaagaatgtggc

SEQ ID NO: 1762852 - DNA, 25 bp, Homo sapien
gatgacaccatatgcaataccagtt

SEQ ID NO: 1762853 - DNA, 25 bp, Homo sapien
catttgtcttgataactccagtcat

SEQ ID NO: 1762854 - DNA, 25 bp, Homo sapien
tctacatcatttgtcttgataactc

SEQ ID NO: 1762855 - DNA, 25 bp, Homo sapien
catcatttgtcttgataactccagt

SEQ ID NO: 1762856 - DNA, 25 bp, Homo sapien
cttttctacatcatttgtcttgata

SEQ ID NO: 1762857 - DNA, 25 bp, Homo sapien
ttctaagacggactcttgctctgtt

SEQ ID NO: 1762858 - DNA, 25 bp, Homo sapien
ttaccacattggtaaggctggtctc

SEQ ID NO: 1762859 - DNA, 25 bp, Homo sapien
ttttaccacattggtaaggctggtc

SEQ ID NO: 1762860 - DNA, 25 bp, Homo sapien
tagagatggggttttaccacattgg

SEQ ID NO: 1762861 - DNA, 25 bp, Homo sapien
gagaaaatcggcagtttggcatgta

SEQ ID NO: 1762862 - DNA, 25 bp, Homo sapien
tcggcagtttggcatgtacacatct

SEQ ID NO: 1762863 - DNA, 25 bp, Homo sapien
tctgtgtacaccacacctgcatatt

SEQ ID NO: 1762864 - DNA, 25 bp, Homo sapien
tgtacaccacacctgcatattcagt

SEQ ID NO: 1762865 - DNA, 25 bp, Homo sapien
taagcactgagtatccctacaccaa

SEQ ID NO: 1762866 - DNA, 25 bp, Homo sapien
gcagaatgaccactttactgggatg

SEQ ID NO: 1762867 - DNA, 25 bp, Homo sapien
tacaccaaaagtataacaagtgcag

SEQ ID NO: 1762868 - DNA, 25 bp, Homo sapien
cctaaataagaacttgagggccagg

SEQ ID NO: 1762869 - DNA, 25 bp, Homo sapien
cagaacattgagcttggatacccaa

SEQ ID NO: 1762870 - DNA, 25 bp, Homo sapien
caagcaacttgcaggagtcatctcg

SEQ ID NO: 1762871 - DNA, 25 bp, Homo sapien
ggtcaccttacagctgcacctcagg

SEQ ID NO: 1762872 - DNA, 25 bp, Homo sapien
taacaccctctgacatttctgggag

SEQ ID NO: 1762873 - DNA, 25 bp, Homo sapien
ctgactctgatgctggccagcagtc

SEQ ID NO: 1762874 - DNA, 25 bp, Homo sapien
tctggtgaaaaatccctggatcttt

SEQ ID NO: 1762875 - DNA, 25 bp, Homo sapien
tctgatgctggccagcagtctctgg

SEQ ID NO: 1762876 - DNA, 25 bp, Homo sapien
ccagcagtctctggtgaaaaatccc

SEQ ID NO: 1762877 - DNA, 25 bp, Homo sapien
gagctgctttcttttcacgtgcttc

SEQ ID NO: 1762878 - DNA, 25 bp, Homo sapien
cataaattggtgtatgagtccctct

SEQ ID NO: 1762879 - DNA, 25 bp, Homo sapien
gagtccctctaaggacttttgcaaa

SEQ ID NO: 1762880 - DNA, 25 bp, Homo sapien
aatgcatttcctgtatcatgtggca

SEQ ID NO: 1762881 - DNA, 25 bp, Homo sapien
tgtcaatgccgaatgctgatgtggt

SEQ ID NO: 1762882 - DNA, 25 bp, Homo sapien
ggactcagtgacaatccataaataa

SEQ ID NO: 1762883 - DNA, 25 bp, Homo sapien
tctggcatactgctgaggggactca

SEQ ID NO: 1762884 - DNA, 25 bp, Homo sapien
aaagcattaacaatgtttgtgtcaa

SEQ ID NO: 1762885 - DNA, 25 bp, Homo sapien
tgtggaacgttagagcccaggtagg

SEQ ID NO: 1762886 - DNA, 25 bp, Homo sapien
tagagcccaggtagggcgaggtggg

SEQ ID NO: 1762887 - DNA, 25 bp, Homo sapien
aacgttagagcccaggtagggcgag

SEQ ID NO: 1762888 - DNA, 25 bp, Homo sapien
caaaggaataaccaagtgtgggttg

SEQ ID NO: 1762889 - DNA, 25 bp, Homo sapien
ggataatcctccaagccaaaacagt

SEQ ID NO: 1762890 - DNA, 25 bp, Homo sapien
cggcatcagtggtgaaaagggtttc

SEQ ID NO: 1762891 - DNA, 25 bp, Homo sapien
tagaagttgccagtttagcaggaca

SEQ ID NO: 1762892 - DNA, 25 bp, Homo sapien
gagctaattccacctacggcatcag

SEQ ID NO: 1762893 - DNA, 25 bp, Homo sapien
tttggatgtagacatgagaaacgta

SEQ ID NO: 1762894 - DNA, 25 bp, Homo sapien
ttggatgtagacatgagaaacgtat

SEQ ID NO: 1762895 - DNA, 25 bp, Homo sapien
cctctagtgactggaggattagatg

SEQ ID NO: 1762896 - DNA, 25 bp, Homo sapien
gattagatgatcatgttgcaacttg

SEQ ID NO: 1762897 - DNA, 25 bp, Homo sapien
gatgatcatgttgcaacttgttccg

SEQ ID NO: 1762898 - DNA, 25 bp, Homo sapien
ctggaggattagatgatcatgttgc

SEQ ID NO: 1762899 - DNA, 25 bp, Homo sapien
gagcagccgtggcttgtctaaggtc

SEQ ID NO: 1762900 - DNA, 25 bp, Homo sapien
tgaagagatacttccctctccctga

SEQ ID NO: 1762901 - DNA, 25 bp, Homo sapien
ctttcagtctagaaagagaccctag

SEQ ID NO: 1762902 - DNA, 25 bp, Homo sapien
tcctaggactagaacccggatgttc

SEQ ID NO: 1762903 - DNA, 25 bp, Homo sapien
ctatgatcatgggaaatgatccaga

SEQ ID NO: 1762904 - DNA, 25 bp, Homo sapien
ttcttaatgaaccaggaagaatcag

SEQ ID NO: 1762905 - DNA, 25 bp, Homo sapien
gaaatgatccagaaagagtctctga

SEQ ID NO: 1762906 - DNA, 25 bp, Homo sapien
tttcttcttaatgaaccaggaagaa

SEQ ID NO: 1762907 - DNA, 25 bp, Homo sapien
ttcgtcaactacctcatccactttg

SEQ ID NO: 1762908 - DNA, 25 bp, Homo sapien
actacctcatccactttgccaaaca

SEQ ID NO: 1762909 - DNA, 25 bp, Homo sapien
ttaccccagctgcttcgtcaactac

SEQ ID NO: 1762910 - DNA, 25 bp, Homo sapien
gctgcttcgtcaactacctcatcca

SEQ ID NO: 1762911 - DNA, 25 bp, Homo sapien
aaagaggtctcagtacatggctaca

SEQ ID NO: 1762912 - DNA, 25 bp, Homo sapien
ccattttgaacattccaccctagtt

SEQ ID NO: 1762913 - DNA, 25 bp, Homo sapien
gagtcatctcagcaagggatgcaag

SEQ ID NO: 1762914 - DNA, 25 bp, Homo sapien
caatcaaagtattagactagctatt

SEQ ID NO: 1762915 - DNA, 25 bp, Homo sapien
aaggctttattcagacttacaccga

SEQ ID NO: 1762916 - DNA, 25 bp, Homo sapien
tattcagacttacaccgatttgagg

SEQ ID NO: 1762917 - DNA, 25 bp, Homo sapien
gtttgtggaatgcaaggttaggttc

SEQ ID NO: 1762918 - DNA, 25 bp, Homo sapien
gaatgcaaggttaggttcttaccta

SEQ ID NO: 1762919 - DNA, 25 bp, Homo sapien
gatgtgtccattctgggcctctcag

SEQ ID NO: 1762920 - DNA, 25 bp, Homo sapien
gttgtgcagagctcttccccggaga

SEQ ID NO: 1762921 - DNA, 25 bp, Homo sapien
cagatgcttgtgtatcctcagacca

SEQ ID NO: 1762922 - DNA, 25 bp, Homo sapien
aaccattgcaggtgccagtgtccca

SEQ ID NO: 1762923 - DNA, 25 bp, Homo sapien
gtggttcccttgtgacaccgttcat

SEQ ID NO: 1762924 - DNA, 25 bp, Homo sapien
ggcttcagaacactcatgtctacag

SEQ ID NO: 1762925 - DNA, 25 bp, Homo sapien
aaaaaaaacatcctgctgcggctgc

SEQ ID NO: 1762926 - DNA, 25 bp, Homo sapien
tcaggtggttcccttgtgacaccgt

SEQ ID NO: 1762927 - DNA, 25 bp, Homo sapien
ggagtaaactgcctgaaaaggtcat

SEQ ID NO: 1762928 - DNA, 25 bp, Homo sapien
cggaaaggtatcattcctgggagta

SEQ ID NO: 1762929 - DNA, 25 bp, Homo sapien
agcccttgtacagtgccccggaaag

SEQ ID NO: 1762930 - DNA, 25 bp, Homo sapien
tcctgggagtaaactgcctgaaaag

SEQ ID NO: 1762931 - DNA, 25 bp, Homo sapien
aagcagatgtaggtcccaggtctgt

SEQ ID NO: 1762932 - DNA, 25 bp, Homo sapien
ggaagcagatgtaggtcccaggtct

SEQ ID NO: 1762933 - DNA, 25 bp, Homo sapien
taggagggtgggtattccccatctg

SEQ ID NO: 1762934 - DNA, 25 bp, Homo sapien
ggtattccccatctgagtcttcatg

SEQ ID NO: 1762935 - DNA, 25 bp, Homo sapien
ccactgggacacgttgtgctttaac

SEQ ID NO: 1762936 - DNA, 25 bp, Homo sapien
tgctgaagggtctgttcctactgac

SEQ ID NO: 1762937 - DNA, 25 bp, Homo sapien
agatcgaaattgattgctgccagcg

SEQ ID NO: 1762938 - DNA, 25 bp, Homo sapien
gacagaatctataccggccactggg

SEQ ID NO: 1762939 - DNA, 25 bp, Homo sapien
tagttcggtatacacagggcatggt

SEQ ID NO: 1762940 - DNA, 25 bp, Homo sapien
cagtctcagaaagctacaaaagcgt

SEQ ID NO: 1762941 - DNA, 25 bp, Homo sapien
tcaagagtagtcgttggccatcaca

SEQ ID NO: 1762942 - DNA, 25 bp, Homo sapien
tagttctcacaaccaccgtaggaag

SEQ ID NO: 1762943 - DNA, 25 bp, Homo sapien
aagtaccacatgatgctactcaggg

SEQ ID NO: 1762944 - DNA, 25 bp, Homo sapien
gatcttggctccagaaatctcagga

SEQ ID NO: 1762945 - DNA, 25 bp, Homo sapien
agtcccttgacacagtacagcttaa

SEQ ID NO: 1762946 - DNA, 25 bp, Homo sapien
gccattttcataccttgacgcagtg

SEQ ID NO: 1762947 - DNA, 25 bp, Homo sapien
catgcccactttgtctgagtttccc

SEQ ID NO: 1762948 - DNA, 25 bp, Homo sapien
ctttgtctgagtttcccatgatgca

SEQ ID NO: 1762949 - DNA, 25 bp, Homo sapien
agtttcccatgatgcaggaagctgc

SEQ ID NO: 1762950 - DNA, 25 bp, Homo sapien
ttctcaccaatcatgcccactttgt

SEQ ID NO: 1762951 - DNA, 25 bp, Homo sapien
gaccacatatgcagcggcccctggc

SEQ ID NO: 1762952 - DNA, 25 bp, Homo sapien
tcagtgctaatgctgaccacatatg

SEQ ID NO: 1762953 - DNA, 25 bp, Homo sapien
aacgccgggctcttgctgcactttg

SEQ ID NO: 1762954 - DNA, 25 bp, Homo sapien
caagatcagtgctaatgctgaccac

SEQ ID NO: 1762955 - DNA, 25 bp, Homo sapien
cagctatggaggtggtgaaattcgt

SEQ ID NO: 1762956 - DNA, 25 bp, Homo sapien
ctgaggacagcatacaacgtaggca

SEQ ID NO: 1762957 - DNA, 25 bp, Homo sapien
cttattcgatggacacagctatgga

SEQ ID NO: 1762958 - DNA, 25 bp, Homo sapien
aacgtaggcataagctcttagagca

SEQ ID NO: 1762959 - DNA, 25 bp, Homo sapien
cagtgctctcctctgtcgctctgat

SEQ ID NO: 1762960 - DNA, 25 bp, Homo sapien
taagggctcgcggattctgggtggt

SEQ ID NO: 1762961 - DNA, 25 bp, Homo sapien
tctgatttccattcacgctgagcag

SEQ ID NO: 1762962 - DNA, 25 bp, Homo sapien
cattcacgctgagcagtctgcactc

SEQ ID NO: 1762963 - DNA, 25 bp, Homo sapien
gtctgctgctctaagctgacccagg

SEQ ID NO: 1762964 - DNA, 25 bp, Homo sapien
cagaagagcgagatttcagggcagc

SEQ ID NO: 1762965 - DNA, 25 bp, Homo sapien
catcctgactgggtaaagcttatcc

SEQ ID NO: 1762966 - DNA, 25 bp, Homo sapien
gactttagcctgagaaaacactggt

SEQ ID NO: 1762967 - DNA, 25 bp, Homo sapien
cagccatcaagaatgaggtcatttc

SEQ ID NO: 1762968 - DNA, 25 bp, Homo sapien
gttagcagcagccatcaagaatgag

SEQ ID NO: 1762969 - DNA, 25 bp, Homo sapien
cataagttagcagcagccatcaaga

SEQ ID NO: 1762970 - DNA, 25 bp, Homo sapien
taagttagcagcagccatcaagaat

SEQ ID NO: 1762971 - DNA, 25 bp, Homo sapien
tattgggcagggacccagcatctca

SEQ ID NO: 1762972 - DNA, 25 bp, Homo sapien
gatgctcttgagtggacttgtccct

SEQ ID NO: 1762973 - DNA, 25 bp, Homo sapien
tccttaagcacatactccaaaaaca

SEQ ID NO: 1762974 - DNA, 25 bp, Homo sapien
ccctgggtaaattgattggatgtcc

SEQ ID NO: 1762975 - DNA, 25 bp, Homo sapien
caatttgccagaagaattgcgtaag

SEQ ID NO: 1762976 - DNA, 25 bp, Homo sapien
attgcgtaagttgtttgcaacattg

SEQ ID NO: 1762977 - DNA, 25 bp, Homo sapien
tccagccagaggaactctaaaaaca

SEQ ID NO: 1762978 - DNA, 25 bp, Homo sapien
gccacctaatagagctggtgctcct

SEQ ID NO: 1762979 - DNA, 25 bp, Homo sapien
agaaaccacagaagcggcagacgca

SEQ ID NO: 1762980 - DNA, 25 bp, Homo sapien
ggcagacgcatgctctccatttcct

SEQ ID NO: 1762981 - DNA, 25 bp, Homo sapien
cacacgaggtcatctgattgttcat

SEQ ID NO: 1762982 - DNA, 25 bp, Homo sapien
tccaaatctcacacgaggtcatctg

SEQ ID NO: 1762983 - DNA, 25 bp, Homo sapien
tgaacaatagatgcccatgccctgc

SEQ ID NO: 1762984 - DNA, 25 bp, Homo sapien
gaatcagaaagccaacaccgctgtg

SEQ ID NO: 1762985 - DNA, 25 bp, Homo sapien
gaactgcctgagcacaagaggtcat

SEQ ID NO: 1762986 - DNA, 25 bp, Homo sapien
agagacagttttagtcccaccaccg

SEQ ID NO: 1762987 - DNA, 25 bp, Homo sapien
gcccactttattaacaatggtgaag

SEQ ID NO: 1762988 - DNA, 25 bp, Homo sapien
cagaaagcggtaattagtttgaaca

SEQ ID NO: 1762989 - DNA, 25 bp, Homo sapien
aatatgaagttcctattagagtgga

SEQ ID NO: 1762990 - DNA, 25 bp, Homo sapien
ctcagaagcccacaaaccctcatat

SEQ ID NO: 1762991 - DNA, 25 bp, Homo sapien
tcctgggtagctgcgcgccatcacg

SEQ ID NO: 1762992 - DNA, 25 bp, Homo sapien
cctgggtagctgcgcgccatcacgt

SEQ ID NO: 1762993 - DNA, 25 bp, Homo sapien
ctcctgggtagctgcgcgccatcac

SEQ ID NO: 1762994 - DNA, 25 bp, Homo sapien
tcgagcagcctaccagcaagtgatc

SEQ ID NO: 1762995 - DNA, 25 bp, Homo sapien
aatacggcaaacatcacagaggtgg

SEQ ID NO: 1762996 - DNA, 25 bp, Homo sapien
taacagatatctggacccctcagct

SEQ ID NO: 1762997 - DNA, 25 bp, Homo sapien
gcaccagtaagtatgacaggcccaa

SEQ ID NO: 1762998 - DNA, 25 bp, Homo sapien
cccaggttgcacattcacataagtc

SEQ ID NO: 1762999 - DNA, 25 bp, Homo sapien
caggttgcacattcacataagtcac

SEQ ID NO: 1763000 - DNA, 25 bp, Homo sapien
ctcccaggttgcacattcacataag

SEQ ID NO: 1763001 - DNA, 25 bp, Homo sapien
agccctggctccaagtgcacgtagg

SEQ ID NO: 1763002 - DNA, 25 bp, Homo sapien
catggaggactatattgtcagtacc

SEQ ID NO: 1763003 - DNA, 25 bp, Homo sapien
tctgctcacataaactggcataact

SEQ ID NO: 1763004 - DNA, 25 bp, Homo sapien
ttccagacaaagctggtcagattcc

SEQ ID NO: 1763005 - DNA, 25 bp, Homo sapien
gggaacactcatttcttactgatcc

SEQ ID NO: 1763006 - DNA, 25 bp, Homo sapien
gcaaatagttatacaccgtccttgt

SEQ ID NO: 1763007 - DNA, 25 bp, Homo sapien
cagaacctgtccatccacttatcaa

SEQ ID NO: 1763008 - DNA, 25 bp, Homo sapien
taatagacaggttgaccagagaatc

SEQ ID NO: 1763009 - DNA, 25 bp, Homo sapien
tttcatggaattcacagtctactgg

SEQ ID NO: 1763010 - DNA, 25 bp, Homo sapien
cagaatgagactcagtcttaaaaac

SEQ ID NO: 1763011 - DNA, 25 bp, Homo sapien
aaaatagcaaacaggtattacttct

SEQ ID NO: 1763012 - DNA, 25 bp, Homo sapien
ataaaaatagcaaacaggtattact

SEQ ID NO: 1763013 - DNA, 25 bp, Homo sapien
atagcaaacaggtattacttctata

SEQ ID NO: 1763014 - DNA, 25 bp, Homo sapien
ttccttgattagttgtgcaaaaata

SEQ ID NO: 1763015 - DNA, 25 bp, Homo sapien
cttttccttgattagttgtgcaaaa

SEQ ID NO: 1763016 - DNA, 25 bp, Homo sapien
ccttgattagttgtgcaaaaataaa

SEQ ID NO: 1763017 - DNA, 25 bp, Homo sapien
ttttccttgattagttgtgcaaaaa

SEQ ID NO: 1763018 - DNA, 25 bp, Homo sapien
cccttggcaaagtatgagagaacct

SEQ ID NO: 1763019 - DNA, 25 bp, Homo sapien
gcaccgccctctggtagagactgga

SEQ ID NO: 1763020 - DNA, 25 bp, Homo sapien
tcccagggtcctagttggcaggtct

SEQ ID NO: 1763021 - DNA, 25 bp, Homo sapien
caaaggtcatgccagagttacaagc

SEQ ID NO: 1763022 - DNA, 25 bp, Homo sapien
taaactacaaccctagagccaatgg

SEQ ID NO: 1763023 - DNA, 25 bp, Homo sapien
tagccatgtgacctcggaaaagtta

SEQ ID NO: 1763024 - DNA, 25 bp, Homo sapien
tcagtgctcccaaccgagatgcaag

SEQ ID NO: 1763025 - DNA, 25 bp, Homo sapien
caagcggttaagtgcacaggatctg

SEQ ID NO: 1763026 - DNA, 25 bp, Homo sapien
caaatcaggtcggttcatactgcac

SEQ ID NO: 1763027 - DNA, 25 bp, Homo sapien
tgggtttatgtccaagggccagtaa

SEQ ID NO: 1763028 - DNA, 25 bp, Homo sapien
gtgtgtctctaggacgcttcaaacc

SEQ ID NO: 1763029 - DNA, 25 bp, Homo sapien
tttctgatccgaagtagatctcagg

SEQ ID NO: 1763030 - DNA, 25 bp, Homo sapien
ctttggataagggcccttctcaggg

SEQ ID NO: 1763031 - DNA, 25 bp, Homo sapien
ttctcagggaagaacatgatggtaa

SEQ ID NO: 1763032 - DNA, 25 bp, Homo sapien
ttggataagggcccttctcagggaa

SEQ ID NO: 1763033 - DNA, 25 bp, Homo sapien
ccttctcagggaagaacatgatggt

SEQ ID NO: 1763034 - DNA, 25 bp, Homo sapien
gaagggtcactaggaaagcagagca

SEQ ID NO: 1763035 - DNA, 25 bp, Homo sapien
cacaaaagcagtggaacagaagcaa

SEQ ID NO: 1763036 - DNA, 25 bp, Homo sapien
gaagcaactggtggactctatagct

SEQ ID NO: 1763037 - DNA, 25 bp, Homo sapien
ctatagctttgtctagtggccagtt

SEQ ID NO: 1763038 - DNA, 25 bp, Homo sapien
ggaatgcattcttgacgctaaagga

SEQ ID NO: 1763039 - DNA, 25 bp, Homo sapien
taggttctgtacagcacagtctgcc

SEQ ID NO: 1763040 - DNA, 25 bp, Homo sapien
tctgccagtgagtatgtggaatgca

SEQ ID NO: 1763041 - DNA, 25 bp, Homo sapien
tgtccacaggattcgccttaggttc

SEQ ID NO: 1763042 - DNA, 25 bp, Homo sapien
tgtctggaaggagaatggatctaca

SEQ ID NO: 1763043 - DNA, 25 bp, Homo sapien
ggaattttcttcaggcttcaaagga

SEQ ID NO: 1763044 - DNA, 25 bp, Homo sapien
tggatctacataatgagatgacaag

SEQ ID NO: 1763045 - DNA, 25 bp, Homo sapien
gcttcaaaggagaccggtttgccat

SEQ ID NO: 1763046 - DNA, 25 bp, Homo sapien
tggcgcctcattgcaggtcctccct

SEQ ID NO: 1763047 - DNA, 25 bp, Homo sapien
ctggagctgccggtcattcacactt

SEQ ID NO: 1763048 - DNA, 25 bp, Homo sapien
tggagctgccggtcattcacacttg

SEQ ID NO: 1763049 - DNA, 25 bp, Homo sapien
ggctgctccagtctggcgcctcatt

SEQ ID NO: 1763050 - DNA, 25 bp, Homo sapien
cagccaggctgtttcgcttgaatca

SEQ ID NO: 1763051 - DNA, 25 bp, Homo sapien
catcatggaaggtatatactagcag

SEQ ID NO: 1763052 - DNA, 25 bp, Homo sapien
catcatgcgatatgtacattcatca

SEQ ID NO: 1763053 - DNA, 25 bp, Homo sapien
gctgtttcgcttgaatcatcatgcg

SEQ ID NO: 1763054 - DNA, 25 bp, Homo sapien
taagcacatgggactgactgcatgc

SEQ ID NO: 1763055 - DNA, 25 bp, Homo sapien
tgaagtcccaatctatagcctgaag

SEQ ID NO: 1763056 - DNA, 25 bp, Homo sapien
tgccagtgaggataaacttgtacct

SEQ ID NO: 1763057 - DNA, 25 bp, Homo sapien
cccagaactgtcacaatgccagtga

SEQ ID NO: 1763058 - DNA, 25 bp, Homo sapien
gacccagagggaggattttactgca

SEQ ID NO: 1763059 - DNA, 25 bp, Homo sapien
gtcagcatcaaagcaccggtgttat

SEQ ID NO: 1763060 - DNA, 25 bp, Homo sapien
cctgtactgctaacgaatgactttc

SEQ ID NO: 1763061 - DNA, 25 bp, Homo sapien
caatgtgggtgctaatgtggagact

SEQ ID NO: 1763062 - DNA, 25 bp, Homo sapien
agcggaaccgcccaggatcagattg

SEQ ID NO: 1763063 - DNA, 25 bp, Homo sapien
catgtgactctgaagctgacgaact

SEQ ID NO: 1763064 - DNA, 25 bp, Homo sapien
ctttcaattccgtagccagctgctc

SEQ ID NO: 1763065 - DNA, 25 bp, Homo sapien
cagtgccaacaatcctagtgctttc

SEQ ID NO: 1763066 - DNA, 25 bp, Homo sapien
cagtcccggtccgtcatgatttcca

SEQ ID NO: 1763067 - DNA, 25 bp, Homo sapien
agtcccggtccgtcatgatttccat

SEQ ID NO: 1763068 - DNA, 25 bp, Homo sapien
gtcccggtccgtcatgatttccatt

SEQ ID NO: 1763069 - DNA, 25 bp, Homo sapien
cccagtcccggtccgtcatgatttc

SEQ ID NO: 1763070 - DNA, 25 bp, Homo sapien
ttctcagcttcccacgttgcgtctt

SEQ ID NO: 1763071 - DNA, 25 bp, Homo sapien
ggaacaagaggtttcacgaagcttc

SEQ ID NO: 1763072 - DNA, 25 bp, Homo sapien
ctgtgaaggcaaagaaggaccttcc

SEQ ID NO: 1763073 - DNA, 25 bp, Homo sapien
tgcattcttgctatttgttggtgtg

SEQ ID NO: 1763074 - DNA, 25 bp, Homo sapien
tgattaacgtcgacagatggtgaca

SEQ ID NO: 1763075 - DNA, 25 bp, Homo sapien
tagtggttatagcacagggacgatc

SEQ ID NO: 1763076 - DNA, 25 bp, Homo sapien
tggtgacataaaggacacccatgcc

SEQ ID NO: 1763077 - DNA, 25 bp, Homo sapien
aaccacgagtttggcttatccatgc

SEQ ID NO: 1763078 - DNA, 25 bp, Homo sapien
tccctccttctcaaacttcttgctc

SEQ ID NO: 1763079 - DNA, 25 bp, Homo sapien
tcctcccaacctccctccttctcaa

SEQ ID NO: 1763080 - DNA, 25 bp, Homo sapien
caacctccctccttctcaaacttct

SEQ ID NO: 1763081 - DNA, 25 bp, Homo sapien
ccttctcaaacttcttgctcaacat

SEQ ID NO: 1763082 - DNA, 25 bp, Homo sapien
cttggcctaacttgtcccttctcca

SEQ ID NO: 1763083 - DNA, 25 bp, Homo sapien
ccttctccactcacatccccggtgg

SEQ ID NO: 1763084 - DNA, 25 bp, Homo sapien
tgtcctccttggcctaacttgtccc

SEQ ID NO: 1763085 - DNA, 25 bp, Homo sapien
actcacatccccggtgggacagcat

SEQ ID NO: 1763086 - DNA, 25 bp, Homo sapien
cacgcagtacatttgtaaactgccc

SEQ ID NO: 1763087 - DNA, 25 bp, Homo sapien
agcccagctcgtcatgtggcatgaa

SEQ ID NO: 1763088 - DNA, 25 bp, Homo sapien
gatatgttctgagctcccagtcaaa

SEQ ID NO: 1763089 - DNA, 25 bp, Homo sapien
aagtcagactgacacgggccctctg

SEQ ID NO: 1763090 - DNA, 25 bp, Homo sapien
gatcaaggctgatctcgccgtgaga

SEQ ID NO: 1763091 - DNA, 25 bp, Homo sapien
gattattagactcagagcgccagct

SEQ ID NO: 1763092 - DNA, 25 bp, Homo sapien
ccctgtaatccggtggcagatcaag

SEQ ID NO: 1763093 - DNA, 25 bp, Homo sapien
ttaatcagccgcttctgaggcccct

SEQ ID NO: 1763094 - DNA, 25 bp, Homo sapien
ggccagcttgcctattttctcatat

SEQ ID NO: 1763095 - DNA, 25 bp, Homo sapien
cagcggggagtcacacatccactgt

SEQ ID NO: 1763096 - DNA, 25 bp, Homo sapien
tgaagtctgaatatcagatgggcct

SEQ ID NO: 1763097 - DNA, 25 bp, Homo sapien
ttctctgttgagaactatccctgcc

SEQ ID NO: 1763098 - DNA, 25 bp, Homo sapien
ctgggcagtcaccactttgatatac

SEQ ID NO: 1763099 - DNA, 25 bp, Homo sapien
agtggatctgggcagtcaccacttt

SEQ ID NO: 1763100 - DNA, 25 bp, Homo sapien
gatctgggcagtcaccactttgata

SEQ ID NO: 1763101 - DNA, 25 bp, Homo sapien
tggatctgggcagtcaccactttga

SEQ ID NO: 1763102 - DNA, 25 bp, Homo sapien
cccaaacaccttcaaatccatgcca

SEQ ID NO: 1763103 - DNA, 25 bp, Homo sapien
tagcctttgtactgcgtttccttac

SEQ ID NO: 1763104 - DNA, 25 bp, Homo sapien
ttagcctttgtactgcgtttcctta

SEQ ID NO: 1763105 - DNA, 25 bp, Homo sapien
agattgctgacttcggattggcccg

SEQ ID NO: 1763106 - DNA, 25 bp, Homo sapien
cattgggtcgtggtgtaacatgtcc

SEQ ID NO: 1763107 - DNA, 25 bp, Homo sapien
tgacaatggctcgtgatcacagctg

SEQ ID NO: 1763108 - DNA, 25 bp, Homo sapien
gaatggcttacatcgagcgcatgaa

SEQ ID NO: 1763109 - DNA, 25 bp, Homo sapien
tgcaaatagctggtggtcaaaacct

SEQ ID NO: 1763110 - DNA, 25 bp, Homo sapien
gctgaagcacgacaagctggtccag

SEQ ID NO: 1763111 - DNA, 25 bp, Homo sapien
tcgtcaccgagtatatgaacaaagg

SEQ ID NO: 1763112 - DNA, 25 bp, Homo sapien
gaggaagcgcagatcatgaagaagc

SEQ ID NO: 1763113 - DNA, 25 bp, Homo sapien
catgttattagcacgttgagctgaa

SEQ ID NO: 1763114 - DNA, 25 bp, Homo sapien
taatcccctgggtaatctagatact

SEQ ID NO: 1763115 - DNA, 25 bp, Homo sapien
tatagactgtatcgtacctgggctc

SEQ ID NO: 1763116 - DNA, 25 bp, Homo sapien
cccaggagtatctgacatggtggaa

SEQ ID NO: 1763117 - DNA, 25 bp, Homo sapien
agttcttggtcacatgggcctcacc

SEQ ID NO: 1763118 - DNA, 25 bp, Homo sapien
taatcaaggtacgttggctgggcta

SEQ ID NO: 1763119 - DNA, 25 bp, Homo sapien
gcttgcacgagactgaatactagga

SEQ ID NO: 1763120 - DNA, 25 bp, Homo sapien
gaagtcaccatcttttgaagcctag

SEQ ID NO: 1763121 - DNA, 25 bp, Homo sapien
gctaacagtctgatcaaacatacag

SEQ ID NO: 1763122 - DNA, 25 bp, Homo sapien
tatcttgaatggggtaaataagtta

SEQ ID NO: 1763123 - DNA, 25 bp, Homo sapien
aaagctaacagtctgatcaaacata

SEQ ID NO: 1763124 - DNA, 25 bp, Homo sapien
agctaacagtctgatcaaacataca

SEQ ID NO: 1763125 - DNA, 25 bp, Homo sapien
taaagtcactagagagggccacttg

SEQ ID NO: 1763126 - DNA, 25 bp, Homo sapien
catccttgtgcctaccgtgagaagc

SEQ ID NO: 1763127 - DNA, 25 bp, Homo sapien
ccaccgtagtcaggaggagtctttg

SEQ ID NO: 1763128 - DNA, 25 bp, Homo sapien
tcacgagtgctggatatggacccct

SEQ ID NO: 1763129 - DNA, 25 bp, Homo sapien
agagggacggcagcctgaaccagag

SEQ ID NO: 1763130 - DNA, 25 bp, Homo sapien
tgggtaccgctatggcacagacccc

SEQ ID NO: 1763131 - DNA, 25 bp, Homo sapien
agagctctgggtaccgctatggcac

SEQ ID NO: 1763132 - DNA, 25 bp, Homo sapien
agcactaccccagcttcggtgtgac

SEQ ID NO: 1763133 - DNA, 25 bp, Homo sapien
tgctggtcatgaatagaagcccacg

SEQ ID NO: 1763134 - DNA, 25 bp, Homo sapien
tacttgattggatatcaacatcagg

SEQ ID NO: 1763135 - DNA, 25 bp, Homo sapien
tcatgaatagaagcccacgtttttg

SEQ ID NO: 1763136 - DNA, 25 bp, Homo sapien
tctttgctggtcatgaatagaagcc

SEQ ID NO: 1763137 - DNA, 25 bp, Homo sapien
ccagggtgaggaaaccaacatcagg

SEQ ID NO: 1763138 - DNA, 25 bp, Homo sapien
ggtgaggaaaccaacatcagggaag

SEQ ID NO: 1763139 - DNA, 25 bp, Homo sapien
tttccttcaggcaataaagtgtagg

SEQ ID NO: 1763140 - DNA, 25 bp, Homo sapien
gctccttttgttcccgtcctcctga

SEQ ID NO: 1763141 - DNA, 25 bp, Homo sapien
gcacgacatattcaaccaccctggg

SEQ ID NO: 1763142 - DNA, 25 bp, Homo sapien
gacatattcaaccaccctgggctca

SEQ ID NO: 1763143 - DNA, 25 bp, Homo sapien
gagacacgcacgacatattcaacca

SEQ ID NO: 1763144 - DNA, 25 bp, Homo sapien
ctgagacacgcacgacatattcaac

SEQ ID NO: 1763145 - DNA, 25 bp, Homo sapien
taaatgcagacctctagtgaaaact

SEQ ID NO: 1763146 - DNA, 25 bp, Homo sapien
aatgcagacctctagtgaaaacttt

SEQ ID NO: 1763147 - DNA, 25 bp, Homo sapien
aaatgcagacctctagtgaaaactt

SEQ ID NO: 1763148 - DNA, 25 bp, Homo sapien
tttcagtgacgtggatttgggctgc

SEQ ID NO: 1763149 - DNA, 25 bp, Homo sapien
caaggccgtgtccctttagacccag

SEQ ID NO: 1763150 - DNA, 25 bp, Homo sapien
ctgcaagattgccaaggccgtgtcc

SEQ ID NO: 1763151 - DNA, 25 bp, Homo sapien
cagggcaaccctgcctgataccaga

SEQ ID NO: 1763152 - DNA, 25 bp, Homo sapien
tgtacctagcaaccctgtagggtag

SEQ ID NO: 1763153 - DNA, 25 bp, Homo sapien
agcaaccctgtagggtagagccaga

SEQ ID NO: 1763154 - DNA, 25 bp, Homo sapien
gaacagctgtacctagcaaccctgt

SEQ ID NO: 1763155 - DNA, 25 bp, Homo sapien
cagctgtacctagcaaccctgtagg

SEQ ID NO: 1763156 - DNA, 25 bp, Homo sapien
cagttctgcttagtgctgggacaaa

SEQ ID NO: 1763157 - DNA, 25 bp, Homo sapien
gctctcagggacaggccagttctgc

SEQ ID NO: 1763158 - DNA, 25 bp, Homo sapien
tctgccagagctgccgattgatgac

SEQ ID NO: 1763159 - DNA, 25 bp, Homo sapien
gctggtggatgagcaagagtttaca

SEQ ID NO: 1763160 - DNA, 25 bp, Homo sapien
gatgtgagttgaggttgtaagcctt

SEQ ID NO: 1763161 - DNA, 25 bp, Homo sapien
gttgtaagccttcagtccaagaccc

SEQ ID NO: 1763162 - DNA, 25 bp, Homo sapien
gagttgaggttgtaagccttcagtc

SEQ ID NO: 1763163 - DNA, 25 bp, Homo sapien
gaggttgtaagccttcagtccaaga

SEQ ID NO: 1763164 - DNA, 25 bp, Homo sapien
ccctctccagtgagcagctttgcct

SEQ ID NO: 1763165 - DNA, 25 bp, Homo sapien
cctggctgcagccatgagccttggg

SEQ ID NO: 1763166 - DNA, 25 bp, Homo sapien
cagtgagcagctttgcctggctgca

SEQ ID NO: 1763167 - DNA, 25 bp, Homo sapien
ctctccagtgagcagctttgcctgg

SEQ ID NO: 1763168 - DNA, 25 bp, Homo sapien
gagcatctccgatggatgtgcaatt

SEQ ID NO: 1763169 - DNA, 25 bp, Homo sapien
gcttttgacaccttgtaggtatctt

SEQ ID NO: 1763170 - DNA, 25 bp, Homo sapien
tgacaccttgtaggtatctttaaac

SEQ ID NO: 1763171 - DNA, 25 bp, Homo sapien
ttttgacaccttgtaggtatcttta

SEQ ID NO: 1763172 - DNA, 25 bp, Homo sapien
ttgacaccttgtaggtatctttaaa

SEQ ID NO: 1763173 - DNA, 25 bp, Homo sapien
tgctggtgccgaagggcaggacagg

SEQ ID NO: 1763174 - DNA, 25 bp, Homo sapien
taaacagattgtctccaccctccgt

SEQ ID NO: 1763175 - DNA, 25 bp, Homo sapien
cctccgtgcactgctggtgccgaag

SEQ ID NO: 1763176 - DNA, 25 bp, Homo sapien
ccgtgcatgtgcatcttgccagagc

SEQ ID NO: 1763177 - DNA, 25 bp, Homo sapien
cttaatcatggctttgtacacttct

SEQ ID NO: 1763178 - DNA, 25 bp, Homo sapien
gaaacccttcatcttaatcatggct

SEQ ID NO: 1763179 - DNA, 25 bp, Homo sapien
aaatagaaacccttcatcttaatca

SEQ ID NO: 1763180 - DNA, 25 bp, Homo sapien
atcatggctttgtacacttctgaca

SEQ ID NO: 1763181 - DNA, 25 bp, Homo sapien
tgcggtcgccagaattactcaaagt

SEQ ID NO: 1763182 - DNA, 25 bp, Homo sapien
caggaagggactgatcacgtgagct

SEQ ID NO: 1763183 - DNA, 25 bp, Homo sapien
ttccaaaagaagaggcaccgagggc

SEQ ID NO: 1763184 - DNA, 25 bp, Homo sapien
tacagggatacagatagaggaagcc

SEQ ID NO: 1763185 - DNA, 25 bp, Homo sapien
tgtatggaggatcagaccaaatgct

SEQ ID NO: 1763186 - DNA, 25 bp, Homo sapien
acagcttgtctttcatatatcatgc

SEQ ID NO: 1763187 - DNA, 25 bp, Homo sapien
gaatattagagataagtaagtgccc

SEQ ID NO: 1763188 - DNA, 25 bp, Homo sapien
tatatcatgccttgacacttcttct

SEQ ID NO: 1763189 - DNA, 25 bp, Homo sapien
ttttaggcctcctgagaccaccttc

SEQ ID NO: 1763190 - DNA, 25 bp, Homo sapien
attcccaaaggtattatgagaggcc

SEQ ID NO: 1763191 - DNA, 25 bp, Homo sapien
taggtggacctgagctcaccaatca

SEQ ID NO: 1763192 - DNA, 25 bp, Homo sapien
gacaagtttttgaagagctcagagc

SEQ ID NO: 1763193 - DNA, 25 bp, Homo sapien
tgaccaatgtctcccttcatagcat

SEQ ID NO: 1763194 - DNA, 25 bp, Homo sapien
ccatctccttcctgatgtgggatgc

SEQ ID NO: 1763195 - DNA, 25 bp, Homo sapien
aatgtctcccttcatagcatccatc

SEQ ID NO: 1763196 - DNA, 25 bp, Homo sapien
tctccttcctgatgtgggatgccat

SEQ ID NO: 1763197 - DNA, 25 bp, Homo sapien
atcaagtgttgggtataagccaagg

SEQ ID NO: 1763198 - DNA, 25 bp, Homo sapien
gatcaagtgttgggtataagccaag

SEQ ID NO: 1763199 - DNA, 25 bp, Homo sapien
tcaagtgttgggtataagccaagga

SEQ ID NO: 1763200 - DNA, 25 bp, Homo sapien
caagtgttgggtataagccaaggag

SEQ ID NO: 1763201 - DNA, 25 bp, Homo sapien
aacagttaaacaatgtgactgtctc

SEQ ID NO: 1763202 - DNA, 25 bp, Homo sapien
gaaacagttaaacaatgtgactgtc

SEQ ID NO: 1763203 - DNA, 25 bp, Homo sapien
acagttaaacaatgtgactgtctca

SEQ ID NO: 1763204 - DNA, 25 bp, Homo sapien
cagttaaacaatgtgactgtctcac

SEQ ID NO: 1763205 - DNA, 25 bp, Homo sapien
gaaccaaaagatccacagtccttga

SEQ ID NO: 1763206 - DNA, 25 bp, Homo sapien
gttgtggacagcctccgttcggtta

SEQ ID NO: 1763207 - DNA, 25 bp, Homo sapien
tccttgatgagaatgggcaccgagt

SEQ ID NO: 1763208 - DNA, 25 bp, Homo sapien
agaggacccagcaccgttgtggaca

SEQ ID NO: 1763209 - DNA, 25 bp, Homo sapien
ctacagctgcgaggagcccagtagt

SEQ ID NO: 1763210 - DNA, 25 bp, Homo sapien
tttctctacagctgcgaggagccca

SEQ ID NO: 1763211 - DNA, 25 bp, Homo sapien
ctctacagctgcgaggagcccagta

SEQ ID NO: 1763212 - DNA, 25 bp, Homo sapien
ttctctacagctgcgaggagcccag

SEQ ID NO: 1763213 - DNA, 25 bp, Homo sapien
atgattggatgcagatagcctgtcc

SEQ ID NO: 1763214 - DNA, 25 bp, Homo sapien
ctttgacggtgagctgaccagggat

SEQ ID NO: 1763215 - DNA, 25 bp, Homo sapien
gaccagggattgctgagcagtctca

SEQ ID NO: 1763216 - DNA, 25 bp, Homo sapien
tccatgatgtaatgcaggtcctgct

SEQ ID NO: 1763217 - DNA, 25 bp, Homo sapien
tattcatagataacacacgccagag

SEQ ID NO: 1763218 - DNA, 25 bp, Homo sapien
gagactgaaagtccaagttcatggt

SEQ ID NO: 1763219 - DNA, 25 bp, Homo sapien
cacttcttcctagtccatcaggcta

SEQ ID NO: 1763220 - DNA, 25 bp, Homo sapien
cttccaggtgggcatttatgtcagg

SEQ ID NO: 1763221 - DNA, 25 bp, Homo sapien
agttgccagttttcagcaccagcat

SEQ ID NO: 1763222 - DNA, 25 bp, Homo sapien
gagtcgctgagagcttttgtagcct

SEQ ID NO: 1763223 - DNA, 25 bp, Homo sapien
caaggcggttctggtgtgatgaaaa

SEQ ID NO: 1763224 - DNA, 25 bp, Homo sapien
caatctggtttacatgtgagtcgct

SEQ ID NO: 1763225 - DNA, 25 bp, Homo sapien
gcatcagtttgctagtgacaccaca

SEQ ID NO: 1763226 - DNA, 25 bp, Homo sapien
ctgtgataaggcgaggcattattaa

SEQ ID NO: 1763227 - DNA, 25 bp, Homo sapien
gattgcaccattacccgtggatgga

SEQ ID NO: 1763228 - DNA, 25 bp, Homo sapien
ccattacccgtggatggactcagca

SEQ ID NO: 1763229 - DNA, 25 bp, Homo sapien
ggacaagcagattgcaccattaccc

SEQ ID NO: 1763230 - DNA, 25 bp, Homo sapien
tcctgatgagcgcctccctgctgtg

SEQ ID NO: 1763231 - DNA, 25 bp, Homo sapien
cccacgaggggatttcaatcagcat

SEQ ID NO: 1763232 - DNA, 25 bp, Homo sapien
cttacccacgaggggatttcaatca

SEQ ID NO: 1763233 - DNA, 25 bp, Homo sapien
acccacgaggggatttcaatcagca

SEQ ID NO: 1763234 - DNA, 25 bp, Homo sapien
tacccacgaggggatttcaatcagc

SEQ ID NO: 1763235 - DNA, 25 bp, Homo sapien
tcatttctgtaattgttaatctgga

SEQ ID NO: 1763236 - DNA, 25 bp, Homo sapien
ggtgttcatttctgtaattgttaat

SEQ ID NO: 1763237 - DNA, 25 bp, Homo sapien
ttctgtaattgttaatctggatatt

SEQ ID NO: 1763238 - DNA, 25 bp, Homo sapien
gttcatttctgtaattgttaatctg

SEQ ID NO: 1763239 - DNA, 25 bp, Homo sapien
ggttcctgaacgtttcaagatcttc

SEQ ID NO: 1763240 - DNA, 25 bp, Homo sapien
atttgtccttggaatggttcctgaa

SEQ ID NO: 1763241 - DNA, 25 bp, Homo sapien
ggaatggttcctgaacgtttcaaga

SEQ ID NO: 1763242 - DNA, 25 bp, Homo sapien
gaacgtttcaagatcttccagttcc

SEQ ID NO: 1763243 - DNA, 25 bp, Homo sapien
tggaagctccactaaaccctgggaa

SEQ ID NO: 1763244 - DNA, 25 bp, Homo sapien
taaagttgtttagaatcaaagagcc

SEQ ID NO: 1763245 - DNA, 25 bp, Homo sapien
cattttacgttgcttattacagatc

SEQ ID NO: 1763246 - DNA, 25 bp, Homo sapien
gcagaaacccgtaatagagaatcca

SEQ ID NO: 1763247 - DNA, 25 bp, Homo sapien
tcatattcaatatcccttcggcaag

SEQ ID NO: 1763248 - DNA, 25 bp, Homo sapien
tgtgaggactcgtcccacagagcct

SEQ ID NO: 1763249 - DNA, 25 bp, Homo sapien
ttcctaccctgtgctgagacctgtg

SEQ ID NO: 1763250 - DNA, 25 bp, Homo sapien
gacagatttaggaagcgcggttgca

SEQ ID NO: 1763251 - DNA, 25 bp, Homo sapien
tgctttgggaagctgtgcatttccg

SEQ ID NO: 1763252 - DNA, 25 bp, Homo sapien
ccttcaggaaactctacatttgcgc

SEQ ID NO: 1763253 - DNA, 25 bp, Homo sapien
gttggctgcaagaatgaaattatcc

SEQ ID NO: 1763254 - DNA, 25 bp, Homo sapien
catttccgcagattattccttcagg

SEQ ID NO: 1763255 - DNA, 25 bp, Homo sapien
gctactggggacctctacagcatcc

SEQ ID NO: 1763256 - DNA, 25 bp, Homo sapien
ttatgagctactggggacctctaca

SEQ ID NO: 1763257 - DNA, 25 bp, Homo sapien
tgagctactggggacctctacagca

SEQ ID NO: 1763258 - DNA, 25 bp, Homo sapien
ctactggggacctctacagcatcca

SEQ ID NO: 1763259 - DNA, 25 bp, Homo sapien
tgcagttacctatagcatcaggtgc

SEQ ID NO: 1763260 - DNA, 25 bp, Homo sapien
tgaaaccttcactacatggctaaag

SEQ ID NO: 1763261 - DNA, 25 bp, Homo sapien
agttttgcacctggcgtcttcgtca

SEQ ID NO: 1763262 - DNA, 25 bp, Homo sapien
tattgttgaacgacttctctggacg

SEQ ID NO: 1763263 - DNA, 25 bp, Homo sapien
tagagtagacgaaggcatatgcgct

SEQ ID NO: 1763264 - DNA, 25 bp, Homo sapien
gacgaaggcatatgcgctaagccct

SEQ ID NO: 1763265 - DNA, 25 bp, Homo sapien
acagccagtagagtagacgaaggca

SEQ ID NO: 1763266 - DNA, 25 bp, Homo sapien
ggcatatgcgctaagccctcttaaa

SEQ ID NO: 1763267 - DNA, 25 bp, Homo sapien
ggaagatccatctccctcgggtttc

SEQ ID NO: 1763268 - DNA, 25 bp, Homo sapien
ttagaggtagcaagggctccccacc

SEQ ID NO: 1763269 - DNA, 25 bp, Homo sapien
cagagccacgggaacttagaggtag

SEQ ID NO: 1763270 - DNA, 25 bp, Homo sapien
tcatgctgggacagatctgaaggaa

SEQ ID NO: 1763271 - DNA, 25 bp, Homo sapien
aatgaatgttggcatttttgcacat

SEQ ID NO: 1763272 - DNA, 25 bp, Homo sapien
tgaatgaatgttggcatttttgcac

SEQ ID NO: 1763273 - DNA, 25 bp, Homo sapien
aatgttggcatttttgcacattcag

SEQ ID NO: 1763274 - DNA, 25 bp, Homo sapien
tggcatttttgcacattcagttaga

SEQ ID NO: 1763275 - DNA, 25 bp, Homo sapien
tcttgtgtgacaagccctttcttgg

SEQ ID NO: 1763276 - DNA, 25 bp, Homo sapien
gttccactgtagcagccatgtggaa

SEQ ID NO: 1763277 - DNA, 25 bp, Homo sapien
cagccatgtggaaattagagctttc

SEQ ID NO: 1763278 - DNA, 25 bp, Homo sapien
cccgtttttaccctgctgcagttgt

SEQ ID NO: 1763279 - DNA, 25 bp, Homo sapien
tcataatcactgttagtcactgcaa

SEQ ID NO: 1763280 - DNA, 25 bp, Homo sapien
gtagcctatggccacaagtgttggt

SEQ ID NO: 1763281 - DNA, 25 bp, Homo sapien
tgcaaatgcactgtagatttttgta

SEQ ID NO: 1763282 - DNA, 25 bp, Homo sapien
aatgcactgtagatttttgtaaaat

SEQ ID NO: 1763283 - DNA, 25 bp, Homo sapien
tgctcattcacttgacctgagaaaa

SEQ ID NO: 1763284 - DNA, 25 bp, Homo sapien
ttcctgtggttgctcattcacttga

SEQ ID NO: 1763285 - DNA, 25 bp, Homo sapien
cttgacctgagaaaaatgggtccat

SEQ ID NO: 1763286 - DNA, 25 bp, Homo sapien
taggtttctttgatgagaacacaga

SEQ ID NO: 1763287 - DNA, 25 bp, Homo sapien
agcctggataaacgcaggtgagtcc

SEQ ID NO: 1763288 - DNA, 25 bp, Homo sapien
ccatcagcagtagcctggataaacg

SEQ ID NO: 1763289 - DNA, 25 bp, Homo sapien
aggtgagtccttgtagagaacagag

SEQ ID NO: 1763290 - DNA, 25 bp, Homo sapien
gaacagaggtcatcaatgttgagtc

SEQ ID NO: 1763291 - DNA, 25 bp, Homo sapien
cttctgtacatccctgctgggtttc

SEQ ID NO: 1763292 - DNA, 25 bp, Homo sapien
ttctgtacatccctgctgggtttca

SEQ ID NO: 1763293 - DNA, 25 bp, Homo sapien
tctgtacatccctgctgggtttcac

SEQ ID NO: 1763294 - DNA, 25 bp, Homo sapien
ggggaggattttgtccatctttaga

SEQ ID NO: 1763295 - DNA, 25 bp, Homo sapien
tgctacggtaattgaagacaaaacc

SEQ ID NO: 1763296 - DNA, 25 bp, Homo sapien
caacatagataatgctacggtaatt

SEQ ID NO: 1763297 - DNA, 25 bp, Homo sapien
tcaacatagataatgctacggtaat

SEQ ID NO: 1763298 - DNA, 25 bp, Homo sapien
taactcccaactttgacgtcgagtg

SEQ ID NO: 1763299 - DNA, 25 bp, Homo sapien
tactggccatggatggactaactcc

SEQ ID NO: 1763300 - DNA, 25 bp, Homo sapien
tctttggtcagtactggccatggat

SEQ ID NO: 1763301 - DNA, 25 bp, Homo sapien
ggattcatacacagggtagaagaat

SEQ ID NO: 1763302 - DNA, 25 bp, Homo sapien
aaagagctaggccacgggagaagct

SEQ ID NO: 1763303 - DNA, 25 bp, Homo sapien
tgacagtcatcaagagtaaggtgca

SEQ ID NO: 1763304 - DNA, 25 bp, Homo sapien
agtaaggtgcaactgtgaagagtgt

SEQ ID NO: 1763305 - DNA, 25 bp, Homo sapien
gccacgggagaagctgacagtcatc

SEQ ID NO: 1763306 - DNA, 25 bp, Homo sapien
tgtgcatttgcatagtccctccaga

SEQ ID NO: 1763307 - DNA, 25 bp, Homo sapien
ctaaagactgatcctcctttgtggg

SEQ ID NO: 1763308 - DNA, 25 bp, Homo sapien
tcccactgttgggtgagcatgatgg

SEQ ID NO: 1763309 - DNA, 25 bp, Homo sapien
ccctccagataaggctgccatgaga

SEQ ID NO: 1763310 - DNA, 25 bp, Homo sapien
tcagttcagaagctaatgcaaagag

SEQ ID NO: 1763311 - DNA, 25 bp, Homo sapien
tctataggtggctgtctagatggac

SEQ ID NO: 1763312 - DNA, 25 bp, Homo sapien
gataatctggtaagacatagtacag

SEQ ID NO: 1763313 - DNA, 25 bp, Homo sapien
tatggctgggcatgtcgtagagcca

SEQ ID NO: 1763314 - DNA, 25 bp, Homo sapien
cctgcaaggtggtcgccctgtgaaa

SEQ ID NO: 1763315 - DNA, 25 bp, Homo sapien
tgtgaaagcgtgaaaatgacttcca

SEQ ID NO: 1763316 - DNA, 25 bp, Homo sapien
ctggccctgcaaggtggtcgccctg

SEQ ID NO: 1763317 - DNA, 25 bp, Homo sapien
tggtcgccctgtgaaagcgtgaaaa

SEQ ID NO: 1763318 - DNA, 25 bp, Homo sapien
taccgcgcaaatgcgtgtactggtt

SEQ ID NO: 1763319 - DNA, 25 bp, Homo sapien
ggtgacatgaggatgtgtctccagt

SEQ ID NO: 1763320 - DNA, 25 bp, Homo sapien
tctccagtgtgaatagggggacatt

SEQ ID NO: 1763321 - DNA, 25 bp, Homo sapien
ttggctttggggtgtaccgcgcaaa

SEQ ID NO: 1763322 - DNA, 25 bp, Homo sapien
cagcagtcctgtgagggagctatga

SEQ ID NO: 1763323 - DNA, 25 bp, Homo sapien
gcattatgtggcgataagaccatca

SEQ ID NO: 1763324 - DNA, 25 bp, Homo sapien
gaactgcaggctttatcagctcaga

SEQ ID NO: 1763325 - DNA, 25 bp, Homo sapien
tgtgccaagcctagtgcctaactca

SEQ ID NO: 1763326 - DNA, 25 bp, Homo sapien
ttttcagctcatacaaaccagggca

SEQ ID NO: 1763327 - DNA, 25 bp, Homo sapien
tctactgctagtcacgggcttttca

SEQ ID NO: 1763328 - DNA, 25 bp, Homo sapien
gagcctttttagaatccgcatgcac

SEQ ID NO: 1763329 - DNA, 25 bp, Homo sapien
caggatggcctgtgatctactgcta

SEQ ID NO: 1763330 - DNA, 25 bp, Homo sapien
gtcgttttcagtccattcattgttg

SEQ ID NO: 1763331 - DNA, 25 bp, Homo sapien
caaggaggtcgttttcagtccattc

SEQ ID NO: 1763332 - DNA, 25 bp, Homo sapien
caggctggtcaaggaggtcgttttc

SEQ ID NO: 1763333 - DNA, 25 bp, Homo sapien
gggagcgcctatcctcaggctggtc

SEQ ID NO: 1763334 - DNA, 25 bp, Homo sapien
ataagttatggctcccaccccagaa

SEQ ID NO: 1763335 - DNA, 25 bp, Homo sapien
tagttgtaacactcaattctggtaa

SEQ ID NO: 1763336 - DNA, 25 bp, Homo sapien
aatttatgggaacatatgttttgac

SEQ ID NO: 1763337 - DNA, 25 bp, Homo sapien
tcccttcccttagttgtaacactca

SEQ ID NO: 1763338 - DNA, 25 bp, Homo sapien
tggcaagttttgcactgagagcaag

SEQ ID NO: 1763339 - DNA, 25 bp, Homo sapien
gggattgtaattctgagtccataga

SEQ ID NO: 1763340 - DNA, 25 bp, Homo sapien
caggatgctgatctaaacgtggaaa

SEQ ID NO: 1763341 - DNA, 25 bp, Homo sapien
ccatagatttctaagagagaggtcg

SEQ ID NO: 1763342 - DNA, 25 bp, Homo sapien
gtgagttcatgatttgaatgcccat

SEQ ID NO: 1763343 - DNA, 25 bp, Homo sapien
tcatctccagtgagttcatgatttg

SEQ ID NO: 1763344 - DNA, 25 bp, Homo sapien
tccagtgagttcatgatttgaatgc

SEQ ID NO: 1763345 - DNA, 25 bp, Homo sapien
tgctcatctccagtgagttcatgat

SEQ ID NO: 1763346 - DNA, 25 bp, Homo sapien
cactcctctgttgtgcagcactgtc

SEQ ID NO: 1763347 - DNA, 25 bp, Homo sapien
cctgtcgtgaggttcatagggagat

SEQ ID NO: 1763348 - DNA, 25 bp, Homo sapien
aggcctctaagcgtgcagcccatgc

SEQ ID NO: 1763349 - DNA, 25 bp, Homo sapien
tgactgtgtactggttgctttgcct

SEQ ID NO: 1763350 - DNA, 25 bp, Homo sapien
ggtaccatgcttggtgtagtcccag

SEQ ID NO: 1763351 - DNA, 25 bp, Homo sapien
gcacacgcccctgtatcttgcaggt

SEQ ID NO: 1763352 - DNA, 25 bp, Homo sapien
gtaccatgcttggtgtagtcccagt

SEQ ID NO: 1763353 - DNA, 25 bp, Homo sapien
ctgtatcttgcaggtaccatgcttg

SEQ ID NO: 1763354 - DNA, 25 bp, Homo sapien
actatgacatcgtttccatggcaac

SEQ ID NO: 1763355 - DNA, 25 bp, Homo sapien
tgcctttccaaggacagtaaatggt

SEQ ID NO: 1763356 - DNA, 25 bp, Homo sapien
tggcaactaatgtattttagcaaag

SEQ ID NO: 1763357 - DNA, 25 bp, Homo sapien
caaggacagtaaatggttttacaca

SEQ ID NO: 1763358 - DNA, 25 bp, Homo sapien
tctcatgtgctaaataaagtatcag

SEQ ID NO: 1763359 - DNA, 25 bp, Homo sapien
tagttaccagaacactcaaatgaga

SEQ ID NO: 1763360 - DNA, 25 bp, Homo sapien
aattgcatttcatctctctttgaca

SEQ ID NO: 1763361 - DNA, 25 bp, Homo sapien
catcaggcttgctttaaaagtgtgc

SEQ ID NO: 1763362 - DNA, 25 bp, Homo sapien
gctagggattccatcacttcaaggg

SEQ ID NO: 1763363 - DNA, 25 bp, Homo sapien
ggatcacttccgttagcccaagaag

SEQ ID NO: 1763364 - DNA, 25 bp, Homo sapien
gagaacagagttagcccaagccttc

SEQ ID NO: 1763365 - DNA, 25 bp, Homo sapien
tatattgtacattaagccacggagg

SEQ ID NO: 1763366 - DNA, 25 bp, Homo sapien
ggttttcagtctagcccatggttga

SEQ ID NO: 1763367 - DNA, 25 bp, Homo sapien
gggttttcagtctagcccatggttg

SEQ ID NO: 1763368 - DNA, 25 bp, Homo sapien
gttttcagtctagcccatggttgag

SEQ ID NO: 1763369 - DNA, 25 bp, Homo sapien
agggaatgaatcaccctggccccca

SEQ ID NO: 1763370 - DNA, 25 bp, Homo sapien
cagaggttctgtttccagggaatga

SEQ ID NO: 1763371 - DNA, 25 bp, Homo sapien
ccacacacttgagatccagaactgc

SEQ ID NO: 1763372 - DNA, 25 bp, Homo sapien
atctctagctgtgacagaggttctg

SEQ ID NO: 1763373 - DNA, 25 bp, Homo sapien
tcactctcatatttcctagattgag

SEQ ID NO: 1763374 - DNA, 25 bp, Homo sapien
tatttcctagattgagtgaggaggt

SEQ ID NO: 1763375 - DNA, 25 bp, Homo sapien
tctcatatttcctagattgagtgag

SEQ ID NO: 1763376 - DNA, 25 bp, Homo sapien
cttcactctcatatttcctagattg

SEQ ID NO: 1763377 - DNA, 25 bp, Homo sapien
actggcctttcccaccgacttgtga

SEQ ID NO: 1763378 - DNA, 25 bp, Homo sapien
ctgggtaggacagtggggcaggcac

SEQ ID NO: 1763379 - DNA, 25 bp, Homo sapien
ggcactggcctttcccaccgacttg

SEQ ID NO: 1763380 - DNA, 25 bp, Homo sapien
tggcctttcccaccgacttgtgagc

SEQ ID NO: 1763381 - DNA, 25 bp, Homo sapien
tcatcctcatcatagcctgattcgt

SEQ ID NO: 1763382 - DNA, 25 bp, Homo sapien
cccagagcacctgattaccacctca

SEQ ID NO: 1763383 - DNA, 25 bp, Homo sapien
gagcacctgattaccacctcatcat

SEQ ID NO: 1763384 - DNA, 25 bp, Homo sapien
cctcatcatagcctgattcgtaagg

SEQ ID NO: 1763385 - DNA, 25 bp, Homo sapien
tagtaagaaatgcagcaccttcatt

SEQ ID NO: 1763386 - DNA, 25 bp, Homo sapien
atggtatgattgaaaacagcatttt

SEQ ID NO: 1763387 - DNA, 25 bp, Homo sapien
ttttagtaagaaatgcagcaccttc

SEQ ID NO: 1763388 - DNA, 25 bp, Homo sapien
gtatgattgaaaacagcatttttag

SEQ ID NO: 1763389 - DNA, 25 bp, Homo sapien
gttcagagaccggtagtgttgactg

SEQ ID NO: 1763390 - DNA, 25 bp, Homo sapien
taggataggcacgatgcttcttgtc

SEQ ID NO: 1763391 - DNA, 25 bp, Homo sapien
gaacagttatcccagcagtcttaag

SEQ ID NO: 1763392 - DNA, 25 bp, Homo sapien
tttctttcccatgaagcagttgatc

SEQ ID NO: 1763393 - DNA, 25 bp, Homo sapien
ccaataaatcacacagactcgccgg

SEQ ID NO: 1763394 - DNA, 25 bp, Homo sapien
aatcacacagactcgccgggtgtgt

SEQ ID NO: 1763395 - DNA, 25 bp, Homo sapien
taaatcacacagactcgccgggtgt

SEQ ID NO: 1763396 - DNA, 25 bp, Homo sapien
aataaatcacacagactcgccgggt

SEQ ID NO: 1763397 - DNA, 25 bp, Homo sapien
cggcgcgtcgttgcagttgcgccat

SEQ ID NO: 1763398 - DNA, 25 bp, Homo sapien
gcggcgcgtcgttgcagttgcgcca

SEQ ID NO: 1763399 - DNA, 25 bp, Homo sapien
aagagtagcagcgagcagccgcgct

SEQ ID NO: 1763400 - DNA, 25 bp, Homo sapien
tcagcaagagtagcagcgagcagcc

SEQ ID NO: 1763401 - DNA, 25 bp, Homo sapien
tttcagtaatacttcctccagactt

SEQ ID NO: 1763402 - DNA, 25 bp, Homo sapien
tttcaggttccttagtcgccgcttg

SEQ ID NO: 1763403 - DNA, 25 bp, Homo sapien
tcaggttccttagtcgccgcttggc

SEQ ID NO: 1763404 - DNA, 25 bp, Homo sapien
catttcaggttccttagtcgccgct

SEQ ID NO: 1763405 - DNA, 25 bp, Homo sapien
tggaacccatcctcaagatctttgg

SEQ ID NO: 1763406 - DNA, 25 bp, Homo sapien
gaacccatcctcaagatctttggca

SEQ ID NO: 1763407 - DNA, 25 bp, Homo sapien
cccatcctcaagatctttggcaact

SEQ ID NO: 1763408 - DNA, 25 bp, Homo sapien
gtttttggaacccatcctcaagatc

SEQ ID NO: 1763409 - DNA, 25 bp, Homo sapien
tttttggcatcgacccaattttcca

SEQ ID NO: 1763410 - DNA, 25 bp, Homo sapien
ttttggcatcgacccaattttccaa

SEQ ID NO: 1763411 - DNA, 25 bp, Homo sapien
tctagaagctctgtccttttcccag

SEQ ID NO: 1763412 - DNA, 25 bp, Homo sapien
taatgagtatccagttaaatagaaa

SEQ ID NO: 1763413 - DNA, 25 bp, Homo sapien
tgctgctggctgagccttaatgagt

SEQ ID NO: 1763414 - DNA, 25 bp, Homo sapien
gcagctttgaaaagtgcagcccctg

SEQ ID NO: 1763415 - DNA, 25 bp, Homo sapien
tcatgtagtcctgtgagatgactgc

SEQ ID NO: 1763416 - DNA, 25 bp, Homo sapien
cattcatgtagtcctgtgagatgac

SEQ ID NO: 1763417 - DNA, 25 bp, Homo sapien
attcatgtagtcctgtgagatgact

SEQ ID NO: 1763418 - DNA, 25 bp, Homo sapien
ttcatgtagtcctgtgagatgactg

SEQ ID NO: 1763419 - DNA, 25 bp, Homo sapien
tcagttctccagacgatgatggtga

SEQ ID NO: 1763420 - DNA, 25 bp, Homo sapien
gctggtctccaatgtgtcagcatcc

SEQ ID NO: 1763421 - DNA, 25 bp, Homo sapien
cacatgacctttaacccgtttctgg

SEQ ID NO: 1763422 - DNA, 25 bp, Homo sapien
ttattttcgttgcttcttaaacaca

SEQ ID NO: 1763423 - DNA, 25 bp, Homo sapien
ctagcgcattcacagctgtcaccag

SEQ ID NO: 1763424 - DNA, 25 bp, Homo sapien
ggaacactgtttctccctagcgcat

SEQ ID NO: 1763425 - DNA, 25 bp, Homo sapien
tgcagccggagctttaaaagggttc

SEQ ID NO: 1763426 - DNA, 25 bp, Homo sapien
aggatgcagccggagctttaaaagg

SEQ ID NO: 1763427 - DNA, 25 bp, Homo sapien
tacacagctgctagggttctatgcc

SEQ ID NO: 1763428 - DNA, 25 bp, Homo sapien
aaaagcactgaggagtacggccatg

SEQ ID NO: 1763429 - DNA, 25 bp, Homo sapien
tatgcctgagccgtaagtgaggtac

SEQ ID NO: 1763430 - DNA, 25 bp, Homo sapien
gccaggccgtgcatattgtctccaa

SEQ ID NO: 1763431 - DNA, 25 bp, Homo sapien
gtttctccagcaaggaatcctcctg

SEQ ID NO: 1763432 - DNA, 25 bp, Homo sapien
ctgttggaggactgcaaaatgctaa

SEQ ID NO: 1763433 - DNA, 25 bp, Homo sapien
tcatcctgttggaggactgcaaaat

SEQ ID NO: 1763434 - DNA, 25 bp, Homo sapien
gttggaggactgcaaaatgctaaca

SEQ ID NO: 1763435 - DNA, 25 bp, Homo sapien
atcctgttggaggactgcaaaatgc

SEQ ID NO: 1763436 - DNA, 25 bp, Homo sapien
tctcagacttcgttgtttttgctct

SEQ ID NO: 1763437 - DNA, 25 bp, Homo sapien
taggcccctctcaactgtggcagtt

SEQ ID NO: 1763438 - DNA, 25 bp, Homo sapien
tctttctctttcacgtggggagagt

SEQ ID NO: 1763439 - DNA, 25 bp, Homo sapien
cattcaatcatcacgtctccttagg

SEQ ID NO: 1763440 - DNA, 25 bp, Homo sapien
catgatcaggttctgttcgtgcaga

SEQ ID NO: 1763441 - DNA, 25 bp, Homo sapien
gattcactttcacccatatgtcact

SEQ ID NO: 1763442 - DNA, 25 bp, Homo sapien
tatgtcactttccaaaattgtgtcc

SEQ ID NO: 1763443 - DNA, 25 bp, Homo sapien
ccaaaattgtgtcccctatattgat

SEQ ID NO: 1763444 - DNA, 25 bp, Homo sapien
catctaactcagacatgagtgtctg

SEQ ID NO: 1763445 - DNA, 25 bp, Homo sapien
gtgtctgagtccaggttccccattg

SEQ ID NO: 1763446 - DNA, 25 bp, Homo sapien
tccccattgagttgttgggtaatac

SEQ ID NO: 1763447 - DNA, 25 bp, Homo sapien
gggtaatactgtttccgatacctga

SEQ ID NO: 1763448 - DNA, 25 bp, Homo sapien
ctgagcaaagggatgaacgtctaca

SEQ ID NO: 1763449 - DNA, 25 bp, Homo sapien
ggatgctacctcataattactactg

SEQ ID NO: 1763450 - DNA, 25 bp, Homo sapien
caccattgaaagtgacttccaccac

SEQ ID NO: 1763451 - DNA, 25 bp, Homo sapien
ctactgagaagaagtgtaagacact

SEQ ID NO: 1763452 - DNA, 25 bp, Homo sapien
tgtagtctattgtacgatcaaattt

SEQ ID NO: 1763453 - DNA, 25 bp, Homo sapien
tttgtagtctattgtacgatcaaat

SEQ ID NO: 1763454 - DNA, 25 bp, Homo sapien
tattgtacgatcaaattttttaagc

SEQ ID NO: 1763455 - DNA, 25 bp, Homo sapien
tagtctattgtacgatcaaattttt

SEQ ID NO: 1763456 - DNA, 25 bp, Homo sapien
tgggttaaaaatgtgcggcgttgac

SEQ ID NO: 1763457 - DNA, 25 bp, Homo sapien
gaagagaaccccattcaacatagct

SEQ ID NO: 1763458 - DNA, 25 bp, Homo sapien
caaaaggtctaagggaagcataggc

SEQ ID NO: 1763459 - DNA, 25 bp, Homo sapien
aagcataggcacagttaagggcgca

SEQ ID NO: 1763460 - DNA, 25 bp, Homo sapien
tgtgctccattgtatgggcagccag

SEQ ID NO: 1763461 - DNA, 25 bp, Homo sapien
taggcataggcggattcccaggatc

SEQ ID NO: 1763462 - DNA, 25 bp, Homo sapien
tgcctggcaagtagccaggttggca

SEQ ID NO: 1763463 - DNA, 25 bp, Homo sapien
tgtgtcaatcagtcggtcctcctct

SEQ ID NO: 1763464 - DNA, 25 bp, Homo sapien
ttttgtcccaagagcagaacatgag

SEQ ID NO: 1763465 - DNA, 25 bp, Homo sapien
taaactgctcagacgatgaacctca

SEQ ID NO: 1763466 - DNA, 25 bp, Homo sapien
cacgtagatagccacttttaggaga

SEQ ID NO: 1763467 - DNA, 25 bp, Homo sapien
gctgcatattttggatcacgtagat

SEQ ID NO: 1763468 - DNA, 25 bp, Homo sapien
gaatgcacaaggaagagcttacctg

SEQ ID NO: 1763469 - DNA, 25 bp, Homo sapien
gacaagttagaaacctgcaggacca

SEQ ID NO: 1763470 - DNA, 25 bp, Homo sapien
tgctccctgccaatagtgcttcctg

SEQ ID NO: 1763471 - DNA, 25 bp, Homo sapien
tactatgccagcaccccaatgatgg

SEQ ID NO: 1763472 - DNA, 25 bp, Homo sapien
cattcagaggatacaggaatcctgg

SEQ ID NO: 1763473 - DNA, 25 bp, Homo sapien
gaccacatccgctccacttgatgaa

SEQ ID NO: 1763474 - DNA, 25 bp, Homo sapien
tgaaggtggcgatgggtcacattca

SEQ ID NO: 1763475 - DNA, 25 bp, Homo sapien
cagatggattttctctggccagtcc

SEQ ID NO: 1763476 - DNA, 25 bp, Homo sapien
ctcgcctttgttcgttggaaatttg

SEQ ID NO: 1763477 - DNA, 25 bp, Homo sapien
tctgcagcatttggcagtgccaaga

SEQ ID NO: 1763478 - DNA, 25 bp, Homo sapien
gcgtttcacaaggaatgtcttctct

SEQ ID NO: 1763479 - DNA, 25 bp, Homo sapien
ccacatcagtgtaggcgtttcacaa

SEQ ID NO: 1763480 - DNA, 25 bp, Homo sapien
tgaactgctgtccatgtcttctccg

SEQ ID NO: 1763481 - DNA, 25 bp, Homo sapien
aaattctgatgcgtgggaagagcga

SEQ ID NO: 1763482 - DNA, 25 bp, Homo sapien
atgaacggccccaagcaggaaagct

SEQ ID NO: 1763483 - DNA, 25 bp, Homo sapien
gctgactgtgaatgactaaacggaa

SEQ ID NO: 1763484 - DNA, 25 bp, Homo sapien
aaaagtttgatatcccctgtgtcag

SEQ ID NO: 1763485 - DNA, 25 bp, Homo sapien
gaactgtgaacccttgaggtctgca

SEQ ID NO: 1763486 - DNA, 25 bp, Homo sapien
ggtctgcactcggaaatttatccag

SEQ ID NO: 1763487 - DNA, 25 bp, Homo sapien
tcaaggtgcatcaaaagaactgtga

SEQ ID NO: 1763488 - DNA, 25 bp, Homo sapien
ttatccagataaagtccgggctgct

SEQ ID NO: 1763489 - DNA, 25 bp, Homo sapien
gactgtggcacttaggaggacacag

SEQ ID NO: 1763490 - DNA, 25 bp, Homo sapien
actgtggcacttaggaggacacagg

SEQ ID NO: 1763491 - DNA, 25 bp, Homo sapien
tgtggcacttaggaggacacaggcc

SEQ ID NO: 1763492 - DNA, 25 bp, Homo sapien
ctgtggcacttaggaggacacaggc

SEQ ID NO: 1763493 - DNA, 25 bp, Homo sapien
gattggcttctctcacaaatgagag

SEQ ID NO: 1763494 - DNA, 25 bp, Homo sapien
gaagggagagtgtgaccgaaagtgt

SEQ ID NO: 1763495 - DNA, 25 bp, Homo sapien
gagtgtgaccgaaagtgtgatttcc

SEQ ID NO: 1763496 - DNA, 25 bp, Homo sapien
gcttctctcacaaatgagagttgtc

SEQ ID NO: 1763497 - DNA, 25 bp, Homo sapien
tctgtgccacgtgaccgaacgatca

SEQ ID NO: 1763498 - DNA, 25 bp, Homo sapien
tgtaacagatagacagaaaggctca

SEQ ID NO: 1763499 - DNA, 25 bp, Homo sapien
gagactccagcagtaagacgcttga

SEQ ID NO: 1763500 - DNA, 25 bp, Homo sapien
aagcagggcctttccacgaagactc

SEQ ID NO: 1763501 - DNA, 25 bp, Homo sapien
ggtccttgtcttaatgaacaagtag

SEQ ID NO: 1763502 - DNA, 25 bp, Homo sapien
cagaggtccttgtcttaatgaacaa

SEQ ID NO: 1763503 - DNA, 25 bp, Homo sapien
cttgtcttaatgaacaagtagtctg

SEQ ID NO: 1763504 - DNA, 25 bp, Homo sapien
gggcagaggtccttgtcttaatgaa

SEQ ID NO: 1763505 - DNA, 25 bp, Homo sapien
cagtgaattttattcttctctttta

SEQ ID NO: 1763506 - DNA, 25 bp, Homo sapien
ggtgacatcgcaagcctgcgtgtgc

SEQ ID NO: 1763507 - DNA, 25 bp, Homo sapien
tcctgtgcctgcaatggtgacatcg

SEQ ID NO: 1763508 - DNA, 25 bp, Homo sapien
gtgcctgcaatggtgacatcgcaag

SEQ ID NO: 1763509 - DNA, 25 bp, Homo sapien
gtgacatcgcaagcctgcgtgtgcc

SEQ ID NO: 1763510 - DNA, 25 bp, Homo sapien
cactggcattaactgccagctcttc

SEQ ID NO: 1763511 - DNA, 25 bp, Homo sapien
actggcattaactgccagctcttcc

SEQ ID NO: 1763512 - DNA, 25 bp, Homo sapien
gtgggaccttcgcttctccatgttc

SEQ ID NO: 1763513 - DNA, 25 bp, Homo sapien
cctgaaaggtgtgaccaccagcgca

SEQ ID NO: 1763514 - DNA, 25 bp, Homo sapien
tcatcatgtgggaccttcgcttctc

SEQ ID NO: 1763515 - DNA, 25 bp, Homo sapien
tgtgtcatcatgtgggaccttcgct

SEQ ID NO: 1763516 - DNA, 25 bp, Homo sapien
tggcctgagagacgcctctttttgt

SEQ ID NO: 1763517 - DNA, 25 bp, Homo sapien
ctggcctgagagacgcctctttttg

SEQ ID NO: 1763518 - DNA, 25 bp, Homo sapien
ctgagagacgcctctttttgtggcc

SEQ ID NO: 1763519 - DNA, 25 bp, Homo sapien
gcctgagagacgcctctttttgtgg

SEQ ID NO: 1763520 - DNA, 25 bp, Homo sapien
gccctgggctcacctttatcccaac

SEQ ID NO: 1763521 - DNA, 25 bp, Homo sapien
acagtgccctgggctcacctttatc

SEQ ID NO: 1763522 - DNA, 25 bp, Homo sapien
gtgccctgggctcacctttatccca

SEQ ID NO: 1763523 - DNA, 25 bp, Homo sapien
cctgggctcacctttatcccaacac

SEQ ID NO: 1763524 - DNA, 25 bp, Homo sapien
ggcaggctctcgaaggaccctgact

SEQ ID NO: 1763525 - DNA, 25 bp, Homo sapien
gcaggctctcgaaggaccctgactc

SEQ ID NO: 1763526 - DNA, 25 bp, Homo sapien
caggctctcgaaggaccctgactcc

SEQ ID NO: 1763527 - DNA, 25 bp, Homo sapien
ggagagcagagcctgcccccgacaa

SEQ ID NO: 1763528 - DNA, 25 bp, Homo sapien
accaacagcacccatcgcagcctag

SEQ ID NO: 1763529 - DNA, 25 bp, Homo sapien
agcacccatcgcagcctagccctgg

SEQ ID NO: 1763530 - DNA, 25 bp, Homo sapien
gcttcaccctcacgtacagagtgca

SEQ ID NO: 1763531 - DNA, 25 bp, Homo sapien
aatgggcgagcactttcctcccggg

SEQ ID NO: 1763532 - DNA, 25 bp, Homo sapien
caggtcaggaatgggcgagcacttt

SEQ ID NO: 1763533 - DNA, 25 bp, Homo sapien
cacaggtcaggaatgggcgagcact

SEQ ID NO: 1763534 - DNA, 25 bp, Homo sapien
tcaggaatgggcgagcactttcctc

SEQ ID NO: 1763535 - DNA, 25 bp, Homo sapien
tcatgggactcttctaataacctgc

SEQ ID NO: 1763536 - DNA, 25 bp, Homo sapien
tttcatgggactcttctaataacct

SEQ ID NO: 1763537 - DNA, 25 bp, Homo sapien
ttcatgggactcttctaataacctg

SEQ ID NO: 1763538 - DNA, 25 bp, Homo sapien
ctgcacaagaacacacaccctctac

SEQ ID NO: 1763539 - DNA, 25 bp, Homo sapien
tgctccgggtacacaaagctcccct

SEQ ID NO: 1763540 - DNA, 25 bp, Homo sapien
ctccgggtacacaaagctcccctgt

SEQ ID NO: 1763541 - DNA, 25 bp, Homo sapien
gctccgggtacacaaagctcccctg

SEQ ID NO: 1763542 - DNA, 25 bp, Homo sapien
aggggtagagaagtcgccgcttgtt

SEQ ID NO: 1763543 - DNA, 25 bp, Homo sapien
gggtagagaagtcgccgcttgttca

SEQ ID NO: 1763544 - DNA, 25 bp, Homo sapien
ctgaggggtagagaagtcgccgctt

SEQ ID NO: 1763545 - DNA, 25 bp, Homo sapien
tgaggggtagagaagtcgccgcttg

SEQ ID NO: 1763546 - DNA, 25 bp, Homo sapien
gcagaagagtggagaagaggagccc

SEQ ID NO: 1763547 - DNA, 25 bp, Homo sapien
ccagcaagcagaagagtggagaaga

SEQ ID NO: 1763548 - DNA, 25 bp, Homo sapien
gaagagtggagaagaggagcccctg

SEQ ID NO: 1763549 - DNA, 25 bp, Homo sapien
aagcagaagagtggagaagaggagc

SEQ ID NO: 1763550 - DNA, 25 bp, Homo sapien
caaacatagcgaaaggaggcttcgg

SEQ ID NO: 1763551 - DNA, 25 bp, Homo sapien
tggagagacactgtttcccgcactg

SEQ ID NO: 1763552 - DNA, 25 bp, Homo sapien
tgccttaggctctgctataaaaata

SEQ ID NO: 1763553 - DNA, 25 bp, Homo sapien
aaagcgtggcgctgttcaaacatag

SEQ ID NO: 1763554 - DNA, 25 bp, Homo sapien
tcaaagaaggacagacttaactgga

SEQ ID NO: 1763555 - DNA, 25 bp, Homo sapien
ctctgactccaagcacactctgccc

SEQ ID NO: 1763556 - DNA, 25 bp, Homo sapien
agccacaccagcgtccttgttctct

SEQ ID NO: 1763557 - DNA, 25 bp, Homo sapien
acaccagcgtccttgttctctgact

SEQ ID NO: 1763558 - DNA, 25 bp, Homo sapien
acactctgcccctagatatcttcat

SEQ ID NO: 1763559 - DNA, 25 bp, Homo sapien
caggtgttgtatctaatggtccagt

SEQ ID NO: 1763560 - DNA, 25 bp, Homo sapien
tcaggtgttgtatctaatggtccag

SEQ ID NO: 1763561 - DNA, 25 bp, Homo sapien
gtgttgtatctaatggtccagtgcc

SEQ ID NO: 1763562 - DNA, 25 bp, Homo sapien
tccttcaggtgttgtatctaatggt

SEQ ID NO: 1763563 - DNA, 25 bp, Homo sapien
cagggccagtgacaaaactgtttac

SEQ ID NO: 1763564 - DNA, 25 bp, Homo sapien
agggccagtgacaaaactgtttacg

SEQ ID NO: 1763565 - DNA, 25 bp, Homo sapien
gcagggccagtgacaaaactgttta

SEQ ID NO: 1763566 - DNA, 25 bp, Homo sapien
gcttcattgcagatttcccctggtt

SEQ ID NO: 1763567 - DNA, 25 bp, Homo sapien
actccagtctcgtacctaggcctgt

SEQ ID NO: 1763568 - DNA, 25 bp, Homo sapien
tctactgagtagtcacaatacagcc

SEQ ID NO: 1763569 - DNA, 25 bp, Homo sapien
ccctggttgcttggcacagatttta

SEQ ID NO: 1763570 - DNA, 25 bp, Homo sapien
ctttccacctttagctccagagcag

SEQ ID NO: 1763571 - DNA, 25 bp, Homo sapien
tgaacagaggtgtgcatccaatggc

SEQ ID NO: 1763572 - DNA, 25 bp, Homo sapien
tacctggttgaactcgcacccaaca

SEQ ID NO: 1763573 - DNA, 25 bp, Homo sapien
cagccagctttggtatgaacagagg

SEQ ID NO: 1763574 - DNA, 25 bp, Homo sapien
gctgctgtagtaatggttccaggct

SEQ ID NO: 1763575 - DNA, 25 bp, Homo sapien
ctgctgtagtaatggttccaggcta

SEQ ID NO: 1763576 - DNA, 25 bp, Homo sapien
tgctgtagtaatggttccaggctac

SEQ ID NO: 1763577 - DNA, 25 bp, Homo sapien
agctgctgtagtaatggttccaggc

SEQ ID NO: 1763578 - DNA, 25 bp, Homo sapien
gcaggaagcagattagaagcttggc

SEQ ID NO: 1763579 - DNA, 25 bp, Homo sapien
gaagcagattagaagcttggcacac

SEQ ID NO: 1763580 - DNA, 25 bp, Homo sapien
agcagattagaagcttggcacacat

SEQ ID NO: 1763581 - DNA, 25 bp, Homo sapien
caggaagcagattagaagcttggca

SEQ ID NO: 1763582 - DNA, 25 bp, Homo sapien
ctgttttcattggtcaccctgttag

SEQ ID NO: 1763583 - DNA, 25 bp, Homo sapien
gtcgcaaggctgaatgtaacacagt

SEQ ID NO: 1763584 - DNA, 25 bp, Homo sapien
ttaatatattgctgtcgcaaggctg

SEQ ID NO: 1763585 - DNA, 25 bp, Homo sapien
tattgctgtcgcaaggctgaatgta

SEQ ID NO: 1763586 - DNA, 25 bp, Homo sapien
caaaaagtgggtttgtaactctgag

SEQ ID NO: 1763587 - DNA, 25 bp, Homo sapien
tctgacacacacaagatgtaatcca

SEQ ID NO: 1763588 - DNA, 25 bp, Homo sapien
aatgacccctcatttgggcaatcaa

SEQ ID NO: 1763589 - DNA, 25 bp, Homo sapien
taactctgagtacttgagcatccag

SEQ ID NO: 1763590 - DNA, 25 bp, Homo sapien
caggattgactaacttttcccccat

SEQ ID NO: 1763591 - DNA, 25 bp, Homo sapien
tatgacaggattgactaacttttcc

SEQ ID NO: 1763592 - DNA, 25 bp, Homo sapien
atatgacaggattgactaacttttc

SEQ ID NO: 1763593 - DNA, 25 bp, Homo sapien
tgacaggattgactaacttttcccc

SEQ ID NO: 1763594 - DNA, 25 bp, Homo sapien
gattgcagttgttaacagtggccag

SEQ ID NO: 1763595 - DNA, 25 bp, Homo sapien
gatgtatcaactaatgggcacctta

SEQ ID NO: 1763596 - DNA, 25 bp, Homo sapien
gggcaccttaggctacattgtcaaa

SEQ ID NO: 1763597 - DNA, 25 bp, Homo sapien
aaaggagtctcgcttctccgtgcca

SEQ ID NO: 1763598 - DNA, 25 bp, Homo sapien
tataatagcatcttggcaatgaagg

SEQ ID NO: 1763599 - DNA, 25 bp, Homo sapien
gcatgcagactgtgtattgcccatt

SEQ ID NO: 1763600 - DNA, 25 bp, Homo sapien
gtgacttccatttatccttctggtg

SEQ ID NO: 1763601 - DNA, 25 bp, Homo sapien
ggatgatgtcataacctcaccttat

SEQ ID NO: 1763602 - DNA, 25 bp, Homo sapien
tgtacagtcctatttcctagagtga

SEQ ID NO: 1763603 - DNA, 25 bp, Homo sapien
tccttagagtttgcctgtacagtcc

SEQ ID NO: 1763604 - DNA, 25 bp, Homo sapien
tcagcaagttaggtgtatgtacagt

SEQ ID NO: 1763605 - DNA, 25 bp, Homo sapien
ccagggaagtctataccttagaact

SEQ ID NO: 1763606 - DNA, 25 bp, Homo sapien
tcgtacagggtaagctacgccgggc

SEQ ID NO: 1763607 - DNA, 25 bp, Homo sapien
cctacagtcctatgggtgaaatcct

SEQ ID NO: 1763608 - DNA, 25 bp, Homo sapien
tgcggaaaccagatcggctgctgct

SEQ ID NO: 1763609 - DNA, 25 bp, Homo sapien
taaactaaaagaacactggccagcg

SEQ ID NO: 1763610 - DNA, 25 bp, Homo sapien
ggatatacagtccagaagcccagtc

SEQ ID NO: 1763611 - DNA, 25 bp, Homo sapien
acttgcgcggccttctgacggaaaa

SEQ ID NO: 1763612 - DNA, 25 bp, Homo sapien
aacctacagacgtgcttagcgacgg

SEQ ID NO: 1763613 - DNA, 25 bp, Homo sapien
tacggtaacggtgacacgcaagtgc

SEQ ID NO: 1763614 - DNA, 25 bp, Homo sapien
cagcgagcctacaagttaatttggg

SEQ ID NO: 1763615 - DNA, 25 bp, Homo sapien
tgttgaacagagatgccaacgcagc

SEQ ID NO: 1763616 - DNA, 25 bp, Homo sapien
tgatagcccacgaacagcttaacga

SEQ ID NO: 1763617 - DNA, 25 bp, Homo sapien
tgaataaacggactgatccaccgcc

SEQ ID NO: 1763618 - DNA, 25 bp, Homo sapien
gggaataatgactgggactgcatga

SEQ ID NO: 1763619 - DNA, 25 bp, Homo sapien
agaactgtctctcagtctgattctc

SEQ ID NO: 1763620 - DNA, 25 bp, Homo sapien
tggggaataatgactgggactgcat

SEQ ID NO: 1763621 - DNA, 25 bp, Homo sapien
ctctcagtctgattctctagagact

SEQ ID NO: 1763622 - DNA, 25 bp, Homo sapien
atgctgctatagttggcttcagtgt

SEQ ID NO: 1763623 - DNA, 25 bp, Homo sapien
gagaatattcgttgtatgacttgaa

SEQ ID NO: 1763624 - DNA, 25 bp, Homo sapien
tccacacgcacttgaatgtacatgc

SEQ ID NO: 1763625 - DNA, 25 bp, Homo sapien
ctattgaaataagggtgtgaaatct

SEQ ID NO: 1763626 - DNA, 25 bp, Homo sapien
ctgagtctgattcctgtagaggtga

SEQ ID NO: 1763627 - DNA, 25 bp, Homo sapien
cacccggaaattatgacatcaggag

SEQ ID NO: 1763628 - DNA, 25 bp, Homo sapien
ggctgagtctgattcctgtagaggt

SEQ ID NO: 1763629 - DNA, 25 bp, Homo sapien
tgatcaaatgttccggtgacacccg

SEQ ID NO: 1763630 - DNA, 25 bp, Homo sapien
ggtgacatctccttcccattacagg

SEQ ID NO: 1763631 - DNA, 25 bp, Homo sapien
gcagcactggagctcagcccaggtt

SEQ ID NO: 1763632 - DNA, 25 bp, Homo sapien
ggctgggttccaaattgaaaaggca

SEQ ID NO: 1763633 - DNA, 25 bp, Homo sapien
ggttccagctcaattgaagaatctc

SEQ ID NO: 1763634 - DNA, 25 bp, Homo sapien
ctttgtgcaggtggctttctcgttg

SEQ ID NO: 1763635 - DNA, 25 bp, Homo sapien
cgttgttgcataaacagtgacggga

SEQ ID NO: 1763636 - DNA, 25 bp, Homo sapien
gttattgtcaggcaatgacttccag

SEQ ID NO: 1763637 - DNA, 25 bp, Homo sapien
cagtgacgggaacatcagttattgt

SEQ ID NO: 1763638 - DNA, 25 bp, Homo sapien
tagtcagaccttgacaaaagactta

SEQ ID NO: 1763639 - DNA, 25 bp, Homo sapien
cattacccttgacctagtcagacct

SEQ ID NO: 1763640 - DNA, 25 bp, Homo sapien
tgacctagtcagaccttgacaaaag

SEQ ID NO: 1763641 - DNA, 25 bp, Homo sapien
tacccttgacctagtcagaccttga

SEQ ID NO: 1763642 - DNA, 25 bp, Homo sapien
ttatttgtttaccagatcaccagat

SEQ ID NO: 1763643 - DNA, 25 bp, Homo sapien
cttttatttgtttaccagatcacca

SEQ ID NO: 1763644 - DNA, 25 bp, Homo sapien
tttgtttaccagatcaccagatgat

SEQ ID NO: 1763645 - DNA, 25 bp, Homo sapien
tatttgtttaccagatcaccagatg

SEQ ID NO: 1763646 - DNA, 25 bp, Homo sapien
tacccagccttgtatgagctctgag

SEQ ID NO: 1763647 - DNA, 25 bp, Homo sapien
ggtgctgacagccatcgagagaaaa

SEQ ID NO: 1763648 - DNA, 25 bp, Homo sapien
tctgggctcctctatggaagtggct

SEQ ID NO: 1763649 - DNA, 25 bp, Homo sapien
gaataagccccacctgactgatgac

SEQ ID NO: 1763650 - DNA, 25 bp, Homo sapien
aagattctcttgactgtggattgcc

SEQ ID NO: 1763651 - DNA, 25 bp, Homo sapien
gatttgcgttgggacgcagagccaa

SEQ ID NO: 1763652 - DNA, 25 bp, Homo sapien
aaagaaggaagtgctacacgctttt

SEQ ID NO: 1763653 - DNA, 25 bp, Homo sapien
taggtgttcaccataatccagtcac

SEQ ID NO: 1763654 - DNA, 25 bp, Homo sapien
cattttttatagtgtagatctgcta

SEQ ID NO: 1763655 - DNA, 25 bp, Homo sapien
ttttatagtgtagatctgctagtga

SEQ ID NO: 1763656 - DNA, 25 bp, Homo sapien
tggctgaaaagtctttacttcacct

SEQ ID NO: 1763657 - DNA, 25 bp, Homo sapien
tgtttggctgaaaagtctttacttc

SEQ ID NO: 1763658 - DNA, 25 bp, Homo sapien
taattctctctaagcgctacccatg

SEQ ID NO: 1763659 - DNA, 25 bp, Homo sapien
tattctgctgttcctaggtaaagtg

SEQ ID NO: 1763660 - DNA, 25 bp, Homo sapien
aagcttagatcattgccttgagatg

SEQ ID NO: 1763661 - DNA, 25 bp, Homo sapien
cttgttctaccagctgaaatcctga

SEQ ID NO: 1763662 - DNA, 25 bp, Homo sapien
atgttggtgtgctgagcccatcaac

SEQ ID NO: 1763663 - DNA, 25 bp, Homo sapien
cctcaccacaacaggccccaatgtg

SEQ ID NO: 1763664 - DNA, 25 bp, Homo sapien
aaattttagggtacaatgtgcaggt

SEQ ID NO: 1763665 - DNA, 25 bp, Homo sapien
gtgtgctgagcccatcaactcgtca

SEQ ID NO: 1763666 - DNA, 25 bp, Homo sapien
tgttgaagatatcgataaacatagc

SEQ ID NO: 1763667 - DNA, 25 bp, Homo sapien
taggccctgatatcaacagaattaa

SEQ ID NO: 1763668 - DNA, 25 bp, Homo sapien
ccaagtagctacattaatatagtct

SEQ ID NO: 1763669 - DNA, 25 bp, Homo sapien
tagctaatgtctgttcatagaggac

SEQ ID NO: 1763670 - DNA, 25 bp, Homo sapien
cgccactttgtgattgatggacacc

SEQ ID NO: 1763671 - DNA, 25 bp, Homo sapien
gaaaattcactgctgaggctttaca

SEQ ID NO: 1763672 - DNA, 25 bp, Homo sapien
tacacattataagtgaggcccaggt

SEQ ID NO: 1763673 - DNA, 25 bp, Homo sapien
tgggcttggaatacctcaattgcaa

SEQ ID NO: 1763674 - DNA, 25 bp, Homo sapien
tttattcgagaaaggagcagtggcc

SEQ ID NO: 1763675 - DNA, 25 bp, Homo sapien
gagcagtggccgactggtaattgat

SEQ ID NO: 1763676 - DNA, 25 bp, Homo sapien
aattgatggtctccgagtcctagaa

SEQ ID NO: 1763677 - DNA, 25 bp, Homo sapien
ccaggtgatatttattcgagaaagg

SEQ ID NO: 1763678 - DNA, 25 bp, Homo sapien
tatctcctttctaatttatagctgc

SEQ ID NO: 1763679 - DNA, 25 bp, Homo sapien
gagaacctcctcaatcaagccagag

SEQ ID NO: 1763680 - DNA, 25 bp, Homo sapien
tacacgtagacagagatttccaaat

SEQ ID NO: 1763681 - DNA, 25 bp, Homo sapien
caatcaagccagagaactgcaagca

SEQ ID NO: 1763682 - DNA, 25 bp, Homo sapien
gccttgaaggtttcagtctgcagat

SEQ ID NO: 1763683 - DNA, 25 bp, Homo sapien
gattcttcgagatgtgctgtagtcc

SEQ ID NO: 1763684 - DNA, 25 bp, Homo sapien
ggaactaagggaagaccatttcatg

SEQ ID NO: 1763685 - DNA, 25 bp, Homo sapien
tccagtgtgaaatccaaatggcaga

SEQ ID NO: 1763686 - DNA, 25 bp, Homo sapien
gaacaccactgaccgaatttatgat

SEQ ID NO: 1763687 - DNA, 25 bp, Homo sapien
ttcagatatgaacgggctggtacag

SEQ ID NO: 1763688 - DNA, 25 bp, Homo sapien
gatgtgagtattccctgaaagttct

SEQ ID NO: 1763689 - DNA, 25 bp, Homo sapien
caggaagttgcacagttcagatatg

SEQ ID NO: 1763690 - DNA, 25 bp, Homo sapien
cttattcttgattgccaaaattttc

SEQ ID NO: 1763691 - DNA, 25 bp, Homo sapien
tctttccacacccaagtgtcttaag

SEQ ID NO: 1763692 - DNA, 25 bp, Homo sapien
ttctgataaatactccacagtgccc

SEQ ID NO: 1763693 - DNA, 25 bp, Homo sapien
tcatagacagcattatctttccaca

SEQ ID NO: 1763694 - DNA, 25 bp, Homo sapien
aattggcaatataactgacttctga

SEQ ID NO: 1763695 - DNA, 25 bp, Homo sapien
ccatgctatcagttctgcctggtga

SEQ ID NO: 1763696 - DNA, 25 bp, Homo sapien
gactggtgggaacccacttcccatg

SEQ ID NO: 1763697 - DNA, 25 bp, Homo sapien
cagctgcatgcgactggtgggaacc

SEQ ID NO: 1763698 - DNA, 25 bp, Homo sapien
accatggccataccagagcagctgc

SEQ ID NO: 1763699 - DNA, 25 bp, Homo sapien
cttcagggtgttagcagtgttctcc

SEQ ID NO: 1763700 - DNA, 25 bp, Homo sapien
gtgttctcccgcagtcacccagaga

SEQ ID NO: 1763701 - DNA, 25 bp, Homo sapien
cacactgtattaggcttgatggata

SEQ ID NO: 1763702 - DNA, 25 bp, Homo sapien
cagttctgtgagaggtaaataatac

SEQ ID NO: 1763703 - DNA, 25 bp, Homo sapien
cagacatctgcctctgattcatgag

SEQ ID NO: 1763704 - DNA, 25 bp, Homo sapien
caagctgccacatattctgcctgag

SEQ ID NO: 1763705 - DNA, 25 bp, Homo sapien
cagctggatgtcatacgactggctt

SEQ ID NO: 1763706 - DNA, 25 bp, Homo sapien
gattcatgagggaaacacctgcaca

SEQ ID NO: 1763707 - DNA, 25 bp, Homo sapien
tatgttgaaagctacgtgttggatc

SEQ ID NO: 1763708 - DNA, 25 bp, Homo sapien
atctgctaacacaagctcatgttta

SEQ ID NO: 1763709 - DNA, 25 bp, Homo sapien
tctcctcaaagtcatgaatcagcat

SEQ ID NO: 1763710 - DNA, 25 bp, Homo sapien
tgagttagttcaaatcatccagaaa

SEQ ID NO: 1763711 - DNA, 25 bp, Homo sapien
tggggagaactgatgttctaatgaa

SEQ ID NO: 1763712 - DNA, 25 bp, Homo sapien
tctctcctttctcgatacagtagtt

SEQ ID NO: 1763713 - DNA, 25 bp, Homo sapien
tcgatacagtagttcaccccatttg

SEQ ID NO: 1763714 - DNA, 25 bp, Homo sapien
cccatttgtggtccagaagctgttt

SEQ ID NO: 1763715 - DNA, 25 bp, Homo sapien
tagttcaccccatttgtggtccaga

SEQ ID NO: 1763716 - DNA, 25 bp, Homo sapien
taaaaagatagctctcaagtcttac

SEQ ID NO: 1763717 - DNA, 25 bp, Homo sapien
ctgcaccctgagctaaaaagatagc

SEQ ID NO: 1763718 - DNA, 25 bp, Homo sapien
caccctgagctaaaaagatagctct

SEQ ID NO: 1763719 - DNA, 25 bp, Homo sapien
gagctaaaaagatagctctcaagtc

SEQ ID NO: 1763720 - DNA, 25 bp, Homo sapien
ggtgctctcctgagagatattttta

SEQ ID NO: 1763721 - DNA, 25 bp, Homo sapien
tgtctcggtcattaacctgggagta

SEQ ID NO: 1763722 - DNA, 25 bp, Homo sapien
tgtaatagctccaaacatgagctag

SEQ ID NO: 1763723 - DNA, 25 bp, Homo sapien
cctgtctgacggtatttttggccct

SEQ ID NO: 1763724 - DNA, 25 bp, Homo sapien
ggcaataggtggcagagagcctgga

SEQ ID NO: 1763725 - DNA, 25 bp, Homo sapien
caggataacccatgtcgtgcattgg

SEQ ID NO: 1763726 - DNA, 25 bp, Homo sapien
gcattggtaaccatccaggagggcc

SEQ ID NO: 1763727 - DNA, 25 bp, Homo sapien
gcagagagcctggaatcaggataac

SEQ ID NO: 1763728 - DNA, 25 bp, Homo sapien
taatgccctgtaggctgagtacatc

SEQ ID NO: 1763729 - DNA, 25 bp, Homo sapien
gaagttcacctttcgttacaggcag

SEQ ID NO: 1763730 - DNA, 25 bp, Homo sapien
tctagctcggtaaagaaacgcatcc

SEQ ID NO: 1763731 - DNA, 25 bp, Homo sapien
aaacgcatcctgtgagtggtgggcc

SEQ ID NO: 1763732 - DNA, 25 bp, Homo sapien
gctaggtcagttcggaaacttgaaa

SEQ ID NO: 1763733 - DNA, 25 bp, Homo sapien
tccccagtgccttgagagtttcacc

SEQ ID NO: 1763734 - DNA, 25 bp, Homo sapien
aagttgaggcttcggaatgtgtctg

SEQ ID NO: 1763735 - DNA, 25 bp, Homo sapien
gggctgtgccacactcgtccttctc

SEQ ID NO: 1763736 - DNA, 25 bp, Homo sapien
cataggtcttggacgaatacactcc

SEQ ID NO: 1763737 - DNA, 25 bp, Homo sapien
gccaaatgtgtatgacaatccctac

SEQ ID NO: 1763738 - DNA, 25 bp, Homo sapien
taatagtacccacagaaagaagatg

SEQ ID NO: 1763739 - DNA, 25 bp, Homo sapien
taccacttacccatggccaaatgtg

SEQ ID NO: 1763740 - DNA, 25 bp, Homo sapien
tgctgtaaattagtcagccgtgctc

SEQ ID NO: 1763741 - DNA, 25 bp, Homo sapien
attagtcagccgtgctctctcctca

SEQ ID NO: 1763742 - DNA, 25 bp, Homo sapien
taacttgctgtaaattagtcagccg

SEQ ID NO: 1763743 - DNA, 25 bp, Homo sapien
tgccttttaacttgctgtaaattag

SEQ ID NO: 1763744 - DNA, 25 bp, Homo sapien
gaaagcagccgcactagaaatgctt

SEQ ID NO: 1763745 - DNA, 25 bp, Homo sapien
tgggtgaacaccaagcctcaatccc

SEQ ID NO: 1763746 - DNA, 25 bp, Homo sapien
aaagggagagccgtgataagaaagc

SEQ ID NO: 1763747 - DNA, 25 bp, Homo sapien
agaaatgcttcccagttgcccttgt

SEQ ID NO: 1763748 - DNA, 25 bp, Homo sapien
tgtgagcgtctctgcatgtccgtgc

SEQ ID NO: 1763749 - DNA, 25 bp, Homo sapien
tgtccttgtaggcactgtgagcgtc

SEQ ID NO: 1763750 - DNA, 25 bp, Homo sapien
ggtgtcccgaaaacgatgacagcca

SEQ ID NO: 1763751 - DNA, 25 bp, Homo sapien
tcatcacggggtagataggtgtccc

SEQ ID NO: 1763752 - DNA, 25 bp, Homo sapien
tccaccagagtcgttcatagaaggg

SEQ ID NO: 1763753 - DNA, 25 bp, Homo sapien
gctcctcctcacagagactgaacat

SEQ ID NO: 1763754 - DNA, 25 bp, Homo sapien
agagactgaacatccaccagagtcg

SEQ ID NO: 1763755 - DNA, 25 bp, Homo sapien
gaacatccaccagagtcgttcatag

SEQ ID NO: 1763756 - DNA, 25 bp, Homo sapien
cctggattggtgtgcagtgctgaga

SEQ ID NO: 1763757 - DNA, 25 bp, Homo sapien
tggattggtgtgcagtgctgagaga

SEQ ID NO: 1763758 - DNA, 25 bp, Homo sapien
gattggtgtgcagtgctgagagagc

SEQ ID NO: 1763759 - DNA, 25 bp, Homo sapien
ggcctggattggtgtgcagtgctga

SEQ ID NO: 1763760 - DNA, 25 bp, Homo sapien
ccagttcatgagtatagtccctgcc

SEQ ID NO: 1763761 - DNA, 25 bp, Homo sapien
caggccaacccaatcattgctacta

SEQ ID NO: 1763762 - DNA, 25 bp, Homo sapien
tcctgagtccccagttcatgagtat

SEQ ID NO: 1763763 - DNA, 25 bp, Homo sapien
aatcattgctactatcatccccaaa

SEQ ID NO: 1763764 - DNA, 25 bp, Homo sapien
ccaggcttgtgtctacactgggcct

SEQ ID NO: 1763765 - DNA, 25 bp, Homo sapien
ccttggatttgtggagttcacgtac

SEQ ID NO: 1763766 - DNA, 25 bp, Homo sapien
aaagcaggtgctccctgtcctacac

SEQ ID NO: 1763767 - DNA, 25 bp, Homo sapien
ctcagcatcctgcaaaaagcaggtg

SEQ ID NO: 1763768 - DNA, 25 bp, Homo sapien
ccctgttgtccatgccagtgtgagt

SEQ ID NO: 1763769 - DNA, 25 bp, Homo sapien
tcttgttaaagagaacctgaatttc

SEQ ID NO: 1763770 - DNA, 25 bp, Homo sapien
ccacttccaagcctcttgttaaaga

SEQ ID NO: 1763771 - DNA, 25 bp, Homo sapien
tttgccttccttgggcactcacttc

SEQ ID NO: 1763772 - DNA, 25 bp, Homo sapien
ttgctcgttcatcattctttatctc

SEQ ID NO: 1763773 - DNA, 25 bp, Homo sapien
gctcgttcatcattctttatctcca

SEQ ID NO: 1763774 - DNA, 25 bp, Homo sapien
tcgttcatcattctttatctccagc

SEQ ID NO: 1763775 - DNA, 25 bp, Homo sapien
tcttgctcgttcatcattctttatc

SEQ ID NO: 1763776 - DNA, 25 bp, Homo sapien
tctgaccaaagtatattgaagttta

SEQ ID NO: 1763777 - DNA, 25 bp, Homo sapien
tccctctggatttacatattttgtg

SEQ ID NO: 1763778 - DNA, 25 bp, Homo sapien
tttgtgttgacttgatttatccatt

SEQ ID NO: 1763779 - DNA, 25 bp, Homo sapien
gagagaaagcccaagtcctacagtg

SEQ ID NO: 1763780 - DNA, 25 bp, Homo sapien
ccaggggagatgctttctctgttaa

SEQ ID NO: 1763781 - DNA, 25 bp, Homo sapien
tcttcagctacattagagttgactt

SEQ ID NO: 1763782 - DNA, 25 bp, Homo sapien
gccacttctactggtaacgtaagct

SEQ ID NO: 1763783 - DNA, 25 bp, Homo sapien
gccggtcactgcttcgcaaataata

SEQ ID NO: 1763784 - DNA, 25 bp, Homo sapien
cactatttatttaccgagcacctgc

SEQ ID NO: 1763785 - DNA, 25 bp, Homo sapien
tactcagcgaacacgtacactattt

SEQ ID NO: 1763786 - DNA, 25 bp, Homo sapien
ctaaaggcacaacggaaagatatgg

SEQ ID NO: 1763787 - DNA, 25 bp, Homo sapien
gatcctaggttcaaggcacatgctg

SEQ ID NO: 1763788 - DNA, 25 bp, Homo sapien
gaaatttggccacatctctggctga

SEQ ID NO: 1763789 - DNA, 25 bp, Homo sapien
atttggccacatctctggctgaccc

SEQ ID NO: 1763790 - DNA, 25 bp, Homo sapien
tccaacatgctccctccatgaagca

SEQ ID NO: 1763791 - DNA, 25 bp, Homo sapien
gagaaatttggccacatctctggct

SEQ ID NO: 1763792 - DNA, 25 bp, Homo sapien
caactccactgagaagatcaaggcc

SEQ ID NO: 1763793 - DNA, 25 bp, Homo sapien
tgagaagatcaaggccaacccatcc

SEQ ID NO: 1763794 - DNA, 25 bp, Homo sapien
tcctgaatgaaattcttccctcaag

SEQ ID NO: 1763795 - DNA, 25 bp, Homo sapien
tgttttacttcctgaatgaaattct

SEQ ID NO: 1763796 - DNA, 25 bp, Homo sapien
gacagcctcgggcatgtgatacagc

SEQ ID NO: 1763797 - DNA, 25 bp, Homo sapien
gagtagagatggcacaatggatgac

SEQ ID NO: 1763798 - DNA, 25 bp, Homo sapien
tacagctggataagtccaagcaaac

SEQ ID NO: 1763799 - DNA, 25 bp, Homo sapien
gataagtccaagcaaactgatccct

SEQ ID NO: 1763800 - DNA, 25 bp, Homo sapien
gagtaattagcacatgtgtcttcta

SEQ ID NO: 1763801 - DNA, 25 bp, Homo sapien
aaccaggaggccacattctactcct

SEQ ID NO: 1763802 - DNA, 25 bp, Homo sapien
tagttgcctgactccggatgttggg

SEQ ID NO: 1763803 - DNA, 25 bp, Homo sapien
gaatattccatacactacataagag

SEQ ID NO: 1763804 - DNA, 25 bp, Homo sapien
tgctgaaacctaatcacctcgtggc

SEQ ID NO: 1763805 - DNA, 25 bp, Homo sapien
gaaagatggcagctaggcaaggcta

SEQ ID NO: 1763806 - DNA, 25 bp, Homo sapien
tactggacaggataagaaagatggc

SEQ ID NO: 1763807 - DNA, 25 bp, Homo sapien
tgagcggacaggatctacaacagtt

SEQ ID NO: 1763808 - DNA, 25 bp, Homo sapien
cagcagaattctaaaagatccgaag

SEQ ID NO: 1763809 - DNA, 25 bp, Homo sapien
gaagcctacgtctctacctctacag

SEQ ID NO: 1763810 - DNA, 25 bp, Homo sapien
tctaaaagatccgaagcctacgtct

SEQ ID NO: 1763811 - DNA, 25 bp, Homo sapien
cttggagacttccagcagaattcta

SEQ ID NO: 1763812 - DNA, 25 bp, Homo sapien
gtgttggctgctccggccaaagttt

SEQ ID NO: 1763813 - DNA, 25 bp, Homo sapien
aattcaagtgggtctttaacagaat

SEQ ID NO: 1763814 - DNA, 25 bp, Homo sapien
gtgggtctttaacagaatctcagta

SEQ ID NO: 1763815 - DNA, 25 bp, Homo sapien
cagtatagtctccactcagtatttc

SEQ ID NO: 1763816 - DNA, 25 bp, Homo sapien
tactccttagccgtgaagtaaactg

SEQ ID NO: 1763817 - DNA, 25 bp, Homo sapien
tccttagccgtgaagtaaactgaag

SEQ ID NO: 1763818 - DNA, 25 bp, Homo sapien
cagtacacaatccactcttcaatag

SEQ ID NO: 1763819 - DNA, 25 bp, Homo sapien
tggcttctggaagcacttgggagcc

SEQ ID NO: 1763820 - DNA, 25 bp, Homo sapien
ctggatgcaatcaaagcagaacacg

SEQ ID NO: 1763821 - DNA, 25 bp, Homo sapien
tcaaagcagaacacgtgtgtacaag

SEQ ID NO: 1763822 - DNA, 25 bp, Homo sapien
ggagaaaaaatccaggcaaactgga

SEQ ID NO: 1763823 - DNA, 25 bp, Homo sapien
gaacacgtgtgtacaagagagagaa

SEQ ID NO: 1763824 - DNA, 25 bp, Homo sapien
tggtggatcttcttacactgagcgc

SEQ ID NO: 1763825 - DNA, 25 bp, Homo sapien
gagggcttgcaggaattctctccag

SEQ ID NO: 1763826 - DNA, 25 bp, Homo sapien
tggattgctcctgccttcatgctga

SEQ ID NO: 1763827 - DNA, 25 bp, Homo sapien
tcccagtaatgttggccggaggaga

SEQ ID NO: 1763828 - DNA, 25 bp, Homo sapien
taaagaccccagttacctagctaca

SEQ ID NO: 1763829 - DNA, 25 bp, Homo sapien
catgctgacctttctcaggccaaaa

SEQ ID NO: 1763830 - DNA, 25 bp, Homo sapien
ttgagatgggtaaatgacacttccc

SEQ ID NO: 1763831 - DNA, 25 bp, Homo sapien
ccacagctgtttgactgagatacaa

SEQ ID NO: 1763832 - DNA, 25 bp, Homo sapien
gtttgatgtggtggacaccggctcg

SEQ ID NO: 1763833 - DNA, 25 bp, Homo sapien
gatgtggtggacaccggctcgggaa

SEQ ID NO: 1763834 - DNA, 25 bp, Homo sapien
tggtggacaccggctcgggaagttc

SEQ ID NO: 1763835 - DNA, 25 bp, Homo sapien
tttgatgtggtggacaccggctcgg

SEQ ID NO: 1763836 - DNA, 25 bp, Homo sapien
tcagttacgccaaggtccccatctg

SEQ ID NO: 1763837 - DNA, 25 bp, Homo sapien
aaacagtgtcagttacgccaaggtc

SEQ ID NO: 1763838 - DNA, 25 bp, Homo sapien
gcagaaacagtgtcagttacgccaa

SEQ ID NO: 1763839 - DNA, 25 bp, Homo sapien
acagtgtcagttacgccaaggtccc

SEQ ID NO: 1763840 - DNA, 25 bp, Homo sapien
tagaaccatagaacccactgacagc

SEQ ID NO: 1763841 - DNA, 25 bp, Homo sapien
cggccggcagacctagacaacgcat

SEQ ID NO: 1763842 - DNA, 25 bp, Homo sapien
cactgacagccacggccggcagacc

SEQ ID NO: 1763843 - DNA, 25 bp, Homo sapien
cttagaaccatagaacccactgaca

SEQ ID NO: 1763844 - DNA, 25 bp, Homo sapien
tgatttcccggggagagagctttgt

SEQ ID NO: 1763845 - DNA, 25 bp, Homo sapien
caattaagatggctgatttcccggg

SEQ ID NO: 1763846 - DNA, 25 bp, Homo sapien
caatattcttcaatgaaagcttgag

SEQ ID NO: 1763847 - DNA, 25 bp, Homo sapien
gaaagcttgagcaattaagatggct

SEQ ID NO: 1763848 - DNA, 25 bp, Homo sapien
tgagaatgatagttcagaaacagtg

SEQ ID NO: 1763849 - DNA, 25 bp, Homo sapien
tcagaaacagtgagttccaatcctg

SEQ ID NO: 1763850 - DNA, 25 bp, Homo sapien
tgatagttcagaaacagtgagttcc

SEQ ID NO: 1763851 - DNA, 25 bp, Homo sapien
ctagcactgagaatgatagttcaga

SEQ ID NO: 1763852 - DNA, 25 bp, Homo sapien
cattatatggaacgtggccttgtat

SEQ ID NO: 1763853 - DNA, 25 bp, Homo sapien
gatttcattatatggaacgtggcct

SEQ ID NO: 1763854 - DNA, 25 bp, Homo sapien
tttcattatatggaacgtggccttg

SEQ ID NO: 1763855 - DNA, 25 bp, Homo sapien
cttgtatacacgccaaaccagaaaa

SEQ ID NO: 1763856 - DNA, 25 bp, Homo sapien
gacacagtgtgcgagtaaaacctta

SEQ ID NO: 1763857 - DNA, 25 bp, Homo sapien
catctaaagtatgtttaggagagga

SEQ ID NO: 1763858 - DNA, 25 bp, Homo sapien
gaaggccagagagtatgaggacaca

SEQ ID NO: 1763859 - DNA, 25 bp, Homo sapien
agagaattctgccaagtgacttcag

SEQ ID NO: 1763860 - DNA, 25 bp, Homo sapien
tgcagggtccactccttgcaaaggc

SEQ ID NO: 1763861 - DNA, 25 bp, Homo sapien
gtgactgctcttgcagggtccactc

SEQ ID NO: 1763862 - DNA, 25 bp, Homo sapien
tgctcttgcagggtccactccttgc

SEQ ID NO: 1763863 - DNA, 25 bp, Homo sapien
cttgcaaaggccctctacataattc

SEQ ID NO: 1763864 - DNA, 25 bp, Homo sapien
cacagactgagttaagggcttttcg

SEQ ID NO: 1763865 - DNA, 25 bp, Homo sapien
gtaaccctagagatgaggaatccat

SEQ ID NO: 1763866 - DNA, 25 bp, Homo sapien
ggcttttcgacctaagtcaattggc

SEQ ID NO: 1763867 - DNA, 25 bp, Homo sapien
atagtacagttttgatgctgcttcc

SEQ ID NO: 1763868 - DNA, 25 bp, Homo sapien
gggcagcatatctcgcacatgagta

SEQ ID NO: 1763869 - DNA, 25 bp, Homo sapien
gcacatgagtataaatacccaatca

SEQ ID NO: 1763870 - DNA, 25 bp, Homo sapien
gttggagggcagcatatctcgcaca

SEQ ID NO: 1763871 - DNA, 25 bp, Homo sapien
tcatcacacataagttgcaaaagga

SEQ ID NO: 1763872 - DNA, 25 bp, Homo sapien
ttcagacaaccgtgtggacccagag

SEQ ID NO: 1763873 - DNA, 25 bp, Homo sapien
cataaggattgcctgattcagacaa

SEQ ID NO: 1763874 - DNA, 25 bp, Homo sapien
aaaaggcagcattggcacacatcag

SEQ ID NO: 1763875 - DNA, 25 bp, Homo sapien
tgagcttctacgagttccatccctg

SEQ ID NO: 1763876 - DNA, 25 bp, Homo sapien
cctttcatgctctcagtgatctgtc

SEQ ID NO: 1763877 - DNA, 25 bp, Homo sapien
ctggcctttcatgctctcagtgatc

SEQ ID NO: 1763878 - DNA, 25 bp, Homo sapien
ggcctttcatgctctcagtgatctg

SEQ ID NO: 1763879 - DNA, 25 bp, Homo sapien
tcatgctctcagtgatctgtctcat

SEQ ID NO: 1763880 - DNA, 25 bp, Homo sapien
agtgccatggttcagcatgcaccag

SEQ ID NO: 1763881 - DNA, 25 bp, Homo sapien
tcagcatgcaccagtcctcatttgt

SEQ ID NO: 1763882 - DNA, 25 bp, Homo sapien
catggttcagcatgcaccagtcctc

SEQ ID NO: 1763883 - DNA, 25 bp, Homo sapien
ctggtatgcagtgccatggttcagc

SEQ ID NO: 1763884 - DNA, 25 bp, Homo sapien
gatttgagccaacctggtggtacct

SEQ ID NO: 1763885 - DNA, 25 bp, Homo sapien
caatactagtatctggatttgagcc

SEQ ID NO: 1763886 - DNA, 25 bp, Homo sapien
ggtggtacctggtccaagagccaat

SEQ ID NO: 1763887 - DNA, 25 bp, Homo sapien
tgccagacaagcagttctgctactt

SEQ ID NO: 1763888 - DNA, 25 bp, Homo sapien
gacacctctctggttgacatatcca

SEQ ID NO: 1763889 - DNA, 25 bp, Homo sapien
ttatggcagtttgccgatattttgg

SEQ ID NO: 1763890 - DNA, 25 bp, Homo sapien
gacatatccataagctcccttttca

SEQ ID NO: 1763891 - DNA, 25 bp, Homo sapien
tctattaagtttcctgtcgcaggtc

SEQ ID NO: 1763892 - DNA, 25 bp, Homo sapien
gtattttcaattagggttgatctta

SEQ ID NO: 1763893 - DNA, 25 bp, Homo sapien
tattttcaattagggttgatcttaa

SEQ ID NO: 1763894 - DNA, 25 bp, Homo sapien
catttgcatccgcatgttctttaat

SEQ ID NO: 1763895 - DNA, 25 bp, Homo sapien
tgcatccgcatgttctttaatctca

SEQ ID NO: 1763896 - DNA, 25 bp, Homo sapien
gcatccgcatgttctttaatctcat

SEQ ID NO: 1763897 - DNA, 25 bp, Homo sapien
tttgcatccgcatgttctttaatct

SEQ ID NO: 1763898 - DNA, 25 bp, Homo sapien
aaatgtctctgcgatccagtggtca

SEQ ID NO: 1763899 - DNA, 25 bp, Homo sapien
taagatcacctgtgccctagagagt

SEQ ID NO: 1763900 - DNA, 25 bp, Homo sapien
gagttgtacctacttcgcctggtga

SEQ ID NO: 1763901 - DNA, 25 bp, Homo sapien
tatggtcccacttcttagcctaaga

SEQ ID NO: 1763902 - DNA, 25 bp, Homo sapien
cagctgcatttagcatccaaggctg

SEQ ID NO: 1763903 - DNA, 25 bp, Homo sapien
tagcatccaaggctgccaaaactgc

SEQ ID NO: 1763904 - DNA, 25 bp, Homo sapien
tgtagaaaggtaggtgaattcagct

SEQ ID NO: 1763905 - DNA, 25 bp, Homo sapien
ctaaatgagctgtttgggcagttgt

SEQ ID NO: 1763906 - DNA, 25 bp, Homo sapien
caagaccgtttctcctttacaatgg

SEQ ID NO: 1763907 - DNA, 25 bp, Homo sapien
tatagtgaatgtaggcacagatgca

SEQ ID NO: 1763908 - DNA, 25 bp, Homo sapien
tgacataactgacccataggccatc

SEQ ID NO: 1763909 - DNA, 25 bp, Homo sapien
tatgtagggcctaagctaagacagg

SEQ ID NO: 1763910 - DNA, 25 bp, Homo sapien
tctccaccacgatatttatccaatg

SEQ ID NO: 1763911 - DNA, 25 bp, Homo sapien
gacactgatagttcacagcatacat

SEQ ID NO: 1763912 - DNA, 25 bp, Homo sapien
cgatatttatccaatgtgtcagcag

SEQ ID NO: 1763913 - DNA, 25 bp, Homo sapien
gtgtcagcagacactgatagttcac

SEQ ID NO: 1763914 - DNA, 25 bp, Homo sapien
ctttgtcttggttctccccagccat

SEQ ID NO: 1763915 - DNA, 25 bp, Homo sapien
ttggaaatcttgatggcccttttat

SEQ ID NO: 1763916 - DNA, 25 bp, Homo sapien
ggagtgaatcctgtccagtccttcg

SEQ ID NO: 1763917 - DNA, 25 bp, Homo sapien
gatgggaaatcaaatggtaaagacc

SEQ ID NO: 1763918 - DNA, 25 bp, Homo sapien
tgctcagaactcaccctgtgatggg

SEQ ID NO: 1763919 - DNA, 25 bp, Homo sapien
ctattgagcaattgacaagctgttg

SEQ ID NO: 1763920 - DNA, 25 bp, Homo sapien
ctaagtgtaacttcagatatctctg

SEQ ID NO: 1763921 - DNA, 25 bp, Homo sapien
caattgacaagctgttgcacacgaa

SEQ ID NO: 1763922 - DNA, 25 bp, Homo sapien
ctctaagtgtaacttcagatatctc

SEQ ID NO: 1763923 - DNA, 25 bp, Homo sapien
tagtaactatatcagcaaggtcaag

SEQ ID NO: 1763924 - DNA, 25 bp, Homo sapien
gcttccactgggcatcactgtcact

SEQ ID NO: 1763925 - DNA, 25 bp, Homo sapien
cactgtcactgagatactagtaact

SEQ ID NO: 1763926 - DNA, 25 bp, Homo sapien
caagtcttgtttcactctggtgcac

SEQ ID NO: 1763927 - DNA, 25 bp, Homo sapien
tgtctgctatcatgccagtgctcca

SEQ ID NO: 1763928 - DNA, 25 bp, Homo sapien
gagtaaaaagttcatcagagttggt

SEQ ID NO: 1763929 - DNA, 25 bp, Homo sapien
agtgtgcgtgctttgaactgtctgc

SEQ ID NO: 1763930 - DNA, 25 bp, Homo sapien
gaccagatctatatagtgtgcgtgc

SEQ ID NO: 1763931 - DNA, 25 bp, Homo sapien
ttgcactgtcgtttttcagtgtgtg

SEQ ID NO: 1763932 - DNA, 25 bp, Homo sapien
gcaatctttcttattgcactgtcgt

SEQ ID NO: 1763933 - DNA, 25 bp, Homo sapien
cagtgtgtgtaaactggggttgcca

SEQ ID NO: 1763934 - DNA, 25 bp, Homo sapien
tcagttgaagaagccaatgcaatct

SEQ ID NO: 1763935 - DNA, 25 bp, Homo sapien
tattcactatagtgtgatgagatca

SEQ ID NO: 1763936 - DNA, 25 bp, Homo sapien
catctctaacactgttggagggact

SEQ ID NO: 1763937 - DNA, 25 bp, Homo sapien
tattcatattcactatagtgtgatg

SEQ ID NO: 1763938 - DNA, 25 bp, Homo sapien
aacactgttggagggactgtgactg

SEQ ID NO: 1763939 - DNA, 25 bp, Homo sapien
tcaggtaaatacagtacagagtcat

SEQ ID NO: 1763940 - DNA, 25 bp, Homo sapien
gaagaaaccgcactttataagagaa

SEQ ID NO: 1763941 - DNA, 25 bp, Homo sapien
cattcctgagtgatgtgaagaaacc

SEQ ID NO: 1763942 - DNA, 25 bp, Homo sapien
caggcagttgccttctttaagtcca

SEQ ID NO: 1763943 - DNA, 25 bp, Homo sapien
tctacagagcaatgtaggaccctgt

SEQ ID NO: 1763944 - DNA, 25 bp, Homo sapien
gtccagtgaccggttctacagagca

SEQ ID NO: 1763945 - DNA, 25 bp, Homo sapien
gtaggaccctgtcatagctcaccat

SEQ ID NO: 1763946 - DNA, 25 bp, Homo sapien
gaccggttctacagagcaatgtagg

SEQ ID NO: 1763947 - DNA, 25 bp, Homo sapien
tggtggaaaagcacctgacagttct

SEQ ID NO: 1763948 - DNA, 25 bp, Homo sapien
ggacagggacccatagcacattgga

SEQ ID NO: 1763949 - DNA, 25 bp, Homo sapien
taggtgcatgcaccagaatcagtgg

SEQ ID NO: 1763950 - DNA, 25 bp, Homo sapien
tctctaaaataatcagctggctgac

SEQ ID NO: 1763951 - DNA, 25 bp, Homo sapien
ttttgtaattgtactacatatacca

SEQ ID NO: 1763952 - DNA, 25 bp, Homo sapien
tattacatgcaggtccattatctat

SEQ ID NO: 1763953 - DNA, 25 bp, Homo sapien
gatgatgatgaaagcgtcctctacg

SEQ ID NO: 1763954 - DNA, 25 bp, Homo sapien
gcgtcctctacgttgtcttctgttg

SEQ ID NO: 1763955 - DNA, 25 bp, Homo sapien
tctcaagtaagcacaagttaggctc

SEQ ID NO: 1763956 - DNA, 25 bp, Homo sapien
tgcactctgaatctcccagagggat

SEQ ID NO: 1763957 - DNA, 25 bp, Homo sapien
catcatcagtggtgctatatacaga

SEQ ID NO: 1763958 - DNA, 25 bp, Homo sapien
agttaggctcatatcaggacactcc

SEQ ID NO: 1763959 - DNA, 25 bp, Homo sapien
tgcacataattaaggcctgagatct

SEQ ID NO: 1763960 - DNA, 25 bp, Homo sapien
cataattaaggcctgagatctggac

SEQ ID NO: 1763961 - DNA, 25 bp, Homo sapien
ctgttgggagattgacattgcacat

SEQ ID NO: 1763962 - DNA, 25 bp, Homo sapien
tgggagattgacattgcacataatt

SEQ ID NO: 1763963 - DNA, 25 bp, Homo sapien
cctctaacttggaggttacccatgg

SEQ ID NO: 1763964 - DNA, 25 bp, Homo sapien
acttggaggttacccatggactgga

SEQ ID NO: 1763965 - DNA, 25 bp, Homo sapien
ggcagtcctatacattccttgttct

SEQ ID NO: 1763966 - DNA, 25 bp, Homo sapien
catggactggaatggcagtcctata

SEQ ID NO: 1763967 - DNA, 25 bp, Homo sapien
tgatggcatataggtgcttggaatg

SEQ ID NO: 1763968 - DNA, 25 bp, Homo sapien
aagagattagtctgagcccattcaa

SEQ ID NO: 1763969 - DNA, 25 bp, Homo sapien
cccattcaaagctggccgacttcat

SEQ ID NO: 1763970 - DNA, 25 bp, Homo sapien
gagcccattcaaagctggccgactt

SEQ ID NO: 1763971 - DNA, 25 bp, Homo sapien
taagagattagtctgagcccattca

SEQ ID NO: 1763972 - DNA, 25 bp, Homo sapien
acaaatctcttgtgatcactgccac

SEQ ID NO: 1763973 - DNA, 25 bp, Homo sapien
cacaaatctcttgtgatcactgcca

SEQ ID NO: 1763974 - DNA, 25 bp, Homo sapien
aagggagtactattctcaactctct

SEQ ID NO: 1763975 - DNA, 25 bp, Homo sapien
gggagtactattctcaactctcttc

SEQ ID NO: 1763976 - DNA, 25 bp, Homo sapien
agggagtactattctcaactctctt

SEQ ID NO: 1763977 - DNA, 25 bp, Homo sapien
gaagggagtactattctcaactctc

SEQ ID NO: 1763978 - DNA, 25 bp, Homo sapien
gcaagctaagtgtaattctaaccag

SEQ ID NO: 1763979 - DNA, 25 bp, Homo sapien
gattttctgccaactgccaaattgg

SEQ ID NO: 1763980 - DNA, 25 bp, Homo sapien
tgactttgtgtatgaaatcactggc

SEQ ID NO: 1763981 - DNA, 25 bp, Homo sapien
ccagtgtaggttcctttgaaggtga

SEQ ID NO: 1763982 - DNA, 25 bp, Homo sapien
gccttccagcctgtgccactgggtg

SEQ ID NO: 1763983 - DNA, 25 bp, Homo sapien
tgtgatcacatcattgccttccagc

SEQ ID NO: 1763984 - DNA, 25 bp, Homo sapien
agttgtgatcacatcattgccttcc

SEQ ID NO: 1763985 - DNA, 25 bp, Homo sapien
tgagttgtgatcacatcattgcctt

SEQ ID NO: 1763986 - DNA, 25 bp, Homo sapien
tgttgactctagtgcctgggaaaag

SEQ ID NO: 1763987 - DNA, 25 bp, Homo sapien
ccattttctggtccttagctagaga

SEQ ID NO: 1763988 - DNA, 25 bp, Homo sapien
ttctcttgaggtcggttggtgtgtc

SEQ ID NO: 1763989 - DNA, 25 bp, Homo sapien
agttcttcgccttgataggttgccc

SEQ ID NO: 1763990 - DNA, 25 bp, Homo sapien
cttaacttggacagcataatgtgat

SEQ ID NO: 1763991 - DNA, 25 bp, Homo sapien
ttaaaacataagatggctacctgca

SEQ ID NO: 1763992 - DNA, 25 bp, Homo sapien
caggagataggttacctgggttcaa

SEQ ID NO: 1763993 - DNA, 25 bp, Homo sapien
tctaaaagtgtggtctcaggagata

SEQ ID NO: 1763994 - DNA, 25 bp, Homo sapien
taaatgacctcaagctgtcacggct

SEQ ID NO: 1763995 - DNA, 25 bp, Homo sapien
caaactggcactggatggtgcaaga

SEQ ID NO: 1763996 - DNA, 25 bp, Homo sapien
cattaagcagttgcctgtaagaggc

SEQ ID NO: 1763997 - DNA, 25 bp, Homo sapien
tcagctgggctacactaacttcaac

SEQ ID NO: 1763998 - DNA, 25 bp, Homo sapien
taaggcccaattacatagcatatat

SEQ ID NO: 1763999 - DNA, 25 bp, Homo sapien
ttgagtttgacatggtctgccagga

SEQ ID NO: 1764000 - DNA, 25 bp, Homo sapien
tggtaataatgagttagacagtatc

SEQ ID NO: 1764001 - DNA, 25 bp, Homo sapien
caatctcagtagtttcagggataat

SEQ ID NO: 1764002 - DNA, 25 bp, Homo sapien
tccattgtctgagtggaagccactc

SEQ ID NO: 1764003 - DNA, 25 bp, Homo sapien
gccttgtgaggagcattagcacatt

SEQ ID NO: 1764004 - DNA, 25 bp, Homo sapien
aaatcgaagtcctgtggtagtgacc

SEQ ID NO: 1764005 - DNA, 25 bp, Homo sapien
cattttgagactgcacactctgaag

SEQ ID NO: 1764006 - DNA, 25 bp, Homo sapien
tgtatgtcatactttcacacgggcc

SEQ ID NO: 1764007 - DNA, 25 bp, Homo sapien
aatttgtatgtcatactttcacacg

SEQ ID NO: 1764008 - DNA, 25 bp, Homo sapien
catactttcacacgggccatggtaa

SEQ ID NO: 1764009 - DNA, 25 bp, Homo sapien
tgtcatactttcacacgggccatgg

SEQ ID NO: 1764010 - DNA, 25 bp, Homo sapien
cttcatcatttcctgtactccttcc

SEQ ID NO: 1764011 - DNA, 25 bp, Homo sapien
atttcctgtactccttccacgctga

SEQ ID NO: 1764012 - DNA, 25 bp, Homo sapien
tgtccttcctcagttggctcttcca

SEQ ID NO: 1764013 - DNA, 25 bp, Homo sapien
tccacgctgagacctctgtccttcc

SEQ ID NO: 1764014 - DNA, 25 bp, Homo sapien
ccatgcagctctgtaagagttttgc

SEQ ID NO: 1764015 - DNA, 25 bp, Homo sapien
tctcgctcccatgcagctctgtaag

SEQ ID NO: 1764016 - DNA, 25 bp, Homo sapien
ctcataacaatggttcctttaactg

SEQ ID NO: 1764017 - DNA, 25 bp, Homo sapien
gtaagagttttgctcataacaatgg

SEQ ID NO: 1764018 - DNA, 25 bp, Homo sapien
gtaatcatgtagcagccccttcatg

SEQ ID NO: 1764019 - DNA, 25 bp, Homo sapien
gatcaagctcaatagtgtccacact

SEQ ID NO: 1764020 - DNA, 25 bp, Homo sapien
caatcaataaggtggtcttagctgg

SEQ ID NO: 1764021 - DNA, 25 bp, Homo sapien
tgtttgtgataggaattctgggcat

SEQ ID NO: 1764022 - DNA, 25 bp, Homo sapien
atggctgtaactcaattcatagtga

SEQ ID NO: 1764023 - DNA, 25 bp, Homo sapien
ggctgtaactcaattcatagtgacc

SEQ ID NO: 1764024 - DNA, 25 bp, Homo sapien
actcaattcatagtgaccaccacaa

SEQ ID NO: 1764025 - DNA, 25 bp, Homo sapien
tgtaactcaattcatagtgaccacc

SEQ ID NO: 1764026 - DNA, 25 bp, Homo sapien
tcagtcttcctcagggaacgtatgc

SEQ ID NO: 1764027 - DNA, 25 bp, Homo sapien
ttcctcagggaacgtatgcaaggcc

SEQ ID NO: 1764028 - DNA, 25 bp, Homo sapien
gaacgtatgcaaggccaactcagac

SEQ ID NO: 1764029 - DNA, 25 bp, Homo sapien
gcaaggccaactcagacttagaatt

SEQ ID NO: 1764030 - DNA, 25 bp, Homo sapien
aagaaaaatatgacgtataggaagc

SEQ ID NO: 1764031 - DNA, 25 bp, Homo sapien
tgttgcttgacactgtaaaaagaaa

SEQ ID NO: 1764032 - DNA, 25 bp, Homo sapien
tataggaagcttgggtagatatgtt

SEQ ID NO: 1764033 - DNA, 25 bp, Homo sapien
tatgtttggggatacccaggcacac

SEQ ID NO: 1764034 - DNA, 25 bp, Homo sapien
tatgaaaggagccatcgcctaaagc

SEQ ID NO: 1764035 - DNA, 25 bp, Homo sapien
taaagcgagggcctttaaagtgctg

SEQ ID NO: 1764036 - DNA, 25 bp, Homo sapien
tgaaagagtgggcaaaaacaagtcc

SEQ ID NO: 1764037 - DNA, 25 bp, Homo sapien
taaagtgctgtaccatcaatgaaag

SEQ ID NO: 1764038 - DNA, 25 bp, Homo sapien
gctcccgtaactatcacaaaaagta

SEQ ID NO: 1764039 - DNA, 25 bp, Homo sapien
ccagttcaatgaaatagctcccgta

SEQ ID NO: 1764040 - DNA, 25 bp, Homo sapien
aatccacttgacatagatttgccag

SEQ ID NO: 1764041 - DNA, 25 bp, Homo sapien
catagatttgccagagtttattcat

SEQ ID NO: 1764042 - DNA, 25 bp, Homo sapien
tgtcctcatgttccatagggccagt

SEQ ID NO: 1764043 - DNA, 25 bp, Homo sapien
tgaatccccgacttcctaagaactg

SEQ ID NO: 1764044 - DNA, 25 bp, Homo sapien
taagctttccccaagtagaagcaga

SEQ ID NO: 1764045 - DNA, 25 bp, Homo sapien
gccatatgtctcagttgtaagctca

SEQ ID NO: 1764046 - DNA, 25 bp, Homo sapien
tcagttctctcatatggtgatggcc

SEQ ID NO: 1764047 - DNA, 25 bp, Homo sapien
cattggctttaagggcctttgctga

SEQ ID NO: 1764048 - DNA, 25 bp, Homo sapien
tctcatatggtgatggccttttgac

SEQ ID NO: 1764049 - DNA, 25 bp, Homo sapien
ttaccactcgttccatatgtttaaa

SEQ ID NO: 1764050 - DNA, 25 bp, Homo sapien
ttcattagccccaagtgtggctcag

SEQ ID NO: 1764051 - DNA, 25 bp, Homo sapien
tttcattagccccaagtgtggctca

SEQ ID NO: 1764052 - DNA, 25 bp, Homo sapien
ttttcattagccccaagtgtggctc

SEQ ID NO: 1764053 - DNA, 25 bp, Homo sapien
aggatattattcctccgttgcttct

SEQ ID NO: 1764054 - DNA, 25 bp, Homo sapien
tattcctccgttgcttctcagaaat

SEQ ID NO: 1764055 - DNA, 25 bp, Homo sapien
tattattcctccgttgcttctcaga

SEQ ID NO: 1764056 - DNA, 25 bp, Homo sapien
gatattattcctccgttgcttctca

SEQ ID NO: 1764057 - DNA, 25 bp, Homo sapien
tctatttgtagagtcaggcataaca

SEQ ID NO: 1764058 - DNA, 25 bp, Homo sapien
taaacctcattgagattcacttcag

SEQ ID NO: 1764059 - DNA, 25 bp, Homo sapien
gattcacttcaggacatatccaaac

SEQ ID NO: 1764060 - DNA, 25 bp, Homo sapien
caaattgtgactgaagtctatttgt

SEQ ID NO: 1764061 - DNA, 25 bp, Homo sapien
tgcatgcacaagggggcagtaagat

SEQ ID NO: 1764062 - DNA, 25 bp, Homo sapien
caagggggcagtaagatccattgct

SEQ ID NO: 1764063 - DNA, 25 bp, Homo sapien
cacaagggggcagtaagatccattg

SEQ ID NO: 1764064 - DNA, 25 bp, Homo sapien
tgcacaagggggcagtaagatccat

SEQ ID NO: 1764065 - DNA, 25 bp, Homo sapien
aactacagtcttgttgggtgaacaa

SEQ ID NO: 1764066 - DNA, 25 bp, Homo sapien
gacaccttcgttagaaactacagtc

SEQ ID NO: 1764067 - DNA, 25 bp, Homo sapien
tatacctaatcctaatgcgtctgag

SEQ ID NO: 1764068 - DNA, 25 bp, Homo sapien
tgagagacgcatacatgaaataacg

SEQ ID NO: 1764069 - DNA, 25 bp, Homo sapien
gatcatgtatctcatagtatgcttg

SEQ ID NO: 1764070 - DNA, 25 bp, Homo sapien
taggatcagtactgaaagctgctgc

SEQ ID NO: 1764071 - DNA, 25 bp, Homo sapien
tgctgctggatcaatactagttcca

SEQ ID NO: 1764072 - DNA, 25 bp, Homo sapien
actagttccaaagaaggttacagtg

SEQ ID NO: 1764073 - DNA, 25 bp, Homo sapien
tacgctgatgttcgtctctttgaca

SEQ ID NO: 1764074 - DNA, 25 bp, Homo sapien
tcctacgctgatgttcgtctctttg

SEQ ID NO: 1764075 - DNA, 25 bp, Homo sapien
taacaccggactcattatccttttc

SEQ ID NO: 1764076 - DNA, 25 bp, Homo sapien
cctacgctgatgttcgtctctttga

SEQ ID NO: 1764077 - DNA, 25 bp, Homo sapien
tgtccatgtcgtgtacagaacttac

SEQ ID NO: 1764078 - DNA, 25 bp, Homo sapien
actgtccatgtcgtgtacagaactt

SEQ ID NO: 1764079 - DNA, 25 bp, Homo sapien
cactgtccatgtcgtgtacagaact

SEQ ID NO: 1764080 - DNA, 25 bp, Homo sapien
ctgtccatgtcgtgtacagaactta

SEQ ID NO: 1764081 - DNA, 25 bp, Homo sapien
tctgtctcagagagcgacttcctac

SEQ ID NO: 1764082 - DNA, 25 bp, Homo sapien
ctctgtctcagagagcgacttccta

SEQ ID NO: 1764083 - DNA, 25 bp, Homo sapien
tcatgggaaaacacaagcccacaac

SEQ ID NO: 1764084 - DNA, 25 bp, Homo sapien
ggagaggctttgagtgcttgcagta

SEQ ID NO: 1764085 - DNA, 25 bp, Homo sapien
aaggagaggctttgagtgcttgcag

SEQ ID NO: 1764086 - DNA, 25 bp, Homo sapien
ttgtttcattggaaaggagaggctt

SEQ ID NO: 1764087 - DNA, 25 bp, Homo sapien
aaaggagaggctttgagtgcttgca

SEQ ID NO: 1764088 - DNA, 25 bp, Homo sapien
aatataggaactgtatgctgtttaa

SEQ ID NO: 1764089 - DNA, 25 bp, Homo sapien
gaatataggaactgtatgctgttta

SEQ ID NO: 1764090 - DNA, 25 bp, Homo sapien
aaacgtatgtatttgcgcattgcga

SEQ ID NO: 1764091 - DNA, 25 bp, Homo sapien
tcaaacgtatgtatttgcgcattgc

SEQ ID NO: 1764092 - DNA, 25 bp, Homo sapien
acgtatgtatttgcgcattgcgagg

SEQ ID NO: 1764093 - DNA, 25 bp, Homo sapien
tgcgcattgcgaggggatcaacccc

SEQ ID NO: 1764094 - DNA, 25 bp, Homo sapien
tgtggtctcagtttacataatggat

SEQ ID NO: 1764095 - DNA, 25 bp, Homo sapien
tcctcttccgagtcatatttagctt

SEQ ID NO: 1764096 - DNA, 25 bp, Homo sapien
gattcttctgcttccgtgactgcaa

SEQ ID NO: 1764097 - DNA, 25 bp, Homo sapien
ggttgtatcctcttccgagtcatat

SEQ ID NO: 1764098 - DNA, 25 bp, Homo sapien
ccgagtcatatttagcttgtggaat

SEQ ID NO: 1764099 - DNA, 25 bp, Homo sapien
caaatcaggcgctagacagtgtatg

SEQ ID NO: 1764100 - DNA, 25 bp, Homo sapien
agctctctgtctgctaacacgagca

SEQ ID NO: 1764101 - DNA, 25 bp, Homo sapien
cacgagcatggctgtctcgagatac

SEQ ID NO: 1764102 - DNA, 25 bp, Homo sapien
tgaagcaaatcaggcgctagacagt

SEQ ID NO: 1764103 - DNA, 25 bp, Homo sapien
ctcaggtttcacttcaagaaggcct

SEQ ID NO: 1764104 - DNA, 25 bp, Homo sapien
aatacacacgaatcatgggcatcaa

SEQ ID NO: 1764105 - DNA, 25 bp, Homo sapien
ggatctgttgcctcgctaagctcac

SEQ ID NO: 1764106 - DNA, 25 bp, Homo sapien
aaaaacgcgctttcaggcctcaggt

SEQ ID NO: 1764107 - DNA, 25 bp, Homo sapien
gctaaaagtcccattgagtgatatg

SEQ ID NO: 1764108 - DNA, 25 bp, Homo sapien
gcgccaccgatatacttcaggctaa

SEQ ID NO: 1764109 - DNA, 25 bp, Homo sapien
tacttcaggctaaaagtcccattga

SEQ ID NO: 1764110 - DNA, 25 bp, Homo sapien
agatttccgcgccaccgatatactt

SEQ ID NO: 1764111 - DNA, 25 bp, Homo sapien
taaagggagcccatcaatcacatca

SEQ ID NO: 1764112 - DNA, 25 bp, Homo sapien
atcaatcacatcatacttagtgcac

SEQ ID NO: 1764113 - DNA, 25 bp, Homo sapien
aagggagcccatcaatcacatcata

SEQ ID NO: 1764114 - DNA, 25 bp, Homo sapien
catcaatcacatcatacttagtgca

SEQ ID NO: 1764115 - DNA, 25 bp, Homo sapien
ctttgccttgaatggttctcattct

SEQ ID NO: 1764116 - DNA, 25 bp, Homo sapien
ttactttgccttgaatggttctcat

SEQ ID NO: 1764117 - DNA, 25 bp, Homo sapien
tactttgccttgaatggttctcatt

SEQ ID NO: 1764118 - DNA, 25 bp, Homo sapien
tgccttgaatggttctcattctaac

SEQ ID NO: 1764119 - DNA, 25 bp, Homo sapien
atcaaatgcaattctgtcatgaaac

SEQ ID NO: 1764120 - DNA, 25 bp, Homo sapien
ccaacatcaaatgcaattctgtcat

SEQ ID NO: 1764121 - DNA, 25 bp, Homo sapien
acatcaaatgcaattctgtcatgaa

SEQ ID NO: 1764122 - DNA, 25 bp, Homo sapien
aaatgcaattctgtcatgaaactga

SEQ ID NO: 1764123 - DNA, 25 bp, Homo sapien
tctgacagcgttgggagtatagcac

SEQ ID NO: 1764124 - DNA, 25 bp, Homo sapien
gaataactccaatctcacatttgga

SEQ ID NO: 1764125 - DNA, 25 bp, Homo sapien
ctaaaacccatgcagtaaggcctcc

SEQ ID NO: 1764126 - DNA, 25 bp, Homo sapien
tctagtggttgaccggacactgaaa

SEQ ID NO: 1764127 - DNA, 25 bp, Homo sapien
tggaacagagttcacctggaacaga

SEQ ID NO: 1764128 - DNA, 25 bp, Homo sapien
cctggaacagaattcgtatctcata

SEQ ID NO: 1764129 - DNA, 25 bp, Homo sapien
ctggaacagagttcacctggaacag

SEQ ID NO: 1764130 - DNA, 25 bp, Homo sapien
gaattcgtatctcataaacagcttt

SEQ ID NO: 1764131 - DNA, 25 bp, Homo sapien
tccgacgtgccagtcacacagggca

SEQ ID NO: 1764132 - DNA, 25 bp, Homo sapien
cacagggcactatgttgagagccag

SEQ ID NO: 1764133 - DNA, 25 bp, Homo sapien
caactggcacatacagcagagactc

SEQ ID NO: 1764134 - DNA, 25 bp, Homo sapien
ctcctgtgagaccagtgtgtccgac

SEQ ID NO: 1764135 - DNA, 25 bp, Homo sapien
tgagtggaagggctgcactcagagg

SEQ ID NO: 1764136 - DNA, 25 bp, Homo sapien
ctgagtggaagggctgcactcagag

SEQ ID NO: 1764137 - DNA, 25 bp, Homo sapien
tgaaccattggacccatgaaaaacc

SEQ ID NO: 1764138 - DNA, 25 bp, Homo sapien
caccaaattcgtggttgtgtaaagg

SEQ ID NO: 1764139 - DNA, 25 bp, Homo sapien
ggagatggctttagagaatgaacca

SEQ ID NO: 1764140 - DNA, 25 bp, Homo sapien
aattcgtggttgtgtaaaggagtag

SEQ ID NO: 1764141 - DNA, 25 bp, Homo sapien
tgcactctctggttagaacagccat

SEQ ID NO: 1764142 - DNA, 25 bp, Homo sapien
aatgcactctctggttagaacagcc

SEQ ID NO: 1764143 - DNA, 25 bp, Homo sapien
gaatgcactctctggttagaacagc

SEQ ID NO: 1764144 - DNA, 25 bp, Homo sapien
aagaatgcactctctggttagaaca

SEQ ID NO: 1764145 - DNA, 25 bp, Homo sapien
gggaatgcctttctagtttgaagta

SEQ ID NO: 1764146 - DNA, 25 bp, Homo sapien
ttggcagatgcacagaaggaaaact

SEQ ID NO: 1764147 - DNA, 25 bp, Homo sapien
tcaaagcctagttggcagatgcaca

SEQ ID NO: 1764148 - DNA, 25 bp, Homo sapien
ggcaaagagatcactccatgtctac

SEQ ID NO: 1764149 - DNA, 25 bp, Homo sapien
tatcagcgataaccacatgcttctg

SEQ ID NO: 1764150 - DNA, 25 bp, Homo sapien
gataaccacatgcttctgtaacggg

SEQ ID NO: 1764151 - DNA, 25 bp, Homo sapien
catgaaaagtcttgtatcagcgata

SEQ ID NO: 1764152 - DNA, 25 bp, Homo sapien
tcttgtatcagcgataaccacatgc

SEQ ID NO: 1764153 - DNA, 25 bp, Homo sapien
cattcatcctgcatattcattggtc

SEQ ID NO: 1764154 - DNA, 25 bp, Homo sapien
catcctgcatattcattggtccgta

SEQ ID NO: 1764155 - DNA, 25 bp, Homo sapien
gcatattcattggtccgtattcttt

SEQ ID NO: 1764156 - DNA, 25 bp, Homo sapien
accattgccatcctttactatccat

SEQ ID NO: 1764157 - DNA, 25 bp, Homo sapien
ggaacagtaagagtaaaggtatgga

SEQ ID NO: 1764158 - DNA, 25 bp, Homo sapien
gaataatgggtgatcgctttaaagg

SEQ ID NO: 1764159 - DNA, 25 bp, Homo sapien
tcaatctggactgtgaataatgggt

SEQ ID NO: 1764160 - DNA, 25 bp, Homo sapien
agagtaaaggtatggaagtctctgt

SEQ ID NO: 1764161 - DNA, 25 bp, Homo sapien
cttttatgacaaatggaaactcctc

SEQ ID NO: 1764162 - DNA, 25 bp, Homo sapien
tccagtgttgcaggccactctctgt

SEQ ID NO: 1764163 - DNA, 25 bp, Homo sapien
agaggctctacaggcttggtcttcc

SEQ ID NO: 1764164 - DNA, 25 bp, Homo sapien
gtctcctaaggactctgtactttct

SEQ ID NO: 1764165 - DNA, 25 bp, Homo sapien
tctgcttttcctgccgtatttagat

SEQ ID NO: 1764166 - DNA, 25 bp, Homo sapien
agctcctcagagtctgactcgtaag

SEQ ID NO: 1764167 - DNA, 25 bp, Homo sapien
gcttttcctgccgtatttagatttg

SEQ ID NO: 1764168 - DNA, 25 bp, Homo sapien
gtctgactcgtaagctggaatgcca

SEQ ID NO: 1764169 - DNA, 25 bp, Homo sapien
tcacagggtcgtcagcattcccaag

SEQ ID NO: 1764170 - DNA, 25 bp, Homo sapien
ttcccaagttgatcagactcaggga

SEQ ID NO: 1764171 - DNA, 25 bp, Homo sapien
agcattcccaagttgatcagactca

SEQ ID NO: 1764172 - DNA, 25 bp, Homo sapien
ggtcgtcagcattcccaagttgatc

SEQ ID NO: 1764173 - DNA, 25 bp, Homo sapien
aaactcatcatagtggtgatcttca

SEQ ID NO: 1764174 - DNA, 25 bp, Homo sapien
ggctgagtcagccatttgcttattt

SEQ ID NO: 1764175 - DNA, 25 bp, Homo sapien
catcatagtggtgatcttcagaggc

SEQ ID NO: 1764176 - DNA, 25 bp, Homo sapien
catagtggtgatcttcagaggctga

SEQ ID NO: 1764177 - DNA, 25 bp, Homo sapien
aggagcaaccacatttctgctgaac

SEQ ID NO: 1764178 - DNA, 25 bp, Homo sapien
tcatgttgttaactccctcaggagc

SEQ ID NO: 1764179 - DNA, 25 bp, Homo sapien
gttaactccctcaggagcaaccaca

SEQ ID NO: 1764180 - DNA, 25 bp, Homo sapien
tctgctgaacaaagggcatcatcaa

SEQ ID NO: 1764181 - DNA, 25 bp, Homo sapien
accctgagagactgctgaaagcttt

SEQ ID NO: 1764182 - DNA, 25 bp, Homo sapien
ctttcagagagtaaggccttgtacc

SEQ ID NO: 1764183 - DNA, 25 bp, Homo sapien
tatagatgactcaagtaggaccctg

SEQ ID NO: 1764184 - DNA, 25 bp, Homo sapien
cttgtaccaggaacttccactgtag

SEQ ID NO: 1764185 - DNA, 25 bp, Homo sapien
ttagcctcagccattgcatttgtaa

SEQ ID NO: 1764186 - DNA, 25 bp, Homo sapien
gagcaacaagggaacggatatccca

SEQ ID NO: 1764187 - DNA, 25 bp, Homo sapien
gggagtgagagaactttagcctcag

SEQ ID NO: 1764188 - DNA, 25 bp, Homo sapien
aacggatatcccagttagcaatctg

SEQ ID NO: 1764189 - DNA, 25 bp, Homo sapien
gacactgaacgatcccaaacaaaca

SEQ ID NO: 1764190 - DNA, 25 bp, Homo sapien
gcctcataaatccagtactttattg

SEQ ID NO: 1764191 - DNA, 25 bp, Homo sapien
gaacttttgaatccactgcctcata

SEQ ID NO: 1764192 - DNA, 25 bp, Homo sapien
tcagacactgaacgatcccaaacaa

SEQ ID NO: 1764193 - DNA, 25 bp, Homo sapien
gaggtagaaattcaggcatgtgaag

SEQ ID NO: 1764194 - DNA, 25 bp, Homo sapien
tgtccaggatccagtgacaacatca

SEQ ID NO: 1764195 - DNA, 25 bp, Homo sapien
catgtgaagtaactgtccaggatcc

SEQ ID NO: 1764196 - DNA, 25 bp, Homo sapien
ctggatgaggtagaaattcaggcat

SEQ ID NO: 1764197 - DNA, 25 bp, Homo sapien
tcttgactgctgtgagactctttcc

SEQ ID NO: 1764198 - DNA, 25 bp, Homo sapien
ggagacaccccaaatgggcctgtgt

SEQ ID NO: 1764199 - DNA, 25 bp, Homo sapien
tcacaattctgagcagcatggtctt

SEQ ID NO: 1764200 - DNA, 25 bp, Homo sapien
catggtcttcggaaaaagttcagca

SEQ ID NO: 1764201 - DNA, 25 bp, Homo sapien
gtctcaggccctcgaatgaggcttc

SEQ ID NO: 1764202 - DNA, 25 bp, Homo sapien
tgtctcaggccctcgaatgaggctt

SEQ ID NO: 1764203 - DNA, 25 bp, Homo sapien
gagaagcaaccactgagttagcgat

SEQ ID NO: 1764204 - DNA, 25 bp, Homo sapien
gaagcaaccactgagttagcgatga

SEQ ID NO: 1764205 - DNA, 25 bp, Homo sapien
agcaaccactgagttagcgatgagg

SEQ ID NO: 1764206 - DNA, 25 bp, Homo sapien
tgagaagcaaccactgagttagcga

SEQ ID NO: 1764207 - DNA, 25 bp, Homo sapien
taaactgccatgagttgtatttctg

SEQ ID NO: 1764208 - DNA, 25 bp, Homo sapien
actgccatgagttgtatttctgttt

SEQ ID NO: 1764209 - DNA, 25 bp, Homo sapien
ctaaactgccatgagttgtatttct

SEQ ID NO: 1764210 - DNA, 25 bp, Homo sapien
aaactgccatgagttgtatttctgt

SEQ ID NO: 1764211 - DNA, 25 bp, Homo sapien
ccagaacttatgctggtcctggcac

SEQ ID NO: 1764212 - DNA, 25 bp, Homo sapien
gattgagcacatgaatttggtattg

SEQ ID NO: 1764213 - DNA, 25 bp, Homo sapien
aagccccagaacttatgctggtcct

SEQ ID NO: 1764214 - DNA, 25 bp, Homo sapien
atgaggacagaaatgattgagcaca

SEQ ID NO: 1764215 - DNA, 25 bp, Homo sapien
gagccagggttgagtcctcctcaca

SEQ ID NO: 1764216 - DNA, 25 bp, Homo sapien
cttggtgaggcctgacacaagcaac

SEQ ID NO: 1764217 - DNA, 25 bp, Homo sapien
ttcagagccagggttgagtcctcct

SEQ ID NO: 1764218 - DNA, 25 bp, Homo sapien
ctctccttggtgaggcctgacacaa

SEQ ID NO: 1764219 - DNA, 25 bp, Homo sapien
agatctgcccaattctggactgtag

SEQ ID NO: 1764220 - DNA, 25 bp, Homo sapien
ctgtagtacccaagccacatcttca

SEQ ID NO: 1764221 - DNA, 25 bp, Homo sapien
tcctttgtgactaggtgcgtagatc

SEQ ID NO: 1764222 - DNA, 25 bp, Homo sapien
ggtgcgtagatctgcccaattctgg

SEQ ID NO: 1764223 - DNA, 25 bp, Homo sapien
cagagcaacacttccggtctttcta

SEQ ID NO: 1764224 - DNA, 25 bp, Homo sapien
ctttctgcttggtgggtttagagaa

SEQ ID NO: 1764225 - DNA, 25 bp, Homo sapien
tccactgtgaaaggatcttccatca

SEQ ID NO: 1764226 - DNA, 25 bp, Homo sapien
aaggatcttccatcagagcaacact

SEQ ID NO: 1764227 - DNA, 25 bp, Homo sapien
gcctccacgggccaatagaaactga

SEQ ID NO: 1764228 - DNA, 25 bp, Homo sapien
tctgatccactttctgcctgggtga

SEQ ID NO: 1764229 - DNA, 25 bp, Homo sapien
gaaactgacttcacttgattgcaga

SEQ ID NO: 1764230 - DNA, 25 bp, Homo sapien
tctgtgtaggtctgagcctccacgg

SEQ ID NO: 1764231 - DNA, 25 bp, Homo sapien
gactttgtgcaaatgtccagccaac

SEQ ID NO: 1764232 - DNA, 25 bp, Homo sapien
gatgctggttgtagccctccactga

SEQ ID NO: 1764233 - DNA, 25 bp, Homo sapien
actgaccttttgtggcggtgacacc

SEQ ID NO: 1764234 - DNA, 25 bp, Homo sapien
taagaggcccctttccatgatgctg

SEQ ID NO: 1764235 - DNA, 25 bp, Homo sapien
gacatcagtcttaatgtagaaaatg

SEQ ID NO: 1764236 - DNA, 25 bp, Homo sapien
cattttgacatcagtcttaatgtag

SEQ ID NO: 1764237 - DNA, 25 bp, Homo sapien
taaagtttttacatagacaggcaga

SEQ ID NO: 1764238 - DNA, 25 bp, Homo sapien
acaggcagagtttgggcaggtccct

SEQ ID NO: 1764239 - DNA, 25 bp, Homo sapien
agtcaaagatccagtttgacaacct

SEQ ID NO: 1764240 - DNA, 25 bp, Homo sapien
cagtttgacaacctcttagtaagtc

SEQ ID NO: 1764241 - DNA, 25 bp, Homo sapien
aagatccagtttgacaacctcttag

SEQ ID NO: 1764242 - DNA, 25 bp, Homo sapien
ggctgatggacttggtagtcaaaga

SEQ ID NO: 1764243 - DNA, 25 bp, Homo sapien
aggcctgaggcataaagtccttggc

SEQ ID NO: 1764244 - DNA, 25 bp, Homo sapien
ttggctgggtagacacaggtagcaa

SEQ ID NO: 1764245 - DNA, 25 bp, Homo sapien
gctgggtagacacaggtagcaacaa

SEQ ID NO: 1764246 - DNA, 25 bp, Homo sapien
ggcctgaggcataaagtccttggct

SEQ ID NO: 1764247 - DNA, 25 bp, Homo sapien
cattttcggtggtggtgtaacttgg

SEQ ID NO: 1764248 - DNA, 25 bp, Homo sapien
tctaagtactgtagttgcaagagat

SEQ ID NO: 1764249 - DNA, 25 bp, Homo sapien
catggcaggatgtatcggaggtatt

SEQ ID NO: 1764250 - DNA, 25 bp, Homo sapien
tggtatggtctttttgtgggcagca

SEQ ID NO: 1764251 - DNA, 25 bp, Homo sapien
ggaaatgggctcaccattgctagca

SEQ ID NO: 1764252 - DNA, 25 bp, Homo sapien
taggttggtgctgctagtctgccaa

SEQ ID NO: 1764253 - DNA, 25 bp, Homo sapien
cacggttccatgaggtgtacaagaa

SEQ ID NO: 1764254 - DNA, 25 bp, Homo sapien
ggtgcatcttacatgactggagcaa

SEQ ID NO: 1764255 - DNA, 25 bp, Homo sapien
gagatcttttgtgggccttcccttg

SEQ ID NO: 1764256 - DNA, 25 bp, Homo sapien
actgaagagatcttttgtgggcctt

SEQ ID NO: 1764257 - DNA, 25 bp, Homo sapien
tgtgggccttcccttgggtgaggag

SEQ ID NO: 1764258 - DNA, 25 bp, Homo sapien
aagagatcttttgtgggccttccct

SEQ ID NO: 1764259 - DNA, 25 bp, Homo sapien
gtaagggttttcaagaaaatctgca

SEQ ID NO: 1764260 - DNA, 25 bp, Homo sapien
ttttctatcgtatccaagggttcag

SEQ ID NO: 1764261 - DNA, 25 bp, Homo sapien
atactgtagtcagacaaagtacatc

SEQ ID NO: 1764262 - DNA, 25 bp, Homo sapien
tatcgtatccaagggttcagcctcg

SEQ ID NO: 1764263 - DNA, 25 bp, Homo sapien
aggcaactaattttgccattctcat

SEQ ID NO: 1764264 - DNA, 25 bp, Homo sapien
gaaggcaactaattttgccattctc

SEQ ID NO: 1764265 - DNA, 25 bp, Homo sapien
aactaattttgccattctcatccac

SEQ ID NO: 1764266 - DNA, 25 bp, Homo sapien
gcaactaattttgccattctcatcc

SEQ ID NO: 1764267 - DNA, 25 bp, Homo sapien
aagtggcttgccataaacacctcag

SEQ ID NO: 1764268 - DNA, 25 bp, Homo sapien
ttattaactcatacaattacttgtc

SEQ ID NO: 1764269 - DNA, 25 bp, Homo sapien
cattcatcagaaggtcactctcgac

SEQ ID NO: 1764270 - DNA, 25 bp, Homo sapien
gtttgttaagcagtaagtcagacaa

SEQ ID NO: 1764271 - DNA, 25 bp, Homo sapien
ctccctgtgcataaaacacactgtg

SEQ ID NO: 1764272 - DNA, 25 bp, Homo sapien
gccagtgggcctctcatcttttttc

SEQ ID NO: 1764273 - DNA, 25 bp, Homo sapien
caggaatttctggtagatctataag

SEQ ID NO: 1764274 - DNA, 25 bp, Homo sapien
tcatgttggcaaagtgtgaactcag

SEQ ID NO: 1764275 - DNA, 25 bp, Homo sapien
aagtgaaggatgtcttgctctagtt

SEQ ID NO: 1764276 - DNA, 25 bp, Homo sapien
aggaaaagtgaaggatgtcttgctc

SEQ ID NO: 1764277 - DNA, 25 bp, Homo sapien
tcttgataggaagtgatgggatggc

SEQ ID NO: 1764278 - DNA, 25 bp, Homo sapien
gatggcgatacgaatatatgttcct

SEQ ID NO: 1764279 - DNA, 25 bp, Homo sapien
taaatagtgttcaaggaggaagcag

SEQ ID NO: 1764280 - DNA, 25 bp, Homo sapien
aagcagggagggtatagctcttgat

SEQ ID NO: 1764281 - DNA, 25 bp, Homo sapien
ttgtatgatcgcccttgggcaccac

SEQ ID NO: 1764282 - DNA, 25 bp, Homo sapien
ccttgtatgatcgcccttgggcacc

SEQ ID NO: 1764283 - DNA, 25 bp, Homo sapien
gtatgatcgcccttgggcaccacat

SEQ ID NO: 1764284 - DNA, 25 bp, Homo sapien
actggatttgctgcccactgctcct

SEQ ID NO: 1764285 - DNA, 25 bp, Homo sapien
gaatgcaaggcagttcaaaactcaa

SEQ ID NO: 1764286 - DNA, 25 bp, Homo sapien
ctgaatagcgaatgcaaggcagttc

SEQ ID NO: 1764287 - DNA, 25 bp, Homo sapien
gaatagcgaatgcaaggcagttcaa

SEQ ID NO: 1764288 - DNA, 25 bp, Homo sapien
tagcgaatgcaaggcagttcaaaac

SEQ ID NO: 1764289 - DNA, 25 bp, Homo sapien
acttctgaggttgcctctgactcta

SEQ ID NO: 1764290 - DNA, 25 bp, Homo sapien
ccttcacttctgaggttgcctctga

SEQ ID NO: 1764291 - DNA, 25 bp, Homo sapien
tcacttctgaggttgcctctgactc

SEQ ID NO: 1764292 - DNA, 25 bp, Homo sapien
tctgaggttgcctctgactctatct

SEQ ID NO: 1764293 - DNA, 25 bp, Homo sapien
cttccctcttgctgcttgtccccac

SEQ ID NO: 1764294 - DNA, 25 bp, Homo sapien
caatatatttagcaacaagttcctc

SEQ ID NO: 1764295 - DNA, 25 bp, Homo sapien
atatatttagcaacaagttcctcct

SEQ ID NO: 1764296 - DNA, 25 bp, Homo sapien
ttcttgtgggagaacacgcaatata

SEQ ID NO: 1764297 - DNA, 25 bp, Homo sapien
tgggagaacacgcaatatatttagc

SEQ ID NO: 1764298 - DNA, 25 bp, Homo sapien
cagggtaatgctgcatcttttcaga

SEQ ID NO: 1764299 - DNA, 25 bp, Homo sapien
ctggcttctcaaagcaactttcatc

SEQ ID NO: 1764300 - DNA, 25 bp, Homo sapien
ctctggcttctcaaagcaactttca

SEQ ID NO: 1764301 - DNA, 25 bp, Homo sapien
ggtaatgctgcatcttttcagaaat

SEQ ID NO: 1764302 - DNA, 25 bp, Homo sapien
gtattattcaagactctcatcagca

SEQ ID NO: 1764303 - DNA, 25 bp, Homo sapien
tggacactggaactgtttgtctctg

SEQ ID NO: 1764304 - DNA, 25 bp, Homo sapien
tatgttctaggtattgggccagctg

SEQ ID NO: 1764305 - DNA, 25 bp, Homo sapien
gaatatcccactcactttgggaaag

SEQ ID NO: 1764306 - DNA, 25 bp, Homo sapien
atcttcttgactcagccttttgagt

SEQ ID NO: 1764307 - DNA, 25 bp, Homo sapien
acttaaactccagggttcagccgtg

SEQ ID NO: 1764308 - DNA, 25 bp, Homo sapien
ggttcagccgtggaacacaggtgat

SEQ ID NO: 1764309 - DNA, 25 bp, Homo sapien
aactccagggttcagccgtggaaca

SEQ ID NO: 1764310 - DNA, 25 bp, Homo sapien
caaaaagatgcgaagtagatgtgaa

SEQ ID NO: 1764311 - DNA, 25 bp, Homo sapien
gcaactcaaaaagatgcgaagtaga

SEQ ID NO: 1764312 - DNA, 25 bp, Homo sapien
gatgcgaagtagatgtgaaaccttc

SEQ ID NO: 1764313 - DNA, 25 bp, Homo sapien
gcgaagtagatgtgaaaccttcata

SEQ ID NO: 1764314 - DNA, 25 bp, Homo sapien
ttaatatcaacctgcagcaaagtgt

SEQ ID NO: 1764315 - DNA, 25 bp, Homo sapien
aacctgcagcaaagtgttgacagtg

SEQ ID NO: 1764316 - DNA, 25 bp, Homo sapien
ttcacaagcccaacattttgcagta

SEQ ID NO: 1764317 - DNA, 25 bp, Homo sapien
tgggcataagtgaaggagctttcca

SEQ ID NO: 1764318 - DNA, 25 bp, Homo sapien
gtcagaaagccttcggcatctagtg

SEQ ID NO: 1764319 - DNA, 25 bp, Homo sapien
tctagtgcatttctacagatattcc

SEQ ID NO: 1764320 - DNA, 25 bp, Homo sapien
tacagatattccgtggtgatttaat

SEQ ID NO: 1764321 - DNA, 25 bp, Homo sapien
gaaagccttcggcatctagtgcatt

SEQ ID NO: 1764322 - DNA, 25 bp, Homo sapien
aaccggaggacacagatgaaggtcc

SEQ ID NO: 1764323 - DNA, 25 bp, Homo sapien
gaggacacagatgaaggtcctgccc

SEQ ID NO: 1764324 - DNA, 25 bp, Homo sapien
agatgaaggtcctgccccgattgtc

SEQ ID NO: 1764325 - DNA, 25 bp, Homo sapien
tcaaccggaggacacagatgaaggt

SEQ ID NO: 1764326 - DNA, 25 bp, Homo sapien
tttgtccatggccatgcgttatgtt

SEQ ID NO: 1764327 - DNA, 25 bp, Homo sapien
gccatttggcatgagagcagagttc

SEQ ID NO: 1764328 - DNA, 25 bp, Homo sapien
tattgtatcctatcttgtatttgct

SEQ ID NO: 1764329 - DNA, 25 bp, Homo sapien
tcttgaccaccttccttgttgcatt

SEQ ID NO: 1764330 - DNA, 25 bp, Homo sapien
ctgttttctagtgccatgtgagcca

SEQ ID NO: 1764331 - DNA, 25 bp, Homo sapien
gcacagtggcatgggtagtacttcc

SEQ ID NO: 1764332 - DNA, 25 bp, Homo sapien
ggaaattgtagctttcagcaagcac

SEQ ID NO: 1764333 - DNA, 25 bp, Homo sapien
cagcagaggtgtttttggtaggaaa

SEQ ID NO: 1764334 - DNA, 25 bp, Homo sapien
ctttgtttgccgctatttcctagcc

SEQ ID NO: 1764335 - DNA, 25 bp, Homo sapien
tgccgctatttcctagccaataaaa

SEQ ID NO: 1764336 - DNA, 25 bp, Homo sapien
tcctagccaataaaaccattgctta

SEQ ID NO: 1764337 - DNA, 25 bp, Homo sapien
taaaaccattgcttattaaatccta

SEQ ID NO: 1764338 - DNA, 25 bp, Homo sapien
ggttgcagtgagcagtgccattaca

SEQ ID NO: 1764339 - DNA, 25 bp, Homo sapien
gtgagcagtgccattacactccggc

SEQ ID NO: 1764340 - DNA, 25 bp, Homo sapien
tgcagtgagcagtgccattacactc

SEQ ID NO: 1764341 - DNA, 25 bp, Homo sapien
agtgagcagtgccattacactccgg

SEQ ID NO: 1764342 - DNA, 25 bp, Homo sapien
tggatttacttccatctttacggga

SEQ ID NO: 1764343 - DNA, 25 bp, Homo sapien
ccatctttacgggaggggcatcttg

SEQ ID NO: 1764344 - DNA, 25 bp, Homo sapien
aattctggatttacttccatcttta

SEQ ID NO: 1764345 - DNA, 25 bp, Homo sapien
gacttttgtcagctaaaagttcact

SEQ ID NO: 1764346 - DNA, 25 bp, Homo sapien
gagcagttgttatttgtcagtgtag

SEQ ID NO: 1764347 - DNA, 25 bp, Homo sapien
tgtcagtgtagtttgtctggtaagc

SEQ ID NO: 1764348 - DNA, 25 bp, Homo sapien
tgatgagcagttgttatttgtcagt

SEQ ID NO: 1764349 - DNA, 25 bp, Homo sapien
ttgtctggtaagcagagccttttcc

SEQ ID NO: 1764350 - DNA, 25 bp, Homo sapien
tcttcgtctgagtttaagagtgcct

SEQ ID NO: 1764351 - DNA, 25 bp, Homo sapien
ccatctttcctggattcatgggagc

SEQ ID NO: 1764352 - DNA, 25 bp, Homo sapien
tgcctgggctggtgcattaaagcca

SEQ ID NO: 1764353 - DNA, 25 bp, Homo sapien
ctttcctggattcatgggagctgtc

SEQ ID NO: 1764354 - DNA, 25 bp, Homo sapien
tcaatggtctgtgttgggaatccag

SEQ ID NO: 1764355 - DNA, 25 bp, Homo sapien
cagggaggccttaagaagcacaact

SEQ ID NO: 1764356 - DNA, 25 bp, Homo sapien
tcagctggttagaggatctcctttc

SEQ ID NO: 1764357 - DNA, 25 bp, Homo sapien
ggcatgagtctctcaacagggaggc

SEQ ID NO: 1764358 - DNA, 25 bp, Homo sapien
tcctagctgtagatcttagtacact

SEQ ID NO: 1764359 - DNA, 25 bp, Homo sapien
tggatgtttgagtcaccaggtgacc

SEQ ID NO: 1764360 - DNA, 25 bp, Homo sapien
gagaatgcatgtcttgctttccaca

SEQ ID NO: 1764361 - DNA, 25 bp, Homo sapien
gaacccctattagcagcattcagag

SEQ ID NO: 1764362 - DNA, 25 bp, Homo sapien
aggaaacactctcagtgggcttggg

SEQ ID NO: 1764363 - DNA, 25 bp, Homo sapien
actctcagtgggcttgggagtcatg

SEQ ID NO: 1764364 - DNA, 25 bp, Homo sapien
tgctaacaggctctgcaagacaaga

SEQ ID NO: 1764365 - DNA, 25 bp, Homo sapien
caaggaggtgctaacaggctctgca

SEQ ID NO: 1764366 - DNA, 25 bp, Homo sapien
aaaggaagcttctagacaaaggcct

SEQ ID NO: 1764367 - DNA, 25 bp, Homo sapien
ttgtcttagctgagatactacttct

SEQ ID NO: 1764368 - DNA, 25 bp, Homo sapien
caatgcatgtatgttgaaggaatgg

SEQ ID NO: 1764369 - DNA, 25 bp, Homo sapien
gagctatgattaacaacagaaggaa

SEQ ID NO: 1764370 - DNA, 25 bp, Homo sapien
gaacccagtctagacacttcagtgg

SEQ ID NO: 1764371 - DNA, 25 bp, Homo sapien
tttgactgaacccagtctagacact

SEQ ID NO: 1764372 - DNA, 25 bp, Homo sapien
cgtgcccggcgcaaatttgattttg

SEQ ID NO: 1764373 - DNA, 25 bp, Homo sapien
catagcatggtggatggaatacttc

SEQ ID NO: 1764374 - DNA, 25 bp, Homo sapien
gctgcatggtggtccaattgagaaa

SEQ ID NO: 1764375 - DNA, 25 bp, Homo sapien
tcttctgtcaagagtctatgagtgg

SEQ ID NO: 1764376 - DNA, 25 bp, Homo sapien
gggggtcaacatggattcacgtcaa

SEQ ID NO: 1764377 - DNA, 25 bp, Homo sapien
tgttactttcctagtcaaatctata

SEQ ID NO: 1764378 - DNA, 25 bp, Homo sapien
ctctcctcctgataggtgttgagag

SEQ ID NO: 1764379 - DNA, 25 bp, Homo sapien
taaggacactgctgtttttccagat

SEQ ID NO: 1764380 - DNA, 25 bp, Homo sapien
tgttgagagagagtaaggacactgc

SEQ ID NO: 1764381 - DNA, 25 bp, Homo sapien
tcctcctgataggtgttgagagaga

SEQ ID NO: 1764382 - DNA, 25 bp, Homo sapien
cactcagcaagtgagagctggagca

SEQ ID NO: 1764383 - DNA, 25 bp, Homo sapien
gctaacatgatccactcagcaagtg

SEQ ID NO: 1764384 - DNA, 25 bp, Homo sapien
gccatttgtatagctaacatgatcc

SEQ ID NO: 1764385 - DNA, 25 bp, Homo sapien
gtgagagctggagcatattaagcac

SEQ ID NO: 1764386 - DNA, 25 bp, Homo sapien
gtttcctcgccagtcacatttagtc

SEQ ID NO: 1764387 - DNA, 25 bp, Homo sapien
tgtttcctcgccagtcacatttagt

SEQ ID NO: 1764388 - DNA, 25 bp, Homo sapien
tggctgtttcctcgccagtcacatt

SEQ ID NO: 1764389 - DNA, 25 bp, Homo sapien
aatggctgtttcctcgccagtcaca

SEQ ID NO: 1764390 - DNA, 25 bp, Homo sapien
ccttgaaggtaggacgaagtcctat

SEQ ID NO: 1764391 - DNA, 25 bp, Homo sapien
catgtgaagcacctggtacataatc

SEQ ID NO: 1764392 - DNA, 25 bp, Homo sapien
aatttctctgttataagctccttga

SEQ ID NO: 1764393 - DNA, 25 bp, Homo sapien
gcacctggtacataatctgcatttt

SEQ ID NO: 1764394 - DNA, 25 bp, Homo sapien
ggatctccagtggatatcgtaatga

SEQ ID NO: 1764395 - DNA, 25 bp, Homo sapien
tctccagtggatatcgtaatgactg

SEQ ID NO: 1764396 - DNA, 25 bp, Homo sapien
gatctccagtggatatcgtaatgac

SEQ ID NO: 1764397 - DNA, 25 bp, Homo sapien
caggatctccagtggatatcgtaat

SEQ ID NO: 1764398 - DNA, 25 bp, Homo sapien
acttgaaacaggtatccaccttctt

SEQ ID NO: 1764399 - DNA, 25 bp, Homo sapien
gtttcatttaggtaggagttcacca

SEQ ID NO: 1764400 - DNA, 25 bp, Homo sapien
gggtttaccatccacagcattctgg

SEQ ID NO: 1764401 - DNA, 25 bp, Homo sapien
atccaccttcttcagtaataacatc

SEQ ID NO: 1764402 - DNA, 25 bp, Homo sapien
gtctcccacaagtgaagagaaggac

SEQ ID NO: 1764403 - DNA, 25 bp, Homo sapien
gagaaggacttgagtaggtcttaca

SEQ ID NO: 1764404 - DNA, 25 bp, Homo sapien
cagctgtggagtctcccacaagtga

SEQ ID NO: 1764405 - DNA, 25 bp, Homo sapien
tgtggagtctcccacaagtgaagag

SEQ ID NO: 1764406 - DNA, 25 bp, Homo sapien
tctttaaagttagtaggtgtgccga

SEQ ID NO: 1764407 - DNA, 25 bp, Homo sapien
ctaacaaccgtttctgcaggtggct

SEQ ID NO: 1764408 - DNA, 25 bp, Homo sapien
gtcccttgaataggcaaaggtctcc

SEQ ID NO: 1764409 - DNA, 25 bp, Homo sapien
agcttgatgcattctgtcccttgaa

SEQ ID NO: 1764410 - DNA, 25 bp, Homo sapien
cttggttgggatggccccagtcaag

SEQ ID NO: 1764411 - DNA, 25 bp, Homo sapien
ttttcatgagttggagccgataatt

SEQ ID NO: 1764412 - DNA, 25 bp, Homo sapien
agtgagcgccagtgtgcatactctg

SEQ ID NO: 1764413 - DNA, 25 bp, Homo sapien
caaggatgaccaattttgctgtgcc

SEQ ID NO: 1764414 - DNA, 25 bp, Homo sapien
atagtactctacttctgatttccgc

SEQ ID NO: 1764415 - DNA, 25 bp, Homo sapien
ggaattctcattatgtggtcaccag

SEQ ID NO: 1764416 - DNA, 25 bp, Homo sapien
tggctgcaccgcatcattttgacac

SEQ ID NO: 1764417 - DNA, 25 bp, Homo sapien
tatgtggtcaccagtatcatgtgtt

SEQ ID NO: 1764418 - DNA, 25 bp, Homo sapien
ccacagtggtaggtcctctggaggc

SEQ ID NO: 1764419 - DNA, 25 bp, Homo sapien
aactgggctgatccgacaccaccat

SEQ ID NO: 1764420 - DNA, 25 bp, Homo sapien
caaatcccttgtattagcagttcca

SEQ ID NO: 1764421 - DNA, 25 bp, Homo sapien
cagccgccaggatggacgcaaatcc

SEQ ID NO: 1764422 - DNA, 25 bp, Homo sapien
ccaaaagcccatttaaggctcttga

SEQ ID NO: 1764423 - DNA, 25 bp, Homo sapien
tgatgtaaagacgtttccgtagaaa

SEQ ID NO: 1764424 - DNA, 25 bp, Homo sapien
tgtaaagacgtttccgtagaaatgc

SEQ ID NO: 1764425 - DNA, 25 bp, Homo sapien
gagctgatgtaaagacgtttccgta

SEQ ID NO: 1764426 - DNA, 25 bp, Homo sapien
tccccagagctgatgtaaagacgtt

SEQ ID NO: 1764427 - DNA, 25 bp, Homo sapien
cagtaactctttgttcaagcgttgc

SEQ ID NO: 1764428 - DNA, 25 bp, Homo sapien
aatcaccaagctgaacattgttacg

SEQ ID NO: 1764429 - DNA, 25 bp, Homo sapien
gacggttggttcaagccagtaactc

SEQ ID NO: 1764430 - DNA, 25 bp, Homo sapien
gaagcttcgtcttctcactgtccag

SEQ ID NO: 1764431 - DNA, 25 bp, Homo sapien
taacttgactcgcattgactctcgt

SEQ ID NO: 1764432 - DNA, 25 bp, Homo sapien
caatggttgcgatttgtgtgtttgc

SEQ ID NO: 1764433 - DNA, 25 bp, Homo sapien
gactctcgtcggtctatatccgtgt

SEQ ID NO: 1764434 - DNA, 25 bp, Homo sapien
tgcgagtgttaaagacaatggttgc

SEQ ID NO: 1764435 - DNA, 25 bp, Homo sapien
cagaaccgattaaatacactccgga

SEQ ID NO: 1764436 - DNA, 25 bp, Homo sapien
ttgtagccgcactgtagacaagagg

SEQ ID NO: 1764437 - DNA, 25 bp, Homo sapien
tctccctggttgctaataagatgcg

SEQ ID NO: 1764438 - DNA, 25 bp, Homo sapien
ttagtcgaagagatcaaaaagcagc

SEQ ID NO: 1764439 - DNA, 25 bp, Homo sapien
tcaacagatccaagaggggaaacaa

SEQ ID NO: 1764440 - DNA, 25 bp, Homo sapien
caacagatccaagaggggaaacaaa

SEQ ID NO: 1764441 - DNA, 25 bp, Homo sapien
ggcttctcccttcgctgcggtcttg

SEQ ID NO: 1764442 - DNA, 25 bp, Homo sapien
tccgttcgctttggaaggcgacgag

SEQ ID NO: 1764443 - DNA, 25 bp, Homo sapien
tccccaggcctctccgcggcggctt

SEQ ID NO: 1764444 - DNA, 25 bp, Homo sapien
cttcgctgcggtcttggagaactgg

SEQ ID NO: 1764445 - DNA, 25 bp, Homo sapien
tgcccagtgtttgcgaagcagccac

SEQ ID NO: 1764446 - DNA, 25 bp, Homo sapien
gaaggagggcacctagctagtcacg

SEQ ID NO: 1764447 - DNA, 25 bp, Homo sapien
tcctctccacgaatgagccttggga

SEQ ID NO: 1764448 - DNA, 25 bp, Homo sapien
ggaccccggctatgaaaaatccaca

SEQ ID NO: 1764449 - DNA, 25 bp, Homo sapien
cagagaaagcgggagcgtcactgaa

SEQ ID NO: 1764450 - DNA, 25 bp, Homo sapien
aagagagccccacgaacgaggaaat

SEQ ID NO: 1764451 - DNA, 25 bp, Homo sapien
tcagcaagtgccctaaagacgaagt

SEQ ID NO: 1764452 - DNA, 25 bp, Homo sapien
gaaacgtagcaagcaaaggctaacc

SEQ ID NO: 1764453 - DNA, 25 bp, Homo sapien
cggccgcgggcgaagcgtcgccgtt

SEQ ID NO: 1764454 - DNA, 25 bp, Homo sapien
ggcggccgcgggcgaagcgtcgccg

SEQ ID NO: 1764455 - DNA, 25 bp, Homo sapien
gccgcgggcgaagcgtcgccgttta

SEQ ID NO: 1764456 - DNA, 25 bp, Homo sapien
gcggccgcgggcgaagcgtcgccgt

SEQ ID NO: 1764457 - DNA, 25 bp, Homo sapien
cagcggcggcggccggctcaccttt

SEQ ID NO: 1764458 - DNA, 25 bp, Homo sapien
tcggccttgggcgaagaagtcgagg

SEQ ID NO: 1764459 - DNA, 25 bp, Homo sapien
tcgttgctgggcgagggcgtggccc

SEQ ID NO: 1764460 - DNA, 25 bp, Homo sapien
gggcctccttctctaccgggctggc

SEQ ID NO: 1764461 - DNA, 25 bp, Homo sapien
aaggagaagccgctcagcttgaaag

SEQ ID NO: 1764462 - DNA, 25 bp, Homo sapien
ctggcgggcggcttctctggcgcga

SEQ ID NO: 1764463 - DNA, 25 bp, Homo sapien
ggcctcgtccttgccgccttcggca

SEQ ID NO: 1764464 - DNA, 25 bp, Homo sapien
ttctctggcgcgacagcggcctcct

SEQ ID NO: 1764465 - DNA, 25 bp, Homo sapien
ctcggcggccttggtctcgtcgctg

SEQ ID NO: 1764466 - DNA, 25 bp, Homo sapien
gggcttctggactgcactcgggctg

SEQ ID NO: 1764467 - DNA, 25 bp, Homo sapien
gcgcaggctgacgaggctgcggcgg

SEQ ID NO: 1764468 - DNA, 25 bp, Homo sapien
ggctgcgcaggctgacgaggctgcg

SEQ ID NO: 1764469 - DNA, 25 bp, Homo sapien
ttctggactgcactcgggctgggcc

SEQ ID NO: 1764470 - DNA, 25 bp, Homo sapien
gtacctggcaccactccaacaaaca

SEQ ID NO: 1764471 - DNA, 25 bp, Homo sapien
gaaaagttcttcgattatctcacaa

SEQ ID NO: 1764472 - DNA, 25 bp, Homo sapien
tggcaccactccaacaaacaaacgg

SEQ ID NO: 1764473 - DNA, 25 bp, Homo sapien
tcaatccctggttgtagacaagttc

SEQ ID NO: 1764474 - DNA, 25 bp, Homo sapien
ctctcctcgacctgttggaatggtg

SEQ ID NO: 1764475 - DNA, 25 bp, Homo sapien
taagctctcctcgacctgttggaat

SEQ ID NO: 1764476 - DNA, 25 bp, Homo sapien
ttaagctctcctcgacctgttggaa

SEQ ID NO: 1764477 - DNA, 25 bp, Homo sapien
agctctcctcgacctgttggaatgg

SEQ ID NO: 1764478 - DNA, 25 bp, Homo sapien
tgggcatgtccatagattgacaaag

SEQ ID NO: 1764479 - DNA, 25 bp, Homo sapien
ctattttggcaatgttatgcaccac

SEQ ID NO: 1764480 - DNA, 25 bp, Homo sapien
tgatatccctttttgacccacccat

SEQ ID NO: 1764481 - DNA, 25 bp, Homo sapien
tacaccatttctagtggcacactat

SEQ ID NO: 1764482 - DNA, 25 bp, Homo sapien
gacttgtagtgttgtaaacctgcct

SEQ ID NO: 1764483 - DNA, 25 bp, Homo sapien
cactgactggtacagctaacatgag

SEQ ID NO: 1764484 - DNA, 25 bp, Homo sapien
cctttattctcaaagacgactggaa

SEQ ID NO: 1764485 - DNA, 25 bp, Homo sapien
taagtcaaattggtcaaagcttctc

SEQ ID NO: 1764486 - DNA, 25 bp, Homo sapien
attaacctaagacctagaagtctca

SEQ ID NO: 1764487 - DNA, 25 bp, Homo sapien
aacctaagacctagaagtctcagta

SEQ ID NO: 1764488 - DNA, 25 bp, Homo sapien
gaagtctcagtattattagaacata

SEQ ID NO: 1764489 - DNA, 25 bp, Homo sapien
tagaagtctcagtattattagaaca

SEQ ID NO: 1764490 - DNA, 25 bp, Homo sapien
ctacgtaatctgacactgcggatta

SEQ ID NO: 1764491 - DNA, 25 bp, Homo sapien
aaatttactcctgatggcatgcaag

SEQ ID NO: 1764492 - DNA, 25 bp, Homo sapien
gaaaacttcagattaagaaccacaa

SEQ ID NO: 1764493 - DNA, 25 bp, Homo sapien
cacaataaaatttactcctgatggc

SEQ ID NO: 1764494 - DNA, 25 bp, Homo sapien
gctaaaggcccatgaactgacatca

SEQ ID NO: 1764495 - DNA, 25 bp, Homo sapien
ccaattaagaatgcgtgtcaaaacc

SEQ ID NO: 1764496 - DNA, 25 bp, Homo sapien
caggcactgtacttggccatctagg

SEQ ID NO: 1764497 - DNA, 25 bp, Homo sapien
ccagttatcgggtggcaaagagcag

SEQ ID NO: 1764498 - DNA, 25 bp, Homo sapien
ctgccaatacagatttaatagacaa

SEQ ID NO: 1764499 - DNA, 25 bp, Homo sapien
gccaatacagatttaatagacaata

SEQ ID NO: 1764500 - DNA, 25 bp, Homo sapien
ccaatacagatttaatagacaatac

SEQ ID NO: 1764501 - DNA, 25 bp, Homo sapien
tactgccaatacagatttaatagac

SEQ ID NO: 1764502 - DNA, 25 bp, Homo sapien
tattttacaagcaataggaattgga

SEQ ID NO: 1764503 - DNA, 25 bp, Homo sapien
tattttgtaaccacagcaaatgcca

SEQ ID NO: 1764504 - DNA, 25 bp, Homo sapien
caataggaattggatcaaatgatta

SEQ ID NO: 1764505 - DNA, 25 bp, Homo sapien
tataacccagaggaagtattttgta

SEQ ID NO: 1764506 - DNA, 25 bp, Homo sapien
gggcttcccttacagtggtcttgaa

SEQ ID NO: 1764507 - DNA, 25 bp, Homo sapien
aaaaggtatggcttacagtaagtca

SEQ ID NO: 1764508 - DNA, 25 bp, Homo sapien
gaaatgcctattatccagaagacag

SEQ ID NO: 1764509 - DNA, 25 bp, Homo sapien
tattaggcaagagatcaaactatgt

SEQ ID NO: 1764510 - DNA, 25 bp, Homo sapien
tctctgagtctgtatgggtgctgct

SEQ ID NO: 1764511 - DNA, 25 bp, Homo sapien
catctctgagtctgtatgggtgctg

SEQ ID NO: 1764512 - DNA, 25 bp, Homo sapien
atctctgagtctgtatgggtgctgc

SEQ ID NO: 1764513 - DNA, 25 bp, Homo sapien
tctgtagtgtggagtgtccattttg

SEQ ID NO: 1764514 - DNA, 25 bp, Homo sapien
tgaagaaaatagatctaattcttca

SEQ ID NO: 1764515 - DNA, 25 bp, Homo sapien
agaaaatagatctaattcttcaaaa

SEQ ID NO: 1764516 - DNA, 25 bp, Homo sapien
tttctgtagtgtggagtgtccattt

SEQ ID NO: 1764517 - DNA, 25 bp, Homo sapien
cagggccaaaccaggccactatctt

SEQ ID NO: 1764518 - DNA, 25 bp, Homo sapien
aaaccaggccactatctttgctgag

SEQ ID NO: 1764519 - DNA, 25 bp, Homo sapien
caggccactatctttgctgagagct

SEQ ID NO: 1764520 - DNA, 25 bp, Homo sapien
aggcagggccaaaccaggccactat

SEQ ID NO: 1764521 - DNA, 25 bp, Homo sapien
aaggagtgcaccatgcgggcactga

SEQ ID NO: 1764522 - DNA, 25 bp, Homo sapien
atgcgggcactgaggcacatccacc

SEQ ID NO: 1764523 - DNA, 25 bp, Homo sapien
caaggagtgcaccatgcgggcactg

SEQ ID NO: 1764524 - DNA, 25 bp, Homo sapien
gcaccatgcgggcactgaggcacat

SEQ ID NO: 1764525 - DNA, 25 bp, Homo sapien
agtttgggttcttccagtggcgttg

SEQ ID NO: 1764526 - DNA, 25 bp, Homo sapien
cgatggcagtttgggttcttccagt

SEQ ID NO: 1764527 - DNA, 25 bp, Homo sapien
cttccagtggcgttggggaggcaca

SEQ ID NO: 1764528 - DNA, 25 bp, Homo sapien
gcgttggggaggcacagtaggagac

SEQ ID NO: 1764529 - DNA, 25 bp, Homo sapien
gccccagtgagtgctcactcaagaa

SEQ ID NO: 1764530 - DNA, 25 bp, Homo sapien
aatccagttcatggagccacagccc

SEQ ID NO: 1764531 - DNA, 25 bp, Homo sapien
gagagagagaatgccttggctggtt

SEQ ID NO: 1764532 - DNA, 25 bp, Homo sapien
ggacaggcaccagctaggaaactcc

SEQ ID NO: 1764533 - DNA, 25 bp, Homo sapien
acttgggtgagtctgaggcacccca

SEQ ID NO: 1764534 - DNA, 25 bp, Homo sapien
cccaggtagcaacgatggcaggttt

SEQ ID NO: 1764535 - DNA, 25 bp, Homo sapien
cgatggcaggttttgcacttgagct

SEQ ID NO: 1764536 - DNA, 25 bp, Homo sapien
ggtacagagatcttcctgccgaacc

SEQ ID NO: 1764537 - DNA, 25 bp, Homo sapien
gaaaatctgtaacaacgtccaattg

SEQ ID NO: 1764538 - DNA, 25 bp, Homo sapien
ggatcttggcgcctcggataaacaa

SEQ ID NO: 1764539 - DNA, 25 bp, Homo sapien
gaggaaaagcgagaaccactggtct

SEQ ID NO: 1764540 - DNA, 25 bp, Homo sapien
ctggcaggaaggaaagcgaaaatca

SEQ ID NO: 1764541 - DNA, 25 bp, Homo sapien
acatgaggcctgctgtccgtagccc

SEQ ID NO: 1764542 - DNA, 25 bp, Homo sapien
ggccacatatccatctcatctctac

SEQ ID NO: 1764543 - DNA, 25 bp, Homo sapien
ggtggatgcaaccacggccacatat

SEQ ID NO: 1764544 - DNA, 25 bp, Homo sapien
cctgtggctgcatcttccggtggat

SEQ ID NO: 1764545 - DNA, 25 bp, Homo sapien
caactggaactctccgatgttgctg

SEQ ID NO: 1764546 - DNA, 25 bp, Homo sapien
caatattaagtgctagtgagggtgt

SEQ ID NO: 1764547 - DNA, 25 bp, Homo sapien
ctggaactctccgatgttgctgatg

SEQ ID NO: 1764548 - DNA, 25 bp, Homo sapien
tagtctggcattttcatatgatcca

SEQ ID NO: 1764549 - DNA, 25 bp, Homo sapien
tgtagacgagtctttcaaaatgcat

SEQ ID NO: 1764550 - DNA, 25 bp, Homo sapien
tagacgagtctttcaaaatgcattg

SEQ ID NO: 1764551 - DNA, 25 bp, Homo sapien
gtagacgagtctttcaaaatgcatt

SEQ ID NO: 1764552 - DNA, 25 bp, Homo sapien
ctgtagacgagtctttcaaaatgca

SEQ ID NO: 1764553 - DNA, 25 bp, Homo sapien
ggtgtaagcgttgcatgtcccagta

SEQ ID NO: 1764554 - DNA, 25 bp, Homo sapien
tttccaagtcgtgaatcgaacagag

SEQ ID NO: 1764555 - DNA, 25 bp, Homo sapien
tgcagtttccgttgcagctgaagaa

SEQ ID NO: 1764556 - DNA, 25 bp, Homo sapien
caagataaccaacaagtcgggaggg

SEQ ID NO: 1764557 - DNA, 25 bp, Homo sapien
ggccacccagctacccattgtgtta

SEQ ID NO: 1764558 - DNA, 25 bp, Homo sapien
tcttctctgcaaaattggaaacctc

SEQ ID NO: 1764559 - DNA, 25 bp, Homo sapien
ttctaggaaaccaatactcatgctg

SEQ ID NO: 1764560 - DNA, 25 bp, Homo sapien
tttttatctgagcacacactgtctg

SEQ ID NO: 1764561 - DNA, 25 bp, Homo sapien
gatgttcctgggtaatcctaaggac

SEQ ID NO: 1764562 - DNA, 25 bp, Homo sapien
tgctgataacacgaggacaacctct

SEQ ID NO: 1764563 - DNA, 25 bp, Homo sapien
gtcctacccgtgacagaaatgaagt

SEQ ID NO: 1764564 - DNA, 25 bp, Homo sapien
gaatatctttccaagtgagagcctc

SEQ ID NO: 1764565 - DNA, 25 bp, Homo sapien
gcagtgagtttccagtggcttcaca

SEQ ID NO: 1764566 - DNA, 25 bp, Homo sapien
gaagtccatgcttttcctagtagca

SEQ ID NO: 1764567 - DNA, 25 bp, Homo sapien
tgcttgaagtcacagagtttatgag

SEQ ID NO: 1764568 - DNA, 25 bp, Homo sapien
taaggaagttgggtaccttgcttga

SEQ ID NO: 1764569 - DNA, 25 bp, Homo sapien
ggacaacaccagtgacttcagctaa

SEQ ID NO: 1764570 - DNA, 25 bp, Homo sapien
tgctttgcagatactagttccatgg

SEQ ID NO: 1764571 - DNA, 25 bp, Homo sapien
gaaaaacaccctgaggctgagtaaa

SEQ ID NO: 1764572 - DNA, 25 bp, Homo sapien
gagctaggtaggtccaatcagtgag

SEQ ID NO: 1764573 - DNA, 25 bp, Homo sapien
aattgggacctattatctgcagagc

SEQ ID NO: 1764574 - DNA, 25 bp, Homo sapien
cagagcagattatggaagatttgag

SEQ ID NO: 1764575 - DNA, 25 bp, Homo sapien
tgagcttaagtggtgattcagactc

SEQ ID NO: 1764576 - DNA, 25 bp, Homo sapien
tatcaacataaatagagtctagagg

SEQ ID NO: 1764577 - DNA, 25 bp, Homo sapien
tagagtcacctatgagatcctggag

SEQ ID NO: 1764578 - DNA, 25 bp, Homo sapien
tctgatctacccctgttgacacatg

SEQ ID NO: 1764579 - DNA, 25 bp, Homo sapien
aactgagctcagtatccgggtgcca

SEQ ID NO: 1764580 - DNA, 25 bp, Homo sapien
gaaaataccatttcgcaggctccag

SEQ ID NO: 1764581 - DNA, 25 bp, Homo sapien
ctccctcccagccttaagaagtaat

SEQ ID NO: 1764582 - DNA, 25 bp, Homo sapien
cagccttaagaagtaatcaccattg

SEQ ID NO: 1764583 - DNA, 25 bp, Homo sapien
tcccagccttaagaagtaatcacca

SEQ ID NO: 1764584 - DNA, 25 bp, Homo sapien
ccttaagaagtaatcaccattgtga

SEQ ID NO: 1764585 - DNA, 25 bp, Homo sapien
taggaacttgccaaaatcagtgaaa

SEQ ID NO: 1764586 - DNA, 25 bp, Homo sapien
tgctatatttgcttcggtgtttttt

SEQ ID NO: 1764587 - DNA, 25 bp, Homo sapien
aatagcacctagacttttgtaatga

SEQ ID NO: 1764588 - DNA, 25 bp, Homo sapien
tccctttttgtcaggcccacattga

SEQ ID NO: 1764589 - DNA, 25 bp, Homo sapien
aaaactgatctattaaagaagtaat

SEQ ID NO: 1764590 - DNA, 25 bp, Homo sapien
tgatgtgagttattatgtcaaaaaa

SEQ ID NO: 1764591 - DNA, 25 bp, Homo sapien
gacagtctcaccaatttcagaaaat

SEQ ID NO: 1764592 - DNA, 25 bp, Homo sapien
cattttatactactttggcatggac

SEQ ID NO: 1764593 - DNA, 25 bp, Homo sapien
gaaatacacattcttagggcccaga

SEQ ID NO: 1764594 - DNA, 25 bp, Homo sapien
agattttacaatcgctgggccgggc

SEQ ID NO: 1764595 - DNA, 25 bp, Homo sapien
cagtggcgcctaaactgaggaaagc

SEQ ID NO: 1764596 - DNA, 25 bp, Homo sapien
catacttacaaatgggtgggaggtc

SEQ ID NO: 1764597 - DNA, 25 bp, Homo sapien
gaatactgtgttagtgtggccaagc

SEQ ID NO: 1764598 - DNA, 25 bp, Homo sapien
tggccaagcatagtacagataacac

SEQ ID NO: 1764599 - DNA, 25 bp, Homo sapien
tctgcctgtgctgctgaaaagagtt

SEQ ID NO: 1764600 - DNA, 25 bp, Homo sapien
gagttgacctgggactgttacaaaa

SEQ ID NO: 1764601 - DNA, 25 bp, Homo sapien
gttgtagatcagactccatgggtcc

SEQ ID NO: 1764602 - DNA, 25 bp, Homo sapien
gagcgcgtctttctcaggattcaaa

SEQ ID NO: 1764603 - DNA, 25 bp, Homo sapien
cattggtatcttgcaaaggctgttc

SEQ ID NO: 1764604 - DNA, 25 bp, Homo sapien
gctcaggtcgcgtgtggctttatca

SEQ ID NO: 1764605 - DNA, 25 bp, Homo sapien
cactgacgtgcagaaaatgtttgga

SEQ ID NO: 1764606 - DNA, 25 bp, Homo sapien
caaactatcatggtgcctagtggca

SEQ ID NO: 1764607 - DNA, 25 bp, Homo sapien
ttagtcagtaagtggatcttggctc

SEQ ID NO: 1764608 - DNA, 25 bp, Homo sapien
tggataccaagcattagtcaagttt

SEQ ID NO: 1764609 - DNA, 25 bp, Homo sapien
agtctcctccgcaggtggatacaga

SEQ ID NO: 1764610 - DNA, 25 bp, Homo sapien
actttagccagtcagagcctcttca

SEQ ID NO: 1764611 - DNA, 25 bp, Homo sapien
tggatacagaagctgttggtagcca

SEQ ID NO: 1764612 - DNA, 25 bp, Homo sapien
tgggggaataacagagcagtcagtc

SEQ ID NO: 1764613 - DNA, 25 bp, Homo sapien
ttgcctaaccctggggtgatcacta

SEQ ID NO: 1764614 - DNA, 25 bp, Homo sapien
ggttgcctaaccctggggtgatcac

SEQ ID NO: 1764615 - DNA, 25 bp, Homo sapien
gcctaaccctggggtgatcactata

SEQ ID NO: 1764616 - DNA, 25 bp, Homo sapien
cctaaccctggggtgatcactatac

SEQ ID NO: 1764617 - DNA, 25 bp, Homo sapien
cagccaggttcataacgtttttcct

SEQ ID NO: 1764618 - DNA, 25 bp, Homo sapien
ctccatggaatagttcagacatcca

SEQ ID NO: 1764619 - DNA, 25 bp, Homo sapien
tccatggaatagttcagacatccaa

SEQ ID NO: 1764620 - DNA, 25 bp, Homo sapien
ggttaagagtccattgcaggtgttc

SEQ ID NO: 1764621 - DNA, 25 bp, Homo sapien
tcacccccaggttaagagtccattg

SEQ ID NO: 1764622 - DNA, 25 bp, Homo sapien
ggtgttcttcgttggctgcagcttt

SEQ ID NO: 1764623 - DNA, 25 bp, Homo sapien
gcaggtgttcttcgttggctgcagc

SEQ ID NO: 1764624 - DNA, 25 bp, Homo sapien
ctataacaatgtcaatgccaatctg

SEQ ID NO: 1764625 - DNA, 25 bp, Homo sapien
gacactgatgccaatattccctttc

SEQ ID NO: 1764626 - DNA, 25 bp, Homo sapien
tatacatttctttaggttgccatag

SEQ ID NO: 1764627 - DNA, 25 bp, Homo sapien
taggcaggctctataacaatgtcaa

SEQ ID NO: 1764628 - DNA, 25 bp, Homo sapien
taagctatgccaagcctgtctggta

SEQ ID NO: 1764629 - DNA, 25 bp, Homo sapien
gctataattgagtctaagctatgcc

SEQ ID NO: 1764630 - DNA, 25 bp, Homo sapien
caagcctgtctggtatccactgttt

SEQ ID NO: 1764631 - DNA, 25 bp, Homo sapien
taaaataattctagctataattgag

SEQ ID NO: 1764632 - DNA, 25 bp, Homo sapien
taagtgcaggaccaaagcatggagc

SEQ ID NO: 1764633 - DNA, 25 bp, Homo sapien
cattagaggacagacaagtcaggtg

SEQ ID NO: 1764634 - DNA, 25 bp, Homo sapien
aaaatccctggactaagatgcagca

SEQ ID NO: 1764635 - DNA, 25 bp, Homo sapien
ccttgagtggagagatgtgacgaca

SEQ ID NO: 1764636 - DNA, 25 bp, Homo sapien
tttttacaactcttcattggtttgc

SEQ ID NO: 1764637 - DNA, 25 bp, Homo sapien
tctccttatcttcatcagtctgcca

SEQ ID NO: 1764638 - DNA, 25 bp, Homo sapien
tagcaactttctccctatagaaaac

SEQ ID NO: 1764639 - DNA, 25 bp, Homo sapien
acttctaaatctaatccagaattgc

SEQ ID NO: 1764640 - DNA, 25 bp, Homo sapien
ggattagactcgatgacctttaagg

SEQ ID NO: 1764641 - DNA, 25 bp, Homo sapien
tttcagaaggtcagtgtaagcctac

SEQ ID NO: 1764642 - DNA, 25 bp, Homo sapien
aattacttttaggtgcgagcttcag

SEQ ID NO: 1764643 - DNA, 25 bp, Homo sapien
aaagtctccacaggcaatacaaagg

SEQ ID NO: 1764644 - DNA, 25 bp, Homo sapien
ggctgattcacacttaagctatgac

SEQ ID NO: 1764645 - DNA, 25 bp, Homo sapien
gaagtccggtggcaacaaaggaatg

SEQ ID NO: 1764646 - DNA, 25 bp, Homo sapien
aatatcctctccatagggtgttggg

SEQ ID NO: 1764647 - DNA, 25 bp, Homo sapien
gatagttaagacacccattgtgtca

SEQ ID NO: 1764648 - DNA, 25 bp, Homo sapien
actacgggctccatacaccatcatg

SEQ ID NO: 1764649 - DNA, 25 bp, Homo sapien
tgtagaaccattgatagtgacactc

SEQ ID NO: 1764650 - DNA, 25 bp, Homo sapien
cccagtgaagtggatttatggctta

SEQ ID NO: 1764651 - DNA, 25 bp, Homo sapien
catgaattaatactgagacctttcc

SEQ ID NO: 1764652 - DNA, 25 bp, Homo sapien
gagctaaagatccaagcaattactg

SEQ ID NO: 1764653 - DNA, 25 bp, Homo sapien
gaatcatagggacaaaagaacccca

SEQ ID NO: 1764654 - DNA, 25 bp, Homo sapien
tctctgagatcctgaaacgtcctta

SEQ ID NO: 1764655 - DNA, 25 bp, Homo sapien
tgtttatactcacagacgaaccagc

SEQ ID NO: 1764656 - DNA, 25 bp, Homo sapien
ttgctgcagctgatgggatcctcca

SEQ ID NO: 1764657 - DNA, 25 bp, Homo sapien
aagtgtttctgtgggtatactgacc

SEQ ID NO: 1764658 - DNA, 25 bp, Homo sapien
tctcctgagattgaggaaaaagtgt

SEQ ID NO: 1764659 - DNA, 25 bp, Homo sapien
ccttcatggccagtagctttgctgc

SEQ ID NO: 1764660 - DNA, 25 bp, Homo sapien
aaatgccctcacagatcaacttagg

SEQ ID NO: 1764661 - DNA, 25 bp, Homo sapien
ttaccaagaaggctaaaatgccctc

SEQ ID NO: 1764662 - DNA, 25 bp, Homo sapien
cagagatggttgttcactattcagg

SEQ ID NO: 1764663 - DNA, 25 bp, Homo sapien
tctttctccctgagaaaagcagaga

SEQ ID NO: 1764664 - DNA, 25 bp, Homo sapien
caagttgctcattctatccatattc

SEQ ID NO: 1764665 - DNA, 25 bp, Homo sapien
acacaaacacactatatgttacatg

SEQ ID NO: 1764666 - DNA, 25 bp, Homo sapien
gctcattctatccatattctttgaa

SEQ ID NO: 1764667 - DNA, 25 bp, Homo sapien
accgtacccggccaagttgctcatt

SEQ ID NO: 1764668 - DNA, 25 bp, Homo sapien
tactctgttatttagatactctgct

SEQ ID NO: 1764669 - DNA, 25 bp, Homo sapien
gtcgtttctggccacatactctgtt

SEQ ID NO: 1764670 - DNA, 25 bp, Homo sapien
ccaagataccgtgtctgttaaagct

SEQ ID NO: 1764671 - DNA, 25 bp, Homo sapien
gtgctgctatagagaaacagccaga

SEQ ID NO: 1764672 - DNA, 25 bp, Homo sapien
gctctgtaacaattctcctctgcac

SEQ ID NO: 1764673 - DNA, 25 bp, Homo sapien
gcattgctctgtaacaattctcctc

SEQ ID NO: 1764674 - DNA, 25 bp, Homo sapien
tctgtaacaattctcctctgcacta

SEQ ID NO: 1764675 - DNA, 25 bp, Homo sapien
ctagcattgctctgtaacaattctc

SEQ ID NO: 1764676 - DNA, 25 bp, Homo sapien
agacagagcagtatacttctcacgt

SEQ ID NO: 1764677 - DNA, 25 bp, Homo sapien
caggggtctcttaacttctccagcc

SEQ ID NO: 1764678 - DNA, 25 bp, Homo sapien
tacttctcacgtgccttcctatcta

SEQ ID NO: 1764679 - DNA, 25 bp, Homo sapien
tcctatctagcaggggtctcttaac

SEQ ID NO: 1764680 - DNA, 25 bp, Homo sapien
gaaatgtcagtgactacctccccaa

SEQ ID NO: 1764681 - DNA, 25 bp, Homo sapien
gcaaattgccttacacagacggaga

SEQ ID NO: 1764682 - DNA, 25 bp, Homo sapien
tcatggccacatgtacagggttctc

SEQ ID NO: 1764683 - DNA, 25 bp, Homo sapien
tctgtttaaaagcacggactgcatt

SEQ ID NO: 1764684 - DNA, 25 bp, Homo sapien
aatctttgtgacattcatttactac

SEQ ID NO: 1764685 - DNA, 25 bp, Homo sapien
gaaaagctggaacatagcataccca

SEQ ID NO: 1764686 - DNA, 25 bp, Homo sapien
catcagtggattaaagataagtgca

SEQ ID NO: 1764687 - DNA, 25 bp, Homo sapien
gcagcacaagggaatagcagacatt

SEQ ID NO: 1764688 - DNA, 25 bp, Homo sapien
ccaaactggatattactgggctaaa

SEQ ID NO: 1764689 - DNA, 25 bp, Homo sapien
actgggctaaattcaagaagtcagc

SEQ ID NO: 1764690 - DNA, 25 bp, Homo sapien
ctggatattactgggctaaattcaa

SEQ ID NO: 1764691 - DNA, 25 bp, Homo sapien
gatattactgggctaaattcaagaa

SEQ ID NO: 1764692 - DNA, 25 bp, Homo sapien
gttttcttctgagaacgccaaagtc

SEQ ID NO: 1764693 - DNA, 25 bp, Homo sapien
tctgagaacgccaaagtctttttac

SEQ ID NO: 1764694 - DNA, 25 bp, Homo sapien
cagcagtctcattcgtgtgatctca

SEQ ID NO: 1764695 - DNA, 25 bp, Homo sapien
attcgtgtgatctcatttggttttc

SEQ ID NO: 1764696 - DNA, 25 bp, Homo sapien
gtaaacctgaaaatcgatagctgat

SEQ ID NO: 1764697 - DNA, 25 bp, Homo sapien
caaaaaactgaaccatagtaatgga

SEQ ID NO: 1764698 - DNA, 25 bp, Homo sapien
tttgtctcatggaccaagaaagcag

SEQ ID NO: 1764699 - DNA, 25 bp, Homo sapien
tagtcacatatgtggttgggcgcca

SEQ ID NO: 1764700 - DNA, 25 bp, Homo sapien
tagtagatatttgcattagattgct

SEQ ID NO: 1764701 - DNA, 25 bp, Homo sapien
agtagatatttgcattagattgctc

SEQ ID NO: 1764702 - DNA, 25 bp, Homo sapien
tgataatctgtagtagatatttgca

SEQ ID NO: 1764703 - DNA, 25 bp, Homo sapien
ttgataatctgtagtagatatttgc

SEQ ID NO: 1764704 - DNA, 25 bp, Homo sapien
gattacaaatcagctgtctatacca

SEQ ID NO: 1764705 - DNA, 25 bp, Homo sapien
gctctaatttattgtgggaacaagc

SEQ ID NO: 1764706 - DNA, 25 bp, Homo sapien
taccatgcacagatatgatcattgc

SEQ ID NO: 1764707 - DNA, 25 bp, Homo sapien
ccagtttgtgtttgagaacctctca

SEQ ID NO: 1764708 - DNA, 25 bp, Homo sapien
ccctatccattggtgtcctctgagg

SEQ ID NO: 1764709 - DNA, 25 bp, Homo sapien
caatcctggaacttcgtggaggcag

SEQ ID NO: 1764710 - DNA, 25 bp, Homo sapien
gtcatgggctagagaaactctcagg

SEQ ID NO: 1764711 - DNA, 25 bp, Homo sapien
ctttgggaagttcaaagaagctgac

SEQ ID NO: 1764712 - DNA, 25 bp, Homo sapien
tctctgggcatagtccctgccccca

SEQ ID NO: 1764713 - DNA, 25 bp, Homo sapien
tctgggcatagtccctgcccccaga

SEQ ID NO: 1764714 - DNA, 25 bp, Homo sapien
tgggcatagtccctgcccccagaaa

SEQ ID NO: 1764715 - DNA, 25 bp, Homo sapien
ctgtctctgggcatagtccctgccc

SEQ ID NO: 1764716 - DNA, 25 bp, Homo sapien
ttctgtgggttactggtgttcatta

SEQ ID NO: 1764717 - DNA, 25 bp, Homo sapien
ctccggttctgtgggttactggtgt

SEQ ID NO: 1764718 - DNA, 25 bp, Homo sapien
cggttctgtgggttactggtgttca

SEQ ID NO: 1764719 - DNA, 25 bp, Homo sapien
gtgggttactggtgttcattacttc

SEQ ID NO: 1764720 - DNA, 25 bp, Homo sapien
tgtcatattttcagccattccgaga

SEQ ID NO: 1764721 - DNA, 25 bp, Homo sapien
gagccacgtagatgggtccggtaca

SEQ ID NO: 1764722 - DNA, 25 bp, Homo sapien
tcaggattttttaccaggggagcca

SEQ ID NO: 1764723 - DNA, 25 bp, Homo sapien
tgggtccggtacaaaggactgtcaa

SEQ ID NO: 1764724 - DNA, 25 bp, Homo sapien
tagtagcagtccagaagaaatgaca

SEQ ID NO: 1764725 - DNA, 25 bp, Homo sapien
tagtctaagttaccccactcttcac

SEQ ID NO: 1764726 - DNA, 25 bp, Homo sapien
tgctgtggtactaaggcaggaattg

SEQ ID NO: 1764727 - DNA, 25 bp, Homo sapien
tgtggccaccgtccaccacttgtag

SEQ ID NO: 1764728 - DNA, 25 bp, Homo sapien
caggcacatgttcttgtataagcag

SEQ ID NO: 1764729 - DNA, 25 bp, Homo sapien
tgtgtgacccatgtaataagctgca

SEQ ID NO: 1764730 - DNA, 25 bp, Homo sapien
gaagtaggactgcaatctgggacat

SEQ ID NO: 1764731 - DNA, 25 bp, Homo sapien
gaaagcttattggtgctggcagcaa

SEQ ID NO: 1764732 - DNA, 25 bp, Homo sapien
attgtcgtgcaatgttttgcttgct

SEQ ID NO: 1764733 - DNA, 25 bp, Homo sapien
tgctctcttgaaccttgtctctgaa

SEQ ID NO: 1764734 - DNA, 25 bp, Homo sapien
caggctcccagctatgtaccatatc

SEQ ID NO: 1764735 - DNA, 25 bp, Homo sapien
gagttctgagggtaatgacaaaatc

SEQ ID NO: 1764736 - DNA, 25 bp, Homo sapien
tctgggcaactcatacagtccttga

SEQ ID NO: 1764737 - DNA, 25 bp, Homo sapien
gagttggcaggctcccagctatgta

SEQ ID NO: 1764738 - DNA, 25 bp, Homo sapien
tcttcagcattggtgtcttctattc

SEQ ID NO: 1764739 - DNA, 25 bp, Homo sapien
tggtgtcttctattctcaacggcat

SEQ ID NO: 1764740 - DNA, 25 bp, Homo sapien
tgtcttcagcattggtgtcttctat

SEQ ID NO: 1764741 - DNA, 25 bp, Homo sapien
attggtgtcttctattctcaacggc

SEQ ID NO: 1764742 - DNA, 25 bp, Homo sapien
aattcattaccgtcatctcctgtcc

SEQ ID NO: 1764743 - DNA, 25 bp, Homo sapien
catgcccaaatctcctaggagtcaa

SEQ ID NO: 1764744 - DNA, 25 bp, Homo sapien
gtcccattattctccacatgcccaa

SEQ ID NO: 1764745 - DNA, 25 bp, Homo sapien
tgttttaattcattaccgtcatctc

SEQ ID NO: 1764746 - DNA, 25 bp, Homo sapien
tgtcatacatagctttgtcaccgag

SEQ ID NO: 1764747 - DNA, 25 bp, Homo sapien
caaaccaagccctgcgctaggcttt

SEQ ID NO: 1764748 - DNA, 25 bp, Homo sapien
tgtcaccgaggcaaagatgagagtc

SEQ ID NO: 1764749 - DNA, 25 bp, Homo sapien
ttttcctgctataatactggaccgt

SEQ ID NO: 1764750 - DNA, 25 bp, Homo sapien
ggttcatagttcttcaggcttttcc

SEQ ID NO: 1764751 - DNA, 25 bp, Homo sapien
cttcaggcttttccataagcatggt

SEQ ID NO: 1764752 - DNA, 25 bp, Homo sapien
gcttttccataagcatggtgctggc

SEQ ID NO: 1764753 - DNA, 25 bp, Homo sapien
tggttcatagttcttcaggcttttc

SEQ ID NO: 1764754 - DNA, 25 bp, Homo sapien
aagactctaggattccatgtaagaa

SEQ ID NO: 1764755 - DNA, 25 bp, Homo sapien
ttccatgtaagaattgttttgttgg

SEQ ID NO: 1764756 - DNA, 25 bp, Homo sapien
caaaccacgttccaaagactctagg

SEQ ID NO: 1764757 - DNA, 25 bp, Homo sapien
gctggtggtgttcaaaccacgttcc

SEQ ID NO: 1764758 - DNA, 25 bp, Homo sapien
ctggaccaccttttctgtcctgtga

SEQ ID NO: 1764759 - DNA, 25 bp, Homo sapien
tggaccaccttttctgtcctgtgaa

SEQ ID NO: 1764760 - DNA, 25 bp, Homo sapien
aaggttgattcatgaatggggacca

SEQ ID NO: 1764761 - DNA, 25 bp, Homo sapien
ctgagagtctggctcaaggaggcac

SEQ ID NO: 1764762 - DNA, 25 bp, Homo sapien
gaatggggaccactcctgaccacta

SEQ ID NO: 1764763 - DNA, 25 bp, Homo sapien
ggtcagactcattaggagctgaagt

SEQ ID NO: 1764764 - DNA, 25 bp, Homo sapien
caatatacggagtgcttagaaaagt

SEQ ID NO: 1764765 - DNA, 25 bp, Homo sapien
gtttatagttgaaagcttgcctgtg

SEQ ID NO: 1764766 - DNA, 25 bp, Homo sapien
gcatttctttatgtccaatatacgg

SEQ ID NO: 1764767 - DNA, 25 bp, Homo sapien
gatctgtctttggagagctctcaag

SEQ ID NO: 1764768 - DNA, 25 bp, Homo sapien
ggaataacactgtcagcgaacccag

SEQ ID NO: 1764769 - DNA, 25 bp, Homo sapien
tcccagggatggcacttggaataac

SEQ ID NO: 1764770 - DNA, 25 bp, Homo sapien
ataacactgtcagcgaacccagagc

SEQ ID NO: 1764771 - DNA, 25 bp, Homo sapien
ggatggcacttggaataacactgtc

SEQ ID NO: 1764772 - DNA, 25 bp, Homo sapien
tgtaacccattgatatcaaaactac

SEQ ID NO: 1764773 - DNA, 25 bp, Homo sapien
cattgctttcgttgtgtaacccatt

SEQ ID NO: 1764774 - DNA, 25 bp, Homo sapien
cattagtgagtcattgctttcgttg

SEQ ID NO: 1764775 - DNA, 25 bp, Homo sapien
tgccttttcattagtgagtcattgc

SEQ ID NO: 1764776 - DNA, 25 bp, Homo sapien
cctgttgttgtctattcttctcacc

SEQ ID NO: 1764777 - DNA, 25 bp, Homo sapien
cacctctggtgttccagtgtgacaa

SEQ ID NO: 1764778 - DNA, 25 bp, Homo sapien
tgtccttgtaggactgtatctgtcc

SEQ ID NO: 1764779 - DNA, 25 bp, Homo sapien
aatccatgcaagtaggctggccaca

SEQ ID NO: 1764780 - DNA, 25 bp, Homo sapien
gaagttaggctagcatcagactact

SEQ ID NO: 1764781 - DNA, 25 bp, Homo sapien
tcaaccctgaaccaattggtgtggc

SEQ ID NO: 1764782 - DNA, 25 bp, Homo sapien
gcccactaccaaagacaagaacgga

SEQ ID NO: 1764783 - DNA, 25 bp, Homo sapien
caagaacggagtgaattccatccaa

SEQ ID NO: 1764784 - DNA, 25 bp, Homo sapien
tgagaactggtagagacataggatc

SEQ ID NO: 1764785 - DNA, 25 bp, Homo sapien
aaatgtagatttatgtgagaactgg

SEQ ID NO: 1764786 - DNA, 25 bp, Homo sapien
gatggctgtgaagttgatactctga

SEQ ID NO: 1764787 - DNA, 25 bp, Homo sapien
tcccagcagggaaatcctgagtctt

SEQ ID NO: 1764788 - DNA, 25 bp, Homo sapien
acgtgttgcacagcattgggctggc

SEQ ID NO: 1764789 - DNA, 25 bp, Homo sapien
ggctggccctgctagtgtttgtcac

SEQ ID NO: 1764790 - DNA, 25 bp, Homo sapien
gtttgtcactatgctgctgtttgtc

SEQ ID NO: 1764791 - DNA, 25 bp, Homo sapien
taccccaaacgtgttgcacagcatt

SEQ ID NO: 1764792 - DNA, 25 bp, Homo sapien
cctgagacgagatacaaagttgtca

SEQ ID NO: 1764793 - DNA, 25 bp, Homo sapien
catttcttagagcagaattccagtt

SEQ ID NO: 1764794 - DNA, 25 bp, Homo sapien
ttattcagatgaataatctgcaaag

SEQ ID NO: 1764795 - DNA, 25 bp, Homo sapien
ttatgaaaagattctttaggtgatc

SEQ ID NO: 1764796 - DNA, 25 bp, Homo sapien
tcacgatgtatatgtggtgcacaaa

SEQ ID NO: 1764797 - DNA, 25 bp, Homo sapien
gggaagtcccctgcccaatcatagg

SEQ ID NO: 1764798 - DNA, 25 bp, Homo sapien
gtgtagtatgagtgcctgagccaca

SEQ ID NO: 1764799 - DNA, 25 bp, Homo sapien
cacaaacttaatgttgcgaatgcat

SEQ ID NO: 1764800 - DNA, 25 bp, Homo sapien
gccttcatcaaaggtaagtaatgag

SEQ ID NO: 1764801 - DNA, 25 bp, Homo sapien
aggtggccttcatcaaaggtaagta

SEQ ID NO: 1764802 - DNA, 25 bp, Homo sapien
cccctcaaagcccatcgcaggtggc

SEQ ID NO: 1764803 - DNA, 25 bp, Homo sapien
tggccttcatcaaaggtaagtaatg

SEQ ID NO: 1764804 - DNA, 25 bp, Homo sapien
tgataaactgattgttagctgcatt

SEQ ID NO: 1764805 - DNA, 25 bp, Homo sapien
actgattgttagctgcattctgtcg

SEQ ID NO: 1764806 - DNA, 25 bp, Homo sapien
agctgcattctgtcgtttgctgtgg

SEQ ID NO: 1764807 - DNA, 25 bp, Homo sapien
gttagctgcattctgtcgtttgctg

SEQ ID NO: 1764808 - DNA, 25 bp, Homo sapien
tgcctggaataccttttttccaaca

SEQ ID NO: 1764809 - DNA, 25 bp, Homo sapien
tggggattgaatacagcaaagggtt

SEQ ID NO: 1764810 - DNA, 25 bp, Homo sapien
cttcctacttgaaatttcctgccgt

SEQ ID NO: 1764811 - DNA, 25 bp, Homo sapien
ggatgttaattgtcatgcgtgtttt

SEQ ID NO: 1764812 - DNA, 25 bp, Homo sapien
aggatgttaattgtcatgcgtgttt

SEQ ID NO: 1764813 - DNA, 25 bp, Homo sapien
ccgacagaccgagaaaattggacat

SEQ ID NO: 1764814 - DNA, 25 bp, Homo sapien
gaggcagctgtatcctccgacagac

SEQ ID NO: 1764815 - DNA, 25 bp, Homo sapien
aagtcaccgtaattaaagcttcgct

SEQ ID NO: 1764816 - DNA, 25 bp, Homo sapien
taattaaagcttcgctggcacatgg

SEQ ID NO: 1764817 - DNA, 25 bp, Homo sapien
gattagcagacaaaaatgcgagttg

SEQ ID NO: 1764818 - DNA, 25 bp, Homo sapien
catttgttgtaacttcataggtttc

SEQ ID NO: 1764819 - DNA, 25 bp, Homo sapien
taagtcactggtaattcaatgctag

SEQ ID NO: 1764820 - DNA, 25 bp, Homo sapien
atctgaacagctccacaaaagtaag

SEQ ID NO: 1764821 - DNA, 25 bp, Homo sapien
gtaaaagagtctcccttcattctgg

SEQ ID NO: 1764822 - DNA, 25 bp, Homo sapien
taggtaaaagagtctcccttcattc

SEQ ID NO: 1764823 - DNA, 25 bp, Homo sapien
ttctaggtaaaagagtctcccttca

SEQ ID NO: 1764824 - DNA, 25 bp, Homo sapien
ggtaaaagagtctcccttcattctg

SEQ ID NO: 1764825 - DNA, 25 bp, Homo sapien
ggcaggcttcttaacttcaggaata

SEQ ID NO: 1764826 - DNA, 25 bp, Homo sapien
caggaatatgaagttattcaccagt

SEQ ID NO: 1764827 - DNA, 25 bp, Homo sapien
gtaactgcatgagcatcagggcagg

SEQ ID NO: 1764828 - DNA, 25 bp, Homo sapien
catcagggcaggcttcttaacttca

SEQ ID NO: 1764829 - DNA, 25 bp, Homo sapien
ctgcggccgcccgtgccgtgcccgc

SEQ ID NO: 1764830 - DNA, 25 bp, Homo sapien
gggcaaggaggatgcgcacctcccc

SEQ ID NO: 1764831 - DNA, 25 bp, Homo sapien
gaggacgcccgaagtctcgccctct

SEQ ID NO: 1764832 - DNA, 25 bp, Homo sapien
tgcggtctccggcactgcgcggact

SEQ ID NO: 1764833 - DNA, 25 bp, Homo sapien
ggaggcagctgccggctcgggcgct

SEQ ID NO: 1764834 - DNA, 25 bp, Homo sapien
cggccgtgacagcgccagccgcggg

SEQ ID NO: 1764835 - DNA, 25 bp, Homo sapien
ggcggccgtgacagcgccagccgcg

SEQ ID NO: 1764836 - DNA, 25 bp, Homo sapien
cgggaggcagctgccggctcgggcg

SEQ ID NO: 1764837 - DNA, 25 bp, Homo sapien
attcaggtcatcagtgactgaggac

SEQ ID NO: 1764838 - DNA, 25 bp, Homo sapien
gtattatctgggtaagtactgcctt

SEQ ID NO: 1764839 - DNA, 25 bp, Homo sapien
tatctgggtaagtactgccttttct

SEQ ID NO: 1764840 - DNA, 25 bp, Homo sapien
ttcaggtcatcagtgactgaggact

SEQ ID NO: 1764841 - DNA, 25 bp, Homo sapien
taaatcatccatggctaagacagca

SEQ ID NO: 1764842 - DNA, 25 bp, Homo sapien
tatgaaggatcttaagtctgactcg

SEQ ID NO: 1764843 - DNA, 25 bp, Homo sapien
ttttttcttcagtccaagtcaactg

SEQ ID NO: 1764844 - DNA, 25 bp, Homo sapien
caagcattggttctcgaacttgcaa

SEQ ID NO: 1764845 - DNA, 25 bp, Homo sapien
aggttccttgatctccaactcgcca

SEQ ID NO: 1764846 - DNA, 25 bp, Homo sapien
tctgtgcacaatcaaggttccttga

SEQ ID NO: 1764847 - DNA, 25 bp, Homo sapien
acgtctgtgcacaatcaaggttcct

SEQ ID NO: 1764848 - DNA, 25 bp, Homo sapien
tcaaggttccttgatctccaactcg

SEQ ID NO: 1764849 - DNA, 25 bp, Homo sapien
gcatcaccattagaacagccctcca

SEQ ID NO: 1764850 - DNA, 25 bp, Homo sapien
catcaccattagaacagccctccat

SEQ ID NO: 1764851 - DNA, 25 bp, Homo sapien
aatgttccagtccaagagcaggcgg

SEQ ID NO: 1764852 - DNA, 25 bp, Homo sapien
tccaatgttaaacttggcttgtggc

SEQ ID NO: 1764853 - DNA, 25 bp, Homo sapien
gaacttccaatactgggcctcatgt

SEQ ID NO: 1764854 - DNA, 25 bp, Homo sapien
ctagaatgttccagtccaagagcag

SEQ ID NO: 1764855 - DNA, 25 bp, Homo sapien
tagtgatgtaaaacatggccacttg

SEQ ID NO: 1764856 - DNA, 25 bp, Homo sapien
tcagaattagtgatgtaaaacatgg

SEQ ID NO: 1764857 - DNA, 25 bp, Homo sapien
gaattagtgatgtaaaacatggcca

SEQ ID NO: 1764858 - DNA, 25 bp, Homo sapien
tgatgtaaaacatggccacttgctt

SEQ ID NO: 1764859 - DNA, 25 bp, Homo sapien
agccaaccattctgaacagatcttt

SEQ ID NO: 1764860 - DNA, 25 bp, Homo sapien
accattctgaacagatctttgtcta

SEQ ID NO: 1764861 - DNA, 25 bp, Homo sapien
gaacagatctttgtctacagatgca

SEQ ID NO: 1764862 - DNA, 25 bp, Homo sapien
ccaaccattctgaacagatctttgt

SEQ ID NO: 1764863 - DNA, 25 bp, Homo sapien
taactctgacccaatgccaccacca

SEQ ID NO: 1764864 - DNA, 25 bp, Homo sapien
gactgtaactctgacccaatgccac

SEQ ID NO: 1764865 - DNA, 25 bp, Homo sapien
ctgtaactctgacccaatgccacca

SEQ ID NO: 1764866 - DNA, 25 bp, Homo sapien
gtgactgtaactctgacccaatgcc

SEQ ID NO: 1764867 - DNA, 25 bp, Homo sapien
tgaggattctagtgccagtcagctc

SEQ ID NO: 1764868 - DNA, 25 bp, Homo sapien
ctagtgccagtcagctctcctacag

SEQ ID NO: 1764869 - DNA, 25 bp, Homo sapien
attctgtgttccttactgacgatct

SEQ ID NO: 1764870 - DNA, 25 bp, Homo sapien
gacgatcttcagtaaacttgctttg

SEQ ID NO: 1764871 - DNA, 25 bp, Homo sapien
aaccaccagctgcagtctcagtgac

SEQ ID NO: 1764872 - DNA, 25 bp, Homo sapien
tatagagagccattacaaagtaaac

SEQ ID NO: 1764873 - DNA, 25 bp, Homo sapien
gagagccattacaaagtaaacagaa

SEQ ID NO: 1764874 - DNA, 25 bp, Homo sapien
gaaaccaccagctgcagtctcagtg

SEQ ID NO: 1764875 - DNA, 25 bp, Homo sapien
aagcaacacggaaaagaggattctg

SEQ ID NO: 1764876 - DNA, 25 bp, Homo sapien
tgaagcaacacggaaaagaggattc

SEQ ID NO: 1764877 - DNA, 25 bp, Homo sapien
ttctgggaaatatgatacctggctt

SEQ ID NO: 1764878 - DNA, 25 bp, Homo sapien
ctgggaaatatgatacctggcttct

SEQ ID NO: 1764879 - DNA, 25 bp, Homo sapien
ggaagcttccatcagtggtctcagt

SEQ ID NO: 1764880 - DNA, 25 bp, Homo sapien
tcagtctgaaggtcaaagtcacgtt

SEQ ID NO: 1764881 - DNA, 25 bp, Homo sapien
ggtctcagtctatagtgggaaagca

SEQ ID NO: 1764882 - DNA, 25 bp, Homo sapien
gattgttagtatccagcactgtgct

SEQ ID NO: 1764883 - DNA, 25 bp, Homo sapien
accgatctatgtcctgcatggagcc

SEQ ID NO: 1764884 - DNA, 25 bp, Homo sapien
ccaaaatctcccttcaatataactg

SEQ ID NO: 1764885 - DNA, 25 bp, Homo sapien
tcctgatgtccccatatacttactg

SEQ ID NO: 1764886 - DNA, 25 bp, Homo sapien
caaggatctctctattctctcaact

SEQ ID NO: 1764887 - DNA, 25 bp, Homo sapien
tgcaaagcccgtaactgaatcgtgg

SEQ ID NO: 1764888 - DNA, 25 bp, Homo sapien
tttctgacgttaattgcatctcaca

SEQ ID NO: 1764889 - DNA, 25 bp, Homo sapien
tattacatgctgtatgtatgcttgg

SEQ ID NO: 1764890 - DNA, 25 bp, Homo sapien
ggttggcctaatccaaagcacaaat

SEQ ID NO: 1764891 - DNA, 25 bp, Homo sapien
cctttttctcctttcccatcatcaa

SEQ ID NO: 1764892 - DNA, 25 bp, Homo sapien
ttctcctttcccatcatcaagcctt

SEQ ID NO: 1764893 - DNA, 25 bp, Homo sapien
tttttctcctttcccatcatcaagc

SEQ ID NO: 1764894 - DNA, 25 bp, Homo sapien
tttctcctttcccatcatcaagcct

SEQ ID NO: 1764895 - DNA, 25 bp, Homo sapien
tccacagtccatctggaaactttga

SEQ ID NO: 1764896 - DNA, 25 bp, Homo sapien
tcctcctccggtatttgtattatca

SEQ ID NO: 1764897 - DNA, 25 bp, Homo sapien
ttatcagttaatccctccacagtcc

SEQ ID NO: 1764898 - DNA, 25 bp, Homo sapien
tagagcttatcataaactcccaaag

SEQ ID NO: 1764899 - DNA, 25 bp, Homo sapien
aaaagtgcactatctgtcctcactc

SEQ ID NO: 1764900 - DNA, 25 bp, Homo sapien
tggaaaagtgcactatctgtcctca

SEQ ID NO: 1764901 - DNA, 25 bp, Homo sapien
atcatggaaaagtgcactatctgtc

SEQ ID NO: 1764902 - DNA, 25 bp, Homo sapien
tcatggaaaagtgcactatctgtcc

SEQ ID NO: 1764903 - DNA, 25 bp, Homo sapien
ctggcccaggtagcaaagtgactag

SEQ ID NO: 1764904 - DNA, 25 bp, Homo sapien
tagactgtactaacatctccatgtg

SEQ ID NO: 1764905 - DNA, 25 bp, Homo sapien
tagcaaagtgactagaccatagact

SEQ ID NO: 1764906 - DNA, 25 bp, Homo sapien
gactagaccatagactgtactaaca

SEQ ID NO: 1764907 - DNA, 25 bp, Homo sapien
tgctatcgaatctactccaattagg

SEQ ID NO: 1764908 - DNA, 25 bp, Homo sapien
tacagtgctatggttgtgcaggacc

SEQ ID NO: 1764909 - DNA, 25 bp, Homo sapien
gatactgggccatatcttcctcgca

SEQ ID NO: 1764910 - DNA, 25 bp, Homo sapien
tgtccaaaacagtacaaaccacagg

SEQ ID NO: 1764911 - DNA, 25 bp, Homo sapien
cattattctggagtactggttgtca

SEQ ID NO: 1764912 - DNA, 25 bp, Homo sapien
ttattctggagtactggttgtcaga

SEQ ID NO: 1764913 - DNA, 25 bp, Homo sapien
gcattattctggagtactggttgtc

SEQ ID NO: 1764914 - DNA, 25 bp, Homo sapien
attattctggagtactggttgtcag

SEQ ID NO: 1764915 - DNA, 25 bp, Homo sapien
ttcattcgaaaaccttgtcttagag

SEQ ID NO: 1764916 - DNA, 25 bp, Homo sapien
cattcgaaaaccttgtcttagagct

SEQ ID NO: 1764917 - DNA, 25 bp, Homo sapien
tcacctctctctagtgcctctttga

SEQ ID NO: 1764918 - DNA, 25 bp, Homo sapien
ttcccatcatatcttgtatcctttt

SEQ ID NO: 1764919 - DNA, 25 bp, Homo sapien
ctagatggtctgctaatattcttct

SEQ ID NO: 1764920 - DNA, 25 bp, Homo sapien
agatggtctgctaatattcttctag

SEQ ID NO: 1764921 - DNA, 25 bp, Homo sapien
tggtctgctaatattcttctagaca

SEQ ID NO: 1764922 - DNA, 25 bp, Homo sapien
gatggtctgctaatattcttctaga

SEQ ID NO: 1764923 - DNA, 25 bp, Homo sapien
ttggtttagacagagggtcccactg

SEQ ID NO: 1764924 - DNA, 25 bp, Homo sapien
cactggggtatagcaaaattgggag

SEQ ID NO: 1764925 - DNA, 25 bp, Homo sapien
cagggaaagctggcaatggaagttt

SEQ ID NO: 1764926 - DNA, 25 bp, Homo sapien
aaattgggagactttttgatggtct

SEQ ID NO: 1764927 - DNA, 25 bp, Homo sapien
aagaatttgcagttacccatatcac

SEQ ID NO: 1764928 - DNA, 25 bp, Homo sapien
tacattcacatccaaagccatgggc

SEQ ID NO: 1764929 - DNA, 25 bp, Homo sapien
tctgcaatgtaggtgtagtttagat

SEQ ID NO: 1764930 - DNA, 25 bp, Homo sapien
cacttggacgtgattggatacattc

SEQ ID NO: 1764931 - DNA, 25 bp, Homo sapien
caagctggctttgtccgtggaagca

SEQ ID NO: 1764932 - DNA, 25 bp, Homo sapien
tcttggttcacatttgacagctcat

SEQ ID NO: 1764933 - DNA, 25 bp, Homo sapien
cacatttgacagctcatgatccaag

SEQ ID NO: 1764934 - DNA, 25 bp, Homo sapien
cctcctggggctgtaattcttggtt

SEQ ID NO: 1764935 - DNA, 25 bp, Homo sapien
cctgactatatattaacgggttctc

SEQ ID NO: 1764936 - DNA, 25 bp, Homo sapien
aatatcctgactatatattaacggg

SEQ ID NO: 1764937 - DNA, 25 bp, Homo sapien
gactatatattaacgggttctctgg

SEQ ID NO: 1764938 - DNA, 25 bp, Homo sapien
atatattaacgggttctctggtcct

SEQ ID NO: 1764939 - DNA, 25 bp, Homo sapien
aatgtgtctttacggcctacatata

SEQ ID NO: 1764940 - DNA, 25 bp, Homo sapien
tgtgtctttacggcctacatataga

SEQ ID NO: 1764941 - DNA, 25 bp, Homo sapien
ttaatgtgtctttacggcctacata

SEQ ID NO: 1764942 - DNA, 25 bp, Homo sapien
gtgtctttacggcctacatatagat

SEQ ID NO: 1764943 - DNA, 25 bp, Homo sapien
tttctgcagaggcattgtacatgtt

SEQ ID NO: 1764944 - DNA, 25 bp, Homo sapien
gatgtagcattctgcatcagtaaca

SEQ ID NO: 1764945 - DNA, 25 bp, Homo sapien
gtacatgttgatgtagcattctgca

SEQ ID NO: 1764946 - DNA, 25 bp, Homo sapien
tgcagaggcattgtacatgttgatg

SEQ ID NO: 1764947 - DNA, 25 bp, Homo sapien
tatcctattaaatcctgctccactc

SEQ ID NO: 1764948 - DNA, 25 bp, Homo sapien
ctatcctattaaatcctgctccact

SEQ ID NO: 1764949 - DNA, 25 bp, Homo sapien
atcctattaaatcctgctccactcc

SEQ ID NO: 1764950 - DNA, 25 bp, Homo sapien
cactttaccatgaaagtgacctgaa

SEQ ID NO: 1764951 - DNA, 25 bp, Homo sapien
tatgaaatggtggaagcagcgttat

SEQ ID NO: 1764952 - DNA, 25 bp, Homo sapien
tacttgtaggaatgagcataagaca

SEQ ID NO: 1764953 - DNA, 25 bp, Homo sapien
agacagtttttagctagtgagttat

SEQ ID NO: 1764954 - DNA, 25 bp, Homo sapien
tactccaagcctgctagcaatgtgt

SEQ ID NO: 1764955 - DNA, 25 bp, Homo sapien
actccaagcctgctagcaatgtgtc

SEQ ID NO: 1764956 - DNA, 25 bp, Homo sapien
tctactccaagcctgctagcaatgt

SEQ ID NO: 1764957 - DNA, 25 bp, Homo sapien
tccaagcctgctagcaatgtgtctt

SEQ ID NO: 1764958 - DNA, 25 bp, Homo sapien
tcaatgtatatagggtgatgcaggg

SEQ ID NO: 1764959 - DNA, 25 bp, Homo sapien
gctgccatagtacagacacgataat

SEQ ID NO: 1764960 - DNA, 25 bp, Homo sapien
tagtacagacacgataatcaagtca

SEQ ID NO: 1764961 - DNA, 25 bp, Homo sapien
acagcagctggtgaaccgctgccat

SEQ ID NO: 1764962 - DNA, 25 bp, Homo sapien
tctcagcagacacaacactgcacat

SEQ ID NO: 1764963 - DNA, 25 bp, Homo sapien
gtctaccgagaagcctacgctctca

SEQ ID NO: 1764964 - DNA, 25 bp, Homo sapien
ggctttttcattgtcatccctaagg

SEQ ID NO: 1764965 - DNA, 25 bp, Homo sapien
tcatccctaaggtctaccgagaagc

SEQ ID NO: 1764966 - DNA, 25 bp, Homo sapien
aaagcttggagctctagtgggctgc

SEQ ID NO: 1764967 - DNA, 25 bp, Homo sapien
gcaggcaaagcttggagctctagtg

SEQ ID NO: 1764968 - DNA, 25 bp, Homo sapien
cccttattgtcgcatgtggtagcag

SEQ ID NO: 1764969 - DNA, 25 bp, Homo sapien
tgcttgtggtgctaaagaagccaat

SEQ ID NO: 1764970 - DNA, 25 bp, Homo sapien
tgttattggataagagtttgcttga

SEQ ID NO: 1764971 - DNA, 25 bp, Homo sapien
tgcttgattcttcagtaaacctggg

SEQ ID NO: 1764972 - DNA, 25 bp, Homo sapien
tcttgtcacagtaatttattttgtc

SEQ ID NO: 1764973 - DNA, 25 bp, Homo sapien
gtttgcttgattcttcagtaaacct

SEQ ID NO: 1764974 - DNA, 25 bp, Homo sapien
gaggtcaccaggtatactagactgc

SEQ ID NO: 1764975 - DNA, 25 bp, Homo sapien
gaaatttctgggctgtttgcctcct

SEQ ID NO: 1764976 - DNA, 25 bp, Homo sapien
tactgtgtcacagtggaggtcacca

SEQ ID NO: 1764977 - DNA, 25 bp, Homo sapien
ttctgggccggagactgactactgt

SEQ ID NO: 1764978 - DNA, 25 bp, Homo sapien
caccccgcccggatttcttctagat

SEQ ID NO: 1764979 - DNA, 25 bp, Homo sapien
gaacacgaatgttattatactttct

SEQ ID NO: 1764980 - DNA, 25 bp, Homo sapien
ctagaacacgaatgttattatactt

SEQ ID NO: 1764981 - DNA, 25 bp, Homo sapien
aacacgaatgttattatactttctc

SEQ ID NO: 1764982 - DNA, 25 bp, Homo sapien
agaacacgaatgttattatactttc

SEQ ID NO: 1764983 - DNA, 25 bp, Homo sapien
atgcaactgactgtatggttccaga

SEQ ID NO: 1764984 - DNA, 25 bp, Homo sapien
aactgactgtatggttccagatata

SEQ ID NO: 1764985 - DNA, 25 bp, Homo sapien
tacgaagacaaatggtagagtgaat

SEQ ID NO: 1764986 - DNA, 25 bp, Homo sapien
tgcttttcaacttcaccagatggga

SEQ ID NO: 1764987 - DNA, 25 bp, Homo sapien
tttacttggcaattgaaaatgcttt

SEQ ID NO: 1764988 - DNA, 25 bp, Homo sapien
tccaatttcgggcagataagagttc

SEQ ID NO: 1764989 - DNA, 25 bp, Homo sapien
ccacttccgaatcttgcaggtctaa

SEQ ID NO: 1764990 - DNA, 25 bp, Homo sapien
tttgagtcagccgtccaagcttggt

SEQ ID NO: 1764991 - DNA, 25 bp, Homo sapien
ccgaaaaatctaccagaatgttctt

SEQ ID NO: 1764992 - DNA, 25 bp, Homo sapien
tattggcctattgtaagcagcccct

SEQ ID NO: 1764993 - DNA, 25 bp, Homo sapien
acatcccgtggagaaaccactgtac

SEQ ID NO: 1764994 - DNA, 25 bp, Homo sapien
tcccgtggagaaaccactgtactgc

SEQ ID NO: 1764995 - DNA, 25 bp, Homo sapien
cgtggagaaaccactgtactgctga

SEQ ID NO: 1764996 - DNA, 25 bp, Homo sapien
ggagaaaccactgtactgctgatta

SEQ ID NO: 1764997 - DNA, 25 bp, Homo sapien
taagactgtgctgaagccataagac

SEQ ID NO: 1764998 - DNA, 25 bp, Homo sapien
aggtaaatgtcaatgttgccaggaa

SEQ ID NO: 1764999 - DNA, 25 bp, Homo sapien
gtaaatgtcaatgttgccaggaaaa

SEQ ID NO: 1765000 - DNA, 25 bp, Homo sapien
gtttcattaccacaacataagactg

SEQ ID NO: 1765001 - DNA, 25 bp, Homo sapien
ccaactccacttcatccccatcact

SEQ ID NO: 1765002 - DNA, 25 bp, Homo sapien
aactccacttcatccccatcactct

SEQ ID NO: 1765003 - DNA, 25 bp, Homo sapien
ctgccaactccacttcatccccatc

SEQ ID NO: 1765004 - DNA, 25 bp, Homo sapien
ccacttcatccccatcactcttcat

SEQ ID NO: 1765005 - DNA, 25 bp, Homo sapien
aaaggttttccatcatctgtgaaag

SEQ ID NO: 1765006 - DNA, 25 bp, Homo sapien
tctaaaggttttccatcatctgtga

SEQ ID NO: 1765007 - DNA, 25 bp, Homo sapien
ctttctaaaggttttccatcatctg

SEQ ID NO: 1765008 - DNA, 25 bp, Homo sapien
aaggttttccatcatctgtgaaagg

SEQ ID NO: 1765009 - DNA, 25 bp, Homo sapien
tcacatcactgataagattgccttc

SEQ ID NO: 1765010 - DNA, 25 bp, Homo sapien
gccttcttcgatattaaggagatca

SEQ ID NO: 1765011 - DNA, 25 bp, Homo sapien
tcactgataagattgccttcttcga

SEQ ID NO: 1765012 - DNA, 25 bp, Homo sapien
gataagattgccttcttcgatatta

SEQ ID NO: 1765013 - DNA, 25 bp, Homo sapien
aaacctgcaggtttatgccagatga

SEQ ID NO: 1765014 - DNA, 25 bp, Homo sapien
cctgcaggtttatgccagatgaaac

SEQ ID NO: 1765015 - DNA, 25 bp, Homo sapien
tttcaagatttgtagaggtaaccca

SEQ ID NO: 1765016 - DNA, 25 bp, Homo sapien
aggtaacccaattgttagggatgtg

SEQ ID NO: 1765017 - DNA, 25 bp, Homo sapien
tctcaactgcccagtatgctcatgg

SEQ ID NO: 1765018 - DNA, 25 bp, Homo sapien
tgctcatggcttatagttttagctt

SEQ ID NO: 1765019 - DNA, 25 bp, Homo sapien
ggtacttcaccaagtcatcaggcat

SEQ ID NO: 1765020 - DNA, 25 bp, Homo sapien
gccttctgggtacttcaccaagtca

SEQ ID NO: 1765021 - DNA, 25 bp, Homo sapien
ccaggaaataagcagtgaaccagat

SEQ ID NO: 1765022 - DNA, 25 bp, Homo sapien
acagatctatggaggtgtttgtagg

SEQ ID NO: 1765023 - DNA, 25 bp, Homo sapien
aggtgtttgtagggatgcagcttca

SEQ ID NO: 1765024 - DNA, 25 bp, Homo sapien
aataagcagtgaaccagattgacag

SEQ ID NO: 1765025 - DNA, 25 bp, Homo sapien
tgtattaggaagacttttctcagtt

SEQ ID NO: 1765026 - DNA, 25 bp, Homo sapien
ctgtattaggaagacttttctcagt

SEQ ID NO: 1765027 - DNA, 25 bp, Homo sapien
tctcagtttttgttggtattgtata

SEQ ID NO: 1765028 - DNA, 25 bp, Homo sapien
cagtttttgttggtattgtatacat

SEQ ID NO: 1765029 - DNA, 25 bp, Homo sapien
cagccagatggtgtagtactgatac

SEQ ID NO: 1765030 - DNA, 25 bp, Homo sapien
tctcctgtggaccaactcacagcca

SEQ ID NO: 1765031 - DNA, 25 bp, Homo sapien
caaaacagagccaatgtttcctctt

SEQ ID NO: 1765032 - DNA, 25 bp, Homo sapien
caatatctgatccacctgttcccag

SEQ ID NO: 1765033 - DNA, 25 bp, Homo sapien
gctgcctgcaaataaactgcctgcc

SEQ ID NO: 1765034 - DNA, 25 bp, Homo sapien
ctagaagctgcctgcaaataaactg

SEQ ID NO: 1765035 - DNA, 25 bp, Homo sapien
gcctgcaaataaactgcctgccact

SEQ ID NO: 1765036 - DNA, 25 bp, Homo sapien
gaagctgcctgcaaataaactgcct

SEQ ID NO: 1765037 - DNA, 25 bp, Homo sapien
cagttgcggttggtatttcttccat

SEQ ID NO: 1765038 - DNA, 25 bp, Homo sapien
acccactggtctgtgagagactaaa

SEQ ID NO: 1765039 - DNA, 25 bp, Homo sapien
ccactggtctgtgagagactaaaat

SEQ ID NO: 1765040 - DNA, 25 bp, Homo sapien
cccactggtctgtgagagactaaaa

SEQ ID NO: 1765041 - DNA, 25 bp, Homo sapien
cacccactggtctgtgagagactaa

SEQ ID NO: 1765042 - DNA, 25 bp, Homo sapien
tagacattaagcaaggcactcttag

SEQ ID NO: 1765043 - DNA, 25 bp, Homo sapien
tttgtgaaatctgtcacactcacac

SEQ ID NO: 1765044 - DNA, 25 bp, Homo sapien
tgagcagtgtagacattaagcaagg

SEQ ID NO: 1765045 - DNA, 25 bp, Homo sapien
gtgaggaatgagcagtgtagacatt

SEQ ID NO: 1765046 - DNA, 25 bp, Homo sapien
gagcctggcacaggctttgaaacac

SEQ ID NO: 1765047 - DNA, 25 bp, Homo sapien
cttcagaaggatgcagctcagcagc

SEQ ID NO: 1765048 - DNA, 25 bp, Homo sapien
tgcttcagaaggatgcagctcagca

SEQ ID NO: 1765049 - DNA, 25 bp, Homo sapien
gcagctcagcagctcagtcctgttc

SEQ ID NO: 1765050 - DNA, 25 bp, Homo sapien
catgtctttgacagatggatgagaa

SEQ ID NO: 1765051 - DNA, 25 bp, Homo sapien
tcagacataaactcccttcacagca

SEQ ID NO: 1765052 - DNA, 25 bp, Homo sapien
gcacaactggggacgaatttcatgt

SEQ ID NO: 1765053 - DNA, 25 bp, Homo sapien
gatgagaaagcgtgccaaaaacaga

SEQ ID NO: 1765054 - DNA, 25 bp, Homo sapien
tgccacagcataaagcaatccaagg

SEQ ID NO: 1765055 - DNA, 25 bp, Homo sapien
taattagtcaaaggtcagtgggaaa

SEQ ID NO: 1765056 - DNA, 25 bp, Homo sapien
tagcattatatgagaagtccacaga

SEQ ID NO: 1765057 - DNA, 25 bp, Homo sapien
cattggctttgaatacctgttgcca

SEQ ID NO: 1765058 - DNA, 25 bp, Homo sapien
cttagtggatttggtcttgtaacaa

SEQ ID NO: 1765059 - DNA, 25 bp, Homo sapien
cttcttagtggatttggtcttgtaa

SEQ ID NO: 1765060 - DNA, 25 bp, Homo sapien
aaatgttttgtaatgagtaactcat

SEQ ID NO: 1765061 - DNA, 25 bp, Homo sapien
tggatttggtcttgtaacaaatgtt

SEQ ID NO: 1765062 - DNA, 25 bp, Homo sapien
cctgccatatattaacggcctacac

SEQ ID NO: 1765063 - DNA, 25 bp, Homo sapien
catatattaacggcctacactctag

SEQ ID NO: 1765064 - DNA, 25 bp, Homo sapien
gccatatattaacggcctacactct

SEQ ID NO: 1765065 - DNA, 25 bp, Homo sapien
tgccatatattaacggcctacactc

SEQ ID NO: 1765066 - DNA, 25 bp, Homo sapien
catgcagaaagccagtaaaggggcc

SEQ ID NO: 1765067 - DNA, 25 bp, Homo sapien
aggtgacatcggcattgcgtccatg

SEQ ID NO: 1765068 - DNA, 25 bp, Homo sapien
gcaacagaagctcgaagcacacagg

SEQ ID NO: 1765069 - DNA, 25 bp, Homo sapien
cattgcgtccatgctgcacatgcat

SEQ ID NO: 1765070 - DNA, 25 bp, Homo sapien
ggtgaaagatcatccacatgtggca

SEQ ID NO: 1765071 - DNA, 25 bp, Homo sapien
taaagtgtataggatcttctcttgc

SEQ ID NO: 1765072 - DNA, 25 bp, Homo sapien
taatgttagaagacttaagcctact

SEQ ID NO: 1765073 - DNA, 25 bp, Homo sapien
taagcctacttcctatgccatggtg

SEQ ID NO: 1765074 - DNA, 25 bp, Homo sapien
gcctgtgacagcctctccattttat

SEQ ID NO: 1765075 - DNA, 25 bp, Homo sapien
tgtgacagcctctccattttattca

SEQ ID NO: 1765076 - DNA, 25 bp, Homo sapien
ctgggcctgtgacagcctctccatt

SEQ ID NO: 1765077 - DNA, 25 bp, Homo sapien
gggcctgtgacagcctctccatttt

SEQ ID NO: 1765078 - DNA, 25 bp, Homo sapien
cagttacacaagcaggtaatgggtt

SEQ ID NO: 1765079 - DNA, 25 bp, Homo sapien
gagttcctaatctgacagtacagat

SEQ ID NO: 1765080 - DNA, 25 bp, Homo sapien
gcagatccttgggtcctgagaaccc

SEQ ID NO: 1765081 - DNA, 25 bp, Homo sapien
gagaacccctggtatttcagtctaa

SEQ ID NO: 1765082 - DNA, 25 bp, Homo sapien
tgccgatgaccagcagtaatctgag

SEQ ID NO: 1765083 - DNA, 25 bp, Homo sapien
taatctgaggatagccttttgagta

SEQ ID NO: 1765084 - DNA, 25 bp, Homo sapien
accagcagtaatctgaggatagcct

SEQ ID NO: 1765085 - DNA, 25 bp, Homo sapien
gccgatgaccagcagtaatctgagg

SEQ ID NO: 1765086 - DNA, 25 bp, Homo sapien
tgccttcgtaacgtactgtttggaa

SEQ ID NO: 1765087 - DNA, 25 bp, Homo sapien
taacgtactgtttggaatgatttaa

SEQ ID NO: 1765088 - DNA, 25 bp, Homo sapien
gcttggctgggctgattgcttgcct

SEQ ID NO: 1765089 - DNA, 25 bp, Homo sapien
gggctgattgcttgccttcgtaacg

SEQ ID NO: 1765090 - DNA, 25 bp, Homo sapien
tgcatcctttagatgtactaatgca

SEQ ID NO: 1765091 - DNA, 25 bp, Homo sapien
gattgaacataatctgccctgtacc

SEQ ID NO: 1765092 - DNA, 25 bp, Homo sapien
aaaaatcccaacacactagaacatc

SEQ ID NO: 1765093 - DNA, 25 bp, Homo sapien
catctatttgcaaatcctctaggcc

SEQ ID NO: 1765094 - DNA, 25 bp, Homo sapien
tataaaggtgtttttctttagcatc

SEQ ID NO: 1765095 - DNA, 25 bp, Homo sapien
cataagagttttggattctgctgat

SEQ ID NO: 1765096 - DNA, 25 bp, Homo sapien
gtaataaatgcctatccaaaatgtg

SEQ ID NO: 1765097 - DNA, 25 bp, Homo sapien
taataaatgcctatccaaaatgtgt

SEQ ID NO: 1765098 - DNA, 25 bp, Homo sapien
taagagttttggattctgctgattt

SEQ ID NO: 1765099 - DNA, 25 bp, Homo sapien
tattgtgcttcccaaatagtgcatt

SEQ ID NO: 1765100 - DNA, 25 bp, Homo sapien
cactattttgttatcagcttctacg

SEQ ID NO: 1765101 - DNA, 25 bp, Homo sapien
tgtgacaatcttgcatcaagcaagt

SEQ ID NO: 1765102 - DNA, 25 bp, Homo sapien
cactgtatgtataagggcatacctc

SEQ ID NO: 1765103 - DNA, 25 bp, Homo sapien
tttctagtttatccatgggaataca

SEQ ID NO: 1765104 - DNA, 25 bp, Homo sapien
ttctagtttatccatgggaatacat

SEQ ID NO: 1765105 - DNA, 25 bp, Homo sapien
caagctctataatgatatatccctc

SEQ ID NO: 1765106 - DNA, 25 bp, Homo sapien
aatgatatatccctctgtatctgag

SEQ ID NO: 1765107 - DNA, 25 bp, Homo sapien
ctctgtatctgagatctgaacagtt

SEQ ID NO: 1765108 - DNA, 25 bp, Homo sapien
tgtatctgagatctgaacagttgga

SEQ ID NO: 1765109 - DNA, 25 bp, Homo sapien
ttgcaaggcagaataccagaaccca

SEQ ID NO: 1765110 - DNA, 25 bp, Homo sapien
gaagtctgtgcttgggcttatgtct

SEQ ID NO: 1765111 - DNA, 25 bp, Homo sapien
acaaggccaattccaacctcaagtg

SEQ ID NO: 1765112 - DNA, 25 bp, Homo sapien
taaacttcgtcatgttcactgacat

SEQ ID NO: 1765113 - DNA, 25 bp, Homo sapien
gacacctttgtcataggataacagc

SEQ ID NO: 1765114 - DNA, 25 bp, Homo sapien
gtgctgctcagttccacatttcgga

SEQ ID NO: 1765115 - DNA, 25 bp, Homo sapien
tggagagtagcaagggacacctttg

SEQ ID NO: 1765116 - DNA, 25 bp, Homo sapien
gagagtagcagtcactcgtgctgct

SEQ ID NO: 1765117 - DNA, 25 bp, Homo sapien
tgtcctctgtcgtattgccaattct

SEQ ID NO: 1765118 - DNA, 25 bp, Homo sapien
agctgtcatactgcccctccttatt

SEQ ID NO: 1765119 - DNA, 25 bp, Homo sapien
cctctgtcgtattgccaattcttct

SEQ ID NO: 1765120 - DNA, 25 bp, Homo sapien
attgaatgtcctctgtcgtattgcc

SEQ ID NO: 1765121 - DNA, 25 bp, Homo sapien
taatgaggcctaaagtaattgaggc

SEQ ID NO: 1765122 - DNA, 25 bp, Homo sapien
caagaatggaggagtgaatggcaca

SEQ ID NO: 1765123 - DNA, 25 bp, Homo sapien
gattgagctggctagatgctgccta

SEQ ID NO: 1765124 - DNA, 25 bp, Homo sapien
gcacagagggcattaaacaaggtca

SEQ ID NO: 1765125 - DNA, 25 bp, Homo sapien
tcatcaatattagcctctgcccagt

SEQ ID NO: 1765126 - DNA, 25 bp, Homo sapien
aacatgtcggcctgtcttatttcaa

SEQ ID NO: 1765127 - DNA, 25 bp, Homo sapien
gtaccccaatcagtcttaagttcag

SEQ ID NO: 1765128 - DNA, 25 bp, Homo sapien
tttatttagcttcgatctttgaggc

SEQ ID NO: 1765129 - DNA, 25 bp, Homo sapien
ctgtatcgatgctggcaaggtagaa

SEQ ID NO: 1765130 - DNA, 25 bp, Homo sapien
gatggtgtacatgccttctccttcc

SEQ ID NO: 1765131 - DNA, 25 bp, Homo sapien
cacctcgcctctcttttggtctgta

SEQ ID NO: 1765132 - DNA, 25 bp, Homo sapien
taatgagatggtgtacatgccttct

SEQ ID NO: 1765133 - DNA, 25 bp, Homo sapien
tgtcctgcagaggataaatgctgta

SEQ ID NO: 1765134 - DNA, 25 bp, Homo sapien
ctctttttctacactgttctccatc

SEQ ID NO: 1765135 - DNA, 25 bp, Homo sapien
catctattcagttaatcatgacaag

SEQ ID NO: 1765136 - DNA, 25 bp, Homo sapien
cataggtttccaggacaagagttct

SEQ ID NO: 1765137 - DNA, 25 bp, Homo sapien
agttaatcatgacaagtccttgcca

SEQ ID NO: 1765138 - DNA, 25 bp, Homo sapien
ttccccagcataggtttccaggaca

SEQ ID NO: 1765139 - DNA, 25 bp, Homo sapien
gatctagatgtacccacatctagca

SEQ ID NO: 1765140 - DNA, 25 bp, Homo sapien
ttgagtcacacccagatctagatgt

SEQ ID NO: 1765141 - DNA, 25 bp, Homo sapien
tcacacccagatctagatgtaccca

SEQ ID NO: 1765142 - DNA, 25 bp, Homo sapien
cacccagatctagatgtacccacat

SEQ ID NO: 1765143 - DNA, 25 bp, Homo sapien
tattctaggactgggaaggaatcct

SEQ ID NO: 1765144 - DNA, 25 bp, Homo sapien
actgagagtcccatgtcccttgaac

SEQ ID NO: 1765145 - DNA, 25 bp, Homo sapien
tttggtttcaagagcgatcaggcac

SEQ ID NO: 1765146 - DNA, 25 bp, Homo sapien
gcaaatctgaatggttgatcaccct

SEQ ID NO: 1765147 - DNA, 25 bp, Homo sapien
gttttcaagatgtcagtatgcttga

SEQ ID NO: 1765148 - DNA, 25 bp, Homo sapien
ttttcaagatgtcagtatgcttgat

SEQ ID NO: 1765149 - DNA, 25 bp, Homo sapien
tcaagatgtcagtatgcttgatttt

SEQ ID NO: 1765150 - DNA, 25 bp, Homo sapien
tttcaagatgtcagtatgcttgatt

SEQ ID NO: 1765151 - DNA, 25 bp, Homo sapien
gttacctaaatctccatgtctccat

SEQ ID NO: 1765152 - DNA, 25 bp, Homo sapien
tgtctctaatacctccagtgccatt

SEQ ID NO: 1765153 - DNA, 25 bp, Homo sapien
taattgaatctggatgttacctaaa

SEQ ID NO: 1765154 - DNA, 25 bp, Homo sapien
tacctccagtgccatttaattgaat

SEQ ID NO: 1765155 - DNA, 25 bp, Homo sapien
caagcagtttaattgagtactgcag

SEQ ID NO: 1765156 - DNA, 25 bp, Homo sapien
tcttcttgaggcagtacaagttggg

SEQ ID NO: 1765157 - DNA, 25 bp, Homo sapien
tcctctgttgtccagcaagcagttt

SEQ ID NO: 1765158 - DNA, 25 bp, Homo sapien
gaataaactcaagtaaggggtcatg

SEQ ID NO: 1765159 - DNA, 25 bp, Homo sapien
aagatttgtggatgattgtttctat

SEQ ID NO: 1765160 - DNA, 25 bp, Homo sapien
tgtggtgaagcaaatcataagattt

SEQ ID NO: 1765161 - DNA, 25 bp, Homo sapien
tgtttctataacagaagaccctaaa

SEQ ID NO: 1765162 - DNA, 25 bp, Homo sapien
tttctgacaagaagctctccctcat

SEQ ID NO: 1765163 - DNA, 25 bp, Homo sapien
cttttcaccttctttgtataagtca

SEQ ID NO: 1765164 - DNA, 25 bp, Homo sapien
ttttcaccttctttgtataagtcat

SEQ ID NO: 1765165 - DNA, 25 bp, Homo sapien
ttgagattataagccagaagatgca

SEQ ID NO: 1765166 - DNA, 25 bp, Homo sapien
ggcttcacagcgaagatactgatcc

SEQ ID NO: 1765167 - DNA, 25 bp, Homo sapien
tgcaaatgaattctgaaggaatcag

SEQ ID NO: 1765168 - DNA, 25 bp, Homo sapien
tacacttgtatggtattcgctccaa

SEQ ID NO: 1765169 - DNA, 25 bp, Homo sapien
ggtcctggctcaccctgagacttca

SEQ ID NO: 1765170 - DNA, 25 bp, Homo sapien
ccaggtcctggctcaccctgagact

SEQ ID NO: 1765171 - DNA, 25 bp, Homo sapien
caggtcctggctcaccctgagactt

SEQ ID NO: 1765172 - DNA, 25 bp, Homo sapien
aggtcctggctcaccctgagacttc

SEQ ID NO: 1765173 - DNA, 25 bp, Homo sapien
ttcctaacgtcagaaccagagccag

SEQ ID NO: 1765174 - DNA, 25 bp, Homo sapien
ttcttcctaacgtcagaaccagagc

SEQ ID NO: 1765175 - DNA, 25 bp, Homo sapien
aacgtcagaaccagagccagctcct

SEQ ID NO: 1765176 - DNA, 25 bp, Homo sapien
atcaactttcttcctaacgtcagaa

SEQ ID NO: 1765177 - DNA, 25 bp, Homo sapien
tacacatagcctactgccaaatatt

SEQ ID NO: 1765178 - DNA, 25 bp, Homo sapien
cacatagcctactgccaaatatttc

SEQ ID NO: 1765179 - DNA, 25 bp, Homo sapien
acacatagcctactgccaaatattt

SEQ ID NO: 1765180 - DNA, 25 bp, Homo sapien
tgatttgcctgtttgcaggctctct

SEQ ID NO: 1765181 - DNA, 25 bp, Homo sapien
ctgatttgcctgtttgcaggctctc

SEQ ID NO: 1765182 - DNA, 25 bp, Homo sapien
gaactttgcgggaaatgttattcat

SEQ ID NO: 1765183 - DNA, 25 bp, Homo sapien
tatccacttgcatcaatcaatcttt

SEQ ID NO: 1765184 - DNA, 25 bp, Homo sapien
gttttcagcactgttgcctgcagta

SEQ ID NO: 1765185 - DNA, 25 bp, Homo sapien
cctgcagtaatgtcacagcttttct

SEQ ID NO: 1765186 - DNA, 25 bp, Homo sapien
ccagcaagagcttggtgccgtctgg

SEQ ID NO: 1765187 - DNA, 25 bp, Homo sapien
agtagggtagagttggcaacgtatt

SEQ ID NO: 1765188 - DNA, 25 bp, Homo sapien
ttggcaacgtattgggaagcctagg

SEQ ID NO: 1765189 - DNA, 25 bp, Homo sapien
catgtgtggcaccatatgagtccag

SEQ ID NO: 1765190 - DNA, 25 bp, Homo sapien
tgtggctaggagctttgagccatct

SEQ ID NO: 1765191 - DNA, 25 bp, Homo sapien
ctcttgagttgtcatcaaaatgtaa

SEQ ID NO: 1765192 - DNA, 25 bp, Homo sapien
agaaagtgtggctaggagctttgag

SEQ ID NO: 1765193 - DNA, 25 bp, Homo sapien
taggagctttgagccatctcttgag

SEQ ID NO: 1765194 - DNA, 25 bp, Homo sapien
cgacatttatttaacaggaaggcca

SEQ ID NO: 1765195 - DNA, 25 bp, Homo sapien
tgcagtagcacatgtaggccgtagc

SEQ ID NO: 1765196 - DNA, 25 bp, Homo sapien
agcctgaggaacagaaagtgcgtgt

SEQ ID NO: 1765197 - DNA, 25 bp, Homo sapien
taaaagtggtaatcagtcagcacag

SEQ ID NO: 1765198 - DNA, 25 bp, Homo sapien
ttactagttgttccaattctgccat

SEQ ID NO: 1765199 - DNA, 25 bp, Homo sapien
caattctgccattggaattcagcat

SEQ ID NO: 1765200 - DNA, 25 bp, Homo sapien
cttactagttgttccaattctgcca

SEQ ID NO: 1765201 - DNA, 25 bp, Homo sapien
ttccaattctgccattggaattcag

SEQ ID NO: 1765202 - DNA, 25 bp, Homo sapien
cttcttcagaacagatttgtttgtt

SEQ ID NO: 1765203 - DNA, 25 bp, Homo sapien
cagtcagttcaatgcaaggaatgat

SEQ ID NO: 1765204 - DNA, 25 bp, Homo sapien
ggctggagcaattaccatcagcaca

SEQ ID NO: 1765205 - DNA, 25 bp, Homo sapien
catgggtttgtcacaaagagggctg

SEQ ID NO: 1765206 - DNA, 25 bp, Homo sapien
aggttttcatgggtttgtcacaaag

SEQ ID NO: 1765207 - DNA, 25 bp, Homo sapien
agatgaagccttgaaacaggagttt

SEQ ID NO: 1765208 - DNA, 25 bp, Homo sapien
gaggaagatgaagccttgaaacagg

SEQ ID NO: 1765209 - DNA, 25 bp, Homo sapien
gaagatgaagccttgaaacaggagt

SEQ ID NO: 1765210 - DNA, 25 bp, Homo sapien
atgaagccttgaaacaggagtttcc

SEQ ID NO: 1765211 - DNA, 25 bp, Homo sapien
tacttgttctaaagtatgagggtat

SEQ ID NO: 1765212 - DNA, 25 bp, Homo sapien
gaatgtactgtatggaggaagtact

SEQ ID NO: 1765213 - DNA, 25 bp, Homo sapien
aaatccactgataccctaaagaatg

SEQ ID NO: 1765214 - DNA, 25 bp, Homo sapien
taatgaactatctagtctatcatcc

SEQ ID NO: 1765215 - DNA, 25 bp, Homo sapien
catcaacgtgggtggtatccttggt

SEQ ID NO: 1765216 - DNA, 25 bp, Homo sapien
gaagctgctggtatcgcttttgcat

SEQ ID NO: 1765217 - DNA, 25 bp, Homo sapien
ccttggtatgggtccctggatttct

SEQ ID NO: 1765218 - DNA, 25 bp, Homo sapien
ggtatcgcttttgcatcaacgtggg

SEQ ID NO: 1765219 - DNA, 25 bp, Homo sapien
cttttgaagattaagatgatgctgg

SEQ ID NO: 1765220 - DNA, 25 bp, Homo sapien
gatgatgctggctatttatctcggt

SEQ ID NO: 1765221 - DNA, 25 bp, Homo sapien
tttgaagattaagatgatgctggct

SEQ ID NO: 1765222 - DNA, 25 bp, Homo sapien
gatgctggctatttatctcggtcat

SEQ ID NO: 1765223 - DNA, 25 bp, Homo sapien
tctgtctatctgctcagttaatgct

SEQ ID NO: 1765224 - DNA, 25 bp, Homo sapien
taaatagtcataacctaatgttctg

SEQ ID NO: 1765225 - DNA, 25 bp, Homo sapien
ccttctctgtctatctgctcagtta

SEQ ID NO: 1765226 - DNA, 25 bp, Homo sapien
tcataacctaatgttctgagactct

SEQ ID NO: 1765227 - DNA, 25 bp, Homo sapien
tgttatcagagtaattgacagacat

SEQ ID NO: 1765228 - DNA, 25 bp, Homo sapien
gattgtttctattctaagattaggc

SEQ ID NO: 1765229 - DNA, 25 bp, Homo sapien
attaggcaaactcccagctgtctca

SEQ ID NO: 1765230 - DNA, 25 bp, Homo sapien
attgactgttatcagagtaattgac

SEQ ID NO: 1765231 - DNA, 25 bp, Homo sapien
caggcctgatgaatttgctcggaaa

SEQ ID NO: 1765232 - DNA, 25 bp, Homo sapien
ttaagtgaccgtgagaggaactgtt

SEQ ID NO: 1765233 - DNA, 25 bp, Homo sapien
gaatcatggagttgactgagtgcca

SEQ ID NO: 1765234 - DNA, 25 bp, Homo sapien
aaagcaatgctaaactgcaggcctg

SEQ ID NO: 1765235 - DNA, 25 bp, Homo sapien
ctggccaagtagtcttggtactgtt

SEQ ID NO: 1765236 - DNA, 25 bp, Homo sapien
tttgtggaggtatgttcgactgatc

SEQ ID NO: 1765237 - DNA, 25 bp, Homo sapien
caagtagtcttggtactgtttgtgg

SEQ ID NO: 1765238 - DNA, 25 bp, Homo sapien
tatgttcgactgatcaagtctttga

SEQ ID NO: 1765239 - DNA, 25 bp, Homo sapien
tccttttgcgtcttctagcaaatgt

SEQ ID NO: 1765240 - DNA, 25 bp, Homo sapien
ctccttttgcgtcttctagcaaatg

SEQ ID NO: 1765241 - DNA, 25 bp, Homo sapien
tgttctcattgtgtcttgtgcactc

SEQ ID NO: 1765242 - DNA, 25 bp, Homo sapien
ctcattgtgtcttgtgcactcatct

SEQ ID NO: 1765243 - DNA, 25 bp, Homo sapien
ttctggtcatggcagtcaagttgta

SEQ ID NO: 1765244 - DNA, 25 bp, Homo sapien
ctgaggaggagtcttcttttgccat

SEQ ID NO: 1765245 - DNA, 25 bp, Homo sapien
gactctgagtgggtcgttacagctg

SEQ ID NO: 1765246 - DNA, 25 bp, Homo sapien
ttgtattgtcaaaaccatctctggg

SEQ ID NO: 1765247 - DNA, 25 bp, Homo sapien
taaatgtgtctctgcaggagggata

SEQ ID NO: 1765248 - DNA, 25 bp, Homo sapien
aaatgtgtctctgcaggagggatac

SEQ ID NO: 1765249 - DNA, 25 bp, Homo sapien
tttaaatgtgtctctgcaggaggga

SEQ ID NO: 1765250 - DNA, 25 bp, Homo sapien
ttaaatgtgtctctgcaggagggat

SEQ ID NO: 1765251 - DNA, 25 bp, Homo sapien
ggctgccgataatgcttcattcatg

SEQ ID NO: 1765252 - DNA, 25 bp, Homo sapien
gtctgcgctgctccagaacgctttg

SEQ ID NO: 1765253 - DNA, 25 bp, Homo sapien
gaaggggctgccgataatgcttcat

SEQ ID NO: 1765254 - DNA, 25 bp, Homo sapien
gaaatctcgttctgagagtgtggtc

SEQ ID NO: 1765255 - DNA, 25 bp, Homo sapien
cccagctgcaggttgattgatggca

SEQ ID NO: 1765256 - DNA, 25 bp, Homo sapien
gctgctgggatagagttcactgtga

SEQ ID NO: 1765257 - DNA, 25 bp, Homo sapien
catcactgagtggttctttggtccc

SEQ ID NO: 1765258 - DNA, 25 bp, Homo sapien
ggcatcacatcgaagaacactctgg

SEQ ID NO: 1765259 - DNA, 25 bp, Homo sapien
ctgggcctcatataccatcttctct

SEQ ID NO: 1765260 - DNA, 25 bp, Homo sapien
tctctccttcacctgtttagtgagt

SEQ ID NO: 1765261 - DNA, 25 bp, Homo sapien
tctccttcacctgtttagtgagtct

SEQ ID NO: 1765262 - DNA, 25 bp, Homo sapien
ccttccggaattttctgggcctcat

SEQ ID NO: 1765263 - DNA, 25 bp, Homo sapien
gtgtagcgagaagggtacaatcagc

SEQ ID NO: 1765264 - DNA, 25 bp, Homo sapien
agtgtagcgagaagggtacaatcag

SEQ ID NO: 1765265 - DNA, 25 bp, Homo sapien
gaagtggaaaccttgagtacagacc

SEQ ID NO: 1765266 - DNA, 25 bp, Homo sapien
ccattggtggtcatgtggtatccag

SEQ ID NO: 1765267 - DNA, 25 bp, Homo sapien
aatcagaggttgtctgcgaggcatc

SEQ ID NO: 1765268 - DNA, 25 bp, Homo sapien
gtttcaacatccgtggaggagcagg

SEQ ID NO: 1765269 - DNA, 25 bp, Homo sapien
tacctgatggatcatggagaaaaat

SEQ ID NO: 1765270 - DNA, 25 bp, Homo sapien
tatgttcaaggttctgtcaaagcaa

SEQ ID NO: 1765271 - DNA, 25 bp, Homo sapien
taatggattcagttatgagaaacag

SEQ ID NO: 1765272 - DNA, 25 bp, Homo sapien
ctgttttaataccacctgatacccg

SEQ ID NO: 1765273 - DNA, 25 bp, Homo sapien
caggcacaatatcattagcagttca

SEQ ID NO: 1765274 - DNA, 25 bp, Homo sapien
tcaatgtgaacgaagacccatgtcc

SEQ ID NO: 1765275 - DNA, 25 bp, Homo sapien
ggtcacagatggctatcaatggcaa

SEQ ID NO: 1765276 - DNA, 25 bp, Homo sapien
ggagaagcgcctatctaaacagtta

SEQ ID NO: 1765277 - DNA, 25 bp, Homo sapien
gtctaatagcccataaagtctgaga

SEQ ID NO: 1765278 - DNA, 25 bp, Homo sapien
tgctgtggcctagacttctgagtaa

SEQ ID NO: 1765279 - DNA, 25 bp, Homo sapien
tgagaatcaggttgcaaaacggatg

SEQ ID NO: 1765280 - DNA, 25 bp, Homo sapien
ctcagattgctgaatcccatcaggc

SEQ ID NO: 1765281 - DNA, 25 bp, Homo sapien
caacactgcaggacagtcaaggtga

SEQ ID NO: 1765282 - DNA, 25 bp, Homo sapien
caagtgataggataaagttggccat

SEQ ID NO: 1765283 - DNA, 25 bp, Homo sapien
gcattttattgactgggcaacactg

SEQ ID NO: 1765284 - DNA, 25 bp, Homo sapien
tgttatcaaccaactgcacaatcag

SEQ ID NO: 1765285 - DNA, 25 bp, Homo sapien
tccacaatatgtcctaattcttcga

SEQ ID NO: 1765286 - DNA, 25 bp, Homo sapien
gttctgctagattcatcagttgaca

SEQ ID NO: 1765287 - DNA, 25 bp, Homo sapien
ccacgtctccacaatatgtcctaat

SEQ ID NO: 1765288 - DNA, 25 bp, Homo sapien
taattcttcgacatgttctgctaga

SEQ ID NO: 1765289 - DNA, 25 bp, Homo sapien
gctggagaatttgacacaagctccc

SEQ ID NO: 1765290 - DNA, 25 bp, Homo sapien
gagaatttgacacaagctccctgtg

SEQ ID NO: 1765291 - DNA, 25 bp, Homo sapien
tgctggagaatttgacacaagctcc

SEQ ID NO: 1765292 - DNA, 25 bp, Homo sapien
tggagaatttgacacaagctccctg

SEQ ID NO: 1765293 - DNA, 25 bp, Homo sapien
cgttgcttttcaattctaactgtgc

SEQ ID NO: 1765294 - DNA, 25 bp, Homo sapien
tcccgttgcttttcaattctaactg

SEQ ID NO: 1765295 - DNA, 25 bp, Homo sapien
tttatcccgttgcttttcaattcta

SEQ ID NO: 1765296 - DNA, 25 bp, Homo sapien
gcttttcaattctaactgtgcacat

SEQ ID NO: 1765297 - DNA, 25 bp, Homo sapien
aggtgctgaaggtcagcgtcagcct

SEQ ID NO: 1765298 - DNA, 25 bp, Homo sapien
aggtcagcgtcagccttcagtgatt

SEQ ID NO: 1765299 - DNA, 25 bp, Homo sapien
gttggggattataggttttatgata

SEQ ID NO: 1765300 - DNA, 25 bp, Homo sapien
cagtgattttctaggttggggatta

SEQ ID NO: 1765301 - DNA, 25 bp, Homo sapien
cgccttcagagtgcggatgagctcc

SEQ ID NO: 1765302 - DNA, 25 bp, Homo sapien
caacgaacttcctggaggtcgccat

SEQ ID NO: 1765303 - DNA, 25 bp, Homo sapien
tcttccgtcggttcatcttccagtt

SEQ ID NO: 1765304 - DNA, 25 bp, Homo sapien
ccaggctcttcttccgtcggttcat

SEQ ID NO: 1765305 - DNA, 25 bp, Homo sapien
gggcaaagtcggtataggcagtggg

SEQ ID NO: 1765306 - DNA, 25 bp, Homo sapien
ctggggcaaagtcggtataggcagt

SEQ ID NO: 1765307 - DNA, 25 bp, Homo sapien
aaagtcggtataggcagtggggaga

SEQ ID NO: 1765308 - DNA, 25 bp, Homo sapien
gcaaagtcggtataggcagtgggga

SEQ ID NO: 1765309 - DNA, 25 bp, Homo sapien
gccccaggaccctcgattggctttg

SEQ ID NO: 1765310 - DNA, 25 bp, Homo sapien
ggaccctcgattggctttgcagtct

SEQ ID NO: 1765311 - DNA, 25 bp, Homo sapien
agtgccccaggaccctcgattggct

SEQ ID NO: 1765312 - DNA, 25 bp, Homo sapien
caggaccctcgattggctttgcagt

SEQ ID NO: 1765313 - DNA, 25 bp, Homo sapien
gtgatgccacttccctttcagctag

SEQ ID NO: 1765314 - DNA, 25 bp, Homo sapien
tgcaagcgattactctgagtccctt

SEQ ID NO: 1765315 - DNA, 25 bp, Homo sapien
gatgccacttccctttcagctagct

SEQ ID NO: 1765316 - DNA, 25 bp, Homo sapien
cagtgatgccacttccctttcagct

SEQ ID NO: 1765317 - DNA, 25 bp, Homo sapien
cctgggccttctggggtgttgcagt

SEQ ID NO: 1765318 - DNA, 25 bp, Homo sapien
tcttgctggtaccaatggcccacac

SEQ ID NO: 1765319 - DNA, 25 bp, Homo sapien
aggctcgcaggccaggacgaccttg

SEQ ID NO: 1765320 - DNA, 25 bp, Homo sapien
gttgcagtcttgctggtaccaatgg

SEQ ID NO: 1765321 - DNA, 25 bp, Homo sapien
cacgaattagggcttgagggaagca

SEQ ID NO: 1765322 - DNA, 25 bp, Homo sapien
atcacccacgaggaagccatccact

SEQ ID NO: 1765323 - DNA, 25 bp, Homo sapien
ccataaatggatacgggtgctctga

SEQ ID NO: 1765324 - DNA, 25 bp, Homo sapien
acatcagagatgttggacaccattc

SEQ ID NO: 1765325 - DNA, 25 bp, Homo sapien
tcatctatattcatgcatcgcctga

SEQ ID NO: 1765326 - DNA, 25 bp, Homo sapien
ccgcgaagggtgcaaggagctggct

SEQ ID NO: 1765327 - DNA, 25 bp, Homo sapien
gggacgctgcgggacaggaccgggc

SEQ ID NO: 1765328 - DNA, 25 bp, Homo sapien
ctgcgcggggagcaccagggagcgc

SEQ ID NO: 1765329 - DNA, 25 bp, Homo sapien
ctggctggcgggacgctgcgggaca

SEQ ID NO: 1765330 - DNA, 25 bp, Homo sapien
agcgacacagagtgtggtccaggtc

SEQ ID NO: 1765331 - DNA, 25 bp, Homo sapien
tctcgggcaggttgtagcgacacag

SEQ ID NO: 1765332 - DNA, 25 bp, Homo sapien
cgctctcgggcaggttgtagcgaca

SEQ ID NO: 1765333 - DNA, 25 bp, Homo sapien
aggtcgaatccgaccacgtcgcagg

SEQ ID NO: 1765334 - DNA, 25 bp, Homo sapien
catctacgttaactgactggtatca

SEQ ID NO: 1765335 - DNA, 25 bp, Homo sapien
tttgcttgcacccagcagttcccgg

SEQ ID NO: 1765336 - DNA, 25 bp, Homo sapien
gctgttgctcacctcgaggttctga

SEQ ID NO: 1765337 - DNA, 25 bp, Homo sapien
caaaactgaaaggagacgcactcac

SEQ ID NO: 1765338 - DNA, 25 bp, Homo sapien
tgtctgagtcaacctgcacagtgtc

SEQ ID NO: 1765339 - DNA, 25 bp, Homo sapien
agaacagttgtctgagtcaacctgc

SEQ ID NO: 1765340 - DNA, 25 bp, Homo sapien
agtgttgggtaaacttgagcctgag

SEQ ID NO: 1765341 - DNA, 25 bp, Homo sapien
ttggccagtgttgggtaaacttgag

SEQ ID NO: 1765342 - DNA, 25 bp, Homo sapien
gaactgggcaaagctattataaatg

SEQ ID NO: 1765343 - DNA, 25 bp, Homo sapien
aactgggcaaagctattataaatga

SEQ ID NO: 1765344 - DNA, 25 bp, Homo sapien
actgggcaaagctattataaatgag

SEQ ID NO: 1765345 - DNA, 25 bp, Homo sapien
tcttctagatccaatgccaaacctt

SEQ ID NO: 1765346 - DNA, 25 bp, Homo sapien
tcccatcttctagatccaatgccaa

SEQ ID NO: 1765347 - DNA, 25 bp, Homo sapien
cagtgccattatttgcaagtttaag

SEQ ID NO: 1765348 - DNA, 25 bp, Homo sapien
tgagaacagtgccattatttgcaag

SEQ ID NO: 1765349 - DNA, 25 bp, Homo sapien
tggttgaagatagccaagaacactg

SEQ ID NO: 1765350 - DNA, 25 bp, Homo sapien
gaaaaggaatctactacactggttg

SEQ ID NO: 1765351 - DNA, 25 bp, Homo sapien
tacacctgctctaggtagatgcacc

SEQ ID NO: 1765352 - DNA, 25 bp, Homo sapien
taaaggttagccaggacttggatgg

SEQ ID NO: 1765353 - DNA, 25 bp, Homo sapien
tgctcgaaatactgcttttgtccag

SEQ ID NO: 1765354 - DNA, 25 bp, Homo sapien
gttaagagaatcctatgctacagag

SEQ ID NO: 1765355 - DNA, 25 bp, Homo sapien
ttttggaagctaacctccgaggata

SEQ ID NO: 1765356 - DNA, 25 bp, Homo sapien
ctgggttgaaaaatactaagggcat

SEQ ID NO: 1765357 - DNA, 25 bp, Homo sapien
tggcacccacaggtggatcattgtg

SEQ ID NO: 1765358 - DNA, 25 bp, Homo sapien
atgaggagcaacctgcccactcaag

SEQ ID NO: 1765359 - DNA, 25 bp, Homo sapien
cgcaggactgtgaagacaagatgag

SEQ ID NO: 1765360 - DNA, 25 bp, Homo sapien
tggatcattgtgagcacgcaggact

SEQ ID NO: 1765361 - DNA, 25 bp, Homo sapien
gtcaaagcatgagtccatcgggccc

SEQ ID NO: 1765362 - DNA, 25 bp, Homo sapien
cagagtcaaagcatgagtccatcgg

SEQ ID NO: 1765363 - DNA, 25 bp, Homo sapien
ggcccataggaggcacaggaagcac

SEQ ID NO: 1765364 - DNA, 25 bp, Homo sapien
gcatgagtccatcgggcccatagga

SEQ ID NO: 1765365 - DNA, 25 bp, Homo sapien
tagtgggaagctggttctggcagca

SEQ ID NO: 1765366 - DNA, 25 bp, Homo sapien
agtgggaagctggttctggcagcac

SEQ ID NO: 1765367 - DNA, 25 bp, Homo sapien
tggcagcactggagaaagagcagta

SEQ ID NO: 1765368 - DNA, 25 bp, Homo sapien
gcactggagaaagagcagtaggtac

SEQ ID NO: 1765369 - DNA, 25 bp, Homo sapien
gactgttgatccctgttgccactgg

SEQ ID NO: 1765370 - DNA, 25 bp, Homo sapien
tctgttttcaactgggtgcctccct

SEQ ID NO: 1765371 - DNA, 25 bp, Homo sapien
ggtcaacactggataagataccacc

SEQ ID NO: 1765372 - DNA, 25 bp, Homo sapien
gccactggagctaacaaaaacatat

SEQ ID NO: 1765373 - DNA, 25 bp, Homo sapien
gagtcatcatcttggtgccatggct

SEQ ID NO: 1765374 - DNA, 25 bp, Homo sapien
gcacctctggagtcatcatcttggt

SEQ ID NO: 1765375 - DNA, 25 bp, Homo sapien
tttcttgccatatgcctctgccagc

SEQ ID NO: 1765376 - DNA, 25 bp, Homo sapien
actctttcttgccatatgcctctgc

SEQ ID NO: 1765377 - DNA, 25 bp, Homo sapien
tttgccagtgtgaagaaccagtgat

SEQ ID NO: 1765378 - DNA, 25 bp, Homo sapien
atggctttgccagtgtgaagaacca

SEQ ID NO: 1765379 - DNA, 25 bp, Homo sapien
ggctttgccagtgtgaagaaccagt

SEQ ID NO: 1765380 - DNA, 25 bp, Homo sapien
gctttgccagtgtgaagaaccagtg

SEQ ID NO: 1765381 - DNA, 25 bp, Homo sapien
gctcctggcaggtcaaagtagttgt

SEQ ID NO: 1765382 - DNA, 25 bp, Homo sapien
tcctggcaggtcaaagtagttgtcg

SEQ ID NO: 1765383 - DNA, 25 bp, Homo sapien
caggtcaaagtagttgtcgtaaaag

SEQ ID NO: 1765384 - DNA, 25 bp, Homo sapien
aagagctcctggcaggtcaaagtag

SEQ ID NO: 1765385 - DNA, 25 bp, Homo sapien
gtgttgtatagcagcaactatatcc

SEQ ID NO: 1765386 - DNA, 25 bp, Homo sapien
tgtatagcagcaactatatccttcc

SEQ ID NO: 1765387 - DNA, 25 bp, Homo sapien
tatagcagcaactatatccttccaa

SEQ ID NO: 1765388 - DNA, 25 bp, Homo sapien
tagcagcaactatatccttccaaaa

SEQ ID NO: 1765389 - DNA, 25 bp, Homo sapien
gcttaacaaacacgtattagaaggc

SEQ ID NO: 1765390 - DNA, 25 bp, Homo sapien
acacgtattagaaggcccctcttca

SEQ ID NO: 1765391 - DNA, 25 bp, Homo sapien
gacaaacatagcttaacaaacacgt

SEQ ID NO: 1765392 - DNA, 25 bp, Homo sapien
tcactagacaaacatagcttaacaa

SEQ ID NO: 1765393 - DNA, 25 bp, Homo sapien
acacagcaaagtacctacttttcag

SEQ ID NO: 1765394 - DNA, 25 bp, Homo sapien
caatctgagtcagggtcaagggctg

SEQ ID NO: 1765395 - DNA, 25 bp, Homo sapien
cacagacccaaccactcattgttga

SEQ ID NO: 1765396 - DNA, 25 bp, Homo sapien
cacaaaaccacatgcaatctgagtc

SEQ ID NO: 1765397 - DNA, 25 bp, Homo sapien
cacatgcaatctgagtcagggtcaa

SEQ ID NO: 1765398 - DNA, 25 bp, Homo sapien
tcagatggaaaaccagggtacccag

SEQ ID NO: 1765399 - DNA, 25 bp, Homo sapien
ggaataccaggtactagaggcccta

SEQ ID NO: 1765400 - DNA, 25 bp, Homo sapien
tctcgatggtcctaagggtaaccca

SEQ ID NO: 1765401 - DNA, 25 bp, Homo sapien
gctggcatagcaactaagggcctca

SEQ ID NO: 1765402 - DNA, 25 bp, Homo sapien
gaccatatggaccaaaaggagatgt

SEQ ID NO: 1765403 - DNA, 25 bp, Homo sapien
aggaccaccgggaccatcagctgta

SEQ ID NO: 1765404 - DNA, 25 bp, Homo sapien
cctggaccggctggaatttctgtgc

SEQ ID NO: 1765405 - DNA, 25 bp, Homo sapien
tgttggaccagctggcctaccagga

SEQ ID NO: 1765406 - DNA, 25 bp, Homo sapien
tgtatgtacactacaatcaatgaaa

SEQ ID NO: 1765407 - DNA, 25 bp, Homo sapien
tctcagaaacatctgtaccctgtgc

SEQ ID NO: 1765408 - DNA, 25 bp, Homo sapien
aatgattcgctctgcatttatatac

SEQ ID NO: 1765409 - DNA, 25 bp, Homo sapien
acttgtggcccagccgcatttttca

SEQ ID NO: 1765410 - DNA, 25 bp, Homo sapien
gcaaccttccgctttacttgaagca

SEQ ID NO: 1765411 - DNA, 25 bp, Homo sapien
taaatgcacaggtatacaacagata

SEQ ID NO: 1765412 - DNA, 25 bp, Homo sapien
tgacaaacagcactggattcaatag

SEQ ID NO: 1765413 - DNA, 25 bp, Homo sapien
gattcaatagtttccatgatcacaa

SEQ ID NO: 1765414 - DNA, 25 bp, Homo sapien
ggttaataacaatgctgtataaagt

SEQ ID NO: 1765415 - DNA, 25 bp, Homo sapien
gctgccacaaataccctttttgctg

SEQ ID NO: 1765416 - DNA, 25 bp, Homo sapien
tcatggagtgttttacgctgaacga

SEQ ID NO: 1765417 - DNA, 25 bp, Homo sapien
aactgtataaagaactcatctgtga

SEQ ID NO: 1765418 - DNA, 25 bp, Homo sapien
catattgtaaaaatttgccctaatc

SEQ ID NO: 1765419 - DNA, 25 bp, Homo sapien
taatacagacatccaatcctaattt

SEQ ID NO: 1765420 - DNA, 25 bp, Homo sapien
tatttcaggctatgtcaaagatcct

SEQ ID NO: 1765421 - DNA, 25 bp, Homo sapien
tgccctaatccgaatttcagtgtat

SEQ ID NO: 1765422 - DNA, 25 bp, Homo sapien
cagttgtcccaaagtctggtgtgga

SEQ ID NO: 1765423 - DNA, 25 bp, Homo sapien
tccagtaactttcaacgccatcagc

SEQ ID NO: 1765424 - DNA, 25 bp, Homo sapien
tgaactatgtgccaaacagagctct

SEQ ID NO: 1765425 - DNA, 25 bp, Homo sapien
gaactaactcacagttgtcagggac

SEQ ID NO: 1765426 - DNA, 25 bp, Homo sapien
tgaaacttgtagatatatcctgaag

SEQ ID NO: 1765427 - DNA, 25 bp, Homo sapien
gtatgaaacttgtagatatatcctg

SEQ ID NO: 1765428 - DNA, 25 bp, Homo sapien
aaacttgtagatatatcctgaagca

SEQ ID NO: 1765429 - DNA, 25 bp, Homo sapien
aagtatgaaacttgtagatatatcc

SEQ ID NO: 1765430 - DNA, 25 bp, Homo sapien
caatttccctgcctcagactcccag

SEQ ID NO: 1765431 - DNA, 25 bp, Homo sapien
aatttccctgcctcagactcccagg

SEQ ID NO: 1765432 - DNA, 25 bp, Homo sapien
tatttgctgtggtagactaagctgg

SEQ ID NO: 1765433 - DNA, 25 bp, Homo sapien
gcatcctgtgaaaatagattgtgac

SEQ ID NO: 1765434 - DNA, 25 bp, Homo sapien
taatgaaaacgaaggcactgcatcc

SEQ ID NO: 1765435 - DNA, 25 bp, Homo sapien
tcaaactagtttaagaagtcaacca

SEQ ID NO: 1765436 - DNA, 25 bp, Homo sapien
caacctatgttgtaatggagtaacc

SEQ ID NO: 1765437 - DNA, 25 bp, Homo sapien
gaaagtggccactgaattccaaaag

SEQ ID NO: 1765438 - DNA, 25 bp, Homo sapien
cccagtgccctttagatggatacca

SEQ ID NO: 1765439 - DNA, 25 bp, Homo sapien
taattcacaatggtcctctagagca

SEQ ID NO: 1765440 - DNA, 25 bp, Homo sapien
gaaacagaaagatgatacttgctac

SEQ ID NO: 1765441 - DNA, 25 bp, Homo sapien
tagaccagtacaccaaaaatgctaa

SEQ ID NO: 1765442 - DNA, 25 bp, Homo sapien
aagcacacgtaagtacaaagttcac

SEQ ID NO: 1765443 - DNA, 25 bp, Homo sapien
tgctaccacaaaagcacacgtaagt

SEQ ID NO: 1765444 - DNA, 25 bp, Homo sapien
ttccaccaggaacataatatagctc

SEQ ID NO: 1765445 - DNA, 25 bp, Homo sapien
gagtgtgaagctttggagatatcct

SEQ ID NO: 1765446 - DNA, 25 bp, Homo sapien
aaaaagtggtgacaataagcctcct

SEQ ID NO: 1765447 - DNA, 25 bp, Homo sapien
aagcctccttgtcttattctcagtg

SEQ ID NO: 1765448 - DNA, 25 bp, Homo sapien
acatcccatgctccatataacatgg

SEQ ID NO: 1765449 - DNA, 25 bp, Homo sapien
ataacatgggatattataaaaatcc

SEQ ID NO: 1765450 - DNA, 25 bp, Homo sapien
tgagtagccctgctatacactaaca

SEQ ID NO: 1765451 - DNA, 25 bp, Homo sapien
aaaaagctcctagaaatggtaaatg

SEQ ID NO: 1765452 - DNA, 25 bp, Homo sapien
tattgtgccactacctgaaaactag

SEQ ID NO: 1765453 - DNA, 25 bp, Homo sapien
tgaacatatgttgaccagccactat

SEQ ID NO: 1765454 - DNA, 25 bp, Homo sapien
tgtaatatccactacaagctctgtg

SEQ ID NO: 1765455 - DNA, 25 bp, Homo sapien
gaattatgtgcttcccctgaacgga

SEQ ID NO: 1765456 - DNA, 25 bp, Homo sapien
cacaccttccaatagtaggaggcca

SEQ ID NO: 1765457 - DNA, 25 bp, Homo sapien
caggtttcagcttaataccaggagg

SEQ ID NO: 1765458 - DNA, 25 bp, Homo sapien
gttgagactagaaaagacacacctt

SEQ ID NO: 1765459 - DNA, 25 bp, Homo sapien
gagtctgtaaggcacggagctattc

SEQ ID NO: 1765460 - DNA, 25 bp, Homo sapien
tgcacacatctaggtgcagtacctc

SEQ ID NO: 1765461 - DNA, 25 bp, Homo sapien
ttcactcctattgggcaagttagta

SEQ ID NO: 1765462 - DNA, 25 bp, Homo sapien
cttcttattctgcacacatctaggt

SEQ ID NO: 1765463 - DNA, 25 bp, Homo sapien
tcctattgggcaagttagtacttca

SEQ ID NO: 1765464 - DNA, 25 bp, Homo sapien
caatacccactctgcacatcaatga

SEQ ID NO: 1765465 - DNA, 25 bp, Homo sapien
tacccactctgcacatcaatgatgg

SEQ ID NO: 1765466 - DNA, 25 bp, Homo sapien
ccaatacccactctgcacatcaatg

SEQ ID NO: 1765467 - DNA, 25 bp, Homo sapien
ggagccctccccaatacccactctg

SEQ ID NO: 1765468 - DNA, 25 bp, Homo sapien
gactctatggtaactacagggtcac

SEQ ID NO: 1765469 - DNA, 25 bp, Homo sapien
tcggagcttgtgcaatactgcccag

SEQ ID NO: 1765470 - DNA, 25 bp, Homo sapien
ctgaaaatccgagatacagagaggc

SEQ ID NO: 1765471 - DNA, 25 bp, Homo sapien
tcggaatttgaatgcaggcggtctg

SEQ ID NO: 1765472 - DNA, 25 bp, Homo sapien
gactagctgccaaacatactaatac

SEQ ID NO: 1765473 - DNA, 25 bp, Homo sapien
gctatctttgtagactagctgccaa

SEQ ID NO: 1765474 - DNA, 25 bp, Homo sapien
ctaatacttctatgtgattcctgcc

SEQ ID NO: 1765475 - DNA, 25 bp, Homo sapien
gattcctgccagtatattttctgtt

SEQ ID NO: 1765476 - DNA, 25 bp, Homo sapien
cactgtgagaactggtaattaacag

SEQ ID NO: 1765477 - DNA, 25 bp, Homo sapien
gcattctttagctgtcgaagccatt

SEQ ID NO: 1765478 - DNA, 25 bp, Homo sapien
gagaagtctacagtaatcactgtga

SEQ ID NO: 1765479 - DNA, 25 bp, Homo sapien
tatattcgcagagaagtctacagta

SEQ ID NO: 1765480 - DNA, 25 bp, Homo sapien
taagaattagaaaaggtccatataa

SEQ ID NO: 1765481 - DNA, 25 bp, Homo sapien
attccactggaaatagaaggtgggt

SEQ ID NO: 1765482 - DNA, 25 bp, Homo sapien
catcttttgactaacttttacatgc

SEQ ID NO: 1765483 - DNA, 25 bp, Homo sapien
tatctattttaccacagcatcattc

SEQ ID NO: 1765484 - DNA, 25 bp, Homo sapien
cgagtgtccggaaaggtctctgact

SEQ ID NO: 1765485 - DNA, 25 bp, Homo sapien
tttatcgaggcatttatttaggccc

SEQ ID NO: 1765486 - DNA, 25 bp, Homo sapien
ccacaggcgcttttgttctagaaga

SEQ ID NO: 1765487 - DNA, 25 bp, Homo sapien
taaaaactaaggtgaagttcatgcc

SEQ ID NO: 1765488 - DNA, 25 bp, Homo sapien
gcattgcatgcaacacagtgttctg

SEQ ID NO: 1765489 - DNA, 25 bp, Homo sapien
aaccgctgacgtcaaacctgtgcga

SEQ ID NO: 1765490 - DNA, 25 bp, Homo sapien
aaacctgtgcgactcgctaaggcca

SEQ ID NO: 1765491 - DNA, 25 bp, Homo sapien
catgacaaccgctgacgtcaaacct

SEQ ID NO: 1765492 - DNA, 25 bp, Homo sapien
tgacgtcaaacctgtgcgactcgct

SEQ ID NO: 1765493 - DNA, 25 bp, Homo sapien
gacactggcatcagcatctttgccc

SEQ ID NO: 1765494 - DNA, 25 bp, Homo sapien
ggcatcagcatctttgcccctgtta

SEQ ID NO: 1765495 - DNA, 25 bp, Homo sapien
actggcatcagcatctttgcccctg

SEQ ID NO: 1765496 - DNA, 25 bp, Homo sapien
tgacactggcatcagcatctttgcc

SEQ ID NO: 1765497 - DNA, 25 bp, Homo sapien
ctggagggaggagctcagtcctgac

SEQ ID NO: 1765498 - DNA, 25 bp, Homo sapien
gaagattttgcttggaagacgcttc

SEQ ID NO: 1765499 - DNA, 25 bp, Homo sapien
ctgcacgtgatagagaacagaggat

SEQ ID NO: 1765500 - DNA, 25 bp, Homo sapien
gtgacgcactgcacgtgatagagaa

SEQ ID NO: 1765501 - DNA, 25 bp, Homo sapien
ttgcttggaagacgcttctcccctc

SEQ ID NO: 1765502 - DNA, 25 bp, Homo sapien
cagtgtattggtgacagctaaggcc

SEQ ID NO: 1765503 - DNA, 25 bp, Homo sapien
tctaggcggaaggagaatctcaagc

SEQ ID NO: 1765504 - DNA, 25 bp, Homo sapien
ggctcatgattctcccaatggtggg

SEQ ID NO: 1765505 - DNA, 25 bp, Homo sapien
cagcattggcgacactgcggtgaac

SEQ ID NO: 1765506 - DNA, 25 bp, Homo sapien
cagaaagattcctgcagacagctgc

SEQ ID NO: 1765507 - DNA, 25 bp, Homo sapien
cagaatctaaggtttcaccagggcc

SEQ ID NO: 1765508 - DNA, 25 bp, Homo sapien
aagtgtgatcttccaaccagtagca

SEQ ID NO: 1765509 - DNA, 25 bp, Homo sapien
gactgtacaattagccttaggatgc

SEQ ID NO: 1765510 - DNA, 25 bp, Homo sapien
ggacagcgttcccttgggagtacca

SEQ ID NO: 1765511 - DNA, 25 bp, Homo sapien
gggagtaccagccaggtttatccag

SEQ ID NO: 1765512 - DNA, 25 bp, Homo sapien
cttcagaagttcatagaggtggaca

SEQ ID NO: 1765513 - DNA, 25 bp, Homo sapien
tttatccagagatggcagtgcctcc

SEQ ID NO: 1765514 - DNA, 25 bp, Homo sapien
tcacagaaattctggtaaatatttt

SEQ ID NO: 1765515 - DNA, 25 bp, Homo sapien
cagctcacagaaattctggtaaata

SEQ ID NO: 1765516 - DNA, 25 bp, Homo sapien
gctcacagaaattctggtaaatatt

SEQ ID NO: 1765517 - DNA, 25 bp, Homo sapien
tcagctcacagaaattctggtaaat

SEQ ID NO: 1765518 - DNA, 25 bp, Homo sapien
cagggctctgttaccccacgatctc

SEQ ID NO: 1765519 - DNA, 25 bp, Homo sapien
ggatatgagaatcagcatctgcaag

SEQ ID NO: 1765520 - DNA, 25 bp, Homo sapien
tcagatgtgaaaacagagttaaggg

SEQ ID NO: 1765521 - DNA, 25 bp, Homo sapien
caagtcagactgctccatccattaa

SEQ ID NO: 1765522 - DNA, 25 bp, Homo sapien
cacaggtgaccatcaacttgtctca

SEQ ID NO: 1765523 - DNA, 25 bp, Homo sapien
aagaaaatttctcaacaggcatcag

SEQ ID NO: 1765524 - DNA, 25 bp, Homo sapien
ggcatcagagtatgacaatcaaaaa

SEQ ID NO: 1765525 - DNA, 25 bp, Homo sapien
gagctggtgaggtattagagacaac

SEQ ID NO: 1765526 - DNA, 25 bp, Homo sapien
tactatagtgacgagctgggaaaat

SEQ ID NO: 1765527 - DNA, 25 bp, Homo sapien
caattactatagtgacgagctggga

SEQ ID NO: 1765528 - DNA, 25 bp, Homo sapien
tatagtgacgagctgggaaaatatc

SEQ ID NO: 1765529 - DNA, 25 bp, Homo sapien
aattactatagtgacgagctgggaa

SEQ ID NO: 1765530 - DNA, 25 bp, Homo sapien
ctgcgattgcttcaatacttggaat

SEQ ID NO: 1765531 - DNA, 25 bp, Homo sapien
gcttcaatacttggaattgcaatag

SEQ ID NO: 1765532 - DNA, 25 bp, Homo sapien
gattgcttcaatacttggaattgca

SEQ ID NO: 1765533 - DNA, 25 bp, Homo sapien
gcgattgcttcaatacttggaattg

SEQ ID NO: 1765534 - DNA, 25 bp, Homo sapien
tcaaaggtcacttaggatgaagagt

SEQ ID NO: 1765535 - DNA, 25 bp, Homo sapien
taaccatgtctaacagaatatccac

SEQ ID NO: 1765536 - DNA, 25 bp, Homo sapien
cttttgctccttcagtaggtctgtg

SEQ ID NO: 1765537 - DNA, 25 bp, Homo sapien
taagaggcaaaagggatgtaccagg

SEQ ID NO: 1765538 - DNA, 25 bp, Homo sapien
catcacttgataagaccagtggagg

SEQ ID NO: 1765539 - DNA, 25 bp, Homo sapien
cagtggaggatttggatagtagcca

SEQ ID NO: 1765540 - DNA, 25 bp, Homo sapien
tttggatatcagtgtctcatcactt

SEQ ID NO: 1765541 - DNA, 25 bp, Homo sapien
gtgtctcatcacttgataagaccag

SEQ ID NO: 1765542 - DNA, 25 bp, Homo sapien
tataataagagttgttaaacatcaa

SEQ ID NO: 1765543 - DNA, 25 bp, Homo sapien
caaatatcaacttattggtcaataa

SEQ ID NO: 1765544 - DNA, 25 bp, Homo sapien
tttaactgcatatatgggtcttcac

SEQ ID NO: 1765545 - DNA, 25 bp, Homo sapien
tttatagaaaggagacctatggaca

SEQ ID NO: 1765546 - DNA, 25 bp, Homo sapien
tgtaaatcagaatcacctgacgggc

SEQ ID NO: 1765547 - DNA, 25 bp, Homo sapien
gattggtaggccttactctcagagc

SEQ ID NO: 1765548 - DNA, 25 bp, Homo sapien
catatgtgtaagagtgactgtgcgt

SEQ ID NO: 1765549 - DNA, 25 bp, Homo sapien
ttgtccccaattgagaatgtaatgc

SEQ ID NO: 1765550 - DNA, 25 bp, Homo sapien
acagtcctggattgtagcatgcctg

SEQ ID NO: 1765551 - DNA, 25 bp, Homo sapien
tagctactaatatgaccatacacgg

SEQ ID NO: 1765552 - DNA, 25 bp, Homo sapien
tacacggcacatagaacaccacagt

SEQ ID NO: 1765553 - DNA, 25 bp, Homo sapien
taaaccagatagtgaaaaccagtgt

SEQ ID NO: 1765554 - DNA, 25 bp, Homo sapien
atatcaaacaaagctactgactgtg

SEQ ID NO: 1765555 - DNA, 25 bp, Homo sapien
tttaaagcatacatgagatagtatc

SEQ ID NO: 1765556 - DNA, 25 bp, Homo sapien
tatcaccatatacttattgttaaat

SEQ ID NO: 1765557 - DNA, 25 bp, Homo sapien
tcctaagcttgattatttatgctca

SEQ ID NO: 1765558 - DNA, 25 bp, Homo sapien
tatccattggcactctttacaaaga

SEQ ID NO: 1765559 - DNA, 25 bp, Homo sapien
tcttcatatccattggcactcttta

SEQ ID NO: 1765560 - DNA, 25 bp, Homo sapien
aaagcctaattatagtctttctaat

SEQ ID NO: 1765561 - DNA, 25 bp, Homo sapien
catatccattggcactctttacaaa

SEQ ID NO: 1765562 - DNA, 25 bp, Homo sapien
tagagaccaacaagagacacctttc

SEQ ID NO: 1765563 - DNA, 25 bp, Homo sapien
tgtacatgaagtagcctagtgaggc

SEQ ID NO: 1765564 - DNA, 25 bp, Homo sapien
gaattacttggtatgccctcatggc

SEQ ID NO: 1765565 - DNA, 25 bp, Homo sapien
catgcccagggattttcaagggtgg

SEQ ID NO: 1765566 - DNA, 25 bp, Homo sapien
gagggaaatttaccaagcagtcaag

SEQ ID NO: 1765567 - DNA, 25 bp, Homo sapien
tacatggtacaacaaactgattggc

SEQ ID NO: 1765568 - DNA, 25 bp, Homo sapien
gacccaacttctctataggcccaga

SEQ ID NO: 1765569 - DNA, 25 bp, Homo sapien
taatccctctcatgtcctagcacga

SEQ ID NO: 1765570 - DNA, 25 bp, Homo sapien
ggtgattgcttttaacacatttaga

SEQ ID NO: 1765571 - DNA, 25 bp, Homo sapien
gattaaacttggtgattgcttttaa

SEQ ID NO: 1765572 - DNA, 25 bp, Homo sapien
ttaagtgattaaacttggtgattgc

SEQ ID NO: 1765573 - DNA, 25 bp, Homo sapien
aaacttggtgattgcttttaacaca

SEQ ID NO: 1765574 - DNA, 25 bp, Homo sapien
tacaggactccatacagttacagat

SEQ ID NO: 1765575 - DNA, 25 bp, Homo sapien
taaatagttgagaaaacagaggtcc

SEQ ID NO: 1765576 - DNA, 25 bp, Homo sapien
catgactattcaggcctcagttgaa

SEQ ID NO: 1765577 - DNA, 25 bp, Homo sapien
gctgctaagcattgtaagtaaccgc

SEQ ID NO: 1765578 - DNA, 25 bp, Homo sapien
tggtgacactgcataattaccctgg

SEQ ID NO: 1765579 - DNA, 25 bp, Homo sapien
tgtggacctccaaaccagttaagaa

SEQ ID NO: 1765580 - DNA, 25 bp, Homo sapien
caattaggcatcttacaggtttcac

SEQ ID NO: 1765581 - DNA, 25 bp, Homo sapien
cattcactgtaataggctggcgcca

SEQ ID NO: 1765582 - DNA, 25 bp, Homo sapien
ctctcaattatcctaggagtgacct

SEQ ID NO: 1765583 - DNA, 25 bp, Homo sapien
tatgttcctaagcagtgtaagtacc

SEQ ID NO: 1765584 - DNA, 25 bp, Homo sapien
caaaattgatgtttacaggcctgct

SEQ ID NO: 1765585 - DNA, 25 bp, Homo sapien
aataccaaatttgtgtcctgtgcag

SEQ ID NO: 1765586 - DNA, 25 bp, Homo sapien
ttaatctaggttgggaaactgagta

SEQ ID NO: 1765587 - DNA, 25 bp, Homo sapien
cacagtggagaggttaatctaggtt

SEQ ID NO: 1765588 - DNA, 25 bp, Homo sapien
gtttaggaggtctgaacacacacag

SEQ ID NO: 1765589 - DNA, 25 bp, Homo sapien
tttgaaggccttgccctaagctacc

SEQ ID NO: 1765590 - DNA, 25 bp, Homo sapien
tggaagatctccagcctccttgtag

SEQ ID NO: 1765591 - DNA, 25 bp, Homo sapien
ctgcagcctgcattgtggaagatct

SEQ ID NO: 1765592 - DNA, 25 bp, Homo sapien
ctaacaaatgaagaagcaggctgca

SEQ ID NO: 1765593 - DNA, 25 bp, Homo sapien
cacggacaagttccagtaggtggga

SEQ ID NO: 1765594 - DNA, 25 bp, Homo sapien
ccttggactgcttctagggtagcat

SEQ ID NO: 1765595 - DNA, 25 bp, Homo sapien
ttgtgatgtgagcaaaggcaaccaa

SEQ ID NO: 1765596 - DNA, 25 bp, Homo sapien
ccatccattctaccaaaacctgtgt

SEQ ID NO: 1765597 - DNA, 25 bp, Homo sapien
aacttagcctcactccacttttcta

SEQ ID NO: 1765598 - DNA, 25 bp, Homo sapien
ccaaagcaaggctggaacgcagtcc

SEQ ID NO: 1765599 - DNA, 25 bp, Homo sapien
taatatgtgacagagcccaaagcaa

SEQ ID NO: 1765600 - DNA, 25 bp, Homo sapien
ttatctgatagaacaagctggtggc

SEQ ID NO: 1765601 - DNA, 25 bp, Homo sapien
tatgaagcctgtgctatagcccacc

SEQ ID NO: 1765602 - DNA, 25 bp, Homo sapien
gaagtgacgactaaaaaacgcgcca

SEQ ID NO: 1765603 - DNA, 25 bp, Homo sapien
ttgtcaaacgtaaatgcccaggctg

SEQ ID NO: 1765604 - DNA, 25 bp, Homo sapien
caagggctccgtgaagaaaccgagg

SEQ ID NO: 1765605 - DNA, 25 bp, Homo sapien
tagtcaaccgcgcagagagttctcg

SEQ ID NO: 1765606 - DNA, 25 bp, Homo sapien
ccatgaatccacaccttaaaagaag

SEQ ID NO: 1765607 - DNA, 25 bp, Homo sapien
tttaaattctttggtaatagccatg

SEQ ID NO: 1765608 - DNA, 25 bp, Homo sapien
taaaatcaaactctgctcatttaaa

SEQ ID NO: 1765609 - DNA, 25 bp, Homo sapien
gaaggcctgtgagttcgtgaatcca

SEQ ID NO: 1765610 - DNA, 25 bp, Homo sapien
tgctcgtgtgccagtcacctctacg

SEQ ID NO: 1765611 - DNA, 25 bp, Homo sapien
tctttcagtaatgcttaaaagccta

SEQ ID NO: 1765612 - DNA, 25 bp, Homo sapien
ttattatgtcttgttaggatgagag

SEQ ID NO: 1765613 - DNA, 25 bp, Homo sapien
tattgtccacttgttttgtagatgt

SEQ ID NO: 1765614 - DNA, 25 bp, Homo sapien
ccttgggtaggctgactaggcatac

SEQ ID NO: 1765615 - DNA, 25 bp, Homo sapien
tttaagagacagtagcatagatgcc

SEQ ID NO: 1765616 - DNA, 25 bp, Homo sapien
tcaggtgacagaactaatacaggct

SEQ ID NO: 1765617 - DNA, 25 bp, Homo sapien
tctagctgggataaaactgacctta

SEQ ID NO: 1765618 - DNA, 25 bp, Homo sapien
ggtcataatatcacctcacagggtc

SEQ ID NO: 1765619 - DNA, 25 bp, Homo sapien
aatttcttctgaggcatagggaagg

SEQ ID NO: 1765620 - DNA, 25 bp, Homo sapien
gtgatcttggataaaccactttatt

SEQ ID NO: 1765621 - DNA, 25 bp, Homo sapien
tctcattgcctcaatttcttctgag

SEQ ID NO: 1765622 - DNA, 25 bp, Homo sapien
ttaagaagaaggacgtgtggccttc

SEQ ID NO: 1765623 - DNA, 25 bp, Homo sapien
tgtggccttcttggagcatgtggcc

SEQ ID NO: 1765624 - DNA, 25 bp, Homo sapien
cacttcgccgtgtgaatcaggccat

SEQ ID NO: 1765625 - DNA, 25 bp, Homo sapien
tggcagaggagctcatcaatgctgc

SEQ ID NO: 1765626 - DNA, 25 bp, Homo sapien
gtcgagcaacagagacactcaggct

SEQ ID NO: 1765627 - DNA, 25 bp, Homo sapien
tcccattgtggagcgccttactaac

SEQ ID NO: 1765628 - DNA, 25 bp, Homo sapien
tcacgatgactgagtgggagacagc

SEQ ID NO: 1765629 - DNA, 25 bp, Homo sapien
tggcgcatggtctacgtcgagcaac

SEQ ID NO: 1765630 - DNA, 25 bp, Homo sapien
atagagaaccaggagcaaacaaatc

SEQ ID NO: 1765631 - DNA, 25 bp, Homo sapien
atttcaaagatcaacgaatccagga

SEQ ID NO: 1765632 - DNA, 25 bp, Homo sapien
gaaccaggagcaaacaaatcctaaa

SEQ ID NO: 1765633 - DNA, 25 bp, Homo sapien
tttcaaagatcaacgaatccaggag

SEQ ID NO: 1765634 - DNA, 25 bp, Homo sapien
gggctcacatctccagtaagggttc

SEQ ID NO: 1765635 - DNA, 25 bp, Homo sapien
gaagaccattcagctaccagagtac

SEQ ID NO: 1765636 - DNA, 25 bp, Homo sapien
caaagattgaaggaacacaagacca

SEQ ID NO: 1765637 - DNA, 25 bp, Homo sapien
caaagtgccttatttcctccaaagg

SEQ ID NO: 1765638 - DNA, 25 bp, Homo sapien
tgaactggcaaggagcaacctactc

SEQ ID NO: 1765639 - DNA, 25 bp, Homo sapien
taggcttgacttgctcacataggag

SEQ ID NO: 1765640 - DNA, 25 bp, Homo sapien
taatgtcggcaagactaacagccaa

SEQ ID NO: 1765641 - DNA, 25 bp, Homo sapien
gaaggctgtcccctctaggcttgac

SEQ ID NO: 1765642 - DNA, 25 bp, Homo sapien
cctcaacatcttgtcccaatagaag

SEQ ID NO: 1765643 - DNA, 25 bp, Homo sapien
catagccatgctcccgattatcaat

SEQ ID NO: 1765644 - DNA, 25 bp, Homo sapien
gagtatcctctacaatcacatatag

SEQ ID NO: 1765645 - DNA, 25 bp, Homo sapien
ggcagtaacacatactgagttgtca

SEQ ID NO: 1765646 - DNA, 25 bp, Homo sapien
tgtcatggttagatgtgccttgctt

SEQ ID NO: 1765647 - DNA, 25 bp, Homo sapien
ttactgtacactacttgatacggtt

SEQ ID NO: 1765648 - DNA, 25 bp, Homo sapien
agctttgtcatggttagatgtgcct

SEQ ID NO: 1765649 - DNA, 25 bp, Homo sapien
actgtacactacttgatacggtttg

SEQ ID NO: 1765650 - DNA, 25 bp, Homo sapien
caaacatatgtgagaaactatgcca

SEQ ID NO: 1765651 - DNA, 25 bp, Homo sapien
cttgaactttgagggcagacaaaac

SEQ ID NO: 1765652 - DNA, 25 bp, Homo sapien
tgtatatgcatacctccctctaggg

SEQ ID NO: 1765653 - DNA, 25 bp, Homo sapien
ttacgatgaatagggctgcagctgg

SEQ ID NO: 1765654 - DNA, 25 bp, Homo sapien
tccccatagaggagataaatgtttc

SEQ ID NO: 1765655 - DNA, 25 bp, Homo sapien
cacttagtgtactttggagggacct

SEQ ID NO: 1765656 - DNA, 25 bp, Homo sapien
tattaacttgtatgcagggagtacc

SEQ ID NO: 1765657 - DNA, 25 bp, Homo sapien
tatattctcaggttattcaggctct

SEQ ID NO: 1765658 - DNA, 25 bp, Homo sapien
gaagttggcctgtaaaatagagtgc

SEQ ID NO: 1765659 - DNA, 25 bp, Homo sapien
tgaaaggtgccctaagcaggagaaa

SEQ ID NO: 1765660 - DNA, 25 bp, Homo sapien
tagagtgctagagctcttacgcccc

SEQ ID NO: 1765661 - DNA, 25 bp, Homo sapien
tgaacaaaaggctagaggcatgggc

SEQ ID NO: 1765662 - DNA, 25 bp, Homo sapien
catatgaccttcatgctgttctgga

SEQ ID NO: 1765663 - DNA, 25 bp, Homo sapien
ggaatatcacatgctacgaggtcat

SEQ ID NO: 1765664 - DNA, 25 bp, Homo sapien
agggcctctgaactggttgctgtca

SEQ ID NO: 1765665 - DNA, 25 bp, Homo sapien
gaaaagcagtgagccacttgttctg

SEQ ID NO: 1765666 - DNA, 25 bp, Homo sapien
cagacaccctagaaccggttgcaag

SEQ ID NO: 1765667 - DNA, 25 bp, Homo sapien
tatgaggtaagatcctccggccgag

SEQ ID NO: 1765668 - DNA, 25 bp, Homo sapien
tagaggtgaaggaactcagacaccc

SEQ ID NO: 1765669 - DNA, 25 bp, Homo sapien
tctactccaattatatggcgcaggg

SEQ ID NO: 1765670 - DNA, 25 bp, Homo sapien
gtcatgtggcgatcaaagccgggca

SEQ ID NO: 1765671 - DNA, 25 bp, Homo sapien
cctagaaatctgtggcgcccagaga

SEQ ID NO: 1765672 - DNA, 25 bp, Homo sapien
ggtactccccagatccgagttgttg

SEQ ID NO: 1765673 - DNA, 25 bp, Homo sapien
ttctgtggtgatggcagccgaccgc

SEQ ID NO: 1765674 - DNA, 25 bp, Homo sapien
tatttctgaccaagtcccgagcgac

SEQ ID NO: 1765675 - DNA, 25 bp, Homo sapien
ttagctcccagttcggcctctgagg

SEQ ID NO: 1765676 - DNA, 25 bp, Homo sapien
tgttagcaacatgagcggcctggat

SEQ ID NO: 1765677 - DNA, 25 bp, Homo sapien
tcagcaagttctcgcgataccgtga

SEQ ID NO: 1765678 - DNA, 25 bp, Homo sapien
gatgcatctcaaggtgggtcgtccg

SEQ ID NO: 1765679 - DNA, 25 bp, Homo sapien
agagcaggcactgttacggctgtga

SEQ ID NO: 1765680 - DNA, 25 bp, Homo sapien
tgggagcagtcgctagatgcatctc

SEQ ID NO: 1765681 - DNA, 25 bp, Homo sapien
gcactgttacggctgtgattttaca

SEQ ID NO: 1765682 - DNA, 25 bp, Homo sapien
ttggtatagtaacaaacaaatcact

SEQ ID NO: 1765683 - DNA, 25 bp, Homo sapien
tttgtatgatacatgagctctggag

SEQ ID NO: 1765684 - DNA, 25 bp, Homo sapien
tagctgcagatctaaatactaccta

SEQ ID NO: 1765685 - DNA, 25 bp, Homo sapien
ttctttgaccctaggactatatttc

SEQ ID NO: 1765686 - DNA, 25 bp, Homo sapien
aattaggatgagacctgattgtaga

SEQ ID NO: 1765687 - DNA, 25 bp, Homo sapien
gtaaggagtgccttagagaaagcaa

SEQ ID NO: 1765688 - DNA, 25 bp, Homo sapien
tttatgggcagtgggaagtttatga

SEQ ID NO: 1765689 - DNA, 25 bp, Homo sapien
tgtagaaactccctgagcataatgt

SEQ ID NO: 1765690 - DNA, 25 bp, Homo sapien
gcatggaacataactcatctttgag

SEQ ID NO: 1765691 - DNA, 25 bp, Homo sapien
tggtaccgtacacgtttagtgaata

SEQ ID NO: 1765692 - DNA, 25 bp, Homo sapien
catagtggtatggacttgcctgaca

SEQ ID NO: 1765693 - DNA, 25 bp, Homo sapien
tctatgttcgtcatgtctaaaggca

SEQ ID NO: 1765694 - DNA, 25 bp, Homo sapien
cttttgagcctgcttagtatttgca

SEQ ID NO: 1765695 - DNA, 25 bp, Homo sapien
tatttgcattgtagactggttgctc

SEQ ID NO: 1765696 - DNA, 25 bp, Homo sapien
cacttgttgccttgatggagctgca

SEQ ID NO: 1765697 - DNA, 25 bp, Homo sapien
tggttgctcacaatcttcctaggac

SEQ ID NO: 1765698 - DNA, 25 bp, Homo sapien
gatgctctgagccatagttccaaaa

SEQ ID NO: 1765699 - DNA, 25 bp, Homo sapien
cataccaatctacaggacagcgttt

SEQ ID NO: 1765700 - DNA, 25 bp, Homo sapien
gaacttaaaaatgtctgagcccacc

SEQ ID NO: 1765701 - DNA, 25 bp, Homo sapien
gctaacagccttcatgccattcagg

SEQ ID NO: 1765702 - DNA, 25 bp, Homo sapien
gggattcgggaataccctggctcta

SEQ ID NO: 1765703 - DNA, 25 bp, Homo sapien
taggaatcctaaaacactcagtgtg

SEQ ID NO: 1765704 - DNA, 25 bp, Homo sapien
cagaatctggtgagcagagactaca

SEQ ID NO: 1765705 - DNA, 25 bp, Homo sapien
tgtcgccaaagacaagcagcacggg

SEQ ID NO: 1765706 - DNA, 25 bp, Homo sapien
gaaggaggatgatagaatagctcta

SEQ ID NO: 1765707 - DNA, 25 bp, Homo sapien
tttgtagcttcagatacgactcacg

SEQ ID NO: 1765708 - DNA, 25 bp, Homo sapien
gcattaaacaggaactttttgagaa

SEQ ID NO: 1765709 - DNA, 25 bp, Homo sapien
ttaatgtgtttctactggataagac

SEQ ID NO: 1765710 - DNA, 25 bp, Homo sapien
tacagtttgcgtatcctggcctcag

SEQ ID NO: 1765711 - DNA, 25 bp, Homo sapien
taggtcatgaaatgtaccaggcacg

SEQ ID NO: 1765712 - DNA, 25 bp, Homo sapien
ggatccttccactaaaccacttggc

SEQ ID NO: 1765713 - DNA, 25 bp, Homo sapien
cccagtctagataccatggtggata

SEQ ID NO: 1765714 - DNA, 25 bp, Homo sapien
tgattcagtgataatctcctgagct

SEQ ID NO: 1765715 - DNA, 25 bp, Homo sapien
tgactcaagcttcgtgggcttagtt

SEQ ID NO: 1765716 - DNA, 25 bp, Homo sapien
ctgcctttctcagcgctgacatgat

SEQ ID NO: 1765717 - DNA, 25 bp, Homo sapien
attaccaagactgctccgctgcgac

SEQ ID NO: 1765718 - DNA, 25 bp, Homo sapien
atattttactgggagcagtgctttt

SEQ ID NO: 1765719 - DNA, 25 bp, Homo sapien
aattcctctatcctcagaggttctc

SEQ ID NO: 1765720 - DNA, 25 bp, Homo sapien
tccatccaattcctctatcctcaga

SEQ ID NO: 1765721 - DNA, 25 bp, Homo sapien
gggcacctccatccaattcctctat

SEQ ID NO: 1765722 - DNA, 25 bp, Homo sapien
gcatttaatgtaggcagctcacaaa

SEQ ID NO: 1765723 - DNA, 25 bp, Homo sapien
gttcaggtggagcatttgcaacctt

SEQ ID NO: 1765724 - DNA, 25 bp, Homo sapien
catttgcaaccttggtagtcacagc

SEQ ID NO: 1765725 - DNA, 25 bp, Homo sapien
gagagagagagatccctcatgcacc

SEQ ID NO: 1765726 - DNA, 25 bp, Homo sapien
tcctcccgaatagttactgcctctt

SEQ ID NO: 1765727 - DNA, 25 bp, Homo sapien
ttctctcgaattcggttttactctc

SEQ ID NO: 1765728 - DNA, 25 bp, Homo sapien
gggcgggggtcacctatagagaagc

SEQ ID NO: 1765729 - DNA, 25 bp, Homo sapien
tgcctcctcccgaatagttactgcc

SEQ ID NO: 1765730 - DNA, 25 bp, Homo sapien
tcgccgctcgcagctgtgctcggcc

SEQ ID NO: 1765731 - DNA, 25 bp, Homo sapien
agagccagaggagacgaggatgagg

SEQ ID NO: 1765732 - DNA, 25 bp, Homo sapien
gggaggaaaccgcaacgtcaccaga

SEQ ID NO: 1765733 - DNA, 25 bp, Homo sapien
ccaggcctctttggctctaacttgt

SEQ ID NO: 1765734 - DNA, 25 bp, Homo sapien
cctcgggcgacgctactgagagccg

SEQ ID NO: 1765735 - DNA, 25 bp, Homo sapien
ctgctgcagcctcgggcgacgctac

SEQ ID NO: 1765736 - DNA, 25 bp, Homo sapien
ctgcagcctcgggcgacgctactga

SEQ ID NO: 1765737 - DNA, 25 bp, Homo sapien
agcctcgggcgacgctactgagagc

SEQ ID NO: 1765738 - DNA, 25 bp, Homo sapien
cgagccctccgcgcccccgccgcgc

SEQ ID NO: 1765739 - DNA, 25 bp, Homo sapien
ccgagccctccgcgcccccgccgcg

SEQ ID NO: 1765740 - DNA, 25 bp, Homo sapien
agccctccgcgcccccgccgcgcca

SEQ ID NO: 1765741 - DNA, 25 bp, Homo sapien
gccctccgcgcccccgccgcgccat

SEQ ID NO: 1765742 - DNA, 25 bp, Homo sapien
gaggcttcgttctctccggcgtcgc

SEQ ID NO: 1765743 - DNA, 25 bp, Homo sapien
gctcccagccgaggcttcgttctct

SEQ ID NO: 1765744 - DNA, 25 bp, Homo sapien
ccagccgaggcttcgttctctccgg

SEQ ID NO: 1765745 - DNA, 25 bp, Homo sapien
agccgaggcttcgttctctccggcg

SEQ ID NO: 1765746 - DNA, 25 bp, Homo sapien
aacaatttctccgagtgccggcgga

SEQ ID NO: 1765747 - DNA, 25 bp, Homo sapien
tctgcagccgcaaagtagggttgcc

SEQ ID NO: 1765748 - DNA, 25 bp, Homo sapien
caaggaccgtcgaggaaatcgcggc

SEQ ID NO: 1765749 - DNA, 25 bp, Homo sapien
cccatgtggcatcgctttcagagct

SEQ ID NO: 1765750 - DNA, 25 bp, Homo sapien
ctcgaaatgcctaagacattaactt

SEQ ID NO: 1765751 - DNA, 25 bp, Homo sapien
ctgaaacagaactcgaaatgcctaa

SEQ ID NO: 1765752 - DNA, 25 bp, Homo sapien
gaaacagaactcgaaatgcctaaga

SEQ ID NO: 1765753 - DNA, 25 bp, Homo sapien
cagaactcgaaatgcctaagacatt

SEQ ID NO: 1765754 - DNA, 25 bp, Homo sapien
taggcactgtgactcgcttgctcat

SEQ ID NO: 1765755 - DNA, 25 bp, Homo sapien
ggaaaacagacagatgttgccgagg

SEQ ID NO: 1765756 - DNA, 25 bp, Homo sapien
aaacagacagatgttgccgaggtta

SEQ ID NO: 1765757 - DNA, 25 bp, Homo sapien
ggttaggcactgtgactcgcttgct

SEQ ID NO: 1765758 - DNA, 25 bp, Homo sapien
cgtggcatcagatctccaaatctcc

SEQ ID NO: 1765759 - DNA, 25 bp, Homo sapien
tgccctggagaagtacagcatggga

SEQ ID NO: 1765760 - DNA, 25 bp, Homo sapien
cggtgatgtaggctgacacaaagca

SEQ ID NO: 1765761 - DNA, 25 bp, Homo sapien
aaatttcattccagcgggcactgta

SEQ ID NO: 1765762 - DNA, 25 bp, Homo sapien
tgtctcgggcttcaatgttctcagg

SEQ ID NO: 1765763 - DNA, 25 bp, Homo sapien
gaaagaattctcagcaatcacgatg

SEQ ID NO: 1765764 - DNA, 25 bp, Homo sapien
tataaattgccagtcagtcccatcc

SEQ ID NO: 1765765 - DNA, 25 bp, Homo sapien
gaaggagtctcatcctaatggcagc

SEQ ID NO: 1765766 - DNA, 25 bp, Homo sapien
taaatacacggttctctacaggctc

SEQ ID NO: 1765767 - DNA, 25 bp, Homo sapien
caaacagggtctaattactaggtag

SEQ ID NO: 1765768 - DNA, 25 bp, Homo sapien
ctaggtaggtaaaagaacagcatca

SEQ ID NO: 1765769 - DNA, 25 bp, Homo sapien
ggcttactatgagacaagaactgtg

SEQ ID NO: 1765770 - DNA, 25 bp, Homo sapien
ggtagatagggttgttactgccaca

SEQ ID NO: 1765771 - DNA, 25 bp, Homo sapien
gtgggataagcaatgatctggcccc

SEQ ID NO: 1765772 - DNA, 25 bp, Homo sapien
tgtgggataagcaatgatctggccc

SEQ ID NO: 1765773 - DNA, 25 bp, Homo sapien
ttatgtgggataagcaatgatctgg

SEQ ID NO: 1765774 - DNA, 25 bp, Homo sapien
gatctggcccccgactatggtatct

SEQ ID NO: 1765775 - DNA, 25 bp, Homo sapien
cttcctgtcgctgcctgaacactca

SEQ ID NO: 1765776 - DNA, 25 bp, Homo sapien
ctgcctgaacactcagttactccca

SEQ ID NO: 1765777 - DNA, 25 bp, Homo sapien
tgcctgaacactcagttactcccat

SEQ ID NO: 1765778 - DNA, 25 bp, Homo sapien
cctgtcgctgcctgaacactcagtt

SEQ ID NO: 1765779 - DNA, 25 bp, Homo sapien
tgctgccacctcgtacactccccat

SEQ ID NO: 1765780 - DNA, 25 bp, Homo sapien
ttgctgccacctcgtacactcccca

SEQ ID NO: 1765781 - DNA, 25 bp, Homo sapien
tgaaggtgagccaaaacctattctc

SEQ ID NO: 1765782 - DNA, 25 bp, Homo sapien
aatttgctcttagttcatggatggc

SEQ ID NO: 1765783 - DNA, 25 bp, Homo sapien
tcaatgtaacactggcgccccaaaa

SEQ ID NO: 1765784 - DNA, 25 bp, Homo sapien
atgtccaagccccaacctgcagttt

SEQ ID NO: 1765785 - DNA, 25 bp, Homo sapien
ttgattcatcaggactaggcttccc

SEQ ID NO: 1765786 - DNA, 25 bp, Homo sapien
tgattcatcaggactaggcttcccg

SEQ ID NO: 1765787 - DNA, 25 bp, Homo sapien
gattcatcaggactaggcttcccgt

SEQ ID NO: 1765788 - DNA, 25 bp, Homo sapien
atcaggactaggcttcccgtgagca

SEQ ID NO: 1765789 - DNA, 25 bp, Homo sapien
tggtgtagctgccatacgcaactcc

SEQ ID NO: 1765790 - DNA, 25 bp, Homo sapien
atgttgaagtgcctctggacgagaa

SEQ ID NO: 1765791 - DNA, 25 bp, Homo sapien
gttgaagtgcctctggacgagaaac

SEQ ID NO: 1765792 - DNA, 25 bp, Homo sapien
gtagctgccatacgcaactccttca

SEQ ID NO: 1765793 - DNA, 25 bp, Homo sapien
tttcacacttctgactcctcactat

SEQ ID NO: 1765794 - DNA, 25 bp, Homo sapien
atagtttaatgttttcacacttctg

SEQ ID NO: 1765795 - DNA, 25 bp, Homo sapien
taatgttttcacacttctgactcct

SEQ ID NO: 1765796 - DNA, 25 bp, Homo sapien
ttcacacttctgactcctcactata

SEQ ID NO: 1765797 - DNA, 25 bp, Homo sapien
tgtatttaatccataaccctccaaa

SEQ ID NO: 1765798 - DNA, 25 bp, Homo sapien
taaggacctaatttctctgcctagt

SEQ ID NO: 1765799 - DNA, 25 bp, Homo sapien
ctgcctagtctagctcattttcata

SEQ ID NO: 1765800 - DNA, 25 bp, Homo sapien
tgttctggctatatgcaactcttga

SEQ ID NO: 1765801 - DNA, 25 bp, Homo sapien
gaccagttagtcagaatccctcaaa

SEQ ID NO: 1765802 - DNA, 25 bp, Homo sapien
tatacatgggacatcctcttgtgca

SEQ ID NO: 1765803 - DNA, 25 bp, Homo sapien
gaacctggaatgaacactagctctc

SEQ ID NO: 1765804 - DNA, 25 bp, Homo sapien
caggtaagactggatatgctccacg

SEQ ID NO: 1765805 - DNA, 25 bp, Homo sapien
tgagtccgcaatagccacagtcctt

SEQ ID NO: 1765806 - DNA, 25 bp, Homo sapien
cagttgtaatttgagtccgcaatag

SEQ ID NO: 1765807 - DNA, 25 bp, Homo sapien
tccgcaatagccacagtcctttgaa

SEQ ID NO: 1765808 - DNA, 25 bp, Homo sapien
aatttgagtccgcaatagccacagt

SEQ ID NO: 1765809 - DNA, 25 bp, Homo sapien
ctgccattacgcatgacaaatttat

SEQ ID NO: 1765810 - DNA, 25 bp, Homo sapien
tgccattacgcatgacaaatttatc

SEQ ID NO: 1765811 - DNA, 25 bp, Homo sapien
tgcaccagcgctgccctttggatgg

SEQ ID NO: 1765812 - DNA, 25 bp, Homo sapien
accagcgctgccctttggatggtgt

SEQ ID NO: 1765813 - DNA, 25 bp, Homo sapien
gtgcaccagcgctgccctttggatg

SEQ ID NO: 1765814 - DNA, 25 bp, Homo sapien
agcgctgccctttggatggtgttcc

SEQ ID NO: 1765815 - DNA, 25 bp, Homo sapien
gaatctggactctaacaagccttga

SEQ ID NO: 1765816 - DNA, 25 bp, Homo sapien
gatgcgacacacaaatgctacccag

SEQ ID NO: 1765817 - DNA, 25 bp, Homo sapien
gagtgaccattcaaactactgggcc

SEQ ID NO: 1765818 - DNA, 25 bp, Homo sapien
tactgggcctcatggatttaagcac

SEQ ID NO: 1765819 - DNA, 25 bp, Homo sapien
gaggaaccgatttcaagctgccatc

SEQ ID NO: 1765820 - DNA, 25 bp, Homo sapien
ggaaccgatttcaagctgccatcat

SEQ ID NO: 1765821 - DNA, 25 bp, Homo sapien
aaccgatttcaagctgccatcatac

SEQ ID NO: 1765822 - DNA, 25 bp, Homo sapien
ctggaggaggaaccgatttcaagct

SEQ ID NO: 1765823 - DNA, 25 bp, Homo sapien
gatagccccgaggatatgtcactga

SEQ ID NO: 1765824 - DNA, 25 bp, Homo sapien
tctccgtggacagtgaagctctgaa

SEQ ID NO: 1765825 - DNA, 25 bp, Homo sapien
aaaggttgctttctcgctgtagcca

SEQ ID NO: 1765826 - DNA, 25 bp, Homo sapien
ctaaagctagctgtgttccggactc

SEQ ID NO: 1765827 - DNA, 25 bp, Homo sapien
atggggccctgctgtgtgtagttgt

SEQ ID NO: 1765828 - DNA, 25 bp, Homo sapien
gggccctgctgtgtgtagttgtcac

SEQ ID NO: 1765829 - DNA, 25 bp, Homo sapien
ctggtataggaagcagacagtgatg

SEQ ID NO: 1765830 - DNA, 25 bp, Homo sapien
gacagtgatggggccctgctgtgtg

SEQ ID NO: 1765831 - DNA, 25 bp, Homo sapien
aaataagtcagttgcattgccaaca

SEQ ID NO: 1765832 - DNA, 25 bp, Homo sapien
gaaaatagcaatgttcagaatcagg

SEQ ID NO: 1765833 - DNA, 25 bp, Homo sapien
taaaatacagctatctatgagaaga

SEQ ID NO: 1765834 - DNA, 25 bp, Homo sapien
ctaacactgtgattgggaacaagaa

SEQ ID NO: 1765835 - DNA, 25 bp, Homo sapien
aaaatctgataatctggggtaaaga

SEQ ID NO: 1765836 - DNA, 25 bp, Homo sapien
cttgtgatcacaaaatgaccaggta

SEQ ID NO: 1765837 - DNA, 25 bp, Homo sapien
ttttttgcatagactcttgtgatca

SEQ ID NO: 1765838 - DNA, 25 bp, Homo sapien
tgcatagactcttgtgatcacaaaa

SEQ ID NO: 1765839 - DNA, 25 bp, Homo sapien
ccaatttctccacgttcctgctttc

SEQ ID NO: 1765840 - DNA, 25 bp, Homo sapien
gatctgtagtaaaacatcctgttag

SEQ ID NO: 1765841 - DNA, 25 bp, Homo sapien
tatggactgctcaattagcaatgcc

SEQ ID NO: 1765842 - DNA, 25 bp, Homo sapien
cacaccatcataccaggacttagca

SEQ ID NO: 1765843 - DNA, 25 bp, Homo sapien
ccatgttatctgaatagccatccag

SEQ ID NO: 1765844 - DNA, 25 bp, Homo sapien
tctataacggttttccatataagga

SEQ ID NO: 1765845 - DNA, 25 bp, Homo sapien
gagaccagcatcaaggaaatattca

SEQ ID NO: 1765846 - DNA, 25 bp, Homo sapien
caagcatatgtgtgcagagaccagc

SEQ ID NO: 1765847 - DNA, 25 bp, Homo sapien
tgaacaaccaatgaatgcatgcaag

SEQ ID NO: 1765848 - DNA, 25 bp, Homo sapien
tacactggatcatgctgtggcgact

SEQ ID NO: 1765849 - DNA, 25 bp, Homo sapien
tgtgtaatgacatcctccctagaga

SEQ ID NO: 1765850 - DNA, 25 bp, Homo sapien
catccatgcaggacaaacggaagca

SEQ ID NO: 1765851 - DNA, 25 bp, Homo sapien
cagacagttcatccttttgagtgag

SEQ ID NO: 1765852 - DNA, 25 bp, Homo sapien
caagctctgtatgctagtgattctc

SEQ ID NO: 1765853 - DNA, 25 bp, Homo sapien
tctttaaggctaggaccaagagtcc

SEQ ID NO: 1765854 - DNA, 25 bp, Homo sapien
gaacacggtcttccacctgactttg

SEQ ID NO: 1765855 - DNA, 25 bp, Homo sapien
taggtctcatctaccatcaactgaa

SEQ ID NO: 1765856 - DNA, 25 bp, Homo sapien
tcaatcaggtcatctcaagttccct

SEQ ID NO: 1765857 - DNA, 25 bp, Homo sapien
acagcgaacagggaaaggatcaggc

SEQ ID NO: 1765858 - DNA, 25 bp, Homo sapien
aagatgaccatatgtcccagttcac

SEQ ID NO: 1765859 - DNA, 25 bp, Homo sapien
gccacagacagggaatacacagcga

SEQ ID NO: 1765860 - DNA, 25 bp, Homo sapien
gaagtgcctagaccattgaaaacgt

SEQ ID NO: 1765861 - DNA, 25 bp, Homo sapien
caaaaatggtaaacagcagagactg

SEQ ID NO: 1765862 - DNA, 25 bp, Homo sapien
tatttaatttggaatgtgctgggct

SEQ ID NO: 1765863 - DNA, 25 bp, Homo sapien
tgtttgctttacacagaaaggtact

SEQ ID NO: 1765864 - DNA, 25 bp, Homo sapien
tgagccacctaagggcagtgttcag

SEQ ID NO: 1765865 - DNA, 25 bp, Homo sapien
caatgttaaggtcttctgggaccac

SEQ ID NO: 1765866 - DNA, 25 bp, Homo sapien
aaggatactactcccattcacgagg

SEQ ID NO: 1765867 - DNA, 25 bp, Homo sapien
tatacaacgagcaagagacacaatc

SEQ ID NO: 1765868 - DNA, 25 bp, Homo sapien
cacctggcccagtagtctatcttta

SEQ ID NO: 1765869 - DNA, 25 bp, Homo sapien
tcaaactttgctaggcttcagtaag

SEQ ID NO: 1765870 - DNA, 25 bp, Homo sapien
tccttacagtatgcagatgcgtaca

SEQ ID NO: 1765871 - DNA, 25 bp, Homo sapien
gttggctgtatgtctctggtcacag

SEQ ID NO: 1765872 - DNA, 25 bp, Homo sapien
gcaagtatgaagtgtcctcaaattg

SEQ ID NO: 1765873 - DNA, 25 bp, Homo sapien
ttttatgaagagagactaacttggc

SEQ ID NO: 1765874 - DNA, 25 bp, Homo sapien
cagacttggtgctggcaaaagaagc

SEQ ID NO: 1765875 - DNA, 25 bp, Homo sapien
attcagatgaggcagacttggtgct

SEQ ID NO: 1765876 - DNA, 25 bp, Homo sapien
tccaaaagacaccacccgcccaata

SEQ ID NO: 1765877 - DNA, 25 bp, Homo sapien
gacaccacccgcccaatagtggatg

SEQ ID NO: 1765878 - DNA, 25 bp, Homo sapien
acccgcccaatagtggatggcgaag

SEQ ID NO: 1765879 - DNA, 25 bp, Homo sapien
ccgcccaatagtggatggcgaagtg

SEQ ID NO: 1765880 - DNA, 25 bp, Homo sapien
aagtactggtctcagcagattgagg

SEQ ID NO: 1765881 - DNA, 25 bp, Homo sapien
gacaagtactggtctcagcagattg

SEQ ID NO: 1765882 - DNA, 25 bp, Homo sapien
agctggacaagtactggtctcagca

SEQ ID NO: 1765883 - DNA, 25 bp, Homo sapien
tggacaagtactggtctcagcagat

SEQ ID NO: 1765884 - DNA, 25 bp, Homo sapien
cgcatcgttctgcaaatcaatgcct

SEQ ID NO: 1765885 - DNA, 25 bp, Homo sapien
ccgcatcgttctgcaaatcaatgcc

SEQ ID NO: 1765886 - DNA, 25 bp, Homo sapien
cccgcatcgttctgcaaatcaatgc

SEQ ID NO: 1765887 - DNA, 25 bp, Homo sapien
gcccgcatcgttctgcaaatcaatg

SEQ ID NO: 1765888 - DNA, 25 bp, Homo sapien
cagccagtgtctatgcaggcaccca

SEQ ID NO: 1765889 - DNA, 25 bp, Homo sapien
agcttcatcgcccagctggtcagca

SEQ ID NO: 1765890 - DNA, 25 bp, Homo sapien
tgtcatcggtaaagcctgagtcctg

SEQ ID NO: 1765891 - DNA, 25 bp, Homo sapien
gcacccaggactctggttcccggat

SEQ ID NO: 1765892 - DNA, 25 bp, Homo sapien
taagctaaatcagcaaagtccagct

SEQ ID NO: 1765893 - DNA, 25 bp, Homo sapien
tattcaaggacaaatttctggttcc

SEQ ID NO: 1765894 - DNA, 25 bp, Homo sapien
gcaaagtccagctcaagttctggta

SEQ ID NO: 1765895 - DNA, 25 bp, Homo sapien
tacttctatgatgggcggcaccctt

SEQ ID NO: 1765896 - DNA, 25 bp, Homo sapien
ttgtcaaatggttttggtgggatgg

SEQ ID NO: 1765897 - DNA, 25 bp, Homo sapien
cttgtcaaatggttttggtgggatg

SEQ ID NO: 1765898 - DNA, 25 bp, Homo sapien
tgtcaaatggttttggtgggatggg

SEQ ID NO: 1765899 - DNA, 25 bp, Homo sapien
cggggcgtcgcgcacaggcccagat

SEQ ID NO: 1765900 - DNA, 25 bp, Homo sapien
tcccccggggcgtcgcgcacaggcc

SEQ ID NO: 1765901 - DNA, 25 bp, Homo sapien
gggcgtcgcgcacaggcccagatcc

SEQ ID NO: 1765902 - DNA, 25 bp, Homo sapien
gcgtcgcgcacaggcccagatcctt

SEQ ID NO: 1765903 - DNA, 25 bp, Homo sapien
cacgtgcgtgcgctcagcacgtagc

SEQ ID NO: 1765904 - DNA, 25 bp, Homo sapien
tggtgcttgacgtgcaggtccagca

SEQ ID NO: 1765905 - DNA, 25 bp, Homo sapien
gctgcacgggcactggaatgccacg

SEQ ID NO: 1765906 - DNA, 25 bp, Homo sapien
aatgccacggcggagaagatgcgct

SEQ ID NO: 1765907 - DNA, 25 bp, Homo sapien
gcagcgccgatccgcaactcgcgcg

SEQ ID NO: 1765908 - DNA, 25 bp, Homo sapien
agcgccgatccgcaactcgcgcggg

SEQ ID NO: 1765909 - DNA, 25 bp, Homo sapien
cagcgccgatccgcaactcgcgcgg

SEQ ID NO: 1765910 - DNA, 25 bp, Homo sapien
gcgccgatccgcaactcgcgcgggc

SEQ ID NO: 1765911 - DNA, 25 bp, Homo sapien
aggtcctgcacgtccgacgccttgg

SEQ ID NO: 1765912 - DNA, 25 bp, Homo sapien
tggccgcgcactcgtaaaaggcgcc

SEQ ID NO: 1765913 - DNA, 25 bp, Homo sapien
gacgccttggcctggttgcacggca

SEQ ID NO: 1765914 - DNA, 25 bp, Homo sapien
tgcgactgagccttcagatccttca

SEQ ID NO: 1765915 - DNA, 25 bp, Homo sapien
cggctcctcccaaacgcccccagcg

SEQ ID NO: 1765916 - DNA, 25 bp, Homo sapien
tctcggctcctcccaaacgccccca

SEQ ID NO: 1765917 - DNA, 25 bp, Homo sapien
cagcggccctgagaaagctcggcct

SEQ ID NO: 1765918 - DNA, 25 bp, Homo sapien
ctcggctcctcccaaacgcccccag

SEQ ID NO: 1765919 - DNA, 25 bp, Homo sapien
taactggagataggcatcgggtgac

SEQ ID NO: 1765920 - DNA, 25 bp, Homo sapien
gttatattcttttggatgcgagccc

SEQ ID NO: 1765921 - DNA, 25 bp, Homo sapien
ggcccttcggattgaaagtatacag

SEQ ID NO: 1765922 - DNA, 25 bp, Homo sapien
tgcaacatgctgtagtactggccct

SEQ ID NO: 1765923 - DNA, 25 bp, Homo sapien
tcaggagtgctgtttataccagatg

SEQ ID NO: 1765924 - DNA, 25 bp, Homo sapien
caggagtgctgtttataccagatga

SEQ ID NO: 1765925 - DNA, 25 bp, Homo sapien
tgctgtttataccagatgaatctac

SEQ ID NO: 1765926 - DNA, 25 bp, Homo sapien
gagtgctgtttataccagatgaatc

SEQ ID NO: 1765927 - DNA, 25 bp, Homo sapien
ataaagcaataattcaaaacaattt

SEQ ID NO: 1765928 - DNA, 25 bp, Homo sapien
taataaagcaataattcaaaacaat

SEQ ID NO: 1765929 - DNA, 25 bp, Homo sapien
tttaataaagcaataattcaaaaca

SEQ ID NO: 1765930 - DNA, 25 bp, Homo sapien
tattttttaataaagcaataattca

SEQ ID NO: 1765931 - DNA, 25 bp, Homo sapien
caaggatataagacttcttttagtt

SEQ ID NO: 1765932 - DNA, 25 bp, Homo sapien
tttactttggatgaatcactttctt

SEQ ID NO: 1765933 - DNA, 25 bp, Homo sapien
aatttcagatataaaattccacaat

SEQ ID NO: 1765934 - DNA, 25 bp, Homo sapien
aggactctagaacaaggatataaga

SEQ ID NO: 1765935 - DNA, 25 bp, Homo sapien
tattaaggactgtgcaagaggaggt

SEQ ID NO: 1765936 - DNA, 25 bp, Homo sapien
ggaggtggagcataaatcaaaacaa

SEQ ID NO: 1765937 - DNA, 25 bp, Homo sapien
gacaatatgatactactgaagatgc

SEQ ID NO: 1765938 - DNA, 25 bp, Homo sapien
gatgcaagtataagtgatagaacat

SEQ ID NO: 1765939 - DNA, 25 bp, Homo sapien
caccaatcttagtcctcagaaggga

SEQ ID NO: 1765940 - DNA, 25 bp, Homo sapien
gggataatatcctactaaccagtaa

SEQ ID NO: 1765941 - DNA, 25 bp, Homo sapien
gatagagtttatgcagacacagagt

SEQ ID NO: 1765942 - DNA, 25 bp, Homo sapien
gacacagagtttatacatggctact

SEQ ID NO: 1765943 - DNA, 25 bp, Homo sapien
ggaacttttccaaacaaggagcaga

SEQ ID NO: 1765944 - DNA, 25 bp, Homo sapien
caaggagcagatttgtggctacaaa

SEQ ID NO: 1765945 - DNA, 25 bp, Homo sapien
cttttccaaacaaggagcagatttg

SEQ ID NO: 1765946 - DNA, 25 bp, Homo sapien
tccaaacaaggagcagatttgtggc

SEQ ID NO: 1765947 - DNA, 25 bp, Homo sapien
cacatagatcataagtacaatttct

SEQ ID NO: 1765948 - DNA, 25 bp, Homo sapien
gattccacatagatcataagtacaa

SEQ ID NO: 1765949 - DNA, 25 bp, Homo sapien
ctgagattccacatagatcataagt

SEQ ID NO: 1765950 - DNA, 25 bp, Homo sapien
agatgggtgatttgattgtaggcca

SEQ ID NO: 1765951 - DNA, 25 bp, Homo sapien
gggaagacgctgatcaagctcatga

SEQ ID NO: 1765952 - DNA, 25 bp, Homo sapien
gctcatgaccgttggccttaatctt

SEQ ID NO: 1765953 - DNA, 25 bp, Homo sapien
tcaagctcatgaccgttggccttaa

SEQ ID NO: 1765954 - DNA, 25 bp, Homo sapien
cgctgatcaagctcatgaccgttgg

SEQ ID NO: 1765955 - DNA, 25 bp, Homo sapien
gcctggatctgtttagcagttggaa

SEQ ID NO: 1765956 - DNA, 25 bp, Homo sapien
ttattagctgttaggagcctggatc

SEQ ID NO: 1765957 - DNA, 25 bp, Homo sapien
ttctcaaacctctcagtttcattta

SEQ ID NO: 1765958 - DNA, 25 bp, Homo sapien
tcatttattagctgttaggagcctg

SEQ ID NO: 1765959 - DNA, 25 bp, Homo sapien
tgccactgccctccaatccgggcaa

SEQ ID NO: 1765960 - DNA, 25 bp, Homo sapien
ggattgattaaggccaggaggttga

SEQ ID NO: 1765961 - DNA, 25 bp, Homo sapien
aggattgattaaggccaggaggttg

SEQ ID NO: 1765962 - DNA, 25 bp, Homo sapien
ctgccctccaatccgggcaacagag

SEQ ID NO: 1765963 - DNA, 25 bp, Homo sapien
cttgcaagacagactaaaaggtgac

SEQ ID NO: 1765964 - DNA, 25 bp, Homo sapien
tgaagactagcacggaaaatgccac

SEQ ID NO: 1765965 - DNA, 25 bp, Homo sapien
aatagctccttacaagatagcaggc

SEQ ID NO: 1765966 - DNA, 25 bp, Homo sapien
tctttcctaggttcatttggcggct

SEQ ID NO: 1765967 - DNA, 25 bp, Homo sapien
gttggagatgcacagagggaaaatg

SEQ ID NO: 1765968 - DNA, 25 bp, Homo sapien
aatgctgtgcctttgttattggcag

SEQ ID NO: 1765969 - DNA, 25 bp, Homo sapien
acagagggaaaatgctgtgcctttg

SEQ ID NO: 1765970 - DNA, 25 bp, Homo sapien
gtgcctttgttattggcagagcagc

SEQ ID NO: 1765971 - DNA, 25 bp, Homo sapien
ccgaggacgtagaagaaacggcagc

SEQ ID NO: 1765972 - DNA, 25 bp, Homo sapien
gagtctccacgacctattgttcaga

SEQ ID NO: 1765973 - DNA, 25 bp, Homo sapien
cataggtcatattctcagtgctgca

SEQ ID NO: 1765974 - DNA, 25 bp, Homo sapien
gattttcctgggattcacacagcag

SEQ ID NO: 1765975 - DNA, 25 bp, Homo sapien
ggtagcatgctagttttgccacaag

SEQ ID NO: 1765976 - DNA, 25 bp, Homo sapien
tgggcttacccttgcaaatcagttc

SEQ ID NO: 1765977 - DNA, 25 bp, Homo sapien
tggagccaccaatgagctcagagtg

SEQ ID NO: 1765978 - DNA, 25 bp, Homo sapien
cagttcttcattgacggtaggtagc

SEQ ID NO: 1765979 - DNA, 25 bp, Homo sapien
acttcgagctcatgctgagagaaaa

SEQ ID NO: 1765980 - DNA, 25 bp, Homo sapien
gagagaatacttcgagctcatgctg

SEQ ID NO: 1765981 - DNA, 25 bp, Homo sapien
aaaggagcacagagagaatacttcg

SEQ ID NO: 1765982 - DNA, 25 bp, Homo sapien
cacagagagaatacttcgagctcat

SEQ ID NO: 1765983 - DNA, 25 bp, Homo sapien
tcccaggcagcaaacgtaggcatgg

SEQ ID NO: 1765984 - DNA, 25 bp, Homo sapien
catcctcagggctaagttgcagacc

SEQ ID NO: 1765985 - DNA, 25 bp, Homo sapien
gctaactttagatcggcagcgagca

SEQ ID NO: 1765986 - DNA, 25 bp, Homo sapien
cagcgagcataacatgtggtgagca

SEQ ID NO: 1765987 - DNA, 25 bp, Homo sapien
tgtcacccctcagcatcaatttgag

SEQ ID NO: 1765988 - DNA, 25 bp, Homo sapien
ggagcaacatttaggcctactgagc

SEQ ID NO: 1765989 - DNA, 25 bp, Homo sapien
cctgatgttccacttgagagcttca

SEQ ID NO: 1765990 - DNA, 25 bp, Homo sapien
tgatgagccctctcacatgagtctg

SEQ ID NO: 1765991 - DNA, 25 bp, Homo sapien
aattccacaatttcatacatcctta

SEQ ID NO: 1765992 - DNA, 25 bp, Homo sapien
tttcatacatccttaaaagtgtaga

SEQ ID NO: 1765993 - DNA, 25 bp, Homo sapien
ttcagatcctgagggaatgaattcc

SEQ ID NO: 1765994 - DNA, 25 bp, Homo sapien
agatcttcagatcctgagggaatga

SEQ ID NO: 1765995 - DNA, 25 bp, Homo sapien
gaaatggttcgcaaaggcaaaagta

SEQ ID NO: 1765996 - DNA, 25 bp, Homo sapien
gggagtattttcagtatacagtgaa

SEQ ID NO: 1765997 - DNA, 25 bp, Homo sapien
ttttgaatgtaggaaatggttcgca

SEQ ID NO: 1765998 - DNA, 25 bp, Homo sapien
gcaaaagtacataaagcccacaaaa

SEQ ID NO: 1765999 - DNA, 25 bp, Homo sapien
aaacacatggttggttcccgtggca

SEQ ID NO: 1766000 - DNA, 25 bp, Homo sapien
gaccataatacttgtaagggcccac

SEQ ID NO: 1766001 - DNA, 25 bp, Homo sapien
agtgtccccagacctttagccaagg

SEQ ID NO: 1766002 - DNA, 25 bp, Homo sapien
taagacatacccacggcctagtaag

SEQ ID NO: 1766003 - DNA, 25 bp, Homo sapien
agatccccagcaggttaagagctca

SEQ ID NO: 1766004 - DNA, 25 bp, Homo sapien
taatcggcattaagtgcagatcccc

SEQ ID NO: 1766005 - DNA, 25 bp, Homo sapien
cactccttgccaccaactgtgtggg

SEQ ID NO: 1766006 - DNA, 25 bp, Homo sapien
cacaagcagtaggttccaaagttac

SEQ ID NO: 1766007 - DNA, 25 bp, Homo sapien
atacacacacagacgtctgaccctg

SEQ ID NO: 1766008 - DNA, 25 bp, Homo sapien
tctgaaaactctaccccctcacatc

SEQ ID NO: 1766009 - DNA, 25 bp, Homo sapien
tattctgaaaactctaccccctcac

SEQ ID NO: 1766010 - DNA, 25 bp, Homo sapien
acagacgtctgaccctgcacctcca

SEQ ID NO: 1766011 - DNA, 25 bp, Homo sapien
taagctgcagcaacaagtacccagg

SEQ ID NO: 1766012 - DNA, 25 bp, Homo sapien
caatgtcccagttcggcagtgtaac

SEQ ID NO: 1766013 - DNA, 25 bp, Homo sapien
gaagacacttaagggcagacaaact

SEQ ID NO: 1766014 - DNA, 25 bp, Homo sapien
ctgcaaaagaggcatcggcatcggc

SEQ ID NO: 1766015 - DNA, 25 bp, Homo sapien
ggaaagcatcacattcttttcaaga

SEQ ID NO: 1766016 - DNA, 25 bp, Homo sapien
caaggacccttccatatgcttcaag

SEQ ID NO: 1766017 - DNA, 25 bp, Homo sapien
tattcatgggataaattggacagaa

SEQ ID NO: 1766018 - DNA, 25 bp, Homo sapien
tctcttatgtaatagggtagtggtg

SEQ ID NO: 1766019 - DNA, 25 bp, Homo sapien
aggaactgcacaggaaaaacaaaag

SEQ ID NO: 1766020 - DNA, 25 bp, Homo sapien
gaaaaaaggaaggaactgcacagga

SEQ ID NO: 1766021 - DNA, 25 bp, Homo sapien
gaactgcacaggaaaaacaaaagaa

SEQ ID NO: 1766022 - DNA, 25 bp, Homo sapien
ctgaaaaaaggaaggaactgcacag

SEQ ID NO: 1766023 - DNA, 25 bp, Homo sapien
taagctgaatgtatcctaaagctga

SEQ ID NO: 1766024 - DNA, 25 bp, Homo sapien
gaatgtatcctaaagctgaattaag

SEQ ID NO: 1766025 - DNA, 25 bp, Homo sapien
tgatatgaataagctgaatgtatcc

SEQ ID NO: 1766026 - DNA, 25 bp, Homo sapien
gaataagctgaatgtatcctaaagc

SEQ ID NO: 1766027 - DNA, 25 bp, Homo sapien
catcaggttctcaggaaatgggtcc

SEQ ID NO: 1766028 - DNA, 25 bp, Homo sapien
taacacgactacatctgccagaagg

SEQ ID NO: 1766029 - DNA, 25 bp, Homo sapien
gattctccagcttacaggtggcacg

SEQ ID NO: 1766030 - DNA, 25 bp, Homo sapien
caaaatcttggacgggctgatgacc

SEQ ID NO: 1766031 - DNA, 25 bp, Homo sapien
cacaggttcacaacaaaccaggtag

SEQ ID NO: 1766032 - DNA, 25 bp, Homo sapien
gtgaaaggctcagttattcacctga

SEQ ID NO: 1766033 - DNA, 25 bp, Homo sapien
acaggagacccggtcagagagagca

SEQ ID NO: 1766034 - DNA, 25 bp, Homo sapien
caggtagaaacaggagacccggtca

SEQ ID NO: 1766035 - DNA, 25 bp, Homo sapien
tctccttggcagatctgggggccat

SEQ ID NO: 1766036 - DNA, 25 bp, Homo sapien
ggattgtgcagacgcctgagaagtc

SEQ ID NO: 1766037 - DNA, 25 bp, Homo sapien
ggccattagggattgtgcagacgcc

SEQ ID NO: 1766038 - DNA, 25 bp, Homo sapien
gcctgagaagtcttatccaattctt

SEQ ID NO: 1766039 - DNA, 25 bp, Homo sapien
tgtcagtctgaagtaaaagccggct

SEQ ID NO: 1766040 - DNA, 25 bp, Homo sapien
taagctcgtgtcttgactggaaggt

SEQ ID NO: 1766041 - DNA, 25 bp, Homo sapien
gctttgtacagtagcacctggcagg

SEQ ID NO: 1766042 - DNA, 25 bp, Homo sapien
gaattctcccgatggccataatgtg

SEQ ID NO: 1766043 - DNA, 25 bp, Homo sapien
gaagctgttacacaaatcagcttgt

SEQ ID NO: 1766044 - DNA, 25 bp, Homo sapien
tacacaaatcagcttgtggcccttt

SEQ ID NO: 1766045 - DNA, 25 bp, Homo sapien
cttgggaagctgttacacaaatcag

SEQ ID NO: 1766046 - DNA, 25 bp, Homo sapien
tgttacacaaatcagcttgtggccc

SEQ ID NO: 1766047 - DNA, 25 bp, Homo sapien
caatattgttgagagttgggcacat

SEQ ID NO: 1766048 - DNA, 25 bp, Homo sapien
cattcataatacgtgcctgtcagca

SEQ ID NO: 1766049 - DNA, 25 bp, Homo sapien
ttttccaacctgacaaggacagctg

SEQ ID NO: 1766050 - DNA, 25 bp, Homo sapien
caaagccagcaacgagaaggatcaa

SEQ ID NO: 1766051 - DNA, 25 bp, Homo sapien
agggtcaccgccagccaagttaaag

SEQ ID NO: 1766052 - DNA, 25 bp, Homo sapien
ggatctcttctcgtttgctggcact

SEQ ID NO: 1766053 - DNA, 25 bp, Homo sapien
ggtaatggtccacagatgcaaattc

SEQ ID NO: 1766054 - DNA, 25 bp, Homo sapien
cattatcaaacattgggtaatggtc

SEQ ID NO: 1766055 - DNA, 25 bp, Homo sapien
ctcttctcgtttgctggcactgaca

SEQ ID NO: 1766056 - DNA, 25 bp, Homo sapien
taggatcacgtcagaaggagctgat

SEQ ID NO: 1766057 - DNA, 25 bp, Homo sapien
ctcttactaggatcacgtcagaagg

SEQ ID NO: 1766058 - DNA, 25 bp, Homo sapien
tactaggatcacgtcagaaggagct

SEQ ID NO: 1766059 - DNA, 25 bp, Homo sapien
ggtatctgtgcagaagagctatttc

SEQ ID NO: 1766060 - DNA, 25 bp, Homo sapien
aggagactaaggcagcaatggttgc

SEQ ID NO: 1766061 - DNA, 25 bp, Homo sapien
gactaaggcagcaatggttgccaag

SEQ ID NO: 1766062 - DNA, 25 bp, Homo sapien
aatggttgccaaggtgatcaaaatc

SEQ ID NO: 1766063 - DNA, 25 bp, Homo sapien
aaggtgatcaaaatccaacccagca

SEQ ID NO: 1766064 - DNA, 25 bp, Homo sapien
aggtggctggtccagtagcaatgtt

SEQ ID NO: 1766065 - DNA, 25 bp, Homo sapien
gtagcaatgttgcagagaggtgagg

SEQ ID NO: 1766066 - DNA, 25 bp, Homo sapien
tccagtagcaatgttgcagagaggt

SEQ ID NO: 1766067 - DNA, 25 bp, Homo sapien
tggtccagtagcaatgttgcagaga

SEQ ID NO: 1766068 - DNA, 25 bp, Homo sapien
atgcgatgcatcatgaggagccgag

SEQ ID NO: 1766069 - DNA, 25 bp, Homo sapien
tatgcgatgcatcatgaggagccga

SEQ ID NO: 1766070 - DNA, 25 bp, Homo sapien
tttatgcgatgcatcatgaggagcc

SEQ ID NO: 1766071 - DNA, 25 bp, Homo sapien
ttatgcgatgcatcatgaggagccg

SEQ ID NO: 1766072 - DNA, 25 bp, Homo sapien
aaggaatgcggatgtgtttgacgtc

SEQ ID NO: 1766073 - DNA, 25 bp, Homo sapien
tgacgtcttcactcccgggaatgaa

SEQ ID NO: 1766074 - DNA, 25 bp, Homo sapien
gatgtgtttgacgtcttcactcccg

SEQ ID NO: 1766075 - DNA, 25 bp, Homo sapien
tgacaagaaggaatgcggatgtgtt

SEQ ID NO: 1766076 - DNA, 25 bp, Homo sapien
gtcatcacccatgcataaaagagtg

SEQ ID NO: 1766077 - DNA, 25 bp, Homo sapien
ccaccctatttccaaggaagctata

SEQ ID NO: 1766078 - DNA, 25 bp, Homo sapien
catgcataaaagagtgggtactgaa

SEQ ID NO: 1766079 - DNA, 25 bp, Homo sapien
gaagctatagtgaccttgcaagtca

SEQ ID NO: 1766080 - DNA, 25 bp, Homo sapien
gctctaggaggtagctacaatgtgc

SEQ ID NO: 1766081 - DNA, 25 bp, Homo sapien
tacaatgtgcagatgacaaaatggc

SEQ ID NO: 1766082 - DNA, 25 bp, Homo sapien
tctaggcattaccagaccattggca

SEQ ID NO: 1766083 - DNA, 25 bp, Homo sapien
taagcaacctgactcatgaaaggtg

SEQ ID NO: 1766084 - DNA, 25 bp, Homo sapien
gagggagtaccatgttcttaatgaa

SEQ ID NO: 1766085 - DNA, 25 bp, Homo sapien
ggtttatatatgtcaagctccaggg

SEQ ID NO: 1766086 - DNA, 25 bp, Homo sapien
gacagagtataaatgcggttctaca

SEQ ID NO: 1766087 - DNA, 25 bp, Homo sapien
gtttcatttaactagctgtggagca

SEQ ID NO: 1766088 - DNA, 25 bp, Homo sapien
ccatgccaatgagccccagacaatt

SEQ ID NO: 1766089 - DNA, 25 bp, Homo sapien
tgctgtgggaagagggtcgaagagt

SEQ ID NO: 1766090 - DNA, 25 bp, Homo sapien
agctagaacaccccggcatgccatg

SEQ ID NO: 1766091 - DNA, 25 bp, Homo sapien
gggagctggcacttccagctagaac

SEQ ID NO: 1766092 - DNA, 25 bp, Homo sapien
tgtgatctccaaaatcattgcagca

SEQ ID NO: 1766093 - DNA, 25 bp, Homo sapien
gcagtaccccgagaaatgttgagaa

SEQ ID NO: 1766094 - DNA, 25 bp, Homo sapien
aacttgagcaagtagcatgcatctg

SEQ ID NO: 1766095 - DNA, 25 bp, Homo sapien
taatttggtaatacgacttccaaga

SEQ ID NO: 1766096 - DNA, 25 bp, Homo sapien
cggaggtccggcttctcggttcaga

SEQ ID NO: 1766097 - DNA, 25 bp, Homo sapien
tctgattttgtgaaatgaacgcagc

SEQ ID NO: 1766098 - DNA, 25 bp, Homo sapien
cagatctttaggcttaacttctgat

SEQ ID NO: 1766099 - DNA, 25 bp, Homo sapien
gcagctggacgtatgatagatctca

SEQ ID NO: 1766100 - DNA, 25 bp, Homo sapien
ggcttgcaacctagtgtggactggt

SEQ ID NO: 1766101 - DNA, 25 bp, Homo sapien
ttctcgaactccgtattgcttggcg

SEQ ID NO: 1766102 - DNA, 25 bp, Homo sapien
cgtggcgtaggtgctgcgggcttgc

SEQ ID NO: 1766103 - DNA, 25 bp, Homo sapien
ctcgaactccgtattgcttggcgtc

SEQ ID NO: 1766104 - DNA, 25 bp, Homo sapien
caaagccagacccggcttgcttaac

SEQ ID NO: 1766105 - DNA, 25 bp, Homo sapien
ttgcttaactgcagctccgcgccgg

SEQ ID NO: 1766106 - DNA, 25 bp, Homo sapien
caggcgcagagtccccggctggaag

SEQ ID NO: 1766107 - DNA, 25 bp, Homo sapien
gcaggcgcagagtccccggctggaa

SEQ ID NO: 1766108 - DNA, 25 bp, Homo sapien
tgctcttgcccatagatcgcccaga

SEQ ID NO: 1766109 - DNA, 25 bp, Homo sapien
ctcttgcccatagatcgcccagaca

SEQ ID NO: 1766110 - DNA, 25 bp, Homo sapien
ttgctcttgcccatagatcgcccag

SEQ ID NO: 1766111 - DNA, 25 bp, Homo sapien
cttgctcttgcccatagatcgccca

SEQ ID NO: 1766112 - DNA, 25 bp, Homo sapien
gctgctcctcgccgtaatctgtcat

SEQ ID NO: 1766113 - DNA, 25 bp, Homo sapien
cgctgctcctcgccgtaatctgtca

SEQ ID NO: 1766114 - DNA, 25 bp, Homo sapien
ggtgagagagaacatgaacaggact

SEQ ID NO: 1766115 - DNA, 25 bp, Homo sapien
acagggatagctgagagacatctgc

SEQ ID NO: 1766116 - DNA, 25 bp, Homo sapien
acagatgtactgctggtgagagaga

SEQ ID NO: 1766117 - DNA, 25 bp, Homo sapien
aacaggactggagctatacagggat

SEQ ID NO: 1766118 - DNA, 25 bp, Homo sapien
gaatgtggtatcaggagagtccatt

SEQ ID NO: 1766119 - DNA, 25 bp, Homo sapien
ggagggttggatcaatgtgcaatca

SEQ ID NO: 1766120 - DNA, 25 bp, Homo sapien
gagaatgtggtatcaggagagtcca

SEQ ID NO: 1766121 - DNA, 25 bp, Homo sapien
atattttggaagactagttgttagg

SEQ ID NO: 1766122 - DNA, 25 bp, Homo sapien
ttagcaaattatcagtacccagtcc

SEQ ID NO: 1766123 - DNA, 25 bp, Homo sapien
gcaaattatcagtacccagtcctag

SEQ ID NO: 1766124 - DNA, 25 bp, Homo sapien
ccttattagcaaattatcagtaccc

SEQ ID NO: 1766125 - DNA, 25 bp, Homo sapien
tattgaaatgctttctaaggcagat

SEQ ID NO: 1766126 - DNA, 25 bp, Homo sapien
tccagcctcagacgtcacagtaatg

SEQ ID NO: 1766127 - DNA, 25 bp, Homo sapien
ttctccagcctcagacgtcacagta

SEQ ID NO: 1766128 - DNA, 25 bp, Homo sapien
tgaagctgggtggattttctgataa

SEQ ID NO: 1766129 - DNA, 25 bp, Homo sapien
gcctcagacgtcacagtaatggtga

SEQ ID NO: 1766130 - DNA, 25 bp, Homo sapien
ctaagacacaagataagagtttgat

SEQ ID NO: 1766131 - DNA, 25 bp, Homo sapien
taagacacaagataagagtttgatg

SEQ ID NO: 1766132 - DNA, 25 bp, Homo sapien
caagataagagtttgatgtgaatac

SEQ ID NO: 1766133 - DNA, 25 bp, Homo sapien
gacacaagataagagtttgatgtga

SEQ ID NO: 1766134 - DNA, 25 bp, Homo sapien
aaaatgtctgagacatcattatctt

SEQ ID NO: 1766135 - DNA, 25 bp, Homo sapien
ttttcttgcacagctgtcactagag

SEQ ID NO: 1766136 - DNA, 25 bp, Homo sapien
aaaaatcatcaccataccaagattt

SEQ ID NO: 1766137 - DNA, 25 bp, Homo sapien
cagctgtcactagagtaaaaatcat

SEQ ID NO: 1766138 - DNA, 25 bp, Homo sapien
gtcactagagtaaaaatcatcacca

SEQ ID NO: 1766139 - DNA, 25 bp, Homo sapien
ttcttcttctcttctagtttttatc

SEQ ID NO: 1766140 - DNA, 25 bp, Homo sapien
aaattctcaattgtaactggagtac

SEQ ID NO: 1766141 - DNA, 25 bp, Homo sapien
gaaattctcaattgtaactggagta

SEQ ID NO: 1766142 - DNA, 25 bp, Homo sapien
attatgatctgtttcaaatagttgt

SEQ ID NO: 1766143 - DNA, 25 bp, Homo sapien
tcatctacctccacgttgtttccag

SEQ ID NO: 1766144 - DNA, 25 bp, Homo sapien
caaagactcatctacctccacgttg

SEQ ID NO: 1766145 - DNA, 25 bp, Homo sapien
ttggaacaaagactcatctacctcc

SEQ ID NO: 1766146 - DNA, 25 bp, Homo sapien
gactcatctacctccacgttgtttc

SEQ ID NO: 1766147 - DNA, 25 bp, Homo sapien
gcagtcaagcctctctgcagatggg

SEQ ID NO: 1766148 - DNA, 25 bp, Homo sapien
aagctatcagaagaatattctcctg

SEQ ID NO: 1766149 - DNA, 25 bp, Homo sapien
taagttcaatgatgaaagctatcag

SEQ ID NO: 1766150 - DNA, 25 bp, Homo sapien
taaccctctgagcatagccacagat

SEQ ID NO: 1766151 - DNA, 25 bp, Homo sapien
tagacttcacgactacaggacagtg

SEQ ID NO: 1766152 - DNA, 25 bp, Homo sapien
ttgaaacttcaccaatggaggcctg

SEQ ID NO: 1766153 - DNA, 25 bp, Homo sapien
gaagtagccaaagtctccagcatag

SEQ ID NO: 1766154 - DNA, 25 bp, Homo sapien
caaaggactctatgtgcacggatgt

SEQ ID NO: 1766155 - DNA, 25 bp, Homo sapien
ggaatgggccttactgaaatcgcag

SEQ ID NO: 1766156 - DNA, 25 bp, Homo sapien
cgtggctacaaatggataaggtgct

SEQ ID NO: 1766157 - DNA, 25 bp, Homo sapien
cattgatggttcagtaccgtggaca

SEQ ID NO: 1766158 - DNA, 25 bp, Homo sapien
tagctgcatgacaggatgaagatcc

SEQ ID NO: 1766159 - DNA, 25 bp, Homo sapien
agtgtatcatgaggtagctttgcaa

SEQ ID NO: 1766160 - DNA, 25 bp, Homo sapien
gtataagagtgtatcatgaggtagc

SEQ ID NO: 1766161 - DNA, 25 bp, Homo sapien
gtatcatgaggtagctttgcaaccc

SEQ ID NO: 1766162 - DNA, 25 bp, Homo sapien
tttagtattggtataagagtgtatc

SEQ ID NO: 1766163 - DNA, 25 bp, Homo sapien
tgtgagattttggagcactaccacc

SEQ ID NO: 1766164 - DNA, 25 bp, Homo sapien
tctatggcacctgcagtctgtagtt

SEQ ID NO: 1766165 - DNA, 25 bp, Homo sapien
gaaccttctcttggcgtctggcttg

SEQ ID NO: 1766166 - DNA, 25 bp, Homo sapien
tcacgggtgtggaacttctatggca

SEQ ID NO: 1766167 - DNA, 25 bp, Homo sapien
ccagaaattctgcttagttctttct

SEQ ID NO: 1766168 - DNA, 25 bp, Homo sapien
tctggtctgttgttaaggcttccaa

SEQ ID NO: 1766169 - DNA, 25 bp, Homo sapien
tctcttgaatctggttgagtttttt

SEQ ID NO: 1766170 - DNA, 25 bp, Homo sapien
cttaataaacgtatgtcatctttca

SEQ ID NO: 1766171 - DNA, 25 bp, Homo sapien
cgcgcctgttgccaggattcgaggg

SEQ ID NO: 1766172 - DNA, 25 bp, Homo sapien
cgcctgttgccaggattcgagggcg

SEQ ID NO: 1766173 - DNA, 25 bp, Homo sapien
cctgttgccaggattcgagggcgga

SEQ ID NO: 1766174 - DNA, 25 bp, Homo sapien
tgttgccaggattcgagggcggaga

SEQ ID NO: 1766175 - DNA, 25 bp, Homo sapien
tatggaagaaggcaactcagttaag

SEQ ID NO: 1766176 - DNA, 25 bp, Homo sapien
tcttaagcgatttctgggtcctggt

SEQ ID NO: 1766177 - DNA, 25 bp, Homo sapien
tcagttaagttactttgccgcggtc

SEQ ID NO: 1766178 - DNA, 25 bp, Homo sapien
tactttgccgcggtctcttaagcga

SEQ ID NO: 1766179 - DNA, 25 bp, Homo sapien
tccaaggacggctgcttcgggactg

SEQ ID NO: 1766180 - DNA, 25 bp, Homo sapien
agacgactcaggctcagaatattgg

SEQ ID NO: 1766181 - DNA, 25 bp, Homo sapien
ttggctctagactgcgggctccaag

SEQ ID NO: 1766182 - DNA, 25 bp, Homo sapien
tcgggactggcgtccagtttctggc

SEQ ID NO: 1766183 - DNA, 25 bp, Homo sapien
gattgttccaaaggatcaggataag

SEQ ID NO: 1766184 - DNA, 25 bp, Homo sapien
cagatgattgttccaaaggatcagg

SEQ ID NO: 1766185 - DNA, 25 bp, Homo sapien
ctcgtggtcctgtccgactgaggtg

SEQ ID NO: 1766186 - DNA, 25 bp, Homo sapien
cttcaggaatcacactcgtggtcct

SEQ ID NO: 1766187 - DNA, 25 bp, Homo sapien
ctgctgtaaatcatagtcactgttt

SEQ ID NO: 1766188 - DNA, 25 bp, Homo sapien
ttagcgttgttatagctcacgtccc

SEQ ID NO: 1766189 - DNA, 25 bp, Homo sapien
ctcagctctttctgtttagcgttgt

SEQ ID NO: 1766190 - DNA, 25 bp, Homo sapien
ttgctgagactgttgaaaggtgttt

SEQ ID NO: 1766191 - DNA, 25 bp, Homo sapien
aggtaagccttagcattctgaatgg

SEQ ID NO: 1766192 - DNA, 25 bp, Homo sapien
gaattgctgctagtcttcagcaggt

SEQ ID NO: 1766193 - DNA, 25 bp, Homo sapien
agattaaagcccgaattgctgctag

SEQ ID NO: 1766194 - DNA, 25 bp, Homo sapien
gaatggtgatctcaagcatgctggg

SEQ ID NO: 1766195 - DNA, 25 bp, Homo sapien
cattctcattttgtagtgcatcaaa

SEQ ID NO: 1766196 - DNA, 25 bp, Homo sapien
gacgctcatttaatatcttggtcaa

SEQ ID NO: 1766197 - DNA, 25 bp, Homo sapien
aatgtgccatcttcacatcttggct

SEQ ID NO: 1766198 - DNA, 25 bp, Homo sapien
ttctgctatttcatatgttggaagc

SEQ ID NO: 1766199 - DNA, 25 bp, Homo sapien
tatgagtactacaggtcttactgca

SEQ ID NO: 1766200 - DNA, 25 bp, Homo sapien
agttaggtctctcctcataggctgc

SEQ ID NO: 1766201 - DNA, 25 bp, Homo sapien
gaaactgtctaatgtcaactccttg

SEQ ID NO: 1766202 - DNA, 25 bp, Homo sapien
tggatatggctacataaccaactgc

SEQ ID NO: 1766203 - DNA, 25 bp, Homo sapien
tctttccccagaagcggcatctttg

SEQ ID NO: 1766204 - DNA, 25 bp, Homo sapien
aaatatgcggtatgtctcatctgtg

SEQ ID NO: 1766205 - DNA, 25 bp, Homo sapien
tacaatataattcatttccagaccc

SEQ ID NO: 1766206 - DNA, 25 bp, Homo sapien
attgggtgggtatcagtaagctgct

SEQ ID NO: 1766207 - DNA, 25 bp, Homo sapien
catcttccccctcacgaaattccac

SEQ ID NO: 1766208 - DNA, 25 bp, Homo sapien
ttcatcttccccctcacgaaattcc

SEQ ID NO: 1766209 - DNA, 25 bp, Homo sapien
tcatcttccccctcacgaaattcca

SEQ ID NO: 1766210 - DNA, 25 bp, Homo sapien
cttcatcttccccctcacgaaattc

SEQ ID NO: 1766211 - DNA, 25 bp, Homo sapien
taactggtggtaacttcacccatgg

SEQ ID NO: 1766212 - DNA, 25 bp, Homo sapien
taaaatcctagaggactgacgtggg

SEQ ID NO: 1766213 - DNA, 25 bp, Homo sapien
tatgatgggagcatccaatcgccca

SEQ ID NO: 1766214 - DNA, 25 bp, Homo sapien
gggttcctgctgaaattcgggcaat

SEQ ID NO: 1766215 - DNA, 25 bp, Homo sapien
gagagaatatgctgtacatgatgaa

SEQ ID NO: 1766216 - DNA, 25 bp, Homo sapien
cttggatgccttcaaaatcagggtt

SEQ ID NO: 1766217 - DNA, 25 bp, Homo sapien
tgatgaacccaattggatagggatt

SEQ ID NO: 1766218 - DNA, 25 bp, Homo sapien
gattctactagatcaatcacttgga

SEQ ID NO: 1766219 - DNA, 25 bp, Homo sapien
agattgagaagtgcaaagctcctac

SEQ ID NO: 1766220 - DNA, 25 bp, Homo sapien
ctgatagattgagaagtgcaaagct

SEQ ID NO: 1766221 - DNA, 25 bp, Homo sapien
tagattgagaagtgcaaagctccta

SEQ ID NO: 1766222 - DNA, 25 bp, Homo sapien
gatagattgagaagtgcaaagctcc

SEQ ID NO: 1766223 - DNA, 25 bp, Homo sapien
tggagttgaaccaattacagcgacc

SEQ ID NO: 1766224 - DNA, 25 bp, Homo sapien
gtgtcaaaagaggaagccccacttc

SEQ ID NO: 1766225 - DNA, 25 bp, Homo sapien
aatcttcagagattggtgtcaaaag

SEQ ID NO: 1766226 - DNA, 25 bp, Homo sapien
ccacttcctgttctatgtagtcaga

SEQ ID NO: 1766227 - DNA, 25 bp, Homo sapien
tctgtcagagaacattgatgtggcc

SEQ ID NO: 1766228 - DNA, 25 bp, Homo sapien
cctgtccagtttttagagctttccg

SEQ ID NO: 1766229 - DNA, 25 bp, Homo sapien
gaaagcgctacagccaacttatgtt

SEQ ID NO: 1766230 - DNA, 25 bp, Homo sapien
gatgtggccagctacattcttcact

SEQ ID NO: 1766231 - DNA, 25 bp, Homo sapien
tagcatattgtggaatgagatttga

SEQ ID NO: 1766232 - DNA, 25 bp, Homo sapien
gaatgagatttgaggataaccgtgt

SEQ ID NO: 1766233 - DNA, 25 bp, Homo sapien
gatttgaggataaccgtgttgtcca

SEQ ID NO: 1766234 - DNA, 25 bp, Homo sapien
tgtggaatgagatttgaggataacc

SEQ ID NO: 1766235 - DNA, 25 bp, Homo sapien
cattggagaaggcatatgctccagg

SEQ ID NO: 1766236 - DNA, 25 bp, Homo sapien
agaaggcatatgctccaggccaaag

SEQ ID NO: 1766237 - DNA, 25 bp, Homo sapien
ttggagaaggcatatgctccaggcc

SEQ ID NO: 1766238 - DNA, 25 bp, Homo sapien
ggagaaggcatatgctccaggccaa

SEQ ID NO: 1766239 - DNA, 25 bp, Homo sapien
ctgggggtgtataattgtctggact

SEQ ID NO: 1766240 - DNA, 25 bp, Homo sapien
gggtgtataattgtctggactatac

SEQ ID NO: 1766241 - DNA, 25 bp, Homo sapien
tgggggtgtataattgtctggacta

SEQ ID NO: 1766242 - DNA, 25 bp, Homo sapien
tgtataattgtctggactatactta

SEQ ID NO: 1766243 - DNA, 25 bp, Homo sapien
tcttcattctcagctgcgagtagaa

SEQ ID NO: 1766244 - DNA, 25 bp, Homo sapien
cagctgcgagtagaactgcttcttg

SEQ ID NO: 1766245 - DNA, 25 bp, Homo sapien
ggtccactggggtattcttgataaa

SEQ ID NO: 1766246 - DNA, 25 bp, Homo sapien
tggggtattcttgataaactggtgg

SEQ ID NO: 1766247 - DNA, 25 bp, Homo sapien
ctggaccatgtgaaacctgagccct

SEQ ID NO: 1766248 - DNA, 25 bp, Homo sapien
tattccattatccataaccctcaga

SEQ ID NO: 1766249 - DNA, 25 bp, Homo sapien
ggaaaatcctgtgagtatctttcaa

SEQ ID NO: 1766250 - DNA, 25 bp, Homo sapien
tatcagtgtcacataaaaccaggct

SEQ ID NO: 1766251 - DNA, 25 bp, Homo sapien
catgctgagatcagttcttacaaag

SEQ ID NO: 1766252 - DNA, 25 bp, Homo sapien
caaaggtttaagaatacatgctgag

SEQ ID NO: 1766253 - DNA, 25 bp, Homo sapien
taagaatacattactctagtgacta

SEQ ID NO: 1766254 - DNA, 25 bp, Homo sapien
tcctgtgggttatatcttccagtgt

SEQ ID NO: 1766255 - DNA, 25 bp, Homo sapien
cctatcatacttcattgtttggtaa

SEQ ID NO: 1766256 - DNA, 25 bp, Homo sapien
tacagccgagaagattccttgaaga

SEQ ID NO: 1766257 - DNA, 25 bp, Homo sapien
ttctaaaatgcctgtgttaattgaa

SEQ ID NO: 1766258 - DNA, 25 bp, Homo sapien
tcagtgattgagaacaatactttgt

SEQ ID NO: 1766259 - DNA, 25 bp, Homo sapien
gcctgtggtttgaatttcatcctgt

SEQ ID NO: 1766260 - DNA, 25 bp, Homo sapien
cagctgatcacattggctcctgagg

SEQ ID NO: 1766261 - DNA, 25 bp, Homo sapien
ttgcctgtggtttgaatttcatcct

SEQ ID NO: 1766262 - DNA, 25 bp, Homo sapien
ttcttccagctgatcacattggctc

SEQ ID NO: 1766263 - DNA, 25 bp, Homo sapien
gcttactaatacttgatcctggatg

SEQ ID NO: 1766264 - DNA, 25 bp, Homo sapien
ggatgtccttctcgagaaatgcaga

SEQ ID NO: 1766265 - DNA, 25 bp, Homo sapien
tagaggctagcagtctcaagcaact

SEQ ID NO: 1766266 - DNA, 25 bp, Homo sapien
tcttttgataggtcacagtcgaact

SEQ ID NO: 1766267 - DNA, 25 bp, Homo sapien
tgaaaaatgcctgacaatcctttgc

SEQ ID NO: 1766268 - DNA, 25 bp, Homo sapien
cctgtaagtttctcaggaccagtaa

SEQ ID NO: 1766269 - DNA, 25 bp, Homo sapien
tgctgacacaacatttcctgtaagt

SEQ ID NO: 1766270 - DNA, 25 bp, Homo sapien
gcgtctggcctgttaacgaatttta

SEQ ID NO: 1766271 - DNA, 25 bp, Homo sapien
tgtgcctgcgacaagccctggattt

SEQ ID NO: 1766272 - DNA, 25 bp, Homo sapien
tgctgtaggtactctgcggcccgta

SEQ ID NO: 1766273 - DNA, 25 bp, Homo sapien
ttttagttgcgcttgcggtggccat

SEQ ID NO: 1766274 - DNA, 25 bp, Homo sapien
cctccgtgtgtgcaaagggacgacc

SEQ ID NO: 1766275 - DNA, 25 bp, Homo sapien
gcgggtaacagaagggccgccactc

SEQ ID NO: 1766276 - DNA, 25 bp, Homo sapien
tccgcccctggcgtgaagcgtagcg

SEQ ID NO: 1766277 - DNA, 25 bp, Homo sapien
tggcactctccgatgccctgatttc

SEQ ID NO: 1766278 - DNA, 25 bp, Homo sapien
gcggcgacgtgtgtggcgggtaaca

SEQ ID NO: 1766279 - DNA, 25 bp, Homo sapien
cacgagaaacacccggcaccgccag

SEQ ID NO: 1766280 - DNA, 25 bp, Homo sapien
acacgagaaacacccggcaccgcca

SEQ ID NO: 1766281 - DNA, 25 bp, Homo sapien
acgagaaacacccggcaccgccagg

SEQ ID NO: 1766282 - DNA, 25 bp, Homo sapien
cacgccttcgcgtccgcaagggaaa

SEQ ID NO: 1766283 - DNA, 25 bp, Homo sapien
tccgcaagggaaaggtccggctgcc

SEQ ID NO: 1766284 - DNA, 25 bp, Homo sapien
acgccttcgcgtccgcaagggaaag

SEQ ID NO: 1766285 - DNA, 25 bp, Homo sapien
caagggaaaggtccggctgccacgc

SEQ ID NO: 1766286 - DNA, 25 bp, Homo sapien
gccctcgggatggaacctgtctctt

SEQ ID NO: 1766287 - DNA, 25 bp, Homo sapien
ccaggcttgccttgtcgtcgggaat

SEQ ID NO: 1766288 - DNA, 25 bp, Homo sapien
cgtcgggaatgagcactagaggcac

SEQ ID NO: 1766289 - DNA, 25 bp, Homo sapien
tgagtggcaacgtttggcaattcca

SEQ ID NO: 1766290 - DNA, 25 bp, Homo sapien
cggagctgcccgactattagaagcg

SEQ ID NO: 1766291 - DNA, 25 bp, Homo sapien
gagctgcccgactattagaagcgtg

SEQ ID NO: 1766292 - DNA, 25 bp, Homo sapien
tgcccgactattagaagcgtggaac

SEQ ID NO: 1766293 - DNA, 25 bp, Homo sapien
gaacggagctgcccgactattagaa

SEQ ID NO: 1766294 - DNA, 25 bp, Homo sapien
gtcatattctttagacatatcactg

SEQ ID NO: 1766295 - DNA, 25 bp, Homo sapien
gcgcccgccgccaatgtcatattct

SEQ ID NO: 1766296 - DNA, 25 bp, Homo sapien
tagacatatcactgtcatttcacag

SEQ ID NO: 1766297 - DNA, 25 bp, Homo sapien
aatacttccatctcctatgtattat

SEQ ID NO: 1766298 - DNA, 25 bp, Homo sapien
gttttctaagctgtattccttcttc

SEQ ID NO: 1766299 - DNA, 25 bp, Homo sapien
ttcttctcttcgtctacgcatctct

SEQ ID NO: 1766300 - DNA, 25 bp, Homo sapien
tcattctatagttatctttccctgg

SEQ ID NO: 1766301 - DNA, 25 bp, Homo sapien
catctcttgaggatttagggcttta

SEQ ID NO: 1766302 - DNA, 25 bp, Homo sapien
tttgcaattatgatgcctggagtct

SEQ ID NO: 1766303 - DNA, 25 bp, Homo sapien
cacaacaggtttatcaataaaacag

SEQ ID NO: 1766304 - DNA, 25 bp, Homo sapien
tataattaacacaacaggtttatca

SEQ ID NO: 1766305 - DNA, 25 bp, Homo sapien
gatctaaatagatgcaagaggaaaa

SEQ ID NO: 1766306 - DNA, 25 bp, Homo sapien
tataggactttcaagcatagattca

SEQ ID NO: 1766307 - DNA, 25 bp, Homo sapien
tggaatgggtacagtggaactaata

SEQ ID NO: 1766308 - DNA, 25 bp, Homo sapien
taatatctggatcctgtataggact

SEQ ID NO: 1766309 - DNA, 25 bp, Homo sapien
tcatttctgggcaaatagacatttc

SEQ ID NO: 1766310 - DNA, 25 bp, Homo sapien
tattgctaaaattattgaggtataa

SEQ ID NO: 1766311 - DNA, 25 bp, Homo sapien
tataatttgaaacatattttggtaa

SEQ ID NO: 1766312 - DNA, 25 bp, Homo sapien
attgaggtataatttgaaacatatt

SEQ ID NO: 1766313 - DNA, 25 bp, Homo sapien
tgaaacatattttggtaaagtatac

SEQ ID NO: 1766314 - DNA, 25 bp, Homo sapien
gttgctgttagctgttgatcagcat

SEQ ID NO: 1766315 - DNA, 25 bp, Homo sapien
gctgttagctgttgatcagcattat

SEQ ID NO: 1766316 - DNA, 25 bp, Homo sapien
gatcagcattattagaaaaaatcat

SEQ ID NO: 1766317 - DNA, 25 bp, Homo sapien
atctgaaccatatctgtagtaacaa

SEQ ID NO: 1766318 - DNA, 25 bp, Homo sapien
tctgtataacttgatctattggtgg

SEQ ID NO: 1766319 - DNA, 25 bp, Homo sapien
tataacttgatctattggtggatta

SEQ ID NO: 1766320 - DNA, 25 bp, Homo sapien
aacttgatctattggtggattaggt

SEQ ID NO: 1766321 - DNA, 25 bp, Homo sapien
tgtataacttgatctattggtggat

SEQ ID NO: 1766322 - DNA, 25 bp, Homo sapien
tcaagactagtcctgcaacactacc

SEQ ID NO: 1766323 - DNA, 25 bp, Homo sapien
ctgtgtccccagagtactttgttta

SEQ ID NO: 1766324 - DNA, 25 bp, Homo sapien
cactaaggatatgatgttaccacag

SEQ ID NO: 1766325 - DNA, 25 bp, Homo sapien
gatgctttgctcaaactagctctca

SEQ ID NO: 1766326 - DNA, 25 bp, Homo sapien
cagaaaagttccagatgctatattt

SEQ ID NO: 1766327 - DNA, 25 bp, Homo sapien
agaaaagttccagatgctatatttg

SEQ ID NO: 1766328 - DNA, 25 bp, Homo sapien
gaaaagttccagatgctatatttgt

SEQ ID NO: 1766329 - DNA, 25 bp, Homo sapien
aaatcggaacagccccagtttcaat

SEQ ID NO: 1766330 - DNA, 25 bp, Homo sapien
tgataaaaatcggaacagccccagt

SEQ ID NO: 1766331 - DNA, 25 bp, Homo sapien
tttgataaaaatcggaacagcccca

SEQ ID NO: 1766332 - DNA, 25 bp, Homo sapien
atcggaacagccccagtttcaatca

SEQ ID NO: 1766333 - DNA, 25 bp, Homo sapien
cagcaatattaccaagtgcccaaac

SEQ ID NO: 1766334 - DNA, 25 bp, Homo sapien
gcaatattaccaagtgcccaaacag

SEQ ID NO: 1766335 - DNA, 25 bp, Homo sapien
caatattaccaagtgcccaaacagc

SEQ ID NO: 1766336 - DNA, 25 bp, Homo sapien
accagcaatattaccaagtgcccaa

SEQ ID NO: 1766337 - DNA, 25 bp, Homo sapien
tacgatgctgtctacaaatgactca

SEQ ID NO: 1766338 - DNA, 25 bp, Homo sapien
gccgagaagcgattttccatgcaaa

SEQ ID NO: 1766339 - DNA, 25 bp, Homo sapien
caaaacccataagtctacgatgctg

SEQ ID NO: 1766340 - DNA, 25 bp, Homo sapien
aaagtaagtccccatttatcagtag

SEQ ID NO: 1766341 - DNA, 25 bp, Homo sapien
cactcccggccagattaatttcttt

SEQ ID NO: 1766342 - DNA, 25 bp, Homo sapien
ccactcccggccagattaatttctt

SEQ ID NO: 1766343 - DNA, 25 bp, Homo sapien
gttgtgagtctgtttgaatttgtta

SEQ ID NO: 1766344 - DNA, 25 bp, Homo sapien
gagtctgtttgaatttgttaataac

SEQ ID NO: 1766345 - DNA, 25 bp, Homo sapien
ttgagagggcccacacggcatttct

SEQ ID NO: 1766346 - DNA, 25 bp, Homo sapien
atttgagagggcccacacggcattt

SEQ ID NO: 1766347 - DNA, 25 bp, Homo sapien
tgctaaacaacagtcgtgacaggac

SEQ ID NO: 1766348 - DNA, 25 bp, Homo sapien
taagaaagggcccaacacacgtctg

SEQ ID NO: 1766349 - DNA, 25 bp, Homo sapien
caaaagttccaccaatcttcgacag

SEQ ID NO: 1766350 - DNA, 25 bp, Homo sapien
cacacgtctgctaacacatctgggt

SEQ ID NO: 1766351 - DNA, 25 bp, Homo sapien
tcagccagactggtaccccatgatg

SEQ ID NO: 1766352 - DNA, 25 bp, Homo sapien
ccatgatgtgctggctccaagtcct

SEQ ID NO: 1766353 - DNA, 25 bp, Homo sapien
ggtaccccatgatgtgctggctcca

SEQ ID NO: 1766354 - DNA, 25 bp, Homo sapien
cattatcaagttggggccctgatcc

SEQ ID NO: 1766355 - DNA, 25 bp, Homo sapien
tcaccagtcacaatattaccaactg

SEQ ID NO: 1766356 - DNA, 25 bp, Homo sapien
ccaactgcccttaatgcaggtgata

SEQ ID NO: 1766357 - DNA, 25 bp, Homo sapien
ttaccaactgcccttaatgcaggtg

SEQ ID NO: 1766358 - DNA, 25 bp, Homo sapien
ggtgatacaactttataatcattgt

SEQ ID NO: 1766359 - DNA, 25 bp, Homo sapien
taaaacttgctgtcttctacacgtc

SEQ ID NO: 1766360 - DNA, 25 bp, Homo sapien
aaaaagatttggtgaccgaggtcag

SEQ ID NO: 1766361 - DNA, 25 bp, Homo sapien
tgctattgataaacctagtctcctg

SEQ ID NO: 1766362 - DNA, 25 bp, Homo sapien
cctgccactataaggaactgccctg

SEQ ID NO: 1766363 - DNA, 25 bp, Homo sapien
taagagacagggtaatgcagaacaa

SEQ ID NO: 1766364 - DNA, 25 bp, Homo sapien
cagcagtgatgttagaaacagtcca

SEQ ID NO: 1766365 - DNA, 25 bp, Homo sapien
gacagggtaatgcagaacaattcaa

SEQ ID NO: 1766366 - DNA, 25 bp, Homo sapien
cagtgatgttagaaacagtccagca

SEQ ID NO: 1766367 - DNA, 25 bp, Homo sapien
ctgaagaatctcaatcaaaacagga

SEQ ID NO: 1766368 - DNA, 25 bp, Homo sapien
tgaagaatctcaatcaaaacaggaa

SEQ ID NO: 1766369 - DNA, 25 bp, Homo sapien
gaagaatctcaatcaaaacaggaaa

SEQ ID NO: 1766370 - DNA, 25 bp, Homo sapien
tcctgatgttgcattagttatagcc

SEQ ID NO: 1766371 - DNA, 25 bp, Homo sapien
ggagtacctcctgatgttgcattag

SEQ ID NO: 1766372 - DNA, 25 bp, Homo sapien
atttgctctggagtacctcctgatg

SEQ ID NO: 1766373 - DNA, 25 bp, Homo sapien
gcattagttatagcccaagctgctt

SEQ ID NO: 1766374 - DNA, 25 bp, Homo sapien
aacaattaagaagtttatatcatac

SEQ ID NO: 1766375 - DNA, 25 bp, Homo sapien
aaacaattaagaagtttatatcata

SEQ ID NO: 1766376 - DNA, 25 bp, Homo sapien
aaaacaattaagaagtttatatcat

SEQ ID NO: 1766377 - DNA, 25 bp, Homo sapien
aatgcagcctaaagctaccaaatac

SEQ ID NO: 1766378 - DNA, 25 bp, Homo sapien
tttggagtccataacagtcaaaaga

SEQ ID NO: 1766379 - DNA, 25 bp, Homo sapien
ttctccaagacgtaaaatattttca

SEQ ID NO: 1766380 - DNA, 25 bp, Homo sapien
aaagccacttggactattttggagt

SEQ ID NO: 1766381 - DNA, 25 bp, Homo sapien
ctacaccaaagtaatgttcaatcag

SEQ ID NO: 1766382 - DNA, 25 bp, Homo sapien
aaagttgaaatccatccattggtgc

SEQ ID NO: 1766383 - DNA, 25 bp, Homo sapien
catccacctgaggtacaatgctggg

SEQ ID NO: 1766384 - DNA, 25 bp, Homo sapien
ttttcatccacctgaggtacaatgc

SEQ ID NO: 1766385 - DNA, 25 bp, Homo sapien
tgaagctaccctttttagccataaa

SEQ ID NO: 1766386 - DNA, 25 bp, Homo sapien
ctgaagctaccctttttagccataa

SEQ ID NO: 1766387 - DNA, 25 bp, Homo sapien
gagtagaataccctgtcacctgata

SEQ ID NO: 1766388 - DNA, 25 bp, Homo sapien
tattatagtgactacagggtcctca

SEQ ID NO: 1766389 - DNA, 25 bp, Homo sapien
tacattggcaacaaagaggagttac

SEQ ID NO: 1766390 - DNA, 25 bp, Homo sapien
taaaaaagggctggcagatgcactc

SEQ ID NO: 1766391 - DNA, 25 bp, Homo sapien
tgctataaactaaactgaataaagg

SEQ ID NO: 1766392 - DNA, 25 bp, Homo sapien
tgatttcacagtttcgcaagcagcc

SEQ ID NO: 1766393 - DNA, 25 bp, Homo sapien
aagatatactatccttttagagctc

SEQ ID NO: 1766394 - DNA, 25 bp, Homo sapien
tagagctctattatattggctccta

SEQ ID NO: 1766395 - DNA, 25 bp, Homo sapien
ctggaattgtgactgaaggacagtc

SEQ ID NO: 1766396 - DNA, 25 bp, Homo sapien
tcctcttggcataatatggctgctg

SEQ ID NO: 1766397 - DNA, 25 bp, Homo sapien
ggatggtaggcattctctggtgcat

SEQ ID NO: 1766398 - DNA, 25 bp, Homo sapien
gaagacttcaccatggaagctcatg

SEQ ID NO: 1766399 - DNA, 25 bp, Homo sapien
tgaaggtcagggagctcctagttcc

SEQ ID NO: 1766400 - DNA, 25 bp, Homo sapien
gaccgctatgtggtaagcaacatga

SEQ ID NO: 1766401 - DNA, 25 bp, Homo sapien
tcttttcgtaaactagcctaggtgc

SEQ ID NO: 1766402 - DNA, 25 bp, Homo sapien
aaacacttatttggagaccgctatg

SEQ ID NO: 1766403 - DNA, 25 bp, Homo sapien
gaggggctagtaccaggaagttgct

SEQ ID NO: 1766404 - DNA, 25 bp, Homo sapien
tttctctactttgtagagtggaggg

SEQ ID NO: 1766405 - DNA, 25 bp, Homo sapien
tactttctctactttgtagagtgga

SEQ ID NO: 1766406 - DNA, 25 bp, Homo sapien
tgtgaatgtgtttatcactaaatgc

SEQ ID NO: 1766407 - DNA, 25 bp, Homo sapien
ctaaagtttctggtcataggtagaa

SEQ ID NO: 1766408 - DNA, 25 bp, Homo sapien
aatgtaatttttgcaagcagatctc

SEQ ID NO: 1766409 - DNA, 25 bp, Homo sapien
agaatgtaatttttgcaagcagatc

SEQ ID NO: 1766410 - DNA, 25 bp, Homo sapien
tgtaatttttgcaagcagatctctc

SEQ ID NO: 1766411 - DNA, 25 bp, Homo sapien
cctcctggccgccggacacctccgc

SEQ ID NO: 1766412 - DNA, 25 bp, Homo sapien
gctcggccggttccccagcggagcc

SEQ ID NO: 1766413 - DNA, 25 bp, Homo sapien
tcctggccgccggacacctccgcgc

SEQ ID NO: 1766414 - DNA, 25 bp, Homo sapien
ccgctcggccggttccccagcggag

SEQ ID NO: 1766415 - DNA, 25 bp, Homo sapien
ctgcaggaaggtgtcttccagctcc

SEQ ID NO: 1766416 - DNA, 25 bp, Homo sapien
cttccagctccgggaccttggccat

SEQ ID NO: 1766417 - DNA, 25 bp, Homo sapien
tgcacacagcagtcttcctggatcc

SEQ ID NO: 1766418 - DNA, 25 bp, Homo sapien
cttcctggatccccggggacagttg

SEQ ID NO: 1766419 - DNA, 25 bp, Homo sapien
caggtacactgtttcttccggatag

SEQ ID NO: 1766420 - DNA, 25 bp, Homo sapien
ggtacactgtttcttccggatagac

SEQ ID NO: 1766421 - DNA, 25 bp, Homo sapien
ccgccaggtacactgtttcttccgg

SEQ ID NO: 1766422 - DNA, 25 bp, Homo sapien
ggcagctccgggtcttcgcctttct

SEQ ID NO: 1766423 - DNA, 25 bp, Homo sapien
gaaaagttaccattgtttaagtgca

SEQ ID NO: 1766424 - DNA, 25 bp, Homo sapien
aaaagttaccattgtttaagtgcat

SEQ ID NO: 1766425 - DNA, 25 bp, Homo sapien
tttggttttgctgtcgtggttgtcg

SEQ ID NO: 1766426 - DNA, 25 bp, Homo sapien
aatctgcgtgatggttttcttctga

SEQ ID NO: 1766427 - DNA, 25 bp, Homo sapien
gctgtcgtggttgtcggcgtcctct

SEQ ID NO: 1766428 - DNA, 25 bp, Homo sapien
gagacaggtattgatccgctgcttt

SEQ ID NO: 1766429 - DNA, 25 bp, Homo sapien
aatgcaccgtggtaagcaaactcct

SEQ ID NO: 1766430 - DNA, 25 bp, Homo sapien
acaggctggctctaatttctctttc

SEQ ID NO: 1766431 - DNA, 25 bp, Homo sapien
agaatgcaccgtggtaagcaaactc

SEQ ID NO: 1766432 - DNA, 25 bp, Homo sapien
gcaccgtggtaagcaaactccttca

SEQ ID NO: 1766433 - DNA, 25 bp, Homo sapien
tccaagccgccttgttgttaggagg

SEQ ID NO: 1766434 - DNA, 25 bp, Homo sapien
ttgttccaagccgccttgttgttag

SEQ ID NO: 1766435 - DNA, 25 bp, Homo sapien
gttccaagccgccttgttgttagga

SEQ ID NO: 1766436 - DNA, 25 bp, Homo sapien
ccaagccgccttgttgttaggaggg

SEQ ID NO: 1766437 - DNA, 25 bp, Homo sapien
gttctctttgtactgacaaagacaa

SEQ ID NO: 1766438 - DNA, 25 bp, Homo sapien
tgtcaatcttcatgcacaagagcag

SEQ ID NO: 1766439 - DNA, 25 bp, Homo sapien
gaacctgaatatgttcactggtatc

SEQ ID NO: 1766440 - DNA, 25 bp, Homo sapien
agcagaacctgaatatgttcactgg

SEQ ID NO: 1766441 - DNA, 25 bp, Homo sapien
agatgaccaaacaggtcatctgtgc

SEQ ID NO: 1766442 - DNA, 25 bp, Homo sapien
gagatgaccaaacaggtcatctgtg

SEQ ID NO: 1766443 - DNA, 25 bp, Homo sapien
actacattttgctatatttttacca

SEQ ID NO: 1766444 - DNA, 25 bp, Homo sapien
gctgttgggcacatctatggctctt

SEQ ID NO: 1766445 - DNA, 25 bp, Homo sapien
ttcaaataaattgcccgaagtcacc

SEQ ID NO: 1766446 - DNA, 25 bp, Homo sapien
aattcaaattgttaatgccttgctg

SEQ ID NO: 1766447 - DNA, 25 bp, Homo sapien
gagtggtaatatgcactgctctctt

SEQ ID NO: 1766448 - DNA, 25 bp, Homo sapien
gatgccaatcccatagtaatgatac

SEQ ID NO: 1766449 - DNA, 25 bp, Homo sapien
tttgatgccaatcccatagtaatga

SEQ ID NO: 1766450 - DNA, 25 bp, Homo sapien
agccctttccagaataaacggagtg

SEQ ID NO: 1766451 - DNA, 25 bp, Homo sapien
attctttagcttgcttccagaaaac

SEQ ID NO: 1766452 - DNA, 25 bp, Homo sapien
tcattctttagcttgcttccagaaa

SEQ ID NO: 1766453 - DNA, 25 bp, Homo sapien
ctcattctttagcttgcttccagaa

SEQ ID NO: 1766454 - DNA, 25 bp, Homo sapien
cattctttagcttgcttccagaaaa

SEQ ID NO: 1766455 - DNA, 25 bp, Homo sapien
tcaattgataacttcggtactcttg

SEQ ID NO: 1766456 - DNA, 25 bp, Homo sapien
cggtactcttgggtgaactattaag

SEQ ID NO: 1766457 - DNA, 25 bp, Homo sapien
gataacttcggtactcttgggtgaa

SEQ ID NO: 1766458 - DNA, 25 bp, Homo sapien
cttgggtgaactattaagaatcgta

SEQ ID NO: 1766459 - DNA, 25 bp, Homo sapien
ccagtttttgagctaagcgaatatt

SEQ ID NO: 1766460 - DNA, 25 bp, Homo sapien
gaaatgcatccttggtatacaaggt

SEQ ID NO: 1766461 - DNA, 25 bp, Homo sapien
cttggtatacaaggtgttgagcgct

SEQ ID NO: 1766462 - DNA, 25 bp, Homo sapien
agcgaatatttacgagtgaagccac

SEQ ID NO: 1766463 - DNA, 25 bp, Homo sapien
tccattaattgcattgtccaggata

SEQ ID NO: 1766464 - DNA, 25 bp, Homo sapien
aagtttccattaattgcattgtcca

SEQ ID NO: 1766465 - DNA, 25 bp, Homo sapien
attaattgcattgtccaggatacac

SEQ ID NO: 1766466 - DNA, 25 bp, Homo sapien
gtttccattaattgcattgtccagg

SEQ ID NO: 1766467 - DNA, 25 bp, Homo sapien
atgataacaggattttcgagcaggg

SEQ ID NO: 1766468 - DNA, 25 bp, Homo sapien
aatatcaatgataacaggattttcg

SEQ ID NO: 1766469 - DNA, 25 bp, Homo sapien
caatgataacaggattttcgagcag

SEQ ID NO: 1766470 - DNA, 25 bp, Homo sapien
tatcaatgataacaggattttcgag

SEQ ID NO: 1766471 - DNA, 25 bp, Homo sapien
caggaatgagtacatctgtaagaac

SEQ ID NO: 1766472 - DNA, 25 bp, Homo sapien
gttgcaggaatgagtacatctgtaa

SEQ ID NO: 1766473 - DNA, 25 bp, Homo sapien
tgttgcaggaatgagtacatctgta

SEQ ID NO: 1766474 - DNA, 25 bp, Homo sapien
tgcaggaatgagtacatctgtaaga

SEQ ID NO: 1766475 - DNA, 25 bp, Homo sapien
cagagaagatacaaatcttcgcaca

SEQ ID NO: 1766476 - DNA, 25 bp, Homo sapien
ttcttgtcagttagagcttctggca

SEQ ID NO: 1766477 - DNA, 25 bp, Homo sapien
aagatgtttgtcgtttcagagaaga

SEQ ID NO: 1766478 - DNA, 25 bp, Homo sapien
cgcacaataggtattttcttgtcag

SEQ ID NO: 1766479 - DNA, 25 bp, Homo sapien
ccatagaattaacgacatgctggtc

SEQ ID NO: 1766480 - DNA, 25 bp, Homo sapien
tgctgcctgaaatggtaagaagggc

SEQ ID NO: 1766481 - DNA, 25 bp, Homo sapien
catgctggtcaaagagagctggtct

SEQ ID NO: 1766482 - DNA, 25 bp, Homo sapien
taagaagggcttgagagccaatgct

SEQ ID NO: 1766483 - DNA, 25 bp, Homo sapien
tctctgttctaccacagtatccaac

SEQ ID NO: 1766484 - DNA, 25 bp, Homo sapien
tgttctaccacagtatccaaccatt

SEQ ID NO: 1766485 - DNA, 25 bp, Homo sapien
ccacagtatccaaccattcaataaa

SEQ ID NO: 1766486 - DNA, 25 bp, Homo sapien
cttcttaaggagatccttcagttct

SEQ ID NO: 1766487 - DNA, 25 bp, Homo sapien
taacagaaagtcttgagctctcttc

SEQ ID NO: 1766488 - DNA, 25 bp, Homo sapien
cattgttcaaggtgagattatgcat

SEQ ID NO: 1766489 - DNA, 25 bp, Homo sapien
tatgcattactcgagcaccaaaaaa

SEQ ID NO: 1766490 - DNA, 25 bp, Homo sapien
caaaactggatgcattgttcaaggt

SEQ ID NO: 1766491 - DNA, 25 bp, Homo sapien
agtacctatacaacccttcgaagag

SEQ ID NO: 1766492 - DNA, 25 bp, Homo sapien
ctcatagctccatattcagatacag

SEQ ID NO: 1766493 - DNA, 25 bp, Homo sapien
taatcctgcttatggtctgactcca

SEQ ID NO: 1766494 - DNA, 25 bp, Homo sapien
tcaatgagcagattggcccatagcc

SEQ ID NO: 1766495 - DNA, 25 bp, Homo sapien
tattcatcgagaagcattcgaatca

SEQ ID NO: 1766496 - DNA, 25 bp, Homo sapien
gaagcattcgaatcaaatgaaaaga

SEQ ID NO: 1766497 - DNA, 25 bp, Homo sapien
caggagaatgtattcatcgagaagc

SEQ ID NO: 1766498 - DNA, 25 bp, Homo sapien
tggccaggagaatgtattcatcgag

SEQ ID NO: 1766499 - DNA, 25 bp, Homo sapien
gagcggcatgttgtctgtgttccca

SEQ ID NO: 1766500 - DNA, 25 bp, Homo sapien
gctccctttattacggttggccaga

SEQ ID NO: 1766501 - DNA, 25 bp, Homo sapien
ttggccagaaagcatgaactcggag

SEQ ID NO: 1766502 - DNA, 25 bp, Homo sapien
cacagcgtcgctggaaaccatgctc

SEQ ID NO: 1766503 - DNA, 25 bp, Homo sapien
tattgtgtgaatcctgggcttgcag

SEQ ID NO: 1766504 - DNA, 25 bp, Homo sapien
tgatggagctgacagtactgggccc

SEQ ID NO: 1766505 - DNA, 25 bp, Homo sapien
gaccagcaatctgtgaaagctccat

SEQ ID NO: 1766506 - DNA, 25 bp, Homo sapien
tgttcagtccaagccatgcatcgac

SEQ ID NO: 1766507 - DNA, 25 bp, Homo sapien
ctaggactggagttcgacatgcaac

SEQ ID NO: 1766508 - DNA, 25 bp, Homo sapien
gatgacagaaacgtgctgattcacc

SEQ ID NO: 1766509 - DNA, 25 bp, Homo sapien
ttgatccgagcctgtgagactctgg

SEQ ID NO: 1766510 - DNA, 25 bp, Homo sapien
tgtctgtgtaaaacgagctggtctg

SEQ ID NO: 1766511 - DNA, 25 bp, Homo sapien
gttggaagttccatacatacattgg

SEQ ID NO: 1766512 - DNA, 25 bp, Homo sapien
gataggtggtaaagaggacaccatt

SEQ ID NO: 1766513 - DNA, 25 bp, Homo sapien
tttcttgagctggatactggttgga

SEQ ID NO: 1766514 - DNA, 25 bp, Homo sapien
gctgttcccatgaacacagtgttga

SEQ ID NO: 1766515 - DNA, 25 bp, Homo sapien
tggagttgtccatagtaccagtgac

SEQ ID NO: 1766516 - DNA, 25 bp, Homo sapien
taaactcttagtgtgcatgacaagc

SEQ ID NO: 1766517 - DNA, 25 bp, Homo sapien
aactatgattaataatgagctcaca

SEQ ID NO: 1766518 - DNA, 25 bp, Homo sapien
gacaagctctgcaagtatctccatt

SEQ ID NO: 1766519 - DNA, 25 bp, Homo sapien
tatcatctccattcagttacataga

SEQ ID NO: 1766520 - DNA, 25 bp, Homo sapien
gtaaacaatgattctgagatcctaa

SEQ ID NO: 1766521 - DNA, 25 bp, Homo sapien
tcggaatgctgctatgtgacagaaa

SEQ ID NO: 1766522 - DNA, 25 bp, Homo sapien
tcatcacactaatgcacaggaattg

SEQ ID NO: 1766523 - DNA, 25 bp, Homo sapien
gattcttgtcctgaacaagcggttc

SEQ ID NO: 1766524 - DNA, 25 bp, Homo sapien
tcttgtcctgaacaagcggttctgc

SEQ ID NO: 1766525 - DNA, 25 bp, Homo sapien
ttgtcctgaacaagcggttctgctg

SEQ ID NO: 1766526 - DNA, 25 bp, Homo sapien
ggttctgctgctcgccaccactctt

SEQ ID NO: 1766527 - DNA, 25 bp, Homo sapien
cttcatggagacagcagattacaga

SEQ ID NO: 1766528 - DNA, 25 bp, Homo sapien
gagacagcagattacagacaatacc

SEQ ID NO: 1766529 - DNA, 25 bp, Homo sapien
ggagacagcagattacagacaatac

SEQ ID NO: 1766530 - DNA, 25 bp, Homo sapien
ttcatggagacagcagattacagac

SEQ ID NO: 1766531 - DNA, 25 bp, Homo sapien
tcagtctgactgtttgacaaagcca

SEQ ID NO: 1766532 - DNA, 25 bp, Homo sapien
gatgtgagagaaagcacgggaaccc

SEQ ID NO: 1766533 - DNA, 25 bp, Homo sapien
tttgacaaagccagttgcagatgct

SEQ ID NO: 1766534 - DNA, 25 bp, Homo sapien
tgtgcctcagccaccgattgttctc

SEQ ID NO: 1766535 - DNA, 25 bp, Homo sapien
aggtgttttgtttcctctcgtacat

SEQ ID NO: 1766536 - DNA, 25 bp, Homo sapien
ctgctgtttttcaaaggtgttttgt

SEQ ID NO: 1766537 - DNA, 25 bp, Homo sapien
ctgctgctgtttttcaaaggtgttt

SEQ ID NO: 1766538 - DNA, 25 bp, Homo sapien
gctgctgtttttcaaaggtgttttg

SEQ ID NO: 1766539 - DNA, 25 bp, Homo sapien
tgatgtgcaattataagtcacagac

SEQ ID NO: 1766540 - DNA, 25 bp, Homo sapien
taatgatgtgcaattataagtcaca

SEQ ID NO: 1766541 - DNA, 25 bp, Homo sapien
cacgtgcatggatcttaaatctata

SEQ ID NO: 1766542 - DNA, 25 bp, Homo sapien
tgttcacatagccacgtgcatggat

SEQ ID NO: 1766543 - DNA, 25 bp, Homo sapien
tcagtgacagtgagtgagggtcagc

SEQ ID NO: 1766544 - DNA, 25 bp, Homo sapien
tgacagtgagtgagggtcagctctt

SEQ ID NO: 1766545 - DNA, 25 bp, Homo sapien
tgtaacatcagctgcctcctcaact

SEQ ID NO: 1766546 - DNA, 25 bp, Homo sapien
aacatcagctgcctcctcaactgat

SEQ ID NO: 1766547 - DNA, 25 bp, Homo sapien
ccttggaggcacaatagagagctta

SEQ ID NO: 1766548 - DNA, 25 bp, Homo sapien
gagagcttattctccgtacattctt

SEQ ID NO: 1766549 - DNA, 25 bp, Homo sapien
tccgtacattctttgtgaacgctgt

SEQ ID NO: 1766550 - DNA, 25 bp, Homo sapien
taatgatggaacatctattcccggg

SEQ ID NO: 1766551 - DNA, 25 bp, Homo sapien
gaattataaggttggttgatgttac

SEQ ID NO: 1766552 - DNA, 25 bp, Homo sapien
cacagcgtctgaccccgcagttgat

SEQ ID NO: 1766553 - DNA, 25 bp, Homo sapien
gaccccgcagttgatgaattataag

SEQ ID NO: 1766554 - DNA, 25 bp, Homo sapien
gatgttaccgtcgtgttaggtctca

SEQ ID NO: 1766555 - DNA, 25 bp, Homo sapien
caccaagggagactgtggctgagct

SEQ ID NO: 1766556 - DNA, 25 bp, Homo sapien
tgagctgttttcagagagcaaatcc

SEQ ID NO: 1766557 - DNA, 25 bp, Homo sapien
tgtatccctgagctgtgttctccat

SEQ ID NO: 1766558 - DNA, 25 bp, Homo sapien
agagagcaaatccttcctgtatccc

SEQ ID NO: 1766559 - DNA, 25 bp, Homo sapien
caaagagcagtttcgcatcaatagc

SEQ ID NO: 1766560 - DNA, 25 bp, Homo sapien
aatagctttcttggtctcacactga

SEQ ID NO: 1766561 - DNA, 25 bp, Homo sapien
aaatggccatcatcctgggttgcac

SEQ ID NO: 1766562 - DNA, 25 bp, Homo sapien
tgaagcacgatgtcaccaaagagca

SEQ ID NO: 1766563 - DNA, 25 bp, Homo sapien
tagcttgtttactgtgcattcttaa

SEQ ID NO: 1766564 - DNA, 25 bp, Homo sapien
gaaacctgtgaaagcgtctgcactt

SEQ ID NO: 1766565 - DNA, 25 bp, Homo sapien
gtccaacagaaacctgtgaaagcgt

SEQ ID NO: 1766566 - DNA, 25 bp, Homo sapien
gaaagcgtctgcactttagcttgtt

SEQ ID NO: 1766567 - DNA, 25 bp, Homo sapien
ttcattgcccaaacatgcttctcac

SEQ ID NO: 1766568 - DNA, 25 bp, Homo sapien
cattgcccaaacatgcttctcacac

SEQ ID NO: 1766569 - DNA, 25 bp, Homo sapien
tcattgcccaaacatgcttctcaca

SEQ ID NO: 1766570 - DNA, 25 bp, Homo sapien
attgcccaaacatgcttctcacacc

SEQ ID NO: 1766571 - DNA, 25 bp, Homo sapien
aagtgcgttgctagctctgacaaag

SEQ ID NO: 1766572 - DNA, 25 bp, Homo sapien
tccaagtgcgttgctagctctgaca

SEQ ID NO: 1766573 - DNA, 25 bp, Homo sapien
cagtccaagtgcgttgctagctctg

SEQ ID NO: 1766574 - DNA, 25 bp, Homo sapien
caagtgcgttgctagctctgacaaa

SEQ ID NO: 1766575 - DNA, 25 bp, Homo sapien
tcttgggtggtatggatgagatcta

SEQ ID NO: 1766576 - DNA, 25 bp, Homo sapien
ggtggtatggatgagatctaaaact

SEQ ID NO: 1766577 - DNA, 25 bp, Homo sapien
tttggccactctgaattcttgggtg

SEQ ID NO: 1766578 - DNA, 25 bp, Homo sapien
cactctgaattcttgggtggtatgg

SEQ ID NO: 1766579 - DNA, 25 bp, Homo sapien
gtcacccatcatcatacctacagca

SEQ ID NO: 1766580 - DNA, 25 bp, Homo sapien
gcatctgagcccttgatagtactag

SEQ ID NO: 1766581 - DNA, 25 bp, Homo sapien
catgggcttgcaatctgccgttaag

SEQ ID NO: 1766582 - DNA, 25 bp, Homo sapien
ccttgatagtactagccacatgggc

SEQ ID NO: 1766583 - DNA, 25 bp, Homo sapien
taggaatgtctgattggtcaagttt

SEQ ID NO: 1766584 - DNA, 25 bp, Homo sapien
ataggaatgtctgattggtcaagtt

SEQ ID NO: 1766585 - DNA, 25 bp, Homo sapien
aggaatgtctgattggtcaagtttt

SEQ ID NO: 1766586 - DNA, 25 bp, Homo sapien
catatggtctatgcatgtgctgtgc

SEQ ID NO: 1766587 - DNA, 25 bp, Homo sapien
gctctgatgccatggttagtcgatt

SEQ ID NO: 1766588 - DNA, 25 bp, Homo sapien
gctcatcagcagaaccatatggtct

SEQ ID NO: 1766589 - DNA, 25 bp, Homo sapien
ggttagtcgattcacggaaaatgtg

SEQ ID NO: 1766590 - DNA, 25 bp, Homo sapien
gctctactggagccatctgtgaaga

SEQ ID NO: 1766591 - DNA, 25 bp, Homo sapien
tcttatcacatctactcaaacttgc

SEQ ID NO: 1766592 - DNA, 25 bp, Homo sapien
tcaaacttgcattgttgtgatccaa

SEQ ID NO: 1766593 - DNA, 25 bp, Homo sapien
gccatctgtgaagatttggtcagag

SEQ ID NO: 1766594 - DNA, 25 bp, Homo sapien
ggtctttcagccaagttctaaccag

SEQ ID NO: 1766595 - DNA, 25 bp, Homo sapien
caggtggtctttcagccaagttcta

SEQ ID NO: 1766596 - DNA, 25 bp, Homo sapien
agaaatcggctgcatttagggtggt

SEQ ID NO: 1766597 - DNA, 25 bp, Homo sapien
ctgagatcagaagaaatcggctgca

SEQ ID NO: 1766598 - DNA, 25 bp, Homo sapien
agcagggagctttcctaggtgagtg

SEQ ID NO: 1766599 - DNA, 25 bp, Homo sapien
gggagctttcctaggtgagtgggca

SEQ ID NO: 1766600 - DNA, 25 bp, Homo sapien
ggagctttcctaggtgagtgggcat

SEQ ID NO: 1766601 - DNA, 25 bp, Homo sapien
cagggagctttcctaggtgagtggg

SEQ ID NO: 1766602 - DNA, 25 bp, Homo sapien
gttacctttaggcctgagagctcca

SEQ ID NO: 1766603 - DNA, 25 bp, Homo sapien
aaagttacctttaggcctgagagct

SEQ ID NO: 1766604 - DNA, 25 bp, Homo sapien
tgcttcctgcaaaaagttaccttta

SEQ ID NO: 1766605 - DNA, 25 bp, Homo sapien
aagttacctttaggcctgagagctc

SEQ ID NO: 1766606 - DNA, 25 bp, Homo sapien
actcatgaagtcataaaacctgaga

SEQ ID NO: 1766607 - DNA, 25 bp, Homo sapien
atttgctttgaactcatgaagtcat

SEQ ID NO: 1766608 - DNA, 25 bp, Homo sapien
ataatttgctttgaactcatgaagt

SEQ ID NO: 1766609 - DNA, 25 bp, Homo sapien
taatttgctttgaactcatgaagtc

SEQ ID NO: 1766610 - DNA, 25 bp, Homo sapien
cagttggcttgagtaaccccattgt

SEQ ID NO: 1766611 - DNA, 25 bp, Homo sapien
tcaccagttggcttgagtaacccca

SEQ ID NO: 1766612 - DNA, 25 bp, Homo sapien
acataatcaccagttggcttgagta

SEQ ID NO: 1766613 - DNA, 25 bp, Homo sapien
cagcagctgaagatacatacagcat

SEQ ID NO: 1766614 - DNA, 25 bp, Homo sapien
gtaagtgtcatgtggtactgagaag

SEQ ID NO: 1766615 - DNA, 25 bp, Homo sapien
gagtaagtgtcatgtggtactgaga

SEQ ID NO: 1766616 - DNA, 25 bp, Homo sapien
ttttagagtaagtgtcatgtggtac

SEQ ID NO: 1766617 - DNA, 25 bp, Homo sapien
tagagtaagtgtcatgtggtactga

SEQ ID NO: 1766618 - DNA, 25 bp, Homo sapien
tgtgccaagcatccagattaattga

SEQ ID NO: 1766619 - DNA, 25 bp, Homo sapien
cgggaaccacgcgtggcatctctca

SEQ ID NO: 1766620 - DNA, 25 bp, Homo sapien
cttctgttcatggttggagtgtgcc

SEQ ID NO: 1766621 - DNA, 25 bp, Homo sapien
gcatctctcataacaagctgcagca

SEQ ID NO: 1766622 - DNA, 25 bp, Homo sapien
tgcgggatatactctcgtggcgcgc

SEQ ID NO: 1766623 - DNA, 25 bp, Homo sapien
gatatactctcgtggcgcgccattt

SEQ ID NO: 1766624 - DNA, 25 bp, Homo sapien
gggatatactctcgtggcgcgccat

SEQ ID NO: 1766625 - DNA, 25 bp, Homo sapien
gcgggatatactctcgtggcgcgcc

SEQ ID NO: 1766626 - DNA, 25 bp, Homo sapien
aagacttgctaacgggatgtgttgc

SEQ ID NO: 1766627 - DNA, 25 bp, Homo sapien
caagccagatgaaagacttgctaac

SEQ ID NO: 1766628 - DNA, 25 bp, Homo sapien
gaaacttcccagcacgaacttctaa

SEQ ID NO: 1766629 - DNA, 25 bp, Homo sapien
gagggacatgacagatttgactgta

SEQ ID NO: 1766630 - DNA, 25 bp, Homo sapien
tattcactgtagctcagattgctgg

SEQ ID NO: 1766631 - DNA, 25 bp, Homo sapien
gggataggaagatttagcactgcat

SEQ ID NO: 1766632 - DNA, 25 bp, Homo sapien
tccaatgtgtgttggcccgttgcct

SEQ ID NO: 1766633 - DNA, 25 bp, Homo sapien
gaaattccaacctagctccaatgtg

SEQ ID NO: 1766634 - DNA, 25 bp, Homo sapien
gaggatgtaatgtgtctcggtgacc

SEQ ID NO: 1766635 - DNA, 25 bp, Homo sapien
taatgtgtctcggtgaccaattggc

SEQ ID NO: 1766636 - DNA, 25 bp, Homo sapien
tctcggtgaccaattggcagactgt

SEQ ID NO: 1766637 - DNA, 25 bp, Homo sapien
ccaattggcagactgtatcctgttc

SEQ ID NO: 1766638 - DNA, 25 bp, Homo sapien
agtgaagggattgggaaagtggctg

SEQ ID NO: 1766639 - DNA, 25 bp, Homo sapien
ctagtgaagggattgggaaagtggc

SEQ ID NO: 1766640 - DNA, 25 bp, Homo sapien
aagggattgggaaagtggctgcaca

SEQ ID NO: 1766641 - DNA, 25 bp, Homo sapien
tgaagggattgggaaagtggctgca

SEQ ID NO: 1766642 - DNA, 25 bp, Homo sapien
tgcattgtgcaaggatgttgaaacc

SEQ ID NO: 1766643 - DNA, 25 bp, Homo sapien
ctcagggccaatgcttctcactggg

SEQ ID NO: 1766644 - DNA, 25 bp, Homo sapien
tgggaattcagcattaatctcaaga

SEQ ID NO: 1766645 - DNA, 25 bp, Homo sapien
tctctgaggacatccctatcactct

SEQ ID NO: 1766646 - DNA, 25 bp, Homo sapien
aggcccgcaggagtacaggtgtcaa

SEQ ID NO: 1766647 - DNA, 25 bp, Homo sapien
ggtgtcaacgcaaccatcgcaccag

SEQ ID NO: 1766648 - DNA, 25 bp, Homo sapien
cgcagtccctccttggacacggagg

SEQ ID NO: 1766649 - DNA, 25 bp, Homo sapien
ctttcgcgcaagtcccgcagtccct

SEQ ID NO: 1766650 - DNA, 25 bp, Homo sapien
agaggaaaccctcatccaaagagcc

SEQ ID NO: 1766651 - DNA, 25 bp, Homo sapien
tacgctcttctgtgtgcgggagatg

SEQ ID NO: 1766652 - DNA, 25 bp, Homo sapien
gttcaggtcccagtctcgctggccg

SEQ ID NO: 1766653 - DNA, 25 bp, Homo sapien
aagagccacagtacgctcttctgtg

SEQ ID NO: 1766654 - DNA, 25 bp, Homo sapien
aatgtgccctccctaggcgtttctg

SEQ ID NO: 1766655 - DNA, 25 bp, Homo sapien
ccctccctaggcgtttctgaagata

SEQ ID NO: 1766656 - DNA, 25 bp, Homo sapien
gtgccctccctaggcgtttctgaag

SEQ ID NO: 1766657 - DNA, 25 bp, Homo sapien
ctaggcgtttctgaagataggtaca

SEQ ID NO: 1766658 - DNA, 25 bp, Homo sapien
tgagctgctttcgaggagtccagga

SEQ ID NO: 1766659 - DNA, 25 bp, Homo sapien
ccggcctcggatgtctggcttttca

SEQ ID NO: 1766660 - DNA, 25 bp, Homo sapien
aggaggctttacccggcctcggatg

SEQ ID NO: 1766661 - DNA, 25 bp, Homo sapien
ttagcttcgcatagatcgcgcccgc

SEQ ID NO: 1766662 - DNA, 25 bp, Homo sapien
gacaggatgtgggagtccgggtacc

SEQ ID NO: 1766663 - DNA, 25 bp, Homo sapien
gtgctgtcccttggaatcccctagg

SEQ ID NO: 1766664 - DNA, 25 bp, Homo sapien
cctccagggcgcagaagagctacct

SEQ ID NO: 1766665 - DNA, 25 bp, Homo sapien
aattctctgctttcggttcctgatg

SEQ ID NO: 1766666 - DNA, 25 bp, Homo sapien
tctccgcagcggagacggttaagtg

SEQ ID NO: 1766667 - DNA, 25 bp, Homo sapien
tctggagtcatcaggcggagcaaag

SEQ ID NO: 1766668 - DNA, 25 bp, Homo sapien
gctccgcggctcggaatccagctgg

SEQ ID NO: 1766669 - DNA, 25 bp, Homo sapien
tcctgcgattttactcccgaccgcg

SEQ ID NO: 1766670 - DNA, 25 bp, Homo sapien
gacttggtacataacatccagacag

SEQ ID NO: 1766671 - DNA, 25 bp, Homo sapien
gtaggcggctgcgaagtagggctgc

SEQ ID NO: 1766672 - DNA, 25 bp, Homo sapien
gaccatagacttggtacataacatc

SEQ ID NO: 1766673 - DNA, 25 bp, Homo sapien
tagggctgcggaggaccatagactt

SEQ ID NO: 1766674 - DNA, 25 bp, Homo sapien
ctgtcctcagtttctgctacctcag

SEQ ID NO: 1766675 - DNA, 25 bp, Homo sapien
ctactgtcctcagtttctgctacct

SEQ ID NO: 1766676 - DNA, 25 bp, Homo sapien
actgtcctcagtttctgctacctca

SEQ ID NO: 1766677 - DNA, 25 bp, Homo sapien
tactgtcctcagtttctgctacctc

SEQ ID NO: 1766678 - DNA, 25 bp, Homo sapien
gctttgctgctggtacagctaggag

SEQ ID NO: 1766679 - DNA, 25 bp, Homo sapien
tctgcctctggtgggcgctctttct

SEQ ID NO: 1766680 - DNA, 25 bp, Homo sapien
gggctggcattgcactcctgcgctt

SEQ ID NO: 1766681 - DNA, 25 bp, Homo sapien
gaaatgttcatccaccacggagctg

SEQ ID NO: 1766682 - DNA, 25 bp, Homo sapien
tgagaggaccccctatgggtccttc

SEQ ID NO: 1766683 - DNA, 25 bp, Homo sapien
ggctgagaggaccccctatgggtcc

SEQ ID NO: 1766684 - DNA, 25 bp, Homo sapien
gctgagaggaccccctatgggtcct

SEQ ID NO: 1766685 - DNA, 25 bp, Homo sapien
ctgagaggaccccctatgggtcctt

SEQ ID NO: 1766686 - DNA, 25 bp, Homo sapien
cttctctgacacctaatattctttt

SEQ ID NO: 1766687 - DNA, 25 bp, Homo sapien
tgcacaccttctctgacacctaata

SEQ ID NO: 1766688 - DNA, 25 bp, Homo sapien
ccttctctgacacctaatattcttt

SEQ ID NO: 1766689 - DNA, 25 bp, Homo sapien
ctgcacaccttctctgacacctaat

SEQ ID NO: 1766690 - DNA, 25 bp, Homo sapien
ttagttgagttgtccaacaaataat

SEQ ID NO: 1766691 - DNA, 25 bp, Homo sapien
gttgagttgtccaacaaataattgt

SEQ ID NO: 1766692 - DNA, 25 bp, Homo sapien
ttgagttgtccaacaaataattgtc

SEQ ID NO: 1766693 - DNA, 25 bp, Homo sapien
agttgagttgtccaacaaataattg

SEQ ID NO: 1766694 - DNA, 25 bp, Homo sapien
gtgcaggtggccatgcagcgcggcg

SEQ ID NO: 1766695 - DNA, 25 bp, Homo sapien
aagtgcggcgcgtagacttcgtgca

SEQ ID NO: 1766696 - DNA, 25 bp, Homo sapien
gctggcatcagcagcggcccatagc

SEQ ID NO: 1766697 - DNA, 25 bp, Homo sapien
tggtacgcgctattccagaaggagg

SEQ ID NO: 1766698 - DNA, 25 bp, Homo sapien
gcggctccgcggagaccaaacttct

SEQ ID NO: 1766699 - DNA, 25 bp, Homo sapien
agggccatgtatcagtggaaacacg

SEQ ID NO: 1766700 - DNA, 25 bp, Homo sapien
caaggtctccaaggaggattaaggg

SEQ ID NO: 1766701 - DNA, 25 bp, Homo sapien
ttgggccacagaattcaaggtctcc

SEQ ID NO: 1766702 - DNA, 25 bp, Homo sapien
catttaccagccaggttagggtagg

SEQ ID NO: 1766703 - DNA, 25 bp, Homo sapien
acatttaccagccaggttagggtag

SEQ ID NO: 1766704 - DNA, 25 bp, Homo sapien
aaaagtcctctgtaacatttaccag

SEQ ID NO: 1766705 - DNA, 25 bp, Homo sapien
agtcctctgtaacatttaccagcca

SEQ ID NO: 1766706 - DNA, 25 bp, Homo sapien
ttaattcggcctcaccacgtgccaa

SEQ ID NO: 1766707 - DNA, 25 bp, Homo sapien
tcagtagccccaagtggctagcggc

SEQ ID NO: 1766708 - DNA, 25 bp, Homo sapien
ttataatcgatatgcaatgtgttga

SEQ ID NO: 1766709 - DNA, 25 bp, Homo sapien
tacagtattgaacagcgcagagcta

SEQ ID NO: 1766710 - DNA, 25 bp, Homo sapien
gcaccacagagggaataacgacgag

SEQ ID NO: 1766711 - DNA, 25 bp, Homo sapien
gatgcaccacagagggaataacgac

SEQ ID NO: 1766712 - DNA, 25 bp, Homo sapien
ggatgcaccacagagggaataacga

SEQ ID NO: 1766713 - DNA, 25 bp, Homo sapien
atgcaccacagagggaataacgacg

SEQ ID NO: 1766714 - DNA, 25 bp, Homo sapien
ctcatccacggagtgagaggcacag

SEQ ID NO: 1766715 - DNA, 25 bp, Homo sapien
atccacggagtgagaggcacagatg

SEQ ID NO: 1766716 - DNA, 25 bp, Homo sapien
tcatccacggagtgagaggcacaga

SEQ ID NO: 1766717 - DNA, 25 bp, Homo sapien
tcctcatccacggagtgagaggcac

SEQ ID NO: 1766718 - DNA, 25 bp, Homo sapien
gctctttcagcagcaggacttattt

SEQ ID NO: 1766719 - DNA, 25 bp, Homo sapien
agatatttccagtgattcggccaaa

SEQ ID NO: 1766720 - DNA, 25 bp, Homo sapien
aacataactcagtctttggatttgc

SEQ ID NO: 1766721 - DNA, 25 bp, Homo sapien
tcggccaaaagtcattaaacataac

SEQ ID NO: 1766722 - DNA, 25 bp, Homo sapien
gcattttagtaagacttgggcaggt

SEQ ID NO: 1766723 - DNA, 25 bp, Homo sapien
taaagtgaccaaatcacaaccagtg

SEQ ID NO: 1766724 - DNA, 25 bp, Homo sapien
tatctttgcgtctggagtgggcatt

SEQ ID NO: 1766725 - DNA, 25 bp, Homo sapien
ccacagtcttagatgcaagtacaca

SEQ ID NO: 1766726 - DNA, 25 bp, Homo sapien
tataccagggattcatgccagtgga

SEQ ID NO: 1766727 - DNA, 25 bp, Homo sapien
cctggagaagaatagagagctgtac

SEQ ID NO: 1766728 - DNA, 25 bp, Homo sapien
tattgtggagaaaataagcccaacg

SEQ ID NO: 1766729 - DNA, 25 bp, Homo sapien
tcacacagcgaataacagtgcagcc

SEQ ID NO: 1766730 - DNA, 25 bp, Homo sapien
gagatgtccagcagagaatgcactg

SEQ ID NO: 1766731 - DNA, 25 bp, Homo sapien
aaatgttccctgtgggttctgatca

SEQ ID NO: 1766732 - DNA, 25 bp, Homo sapien
caacctcttccggtggggaatatgt

SEQ ID NO: 1766733 - DNA, 25 bp, Homo sapien
cagatcttgtgagtgttaacgcagg

SEQ ID NO: 1766734 - DNA, 25 bp, Homo sapien
gcaacctgatattcaggtcagatgt

SEQ ID NO: 1766735 - DNA, 25 bp, Homo sapien
cagcaacctgatattcaggtcagat

SEQ ID NO: 1766736 - DNA, 25 bp, Homo sapien
aacctgatattcaggtcagatgtag

SEQ ID NO: 1766737 - DNA, 25 bp, Homo sapien
caacctgatattcaggtcagatgta

SEQ ID NO: 1766738 - DNA, 25 bp, Homo sapien
tgggtgaccgaattctcagccagag

SEQ ID NO: 1766739 - DNA, 25 bp, Homo sapien
gaaatgagacgggatggcaactctt

SEQ ID NO: 1766740 - DNA, 25 bp, Homo sapien
tcagccagagtgcaatcggcaaaag

SEQ ID NO: 1766741 - DNA, 25 bp, Homo sapien
aagatattgctagaatttgccatgc

SEQ ID NO: 1766742 - DNA, 25 bp, Homo sapien
caaatatttcaaccacggaaacagc

SEQ ID NO: 1766743 - DNA, 25 bp, Homo sapien
tcagattatgcgttaacttcacaaa

SEQ ID NO: 1766744 - DNA, 25 bp, Homo sapien
cagcagctatcaagtatctctttct

SEQ ID NO: 1766745 - DNA, 25 bp, Homo sapien
aatttattagcttctgctttcagat

SEQ ID NO: 1766746 - DNA, 25 bp, Homo sapien
agttttcaacttgaggagggctaca

SEQ ID NO: 1766747 - DNA, 25 bp, Homo sapien
gcagagctacttgcacacctttatt

SEQ ID NO: 1766748 - DNA, 25 bp, Homo sapien
tcaacttgaggagggctacacgtgg

SEQ ID NO: 1766749 - DNA, 25 bp, Homo sapien
caaccaagttttcaacttgaggagg

SEQ ID NO: 1766750 - DNA, 25 bp, Homo sapien
ttttcaacttcaggagggttacgca

SEQ ID NO: 1766751 - DNA, 25 bp, Homo sapien
tcaacttcaggagggttacgcatgg

SEQ ID NO: 1766752 - DNA, 25 bp, Homo sapien
agctacttgaacacccttgattaaa

SEQ ID NO: 1766753 - DNA, 25 bp, Homo sapien
tcaggagggttacgcatggaacact

SEQ ID NO: 1766754 - DNA, 25 bp, Homo sapien
gaccttgtagacctgtgtgtagata

SEQ ID NO: 1766755 - DNA, 25 bp, Homo sapien
tgtgtctacttggaacggatgcatt

SEQ ID NO: 1766756 - DNA, 25 bp, Homo sapien
caattctcttctggatacagggtta

SEQ ID NO: 1766757 - DNA, 25 bp, Homo sapien
tacttggaacggatgcatttcattc

SEQ ID NO: 1766758 - DNA, 25 bp, Homo sapien
tataaagattggttctcacatgcac

SEQ ID NO: 1766759 - DNA, 25 bp, Homo sapien
gcagcctttcctggtggttgccaaa

SEQ ID NO: 1766760 - DNA, 25 bp, Homo sapien
ttccagatcgttttgagtcacccag

SEQ ID NO: 1766761 - DNA, 25 bp, Homo sapien
cccaggatcctaatgcttataaaga

SEQ ID NO: 1766762 - DNA, 25 bp, Homo sapien
actaatcacagctggacctgctcgg

SEQ ID NO: 1766763 - DNA, 25 bp, Homo sapien
caagggctgcattcaagatacacta

SEQ ID NO: 1766764 - DNA, 25 bp, Homo sapien
taaaggcccatttacagcagttgct

SEQ ID NO: 1766765 - DNA, 25 bp, Homo sapien
ttaccaccgcattactaaaggccca

SEQ ID NO: 1766766 - DNA, 25 bp, Homo sapien
tcctttgtcaaatacatagtttgtg

SEQ ID NO: 1766767 - DNA, 25 bp, Homo sapien
atcagcagtgtaagagtgttccctc

SEQ ID NO: 1766768 - DNA, 25 bp, Homo sapien
acatctattatttgagatggtttgc

SEQ ID NO: 1766769 - DNA, 25 bp, Homo sapien
caacatctattatttgagatggttt

SEQ ID NO: 1766770 - DNA, 25 bp, Homo sapien
aaagtcacccatatgtaaagagaca

SEQ ID NO: 1766771 - DNA, 25 bp, Homo sapien
ctttaaagcatcgaagcagcccagg

SEQ ID NO: 1766772 - DNA, 25 bp, Homo sapien
taggataaatgtaccagtgtcagga

SEQ ID NO: 1766773 - DNA, 25 bp, Homo sapien
cccaggattagatctgtaatgtgct

SEQ ID NO: 1766774 - DNA, 25 bp, Homo sapien
cctgcccaagaccatttgatggtca

SEQ ID NO: 1766775 - DNA, 25 bp, Homo sapien
ctgcccaagaccatttgatggtcat

SEQ ID NO: 1766776 - DNA, 25 bp, Homo sapien
ttccaacagctcctgagccaagaat

SEQ ID NO: 1766777 - DNA, 25 bp, Homo sapien
gaatgactaatttatactcaagcat

SEQ ID NO: 1766778 - DNA, 25 bp, Homo sapien
ttattgtaggaccatgtttttcaac

SEQ ID NO: 1766779 - DNA, 25 bp, Homo sapien
tgtaggaccatgtttttcaacaaaa

SEQ ID NO: 1766780 - DNA, 25 bp, Homo sapien
gtcaagcatacagagttgtgcatct

SEQ ID NO: 1766781 - DNA, 25 bp, Homo sapien
agtatccaatatgtcaagcatacag

SEQ ID NO: 1766782 - DNA, 25 bp, Homo sapien
ttattaccaacaatcactgggacaa

SEQ ID NO: 1766783 - DNA, 25 bp, Homo sapien
tggtatatgctaatacaaagccttg

SEQ ID NO: 1766784 - DNA, 25 bp, Homo sapien
tttttctgttaattgccacactagg

SEQ ID NO: 1766785 - DNA, 25 bp, Homo sapien
gctggttatcacagtactggcacat

SEQ ID NO: 1766786 - DNA, 25 bp, Homo sapien
taaggtgctggttatcacagtactg

SEQ ID NO: 1766787 - DNA, 25 bp, Homo sapien
ctctaaggtgctggttatcacagta

SEQ ID NO: 1766788 - DNA, 25 bp, Homo sapien
ggtgctggttatcacagtactggca

SEQ ID NO: 1766789 - DNA, 25 bp, Homo sapien
catagattgttttatgctggcgatc

SEQ ID NO: 1766790 - DNA, 25 bp, Homo sapien
atagattgttttatgctggcgatca

SEQ ID NO: 1766791 - DNA, 25 bp, Homo sapien
tagattgttttatgctggcgatcat

SEQ ID NO: 1766792 - DNA, 25 bp, Homo sapien
ggctttcgctggacattttcaatta

SEQ ID NO: 1766793 - DNA, 25 bp, Homo sapien
gaatctgttgactcaggtttgtgtg

SEQ ID NO: 1766794 - DNA, 25 bp, Homo sapien
gattaaacaagcttgcttatcaggc

SEQ ID NO: 1766795 - DNA, 25 bp, Homo sapien
tatcggagcttcctatcagaatctg

SEQ ID NO: 1766796 - DNA, 25 bp, Homo sapien
accaccgcgcggcacgctgaagttt

SEQ ID NO: 1766797 - DNA, 25 bp, Homo sapien
gcaccaccgcgcggcacgctgaagt

SEQ ID NO: 1766798 - DNA, 25 bp, Homo sapien
cttcgcaccaccgcgcggcacgctg

SEQ ID NO: 1766799 - DNA, 25 bp, Homo sapien
caccgcgcggcacgctgaagtttca

SEQ ID NO: 1766800 - DNA, 25 bp, Homo sapien
gaatcccattggggcggctttcagc

SEQ ID NO: 1766801 - DNA, 25 bp, Homo sapien
aatcccattggggcggctttcagcc

SEQ ID NO: 1766802 - DNA, 25 bp, Homo sapien
cgaatcccattggggcggctttcag

SEQ ID NO: 1766803 - DNA, 25 bp, Homo sapien
ccgaatcccattggggcggctttca

SEQ ID NO: 1766804 - DNA, 25 bp, Homo sapien
cgctgggcgccagcttggcaagctc

SEQ ID NO: 1766805 - DNA, 25 bp, Homo sapien
tcggcctcccctcgacggatcccga

SEQ ID NO: 1766806 - DNA, 25 bp, Homo sapien
ctctgcggacgagcgcggcgccggg

SEQ ID NO: 1766807 - DNA, 25 bp, Homo sapien
gggacggggcgcagtcgctgccccg

SEQ ID NO: 1766808 - DNA, 25 bp, Homo sapien
cccggcagcccgcgccagtgcgccg

SEQ ID NO: 1766809 - DNA, 25 bp, Homo sapien
cggagaccgcgagcagcaaagccag

SEQ ID NO: 1766810 - DNA, 25 bp, Homo sapien
cggagcggggcggagaccgcgagca

SEQ ID NO: 1766811 - DNA, 25 bp, Homo sapien
agcggggcggagaccgcgagcagca

SEQ ID NO: 1766812 - DNA, 25 bp, Homo sapien
taaaggtgcaccttcaaactgtgag

SEQ ID NO: 1766813 - DNA, 25 bp, Homo sapien
gctttggccagattagtacaggaac

SEQ ID NO: 1766814 - DNA, 25 bp, Homo sapien
tttattgggaaagataagtgacagc

SEQ ID NO: 1766815 - DNA, 25 bp, Homo sapien
tctcacagacgtatagtattaaagg

SEQ ID NO: 1766816 - DNA, 25 bp, Homo sapien
tgttaataatgtcaggatgttgatg

SEQ ID NO: 1766817 - DNA, 25 bp, Homo sapien
gaaatctttcctgccgctggaacat

SEQ ID NO: 1766818 - DNA, 25 bp, Homo sapien
caagaaatctttcctgccgctggaa

SEQ ID NO: 1766819 - DNA, 25 bp, Homo sapien
gatgtaatatccaagctgccactgc

SEQ ID NO: 1766820 - DNA, 25 bp, Homo sapien
tatcctgataagtcactaggtgtcc

SEQ ID NO: 1766821 - DNA, 25 bp, Homo sapien
cctgataagtcactaggtgtccaca

SEQ ID NO: 1766822 - DNA, 25 bp, Homo sapien
gataagtcactaggtgtccacagcc

SEQ ID NO: 1766823 - DNA, 25 bp, Homo sapien
ccactatcctgataagtcactaggt

SEQ ID NO: 1766824 - DNA, 25 bp, Homo sapien
cacaggtctgggattcgatatccaa

SEQ ID NO: 1766825 - DNA, 25 bp, Homo sapien
taggtcccgggataattcttagatg

SEQ ID NO: 1766826 - DNA, 25 bp, Homo sapien
tcttttcgcaaacagtgtgattggg

SEQ ID NO: 1766827 - DNA, 25 bp, Homo sapien
gctggtgaagagaagatagtcagaa

SEQ ID NO: 1766828 - DNA, 25 bp, Homo sapien
tagtgatgcatctaagcttgaaagc

SEQ ID NO: 1766829 - DNA, 25 bp, Homo sapien
tgcaagctagcttgagatacgtagc

SEQ ID NO: 1766830 - DNA, 25 bp, Homo sapien
agaccatgatcaccttgcaagctag

SEQ ID NO: 1766831 - DNA, 25 bp, Homo sapien
gcccaggctgtatcgcttgaactcc

SEQ ID NO: 1766832 - DNA, 25 bp, Homo sapien
ataatgtaataatgggccagtccac

SEQ ID NO: 1766833 - DNA, 25 bp, Homo sapien
tagacgaaattgctgtataatgtaa

SEQ ID NO: 1766834 - DNA, 25 bp, Homo sapien
attgctgtataatgtaataatgggc

SEQ ID NO: 1766835 - DNA, 25 bp, Homo sapien
tgtgttttagacgaaattgctgtat

SEQ ID NO: 1766836 - DNA, 25 bp, Homo sapien
tgggcaacagctgcacaggaatgtc

SEQ ID NO: 1766837 - DNA, 25 bp, Homo sapien
tgagcgccagccactgaaagacaaa

SEQ ID NO: 1766838 - DNA, 25 bp, Homo sapien
tgaaagacaaagcacttctgtctcc

SEQ ID NO: 1766839 - DNA, 25 bp, Homo sapien
ggaatgtccactctctgagcgccag

SEQ ID NO: 1766840 - DNA, 25 bp, Homo sapien
tgcctctgcagccatgccagatcct

SEQ ID NO: 1766841 - DNA, 25 bp, Homo sapien
cagatcctgtggccacatcagcttg

SEQ ID NO: 1766842 - DNA, 25 bp, Homo sapien
gcctctgcagccatgccagatcctg

SEQ ID NO: 1766843 - DNA, 25 bp, Homo sapien
gccagatcctgtggccacatcagct

SEQ ID NO: 1766844 - DNA, 25 bp, Homo sapien
gctctggatccttgggacactgcaa

SEQ ID NO: 1766845 - DNA, 25 bp, Homo sapien
gttcaggcaatatagctctggatcc

SEQ ID NO: 1766846 - DNA, 25 bp, Homo sapien
ttttactggttcaggcaatatagct

SEQ ID NO: 1766847 - DNA, 25 bp, Homo sapien
atagctctggatccttgggacactg

SEQ ID NO: 1766848 - DNA, 25 bp, Homo sapien
caagtatgtccactcttggcagaca

SEQ ID NO: 1766849 - DNA, 25 bp, Homo sapien
gaacatgcattctctccctgctgaa

SEQ ID NO: 1766850 - DNA, 25 bp, Homo sapien
tatcgggcaggataaactaaaacga

SEQ ID NO: 1766851 - DNA, 25 bp, Homo sapien
gcatattttgctggattactgtgaa

SEQ ID NO: 1766852 - DNA, 25 bp, Homo sapien
gtttcatattacatgggcctctttg

SEQ ID NO: 1766853 - DNA, 25 bp, Homo sapien
ctttcaaagtttcatattacatggg

SEQ ID NO: 1766854 - DNA, 25 bp, Homo sapien
ttcatattacatgggcctctttgaa

SEQ ID NO: 1766855 - DNA, 25 bp, Homo sapien
caaagtttcatattacatgggcctc

SEQ ID NO: 1766856 - DNA, 25 bp, Homo sapien
ggataatctcttgtcttatgaaaga

SEQ ID NO: 1766857 - DNA, 25 bp, Homo sapien
agtgctccgccagactcctttaagg

SEQ ID NO: 1766858 - DNA, 25 bp, Homo sapien
ggtactctccaaaggtctcctgact

SEQ ID NO: 1766859 - DNA, 25 bp, Homo sapien
tctgtcctaagcaatgtcctcagtg

SEQ ID NO: 1766860 - DNA, 25 bp, Homo sapien
ggatggtcgctgctcgcataggtca

SEQ ID NO: 1766861 - DNA, 25 bp, Homo sapien
ccggccagaaatgtgggatccactc

SEQ ID NO: 1766862 - DNA, 25 bp, Homo sapien
gatccactctcaaagcggacggtta

SEQ ID NO: 1766863 - DNA, 25 bp, Homo sapien
gcataggtcagcaaaaaaccccggc

SEQ ID NO: 1766864 - DNA, 25 bp, Homo sapien
tctgagtccacaattatgtccaggg

SEQ ID NO: 1766865 - DNA, 25 bp, Homo sapien
agtggcaagaggaattcttagacag

SEQ ID NO: 1766866 - DNA, 25 bp, Homo sapien
ccctcatatcttaattctgcatctg

SEQ ID NO: 1766867 - DNA, 25 bp, Homo sapien
tcttagacagataacatttagagat

SEQ ID NO: 1766868 - DNA, 25 bp, Homo sapien
gacaggagcccgtgcttctctctct

SEQ ID NO: 1766869 - DNA, 25 bp, Homo sapien
cagcagaaacctctatgaccatagg

SEQ ID NO: 1766870 - DNA, 25 bp, Homo sapien
cagatttggtatgggctgcacagaa

SEQ ID NO: 1766871 - DNA, 25 bp, Homo sapien
tctctctctcatcagtgttcgtgtt

SEQ ID NO: 1766872 - DNA, 25 bp, Homo sapien
aaataatggctagctcgttccaaac

SEQ ID NO: 1766873 - DNA, 25 bp, Homo sapien
aatggctagctcgttccaaacatgt

SEQ ID NO: 1766874 - DNA, 25 bp, Homo sapien
ggctagctcgttccaaacatgttat

SEQ ID NO: 1766875 - DNA, 25 bp, Homo sapien
taatggctagctcgttccaaacatg

SEQ ID NO: 1766876 - DNA, 25 bp, Homo sapien
ctgctacgtctctacaaccagctgg

SEQ ID NO: 1766877 - DNA, 25 bp, Homo sapien
ctacgtctctacaaccagctgggca

SEQ ID NO: 1766878 - DNA, 25 bp, Homo sapien
tctctatatccatctaccatattcc

SEQ ID NO: 1766879 - DNA, 25 bp, Homo sapien
tatatccatctaccatattcccaga

SEQ ID NO: 1766880 - DNA, 25 bp, Homo sapien
aacacagcaacatcattatgcagaa

SEQ ID NO: 1766881 - DNA, 25 bp, Homo sapien
gaaacacagcaacatcattatgcag

SEQ ID NO: 1766882 - DNA, 25 bp, Homo sapien
tgaaacacagcaacatcattatgca

SEQ ID NO: 1766883 - DNA, 25 bp, Homo sapien
ctgaaacacagcaacatcattatgc

SEQ ID NO: 1766884 - DNA, 25 bp, Homo sapien
cctcgaaagaacaccattggccaga

SEQ ID NO: 1766885 - DNA, 25 bp, Homo sapien
gaatcccttcatatcgactgatccc

SEQ ID NO: 1766886 - DNA, 25 bp, Homo sapien
tggccacctagttcatcagcaatta

SEQ ID NO: 1766887 - DNA, 25 bp, Homo sapien
tgcgctgaagcacactgatctggcc

SEQ ID NO: 1766888 - DNA, 25 bp, Homo sapien
aaacaatcatgtgtgggaacataag

SEQ ID NO: 1766889 - DNA, 25 bp, Homo sapien
ggtttttcctgaatgccaaacaatc

SEQ ID NO: 1766890 - DNA, 25 bp, Homo sapien
ggaacataagttcaatgaccgcatg

SEQ ID NO: 1766891 - DNA, 25 bp, Homo sapien
aatgaccgcatgtacagtgtttccc

SEQ ID NO: 1766892 - DNA, 25 bp, Homo sapien
tgaatcccagaagacccctggatat

SEQ ID NO: 1766893 - DNA, 25 bp, Homo sapien
tcccagaagacccctggatatttac

SEQ ID NO: 1766894 - DNA, 25 bp, Homo sapien
aatcccagaagacccctggatattt

SEQ ID NO: 1766895 - DNA, 25 bp, Homo sapien
cggagatgaatcccagaagacccct

SEQ ID NO: 1766896 - DNA, 25 bp, Homo sapien
actgtagcaaccagcaccaagtctt

SEQ ID NO: 1766897 - DNA, 25 bp, Homo sapien
ctgtagcaaccagcaccaagtcttg

SEQ ID NO: 1766898 - DNA, 25 bp, Homo sapien
tactgtagcaaccagcaccaagtct

SEQ ID NO: 1766899 - DNA, 25 bp, Homo sapien
ctactgtagcaaccagcaccaagtc

SEQ ID NO: 1766900 - DNA, 25 bp, Homo sapien
ggtaaacagaaatcgcttgtctgac

SEQ ID NO: 1766901 - DNA, 25 bp, Homo sapien
gaaatcgcttgtctgacagggaacc

SEQ ID NO: 1766902 - DNA, 25 bp, Homo sapien
ggaggtaaacagaaatcgcttgtct

SEQ ID NO: 1766903 - DNA, 25 bp, Homo sapien
aaacagaaatcgcttgtctgacagg

SEQ ID NO: 1766904 - DNA, 25 bp, Homo sapien
ggaagaagctctgatttgcccgtca

SEQ ID NO: 1766905 - DNA, 25 bp, Homo sapien
ccttggtcctgaagtcgggcttggc

SEQ ID NO: 1766906 - DNA, 25 bp, Homo sapien
tgcccgtcaggttcaaaactcaagg

SEQ ID NO: 1766907 - DNA, 25 bp, Homo sapien
tggttgttgctactgtcgcccgaag

SEQ ID NO: 1766908 - DNA, 25 bp, Homo sapien
agtcatgaaactactcctgcacttg

SEQ ID NO: 1766909 - DNA, 25 bp, Homo sapien
caaatatttcaagaacttggaggta

SEQ ID NO: 1766910 - DNA, 25 bp, Homo sapien
gaagcacctatgtaaacaataagcg

SEQ ID NO: 1766911 - DNA, 25 bp, Homo sapien
ttcaactacgagtcatttacagtca

SEQ ID NO: 1766912 - DNA, 25 bp, Homo sapien
ttcctttataggtcttccacttaga

SEQ ID NO: 1766913 - DNA, 25 bp, Homo sapien
agttcgactgtgtagatcctgtggt

SEQ ID NO: 1766914 - DNA, 25 bp, Homo sapien
tattcacaattcctttataggtctt

SEQ ID NO: 1766915 - DNA, 25 bp, Homo sapien
taacataaaagttgaagttcgactg

SEQ ID NO: 1766916 - DNA, 25 bp, Homo sapien
tgagatggaatctcgctcttgtcgc

SEQ ID NO: 1766917 - DNA, 25 bp, Homo sapien
cgcctgccttagcctcccaaagtgc

SEQ ID NO: 1766918 - DNA, 25 bp, Homo sapien
ctcccaaagtgctgagattatatgc

SEQ ID NO: 1766919 - DNA, 25 bp, Homo sapien
ttgagatggaatctcgctcttgtcg

SEQ ID NO: 1766920 - DNA, 25 bp, Homo sapien
gggacaacccgcacatatctggcca

SEQ ID NO: 1766921 - DNA, 25 bp, Homo sapien
tgtgtaatctggcaaccaatgagct

SEQ ID NO: 1766922 - DNA, 25 bp, Homo sapien
tcaaggctatcctctggtgccatgt

SEQ ID NO: 1766923 - DNA, 25 bp, Homo sapien
catatctggccacgatgggagggat

SEQ ID NO: 1766924 - DNA, 25 bp, Homo sapien
ttgtcttgcgccacaccaatgaatc

SEQ ID NO: 1766925 - DNA, 25 bp, Homo sapien
gaaacactggtgctttgacttgtct

SEQ ID NO: 1766926 - DNA, 25 bp, Homo sapien
atgtttcttccgaggggatgggcct

SEQ ID NO: 1766927 - DNA, 25 bp, Homo sapien
ggatgggccttgtgattgtctcatc

SEQ ID NO: 1766928 - DNA, 25 bp, Homo sapien
caaggagcaccaatggaatagccac

SEQ ID NO: 1766929 - DNA, 25 bp, Homo sapien
acaaggagcaccaatggaatagcca

SEQ ID NO: 1766930 - DNA, 25 bp, Homo sapien
tttctaaaggctgcaaagatcccca

SEQ ID NO: 1766931 - DNA, 25 bp, Homo sapien
tctaaaggctgcaaagatccccatt

SEQ ID NO: 1766932 - DNA, 25 bp, Homo sapien
agatccccattccagcaaacaccag

SEQ ID NO: 1766933 - DNA, 25 bp, Homo sapien
caaagatccccattccagcaaacac

SEQ ID NO: 1766934 - DNA, 25 bp, Homo sapien
actgaatatttataagccaatgtat

SEQ ID NO: 1766935 - DNA, 25 bp, Homo sapien
cacaagatttcactagaagaatata

SEQ ID NO: 1766936 - DNA, 25 bp, Homo sapien
tatactaatcttattttgcatatta

SEQ ID NO: 1766937 - DNA, 25 bp, Homo sapien
tatctcatttataagaaaggtcaca

SEQ ID NO: 1766938 - DNA, 25 bp, Homo sapien
gcctctgctgatccatacggacttc

SEQ ID NO: 1766939 - DNA, 25 bp, Homo sapien
gatccatacggacttcctttcttct

SEQ ID NO: 1766940 - DNA, 25 bp, Homo sapien
gagcctctgctgatccatacggact

SEQ ID NO: 1766941 - DNA, 25 bp, Homo sapien
tgctgatccatacggacttcctttc

SEQ ID NO: 1766942 - DNA, 25 bp, Homo sapien
ctgtgaggcagaggagacactgcag

SEQ ID NO: 1766943 - DNA, 25 bp, Homo sapien
tgaggcagaggagacactgcagctg

SEQ ID NO: 1766944 - DNA, 25 bp, Homo sapien
gagacactgcagctggtgtttagac

SEQ ID NO: 1766945 - DNA, 25 bp, Homo sapien
agacactgcagctggtgtttagacc

SEQ ID NO: 1766946 - DNA, 25 bp, Homo sapien
tatggtctccgacaatctgcactgg

SEQ ID NO: 1766947 - DNA, 25 bp, Homo sapien
tgccaaggtcattaaccacaacagc

SEQ ID NO: 1766948 - DNA, 25 bp, Homo sapien
tgtgtgctaagaacagcatgccaag

SEQ ID NO: 1766949 - DNA, 25 bp, Homo sapien
tactctaaccatgctttccgctgtg

SEQ ID NO: 1766950 - DNA, 25 bp, Homo sapien
gatgtctggcaaagggatatttaat

SEQ ID NO: 1766951 - DNA, 25 bp, Homo sapien
tcacttgtgatgagatctaactttt

SEQ ID NO: 1766952 - DNA, 25 bp, Homo sapien
tccttctcattatcatagctgatgg

SEQ ID NO: 1766953 - DNA, 25 bp, Homo sapien
taaactcagctgactgatgtctggc

SEQ ID NO: 1766954 - DNA, 25 bp, Homo sapien
gaggaagtggctctgaaactggctc

SEQ ID NO: 1766955 - DNA, 25 bp, Homo sapien
ggaagtggctctgaaactggctctg

SEQ ID NO: 1766956 - DNA, 25 bp, Homo sapien
aagtggctctgaaactggctctgga

SEQ ID NO: 1766957 - DNA, 25 bp, Homo sapien
ggaggaagtggctctgaaactggct

SEQ ID NO: 1766958 - DNA, 25 bp, Homo sapien
aggcagtacacaaccgcaccgcctg

SEQ ID NO: 1766959 - DNA, 25 bp, Homo sapien
cactgcggaaaaccctgatgtgaaa

SEQ ID NO: 1766960 - DNA, 25 bp, Homo sapien
ccgcctgctcaggaagcttcgcagg

SEQ ID NO: 1766961 - DNA, 25 bp, Homo sapien
ggaagcttcgcagggtcttctcaga

SEQ ID NO: 1766962 - DNA, 25 bp, Homo sapien
tgactgtcccggtgccaatcatgag

SEQ ID NO: 1766963 - DNA, 25 bp, Homo sapien
gcttctgagagtcagggtgcccgct

SEQ ID NO: 1766964 - DNA, 25 bp, Homo sapien
atagctgtcactcgtcccgggatgc

SEQ ID NO: 1766965 - DNA, 25 bp, Homo sapien
cctttgatagtctccgtcctgggcg

SEQ ID NO: 1766966 - DNA, 25 bp, Homo sapien
acgcacactctggaccagcaggctc

SEQ ID NO: 1766967 - DNA, 25 bp, Homo sapien
tgtgacagcccgacgctcagtacca

SEQ ID NO: 1766968 - DNA, 25 bp, Homo sapien
tacacacgcacactctggaccagca

SEQ ID NO: 1766969 - DNA, 25 bp, Homo sapien
gccttgtgacagcccgacgctcagt

SEQ ID NO: 1766970 - DNA, 25 bp, Homo sapien
caacaagactaggtttaagcagacc

SEQ ID NO: 1766971 - DNA, 25 bp, Homo sapien
gacctgctgctaacacagtatcaga

SEQ ID NO: 1766972 - DNA, 25 bp, Homo sapien
ccaacagacgcaccctaagggtcag

SEQ ID NO: 1766973 - DNA, 25 bp, Homo sapien
taagggtcagcacgaaaccagctgc

SEQ ID NO: 1766974 - DNA, 25 bp, Homo sapien
ttttcagaggacagcggaagtcacg

SEQ ID NO: 1766975 - DNA, 25 bp, Homo sapien
catgaaaattgtggcgtctgacctc

SEQ ID NO: 1766976 - DNA, 25 bp, Homo sapien
tggaattacagacgcctccttgagg

SEQ ID NO: 1766977 - DNA, 25 bp, Homo sapien
tctgaggtacgaaaacatctgacac

SEQ ID NO: 1766978 - DNA, 25 bp, Homo sapien
agtgggagattgcaacaaaactttc

SEQ ID NO: 1766979 - DNA, 25 bp, Homo sapien
taagagggcatttggttgtaaaaga

SEQ ID NO: 1766980 - DNA, 25 bp, Homo sapien
tactacaatgttaaatctatcatca

SEQ ID NO: 1766981 - DNA, 25 bp, Homo sapien
ggagaaagaatatacactgggcata

SEQ ID NO: 1766982 - DNA, 25 bp, Homo sapien
taattacaagtcaacagctatcgaa

SEQ ID NO: 1766983 - DNA, 25 bp, Homo sapien
ctatcgaaagttagcacagcttgtc

SEQ ID NO: 1766984 - DNA, 25 bp, Homo sapien
cagtcttacacttatggttggcctc

SEQ ID NO: 1766985 - DNA, 25 bp, Homo sapien
gcaacattttggtggtgagactatt

SEQ ID NO: 1766986 - DNA, 25 bp, Homo sapien
caagttggaatttttatgaggtcac

SEQ ID NO: 1766987 - DNA, 25 bp, Homo sapien
tatctgctatgactgaatccttagg

SEQ ID NO: 1766988 - DNA, 25 bp, Homo sapien
cattgtagcagacccgaaaaccttt

SEQ ID NO: 1766989 - DNA, 25 bp, Homo sapien
catgacatgagatctgcaaactgga

SEQ ID NO: 1766990 - DNA, 25 bp, Homo sapien
aatattaagtgggagaaagcctaca

SEQ ID NO: 1766991 - DNA, 25 bp, Homo sapien
tatcactgttttaaaggacgtacag

SEQ ID NO: 1766992 - DNA, 25 bp, Homo sapien
taacctgctaggcaaagtcacaaca

SEQ ID NO: 1766993 - DNA, 25 bp, Homo sapien
tcccatgattaaacatggagtgcct

SEQ ID NO: 1766994 - DNA, 25 bp, Homo sapien
aacctgctgatagatgcggagggct

SEQ ID NO: 1766995 - DNA, 25 bp, Homo sapien
gagacagcataggtgtttaatgaaa

SEQ ID NO: 1766996 - DNA, 25 bp, Homo sapien
ggatgctattttggcagtcaacgga

SEQ ID NO: 1766997 - DNA, 25 bp, Homo sapien
gaacatggtgttccaatcctcatct

SEQ ID NO: 1766998 - DNA, 25 bp, Homo sapien
taagctagagagtgataggtaccaa

SEQ ID NO: 1766999 - DNA, 25 bp, Homo sapien
ttttagcaggacaaataagacacac

SEQ ID NO: 1767000 - DNA, 25 bp, Homo sapien
gagcatacattttagcaggacaaat

SEQ ID NO: 1767001 - DNA, 25 bp, Homo sapien
tacacacacgcaacaatgatataag

SEQ ID NO: 1767002 - DNA, 25 bp, Homo sapien
tgctaggacgagatatgaagggacc

SEQ ID NO: 1767003 - DNA, 25 bp, Homo sapien
caatatgaagggtccaacagataca

SEQ ID NO: 1767004 - DNA, 25 bp, Homo sapien
gagttcagtgactttgcatgcaaga

SEQ ID NO: 1767005 - DNA, 25 bp, Homo sapien
tgaagggacctgctcatgataagct

SEQ ID NO: 1767006 - DNA, 25 bp, Homo sapien
tgacagaaacccaagcagagaaagt

SEQ ID NO: 1767007 - DNA, 25 bp, Homo sapien
gcttttacagctgcactctattcag

SEQ ID NO: 1767008 - DNA, 25 bp, Homo sapien
aagtgctgactctggtaccattaag

SEQ ID NO: 1767009 - DNA, 25 bp, Homo sapien
gcagcttcatgctaaaactggtcaa

SEQ ID NO: 1767010 - DNA, 25 bp, Homo sapien
gacaccttcatggtactcacgacag

SEQ ID NO: 1767011 - DNA, 25 bp, Homo sapien
ccagataaggtagaactcatgccaa

SEQ ID NO: 1767012 - DNA, 25 bp, Homo sapien
ccaccaaagagagcgatgacgactt

SEQ ID NO: 1767013 - DNA, 25 bp, Homo sapien
ttgtaactcacacccaataaaggag

SEQ ID NO: 1767014 - DNA, 25 bp, Homo sapien
caacctctcgaaatgctggtattac

SEQ ID NO: 1767015 - DNA, 25 bp, Homo sapien
cagtaaccactgttgtattctctac

SEQ ID NO: 1767016 - DNA, 25 bp, Homo sapien
catgtggtcttcaatgcaggatttc

SEQ ID NO: 1767017 - DNA, 25 bp, Homo sapien
agctcagttgatccctctgcttcag

SEQ ID NO: 1767018 - DNA, 25 bp, Homo sapien
gaccaagcggacatcacttatgagg

SEQ ID NO: 1767019 - DNA, 25 bp, Homo sapien
tgctcctgggagagatcgatccaga

SEQ ID NO: 1767020 - DNA, 25 bp, Homo sapien
gggcgacagaagatgaccagcctga

SEQ ID NO: 1767021 - DNA, 25 bp, Homo sapien
tggagaaggagttcgacaaagcttt

SEQ ID NO: 1767022 - DNA, 25 bp, Homo sapien
tctggtttaccaagaacagccagtg

SEQ ID NO: 1767023 - DNA, 25 bp, Homo sapien
ccaagaacagccagtgtgtacaccc

SEQ ID NO: 1767024 - DNA, 25 bp, Homo sapien
tggggtctggtttaccaagaacagc

SEQ ID NO: 1767025 - DNA, 25 bp, Homo sapien
caagaacagccagtgtgtacaccca

SEQ ID NO: 1767026 - DNA, 25 bp, Homo sapien
acctatcaaagaaacccttagcatc

SEQ ID NO: 1767027 - DNA, 25 bp, Homo sapien
aacccttagcatcatctctctttcc

SEQ ID NO: 1767028 - DNA, 25 bp, Homo sapien
cccttagcatcatctctctttcccc

SEQ ID NO: 1767029 - DNA, 25 bp, Homo sapien
cagtacctatcaaagaaacccttag

SEQ ID NO: 1767030 - DNA, 25 bp, Homo sapien
gaaaaagctccccatatcccatggt

SEQ ID NO: 1767031 - DNA, 25 bp, Homo sapien
aatgatttttcctaagcatgcaagc

SEQ ID NO: 1767032 - DNA, 25 bp, Homo sapien
gataaagacctacccactgcagtga

SEQ ID NO: 1767033 - DNA, 25 bp, Homo sapien
gaaggtgaatagctcaaggaggcca

SEQ ID NO: 1767034 - DNA, 25 bp, Homo sapien
ctgcacctggctcacagagaggcat

SEQ ID NO: 1767035 - DNA, 25 bp, Homo sapien
tgcctctctgcacctggctcacaga

SEQ ID NO: 1767036 - DNA, 25 bp, Homo sapien
cctctctgcacctggctcacagaga

SEQ ID NO: 1767037 - DNA, 25 bp, Homo sapien
ctctgcacctggctcacagagaggc

SEQ ID NO: 1767038 - DNA, 25 bp, Homo sapien
tacattcaggtgaagtcagacagct

SEQ ID NO: 1767039 - DNA, 25 bp, Homo sapien
cattcaggtgaagtcagacagctac

SEQ ID NO: 1767040 - DNA, 25 bp, Homo sapien
ttcaggtgaagtcagacagctacaa

SEQ ID NO: 1767041 - DNA, 25 bp, Homo sapien
ctacattcaggtgaagtcagacagc

SEQ ID NO: 1767042 - DNA, 25 bp, Homo sapien
ggccagcagaatagaatcttctaaa

SEQ ID NO: 1767043 - DNA, 25 bp, Homo sapien
ctggccagcagaatagaatcttcta

SEQ ID NO: 1767044 - DNA, 25 bp, Homo sapien
ccagcagaatagaatcttctaaagc

SEQ ID NO: 1767045 - DNA, 25 bp, Homo sapien
actggccagcagaatagaatcttct

SEQ ID NO: 1767046 - DNA, 25 bp, Homo sapien
caaactttgcaaactgacaagggag

SEQ ID NO: 1767047 - DNA, 25 bp, Homo sapien
gagagcactagggactcaacttatt

SEQ ID NO: 1767048 - DNA, 25 bp, Homo sapien
tctccaggctcatatgtgtcagatg

SEQ ID NO: 1767049 - DNA, 25 bp, Homo sapien
agctatggcctccacgttgttacca

SEQ ID NO: 1767050 - DNA, 25 bp, Homo sapien
taaattggtaaggaactgtgcccca

SEQ ID NO: 1767051 - DNA, 25 bp, Homo sapien
cccattgatggaagagagtaagttt

SEQ ID NO: 1767052 - DNA, 25 bp, Homo sapien
gttttgggacagctcaagagcagtt

SEQ ID NO: 1767053 - DNA, 25 bp, Homo sapien
ttttgggacagctcaagagcagtta

SEQ ID NO: 1767054 - DNA, 25 bp, Homo sapien
gggtatggacaacagcagattctgc

SEQ ID NO: 1767055 - DNA, 25 bp, Homo sapien
tcctggaagtcttgtgctgttactc

SEQ ID NO: 1767056 - DNA, 25 bp, Homo sapien
gaaactcgcattgttgttgtccaga

SEQ ID NO: 1767057 - DNA, 25 bp, Homo sapien
agggctccagcttcgaagaaactcg

SEQ ID NO: 1767058 - DNA, 25 bp, Homo sapien
gaggcagaccctctaaggcttttag

SEQ ID NO: 1767059 - DNA, 25 bp, Homo sapien
gaaggtgcaattccagggatttcca

SEQ ID NO: 1767060 - DNA, 25 bp, Homo sapien
cagcctggttaaggtccctgggagc

SEQ ID NO: 1767061 - DNA, 25 bp, Homo sapien
gatctcccgttcagcaatattctgg

SEQ ID NO: 1767062 - DNA, 25 bp, Homo sapien
ccatgttgattctgatgctggaggg

SEQ ID NO: 1767063 - DNA, 25 bp, Homo sapien
gaaacactttctaaactgtgagcaa

SEQ ID NO: 1767064 - DNA, 25 bp, Homo sapien
tttctcggtcagatgaaagtgatgc

SEQ ID NO: 1767065 - DNA, 25 bp, Homo sapien
gaaccactacaaaagagagtcttgc

SEQ ID NO: 1767066 - DNA, 25 bp, Homo sapien
ggtttcactatcaagcacaaattac

SEQ ID NO: 1767067 - DNA, 25 bp, Homo sapien
taggtttcactatcaagcacaaatt

SEQ ID NO: 1767068 - DNA, 25 bp, Homo sapien
aggtttcactatcaagcacaaatta

SEQ ID NO: 1767069 - DNA, 25 bp, Homo sapien
tgattctatttagcattatgatttg

SEQ ID NO: 1767070 - DNA, 25 bp, Homo sapien
attctatttagcattatgatttgcc

SEQ ID NO: 1767071 - DNA, 25 bp, Homo sapien
gattctatttagcattatgatttgc

SEQ ID NO: 1767072 - DNA, 25 bp, Homo sapien
cttggcagccccgcccccagtagta

SEQ ID NO: 1767073 - DNA, 25 bp, Homo sapien
gcccccgccgccatcttcctcctcc

SEQ ID NO: 1767074 - DNA, 25 bp, Homo sapien
ctcgcccccgccgccatcttcctcc

SEQ ID NO: 1767075 - DNA, 25 bp, Homo sapien
tcgcccccgccgccatcttcctcct

SEQ ID NO: 1767076 - DNA, 25 bp, Homo sapien
cgcccccgccgccatcttcctcctc

SEQ ID NO: 1767077 - DNA, 25 bp, Homo sapien
gagcccgaacccctttccactgcca

SEQ ID NO: 1767078 - DNA, 25 bp, Homo sapien
acccctttccactgccaacacctca

SEQ ID NO: 1767079 - DNA, 25 bp, Homo sapien
cccctttccactgccaacacctcac

SEQ ID NO: 1767080 - DNA, 25 bp, Homo sapien
ttttatccgcccctgcggccggcgc

SEQ ID NO: 1767081 - DNA, 25 bp, Homo sapien
ctgcggccggcgcgggccatcgctc

SEQ ID NO: 1767082 - DNA, 25 bp, Homo sapien
tttatccgcccctgcggccggcgcg

SEQ ID NO: 1767083 - DNA, 25 bp, Homo sapien
cccctgcggccggcgcgggccatcg

SEQ ID NO: 1767084 - DNA, 25 bp, Homo sapien
ctccctcccgcccactcccgcagcg

SEQ ID NO: 1767085 - DNA, 25 bp, Homo sapien
ctctccctcccgcccactcccgcag

SEQ ID NO: 1767086 - DNA, 25 bp, Homo sapien
ctcagacaccccctctccctcccgc

SEQ ID NO: 1767087 - DNA, 25 bp, Homo sapien
ctcccgcccactcccgcagcgcgac

SEQ ID NO: 1767088 - DNA, 25 bp, Homo sapien
caggaggtgagcgtgcggtgcagac

SEQ ID NO: 1767089 - DNA, 25 bp, Homo sapien
gccaggaggtgagcgtgcggtgcag

SEQ ID NO: 1767090 - DNA, 25 bp, Homo sapien
ccaggaggtgagcgtgcggtgcaga

SEQ ID NO: 1767091 - DNA, 25 bp, Homo sapien
agccaggaggtgagcgtgcggtgca

SEQ ID NO: 1767092 - DNA, 25 bp, Homo sapien
gcttctccaaggaacgaccgtccgc

SEQ ID NO: 1767093 - DNA, 25 bp, Homo sapien
tgacggcggttcctgccgactgccg

SEQ ID NO: 1767094 - DNA, 25 bp, Homo sapien
gtggtgacggcggttcctgccgact

SEQ ID NO: 1767095 - DNA, 25 bp, Homo sapien
ccagcgcatccggtggtgtgcggct

SEQ ID NO: 1767096 - DNA, 25 bp, Homo sapien
acaaagccaaaccttggcggcttat

SEQ ID NO: 1767097 - DNA, 25 bp, Homo sapien
tctaataaagctagctctcggaaca

SEQ ID NO: 1767098 - DNA, 25 bp, Homo sapien
ttatctaataaagctagctctcgga

SEQ ID NO: 1767099 - DNA, 25 bp, Homo sapien
aaccttggcggcttatctaataaag

SEQ ID NO: 1767100 - DNA, 25 bp, Homo sapien
aggatgagttcggttttagacagcc

SEQ ID NO: 1767101 - DNA, 25 bp, Homo sapien
gaggattactatagaagtgattaag

SEQ ID NO: 1767102 - DNA, 25 bp, Homo sapien
gacagccgatgatagaaaatttagg

SEQ ID NO: 1767103 - DNA, 25 bp, Homo sapien
ttgaaaattccacaaagagaacttg

SEQ ID NO: 1767104 - DNA, 25 bp, Homo sapien
catctttgtcattactatttgcaaa

SEQ ID NO: 1767105 - DNA, 25 bp, Homo sapien
gatcatctttgtcattactatttgc

SEQ ID NO: 1767106 - DNA, 25 bp, Homo sapien
tcatctttgtcattactatttgcaa

SEQ ID NO: 1767107 - DNA, 25 bp, Homo sapien
cttgatcatctttgtcattactatt

SEQ ID NO: 1767108 - DNA, 25 bp, Homo sapien
attttgaacaatctaggcccagaag

SEQ ID NO: 1767109 - DNA, 25 bp, Homo sapien
ttgaacaatctaggcccagaagttc

SEQ ID NO: 1767110 - DNA, 25 bp, Homo sapien
aatctaggcccagaagttcttgctg

SEQ ID NO: 1767111 - DNA, 25 bp, Homo sapien
acaatctaggcccagaagttcttgc

SEQ ID NO: 1767112 - DNA, 25 bp, Homo sapien
ttctgggctactaactggcaaaagt

SEQ ID NO: 1767113 - DNA, 25 bp, Homo sapien
gtatctacatccaaatctgtgggtc

SEQ ID NO: 1767114 - DNA, 25 bp, Homo sapien
gctcttacaatatctgcttttccat

SEQ ID NO: 1767115 - DNA, 25 bp, Homo sapien
ttttccatcttccggagacagcacc

SEQ ID NO: 1767116 - DNA, 25 bp, Homo sapien
cctgaaggcaacaactgggcttaat

SEQ ID NO: 1767117 - DNA, 25 bp, Homo sapien
tattagggtctcatagggtgcagga

SEQ ID NO: 1767118 - DNA, 25 bp, Homo sapien
taaacattagcgctttcccatggac

SEQ ID NO: 1767119 - DNA, 25 bp, Homo sapien
caatgacagggtagggtaagaagca

SEQ ID NO: 1767120 - DNA, 25 bp, Homo sapien
cagttacagttctgtaacattctgt

SEQ ID NO: 1767121 - DNA, 25 bp, Homo sapien
aaatactatctgtcataacccatta

SEQ ID NO: 1767122 - DNA, 25 bp, Homo sapien
tattttaagctgattaccacactgc

SEQ ID NO: 1767123 - DNA, 25 bp, Homo sapien
agttattattattgactgggtcatc

SEQ ID NO: 1767124 - DNA, 25 bp, Homo sapien
tcttgcgaatgtttcatgtgctgac

SEQ ID NO: 1767125 - DNA, 25 bp, Homo sapien
tggcccaacatatggtctcttcttg

SEQ ID NO: 1767126 - DNA, 25 bp, Homo sapien
tatggtctcttcttgcgaatgtttc

SEQ ID NO: 1767127 - DNA, 25 bp, Homo sapien
caacatatggtctcttcttgcgaat

SEQ ID NO: 1767128 - DNA, 25 bp, Homo sapien
atactactctgtggtccatatgtac

SEQ ID NO: 1767129 - DNA, 25 bp, Homo sapien
tgctggctcactcccccattatctt

SEQ ID NO: 1767130 - DNA, 25 bp, Homo sapien
cactcccccattatctttcccagcc

SEQ ID NO: 1767131 - DNA, 25 bp, Homo sapien
gaatactactctgtggtccatatgt

SEQ ID NO: 1767132 - DNA, 25 bp, Homo sapien
caggaccgaacttcaatactaaatc

SEQ ID NO: 1767133 - DNA, 25 bp, Homo sapien
agtcaatctgatgtgccagggaaga

SEQ ID NO: 1767134 - DNA, 25 bp, Homo sapien
gcctaatgtgctgtccacaggaccg

SEQ ID NO: 1767135 - DNA, 25 bp, Homo sapien
tcaggatcaggacaaccatttgaac

SEQ ID NO: 1767136 - DNA, 25 bp, Homo sapien
ctttcccagacgctgttcacaggct

SEQ ID NO: 1767137 - DNA, 25 bp, Homo sapien
ccagacgctgttcacaggctgcata

SEQ ID NO: 1767138 - DNA, 25 bp, Homo sapien
tcccagacgctgttcacaggctgca

SEQ ID NO: 1767139 - DNA, 25 bp, Homo sapien
tttcccagacgctgttcacaggctg

SEQ ID NO: 1767140 - DNA, 25 bp, Homo sapien
tctccaatacgtccccatttataag

SEQ ID NO: 1767141 - DNA, 25 bp, Homo sapien
tacacacagtaaccatcaggattta

SEQ ID NO: 1767142 - DNA, 25 bp, Homo sapien
tcagaacccagaatacagagcaact

SEQ ID NO: 1767143 - DNA, 25 bp, Homo sapien
caagtcatacttttgaacccagaat

SEQ ID NO: 1767144 - DNA, 25 bp, Homo sapien
cgtacaacgtataatggattatgca

SEQ ID NO: 1767145 - DNA, 25 bp, Homo sapien
aagtcgtacaacgtataatggatta

SEQ ID NO: 1767146 - DNA, 25 bp, Homo sapien
aacgtataatggattatgcagtgca

SEQ ID NO: 1767147 - DNA, 25 bp, Homo sapien
aaaagtcgtacaacgtataatggat

SEQ ID NO: 1767148 - DNA, 25 bp, Homo sapien
tacatgttaagtttcaactttcaat

SEQ ID NO: 1767149 - DNA, 25 bp, Homo sapien
atacatgttaagtttcaactttcaa

SEQ ID NO: 1767150 - DNA, 25 bp, Homo sapien
tgttaagtttcaactttcaataata

SEQ ID NO: 1767151 - DNA, 25 bp, Homo sapien
tacaaaaaattctcggtgatcacca

SEQ ID NO: 1767152 - DNA, 25 bp, Homo sapien
catagtttatgtcccaccagttagg

SEQ ID NO: 1767153 - DNA, 25 bp, Homo sapien
ccttcaagttaggaggtgaatagtc

SEQ ID NO: 1767154 - DNA, 25 bp, Homo sapien
aaggaagttcctagtaagcagttat

SEQ ID NO: 1767155 - DNA, 25 bp, Homo sapien
tccagacacaataatcaaatacaaa

SEQ ID NO: 1767156 - DNA, 25 bp, Homo sapien
cagacacaataatcaaatacaaaag

SEQ ID NO: 1767157 - DNA, 25 bp, Homo sapien
tgtaatttatatccagacacaataa

SEQ ID NO: 1767158 - DNA, 25 bp, Homo sapien
catgtgctattgtaatttatatcca

SEQ ID NO: 1767159 - DNA, 25 bp, Homo sapien
tcaccaactgatatgctatgagcat

SEQ ID NO: 1767160 - DNA, 25 bp, Homo sapien
ccagtgctcagaagagtaggcagta

SEQ ID NO: 1767161 - DNA, 25 bp, Homo sapien
ggtcttaacatctaataggcatctg

SEQ ID NO: 1767162 - DNA, 25 bp, Homo sapien
tgcagcatgcttaactaccaagagc

SEQ ID NO: 1767163 - DNA, 25 bp, Homo sapien
cactcaagcctggagtgagactccg

SEQ ID NO: 1767164 - DNA, 25 bp, Homo sapien
atgagattaagagatcaagacctcc

SEQ ID NO: 1767165 - DNA, 25 bp, Homo sapien
gcactcaagcctggagtgagactcc

SEQ ID NO: 1767166 - DNA, 25 bp, Homo sapien
gattaagagatcaagacctcctggc

SEQ ID NO: 1767167 - DNA, 25 bp, Homo sapien
tccttatcttcctcctgggtctgca

SEQ ID NO: 1767168 - DNA, 25 bp, Homo sapien
tttccttatcttcctcctgggtctg

SEQ ID NO: 1767169 - DNA, 25 bp, Homo sapien
ccttatcttcctcctgggtctgcat

SEQ ID NO: 1767170 - DNA, 25 bp, Homo sapien
ttccttatcttcctcctgggtctgc

SEQ ID NO: 1767171 - DNA, 25 bp, Homo sapien
ggcatcccctgtggagcagactgct

SEQ ID NO: 1767172 - DNA, 25 bp, Homo sapien
cctgtggagcagactgcttggatcc

SEQ ID NO: 1767173 - DNA, 25 bp, Homo sapien
gagcagactgcttggatccacaatg

SEQ ID NO: 1767174 - DNA, 25 bp, Homo sapien
catcccctgtggagcagactgcttg

SEQ ID NO: 1767175 - DNA, 25 bp, Homo sapien
cttgttggatcagaactcaactctc

SEQ ID NO: 1767176 - DNA, 25 bp, Homo sapien
gcttgttggatcagaactcaactct

SEQ ID NO: 1767177 - DNA, 25 bp, Homo sapien
ttgttggatcagaactcaactctcc

SEQ ID NO: 1767178 - DNA, 25 bp, Homo sapien
tgtccacctctatctggaactccaa

SEQ ID NO: 1767179 - DNA, 25 bp, Homo sapien
cttgtggaaacccaagctagaataa

SEQ ID NO: 1767180 - DNA, 25 bp, Homo sapien
gaaacccaagctagaataaaggcat

SEQ ID NO: 1767181 - DNA, 25 bp, Homo sapien
aaaggcattcactgtccacctctat

SEQ ID NO: 1767182 - DNA, 25 bp, Homo sapien
tagggcatgtctgctcatgaggact

SEQ ID NO: 1767183 - DNA, 25 bp, Homo sapien
ctttcaaaggatatagccaaccggg

SEQ ID NO: 1767184 - DNA, 25 bp, Homo sapien
ccaaagttgttaatgcataggtcat

SEQ ID NO: 1767185 - DNA, 25 bp, Homo sapien
cataggtcatattgataagtagggc

SEQ ID NO: 1767186 - DNA, 25 bp, Homo sapien
gcccaaagggtcacacacttctgag

SEQ ID NO: 1767187 - DNA, 25 bp, Homo sapien
ggcccaaagggtcacacacttctga

SEQ ID NO: 1767188 - DNA, 25 bp, Homo sapien
tgtggcccaaagggtcacacacttc

SEQ ID NO: 1767189 - DNA, 25 bp, Homo sapien
tggcccaaagggtcacacacttctg

SEQ ID NO: 1767190 - DNA, 25 bp, Homo sapien
aattctgctaccaaactggagttcc

SEQ ID NO: 1767191 - DNA, 25 bp, Homo sapien
caaatctttatcaggtctctctgct

SEQ ID NO: 1767192 - DNA, 25 bp, Homo sapien
ggagttccacatctattctcagatt

SEQ ID NO: 1767193 - DNA, 25 bp, Homo sapien
tggtaaaattctgctaccaaactgg

SEQ ID NO: 1767194 - DNA, 25 bp, Homo sapien
aaatttccaatttgcacctccatgt

SEQ ID NO: 1767195 - DNA, 25 bp, Homo sapien
aatttccaatttgcacctccatgtt

SEQ ID NO: 1767196 - DNA, 25 bp, Homo sapien
atttccaatttgcacctccatgttc

SEQ ID NO: 1767197 - DNA, 25 bp, Homo sapien
taaatttccaatttgcacctccatg

SEQ ID NO: 1767198 - DNA, 25 bp, Homo sapien
gtctgtaggcgtattcccagaaaca

SEQ ID NO: 1767199 - DNA, 25 bp, Homo sapien
tcattgccgggtctgtaggcgtatt

SEQ ID NO: 1767200 - DNA, 25 bp, Homo sapien
gggtctgtaggcgtattcccagaaa

SEQ ID NO: 1767201 - DNA, 25 bp, Homo sapien
gccgggtctgtaggcgtattcccag

SEQ ID NO: 1767202 - DNA, 25 bp, Homo sapien
gcttaaatgtaccataaccctgtga

SEQ ID NO: 1767203 - DNA, 25 bp, Homo sapien
gagcatatacttcctgtggacagga

SEQ ID NO: 1767204 - DNA, 25 bp, Homo sapien
cagcctgggatgctatcagtatgga

SEQ ID NO: 1767205 - DNA, 25 bp, Homo sapien
tcacccaagaattagacccctcaag

SEQ ID NO: 1767206 - DNA, 25 bp, Homo sapien
gcttcagggaaacagatcggcaata

SEQ ID NO: 1767207 - DNA, 25 bp, Homo sapien
cagagcttcagggaaacagatcggc

SEQ ID NO: 1767208 - DNA, 25 bp, Homo sapien
tcagagcttcagggaaacagatcgg

SEQ ID NO: 1767209 - DNA, 25 bp, Homo sapien
gagcttcagggaaacagatcggcaa

SEQ ID NO: 1767210 - DNA, 25 bp, Homo sapien
gctcggtcggaaagctaccgtctgt

SEQ ID NO: 1767211 - DNA, 25 bp, Homo sapien
gcggtgctgcctgcgaagcggtgag

SEQ ID NO: 1767212 - DNA, 25 bp, Homo sapien
gcgatcagaacgcagccgggtgcat

SEQ ID NO: 1767213 - DNA, 25 bp, Homo sapien
cggcagttgtgctggcgccgcctca

SEQ ID NO: 1767214 - DNA, 25 bp, Homo sapien
tcaccacatggttcggcggggctgg

SEQ ID NO: 1767215 - DNA, 25 bp, Homo sapien
gaggaggcggacaggctcccgccgc

SEQ ID NO: 1767216 - DNA, 25 bp, Homo sapien
tcggccggcaggttctcgatggtgg

SEQ ID NO: 1767217 - DNA, 25 bp, Homo sapien
cagcactttgcggatcctctggcgc

SEQ ID NO: 1767218 - DNA, 25 bp, Homo sapien
cggcatgggcgcttcggaataactg

SEQ ID NO: 1767219 - DNA, 25 bp, Homo sapien
gtgtcagctcgtcaaccatttcaag

SEQ ID NO: 1767220 - DNA, 25 bp, Homo sapien
tacagatgcatcgaaaggcacccac

SEQ ID NO: 1767221 - DNA, 25 bp, Homo sapien
tatgaacagagcgactggaacagtt

SEQ ID NO: 1767222 - DNA, 25 bp, Homo sapien
ccagacagttccgtgtgaattcgtt

SEQ ID NO: 1767223 - DNA, 25 bp, Homo sapien
cagttccgtgtgaattcgttgggaa

SEQ ID NO: 1767224 - DNA, 25 bp, Homo sapien
gacagttccgtgtgaattcgttggg

SEQ ID NO: 1767225 - DNA, 25 bp, Homo sapien
agccccagacagttccgtgtgaatt

SEQ ID NO: 1767226 - DNA, 25 bp, Homo sapien
tatttctgtacatagtttgtactcc

SEQ ID NO: 1767227 - DNA, 25 bp, Homo sapien
ttctgtacatagtttgtactcccac

SEQ ID NO: 1767228 - DNA, 25 bp, Homo sapien
ctatttctgtacatagtttgtactc

SEQ ID NO: 1767229 - DNA, 25 bp, Homo sapien
tttctgtacatagtttgtactccca

SEQ ID NO: 1767230 - DNA, 25 bp, Homo sapien
tgtactgagccagcgtcttcttgct

SEQ ID NO: 1767231 - DNA, 25 bp, Homo sapien
tggaaggtggtattctcagctacaa

SEQ ID NO: 1767232 - DNA, 25 bp, Homo sapien
ggctctgctgcaaaccacttgtcta

SEQ ID NO: 1767233 - DNA, 25 bp, Homo sapien
tactggccaaggtatgatgacaaca

SEQ ID NO: 1767234 - DNA, 25 bp, Homo sapien
tacctgcgatgaaatgccgtcaacc

SEQ ID NO: 1767235 - DNA, 25 bp, Homo sapien
ctagggttccattcacggttgtata

SEQ ID NO: 1767236 - DNA, 25 bp, Homo sapien
tcacggttgtatacctgcgatgaaa

SEQ ID NO: 1767237 - DNA, 25 bp, Homo sapien
tgccgtcaacccaacataagtataa

SEQ ID NO: 1767238 - DNA, 25 bp, Homo sapien
ctttggcccagtgggatgctaggag

SEQ ID NO: 1767239 - DNA, 25 bp, Homo sapien
tgggtagacaggatatagatagcgt

SEQ ID NO: 1767240 - DNA, 25 bp, Homo sapien
tgtgaccaatggcaggcaattcgcc

SEQ ID NO: 1767241 - DNA, 25 bp, Homo sapien
agatagctgttcctgtagactgtga

SEQ ID NO: 1767242 - DNA, 25 bp, Homo sapien
caggcttggcttgctcacagtctaa

SEQ ID NO: 1767243 - DNA, 25 bp, Homo sapien
agtatcatatttgggcacatctctg

SEQ ID NO: 1767244 - DNA, 25 bp, Homo sapien
ccctttgtattgacgcatcctataa

SEQ ID NO: 1767245 - DNA, 25 bp, Homo sapien
taagactttcagttatctgatccca

SEQ ID NO: 1767246 - DNA, 25 bp, Homo sapien
tacttccatgaacggctcatcctgt

SEQ ID NO: 1767247 - DNA, 25 bp, Homo sapien
gagttcatcttttccaaggtcgcag

SEQ ID NO: 1767248 - DNA, 25 bp, Homo sapien
gaactgcctatgattcccaccacga

SEQ ID NO: 1767249 - DNA, 25 bp, Homo sapien
gatatccttgcctcagagttcacag

SEQ ID NO: 1767250 - DNA, 25 bp, Homo sapien
caccacgaaatcatgaaatctacca

SEQ ID NO: 1767251 - DNA, 25 bp, Homo sapien
cacgggccaggtgcttacaatatat

SEQ ID NO: 1767252 - DNA, 25 bp, Homo sapien
gcaatgcaagcacgaagagacctaa

SEQ ID NO: 1767253 - DNA, 25 bp, Homo sapien
tgtctactgaaaactaaccacgggc

SEQ ID NO: 1767254 - DNA, 25 bp, Homo sapien
tcaagttcagatggcctgacccaga

SEQ ID NO: 1767255 - DNA, 25 bp, Homo sapien
aatttcggagatcacccttcagcgg

SEQ ID NO: 1767256 - DNA, 25 bp, Homo sapien
agttgaatcctatcctagatgccca

SEQ ID NO: 1767257 - DNA, 25 bp, Homo sapien
gcatttgtcctagctaaaaacacct

SEQ ID NO: 1767258 - DNA, 25 bp, Homo sapien
tagatgcccaacagcaactgctcag

SEQ ID NO: 1767259 - DNA, 25 bp, Homo sapien
gacatgtaatagtaggcctggaagc

SEQ ID NO: 1767260 - DNA, 25 bp, Homo sapien
tttaagccagcacgatattgatccc

SEQ ID NO: 1767261 - DNA, 25 bp, Homo sapien
gaagcagggactacattcagctctg

SEQ ID NO: 1767262 - DNA, 25 bp, Homo sapien
tgtgcggtaggaagataccctgccc

SEQ ID NO: 1767263 - DNA, 25 bp, Homo sapien
gcactcattgaaggtttaatcacag

SEQ ID NO: 1767264 - DNA, 25 bp, Homo sapien
tgcaaaaggcagttcaacagcacat

SEQ ID NO: 1767265 - DNA, 25 bp, Homo sapien
actgtccccgcgttgcctagtaaag

SEQ ID NO: 1767266 - DNA, 25 bp, Homo sapien
taatcacagtttcacatccacaatg

SEQ ID NO: 1767267 - DNA, 25 bp, Homo sapien
acttacacaaaggaacagtcatgct

SEQ ID NO: 1767268 - DNA, 25 bp, Homo sapien
cagtcatgctttcaacctcgagttt

SEQ ID NO: 1767269 - DNA, 25 bp, Homo sapien
tagtcagtggctgaatcagatggca

SEQ ID NO: 1767270 - DNA, 25 bp, Homo sapien
ggcccgttaataaggcctggatgca

SEQ ID NO: 1767271 - DNA, 25 bp, Homo sapien
cctggaggacagcatttagtacaat

SEQ ID NO: 1767272 - DNA, 25 bp, Homo sapien
ggaatctaaaccaaccagcctgcct

SEQ ID NO: 1767273 - DNA, 25 bp, Homo sapien
tgatagatctcataacagccctttg

SEQ ID NO: 1767274 - DNA, 25 bp, Homo sapien
caggaattccacagttacggtaaca

SEQ ID NO: 1767275 - DNA, 25 bp, Homo sapien
tcccatcctgtagagatgaccaggg

SEQ ID NO: 1767276 - DNA, 25 bp, Homo sapien
cattcatggcgattcagctgtctca

SEQ ID NO: 1767277 - DNA, 25 bp, Homo sapien
catggagttcattatagaggttccc

SEQ ID NO: 1767278 - DNA, 25 bp, Homo sapien
tcctgcctgcagtagttctagcttt

SEQ ID NO: 1767279 - DNA, 25 bp, Homo sapien
tcttctttgatcccccaggagtacc

SEQ ID NO: 1767280 - DNA, 25 bp, Homo sapien
accctaagtcttgcagctgatggga

SEQ ID NO: 1767281 - DNA, 25 bp, Homo sapien
ccaggagtaccctaagtcttgcagc

SEQ ID NO: 1767282 - DNA, 25 bp, Homo sapien
gagtaccctaagtcttgcagctgat

SEQ ID NO: 1767283 - DNA, 25 bp, Homo sapien
tccttcttgcagccaataatggatg

SEQ ID NO: 1767284 - DNA, 25 bp, Homo sapien
gtccttcttgcagccaataatggat

SEQ ID NO: 1767285 - DNA, 25 bp, Homo sapien
ccttcttgcagccaataatggatga

SEQ ID NO: 1767286 - DNA, 25 bp, Homo sapien
ggtccttcttgcagccaataatgga

SEQ ID NO: 1767287 - DNA, 25 bp, Homo sapien
caactttgggaattataattaactg

SEQ ID NO: 1767288 - DNA, 25 bp, Homo sapien
gggagctgctcttcgctagctttcc

SEQ ID NO: 1767289 - DNA, 25 bp, Homo sapien
ttttgacacaggaggtgatgtccaa

SEQ ID NO: 1767290 - DNA, 25 bp, Homo sapien
gagccctgttccaccaccaactttg

SEQ ID NO: 1767291 - DNA, 25 bp, Homo sapien
gagaacacctcacaaacagagtctg

SEQ ID NO: 1767292 - DNA, 25 bp, Homo sapien
gaaaacatcatcagctggatcccat

SEQ ID NO: 1767293 - DNA, 25 bp, Homo sapien
cacatgaggctctagacaaggttcc

SEQ ID NO: 1767294 - DNA, 25 bp, Homo sapien
gatcgcgcagcacatcctatggaag

SEQ ID NO: 1767295 - DNA, 25 bp, Homo sapien
tatactcacatcagtttgctcagca

SEQ ID NO: 1767296 - DNA, 25 bp, Homo sapien
catcttgagatgctccaattagaaa

SEQ ID NO: 1767297 - DNA, 25 bp, Homo sapien
ctccatgtgcccattacaagtgaat

SEQ ID NO: 1767298 - DNA, 25 bp, Homo sapien
taaatgagtaccatccctgctcaat

SEQ ID NO: 1767299 - DNA, 25 bp, Homo sapien
taaagcagacactacaaagaatctg

SEQ ID NO: 1767300 - DNA, 25 bp, Homo sapien
aactacgggagctatatccctggcc

SEQ ID NO: 1767301 - DNA, 25 bp, Homo sapien
tctgatggccatgtttaaactacgg

SEQ ID NO: 1767302 - DNA, 25 bp, Homo sapien
aatccaagagtggtctctgatggcc

SEQ ID NO: 1767303 - DNA, 25 bp, Homo sapien
gcacccacctgatagataaggaact

SEQ ID NO: 1767304 - DNA, 25 bp, Homo sapien
gagctgccagtgatgtcgagagcaa

SEQ ID NO: 1767305 - DNA, 25 bp, Homo sapien
ggaactgaactaagcctaagaggcc

SEQ ID NO: 1767306 - DNA, 25 bp, Homo sapien
ctaagcctaagaggcccaacacagg

SEQ ID NO: 1767307 - DNA, 25 bp, Homo sapien
tgggctctaactgcacatcccaagc

SEQ ID NO: 1767308 - DNA, 25 bp, Homo sapien
cgctgttgggctctaactgcacatc

SEQ ID NO: 1767309 - DNA, 25 bp, Homo sapien
tgttgggctctaactgcacatccca

SEQ ID NO: 1767310 - DNA, 25 bp, Homo sapien
gctgttgggctctaactgcacatcc

SEQ ID NO: 1767311 - DNA, 25 bp, Homo sapien
tccaaaggaccatctcggttgaggg

SEQ ID NO: 1767312 - DNA, 25 bp, Homo sapien
tatctccaaaggaccatctcggttg

SEQ ID NO: 1767313 - DNA, 25 bp, Homo sapien
ggcttatctccaaaggaccatctcg

SEQ ID NO: 1767314 - DNA, 25 bp, Homo sapien
gcttatctccaaaggaccatctcgg

SEQ ID NO: 1767315 - DNA, 25 bp, Homo sapien
taacttccatggaaatctaccacca

SEQ ID NO: 1767316 - DNA, 25 bp, Homo sapien
tagtaacttccatggaaatctacca

SEQ ID NO: 1767317 - DNA, 25 bp, Homo sapien
gtaacttccatggaaatctaccacc

SEQ ID NO: 1767318 - DNA, 25 bp, Homo sapien
ctagtaacttccatggaaatctacc

SEQ ID NO: 1767319 - DNA, 25 bp, Homo sapien
tgtcgatcgagcttgcagctgactc

SEQ ID NO: 1767320 - DNA, 25 bp, Homo sapien
gcaatacgggcaagagcacgcttcc

SEQ ID NO: 1767321 - DNA, 25 bp, Homo sapien
cccttggcaatacgggcaagagcac

SEQ ID NO: 1767322 - DNA, 25 bp, Homo sapien
cgtaggcatgtcgatcgagcttgca

SEQ ID NO: 1767323 - DNA, 25 bp, Homo sapien
ccagccccatgcagatgatagccca

SEQ ID NO: 1767324 - DNA, 25 bp, Homo sapien
gccccatgcagatgatagcccaggg

SEQ ID NO: 1767325 - DNA, 25 bp, Homo sapien
ttctgtcctcatgttggcagagata

SEQ ID NO: 1767326 - DNA, 25 bp, Homo sapien
tctgtcctcatgttggcagagatat

SEQ ID NO: 1767327 - DNA, 25 bp, Homo sapien
ggtttatttgtacaaatagcacagg

SEQ ID NO: 1767328 - DNA, 25 bp, Homo sapien
cctgcctcaggtttatttgtacaaa

SEQ ID NO: 1767329 - DNA, 25 bp, Homo sapien
tcaggtttatttgtacaaatagcac

SEQ ID NO: 1767330 - DNA, 25 bp, Homo sapien
gtttatttgtacaaatagcacagga

SEQ ID NO: 1767331 - DNA, 25 bp, Homo sapien
accacagccggcaggttgccatggg

SEQ ID NO: 1767332 - DNA, 25 bp, Homo sapien
gatgtgacccatccgaagaccacag

SEQ ID NO: 1767333 - DNA, 25 bp, Homo sapien
catgcatcattgatgtgacccatcc

SEQ ID NO: 1767334 - DNA, 25 bp, Homo sapien
gctgcacctagacttatgcattcca

SEQ ID NO: 1767335 - DNA, 25 bp, Homo sapien
ctagatcatggacttggatagccaa

SEQ ID NO: 1767336 - DNA, 25 bp, Homo sapien
caacctgtatgcatgtgagcaggca

SEQ ID NO: 1767337 - DNA, 25 bp, Homo sapien
taagtgtcacactgaaggcttcctt

SEQ ID NO: 1767338 - DNA, 25 bp, Homo sapien
taatggtcaagctcctaagtgtcac

SEQ ID NO: 1767339 - DNA, 25 bp, Homo sapien
ttcgacacaccaaaatcaccagagt

SEQ ID NO: 1767340 - DNA, 25 bp, Homo sapien
ggtctaatctggtctgtcactagca

SEQ ID NO: 1767341 - DNA, 25 bp, Homo sapien
tgacacttcacgacagtacacgagt

SEQ ID NO: 1767342 - DNA, 25 bp, Homo sapien
tgtgttctccctatggtatcccaag

SEQ ID NO: 1767343 - DNA, 25 bp, Homo sapien
tctgcactgaacaactcttcattga

SEQ ID NO: 1767344 - DNA, 25 bp, Homo sapien
aaaacagggaaatagctgtcgtgtt

SEQ ID NO: 1767345 - DNA, 25 bp, Homo sapien
gttttcccagtgatgctattaatat

SEQ ID NO: 1767346 - DNA, 25 bp, Homo sapien
caactcttcattgagctgcagaaaa

SEQ ID NO: 1767347 - DNA, 25 bp, Homo sapien
ctgtttactatctttaccatctcta

SEQ ID NO: 1767348 - DNA, 25 bp, Homo sapien
tgtttactatctttaccatctctat

SEQ ID NO: 1767349 - DNA, 25 bp, Homo sapien
accatctctatttcctccagttttc

SEQ ID NO: 1767350 - DNA, 25 bp, Homo sapien
atctctatttcctccagttttccac

SEQ ID NO: 1767351 - DNA, 25 bp, Homo sapien
tctcttcccttgttggaatgtcctc

SEQ ID NO: 1767352 - DNA, 25 bp, Homo sapien
cttcccttgttggaatgtcctctcc

SEQ ID NO: 1767353 - DNA, 25 bp, Homo sapien
ctctcttcccttgttggaatgtcct

SEQ ID NO: 1767354 - DNA, 25 bp, Homo sapien
tcttcccttgttggaatgtcctctc

SEQ ID NO: 1767355 - DNA, 25 bp, Homo sapien
tgcctttgcgcattaagtatttggc

SEQ ID NO: 1767356 - DNA, 25 bp, Homo sapien
tctggttgagtgacaactccatgaa

SEQ ID NO: 1767357 - DNA, 25 bp, Homo sapien
tcctcatcagcaaactgatcttggg

SEQ ID NO: 1767358 - DNA, 25 bp, Homo sapien
acaggtttctatccatctggttgag

SEQ ID NO: 1767359 - DNA, 25 bp, Homo sapien
tccaaggagatctgagacttcccaa

SEQ ID NO: 1767360 - DNA, 25 bp, Homo sapien
taagtctctgacaaaatccaaggag

SEQ ID NO: 1767361 - DNA, 25 bp, Homo sapien
actgagtccaccaaagtccagctgg

SEQ ID NO: 1767362 - DNA, 25 bp, Homo sapien
gaaatctaagcaccctaagtctctg

SEQ ID NO: 1767363 - DNA, 25 bp, Homo sapien
gcctctgcccatgtgcaatctcttt

SEQ ID NO: 1767364 - DNA, 25 bp, Homo sapien
cagccccgactaacctgggctctct

SEQ ID NO: 1767365 - DNA, 25 bp, Homo sapien
cactttgcacctggatgcctttgag

SEQ ID NO: 1767366 - DNA, 25 bp, Homo sapien
tgtgcaatctctttgcagagcctct

SEQ ID NO: 1767367 - DNA, 25 bp, Homo sapien
agctttttctctttacaccgactgt

SEQ ID NO: 1767368 - DNA, 25 bp, Homo sapien
tctgccttactctctgagctgaaga

SEQ ID NO: 1767369 - DNA, 25 bp, Homo sapien
tcaggtcaacaccagtggaaaaaag

SEQ ID NO: 1767370 - DNA, 25 bp, Homo sapien
accgactgttaacagctttttctgc

SEQ ID NO: 1767371 - DNA, 25 bp, Homo sapien
tcatcagtgactccttgaactttca

SEQ ID NO: 1767372 - DNA, 25 bp, Homo sapien
gtttcatcagtgactccttgaactt

SEQ ID NO: 1767373 - DNA, 25 bp, Homo sapien
ttcatcagtgactccttgaactttc

SEQ ID NO: 1767374 - DNA, 25 bp, Homo sapien
tttcatcagtgactccttgaacttt

SEQ ID NO: 1767375 - DNA, 25 bp, Homo sapien
tattctcttggccaccgggctattt

SEQ ID NO: 1767376 - DNA, 25 bp, Homo sapien
attctcttggccaccgggctatttt

SEQ ID NO: 1767377 - DNA, 25 bp, Homo sapien
tctccatgccttcctctagaagcag

SEQ ID NO: 1767378 - DNA, 25 bp, Homo sapien
tgtggtcttgaccactaaaaaagtc

SEQ ID NO: 1767379 - DNA, 25 bp, Homo sapien
tccactggaaggactgcctttccca

SEQ ID NO: 1767380 - DNA, 25 bp, Homo sapien
ggagcatatagagccagctgtcaac

SEQ ID NO: 1767381 - DNA, 25 bp, Homo sapien
agaagatggtgttctggatctctgc

SEQ ID NO: 1767382 - DNA, 25 bp, Homo sapien
caagaagatggtgttctggatctct

SEQ ID NO: 1767383 - DNA, 25 bp, Homo sapien
agcaacaagaagatggtgttctgga

SEQ ID NO: 1767384 - DNA, 25 bp, Homo sapien
aaaagtctataagcagcaacagcaa

SEQ ID NO: 1767385 - DNA, 25 bp, Homo sapien
tccagagactgtgacaagggaggtc

SEQ ID NO: 1767386 - DNA, 25 bp, Homo sapien
gagaatgcccacagttccagagact

SEQ ID NO: 1767387 - DNA, 25 bp, Homo sapien
caggcactgggcctcctgagaatgc

SEQ ID NO: 1767388 - DNA, 25 bp, Homo sapien
ctgagaatgcccacagttccagaga

SEQ ID NO: 1767389 - DNA, 25 bp, Homo sapien
gacgtccttgttcttgaattctgtt

SEQ ID NO: 1767390 - DNA, 25 bp, Homo sapien
cataagcccatagaaacgtgacgtc

SEQ ID NO: 1767391 - DNA, 25 bp, Homo sapien
taagaagctttccaactgcgtccct

SEQ ID NO: 1767392 - DNA, 25 bp, Homo sapien
cctgttaagaagctttccaactgcg

SEQ ID NO: 1767393 - DNA, 25 bp, Homo sapien
tggccttgtttaatgactcggttgc

SEQ ID NO: 1767394 - DNA, 25 bp, Homo sapien
tcaagcacacttcagataaatctaa

SEQ ID NO: 1767395 - DNA, 25 bp, Homo sapien
tctaatgaagttctcacagtgaaaa

SEQ ID NO: 1767396 - DNA, 25 bp, Homo sapien
taaactatttggagcaacataaatt

SEQ ID NO: 1767397 - DNA, 25 bp, Homo sapien
gcactgaacatacgcatgaatgtat

SEQ ID NO: 1767398 - DNA, 25 bp, Homo sapien
agtgctgcactgaacatacgcatga

SEQ ID NO: 1767399 - DNA, 25 bp, Homo sapien
tgtgttcacatggttcagctcccat

SEQ ID NO: 1767400 - DNA, 25 bp, Homo sapien
catggttcagctcccatgtataagt

SEQ ID NO: 1767401 - DNA, 25 bp, Homo sapien
ccaggctgtgtatctcatgctttct

SEQ ID NO: 1767402 - DNA, 25 bp, Homo sapien
actctgcataggctataaccaacat

SEQ ID NO: 1767403 - DNA, 25 bp, Homo sapien
ccagctccagtggtcgctgccatga

SEQ ID NO: 1767404 - DNA, 25 bp, Homo sapien
ccaacattatgtgggcacaacccag

SEQ ID NO: 1767405 - DNA, 25 bp, Homo sapien
cattcatggacttgaatctgttctt

SEQ ID NO: 1767406 - DNA, 25 bp, Homo sapien
attctgcattcatggacttgaatct

SEQ ID NO: 1767407 - DNA, 25 bp, Homo sapien
ggctccatggtatccattttgtttt

SEQ ID NO: 1767408 - DNA, 25 bp, Homo sapien
tctttggctccatggtatccatttt

SEQ ID NO: 1767409 - DNA, 25 bp, Homo sapien
ctgttataatagagcttgtattcat

SEQ ID NO: 1767410 - DNA, 25 bp, Homo sapien
ataaccattaccaccggcacttcgt

SEQ ID NO: 1767411 - DNA, 25 bp, Homo sapien
attcataaagactgacataaccatt

SEQ ID NO: 1767412 - DNA, 25 bp, Homo sapien
taaagactgacataaccattaccac

SEQ ID NO: 1767413 - DNA, 25 bp, Homo sapien
gatggtgagaaagtacctgaacact

SEQ ID NO: 1767414 - DNA, 25 bp, Homo sapien
gagaaagtacctgaacactgactag

SEQ ID NO: 1767415 - DNA, 25 bp, Homo sapien
aagtacctgaacactgactaggagg

SEQ ID NO: 1767416 - DNA, 25 bp, Homo sapien
ctgaacactgactaggagggaccat

SEQ ID NO: 1767417 - DNA, 25 bp, Homo sapien
ggcctagggccacagagattaacat

SEQ ID NO: 1767418 - DNA, 25 bp, Homo sapien
cctagggccacagagattaacatct

SEQ ID NO: 1767419 - DNA, 25 bp, Homo sapien
tagggccacagagattaacatctcc

SEQ ID NO: 1767420 - DNA, 25 bp, Homo sapien
ctggcctagggccacagagattaac

SEQ ID NO: 1767421 - DNA, 25 bp, Homo sapien
cttgtctgacggctagtgtggtggt

SEQ ID NO: 1767422 - DNA, 25 bp, Homo sapien
ggcgtggaaatcttctgacagatac

SEQ ID NO: 1767423 - DNA, 25 bp, Homo sapien
cagatacttgctagtcaagccaatt

SEQ ID NO: 1767424 - DNA, 25 bp, Homo sapien
ctagtgtggtggtatagaccaagaa

SEQ ID NO: 1767425 - DNA, 25 bp, Homo sapien
gcaagcattatttagaatatctgca

SEQ ID NO: 1767426 - DNA, 25 bp, Homo sapien
ttggatttctcagagcaagcattat

SEQ ID NO: 1767427 - DNA, 25 bp, Homo sapien
tatttgtctgcaattcccttggatt

SEQ ID NO: 1767428 - DNA, 25 bp, Homo sapien
gcatcaggcctgttccaagttccag

SEQ ID NO: 1767429 - DNA, 25 bp, Homo sapien
aataacctcacccttaatgctcttg

SEQ ID NO: 1767430 - DNA, 25 bp, Homo sapien
aacctcacccttaatgctcttgaaa

SEQ ID NO: 1767431 - DNA, 25 bp, Homo sapien
taacctcacccttaatgctcttgaa

SEQ ID NO: 1767432 - DNA, 25 bp, Homo sapien
cctcacccttaatgctcttgaaagg

SEQ ID NO: 1767433 - DNA, 25 bp, Homo sapien
gcttcagagtctttgatcgtgactc

SEQ ID NO: 1767434 - DNA, 25 bp, Homo sapien
tctttgatcgtgactccagtgaaat

SEQ ID NO: 1767435 - DNA, 25 bp, Homo sapien
tcagagtctttgatcgtgactccag

SEQ ID NO: 1767436 - DNA, 25 bp, Homo sapien
tgatagggagaattcagtttgactt

SEQ ID NO: 1767437 - DNA, 25 bp, Homo sapien
tatctcttctgccccacttgaatat

SEQ ID NO: 1767438 - DNA, 25 bp, Homo sapien
ttatctcttctgccccacttgaata

SEQ ID NO: 1767439 - DNA, 25 bp, Homo sapien
atctcttctgccccacttgaatatt

SEQ ID NO: 1767440 - DNA, 25 bp, Homo sapien
tccccatttgtctattagttaaggc

SEQ ID NO: 1767441 - DNA, 25 bp, Homo sapien
cttctgcagttgacatgtacctcgg

SEQ ID NO: 1767442 - DNA, 25 bp, Homo sapien
cagttggttgcagtttacaatgcat

SEQ ID NO: 1767443 - DNA, 25 bp, Homo sapien
tatattcagttggttgcagtttaca

SEQ ID NO: 1767444 - DNA, 25 bp, Homo sapien
ggtcagcaggccaaatggaaattag

SEQ ID NO: 1767445 - DNA, 25 bp, Homo sapien
caaagtatctatggctcctgtgccc

SEQ ID NO: 1767446 - DNA, 25 bp, Homo sapien
gtgcccaaacctgattccttgctgg

SEQ ID NO: 1767447 - DNA, 25 bp, Homo sapien
tactgttgtaatgatagggtcttcc

SEQ ID NO: 1767448 - DNA, 25 bp, Homo sapien
ttccactgtgatggccttaacaggg

SEQ ID NO: 1767449 - DNA, 25 bp, Homo sapien
caagtactctggcttacatgatgcc

SEQ ID NO: 1767450 - DNA, 25 bp, Homo sapien
actctggcttacatgatgccctgaa

SEQ ID NO: 1767451 - DNA, 25 bp, Homo sapien
aaggattattactgacgtcatttat

SEQ ID NO: 1767452 - DNA, 25 bp, Homo sapien
tattactgacgtcatttatgtgatc

SEQ ID NO: 1767453 - DNA, 25 bp, Homo sapien
gtctggtgtatcttaaactcatttc

SEQ ID NO: 1767454 - DNA, 25 bp, Homo sapien
aaagtctggtgtatcttaaactcat

SEQ ID NO: 1767455 - DNA, 25 bp, Homo sapien
aactcatttctctcagatcttctgt

SEQ ID NO: 1767456 - DNA, 25 bp, Homo sapien
tgcttggcagctgaaagtctggtgt

SEQ ID NO: 1767457 - DNA, 25 bp, Homo sapien
cagaagttggatggtatcttggtcc

SEQ ID NO: 1767458 - DNA, 25 bp, Homo sapien
gattccacactgtggtggagcttgg

SEQ ID NO: 1767459 - DNA, 25 bp, Homo sapien
tctgggaaatctgctccacatatgg

SEQ ID NO: 1767460 - DNA, 25 bp, Homo sapien
cagagtatctgggagagattccaca

SEQ ID NO: 1767461 - DNA, 25 bp, Homo sapien
tttgcacagcgagtctgccaggttg

SEQ ID NO: 1767462 - DNA, 25 bp, Homo sapien
gccttttgatttgcacagcgagtct

SEQ ID NO: 1767463 - DNA, 25 bp, Homo sapien
ttgatttgcacagcgagtctgccag

SEQ ID NO: 1767464 - DNA, 25 bp, Homo sapien
ccttttgatttgcacagcgagtctg

SEQ ID NO: 1767465 - DNA, 25 bp, Homo sapien
ccttgcctgatctaagtctatgaga

SEQ ID NO: 1767466 - DNA, 25 bp, Homo sapien
tcagggatttgatgtctccttgcct

SEQ ID NO: 1767467 - DNA, 25 bp, Homo sapien
gcctgatctaagtctatgagagaat

SEQ ID NO: 1767468 - DNA, 25 bp, Homo sapien
catcaccatcagttcagtatcaggg

SEQ ID NO: 1767469 - DNA, 25 bp, Homo sapien
gccttgaccaccagataatttgctt

SEQ ID NO: 1767470 - DNA, 25 bp, Homo sapien
tcttcgtcgtaaaattgccaggagg

SEQ ID NO: 1767471 - DNA, 25 bp, Homo sapien
tgtgtattggtaagccttgaccacc

SEQ ID NO: 1767472 - DNA, 25 bp, Homo sapien
ttccaggtctatgagtcccaaaatc

SEQ ID NO: 1767473 - DNA, 25 bp, Homo sapien
cagccacaatggtctttgaaactca

SEQ ID NO: 1767474 - DNA, 25 bp, Homo sapien
aagaccttctacaatatggcccagc

SEQ ID NO: 1767475 - DNA, 25 bp, Homo sapien
gacccaaacacttgaaatggccacc

SEQ ID NO: 1767476 - DNA, 25 bp, Homo sapien
tctggtggtactagcctaaagaccc

SEQ ID NO: 1767477 - DNA, 25 bp, Homo sapien
ggagctggttgcagacttttatcat

SEQ ID NO: 1767478 - DNA, 25 bp, Homo sapien
gtgggagctgtttctcctgtgtctc

SEQ ID NO: 1767479 - DNA, 25 bp, Homo sapien
atgaaacctaagggtgggagctgtt

SEQ ID NO: 1767480 - DNA, 25 bp, Homo sapien
cctaagggtgggagctgtttctcct

SEQ ID NO: 1767481 - DNA, 25 bp, Homo sapien
taagggtgggagctgtttctcctgt

SEQ ID NO: 1767482 - DNA, 25 bp, Homo sapien
agaccatctcagatatgagtgtggg

SEQ ID NO: 1767483 - DNA, 25 bp, Homo sapien
actgagttatccaaagagagttttt

SEQ ID NO: 1767484 - DNA, 25 bp, Homo sapien
tccacagaccatctcagatatgagt

SEQ ID NO: 1767485 - DNA, 25 bp, Homo sapien
ctggaaatccacagaccatctcaga

SEQ ID NO: 1767486 - DNA, 25 bp, Homo sapien
tactagccagctgcccctagggaca

SEQ ID NO: 1767487 - DNA, 25 bp, Homo sapien
acatcaggccacaaggtcacacaaa

SEQ ID NO: 1767488 - DNA, 25 bp, Homo sapien
aggtgcacatccaactactagccag

SEQ ID NO: 1767489 - DNA, 25 bp, Homo sapien
gggacattaggcacaggaccgacat

SEQ ID NO: 1767490 - DNA, 25 bp, Homo sapien
tctttctacatgttgttccccctgt

SEQ ID NO: 1767491 - DNA, 25 bp, Homo sapien
cagagttcagtttagccagtgcttc

SEQ ID NO: 1767492 - DNA, 25 bp, Homo sapien
gagttcagtttagccagtgcttcct

SEQ ID NO: 1767493 - DNA, 25 bp, Homo sapien
ttctttctacatgttgttccccctg

SEQ ID NO: 1767494 - DNA, 25 bp, Homo sapien
tgaagccattccttaacataccatg

SEQ ID NO: 1767495 - DNA, 25 bp, Homo sapien
ccatggtctttcttgactcatttat

SEQ ID NO: 1767496 - DNA, 25 bp, Homo sapien
cattccttaacataccatggtcttt

SEQ ID NO: 1767497 - DNA, 25 bp, Homo sapien
accatggtctttcttgactcattta

SEQ ID NO: 1767498 - DNA, 25 bp, Homo sapien
taagggtagagctcatgttaagggt

SEQ ID NO: 1767499 - DNA, 25 bp, Homo sapien
gctatatgtctagttgcccatggga

SEQ ID NO: 1767500 - DNA, 25 bp, Homo sapien
tcacacaccgaataagtcaccaagt

SEQ ID NO: 1767501 - DNA, 25 bp, Homo sapien
taagtcagtccctttgtgatccgtc

SEQ ID NO: 1767502 - DNA, 25 bp, Homo sapien
tgatcatcatgcacttagtggcccc

SEQ ID NO: 1767503 - DNA, 25 bp, Homo sapien
gactgaggccaataactaaggaacc

SEQ ID NO: 1767504 - DNA, 25 bp, Homo sapien
tatccacatcgacagttagcaagtg

SEQ ID NO: 1767505 - DNA, 25 bp, Homo sapien
cctatcccctctatgaatgctcaga

SEQ ID NO: 1767506 - DNA, 25 bp, Homo sapien
tgttgaggatcatcgggtatcatca

SEQ ID NO: 1767507 - DNA, 25 bp, Homo sapien
aatctgccttcggtgagagcagagc

SEQ ID NO: 1767508 - DNA, 25 bp, Homo sapien
tcctgggggcaagatcctccttgtt

SEQ ID NO: 1767509 - DNA, 25 bp, Homo sapien
gggtatcatcaaagcctttatcagc

SEQ ID NO: 1767510 - DNA, 25 bp, Homo sapien
tgagcgtttaccaaagcccaaagcc

SEQ ID NO: 1767511 - DNA, 25 bp, Homo sapien
cagggaaggcctctggatgtttcag

SEQ ID NO: 1767512 - DNA, 25 bp, Homo sapien
gatagttggccattttgcagtaagc

SEQ ID NO: 1767513 - DNA, 25 bp, Homo sapien
ctgtgtgcgttcacgtgggccctaa

SEQ ID NO: 1767514 - DNA, 25 bp, Homo sapien
ggacagtctcatgaagatggaacat

SEQ ID NO: 1767515 - DNA, 25 bp, Homo sapien
gtagtggacagtctcatgaagatgg

SEQ ID NO: 1767516 - DNA, 25 bp, Homo sapien
gaagctgtcccagtagtggacagtc

SEQ ID NO: 1767517 - DNA, 25 bp, Homo sapien
gtggacagtctcatgaagatggaac

SEQ ID NO: 1767518 - DNA, 25 bp, Homo sapien
gaaagtgtgctcatcatgatgcgcg

SEQ ID NO: 1767519 - DNA, 25 bp, Homo sapien
tgtgctcatcatgatgcgcgcagcc

SEQ ID NO: 1767520 - DNA, 25 bp, Homo sapien
aagtgtgctcatcatgatgcgcgca

SEQ ID NO: 1767521 - DNA, 25 bp, Homo sapien
ttccgaaagtgtgctcatcatgatg

SEQ ID NO: 1767522 - DNA, 25 bp, Homo sapien
ttcctttgccagcactccgcagacc

SEQ ID NO: 1767523 - DNA, 25 bp, Homo sapien
cactccgcagaccccttaacctggc

SEQ ID NO: 1767524 - DNA, 25 bp, Homo sapien
ctccgcagaccccttaacctggctt

SEQ ID NO: 1767525 - DNA, 25 bp, Homo sapien
gcagaccccttaacctggctttaga

SEQ ID NO: 1767526 - DNA, 25 bp, Homo sapien
aatcacgactgggatcacaaaacag

SEQ ID NO: 1767527 - DNA, 25 bp, Homo sapien
gaaccaggagagcaaaatcacgact

SEQ ID NO: 1767528 - DNA, 25 bp, Homo sapien
ccaggatgcagacaacgatgccgat

SEQ ID NO: 1767529 - DNA, 25 bp, Homo sapien
tgcacagccttgtaccggatcagca

SEQ ID NO: 1767530 - DNA, 25 bp, Homo sapien
gattgctccttgattccaatcaacc

SEQ ID NO: 1767531 - DNA, 25 bp, Homo sapien
ttggattgctccttgattccaatca

SEQ ID NO: 1767532 - DNA, 25 bp, Homo sapien
ccttgattccaatcaacctagtcat

SEQ ID NO: 1767533 - DNA, 25 bp, Homo sapien
tgctccttgattccaatcaacctag

SEQ ID NO: 1767534 - DNA, 25 bp, Homo sapien
tcggatgatgtattcttcccagacg

SEQ ID NO: 1767535 - DNA, 25 bp, Homo sapien
ttcccagacgttagaaataccatag

SEQ ID NO: 1767536 - DNA, 25 bp, Homo sapien
aattccactcggctcagagttcgga

SEQ ID NO: 1767537 - DNA, 25 bp, Homo sapien
gtggctcctcctaagaccagaaggt

SEQ ID NO: 1767538 - DNA, 25 bp, Homo sapien
ctatttgccagtcccagggcacctt

SEQ ID NO: 1767539 - DNA, 25 bp, Homo sapien
ccagggcaccttcaacagttcctta

SEQ ID NO: 1767540 - DNA, 25 bp, Homo sapien
cagtcccagggcaccttcaacagtt

SEQ ID NO: 1767541 - DNA, 25 bp, Homo sapien
atttgccagtcccagggcaccttca

SEQ ID NO: 1767542 - DNA, 25 bp, Homo sapien
catgcaattccataagccacgttct

SEQ ID NO: 1767543 - DNA, 25 bp, Homo sapien
tccatgcaattccataagccacgtt

SEQ ID NO: 1767544 - DNA, 25 bp, Homo sapien
ttccatgcaattccataagccacgt

SEQ ID NO: 1767545 - DNA, 25 bp, Homo sapien
tttccatgcaattccataagccacg

SEQ ID NO: 1767546 - DNA, 25 bp, Homo sapien
gctgtagagaccaaacatgcaggca

SEQ ID NO: 1767547 - DNA, 25 bp, Homo sapien
tagtggaagagaaacaatccacaga

SEQ ID NO: 1767548 - DNA, 25 bp, Homo sapien
ctggttttctttatgacgactggca

SEQ ID NO: 1767549 - DNA, 25 bp, Homo sapien
catgcaggcactaaagccaacgtag

SEQ ID NO: 1767550 - DNA, 25 bp, Homo sapien
aagatgctctgcctaccaaggtgcc

SEQ ID NO: 1767551 - DNA, 25 bp, Homo sapien
tggtggctgtaataccactggtgag

SEQ ID NO: 1767552 - DNA, 25 bp, Homo sapien
gctccaggaacgtctacaccctgtt

SEQ ID NO: 1767553 - DNA, 25 bp, Homo sapien
gccacccccgagtgctgcggatggt

SEQ ID NO: 1767554 - DNA, 25 bp, Homo sapien
caagacaactagacgaacctggctc

SEQ ID NO: 1767555 - DNA, 25 bp, Homo sapien
tacaattgcttggtgcaggacgaaa

SEQ ID NO: 1767556 - DNA, 25 bp, Homo sapien
tgtggcctgtaacggtaagaccctg

SEQ ID NO: 1767557 - DNA, 25 bp, Homo sapien
tgggcccgagccaattgctattcag

SEQ ID NO: 1767558 - DNA, 25 bp, Homo sapien
cttaaacttcggtgaatgaaatagg

SEQ ID NO: 1767559 - DNA, 25 bp, Homo sapien
aataggtctgttcctaacattacca

SEQ ID NO: 1767560 - DNA, 25 bp, Homo sapien
gaaataggtctgttcctaacattac

SEQ ID NO: 1767561 - DNA, 25 bp, Homo sapien
tcggtgaatgaaataggtctgttcc

SEQ ID NO: 1767562 - DNA, 25 bp, Homo sapien
ttgcggaactgcttatacactcggg

SEQ ID NO: 1767563 - DNA, 25 bp, Homo sapien
caacaggtcctgaaggattgcggaa

SEQ ID NO: 1767564 - DNA, 25 bp, Homo sapien
cacctgagctgtggtcggtaagtcc

SEQ ID NO: 1767565 - DNA, 25 bp, Homo sapien
atgaggctcctcttcggtctcctgg

SEQ ID NO: 1767566 - DNA, 25 bp, Homo sapien
gaagtatatggtcagttgcccctcc

SEQ ID NO: 1767567 - DNA, 25 bp, Homo sapien
gagatgatgggcaaaaacatggcca

SEQ ID NO: 1767568 - DNA, 25 bp, Homo sapien
taggcatccttccaagtcaggtgga

SEQ ID NO: 1767569 - DNA, 25 bp, Homo sapien
gattagcagaatcacgtggcacaac

SEQ ID NO: 1767570 - DNA, 25 bp, Homo sapien
tcattgaggaagtgagaaccaccac

SEQ ID NO: 1767571 - DNA, 25 bp, Homo sapien
caatttcatgggacacggtggtgca

SEQ ID NO: 1767572 - DNA, 25 bp, Homo sapien
cacttacccgttatagaaggcaggc

SEQ ID NO: 1767573 - DNA, 25 bp, Homo sapien
cataagaatgtcgtgtcggccgggc

SEQ ID NO: 1767574 - DNA, 25 bp, Homo sapien
aaggaggtctgaacagtcaggctga

SEQ ID NO: 1767575 - DNA, 25 bp, Homo sapien
aagaaggaggtctgaacagtcaggc

SEQ ID NO: 1767576 - DNA, 25 bp, Homo sapien
ggaggtctgaacagtcaggctgagg

SEQ ID NO: 1767577 - DNA, 25 bp, Homo sapien
ccaagaaggaggtctgaacagtcag

SEQ ID NO: 1767578 - DNA, 25 bp, Homo sapien
ccattggaggcacggcacatggctt

SEQ ID NO: 1767579 - DNA, 25 bp, Homo sapien
gaaggtgccacaggttatctcaatt

SEQ ID NO: 1767580 - DNA, 25 bp, Homo sapien
ggtgccacaggttatctcaattaac

SEQ ID NO: 1767581 - DNA, 25 bp, Homo sapien
tcccatcatcttgagtttgcctcca

SEQ ID NO: 1767582 - DNA, 25 bp, Homo sapien
tgggcaaaatcaatgcctttggtct

SEQ ID NO: 1767583 - DNA, 25 bp, Homo sapien
gctattagttgctcttgtgcttccc

SEQ ID NO: 1767584 - DNA, 25 bp, Homo sapien
ccctgagttgacatctttgctggag

SEQ ID NO: 1767585 - DNA, 25 bp, Homo sapien
tgtgcttcccagagaaatcttggcg

SEQ ID NO: 1767586 - DNA, 25 bp, Homo sapien
cagactctaagtcttaagtgagtgg

SEQ ID NO: 1767587 - DNA, 25 bp, Homo sapien
cttaagtgagtggtgtagtgatgaa

SEQ ID NO: 1767588 - DNA, 25 bp, Homo sapien
gacttggctgagtgtacatccagac

SEQ ID NO: 1767589 - DNA, 25 bp, Homo sapien
ggactgtgagatttgttcctcggtg

SEQ ID NO: 1767590 - DNA, 25 bp, Homo sapien
tttgtctttcagattctgtaaacat

SEQ ID NO: 1767591 - DNA, 25 bp, Homo sapien
ctttgtctttcagattctgtaaaca

SEQ ID NO: 1767592 - DNA, 25 bp, Homo sapien
ttctctctcttagaatacttagcaa

SEQ ID NO: 1767593 - DNA, 25 bp, Homo sapien
tctctcttagaatacttagcaacca

SEQ ID NO: 1767594 - DNA, 25 bp, Homo sapien
cttagaatacttagcaaccatgttt

SEQ ID NO: 1767595 - DNA, 25 bp, Homo sapien
tctcttagaatacttagcaaccatg

SEQ ID NO: 1767596 - DNA, 25 bp, Homo sapien
gtaggttgacaagggcctctgctgt

SEQ ID NO: 1767597 - DNA, 25 bp, Homo sapien
taaagtgctgtgaaaataggcccag

SEQ ID NO: 1767598 - DNA, 25 bp, Homo sapien
tccgagcttgctgtttgtgatggct

SEQ ID NO: 1767599 - DNA, 25 bp, Homo sapien
gcccaggctgtggtgacttaagtac

SEQ ID NO: 1767600 - DNA, 25 bp, Homo sapien
catcaacaattcctgatagataggc

SEQ ID NO: 1767601 - DNA, 25 bp, Homo sapien
caacaattcctgatagataggccat

SEQ ID NO: 1767602 - DNA, 25 bp, Homo sapien
tcaacaattcctgatagataggcca

SEQ ID NO: 1767603 - DNA, 25 bp, Homo sapien
catcagcagtgatggccacatcaca

SEQ ID NO: 1767604 - DNA, 25 bp, Homo sapien
aaaaatctgtcctcggagtagacct

SEQ ID NO: 1767605 - DNA, 25 bp, Homo sapien
tgtaaaaagatgctagagtattccc

SEQ ID NO: 1767606 - DNA, 25 bp, Homo sapien
tctgctttcgagcatgagccagaat

SEQ ID NO: 1767607 - DNA, 25 bp, Homo sapien
tcccaagaatggttgaagttgttca

SEQ ID NO: 1767608 - DNA, 25 bp, Homo sapien
tctagtttctaagacttcttctctg

SEQ ID NO: 1767609 - DNA, 25 bp, Homo sapien
tttaggattgttaagggttgataga

SEQ ID NO: 1767610 - DNA, 25 bp, Homo sapien
ctctagtttctaagacttcttctct

SEQ ID NO: 1767611 - DNA, 25 bp, Homo sapien
taggattgttaagggttgatagagc

SEQ ID NO: 1767612 - DNA, 25 bp, Homo sapien
taaagcctagctgcaaatgtagcaa

SEQ ID NO: 1767613 - DNA, 25 bp, Homo sapien
tcagaaaatcctagcttgcctccag

SEQ ID NO: 1767614 - DNA, 25 bp, Homo sapien
gatccccaggtacagattggaattg

SEQ ID NO: 1767615 - DNA, 25 bp, Homo sapien
tgggaaatgaacttgcaagagcagt

SEQ ID NO: 1767616 - DNA, 25 bp, Homo sapien
aattatctggctccaaacaagaaca

SEQ ID NO: 1767617 - DNA, 25 bp, Homo sapien
tatctggctccaaacaagaacacat

SEQ ID NO: 1767618 - DNA, 25 bp, Homo sapien
tccaaacaagaacacatttcctggg

SEQ ID NO: 1767619 - DNA, 25 bp, Homo sapien
catttcctgggcactaatgcttcca

SEQ ID NO: 1767620 - DNA, 25 bp, Homo sapien
ccttgtcaggatgccccaaaaggca

SEQ ID NO: 1767621 - DNA, 25 bp, Homo sapien
tagctagggcttctctattcaccat

SEQ ID NO: 1767622 - DNA, 25 bp, Homo sapien
actccctgtgttcatccgactttga

SEQ ID NO: 1767623 - DNA, 25 bp, Homo sapien
gctgtattggtggagaaggataatt

SEQ ID NO: 1767624 - DNA, 25 bp, Homo sapien
tttttgatctgctggcaaccacaag

SEQ ID NO: 1767625 - DNA, 25 bp, Homo sapien
tatcagttcttatcagaagtgtggc

SEQ ID NO: 1767626 - DNA, 25 bp, Homo sapien
caagactttgagctagggctgaaga

SEQ ID NO: 1767627 - DNA, 25 bp, Homo sapien
ttcatcattgtatcgaattctctta

SEQ ID NO: 1767628 - DNA, 25 bp, Homo sapien
ctgccacacatcaaacagtgttgtc

SEQ ID NO: 1767629 - DNA, 25 bp, Homo sapien
tttcacacaaagcaagccgtgggat

SEQ ID NO: 1767630 - DNA, 25 bp, Homo sapien
cagtgttgtccatatgcctttcaca

SEQ ID NO: 1767631 - DNA, 25 bp, Homo sapien
cgtgggatattgcataaaactgctg

SEQ ID NO: 1767632 - DNA, 25 bp, Homo sapien
ttagttggcacgaggcctcttattt

SEQ ID NO: 1767633 - DNA, 25 bp, Homo sapien
tagttggcacgaggcctcttatttt

SEQ ID NO: 1767634 - DNA, 25 bp, Homo sapien
agttggcacgaggcctcttattttc

SEQ ID NO: 1767635 - DNA, 25 bp, Homo sapien
ttggcacgaggcctcttattttctt

SEQ ID NO: 1767636 - DNA, 25 bp, Homo sapien
cctggtgatggctccgaataatcac

SEQ ID NO: 1767637 - DNA, 25 bp, Homo sapien
ggtccattggtcactataagaaaca

SEQ ID NO: 1767638 - DNA, 25 bp, Homo sapien
gcttaactgggctgctcttagtgga

SEQ ID NO: 1767639 - DNA, 25 bp, Homo sapien
tcttagtggaagcagcccctggtga

SEQ ID NO: 1767640 - DNA, 25 bp, Homo sapien
tttcagttgtagatacttctttctg

SEQ ID NO: 1767641 - DNA, 25 bp, Homo sapien
tttatttcagttgtagatacttctt

SEQ ID NO: 1767642 - DNA, 25 bp, Homo sapien
cagttgtagatacttctttctggat

SEQ ID NO: 1767643 - DNA, 25 bp, Homo sapien
tagatacttctttctggattcccat

SEQ ID NO: 1767644 - DNA, 25 bp, Homo sapien
ctgttgaccacaaggaaggaggttc

SEQ ID NO: 1767645 - DNA, 25 bp, Homo sapien
tgttgaccacaaggaaggaggttct

SEQ ID NO: 1767646 - DNA, 25 bp, Homo sapien
ttgaccacaaggaaggaggttctgg

SEQ ID NO: 1767647 - DNA, 25 bp, Homo sapien
gttgaccacaaggaaggaggttctg

SEQ ID NO: 1767648 - DNA, 25 bp, Homo sapien
tccaggggcaactatcccacactga

SEQ ID NO: 1767649 - DNA, 25 bp, Homo sapien
ccaggggcaactatcccacactgag

SEQ ID NO: 1767650 - DNA, 25 bp, Homo sapien
caggggcaactatcccacactgagc

SEQ ID NO: 1767651 - DNA, 25 bp, Homo sapien
agccatttgaaactccacttggtca

SEQ ID NO: 1767652 - DNA, 25 bp, Homo sapien
gccatttgaaactccacttggtcat

SEQ ID NO: 1767653 - DNA, 25 bp, Homo sapien
agatagatgtctttggagcccagcc

SEQ ID NO: 1767654 - DNA, 25 bp, Homo sapien
ccttccctgtgtagtgagctggaaa

SEQ ID NO: 1767655 - DNA, 25 bp, Homo sapien
gagctggaaactcctttagattgta

SEQ ID NO: 1767656 - DNA, 25 bp, Homo sapien
gctaggtggttacattaaaaagcac

SEQ ID NO: 1767657 - DNA, 25 bp, Homo sapien
tagatagacttggagggattttgtg

SEQ ID NO: 1767658 - DNA, 25 bp, Homo sapien
ttaacaaaactactgctgatgcatt

SEQ ID NO: 1767659 - DNA, 25 bp, Homo sapien
aaaagggagttaagatgtgctagtt

SEQ ID NO: 1767660 - DNA, 25 bp, Homo sapien
gtgctagtttaagtagttagctgaa

SEQ ID NO: 1767661 - DNA, 25 bp, Homo sapien
taacctctgtttgtatgggacagca

SEQ ID NO: 1767662 - DNA, 25 bp, Homo sapien
ctcgtaggagagtgttggcagcaat

SEQ ID NO: 1767663 - DNA, 25 bp, Homo sapien
taggacatctttgcacacagacaga

SEQ ID NO: 1767664 - DNA, 25 bp, Homo sapien
gacagttgagtccaagttagagagc

SEQ ID NO: 1767665 - DNA, 25 bp, Homo sapien
caagttagccatgaagtctgtggtc

SEQ ID NO: 1767666 - DNA, 25 bp, Homo sapien
tcatgttgctgagatccattgggtg

SEQ ID NO: 1767667 - DNA, 25 bp, Homo sapien
ctgtgagatgtctgttctgtctttc

SEQ ID NO: 1767668 - DNA, 25 bp, Homo sapien
gaagttatccgttagttcttcactg

SEQ ID NO: 1767669 - DNA, 25 bp, Homo sapien
actgtctctctaaattactgctttt

SEQ ID NO: 1767670 - DNA, 25 bp, Homo sapien
ccactgactgttaacaagccacctg

SEQ ID NO: 1767671 - DNA, 25 bp, Homo sapien
attcccactgactgttaacaagcca

SEQ ID NO: 1767672 - DNA, 25 bp, Homo sapien
aggatggggaagtcccagtcttctt

SEQ ID NO: 1767673 - DNA, 25 bp, Homo sapien
gaagtcccagtcttcttgttccatc

SEQ ID NO: 1767674 - DNA, 25 bp, Homo sapien
cagaatattcactccagactgaagt

SEQ ID NO: 1767675 - DNA, 25 bp, Homo sapien
ccctgcagaatattcactccagact

SEQ ID NO: 1767676 - DNA, 25 bp, Homo sapien
gaacccctgcagaatattcactcca

SEQ ID NO: 1767677 - DNA, 25 bp, Homo sapien
tgcagaatattcactccagactgaa

SEQ ID NO: 1767678 - DNA, 25 bp, Homo sapien
cggtacataagaactccagggtcca

SEQ ID NO: 1767679 - DNA, 25 bp, Homo sapien
cataatgcggtacataagaactcca

SEQ ID NO: 1767680 - DNA, 25 bp, Homo sapien
tgcggtacataagaactccagggtc

SEQ ID NO: 1767681 - DNA, 25 bp, Homo sapien
aatgcggtacataagaactccaggg

SEQ ID NO: 1767682 - DNA, 25 bp, Homo sapien
tgtatgagggatccaagagacatca

SEQ ID NO: 1767683 - DNA, 25 bp, Homo sapien
tcagtgccatgagcctatcttgagt

SEQ ID NO: 1767684 - DNA, 25 bp, Homo sapien
ccttcatcgtcaggtgatatctcca

SEQ ID NO: 1767685 - DNA, 25 bp, Homo sapien
tatctccaactcttatagggccctg

SEQ ID NO: 1767686 - DNA, 25 bp, Homo sapien
tcaactcccactaggtccactccgt

SEQ ID NO: 1767687 - DNA, 25 bp, Homo sapien
ctggagttacttgttgtacaagttc

SEQ ID NO: 1767688 - DNA, 25 bp, Homo sapien
gatcttctgttaaatctacaaagtt

SEQ ID NO: 1767689 - DNA, 25 bp, Homo sapien
cactaggtccactccgtgtcttttt

SEQ ID NO: 1767690 - DNA, 25 bp, Homo sapien
aaatatttgatatcttgtgaaagcg

SEQ ID NO: 1767691 - DNA, 25 bp, Homo sapien
gaatctactaagtaataagctagga

SEQ ID NO: 1767692 - DNA, 25 bp, Homo sapien
aattggaaagaaccaacatgttcac

SEQ ID NO: 1767693 - DNA, 25 bp, Homo sapien
gattgcttatatagatggtagtgaa

SEQ ID NO: 1767694 - DNA, 25 bp, Homo sapien
ccctgggtttgattaacttgctgaa

SEQ ID NO: 1767695 - DNA, 25 bp, Homo sapien
gagttcacataactccctccctggg

SEQ ID NO: 1767696 - DNA, 25 bp, Homo sapien
ggaatgtggagatcccatgccatct

SEQ ID NO: 1767697 - DNA, 25 bp, Homo sapien
cccaaatgcttcttaccaactggct

SEQ ID NO: 1767698 - DNA, 25 bp, Homo sapien
ttaggagagcagtgtataagaactc

SEQ ID NO: 1767699 - DNA, 25 bp, Homo sapien
ctcccagccatgctaacagagtgtg

SEQ ID NO: 1767700 - DNA, 25 bp, Homo sapien
aagaatatgtacattatctggcacc

SEQ ID NO: 1767701 - DNA, 25 bp, Homo sapien
gtatcccttccagagttgatgcata

SEQ ID NO: 1767702 - DNA, 25 bp, Homo sapien
tagctggggagttttctgactctgt

SEQ ID NO: 1767703 - DNA, 25 bp, Homo sapien
tatgaagtcttacgggtgtttagct

SEQ ID NO: 1767704 - DNA, 25 bp, Homo sapien
cacagtatagagtattgtgttgtat

SEQ ID NO: 1767705 - DNA, 25 bp, Homo sapien
gagtattgtgttgtatgaagtctta

SEQ ID NO: 1767706 - DNA, 25 bp, Homo sapien
gatcttataatcctacaacagctaa

SEQ ID NO: 1767707 - DNA, 25 bp, Homo sapien
caaattgggtgtaaaggagatgacc

SEQ ID NO: 1767708 - DNA, 25 bp, Homo sapien
taaatctgctttacacgctaaaatg

SEQ ID NO: 1767709 - DNA, 25 bp, Homo sapien
caacagctaactgttattgaaaaag

SEQ ID NO: 1767710 - DNA, 25 bp, Homo sapien
agttttaagtggtcgagagaaagat

SEQ ID NO: 1767711 - DNA, 25 bp, Homo sapien
taagtggtcgagagaaagataaaaa

SEQ ID NO: 1767712 - DNA, 25 bp, Homo sapien
ttttaagtggtcgagagaaagataa

SEQ ID NO: 1767713 - DNA, 25 bp, Homo sapien
ctgaagttttaagtggtcgagagaa

SEQ ID NO: 1767714 - DNA, 25 bp, Homo sapien
gaggctcttcttatagctgagcgag

SEQ ID NO: 1767715 - DNA, 25 bp, Homo sapien
cgagtgaggtattggactttctcca

SEQ ID NO: 1767716 - DNA, 25 bp, Homo sapien
ctgtagcttttgacgtgcttgttga

SEQ ID NO: 1767717 - DNA, 25 bp, Homo sapien
gaagcatcacgatgatacagatcag

SEQ ID NO: 1767718 - DNA, 25 bp, Homo sapien
ctggaatggaagacaacctgcaaaa

SEQ ID NO: 1767719 - DNA, 25 bp, Homo sapien
tgatgtggcaagctgcagatctaga

SEQ ID NO: 1767720 - DNA, 25 bp, Homo sapien
tagctcagataattcactacagtgc

SEQ ID NO: 1767721 - DNA, 25 bp, Homo sapien
cagatctagaggttgtagcagaact

SEQ ID NO: 1767722 - DNA, 25 bp, Homo sapien
tagttaagattttgcggacccacga

SEQ ID NO: 1767723 - DNA, 25 bp, Homo sapien
aagggtcagctgtagatgtaataga

SEQ ID NO: 1767724 - DNA, 25 bp, Homo sapien
gatgggccaacaagttcatttcaaa

SEQ ID NO: 1767725 - DNA, 25 bp, Homo sapien
tgcggacccacgaattgtcagctcc

SEQ ID NO: 1767726 - DNA, 25 bp, Homo sapien
atgttatcagtaaggtttatggtca

SEQ ID NO: 1767727 - DNA, 25 bp, Homo sapien
tatcagtaaggtttatggtcaatag

SEQ ID NO: 1767728 - DNA, 25 bp, Homo sapien
atcagtaaggtttatggtcaatagt

SEQ ID NO: 1767729 - DNA, 25 bp, Homo sapien
gttatcagtaaggtttatggtcaat

SEQ ID NO: 1767730 - DNA, 25 bp, Homo sapien
tgtaggaatatagtgtataatacat

SEQ ID NO: 1767731 - DNA, 25 bp, Homo sapien
tttattgtaggaatatagtgtataa

SEQ ID NO: 1767732 - DNA, 25 bp, Homo sapien
attgtaggaatatagtgtataatac

SEQ ID NO: 1767733 - DNA, 25 bp, Homo sapien
actttattgtaggaatatagtgtat

SEQ ID NO: 1767734 - DNA, 25 bp, Homo sapien
gaatagtaaatatattttctctttc

SEQ ID NO: 1767735 - DNA, 25 bp, Homo sapien
aatgaatagtaaatatattttctct

SEQ ID NO: 1767736 - DNA, 25 bp, Homo sapien
taaatatattttctctttcttatga

SEQ ID NO: 1767737 - DNA, 25 bp, Homo sapien
gacccacttccatttaatgaatagt

SEQ ID NO: 1767738 - DNA, 25 bp, Homo sapien
tccagcttgtagatgaggcgtcact

SEQ ID NO: 1767739 - DNA, 25 bp, Homo sapien
caagggcttgaattgcaagggtcca

SEQ ID NO: 1767740 - DNA, 25 bp, Homo sapien
aatttagctcagtagagtggactgc

SEQ ID NO: 1767741 - DNA, 25 bp, Homo sapien
cactattgagttagcaacacttgtg

SEQ ID NO: 1767742 - DNA, 25 bp, Homo sapien
aagataagaacttattctatagtag

SEQ ID NO: 1767743 - DNA, 25 bp, Homo sapien
tatatcttattctttacactttatg

SEQ ID NO: 1767744 - DNA, 25 bp, Homo sapien
cttatatcttattctttacacttta

SEQ ID NO: 1767745 - DNA, 25 bp, Homo sapien
ataagaacttattctatagtagaac

SEQ ID NO: 1767746 - DNA, 25 bp, Homo sapien
cattcattaggtagttaaagaggac

SEQ ID NO: 1767747 - DNA, 25 bp, Homo sapien
gacactccctatattaggatatgac

SEQ ID NO: 1767748 - DNA, 25 bp, Homo sapien
gatgtgaacactatgacactcccta

SEQ ID NO: 1767749 - DNA, 25 bp, Homo sapien
tacgtcctgtgaacagaaagttttc

SEQ ID NO: 1767750 - DNA, 25 bp, Homo sapien
gccatatatggtgatgtgcccctgt

SEQ ID NO: 1767751 - DNA, 25 bp, Homo sapien
aaaaatttggaccaagcatggtagc

SEQ ID NO: 1767752 - DNA, 25 bp, Homo sapien
tatttagtcataagggtgtttgaac

SEQ ID NO: 1767753 - DNA, 25 bp, Homo sapien
gctacttgggaaccaaggttggaga

SEQ ID NO: 1767754 - DNA, 25 bp, Homo sapien
ctccagctggtgtctttacacagaa

SEQ ID NO: 1767755 - DNA, 25 bp, Homo sapien
tggacaaatctctggtttaaacaag

SEQ ID NO: 1767756 - DNA, 25 bp, Homo sapien
tacacagaattggagctgtccagtg

SEQ ID NO: 1767757 - DNA, 25 bp, Homo sapien
gctattccaaactagagtaggtgtg

SEQ ID NO: 1767758 - DNA, 25 bp, Homo sapien
tgaaagcaagcccattatgacaagc

SEQ ID NO: 1767759 - DNA, 25 bp, Homo sapien
taatgcttggtcaacaggcagtagg

SEQ ID NO: 1767760 - DNA, 25 bp, Homo sapien
aagcaagcccattatgacaagctca

SEQ ID NO: 1767761 - DNA, 25 bp, Homo sapien
aaatatttaatgcttggtcaacagg

SEQ ID NO: 1767762 - DNA, 25 bp, Homo sapien
gatgcctctgctgttgcctgtatca

SEQ ID NO: 1767763 - DNA, 25 bp, Homo sapien
aaatggtagctccacaccgagtcca

SEQ ID NO: 1767764 - DNA, 25 bp, Homo sapien
actgctgttgtggaaaggtgatgcc

SEQ ID NO: 1767765 - DNA, 25 bp, Homo sapien
gaactgtcagtcttccaccactaag

SEQ ID NO: 1767766 - DNA, 25 bp, Homo sapien
tgattggacgattcagtgttttcag

SEQ ID NO: 1767767 - DNA, 25 bp, Homo sapien
tttactggctggttgagcacatagg

SEQ ID NO: 1767768 - DNA, 25 bp, Homo sapien
agtcagcagaagttgtttactggct

SEQ ID NO: 1767769 - DNA, 25 bp, Homo sapien
attcttttggcttcatgattggacg

SEQ ID NO: 1767770 - DNA, 25 bp, Homo sapien
ttcccggaggagaatgatatcccag

SEQ ID NO: 1767771 - DNA, 25 bp, Homo sapien
caggtttattcttcacactgggtgg

SEQ ID NO: 1767772 - DNA, 25 bp, Homo sapien
tcttcctgtgttgccgagagtccag

SEQ ID NO: 1767773 - DNA, 25 bp, Homo sapien
tgtcgccgtggtatctgtactgtag

SEQ ID NO: 1767774 - DNA, 25 bp, Homo sapien
ggagatctccacaaggtaagactag

SEQ ID NO: 1767775 - DNA, 25 bp, Homo sapien
tcggctttccggagtgctatttcag

SEQ ID NO: 1767776 - DNA, 25 bp, Homo sapien
tatttcagttgttaggagtaccagg

SEQ ID NO: 1767777 - DNA, 25 bp, Homo sapien
gatgtaatctcgctaggaggccttg

SEQ ID NO: 1767778 - DNA, 25 bp, Homo sapien
ggcgcggtctcggctcatggcaacg

SEQ ID NO: 1767779 - DNA, 25 bp, Homo sapien
gcgcggtctcggctcatggcaacgt

SEQ ID NO: 1767780 - DNA, 25 bp, Homo sapien
gcggtctcggctcatggcaacgtcc

SEQ ID NO: 1767781 - DNA, 25 bp, Homo sapien
ggtctcggctcatggcaacgtccgc

SEQ ID NO: 1767782 - DNA, 25 bp, Homo sapien
tattagataagtatctggcaatatc

SEQ ID NO: 1767783 - DNA, 25 bp, Homo sapien
tctttattagataagtatctggcaa

SEQ ID NO: 1767784 - DNA, 25 bp, Homo sapien
agtctgacctcggagacgaagcagc

SEQ ID NO: 1767785 - DNA, 25 bp, Homo sapien
ggagcagtctgacctcggagacgaa

SEQ ID NO: 1767786 - DNA, 25 bp, Homo sapien
ctctgagtttttcagctttccccac

SEQ ID NO: 1767787 - DNA, 25 bp, Homo sapien
tatacacataggtgattttctctga

SEQ ID NO: 1767788 - DNA, 25 bp, Homo sapien
cctagtttagtcatggtctcatagt

SEQ ID NO: 1767789 - DNA, 25 bp, Homo sapien
ctagagacctagtttagtcatggtc

SEQ ID NO: 1767790 - DNA, 25 bp, Homo sapien
tctatatcagaatcattcccctgga

SEQ ID NO: 1767791 - DNA, 25 bp, Homo sapien
ctgcagttttagtctatatcagaat

SEQ ID NO: 1767792 - DNA, 25 bp, Homo sapien
cagtccgtgggtccagacgtgttcc

SEQ ID NO: 1767793 - DNA, 25 bp, Homo sapien
gatactttctctctcgcagtccgtg

SEQ ID NO: 1767794 - DNA, 25 bp, Homo sapien
tggaaagttcccttgtagcatgccg

SEQ ID NO: 1767795 - DNA, 25 bp, Homo sapien
tcccattgttttgtgagccagatgt

SEQ ID NO: 1767796 - DNA, 25 bp, Homo sapien
tcatcttcctcagggtttctgatct

SEQ ID NO: 1767797 - DNA, 25 bp, Homo sapien
ttgtcatcttcctcagggtttctga

SEQ ID NO: 1767798 - DNA, 25 bp, Homo sapien
cctcagggtttctgatctcttcata

SEQ ID NO: 1767799 - DNA, 25 bp, Homo sapien
ctcagggtttctgatctcttcataa

SEQ ID NO: 1767800 - DNA, 25 bp, Homo sapien
accatacacccgtttgaagtgtaca

SEQ ID NO: 1767801 - DNA, 25 bp, Homo sapien
tcttttataaaaacctcaggctcga

SEQ ID NO: 1767802 - DNA, 25 bp, Homo sapien
gcagtacagtaatggacttatacca

SEQ ID NO: 1767803 - DNA, 25 bp, Homo sapien
cagcattattgcgatgcgctgcccc

SEQ ID NO: 1767804 - DNA, 25 bp, Homo sapien
catattgttcattggtgtggtttcc

SEQ ID NO: 1767805 - DNA, 25 bp, Homo sapien
ctacttcaatatttaacgccctttg

SEQ ID NO: 1767806 - DNA, 25 bp, Homo sapien
tctgaggttgtagtgtacattctac

SEQ ID NO: 1767807 - DNA, 25 bp, Homo sapien
tttgcttgatggtcccatattgttc

SEQ ID NO: 1767808 - DNA, 25 bp, Homo sapien
tgggtagagttattatgtgtactgt

SEQ ID NO: 1767809 - DNA, 25 bp, Homo sapien
gcttagaatattgaagtctgggtat

SEQ ID NO: 1767810 - DNA, 25 bp, Homo sapien
gaataatcaagctactgtaagtaaa

SEQ ID NO: 1767811 - DNA, 25 bp, Homo sapien
cagtgtgagacatagactgaggttt

SEQ ID NO: 1767812 - DNA, 25 bp, Homo sapien
acagagcacaggttccctcccatac

SEQ ID NO: 1767813 - DNA, 25 bp, Homo sapien
gatccttctatcatggtctcaagtg

SEQ ID NO: 1767814 - DNA, 25 bp, Homo sapien
tagtggtgcataccgtcatacctgg

SEQ ID NO: 1767815 - DNA, 25 bp, Homo sapien
ctggcctcatagagcacaagtttta

SEQ ID NO: 1767816 - DNA, 25 bp, Homo sapien
ccactgctagcttgggtgattgcct

SEQ ID NO: 1767817 - DNA, 25 bp, Homo sapien
tatgcttactcgttttgtggccttg

SEQ ID NO: 1767818 - DNA, 25 bp, Homo sapien
tgagttttacagctttccaagcccc

SEQ ID NO: 1767819 - DNA, 25 bp, Homo sapien
ttaagagaccagtgggctgatcctg

SEQ ID NO: 1767820 - DNA, 25 bp, Homo sapien
tatcaggagacacagtatagcttct

SEQ ID NO: 1767821 - DNA, 25 bp, Homo sapien
tgttccatctaaccatcgaaataac

SEQ ID NO: 1767822 - DNA, 25 bp, Homo sapien
atagcttctgacagtggagacactg

SEQ ID NO: 1767823 - DNA, 25 bp, Homo sapien
taatgaatcattgtggcaggccaca

SEQ ID NO: 1767824 - DNA, 25 bp, Homo sapien
aaggggtctgtttgtatcggacagc

SEQ ID NO: 1767825 - DNA, 25 bp, Homo sapien
gtttgctgcattccgtatctgaagg

SEQ ID NO: 1767826 - DNA, 25 bp, Homo sapien
tcaaggaaaattaggggtttgctgc

SEQ ID NO: 1767827 - DNA, 25 bp, Homo sapien
gggtctgtttgtatcggacagccat

SEQ ID NO: 1767828 - DNA, 25 bp, Homo sapien
ctgcgtgataacggggcttgcccgt

SEQ ID NO: 1767829 - DNA, 25 bp, Homo sapien
gacccgggcgggaaggtcgctgcga

SEQ ID NO: 1767830 - DNA, 25 bp, Homo sapien
gcttgcccgtttgctcgcggggacc

SEQ ID NO: 1767831 - DNA, 25 bp, Homo sapien
cgggcgggaaggtcgctgcgacagt

SEQ ID NO: 1767832 - DNA, 25 bp, Homo sapien
agcacccgggctgacatatggcttg

SEQ ID NO: 1767833 - DNA, 25 bp, Homo sapien
ccgcgggttgggctttattgtctgc

SEQ ID NO: 1767834 - DNA, 25 bp, Homo sapien
atggcttgccgcgtcccaggcgcat

SEQ ID NO: 1767835 - DNA, 25 bp, Homo sapien
ccaacttccagctcgcttgggcccc

SEQ ID NO: 1767836 - DNA, 25 bp, Homo sapien
tgccggtaaggaacgggacagcgcc

SEQ ID NO: 1767837 - DNA, 25 bp, Homo sapien
ctgccggtaaggaacgggacagcgc

SEQ ID NO: 1767838 - DNA, 25 bp, Homo sapien
gcgcaagtttccgccgccgaagaag

SEQ ID NO: 1767839 - DNA, 25 bp, Homo sapien
ctgagcagccgttaaccagccatcc

SEQ ID NO: 1767840 - DNA, 25 bp, Homo sapien
gacgtgaggagtcgggcgtccctgg

SEQ ID NO: 1767841 - DNA, 25 bp, Homo sapien
ctccggaggccagcggccgggatag

SEQ ID NO: 1767842 - DNA, 25 bp, Homo sapien
gtgcggcgaatctggcccctgcgct

SEQ ID NO: 1767843 - DNA, 25 bp, Homo sapien
gcagtgcggcgaatctggcccctgc

SEQ ID NO: 1767844 - DNA, 25 bp, Homo sapien
cggcagtgcggcgaatctggcccct

SEQ ID NO: 1767845 - DNA, 25 bp, Homo sapien
cttggccatggcaggcgccggcagt

SEQ ID NO: 1767846 - DNA, 25 bp, Homo sapien
caccgccgagtcgccgcttccccgg

SEQ ID NO: 1767847 - DNA, 25 bp, Homo sapien
ccgccgagtcgccgcttccccggcg

SEQ ID NO: 1767848 - DNA, 25 bp, Homo sapien
tcaccgccgagtcgccgcttccccg

SEQ ID NO: 1767849 - DNA, 25 bp, Homo sapien
aaagtgcacagtctagcggttttta

SEQ ID NO: 1767850 - DNA, 25 bp, Homo sapien
cagtctagcggtttttaatggttgt

SEQ ID NO: 1767851 - DNA, 25 bp, Homo sapien
tatgtggtttttgtgtcgggattct

SEQ ID NO: 1767852 - DNA, 25 bp, Homo sapien
gtgcacagtctagcggtttttaatg

SEQ ID NO: 1767853 - DNA, 25 bp, Homo sapien
gcactgtaatcccaggctcacgcct

SEQ ID NO: 1767854 - DNA, 25 bp, Homo sapien
acccagccacagcaggtggatcacc

SEQ ID NO: 1767855 - DNA, 25 bp, Homo sapien
taataattaaggtaaaatagatcta

SEQ ID NO: 1767856 - DNA, 25 bp, Homo sapien
gtaatcccacccagccacagcaggt

SEQ ID NO: 1767857 - DNA, 25 bp, Homo sapien
cactaggatgctgcactgattttcc

SEQ ID NO: 1767858 - DNA, 25 bp, Homo sapien
tagtttgccatagggaatgttaccc

SEQ ID NO: 1767859 - DNA, 25 bp, Homo sapien
aaagctgtctgatgaaatcactgcc

SEQ ID NO: 1767860 - DNA, 25 bp, Homo sapien
catcattactgctggagttgggaaa

SEQ ID NO: 1767861 - DNA, 25 bp, Homo sapien
taatagtctttaccgtcagggttca

SEQ ID NO: 1767862 - DNA, 25 bp, Homo sapien
caaaaggacaattacagatacaact

SEQ ID NO: 1767863 - DNA, 25 bp, Homo sapien
catgaagtgtataatgctgggaata

SEQ ID NO: 1767864 - DNA, 25 bp, Homo sapien
aactggaggctgtcattacttaact

SEQ ID NO: 1767865 - DNA, 25 bp, Homo sapien
gggagatcatacacattccaagcat

SEQ ID NO: 1767866 - DNA, 25 bp, Homo sapien
cactttgggaatgaatcgagttcct

SEQ ID NO: 1767867 - DNA, 25 bp, Homo sapien
aacattgtttcctctggggagatca

SEQ ID NO: 1767868 - DNA, 25 bp, Homo sapien
cccttggtcaagagagcaccaggct

SEQ ID NO: 1767869 - DNA, 25 bp, Homo sapien
tcaagcttcttttgtccaagagtaa

SEQ ID NO: 1767870 - DNA, 25 bp, Homo sapien
gttcaagcttcttttgtccaagagt

SEQ ID NO: 1767871 - DNA, 25 bp, Homo sapien
tgttcaagcttcttttgtccaagag

SEQ ID NO: 1767872 - DNA, 25 bp, Homo sapien
caagcttcttttgtccaagagtaag

SEQ ID NO: 1767873 - DNA, 25 bp, Homo sapien
tcttgtacgccttattgcagccatc

SEQ ID NO: 1767874 - DNA, 25 bp, Homo sapien
tcatctcattgtcttgtacgcctta

SEQ ID NO: 1767875 - DNA, 25 bp, Homo sapien
accaagtgatccacttcgtcccttt

SEQ ID NO: 1767876 - DNA, 25 bp, Homo sapien
gcagccatcaaacccttcattgttc

SEQ ID NO: 1767877 - DNA, 25 bp, Homo sapien
tgggctcacattccaccctggaata

SEQ ID NO: 1767878 - DNA, 25 bp, Homo sapien
actcgctcaccctgaggctcatatt

SEQ ID NO: 1767879 - DNA, 25 bp, Homo sapien
gctcatattccaacctgggctcaca

SEQ ID NO: 1767880 - DNA, 25 bp, Homo sapien
cctccacttaaagcagggctgcaaa

SEQ ID NO: 1767881 - DNA, 25 bp, Homo sapien
gttcaattgaggacctcaagcatgt

SEQ ID NO: 1767882 - DNA, 25 bp, Homo sapien
cctcaagcatgtgttaaataagcac

SEQ ID NO: 1767883 - DNA, 25 bp, Homo sapien
tctcagggcttttggcatcaggtct

SEQ ID NO: 1767884 - DNA, 25 bp, Homo sapien
tatatcatagttcatagtctcttct

SEQ ID NO: 1767885 - DNA, 25 bp, Homo sapien
tcccgttaagaaggatgcacgctag

SEQ ID NO: 1767886 - DNA, 25 bp, Homo sapien
gccagaaattttgcaccggtgccta

SEQ ID NO: 1767887 - DNA, 25 bp, Homo sapien
gactttgaggtagctattttgacca

SEQ ID NO: 1767888 - DNA, 25 bp, Homo sapien
actttgaaagaacctgacagtgcca

SEQ ID NO: 1767889 - DNA, 25 bp, Homo sapien
aatatggtttataatctccagtccc

SEQ ID NO: 1767890 - DNA, 25 bp, Homo sapien
caaacttggctattcttcagaagaa

SEQ ID NO: 1767891 - DNA, 25 bp, Homo sapien
gattaatttaactggactaatgcca

SEQ ID NO: 1767892 - DNA, 25 bp, Homo sapien
ttccccacttcggagcaacttgcag

SEQ ID NO: 1767893 - DNA, 25 bp, Homo sapien
gatggactctgctgtccaacacttg

SEQ ID NO: 1767894 - DNA, 25 bp, Homo sapien
agcctcttcttttcttcacatgttg

SEQ ID NO: 1767895 - DNA, 25 bp, Homo sapien
tcctggtggctgtcttccatgatca

SEQ ID NO: 1767896 - DNA, 25 bp, Homo sapien
ccccagagggtttcctggtggctgt

SEQ ID NO: 1767897 - DNA, 25 bp, Homo sapien
gtttcctggtggctgtcttccatga

SEQ ID NO: 1767898 - DNA, 25 bp, Homo sapien
ggctgtcttccatgatcatatctgg

SEQ ID NO: 1767899 - DNA, 25 bp, Homo sapien
gaggactggggagatgcagatgatt

SEQ ID NO: 1767900 - DNA, 25 bp, Homo sapien
ggactggggagatgcagatgattga

SEQ ID NO: 1767901 - DNA, 25 bp, Homo sapien
gggagatgcagatgattgatttgac

SEQ ID NO: 1767902 - DNA, 25 bp, Homo sapien
tgggggaggactggggagatgcaga

SEQ ID NO: 1767903 - DNA, 25 bp, Homo sapien
tgaatgtgcatgtccagttgtctat

SEQ ID NO: 1767904 - DNA, 25 bp, Homo sapien
gtcagccctccgctccttggtggtt

SEQ ID NO: 1767905 - DNA, 25 bp, Homo sapien
gacccagagcaatccttgtttagat

SEQ ID NO: 1767906 - DNA, 25 bp, Homo sapien
atctacttgtccagcatggtcagcc

SEQ ID NO: 1767907 - DNA, 25 bp, Homo sapien
aattgcactgtgtgattgcaggtgg

SEQ ID NO: 1767908 - DNA, 25 bp, Homo sapien
ccgagactcccattcccaagtaagg

SEQ ID NO: 1767909 - DNA, 25 bp, Homo sapien
catgagctgcctgagagaatagaca

SEQ ID NO: 1767910 - DNA, 25 bp, Homo sapien
tgtgagctgaactaactggcagagc

SEQ ID NO: 1767911 - DNA, 25 bp, Homo sapien
atgaggtcagctatggttctaatga

SEQ ID NO: 1767912 - DNA, 25 bp, Homo sapien
atgaccagaggagctaggacacaca

SEQ ID NO: 1767913 - DNA, 25 bp, Homo sapien
tcagctatggttctaatgaccagag

SEQ ID NO: 1767914 - DNA, 25 bp, Homo sapien
gtcccaccttgcagcacgccatcag

SEQ ID NO: 1767915 - DNA, 25 bp, Homo sapien
tcttagagatctggccactggtcaa

SEQ ID NO: 1767916 - DNA, 25 bp, Homo sapien
tctacccagctggttaatatggaaa

SEQ ID NO: 1767917 - DNA, 25 bp, Homo sapien
gaggtatccttacaattccatgatg

SEQ ID NO: 1767918 - DNA, 25 bp, Homo sapien
ttttcacctggaatgggctaagtac

SEQ ID NO: 1767919 - DNA, 25 bp, Homo sapien
gaaagagaccgaaatcccttgcgca

SEQ ID NO: 1767920 - DNA, 25 bp, Homo sapien
caggaaagttaacatctaccccagg

SEQ ID NO: 1767921 - DNA, 25 bp, Homo sapien
cgtagaacaagaagagacgcagcct

SEQ ID NO: 1767922 - DNA, 25 bp, Homo sapien
agacaaaggaggtgtcgcagcagcc

SEQ ID NO: 1767923 - DNA, 25 bp, Homo sapien
tatggcttcgaagatctctaacagc

SEQ ID NO: 1767924 - DNA, 25 bp, Homo sapien
cccaccgcatctggagcctaataga

SEQ ID NO: 1767925 - DNA, 25 bp, Homo sapien
cagcacatctcagggtaaggagaag

SEQ ID NO: 1767926 - DNA, 25 bp, Homo sapien
tgggttgcttccatcaccaggagag

SEQ ID NO: 1767927 - DNA, 25 bp, Homo sapien
tgtctgtgaacattgccctcggcag

SEQ ID NO: 1767928 - DNA, 25 bp, Homo sapien
tcggcagcccactcttaagtcgatt

SEQ ID NO: 1767929 - DNA, 25 bp, Homo sapien
taagtcgatttgacctgatcctggt

SEQ ID NO: 1767930 - DNA, 25 bp, Homo sapien
gcttgataccaagaatgaagactgg

SEQ ID NO: 1767931 - DNA, 25 bp, Homo sapien
taaaacttgatcgtattcttcactt

SEQ ID NO: 1767932 - DNA, 25 bp, Homo sapien
gcccacatagataattttccattcc

SEQ ID NO: 1767933 - DNA, 25 bp, Homo sapien
cttcctgcgggaacaggacccacta

SEQ ID NO: 1767934 - DNA, 25 bp, Homo sapien
taaaacagagtctaaaacttgatcg

SEQ ID NO: 1767935 - DNA, 25 bp, Homo sapien
ttctaattttaggaatagggcactc

SEQ ID NO: 1767936 - DNA, 25 bp, Homo sapien
gcttccttctacagaacagggcatt

SEQ ID NO: 1767937 - DNA, 25 bp, Homo sapien
catggctaatacagaggtgtcggga

SEQ ID NO: 1767938 - DNA, 25 bp, Homo sapien
gaggttagagaggtaaagccacaca

SEQ ID NO: 1767939 - DNA, 25 bp, Homo sapien
cctcgataggtacaagtaattagca

SEQ ID NO: 1767940 - DNA, 25 bp, Homo sapien
taattagcacaacagttacgcctac

SEQ ID NO: 1767941 - DNA, 25 bp, Homo sapien
agttacgcctactgcatctgcatct

SEQ ID NO: 1767942 - DNA, 25 bp, Homo sapien
tgagtcctggattaggtgcatcagc

SEQ ID NO: 1767943 - DNA, 25 bp, Homo sapien
aaatggttcatgttagtactcctaa

SEQ ID NO: 1767944 - DNA, 25 bp, Homo sapien
gggctaagttcatatacaaaggtat

SEQ ID NO: 1767945 - DNA, 25 bp, Homo sapien
aaacaagatacggagaatctgaggg

SEQ ID NO: 1767946 - DNA, 25 bp, Homo sapien
taataagatgtaacgactagggctg

SEQ ID NO: 1767947 - DNA, 25 bp, Homo sapien
ccctttgatgctgaaggtaatgcat

SEQ ID NO: 1767948 - DNA, 25 bp, Homo sapien
ctgtgttatcttcccaattaatgtg

SEQ ID NO: 1767949 - DNA, 25 bp, Homo sapien
tagatttggattactgctctctgca

SEQ ID NO: 1767950 - DNA, 25 bp, Homo sapien
gagttttctgatgtggaccatccct

SEQ ID NO: 1767951 - DNA, 25 bp, Homo sapien
ctttaatcagattagtttcagaaca

SEQ ID NO: 1767952 - DNA, 25 bp, Homo sapien
aatttcagggaaatagttctgtgta

SEQ ID NO: 1767953 - DNA, 25 bp, Homo sapien
gtgttttgactatgtacttacggaa

SEQ ID NO: 1767954 - DNA, 25 bp, Homo sapien
tcttataaactttctacaggatgtt

SEQ ID NO: 1767955 - DNA, 25 bp, Homo sapien
agctatctagagtatgtcaaccaca

SEQ ID NO: 1767956 - DNA, 25 bp, Homo sapien
gatatgaaggcactgcataacctgc

SEQ ID NO: 1767957 - DNA, 25 bp, Homo sapien
tcacggtggcttggaaaattggatc

SEQ ID NO: 1767958 - DNA, 25 bp, Homo sapien
gaatccatgtttagacaaatgccct

SEQ ID NO: 1767959 - DNA, 25 bp, Homo sapien
ttctaataagcacatatgttgttcc

SEQ ID NO: 1767960 - DNA, 25 bp, Homo sapien
gatttggctgtatatgctttatttc

SEQ ID NO: 1767961 - DNA, 25 bp, Homo sapien
catatgttgttcctattatattaac

SEQ ID NO: 1767962 - DNA, 25 bp, Homo sapien
tcctattatattaaccactgagctc

SEQ ID NO: 1767963 - DNA, 25 bp, Homo sapien
ggcctactaagttctcttcattgag

SEQ ID NO: 1767964 - DNA, 25 bp, Homo sapien
cctgagggattccttgaccctggtg

SEQ ID NO: 1767965 - DNA, 25 bp, Homo sapien
gaccctggtgcttagatgttagaaa

SEQ ID NO: 1767966 - DNA, 25 bp, Homo sapien
ttaattctgagattactaagggcct

SEQ ID NO: 1767967 - DNA, 25 bp, Homo sapien
agcacttggaggttgacttgcttaa

SEQ ID NO: 1767968 - DNA, 25 bp, Homo sapien
gcacttggaggttgacttgcttaag

SEQ ID NO: 1767969 - DNA, 25 bp, Homo sapien
cacttggaggttgacttgcttaaga

SEQ ID NO: 1767970 - DNA, 25 bp, Homo sapien
cagcacttggaggttgacttgctta

SEQ ID NO: 1767971 - DNA, 25 bp, Homo sapien
ggtactctaactagatcttcagacg

SEQ ID NO: 1767972 - DNA, 25 bp, Homo sapien
tcagtttcctatggaccagcaccag

SEQ ID NO: 1767973 - DNA, 25 bp, Homo sapien
taattaggctactgttgcatgagcc

SEQ ID NO: 1767974 - DNA, 25 bp, Homo sapien
tcttcagacgtgctttgtgctggca

SEQ ID NO: 1767975 - DNA, 25 bp, Homo sapien
gcactttaagaatcatacattttta

SEQ ID NO: 1767976 - DNA, 25 bp, Homo sapien
attagtagttcctgatctttctttt

SEQ ID NO: 1767977 - DNA, 25 bp, Homo sapien
atgtatagcacattagtagttcctg

SEQ ID NO: 1767978 - DNA, 25 bp, Homo sapien
gagatattgattactttattcttaa

SEQ ID NO: 1767979 - DNA, 25 bp, Homo sapien
taacactcccctcaaatctaagaga

SEQ ID NO: 1767980 - DNA, 25 bp, Homo sapien
tcccctcaaatctaagagatattga

SEQ ID NO: 1767981 - DNA, 25 bp, Homo sapien
cacatgctaaattagatagatatta

SEQ ID NO: 1767982 - DNA, 25 bp, Homo sapien
tgtgtaaagcaccaattaaatcttc

SEQ ID NO: 1767983 - DNA, 25 bp, Homo sapien
gcaccaattaaatcttcaagtgcct

SEQ ID NO: 1767984 - DNA, 25 bp, Homo sapien
agtgtgtaaagcaccaattaaatct

SEQ ID NO: 1767985 - DNA, 25 bp, Homo sapien
gtaaagcaccaattaaatcttcaag

SEQ ID NO: 1767986 - DNA, 25 bp, Homo sapien
cacattgtggagatattccttccca

SEQ ID NO: 1767987 - DNA, 25 bp, Homo sapien
caggattcttgacctaactgctata

SEQ ID NO: 1767988 - DNA, 25 bp, Homo sapien
cactctggcctcctatagtggtcag

SEQ ID NO: 1767989 - DNA, 25 bp, Homo sapien
tcttaaacgtttcacaccttgcgga

SEQ ID NO: 1767990 - DNA, 25 bp, Homo sapien
cttcggcctcgggagcaacgcgttc

SEQ ID NO: 1767991 - DNA, 25 bp, Homo sapien
ttcttgcgccggagacgaacccgct

SEQ ID NO: 1767992 - DNA, 25 bp, Homo sapien
tctccagttcgtcccaagtctcgtt

SEQ ID NO: 1767993 - DNA, 25 bp, Homo sapien
ggcgacttctgacacagccagtaag

SEQ ID NO: 1767994 - DNA, 25 bp, Homo sapien
actgtagttaccataatccccaggt

SEQ ID NO: 1767995 - DNA, 25 bp, Homo sapien
gccctgtgaagaaggaggtttgctc

SEQ ID NO: 1767996 - DNA, 25 bp, Homo sapien
ttctctgatagtgagtgaggtatca

SEQ ID NO: 1767997 - DNA, 25 bp, Homo sapien
tgaagaaggaggtttgctcccgctt

SEQ ID NO: 1767998 - DNA, 25 bp, Homo sapien
tgccagacactttcaaaaaacctga

SEQ ID NO: 1767999 - DNA, 25 bp, Homo sapien
cccaccagactcctggggattacaa

SEQ ID NO: 1768000 - DNA, 25 bp, Homo sapien
tcccaccagactcctggggattaca

SEQ ID NO: 1768001 - DNA, 25 bp, Homo sapien
gggaagtgccagacactttcaaaaa

SEQ ID NO: 1768002 - DNA, 25 bp, Homo sapien
aaagcatgactaggaggcctcggga

SEQ ID NO: 1768003 - DNA, 25 bp, Homo sapien
tcctgaatatatagaaaatctagca

SEQ ID NO: 1768004 - DNA, 25 bp, Homo sapien
aaagctgttagaactcataagtggt

SEQ ID NO: 1768005 - DNA, 25 bp, Homo sapien
cagacctataattccaatgtattag

SEQ ID NO: 1768006 - DNA, 25 bp, Homo sapien
acaagtgacatttaaagggactggg

SEQ ID NO: 1768007 - DNA, 25 bp, Homo sapien
gataaaagtgctcaaatcttcctac

SEQ ID NO: 1768008 - DNA, 25 bp, Homo sapien
tcttcctacatcttaataaagggca

SEQ ID NO: 1768009 - DNA, 25 bp, Homo sapien
caaaaaaccctgggctaacatccat

SEQ ID NO: 1768010 - DNA, 25 bp, Homo sapien
tatcatccaagagtcaaatcctgga

SEQ ID NO: 1768011 - DNA, 25 bp, Homo sapien
gacaggcctgaggttaacccttcag

SEQ ID NO: 1768012 - DNA, 25 bp, Homo sapien
caatgttcacctatggccaaaggtc

SEQ ID NO: 1768013 - DNA, 25 bp, Homo sapien
gggcgggtccggaaatatcatccaa

SEQ ID NO: 1768014 - DNA, 25 bp, Homo sapien
tcccttcagggtatcgacaagttcc

SEQ ID NO: 1768015 - DNA, 25 bp, Homo sapien
caatgaatccataggttgctttggg

SEQ ID NO: 1768016 - DNA, 25 bp, Homo sapien
ttcaccaatgttttatggctttcat

SEQ ID NO: 1768017 - DNA, 25 bp, Homo sapien
tcccatccatgaaaacggaatatct

SEQ ID NO: 1768018 - DNA, 25 bp, Homo sapien
tatttgcttaggttaattcctagga

SEQ ID NO: 1768019 - DNA, 25 bp, Homo sapien
taacgatcagtgacgttcagcacct

SEQ ID NO: 1768020 - DNA, 25 bp, Homo sapien
aacgatcagtgacgttcagcacctt

SEQ ID NO: 1768021 - DNA, 25 bp, Homo sapien
tctaacgatcagtgacgttcagcac

SEQ ID NO: 1768022 - DNA, 25 bp, Homo sapien
cgatcagtgacgttcagcacctttt

SEQ ID NO: 1768023 - DNA, 25 bp, Homo sapien
gcatatgccactgcgttttcctttc

SEQ ID NO: 1768024 - DNA, 25 bp, Homo sapien
cagatttcttagttaagtattcaga

SEQ ID NO: 1768025 - DNA, 25 bp, Homo sapien
cacaatcagatttcttagttaagta

SEQ ID NO: 1768026 - DNA, 25 bp, Homo sapien
tatttggaaagatatcacaatcaga

SEQ ID NO: 1768027 - DNA, 25 bp, Homo sapien
tggaaagatatcacaatcagatttc

SEQ ID NO: 1768028 - DNA, 25 bp, Homo sapien
ggccacctccaagatatggtaagga

SEQ ID NO: 1768029 - DNA, 25 bp, Homo sapien
tgagcttgacttgactaaagacagc

SEQ ID NO: 1768030 - DNA, 25 bp, Homo sapien
tctgcagaaggacttattgctagtc

SEQ ID NO: 1768031 - DNA, 25 bp, Homo sapien
gaaaagtgaacaaggtcttggctct

SEQ ID NO: 1768032 - DNA, 25 bp, Homo sapien
cacagtgagcgctctgttcctggct

SEQ ID NO: 1768033 - DNA, 25 bp, Homo sapien
aggtagcagccaattcagttccaca

SEQ ID NO: 1768034 - DNA, 25 bp, Homo sapien
ttcagttccacagtgagcgctctgt

SEQ ID NO: 1768035 - DNA, 25 bp, Homo sapien
aagatcaaggtagcagccaattcag

SEQ ID NO: 1768036 - DNA, 25 bp, Homo sapien
gagttttatactaacttcagtaaca

SEQ ID NO: 1768037 - DNA, 25 bp, Homo sapien
aagccagtcatttaggagcggggga

SEQ ID NO: 1768038 - DNA, 25 bp, Homo sapien
gccagtcatttaggagcgggggagt

SEQ ID NO: 1768039 - DNA, 25 bp, Homo sapien
cagtcatttaggagcgggggagttt

SEQ ID NO: 1768040 - DNA, 25 bp, Homo sapien
tttctttgttacattgtagctttgc

SEQ ID NO: 1768041 - DNA, 25 bp, Homo sapien
cttagcactagtacatgccaaatgc

SEQ ID NO: 1768042 - DNA, 25 bp, Homo sapien
ctttgttacattgtagctttgccat

SEQ ID NO: 1768043 - DNA, 25 bp, Homo sapien
tagcactagtacatgccaaatgcag

SEQ ID NO: 1768044 - DNA, 25 bp, Homo sapien
tactctttgagactggttcatcctc

SEQ ID NO: 1768045 - DNA, 25 bp, Homo sapien
caggccttgtgggatgtaattataa

SEQ ID NO: 1768046 - DNA, 25 bp, Homo sapien
agcatatttgggtcactcgtgtcaa

SEQ ID NO: 1768047 - DNA, 25 bp, Homo sapien
gatatcaggttgaaaagcaggcctt

SEQ ID NO: 1768048 - DNA, 25 bp, Homo sapien
ctagacagcacagcggcacggtgcg

SEQ ID NO: 1768049 - DNA, 25 bp, Homo sapien
ctccaaaaccctgcaaactttggtg

SEQ ID NO: 1768050 - DNA, 25 bp, Homo sapien
tttggtggaacgctggcaacatgaa

SEQ ID NO: 1768051 - DNA, 25 bp, Homo sapien
ggaacgctggcaacatgaatttaag

SEQ ID NO: 1768052 - DNA, 25 bp, Homo sapien
tccgccgaagcaacagccggagaca

SEQ ID NO: 1768053 - DNA, 25 bp, Homo sapien
aagaaaatcgcccagctcaccaagg

SEQ ID NO: 1768054 - DNA, 25 bp, Homo sapien
gagcaagaaaatcgcccagctcacc

SEQ ID NO: 1768055 - DNA, 25 bp, Homo sapien
agcgacggggcaggtggcgaccccg

SEQ ID NO: 1768056 - DNA, 25 bp, Homo sapien
aaatgagcaagaaaatcgcccagct

SEQ ID NO: 1768057 - DNA, 25 bp, Homo sapien
cgaccccgggcatgagctggcagca

SEQ ID NO: 1768058 - DNA, 25 bp, Homo sapien
agcagcactattacggcggctcggc

SEQ ID NO: 1768059 - DNA, 25 bp, Homo sapien
ggctcggcggccaaattcgcgccct

SEQ ID NO: 1768060 - DNA, 25 bp, Homo sapien
gactcttgcctcccgggcgtcgttg

SEQ ID NO: 1768061 - DNA, 25 bp, Homo sapien
atctgccccgcgccgttgtccccgc

SEQ ID NO: 1768062 - DNA, 25 bp, Homo sapien
tgccccgcgccgttgtccccgcggc

SEQ ID NO: 1768063 - DNA, 25 bp, Homo sapien
cccgggcatctgccccgcgccgttg

SEQ ID NO: 1768064 - DNA, 25 bp, Homo sapien
ggcatctgccccgcgccgttgtccc

SEQ ID NO: 1768065 - DNA, 25 bp, Homo sapien
tggatccccgccacacgggggaagc

SEQ ID NO: 1768066 - DNA, 25 bp, Homo sapien
tgggctgctggatccccgccacacg

SEQ ID NO: 1768067 - DNA, 25 bp, Homo sapien
gatcccggatcgacctcgcgaggcg

SEQ ID NO: 1768068 - DNA, 25 bp, Homo sapien
aagcactggcggcacgatcccggat

SEQ ID NO: 1768069 - DNA, 25 bp, Homo sapien
ggaatcctcgctacttcactactca

SEQ ID NO: 1768070 - DNA, 25 bp, Homo sapien
gctacttcactactcatgtctctgg

SEQ ID NO: 1768071 - DNA, 25 bp, Homo sapien
gtcagggcagggaatcctcgctact

SEQ ID NO: 1768072 - DNA, 25 bp, Homo sapien
tacttcactactcatgtctctggat

SEQ ID NO: 1768073 - DNA, 25 bp, Homo sapien
catgttcaaagcaatggggcctctg

SEQ ID NO: 1768074 - DNA, 25 bp, Homo sapien
gcctgggttagggtccgattataca

SEQ ID NO: 1768075 - DNA, 25 bp, Homo sapien
tcaaggtgaccacagtggaagaggc

SEQ ID NO: 1768076 - DNA, 25 bp, Homo sapien
cagaactgatatagcctctcaaggt

SEQ ID NO: 1768077 - DNA, 25 bp, Homo sapien
tttttccgcttctccctgaccacta

SEQ ID NO: 1768078 - DNA, 25 bp, Homo sapien
tcttccaatactccactgtcttcct

SEQ ID NO: 1768079 - DNA, 25 bp, Homo sapien
acatcttccaatactccactgtctt

SEQ ID NO: 1768080 - DNA, 25 bp, Homo sapien
tccactgtcttcctgtattaaaatg

SEQ ID NO: 1768081 - DNA, 25 bp, Homo sapien
actgtcttcctgtattaaaatgtat

SEQ ID NO: 1768082 - DNA, 25 bp, Homo sapien
ccagcctgttctatcagactgcctt

SEQ ID NO: 1768083 - DNA, 25 bp, Homo sapien
tctaggccaagctaataatgctgtt

SEQ ID NO: 1768084 - DNA, 25 bp, Homo sapien
atcagactgccttctcacatctagg

SEQ ID NO: 1768085 - DNA, 25 bp, Homo sapien
cagaaaaagccccatgcacatctct

SEQ ID NO: 1768086 - DNA, 25 bp, Homo sapien
ttagggtggcacattttgtaggcat

SEQ ID NO: 1768087 - DNA, 25 bp, Homo sapien
tggtattgatgttagggtggcacat

SEQ ID NO: 1768088 - DNA, 25 bp, Homo sapien
tgatgttagggtggcacattttgta

SEQ ID NO: 1768089 - DNA, 25 bp, Homo sapien
tggtgcttgtgttcgtggtattgat

SEQ ID NO: 1768090 - DNA, 25 bp, Homo sapien
ttgttcagcttcctggattgtcacc

SEQ ID NO: 1768091 - DNA, 25 bp, Homo sapien
tccgttattaatcaggtcctggcca

SEQ ID NO: 1768092 - DNA, 25 bp, Homo sapien
gccatttctggctgattgttacaga

SEQ ID NO: 1768093 - DNA, 25 bp, Homo sapien
tgctatagcaatgaagttggccacc

SEQ ID NO: 1768094 - DNA, 25 bp, Homo sapien
cctgctcatgcaccaaataataggt

SEQ ID NO: 1768095 - DNA, 25 bp, Homo sapien
tggtcatcccattgtagagttcctg

SEQ ID NO: 1768096 - DNA, 25 bp, Homo sapien
taataggtatagctttccggtatct

SEQ ID NO: 1768097 - DNA, 25 bp, Homo sapien
gcggtgcctactattcctgctcatg

SEQ ID NO: 1768098 - DNA, 25 bp, Homo sapien
ccaagaatacgcattggcttcctgc

SEQ ID NO: 1768099 - DNA, 25 bp, Homo sapien
attttctaagtgctgttcccaagaa

SEQ ID NO: 1768100 - DNA, 25 bp, Homo sapien
cagatatcaacttcttgtggtggga

SEQ ID NO: 1768101 - DNA, 25 bp, Homo sapien
ttcattaagtccattttctaagtgc

SEQ ID NO: 1768102 - DNA, 25 bp, Homo sapien
cttgtcatgaggttttcatatgagc

SEQ ID NO: 1768103 - DNA, 25 bp, Homo sapien
tatgggaaacaatagattgacacat

SEQ ID NO: 1768104 - DNA, 25 bp, Homo sapien
tatatataaatctccaatgttatgg

SEQ ID NO: 1768105 - DNA, 25 bp, Homo sapien
gttttcatatgagctacacattgtg

SEQ ID NO: 1768106 - DNA, 25 bp, Homo sapien
aattcagccagtgtatccaccagtt

SEQ ID NO: 1768107 - DNA, 25 bp, Homo sapien
ttattatcataggtataggtggacc

SEQ ID NO: 1768108 - DNA, 25 bp, Homo sapien
tgtccaccagagacagatcttctgt

SEQ ID NO: 1768109 - DNA, 25 bp, Homo sapien
aatagaattgtatagcgatgacctc

SEQ ID NO: 1768110 - DNA, 25 bp, Homo sapien
taatattttctgacgacgatcttct

SEQ ID NO: 1768111 - DNA, 25 bp, Homo sapien
atcttcaatagcgaggcacatcttc

SEQ ID NO: 1768112 - DNA, 25 bp, Homo sapien
tagcgaggcacatcttctccctatc

SEQ ID NO: 1768113 - DNA, 25 bp, Homo sapien
tgtacctaatattttctgacgacga

SEQ ID NO: 1768114 - DNA, 25 bp, Homo sapien
gaagatgatgtatatccaccacaga

SEQ ID NO: 1768115 - DNA, 25 bp, Homo sapien
tgtcatacatcggtaaagctggaaa

SEQ ID NO: 1768116 - DNA, 25 bp, Homo sapien
tctctagagagttgtcagtggagtc

SEQ ID NO: 1768117 - DNA, 25 bp, Homo sapien
gaatatgcctggtaactagcagagc

SEQ ID NO: 1768118 - DNA, 25 bp, Homo sapien
gaaaagctggtgtactcaaaaccca

SEQ ID NO: 1768119 - DNA, 25 bp, Homo sapien
tttatcgatgttataagtaaaggac

SEQ ID NO: 1768120 - DNA, 25 bp, Homo sapien
ttcggtggtttaatatttgatagca

SEQ ID NO: 1768121 - DNA, 25 bp, Homo sapien
ttcagactaggaccatgtagacatg

SEQ ID NO: 1768122 - DNA, 25 bp, Homo sapien
gaacaagggagggtcacacagagtt

SEQ ID NO: 1768123 - DNA, 25 bp, Homo sapien
ctgggaggccaagtagtgagaacaa

SEQ ID NO: 1768124 - DNA, 25 bp, Homo sapien
tgaaatcttaaaaagtacccactgc

SEQ ID NO: 1768125 - DNA, 25 bp, Homo sapien
caggcttctgtttgccctcaatgag

SEQ ID NO: 1768126 - DNA, 25 bp, Homo sapien
tctggttggtctcctggaattggtt

SEQ ID NO: 1768127 - DNA, 25 bp, Homo sapien
ggcccttgaaatgttgggtatagta

SEQ ID NO: 1768128 - DNA, 25 bp, Homo sapien
acaagcctgcaatgcaggttcctag

SEQ ID NO: 1768129 - DNA, 25 bp, Homo sapien
gtatagtattaaactctggttggtc

SEQ ID NO: 1768130 - DNA, 25 bp, Homo sapien
cacacccagctcaaaattactcctc

SEQ ID NO: 1768131 - DNA, 25 bp, Homo sapien
tcaatccatgagttgcagaacagac

SEQ ID NO: 1768132 - DNA, 25 bp, Homo sapien
acctctcaggtgtaagccattcttc

SEQ ID NO: 1768133 - DNA, 25 bp, Homo sapien
tctccatccaagcttttgggtgacc

SEQ ID NO: 1768134 - DNA, 25 bp, Homo sapien
cctgcttggtgccacaactatagca

SEQ ID NO: 1768135 - DNA, 25 bp, Homo sapien
gggaacaggtacctgcttggtgcca

SEQ ID NO: 1768136 - DNA, 25 bp, Homo sapien
tcagtcatacggcttaaaggagagg

SEQ ID NO: 1768137 - DNA, 25 bp, Homo sapien
tatagcaggcctttcttcagtaaat

SEQ ID NO: 1768138 - DNA, 25 bp, Homo sapien
tggagaagccacacgtgacttcttt

SEQ ID NO: 1768139 - DNA, 25 bp, Homo sapien
cacacgtgacttctttgtcgattgc

SEQ ID NO: 1768140 - DNA, 25 bp, Homo sapien
aggaggaaatggtacgcttccagtc

SEQ ID NO: 1768141 - DNA, 25 bp, Homo sapien
tgtcgattgctttagtgaatgcttc

SEQ ID NO: 1768142 - DNA, 25 bp, Homo sapien
caaaagatctgtggtatgcatgagg

SEQ ID NO: 1768143 - DNA, 25 bp, Homo sapien
tgggaagtagcctcaacattggtat

SEQ ID NO: 1768144 - DNA, 25 bp, Homo sapien
gttattgatacagggaattgtcccc

SEQ ID NO: 1768145 - DNA, 25 bp, Homo sapien
gattaccttcagtctgggagcccaa

SEQ ID NO: 1768146 - DNA, 25 bp, Homo sapien
aacaacagcctgaagttcttcccag

SEQ ID NO: 1768147 - DNA, 25 bp, Homo sapien
tggacagtggtgatatccatgccct

SEQ ID NO: 1768148 - DNA, 25 bp, Homo sapien
ccctgaacaacagcctgaagttctt

SEQ ID NO: 1768149 - DNA, 25 bp, Homo sapien
gacagtggtgatatccatgccctga

SEQ ID NO: 1768150 - DNA, 25 bp, Homo sapien
tccactgtataacagaccctttttc

SEQ ID NO: 1768151 - DNA, 25 bp, Homo sapien
ccactgtataacagaccctttttct

SEQ ID NO: 1768152 - DNA, 25 bp, Homo sapien
ggcactaaggaaagttgtcatcact

SEQ ID NO: 1768153 - DNA, 25 bp, Homo sapien
aaggaaagttgtcatcactccacac

SEQ ID NO: 1768154 - DNA, 25 bp, Homo sapien
ctgtggcactaaggaaagttgtcat

SEQ ID NO: 1768155 - DNA, 25 bp, Homo sapien
cactaaggaaagttgtcatcactcc

SEQ ID NO: 1768156 - DNA, 25 bp, Homo sapien
ccagcgtctcccctcttcagtctct

SEQ ID NO: 1768157 - DNA, 25 bp, Homo sapien
tgccagcgtctcccctcttcagtct

SEQ ID NO: 1768158 - DNA, 25 bp, Homo sapien
gccagcgtctcccctcttcagtctc

SEQ ID NO: 1768159 - DNA, 25 bp, Homo sapien
ctgccagcgtctcccctcttcagtc

SEQ ID NO: 1768160 - DNA, 25 bp, Homo sapien
gataggacgtgtaggagccaacaat

SEQ ID NO: 1768161 - DNA, 25 bp, Homo sapien
tagggagataggacgtgtaggagcc

SEQ ID NO: 1768162 - DNA, 25 bp, Homo sapien
ggagccaacaataagatttcgccca

SEQ ID NO: 1768163 - DNA, 25 bp, Homo sapien
tgtgagaagagtagggagataggac

SEQ ID NO: 1768164 - DNA, 25 bp, Homo sapien
catatcccgtgaagactgagtagta

SEQ ID NO: 1768165 - DNA, 25 bp, Homo sapien
aagtatagataattcctgaacagga

SEQ ID NO: 1768166 - DNA, 25 bp, Homo sapien
gactgagtagtataaggaagtatag

SEQ ID NO: 1768167 - DNA, 25 bp, Homo sapien
ttggattcatatcccgtgaagactg

SEQ ID NO: 1768168 - DNA, 25 bp, Homo sapien
cacaggatgccttgaatgtgttcca

SEQ ID NO: 1768169 - DNA, 25 bp, Homo sapien
ggtaattgtagcattgttgccccaa

SEQ ID NO: 1768170 - DNA, 25 bp, Homo sapien
taacagaaggcagttggctgtcctc

SEQ ID NO: 1768171 - DNA, 25 bp, Homo sapien
ttttcacgacctgtgcaacctgtgg

SEQ ID NO: 1768172 - DNA, 25 bp, Homo sapien
ttatgaatagtgtccaagtttctta

SEQ ID NO: 1768173 - DNA, 25 bp, Homo sapien
tatgaatagtgtccaagtttcttac

SEQ ID NO: 1768174 - DNA, 25 bp, Homo sapien
ggcatatcatagtagtaattggtct

SEQ ID NO: 1768175 - DNA, 25 bp, Homo sapien
taattggtctaagctgagcagggcc

SEQ ID NO: 1768176 - DNA, 25 bp, Homo sapien
cattagttctgcgaatagaacggag

SEQ ID NO: 1768177 - DNA, 25 bp, Homo sapien
gaacggagatctgagtctggattcc

SEQ ID NO: 1768178 - DNA, 25 bp, Homo sapien
aagtgtcttcatcaataattagttg

SEQ ID NO: 1768179 - DNA, 25 bp, Homo sapien
ttaagtgtcttcatcaataattagt

SEQ ID NO: 1768180 - DNA, 25 bp, Homo sapien
taagtgtcttcatcaataattagtt

SEQ ID NO: 1768181 - DNA, 25 bp, Homo sapien
gtgtcttcatcaataattagttgat

SEQ ID NO: 1768182 - DNA, 25 bp, Homo sapien
cacatgatccttgcggaggggccgt

SEQ ID NO: 1768183 - DNA, 25 bp, Homo sapien
gttccagtgttcatacatgttgaca

SEQ ID NO: 1768184 - DNA, 25 bp, Homo sapien
taaatttgcacatgatccttgcgga

SEQ ID NO: 1768185 - DNA, 25 bp, Homo sapien
gtgttcatacatgttgacaaagcaa

SEQ ID NO: 1768186 - DNA, 25 bp, Homo sapien
gagatctgcggaaggatctttctcc

SEQ ID NO: 1768187 - DNA, 25 bp, Homo sapien
tgggattttgcctcagatacttgag

SEQ ID NO: 1768188 - DNA, 25 bp, Homo sapien
tacttgaggaaggtattgacctctc

SEQ ID NO: 1768189 - DNA, 25 bp, Homo sapien
ccttttggaatgaatcaggatgctt

SEQ ID NO: 1768190 - DNA, 25 bp, Homo sapien
ccaccaggggagatggatctggcaa

SEQ ID NO: 1768191 - DNA, 25 bp, Homo sapien
caagccggctcaatgaacgtggact

SEQ ID NO: 1768192 - DNA, 25 bp, Homo sapien
ccttgtgagttgtatagatagaaca

SEQ ID NO: 1768193 - DNA, 25 bp, Homo sapien
cttccttgtgagttgtatagataga

SEQ ID NO: 1768194 - DNA, 25 bp, Homo sapien
aatggtcttctcaaggtcccttcag

SEQ ID NO: 1768195 - DNA, 25 bp, Homo sapien
gacaggatgatctcagaaataggac

SEQ ID NO: 1768196 - DNA, 25 bp, Homo sapien
tttcacgggaatacatgctggagct

SEQ ID NO: 1768197 - DNA, 25 bp, Homo sapien
gccagggatcctagcctacactggg

SEQ ID NO: 1768198 - DNA, 25 bp, Homo sapien
aaccatatctttcaacaggagcctg

SEQ ID NO: 1768199 - DNA, 25 bp, Homo sapien
agagtgcccattgaagtattgaaac

SEQ ID NO: 1768200 - DNA, 25 bp, Homo sapien
cctattgtgacctagaaaatctccc

SEQ ID NO: 1768201 - DNA, 25 bp, Homo sapien
tagtactgcctagaaacttcctaag

SEQ ID NO: 1768202 - DNA, 25 bp, Homo sapien
tatggatatacaacatttgttcatc

SEQ ID NO: 1768203 - DNA, 25 bp, Homo sapien
gttatggtgaccctccatcctccta

SEQ ID NO: 1768204 - DNA, 25 bp, Homo sapien
tgcatgttgtagtattgtgtcaaca

SEQ ID NO: 1768205 - DNA, 25 bp, Homo sapien
aaagaaatctcataccgttatggtg

SEQ ID NO: 1768206 - DNA, 25 bp, Homo sapien
tccagtaagagtaacgaaataggtg

SEQ ID NO: 1768207 - DNA, 25 bp, Homo sapien
tgctttccatgtcaggcaagacaga

SEQ ID NO: 1768208 - DNA, 25 bp, Homo sapien
tagaaaaccccactgattagaaaga

SEQ ID NO: 1768209 - DNA, 25 bp, Homo sapien
gagatttagcaaaagcattacgcat

SEQ ID NO: 1768210 - DNA, 25 bp, Homo sapien
tctcggcatactgacatcgtggacc

SEQ ID NO: 1768211 - DNA, 25 bp, Homo sapien
ccaggagaagggtatcatcgctcta

SEQ ID NO: 1768212 - DNA, 25 bp, Homo sapien
caacgcatgggtggtagagttagcc

SEQ ID NO: 1768213 - DNA, 25 bp, Homo sapien
gagtagggtttctcatctcggcata

SEQ ID NO: 1768214 - DNA, 25 bp, Homo sapien
taaagctctaggagacaatgttgcc

SEQ ID NO: 1768215 - DNA, 25 bp, Homo sapien
ggaagtagggtgttacataaagcca

SEQ ID NO: 1768216 - DNA, 25 bp, Homo sapien
tccttggtcacctgagctcaactgc

SEQ ID NO: 1768217 - DNA, 25 bp, Homo sapien
tatatggcgtaaaatgactaaatgg

SEQ ID NO: 1768218 - DNA, 25 bp, Homo sapien
ttcagagtactagtccagagttttg

SEQ ID NO: 1768219 - DNA, 25 bp, Homo sapien
gaaatagatacccttgtgtaggatg

SEQ ID NO: 1768220 - DNA, 25 bp, Homo sapien
tctttgagctgcaagatctacgaca

SEQ ID NO: 1768221 - DNA, 25 bp, Homo sapien
taagccttagatgtatatgttctct

SEQ ID NO: 1768222 - DNA, 25 bp, Homo sapien
tctgtggtgttatttctaagacctc

SEQ ID NO: 1768223 - DNA, 25 bp, Homo sapien
cagtttgattagactgtacttgtca

SEQ ID NO: 1768224 - DNA, 25 bp, Homo sapien
agatcagatcattgtaggtctgtgg

SEQ ID NO: 1768225 - DNA, 25 bp, Homo sapien
ttatttggtctatgtatgtgttttg

SEQ ID NO: 1768226 - DNA, 25 bp, Homo sapien
ccacagtcccttgaggctgttgctg

SEQ ID NO: 1768227 - DNA, 25 bp, Homo sapien
ctggtgatgagcaccagtaaggagc

SEQ ID NO: 1768228 - DNA, 25 bp, Homo sapien
tggccacagtcccttgaggctgttg

SEQ ID NO: 1768229 - DNA, 25 bp, Homo sapien
cctcttgacgttggcttgctttggg

SEQ ID NO: 1768230 - DNA, 25 bp, Homo sapien
ggcactgtgtaagcactgtgtaaga

SEQ ID NO: 1768231 - DNA, 25 bp, Homo sapien
gaagagtgaccacctatgaacacat

SEQ ID NO: 1768232 - DNA, 25 bp, Homo sapien
ttcccagtggacagaccttttcaag

SEQ ID NO: 1768233 - DNA, 25 bp, Homo sapien
ggacaattgccttatgtgcatctgt

SEQ ID NO: 1768234 - DNA, 25 bp, Homo sapien
gccaggacattgagttggaggacaa

SEQ ID NO: 1768235 - DNA, 25 bp, Homo sapien
agttggaggacaattgccttatgtg

SEQ ID NO: 1768236 - DNA, 25 bp, Homo sapien
attgccttatgtgcatctgtttggg

SEQ ID NO: 1768237 - DNA, 25 bp, Homo sapien
ctttcattcttctgatccgatacat

SEQ ID NO: 1768238 - DNA, 25 bp, Homo sapien
tgcactttcattcttctgatccgat

SEQ ID NO: 1768239 - DNA, 25 bp, Homo sapien
gcactttcattcttctgatccgata

SEQ ID NO: 1768240 - DNA, 25 bp, Homo sapien
tttgcactttcattcttctgatccg

SEQ ID NO: 1768241 - DNA, 25 bp, Homo sapien
ctctgttttggctggaggaaattgt

SEQ ID NO: 1768242 - DNA, 25 bp, Homo sapien
cagtctctgttttggctggaggaaa

SEQ ID NO: 1768243 - DNA, 25 bp, Homo sapien
tctctgttttggctggaggaaattg

SEQ ID NO: 1768244 - DNA, 25 bp, Homo sapien
aggtggtctggtttgctgaagggtg

SEQ ID NO: 1768245 - DNA, 25 bp, Homo sapien
ctgagcagcattgcattttatacac

SEQ ID NO: 1768246 - DNA, 25 bp, Homo sapien
cagacatatagttcttaacatcaca

SEQ ID NO: 1768247 - DNA, 25 bp, Homo sapien
ggagactcataaccttcagaataca

SEQ ID NO: 1768248 - DNA, 25 bp, Homo sapien
tcttctttaatggttcagacatata

SEQ ID NO: 1768249 - DNA, 25 bp, Homo sapien
tcacgcgtcttcagtgacggcacag

SEQ ID NO: 1768250 - DNA, 25 bp, Homo sapien
tctgtcatgccaggttgtaaatgac

SEQ ID NO: 1768251 - DNA, 25 bp, Homo sapien
gagtgcccttgccattagcctatgg

SEQ ID NO: 1768252 - DNA, 25 bp, Homo sapien
cagccaaggctctgatggagtgccc

SEQ ID NO: 1768253 - DNA, 25 bp, Homo sapien
ggaattcaaagtcaatccccatatc

SEQ ID NO: 1768254 - DNA, 25 bp, Homo sapien
ctggaattcaaagtcaatccccata

SEQ ID NO: 1768255 - DNA, 25 bp, Homo sapien
ttcaaagtcaatccccatatcactg

SEQ ID NO: 1768256 - DNA, 25 bp, Homo sapien
aattcaaagtcaatccccatatcac

SEQ ID NO: 1768257 - DNA, 25 bp, Homo sapien
gtgtgaccaggggataaaggcatcc

SEQ ID NO: 1768258 - DNA, 25 bp, Homo sapien
cacaccccactgagtccctgtggga

SEQ ID NO: 1768259 - DNA, 25 bp, Homo sapien
ccaggggataaaggcatccaggacc

SEQ ID NO: 1768260 - DNA, 25 bp, Homo sapien
tcccacatggggaaaggaccaagca

SEQ ID NO: 1768261 - DNA, 25 bp, Homo sapien
acttggtatccatccacttgcttac

SEQ ID NO: 1768262 - DNA, 25 bp, Homo sapien
gacttggtatccatccacttgctta

SEQ ID NO: 1768263 - DNA, 25 bp, Homo sapien
ctgacttggtatccatccacttgct

SEQ ID NO: 1768264 - DNA, 25 bp, Homo sapien
tgacttggtatccatccacttgctt

SEQ ID NO: 1768265 - DNA, 25 bp, Homo sapien
tgacaagcttttacttgcaagagct

SEQ ID NO: 1768266 - DNA, 25 bp, Homo sapien
gaaacaatcaactgggcacactctg

SEQ ID NO: 1768267 - DNA, 25 bp, Homo sapien
tgggcacactctgttaaagcacttc

SEQ ID NO: 1768268 - DNA, 25 bp, Homo sapien
tacttgacaagcttttacttgcaag

SEQ ID NO: 1768269 - DNA, 25 bp, Homo sapien
ataaattgaccaccccaacctgagc

SEQ ID NO: 1768270 - DNA, 25 bp, Homo sapien
aatagcatttctggaacactgggtg

SEQ ID NO: 1768271 - DNA, 25 bp, Homo sapien
gagcagctcttcaaactctctaata

SEQ ID NO: 1768272 - DNA, 25 bp, Homo sapien
acataaattgaccaccccaacctga

SEQ ID NO: 1768273 - DNA, 25 bp, Homo sapien
agctttccacattcttgctcagaaa

SEQ ID NO: 1768274 - DNA, 25 bp, Homo sapien
gctttccacattcttgctcagaaaa

SEQ ID NO: 1768275 - DNA, 25 bp, Homo sapien
cttattagggtatttggatcgggca

SEQ ID NO: 1768276 - DNA, 25 bp, Homo sapien
taagagtcatccgtaaaacccttgc

SEQ ID NO: 1768277 - DNA, 25 bp, Homo sapien
cctatcagaggtattttggctatca

SEQ ID NO: 1768278 - DNA, 25 bp, Homo sapien
tggatcgggcatcctttttcctagg

SEQ ID NO: 1768279 - DNA, 25 bp, Homo sapien
gttaaattgctaggtcaaagtgctt

SEQ ID NO: 1768280 - DNA, 25 bp, Homo sapien
atagcttcatgattaagtgcatgaa

SEQ ID NO: 1768281 - DNA, 25 bp, Homo sapien
cagatataccctatatggaatcccg

SEQ ID NO: 1768282 - DNA, 25 bp, Homo sapien
tactcccgcagtatagaaaagttaa

SEQ ID NO: 1768283 - DNA, 25 bp, Homo sapien
cacatttatggtttcctgtggtaag

SEQ ID NO: 1768284 - DNA, 25 bp, Homo sapien
gtggtaagtatctggctcgccttga

SEQ ID NO: 1768285 - DNA, 25 bp, Homo sapien
tcaaccactgtgtcagaatatgccc

SEQ ID NO: 1768286 - DNA, 25 bp, Homo sapien
ctcgccttgaactctaaccacctgg

SEQ ID NO: 1768287 - DNA, 25 bp, Homo sapien
agtttctgcctgcatctaatgtgga

SEQ ID NO: 1768288 - DNA, 25 bp, Homo sapien
gagcctttccttgcccctgaaacga

SEQ ID NO: 1768289 - DNA, 25 bp, Homo sapien
tctgcctgcatctaatgtggagcct

SEQ ID NO: 1768290 - DNA, 25 bp, Homo sapien
ttccttgcccctgaaacgatggcat

SEQ ID NO: 1768291 - DNA, 25 bp, Homo sapien
gaatgtgaatgggtctttcctcatt

SEQ ID NO: 1768292 - DNA, 25 bp, Homo sapien
ggaatgtgaatgggtctttcctcat

SEQ ID NO: 1768293 - DNA, 25 bp, Homo sapien
aggaatgtgaatgggtctttcctca

SEQ ID NO: 1768294 - DNA, 25 bp, Homo sapien
gaggaatgtgaatgggtctttcctc

SEQ ID NO: 1768295 - DNA, 25 bp, Homo sapien
ttaccgctatgatgattacaggatg

SEQ ID NO: 1768296 - DNA, 25 bp, Homo sapien
taccgctatgatgattacaggatgt

SEQ ID NO: 1768297 - DNA, 25 bp, Homo sapien
cgctatgatgattacaggatgttga

SEQ ID NO: 1768298 - DNA, 25 bp, Homo sapien
tatgatgattacaggatgttgaata

SEQ ID NO: 1768299 - DNA, 25 bp, Homo sapien
gaacaaaacagcgtgtaccctcttg

SEQ ID NO: 1768300 - DNA, 25 bp, Homo sapien
gaaattatgaacctgaaaaccactg

SEQ ID NO: 1768301 - DNA, 25 bp, Homo sapien
aagtcaacaattaatccaggcctgc

SEQ ID NO: 1768302 - DNA, 25 bp, Homo sapien
gctatgctagacacttggaaaatga

SEQ ID NO: 1768303 - DNA, 25 bp, Homo sapien
aatcatgcaggaactttaatttttc

SEQ ID NO: 1768304 - DNA, 25 bp, Homo sapien
tcctcaactttttcacaaatttcac

SEQ ID NO: 1768305 - DNA, 25 bp, Homo sapien
caaatttcacaaaacttgttaggtg

SEQ ID NO: 1768306 - DNA, 25 bp, Homo sapien
tttcacaaaacttgttaggtgccat

SEQ ID NO: 1768307 - DNA, 25 bp, Homo sapien
tcttgaggcataaagttaggttggt

SEQ ID NO: 1768308 - DNA, 25 bp, Homo sapien
tctctgtgcattcgagaagaatgtg

SEQ ID NO: 1768309 - DNA, 25 bp, Homo sapien
gacccaatgattgtacaagagtgtg

SEQ ID NO: 1768310 - DNA, 25 bp, Homo sapien
tatagtgttcagttacactgtttcc

SEQ ID NO: 1768311 - DNA, 25 bp, Homo sapien
ggctatgctgtaaagtcctccaaac

SEQ ID NO: 1768312 - DNA, 25 bp, Homo sapien
catggctatgctgtaaagtcctcca

SEQ ID NO: 1768313 - DNA, 25 bp, Homo sapien
tatgctgtaaagtcctccaaacttg

SEQ ID NO: 1768314 - DNA, 25 bp, Homo sapien
gctatgctgtaaagtcctccaaact

SEQ ID NO: 1768315 - DNA, 25 bp, Homo sapien
agataaccatgagagctgcttatct

SEQ ID NO: 1768316 - DNA, 25 bp, Homo sapien
gataaccatgagagctgcttatctt

SEQ ID NO: 1768317 - DNA, 25 bp, Homo sapien
taagataggccaacacgatgcccct

SEQ ID NO: 1768318 - DNA, 25 bp, Homo sapien
ttatatatctcatgcacaggactgt

SEQ ID NO: 1768319 - DNA, 25 bp, Homo sapien
gctcaatccgtatgcaaatttcgtt

SEQ ID NO: 1768320 - DNA, 25 bp, Homo sapien
tctacattgtcttatggccctacag

SEQ ID NO: 1768321 - DNA, 25 bp, Homo sapien
tacagaacactgcactaggtcaccc

SEQ ID NO: 1768322 - DNA, 25 bp, Homo sapien
gatcactcagggctatataaccttc

SEQ ID NO: 1768323 - DNA, 25 bp, Homo sapien
tttgtagtctacagaacactgcact

SEQ ID NO: 1768324 - DNA, 25 bp, Homo sapien
tgatggatgcataagctgcgatcac

SEQ ID NO: 1768325 - DNA, 25 bp, Homo sapien
ttttcctgagctccgcgtgtagcaa

SEQ ID NO: 1768326 - DNA, 25 bp, Homo sapien
ccgcgtgtagcaagtcattgaccat

SEQ ID NO: 1768327 - DNA, 25 bp, Homo sapien
gagctccgcgtgtagcaagtcattg

SEQ ID NO: 1768328 - DNA, 25 bp, Homo sapien
atattttcctgagctccgcgtgtag

SEQ ID NO: 1768329 - DNA, 25 bp, Homo sapien
gccatgagttctgccctatgggagc

SEQ ID NO: 1768330 - DNA, 25 bp, Homo sapien
ggatattagatcataagaccttctt

SEQ ID NO: 1768331 - DNA, 25 bp, Homo sapien
tggaacctgagcaaatttgacatcc

SEQ ID NO: 1768332 - DNA, 25 bp, Homo sapien
cctttatctctaaggaggatattag

SEQ ID NO: 1768333 - DNA, 25 bp, Homo sapien
tatcagtcttaatgcccaagaagcc

SEQ ID NO: 1768334 - DNA, 25 bp, Homo sapien
tgctccccattaagacagatacggc

SEQ ID NO: 1768335 - DNA, 25 bp, Homo sapien
gatacggctttaggctctgcattca

SEQ ID NO: 1768336 - DNA, 25 bp, Homo sapien
taaccttggtgcatatccttgagag

SEQ ID NO: 1768337 - DNA, 25 bp, Homo sapien
aaagaactggcagccaaatttgtcc

SEQ ID NO: 1768338 - DNA, 25 bp, Homo sapien
gaaagaactggcagccaaatttgtc

SEQ ID NO: 1768339 - DNA, 25 bp, Homo sapien
taaactgggtgttcttcatagttca

SEQ ID NO: 1768340 - DNA, 25 bp, Homo sapien
tgggtgttcttcatagttcatttca

SEQ ID NO: 1768341 - DNA, 25 bp, Homo sapien
tgcctccataaactgggtgttcttc

SEQ ID NO: 1768342 - DNA, 25 bp, Homo sapien
tccataaactgggtgttcttcatag

SEQ ID NO: 1768343 - DNA, 25 bp, Homo sapien
gattcctaacccacaaaagtaagca

SEQ ID NO: 1768344 - DNA, 25 bp, Homo sapien
tttctccagtggaaaagtctgcagg

SEQ ID NO: 1768345 - DNA, 25 bp, Homo sapien
ccatcactgtaatgtggcagagcag

SEQ ID NO: 1768346 - DNA, 25 bp, Homo sapien
cagagcagtgtggatcagtctttcc

SEQ ID NO: 1768347 - DNA, 25 bp, Homo sapien
gattgtatgaactcaactgcgagac

SEQ ID NO: 1768348 - DNA, 25 bp, Homo sapien
cagggacttcctaagattgtatgaa

SEQ ID NO: 1768349 - DNA, 25 bp, Homo sapien
ctaagattgtatgaactcaactgcg

SEQ ID NO: 1768350 - DNA, 25 bp, Homo sapien
tatgaactcaactgcgagacagctg

SEQ ID NO: 1768351 - DNA, 25 bp, Homo sapien
gggccagatccagattagggtagta

SEQ ID NO: 1768352 - DNA, 25 bp, Homo sapien
acttataattgtggcagaagggcga

SEQ ID NO: 1768353 - DNA, 25 bp, Homo sapien
caaggttccacaggccttataggaa

SEQ ID NO: 1768354 - DNA, 25 bp, Homo sapien
cactatggagtgattgggccagatc

SEQ ID NO: 1768355 - DNA, 25 bp, Homo sapien
gactaaccattgaagaactccagat

SEQ ID NO: 1768356 - DNA, 25 bp, Homo sapien
gaaagaagctgtctaggactaacca

SEQ ID NO: 1768357 - DNA, 25 bp, Homo sapien
gaatgctgtgtcatagaggccaagg

SEQ ID NO: 1768358 - DNA, 25 bp, Homo sapien
aatgtctgtgtaaggtccatgttcc

SEQ ID NO: 1768359 - DNA, 25 bp, Homo sapien
gaaaatccaatcttcatgtacttgg

SEQ ID NO: 1768360 - DNA, 25 bp, Homo sapien
ggcacttccgaaagtgtcctggcct

SEQ ID NO: 1768361 - DNA, 25 bp, Homo sapien
gtgaagaggttactctggacaccag

SEQ ID NO: 1768362 - DNA, 25 bp, Homo sapien
tcagggacagacatagtagcatcaa

SEQ ID NO: 1768363 - DNA, 25 bp, Homo sapien
ccttctgagatggaggctagcttct

SEQ ID NO: 1768364 - DNA, 25 bp, Homo sapien
gcttctgttaaggaatcaccctgaa

SEQ ID NO: 1768365 - DNA, 25 bp, Homo sapien
ttcctccgagccttccccgagagaa

SEQ ID NO: 1768366 - DNA, 25 bp, Homo sapien
tagacacaaggatacactgtaattc

SEQ ID NO: 1768367 - DNA, 25 bp, Homo sapien
tcaaaaattcaaaatgcgctcagag

SEQ ID NO: 1768368 - DNA, 25 bp, Homo sapien
caaaaattcaaaatgcgctcagagc

SEQ ID NO: 1768369 - DNA, 25 bp, Homo sapien
tcatttccactctcatttccatgag

SEQ ID NO: 1768370 - DNA, 25 bp, Homo sapien
ttccatgagctccagttgcttgcat

SEQ ID NO: 1768371 - DNA, 25 bp, Homo sapien
actctcatttccatgagctccagtt

SEQ ID NO: 1768372 - DNA, 25 bp, Homo sapien
atttccatgagctccagttgcttgc

SEQ ID NO: 1768373 - DNA, 25 bp, Homo sapien
gaaaaacatttgaccacccaactga

SEQ ID NO: 1768374 - DNA, 25 bp, Homo sapien
ggatgccaaatatccttggtaagag

SEQ ID NO: 1768375 - DNA, 25 bp, Homo sapien
ccttggtaagagatatttgagatag

SEQ ID NO: 1768376 - DNA, 25 bp, Homo sapien
agggagctgattgtggatgccaaat

SEQ ID NO: 1768377 - DNA, 25 bp, Homo sapien
actctcctaatagccgtgtatgtgg

SEQ ID NO: 1768378 - DNA, 25 bp, Homo sapien
cctaatagccgtgtatgtggatgtg

SEQ ID NO: 1768379 - DNA, 25 bp, Homo sapien
tgaactctcctaatagccgtgtatg

SEQ ID NO: 1768380 - DNA, 25 bp, Homo sapien
caatcacctgaactctcctaatagc

SEQ ID NO: 1768381 - DNA, 25 bp, Homo sapien
tctagtgcaacaagtgtcccggaaa

SEQ ID NO: 1768382 - DNA, 25 bp, Homo sapien
cagggtaaccaggaaacgtgacagc

SEQ ID NO: 1768383 - DNA, 25 bp, Homo sapien
cagtcacaaatctctgacaggagct

SEQ ID NO: 1768384 - DNA, 25 bp, Homo sapien
acagagccgcgggagccacgtctga

SEQ ID NO: 1768385 - DNA, 25 bp, Homo sapien
caaaggaacaaagcctgattgatgc

SEQ ID NO: 1768386 - DNA, 25 bp, Homo sapien
gcattaggtcaacactagaaccagc

SEQ ID NO: 1768387 - DNA, 25 bp, Homo sapien
gctcctccagtcgagactgcagtta

SEQ ID NO: 1768388 - DNA, 25 bp, Homo sapien
ggtgctgtcctggattctgcattag

SEQ ID NO: 1768389 - DNA, 25 bp, Homo sapien
cctggatgcttacatagtttagctt

SEQ ID NO: 1768390 - DNA, 25 bp, Homo sapien
actccctggatgcttacatagttta

SEQ ID NO: 1768391 - DNA, 25 bp, Homo sapien
ccctggatgcttacatagtttagct

SEQ ID NO: 1768392 - DNA, 25 bp, Homo sapien
tccctggatgcttacatagtttagc

SEQ ID NO: 1768393 - DNA, 25 bp, Homo sapien
caggatggcaaaatagcctgagaat

SEQ ID NO: 1768394 - DNA, 25 bp, Homo sapien
gaatccttccactgttacatgggcc

SEQ ID NO: 1768395 - DNA, 25 bp, Homo sapien
gattaacataaccaaaggtgggcac

SEQ ID NO: 1768396 - DNA, 25 bp, Homo sapien
cacatactggaaactgcacaggatg

SEQ ID NO: 1768397 - DNA, 25 bp, Homo sapien
catgccttaagctccttgctagcca

SEQ ID NO: 1768398 - DNA, 25 bp, Homo sapien
gcattaccattaatttgcatgtagg

SEQ ID NO: 1768399 - DNA, 25 bp, Homo sapien
gatgctagacatgccttaagctcct

SEQ ID NO: 1768400 - DNA, 25 bp, Homo sapien
taatttgcatgtaggatgctagaca

SEQ ID NO: 1768401 - DNA, 25 bp, Homo sapien
tccaagtgctgatgccaatgagctc

SEQ ID NO: 1768402 - DNA, 25 bp, Homo sapien
tatttactttgatcccactgtcatc

SEQ ID NO: 1768403 - DNA, 25 bp, Homo sapien
gccctcacccttaaatgtccaagtg

SEQ ID NO: 1768404 - DNA, 25 bp, Homo sapien
gatcccactgtcatcgcacatctgg

SEQ ID NO: 1768405 - DNA, 25 bp, Homo sapien
ccttaaggatacatagggaagcaat

SEQ ID NO: 1768406 - DNA, 25 bp, Homo sapien
tgaacaaatccaacacagtaagtgc

SEQ ID NO: 1768407 - DNA, 25 bp, Homo sapien
gtgaaatagactcctcagaagccta

SEQ ID NO: 1768408 - DNA, 25 bp, Homo sapien
tcttcataggacatacaagtgccag

SEQ ID NO: 1768409 - DNA, 25 bp, Homo sapien
ccccgatcttttggcctagataact

SEQ ID NO: 1768410 - DNA, 25 bp, Homo sapien
tttggcctagataactccttccagt

SEQ ID NO: 1768411 - DNA, 25 bp, Homo sapien
gcatctttaatgatgctatgtggcc

SEQ ID NO: 1768412 - DNA, 25 bp, Homo sapien
taatgatgctatgtggcctccaccc

SEQ ID NO: 1768413 - DNA, 25 bp, Homo sapien
tccagtacagaacaacatgcctcta

SEQ ID NO: 1768414 - DNA, 25 bp, Homo sapien
tatggttactattcttagacgtgaa

SEQ ID NO: 1768415 - DNA, 25 bp, Homo sapien
taagagaaagcaaccatatatactg

SEQ ID NO: 1768416 - DNA, 25 bp, Homo sapien
gtcaaatacttgaagggagaagctc

SEQ ID NO: 1768417 - DNA, 25 bp, Homo sapien
gacttaaagctgcacctctgatgag

SEQ ID NO: 1768418 - DNA, 25 bp, Homo sapien
aattgtaaggatccacagcctaagg

SEQ ID NO: 1768419 - DNA, 25 bp, Homo sapien
gaatttgacagacaagccagagcag

SEQ ID NO: 1768420 - DNA, 25 bp, Homo sapien
gaagagtgcctgatctgtaactgga

SEQ ID NO: 1768421 - DNA, 25 bp, Homo sapien
tgttcgaatagcacattcttctcct

SEQ ID NO: 1768422 - DNA, 25 bp, Homo sapien
gaaaaactgattactctttgccagt

SEQ ID NO: 1768423 - DNA, 25 bp, Homo sapien
gagtcctcgtctataatcatttgtg

SEQ ID NO: 1768424 - DNA, 25 bp, Homo sapien
ccacaatcttcagtgttcgaatagc

SEQ ID NO: 1768425 - DNA, 25 bp, Homo sapien
tcaagataaaccattctcctcaaag

SEQ ID NO: 1768426 - DNA, 25 bp, Homo sapien
ccattctcctcaaagtcatccaact

SEQ ID NO: 1768427 - DNA, 25 bp, Homo sapien
caagataaaccattctcctcaaagt

SEQ ID NO: 1768428 - DNA, 25 bp, Homo sapien
ttctcctcaaagtcatccaactcac

SEQ ID NO: 1768429 - DNA, 25 bp, Homo sapien
ttctcttatccggttaaatggtgcc

SEQ ID NO: 1768430 - DNA, 25 bp, Homo sapien
tctcttatccggttaaatggtgcca

SEQ ID NO: 1768431 - DNA, 25 bp, Homo sapien
ccttctcttatccggttaaatggtg

SEQ ID NO: 1768432 - DNA, 25 bp, Homo sapien
ctcttatccggttaaatggtgccat

SEQ ID NO: 1768433 - DNA, 25 bp, Homo sapien
gttgtagggcctttgacaacaatgc

SEQ ID NO: 1768434 - DNA, 25 bp, Homo sapien
ttcatctagatcaaaaagggggccc

SEQ ID NO: 1768435 - DNA, 25 bp, Homo sapien
tgcatatgaacaagttgtagggcct

SEQ ID NO: 1768436 - DNA, 25 bp, Homo sapien
cataaagtgataggtgcatatgaac

SEQ ID NO: 1768437 - DNA, 25 bp, Homo sapien
tacagtaagaagatcaatgagggct

SEQ ID NO: 1768438 - DNA, 25 bp, Homo sapien
tcttgccaattgtcataaagaagga

SEQ ID NO: 1768439 - DNA, 25 bp, Homo sapien
catctgaagacctaacatgctgagc

SEQ ID NO: 1768440 - DNA, 25 bp, Homo sapien
caagtgcttatgtccaaaaatgccc

SEQ ID NO: 1768441 - DNA, 25 bp, Homo sapien
tatcaccatggcattttgtccaaaa

SEQ ID NO: 1768442 - DNA, 25 bp, Homo sapien
tgcgcccagcggaaaagactacctt

SEQ ID NO: 1768443 - DNA, 25 bp, Homo sapien
cttgcacccctactaaagacgggat

SEQ ID NO: 1768444 - DNA, 25 bp, Homo sapien
gactacctttttcctagtatatcac

SEQ ID NO: 1768445 - DNA, 25 bp, Homo sapien
tttatcccagctcttgtccaccgtc

SEQ ID NO: 1768446 - DNA, 25 bp, Homo sapien
tcccagctcttgtccaccgtcctga

SEQ ID NO: 1768447 - DNA, 25 bp, Homo sapien
ccgtcctgagacttccattgatggc

SEQ ID NO: 1768448 - DNA, 25 bp, Homo sapien
gtcctgagacttccattgatggcag

SEQ ID NO: 1768449 - DNA, 25 bp, Homo sapien
actgaaattctttccatgcatatga

SEQ ID NO: 1768450 - DNA, 25 bp, Homo sapien
taaattagataggaggagttgtgaa

SEQ ID NO: 1768451 - DNA, 25 bp, Homo sapien
gtttaatcgactctttctcatcagc

SEQ ID NO: 1768452 - DNA, 25 bp, Homo sapien
atatgatgcctttgttgcccaagaa

SEQ ID NO: 1768453 - DNA, 25 bp, Homo sapien
ggctattttgccctcctcatctatc

SEQ ID NO: 1768454 - DNA, 25 bp, Homo sapien
ctattttgccctcctcatctatcat

SEQ ID NO: 1768455 - DNA, 25 bp, Homo sapien
gctattttgccctcctcatctatca

SEQ ID NO: 1768456 - DNA, 25 bp, Homo sapien
caaggcagagtcactgtttcagcag

SEQ ID NO: 1768457 - DNA, 25 bp, Homo sapien
cccagaggatgatgaccagggactg

SEQ ID NO: 1768458 - DNA, 25 bp, Homo sapien
tcttcagtcatgaacccaggtcctt

SEQ ID NO: 1768459 - DNA, 25 bp, Homo sapien
caggtcctttagctccaaggcagag

SEQ ID NO: 1768460 - DNA, 25 bp, Homo sapien
cacatgtaggtgcattggtattgag

SEQ ID NO: 1768461 - DNA, 25 bp, Homo sapien
tgcattggtattgagagagagcaga

SEQ ID NO: 1768462 - DNA, 25 bp, Homo sapien
ctggagacagccacatgtaggtgca

SEQ ID NO: 1768463 - DNA, 25 bp, Homo sapien
cattggtattgagagagagcagaca

SEQ ID NO: 1768464 - DNA, 25 bp, Homo sapien
ttatcaagataaaccaccacaacca

SEQ ID NO: 1768465 - DNA, 25 bp, Homo sapien
cttatcaagataaaccaccacaacc

SEQ ID NO: 1768466 - DNA, 25 bp, Homo sapien
gctccattactcttacatctgtaca

SEQ ID NO: 1768467 - DNA, 25 bp, Homo sapien
taggggctccattactcttacatct

SEQ ID NO: 1768468 - DNA, 25 bp, Homo sapien
ttaagttgatttctaggggctccat

SEQ ID NO: 1768469 - DNA, 25 bp, Homo sapien
gatttctaggggctccattactctt

SEQ ID NO: 1768470 - DNA, 25 bp, Homo sapien
ggaggaatgctaatttgtaaggttc

SEQ ID NO: 1768471 - DNA, 25 bp, Homo sapien
gaatgctaatttgtaaggttcttac

SEQ ID NO: 1768472 - DNA, 25 bp, Homo sapien
tttggaggaatgctaatttgtaagg

SEQ ID NO: 1768473 - DNA, 25 bp, Homo sapien
aagaatttggaggaatgctaatttg

SEQ ID NO: 1768474 - DNA, 25 bp, Homo sapien
aaaaaggatgaactggaatcattta

SEQ ID NO: 1768475 - DNA, 25 bp, Homo sapien
aaaaggatgaactggaatcatttaa

SEQ ID NO: 1768476 - DNA, 25 bp, Homo sapien
tagaatgtgtatttaactgaaattc

SEQ ID NO: 1768477 - DNA, 25 bp, Homo sapien
gttagaatgtgtatttaactgaaat

SEQ ID NO: 1768478 - DNA, 25 bp, Homo sapien
acacagcaggatctactgtttcttg

SEQ ID NO: 1768479 - DNA, 25 bp, Homo sapien
gatagtcagtaactgggtaggtaaa

SEQ ID NO: 1768480 - DNA, 25 bp, Homo sapien
tgtattactaataaaggtgtgcctg

SEQ ID NO: 1768481 - DNA, 25 bp, Homo sapien
gatcggtaagctatattgttcacac

SEQ ID NO: 1768482 - DNA, 25 bp, Homo sapien
aagtgacatctatatggatatgttt

SEQ ID NO: 1768483 - DNA, 25 bp, Homo sapien
aaagtgacatctatatggatatgtt

SEQ ID NO: 1768484 - DNA, 25 bp, Homo sapien
cctcctcttctagtgcacccttctc

SEQ ID NO: 1768485 - DNA, 25 bp, Homo sapien
cctcttctagtgcacccttctcctc

SEQ ID NO: 1768486 - DNA, 25 bp, Homo sapien
gaaactgtgggctatgacaccaata

SEQ ID NO: 1768487 - DNA, 25 bp, Homo sapien
ctttactgataaaggaaacgctttg

SEQ ID NO: 1768488 - DNA, 25 bp, Homo sapien
tacaatatctcataatgtttgcccg

SEQ ID NO: 1768489 - DNA, 25 bp, Homo sapien
gagcacaactgctagtattccaggc

SEQ ID NO: 1768490 - DNA, 25 bp, Homo sapien
ctctttagccactctatgcttgctt

SEQ ID NO: 1768491 - DNA, 25 bp, Homo sapien
tatgcttgcttgtgttccagacttg

SEQ ID NO: 1768492 - DNA, 25 bp, Homo sapien
tagccactctatgcttgcttgtgtt

SEQ ID NO: 1768493 - DNA, 25 bp, Homo sapien
gttccagacttgtactttatggcca

SEQ ID NO: 1768494 - DNA, 25 bp, Homo sapien
gacggtttgaaagagaatcatatca

SEQ ID NO: 1768495 - DNA, 25 bp, Homo sapien
cagagagaaaactcacttctcggtc

SEQ ID NO: 1768496 - DNA, 25 bp, Homo sapien
gaaacactctgcctcatgatagctc

SEQ ID NO: 1768497 - DNA, 25 bp, Homo sapien
tttttacttggaagtgtacagagag

SEQ ID NO: 1768498 - DNA, 25 bp, Homo sapien
ctaactctaagttgcttagcctttt

SEQ ID NO: 1768499 - DNA, 25 bp, Homo sapien
ccctaactctaagttgcttagcctt

SEQ ID NO: 1768500 - DNA, 25 bp, Homo sapien
cctaactctaagttgcttagccttt

SEQ ID NO: 1768501 - DNA, 25 bp, Homo sapien
agttcataacagctgtcttgccctt

SEQ ID NO: 1768502 - DNA, 25 bp, Homo sapien
cggtgcacaatgttacagttcataa

SEQ ID NO: 1768503 - DNA, 25 bp, Homo sapien
aattcccggtgcacaatgttacagt

SEQ ID NO: 1768504 - DNA, 25 bp, Homo sapien
caatgttacagttcataacagctgt

SEQ ID NO: 1768505 - DNA, 25 bp, Homo sapien
tgaagttgctgtcaacttttccaac

SEQ ID NO: 1768506 - DNA, 25 bp, Homo sapien
gtctgcccactgctaccgctaaggg

SEQ ID NO: 1768507 - DNA, 25 bp, Homo sapien
ggtgctacaatagaggtctgcccac

SEQ ID NO: 1768508 - DNA, 25 bp, Homo sapien
tgctaccgctaagggagaaatcccg

SEQ ID NO: 1768509 - DNA, 25 bp, Homo sapien
ccattccattggaatggcgctggcc

SEQ ID NO: 1768510 - DNA, 25 bp, Homo sapien
actgactgacacacgttcaactgct

SEQ ID NO: 1768511 - DNA, 25 bp, Homo sapien
gactgacacacgttcaactgctgtt

SEQ ID NO: 1768512 - DNA, 25 bp, Homo sapien
ttccattggaatggcgctggccctt

SEQ ID NO: 1768513 - DNA, 25 bp, Homo sapien
tcctttagactctggttaccatcca

SEQ ID NO: 1768514 - DNA, 25 bp, Homo sapien
tgctgtatggatcgtttacatatag

SEQ ID NO: 1768515 - DNA, 25 bp, Homo sapien
ttgctcccctatccacggtctagtg

SEQ ID NO: 1768516 - DNA, 25 bp, Homo sapien
gatttaaggatgtagcctccttcct

SEQ ID NO: 1768517 - DNA, 25 bp, Homo sapien
caattggttttgataactgagaccc

SEQ ID NO: 1768518 - DNA, 25 bp, Homo sapien
caaaagactcatgtccctaagagga

SEQ ID NO: 1768519 - DNA, 25 bp, Homo sapien
tgtgctcatgagaaccaactagttg

SEQ ID NO: 1768520 - DNA, 25 bp, Homo sapien
tgccatcaacaactagaaccccaag

SEQ ID NO: 1768521 - DNA, 25 bp, Homo sapien
gacgggtaatagtcttgacatagct

SEQ ID NO: 1768522 - DNA, 25 bp, Homo sapien
tcaaatctatggacgggtaatagtc

SEQ ID NO: 1768523 - DNA, 25 bp, Homo sapien
tgtattaatatcatcaaatctatgg

SEQ ID NO: 1768524 - DNA, 25 bp, Homo sapien
taatatcatcaaatctatggacggg

SEQ ID NO: 1768525 - DNA, 25 bp, Homo sapien
caaaaagtgagaagcagtgtgcatc

SEQ ID NO: 1768526 - DNA, 25 bp, Homo sapien
tcctgtgctgggcttcatgccactg

SEQ ID NO: 1768527 - DNA, 25 bp, Homo sapien
cactggtacatttgtcttggcctct

SEQ ID NO: 1768528 - DNA, 25 bp, Homo sapien
caagcaggatgctatgactgtaaac

SEQ ID NO: 1768529 - DNA, 25 bp, Homo sapien
tattaaacctccagcacaaggtgcg

SEQ ID NO: 1768530 - DNA, 25 bp, Homo sapien
gatgtgggtaaccagattgtgttct

SEQ ID NO: 1768531 - DNA, 25 bp, Homo sapien
gagtgattggtctaataagccacag

SEQ ID NO: 1768532 - DNA, 25 bp, Homo sapien
caaagatgtagagtttctgatttca

SEQ ID NO: 1768533 - DNA, 25 bp, Homo sapien
ggaaaacatccccttaggcacagaa

SEQ ID NO: 1768534 - DNA, 25 bp, Homo sapien
tccccttaggcacagaatgccttaa

SEQ ID NO: 1768535 - DNA, 25 bp, Homo sapien
aaacatccccttaggcacagaatgc

SEQ ID NO: 1768536 - DNA, 25 bp, Homo sapien
catccccttaggcacagaatgcctt

SEQ ID NO: 1768537 - DNA, 25 bp, Homo sapien
ttccaaagattggagcttcagtgcc

SEQ ID NO: 1768538 - DNA, 25 bp, Homo sapien
tttccaaagattggagcttcagtgc

SEQ ID NO: 1768539 - DNA, 25 bp, Homo sapien
atttccaaagattggagcttcagtg

SEQ ID NO: 1768540 - DNA, 25 bp, Homo sapien
gatttccaaagattggagcttcagt

SEQ ID NO: 1768541 - DNA, 25 bp, Homo sapien
aggatcatttacatcacatggaaac

SEQ ID NO: 1768542 - DNA, 25 bp, Homo sapien
ctaggatcatttacatcacatggaa

SEQ ID NO: 1768543 - DNA, 25 bp, Homo sapien
aaaatactctaggatcatttacatc

SEQ ID NO: 1768544 - DNA, 25 bp, Homo sapien
tactctaggatcatttacatcacat

SEQ ID NO: 1768545 - DNA, 25 bp, Homo sapien
ccagcccactgtagaagagcctggg

SEQ ID NO: 1768546 - DNA, 25 bp, Homo sapien
tctccagcccactgtagaagagcct

SEQ ID NO: 1768547 - DNA, 25 bp, Homo sapien
tgatgtgaggcaagctacaaaactc

SEQ ID NO: 1768548 - DNA, 25 bp, Homo sapien
gaggcaagctacaaaactctccagc

SEQ ID NO: 1768549 - DNA, 25 bp, Homo sapien
tctttctagagcttccttaatcttt

SEQ ID NO: 1768550 - DNA, 25 bp, Homo sapien
tttctagagcttccttaatcttttc

SEQ ID NO: 1768551 - DNA, 25 bp, Homo sapien
ctttctagagcttccttaatctttt

SEQ ID NO: 1768552 - DNA, 25 bp, Homo sapien
ctccttaattctagcaactgtgtac

SEQ ID NO: 1768553 - DNA, 25 bp, Homo sapien
tcagtcctcttcaattctccttaat

SEQ ID NO: 1768554 - DNA, 25 bp, Homo sapien
tcaattctccttaattctagcaact

SEQ ID NO: 1768555 - DNA, 25 bp, Homo sapien
attctccttaattctagcaactgtg

SEQ ID NO: 1768556 - DNA, 25 bp, Homo sapien
agtagctgcaactactagtagctgg

SEQ ID NO: 1768557 - DNA, 25 bp, Homo sapien
gctgcaactactagtagctggaact

SEQ ID NO: 1768558 - DNA, 25 bp, Homo sapien
ccagagactttccaaggccgctttg

SEQ ID NO: 1768559 - DNA, 25 bp, Homo sapien
ggaactactagaggcgtgtggcacc

SEQ ID NO: 1768560 - DNA, 25 bp, Homo sapien
tcaataatatttggtaatacttcag

SEQ ID NO: 1768561 - DNA, 25 bp, Homo sapien
cttcaataatatttggtaatacttc

SEQ ID NO: 1768562 - DNA, 25 bp, Homo sapien
aataatatttggtaatacttcaggc

SEQ ID NO: 1768563 - DNA, 25 bp, Homo sapien
taatatttggtaatacttcaggcat

SEQ ID NO: 1768564 - DNA, 25 bp, Homo sapien
tgttctccttgacctttactggctg

SEQ ID NO: 1768565 - DNA, 25 bp, Homo sapien
tgagagctcatagtcagaggtggca

SEQ ID NO: 1768566 - DNA, 25 bp, Homo sapien
cactatgggaagcactattatctaa

SEQ ID NO: 1768567 - DNA, 25 bp, Homo sapien
tcagctacgagatagtcactatggg

SEQ ID NO: 1768568 - DNA, 25 bp, Homo sapien
gaagtgcacacagctatcacttttc

SEQ ID NO: 1768569 - DNA, 25 bp, Homo sapien
aatagcagttgccagccatcatttc

SEQ ID NO: 1768570 - DNA, 25 bp, Homo sapien
catctgaagtgcacacagctatcac

SEQ ID NO: 1768571 - DNA, 25 bp, Homo sapien
tctgaatggaagcaacctccaagaa

SEQ ID NO: 1768572 - DNA, 25 bp, Homo sapien
tctgaatgcagttacctttctgaag

SEQ ID NO: 1768573 - DNA, 25 bp, Homo sapien
ttgctcccggggtatattcaagccc

SEQ ID NO: 1768574 - DNA, 25 bp, Homo sapien
ttgtgcagttgtgatccacttagat

SEQ ID NO: 1768575 - DNA, 25 bp, Homo sapien
cccggggtatattcaagcccctgat

SEQ ID NO: 1768576 - DNA, 25 bp, Homo sapien
cagtgtcactgtcaagtaaccccaa

SEQ ID NO: 1768577 - DNA, 25 bp, Homo sapien
cctgctcttgatgggacatgccaat

SEQ ID NO: 1768578 - DNA, 25 bp, Homo sapien
tagcctcatagaaaatcagtgtcac

SEQ ID NO: 1768579 - DNA, 25 bp, Homo sapien
tgtgcaaacgtttcttcatcagtcc

SEQ ID NO: 1768580 - DNA, 25 bp, Homo sapien
ccacataatctacccagcagtatgg

SEQ ID NO: 1768581 - DNA, 25 bp, Homo sapien
ctctactgtgtcatttagggaccaa

SEQ ID NO: 1768582 - DNA, 25 bp, Homo sapien
ggaccaaatttctgtagtcttctgc

SEQ ID NO: 1768583 - DNA, 25 bp, Homo sapien
ttcccacataatctacccagcagta

SEQ ID NO: 1768584 - DNA, 25 bp, Homo sapien
gaggccaggatgatacactgaagtg

SEQ ID NO: 1768585 - DNA, 25 bp, Homo sapien
tgatacactgaagtgcgaagttggg

SEQ ID NO: 1768586 - DNA, 25 bp, Homo sapien
tagtctgcacggatgcataaaggca

SEQ ID NO: 1768587 - DNA, 25 bp, Homo sapien
aacaagtagtctgcacggatgcata

SEQ ID NO: 1768588 - DNA, 25 bp, Homo sapien
attttcttgtccgtaggacctctgg

SEQ ID NO: 1768589 - DNA, 25 bp, Homo sapien
ggacctctgggtaaatagactaatg

SEQ ID NO: 1768590 - DNA, 25 bp, Homo sapien
tatttgctagaaggaagagaacttg

SEQ ID NO: 1768591 - DNA, 25 bp, Homo sapien
cacaaagcctgcgaggaatggctcc

SEQ ID NO: 1768592 - DNA, 25 bp, Homo sapien
gttcagggtggtatggctgtagact

SEQ ID NO: 1768593 - DNA, 25 bp, Homo sapien
gcttccgagatcagatgagagatca

SEQ ID NO: 1768594 - DNA, 25 bp, Homo sapien
gatcagatgagagatcaggtgtgtt

SEQ ID NO: 1768595 - DNA, 25 bp, Homo sapien
tgttcagggtggtatggctgtagac

SEQ ID NO: 1768596 - DNA, 25 bp, Homo sapien
ttcctctcttcccatagtcttaacc

SEQ ID NO: 1768597 - DNA, 25 bp, Homo sapien
atgaatctaatttgttcagaaggat

SEQ ID NO: 1768598 - DNA, 25 bp, Homo sapien
tagtatatgtgattaggaacaatga

SEQ ID NO: 1768599 - DNA, 25 bp, Homo sapien
tctaatttgttcagaaggatgcttt

SEQ ID NO: 1768600 - DNA, 25 bp, Homo sapien
ttagtatatgtgattaggaacaatg

SEQ ID NO: 1768601 - DNA, 25 bp, Homo sapien
aagccccaggcatacagaacatttt

SEQ ID NO: 1768602 - DNA, 25 bp, Homo sapien
tccaaaacctgggaaatggttatca

SEQ ID NO: 1768603 - DNA, 25 bp, Homo sapien
gttgacactgacaagccccaggcat

SEQ ID NO: 1768604 - DNA, 25 bp, Homo sapien
cagggaaatggtagtctgctgcgtt

SEQ ID NO: 1768605 - DNA, 25 bp, Homo sapien
catgggtagtttgcagtgtgaatgg

SEQ ID NO: 1768606 - DNA, 25 bp, Homo sapien
atgggtagtttgcagtgtgaatggc

SEQ ID NO: 1768607 - DNA, 25 bp, Homo sapien
tcatgggtagtttgcagtgtgaatg

SEQ ID NO: 1768608 - DNA, 25 bp, Homo sapien
ggcccagaatacatggaacagccca

SEQ ID NO: 1768609 - DNA, 25 bp, Homo sapien
gctctagggcccagaatacatggaa

SEQ ID NO: 1768610 - DNA, 25 bp, Homo sapien
atctggactaagaaggtttgggaca

SEQ ID NO: 1768611 - DNA, 25 bp, Homo sapien
gaacagcccagtaatctggactaag

SEQ ID NO: 1768612 - DNA, 25 bp, Homo sapien
gtcccagttgtgggtgggactgacc

SEQ ID NO: 1768613 - DNA, 25 bp, Homo sapien
tgtcccagttgtgggtgggactgac

SEQ ID NO: 1768614 - DNA, 25 bp, Homo sapien
ccaccttggggagcacaatgaagta

SEQ ID NO: 1768615 - DNA, 25 bp, Homo sapien
cctggccatggacgttgctcgacat

SEQ ID NO: 1768616 - DNA, 25 bp, Homo sapien
tcctggccatggacgttgctcgaca

SEQ ID NO: 1768617 - DNA, 25 bp, Homo sapien
acctcgggtctcgtactctccatgg

SEQ ID NO: 1768618 - DNA, 25 bp, Homo sapien
tcgggtctcgtactctccatggtgg

SEQ ID NO: 1768619 - DNA, 25 bp, Homo sapien
gggtctcgtactctccatggtggtg

SEQ ID NO: 1768620 - DNA, 25 bp, Homo sapien
tgatgacctcgggtctcgtactctc

SEQ ID NO: 1768621 - DNA, 25 bp, Homo sapien
ctcttttgaaatttatccaatcatc

SEQ ID NO: 1768622 - DNA, 25 bp, Homo sapien
ttgacaaaatcgaacaccctttatg

SEQ ID NO: 1768623 - DNA, 25 bp, Homo sapien
ggtggatacttaggtcgattcctta

SEQ ID NO: 1768624 - DNA, 25 bp, Homo sapien
gaatagtgctatggtcatcctacaa

SEQ ID NO: 1768625 - DNA, 25 bp, Homo sapien
cagggacgcaattctcttctgcagc

SEQ ID NO: 1768626 - DNA, 25 bp, Homo sapien
gaccgatcaaaactaggcttgagag

SEQ ID NO: 1768627 - DNA, 25 bp, Homo sapien
taaacagggacgcaattctcttctg

SEQ ID NO: 1768628 - DNA, 25 bp, Homo sapien
ctttcttcttttcgcagtaggaccg

SEQ ID NO: 1768629 - DNA, 25 bp, Homo sapien
ctggtagacctgagattccagctga

SEQ ID NO: 1768630 - DNA, 25 bp, Homo sapien
cattctgcagttagcgtgtgcgtcc

SEQ ID NO: 1768631 - DNA, 25 bp, Homo sapien
ctttgtcattctgcagttagcgtgt

SEQ ID NO: 1768632 - DNA, 25 bp, Homo sapien
gattccagctgagatctttgtcatt

SEQ ID NO: 1768633 - DNA, 25 bp, Homo sapien
cagatataaaaatagacgtctttag

SEQ ID NO: 1768634 - DNA, 25 bp, Homo sapien
ctcagatataaaaatagacgtcttt

SEQ ID NO: 1768635 - DNA, 25 bp, Homo sapien
taaaaatagacgtctttagatcaat

SEQ ID NO: 1768636 - DNA, 25 bp, Homo sapien
aatagacgtctttagatcaatttgc

SEQ ID NO: 1768637 - DNA, 25 bp, Homo sapien
gttttcagtgcctcttcttgtgttc

SEQ ID NO: 1768638 - DNA, 25 bp, Homo sapien
ttttcagtgcctcttcttgtgttct

SEQ ID NO: 1768639 - DNA, 25 bp, Homo sapien
ttcagtgcctcttcttgtgttctca

SEQ ID NO: 1768640 - DNA, 25 bp, Homo sapien
tttcagtgcctcttcttgtgttctc

SEQ ID NO: 1768641 - DNA, 25 bp, Homo sapien
tgttgaagacaaatgttctaccatc

SEQ ID NO: 1768642 - DNA, 25 bp, Homo sapien
cttgtattaacataacccaactggg

SEQ ID NO: 1768643 - DNA, 25 bp, Homo sapien
gaagatgatatagacaacacatgct

SEQ ID NO: 1768644 - DNA, 25 bp, Homo sapien
aatctcagcgtgcagatatggccga

SEQ ID NO: 1768645 - DNA, 25 bp, Homo sapien
aacacttgaaaacctgaatcctcac

SEQ ID NO: 1768646 - DNA, 25 bp, Homo sapien
aaacacttgaaaacctgaatcctca

SEQ ID NO: 1768647 - DNA, 25 bp, Homo sapien
tcaaaacacttgaaaacctgaatcc

SEQ ID NO: 1768648 - DNA, 25 bp, Homo sapien
caaaacacttgaaaacctgaatcct

SEQ ID NO: 1768649 - DNA, 25 bp, Homo sapien
tcaggggtgtagatgtatagatgtt

SEQ ID NO: 1768650 - DNA, 25 bp, Homo sapien
atagatgttgagtgccatagtgatc

SEQ ID NO: 1768651 - DNA, 25 bp, Homo sapien
tattggtcaagttgagtaaaggtaa

SEQ ID NO: 1768652 - DNA, 25 bp, Homo sapien
agtgccatagtgatctccatgttta

SEQ ID NO: 1768653 - DNA, 25 bp, Homo sapien
atcacaaacccgcactcggagtgca

SEQ ID NO: 1768654 - DNA, 25 bp, Homo sapien
actgaagactagtcatcacaaaccc

SEQ ID NO: 1768655 - DNA, 25 bp, Homo sapien
gaaggccacgttaggcaccagatat

SEQ ID NO: 1768656 - DNA, 25 bp, Homo sapien
gcaccagatattgtgggatctggcc

SEQ ID NO: 1768657 - DNA, 25 bp, Homo sapien
caggttgggcagaaaaacgatcatc

SEQ ID NO: 1768658 - DNA, 25 bp, Homo sapien
tctggatctctggagacgagttgtt

SEQ ID NO: 1768659 - DNA, 25 bp, Homo sapien
tctcagcaaatttctccgtctcctt

SEQ ID NO: 1768660 - DNA, 25 bp, Homo sapien
gacagaggttgagccagatctggat

SEQ ID NO: 1768661 - DNA, 25 bp, Homo sapien
cataagattccctaggcaatttgga

SEQ ID NO: 1768662 - DNA, 25 bp, Homo sapien
ttggtcatctcagcagaccgctggg

SEQ ID NO: 1768663 - DNA, 25 bp, Homo sapien
gaccgctgggttcctttgtgcataa

SEQ ID NO: 1768664 - DNA, 25 bp, Homo sapien
taataatggtcggtccacaccaggt

SEQ ID NO: 1768665 - DNA, 25 bp, Homo sapien
gctgtttcaatgtaagtctgaagta

SEQ ID NO: 1768666 - DNA, 25 bp, Homo sapien
caatgtaagtctgaagtacttgcaa

SEQ ID NO: 1768667 - DNA, 25 bp, Homo sapien
cttgcaaatatagtaaagccaatat

SEQ ID NO: 1768668 - DNA, 25 bp, Homo sapien
ccagggatatggtgttttggaattc

SEQ ID NO: 1768669 - DNA, 25 bp, Homo sapien
taagggagtagcatttctccaactc

SEQ ID NO: 1768670 - DNA, 25 bp, Homo sapien
tcacaggtaatccataagggagtag

SEQ ID NO: 1768671 - DNA, 25 bp, Homo sapien
tctccaactcctttatctcagtgtc

SEQ ID NO: 1768672 - DNA, 25 bp, Homo sapien
taatccataagggagtagcatttct

SEQ ID NO: 1768673 - DNA, 25 bp, Homo sapien
gctttataagttaatgtagtccaga

SEQ ID NO: 1768674 - DNA, 25 bp, Homo sapien
aaatttgcttgctaagttatcattg

SEQ ID NO: 1768675 - DNA, 25 bp, Homo sapien
tttgttgtctgagatgtatttggaa

SEQ ID NO: 1768676 - DNA, 25 bp, Homo sapien
cattgtgtatcaatgatatacagtg

SEQ ID NO: 1768677 - DNA, 25 bp, Homo sapien
tcagaggtcccagccatgatggtgg

SEQ ID NO: 1768678 - DNA, 25 bp, Homo sapien
gtttcaagtagggagtaatagtcac

SEQ ID NO: 1768679 - DNA, 25 bp, Homo sapien
ggtatgcaccagttgtagctaaggc

SEQ ID NO: 1768680 - DNA, 25 bp, Homo sapien
ggcaggtgagtagatgtaataccca

SEQ ID NO: 1768681 - DNA, 25 bp, Homo sapien
tcacaaacttgcatgacttccttgt

SEQ ID NO: 1768682 - DNA, 25 bp, Homo sapien
caaacttgcatgacttccttgtgca

SEQ ID NO: 1768683 - DNA, 25 bp, Homo sapien
cttgcatgacttccttgtgcaagag

SEQ ID NO: 1768684 - DNA, 25 bp, Homo sapien
gcatgacttccttgtgcaagagcca

SEQ ID NO: 1768685 - DNA, 25 bp, Homo sapien
ccctcctttcctttaggatccatat

SEQ ID NO: 1768686 - DNA, 25 bp, Homo sapien
tcctttaggatccatatttttcttc

SEQ ID NO: 1768687 - DNA, 25 bp, Homo sapien
tttcttctgcaagcaactctttgtc

SEQ ID NO: 1768688 - DNA, 25 bp, Homo sapien
tttttcttctgcaagcaactctttg

SEQ ID NO: 1768689 - DNA, 25 bp, Homo sapien
aacctaaactagcaggatggaagca

SEQ ID NO: 1768690 - DNA, 25 bp, Homo sapien
catcatcacagttaggaatcagaca

SEQ ID NO: 1768691 - DNA, 25 bp, Homo sapien
tcagacaataactttggagcacggc

SEQ ID NO: 1768692 - DNA, 25 bp, Homo sapien
tttcatcctgattctttgtggtcca

SEQ ID NO: 1768693 - DNA, 25 bp, Homo sapien
gagaaacgagatcttcacagttgcc

SEQ ID NO: 1768694 - DNA, 25 bp, Homo sapien
caaaataaacacctccaccatgggc

SEQ ID NO: 1768695 - DNA, 25 bp, Homo sapien
gagacagagaaacgagatcttcaca

SEQ ID NO: 1768696 - DNA, 25 bp, Homo sapien
tgcctccccgatggccaaaataaac

SEQ ID NO: 1768697 - DNA, 25 bp, Homo sapien
ctgagagattagcccgtgacggtgt

SEQ ID NO: 1768698 - DNA, 25 bp, Homo sapien
attagcccgtgacggtgtttgcagc

SEQ ID NO: 1768699 - DNA, 25 bp, Homo sapien
agagattagcccgtgacggtgtttg

SEQ ID NO: 1768700 - DNA, 25 bp, Homo sapien
cgtgacggtgtttgcagcctccaca

SEQ ID NO: 1768701 - DNA, 25 bp, Homo sapien
tttgcacctcattctacagccatgg

SEQ ID NO: 1768702 - DNA, 25 bp, Homo sapien
tagtgtttgcacctcattctacagc

SEQ ID NO: 1768703 - DNA, 25 bp, Homo sapien
acctcattctacagccatggaaagg

SEQ ID NO: 1768704 - DNA, 25 bp, Homo sapien
gctgtagtgtttgcacctcattcta

SEQ ID NO: 1768705 - DNA, 25 bp, Homo sapien
agcgggtttagcatacaaccttgcg

SEQ ID NO: 1768706 - DNA, 25 bp, Homo sapien
cagaatcagcttttcccctttttct

SEQ ID NO: 1768707 - DNA, 25 bp, Homo sapien
ttttggcatctgcattttctggaag

SEQ ID NO: 1768708 - DNA, 25 bp, Homo sapien
cagcttttcccctttttctctgtgg

SEQ ID NO: 1768709 - DNA, 25 bp, Homo sapien
tgcattttctggaaggttattcccc

SEQ ID NO: 1768710 - DNA, 25 bp, Homo sapien
ttttttgtaacttggagcacagagc

SEQ ID NO: 1768711 - DNA, 25 bp, Homo sapien
ggcaagttcaggcactcagacctgt

SEQ ID NO: 1768712 - DNA, 25 bp, Homo sapien
gaaaagtgctgatacctcgtaaaag

SEQ ID NO: 1768713 - DNA, 25 bp, Homo sapien
tgcttaaaagtagtgaagtcacgcc

SEQ ID NO: 1768714 - DNA, 25 bp, Homo sapien
ttcaaatccatcaatccatttacag

SEQ ID NO: 1768715 - DNA, 25 bp, Homo sapien
aatccatcaatccatttacagtatc

SEQ ID NO: 1768716 - DNA, 25 bp, Homo sapien
tacagtatcataattcaaaattaca

SEQ ID NO: 1768717 - DNA, 25 bp, Homo sapien
aactatagaaacactttcaaatcca

SEQ ID NO: 1768718 - DNA, 25 bp, Homo sapien
aagaccgagctggttcgggcagcga

SEQ ID NO: 1768719 - DNA, 25 bp, Homo sapien
aggatcccggcagacgctaagatgg

SEQ ID NO: 1768720 - DNA, 25 bp, Homo sapien
gttcgggcagcgaaggcgcgggaag

SEQ ID NO: 1768721 - DNA, 25 bp, Homo sapien
ctgagttcgatttgacttgtgagga

SEQ ID NO: 1768722 - DNA, 25 bp, Homo sapien
tgctacgaccgtgaggcgcgcgtct

SEQ ID NO: 1768723 - DNA, 25 bp, Homo sapien
cgcagcgctgctacgaccgtgaggc

SEQ ID NO: 1768724 - DNA, 25 bp, Homo sapien
ttttgggagcaaggagagcttatcg

SEQ ID NO: 1768725 - DNA, 25 bp, Homo sapien
tatcgatgagcgttatcagaaaccc

SEQ ID NO: 1768726 - DNA, 25 bp, Homo sapien
gccacgcttctttttacaacattgt

SEQ ID NO: 1768727 - DNA, 25 bp, Homo sapien
caaatgcgcccgattttcggagggc

SEQ ID NO: 1768728 - DNA, 25 bp, Homo sapien
ttcaaccgtcttccaaataaagcca

SEQ ID NO: 1768729 - DNA, 25 bp, Homo sapien
tactaactgggtcgaggaagcaaaa

SEQ ID NO: 1768730 - DNA, 25 bp, Homo sapien
gcaagaaggccacctcaaagataga

SEQ ID NO: 1768731 - DNA, 25 bp, Homo sapien
aggctgactcaaccgctgtccccag

SEQ ID NO: 1768732 - DNA, 25 bp, Homo sapien
gctggtcactccaaaagactgctaa

SEQ ID NO: 1768733 - DNA, 25 bp, Homo sapien
ggagaaactggtagatgtcttcaac

SEQ ID NO: 1768734 - DNA, 25 bp, Homo sapien
caagaagaaaagtgtcatactcagc

SEQ ID NO: 1768735 - DNA, 25 bp, Homo sapien
tatgtagctgacatgcatgcaagaa

SEQ ID NO: 1768736 - DNA, 25 bp, Homo sapien
ccattagtatcctttgtatgcagaa

SEQ ID NO: 1768737 - DNA, 25 bp, Homo sapien
tgaggcaattggtcaactactgaga

SEQ ID NO: 1768738 - DNA, 25 bp, Homo sapien
tacactgtactctgaagacacaaag

SEQ ID NO: 1768739 - DNA, 25 bp, Homo sapien
tatttcaccataggactaaccaggg

SEQ ID NO: 1768740 - DNA, 25 bp, Homo sapien
cttcaccttcccaggtagggatctg

SEQ ID NO: 1768741 - DNA, 25 bp, Homo sapien
tccctgcccaatcccctcttcacct

SEQ ID NO: 1768742 - DNA, 25 bp, Homo sapien
ctgcccaatcccctcttcaccttcc

SEQ ID NO: 1768743 - DNA, 25 bp, Homo sapien
ccttcccaggtagggatctgcctca

SEQ ID NO: 1768744 - DNA, 25 bp, Homo sapien
ggaacttggtttgaaaactactgca

SEQ ID NO: 1768745 - DNA, 25 bp, Homo sapien
gagaggagagggctataaacctctt

SEQ ID NO: 1768746 - DNA, 25 bp, Homo sapien
tccaagtcccgtagcttcagagttg

SEQ ID NO: 1768747 - DNA, 25 bp, Homo sapien
cacagctgaccgctttgtgagcgcc

SEQ ID NO: 1768748 - DNA, 25 bp, Homo sapien
gatagcccggttgttactggacgga

SEQ ID NO: 1768749 - DNA, 25 bp, Homo sapien
taggagggtcacacactcaagtggg

SEQ ID NO: 1768750 - DNA, 25 bp, Homo sapien
caaaacgaaaacagagaggcggagt

SEQ ID NO: 1768751 - DNA, 25 bp, Homo sapien
tttgaacgctgaatgcaaagtgcct

SEQ ID NO: 1768752 - DNA, 25 bp, Homo sapien
aaataagctccgatatgctgctgct

SEQ ID NO: 1768753 - DNA, 25 bp, Homo sapien
gacaaaataagctccgatatgctgc

SEQ ID NO: 1768754 - DNA, 25 bp, Homo sapien
tcaggttttcacaaaagcacgtgaa

SEQ ID NO: 1768755 - DNA, 25 bp, Homo sapien
gaaccaccttgacgatctgataaat

SEQ ID NO: 1768756 - DNA, 25 bp, Homo sapien
ctcccaagagtccagttatgaggcc

SEQ ID NO: 1768757 - DNA, 25 bp, Homo sapien
tcccaagagtccagttatgaggcct

SEQ ID NO: 1768758 - DNA, 25 bp, Homo sapien
tccccagaagagtcaggaatagcaa

SEQ ID NO: 1768759 - DNA, 25 bp, Homo sapien
ccttccccagaagagtcaggaatag

SEQ ID NO: 1768760 - DNA, 25 bp, Homo sapien
cacaccttcagcccttccccagaag

SEQ ID NO: 1768761 - DNA, 25 bp, Homo sapien
acaccttcagcccttccccagaaga

SEQ ID NO: 1768762 - DNA, 25 bp, Homo sapien
acagatctatttaccagagttccaa

SEQ ID NO: 1768763 - DNA, 25 bp, Homo sapien
tgtgagacttacctccaggcactgg

SEQ ID NO: 1768764 - DNA, 25 bp, Homo sapien
acaacagaagatgaagttgcaggga

SEQ ID NO: 1768765 - DNA, 25 bp, Homo sapien
gagttccaaaacaatgtaccacaca

SEQ ID NO: 1768766 - DNA, 25 bp, Homo sapien
gatagtcttggaagaagcattgcat

SEQ ID NO: 1768767 - DNA, 25 bp, Homo sapien
tgtcacctagctgatattgtaattg

SEQ ID NO: 1768768 - DNA, 25 bp, Homo sapien
gcctcttcaggatgacggggaatgt

SEQ ID NO: 1768769 - DNA, 25 bp, Homo sapien
ctgttccatgttggaagaggtcaaa

SEQ ID NO: 1768770 - DNA, 25 bp, Homo sapien
tgggccgggaaccagctttgactcc

SEQ ID NO: 1768771 - DNA, 25 bp, Homo sapien
gctgccagaagggactgggccggga

SEQ ID NO: 1768772 - DNA, 25 bp, Homo sapien
gaaccagctttgactccggggctgc

SEQ ID NO: 1768773 - DNA, 25 bp, Homo sapien
aagaggaggcaggttgctgccagaa

SEQ ID NO: 1768774 - DNA, 25 bp, Homo sapien
gatccgcttgatgggagcaacctcc

SEQ ID NO: 1768775 - DNA, 25 bp, Homo sapien
gcagcagctcgatccgcttgatggg

SEQ ID NO: 1768776 - DNA, 25 bp, Homo sapien
ttggagatggccgtggccactctac

SEQ ID NO: 1768777 - DNA, 25 bp, Homo sapien
ggagcaacctccgtcttggagatgg

SEQ ID NO: 1768778 - DNA, 25 bp, Homo sapien
cccttgtattgcttatctgcggtga

SEQ ID NO: 1768779 - DNA, 25 bp, Homo sapien
ctatatggtctataatgcccttgta

SEQ ID NO: 1768780 - DNA, 25 bp, Homo sapien
ctgcggtgatctgcttgctggcaca

SEQ ID NO: 1768781 - DNA, 25 bp, Homo sapien
tgatctgcttgctggcacactgtac

SEQ ID NO: 1768782 - DNA, 25 bp, Homo sapien
actccctgctccttgagaatacgga

SEQ ID NO: 1768783 - DNA, 25 bp, Homo sapien
ttgaaagcaaagttaagagcctggg

SEQ ID NO: 1768784 - DNA, 25 bp, Homo sapien
aaagcaaagttaagagcctgggtgg

SEQ ID NO: 1768785 - DNA, 25 bp, Homo sapien
ggccaggttactgcgccagaaggac

SEQ ID NO: 1768786 - DNA, 25 bp, Homo sapien
cttcaaagtagcgccaaaactgggt

SEQ ID NO: 1768787 - DNA, 25 bp, Homo sapien
tcaaagtagcgccaaaactgggtcc

SEQ ID NO: 1768788 - DNA, 25 bp, Homo sapien
ttcaaagtagcgccaaaactgggtc

SEQ ID NO: 1768789 - DNA, 25 bp, Homo sapien
caaagtagcgccaaaactgggtcct

SEQ ID NO: 1768790 - DNA, 25 bp, Homo sapien
aggatgtggccccagaaacactgcc

SEQ ID NO: 1768791 - DNA, 25 bp, Homo sapien
agaaacactgcctgatgccagattc

SEQ ID NO: 1768792 - DNA, 25 bp, Homo sapien
cccagaaacactgcctgatgccaga

SEQ ID NO: 1768793 - DNA, 25 bp, Homo sapien
tggccccagaaacactgcctgatgc

SEQ ID NO: 1768794 - DNA, 25 bp, Homo sapien
tcatcatgtggcagccaatggtgtc

SEQ ID NO: 1768795 - DNA, 25 bp, Homo sapien
tgtggcagccaatggtgtcaaatgg

SEQ ID NO: 1768796 - DNA, 25 bp, Homo sapien
gcaatggcagtgatagtctttgcga

SEQ ID NO: 1768797 - DNA, 25 bp, Homo sapien
gtctttgcgatcatccggttgatga

SEQ ID NO: 1768798 - DNA, 25 bp, Homo sapien
tggaaaacgctttgcctccttcaac

SEQ ID NO: 1768799 - DNA, 25 bp, Homo sapien
acacaagcaatctttctctagcact

SEQ ID NO: 1768800 - DNA, 25 bp, Homo sapien
catgcacccttggaaaacgctttgc

SEQ ID NO: 1768801 - DNA, 25 bp, Homo sapien
cctccttcaacacaagcaatctttc

SEQ ID NO: 1768802 - DNA, 25 bp, Homo sapien
tatcttccttgccatgtaattggcg

SEQ ID NO: 1768803 - DNA, 25 bp, Homo sapien
catgtaattggcgtaagtctatgat

SEQ ID NO: 1768804 - DNA, 25 bp, Homo sapien
tggcgtaagtctatgattatccgac

SEQ ID NO: 1768805 - DNA, 25 bp, Homo sapien
aagtctatgattatccgactcactc

SEQ ID NO: 1768806 - DNA, 25 bp, Homo sapien
ctggttctccatcggcttttcacag

SEQ ID NO: 1768807 - DNA, 25 bp, Homo sapien
cttctggttctccatcggcttttca

SEQ ID NO: 1768808 - DNA, 25 bp, Homo sapien
ttctggttctccatcggcttttcac

SEQ ID NO: 1768809 - DNA, 25 bp, Homo sapien
tctggttctccatcggcttttcaca

SEQ ID NO: 1768810 - DNA, 25 bp, Homo sapien
catgtgtgttcgagggtggctacca

SEQ ID NO: 1768811 - DNA, 25 bp, Homo sapien
tgattttgcattctgtaacccgcct

SEQ ID NO: 1768812 - DNA, 25 bp, Homo sapien
tgatggcttggatcctagctgaccc

SEQ ID NO: 1768813 - DNA, 25 bp, Homo sapien
tagctgaccctcctcttgatgaaag

SEQ ID NO: 1768814 - DNA, 25 bp, Homo sapien
tccggcagcccaagatactgtgact

SEQ ID NO: 1768815 - DNA, 25 bp, Homo sapien
ttggaagagcgcccccaggtgaaac

SEQ ID NO: 1768816 - DNA, 25 bp, Homo sapien
cggcagcccaagatactgtgactcc

SEQ ID NO: 1768817 - DNA, 25 bp, Homo sapien
cttccggcagcccaagatactgtga

SEQ ID NO: 1768818 - DNA, 25 bp, Homo sapien
cgctgaaagcgaagaaggaatttcc

SEQ ID NO: 1768819 - DNA, 25 bp, Homo sapien
caagatggcgctgaaagcgaagaag

SEQ ID NO: 1768820 - DNA, 25 bp, Homo sapien
agcgaagaaggaatttccttcggct

SEQ ID NO: 1768821 - DNA, 25 bp, Homo sapien
tcacaagatggcgctgaaagcgaag

SEQ ID NO: 1768822 - DNA, 25 bp, Homo sapien
gatgccctcgtagcagatctgtgcc

SEQ ID NO: 1768823 - DNA, 25 bp, Homo sapien
tggaggaaaggggtgaccccgctca

SEQ ID NO: 1768824 - DNA, 25 bp, Homo sapien
ggatgccctcgtagcagatctgtgc

SEQ ID NO: 1768825 - DNA, 25 bp, Homo sapien
aattgaattttagcgagggctacgg

SEQ ID NO: 1768826 - DNA, 25 bp, Homo sapien
atgagaaccccacgcaccagaatga

SEQ ID NO: 1768827 - DNA, 25 bp, Homo sapien
tggacgatctatcttctgtaccaga

SEQ ID NO: 1768828 - DNA, 25 bp, Homo sapien
tattacaatagttcatcttgaggtg

SEQ ID NO: 1768829 - DNA, 25 bp, Homo sapien
agcttggactgaaccgactgtatat

SEQ ID NO: 1768830 - DNA, 25 bp, Homo sapien
cctgcccaactaaggagcttggact

SEQ ID NO: 1768831 - DNA, 25 bp, Homo sapien
tgtgttaaggcagagtcaaccatac

SEQ ID NO: 1768832 - DNA, 25 bp, Homo sapien
gactgaaccgactgtatatgagcat

SEQ ID NO: 1768833 - DNA, 25 bp, Homo sapien
gtgtacttcagctcaccagtgctct

SEQ ID NO: 1768834 - DNA, 25 bp, Homo sapien
tattgcctagttgatacagggctcc

SEQ ID NO: 1768835 - DNA, 25 bp, Homo sapien
ggtaaatgggccgagacagtcttca

SEQ ID NO: 1768836 - DNA, 25 bp, Homo sapien
gctcaccagtgctcttgatctctat

SEQ ID NO: 1768837 - DNA, 25 bp, Homo sapien
tcagcccaggttgatatccgttccc

SEQ ID NO: 1768838 - DNA, 25 bp, Homo sapien
ctactagcagttaggtccaagtgga

SEQ ID NO: 1768839 - DNA, 25 bp, Homo sapien
cattagaaatccgaaaactccctgc

SEQ ID NO: 1768840 - DNA, 25 bp, Homo sapien
ccagggatggttaaagtaccacatc

SEQ ID NO: 1768841 - DNA, 25 bp, Homo sapien
catcaaagatttactagagtgtcta

SEQ ID NO: 1768842 - DNA, 25 bp, Homo sapien
tgtctattcagtgccttcgcaaggc

SEQ ID NO: 1768843 - DNA, 25 bp, Homo sapien
tcaagtgttgaaggctgttccttac

SEQ ID NO: 1768844 - DNA, 25 bp, Homo sapien
ttaccaccactaagtttgcacataa

SEQ ID NO: 1768845 - DNA, 25 bp, Homo sapien
aagctggactctgatatgtagttga

SEQ ID NO: 1768846 - DNA, 25 bp, Homo sapien
caaagctggactctgatatgtagtt

SEQ ID NO: 1768847 - DNA, 25 bp, Homo sapien
ctggactctgatatgtagttgaggg

SEQ ID NO: 1768848 - DNA, 25 bp, Homo sapien
gcaaagctggactctgatatgtagt

SEQ ID NO: 1768849 - DNA, 25 bp, Homo sapien
ccatttagatacatccaaatgcaaa

SEQ ID NO: 1768850 - DNA, 25 bp, Homo sapien
cataactagagcttgaacataagtc

SEQ ID NO: 1768851 - DNA, 25 bp, Homo sapien
acagggatcttcataactagagctt

SEQ ID NO: 1768852 - DNA, 25 bp, Homo sapien
actgagtggccgtaaatgtttccat

SEQ ID NO: 1768853 - DNA, 25 bp, Homo sapien
tgtgtctctaatgttctgtcttcct

SEQ ID NO: 1768854 - DNA, 25 bp, Homo sapien
tgtcttccttcaattcattttgcat

SEQ ID NO: 1768855 - DNA, 25 bp, Homo sapien
ttctgtcttccttcaattcattttg

SEQ ID NO: 1768856 - DNA, 25 bp, Homo sapien
ctgtgtctctaatgttctgtcttcc

SEQ ID NO: 1768857 - DNA, 25 bp, Homo sapien
cctcaaagtctaagtggattatttc

SEQ ID NO: 1768858 - DNA, 25 bp, Homo sapien
tcctcaaagtctaagtggattattt

SEQ ID NO: 1768859 - DNA, 25 bp, Homo sapien
tacaagttttatcctccctgagatg

SEQ ID NO: 1768860 - DNA, 25 bp, Homo sapien
ctatctcattgttaacagcttcagt

SEQ ID NO: 1768861 - DNA, 25 bp, Homo sapien
attgttaacagcttcagttctgggc

SEQ ID NO: 1768862 - DNA, 25 bp, Homo sapien
ctccctgagatggctatctcattgt

SEQ ID NO: 1768863 - DNA, 25 bp, Homo sapien
tcagccatgggggattcagcaaaat

SEQ ID NO: 1768864 - DNA, 25 bp, Homo sapien
caaagttattgcagtcagagttcat

SEQ ID NO: 1768865 - DNA, 25 bp, Homo sapien
gcagtcagagttcataaaatcagcc

SEQ ID NO: 1768866 - DNA, 25 bp, Homo sapien
gaatgcaaagttattgcagtcagag

SEQ ID NO: 1768867 - DNA, 25 bp, Homo sapien
ccaggctgttcccattccacgtggg

SEQ ID NO: 1768868 - DNA, 25 bp, Homo sapien
gtcatcccctgatggatatcccagg

SEQ ID NO: 1768869 - DNA, 25 bp, Homo sapien
cattgacctgtgatggtgccataag

SEQ ID NO: 1768870 - DNA, 25 bp, Homo sapien
catcttctaattggtctggcattga

SEQ ID NO: 1768871 - DNA, 25 bp, Homo sapien
gaagcaggaagagagcagaatgcat

SEQ ID NO: 1768872 - DNA, 25 bp, Homo sapien
ggaagcaggaagagagcagaatgca

SEQ ID NO: 1768873 - DNA, 25 bp, Homo sapien
gatttgtctctagaacgcgcgctaa

SEQ ID NO: 1768874 - DNA, 25 bp, Homo sapien
tgggtctcctgatttgtctctagaa

SEQ ID NO: 1768875 - DNA, 25 bp, Homo sapien
gcatacataaacttccatatgacag

SEQ ID NO: 1768876 - DNA, 25 bp, Homo sapien
gaacgcgcgctaataagcatacata

SEQ ID NO: 1768877 - DNA, 25 bp, Homo sapien
tgggtccacattcgtactgttcata

SEQ ID NO: 1768878 - DNA, 25 bp, Homo sapien
aatgcaattgcatgcttccataggt

SEQ ID NO: 1768879 - DNA, 25 bp, Homo sapien
tgcatgcttccataggtgaatacgc

SEQ ID NO: 1768880 - DNA, 25 bp, Homo sapien
aggtgaatacgctctctctttccag

SEQ ID NO: 1768881 - DNA, 25 bp, Homo sapien
tcaggtaagactttcggcgttcttg

SEQ ID NO: 1768882 - DNA, 25 bp, Homo sapien
aagatagttgttgattgaatgaccc

SEQ ID NO: 1768883 - DNA, 25 bp, Homo sapien
agactttcggcgttcttggcatccc

SEQ ID NO: 1768884 - DNA, 25 bp, Homo sapien
cacagatactcccaagatagttgtt

SEQ ID NO: 1768885 - DNA, 25 bp, Homo sapien
accattcaaatgtctgtgagcctga

SEQ ID NO: 1768886 - DNA, 25 bp, Homo sapien
tggtgtctggcctccataggaagcc

SEQ ID NO: 1768887 - DNA, 25 bp, Homo sapien
tacaacccatgcctgattcatctgg

SEQ ID NO: 1768888 - DNA, 25 bp, Homo sapien
taaaggtcagcctagagtttcttgt

SEQ ID NO: 1768889 - DNA, 25 bp, Homo sapien
ccaatgcagttggaaaagtagagcc

SEQ ID NO: 1768890 - DNA, 25 bp, Homo sapien
ctctgtctcaggtagggaatcttca

SEQ ID NO: 1768891 - DNA, 25 bp, Homo sapien
taagcacaaataaagacgtgagtgg

SEQ ID NO: 1768892 - DNA, 25 bp, Homo sapien
gaatgtaagctctatttagcacaga

SEQ ID NO: 1768893 - DNA, 25 bp, Homo sapien
tggctttggcctctgcgaagtacct

SEQ ID NO: 1768894 - DNA, 25 bp, Homo sapien
ttttccatgacctcatggctttggc

SEQ ID NO: 1768895 - DNA, 25 bp, Homo sapien
ttccatgacctcatggctttggcct

SEQ ID NO: 1768896 - DNA, 25 bp, Homo sapien
ggcctctgcgaagtacctttcaagt

SEQ ID NO: 1768897 - DNA, 25 bp, Homo sapien
tcaaaggagccaaaaatacacatcc

SEQ ID NO: 1768898 - DNA, 25 bp, Homo sapien
aaatccctggccttcaacgtttcag

SEQ ID NO: 1768899 - DNA, 25 bp, Homo sapien
ctatacccctcaagtaaattgatgg

SEQ ID NO: 1768900 - DNA, 25 bp, Homo sapien
caactcttggtgatttgggccacta

SEQ ID NO: 1768901 - DNA, 25 bp, Homo sapien
ctgctgctgacatctatatctgatg

SEQ ID NO: 1768902 - DNA, 25 bp, Homo sapien
ccttgggctttctgttagtgtctgc

SEQ ID NO: 1768903 - DNA, 25 bp, Homo sapien
actgggctgtcaactcagcattcac

SEQ ID NO: 1768904 - DNA, 25 bp, Homo sapien
cttgtggttgagtgtgcttggcttg

SEQ ID NO: 1768905 - DNA, 25 bp, Homo sapien
taactaacgtggtcttactcatgag

SEQ ID NO: 1768906 - DNA, 25 bp, Homo sapien
ccagctagtagcaaggaaaagtgaa

SEQ ID NO: 1768907 - DNA, 25 bp, Homo sapien
caatccaagggtttaaatcgtctct

SEQ ID NO: 1768908 - DNA, 25 bp, Homo sapien
catgtatcttctgaactccttgctt

SEQ ID NO: 1768909 - DNA, 25 bp, Homo sapien
atacagaatgcatacagcagaaagg

SEQ ID NO: 1768910 - DNA, 25 bp, Homo sapien
cacaaccatgtcagaatcagtgttc

SEQ ID NO: 1768911 - DNA, 25 bp, Homo sapien
tcagtgttccaagtttagcttgtac

SEQ ID NO: 1768912 - DNA, 25 bp, Homo sapien
aagtttagcttgtaccctgcgtgca

SEQ ID NO: 1768913 - DNA, 25 bp, Homo sapien
gaaaagtaatgacgtgatgtatata

SEQ ID NO: 1768914 - DNA, 25 bp, Homo sapien
taatgacgtgatgtatatacacctg

SEQ ID NO: 1768915 - DNA, 25 bp, Homo sapien
ttgattagtattcaaaaagtaacat

SEQ ID NO: 1768916 - DNA, 25 bp, Homo sapien
tatacacctgtactagattttgatt

SEQ ID NO: 1768917 - DNA, 25 bp, Homo sapien
tattccagcgtatttatctcacctt

SEQ ID NO: 1768918 - DNA, 25 bp, Homo sapien
agggggcctgttaatggaggactct

SEQ ID NO: 1768919 - DNA, 25 bp, Homo sapien
gcctgttaatggaggactctgacct

SEQ ID NO: 1768920 - DNA, 25 bp, Homo sapien
ctattccagcgtatttatctcacct

SEQ ID NO: 1768921 - DNA, 25 bp, Homo sapien
ttgcctagcagggaaagcgaagttg

SEQ ID NO: 1768922 - DNA, 25 bp, Homo sapien
gaaacaagtcatgccggttcctagt

SEQ ID NO: 1768923 - DNA, 25 bp, Homo sapien
taagccaagtgcgattttgcctagt

SEQ ID NO: 1768924 - DNA, 25 bp, Homo sapien
tatcccatcaaaacctaagccaagt

SEQ ID NO: 1768925 - DNA, 25 bp, Homo sapien
gcatatctagaagcaagcccataaa

SEQ ID NO: 1768926 - DNA, 25 bp, Homo sapien
tctaagacatccagactaagtatgg

SEQ ID NO: 1768927 - DNA, 25 bp, Homo sapien
tatggaaccctgcattaggctgaca

SEQ ID NO: 1768928 - DNA, 25 bp, Homo sapien
tccacagagtaccagtatagtttcc

SEQ ID NO: 1768929 - DNA, 25 bp, Homo sapien
ctatggcagctatggtctttaaaaa

SEQ ID NO: 1768930 - DNA, 25 bp, Homo sapien
taatgttgacattataacctcctcc

SEQ ID NO: 1768931 - DNA, 25 bp, Homo sapien
cttgttccatgggttgcagaattaa

SEQ ID NO: 1768932 - DNA, 25 bp, Homo sapien
aatgtgtgttagcaggcttgaaagc

SEQ ID NO: 1768933 - DNA, 25 bp, Homo sapien
ccagaatcatcagctttgcagaaat

SEQ ID NO: 1768934 - DNA, 25 bp, Homo sapien
cagaaattcgtccaagaatgtgcat

SEQ ID NO: 1768935 - DNA, 25 bp, Homo sapien
ctgaaccttggtacttcgagtatgt

SEQ ID NO: 1768936 - DNA, 25 bp, Homo sapien
tcgagtatgttctgaggaccagaat

SEQ ID NO: 1768937 - DNA, 25 bp, Homo sapien
tattcattggccaaaaacttcatgt

SEQ ID NO: 1768938 - DNA, 25 bp, Homo sapien
gaagcccaaggaggcaagcaaacac

SEQ ID NO: 1768939 - DNA, 25 bp, Homo sapien
ctcttaagatcttgactcagaattc

SEQ ID NO: 1768940 - DNA, 25 bp, Homo sapien
agaaatctccactcatagtcatgca

SEQ ID NO: 1768941 - DNA, 25 bp, Homo sapien
ctttaaggtagaactatccacataa

SEQ ID NO: 1768942 - DNA, 25 bp, Homo sapien
ctatccacataacccacaagacttg

SEQ ID NO: 1768943 - DNA, 25 bp, Homo sapien
tagaactatccacataacccacaag

SEQ ID NO: 1768944 - DNA, 25 bp, Homo sapien
taacccacaagacttggatatgtca

SEQ ID NO: 1768945 - DNA, 25 bp, Homo sapien
ttaagtcttgcaaaatatccattca

SEQ ID NO: 1768946 - DNA, 25 bp, Homo sapien
taagtcttgcaaaatatccattcac

SEQ ID NO: 1768947 - DNA, 25 bp, Homo sapien
tttaagtcttgcaaaatatccattc

SEQ ID NO: 1768948 - DNA, 25 bp, Homo sapien
gtcgtgtgactgctggaagctgaag

SEQ ID NO: 1768949 - DNA, 25 bp, Homo sapien
cgtgtgactgctggaagctgaagcc

SEQ ID NO: 1768950 - DNA, 25 bp, Homo sapien
ttgaccttccagtccctctggagtc

SEQ ID NO: 1768951 - DNA, 25 bp, Homo sapien
gaccttccagtccctctggagtcgt

SEQ ID NO: 1768952 - DNA, 25 bp, Homo sapien
ctccaagccacgtgaacagcctgcg

SEQ ID NO: 1768953 - DNA, 25 bp, Homo sapien
ccaagccacgtgaacagcctgcggt

SEQ ID NO: 1768954 - DNA, 25 bp, Homo sapien
caagccacgtgaacagcctgcggtt

SEQ ID NO: 1768955 - DNA, 25 bp, Homo sapien
ctcctccaagccacgtgaacagcct

SEQ ID NO: 1768956 - DNA, 25 bp, Homo sapien
aacattaaggtgctggtatctggtg

SEQ ID NO: 1768957 - DNA, 25 bp, Homo sapien
caacattaaggtgctggtatctggt

SEQ ID NO: 1768958 - DNA, 25 bp, Homo sapien
agtccaacattaaggtgctggtatc

SEQ ID NO: 1768959 - DNA, 25 bp, Homo sapien
tccaacattaaggtgctggtatctg

SEQ ID NO: 1768960 - DNA, 25 bp, Homo sapien
tgggtggtacagcaagaagtttgat

SEQ ID NO: 1768961 - DNA, 25 bp, Homo sapien
tgatgctgacttatttaactataga

SEQ ID NO: 1768962 - DNA, 25 bp, Homo sapien
ctagctgaactgtgtgaaatggtgg

SEQ ID NO: 1768963 - DNA, 25 bp, Homo sapien
ccttaaagtatgaacgagtcagcta

SEQ ID NO: 1768964 - DNA, 25 bp, Homo sapien
aatacggcatctgactggattacca

SEQ ID NO: 1768965 - DNA, 25 bp, Homo sapien
actcagccactcacactgaatacgg

SEQ ID NO: 1768966 - DNA, 25 bp, Homo sapien
taccagaagtgatgttccttaccat

SEQ ID NO: 1768967 - DNA, 25 bp, Homo sapien
actggattaccagaagtgatgttcc

SEQ ID NO: 1768968 - DNA, 25 bp, Homo sapien
attgaggtcgacctgatggttattc

SEQ ID NO: 1768969 - DNA, 25 bp, Homo sapien
gaagaattgaggtcgacctgatggt

SEQ ID NO: 1768970 - DNA, 25 bp, Homo sapien
tggtatgtgggtcagggtagggaaa

SEQ ID NO: 1768971 - DNA, 25 bp, Homo sapien
gaaaagaagaattgaggtcgacctg

SEQ ID NO: 1768972 - DNA, 25 bp, Homo sapien
aagctattcgcattatttttggtca

SEQ ID NO: 1768973 - DNA, 25 bp, Homo sapien
aggaaaaagctattcgcattatttt

SEQ ID NO: 1768974 - DNA, 25 bp, Homo sapien
tgacccagaattctgggaagggctg

SEQ ID NO: 1768975 - DNA, 25 bp, Homo sapien
aagggctgtgagacattgtgaaaga

SEQ ID NO: 1768976 - DNA, 25 bp, Homo sapien
ttggtgaaaggagcgtctccaggat

SEQ ID NO: 1768977 - DNA, 25 bp, Homo sapien
gttttctggcgtttcaacttctcca

SEQ ID NO: 1768978 - DNA, 25 bp, Homo sapien
tcaacttctccactatcttcaccat

SEQ ID NO: 1768979 - DNA, 25 bp, Homo sapien
ttttctggcgtttcaacttctccac

SEQ ID NO: 1768980 - DNA, 25 bp, Homo sapien
gtttcaacttctccactatcttcac

SEQ ID NO: 1768981 - DNA, 25 bp, Homo sapien
ctcatggttaattggctcaagtctt

SEQ ID NO: 1768982 - DNA, 25 bp, Homo sapien
gtcttgctcatggttaattggctca

SEQ ID NO: 1768983 - DNA, 25 bp, Homo sapien
catggcaaagccgtcttgctcatgg

SEQ ID NO: 1768984 - DNA, 25 bp, Homo sapien
gcaaagccgtcttgctcatggttaa

SEQ ID NO: 1768985 - DNA, 25 bp, Homo sapien
tgttgaattgtgtatgttctgacct

SEQ ID NO: 1768986 - DNA, 25 bp, Homo sapien
aggtgggtggcgcaagttgttgttg

SEQ ID NO: 1768987 - DNA, 25 bp, Homo sapien
tgaattgtgtatgttctgacctctg

SEQ ID NO: 1768988 - DNA, 25 bp, Homo sapien
ggtggcgcaagttgttgttgaattg

SEQ ID NO: 1768989 - DNA, 25 bp, Homo sapien
cagtgctcgggtcactgtggaagtc

SEQ ID NO: 1768990 - DNA, 25 bp, Homo sapien
agtgctcgggtcactgtggaagtca

SEQ ID NO: 1768991 - DNA, 25 bp, Homo sapien
ccttggaatgccagtgctcgggtca

SEQ ID NO: 1768992 - DNA, 25 bp, Homo sapien
tccttggaatgccagtgctcgggtc

SEQ ID NO: 1768993 - DNA, 25 bp, Homo sapien
ctgttgctgcaggttaaccgaaccc

SEQ ID NO: 1768994 - DNA, 25 bp, Homo sapien
ccctgtttcgggtagaagggctgca

SEQ ID NO: 1768995 - DNA, 25 bp, Homo sapien
ctgtttcgggtagaagggctgcagg

SEQ ID NO: 1768996 - DNA, 25 bp, Homo sapien
tgctgcaggttaaccgaacccctgt

SEQ ID NO: 1768997 - DNA, 25 bp, Homo sapien
tcaacgctttgaactgcatccagaa

SEQ ID NO: 1768998 - DNA, 25 bp, Homo sapien
gatctagtggttttcacaacaaccc

SEQ ID NO: 1768999 - DNA, 25 bp, Homo sapien
cgttaatatgatccatctgcctgag

SEQ ID NO: 1769000 - DNA, 25 bp, Homo sapien
ttaagcaagcaagctgcccctgcat

SEQ ID NO: 1769001 - DNA, 25 bp, Homo sapien
tgattttaggataaatagttcctgg

SEQ ID NO: 1769002 - DNA, 25 bp, Homo sapien
ttcaacaatggttccctgtttcatc

SEQ ID NO: 1769003 - DNA, 25 bp, Homo sapien
tcttgcccactatgggtgattttag

SEQ ID NO: 1769004 - DNA, 25 bp, Homo sapien
aaagggaacttccataactgctgac

SEQ ID NO: 1769005 - DNA, 25 bp, Homo sapien
cccattatcaccagagttattttgc

SEQ ID NO: 1769006 - DNA, 25 bp, Homo sapien
gactgtggtagtgatttgtttctga

SEQ ID NO: 1769007 - DNA, 25 bp, Homo sapien
agtccgaactccttatcattgcaag

SEQ ID NO: 1769008 - DNA, 25 bp, Homo sapien
taacaattaattcccactggagcag

SEQ ID NO: 1769009 - DNA, 25 bp, Homo sapien
tagcttgaattggagtcacaggaac

SEQ ID NO: 1769010 - DNA, 25 bp, Homo sapien
tcccttggattgaagtagactcccc

SEQ ID NO: 1769011 - DNA, 25 bp, Homo sapien
tcacaggaacaattgtccagaagcc

SEQ ID NO: 1769012 - DNA, 25 bp, Homo sapien
caggggtgcagtaatgtttttcatc

SEQ ID NO: 1769013 - DNA, 25 bp, Homo sapien
ctgcacatatttccaacgttgatct

SEQ ID NO: 1769014 - DNA, 25 bp, Homo sapien
cacaggggacaagctctgcacatat

SEQ ID NO: 1769015 - DNA, 25 bp, Homo sapien
catatttccaacgttgatcttcata

SEQ ID NO: 1769016 - DNA, 25 bp, Homo sapien
aggggacaagctctgcacatatttc

SEQ ID NO: 1769017 - DNA, 25 bp, Homo sapien
aattcctctgattgtcaattagcaa

SEQ ID NO: 1769018 - DNA, 25 bp, Homo sapien
tcctctgattgtcaattagcaatgg

SEQ ID NO: 1769019 - DNA, 25 bp, Homo sapien
caattagcaatggttttgccaagaa

SEQ ID NO: 1769020 - DNA, 25 bp, Homo sapien
gattgtcaattagcaatggttttgc

SEQ ID NO: 1769021 - DNA, 25 bp, Homo sapien
ctgcctattgctgacttctggaaag

SEQ ID NO: 1769022 - DNA, 25 bp, Homo sapien
tattgctgacttctggaaagggcat

SEQ ID NO: 1769023 - DNA, 25 bp, Homo sapien
gcctattgctgacttctggaaaggg

SEQ ID NO: 1769024 - DNA, 25 bp, Homo sapien
ctattgctgacttctggaaagggca

SEQ ID NO: 1769025 - DNA, 25 bp, Homo sapien
tggaatggatggatgtatgcacgtc

SEQ ID NO: 1769026 - DNA, 25 bp, Homo sapien
gatggatgtatgcacgtcaatgcct

SEQ ID NO: 1769027 - DNA, 25 bp, Homo sapien
tggatggatgtatgcacgtcaatgc

SEQ ID NO: 1769028 - DNA, 25 bp, Homo sapien
gatgtatgcacgtcaatgccttcat

SEQ ID NO: 1769029 - DNA, 25 bp, Homo sapien
tgtttgagagctccaaactcagcca

SEQ ID NO: 1769030 - DNA, 25 bp, Homo sapien
aatgtttgagagctccaaactcagc

SEQ ID NO: 1769031 - DNA, 25 bp, Homo sapien
atgtttgagagctccaaactcagcc

SEQ ID NO: 1769032 - DNA, 25 bp, Homo sapien
aggaaacgccccaattttcacaatg

SEQ ID NO: 1769033 - DNA, 25 bp, Homo sapien
ggcttatgtttctggacactatctg

SEQ ID NO: 1769034 - DNA, 25 bp, Homo sapien
atgaagaacataccagaactcaggg

SEQ ID NO: 1769035 - DNA, 25 bp, Homo sapien
gtcaggtcacattgagctatctcat

SEQ ID NO: 1769036 - DNA, 25 bp, Homo sapien
tcagatttcaattggcttatgtttc

SEQ ID NO: 1769037 - DNA, 25 bp, Homo sapien
tttctctttctgttaacgtacatac

SEQ ID NO: 1769038 - DNA, 25 bp, Homo sapien
attttctctttctgttaacgtacat

SEQ ID NO: 1769039 - DNA, 25 bp, Homo sapien
tctttctgttaacgtacataccatt

SEQ ID NO: 1769040 - DNA, 25 bp, Homo sapien
tctctttctgttaacgtacatacca

SEQ ID NO: 1769041 - DNA, 25 bp, Homo sapien
ccacctggcaatggctggcattgtt

SEQ ID NO: 1769042 - DNA, 25 bp, Homo sapien
taaagcgagcgctagtgttgacagc

SEQ ID NO: 1769043 - DNA, 25 bp, Homo sapien
gtgatggtcagaggctgtctgccca

SEQ ID NO: 1769044 - DNA, 25 bp, Homo sapien
ggatcctttcccattcgctaaagcg

SEQ ID NO: 1769045 - DNA, 25 bp, Homo sapien
gataagccttggcctgcgaaaacca

SEQ ID NO: 1769046 - DNA, 25 bp, Homo sapien
ataagccttggcctgcgaaaaccac

SEQ ID NO: 1769047 - DNA, 25 bp, Homo sapien
tggataagccttggcctgcgaaaac

SEQ ID NO: 1769048 - DNA, 25 bp, Homo sapien
aatggataagccttggcctgcgaaa

SEQ ID NO: 1769049 - DNA, 25 bp, Homo sapien
cttcacagatcaaataaatgaccat

SEQ ID NO: 1769050 - DNA, 25 bp, Homo sapien
gccattctagctctgatgcttgctt

SEQ ID NO: 1769051 - DNA, 25 bp, Homo sapien
cattctagctctgatgcttgcttgg

SEQ ID NO: 1769052 - DNA, 25 bp, Homo sapien
cagccattctagctctgatgcttgc

SEQ ID NO: 1769053 - DNA, 25 bp, Homo sapien
tctagctctgatgcttgcttggcaa

SEQ ID NO: 1769054 - DNA, 25 bp, Homo sapien
taaactctagcaacggggataggcc

SEQ ID NO: 1769055 - DNA, 25 bp, Homo sapien
ttcacaaccttgtaagcatgcccag

SEQ ID NO: 1769056 - DNA, 25 bp, Homo sapien
gtgctcttttgattgtaaactctag

SEQ ID NO: 1769057 - DNA, 25 bp, Homo sapien
cagaggtttcaccaatgggagctgc

SEQ ID NO: 1769058 - DNA, 25 bp, Homo sapien
cattctatcccagagtactagggag

SEQ ID NO: 1769059 - DNA, 25 bp, Homo sapien
gtaagatgatacacaagaccgaacc

SEQ ID NO: 1769060 - DNA, 25 bp, Homo sapien
tgtaggtttgtccactcctgtgaaa

SEQ ID NO: 1769061 - DNA, 25 bp, Homo sapien
tagggagacgaaaagccattcacgc

SEQ ID NO: 1769062 - DNA, 25 bp, Homo sapien
gcaatgcactagtgagcaacagaga

SEQ ID NO: 1769063 - DNA, 25 bp, Homo sapien
cacccaaggaatttagatgctttca

SEQ ID NO: 1769064 - DNA, 25 bp, Homo sapien
tattccattacctacattatgcagc

SEQ ID NO: 1769065 - DNA, 25 bp, Homo sapien
gagatgtggttcttacacccaagga

SEQ ID NO: 1769066 - DNA, 25 bp, Homo sapien
agtcttattacacccttctacctca

SEQ ID NO: 1769067 - DNA, 25 bp, Homo sapien
tcttattacacccttctacctcaaa

SEQ ID NO: 1769068 - DNA, 25 bp, Homo sapien
gctctagtcttattacacccttcta

SEQ ID NO: 1769069 - DNA, 25 bp, Homo sapien
gctgagctctagtcttattacaccc

SEQ ID NO: 1769070 - DNA, 25 bp, Homo sapien
tcagaggggcactgaccagatctcc

SEQ ID NO: 1769071 - DNA, 25 bp, Homo sapien
cctcagaggggcactgaccagatct

SEQ ID NO: 1769072 - DNA, 25 bp, Homo sapien
gcctcagaggggcactgaccagatc

SEQ ID NO: 1769073 - DNA, 25 bp, Homo sapien
ctcagaggggcactgaccagatctc

SEQ ID NO: 1769074 - DNA, 25 bp, Homo sapien
catctatatcttcaccaccacctac

SEQ ID NO: 1769075 - DNA, 25 bp, Homo sapien
gatcttctattatgcagatgagttc

SEQ ID NO: 1769076 - DNA, 25 bp, Homo sapien
gtgccattttcatagggtgcaaaaa

SEQ ID NO: 1769077 - DNA, 25 bp, Homo sapien
tgcaaaaaagctggctacccctatc

SEQ ID NO: 1769078 - DNA, 25 bp, Homo sapien
atctgatttacataaggcacagaag

SEQ ID NO: 1769079 - DNA, 25 bp, Homo sapien
tccaatggtcattagtatatagtca

SEQ ID NO: 1769080 - DNA, 25 bp, Homo sapien
tattgtaaggctgacaatccctcat

SEQ ID NO: 1769081 - DNA, 25 bp, Homo sapien
ctttaatccaatggtcattagtata

SEQ ID NO: 1769082 - DNA, 25 bp, Homo sapien
tagtatatagtcattattgtaaggc

SEQ ID NO: 1769083 - DNA, 25 bp, Homo sapien
tgttaacctgaagtgtgatgaaaaa

SEQ ID NO: 1769084 - DNA, 25 bp, Homo sapien
taagccatagccgtgctaattgtga

SEQ ID NO: 1769085 - DNA, 25 bp, Homo sapien
gggaagatgtcgattttgaatataa

SEQ ID NO: 1769086 - DNA, 25 bp, Homo sapien
tgaatataatcccatgcatataagt

SEQ ID NO: 1769087 - DNA, 25 bp, Homo sapien
tggctggttaacatattggcttact

SEQ ID NO: 1769088 - DNA, 25 bp, Homo sapien
caggctggaggcagttgcaacctca

SEQ ID NO: 1769089 - DNA, 25 bp, Homo sapien
cactctgttgacaagactaatctca

SEQ ID NO: 1769090 - DNA, 25 bp, Homo sapien
cataagtccactgtctaaaaatggc

SEQ ID NO: 1769091 - DNA, 25 bp, Homo sapien
ctggttcttttgtctggagactgcc

SEQ ID NO: 1769092 - DNA, 25 bp, Homo sapien
tggttcttttgtctggagactgcca

SEQ ID NO: 1769093 - DNA, 25 bp, Homo sapien
ggttcttttgtctggagactgccat

SEQ ID NO: 1769094 - DNA, 25 bp, Homo sapien
tgttcactctctgttactatggcga

SEQ ID NO: 1769095 - DNA, 25 bp, Homo sapien
gttcactctctgttactatggcgac

SEQ ID NO: 1769096 - DNA, 25 bp, Homo sapien
cagcgtggtgcagtacagtagagat

SEQ ID NO: 1769097 - DNA, 25 bp, Homo sapien
tagagatgaaacaaaggctcaacct

SEQ ID NO: 1769098 - DNA, 25 bp, Homo sapien
ctgagaaggcatcctaggatagaac

SEQ ID NO: 1769099 - DNA, 25 bp, Homo sapien
tctgatctttcggagaaaagtctgc

SEQ ID NO: 1769100 - DNA, 25 bp, Homo sapien
ttaacgcggcgcagggattccaaat

SEQ ID NO: 1769101 - DNA, 25 bp, Homo sapien
tctacacccgaacgcggtggtagcg

SEQ ID NO: 1769102 - DNA, 25 bp, Homo sapien
gcggccgcacgtgacggacaagtct

SEQ ID NO: 1769103 - DNA, 25 bp, Homo sapien
aggcgcagcagatcttggtccccgc

SEQ ID NO: 1769104 - DNA, 25 bp, Homo sapien
ttgctgaggaaagccggcacgttcg

SEQ ID NO: 1769105 - DNA, 25 bp, Homo sapien
gccggcacgttcgaactctgcttca

SEQ ID NO: 1769106 - DNA, 25 bp, Homo sapien
gaggaaagccggcacgttcgaactc

SEQ ID NO: 1769107 - DNA, 25 bp, Homo sapien
gcttgctgaggaaagccggcacgtt

SEQ ID NO: 1769108 - DNA, 25 bp, Homo sapien
gatatgcccctctgctggtaactgt

SEQ ID NO: 1769109 - DNA, 25 bp, Homo sapien
agtgtgcagtaaagaggctcccgcg

SEQ ID NO: 1769110 - DNA, 25 bp, Homo sapien
tcggtcgctgaggtaaagatcgcct

SEQ ID NO: 1769111 - DNA, 25 bp, Homo sapien
cttaggccagacaagataaagggct

SEQ ID NO: 1769112 - DNA, 25 bp, Homo sapien
tgaatgaattcctgatacctagcac

SEQ ID NO: 1769113 - DNA, 25 bp, Homo sapien
taggcactttggttcactactgaat

SEQ ID NO: 1769114 - DNA, 25 bp, Homo sapien
gactgactaaattaatctttggcca

SEQ ID NO: 1769115 - DNA, 25 bp, Homo sapien
gtacccagaactacgacatgcacca

SEQ ID NO: 1769116 - DNA, 25 bp, Homo sapien
tgccaaaagaaaaacggaaggcata

SEQ ID NO: 1769117 - DNA, 25 bp, Homo sapien
ctgccaaaagaaaaacggaaggcat

SEQ ID NO: 1769118 - DNA, 25 bp, Homo sapien
catccaagaccagaaaactttggcc

SEQ ID NO: 1769119 - DNA, 25 bp, Homo sapien
ttgcaaatcgttgctcatccaagac

SEQ ID NO: 1769120 - DNA, 25 bp, Homo sapien
tttcttttgcaaatcgttgctcatc

SEQ ID NO: 1769121 - DNA, 25 bp, Homo sapien
tattgtgcttgaaatatttgggaag

SEQ ID NO: 1769122 - DNA, 25 bp, Homo sapien
ctgaaaaatattcaaaattcaaatg

SEQ ID NO: 1769123 - DNA, 25 bp, Homo sapien
tgaaaaatattcaaaattcaaatga

SEQ ID NO: 1769124 - DNA, 25 bp, Homo sapien
gaaattctacaggaccatctctttc

SEQ ID NO: 1769125 - DNA, 25 bp, Homo sapien
atcctgtccttgtttgaagtaagga

SEQ ID NO: 1769126 - DNA, 25 bp, Homo sapien
tgtccttgtttgaagtaaggatgct

SEQ ID NO: 1769127 - DNA, 25 bp, Homo sapien
taatgttctccaacaagtcatcctg

SEQ ID NO: 1769128 - DNA, 25 bp, Homo sapien
accttctgagcactacttataattt

SEQ ID NO: 1769129 - DNA, 25 bp, Homo sapien
ccttctgagcactacttataatttt

SEQ ID NO: 1769130 - DNA, 25 bp, Homo sapien
taattaagaataccagacaactgaa

SEQ ID NO: 1769131 - DNA, 25 bp, Homo sapien
caactgaactacacttgtttttact

SEQ ID NO: 1769132 - DNA, 25 bp, Homo sapien
ctttaattaagaataccagacaact

SEQ ID NO: 1769133 - DNA, 25 bp, Homo sapien
caaaaaaccagaccatagtatcttt

SEQ ID NO: 1769134 - DNA, 25 bp, Homo sapien
tttgctcgtaattctgacacctcct

SEQ ID NO: 1769135 - DNA, 25 bp, Homo sapien
tgtgcatgctttgctcgtaattctg

SEQ ID NO: 1769136 - DNA, 25 bp, Homo sapien
catgctttgctcgtaattctgacac

SEQ ID NO: 1769137 - DNA, 25 bp, Homo sapien
tcgaataacttgttgctgttgtgca

SEQ ID NO: 1769138 - DNA, 25 bp, Homo sapien
aacaaatgcaaattatggtcctggg

SEQ ID NO: 1769139 - DNA, 25 bp, Homo sapien
ttgggtcacaaacagtactcattaa

SEQ ID NO: 1769140 - DNA, 25 bp, Homo sapien
taagatcaatcacagacactcaata

SEQ ID NO: 1769141 - DNA, 25 bp, Homo sapien
tccaatatgtaagaaactaagatca

SEQ ID NO: 1769142 - DNA, 25 bp, Homo sapien
taaactcacaagttggttattttga

SEQ ID NO: 1769143 - DNA, 25 bp, Homo sapien
tgggctccattagtgtttagaagta

SEQ ID NO: 1769144 - DNA, 25 bp, Homo sapien
ttttgggctccattagtgtttagaa

SEQ ID NO: 1769145 - DNA, 25 bp, Homo sapien
gatgattatcagttggttctttgac

SEQ ID NO: 1769146 - DNA, 25 bp, Homo sapien
atgattatcagttggttctttgact

SEQ ID NO: 1769147 - DNA, 25 bp, Homo sapien
tattcaccacacttctttgaatgca

SEQ ID NO: 1769148 - DNA, 25 bp, Homo sapien
taataaaatttagtctgagacaata

SEQ ID NO: 1769149 - DNA, 25 bp, Homo sapien
tcaccacacttctttgaatgcatga

SEQ ID NO: 1769150 - DNA, 25 bp, Homo sapien
gaattgttattcaccacacttcttt

SEQ ID NO: 1769151 - DNA, 25 bp, Homo sapien
atcagatataacatcctcattagtt

SEQ ID NO: 1769152 - DNA, 25 bp, Homo sapien
tcagatataacatcctcattagttt

SEQ ID NO: 1769153 - DNA, 25 bp, Homo sapien
cagatataacatcctcattagtttc

SEQ ID NO: 1769154 - DNA, 25 bp, Homo sapien
cactgcctgaacttagggattctct

SEQ ID NO: 1769155 - DNA, 25 bp, Homo sapien
ctggacagcactagacatgagaggg

SEQ ID NO: 1769156 - DNA, 25 bp, Homo sapien
caaaatggaatccatcatggtcact

SEQ ID NO: 1769157 - DNA, 25 bp, Homo sapien
ttagctggacagcactagacatgag

SEQ ID NO: 1769158 - DNA, 25 bp, Homo sapien
cctctaaactgcagtcaatactgtc

SEQ ID NO: 1769159 - DNA, 25 bp, Homo sapien
ctctaaactgcagtcaatactgtca

SEQ ID NO: 1769160 - DNA, 25 bp, Homo sapien
atagcatggcctggaagtcctctaa

SEQ ID NO: 1769161 - DNA, 25 bp, Homo sapien
tcctgatagcatggcctggaagtcc

SEQ ID NO: 1769162 - DNA, 25 bp, Homo sapien
cagaatatagggatggcttgtgaat

SEQ ID NO: 1769163 - DNA, 25 bp, Homo sapien
caaggtgattctgtgataactatcc

SEQ ID NO: 1769164 - DNA, 25 bp, Homo sapien
cttggatgagaaaagcaatagtgaa

SEQ ID NO: 1769165 - DNA, 25 bp, Homo sapien
taaatagaagtaataccactacaga

SEQ ID NO: 1769166 - DNA, 25 bp, Homo sapien
gcgtaattcaaggataaaataatga

SEQ ID NO: 1769167 - DNA, 25 bp, Homo sapien
tatgacaatacagcgtaattcaagg

SEQ ID NO: 1769168 - DNA, 25 bp, Homo sapien
caatacagcgtaattcaaggataaa

SEQ ID NO: 1769169 - DNA, 25 bp, Homo sapien
tacagcgtaattcaaggataaaata

SEQ ID NO: 1769170 - DNA, 25 bp, Homo sapien
tggtagtcctataaaattccctggc

SEQ ID NO: 1769171 - DNA, 25 bp, Homo sapien
gatcatatataagctgacacagctg

SEQ ID NO: 1769172 - DNA, 25 bp, Homo sapien
ggaccagcactgtaagctcctctat

SEQ ID NO: 1769173 - DNA, 25 bp, Homo sapien
aaattttgtccctacagagagtggc

SEQ ID NO: 1769174 - DNA, 25 bp, Homo sapien
tatgcctcaagtgaagccctctgac

SEQ ID NO: 1769175 - DNA, 25 bp, Homo sapien
gttgagacctctgccctgacactga

SEQ ID NO: 1769176 - DNA, 25 bp, Homo sapien
gccctctgacagatggcatatctac

SEQ ID NO: 1769177 - DNA, 25 bp, Homo sapien
tctgctctatgacagtggctcctaa

SEQ ID NO: 1769178 - DNA, 25 bp, Homo sapien
attattgatgtaatctgtgggattc

SEQ ID NO: 1769179 - DNA, 25 bp, Homo sapien
ttattgatgtaatctgtgggattca

SEQ ID NO: 1769180 - DNA, 25 bp, Homo sapien
tttgtattattgatgtaatctgtgg

SEQ ID NO: 1769181 - DNA, 25 bp, Homo sapien
tgtattattgatgtaatctgtggga

SEQ ID NO: 1769182 - DNA, 25 bp, Homo sapien
caggcttacacatgacaataatcgt

SEQ ID NO: 1769183 - DNA, 25 bp, Homo sapien
taaaattctggcttcactaatctgg

SEQ ID NO: 1769184 - DNA, 25 bp, Homo sapien
gtatttactagctgcccctttatgg

SEQ ID NO: 1769185 - DNA, 25 bp, Homo sapien
gaagatatagacagtctggtcaggc

SEQ ID NO: 1769186 - DNA, 25 bp, Homo sapien
tcaggaataagatgatgatccacaa

SEQ ID NO: 1769187 - DNA, 25 bp, Homo sapien
aatgtccagtcgcaaataaacaaca

SEQ ID NO: 1769188 - DNA, 25 bp, Homo sapien
gatccacaaataaggactcaatgtc

SEQ ID NO: 1769189 - DNA, 25 bp, Homo sapien
gtttcaggaataagatgatgatcca

SEQ ID NO: 1769190 - DNA, 25 bp, Homo sapien
tactgagaagtataaggcatctgat

SEQ ID NO: 1769191 - DNA, 25 bp, Homo sapien
tgtaatacctgtcatgagcaaggga

SEQ ID NO: 1769192 - DNA, 25 bp, Homo sapien
caattaagattgctgtactgagaag

SEQ ID NO: 1769193 - DNA, 25 bp, Homo sapien
cagctgatgtgccaattatttgaaa

SEQ ID NO: 1769194 - DNA, 25 bp, Homo sapien
catgagaacctgataacaaatggat

SEQ ID NO: 1769195 - DNA, 25 bp, Homo sapien
gacgtcaccgttattctaaaacatg

SEQ ID NO: 1769196 - DNA, 25 bp, Homo sapien
gaaaataagggctccaagatataat

SEQ ID NO: 1769197 - DNA, 25 bp, Homo sapien
aaatgaagctgtgtaagttttagga

SEQ ID NO: 1769198 - DNA, 25 bp, Homo sapien
atatatatggtgtaaccaactgtaa

SEQ ID NO: 1769199 - DNA, 25 bp, Homo sapien
cccagatctacatgctggctaaata

SEQ ID NO: 1769200 - DNA, 25 bp, Homo sapien
agtcccagatctacatgctggctaa

SEQ ID NO: 1769201 - DNA, 25 bp, Homo sapien
tgtaaccaactgtaaactaattcca

SEQ ID NO: 1769202 - DNA, 25 bp, Homo sapien
catatttagagtagctcaggatgac

SEQ ID NO: 1769203 - DNA, 25 bp, Homo sapien
ggttaaggaactattgctgtcactg

SEQ ID NO: 1769204 - DNA, 25 bp, Homo sapien
ctcaaagttgaggtggtgtttcttc

SEQ ID NO: 1769205 - DNA, 25 bp, Homo sapien
catctgactgtggtagggaaattat

SEQ ID NO: 1769206 - DNA, 25 bp, Homo sapien
ggctgaactacattgttcttggtag

SEQ ID NO: 1769207 - DNA, 25 bp, Homo sapien
ttcttccctcttccgaaactggctg

SEQ ID NO: 1769208 - DNA, 25 bp, Homo sapien
tcttccgaaactggctgaactacat

SEQ ID NO: 1769209 - DNA, 25 bp, Homo sapien
ccctcttccgaaactggctgaacta

SEQ ID NO: 1769210 - DNA, 25 bp, Homo sapien
tcagcttcagtcaatggctccaggc

SEQ ID NO: 1769211 - DNA, 25 bp, Homo sapien
ccagaggtgcaggagcaagttcaca

SEQ ID NO: 1769212 - DNA, 25 bp, Homo sapien
ggctccaggcgaacaagcttacttt

SEQ ID NO: 1769213 - DNA, 25 bp, Homo sapien
gatgctgttgtactcgcctgttcaa

SEQ ID NO: 1769214 - DNA, 25 bp, Homo sapien
tggaaccctatcagacagcgagcat

SEQ ID NO: 1769215 - DNA, 25 bp, Homo sapien
tatgcagctgagtaacacctgaaag

SEQ ID NO: 1769216 - DNA, 25 bp, Homo sapien
tctatatatatggagctggaaccct

SEQ ID NO: 1769217 - DNA, 25 bp, Homo sapien
gatacaggcactttatgttcccagt

SEQ ID NO: 1769218 - DNA, 25 bp, Homo sapien
aatatattttcgagatgaggcacaa

SEQ ID NO: 1769219 - DNA, 25 bp, Homo sapien
tatttctcccttgttgcaatataca

SEQ ID NO: 1769220 - DNA, 25 bp, Homo sapien
tgagaataatgaaccacagacagtt

SEQ ID NO: 1769221 - DNA, 25 bp, Homo sapien
tcatgtgagtgtcacctctaaagaa

SEQ ID NO: 1769222 - DNA, 25 bp, Homo sapien
cattcgtcttgtgcctttgatggtg

SEQ ID NO: 1769223 - DNA, 25 bp, Homo sapien
tctcttctagcgtggttttcttgtg

SEQ ID NO: 1769224 - DNA, 25 bp, Homo sapien
cttgggcagtgtaccttatagtaac

SEQ ID NO: 1769225 - DNA, 25 bp, Homo sapien
tataagcacccctaagtatgacgac

SEQ ID NO: 1769226 - DNA, 25 bp, Homo sapien
tttcaatatctgaaccagccttgcg

SEQ ID NO: 1769227 - DNA, 25 bp, Homo sapien
actgcgcctggtctagtttatggaa

SEQ ID NO: 1769228 - DNA, 25 bp, Homo sapien
tgggatgaatccctcttgatcctgg

SEQ ID NO: 1769229 - DNA, 25 bp, Homo sapien
tcaaggacttcttcgtcatgtaggt

SEQ ID NO: 1769230 - DNA, 25 bp, Homo sapien
atgttatatgtcctttcccaagtag

SEQ ID NO: 1769231 - DNA, 25 bp, Homo sapien
tgcatataggttccaggagatttgt

SEQ ID NO: 1769232 - DNA, 25 bp, Homo sapien
tgtcatcagctagcagagacaatgt

SEQ ID NO: 1769233 - DNA, 25 bp, Homo sapien
caaccttgctgtaattgcatatagg

SEQ ID NO: 1769234 - DNA, 25 bp, Homo sapien
ggtgtccagcatgacccataaacag

SEQ ID NO: 1769235 - DNA, 25 bp, Homo sapien
ggaactctgaaggatttagacaagg

SEQ ID NO: 1769236 - DNA, 25 bp, Homo sapien
caagttggccaataatagcattctc

SEQ ID NO: 1769237 - DNA, 25 bp, Homo sapien
tgcaaaacactaggctttagtaggt

SEQ ID NO: 1769238 - DNA, 25 bp, Homo sapien
tagaccttaagctgttttagcaagc

SEQ ID NO: 1769239 - DNA, 25 bp, Homo sapien
ggtgatgagttagtaaaagtggcca

SEQ ID NO: 1769240 - DNA, 25 bp, Homo sapien
ttacccttgatacggaatttacaca

SEQ ID NO: 1769241 - DNA, 25 bp, Homo sapien
tatggatggaggtgtcggtactaaa

SEQ ID NO: 1769242 - DNA, 25 bp, Homo sapien
tgcctgaccagtgtagctactttca

SEQ ID NO: 1769243 - DNA, 25 bp, Homo sapien
tgaaaggatcttttagcagtaagtc

SEQ ID NO: 1769244 - DNA, 25 bp, Homo sapien
taacccatactttcaacagatgtgc

SEQ ID NO: 1769245 - DNA, 25 bp, Homo sapien
aaatcattgtctgcattagtcccta

SEQ ID NO: 1769246 - DNA, 25 bp, Homo sapien
ctgggaacataacccaagaaccagg

SEQ ID NO: 1769247 - DNA, 25 bp, Homo sapien
tatggtctactttcctatgatgagg

SEQ ID NO: 1769248 - DNA, 25 bp, Homo sapien
gcatattactgaaagcatgtgcact

SEQ ID NO: 1769249 - DNA, 25 bp, Homo sapien
tctagcctacaatgggttaaaagca

SEQ ID NO: 1769250 - DNA, 25 bp, Homo sapien
tctgtatccgctgctcttgtgacgt

SEQ ID NO: 1769251 - DNA, 25 bp, Homo sapien
ccatcttgtctgtatccgctgctct

SEQ ID NO: 1769252 - DNA, 25 bp, Homo sapien
tgtgctccatggcgagctgggtaag

SEQ ID NO: 1769253 - DNA, 25 bp, Homo sapien
agctgggtaaggtgctttttgcggc

SEQ ID NO: 1769254 - DNA, 25 bp, Homo sapien
gccagcagtccttgagaaattctcc

SEQ ID NO: 1769255 - DNA, 25 bp, Homo sapien
taatttggcaaactacggtcagatc

SEQ ID NO: 1769256 - DNA, 25 bp, Homo sapien
ctccaggaaagaagacagccgtgtc

SEQ ID NO: 1769257 - DNA, 25 bp, Homo sapien
tagccgttaagtttccagccagcag

SEQ ID NO: 1769258 - DNA, 25 bp, Homo sapien
caggttggtcctgaaggggtgtcca

SEQ ID NO: 1769259 - DNA, 25 bp, Homo sapien
ggggtgtccatactttcttgtcatc

SEQ ID NO: 1769260 - DNA, 25 bp, Homo sapien
gtcctgaaggggtgtccatactttc

SEQ ID NO: 1769261 - DNA, 25 bp, Homo sapien
gaaggggtgtccatactttcttgtc

SEQ ID NO: 1769262 - DNA, 25 bp, Homo sapien
cttgatttcaatattgcgagattac

SEQ ID NO: 1769263 - DNA, 25 bp, Homo sapien
gtctcttgatttcaatattgcgaga

SEQ ID NO: 1769264 - DNA, 25 bp, Homo sapien
tcaatattgcgagattacaaaaacc

SEQ ID NO: 1769265 - DNA, 25 bp, Homo sapien
tttcaatattgcgagattacaaaaa

SEQ ID NO: 1769266 - DNA, 25 bp, Homo sapien
ctttgctgccggggcgcggtggctc

SEQ ID NO: 1769267 - DNA, 25 bp, Homo sapien
acgcctgtaatcccagcactttggg

SEQ ID NO: 1769268 - DNA, 25 bp, Homo sapien
tcaggagatcaagaccatcctggct

SEQ ID NO: 1769269 - DNA, 25 bp, Homo sapien
aggccgaggcgggcggatcacgagg

SEQ ID NO: 1769270 - DNA, 25 bp, Homo sapien
caaaggtcctaactcctaacacagt

SEQ ID NO: 1769271 - DNA, 25 bp, Homo sapien
gaaaagcacagcttcagatatgcat

SEQ ID NO: 1769272 - DNA, 25 bp, Homo sapien
gattcagtgtctgataaggactcac

SEQ ID NO: 1769273 - DNA, 25 bp, Homo sapien
tctggagccaatttataagagcact

SEQ ID NO: 1769274 - DNA, 25 bp, Homo sapien
catcatgttcccatgctcagagtga

SEQ ID NO: 1769275 - DNA, 25 bp, Homo sapien
gagatccgctctcttatctgtaaac

SEQ ID NO: 1769276 - DNA, 25 bp, Homo sapien
ggtgtgttaggataccactataatt

SEQ ID NO: 1769277 - DNA, 25 bp, Homo sapien
gtcctctgaggtactggtgtgttag

SEQ ID NO: 1769278 - DNA, 25 bp, Homo sapien
tttcagttcgtatacagcagatcga

SEQ ID NO: 1769279 - DNA, 25 bp, Homo sapien
tacagcagatcgacagcactttctc

SEQ ID NO: 1769280 - DNA, 25 bp, Homo sapien
tgctctggtatccttagcagcagct

SEQ ID NO: 1769281 - DNA, 25 bp, Homo sapien
tctggtatccttagcagcagctgtc

SEQ ID NO: 1769282 - DNA, 25 bp, Homo sapien
ctgagccttgtggagccttgacctt

SEQ ID NO: 1769283 - DNA, 25 bp, Homo sapien
ctcctttagcactgagccttgtgga

SEQ ID NO: 1769284 - DNA, 25 bp, Homo sapien
tttttaagattcctctcctttagca

SEQ ID NO: 1769285 - DNA, 25 bp, Homo sapien
gattcctctcctttagcactgagcc

SEQ ID NO: 1769286 - DNA, 25 bp, Homo sapien
gagtgtgtcatctttaaacgaaaga

SEQ ID NO: 1769287 - DNA, 25 bp, Homo sapien
ccataggaagtatgtatgtccaagt

SEQ ID NO: 1769288 - DNA, 25 bp, Homo sapien
aagtatgtatgtccaagttctcaaa

SEQ ID NO: 1769289 - DNA, 25 bp, Homo sapien
aattaatttcagagtgtgtcatctt

SEQ ID NO: 1769290 - DNA, 25 bp, Homo sapien
cgtgatcactaccaaaaagatgtta

SEQ ID NO: 1769291 - DNA, 25 bp, Homo sapien
tcagttatgggaatgtttattatgc

SEQ ID NO: 1769292 - DNA, 25 bp, Homo sapien
caggcattctattagctgctaggca

SEQ ID NO: 1769293 - DNA, 25 bp, Homo sapien
aaacatgacaaaacgtgatcactac

SEQ ID NO: 1769294 - DNA, 25 bp, Homo sapien
tttatacaaatacacgaaggctgca

SEQ ID NO: 1769295 - DNA, 25 bp, Homo sapien
gtcttcagtaatttggagataggac

SEQ ID NO: 1769296 - DNA, 25 bp, Homo sapien
agataggactagattatttctcaga

SEQ ID NO: 1769297 - DNA, 25 bp, Homo sapien
caaggcatatataagagtctacaat

SEQ ID NO: 1769298 - DNA, 25 bp, Homo sapien
taattgcagctactccagagagtct

SEQ ID NO: 1769299 - DNA, 25 bp, Homo sapien
attgcagctactccagagagtctga

SEQ ID NO: 1769300 - DNA, 25 bp, Homo sapien
aattgcagctactccagagagtctg

SEQ ID NO: 1769301 - DNA, 25 bp, Homo sapien
gtgctccaggtgtcattaaggttgc

SEQ ID NO: 1769302 - DNA, 25 bp, Homo sapien
ttgtacgcgccctgagcagggtttg

SEQ ID NO: 1769303 - DNA, 25 bp, Homo sapien
tcctgctttccgacgtcgcatcgtg

SEQ ID NO: 1769304 - DNA, 25 bp, Homo sapien
gtgactgcgggaatttcaattccct

SEQ ID NO: 1769305 - DNA, 25 bp, Homo sapien
ggcggtgtcccgctctccgtgcaaa

SEQ ID NO: 1769306 - DNA, 25 bp, Homo sapien
gcctctacagtccaccgggatgcgg

SEQ ID NO: 1769307 - DNA, 25 bp, Homo sapien
tgcgactcgggctctagctcgctgc

SEQ ID NO: 1769308 - DNA, 25 bp, Homo sapien
atgcggccgcgtctgagctactggg

SEQ ID NO: 1769309 - DNA, 25 bp, Homo sapien
cccaggattcatttttctcccattt

SEQ ID NO: 1769310 - DNA, 25 bp, Homo sapien
atttttctcccattttccttctgat

SEQ ID NO: 1769311 - DNA, 25 bp, Homo sapien
tttctcccattttccttctgattcc

SEQ ID NO: 1769312 - DNA, 25 bp, Homo sapien
ttcccaggattcatttttctcccat

SEQ ID NO: 1769313 - DNA, 25 bp, Homo sapien
ctttgtcgctatgacaatgcccttt

SEQ ID NO: 1769314 - DNA, 25 bp, Homo sapien
ctcttgggctctgactggaactcat

SEQ ID NO: 1769315 - DNA, 25 bp, Homo sapien
tgtcgctatgacaatgccctttcca

SEQ ID NO: 1769316 - DNA, 25 bp, Homo sapien
tcctcttgggctctgactggaactc

SEQ ID NO: 1769317 - DNA, 25 bp, Homo sapien
cctgtggggatgtttggcaccctgc

SEQ ID NO: 1769318 - DNA, 25 bp, Homo sapien
tggcaccctgccagactgtactact

SEQ ID NO: 1769319 - DNA, 25 bp, Homo sapien
agactgtactacttctccggtaggg

SEQ ID NO: 1769320 - DNA, 25 bp, Homo sapien
taagaaccctcatgcctgtggggat

SEQ ID NO: 1769321 - DNA, 25 bp, Homo sapien
gaatgcctttcaattgggatttgcc

SEQ ID NO: 1769322 - DNA, 25 bp, Homo sapien
taatatcagtatggcatcactaccg

SEQ ID NO: 1769323 - DNA, 25 bp, Homo sapien
gtttctccactgaaaagttagtctg

SEQ ID NO: 1769324 - DNA, 25 bp, Homo sapien
cactaccgatgttgaccttgatgag

SEQ ID NO: 1769325 - DNA, 25 bp, Homo sapien
acacatcaattgtattctgagcagt

SEQ ID NO: 1769326 - DNA, 25 bp, Homo sapien
cacatcaattgtattctgagcagtc

SEQ ID NO: 1769327 - DNA, 25 bp, Homo sapien
catcaattgtattctgagcagtctt

SEQ ID NO: 1769328 - DNA, 25 bp, Homo sapien
caaacacatcaattgtattctgagc

SEQ ID NO: 1769329 - DNA, 25 bp, Homo sapien
aagtgtcttttcagtatagcatgac

SEQ ID NO: 1769330 - DNA, 25 bp, Homo sapien
cccagagttatcttgatgaagtgtc

SEQ ID NO: 1769331 - DNA, 25 bp, Homo sapien
gtgtcttttcagtatagcatgactc

SEQ ID NO: 1769332 - DNA, 25 bp, Homo sapien
tctgcttctcccagagttatcttga

SEQ ID NO: 1769333 - DNA, 25 bp, Homo sapien
aaaatgtgtatctcaaggtcccagt

SEQ ID NO: 1769334 - DNA, 25 bp, Homo sapien
caaaatactattctgatgggctagc

SEQ ID NO: 1769335 - DNA, 25 bp, Homo sapien
gggctagctgcctctataagaacca

SEQ ID NO: 1769336 - DNA, 25 bp, Homo sapien
caagctcacttatccctggcagata

SEQ ID NO: 1769337 - DNA, 25 bp, Homo sapien
tgtatcacaggaaataaccatgcct

SEQ ID NO: 1769338 - DNA, 25 bp, Homo sapien
tatgcttccgacaaaattaggctca

SEQ ID NO: 1769339 - DNA, 25 bp, Homo sapien
gctggtcaaggacataggcttatgc

SEQ ID NO: 1769340 - DNA, 25 bp, Homo sapien
aacgtagtgttttagctcccatcaa

SEQ ID NO: 1769341 - DNA, 25 bp, Homo sapien
tagcaaattagtactatcccagaaa

SEQ ID NO: 1769342 - DNA, 25 bp, Homo sapien
gcctttgatgtcatgttagacaaga

SEQ ID NO: 1769343 - DNA, 25 bp, Homo sapien
tgtgatgctgtgtgccttcaggaga

SEQ ID NO: 1769344 - DNA, 25 bp, Homo sapien
gttctgcttttatcaatctgacaag

SEQ ID NO: 1769345 - DNA, 25 bp, Homo sapien
tgaagtgctaaacgcaatactgaga

SEQ ID NO: 1769346 - DNA, 25 bp, Homo sapien
acgcaatactgagaaaatgatcggg

SEQ ID NO: 1769347 - DNA, 25 bp, Homo sapien
ggatggataaaaagagttgaagtgc

SEQ ID NO: 1769348 - DNA, 25 bp, Homo sapien
aaatgatcggggttagaaggcaaga

SEQ ID NO: 1769349 - DNA, 25 bp, Homo sapien
cagccattgtgaaagcaaggtatca

SEQ ID NO: 1769350 - DNA, 25 bp, Homo sapien
tgatgtctgatcaccagtgacacct

SEQ ID NO: 1769351 - DNA, 25 bp, Homo sapien
tcaagacaactgtaggacaaaacta

SEQ ID NO: 1769352 - DNA, 25 bp, Homo sapien
tcactagacaagtgatgatgtctga

SEQ ID NO: 1769353 - DNA, 25 bp, Homo sapien
taagctgacagtcactagacaagtg

SEQ ID NO: 1769354 - DNA, 25 bp, Homo sapien
ttccagcaggcaatcaagaatactg

SEQ ID NO: 1769355 - DNA, 25 bp, Homo sapien
ggaccagtcaattgtcacaagcaaa

SEQ ID NO: 1769356 - DNA, 25 bp, Homo sapien
gaaattctatgtggtggaccagtca

SEQ ID NO: 1769357 - DNA, 25 bp, Homo sapien
gacttctgaggctcctgtagccaga

SEQ ID NO: 1769358 - DNA, 25 bp, Homo sapien
gcagattgccctaaagattttggac

SEQ ID NO: 1769359 - DNA, 25 bp, Homo sapien
tactgtttagttaggccataggccc

SEQ ID NO: 1769360 - DNA, 25 bp, Homo sapien
gaacagatgagtgctttccctgatg

SEQ ID NO: 1769361 - DNA, 25 bp, Homo sapien
gatttctgccctaagagtggttcca

SEQ ID NO: 1769362 - DNA, 25 bp, Homo sapien
ccaagttctagagcctgtgcggata

SEQ ID NO: 1769363 - DNA, 25 bp, Homo sapien
gaaaccaagttctagagcctgtgcg

SEQ ID NO: 1769364 - DNA, 25 bp, Homo sapien
aaccaagttctagagcctgtgcgga

SEQ ID NO: 1769365 - DNA, 25 bp, Homo sapien
ctacaacttcttcaagaaaccaagt

SEQ ID NO: 1769366 - DNA, 25 bp, Homo sapien
tagttatgtcccttaatggctcaag

SEQ ID NO: 1769367 - DNA, 25 bp, Homo sapien
tatctttaaggctagcgtacacacc

SEQ ID NO: 1769368 - DNA, 25 bp, Homo sapien
tatgcccaaaactagagacaatccc

SEQ ID NO: 1769369 - DNA, 25 bp, Homo sapien
ccagtgattcaggacaatagcagaa

SEQ ID NO: 1769370 - DNA, 25 bp, Homo sapien
aaaggtttggtcatggaaggctaag

SEQ ID NO: 1769371 - DNA, 25 bp, Homo sapien
ggtcataaaggtttggtcatggaag

SEQ ID NO: 1769372 - DNA, 25 bp, Homo sapien
aagtcagatggtcataaaggtttgg

SEQ ID NO: 1769373 - DNA, 25 bp, Homo sapien
tcagatggtcataaaggtttggtca

SEQ ID NO: 1769374 - DNA, 25 bp, Homo sapien
gattttggttagctaaatgagccct

SEQ ID NO: 1769375 - DNA, 25 bp, Homo sapien
aatgagcccttacaaagcaataagc

SEQ ID NO: 1769376 - DNA, 25 bp, Homo sapien
tcttctgcataggtaacctgttgga

SEQ ID NO: 1769377 - DNA, 25 bp, Homo sapien
tcaagatactgctattaaacggaca

SEQ ID NO: 1769378 - DNA, 25 bp, Homo sapien
gagggcagctcaagactactaagag

SEQ ID NO: 1769379 - DNA, 25 bp, Homo sapien
gtcatattgcgtatccaccagaaag

SEQ ID NO: 1769380 - DNA, 25 bp, Homo sapien
gatagactcctagaggtggaagaga

SEQ ID NO: 1769381 - DNA, 25 bp, Homo sapien
cagaaatgcgcccatgagggcagct

SEQ ID NO: 1769382 - DNA, 25 bp, Homo sapien
tgataggctacaccgaatgagggag

SEQ ID NO: 1769383 - DNA, 25 bp, Homo sapien
caataactgccaaactgatgtcgga

SEQ ID NO: 1769384 - DNA, 25 bp, Homo sapien
ggcctgcatccctaacctggttaag

SEQ ID NO: 1769385 - DNA, 25 bp, Homo sapien
ggaactaggacaatactggaaccac

SEQ ID NO: 1769386 - DNA, 25 bp, Homo sapien
gttgttatttctgagacaggtttaa

SEQ ID NO: 1769387 - DNA, 25 bp, Homo sapien
aaatctctgattaaaatatgttgtt

SEQ ID NO: 1769388 - DNA, 25 bp, Homo sapien
ctgagacaggtttaaaaaattctga

SEQ ID NO: 1769389 - DNA, 25 bp, Homo sapien
aaatatgttgttatttctgagacag

SEQ ID NO: 1769390 - DNA, 25 bp, Homo sapien
tgttatcagccatacacaggtagaa

SEQ ID NO: 1769391 - DNA, 25 bp, Homo sapien
taatgctgactttcaagactatggc

SEQ ID NO: 1769392 - DNA, 25 bp, Homo sapien
tgttctagattaagtgcatcatccc

SEQ ID NO: 1769393 - DNA, 25 bp, Homo sapien
taattgggcccttagctaggcagtg

SEQ ID NO: 1769394 - DNA, 25 bp, Homo sapien
tacctcaggtagagatatgtgcatc

SEQ ID NO: 1769395 - DNA, 25 bp, Homo sapien
tgtgaggtggcagtcaggcccatct

SEQ ID NO: 1769396 - DNA, 25 bp, Homo sapien
cagggtcaggtggtgtttagctctc

SEQ ID NO: 1769397 - DNA, 25 bp, Homo sapien
tgtgcacagggatccactgctattg

SEQ ID NO: 1769398 - DNA, 25 bp, Homo sapien
tattgcttgcactctcatgactccg

SEQ ID NO: 1769399 - DNA, 25 bp, Homo sapien
tcatgactccgaagggcatcgaggt

SEQ ID NO: 1769400 - DNA, 25 bp, Homo sapien
tcctgagctgctattgcttgcactc

SEQ ID NO: 1769401 - DNA, 25 bp, Homo sapien
gaagggcatcgaggtgcagatccat

SEQ ID NO: 1769402 - DNA, 25 bp, Homo sapien
tggagaaccaagcatggtatcctgg

SEQ ID NO: 1769403 - DNA, 25 bp, Homo sapien
gagaaccaagcatggtatcctggtt

SEQ ID NO: 1769404 - DNA, 25 bp, Homo sapien
ccaagcatggtatcctggttgccat

SEQ ID NO: 1769405 - DNA, 25 bp, Homo sapien
gaaccaagcatggtatcctggttgc

SEQ ID NO: 1769406 - DNA, 25 bp, Homo sapien
gcagaggcagccctgtgtgaggttt

SEQ ID NO: 1769407 - DNA, 25 bp, Homo sapien
gaggcagccctgtgtgaggtttgtg

SEQ ID NO: 1769408 - DNA, 25 bp, Homo sapien
cagccctgtgtgaggtttgtgggaa

SEQ ID NO: 1769409 - DNA, 25 bp, Homo sapien
ggcgcagaggcagccctgtgtgagg

SEQ ID NO: 1769410 - DNA, 25 bp, Homo sapien
ctgcttggagcagcaatacagacat

SEQ ID NO: 1769411 - DNA, 25 bp, Homo sapien
cttggagcagcaatacagacattgc

SEQ ID NO: 1769412 - DNA, 25 bp, Homo sapien
tacagacattgcttgtaatggtaca

SEQ ID NO: 1769413 - DNA, 25 bp, Homo sapien
acagacattgcttgtaatggtacac

SEQ ID NO: 1769414 - DNA, 25 bp, Homo sapien
ctctgatcaccatgtctagcctggt

SEQ ID NO: 1769415 - DNA, 25 bp, Homo sapien
gctgtcaggttcagcctgtgtttgg

SEQ ID NO: 1769416 - DNA, 25 bp, Homo sapien
cctgtgtttggcaggtgatctctga

SEQ ID NO: 1769417 - DNA, 25 bp, Homo sapien
tgtcaggttcagcctgtgtttggca

SEQ ID NO: 1769418 - DNA, 25 bp, Homo sapien
ctgtgtttggcaggtgatctctgaa

SEQ ID NO: 1769419 - DNA, 25 bp, Homo sapien
cagaacccagtgggccccgaagagc

SEQ ID NO: 1769420 - DNA, 25 bp, Homo sapien
agtcagaacccagtgggccccgaag

SEQ ID NO: 1769421 - DNA, 25 bp, Homo sapien
gtcagaacccagtgggccccgaaga

SEQ ID NO: 1769422 - DNA, 25 bp, Homo sapien
cagtcagaacccagtgggccccgaa

SEQ ID NO: 1769423 - DNA, 25 bp, Homo sapien
tgtggatggatcagccaaactaggg

SEQ ID NO: 1769424 - DNA, 25 bp, Homo sapien
caatgtctactgttacggtcctgca

SEQ ID NO: 1769425 - DNA, 25 bp, Homo sapien
agcaggaagccctcagtgtgagcca

SEQ ID NO: 1769426 - DNA, 25 bp, Homo sapien
aaaataacccctgagccgaatgagc

SEQ ID NO: 1769427 - DNA, 25 bp, Homo sapien
ggcatggctagatcaaaaacacaac

SEQ ID NO: 1769428 - DNA, 25 bp, Homo sapien
caacaggcttgagagtctaatcatt

SEQ ID NO: 1769429 - DNA, 25 bp, Homo sapien
ccacagtggttgaaaggcatggcta

SEQ ID NO: 1769430 - DNA, 25 bp, Homo sapien
gatgagcctattcagaagtaaatgt

SEQ ID NO: 1769431 - DNA, 25 bp, Homo sapien
gcagctgaactctggatgtctggta

SEQ ID NO: 1769432 - DNA, 25 bp, Homo sapien
tccttcacggagagagcctccagtt

SEQ ID NO: 1769433 - DNA, 25 bp, Homo sapien
tgaggttccgtctgtggcagctgaa

SEQ ID NO: 1769434 - DNA, 25 bp, Homo sapien
gaagatgcaaaattggcgaccccag

SEQ ID NO: 1769435 - DNA, 25 bp, Homo sapien
ttaaagtctctgtaacaaaggctct

SEQ ID NO: 1769436 - DNA, 25 bp, Homo sapien
tctctgtaacaaaggctctgagaag

SEQ ID NO: 1769437 - DNA, 25 bp, Homo sapien
gtctctgtaacaaaggctctgagaa

SEQ ID NO: 1769438 - DNA, 25 bp, Homo sapien
aaagtctctgtaacaaaggctctga

SEQ ID NO: 1769439 - DNA, 25 bp, Homo sapien
cttttccaattggtcttgtgttgtt

SEQ ID NO: 1769440 - DNA, 25 bp, Homo sapien
taatatacacatgctgcttagggct

SEQ ID NO: 1769441 - DNA, 25 bp, Homo sapien
gggctgcaatgttaccacagttacc

SEQ ID NO: 1769442 - DNA, 25 bp, Homo sapien
cagtgcgatttggaagtaacctgcc

SEQ ID NO: 1769443 - DNA, 25 bp, Homo sapien
cagcactcttgatagattatgagcc

SEQ ID NO: 1769444 - DNA, 25 bp, Homo sapien
tggttactgtatacagacatagcct

SEQ ID NO: 1769445 - DNA, 25 bp, Homo sapien
gactaaatgcttaagtgcctactgc

SEQ ID NO: 1769446 - DNA, 25 bp, Homo sapien
aaaaattaaggtctgcattgctgag

SEQ ID NO: 1769447 - DNA, 25 bp, Homo sapien
gacatacacaaaagccctaagaata

SEQ ID NO: 1769448 - DNA, 25 bp, Homo sapien
caagcctgataccttgggtaataca

SEQ ID NO: 1769449 - DNA, 25 bp, Homo sapien
gttggtaggcaaattcagcgttgtc

SEQ ID NO: 1769450 - DNA, 25 bp, Homo sapien
tgcccaagttgtcaagccacctgag

SEQ ID NO: 1769451 - DNA, 25 bp, Homo sapien
tagcaataatgaggagggacatggc

SEQ ID NO: 1769452 - DNA, 25 bp, Homo sapien
tatgactttaagtgcaccaggctct

SEQ ID NO: 1769453 - DNA, 25 bp, Homo sapien
tgtacgctaatggaggataaagaac

SEQ ID NO: 1769454 - DNA, 25 bp, Homo sapien
ttttcaacagataccaggcaaactg

SEQ ID NO: 1769455 - DNA, 25 bp, Homo sapien
gctttgtaacgtgaaactttgcctc

SEQ ID NO: 1769456 - DNA, 25 bp, Homo sapien
ggcaacctgctgttcccccgcttcc

SEQ ID NO: 1769457 - DNA, 25 bp, Homo sapien
ctgctgttcccccgcttccgggagg

SEQ ID NO: 1769458 - DNA, 25 bp, Homo sapien
taggcaacctgctgttcccccgctt

SEQ ID NO: 1769459 - DNA, 25 bp, Homo sapien
caacctgctgttcccccgcttccgg

SEQ ID NO: 1769460 - DNA, 25 bp, Homo sapien
ctgaggacagggcatgacatgacag

SEQ ID NO: 1769461 - DNA, 25 bp, Homo sapien
ggacagggcatgacatgacagggac

SEQ ID NO: 1769462 - DNA, 25 bp, Homo sapien
acagggcatgacatgacagggacag

SEQ ID NO: 1769463 - DNA, 25 bp, Homo sapien
gaggacagggcatgacatgacaggg

SEQ ID NO: 1769464 - DNA, 25 bp, Homo sapien
cctcttctacgacattgcatctaat

SEQ ID NO: 1769465 - DNA, 25 bp, Homo sapien
tcttctacgacattgcatctaatat

SEQ ID NO: 1769466 - DNA, 25 bp, Homo sapien
ctcctcttctacgacattgcatcta

SEQ ID NO: 1769467 - DNA, 25 bp, Homo sapien
ctcctcctcttctacgacattgcat

SEQ ID NO: 1769468 - DNA, 25 bp, Homo sapien
caatgatcatcaactcgtagaaaag

SEQ ID NO: 1769469 - DNA, 25 bp, Homo sapien
tgaacaatggcaaacactttaaggc

SEQ ID NO: 1769470 - DNA, 25 bp, Homo sapien
ggcagtggacttggtaacaccattt

SEQ ID NO: 1769471 - DNA, 25 bp, Homo sapien
gcatacaacagtcttgacagcctag

SEQ ID NO: 1769472 - DNA, 25 bp, Homo sapien
caatcaactggcattctcattataa

SEQ ID NO: 1769473 - DNA, 25 bp, Homo sapien
gtatgattgcccatagtcttttcca

SEQ ID NO: 1769474 - DNA, 25 bp, Homo sapien
ttccattgcagaattgagataccaa

SEQ ID NO: 1769475 - DNA, 25 bp, Homo sapien
gcagaattgagataccaaatgaaca

SEQ ID NO: 1769476 - DNA, 25 bp, Homo sapien
agcgctcgagtgaggctccaatcct

SEQ ID NO: 1769477 - DNA, 25 bp, Homo sapien
cactacagcccttatgcctgagaaa

SEQ ID NO: 1769478 - DNA, 25 bp, Homo sapien
ttagcggagtaggtcgagttcctcc

SEQ ID NO: 1769479 - DNA, 25 bp, Homo sapien
tggtctaattgccactgcagctcag

SEQ ID NO: 1769480 - DNA, 25 bp, Homo sapien
ctagagccttcatgtactcatcaaa

SEQ ID NO: 1769481 - DNA, 25 bp, Homo sapien
ttctgactgttggtcagcttccagg

SEQ ID NO: 1769482 - DNA, 25 bp, Homo sapien
tagagccttcatgtactcatcaaag

SEQ ID NO: 1769483 - DNA, 25 bp, Homo sapien
ctgactgttggtcagcttccaggta

SEQ ID NO: 1769484 - DNA, 25 bp, Homo sapien
caaagggaacagtacagtctgcagc

SEQ ID NO: 1769485 - DNA, 25 bp, Homo sapien
aagggaacagtacagtctgcagcga

SEQ ID NO: 1769486 - DNA, 25 bp, Homo sapien
tagcaaagggaacagtacagtctgc

SEQ ID NO: 1769487 - DNA, 25 bp, Homo sapien
aaatagcaaagggaacagtacagtc

SEQ ID NO: 1769488 - DNA, 25 bp, Homo sapien
cagctggaaactaatctccgtgttc

SEQ ID NO: 1769489 - DNA, 25 bp, Homo sapien
gataattaccgttggtttggtcaca

SEQ ID NO: 1769490 - DNA, 25 bp, Homo sapien
tttcccacctgcctagtggcaaagc

SEQ ID NO: 1769491 - DNA, 25 bp, Homo sapien
cttgaatgtgctgagagtcctgatg

SEQ ID NO: 1769492 - DNA, 25 bp, Homo sapien
gctagtcgtccctctaaagaaagcc

SEQ ID NO: 1769493 - DNA, 25 bp, Homo sapien
taaaccagtgctttgcagctagtcg

SEQ ID NO: 1769494 - DNA, 25 bp, Homo sapien
gctatagcaagtacccattgttcaa

SEQ ID NO: 1769495 - DNA, 25 bp, Homo sapien
cagatttctgatacggaagacgatg

SEQ ID NO: 1769496 - DNA, 25 bp, Homo sapien
ttgccatcccatttctgtatgtgaa

SEQ ID NO: 1769497 - DNA, 25 bp, Homo sapien
gtatgtgaacaagtttgtctccatc

SEQ ID NO: 1769498 - DNA, 25 bp, Homo sapien
cataaccattttgccatccttaatt

SEQ ID NO: 1769499 - DNA, 25 bp, Homo sapien
tgtctccatccaggctaacaacaga

SEQ ID NO: 1769500 - DNA, 25 bp, Homo sapien
catatagttaaagaaccttgccagt

SEQ ID NO: 1769501 - DNA, 25 bp, Homo sapien
tagttaaagaaccttgccagtgatg

SEQ ID NO: 1769502 - DNA, 25 bp, Homo sapien
ttacatatagttaaagaaccttgcc

SEQ ID NO: 1769503 - DNA, 25 bp, Homo sapien
agaatggagaattgtcattacttac

SEQ ID NO: 1769504 - DNA, 25 bp, Homo sapien
catccgggaagtaggaagaagcaag

SEQ ID NO: 1769505 - DNA, 25 bp, Homo sapien
gaaggatggcaacactagggtcgcc

SEQ ID NO: 1769506 - DNA, 25 bp, Homo sapien
tgttgtggcagccttaggacactaa

SEQ ID NO: 1769507 - DNA, 25 bp, Homo sapien
atgattgccaggagccatccgggaa

SEQ ID NO: 1769508 - DNA, 25 bp, Homo sapien
gaacagcaaccacatcaccaaaagt

SEQ ID NO: 1769509 - DNA, 25 bp, Homo sapien
ccttctcatagtggcgaacagcaac

SEQ ID NO: 1769510 - DNA, 25 bp, Homo sapien
tctcatagtggcgaacagcaaccac

SEQ ID NO: 1769511 - DNA, 25 bp, Homo sapien
tagtggcgaacagcaaccacatcac

SEQ ID NO: 1769512 - DNA, 25 bp, Homo sapien
cagccatgttgtaataggatagcac

SEQ ID NO: 1769513 - DNA, 25 bp, Homo sapien
ccttctaattaatgatcagccatgt

SEQ ID NO: 1769514 - DNA, 25 bp, Homo sapien
tgggcaagttgcttggagtaacaag

SEQ ID NO: 1769515 - DNA, 25 bp, Homo sapien
tagcactgagacttgaggaaacaga

SEQ ID NO: 1769516 - DNA, 25 bp, Homo sapien
gcagcgagtcagttcgcctgacctt

SEQ ID NO: 1769517 - DNA, 25 bp, Homo sapien
tgcaaaggcagattccgcagcgagt

SEQ ID NO: 1769518 - DNA, 25 bp, Homo sapien
gtccgactgatcacgtgcaaaggca

SEQ ID NO: 1769519 - DNA, 25 bp, Homo sapien
tgcgggtgtagacgtccgactgatc

SEQ ID NO: 1769520 - DNA, 25 bp, Homo sapien
ggctgacctggaggttcgggctgtc

SEQ ID NO: 1769521 - DNA, 25 bp, Homo sapien
tccactcggaccgtcaggcctgagg

SEQ ID NO: 1769522 - DNA, 25 bp, Homo sapien
cgcagctccactcggaccgtcaggc

SEQ ID NO: 1769523 - DNA, 25 bp, Homo sapien
aggttcgggctgtcccgcagctcca

SEQ ID NO: 1769524 - DNA, 25 bp, Homo sapien
tcagcaggcagcagacgagtgcgcg

SEQ ID NO: 1769525 - DNA, 25 bp, Homo sapien
agcccgaggccggagcggcagtgcc

SEQ ID NO: 1769526 - DNA, 25 bp, Homo sapien
tgcgggcgccacgggcagcccgagg

SEQ ID NO: 1769527 - DNA, 25 bp, Homo sapien
gattcctgccgcctgcgggcgccac

SEQ ID NO: 1769528 - DNA, 25 bp, Homo sapien
tttctcctgctgtgcgcaggcgccg

SEQ ID NO: 1769529 - DNA, 25 bp, Homo sapien
gccgccgctccgcgctctttgccgg

SEQ ID NO: 1769530 - DNA, 25 bp, Homo sapien
gcgccgccgctccgcgctctttgcc

SEQ ID NO: 1769531 - DNA, 25 bp, Homo sapien
aggcgccgccgctccgcgctctttg

SEQ ID NO: 1769532 - DNA, 25 bp, Homo sapien
cagccgtggtcaacgccggacgcgt

SEQ ID NO: 1769533 - DNA, 25 bp, Homo sapien
gacgcgtcaggggccccgctagccc

SEQ ID NO: 1769534 - DNA, 25 bp, Homo sapien
agccgtggtcaacgccggacgcgtc

SEQ ID NO: 1769535 - DNA, 25 bp, Homo sapien
cccgctagcccgagcctctgccggg

SEQ ID NO: 1769536 - DNA, 25 bp, Homo sapien
tcaggaccgattaggggcctcttgc

SEQ ID NO: 1769537 - DNA, 25 bp, Homo sapien
ttgctgtgctggacatcggactccc

SEQ ID NO: 1769538 - DNA, 25 bp, Homo sapien
cccctccattcaggaccgattaggg

SEQ ID NO: 1769539 - DNA, 25 bp, Homo sapien
gcctcttgctgtgctggacatcgga

SEQ ID NO: 1769540 - DNA, 25 bp, Homo sapien
tcctagaacttctgtcgtccgacca

SEQ ID NO: 1769541 - DNA, 25 bp, Homo sapien
tagttcagacataattcagctcgcc

SEQ ID NO: 1769542 - DNA, 25 bp, Homo sapien
gctgaaaggaagtccaagcatgtgg

SEQ ID NO: 1769543 - DNA, 25 bp, Homo sapien
taacagtaccaatacacaagccagt

SEQ ID NO: 1769544 - DNA, 25 bp, Homo sapien
agtgtaagtcagtcacatgccaaaa

SEQ ID NO: 1769545 - DNA, 25 bp, Homo sapien
gtctaagtgtaagtcagtcacatgc

SEQ ID NO: 1769546 - DNA, 25 bp, Homo sapien
ctgtgatgtggtaagtagggtctaa

SEQ ID NO: 1769547 - DNA, 25 bp, Homo sapien
tagggtctaagtgtaagtcagtcac

SEQ ID NO: 1769548 - DNA, 25 bp, Homo sapien
cctttagatgaagcacacacttttg

SEQ ID NO: 1769549 - DNA, 25 bp, Homo sapien
ctgtccatatcatgaaagatgcttc

SEQ ID NO: 1769550 - DNA, 25 bp, Homo sapien
ggcatttgcacctttagatgaagca

SEQ ID NO: 1769551 - DNA, 25 bp, Homo sapien
gctgacaaaataagttgatatggag

SEQ ID NO: 1769552 - DNA, 25 bp, Homo sapien
taacagtgtctgttgagagttcagg

SEQ ID NO: 1769553 - DNA, 25 bp, Homo sapien
tacaggaacatgaggtgggctatcc

SEQ ID NO: 1769554 - DNA, 25 bp, Homo sapien
ggtggttgtcatattagtgatcaca

SEQ ID NO: 1769555 - DNA, 25 bp, Homo sapien
tagtcatgattacccagcgcaggga

SEQ ID NO: 1769556 - DNA, 25 bp, Homo sapien
tacttgctaaccttgtcatggacat

SEQ ID NO: 1769557 - DNA, 25 bp, Homo sapien
tcactagctagttattgtcacaatt

SEQ ID NO: 1769558 - DNA, 25 bp, Homo sapien
cataaattaatcatccacaaactgg

SEQ ID NO: 1769559 - DNA, 25 bp, Homo sapien
cagtccccgaagtacttgtctttgc

SEQ ID NO: 1769560 - DNA, 25 bp, Homo sapien
gggtatctcaggcattaaatgctct

SEQ ID NO: 1769561 - DNA, 25 bp, Homo sapien
taaatgctctgaacatggtttctgc

SEQ ID NO: 1769562 - DNA, 25 bp, Homo sapien
tgtaccacaggagacaattgcccag

SEQ ID NO: 1769563 - DNA, 25 bp, Homo sapien
caataggatgctgtaaaccggacgg

SEQ ID NO: 1769564 - DNA, 25 bp, Homo sapien
gtatatgtatatttatgtagctatg

SEQ ID NO: 1769565 - DNA, 25 bp, Homo sapien
ctgtatatgtatatttatgtagcta

SEQ ID NO: 1769566 - DNA, 25 bp, Homo sapien
tgtatatgtatatttatgtagctat

SEQ ID NO: 1769567 - DNA, 25 bp, Homo sapien
accagtcttgccagtgtaggagtaa

SEQ ID NO: 1769568 - DNA, 25 bp, Homo sapien
aggatgtccacactgatacctactt

SEQ ID NO: 1769569 - DNA, 25 bp, Homo sapien
cccttccttgggtggcaacaggaag

SEQ ID NO: 1769570 - DNA, 25 bp, Homo sapien
cacaaattcggtggcaccagtcttg

SEQ ID NO: 1769571 - DNA, 25 bp, Homo sapien
cactttactggtgactacaggcagt

SEQ ID NO: 1769572 - DNA, 25 bp, Homo sapien
tactggtgactacaggcagttgatc

SEQ ID NO: 1769573 - DNA, 25 bp, Homo sapien
cagaggtttgctactgcattgtaca

SEQ ID NO: 1769574 - DNA, 25 bp, Homo sapien
gcattgtacactttactggtgacta

SEQ ID NO: 1769575 - DNA, 25 bp, Homo sapien
tcatgatggatcactgcccctttaa

SEQ ID NO: 1769576 - DNA, 25 bp, Homo sapien
gctgctttcatgtccaagtagtaga

SEQ ID NO: 1769577 - DNA, 25 bp, Homo sapien
ttgaggcccctcatgcaagacatct

SEQ ID NO: 1769578 - DNA, 25 bp, Homo sapien
tatggtactagcaggtcagttgggt

SEQ ID NO: 1769579 - DNA, 25 bp, Homo sapien
tgctatcgcttccaacatattgaga

SEQ ID NO: 1769580 - DNA, 25 bp, Homo sapien
tacaatccagtcaggaggttggtgc

SEQ ID NO: 1769581 - DNA, 25 bp, Homo sapien
tagtttgcacatagataggctgtca

SEQ ID NO: 1769582 - DNA, 25 bp, Homo sapien
caaattcctgaggtttacaatccag

SEQ ID NO: 1769583 - DNA, 25 bp, Homo sapien
cattcaaactggttggctgggtcag

SEQ ID NO: 1769584 - DNA, 25 bp, Homo sapien
tagactgatgatcctaaggtttgga

SEQ ID NO: 1769585 - DNA, 25 bp, Homo sapien
gtgtcattatatttgggccgtagta

SEQ ID NO: 1769586 - DNA, 25 bp, Homo sapien
tctgctgagagttgttcaatgtact

SEQ ID NO: 1769587 - DNA, 25 bp, Homo sapien
gatactggagtctaccccgagttta

SEQ ID NO: 1769588 - DNA, 25 bp, Homo sapien
catacaaattttgccttccgtttat

SEQ ID NO: 1769589 - DNA, 25 bp, Homo sapien
gaaagaaaatccatgagttgtaaag

SEQ ID NO: 1769590 - DNA, 25 bp, Homo sapien
ccagatggttttggtctatgggatc

SEQ ID NO: 1769591 - DNA, 25 bp, Homo sapien
cagataccccactggaacatgtgct

SEQ ID NO: 1769592 - DNA, 25 bp, Homo sapien
taccccactggaacatgtgctatga

SEQ ID NO: 1769593 - DNA, 25 bp, Homo sapien
gtgagtgtgtccataaaattgtcct

SEQ ID NO: 1769594 - DNA, 25 bp, Homo sapien
taaaattgtcctgcaatgacatcac

SEQ ID NO: 1769595 - DNA, 25 bp, Homo sapien
taatcacgaggatcatactgaaaca

SEQ ID NO: 1769596 - DNA, 25 bp, Homo sapien
caggagccacaaacaaagaatttac

SEQ ID NO: 1769597 - DNA, 25 bp, Homo sapien
tcttcactggtgtaacagcaggagc

SEQ ID NO: 1769598 - DNA, 25 bp, Homo sapien
tctgataccaggattgttggtctgt

SEQ ID NO: 1769599 - DNA, 25 bp, Homo sapien
gcttccagatggactctccctttag

SEQ ID NO: 1769600 - DNA, 25 bp, Homo sapien
tccctttagattcgcctctgtcaga

SEQ ID NO: 1769601 - DNA, 25 bp, Homo sapien
gctgcaaatcttcaatgtcgtaggt

SEQ ID NO: 1769602 - DNA, 25 bp, Homo sapien
catataaactttccggctgcaaatc

SEQ ID NO: 1769603 - DNA, 25 bp, Homo sapien
cacatgttacactgctgtcataact

SEQ ID NO: 1769604 - DNA, 25 bp, Homo sapien
tcacatgttacactgctgtcataac

SEQ ID NO: 1769605 - DNA, 25 bp, Homo sapien
ctcacaaagaagtaattgtagtatt

SEQ ID NO: 1769606 - DNA, 25 bp, Homo sapien
tgtcataactcacaaagaagtaatt

SEQ ID NO: 1769607 - DNA, 25 bp, Homo sapien
gaggcaatctgcataggaaatatta

SEQ ID NO: 1769608 - DNA, 25 bp, Homo sapien
ctgtttgaggcaatctgcataggaa

SEQ ID NO: 1769609 - DNA, 25 bp, Homo sapien
tattatcaagattcataattgcaca

SEQ ID NO: 1769610 - DNA, 25 bp, Homo sapien
attgcacaaatctgaaaggccttac

SEQ ID NO: 1769611 - DNA, 25 bp, Homo sapien
taaagatatctacattaaggcatca

SEQ ID NO: 1769612 - DNA, 25 bp, Homo sapien
tttacatccaatttacatccatcat

SEQ ID NO: 1769613 - DNA, 25 bp, Homo sapien
caggaagtctacttgcccactcagt

SEQ ID NO: 1769614 - DNA, 25 bp, Homo sapien
tcccacaaattgatctcagaatcag

SEQ ID NO: 1769615 - DNA, 25 bp, Homo sapien
caacaattatttactaggtgccagg

SEQ ID NO: 1769616 - DNA, 25 bp, Homo sapien
ttttcccaagagtagatagtgcatg

SEQ ID NO: 1769617 - DNA, 25 bp, Homo sapien
ccaggccttgtgctagtactgcaga

SEQ ID NO: 1769618 - DNA, 25 bp, Homo sapien
aatgccaccactgtaatctaggacg

SEQ ID NO: 1769619 - DNA, 25 bp, Homo sapien
ttctcctacttaacctgaaagcaga

SEQ ID NO: 1769620 - DNA, 25 bp, Homo sapien
taattctcctacttaacctgaaagc

SEQ ID NO: 1769621 - DNA, 25 bp, Homo sapien
aattctcctacttaacctgaaagca

SEQ ID NO: 1769622 - DNA, 25 bp, Homo sapien
tctcctacttaacctgaaagcagaa

SEQ ID NO: 1769623 - DNA, 25 bp, Homo sapien
ttttcctaccaatatatggttaatg

SEQ ID NO: 1769624 - DNA, 25 bp, Homo sapien
tagcagtgtctatatctaaacagga

SEQ ID NO: 1769625 - DNA, 25 bp, Homo sapien
atttgccaaagcaccaccaataaac

SEQ ID NO: 1769626 - DNA, 25 bp, Homo sapien
ttaagataagttttactgtggacat

SEQ ID NO: 1769627 - DNA, 25 bp, Homo sapien
tctgttggggcattgtgcagaccac

SEQ ID NO: 1769628 - DNA, 25 bp, Homo sapien
aagttcacacttgggcgaagctgca

SEQ ID NO: 1769629 - DNA, 25 bp, Homo sapien
agagggagagtaactgatggaatac

SEQ ID NO: 1769630 - DNA, 25 bp, Homo sapien
gggagagtaactgatggaatactct

SEQ ID NO: 1769631 - DNA, 25 bp, Homo sapien
tctgagcacaagctgtctccacaaa

SEQ ID NO: 1769632 - DNA, 25 bp, Homo sapien
acaaagccaaccaaagaggcaacat

SEQ ID NO: 1769633 - DNA, 25 bp, Homo sapien
tcacatctgagcacaagctgtctcc

SEQ ID NO: 1769634 - DNA, 25 bp, Homo sapien
cacaaagccaaccaaagaggcaaca

SEQ ID NO: 1769635 - DNA, 25 bp, Homo sapien
tatgtggttttatgtcggagagatc

SEQ ID NO: 1769636 - DNA, 25 bp, Homo sapien
agagatcataggcaagcgtggcatc

SEQ ID NO: 1769637 - DNA, 25 bp, Homo sapien
cactgaggtgttatgtggttttatg

SEQ ID NO: 1769638 - DNA, 25 bp, Homo sapien
ggttttatgtcggagagatcatagg

SEQ ID NO: 1769639 - DNA, 25 bp, Homo sapien
gacttactcaaagccttgattggcc

SEQ ID NO: 1769640 - DNA, 25 bp, Homo sapien
cagtggtgcatcttcaccactacac

SEQ ID NO: 1769641 - DNA, 25 bp, Homo sapien
tcaccactacacccatttatgttac

SEQ ID NO: 1769642 - DNA, 25 bp, Homo sapien
cactacacccatttatgttacccat

SEQ ID NO: 1769643 - DNA, 25 bp, Homo sapien
agtggtgcatcttcaccactacacc

SEQ ID NO: 1769644 - DNA, 25 bp, Homo sapien
cacctgagtggcagacatcttctat

SEQ ID NO: 1769645 - DNA, 25 bp, Homo sapien
cgtgactgacactgatgacacccag

SEQ ID NO: 1769646 - DNA, 25 bp, Homo sapien
ttctcgtttgaagcacacctgagtg

SEQ ID NO: 1769647 - DNA, 25 bp, Homo sapien
tagatcgcctcatttacacccaacg

SEQ ID NO: 1769648 - DNA, 25 bp, Homo sapien
ctgatggtaattgtggcaaactaga

SEQ ID NO: 1769649 - DNA, 25 bp, Homo sapien
cagggcatctgaagatatgaagctg

SEQ ID NO: 1769650 - DNA, 25 bp, Homo sapien
gctgcctatgtgaggccacaagaac

SEQ ID NO: 1769651 - DNA, 25 bp, Homo sapien
agaactgatggtaattgtggcaaac

SEQ ID NO: 1769652 - DNA, 25 bp, Homo sapien
gactgacccaggtttgcatagctga

SEQ ID NO: 1769653 - DNA, 25 bp, Homo sapien
gcctttgataacagtactttcgatg

SEQ ID NO: 1769654 - DNA, 25 bp, Homo sapien
tttcctttagcagtgtcagcagcaa

SEQ ID NO: 1769655 - DNA, 25 bp, Homo sapien
tgtaaaccaaaggtccccagtgtca

SEQ ID NO: 1769656 - DNA, 25 bp, Homo sapien
catcaactcctctgggcgggatgga

SEQ ID NO: 1769657 - DNA, 25 bp, Homo sapien
ggccctgccattttcgccttcggga

SEQ ID NO: 1769658 - DNA, 25 bp, Homo sapien
tgggtggcatcgaaatatcccgagc

SEQ ID NO: 1769659 - DNA, 25 bp, Homo sapien
gatctcgctgcgacgtaagcactca

SEQ ID NO: 1769660 - DNA, 25 bp, Homo sapien
taagcaatgcggcactccctggcat

SEQ ID NO: 1769661 - DNA, 25 bp, Homo sapien
gggtcgctaagcaatgcggcactcc

SEQ ID NO: 1769662 - DNA, 25 bp, Homo sapien
cccagaggcggggtcgctaagcaat

SEQ ID NO: 1769663 - DNA, 25 bp, Homo sapien
tcgctaagcaatgcggcactccctg

SEQ ID NO: 1769664 - DNA, 25 bp, Homo sapien
ctgctgaaggatacgcctgccaggg

SEQ ID NO: 1769665 - DNA, 25 bp, Homo sapien
tcagaagaccttgttgactgtccca

SEQ ID NO: 1769666 - DNA, 25 bp, Homo sapien
tgcactgtgaatgttcctgcggtcc

SEQ ID NO: 1769667 - DNA, 25 bp, Homo sapien
tcctttaaagagatgtgaacccctg

SEQ ID NO: 1769668 - DNA, 25 bp, Homo sapien
catagtggtccagattggccaggcc

SEQ ID NO: 1769669 - DNA, 25 bp, Homo sapien
tgaaggcatcatccgtgcgcagaaa

SEQ ID NO: 1769670 - DNA, 25 bp, Homo sapien
gagagaccggcttgcaaatgagtca

SEQ ID NO: 1769671 - DNA, 25 bp, Homo sapien
agaaagccaatgtccggcctggtga

SEQ ID NO: 1769672 - DNA, 25 bp, Homo sapien
tacattctaagataccaagactcgg

SEQ ID NO: 1769673 - DNA, 25 bp, Homo sapien
ggaataacatctctataactggcca

SEQ ID NO: 1769674 - DNA, 25 bp, Homo sapien
taagccctcttggtaactgtaaatg

SEQ ID NO: 1769675 - DNA, 25 bp, Homo sapien
caagactcggaagcctatctggaaa

SEQ ID NO: 1769676 - DNA, 25 bp, Homo sapien
aatggtatctctaacagacttcgag

SEQ ID NO: 1769677 - DNA, 25 bp, Homo sapien
accttgaggtgcgataatttcttga

SEQ ID NO: 1769678 - DNA, 25 bp, Homo sapien
caggttccatttcactatagctcaa

SEQ ID NO: 1769679 - DNA, 25 bp, Homo sapien
gaatttgattactagttgtctgccc

SEQ ID NO: 1769680 - DNA, 25 bp, Homo sapien
tgcacatgctccagtgataaaggtt

SEQ ID NO: 1769681 - DNA, 25 bp, Homo sapien
ggagccaaggacgtttttatgcaca

SEQ ID NO: 1769682 - DNA, 25 bp, Homo sapien
tctgtaggagtcaaggagccttcgg

SEQ ID NO: 1769683 - DNA, 25 bp, Homo sapien
tgttggtaacatcctggcattggca

SEQ ID NO: 1769684 - DNA, 25 bp, Homo sapien
gtaaactacactaaattgcagcaga

SEQ ID NO: 1769685 - DNA, 25 bp, Homo sapien
tgttttttggaagaaccacaggcca

SEQ ID NO: 1769686 - DNA, 25 bp, Homo sapien
tatgaatcttttccaaggtacagct

SEQ ID NO: 1769687 - DNA, 25 bp, Homo sapien
tagtcactgtctcacacggttttac

SEQ ID NO: 1769688 - DNA, 25 bp, Homo sapien
aatttaaatttgaaatcagctttgg

SEQ ID NO: 1769689 - DNA, 25 bp, Homo sapien
aatcaaggtaccagtaaggactgaa

SEQ ID NO: 1769690 - DNA, 25 bp, Homo sapien
tggaaggatgatacattgtatgtag

SEQ ID NO: 1769691 - DNA, 25 bp, Homo sapien
aaatagcattaataccaaaatggca

SEQ ID NO: 1769692 - DNA, 25 bp, Homo sapien
taaagaaagtaagatggcacgcaaa

SEQ ID NO: 1769693 - DNA, 25 bp, Homo sapien
aagtaagatggcacgcaaaatatcc

SEQ ID NO: 1769694 - DNA, 25 bp, Homo sapien
gatggcacgcaaaatatccaccagt

SEQ ID NO: 1769695 - DNA, 25 bp, Homo sapien
ggcttctaaagaaagtaagatggca

SEQ ID NO: 1769696 - DNA, 25 bp, Homo sapien
tgtgagtttagaggcttgcttgaaa

SEQ ID NO: 1769697 - DNA, 25 bp, Homo sapien
gctaatcgcagcatacttggtgtga

SEQ ID NO: 1769698 - DNA, 25 bp, Homo sapien
gaagttactccagtctatgatcaaa

SEQ ID NO: 1769699 - DNA, 25 bp, Homo sapien
caaacccattcacttgaagctcagg

SEQ ID NO: 1769700 - DNA, 25 bp, Homo sapien
agtcaggaagcctacatcaggaaaa

SEQ ID NO: 1769701 - DNA, 25 bp, Homo sapien
tcaggaagcctacatcaggaaaaac

SEQ ID NO: 1769702 - DNA, 25 bp, Homo sapien
attggtggccgctggtaacactggg

SEQ ID NO: 1769703 - DNA, 25 bp, Homo sapien
cagagctagcagattggtggccgct

SEQ ID NO: 1769704 - DNA, 25 bp, Homo sapien
tagcagattggtggccgctggtaac

SEQ ID NO: 1769705 - DNA, 25 bp, Homo sapien
tcagagctagcagattggtggccgc

SEQ ID NO: 1769706 - DNA, 25 bp, Homo sapien
taaattgatgttcacattttggagt

SEQ ID NO: 1769707 - DNA, 25 bp, Homo sapien
aaaggataaattgatgttcacattt

SEQ ID NO: 1769708 - DNA, 25 bp, Homo sapien
aggataaattgatgttcacattttg

SEQ ID NO: 1769709 - DNA, 25 bp, Homo sapien
gataaattgatgttcacattttgga

SEQ ID NO: 1769710 - DNA, 25 bp, Homo sapien
agctcatgctgtttccctacgtaca

SEQ ID NO: 1769711 - DNA, 25 bp, Homo sapien
gctcatgctgtttccctacgtacat

SEQ ID NO: 1769712 - DNA, 25 bp, Homo sapien
cttagctcatgctgtttccctacgt

SEQ ID NO: 1769713 - DNA, 25 bp, Homo sapien
tagctcatgctgtttccctacgtac

SEQ ID NO: 1769714 - DNA, 25 bp, Homo sapien
ctggactgcaaagtccagtttggag

SEQ ID NO: 1769715 - DNA, 25 bp, Homo sapien
caagtcaaagctgttagtactggca

SEQ ID NO: 1769716 - DNA, 25 bp, Homo sapien
caaatctgagtcataccaaagggtt

SEQ ID NO: 1769717 - DNA, 25 bp, Homo sapien
agggtaaccagagcccaaatctgag

SEQ ID NO: 1769718 - DNA, 25 bp, Homo sapien
tgttagtactggcagggtaaccaga

SEQ ID NO: 1769719 - DNA, 25 bp, Homo sapien
aaggcgaatgtgaatgaagtagtat

SEQ ID NO: 1769720 - DNA, 25 bp, Homo sapien
ggcgaatgtgaatgaagtagtattt

SEQ ID NO: 1769721 - DNA, 25 bp, Homo sapien
caaggataggaaatgtaaggcgaat

SEQ ID NO: 1769722 - DNA, 25 bp, Homo sapien
gtaaggcgaatgtgaatgaagtagt

SEQ ID NO: 1769723 - DNA, 25 bp, Homo sapien
gcatattgatttgcagagctgccaa

SEQ ID NO: 1769724 - DNA, 25 bp, Homo sapien
gtagtgaattaatctagtatttgca

SEQ ID NO: 1769725 - DNA, 25 bp, Homo sapien
gtatttgcatattgatttgcagagc

SEQ ID NO: 1769726 - DNA, 25 bp, Homo sapien
gagcagtagtgaattaatctagtat

SEQ ID NO: 1769727 - DNA, 25 bp, Homo sapien
catcataatactcggcattcttctg

SEQ ID NO: 1769728 - DNA, 25 bp, Homo sapien
atcataatactcggcattcttctga

SEQ ID NO: 1769729 - DNA, 25 bp, Homo sapien
catggttgattgacaaaatgaattc

SEQ ID NO: 1769730 - DNA, 25 bp, Homo sapien
gatcacggtgtacagggcatggata

SEQ ID NO: 1769731 - DNA, 25 bp, Homo sapien
tccttcaggaaaggccggatcacgg

SEQ ID NO: 1769732 - DNA, 25 bp, Homo sapien
tgaattcctccaaatcgcgctggga

SEQ ID NO: 1769733 - DNA, 25 bp, Homo sapien
cttcagaatccactgaagtaaatac

SEQ ID NO: 1769734 - DNA, 25 bp, Homo sapien
ttcagaatccactgaagtaaataca

SEQ ID NO: 1769735 - DNA, 25 bp, Homo sapien
tcagaatccactgaagtaaatacat

SEQ ID NO: 1769736 - DNA, 25 bp, Homo sapien
cacaggcatgctgtaggagtctaca

SEQ ID NO: 1769737 - DNA, 25 bp, Homo sapien
agtgttcttgcccatgtccccatgt

SEQ ID NO: 1769738 - DNA, 25 bp, Homo sapien
tcatattcatggtctagcagtgttc

SEQ ID NO: 1769739 - DNA, 25 bp, Homo sapien
aggcagcattcctccaaactcagag

SEQ ID NO: 1769740 - DNA, 25 bp, Homo sapien
tgtaggatccactactgattgagat

SEQ ID NO: 1769741 - DNA, 25 bp, Homo sapien
catttttatccatgcgttttagtac

SEQ ID NO: 1769742 - DNA, 25 bp, Homo sapien
gagaaagcaatggttgcatgttttc

SEQ ID NO: 1769743 - DNA, 25 bp, Homo sapien
gcaatggttgcatgttttcttcctc

SEQ ID NO: 1769744 - DNA, 25 bp, Homo sapien
gagttcaagtgttcagtttaccagc

SEQ ID NO: 1769745 - DNA, 25 bp, Homo sapien
taatagggtcttgaataaagggcac

SEQ ID NO: 1769746 - DNA, 25 bp, Homo sapien
ccccatggttcaggccaaggaaagc

SEQ ID NO: 1769747 - DNA, 25 bp, Homo sapien
gaataagtcggtttccagctggtaa

SEQ ID NO: 1769748 - DNA, 25 bp, Homo sapien
ccaatatgttggtttataatctgcc

SEQ ID NO: 1769749 - DNA, 25 bp, Homo sapien
cttcttttgttccaatatgttggtt

SEQ ID NO: 1769750 - DNA, 25 bp, Homo sapien
tagggtccagtgatcgttgagtaac

SEQ ID NO: 1769751 - DNA, 25 bp, Homo sapien
tcatagtaccagcaaaaatgccagc

SEQ ID NO: 1769752 - DNA, 25 bp, Homo sapien
gaaatgcgaaagtcctgaggtagag

SEQ ID NO: 1769753 - DNA, 25 bp, Homo sapien
ttccagggactgtacaaggcaccag

SEQ ID NO: 1769754 - DNA, 25 bp, Homo sapien
ttctcttaaactggcttccaatact

SEQ ID NO: 1769755 - DNA, 25 bp, Homo sapien
cactgtacagactatcaaggatcaa

SEQ ID NO: 1769756 - DNA, 25 bp, Homo sapien
ttattacagtgttgggaaaggcaca

SEQ ID NO: 1769757 - DNA, 25 bp, Homo sapien
ggagcaagctgaaaagccagttgga

SEQ ID NO: 1769758 - DNA, 25 bp, Homo sapien
tgcagagaagatacgaacacaatgt

SEQ ID NO: 1769759 - DNA, 25 bp, Homo sapien
tactgataatatccatggccaaagc

SEQ ID NO: 1769760 - DNA, 25 bp, Homo sapien
taattagcatgaggcagtcagtagc

SEQ ID NO: 1769761 - DNA, 25 bp, Homo sapien
ccttgtggccagaggtaattagcat

SEQ ID NO: 1769762 - DNA, 25 bp, Homo sapien
caggcctaaggtactcatgaatctc

SEQ ID NO: 1769763 - DNA, 25 bp, Homo sapien
aggggtgctggccaatgtctatgtc

SEQ ID NO: 1769764 - DNA, 25 bp, Homo sapien
tgtctatgtctgctgattcctctgc

SEQ ID NO: 1769765 - DNA, 25 bp, Homo sapien
ggtgctggccaatgtctatgtctgc

SEQ ID NO: 1769766 - DNA, 25 bp, Homo sapien
cttgcaggttcccaggggtgctggc

SEQ ID NO: 1769767 - DNA, 25 bp, Homo sapien
cacctgatctaatgtatcattgttc

SEQ ID NO: 1769768 - DNA, 25 bp, Homo sapien
atcattgttcatagaccataactgg

SEQ ID NO: 1769769 - DNA, 25 bp, Homo sapien
cctgccagcacctgatctaatgtat

SEQ ID NO: 1769770 - DNA, 25 bp, Homo sapien
tagaccataactggaaaaatccgct

SEQ ID NO: 1769771 - DNA, 25 bp, Homo sapien
gatcttccaatctagggtcctgcca

SEQ ID NO: 1769772 - DNA, 25 bp, Homo sapien
tattgctccttttaagggcccagag

SEQ ID NO: 1769773 - DNA, 25 bp, Homo sapien
gttgctcacaacagtcagcattctg

SEQ ID NO: 1769774 - DNA, 25 bp, Homo sapien
gattttgagatcttccaatctaggg

SEQ ID NO: 1769775 - DNA, 25 bp, Homo sapien
cagcacttagatgaatgggctctat

SEQ ID NO: 1769776 - DNA, 25 bp, Homo sapien
tttgtgctgagaacttaaccagtga

SEQ ID NO: 1769777 - DNA, 25 bp, Homo sapien
taaccagtgagatgtaactagacaa

SEQ ID NO: 1769778 - DNA, 25 bp, Homo sapien
tatgggcacatttgctaaaatctgc

SEQ ID NO: 1769779 - DNA, 25 bp, Homo sapien
actcattgaatggtttaaagtcagc

SEQ ID NO: 1769780 - DNA, 25 bp, Homo sapien
tggtaagtggcctttgcacaacttt

SEQ ID NO: 1769781 - DNA, 25 bp, Homo sapien
gaaatatttccaactcgccatctgc

SEQ ID NO: 1769782 - DNA, 25 bp, Homo sapien
aagtcagcaggctcattagctgaaa

SEQ ID NO: 1769783 - DNA, 25 bp, Homo sapien
ggttggatctagcaccagccatttc

SEQ ID NO: 1769784 - DNA, 25 bp, Homo sapien
taatcccataccaggtggttggatc

SEQ ID NO: 1769785 - DNA, 25 bp, Homo sapien
gaatcttcttctactcttccaagta

SEQ ID NO: 1769786 - DNA, 25 bp, Homo sapien
catcgttagagatattagtgatggg

SEQ ID NO: 1769787 - DNA, 25 bp, Homo sapien
gggtaagttgtctgaagacttcgaa

SEQ ID NO: 1769788 - DNA, 25 bp, Homo sapien
tgaagacttcgaaactcctccccag

SEQ ID NO: 1769789 - DNA, 25 bp, Homo sapien
caggactgtgcaacttatgatcccc

SEQ ID NO: 1769790 - DNA, 25 bp, Homo sapien
ttactgatgctcaggactgtgcaac

SEQ ID NO: 1769791 - DNA, 25 bp, Homo sapien
ctgtaccaagtcattctctatttta

SEQ ID NO: 1769792 - DNA, 25 bp, Homo sapien
tctctattttacatatacaatgtgg

SEQ ID NO: 1769793 - DNA, 25 bp, Homo sapien
tgtaccaagtcattctctattttac

SEQ ID NO: 1769794 - DNA, 25 bp, Homo sapien
ctattttacatatacaatgtggcat

SEQ ID NO: 1769795 - DNA, 25 bp, Homo sapien
ctagggctcctactctgttgacagt

SEQ ID NO: 1769796 - DNA, 25 bp, Homo sapien
aatcctagggctcctactctgttga

SEQ ID NO: 1769797 - DNA, 25 bp, Homo sapien
attctcatcggcattcaaatcaaag

SEQ ID NO: 1769798 - DNA, 25 bp, Homo sapien
tatgtaaaatacagactcattctca

SEQ ID NO: 1769799 - DNA, 25 bp, Homo sapien
aattctctgtatgctggccttttgt

SEQ ID NO: 1769800 - DNA, 25 bp, Homo sapien
attctctgtatgctggccttttgtt

SEQ ID NO: 1769801 - DNA, 25 bp, Homo sapien
cttaattctctgtatgctggccttt

SEQ ID NO: 1769802 - DNA, 25 bp, Homo sapien
taattctctgtatgctggccttttg

SEQ ID NO: 1769803 - DNA, 25 bp, Homo sapien
cattactgctactgttgccccaaca

SEQ ID NO: 1769804 - DNA, 25 bp, Homo sapien
taattgttttgggagcaatcacagg

SEQ ID NO: 1769805 - DNA, 25 bp, Homo sapien
cattgagtccaagattcagactgag

SEQ ID NO: 1769806 - DNA, 25 bp, Homo sapien
ttgattgtttgatgccagaaagtcc

SEQ ID NO: 1769807 - DNA, 25 bp, Homo sapien
tttctcctgtagcattgacataatt

SEQ ID NO: 1769808 - DNA, 25 bp, Homo sapien
ttttctcctgtagcattgacataat

SEQ ID NO: 1769809 - DNA, 25 bp, Homo sapien
tcctgtagcattgacataattattc

SEQ ID NO: 1769810 - DNA, 25 bp, Homo sapien
tctcctgtagcattgacataattat

SEQ ID NO: 1769811 - DNA, 25 bp, Homo sapien
ggaaattcacccagtatatagcaac

SEQ ID NO: 1769812 - DNA, 25 bp, Homo sapien
gaggagagagccacggaaagcatta

SEQ ID NO: 1769813 - DNA, 25 bp, Homo sapien
cctaatccaacgtggcagattgaga

SEQ ID NO: 1769814 - DNA, 25 bp, Homo sapien
gacaggtaaggagggcctaatccaa

SEQ ID NO: 1769815 - DNA, 25 bp, Homo sapien
ttccacctgtcactttccccatgag

SEQ ID NO: 1769816 - DNA, 25 bp, Homo sapien
caagttactgtcattgttccacctg

SEQ ID NO: 1769817 - DNA, 25 bp, Homo sapien
gttaggccagagtgctgtccatagt

SEQ ID NO: 1769818 - DNA, 25 bp, Homo sapien
tgtgggcccatgacccaagttaggc

SEQ ID NO: 1769819 - DNA, 25 bp, Homo sapien
cctgctatgtggctatgcctgggca

SEQ ID NO: 1769820 - DNA, 25 bp, Homo sapien
cagatttatgaaacagggctcttcc

SEQ ID NO: 1769821 - DNA, 25 bp, Homo sapien
gcctgggcagcacgtgaattctctg

SEQ ID NO: 1769822 - DNA, 25 bp, Homo sapien
tccacgaagtttagaagtaccacaa

SEQ ID NO: 1769823 - DNA, 25 bp, Homo sapien
tgtacttcttgtctcagtccactta

SEQ ID NO: 1769824 - DNA, 25 bp, Homo sapien
ctgggaagtatctgtgtacttcttg

SEQ ID NO: 1769825 - DNA, 25 bp, Homo sapien
cttatttagtgccttgaaattggtc

SEQ ID NO: 1769826 - DNA, 25 bp, Homo sapien
tggatttctgtgttgtccccacatt

SEQ ID NO: 1769827 - DNA, 25 bp, Homo sapien
ttagtgaggctgattatgccagtcc

SEQ ID NO: 1769828 - DNA, 25 bp, Homo sapien
ttgatgcactattttagtctggaac

SEQ ID NO: 1769829 - DNA, 25 bp, Homo sapien
ctgattatgccagtcctcttgatgc

SEQ ID NO: 1769830 - DNA, 25 bp, Homo sapien
tattttagtctggaacttccttaga

SEQ ID NO: 1769831 - DNA, 25 bp, Homo sapien
cctggaatccctccgtcttccccat

SEQ ID NO: 1769832 - DNA, 25 bp, Homo sapien
caagatttttagtaatctcattcat

SEQ ID NO: 1769833 - DNA, 25 bp, Homo sapien
aagatttttagtaatctcattcatc

SEQ ID NO: 1769834 - DNA, 25 bp, Homo sapien
gatttttagtaatctcattcatcat

SEQ ID NO: 1769835 - DNA, 25 bp, Homo sapien
agatttttagtaatctcattcatca

SEQ ID NO: 1769836 - DNA, 25 bp, Homo sapien
ggatgtaactctccgtacttccagg

SEQ ID NO: 1769837 - DNA, 25 bp, Homo sapien
tggggtccttccaaaatgttcagag

SEQ ID NO: 1769838 - DNA, 25 bp, Homo sapien
tcccaggatttattgccattcattg

SEQ ID NO: 1769839 - DNA, 25 bp, Homo sapien
ctttccagtcccaggatttattgcc

SEQ ID NO: 1769840 - DNA, 25 bp, Homo sapien
tataggactttatggttgccttggg

SEQ ID NO: 1769841 - DNA, 25 bp, Homo sapien
gactttatggttgccttggggttga

SEQ ID NO: 1769842 - DNA, 25 bp, Homo sapien
ttgtataggactttatggttgcctt

SEQ ID NO: 1769843 - DNA, 25 bp, Homo sapien
gtataggactttatggttgccttgg

SEQ ID NO: 1769844 - DNA, 25 bp, Homo sapien
taagggtacggaatagacatctgaa

SEQ ID NO: 1769845 - DNA, 25 bp, Homo sapien
tgaacctttgtcgttaagcctttgc

SEQ ID NO: 1769846 - DNA, 25 bp, Homo sapien
tgagctcatactgttctggaacaga

SEQ ID NO: 1769847 - DNA, 25 bp, Homo sapien
gaatctctgtctctctacgcatctg

SEQ ID NO: 1769848 - DNA, 25 bp, Homo sapien
tgaaacaacagacctaagttaggtg

SEQ ID NO: 1769849 - DNA, 25 bp, Homo sapien
cacaagaccaagtctcttcaaggca

SEQ ID NO: 1769850 - DNA, 25 bp, Homo sapien
agttaggtgataattgcctgtttcc

SEQ ID NO: 1769851 - DNA, 25 bp, Homo sapien
gtttcctgtctgtcccctcacaaga

SEQ ID NO: 1769852 - DNA, 25 bp, Homo sapien
tctatacaagtactccagcaaagtg

SEQ ID NO: 1769853 - DNA, 25 bp, Homo sapien
gaagcaaagaaaccgttccagtgga

SEQ ID NO: 1769854 - DNA, 25 bp, Homo sapien
aaaagggtctggtactgagtaggca

SEQ ID NO: 1769855 - DNA, 25 bp, Homo sapien
tgagcagcctaaaatgttctacgtg

SEQ ID NO: 1769856 - DNA, 25 bp, Homo sapien
agcctgcattccaattcaatgggtt

SEQ ID NO: 1769857 - DNA, 25 bp, Homo sapien
cttctctgattgtaataaggcattc

SEQ ID NO: 1769858 - DNA, 25 bp, Homo sapien
taaggcattctttggcagcctgcat

SEQ ID NO: 1769859 - DNA, 25 bp, Homo sapien
gaatcttctctgattgtaataaggc

SEQ ID NO: 1769860 - DNA, 25 bp, Homo sapien
ggactactagccaatcagttcctgg

SEQ ID NO: 1769861 - DNA, 25 bp, Homo sapien
gaggaagcaccatttgcaagttcac

SEQ ID NO: 1769862 - DNA, 25 bp, Homo sapien
tctgtttcacaatcttacaaggtgg

SEQ ID NO: 1769863 - DNA, 25 bp, Homo sapien
gctggctgttggctatggaccatct

SEQ ID NO: 1769864 - DNA, 25 bp, Homo sapien
atttgttgaatactgcattagttac

SEQ ID NO: 1769865 - DNA, 25 bp, Homo sapien
tgaatactgcattagttacttattg

SEQ ID NO: 1769866 - DNA, 25 bp, Homo sapien
tgttgaatactgcattagttactta

SEQ ID NO: 1769867 - DNA, 25 bp, Homo sapien
tagttacttattgctttgtaaagca

SEQ ID NO: 1769868 - DNA, 25 bp, Homo sapien
tggtgtcatccctatggctatgtta

SEQ ID NO: 1769869 - DNA, 25 bp, Homo sapien
gacagaattttgagccccataaccc

SEQ ID NO: 1769870 - DNA, 25 bp, Homo sapien
gaagagctccatcatatgtggtaga

SEQ ID NO: 1769871 - DNA, 25 bp, Homo sapien
taaactgaacacttaatagagaatc

SEQ ID NO: 1769872 - DNA, 25 bp, Homo sapien
actcagtagaagagcctgttctctt

SEQ ID NO: 1769873 - DNA, 25 bp, Homo sapien
ctcagtagaagagcctgttctcttc

SEQ ID NO: 1769874 - DNA, 25 bp, Homo sapien
tgccttcctgtggagtggatcagac

SEQ ID NO: 1769875 - DNA, 25 bp, Homo sapien
ttcttcagcaaagtggaactgtgaa

SEQ ID NO: 1769876 - DNA, 25 bp, Homo sapien
tacacatgctttacaccaaaaagtt

SEQ ID NO: 1769877 - DNA, 25 bp, Homo sapien
cagtaagtgtcgtctggtgcaggca

SEQ ID NO: 1769878 - DNA, 25 bp, Homo sapien
agcatttctaccctataaccttaag

SEQ ID NO: 1769879 - DNA, 25 bp, Homo sapien
agactattaaattcactgtgcaagc

SEQ ID NO: 1769880 - DNA, 25 bp, Homo sapien
caaataatgccagaccttgagccca

SEQ ID NO: 1769881 - DNA, 25 bp, Homo sapien
attgttgatgctgaaaactccagga

SEQ ID NO: 1769882 - DNA, 25 bp, Homo sapien
ccacaaccttttgctgtggagccat

SEQ ID NO: 1769883 - DNA, 25 bp, Homo sapien
tccacaaccttttgctgtggagcca

SEQ ID NO: 1769884 - DNA, 25 bp, Homo sapien
ccatccacaaccttttgctgtggag

SEQ ID NO: 1769885 - DNA, 25 bp, Homo sapien
gctccatccacaaccttttgctgtg

SEQ ID NO: 1769886 - DNA, 25 bp, Homo sapien
caatgcacctatgttctggaatcaa

SEQ ID NO: 1769887 - DNA, 25 bp, Homo sapien
taaccttgcatagtgtcaacttgcc

SEQ ID NO: 1769888 - DNA, 25 bp, Homo sapien
tgttgaaaggatagtagcaagctct

SEQ ID NO: 1769889 - DNA, 25 bp, Homo sapien
tgttttgcaggttgtattcccaggt

SEQ ID NO: 1769890 - DNA, 25 bp, Homo sapien
ctgcatccgtttctccttgcttcat

SEQ ID NO: 1769891 - DNA, 25 bp, Homo sapien
tggttgcttatattgttgtttttag

SEQ ID NO: 1769892 - DNA, 25 bp, Homo sapien
tattgttgtttttagcaatatctaa

SEQ ID NO: 1769893 - DNA, 25 bp, Homo sapien
ggttgcttatattgttgtttttagc

SEQ ID NO: 1769894 - DNA, 25 bp, Homo sapien
gcttatattgttgtttttagcaata

SEQ ID NO: 1769895 - DNA, 25 bp, Homo sapien
ggggaagctctaagatttctcctat

SEQ ID NO: 1769896 - DNA, 25 bp, Homo sapien
tttcaggggaagctctaagatttct

SEQ ID NO: 1769897 - DNA, 25 bp, Homo sapien
ggcggaaagctgaagggcgcaacat

SEQ ID NO: 1769898 - DNA, 25 bp, Homo sapien
gcgggcggaaagctgaagggcgcaa

SEQ ID NO: 1769899 - DNA, 25 bp, Homo sapien
ctgcgggcggaaagctgaagggcgc

SEQ ID NO: 1769900 - DNA, 25 bp, Homo sapien
cgggcggaaagctgaagggcgcaac

SEQ ID NO: 1769901 - DNA, 25 bp, Homo sapien
tgcagagacaggcttcggagcccgc

SEQ ID NO: 1769902 - DNA, 25 bp, Homo sapien
cagagacaggcttcggagcccgctg

SEQ ID NO: 1769903 - DNA, 25 bp, Homo sapien
gagacaggcttcggagcccgctgct

SEQ ID NO: 1769904 - DNA, 25 bp, Homo sapien
ctgcagagacaggcttcggagcccg

SEQ ID NO: 1769905 - DNA, 25 bp, Homo sapien
ggcgaggagtctgggcggcatgacc

SEQ ID NO: 1769906 - DNA, 25 bp, Homo sapien
gtgtctaggcggaaaggagcggcgc

SEQ ID NO: 1769907 - DNA, 25 bp, Homo sapien
cggcatgaccgcggtttgctgagct

SEQ ID NO: 1769908 - DNA, 25 bp, Homo sapien
caactttgaggaccgcaggggctgc

SEQ ID NO: 1769909 - DNA, 25 bp, Homo sapien
ccagatgtgtgaatcctcctcctac

SEQ ID NO: 1769910 - DNA, 25 bp, Homo sapien
cttcgcccagatgtgtgaatcctcc

SEQ ID NO: 1769911 - DNA, 25 bp, Homo sapien
tcccttcgcccagatgtgtgaatcc

SEQ ID NO: 1769912 - DNA, 25 bp, Homo sapien
cctcccttcgcccagatgtgtgaat

SEQ ID NO: 1769913 - DNA, 25 bp, Homo sapien
gacaggcattaggacctgctggcgc

SEQ ID NO: 1769914 - DNA, 25 bp, Homo sapien
tcctaggcaccctgcgttgctgggc

SEQ ID NO: 1769915 - DNA, 25 bp, Homo sapien
cctcgggcatctggcccgcgaagtt

SEQ ID NO: 1769916 - DNA, 25 bp, Homo sapien
cacataccttcactcgctcggtgca

SEQ ID NO: 1769917 - DNA, 25 bp, Homo sapien
actttatccaatcagatcgcgggga

SEQ ID NO: 1769918 - DNA, 25 bp, Homo sapien
tgccacagccagactgtcccacgtc

SEQ ID NO: 1769919 - DNA, 25 bp, Homo sapien
aggacacgcaaacctgccgagggct

SEQ ID NO: 1769920 - DNA, 25 bp, Homo sapien
actgtcccacgtcggccaccgtcga

SEQ ID NO: 1769921 - DNA, 25 bp, Homo sapien
tgcacctgccactgcaataacccat

SEQ ID NO: 1769922 - DNA, 25 bp, Homo sapien
cacagataaagataagcgtgcacct

SEQ ID NO: 1769923 - DNA, 25 bp, Homo sapien
cagttgcatgccacagataaagata

SEQ ID NO: 1769924 - DNA, 25 bp, Homo sapien
taaagataagcgtgcacctgccact

SEQ ID NO: 1769925 - DNA, 25 bp, Homo sapien
ttgcccttagggaattgaaattcag

SEQ ID NO: 1769926 - DNA, 25 bp, Homo sapien
aaattcagagacatgacgttttcca

SEQ ID NO: 1769927 - DNA, 25 bp, Homo sapien
tccttgcccctttgcaactgtacaa

SEQ ID NO: 1769928 - DNA, 25 bp, Homo sapien
cctcaaaaagtacatagaattctcc

SEQ ID NO: 1769929 - DNA, 25 bp, Homo sapien
gtttggcagacttagcctaatgggt

SEQ ID NO: 1769930 - DNA, 25 bp, Homo sapien
gaaaacctttatacagtttggcaga

SEQ ID NO: 1769931 - DNA, 25 bp, Homo sapien
catacatttgccataagaaagccct

SEQ ID NO: 1769932 - DNA, 25 bp, Homo sapien
caaaatgtcatacagacctagtgca

SEQ ID NO: 1769933 - DNA, 25 bp, Homo sapien
gcctggtggcacataaagtctgaat

SEQ ID NO: 1769934 - DNA, 25 bp, Homo sapien
taaatggtcaaaacaccgtgtctgg

SEQ ID NO: 1769935 - DNA, 25 bp, Homo sapien
tctgcatctgcgttaacatggctgc

SEQ ID NO: 1769936 - DNA, 25 bp, Homo sapien
taagtgatggtgcaactctccaaga

SEQ ID NO: 1769937 - DNA, 25 bp, Homo sapien
aattcttagaaagttgggtgctgac

SEQ ID NO: 1769938 - DNA, 25 bp, Homo sapien
tcttagaaagttgggtgctgacgga

SEQ ID NO: 1769939 - DNA, 25 bp, Homo sapien
gctgacggagaaataattggttctc

SEQ ID NO: 1769940 - DNA, 25 bp, Homo sapien
tgctgacggagaaataattggttct

SEQ ID NO: 1769941 - DNA, 25 bp, Homo sapien
gtcatcttagagctctcataagccc

SEQ ID NO: 1769942 - DNA, 25 bp, Homo sapien
tcatcttagagctctcataagccct

SEQ ID NO: 1769943 - DNA, 25 bp, Homo sapien
tagagctctcataagccctcacaag

SEQ ID NO: 1769944 - DNA, 25 bp, Homo sapien
tcttagagctctcataagccctcac

SEQ ID NO: 1769945 - DNA, 25 bp, Homo sapien
atcttcttttactttcatcctgttt

SEQ ID NO: 1769946 - DNA, 25 bp, Homo sapien
cttccaatcttcttttactttcatc

SEQ ID NO: 1769947 - DNA, 25 bp, Homo sapien
ccaatcttcttttactttcatcctg

SEQ ID NO: 1769948 - DNA, 25 bp, Homo sapien
caatcttcttttactttcatcctgt

SEQ ID NO: 1769949 - DNA, 25 bp, Homo sapien
gggcatctccaagggcatgtccaga

SEQ ID NO: 1769950 - DNA, 25 bp, Homo sapien
ccagctttccgttgcgttgctttaa

SEQ ID NO: 1769951 - DNA, 25 bp, Homo sapien
tttaacatctctttactggaagtgc

SEQ ID NO: 1769952 - DNA, 25 bp, Homo sapien
tttaattgggagctgttcttcttcc

SEQ ID NO: 1769953 - DNA, 25 bp, Homo sapien
tctggcacaaccacctagatcctgg

SEQ ID NO: 1769954 - DNA, 25 bp, Homo sapien
cagagggagcatactggttccacca

SEQ ID NO: 1769955 - DNA, 25 bp, Homo sapien
caaggagagattctggtctggcaca

SEQ ID NO: 1769956 - DNA, 25 bp, Homo sapien
tgtcctcggtgtaaaccatcagctg

SEQ ID NO: 1769957 - DNA, 25 bp, Homo sapien
tatcctggctgtacgttacttatca

SEQ ID NO: 1769958 - DNA, 25 bp, Homo sapien
gatatttccgaatactacagcttag

SEQ ID NO: 1769959 - DNA, 25 bp, Homo sapien
gagatactgttgtatccaggacgta

SEQ ID NO: 1769960 - DNA, 25 bp, Homo sapien
gatagaagccagcactaagtttcca

SEQ ID NO: 1769961 - DNA, 25 bp, Homo sapien
gagctgatggtaccctcccaaaatg

SEQ ID NO: 1769962 - DNA, 25 bp, Homo sapien
caaagtatcaaaggtcatgcagtta

SEQ ID NO: 1769963 - DNA, 25 bp, Homo sapien
taataaggccctcaaaggcaagtga

SEQ ID NO: 1769964 - DNA, 25 bp, Homo sapien
actttgtgagatccgtctgtctgga

SEQ ID NO: 1769965 - DNA, 25 bp, Homo sapien
tgatagcttgtaacagggaacctga

SEQ ID NO: 1769966 - DNA, 25 bp, Homo sapien
gaatgccaggcatagtttggaggac

SEQ ID NO: 1769967 - DNA, 25 bp, Homo sapien
caagagcagatagggatttcacaca

SEQ ID NO: 1769968 - DNA, 25 bp, Homo sapien
caggtaccagtctctattggaatca

SEQ ID NO: 1769969 - DNA, 25 bp, Homo sapien
agctacagatttaccagagctggtc

SEQ ID NO: 1769970 - DNA, 25 bp, Homo sapien
aattaatatctctacaaacctgcag

SEQ ID NO: 1769971 - DNA, 25 bp, Homo sapien
gagataacagcagttcattccccag

SEQ ID NO: 1769972 - DNA, 25 bp, Homo sapien
aaaagccgatagctacagatttacc

SEQ ID NO: 1769973 - DNA, 25 bp, Homo sapien
attgaagagtaaacaccacacttgc

SEQ ID NO: 1769974 - DNA, 25 bp, Homo sapien
ccaaaattgaagagtaaacaccaca

SEQ ID NO: 1769975 - DNA, 25 bp, Homo sapien
tctgtgtctgcacatagagagtctc

SEQ ID NO: 1769976 - DNA, 25 bp, Homo sapien
tgtctgcacatagagagtctcttcc

SEQ ID NO: 1769977 - DNA, 25 bp, Homo sapien
taagcagcataaactagctgctgcc

SEQ ID NO: 1769978 - DNA, 25 bp, Homo sapien
aagcagcataaactagctgctgccc

SEQ ID NO: 1769979 - DNA, 25 bp, Homo sapien
cagcataaactagctgctgccctct

SEQ ID NO: 1769980 - DNA, 25 bp, Homo sapien
ctggacttgaagcagggcaggatag

SEQ ID NO: 1769981 - DNA, 25 bp, Homo sapien
ccagggaaaatgtattctcggtgtg

SEQ ID NO: 1769982 - DNA, 25 bp, Homo sapien
cagggaaaatgtattctcggtgtgt

SEQ ID NO: 1769983 - DNA, 25 bp, Homo sapien
ccagttcttcggatgttttaggatt

SEQ ID NO: 1769984 - DNA, 25 bp, Homo sapien
tgatgaatgtacagacttcattaat

SEQ ID NO: 1769985 - DNA, 25 bp, Homo sapien
taaagatgaccaatcaatcacagac

SEQ ID NO: 1769986 - DNA, 25 bp, Homo sapien
ttcaggatcttccagttcttcggat

SEQ ID NO: 1769987 - DNA, 25 bp, Homo sapien
tgcattttcactcaaatgtaagtta

SEQ ID NO: 1769988 - DNA, 25 bp, Homo sapien
tttaaataatgtatgacactattat

SEQ ID NO: 1769989 - DNA, 25 bp, Homo sapien
caattaacaataatacacacagtat

SEQ ID NO: 1769990 - DNA, 25 bp, Homo sapien
tacacacagtattttgcattcaaat

SEQ ID NO: 1769991 - DNA, 25 bp, Homo sapien
cgtttcaccagcttagtttctggct

SEQ ID NO: 1769992 - DNA, 25 bp, Homo sapien
gattgtggtgttctgtgaatttact

SEQ ID NO: 1769993 - DNA, 25 bp, Homo sapien
caccagcttagtttctggctgattg

SEQ ID NO: 1769994 - DNA, 25 bp, Homo sapien
tttctggctgattgtggtgttctgt

SEQ ID NO: 1769995 - DNA, 25 bp, Homo sapien
tactaagtaagaggcaatggtgaac

SEQ ID NO: 1769996 - DNA, 25 bp, Homo sapien
tgcatcacggaaaacacatttgtct

SEQ ID NO: 1769997 - DNA, 25 bp, Homo sapien
gactggcagcagttcttgcatcacg

SEQ ID NO: 1769998 - DNA, 25 bp, Homo sapien
aaaaatgacctctgattggcaggct

SEQ ID NO: 1769999 - DNA, 25 bp, Homo sapien
tcacaaatacagactcatcattacc

SEQ ID NO: 1770000 - DNA, 25 bp, Homo sapien
gaggcaaagtactgaactgtcaatt

SEQ ID NO: 1770001 - DNA, 25 bp, Homo sapien
caaagtactgaactgtcaattcttc

SEQ ID NO: 1770002 - DNA, 25 bp, Homo sapien
ctgaactgtcaattcttcttctaag

SEQ ID NO: 1770003 - DNA, 25 bp, Homo sapien
attcaacccacagtccacattcagt

SEQ ID NO: 1770004 - DNA, 25 bp, Homo sapien
gggaataagcaccaatgtttgggca

SEQ ID NO: 1770005 - DNA, 25 bp, Homo sapien
ctggtctttggaagttagagcacta

SEQ ID NO: 1770006 - DNA, 25 bp, Homo sapien
ctaagtattgctgaacagcattcaa

SEQ ID NO: 1770007 - DNA, 25 bp, Homo sapien
gcaagggttttcatcctatcgatag

SEQ ID NO: 1770008 - DNA, 25 bp, Homo sapien
gctgccaattttcaaggcaagggtt

SEQ ID NO: 1770009 - DNA, 25 bp, Homo sapien
gatagtgtaactaaatcagggctta

SEQ ID NO: 1770010 - DNA, 25 bp, Homo sapien
aaaaatgcgtataatagactggaag

SEQ ID NO: 1770011 - DNA, 25 bp, Homo sapien
gctcagctagctaggcttacatcca

SEQ ID NO: 1770012 - DNA, 25 bp, Homo sapien
taaattgttagcctgaaagtagaga

SEQ ID NO: 1770013 - DNA, 25 bp, Homo sapien
caacacgcaatccaaaaagaactca

SEQ ID NO: 1770014 - DNA, 25 bp, Homo sapien
gaggatgaagatttacaacacgcaa

SEQ ID NO: 1770015 - DNA, 25 bp, Homo sapien
gagttagtgtctcccatggaaacag

SEQ ID NO: 1770016 - DNA, 25 bp, Homo sapien
gcagctttgtttatggcccaatata

SEQ ID NO: 1770017 - DNA, 25 bp, Homo sapien
cacatttctgtacatattgagagca

SEQ ID NO: 1770018 - DNA, 25 bp, Homo sapien
tatgtcaaccccaaagcacttggag

SEQ ID NO: 1770019 - DNA, 25 bp, Homo sapien
cacagagactcacacatggcgagac

SEQ ID NO: 1770020 - DNA, 25 bp, Homo sapien
ccctagattaggtctgggtggccag

SEQ ID NO: 1770021 - DNA, 25 bp, Homo sapien
tccagtggaacacataaagaggccc

SEQ ID NO: 1770022 - DNA, 25 bp, Homo sapien
actgatggtgtagagccttgtagcc

SEQ ID NO: 1770023 - DNA, 25 bp, Homo sapien
catcatcttcttcgttcttctgcat

SEQ ID NO: 1770024 - DNA, 25 bp, Homo sapien
ttctttcatcatcttcttcgttctt

SEQ ID NO: 1770025 - DNA, 25 bp, Homo sapien
ttcatcatcttcttcgttcttctgc

SEQ ID NO: 1770026 - DNA, 25 bp, Homo sapien
ttcatatccaccttttctttcatca

SEQ ID NO: 1770027 - DNA, 25 bp, Homo sapien
agattcactattgcgttctctcatt

SEQ ID NO: 1770028 - DNA, 25 bp, Homo sapien
ttaagattcactattgcgttctctc

SEQ ID NO: 1770029 - DNA, 25 bp, Homo sapien
catttaggacagtaatttgtgaatt

SEQ ID NO: 1770030 - DNA, 25 bp, Homo sapien
tttctccatttaggacagtaatttg

SEQ ID NO: 1770031 - DNA, 25 bp, Homo sapien
tatgcatgatgctaacaggtttaag

SEQ ID NO: 1770032 - DNA, 25 bp, Homo sapien
gatcatgagacatgtcttctaggga

SEQ ID NO: 1770033 - DNA, 25 bp, Homo sapien
tacccctttggcaatcacaatggaa

SEQ ID NO: 1770034 - DNA, 25 bp, Homo sapien
aaagccaaacccaatagagaatcca

SEQ ID NO: 1770035 - DNA, 25 bp, Homo sapien
gaagaacttgcattgttgcctagga

SEQ ID NO: 1770036 - DNA, 25 bp, Homo sapien
cacgttagtgcctgtggctcaagca

SEQ ID NO: 1770037 - DNA, 25 bp, Homo sapien
tacaccgtgtatcagaggtccatca

SEQ ID NO: 1770038 - DNA, 25 bp, Homo sapien
tgcctaggatgctaatccccgaaaa

SEQ ID NO: 1770039 - DNA, 25 bp, Homo sapien
tccagatgactaggatttacactga

SEQ ID NO: 1770040 - DNA, 25 bp, Homo sapien
tgatccagatgactaggatttacac

SEQ ID NO: 1770041 - DNA, 25 bp, Homo sapien
gatccagatgactaggatttacact

SEQ ID NO: 1770042 - DNA, 25 bp, Homo sapien
ctgatccagatgactaggatttaca

SEQ ID NO: 1770043 - DNA, 25 bp, Homo sapien
caggtgtaattaatgtcaagtgctc

SEQ ID NO: 1770044 - DNA, 25 bp, Homo sapien
gggcgagaattccaacaggtgtaat

SEQ ID NO: 1770045 - DNA, 25 bp, Homo sapien
tgctctcagtgcaagtgctccattt

SEQ ID NO: 1770046 - DNA, 25 bp, Homo sapien
cctgcaagtggctgcgctttccagc

SEQ ID NO: 1770047 - DNA, 25 bp, Homo sapien
ggctcctattttggacatgtgatta

SEQ ID NO: 1770048 - DNA, 25 bp, Homo sapien
gccccaagatggaatcatctggacc

SEQ ID NO: 1770049 - DNA, 25 bp, Homo sapien
tgattaattgaagggcatgagccag

SEQ ID NO: 1770050 - DNA, 25 bp, Homo sapien
ggaccactataagtaatagcacccg

SEQ ID NO: 1770051 - DNA, 25 bp, Homo sapien
gtagatatttgcaggagataattgg

SEQ ID NO: 1770052 - DNA, 25 bp, Homo sapien
ttctgtagatatttgcaggagataa

SEQ ID NO: 1770053 - DNA, 25 bp, Homo sapien
agatatttgcaggagataattggat

SEQ ID NO: 1770054 - DNA, 25 bp, Homo sapien
ctaacgaacaattctgtagatattt

SEQ ID NO: 1770055 - DNA, 25 bp, Homo sapien
tgcagggtgtgcttggtcttgctct

SEQ ID NO: 1770056 - DNA, 25 bp, Homo sapien
tgctctccctctttgagaacattaa

SEQ ID NO: 1770057 - DNA, 25 bp, Homo sapien
cgcagacaagtctatcaagagctga

SEQ ID NO: 1770058 - DNA, 25 bp, Homo sapien
gccatttgaagcagcatggaccaaa

SEQ ID NO: 1770059 - DNA, 25 bp, Homo sapien
tcaagaaatccctagaatatggctc

SEQ ID NO: 1770060 - DNA, 25 bp, Homo sapien
tagaatatggctcctctgaaggttg

SEQ ID NO: 1770061 - DNA, 25 bp, Homo sapien
aggttgacatgggtctgcctcgcat

SEQ ID NO: 1770062 - DNA, 25 bp, Homo sapien
aacaactctacaaatatcaggcttc

SEQ ID NO: 1770063 - DNA, 25 bp, Homo sapien
agttgtctagtaagaggccagtgca

SEQ ID NO: 1770064 - DNA, 25 bp, Homo sapien
tctgtctgtaaaggccaggtcctct

SEQ ID NO: 1770065 - DNA, 25 bp, Homo sapien
ttttgtcaccaacaaggctcgtcct

SEQ ID NO: 1770066 - DNA, 25 bp, Homo sapien
cagttcgttctgttggaggctttca

SEQ ID NO: 1770067 - DNA, 25 bp, Homo sapien
tatgtatataccatcaccctatata

SEQ ID NO: 1770068 - DNA, 25 bp, Homo sapien
aaaacagtgtcaaaagacaggtggc

SEQ ID NO: 1770069 - DNA, 25 bp, Homo sapien
tgagaataattgtagagcagtcatt

SEQ ID NO: 1770070 - DNA, 25 bp, Homo sapien
tctgtcaatggacagttagggtgtt

SEQ ID NO: 1770071 - DNA, 25 bp, Homo sapien
tggatttgaaaccaaccctctgtaa

SEQ ID NO: 1770072 - DNA, 25 bp, Homo sapien
catggatttgaaaccaaccctctgt

SEQ ID NO: 1770073 - DNA, 25 bp, Homo sapien
atggatttgaaaccaaccctctgta

SEQ ID NO: 1770074 - DNA, 25 bp, Homo sapien
tgggcattacactttatctgggact

SEQ ID NO: 1770075 - DNA, 25 bp, Homo sapien
agttgagtaaaagctagtggcttcc

SEQ ID NO: 1770076 - DNA, 25 bp, Homo sapien
caaaccatcagttgccactttgaag

SEQ ID NO: 1770077 - DNA, 25 bp, Homo sapien
tggaagacgatgaaatgttaagaac

SEQ ID NO: 1770078 - DNA, 25 bp, Homo sapien
tatcacatccctaaacataaatctt

SEQ ID NO: 1770079 - DNA, 25 bp, Homo sapien
gacgatttttctatatcaatcctat

SEQ ID NO: 1770080 - DNA, 25 bp, Homo sapien
ggtatgtacaagtgcagaatatagt

SEQ ID NO: 1770081 - DNA, 25 bp, Homo sapien
tagtacactactagcagaagctgct

SEQ ID NO: 1770082 - DNA, 25 bp, Homo sapien
caaatgctgtcaattactgcggccc

SEQ ID NO: 1770083 - DNA, 25 bp, Homo sapien
gcaaagcactttccgtcacaataga

SEQ ID NO: 1770084 - DNA, 25 bp, Homo sapien
tacagataaagcttcgctcggtctc

SEQ ID NO: 1770085 - DNA, 25 bp, Homo sapien
aatggactggtcctagtctgtgacc

SEQ ID NO: 1770086 - DNA, 25 bp, Homo sapien
gtttaaaaagatgggttcagcactc

SEQ ID NO: 1770087 - DNA, 25 bp, Homo sapien
tattgctttgtagtccccacttgtg

SEQ ID NO: 1770088 - DNA, 25 bp, Homo sapien
tcttagacctcttaatgaatagtcc

SEQ ID NO: 1770089 - DNA, 25 bp, Homo sapien
caaactgtaaggttcatagaaagat

SEQ ID NO: 1770090 - DNA, 25 bp, Homo sapien
ccaacagtgttgcagaatgggcttt

SEQ ID NO: 1770091 - DNA, 25 bp, Homo sapien
tataagaagaccatgcattcagtgc

SEQ ID NO: 1770092 - DNA, 25 bp, Homo sapien
tattactactaagccaacagagagg

SEQ ID NO: 1770093 - DNA, 25 bp, Homo sapien
tctttcgtttagtgggaggatgctc

SEQ ID NO: 1770094 - DNA, 25 bp, Homo sapien
gcctccttctaaacaagtggttaga

SEQ ID NO: 1770095 - DNA, 25 bp, Homo sapien
tatccgaaagtcagtttgtctcaga

SEQ ID NO: 1770096 - DNA, 25 bp, Homo sapien
gaaatggactctcccaagcctcctt

SEQ ID NO: 1770097 - DNA, 25 bp, Homo sapien
tgaggtccagtcatgctatccgaaa

SEQ ID NO: 1770098 - DNA, 25 bp, Homo sapien
gccccaaaatagcttgatccttgca

SEQ ID NO: 1770099 - DNA, 25 bp, Homo sapien
ttgatccttgcatttagagtgtagc

SEQ ID NO: 1770100 - DNA, 25 bp, Homo sapien
ttcagtgctgtaactctgatccaga

SEQ ID NO: 1770101 - DNA, 25 bp, Homo sapien
caaccagaggaaagcatccaatgag

SEQ ID NO: 1770102 - DNA, 25 bp, Homo sapien
taggttcttctatccacccatataa

SEQ ID NO: 1770103 - DNA, 25 bp, Homo sapien
ttctatccacccatataatgattac

SEQ ID NO: 1770104 - DNA, 25 bp, Homo sapien
taataggttcttctatccacccata

SEQ ID NO: 1770105 - DNA, 25 bp, Homo sapien
gttcttctatccacccatataatga

SEQ ID NO: 1770106 - DNA, 25 bp, Homo sapien
cttctctccatcccgtactctccct

SEQ ID NO: 1770107 - DNA, 25 bp, Homo sapien
cttttcagttggcctccattggaat

SEQ ID NO: 1770108 - DNA, 25 bp, Homo sapien
tttcagttggcctccattggaattt

SEQ ID NO: 1770109 - DNA, 25 bp, Homo sapien
ctccatcccgtactctccctctctt

SEQ ID NO: 1770110 - DNA, 25 bp, Homo sapien
tatgaacaaattactgcctgagtca

SEQ ID NO: 1770111 - DNA, 25 bp, Homo sapien
ctgacgcttcttgccagcaacaagg

SEQ ID NO: 1770112 - DNA, 25 bp, Homo sapien
catttgattgctgatatacactacc

SEQ ID NO: 1770113 - DNA, 25 bp, Homo sapien
ttgaagctgcggatttaagttgtgc

SEQ ID NO: 1770114 - DNA, 25 bp, Homo sapien
tgatcaaacctactggcttgcccaa

SEQ ID NO: 1770115 - DNA, 25 bp, Homo sapien
cagccagagacaatatgcaaatgag

SEQ ID NO: 1770116 - DNA, 25 bp, Homo sapien
cataatatatggagggtgatcaaac

SEQ ID NO: 1770117 - DNA, 25 bp, Homo sapien
gcaaacttcgccacggtagcaagaa

SEQ ID NO: 1770118 - DNA, 25 bp, Homo sapien
ggatcaaggtgtctctgaaagccaa

SEQ ID NO: 1770119 - DNA, 25 bp, Homo sapien
ggccctaggcataacaggatcaagg

SEQ ID NO: 1770120 - DNA, 25 bp, Homo sapien
ctgtgactggcataggccctaggca

SEQ ID NO: 1770121 - DNA, 25 bp, Homo sapien
tgattgtctcttctgatgcttggtc

SEQ ID NO: 1770122 - DNA, 25 bp, Homo sapien
caatctgtgggattttcatggtcca

SEQ ID NO: 1770123 - DNA, 25 bp, Homo sapien
catgtcacatatggaaaggcagcta

SEQ ID NO: 1770124 - DNA, 25 bp, Homo sapien
aagcaggtgcgttagattagaaagc

SEQ ID NO: 1770125 - DNA, 25 bp, Homo sapien
tcataggcctgggtaagcgggaact

SEQ ID NO: 1770126 - DNA, 25 bp, Homo sapien
tagaatatgctctgcactaaaagga

SEQ ID NO: 1770127 - DNA, 25 bp, Homo sapien
tagagtggttacagaagcaaaagga

SEQ ID NO: 1770128 - DNA, 25 bp, Homo sapien
caataactctatagtgccttctgga

SEQ ID NO: 1770129 - DNA, 25 bp, Homo sapien
caggacctatttattgctgagaggt

SEQ ID NO: 1770130 - DNA, 25 bp, Homo sapien
gaaaatgcccattacaagatacctc

SEQ ID NO: 1770131 - DNA, 25 bp, Homo sapien
tgagtagcagacacgaaaacaggtt

SEQ ID NO: 1770132 - DNA, 25 bp, Homo sapien
tctgttctaggaagggtgcccagct

SEQ ID NO: 1770133 - DNA, 25 bp, Homo sapien
tcttctggcctaagaaagctgcgtt

SEQ ID NO: 1770134 - DNA, 25 bp, Homo sapien
taccaaaattgtctcttggtagagg

SEQ ID NO: 1770135 - DNA, 25 bp, Homo sapien
agttccttgaagttcgatctggtac

SEQ ID NO: 1770136 - DNA, 25 bp, Homo sapien
ttcgatctggtaccaaaattgtctc

SEQ ID NO: 1770137 - DNA, 25 bp, Homo sapien
caaaattgtctcttggtagaggtct

SEQ ID NO: 1770138 - DNA, 25 bp, Homo sapien
cagagttcaagcttaattcaaagtt

SEQ ID NO: 1770139 - DNA, 25 bp, Homo sapien
catatcagagttcaagcttaattca

SEQ ID NO: 1770140 - DNA, 25 bp, Homo sapien
atggccatatcagagttcaagctta

SEQ ID NO: 1770141 - DNA, 25 bp, Homo sapien
tggccatatcagagttcaagcttaa

SEQ ID NO: 1770142 - DNA, 25 bp, Homo sapien
tcatcaactaccacctcagcaacac

SEQ ID NO: 1770143 - DNA, 25 bp, Homo sapien
tcaactaccacctcagcaacacaaa

SEQ ID NO: 1770144 - DNA, 25 bp, Homo sapien
actaccacctcagcaacacaaacat

SEQ ID NO: 1770145 - DNA, 25 bp, Homo sapien
catcatcatcaactaccacctcagc

SEQ ID NO: 1770146 - DNA, 25 bp, Homo sapien
gacaatataataagagaaacctaat

SEQ ID NO: 1770147 - DNA, 25 bp, Homo sapien
cttagcaacgtttttgctgtatccc

SEQ ID NO: 1770148 - DNA, 25 bp, Homo sapien
tttggtaagttgtgtcactattact

SEQ ID NO: 1770149 - DNA, 25 bp, Homo sapien
gtgtcactattactgttctgtgcaa

SEQ ID NO: 1770150 - DNA, 25 bp, Homo sapien
atggcctttcttcttagcaacgttt

SEQ ID NO: 1770151 - DNA, 25 bp, Homo sapien
tcctgatttcccctaaattccaagc

SEQ ID NO: 1770152 - DNA, 25 bp, Homo sapien
tctgggcttcccgttgttactatag

SEQ ID NO: 1770153 - DNA, 25 bp, Homo sapien
cattggcctgttcattctttacctc

SEQ ID NO: 1770154 - DNA, 25 bp, Homo sapien
taccatcatgtgtcagttccccaaa

SEQ ID NO: 1770155 - DNA, 25 bp, Homo sapien
gaatgtttggcatatccctgaagta

SEQ ID NO: 1770156 - DNA, 25 bp, Homo sapien
gagatcttcaaggttcccaggtaga

SEQ ID NO: 1770157 - DNA, 25 bp, Homo sapien
gatctgtcaggatacacattaggcc

SEQ ID NO: 1770158 - DNA, 25 bp, Homo sapien
tgagatttcctagatgaaacccagc

SEQ ID NO: 1770159 - DNA, 25 bp, Homo sapien
gattagaattaatgccttaggcaag

SEQ ID NO: 1770160 - DNA, 25 bp, Homo sapien
tcttaaaagcaatgtattcccatgt

SEQ ID NO: 1770161 - DNA, 25 bp, Homo sapien
tacaaatgtcactagagaactgtac

SEQ ID NO: 1770162 - DNA, 25 bp, Homo sapien
gaagaaagcccattatgtcaagcag

SEQ ID NO: 1770163 - DNA, 25 bp, Homo sapien
tctggaactgtagctttcagaagtt

SEQ ID NO: 1770164 - DNA, 25 bp, Homo sapien
ccttttgttactctggaactgtagc

SEQ ID NO: 1770165 - DNA, 25 bp, Homo sapien
ttgccatacggccttttactagacg

SEQ ID NO: 1770166 - DNA, 25 bp, Homo sapien
catacggccttttactagacgaatt

SEQ ID NO: 1770167 - DNA, 25 bp, Homo sapien
tgcctctacaatagcagtgtcttgt

SEQ ID NO: 1770168 - DNA, 25 bp, Homo sapien
ttaatggaattcttgcaatgcctct

SEQ ID NO: 1770169 - DNA, 25 bp, Homo sapien
acaatagcagtgtcttgtataaata

SEQ ID NO: 1770170 - DNA, 25 bp, Homo sapien
tcttgcaatgcctctacaatagcag

SEQ ID NO: 1770171 - DNA, 25 bp, Homo sapien
tatctttcatgaaaacggtgttaac

SEQ ID NO: 1770172 - DNA, 25 bp, Homo sapien
tagataaataatcaggatcctgtac

SEQ ID NO: 1770173 - DNA, 25 bp, Homo sapien
ggagtaacaggttctagagctgcac

SEQ ID NO: 1770174 - DNA, 25 bp, Homo sapien
catttgtccttgcttgacaatctca

SEQ ID NO: 1770175 - DNA, 25 bp, Homo sapien
ttgaatagttccaaacaaaccaaga

SEQ ID NO: 1770176 - DNA, 25 bp, Homo sapien
cctgttatgtaacgaggtctatatt

SEQ ID NO: 1770177 - DNA, 25 bp, Homo sapien
caagaatgacgataataatatgtac

SEQ ID NO: 1770178 - DNA, 25 bp, Homo sapien
taggtgcccactgatatccaaggaa

SEQ ID NO: 1770179 - DNA, 25 bp, Homo sapien
tgccatggggatcctttaccatgtt

SEQ ID NO: 1770180 - DNA, 25 bp, Homo sapien
atgccatggggatcctttaccatgt

SEQ ID NO: 1770181 - DNA, 25 bp, Homo sapien
ccatggggatcctttaccatgttgg

SEQ ID NO: 1770182 - DNA, 25 bp, Homo sapien
catggggatcctttaccatgttggc

SEQ ID NO: 1770183 - DNA, 25 bp, Homo sapien
tagatgtaatctttagaaactgact

SEQ ID NO: 1770184 - DNA, 25 bp, Homo sapien
tttcacataagtaaacgtagtagat

SEQ ID NO: 1770185 - DNA, 25 bp, Homo sapien
taagtaaacgtagtagatgtaatct

SEQ ID NO: 1770186 - DNA, 25 bp, Homo sapien
cgtagtagatgtaatctttagaaac

SEQ ID NO: 1770187 - DNA, 25 bp, Homo sapien
ccccatctttcctctaaggtcacca

SEQ ID NO: 1770188 - DNA, 25 bp, Homo sapien
gagcaatgctcaatccccaaaatgg

SEQ ID NO: 1770189 - DNA, 25 bp, Homo sapien
ttgataagaccaacagccagtcagt

SEQ ID NO: 1770190 - DNA, 25 bp, Homo sapien
cactgatggtgaattgggatggcac

SEQ ID NO: 1770191 - DNA, 25 bp, Homo sapien
gatcccttgcatccttgaagtcgga

SEQ ID NO: 1770192 - DNA, 25 bp, Homo sapien
agccttagttcttaagtgcaagctt

SEQ ID NO: 1770193 - DNA, 25 bp, Homo sapien
ttagttcttaagtgcaagctttgaa

SEQ ID NO: 1770194 - DNA, 25 bp, Homo sapien
ccttagttcttaagtgcaagctttg

SEQ ID NO: 1770195 - DNA, 25 bp, Homo sapien
cttagttcttaagtgcaagctttga

SEQ ID NO: 1770196 - DNA, 25 bp, Homo sapien
taaaacgaatggacttaaaagcatg

SEQ ID NO: 1770197 - DNA, 25 bp, Homo sapien
gaatcaagcttaaaacgaatggact

SEQ ID NO: 1770198 - DNA, 25 bp, Homo sapien
acgaatggacttaaaagcatgcggg

SEQ ID NO: 1770199 - DNA, 25 bp, Homo sapien
tccagaagagatgaatcaagcttaa

SEQ ID NO: 1770200 - DNA, 25 bp, Homo sapien
acgtaacccagaggactagccagac

SEQ ID NO: 1770201 - DNA, 25 bp, Homo sapien
acaaacacattccacgtaacccaga

SEQ ID NO: 1770202 - DNA, 25 bp, Homo sapien
cattccacgtaacccagaggactag

SEQ ID NO: 1770203 - DNA, 25 bp, Homo sapien
cccagaggactagccagacagcata

SEQ ID NO: 1770204 - DNA, 25 bp, Homo sapien
taaccagagtgtggggaacgatgcc

SEQ ID NO: 1770205 - DNA, 25 bp, Homo sapien
cctcctagagccactgaacaattta

SEQ ID NO: 1770206 - DNA, 25 bp, Homo sapien
tgcctgctaaccagagtgtggggaa

SEQ ID NO: 1770207 - DNA, 25 bp, Homo sapien
cattggtcacggcaccttcctgaaa

SEQ ID NO: 1770208 - DNA, 25 bp, Homo sapien
ggtcacagcctttgcgagtgcctat

SEQ ID NO: 1770209 - DNA, 25 bp, Homo sapien
taaggactaattgagggcaccaaac

SEQ ID NO: 1770210 - DNA, 25 bp, Homo sapien
gatgacatttttgacgtagctccta

SEQ ID NO: 1770211 - DNA, 25 bp, Homo sapien
tatgtagcacactatgatgccgcag

SEQ ID NO: 1770212 - DNA, 25 bp, Homo sapien
tctctgtttgataaacatggctcct

SEQ ID NO: 1770213 - DNA, 25 bp, Homo sapien
cactctctgtttgataaacatggct

SEQ ID NO: 1770214 - DNA, 25 bp, Homo sapien
gatttgcagttctggtgctttcttc

SEQ ID NO: 1770215 - DNA, 25 bp, Homo sapien
tccactctctgtttgataaacatgg

SEQ ID NO: 1770216 - DNA, 25 bp, Homo sapien
catggaacttacaatggccttgtgc

SEQ ID NO: 1770217 - DNA, 25 bp, Homo sapien
ggccttgtgctatatcccctggcat

SEQ ID NO: 1770218 - DNA, 25 bp, Homo sapien
tacaatggccttgtgctatatcccc

SEQ ID NO: 1770219 - DNA, 25 bp, Homo sapien
cccctggcattgcagggtctacagg

SEQ ID NO: 1770220 - DNA, 25 bp, Homo sapien
gaagtccaagcccatattatcactc

SEQ ID NO: 1770221 - DNA, 25 bp, Homo sapien
tgacgatgttcaggaagtccaagcc

SEQ ID NO: 1770222 - DNA, 25 bp, Homo sapien
aagagattagagagacctgactgac

SEQ ID NO: 1770223 - DNA, 25 bp, Homo sapien
cctgactgacgatgttcaggaagtc

SEQ ID NO: 1770224 - DNA, 25 bp, Homo sapien
taatgatctctggcctgaattgctg

SEQ ID NO: 1770225 - DNA, 25 bp, Homo sapien
aatgatctctggcctgaattgctga

SEQ ID NO: 1770226 - DNA, 25 bp, Homo sapien
tactctccatcagcaactctgattc

SEQ ID NO: 1770227 - DNA, 25 bp, Homo sapien
cctctgcttcgctaaggaatctgtg

SEQ ID NO: 1770228 - DNA, 25 bp, Homo sapien
tctgcttcgctaaggaatctgtgtt

SEQ ID NO: 1770229 - DNA, 25 bp, Homo sapien
tctatcctctgcttcgctaaggaat

SEQ ID NO: 1770230 - DNA, 25 bp, Homo sapien
taattctatcctctgcttcgctaag

SEQ ID NO: 1770231 - DNA, 25 bp, Homo sapien
cacttaacctcatgaatggccagtt

SEQ ID NO: 1770232 - DNA, 25 bp, Homo sapien
gaagcccaggtctaaatgcactcat

SEQ ID NO: 1770233 - DNA, 25 bp, Homo sapien
cagctaccgtatcccatgcgttgag

SEQ ID NO: 1770234 - DNA, 25 bp, Homo sapien
gaacttaccatcagaccgttacctg

SEQ ID NO: 1770235 - DNA, 25 bp, Homo sapien
tattgatctaacatgcacaagaagc

SEQ ID NO: 1770236 - DNA, 25 bp, Homo sapien
tagctggttgattatggatctggaa

SEQ ID NO: 1770237 - DNA, 25 bp, Homo sapien
gcaaagggcttagctggttgattat

SEQ ID NO: 1770238 - DNA, 25 bp, Homo sapien
ctggattggtggcatgttaatgact

SEQ ID NO: 1770239 - DNA, 25 bp, Homo sapien
gttaactgacaagggcttgtacgca

SEQ ID NO: 1770240 - DNA, 25 bp, Homo sapien
cctctttgttaactgacaagggctt

SEQ ID NO: 1770241 - DNA, 25 bp, Homo sapien
tgacaagggcttgtacgcatatgtg

SEQ ID NO: 1770242 - DNA, 25 bp, Homo sapien
gggcttgtacgcatatgtgagtgct

SEQ ID NO: 1770243 - DNA, 25 bp, Homo sapien
atttttccatacaaccctttcacag

SEQ ID NO: 1770244 - DNA, 25 bp, Homo sapien
ggcaaatgctctcttaatgccatga

SEQ ID NO: 1770245 - DNA, 25 bp, Homo sapien
ccatgatgtttacaggttgacagca

SEQ ID NO: 1770246 - DNA, 25 bp, Homo sapien
tctatttatgaagttacacaggcta

SEQ ID NO: 1770247 - DNA, 25 bp, Homo sapien
catccagggatttgtgcttgaattg

SEQ ID NO: 1770248 - DNA, 25 bp, Homo sapien
gcttgaattgggattctaaatccaa

SEQ ID NO: 1770249 - DNA, 25 bp, Homo sapien
aaatccaattgccagttactatcag

SEQ ID NO: 1770250 - DNA, 25 bp, Homo sapien
tcagccaaacgttgtgtgtaaaaca

SEQ ID NO: 1770251 - DNA, 25 bp, Homo sapien
taacgtcatggttggctataagtga

SEQ ID NO: 1770252 - DNA, 25 bp, Homo sapien
tataacgtcatggttggctataagt

SEQ ID NO: 1770253 - DNA, 25 bp, Homo sapien
gtcatggttggctataagtgatcct

SEQ ID NO: 1770254 - DNA, 25 bp, Homo sapien
agttataacgtcatggttggctata

SEQ ID NO: 1770255 - DNA, 25 bp, Homo sapien
tgttggaacaggttccaatgtaagt

SEQ ID NO: 1770256 - DNA, 25 bp, Homo sapien
tggaacaggttccaatgtaagtgtt

SEQ ID NO: 1770257 - DNA, 25 bp, Homo sapien
ttggaacaggttccaatgtaagtgt

SEQ ID NO: 1770258 - DNA, 25 bp, Homo sapien
attgttggaacaggttccaatgtaa

SEQ ID NO: 1770259 - DNA, 25 bp, Homo sapien
cctgaaggagctgtaagagttgctg

SEQ ID NO: 1770260 - DNA, 25 bp, Homo sapien
gcctgaaggagctgtaagagttgct

SEQ ID NO: 1770261 - DNA, 25 bp, Homo sapien
ggcctgaaggagctgtaagagttgc

SEQ ID NO: 1770262 - DNA, 25 bp, Homo sapien
ccagtgtcagtggtaaggtttgtcc

SEQ ID NO: 1770263 - DNA, 25 bp, Homo sapien
taatggctcctgtatgtaatgatca

SEQ ID NO: 1770264 - DNA, 25 bp, Homo sapien
tccaggagagtgcacagaattggtg

SEQ ID NO: 1770265 - DNA, 25 bp, Homo sapien
gggtcgtgtcaaccagtcatgagtt

SEQ ID NO: 1770266 - DNA, 25 bp, Homo sapien
tattttgaattattcgttcaacagc

SEQ ID NO: 1770267 - DNA, 25 bp, Homo sapien
tgacacaggtttgataaaagccaat

SEQ ID NO: 1770268 - DNA, 25 bp, Homo sapien
aatactgccgcttatctttaaaggg

SEQ ID NO: 1770269 - DNA, 25 bp, Homo sapien
cactcttggtgctaatacagagcag

SEQ ID NO: 1770270 - DNA, 25 bp, Homo sapien
ctttcctttacaaataatcaaggat

SEQ ID NO: 1770271 - DNA, 25 bp, Homo sapien
gctaacttcagtagttgcttgtgct

SEQ ID NO: 1770272 - DNA, 25 bp, Homo sapien
ctgcacctcaattttgctaacttca

SEQ ID NO: 1770273 - DNA, 25 bp, Homo sapien
caaggatatttctgtacgctgaggg

SEQ ID NO: 1770274 - DNA, 25 bp, Homo sapien
aaacactcttaaacctggccgccat

SEQ ID NO: 1770275 - DNA, 25 bp, Homo sapien
ccacttgcaattgtcctaaaaacac

SEQ ID NO: 1770276 - DNA, 25 bp, Homo sapien
gccatcactgagttaaattctactg

SEQ ID NO: 1770277 - DNA, 25 bp, Homo sapien
ttgccctgggaaagtttccacttgc

SEQ ID NO: 1770278 - DNA, 25 bp, Homo sapien
gcctaagattttcgtcctcaaagtc

SEQ ID NO: 1770279 - DNA, 25 bp, Homo sapien
actgcttggatcaaggcctaagatt

SEQ ID NO: 1770280 - DNA, 25 bp, Homo sapien
ttaaattattcatgacaacatccat

SEQ ID NO: 1770281 - DNA, 25 bp, Homo sapien
ttggatcaaggcctaagattttcgt

SEQ ID NO: 1770282 - DNA, 25 bp, Homo sapien
tatgccctcaaaagctaacaagatg

SEQ ID NO: 1770283 - DNA, 25 bp, Homo sapien
tgctccgtgatgtacctagaatagt

SEQ ID NO: 1770284 - DNA, 25 bp, Homo sapien
gatgtgacatatacgctcatgacca

SEQ ID NO: 1770285 - DNA, 25 bp, Homo sapien
gacatatctagaactgagggtggca

SEQ ID NO: 1770286 - DNA, 25 bp, Homo sapien
gatctgtgggctttatgaactttta

SEQ ID NO: 1770287 - DNA, 25 bp, Homo sapien
tatggctagctcaacaaaatgtgca

SEQ ID NO: 1770288 - DNA, 25 bp, Homo sapien
gagaattttcgcatgcttttacaga

SEQ ID NO: 1770289 - DNA, 25 bp, Homo sapien
tattggaattagcacgttcttggaa

SEQ ID NO: 1770290 - DNA, 25 bp, Homo sapien
atgagctgctctcatcaggcaagtc

SEQ ID NO: 1770291 - DNA, 25 bp, Homo sapien
ttgactgtcagccaattatctgtcc

SEQ ID NO: 1770292 - DNA, 25 bp, Homo sapien
gactgtcagccaattatctgtccac

SEQ ID NO: 1770293 - DNA, 25 bp, Homo sapien
gagctgctctcatcaggcaagtcca

SEQ ID NO: 1770294 - DNA, 25 bp, Homo sapien
tcatgatgtgtataacgaagagtgt

SEQ ID NO: 1770295 - DNA, 25 bp, Homo sapien
caccaaattctcctataaggagtcc

SEQ ID NO: 1770296 - DNA, 25 bp, Homo sapien
tgtacatgattgagtggtaatatat

SEQ ID NO: 1770297 - DNA, 25 bp, Homo sapien
taaggagtcctataagaattacacc

SEQ ID NO: 1770298 - DNA, 25 bp, Homo sapien
atggcatcttacacagaaaattctg

SEQ ID NO: 1770299 - DNA, 25 bp, Homo sapien
tcctcccaaggataatttgccgaaa

SEQ ID NO: 1770300 - DNA, 25 bp, Homo sapien
gggaaaagtgcgaaaatggcatctt

SEQ ID NO: 1770301 - DNA, 25 bp, Homo sapien
taagtatagccacactcaacatggc

SEQ ID NO: 1770302 - DNA, 25 bp, Homo sapien
ctgctgtcagtgcagtgagttgagc

SEQ ID NO: 1770303 - DNA, 25 bp, Homo sapien
tcagtgcagtgagttgagctccagg

SEQ ID NO: 1770304 - DNA, 25 bp, Homo sapien
tgtcagtgcagtgagttgagctcca

SEQ ID NO: 1770305 - DNA, 25 bp, Homo sapien
gctgtcagtgcagtgagttgagctc

SEQ ID NO: 1770306 - DNA, 25 bp, Homo sapien
ccagggatggcctcttctgcgtggc

SEQ ID NO: 1770307 - DNA, 25 bp, Homo sapien
gcagattgctcatcggcatcccata

SEQ ID NO: 1770308 - DNA, 25 bp, Homo sapien
tttcattctgaagccagaactgttg

SEQ ID NO: 1770309 - DNA, 25 bp, Homo sapien
tgctctctgacctgccatggctagc

SEQ ID NO: 1770310 - DNA, 25 bp, Homo sapien
agcatcggccagactttgggattcc

SEQ ID NO: 1770311 - DNA, 25 bp, Homo sapien
ggctttgaatttagttgagaggcac

SEQ ID NO: 1770312 - DNA, 25 bp, Homo sapien
tctatccctgccataggctttgaat

SEQ ID NO: 1770313 - DNA, 25 bp, Homo sapien
gctctgtgtccagcatcggccagac

SEQ ID NO: 1770314 - DNA, 25 bp, Homo sapien
gctacttagaagcaaccttgggtcc

SEQ ID NO: 1770315 - DNA, 25 bp, Homo sapien
gttagctgtgaaacgtacctccagg

SEQ ID NO: 1770316 - DNA, 25 bp, Homo sapien
taaaagggcatactcaagactcaca

SEQ ID NO: 1770317 - DNA, 25 bp, Homo sapien
aaagcacctgtcaagatatgttccc

SEQ ID NO: 1770318 - DNA, 25 bp, Homo sapien
aacaagagatgatggccaaagtccc

SEQ ID NO: 1770319 - DNA, 25 bp, Homo sapien
tgttggcatgcctgaaaacctcaca

SEQ ID NO: 1770320 - DNA, 25 bp, Homo sapien
tagaggtcctgccagaaaagtggtc

SEQ ID NO: 1770321 - DNA, 25 bp, Homo sapien
gattctggctgggaaacatgctaga

SEQ ID NO: 1770322 - DNA, 25 bp, Homo sapien
taggtgtttgataggctcagtggaa

SEQ ID NO: 1770323 - DNA, 25 bp, Homo sapien
tggcataaccttgcaccaacagact

SEQ ID NO: 1770324 - DNA, 25 bp, Homo sapien
gcagaggaacttttgccatgttctc

SEQ ID NO: 1770325 - DNA, 25 bp, Homo sapien
gaggctgtcattcatgcttcaaatt

SEQ ID NO: 1770326 - DNA, 25 bp, Homo sapien
gataaagactagaggtgtggtgaca

SEQ ID NO: 1770327 - DNA, 25 bp, Homo sapien
aaactaagtgtgattcaacttcctg

SEQ ID NO: 1770328 - DNA, 25 bp, Homo sapien
caaccttcacttaacttggataaag

SEQ ID NO: 1770329 - DNA, 25 bp, Homo sapien
gataaagagttccttctcagtctgc

SEQ ID NO: 1770330 - DNA, 25 bp, Homo sapien
gctgaggaggtctccaaatcctgca

SEQ ID NO: 1770331 - DNA, 25 bp, Homo sapien
tgctgaggaggtctccaaatcctgc

SEQ ID NO: 1770332 - DNA, 25 bp, Homo sapien
tcaaattatgcctgaaaggtcacat

SEQ ID NO: 1770333 - DNA, 25 bp, Homo sapien
tccaggtattcatagggatttgggt

SEQ ID NO: 1770334 - DNA, 25 bp, Homo sapien
gatctggtgggtgggcttaattctt

SEQ ID NO: 1770335 - DNA, 25 bp, Homo sapien
cagtctgagcttgtttgtactcacc

SEQ ID NO: 1770336 - DNA, 25 bp, Homo sapien
gggccagctcttgttgggcacagtc

SEQ ID NO: 1770337 - DNA, 25 bp, Homo sapien
cactacattatctggtatcagtttc

SEQ ID NO: 1770338 - DNA, 25 bp, Homo sapien
ccagctcttgttgggcacagtctct

SEQ ID NO: 1770339 - DNA, 25 bp, Homo sapien
acaaagggacactacattatctggt

SEQ ID NO: 1770340 - DNA, 25 bp, Homo sapien
ccatgatgcttgccacagatgtggg

SEQ ID NO: 1770341 - DNA, 25 bp, Homo sapien
catgatgcttgccacagatgtgggt

SEQ ID NO: 1770342 - DNA, 25 bp, Homo sapien
gtctcaccaaacaaaccgcaacaaa

SEQ ID NO: 1770343 - DNA, 25 bp, Homo sapien
gtttccaagctcttaagccacaaat

SEQ ID NO: 1770344 - DNA, 25 bp, Homo sapien
attcctatgttcatggacactgagg

SEQ ID NO: 1770345 - DNA, 25 bp, Homo sapien
cgcaacaaataagagacagctgatt

SEQ ID NO: 1770346 - DNA, 25 bp, Homo sapien
tcactcgttactctcatcccccatg

SEQ ID NO: 1770347 - DNA, 25 bp, Homo sapien
cccccatgccgagtttttctgatac

SEQ ID NO: 1770348 - DNA, 25 bp, Homo sapien
tggtcaaatttactgatctcacagg

SEQ ID NO: 1770349 - DNA, 25 bp, Homo sapien
tcttgtactccagaaaactagtgtc

SEQ ID NO: 1770350 - DNA, 25 bp, Homo sapien
caaacccagaaatatgaagcgtgtc

SEQ ID NO: 1770351 - DNA, 25 bp, Homo sapien
gaagcgtgtctagcaaagtgtatga

SEQ ID NO: 1770352 - DNA, 25 bp, Homo sapien
ctttaatacgatgaatttggtctta

SEQ ID NO: 1770353 - DNA, 25 bp, Homo sapien
tggtcttagtgccaaagctctgaag

SEQ ID NO: 1770354 - DNA, 25 bp, Homo sapien
tacgatgaatttggtcttagtgcca

SEQ ID NO: 1770355 - DNA, 25 bp, Homo sapien
gaatttggtcttagtgccaaagctc

SEQ ID NO: 1770356 - DNA, 25 bp, Homo sapien
gacggtaagtcagaccagtcaccaa

SEQ ID NO: 1770357 - DNA, 25 bp, Homo sapien
tcagaccagtcaccaagcattagag

SEQ ID NO: 1770358 - DNA, 25 bp, Homo sapien
agtcaccaagcattagagctgctcc

SEQ ID NO: 1770359 - DNA, 25 bp, Homo sapien
ttatctggacggtaagtcagaccag

SEQ ID NO: 1770360 - DNA, 25 bp, Homo sapien
gttgagttgaaatggccagggaatt

SEQ ID NO: 1770361 - DNA, 25 bp, Homo sapien
gtgtgctatgaatgtcatcatctcc

SEQ ID NO: 1770362 - DNA, 25 bp, Homo sapien
gaatttggagattgcaagtagaact

SEQ ID NO: 1770363 - DNA, 25 bp, Homo sapien
cttctttggaaaaaggtgtgctatg

SEQ ID NO: 1770364 - DNA, 25 bp, Homo sapien
aatctggagggaactatgagccact

SEQ ID NO: 1770365 - DNA, 25 bp, Homo sapien
tccatccaccaagatcggtgcattg

SEQ ID NO: 1770366 - DNA, 25 bp, Homo sapien
ccctgagaccgtgatgtagcgatgg

SEQ ID NO: 1770367 - DNA, 25 bp, Homo sapien
ggcaggtgtcactgacgtcaccgta

SEQ ID NO: 1770368 - DNA, 25 bp, Homo sapien
gtgcactgagttcgcacagaaataa

SEQ ID NO: 1770369 - DNA, 25 bp, Homo sapien
aaccccagaggcactagaaggagcg

SEQ ID NO: 1770370 - DNA, 25 bp, Homo sapien
cactagaaggagcggttggctgcca

SEQ ID NO: 1770371 - DNA, 25 bp, Homo sapien
attccatttgtgtgcactgagttcg

SEQ ID NO: 1770372 - DNA, 25 bp, Homo sapien
tcagcacactaagtccagaggatgg

SEQ ID NO: 1770373 - DNA, 25 bp, Homo sapien
tcctgttaaaagtcgcattaatgag

SEQ ID NO: 1770374 - DNA, 25 bp, Homo sapien
cctgggagaaatctaggaaggaaga

SEQ ID NO: 1770375 - DNA, 25 bp, Homo sapien
caaaagtcacgtaatcacatcttga

SEQ ID NO: 1770376 - DNA, 25 bp, Homo sapien
taactctggtgttccacagtcaaca

SEQ ID NO: 1770377 - DNA, 25 bp, Homo sapien
ctaactctggtgttccacagtcaac

SEQ ID NO: 1770378 - DNA, 25 bp, Homo sapien
tctggtgttccacagtcaacattgc

SEQ ID NO: 1770379 - DNA, 25 bp, Homo sapien
ggtgttccacagtcaacattgcaaa

SEQ ID NO: 1770380 - DNA, 25 bp, Homo sapien
taaatttactggcactcttagctga

SEQ ID NO: 1770381 - DNA, 25 bp, Homo sapien
gaacagtctttccatgcactactga

SEQ ID NO: 1770382 - DNA, 25 bp, Homo sapien
tttcatgctagcaggaagcttcaga

SEQ ID NO: 1770383 - DNA, 25 bp, Homo sapien
ggtactgctagagcttgaaaaacaa

SEQ ID NO: 1770384 - DNA, 25 bp, Homo sapien
aggtccactgggacttcctgagaca

SEQ ID NO: 1770385 - DNA, 25 bp, Homo sapien
ttcatagcacaaccctctgaagtgc

SEQ ID NO: 1770386 - DNA, 25 bp, Homo sapien
tcttctgtttcaaggtccactggga

SEQ ID NO: 1770387 - DNA, 25 bp, Homo sapien
tggcttagataaaaaccaggatgca

SEQ ID NO: 1770388 - DNA, 25 bp, Homo sapien
gagactgttctatggtgtcaaacca

SEQ ID NO: 1770389 - DNA, 25 bp, Homo sapien
ctttgggtgagactgttctatggtg

SEQ ID NO: 1770390 - DNA, 25 bp, Homo sapien
gctgctttgggtgagactgttctat

SEQ ID NO: 1770391 - DNA, 25 bp, Homo sapien
ggtgagactgttctatggtgtcaaa

SEQ ID NO: 1770392 - DNA, 25 bp, Homo sapien
gccactgtaggcttctaaggagaga

SEQ ID NO: 1770393 - DNA, 25 bp, Homo sapien
gaagggatgtcacgaaactcatgtt

SEQ ID NO: 1770394 - DNA, 25 bp, Homo sapien
taagggtccatctcatcactctatg

SEQ ID NO: 1770395 - DNA, 25 bp, Homo sapien
tcttcagattccatgggtgttccca

SEQ ID NO: 1770396 - DNA, 25 bp, Homo sapien
ttggaatctgaacattccacacttt

SEQ ID NO: 1770397 - DNA, 25 bp, Homo sapien
tggaatctgaacattccacactttc

SEQ ID NO: 1770398 - DNA, 25 bp, Homo sapien
ggaatctgaacattccacactttca

SEQ ID NO: 1770399 - DNA, 25 bp, Homo sapien
gttggaatctgaacattccacactt

SEQ ID NO: 1770400 - DNA, 25 bp, Homo sapien
gcacatatctcagagagggatatca

SEQ ID NO: 1770401 - DNA, 25 bp, Homo sapien
aggtcatggaatttataggagagaa

SEQ ID NO: 1770402 - DNA, 25 bp, Homo sapien
gaaacagctgcctgaagctttgcac

SEQ ID NO: 1770403 - DNA, 25 bp, Homo sapien
tcaacacacctataaaggtcatgga

SEQ ID NO: 1770404 - DNA, 25 bp, Homo sapien
ttggagcttgtgctaattttcctgg

SEQ ID NO: 1770405 - DNA, 25 bp, Homo sapien
tccttcacactaagctgttctctga

SEQ ID NO: 1770406 - DNA, 25 bp, Homo sapien
ggcacgtttacagctctggcttcag

SEQ ID NO: 1770407 - DNA, 25 bp, Homo sapien
tacatgggctaagcaagttttcttc

SEQ ID NO: 1770408 - DNA, 25 bp, Homo sapien
tcaaatggataaactagagaaaccc

SEQ ID NO: 1770409 - DNA, 25 bp, Homo sapien
aacccagtgtctttagtgctctgaa

SEQ ID NO: 1770410 - DNA, 25 bp, Homo sapien
tattttcacacaaactcagtaaatc

SEQ ID NO: 1770411 - DNA, 25 bp, Homo sapien
caagacgatagatctgcgctttatg

SEQ ID NO: 1770412 - DNA, 25 bp, Homo sapien
tgcaaaccaacgctctccgatagtc

SEQ ID NO: 1770413 - DNA, 25 bp, Homo sapien
tcctgcaaaccaacgctctccgata

SEQ ID NO: 1770414 - DNA, 25 bp, Homo sapien
ctgctcctgcaaaccaacgctctcc

SEQ ID NO: 1770415 - DNA, 25 bp, Homo sapien
aaaccaacgctctccgatagtcaac

SEQ ID NO: 1770416 - DNA, 25 bp, Homo sapien
aacaggcgtagatgaaacctgccag

SEQ ID NO: 1770417 - DNA, 25 bp, Homo sapien
tttcacaacataacaggcgtagatg

SEQ ID NO: 1770418 - DNA, 25 bp, Homo sapien
ctcttcttcagttatacatttcaca

SEQ ID NO: 1770419 - DNA, 25 bp, Homo sapien
tcttcagttatacatttcacaacat

SEQ ID NO: 1770420 - DNA, 25 bp, Homo sapien
tttccaattttctccagctgtctac

SEQ ID NO: 1770421 - DNA, 25 bp, Homo sapien
tgtttttccaattttctccagctgt

SEQ ID NO: 1770422 - DNA, 25 bp, Homo sapien
tttttccaattttctccagctgtct

SEQ ID NO: 1770423 - DNA, 25 bp, Homo sapien
cttgtttttccaattttctccagct

SEQ ID NO: 1770424 - DNA, 25 bp, Homo sapien
tctttcactccctgccacacaacgc

SEQ ID NO: 1770425 - DNA, 25 bp, Homo sapien
ctgccacacaacgccaaccagtcat

SEQ ID NO: 1770426 - DNA, 25 bp, Homo sapien
tcaaccacatatggaactttttggg

SEQ ID NO: 1770427 - DNA, 25 bp, Homo sapien
tttatggaagggttcttcaaccaca

SEQ ID NO: 1770428 - DNA, 25 bp, Homo sapien
tggaagggttcttcaaccacatatg

SEQ ID NO: 1770429 - DNA, 25 bp, Homo sapien
gggttcttcaaccacatatggaact

SEQ ID NO: 1770430 - DNA, 25 bp, Homo sapien
taggctgtagttgtaaatgagatgt

SEQ ID NO: 1770431 - DNA, 25 bp, Homo sapien
tgtacataggctgtagttgtaaatg

SEQ ID NO: 1770432 - DNA, 25 bp, Homo sapien
gcccttgatagccataagagtcaaa

SEQ ID NO: 1770433 - DNA, 25 bp, Homo sapien
tgatagccataagagtcaaagccac

SEQ ID NO: 1770434 - DNA, 25 bp, Homo sapien
catactggttgatttctgaactgct

SEQ ID NO: 1770435 - DNA, 25 bp, Homo sapien
tctgttttatgggtgctattagcaa

SEQ ID NO: 1770436 - DNA, 25 bp, Homo sapien
gaagcaatgctttgaatgaagcaac

SEQ ID NO: 1770437 - DNA, 25 bp, Homo sapien
ggtgctattagcaaatgatttcaga

SEQ ID NO: 1770438 - DNA, 25 bp, Homo sapien
tcatgaaatgcaggaggccactgcg

SEQ ID NO: 1770439 - DNA, 25 bp, Homo sapien
gggctgacatactgaagtcatctgt

SEQ ID NO: 1770440 - DNA, 25 bp, Homo sapien
aggccactgcgaaaaaagttctttg

SEQ ID NO: 1770441 - DNA, 25 bp, Homo sapien
ttgaaaggtccatgggctgacatac

SEQ ID NO: 1770442 - DNA, 25 bp, Homo sapien
gaggagttagcaatggccggcaacc

SEQ ID NO: 1770443 - DNA, 25 bp, Homo sapien
gaaatccaagatgggcgtgtcctgc

SEQ ID NO: 1770444 - DNA, 25 bp, Homo sapien
gacagagctctcaaactaatgtgcc

SEQ ID NO: 1770445 - DNA, 25 bp, Homo sapien
tcaagatgtatggagtgcagaagac

SEQ ID NO: 1770446 - DNA, 25 bp, Homo sapien
tgcactgggattcttgggcacacaa

SEQ ID NO: 1770447 - DNA, 25 bp, Homo sapien
tatgtacggtacagcctttagggca

SEQ ID NO: 1770448 - DNA, 25 bp, Homo sapien
caatctgccatttcggacttcgggt

SEQ ID NO: 1770449 - DNA, 25 bp, Homo sapien
gacttcgggtacaaggtcatcatgg

SEQ ID NO: 1770450 - DNA, 25 bp, Homo sapien
aggagactttacttctaaggaagag

SEQ ID NO: 1770451 - DNA, 25 bp, Homo sapien
cttctaaggaagaggacatgggcat

SEQ ID NO: 1770452 - DNA, 25 bp, Homo sapien
acttcaggagactttacttctaagg

SEQ ID NO: 1770453 - DNA, 25 bp, Homo sapien
tcaggagactttacttctaaggaag

SEQ ID NO: 1770454 - DNA, 25 bp, Homo sapien
aatgatctaggctctgtgatctctc

SEQ ID NO: 1770455 - DNA, 25 bp, Homo sapien
tcagactctccagcaaacttgagca

SEQ ID NO: 1770456 - DNA, 25 bp, Homo sapien
caaaggcagaaatgatctaggctct

SEQ ID NO: 1770457 - DNA, 25 bp, Homo sapien
tgaatgagagtgatgctgccagcca

SEQ ID NO: 1770458 - DNA, 25 bp, Homo sapien
tcaacgaaagccttagaaggtagag

SEQ ID NO: 1770459 - DNA, 25 bp, Homo sapien
tctaatctcattcctgacaagccgt

SEQ ID NO: 1770460 - DNA, 25 bp, Homo sapien
gacaagccgtctagtctcctgctga

SEQ ID NO: 1770461 - DNA, 25 bp, Homo sapien
ctcatgatgtgatcaggaaatcctg

SEQ ID NO: 1770462 - DNA, 25 bp, Homo sapien
atgtgagaggccagattgaagtccg

SEQ ID NO: 1770463 - DNA, 25 bp, Homo sapien
ccagattgaagtccgggccaggaag

SEQ ID NO: 1770464 - DNA, 25 bp, Homo sapien
tgtgggacttaaagagtgagtacag

SEQ ID NO: 1770465 - DNA, 25 bp, Homo sapien
aatatggggaaatgggatgaatatc

SEQ ID NO: 1770466 - DNA, 25 bp, Homo sapien
taagagtaggcctccaggtaggtgg

SEQ ID NO: 1770467 - DNA, 25 bp, Homo sapien
gtaggcctccaggtaggtggattgc

SEQ ID NO: 1770468 - DNA, 25 bp, Homo sapien
gagtaggcctccaggtaggtggatt

SEQ ID NO: 1770469 - DNA, 25 bp, Homo sapien
aagagtaggcctccaggtaggtgga

SEQ ID NO: 1770470 - DNA, 25 bp, Homo sapien
gtgctcggctcttactccagcccgg

SEQ ID NO: 1770471 - DNA, 25 bp, Homo sapien
gggattgagaggcccggtgagtgcc

SEQ ID NO: 1770472 - DNA, 25 bp, Homo sapien
gccggtgctcggctcttactccagc

SEQ ID NO: 1770473 - DNA, 25 bp, Homo sapien
ccggtgagtgccagtcccgcaggct

SEQ ID NO: 1770474 - DNA, 25 bp, Homo sapien
tccagctccaactgcagtggcaagg

SEQ ID NO: 1770475 - DNA, 25 bp, Homo sapien
ccagctccaactgcagtggcaaggt

SEQ ID NO: 1770476 - DNA, 25 bp, Homo sapien
ctcttttcgatccccagcttcctcc

SEQ ID NO: 1770477 - DNA, 25 bp, Homo sapien
ctgctgttcatcccctccctctttt

SEQ ID NO: 1770478 - DNA, 25 bp, Homo sapien
gagcagaagacttgtctcttggcga

SEQ ID NO: 1770479 - DNA, 25 bp, Homo sapien
acccggcacatcagcaccatgaggg

SEQ ID NO: 1770480 - DNA, 25 bp, Homo sapien
cgcacacggccttcttgcagcaagg

SEQ ID NO: 1770481 - DNA, 25 bp, Homo sapien
tccacgcagtacacggagcagaaga

SEQ ID NO: 1770482 - DNA, 25 bp, Homo sapien
agatcagatcgagagcaggacctcc

SEQ ID NO: 1770483 - DNA, 25 bp, Homo sapien
cctcctcgccagtgatttggaatga

SEQ ID NO: 1770484 - DNA, 25 bp, Homo sapien
tcagatcgagagcaggacctcctcg

SEQ ID NO: 1770485 - DNA, 25 bp, Homo sapien
cttcgcgcgagcagggagatcagat

SEQ ID NO: 1770486 - DNA, 25 bp, Homo sapien
taagaggagggcaacaacttgtatc

SEQ ID NO: 1770487 - DNA, 25 bp, Homo sapien
gccaaccatagcctgaagttcacag

SEQ ID NO: 1770488 - DNA, 25 bp, Homo sapien
aacaactgagacgtgagaaactaac

SEQ ID NO: 1770489 - DNA, 25 bp, Homo sapien
gatcctcagtaagtgtgtcggtcac

SEQ ID NO: 1770490 - DNA, 25 bp, Homo sapien
agtgacttccctggaggcgggctta

SEQ ID NO: 1770491 - DNA, 25 bp, Homo sapien
cctggaggcgggcttatattttgga

SEQ ID NO: 1770492 - DNA, 25 bp, Homo sapien
cgcagggcagcgaaatctgttttga

SEQ ID NO: 1770493 - DNA, 25 bp, Homo sapien
agcagcagacattcctcctgtttta

SEQ ID NO: 1770494 - DNA, 25 bp, Homo sapien
tctagacctaagtttgagtggcagc

SEQ ID NO: 1770495 - DNA, 25 bp, Homo sapien
tccttacaagtagatgaggctgagt

SEQ ID NO: 1770496 - DNA, 25 bp, Homo sapien
aaatcatagctttcctaagccaaat

SEQ ID NO: 1770497 - DNA, 25 bp, Homo sapien
gagtttggctgtaatctctagacct

SEQ ID NO: 1770498 - DNA, 25 bp, Homo sapien
tccgtgagccgagatcatgccactg

SEQ ID NO: 1770499 - DNA, 25 bp, Homo sapien
tgggatgtggaggtttccgtgagcc

SEQ ID NO: 1770500 - DNA, 25 bp, Homo sapien
cactccagcctggtgacagagtgag

SEQ ID NO: 1770501 - DNA, 25 bp, Homo sapien
aacctgggatgtggaggtttccgtg

SEQ ID NO: 1770502 - DNA, 25 bp, Homo sapien
cacagtgttatgagctgggatctct

SEQ ID NO: 1770503 - DNA, 25 bp, Homo sapien
tattgagcacctattctcttctggg

SEQ ID NO: 1770504 - DNA, 25 bp, Homo sapien
gctttgtgccaggtgctagttatga

SEQ ID NO: 1770505 - DNA, 25 bp, Homo sapien
gactctaagaaccttaacagcagga

SEQ ID NO: 1770506 - DNA, 25 bp, Homo sapien
gtagttcactggattgatgcaagtc

SEQ ID NO: 1770507 - DNA, 25 bp, Homo sapien
gccacagtagttcactggattgatg

SEQ ID NO: 1770508 - DNA, 25 bp, Homo sapien
atagatgggatgctagcataaagac

SEQ ID NO: 1770509 - DNA, 25 bp, Homo sapien
gatgctagcataaagactcaggcca

SEQ ID NO: 1770510 - DNA, 25 bp, Homo sapien
taaaagcaatatgcctcttctgttc

SEQ ID NO: 1770511 - DNA, 25 bp, Homo sapien
tcttctgttccagggaatacagatc

SEQ ID NO: 1770512 - DNA, 25 bp, Homo sapien
tacagatctctaacaggaagaaact

SEQ ID NO: 1770513 - DNA, 25 bp, Homo sapien
gaaactcgaggacaacatctatgct

SEQ ID NO: 1770514 - DNA, 25 bp, Homo sapien
gtgaggacataaatccactaaacca

SEQ ID NO: 1770515 - DNA, 25 bp, Homo sapien
tgtaaggtccttttcattagtgaca

SEQ ID NO: 1770516 - DNA, 25 bp, Homo sapien
aattcacatttgtcctgaccatatt

SEQ ID NO: 1770517 - DNA, 25 bp, Homo sapien
taaaccatcactcaggctctaaatt

SEQ ID NO: 1770518 - DNA, 25 bp, Homo sapien
acttgacagcatttggagtgccatg

SEQ ID NO: 1770519 - DNA, 25 bp, Homo sapien
tgacaacattactagcataagcgct

SEQ ID NO: 1770520 - DNA, 25 bp, Homo sapien
gagtgccatgcatattaccttacca

SEQ ID NO: 1770521 - DNA, 25 bp, Homo sapien
cataagcgctcatcaaaatattgcc

SEQ ID NO: 1770522 - DNA, 25 bp, Homo sapien
aacaaaatggaacaagtcaatttca

SEQ ID NO: 1770523 - DNA, 25 bp, Homo sapien
gtaatccaattactttacaattaga

SEQ ID NO: 1770524 - DNA, 25 bp, Homo sapien
agaatgttctgctaaagaattattc

SEQ ID NO: 1770525 - DNA, 25 bp, Homo sapien
caatgtacttttatcattcaaaaga

SEQ ID NO: 1770526 - DNA, 25 bp, Homo sapien
tgtacttttatcattcaaaagatag

SEQ ID NO: 1770527 - DNA, 25 bp, Homo sapien
ttgactcttcccctcattatgaagt

SEQ ID NO: 1770528 - DNA, 25 bp, Homo sapien
gactcttcccctcattatgaagttt

SEQ ID NO: 1770529 - DNA, 25 bp, Homo sapien
ctcttcccctcattatgaagtttgc

SEQ ID NO: 1770530 - DNA, 25 bp, Homo sapien
cttcccctcattatgaagtttgcct

SEQ ID NO: 1770531 - DNA, 25 bp, Homo sapien
gagaatagattccttgcccactaca

SEQ ID NO: 1770532 - DNA, 25 bp, Homo sapien
cttgcccactacatgtttacaacca

SEQ ID NO: 1770533 - DNA, 25 bp, Homo sapien
tacaaccatacaggtgcttataatc

SEQ ID NO: 1770534 - DNA, 25 bp, Homo sapien
ggtgcttataatcttatgttgacaa

SEQ ID NO: 1770535 - DNA, 25 bp, Homo sapien
gcatgcagtgaaactggagaaggga

SEQ ID NO: 1770536 - DNA, 25 bp, Homo sapien
gaagaaatgaatccctgccagcttg

SEQ ID NO: 1770537 - DNA, 25 bp, Homo sapien
cagtgaaactggagaagggatctgc

SEQ ID NO: 1770538 - DNA, 25 bp, Homo sapien
ggaagaaatgaatccctgccagctt

SEQ ID NO: 1770539 - DNA, 25 bp, Homo sapien
acatttgtctaatatttccttttag

SEQ ID NO: 1770540 - DNA, 25 bp, Homo sapien
tcaaagctgcctctaagaaaggcaa

SEQ ID NO: 1770541 - DNA, 25 bp, Homo sapien
caaaaggggaaatataactggcaag

SEQ ID NO: 1770542 - DNA, 25 bp, Homo sapien
ctggcaagccctgttttctttaata

SEQ ID NO: 1770543 - DNA, 25 bp, Homo sapien
tgtgattacttttgtggtcacaatc

SEQ ID NO: 1770544 - DNA, 25 bp, Homo sapien
ggtcacaatcaaactgtaactcagt

SEQ ID NO: 1770545 - DNA, 25 bp, Homo sapien
acagggtaaggattagatgtgtgcc

SEQ ID NO: 1770546 - DNA, 25 bp, Homo sapien
tcagtaacagggtaaggattagatg

SEQ ID NO: 1770547 - DNA, 25 bp, Homo sapien
gatgccagctgttcttgtgccagcc

SEQ ID NO: 1770548 - DNA, 25 bp, Homo sapien
tgatgccagctgttcttgtgccagc

SEQ ID NO: 1770549 - DNA, 25 bp, Homo sapien
tgccagctgttcttgtgccagccat

SEQ ID NO: 1770550 - DNA, 25 bp, Homo sapien
ctgatgccagctgttcttgtgccag

SEQ ID NO: 1770551 - DNA, 25 bp, Homo sapien
ggatggaggagagagaaagttgcac

SEQ ID NO: 1770552 - DNA, 25 bp, Homo sapien
taggatggaggagagagaaagttgc

SEQ ID NO: 1770553 - DNA, 25 bp, Homo sapien
aggatggaggagagagaaagttgca

SEQ ID NO: 1770554 - DNA, 25 bp, Homo sapien
ctaggatggaggagagagaaagttg

SEQ ID NO: 1770555 - DNA, 25 bp, Homo sapien
agtgctggtacaatccaagggtaag

SEQ ID NO: 1770556 - DNA, 25 bp, Homo sapien
cacaggaaaactatcttggctagac

SEQ ID NO: 1770557 - DNA, 25 bp, Homo sapien
tatcttggctagacagtgctggtac

SEQ ID NO: 1770558 - DNA, 25 bp, Homo sapien
caatccaagggtaagggcataagta

SEQ ID NO: 1770559 - DNA, 25 bp, Homo sapien
cttccctcaacttccaccctcatcc

SEQ ID NO: 1770560 - DNA, 25 bp, Homo sapien
cagggctaggatcttcactgttctg

SEQ ID NO: 1770561 - DNA, 25 bp, Homo sapien
tgaagtataagggatgtctgtggaa

SEQ ID NO: 1770562 - DNA, 25 bp, Homo sapien
ctgaagtataagggatgtctgtgga

SEQ ID NO: 1770563 - DNA, 25 bp, Homo sapien
aagtataagggatgtctgtggaaaa

SEQ ID NO: 1770564 - DNA, 25 bp, Homo sapien
gtataagggatgtctgtggaaaata

SEQ ID NO: 1770565 - DNA, 25 bp, Homo sapien
gctacatttgcaggactaatcagca

SEQ ID NO: 1770566 - DNA, 25 bp, Homo sapien
gacttttcatcagcttgactgggtg

SEQ ID NO: 1770567 - DNA, 25 bp, Homo sapien
gcactttgtcaagggcacaagactt

SEQ ID NO: 1770568 - DNA, 25 bp, Homo sapien
tgggatattcaaactcgcagtatgc

SEQ ID NO: 1770569 - DNA, 25 bp, Homo sapien
tatggggaattgagctgataaggaa

SEQ ID NO: 1770570 - DNA, 25 bp, Homo sapien
aatctctccaccagctacacacaca

SEQ ID NO: 1770571 - DNA, 25 bp, Homo sapien
ttcagttcaatatggggaattgagc

SEQ ID NO: 1770572 - DNA, 25 bp, Homo sapien
catttttactacctaattaagcttg

SEQ ID NO: 1770573 - DNA, 25 bp, Homo sapien
tatacaacagctttgattctcctac

SEQ ID NO: 1770574 - DNA, 25 bp, Homo sapien
acaacagctttgattctcctactct

SEQ ID NO: 1770575 - DNA, 25 bp, Homo sapien
gagaactaattatacaacagctttg

SEQ ID NO: 1770576 - DNA, 25 bp, Homo sapien
atgagaagagaactaattatacaac

SEQ ID NO: 1770577 - DNA, 25 bp, Homo sapien
tcacttatactcaaggaaagtgaaa

SEQ ID NO: 1770578 - DNA, 25 bp, Homo sapien
ttccaggctctatgtctgtgagagg

SEQ ID NO: 1770579 - DNA, 25 bp, Homo sapien
gaagagattacaagggctcctgcag

SEQ ID NO: 1770580 - DNA, 25 bp, Homo sapien
actcttccaggctctatgtctgtga

SEQ ID NO: 1770581 - DNA, 25 bp, Homo sapien
attcagtgggcatatataaaatggg

SEQ ID NO: 1770582 - DNA, 25 bp, Homo sapien
tctgttgtgcttaccaggatagctc

SEQ ID NO: 1770583 - DNA, 25 bp, Homo sapien
tcttttgcgagactacatatcaaac

SEQ ID NO: 1770584 - DNA, 25 bp, Homo sapien
cacactgtagacatgacggagtacc

SEQ ID NO: 1770585 - DNA, 25 bp, Homo sapien
gcactgcatgggaaaagcggcacca

SEQ ID NO: 1770586 - DNA, 25 bp, Homo sapien
ctcgcccagggttactgggctcttc

SEQ ID NO: 1770587 - DNA, 25 bp, Homo sapien
agcacctggccccttgagacaggct

SEQ ID NO: 1770588 - DNA, 25 bp, Homo sapien
cggcaccaagagagaccagcacctg

SEQ ID NO: 1770589 - DNA, 25 bp, Homo sapien
gattgtgtgccttggtctccagtcc

SEQ ID NO: 1770590 - DNA, 25 bp, Homo sapien
tcttgtgttcacgtccacattaaaa

SEQ ID NO: 1770591 - DNA, 25 bp, Homo sapien
caaaaaactcgttaggattgtgtgc

SEQ ID NO: 1770592 - DNA, 25 bp, Homo sapien
tgcagccaagccaaatgaaagatta

SEQ ID NO: 1770593 - DNA, 25 bp, Homo sapien
ctcaaactgataagcatgctcaagt

SEQ ID NO: 1770594 - DNA, 25 bp, Homo sapien
ctccctctgctaacttcagacactc

SEQ ID NO: 1770595 - DNA, 25 bp, Homo sapien
gacactcaaactgataagcatgctc

SEQ ID NO: 1770596 - DNA, 25 bp, Homo sapien
gataagcatgctcaagtttctccca

SEQ ID NO: 1770597 - DNA, 25 bp, Homo sapien
tcggtagaaagcaggactttgcaaa

SEQ ID NO: 1770598 - DNA, 25 bp, Homo sapien
cctcggtagaaagcaggactttgca

SEQ ID NO: 1770599 - DNA, 25 bp, Homo sapien
tcctcggtagaaagcaggactttgc

SEQ ID NO: 1770600 - DNA, 25 bp, Homo sapien
ccctcctcggtagaaagcaggactt

SEQ ID NO: 1770601 - DNA, 25 bp, Homo sapien
ttttcctttcaactgaccaatatgc

SEQ ID NO: 1770602 - DNA, 25 bp, Homo sapien
ctttcttacccatgaaccatttcac

SEQ ID NO: 1770603 - DNA, 25 bp, Homo sapien
ctgaccaatatgcacacagtcaaaa

SEQ ID NO: 1770604 - DNA, 25 bp, Homo sapien
tccctcttcaaggccttactcttaa

SEQ ID NO: 1770605 - DNA, 25 bp, Homo sapien
cacagaaatgtggagtactgatgac

SEQ ID NO: 1770606 - DNA, 25 bp, Homo sapien
ggactgaatatgcaaccttccctac

SEQ ID NO: 1770607 - DNA, 25 bp, Homo sapien
tactgatgacacgtttacgctctca

SEQ ID NO: 1770608 - DNA, 25 bp, Homo sapien
tacgctctcaatgctctaaaggctt

SEQ ID NO: 1770609 - DNA, 25 bp, Homo sapien
caagaagtacttatacttgatggag

SEQ ID NO: 1770610 - DNA, 25 bp, Homo sapien
gcttggtgctggaatcaatacggcc

SEQ ID NO: 1770611 - DNA, 25 bp, Homo sapien
cttgaaggttgtaaagtgcttgcac

SEQ ID NO: 1770612 - DNA, 25 bp, Homo sapien
gatggagtcttcatgcgttaagtta

SEQ ID NO: 1770613 - DNA, 25 bp, Homo sapien
gatcagccttcctataaggttacta

SEQ ID NO: 1770614 - DNA, 25 bp, Homo sapien
gacaagtggatctaatctggctgct

SEQ ID NO: 1770615 - DNA, 25 bp, Homo sapien
gccatgtgacatctaacccacagct

SEQ ID NO: 1770616 - DNA, 25 bp, Homo sapien
gaatgatggccaatatatgctcacc

SEQ ID NO: 1770617 - DNA, 25 bp, Homo sapien
aacagcctttgaaaccacttcatcc

SEQ ID NO: 1770618 - DNA, 25 bp, Homo sapien
cagcctttgaaaccacttcatcctg

SEQ ID NO: 1770619 - DNA, 25 bp, Homo sapien
cttaaatggagatgactccaaacag

SEQ ID NO: 1770620 - DNA, 25 bp, Homo sapien
ggagatgactccaaacagcctttga

SEQ ID NO: 1770621 - DNA, 25 bp, Homo sapien
actgtggccatgaatctcacgattg

SEQ ID NO: 1770622 - DNA, 25 bp, Homo sapien
ggtatccatgtcagtgctctcctta

SEQ ID NO: 1770623 - DNA, 25 bp, Homo sapien
ggccatgaatctcacgattggttgg

SEQ ID NO: 1770624 - DNA, 25 bp, Homo sapien
acgattggttggctggggtatccat

SEQ ID NO: 1770625 - DNA, 25 bp, Homo sapien
aagaacaaagatcttagtctcagta

SEQ ID NO: 1770626 - DNA, 25 bp, Homo sapien
caaagatcttagtctcagtacaggg

SEQ ID NO: 1770627 - DNA, 25 bp, Homo sapien
tcttagtctcagtacagggtgccat

SEQ ID NO: 1770628 - DNA, 25 bp, Homo sapien
gatcttagtctcagtacagggtgcc

SEQ ID NO: 1770629 - DNA, 25 bp, Homo sapien
ttcttgtccgaggacccatttcttc

SEQ ID NO: 1770630 - DNA, 25 bp, Homo sapien
ccttcagcatttacagactcttcct

SEQ ID NO: 1770631 - DNA, 25 bp, Homo sapien
tgggtctatttcttgtccgaggacc

SEQ ID NO: 1770632 - DNA, 25 bp, Homo sapien
acaccttcagcatttacagactctt

SEQ ID NO: 1770633 - DNA, 25 bp, Homo sapien
catcaagtcgagtaaggaaacaacc

SEQ ID NO: 1770634 - DNA, 25 bp, Homo sapien
aattcatcaagtcgagtaaggaaac

SEQ ID NO: 1770635 - DNA, 25 bp, Homo sapien
gataattcatcaagtcgagtaagga

SEQ ID NO: 1770636 - DNA, 25 bp, Homo sapien
tcaagtcgagtaaggaaacaaccca

SEQ ID NO: 1770637 - DNA, 25 bp, Homo sapien
cagacgaattggcaggtagggcact

SEQ ID NO: 1770638 - DNA, 25 bp, Homo sapien
caccagacgaattggcaggtagggc

SEQ ID NO: 1770639 - DNA, 25 bp, Homo sapien
cttaaaacaccagacgaattggcag

SEQ ID NO: 1770640 - DNA, 25 bp, Homo sapien
taaaacaccagacgaattggcaggt

SEQ ID NO: 1770641 - DNA, 25 bp, Homo sapien
cagttaacaccttcatgccaaggag

SEQ ID NO: 1770642 - DNA, 25 bp, Homo sapien
ggcccagtgacgcaacaatttgtct

SEQ ID NO: 1770643 - DNA, 25 bp, Homo sapien
tggacacttctgggcattcctctgc

SEQ ID NO: 1770644 - DNA, 25 bp, Homo sapien
ctctgcccatgctcaatttcgctgg

SEQ ID NO: 1770645 - DNA, 25 bp, Homo sapien
tcgtataatactcctgcaacattcc

SEQ ID NO: 1770646 - DNA, 25 bp, Homo sapien
gccatgaaccctcgtataatactcc

SEQ ID NO: 1770647 - DNA, 25 bp, Homo sapien
ggtgttgagtcctttcgccatgaac

SEQ ID NO: 1770648 - DNA, 25 bp, Homo sapien
tcctttcgccatgaaccctcgtata

SEQ ID NO: 1770649 - DNA, 25 bp, Homo sapien
tggccctctacccaatgattacctt

SEQ ID NO: 1770650 - DNA, 25 bp, Homo sapien
ggtagagccgtacaataaatgagcc

SEQ ID NO: 1770651 - DNA, 25 bp, Homo sapien
tactcattgttcttacttgcatctc

SEQ ID NO: 1770652 - DNA, 25 bp, Homo sapien
taagctgactgcaatcccatgttct

SEQ ID NO: 1770653 - DNA, 25 bp, Homo sapien
gtttatcaatggttactgtagccac

SEQ ID NO: 1770654 - DNA, 25 bp, Homo sapien
tgttcatgtttatcaatggttactg

SEQ ID NO: 1770655 - DNA, 25 bp, Homo sapien
tcaatggttactgtagccacatcca

SEQ ID NO: 1770656 - DNA, 25 bp, Homo sapien
ctctgttgttcatgtttatcaatgg

SEQ ID NO: 1770657 - DNA, 25 bp, Homo sapien
ccaaaaaatcggagctggcggtatc

SEQ ID NO: 1770658 - DNA, 25 bp, Homo sapien
tctctgggaggtagcgatatttgca

SEQ ID NO: 1770659 - DNA, 25 bp, Homo sapien
ggcggtatctctcaccacatcggta

SEQ ID NO: 1770660 - DNA, 25 bp, Homo sapien
tactgaggtttgatgtgtggtctcc

SEQ ID NO: 1770661 - DNA, 25 bp, Homo sapien
taggctacgctccatgctgtactgt

SEQ ID NO: 1770662 - DNA, 25 bp, Homo sapien
ggaactctattacagggctctaaaa

SEQ ID NO: 1770663 - DNA, 25 bp, Homo sapien
tattccgccgaagaaccctgcatta

SEQ ID NO: 1770664 - DNA, 25 bp, Homo sapien
gcactgagggcatttgatacttatt

SEQ ID NO: 1770665 - DNA, 25 bp, Homo sapien
tgttctgatcaggtatcatatgctt

SEQ ID NO: 1770666 - DNA, 25 bp, Homo sapien
ctatcactaacatcagctttgttct

SEQ ID NO: 1770667 - DNA, 25 bp, Homo sapien
tcaattgaagacctattcttaaaaa

SEQ ID NO: 1770668 - DNA, 25 bp, Homo sapien
tcccagtaccattcctttaataatc

SEQ ID NO: 1770669 - DNA, 25 bp, Homo sapien
taataatctgcccacgcctcactgg

SEQ ID NO: 1770670 - DNA, 25 bp, Homo sapien
tatttgccatctagaaatcaattga

SEQ ID NO: 1770671 - DNA, 25 bp, Homo sapien
caaaaccataattagaggtgcaatg

SEQ ID NO: 1770672 - DNA, 25 bp, Homo sapien
tatggcccctagtgccaatcccaaa

SEQ ID NO: 1770673 - DNA, 25 bp, Homo sapien
cgattacaaccgctatggcccctag

SEQ ID NO: 1770674 - DNA, 25 bp, Homo sapien
ccataattagaggtgcaatgaataa

SEQ ID NO: 1770675 - DNA, 25 bp, Homo sapien
cacaggctgtggagccaaatgttgg

SEQ ID NO: 1770676 - DNA, 25 bp, Homo sapien
gcagtatagcatatcacttaacaac

SEQ ID NO: 1770677 - DNA, 25 bp, Homo sapien
acttgtttcaggcagtatagcatat

SEQ ID NO: 1770678 - DNA, 25 bp, Homo sapien
ctaccacttatgaggttccagtaag

SEQ ID NO: 1770679 - DNA, 25 bp, Homo sapien
ttacaaaggcaatagataggaaata

SEQ ID NO: 1770680 - DNA, 25 bp, Homo sapien
caatagataggaaatacaaataaac

SEQ ID NO: 1770681 - DNA, 25 bp, Homo sapien
caaaggcaatagataggaaatacaa

SEQ ID NO: 1770682 - DNA, 25 bp, Homo sapien
gcaatagataggaaatacaaataaa

SEQ ID NO: 1770683 - DNA, 25 bp, Homo sapien
ctgtccgtgatcgttttctctgttt

SEQ ID NO: 1770684 - DNA, 25 bp, Homo sapien
tgtccgtgatcgttttctctgtttt

SEQ ID NO: 1770685 - DNA, 25 bp, Homo sapien
catagctagaggcattgtggcccac

SEQ ID NO: 1770686 - DNA, 25 bp, Homo sapien
tgtggcccacggagaatcactggga

SEQ ID NO: 1770687 - DNA, 25 bp, Homo sapien
tgtgactcacagatgggtgtaccct

SEQ ID NO: 1770688 - DNA, 25 bp, Homo sapien
aattctcagaagaggcgtgctcaga

SEQ ID NO: 1770689 - DNA, 25 bp, Homo sapien
tattaacaccaagtctcacaagatg

SEQ ID NO: 1770690 - DNA, 25 bp, Homo sapien
tcagctattaacaccaagtctcaca

SEQ ID NO: 1770691 - DNA, 25 bp, Homo sapien
ttaacaccaagtctcacaagatggc

SEQ ID NO: 1770692 - DNA, 25 bp, Homo sapien
agctattaacaccaagtctcacaag

SEQ ID NO: 1770693 - DNA, 25 bp, Homo sapien
tgtggaaaaatagtgtagcggcatg

SEQ ID NO: 1770694 - DNA, 25 bp, Homo sapien
gcccctacgcatatacacttcagta

SEQ ID NO: 1770695 - DNA, 25 bp, Homo sapien
cagattataataggtgcattcagtg

SEQ ID NO: 1770696 - DNA, 25 bp, Homo sapien
tagcggcatggaactgggtaagtac

SEQ ID NO: 1770697 - DNA, 25 bp, Homo sapien
taaattatgtccacaaaggagccat

SEQ ID NO: 1770698 - DNA, 25 bp, Homo sapien
ctaaattatgtccacaaaggagcca

SEQ ID NO: 1770699 - DNA, 25 bp, Homo sapien
gttgtctacattgactttaatttaa

SEQ ID NO: 1770700 - DNA, 25 bp, Homo sapien
gtctacattgactttaatttaatac

SEQ ID NO: 1770701 - DNA, 25 bp, Homo sapien
acattgactttaatttaatacattg

SEQ ID NO: 1770702 - DNA, 25 bp, Homo sapien
ctacattgactttaatttaatacat

SEQ ID NO: 1770703 - DNA, 25 bp, Homo sapien
gcaagagataacaaggttaggatat

SEQ ID NO: 1770704 - DNA, 25 bp, Homo sapien
tgtaagaccttgacctaaagcagaa

SEQ ID NO: 1770705 - DNA, 25 bp, Homo sapien
cccaatgtgaaggatctatctatag

SEQ ID NO: 1770706 - DNA, 25 bp, Homo sapien
tctacagcaaacttgtttttgggat

SEQ ID NO: 1770707 - DNA, 25 bp, Homo sapien
taatcattttaagttaccagcaggg

SEQ ID NO: 1770708 - DNA, 25 bp, Homo sapien
taaaaatccctgagtaggccaaaga

SEQ ID NO: 1770709 - DNA, 25 bp, Homo sapien
tttcaaactcctccataagaaggtg

SEQ ID NO: 1770710 - DNA, 25 bp, Homo sapien
aaatattcttacactctggagccca

SEQ ID NO: 1770711 - DNA, 25 bp, Homo sapien
taatcttgtagtccattcaacaggg

SEQ ID NO: 1770712 - DNA, 25 bp, Homo sapien
tatggatatgttcatgcaaggtgac

SEQ ID NO: 1770713 - DNA, 25 bp, Homo sapien
tatactcctacaatggattatgcag

SEQ ID NO: 1770714 - DNA, 25 bp, Homo sapien
tatttggctaatcaggcagaaagga

SEQ ID NO: 1770715 - DNA, 25 bp, Homo sapien
gctaggtttgataaccattccaaga

SEQ ID NO: 1770716 - DNA, 25 bp, Homo sapien
acttgggattggtgtgcaaaactgg

SEQ ID NO: 1770717 - DNA, 25 bp, Homo sapien
gatgacacatatttgctaacactgt

SEQ ID NO: 1770718 - DNA, 25 bp, Homo sapien
actgttatcctactgtctccactga

SEQ ID NO: 1770719 - DNA, 25 bp, Homo sapien
tgggcaacattgagagaacctctgt

SEQ ID NO: 1770720 - DNA, 25 bp, Homo sapien
taaagcttcagctaatgctccaaag

SEQ ID NO: 1770721 - DNA, 25 bp, Homo sapien
tttgaagacaggcatagtaggcacg

SEQ ID NO: 1770722 - DNA, 25 bp, Homo sapien
gatgaagtcaaccaaagttacagcc

SEQ ID NO: 1770723 - DNA, 25 bp, Homo sapien
aaagtaagctattgaggagttgcca

SEQ ID NO: 1770724 - DNA, 25 bp, Homo sapien
tttcacgtgaaacataaggttggtc

SEQ ID NO: 1770725 - DNA, 25 bp, Homo sapien
gggcatggcgaagtgaacacatcac

SEQ ID NO: 1770726 - DNA, 25 bp, Homo sapien
aatttagatactagtggcttgaaac

SEQ ID NO: 1770727 - DNA, 25 bp, Homo sapien
tgtaaatagcagacaccatggttct

SEQ ID NO: 1770728 - DNA, 25 bp, Homo sapien
ttttaccgccagcagcatgtgacac

SEQ ID NO: 1770729 - DNA, 25 bp, Homo sapien
gtagattaaggtagcaaacgcagcc

SEQ ID NO: 1770730 - DNA, 25 bp, Homo sapien
cattgggacattacgaaaagtcgga

SEQ ID NO: 1770731 - DNA, 25 bp, Homo sapien
cctctccgtgcacccagacccagag

SEQ ID NO: 1770732 - DNA, 25 bp, Homo sapien
gtgcgcttcactccgcgctcctctc

SEQ ID NO: 1770733 - DNA, 25 bp, Homo sapien
gccacaggccgccggcctctgcttg

SEQ ID NO: 1770734 - DNA, 25 bp, Homo sapien
gtgtgcaccgtgcgcttcactccgc

SEQ ID NO: 1770735 - DNA, 25 bp, Homo sapien
tttcagcacgcaggcaatggagaca

SEQ ID NO: 1770736 - DNA, 25 bp, Homo sapien
gtcgtgttgcccacacgcaggtgct

SEQ ID NO: 1770737 - DNA, 25 bp, Homo sapien
gtgctgctagctgcctcccagtcgc

SEQ ID NO: 1770738 - DNA, 25 bp, Homo sapien
agcctcgggtcgtgttgcccacacg

SEQ ID NO: 1770739 - DNA, 25 bp, Homo sapien
cgctgacagttctctcggtcctcat

SEQ ID NO: 1770740 - DNA, 25 bp, Homo sapien
tccagatacccgctgacagttctct

SEQ ID NO: 1770741 - DNA, 25 bp, Homo sapien
ttctttctccagatacccgctgaca

SEQ ID NO: 1770742 - DNA, 25 bp, Homo sapien
tttgtaattccaagacttcgccgcc

SEQ ID NO: 1770743 - DNA, 25 bp, Homo sapien
aaactgttcaattctttcagtagca

SEQ ID NO: 1770744 - DNA, 25 bp, Homo sapien
aaaactgttcaattctttcagtagc

SEQ ID NO: 1770745 - DNA, 25 bp, Homo sapien
taaaaactgttcaattctttcagta

SEQ ID NO: 1770746 - DNA, 25 bp, Homo sapien
aaaaactgttcaattctttcagtag

SEQ ID NO: 1770747 - DNA, 25 bp, Homo sapien
gtcacttgtaatgtatgggtctgaa

SEQ ID NO: 1770748 - DNA, 25 bp, Homo sapien
accagttcccggtcacttgtaatgt

SEQ ID NO: 1770749 - DNA, 25 bp, Homo sapien
tgagcgtaactacaatattgttgtg

SEQ ID NO: 1770750 - DNA, 25 bp, Homo sapien
aatatttggaggcgattgtagggtt

SEQ ID NO: 1770751 - DNA, 25 bp, Homo sapien
agggttattaatgagcgtaactaca

SEQ ID NO: 1770752 - DNA, 25 bp, Homo sapien
ttaatgagcgtaactacaatattgt

SEQ ID NO: 1770753 - DNA, 25 bp, Homo sapien
aggcagccgccactagccgcttctg

SEQ ID NO: 1770754 - DNA, 25 bp, Homo sapien
gctcccactcctggcacgcgtgtcg

SEQ ID NO: 1770755 - DNA, 25 bp, Homo sapien
tcctggcacgcgtgtcgcgagcgct

SEQ ID NO: 1770756 - DNA, 25 bp, Homo sapien
gcgcccaggctcagaacgcagctgg

SEQ ID NO: 1770757 - DNA, 25 bp, Homo sapien
ctcggggcgatcggcgaccactcac

SEQ ID NO: 1770758 - DNA, 25 bp, Homo sapien
tctcggggcgatcggcgaccactca

SEQ ID NO: 1770759 - DNA, 25 bp, Homo sapien
tcccctgtcactttattgatcccca

SEQ ID NO: 1770760 - DNA, 25 bp, Homo sapien
cccctgtcactttattgatccccag

SEQ ID NO: 1770761 - DNA, 25 bp, Homo sapien
gatcccctgtcactttattgatccc

SEQ ID NO: 1770762 - DNA, 25 bp, Homo sapien
ggatcccctgtcactttattgatcc

SEQ ID NO: 1770763 - DNA, 25 bp, Homo sapien
acgctttccggacccggcacaacag

SEQ ID NO: 1770764 - DNA, 25 bp, Homo sapien
acaacaggtccttcgggcagccgcg

SEQ ID NO: 1770765 - DNA, 25 bp, Homo sapien
gaagagggtagagcattccacgggc

SEQ ID NO: 1770766 - DNA, 25 bp, Homo sapien
gcagccgcgaggttgggaaggccag

SEQ ID NO: 1770767 - DNA, 25 bp, Homo sapien
gtccccgagcgggaagcgtctcgcg

SEQ ID NO: 1770768 - DNA, 25 bp, Homo sapien
cgggcgatcctctcactccctaact

SEQ ID NO: 1770769 - DNA, 25 bp, Homo sapien
ggagccacaagccgcgagtccacgg

SEQ ID NO: 1770770 - DNA, 25 bp, Homo sapien
agcgtctcgcgcagccgggctgcgg

SEQ ID NO: 1770771 - DNA, 25 bp, Homo sapien
tgctggaggtcagggggccggtaac

SEQ ID NO: 1770772 - DNA, 25 bp, Homo sapien
ggatctgctggaggtcagggggccg

SEQ ID NO: 1770773 - DNA, 25 bp, Homo sapien
ctgctggaggtcagggggccggtaa

SEQ ID NO: 1770774 - DNA, 25 bp, Homo sapien
atctgctggaggtcagggggccggt

SEQ ID NO: 1770775 - DNA, 25 bp, Homo sapien
tatactaagagccaacacagagttt

SEQ ID NO: 1770776 - DNA, 25 bp, Homo sapien
taaaggctgaactccgcaagccatc

SEQ ID NO: 1770777 - DNA, 25 bp, Homo sapien
ggcgagcgcatcaggtcatgaacct

SEQ ID NO: 1770778 - DNA, 25 bp, Homo sapien
tccccaaggtagatcactgagtccg

SEQ ID NO: 1770779 - DNA, 25 bp, Homo sapien
agtaaggttcgtgctgttcagacaa

SEQ ID NO: 1770780 - DNA, 25 bp, Homo sapien
tggcagcaaacctgttgggcgactc

SEQ ID NO: 1770781 - DNA, 25 bp, Homo sapien
cagacaattgtaatcctggcagcaa

SEQ ID NO: 1770782 - DNA, 25 bp, Homo sapien
taggaggatggaacaaacgagtaag

SEQ ID NO: 1770783 - DNA, 25 bp, Homo sapien
aggttggaaagctccggtgctgctc

SEQ ID NO: 1770784 - DNA, 25 bp, Homo sapien
tcagttctggcgtgaaggcctccaa

SEQ ID NO: 1770785 - DNA, 25 bp, Homo sapien
gaaaaaatatgggaagcggcagctt

SEQ ID NO: 1770786 - DNA, 25 bp, Homo sapien
tctaatatgcaagtcaggttggaaa

SEQ ID NO: 1770787 - DNA, 25 bp, Homo sapien
gcgaatcatgtccataacaccttgg

SEQ ID NO: 1770788 - DNA, 25 bp, Homo sapien
tcatgtccataacaccttggtgtct

SEQ ID NO: 1770789 - DNA, 25 bp, Homo sapien
agctatatgggcgaatcatgtccat

SEQ ID NO: 1770790 - DNA, 25 bp, Homo sapien
tatgggcgaatcatgtccataacac

SEQ ID NO: 1770791 - DNA, 25 bp, Homo sapien
gggctgacctaacccttcaggaaga

SEQ ID NO: 1770792 - DNA, 25 bp, Homo sapien
gtttaattcacaggctcctaggcac

SEQ ID NO: 1770793 - DNA, 25 bp, Homo sapien
tggaaccctgggatatctaaagagg

SEQ ID NO: 1770794 - DNA, 25 bp, Homo sapien
taacaggagccaaggtctatacttc

SEQ ID NO: 1770795 - DNA, 25 bp, Homo sapien
gaagctgcagtcaaagtgtcggcca

SEQ ID NO: 1770796 - DNA, 25 bp, Homo sapien
ctctcatctagaggctggaccagag

SEQ ID NO: 1770797 - DNA, 25 bp, Homo sapien
gaccagaggagaactgtttcaaggc

SEQ ID NO: 1770798 - DNA, 25 bp, Homo sapien
aagtgtcggccatactgcactctca

SEQ ID NO: 1770799 - DNA, 25 bp, Homo sapien
cttcctctggttctagctttgtaat

SEQ ID NO: 1770800 - DNA, 25 bp, Homo sapien
tctggttctagctttgtaatctgca

SEQ ID NO: 1770801 - DNA, 25 bp, Homo sapien
cctctggttctagctttgtaatctg

SEQ ID NO: 1770802 - DNA, 25 bp, Homo sapien
tggttctagctttgtaatctgcaca

SEQ ID NO: 1770803 - DNA, 25 bp, Homo sapien
cgtggagtcagtgcagaatctaata

SEQ ID NO: 1770804 - DNA, 25 bp, Homo sapien
agtgcagaatctaatactgacttgc

SEQ ID NO: 1770805 - DNA, 25 bp, Homo sapien
cttggttcgtggagtcagtgcagaa

SEQ ID NO: 1770806 - DNA, 25 bp, Homo sapien
aatactgacttgctcccagttatcc

SEQ ID NO: 1770807 - DNA, 25 bp, Homo sapien
ccctgggctctacatgcttctgatg

SEQ ID NO: 1770808 - DNA, 25 bp, Homo sapien
gctgtgcacttgatcagtgtttgca

SEQ ID NO: 1770809 - DNA, 25 bp, Homo sapien
ctttccctgggctctacatgcttct

SEQ ID NO: 1770810 - DNA, 25 bp, Homo sapien
tcacacagcgctgtgcacttgatca

SEQ ID NO: 1770811 - DNA, 25 bp, Homo sapien
tgttttccagttctaatctcatgta

SEQ ID NO: 1770812 - DNA, 25 bp, Homo sapien
tctaatctcatgtaatcgtgatgct

SEQ ID NO: 1770813 - DNA, 25 bp, Homo sapien
taatcgtgatgctttttgttcatcg

SEQ ID NO: 1770814 - DNA, 25 bp, Homo sapien
catgtaatcgtgatgctttttgttc

SEQ ID NO: 1770815 - DNA, 25 bp, Homo sapien
ctgcctttgctgcaaagtgctggaa

SEQ ID NO: 1770816 - DNA, 25 bp, Homo sapien
tgctgcaaagtgctggaagctggcc

SEQ ID NO: 1770817 - DNA, 25 bp, Homo sapien
ctttgctgcaaagtgctggaagctg

SEQ ID NO: 1770818 - DNA, 25 bp, Homo sapien
gcctttgctgcaaagtgctggaagc

SEQ ID NO: 1770819 - DNA, 25 bp, Homo sapien
gggagccaactggattctcaaccaa

SEQ ID NO: 1770820 - DNA, 25 bp, Homo sapien
cctgacctgaggtcatgtggcctta

SEQ ID NO: 1770821 - DNA, 25 bp, Homo sapien
tctcaaccaaagagtgagctgctca

SEQ ID NO: 1770822 - DNA, 25 bp, Homo sapien
gccctaagcttttattcctgacctg

SEQ ID NO: 1770823 - DNA, 25 bp, Homo sapien
atgctggcaagctctcctgtggagt

SEQ ID NO: 1770824 - DNA, 25 bp, Homo sapien
gctggcaagctctcctgtggagtag

SEQ ID NO: 1770825 - DNA, 25 bp, Homo sapien
tgctggcaagctctcctgtggagta

SEQ ID NO: 1770826 - DNA, 25 bp, Homo sapien
caacttggcaagaagttggtgctcc

SEQ ID NO: 1770827 - DNA, 25 bp, Homo sapien
tgtgacgagctccaagaaagcaaag

SEQ ID NO: 1770828 - DNA, 25 bp, Homo sapien
aaatcctcctaaatgtgtgacgagc

SEQ ID NO: 1770829 - DNA, 25 bp, Homo sapien
ccatagtgtggaggactagatgcac

SEQ ID NO: 1770830 - DNA, 25 bp, Homo sapien
ctttaggcagaattgataaaacaga

SEQ ID NO: 1770831 - DNA, 25 bp, Homo sapien
tcgtctgttccttgcaacggttcag

SEQ ID NO: 1770832 - DNA, 25 bp, Homo sapien
tgcaacggttcagtctccaacaaac

SEQ ID NO: 1770833 - DNA, 25 bp, Homo sapien
tgttccttgcaacggttcagtctcc

SEQ ID NO: 1770834 - DNA, 25 bp, Homo sapien
actgcatcttcgtctgttccttgca

SEQ ID NO: 1770835 - DNA, 25 bp, Homo sapien
cttccttttcctcctcagagagcat

SEQ ID NO: 1770836 - DNA, 25 bp, Homo sapien
actcttccttttcctcctcagagag

SEQ ID NO: 1770837 - DNA, 25 bp, Homo sapien
ctgaactaactctgcttttaactct

SEQ ID NO: 1770838 - DNA, 25 bp, Homo sapien
ttaactcttccttttcctcctcaga

SEQ ID NO: 1770839 - DNA, 25 bp, Homo sapien
atctaattaggcctcgatgaagcat

SEQ ID NO: 1770840 - DNA, 25 bp, Homo sapien
tctaattaggcctcgatgaagcatt

SEQ ID NO: 1770841 - DNA, 25 bp, Homo sapien
taattaggcctcgatgaagcattgc

SEQ ID NO: 1770842 - DNA, 25 bp, Homo sapien
attaggcctcgatgaagcattgctt

SEQ ID NO: 1770843 - DNA, 25 bp, Homo sapien
tccatttaatctgctgcccaatatt

SEQ ID NO: 1770844 - DNA, 25 bp, Homo sapien
gtgcatacatacactgattactgta

SEQ ID NO: 1770845 - DNA, 25 bp, Homo sapien
taaagagaataatgcttttagtctc

SEQ ID NO: 1770846 - DNA, 25 bp, Homo sapien
agtatgtttagggaccagtaaagag

SEQ ID NO: 1770847 - DNA, 25 bp, Homo sapien
tacttcggaccacaagctgcatcac

SEQ ID NO: 1770848 - DNA, 25 bp, Homo sapien
gtgtcactctacttcggaccacaag

SEQ ID NO: 1770849 - DNA, 25 bp, Homo sapien
catttactgtaaagtgtcactctac

SEQ ID NO: 1770850 - DNA, 25 bp, Homo sapien
tctgtcactttagtggatttcttac

SEQ ID NO: 1770851 - DNA, 25 bp, Homo sapien
gtactcagattttggaaagtgctgt

SEQ ID NO: 1770852 - DNA, 25 bp, Homo sapien
gaaagtgctgttctatcctgtgaaa

SEQ ID NO: 1770853 - DNA, 25 bp, Homo sapien
ctctataacatattgctctggtatc

SEQ ID NO: 1770854 - DNA, 25 bp, Homo sapien
gccggaaaagaatcattagaactac

SEQ ID NO: 1770855 - DNA, 25 bp, Homo sapien
ctacaaggcggaggggaaatggtgg

SEQ ID NO: 1770856 - DNA, 25 bp, Homo sapien
tttctttcgctgacaaaacttgtcg

SEQ ID NO: 1770857 - DNA, 25 bp, Homo sapien
ttttgttttatctcaactagatgcc

SEQ ID NO: 1770858 - DNA, 25 bp, Homo sapien
tctcaactagatgcctttctttcgc

SEQ ID NO: 1770859 - DNA, 25 bp, Homo sapien
cgtagtgttgtaatttcgtcttcta

SEQ ID NO: 1770860 - DNA, 25 bp, Homo sapien
gcagtggtagtctgcatgtcatgcc

SEQ ID NO: 1770861 - DNA, 25 bp, Homo sapien
cagtggtagtctgcatgtcatgcca

SEQ ID NO: 1770862 - DNA, 25 bp, Homo sapien
agtggtagtctgcatgtcatgccag

SEQ ID NO: 1770863 - DNA, 25 bp, Homo sapien
gccttggccacttggggtgcctgca

SEQ ID NO: 1770864 - DNA, 25 bp, Homo sapien
acttggggtgcctgcagaatggact

SEQ ID NO: 1770865 - DNA, 25 bp, Homo sapien
gggtgcctgcagaatggactgagcc

SEQ ID NO: 1770866 - DNA, 25 bp, Homo sapien
tggccacttggggtgcctgcagaat

SEQ ID NO: 1770867 - DNA, 25 bp, Homo sapien
gtaggtgaaagatacctgcaaggaa

SEQ ID NO: 1770868 - DNA, 25 bp, Homo sapien
taaccaagtaggtgaaagatacctg

SEQ ID NO: 1770869 - DNA, 25 bp, Homo sapien
accaagtaggtgaaagatacctgca

SEQ ID NO: 1770870 - DNA, 25 bp, Homo sapien
caagtaggtgaaagatacctgcaag

SEQ ID NO: 1770871 - DNA, 25 bp, Homo sapien
gaaaatgtcctttcctcaacagatt

SEQ ID NO: 1770872 - DNA, 25 bp, Homo sapien
catgtctccgaacttcttgctgatg

SEQ ID NO: 1770873 - DNA, 25 bp, Homo sapien
ccgttccaacgttgctgaaagctgc

SEQ ID NO: 1770874 - DNA, 25 bp, Homo sapien
tgcagttgccttttgccctgcgtga

SEQ ID NO: 1770875 - DNA, 25 bp, Homo sapien
cttcttgctgatggccgttccaacg

SEQ ID NO: 1770876 - DNA, 25 bp, Homo sapien
tagcgccgttcccatggtattttcc

SEQ ID NO: 1770877 - DNA, 25 bp, Homo sapien
ttagcgccgttcccatggtattttc

SEQ ID NO: 1770878 - DNA, 25 bp, Homo sapien
tcgggtcctagtagaaacagcaact

SEQ ID NO: 1770879 - DNA, 25 bp, Homo sapien
ccagaagtgtatatgtgtggtacct

SEQ ID NO: 1770880 - DNA, 25 bp, Homo sapien
gcattgctatagctacgcactggga

SEQ ID NO: 1770881 - DNA, 25 bp, Homo sapien
aatagtttatgggagtgcattccac

SEQ ID NO: 1770882 - DNA, 25 bp, Homo sapien
aagagtaatacctctatataatatg

SEQ ID NO: 1770883 - DNA, 25 bp, Homo sapien
agtaatacctctatataatatggta

SEQ ID NO: 1770884 - DNA, 25 bp, Homo sapien
gagtaatacctctatataatatggt

SEQ ID NO: 1770885 - DNA, 25 bp, Homo sapien
ctaagagtaatacctctatataata

SEQ ID NO: 1770886 - DNA, 25 bp, Homo sapien
tccagtaaaataaatacgcagagat

SEQ ID NO: 1770887 - DNA, 25 bp, Homo sapien
agtaaaataaatacgcagagatttt

SEQ ID NO: 1770888 - DNA, 25 bp, Homo sapien
taagaatccagtaaaataaatacgc

SEQ ID NO: 1770889 - DNA, 25 bp, Homo sapien
agaatccagtaaaataaatacgcag

SEQ ID NO: 1770890 - DNA, 25 bp, Homo sapien
tattacttgtttgggcataatttaa

SEQ ID NO: 1770891 - DNA, 25 bp, Homo sapien
atttttagccacagtttataatgaa

SEQ ID NO: 1770892 - DNA, 25 bp, Homo sapien
gaaaatgttgtaccctctacatggg

SEQ ID NO: 1770893 - DNA, 25 bp, Homo sapien
tttgattatctagcaacacagattg

SEQ ID NO: 1770894 - DNA, 25 bp, Homo sapien
cagaaatttgttaccagaatgcaca

SEQ ID NO: 1770895 - DNA, 25 bp, Homo sapien
gcacagacagggtagcttcatttac

SEQ ID NO: 1770896 - DNA, 25 bp, Homo sapien
tctgagtactttcctaagtgtgacc

SEQ ID NO: 1770897 - DNA, 25 bp, Homo sapien
caaccgcttggatttcttctgagta

SEQ ID NO: 1770898 - DNA, 25 bp, Homo sapien
caaggagctaatagttcagggacca

SEQ ID NO: 1770899 - DNA, 25 bp, Homo sapien
tctcataggccatagggacttctgc

SEQ ID NO: 1770900 - DNA, 25 bp, Homo sapien
tataaactatcttcctggtcacggg

SEQ ID NO: 1770901 - DNA, 25 bp, Homo sapien
taagaagctctgtcaacaccggaag

SEQ ID NO: 1770902 - DNA, 25 bp, Homo sapien
catacttatggaatggcgaatggag

SEQ ID NO: 1770903 - DNA, 25 bp, Homo sapien
caggcatacttatggaatggcgaat

SEQ ID NO: 1770904 - DNA, 25 bp, Homo sapien
ctcatagcaggcatacttatggaat

SEQ ID NO: 1770905 - DNA, 25 bp, Homo sapien
tagcaggcatacttatggaatggcg

SEQ ID NO: 1770906 - DNA, 25 bp, Homo sapien
tacataaaatattttacacacatta

SEQ ID NO: 1770907 - DNA, 25 bp, Homo sapien
acataaaatattttacacacattac

SEQ ID NO: 1770908 - DNA, 25 bp, Homo sapien
ttacataaaatattttacacacatt

SEQ ID NO: 1770909 - DNA, 25 bp, Homo sapien
tattacataaaatattttacacaca

SEQ ID NO: 1770910 - DNA, 25 bp, Homo sapien
ttttagcactgcaaatgaccctagg

SEQ ID NO: 1770911 - DNA, 25 bp, Homo sapien
tagaagaggcatagctctgactgaa

SEQ ID NO: 1770912 - DNA, 25 bp, Homo sapien
gcaaagttaatccttggcagagctg

SEQ ID NO: 1770913 - DNA, 25 bp, Homo sapien
aagaatttggcttcggcggtctcaa

SEQ ID NO: 1770914 - DNA, 25 bp, Homo sapien
cctaatgcccaatcaaaatggaggt

SEQ ID NO: 1770915 - DNA, 25 bp, Homo sapien
gttttctgtattggatttggcccca

SEQ ID NO: 1770916 - DNA, 25 bp, Homo sapien
gaatacagtgaactgatcttgactc

SEQ ID NO: 1770917 - DNA, 25 bp, Homo sapien
ccaaatagaacctttgcagcctaat

SEQ ID NO: 1770918 - DNA, 25 bp, Homo sapien
tttccaatgagccagtggagcaatg

SEQ ID NO: 1770919 - DNA, 25 bp, Homo sapien
ggcctagctgtcttagcaaccatgc

SEQ ID NO: 1770920 - DNA, 25 bp, Homo sapien
ggtatttggcaatgacacaactgta

SEQ ID NO: 1770921 - DNA, 25 bp, Homo sapien
tcatatctgtaaacacggcctctgc

SEQ ID NO: 1770922 - DNA, 25 bp, Homo sapien
tgaggcttgtgacagttgtctcaac

SEQ ID NO: 1770923 - DNA, 25 bp, Homo sapien
cttgaggcttgtgacagttgtctca

SEQ ID NO: 1770924 - DNA, 25 bp, Homo sapien
gcttgtgacagttgtctcaaccctc

SEQ ID NO: 1770925 - DNA, 25 bp, Homo sapien
gaggcttgtgacagttgtctcaacc

SEQ ID NO: 1770926 - DNA, 25 bp, Homo sapien
gctaagctgtcctgagtcaatggac

SEQ ID NO: 1770927 - DNA, 25 bp, Homo sapien
tcctgagtcaatggacccactcaca

SEQ ID NO: 1770928 - DNA, 25 bp, Homo sapien
gctgtcctgagtcaatggacccact

SEQ ID NO: 1770929 - DNA, 25 bp, Homo sapien
gacccactcacacagaattcacttc

SEQ ID NO: 1770930 - DNA, 25 bp, Homo sapien
gactgtacaggtgacatcagctgca

SEQ ID NO: 1770931 - DNA, 25 bp, Homo sapien
catttgaatcgctgagttgggcttc

SEQ ID NO: 1770932 - DNA, 25 bp, Homo sapien
cattgtaagggcgtaggcagaacta

SEQ ID NO: 1770933 - DNA, 25 bp, Homo sapien
ccaaaagtggcttcacaggagttcg

SEQ ID NO: 1770934 - DNA, 25 bp, Homo sapien
tcttttgcaatagaagtaacacaca

SEQ ID NO: 1770935 - DNA, 25 bp, Homo sapien
gacctctggcagagcattgatcttc

SEQ ID NO: 1770936 - DNA, 25 bp, Homo sapien
tcttaacactgggaacaggtcaggg

SEQ ID NO: 1770937 - DNA, 25 bp, Homo sapien
tcagcttagtttgtggacctctggc

SEQ ID NO: 1770938 - DNA, 25 bp, Homo sapien
tggacactgaaatgtgaacttatgt

SEQ ID NO: 1770939 - DNA, 25 bp, Homo sapien
agacttaatgtatggacactgaaat

SEQ ID NO: 1770940 - DNA, 25 bp, Homo sapien
ggacactgaaatgtgaacttatgta

SEQ ID NO: 1770941 - DNA, 25 bp, Homo sapien
gacttaatgtatggacactgaaatg

SEQ ID NO: 1770942 - DNA, 25 bp, Homo sapien
cctaagtgaatgagcgtggcttccc

SEQ ID NO: 1770943 - DNA, 25 bp, Homo sapien
aaatcagttcttgtaggaagtagcc

SEQ ID NO: 1770944 - DNA, 25 bp, Homo sapien
tcagaaaactctacctgtaaagggc

SEQ ID NO: 1770945 - DNA, 25 bp, Homo sapien
agtagccacagcgaatacctaagtg

SEQ ID NO: 1770946 - DNA, 25 bp, Homo sapien
gccgtggagctgaggacctcctcaa

SEQ ID NO: 1770947 - DNA, 25 bp, Homo sapien
gagctgaggacctcctcaaaactgc

SEQ ID NO: 1770948 - DNA, 25 bp, Homo sapien
caaaactgcctccattagggttcgt

SEQ ID NO: 1770949 - DNA, 25 bp, Homo sapien
ctgcctccattagggttcgtaccgc

SEQ ID NO: 1770950 - DNA, 25 bp, Homo sapien
tgcacatcataaaggaggccaagca

SEQ ID NO: 1770951 - DNA, 25 bp, Homo sapien
gagacagtcatgaagagctccatcc

SEQ ID NO: 1770952 - DNA, 25 bp, Homo sapien
tacacagacaggaattatgaccagt

SEQ ID NO: 1770953 - DNA, 25 bp, Homo sapien
ttgaataacaatgtcaaggcctggg

SEQ ID NO: 1770954 - DNA, 25 bp, Homo sapien
gcatctgtaaaatcataactagcaa

SEQ ID NO: 1770955 - DNA, 25 bp, Homo sapien
gccgccgcacctggctaaaagttga

SEQ ID NO: 1770956 - DNA, 25 bp, Homo sapien
ttttaacatcctaggatagctgagg

SEQ ID NO: 1770957 - DNA, 25 bp, Homo sapien
tctctcatgttcaccaaattagcag

SEQ ID NO: 1770958 - DNA, 25 bp, Homo sapien
gacattatctgattcagtcctgaat

SEQ ID NO: 1770959 - DNA, 25 bp, Homo sapien
tgcagctacttgctgacaattatct

SEQ ID NO: 1770960 - DNA, 25 bp, Homo sapien
tcaatggtgtggcatgagaagtcct

SEQ ID NO: 1770961 - DNA, 25 bp, Homo sapien
catgagaagtcctaaagtgctctac

SEQ ID NO: 1770962 - DNA, 25 bp, Homo sapien
gactcgctcgctagaaaagtgtcca

SEQ ID NO: 1770963 - DNA, 25 bp, Homo sapien
ggatgtgggatttttgccattgact

SEQ ID NO: 1770964 - DNA, 25 bp, Homo sapien
tgtccacataaccaactttagcagg

SEQ ID NO: 1770965 - DNA, 25 bp, Homo sapien
catggtcttacttgtgaacagtgta

SEQ ID NO: 1770966 - DNA, 25 bp, Homo sapien
cctgagaagggcagctcagagatga

SEQ ID NO: 1770967 - DNA, 25 bp, Homo sapien
gtgacacgactcctcatggacaggg

SEQ ID NO: 1770968 - DNA, 25 bp, Homo sapien
tatctcttgaaacgggcttaacaca

SEQ ID NO: 1770969 - DNA, 25 bp, Homo sapien
cagctgcaagagcaagaagagtatc

SEQ ID NO: 1770970 - DNA, 25 bp, Homo sapien
gtaaggtcaactgggaatcggcatc

SEQ ID NO: 1770971 - DNA, 25 bp, Homo sapien
aaggtcatcctcaatgaaggaagaa

SEQ ID NO: 1770972 - DNA, 25 bp, Homo sapien
actgggagacgaagcacccacagct

SEQ ID NO: 1770973 - DNA, 25 bp, Homo sapien
caaacccctagatactgggagacga

SEQ ID NO: 1770974 - DNA, 25 bp, Homo sapien
catcttttacctgattggtattgga

SEQ ID NO: 1770975 - DNA, 25 bp, Homo sapien
tgatgtgttcacatgttgttgggaa

SEQ ID NO: 1770976 - DNA, 25 bp, Homo sapien
catgatcctcagacatacatttgta

SEQ ID NO: 1770977 - DNA, 25 bp, Homo sapien
gttgttgggaatgtatttgaccatg

SEQ ID NO: 1770978 - DNA, 25 bp, Homo sapien
tgtccccgaggaaagctgaaagcct

SEQ ID NO: 1770979 - DNA, 25 bp, Homo sapien
gcagcaggtctgagttgccgactct

SEQ ID NO: 1770980 - DNA, 25 bp, Homo sapien
gccttgatggctttgcattagacgt

SEQ ID NO: 1770981 - DNA, 25 bp, Homo sapien
aattctgggcaatcttgatattggg

SEQ ID NO: 1770982 - DNA, 25 bp, Homo sapien
ccgccatctctggacatctgcttgg

SEQ ID NO: 1770983 - DNA, 25 bp, Homo sapien
attttctgctacaggcagaggacag

SEQ ID NO: 1770984 - DNA, 25 bp, Homo sapien
ttttctgctacaggcagaggacagg

SEQ ID NO: 1770985 - DNA, 25 bp, Homo sapien
tctggacatctgcttggcttgtcta

SEQ ID NO: 1770986 - DNA, 25 bp, Homo sapien
caaaatgtgttgtaaccagaaagct

SEQ ID NO: 1770987 - DNA, 25 bp, Homo sapien
tcaaaatgtgttgtaaccagaaagc

SEQ ID NO: 1770988 - DNA, 25 bp, Homo sapien
cctccagtccaggggacatgttgct

SEQ ID NO: 1770989 - DNA, 25 bp, Homo sapien
tacagttgcaacggagaagtctgtt

SEQ ID NO: 1770990 - DNA, 25 bp, Homo sapien
atacagttgcaacggagaagtctgt

SEQ ID NO: 1770991 - DNA, 25 bp, Homo sapien
ctccagtccaggggacatgttgctg

SEQ ID NO: 1770992 - DNA, 25 bp, Homo sapien
agacaacccagttggctttggaagg

SEQ ID NO: 1770993 - DNA, 25 bp, Homo sapien
agtgcagccgcagataaagctccag

SEQ ID NO: 1770994 - DNA, 25 bp, Homo sapien
gctttggaaggttcatgttacctcg

SEQ ID NO: 1770995 - DNA, 25 bp, Homo sapien
tgttaacacttcttgggactgggca

SEQ ID NO: 1770996 - DNA, 25 bp, Homo sapien
tgtcggtgacgtgaatgaacgaagc

SEQ ID NO: 1770997 - DNA, 25 bp, Homo sapien
taacaacgcctgctaggagtgtttg

SEQ ID NO: 1770998 - DNA, 25 bp, Homo sapien
tgggaccggaaagcagcaagaatgt

SEQ ID NO: 1770999 - DNA, 25 bp, Homo sapien
tttttcttgccgtgaggcgggagcc

SEQ ID NO: 1771000 - DNA, 25 bp, Homo sapien
tgtgacagacgcattgttctcccga

SEQ ID NO: 1771001 - DNA, 25 bp, Homo sapien
acagacgcattgttctcccgagagg

SEQ ID NO: 1771002 - DNA, 25 bp, Homo sapien
tgacagacgcattgttctcccgaga

SEQ ID NO: 1771003 - DNA, 25 bp, Homo sapien
ctgtgtgacagacgcattgttctcc

SEQ ID NO: 1771004 - DNA, 25 bp, Homo sapien
cagggtcgcccttggagacaatggc

SEQ ID NO: 1771005 - DNA, 25 bp, Homo sapien
caaatggcccctggtttatgtcgca

SEQ ID NO: 1771006 - DNA, 25 bp, Homo sapien
gattcctgagcgataatcaggcagc

SEQ ID NO: 1771007 - DNA, 25 bp, Homo sapien
gagggcatctgagtattgacgaaaa

SEQ ID NO: 1771008 - DNA, 25 bp, Homo sapien
ttcttccctttcatcttcagtggtc

SEQ ID NO: 1771009 - DNA, 25 bp, Homo sapien
ctttcttccctttcatcttcagtgg

SEQ ID NO: 1771010 - DNA, 25 bp, Homo sapien
cctttcttccctttcatcttcagtg

SEQ ID NO: 1771011 - DNA, 25 bp, Homo sapien
cttccctttcatcttcagtggtcat

SEQ ID NO: 1771012 - DNA, 25 bp, Homo sapien
tctgctctgcaaaggcgttatcatc

SEQ ID NO: 1771013 - DNA, 25 bp, Homo sapien
tattgcacagagtggctacgagctg

SEQ ID NO: 1771014 - DNA, 25 bp, Homo sapien
gcaagtacacgtgcaggtctgctct

SEQ ID NO: 1771015 - DNA, 25 bp, Homo sapien
tcagatatcacaggcacccgctgtg

SEQ ID NO: 1771016 - DNA, 25 bp, Homo sapien
ccctctagtcatgtggccctggata

SEQ ID NO: 1771017 - DNA, 25 bp, Homo sapien
tcctgagggaggacttatgatttca

SEQ ID NO: 1771018 - DNA, 25 bp, Homo sapien
gctttccgtgtgtgctttgcagcca

SEQ ID NO: 1771019 - DNA, 25 bp, Homo sapien
taacccagagatggatttaaatgca

SEQ ID NO: 1771020 - DNA, 25 bp, Homo sapien
agttcctgggttagtgtcacaggtt

SEQ ID NO: 1771021 - DNA, 25 bp, Homo sapien
tagtgtcacaggttgcggattttcc

SEQ ID NO: 1771022 - DNA, 25 bp, Homo sapien
ggttgcggattttccactccatctc

SEQ ID NO: 1771023 - DNA, 25 bp, Homo sapien
tcctgggttagtgtcacaggttgcg

SEQ ID NO: 1771024 - DNA, 25 bp, Homo sapien
tctctctcttccgagtcctccttca

SEQ ID NO: 1771025 - DNA, 25 bp, Homo sapien
ctctctcttccgagtcctccttcat

SEQ ID NO: 1771026 - DNA, 25 bp, Homo sapien
tctctctctcttccgagtcctcctt

SEQ ID NO: 1771027 - DNA, 25 bp, Homo sapien
ttctctctctcttccgagtcctcct

SEQ ID NO: 1771028 - DNA, 25 bp, Homo sapien
catcttttgcccagaagtcaccaga

SEQ ID NO: 1771029 - DNA, 25 bp, Homo sapien
cctcctggtgataacctgagccaaa

SEQ ID NO: 1771030 - DNA, 25 bp, Homo sapien
tcctcaataaaggagggagagtttc

SEQ ID NO: 1771031 - DNA, 25 bp, Homo sapien
gagaaaattcctcctggtgataacc

SEQ ID NO: 1771032 - DNA, 25 bp, Homo sapien
tctggggaacggagtctggactgaa

SEQ ID NO: 1771033 - DNA, 25 bp, Homo sapien
atttctggggaacggagtctggact

SEQ ID NO: 1771034 - DNA, 25 bp, Homo sapien
ggcatttctggggaacggagtctgg

SEQ ID NO: 1771035 - DNA, 25 bp, Homo sapien
tggactgaagtctgtgacttctgga

SEQ ID NO: 1771036 - DNA, 25 bp, Homo sapien
cattgagagtgaaggattgggtgtc

SEQ ID NO: 1771037 - DNA, 25 bp, Homo sapien
aggattgggtgtctccgtataagtc

SEQ ID NO: 1771038 - DNA, 25 bp, Homo sapien
tctccgtataagtctccagggtggg

SEQ ID NO: 1771039 - DNA, 25 bp, Homo sapien
gggtgtctccgtataagtctccagg

SEQ ID NO: 1771040 - DNA, 25 bp, Homo sapien
catggttgctaacatccacttggaa

SEQ ID NO: 1771041 - DNA, 25 bp, Homo sapien
catccacttggaagatgactacaag

SEQ ID NO: 1771042 - DNA, 25 bp, Homo sapien
tgctattgcaacatggttgctaaca

SEQ ID NO: 1771043 - DNA, 25 bp, Homo sapien
gctgaacgtttgttgctattgcaac

SEQ ID NO: 1771044 - DNA, 25 bp, Homo sapien
gacttagaccagacgtgttgccact

SEQ ID NO: 1771045 - DNA, 25 bp, Homo sapien
gaattgaagtctgagggtgccgtct

SEQ ID NO: 1771046 - DNA, 25 bp, Homo sapien
ggaagcagggctcaatccatagagc

SEQ ID NO: 1771047 - DNA, 25 bp, Homo sapien
gagggtgtcagtttcccgacttaga

SEQ ID NO: 1771048 - DNA, 25 bp, Homo sapien
tttttctttcggctgagattctgaa

SEQ ID NO: 1771049 - DNA, 25 bp, Homo sapien
gtatgatttttctttcggctgagat

SEQ ID NO: 1771050 - DNA, 25 bp, Homo sapien
ttatgttcactctgagacatgggaa

SEQ ID NO: 1771051 - DNA, 25 bp, Homo sapien
actctgagacatgggaagcttccta

SEQ ID NO: 1771052 - DNA, 25 bp, Homo sapien
tactagtggacgaacaatttgggtg

SEQ ID NO: 1771053 - DNA, 25 bp, Homo sapien
ttattctattactagtggacgaaca

SEQ ID NO: 1771054 - DNA, 25 bp, Homo sapien
aacaatttgggtgtcaaacctctga

SEQ ID NO: 1771055 - DNA, 25 bp, Homo sapien
aatttgggtgtcaaacctctgaaag

SEQ ID NO: 1771056 - DNA, 25 bp, Homo sapien
ttatctgatccctggagtccgtagt

SEQ ID NO: 1771057 - DNA, 25 bp, Homo sapien
agtccgtagtgaatctcttgccttc

SEQ ID NO: 1771058 - DNA, 25 bp, Homo sapien
tctcctcagcattcgcctcatcttg

SEQ ID NO: 1771059 - DNA, 25 bp, Homo sapien
tccctggagtccgtagtgaatctct

SEQ ID NO: 1771060 - DNA, 25 bp, Homo sapien
ccaaggcctgagatacaggcagggt

SEQ ID NO: 1771061 - DNA, 25 bp, Homo sapien
gcctgagatacaggcagggttggaa

SEQ ID NO: 1771062 - DNA, 25 bp, Homo sapien
tggtcagtccattcaggcgggtcat

SEQ ID NO: 1771063 - DNA, 25 bp, Homo sapien
tgtggtcagtccattcaggcgggtc

SEQ ID NO: 1771064 - DNA, 25 bp, Homo sapien
taaacaaattgacaccccaatgcca

SEQ ID NO: 1771065 - DNA, 25 bp, Homo sapien
caatgccacaggtaattattatcag

SEQ ID NO: 1771066 - DNA, 25 bp, Homo sapien
gactcgaagccccagtggacccaag

SEQ ID NO: 1771067 - DNA, 25 bp, Homo sapien
tttattgaacagtcttttcattggt

SEQ ID NO: 1771068 - DNA, 25 bp, Homo sapien
cagcaccgtaaggactgcaaaagtc

SEQ ID NO: 1771069 - DNA, 25 bp, Homo sapien
accgtaaggactgcaaaagtcatct

SEQ ID NO: 1771070 - DNA, 25 bp, Homo sapien
gcaccgtaaggactgcaaaagtcat

SEQ ID NO: 1771071 - DNA, 25 bp, Homo sapien
tttcagaaaacaaatgccatgcttt

SEQ ID NO: 1771072 - DNA, 25 bp, Homo sapien
ctctgagcatgcattaataactgtg

SEQ ID NO: 1771073 - DNA, 25 bp, Homo sapien
tctgagcatgcattaataactgtga

SEQ ID NO: 1771074 - DNA, 25 bp, Homo sapien
tctggtacacaatcatgaacaaatg

SEQ ID NO: 1771075 - DNA, 25 bp, Homo sapien
tctttcctactgtcaaggtgggtgt

SEQ ID NO: 1771076 - DNA, 25 bp, Homo sapien
aggtgggtgttcatcggcataccaa

SEQ ID NO: 1771077 - DNA, 25 bp, Homo sapien
aacattagtgacttttgtcctgcca

SEQ ID NO: 1771078 - DNA, 25 bp, Homo sapien
tctcacctctaagtccataaacaca

SEQ ID NO: 1771079 - DNA, 25 bp, Homo sapien
aagtccataaacacacagggctttg

SEQ ID NO: 1771080 - DNA, 25 bp, Homo sapien
taaattactgtactggtctccaaac

SEQ ID NO: 1771081 - DNA, 25 bp, Homo sapien
gatttcctaagattgtgtttccttc

SEQ ID NO: 1771082 - DNA, 25 bp, Homo sapien
cagagaatgaggtaagggaatgaca

SEQ ID NO: 1771083 - DNA, 25 bp, Homo sapien
ggccaaacctactgctttagaagca

SEQ ID NO: 1771084 - DNA, 25 bp, Homo sapien
gaagattgccctcagccctgtttta

SEQ ID NO: 1771085 - DNA, 25 bp, Homo sapien
gaataacagggaaagcctatgcata

SEQ ID NO: 1771086 - DNA, 25 bp, Homo sapien
taaacgtagcaaggaagctagcctt

SEQ ID NO: 1771087 - DNA, 25 bp, Homo sapien
aaggaagctagccttgccatgccca

SEQ ID NO: 1771088 - DNA, 25 bp, Homo sapien
gaagctagccttgccatgcccaaat

SEQ ID NO: 1771089 - DNA, 25 bp, Homo sapien
tccacaagtctaaacgtagcaagga

SEQ ID NO: 1771090 - DNA, 25 bp, Homo sapien
tatcaatacataagcaggagcaaag

SEQ ID NO: 1771091 - DNA, 25 bp, Homo sapien
gcaaagctccagtagccagaagtac

SEQ ID NO: 1771092 - DNA, 25 bp, Homo sapien
aggagcaaagctccagtagccagaa

SEQ ID NO: 1771093 - DNA, 25 bp, Homo sapien
ctttatcaatacataagcaggagca

SEQ ID NO: 1771094 - DNA, 25 bp, Homo sapien
cataagtcaaagtgtgaataatggc

SEQ ID NO: 1771095 - DNA, 25 bp, Homo sapien
cggttttctctctttcgtccataag

SEQ ID NO: 1771096 - DNA, 25 bp, Homo sapien
tcagtgaccagaagatcaatggatt

SEQ ID NO: 1771097 - DNA, 25 bp, Homo sapien
ttggggactgcatatcggttttctc

SEQ ID NO: 1771098 - DNA, 25 bp, Homo sapien
gaacttcctttggttctacactgga

SEQ ID NO: 1771099 - DNA, 25 bp, Homo sapien
ctatgaacttcctttggttctacac

SEQ ID NO: 1771100 - DNA, 25 bp, Homo sapien
actggacccccacaatatgacctac

SEQ ID NO: 1771101 - DNA, 25 bp, Homo sapien
tgaacttcctttggttctacactgg

SEQ ID NO: 1771102 - DNA, 25 bp, Homo sapien
ctaagcagtgaaaagacccttgatc

SEQ ID NO: 1771103 - DNA, 25 bp, Homo sapien
gacactcagaactaatcatccgaaa

SEQ ID NO: 1771104 - DNA, 25 bp, Homo sapien
gacacttgaaacaaaagacactcag

SEQ ID NO: 1771105 - DNA, 25 bp, Homo sapien
tcatcccctacacgagacacttgaa

SEQ ID NO: 1771106 - DNA, 25 bp, Homo sapien
tctccttagcctgccgaaagcataa

SEQ ID NO: 1771107 - DNA, 25 bp, Homo sapien
tgccgaaagcataatagcccctggg

SEQ ID NO: 1771108 - DNA, 25 bp, Homo sapien
gaggagggactctccttagcctgcc

SEQ ID NO: 1771109 - DNA, 25 bp, Homo sapien
tagcctgccgaaagcataatagccc

SEQ ID NO: 1771110 - DNA, 25 bp, Homo sapien
gcccgctatctatgtcttgcctggg

SEQ ID NO: 1771111 - DNA, 25 bp, Homo sapien
aaaggagcgtctggcccgctatcta

SEQ ID NO: 1771112 - DNA, 25 bp, Homo sapien
gcgtctggcccgctatctatgtctt

SEQ ID NO: 1771113 - DNA, 25 bp, Homo sapien
ggaaaggagcgtctggcccgctatc

SEQ ID NO: 1771114 - DNA, 25 bp, Homo sapien
tctttcttcactaattctggaaaga

SEQ ID NO: 1771115 - DNA, 25 bp, Homo sapien
tgtctttcttcactaattctggaaa

SEQ ID NO: 1771116 - DNA, 25 bp, Homo sapien
aatgtctttcttcactaattctgga

SEQ ID NO: 1771117 - DNA, 25 bp, Homo sapien
ggccagttgttgaatgtctttcttc

SEQ ID NO: 1771118 - DNA, 25 bp, Homo sapien
tgggtccctgggttattgagcaaat

SEQ ID NO: 1771119 - DNA, 25 bp, Homo sapien
gggttattgagcaaatactcaacaa

SEQ ID NO: 1771120 - DNA, 25 bp, Homo sapien
tccaagagtggaaggagaagcagtc

SEQ ID NO: 1771121 - DNA, 25 bp, Homo sapien
tactcaacaacctgctcttctgttc

SEQ ID NO: 1771122 - DNA, 25 bp, Homo sapien
ccaagaccgctcagtggtggaagag

SEQ ID NO: 1771123 - DNA, 25 bp, Homo sapien
gggaatgcctataggcaactgtcac

SEQ ID NO: 1771124 - DNA, 25 bp, Homo sapien
taggcaactgtcacaaagagccgct

SEQ ID NO: 1771125 - DNA, 25 bp, Homo sapien
tattcagctgcatacttgattttaa

SEQ ID NO: 1771126 - DNA, 25 bp, Homo sapien
tcagctcaaagaacagtggtcaact

SEQ ID NO: 1771127 - DNA, 25 bp, Homo sapien
gctcaaagaacagtggtcaactgga

SEQ ID NO: 1771128 - DNA, 25 bp, Homo sapien
tcaaagaacagtggtcaactggatg

SEQ ID NO: 1771129 - DNA, 25 bp, Homo sapien
aaagaacagtggtcaactggatgac

SEQ ID NO: 1771130 - DNA, 25 bp, Homo sapien
caagacgctgtctcctgttactgag

SEQ ID NO: 1771131 - DNA, 25 bp, Homo sapien
tcatttagatagtgcctgaggatta

SEQ ID NO: 1771132 - DNA, 25 bp, Homo sapien
cctgaggattaactggcaagacgct

SEQ ID NO: 1771133 - DNA, 25 bp, Homo sapien
agtattcccgggctcggagctcggc

SEQ ID NO: 1771134 - DNA, 25 bp, Homo sapien
gcagctgctactctgttggtattct

SEQ ID NO: 1771135 - DNA, 25 bp, Homo sapien
ttatagagtgactttgcctgtagtt

SEQ ID NO: 1771136 - DNA, 25 bp, Homo sapien
taagccttgtctccaagtcaccaag

SEQ ID NO: 1771137 - DNA, 25 bp, Homo sapien
tagttagggctctaatggcaatcct

SEQ ID NO: 1771138 - DNA, 25 bp, Homo sapien
cacagttggttgtaataaccaaggt

SEQ ID NO: 1771139 - DNA, 25 bp, Homo sapien
ttcacagttggttgtaataaccaag

SEQ ID NO: 1771140 - DNA, 25 bp, Homo sapien
cattatcatgagatcttctcctgaa

SEQ ID NO: 1771141 - DNA, 25 bp, Homo sapien
acattatcatgagatcttctcctga

SEQ ID NO: 1771142 - DNA, 25 bp, Homo sapien
agctccttgtatggccacgctggtc

SEQ ID NO: 1771143 - DNA, 25 bp, Homo sapien
gggcagagctccttgtatggccacg

SEQ ID NO: 1771144 - DNA, 25 bp, Homo sapien
gtcctgggccatagaatatccagct

SEQ ID NO: 1771145 - DNA, 25 bp, Homo sapien
gccatagaatatccagctgcctgca

SEQ ID NO: 1771146 - DNA, 25 bp, Homo sapien
gctgtttgccgtctgtccacctctc

SEQ ID NO: 1771147 - DNA, 25 bp, Homo sapien
aggagcacccgctgtttgccgtctg

SEQ ID NO: 1771148 - DNA, 25 bp, Homo sapien
ccgctgtttgccgtctgtccacctc

SEQ ID NO: 1771149 - DNA, 25 bp, Homo sapien
gagcacccgctgtttgccgtctgtc

SEQ ID NO: 1771150 - DNA, 25 bp, Homo sapien
tcttggatctctattcagttcctca

SEQ ID NO: 1771151 - DNA, 25 bp, Homo sapien
tatcttggatctctattcagttcct

SEQ ID NO: 1771152 - DNA, 25 bp, Homo sapien
cttggatctctattcagttcctcat

SEQ ID NO: 1771153 - DNA, 25 bp, Homo sapien
ttggatctctattcagttcctcatt

SEQ ID NO: 1771154 - DNA, 25 bp, Homo sapien
ggctgtcatggtggtgctgacgcac

SEQ ID NO: 1771155 - DNA, 25 bp, Homo sapien
ccttgtgattcagagcctgggctgt

SEQ ID NO: 1771156 - DNA, 25 bp, Homo sapien
ttaaagcgccttgtgattcagagcc

SEQ ID NO: 1771157 - DNA, 25 bp, Homo sapien
cctgggctgtcatggtggtgctgac

SEQ ID NO: 1771158 - DNA, 25 bp, Homo sapien
tattctcagactgttggtcaaagta

SEQ ID NO: 1771159 - DNA, 25 bp, Homo sapien
tagaggttctctagttcggaataca

SEQ ID NO: 1771160 - DNA, 25 bp, Homo sapien
aagtagaggttctctagttcggaat

SEQ ID NO: 1771161 - DNA, 25 bp, Homo sapien
cagactgttggtcaaagtagaggtt

SEQ ID NO: 1771162 - DNA, 25 bp, Homo sapien
ttcccctccatcctcactgcccact

SEQ ID NO: 1771163 - DNA, 25 bp, Homo sapien
atcctcactgcccactccagttctc

SEQ ID NO: 1771164 - DNA, 25 bp, Homo sapien
tgggggcaatgctccttcccctcca

SEQ ID NO: 1771165 - DNA, 25 bp, Homo sapien
atgggggcaatgctccttcccctcc

SEQ ID NO: 1771166 - DNA, 25 bp, Homo sapien
tcagtgccctctggcttccatgcat

SEQ ID NO: 1771167 - DNA, 25 bp, Homo sapien
agtgccctctggcttccatgcataa

SEQ ID NO: 1771168 - DNA, 25 bp, Homo sapien
ccctctggcttccatgcataagctg

SEQ ID NO: 1771169 - DNA, 25 bp, Homo sapien
tgccctctggcttccatgcataagc

SEQ ID NO: 1771170 - DNA, 25 bp, Homo sapien
gctgcctgtcccgctgtgacagcag

SEQ ID NO: 1771171 - DNA, 25 bp, Homo sapien
agctgcaggcacttggagaacaaga

SEQ ID NO: 1771172 - DNA, 25 bp, Homo sapien
gcctgtcccgctgtgacagcaggca

SEQ ID NO: 1771173 - DNA, 25 bp, Homo sapien
tccacacaggctgcctgtcccgctg

SEQ ID NO: 1771174 - DNA, 25 bp, Homo sapien
cattttgtggtcattcttcgagaga

SEQ ID NO: 1771175 - DNA, 25 bp, Homo sapien
aaatggtagactgcgttttcttctt

SEQ ID NO: 1771176 - DNA, 25 bp, Homo sapien
gaaatggtagactgcgttttcttct

SEQ ID NO: 1771177 - DNA, 25 bp, Homo sapien
taagcattttgtggtcattcttcga

SEQ ID NO: 1771178 - DNA, 25 bp, Homo sapien
catcaggttaacttctttatgtgtc

SEQ ID NO: 1771179 - DNA, 25 bp, Homo sapien
ggtctgctgttctataattacactg

SEQ ID NO: 1771180 - DNA, 25 bp, Homo sapien
ggttgggtctgctgttctataatta

SEQ ID NO: 1771181 - DNA, 25 bp, Homo sapien
tacactgtgttttactcagatgctg

SEQ ID NO: 1771182 - DNA, 25 bp, Homo sapien
gcaaacagctgcgttgctgtcactt

SEQ ID NO: 1771183 - DNA, 25 bp, Homo sapien
agcagtaggacgtgctttggcacag

SEQ ID NO: 1771184 - DNA, 25 bp, Homo sapien
cagctgtctggcatacctaggttaa

SEQ ID NO: 1771185 - DNA, 25 bp, Homo sapien
tacctaggttaaattctaatgcaaa

SEQ ID NO: 1771186 - DNA, 25 bp, Homo sapien
ctagtgcttgacaaggaactgaaac

SEQ ID NO: 1771187 - DNA, 25 bp, Homo sapien
ttttatccacagaaaaggctgccct

SEQ ID NO: 1771188 - DNA, 25 bp, Homo sapien
caaggctgtctagcctgggaaaagc

SEQ ID NO: 1771189 - DNA, 25 bp, Homo sapien
tggtgtgccactctatcagtggttc

SEQ ID NO: 1771190 - DNA, 25 bp, Homo sapien
ggaaaagctgcatggacacgttcca

SEQ ID NO: 1771191 - DNA, 25 bp, Homo sapien
taacccatggattgcaggaagcagc

SEQ ID NO: 1771192 - DNA, 25 bp, Homo sapien
tactacaccctgaaactgtgctcta

SEQ ID NO: 1771193 - DNA, 25 bp, Homo sapien
ctctatagtgcgcagtgatctcaga

SEQ ID NO: 1771194 - DNA, 25 bp, Homo sapien
cagctcgtcattgccaagtaaccca

SEQ ID NO: 1771195 - DNA, 25 bp, Homo sapien
tgtgctgagacatgatatgtttcct

SEQ ID NO: 1771196 - DNA, 25 bp, Homo sapien
gctccccagcaagtcaccgggtatc

SEQ ID NO: 1771197 - DNA, 25 bp, Homo sapien
gcaagtcaccgggtatcccctggtg

SEQ ID NO: 1771198 - DNA, 25 bp, Homo sapien
ccgggtatcccctggtgtgctgaga

SEQ ID NO: 1771199 - DNA, 25 bp, Homo sapien
acacaaagcaggcttctaaagattc

SEQ ID NO: 1771200 - DNA, 25 bp, Homo sapien
gcacacaaagcaggcttctaaagat

SEQ ID NO: 1771201 - DNA, 25 bp, Homo sapien
gtttgcttcaagcctcacgctgagt

SEQ ID NO: 1771202 - DNA, 25 bp, Homo sapien
tcaagcctcacgctgagtccctgct

SEQ ID NO: 1771203 - DNA, 25 bp, Homo sapien
acacagcagtgacgtcctgctggga

SEQ ID NO: 1771204 - DNA, 25 bp, Homo sapien
gatacacagcagtgacgtcctgctg

SEQ ID NO: 1771205 - DNA, 25 bp, Homo sapien
ctagtaactgatacacagcagtgac

SEQ ID NO: 1771206 - DNA, 25 bp, Homo sapien
tgatacacagcagtgacgtcctgct

SEQ ID NO: 1771207 - DNA, 25 bp, Homo sapien
ttatggataccagcctgttgttgct

SEQ ID NO: 1771208 - DNA, 25 bp, Homo sapien
gcctgttgttgctggaagcaaaggc

SEQ ID NO: 1771209 - DNA, 25 bp, Homo sapien
gaagcaaaggctgccacaggctttc

SEQ ID NO: 1771210 - DNA, 25 bp, Homo sapien
gcaaaggctgccacaggctttcagt

SEQ ID NO: 1771211 - DNA, 25 bp, Homo sapien
tcactccagcgaacattccgcgatg

SEQ ID NO: 1771212 - DNA, 25 bp, Homo sapien
gggtctgcatgtcccatgtgctcca

SEQ ID NO: 1771213 - DNA, 25 bp, Homo sapien
tccgcgatggctctgtatccaagaa

SEQ ID NO: 1771214 - DNA, 25 bp, Homo sapien
tgtacttatgaatcaatggaaggac

SEQ ID NO: 1771215 - DNA, 25 bp, Homo sapien
gaaacattgggctggtataccagat

SEQ ID NO: 1771216 - DNA, 25 bp, Homo sapien
tataccagatttgggccagcaagcc

SEQ ID NO: 1771217 - DNA, 25 bp, Homo sapien
cggattgtttcatgggctatgtacc

SEQ ID NO: 1771218 - DNA, 25 bp, Homo sapien
gaagtaatcaggcaagatcttgagc

SEQ ID NO: 1771219 - DNA, 25 bp, Homo sapien
cagctcctctgaaagtttgtaagat

SEQ ID NO: 1771220 - DNA, 25 bp, Homo sapien
tcctctgaaagtttgtaagatgtcc

SEQ ID NO: 1771221 - DNA, 25 bp, Homo sapien
aatctggcttcagctcctctgaaag

SEQ ID NO: 1771222 - DNA, 25 bp, Homo sapien
gctcctctgaaagtttgtaagatgt

SEQ ID NO: 1771223 - DNA, 25 bp, Homo sapien
tcggagaagatgactgaacagaatt

SEQ ID NO: 1771224 - DNA, 25 bp, Homo sapien
gaagatgactgaacagaattgtata

SEQ ID NO: 1771225 - DNA, 25 bp, Homo sapien
aaagatgagagagggttctcggaga

SEQ ID NO: 1771226 - DNA, 25 bp, Homo sapien
ggttctcggagaagatgactgaaca

SEQ ID NO: 1771227 - DNA, 25 bp, Homo sapien
tccttctggtgaccatttgtaagaa

SEQ ID NO: 1771228 - DNA, 25 bp, Homo sapien
ccttctggtgaccatttgtaagaac

SEQ ID NO: 1771229 - DNA, 25 bp, Homo sapien
ctttttgttgtgggataggagtcag

SEQ ID NO: 1771230 - DNA, 25 bp, Homo sapien
tttttgttgtgggataggagtcagt

SEQ ID NO: 1771231 - DNA, 25 bp, Homo sapien
gaagtctttttgttgtgggatagga

SEQ ID NO: 1771232 - DNA, 25 bp, Homo sapien
ggtcaaaaaccacaggctaggctct

SEQ ID NO: 1771233 - DNA, 25 bp, Homo sapien
tcagagcagattggaaatggacccc

SEQ ID NO: 1771234 - DNA, 25 bp, Homo sapien
cagaactagtggcttcagagggcct

SEQ ID NO: 1771235 - DNA, 25 bp, Homo sapien
gaactcattattagggccaggcgcg

SEQ ID NO: 1771236 - DNA, 25 bp, Homo sapien
tgctcaaggccctagttgagggttt

SEQ ID NO: 1771237 - DNA, 25 bp, Homo sapien
gaagcagtcaccgagatggaatgcg

SEQ ID NO: 1771238 - DNA, 25 bp, Homo sapien
acaagttgctagaccctgggctaaa

SEQ ID NO: 1771239 - DNA, 25 bp, Homo sapien
cagggaacacgcagataaagaggac

SEQ ID NO: 1771240 - DNA, 25 bp, Homo sapien
gaattgggccaagggagaagtcact

SEQ ID NO: 1771241 - DNA, 25 bp, Homo sapien
caaccatcgttgctaaatgatgact

SEQ ID NO: 1771242 - DNA, 25 bp, Homo sapien
tacacattctagtttagcatccatg

SEQ ID NO: 1771243 - DNA, 25 bp, Homo sapien
taatgggaagccctttaacatggct

SEQ ID NO: 1771244 - DNA, 25 bp, Homo sapien
tgtgtgtaggtagctcattatgaac

SEQ ID NO: 1771245 - DNA, 25 bp, Homo sapien
gtctttattgctttatattctgcct

SEQ ID NO: 1771246 - DNA, 25 bp, Homo sapien
ctttggtgagttgttttttcatgcc

SEQ ID NO: 1771247 - DNA, 25 bp, Homo sapien
ttcatgccaacaagtctttattgct

SEQ ID NO: 1771248 - DNA, 25 bp, Homo sapien
tattgctttatattctgccttggtt

SEQ ID NO: 1771249 - DNA, 25 bp, Homo sapien
gaaatttgtgagtgatatgagctgc

SEQ ID NO: 1771250 - DNA, 25 bp, Homo sapien
tatgagctgcttgaatactaaaggt

SEQ ID NO: 1771251 - DNA, 25 bp, Homo sapien
atactgcatactcagtggcaccctg

SEQ ID NO: 1771252 - DNA, 25 bp, Homo sapien
ttttatgattaagtcagcatactgc

SEQ ID NO: 1771253 - DNA, 25 bp, Homo sapien
gaagaaacaatctgaccgaattgtc

SEQ ID NO: 1771254 - DNA, 25 bp, Homo sapien
ccttcagtgcaattgatctcataga

SEQ ID NO: 1771255 - DNA, 25 bp, Homo sapien
gatctcatagaggtattgggaagaa

SEQ ID NO: 1771256 - DNA, 25 bp, Homo sapien
tagaggtattgggaagaaacaatct

SEQ ID NO: 1771257 - DNA, 25 bp, Homo sapien
atccccgaacctctcctcctctgaa

SEQ ID NO: 1771258 - DNA, 25 bp, Homo sapien
gcccaagccaagtcttgtacccgat

SEQ ID NO: 1771259 - DNA, 25 bp, Homo sapien
aattattgacttccaccttcgttct

SEQ ID NO: 1771260 - DNA, 25 bp, Homo sapien
tcctctgaagctaccccatgcttca

SEQ ID NO: 1771261 - DNA, 25 bp, Homo sapien
cgcgtagagcaaaccgcagttcttt

SEQ ID NO: 1771262 - DNA, 25 bp, Homo sapien
tgccgttaggaaagaaaggccagga

SEQ ID NO: 1771263 - DNA, 25 bp, Homo sapien
cttttcagcgaaagggaaggcttag

SEQ ID NO: 1771264 - DNA, 25 bp, Homo sapien
gaagaaaagatgtccgcgcgtagag

SEQ ID NO: 1771265 - DNA, 25 bp, Homo sapien
ctcccggccgcaggtgaacgctccg

SEQ ID NO: 1771266 - DNA, 25 bp, Homo sapien
gccaggctcaagctcgaccgtcaca

SEQ ID NO: 1771267 - DNA, 25 bp, Homo sapien
gccgcaggtgaacgctccgcggccc

SEQ ID NO: 1771268 - DNA, 25 bp, Homo sapien
gctcaagctcgaccgtcacaacttt

SEQ ID NO: 1771269 - DNA, 25 bp, Homo sapien
ctagcggctctttcccacgccgcaa

SEQ ID NO: 1771270 - DNA, 25 bp, Homo sapien
gggcgcagcaccctgacgcccgcct

SEQ ID NO: 1771271 - DNA, 25 bp, Homo sapien
gccgcaactctgctcggccgcaaga

SEQ ID NO: 1771272 - DNA, 25 bp, Homo sapien
ggcgcggtctgctcctagcggctct

SEQ ID NO: 1771273 - DNA, 25 bp, Homo sapien
cgatggtctcgtccatgtcgctctc

SEQ ID NO: 1771274 - DNA, 25 bp, Homo sapien
tctcggaggtcgtctcctcgcaggg

SEQ ID NO: 1771275 - DNA, 25 bp, Homo sapien
gagtaattgttctcgctccccacgt

SEQ ID NO: 1771276 - DNA, 25 bp, Homo sapien
attgttctcgctccccacgtcgatg

SEQ ID NO: 1771277 - DNA, 25 bp, Homo sapien
attcaatctaatcacagagctagta

SEQ ID NO: 1771278 - DNA, 25 bp, Homo sapien
gaattcaatctaatcacagagctag

SEQ ID NO: 1771279 - DNA, 25 bp, Homo sapien
gagaattcaatctaatcacagagct

SEQ ID NO: 1771280 - DNA, 25 bp, Homo sapien
gttggagaattcaatctaatcacag

SEQ ID NO: 1771281 - DNA, 25 bp, Homo sapien
aaagcagttggcacaagtcttctca

SEQ ID NO: 1771282 - DNA, 25 bp, Homo sapien
actcagataaactgttatttatccg

SEQ ID NO: 1771283 - DNA, 25 bp, Homo sapien
tgttatttatccgatcccgacgcct

SEQ ID NO: 1771284 - DNA, 25 bp, Homo sapien
tggcacaagtcttctcaactcagat

SEQ ID NO: 1771285 - DNA, 25 bp, Homo sapien
aatgatccactgtcatttgcaatat

SEQ ID NO: 1771286 - DNA, 25 bp, Homo sapien
aaatgatccactgtcatttgcaata

SEQ ID NO: 1771287 - DNA, 25 bp, Homo sapien
aagtcctaaacaaatctctgaccag

SEQ ID NO: 1771288 - DNA, 25 bp, Homo sapien
ctttctgtacagattccagcatgcg

SEQ ID NO: 1771289 - DNA, 25 bp, Homo sapien
tcctaaacaaatctctgaccaggct

SEQ ID NO: 1771290 - DNA, 25 bp, Homo sapien
cagcatgcgcttcttaagtcctaaa

SEQ ID NO: 1771291 - DNA, 25 bp, Homo sapien
gcttggtcacatttatctgagtctc

SEQ ID NO: 1771292 - DNA, 25 bp, Homo sapien
tggttactaccataaaaatggctag

SEQ ID NO: 1771293 - DNA, 25 bp, Homo sapien
taaaaatggctagagcttggtcaca

SEQ ID NO: 1771294 - DNA, 25 bp, Homo sapien
ctatggttactaccataaaaatggc

SEQ ID NO: 1771295 - DNA, 25 bp, Homo sapien
tcttgcagctaaatatcacagtggg

SEQ ID NO: 1771296 - DNA, 25 bp, Homo sapien
gaagtggaacgataatcctttctgg

SEQ ID NO: 1771297 - DNA, 25 bp, Homo sapien
cgcgtttcaaacacttccagagaaa

SEQ ID NO: 1771298 - DNA, 25 bp, Homo sapien
cacatgagttggagattaaagggct

SEQ ID NO: 1771299 - DNA, 25 bp, Homo sapien
agtccatggcaagagcgtgtgcgtc

SEQ ID NO: 1771300 - DNA, 25 bp, Homo sapien
ggccttccacggagctcaggtaccg

SEQ ID NO: 1771301 - DNA, 25 bp, Homo sapien
gaatcctatgctcatgaagtccatg

SEQ ID NO: 1771302 - DNA, 25 bp, Homo sapien
gcaacttctgttaggcactctcgga

SEQ ID NO: 1771303 - DNA, 25 bp, Homo sapien
acgctgcccgtggatggcattcgga

SEQ ID NO: 1771304 - DNA, 25 bp, Homo sapien
ctgatactgacaagggcgggctgat

SEQ ID NO: 1771305 - DNA, 25 bp, Homo sapien
gggctgaatccgcatgggcaaacgt

SEQ ID NO: 1771306 - DNA, 25 bp, Homo sapien
cttctgaagttgtggagaggcgaca

SEQ ID NO: 1771307 - DNA, 25 bp, Homo sapien
cggcatctgtatggctaccttcagg

SEQ ID NO: 1771308 - DNA, 25 bp, Homo sapien
gttactattgcaagaagttcaagaa

SEQ ID NO: 1771309 - DNA, 25 bp, Homo sapien
tcctttgtggatctgtcggcatctg

SEQ ID NO: 1771310 - DNA, 25 bp, Homo sapien
gtctcaaatagctttattgttcctt

SEQ ID NO: 1771311 - DNA, 25 bp, Homo sapien
catgaattaaatagcctctggtgga

SEQ ID NO: 1771312 - DNA, 25 bp, Homo sapien
taagctcaggcacttacgaaacacg

SEQ ID NO: 1771313 - DNA, 25 bp, Homo sapien
tctggtggacacatggtaggcaact

SEQ ID NO: 1771314 - DNA, 25 bp, Homo sapien
tgatgtcagttaccgagctgccttg

SEQ ID NO: 1771315 - DNA, 25 bp, Homo sapien
gaaccacaaggcttatagacacaag

SEQ ID NO: 1771316 - DNA, 25 bp, Homo sapien
tgtttggcccaatagcttcaggagc

SEQ ID NO: 1771317 - DNA, 25 bp, Homo sapien
tatcattaggacgtatgtacacgcc

SEQ ID NO: 1771318 - DNA, 25 bp, Homo sapien
tatttaggcctcactgaagcagagg

SEQ ID NO: 1771319 - DNA, 25 bp, Homo sapien
acttggatgggagatggcaacctcc

SEQ ID NO: 1771320 - DNA, 25 bp, Homo sapien
caatgctgggccacataacagttat

SEQ ID NO: 1771321 - DNA, 25 bp, Homo sapien
aataccttctggctcactgacgtga

SEQ ID NO: 1771322 - DNA, 25 bp, Homo sapien
gcaacctccggtggtcaggttaata

SEQ ID NO: 1771323 - DNA, 25 bp, Homo sapien
gagtcttagactcacggaaatatag

SEQ ID NO: 1771324 - DNA, 25 bp, Homo sapien
tgtattgcctaaaatccgagatgcc

SEQ ID NO: 1771325 - DNA, 25 bp, Homo sapien
agcagaacaactagaagcagtccca

SEQ ID NO: 1771326 - DNA, 25 bp, Homo sapien
gcctcagtcagtgcttagatcttaa

SEQ ID NO: 1771327 - DNA, 25 bp, Homo sapien
gggtttgaggatcgcatcaaaaaag

SEQ ID NO: 1771328 - DNA, 25 bp, Homo sapien
gagcactgagactcgtttcccatga

SEQ ID NO: 1771329 - DNA, 25 bp, Homo sapien
tgtggctcccactcttgggaatcct

SEQ ID NO: 1771330 - DNA, 25 bp, Homo sapien
gtcagtgtggccagataattcatgg

SEQ ID NO: 1771331 - DNA, 25 bp, Homo sapien
gatgactgcaagtcacagtggcggc

SEQ ID NO: 1771332 - DNA, 25 bp, Homo sapien
catcttgcagcggagcgaagtctct

SEQ ID NO: 1771333 - DNA, 25 bp, Homo sapien
caactataacggctgacattttcaa

SEQ ID NO: 1771334 - DNA, 25 bp, Homo sapien
ttgagttatatcttactgccctctg

SEQ ID NO: 1771335 - DNA, 25 bp, Homo sapien
gaaacgagattcaagcacaggctca

SEQ ID NO: 1771336 - DNA, 25 bp, Homo sapien
atcttcctgttctcatattattaca

SEQ ID NO: 1771337 - DNA, 25 bp, Homo sapien
tgaacttgatctaagattccttggg

SEQ ID NO: 1771338 - DNA, 25 bp, Homo sapien
tcaatgatttaaactccatctctga

SEQ ID NO: 1771339 - DNA, 25 bp, Homo sapien
cataagaacgcttgtgatgactggg

SEQ ID NO: 1771340 - DNA, 25 bp, Homo sapien
taggatagttgtcctgccagaagaa

SEQ ID NO: 1771341 - DNA, 25 bp, Homo sapien
tacaacgtaagtctcagtgggctaa

SEQ ID NO: 1771342 - DNA, 25 bp, Homo sapien
gggcccatccaggtaatctaggata

SEQ ID NO: 1771343 - DNA, 25 bp, Homo sapien
agggatacgagtagccatcctgcaa

SEQ ID NO: 1771344 - DNA, 25 bp, Homo sapien
tgtggagggatacgagtagccatcc

SEQ ID NO: 1771345 - DNA, 25 bp, Homo sapien
aatactgatgatcatgtgtggaggg

SEQ ID NO: 1771346 - DNA, 25 bp, Homo sapien
aggccggttgggacacaggaggcaa

SEQ ID NO: 1771347 - DNA, 25 bp, Homo sapien
caggggaggaccgtacgccgaggag

SEQ ID NO: 1771348 - DNA, 25 bp, Homo sapien
aggaccgtacgccgaggaggagcaa

SEQ ID NO: 1771349 - DNA, 25 bp, Homo sapien
ggaggaccgtacgccgaggaggagc

SEQ ID NO: 1771350 - DNA, 25 bp, Homo sapien
accgtacgccgaggaggagcaagag

SEQ ID NO: 1771351 - DNA, 25 bp, Homo sapien
tgcatttctgggagcggtggcctct

SEQ ID NO: 1771352 - DNA, 25 bp, Homo sapien
agaaggggatcggtcgcatgcattt

SEQ ID NO: 1771353 - DNA, 25 bp, Homo sapien
gatcggtcgcatgcatttctgggag

SEQ ID NO: 1771354 - DNA, 25 bp, Homo sapien
gggatcggtcgcatgcatttctggg

SEQ ID NO: 1771355 - DNA, 25 bp, Homo sapien
gcccggagacaagacaactgacaaa

SEQ ID NO: 1771356 - DNA, 25 bp, Homo sapien
cctgagatatcaaagcccggagaca

SEQ ID NO: 1771357 - DNA, 25 bp, Homo sapien
taattctaccaaggcctgagatatc

SEQ ID NO: 1771358 - DNA, 25 bp, Homo sapien
tgtttatatgaataattctaccaag

SEQ ID NO: 1771359 - DNA, 25 bp, Homo sapien
gagtagctaaaccacagtcaacctg

SEQ ID NO: 1771360 - DNA, 25 bp, Homo sapien
taacccactgcggtttggagacaat

SEQ ID NO: 1771361 - DNA, 25 bp, Homo sapien
tgtggaacagaacccgaacttgaac

SEQ ID NO: 1771362 - DNA, 25 bp, Homo sapien
ggcatccggcttaacctttgccaag

SEQ ID NO: 1771363 - DNA, 25 bp, Homo sapien
ggaaagggtaccacaaccaatgaga

SEQ ID NO: 1771364 - DNA, 25 bp, Homo sapien
cagggcatttggcacctctgcttgc

SEQ ID NO: 1771365 - DNA, 25 bp, Homo sapien
gaagaagatacgaaattcccaagta

SEQ ID NO: 1771366 - DNA, 25 bp, Homo sapien
tgcttgcccccaactaaatgccagt

SEQ ID NO: 1771367 - DNA, 25 bp, Homo sapien
cttgtttgtacacatggcaccattt

SEQ ID NO: 1771368 - DNA, 25 bp, Homo sapien
gcagagaccccttaactacaccaaa

SEQ ID NO: 1771369 - DNA, 25 bp, Homo sapien
ttttttgaatcatcagaaaagtgtt

SEQ ID NO: 1771370 - DNA, 25 bp, Homo sapien
ggtacatgtgtcttaacttgcaaat

SEQ ID NO: 1771371 - DNA, 25 bp, Homo sapien
aaaaaaggttgtctccagatcaagc

SEQ ID NO: 1771372 - DNA, 25 bp, Homo sapien
catggctttaaacccttgcgtctcc

SEQ ID NO: 1771373 - DNA, 25 bp, Homo sapien
gtgattcaccagtctaaatttctgc

SEQ ID NO: 1771374 - DNA, 25 bp, Homo sapien
ttccaattgtctacttattcagtga

SEQ ID NO: 1771375 - DNA, 25 bp, Homo sapien
gataacaaagcaactgtaaacttaa

SEQ ID NO: 1771376 - DNA, 25 bp, Homo sapien
aaataaaatggagtagaactacatg

SEQ ID NO: 1771377 - DNA, 25 bp, Homo sapien
gtttacactggccaatgtgaaaaat

SEQ ID NO: 1771378 - DNA, 25 bp, Homo sapien
gagtagaactacatggactaaaaca

SEQ ID NO: 1771379 - DNA, 25 bp, Homo sapien
aatacacaatcaaaagtgcaaagta

SEQ ID NO: 1771380 - DNA, 25 bp, Homo sapien
aaagtccctctttttaatcagtgag

SEQ ID NO: 1771381 - DNA, 25 bp, Homo sapien
tctttttaatcagtgagtcgtaacc

SEQ ID NO: 1771382 - DNA, 25 bp, Homo sapien
caaaagtgcaaagtatttgaaaaag

SEQ ID NO: 1771383 - DNA, 25 bp, Homo sapien
gttccttcttctcttccttggtatc

SEQ ID NO: 1771384 - DNA, 25 bp, Homo sapien
cgttccttcttctcttccttggtat

SEQ ID NO: 1771385 - DNA, 25 bp, Homo sapien
ccttcttctcttccttggtatccat

SEQ ID NO: 1771386 - DNA, 25 bp, Homo sapien
tccttcttctcttccttggtatcca

SEQ ID NO: 1771387 - DNA, 25 bp, Homo sapien
aagctgtgattcatccatactatgg

SEQ ID NO: 1771388 - DNA, 25 bp, Homo sapien
ttgcactctcagacaattatctcag

SEQ ID NO: 1771389 - DNA, 25 bp, Homo sapien
cataaatgattgtagcatctagcat

SEQ ID NO: 1771390 - DNA, 25 bp, Homo sapien
gcatctttgttcataaatagcccaa

SEQ ID NO: 1771391 - DNA, 25 bp, Homo sapien
cactaaagaagatacactatggcta

SEQ ID NO: 1771392 - DNA, 25 bp, Homo sapien
tgcagacaaactggattactcagac

SEQ ID NO: 1771393 - DNA, 25 bp, Homo sapien
cactacatacttatcagaatagcta

SEQ ID NO: 1771394 - DNA, 25 bp, Homo sapien
tgtacaattcaacagtaaaaaccta

SEQ ID NO: 1771395 - DNA, 25 bp, Homo sapien
aggtactgttcgtatattaccctca

SEQ ID NO: 1771396 - DNA, 25 bp, Homo sapien
tactgttcgtatattaccctcaatc

SEQ ID NO: 1771397 - DNA, 25 bp, Homo sapien
gttcgtatattaccctcaatcttca

SEQ ID NO: 1771398 - DNA, 25 bp, Homo sapien
cgtatattaccctcaatcttcatag

SEQ ID NO: 1771399 - DNA, 25 bp, Homo sapien
cagaaatctatgcaacccacactgt

SEQ ID NO: 1771400 - DNA, 25 bp, Homo sapien
gttagacctttagaacctatgatgc

SEQ ID NO: 1771401 - DNA, 25 bp, Homo sapien
tggatcactgtaatgcaacaccctg

SEQ ID NO: 1771402 - DNA, 25 bp, Homo sapien
aatgttcagctgtcaagactgccca

SEQ ID NO: 1771403 - DNA, 25 bp, Homo sapien
tctatcatgggcaactgctcttttc

SEQ ID NO: 1771404 - DNA, 25 bp, Homo sapien
catgggcaactgctcttttcagaca

SEQ ID NO: 1771405 - DNA, 25 bp, Homo sapien
atttctatcatgggcaactgctctt

SEQ ID NO: 1771406 - DNA, 25 bp, Homo sapien
tatcatgggcaactgctcttttcag

SEQ ID NO: 1771407 - DNA, 25 bp, Homo sapien
cataacactttgtgctccaccagtg

SEQ ID NO: 1771408 - DNA, 25 bp, Homo sapien
accacccagatccatccacgtgatg

SEQ ID NO: 1771409 - DNA, 25 bp, Homo sapien
gctgcagatcaaccacccagatcca

SEQ ID NO: 1771410 - DNA, 25 bp, Homo sapien
gatgccttccactggacctcagact

SEQ ID NO: 1771411 - DNA, 25 bp, Homo sapien
tgtaactttcaatacccgagctatc

SEQ ID NO: 1771412 - DNA, 25 bp, Homo sapien
ggaatgattaataacttcactcaaa

SEQ ID NO: 1771413 - DNA, 25 bp, Homo sapien
gaagtacatgcaccacagatgtcat

SEQ ID NO: 1771414 - DNA, 25 bp, Homo sapien
ccatgacagtgatttgatttaagtc

SEQ ID NO: 1771415 - DNA, 25 bp, Homo sapien
cactgtgttcaaggaacattggcca

SEQ ID NO: 1771416 - DNA, 25 bp, Homo sapien
agcctacctcttaacattgcctgtg

SEQ ID NO: 1771417 - DNA, 25 bp, Homo sapien
tggccatcttgcagatccaggaagc

SEQ ID NO: 1771418 - DNA, 25 bp, Homo sapien
catggccaagaaggccctgcatgat

SEQ ID NO: 1771419 - DNA, 25 bp, Homo sapien
taaaacagatatgaatgattggtcc

SEQ ID NO: 1771420 - DNA, 25 bp, Homo sapien
taactcctagcattgtacatctgtc

SEQ ID NO: 1771421 - DNA, 25 bp, Homo sapien
gatgtcactgcttacagcattaaga

SEQ ID NO: 1771422 - DNA, 25 bp, Homo sapien
aataccaccaaggtgctctaactcc

SEQ ID NO: 1771423 - DNA, 25 bp, Homo sapien
tttggaaatgacacaccgagtagct

SEQ ID NO: 1771424 - DNA, 25 bp, Homo sapien
gatgaagtctctagtcctgtcaaag

SEQ ID NO: 1771425 - DNA, 25 bp, Homo sapien
tgagttgcagtaccattaccagtaa

SEQ ID NO: 1771426 - DNA, 25 bp, Homo sapien
caagaagcaataggcccactgggtg

SEQ ID NO: 1771427 - DNA, 25 bp, Homo sapien
tgcttactgtgctctactgcagact

SEQ ID NO: 1771428 - DNA, 25 bp, Homo sapien
tgcagactttctaaacactgtatac

SEQ ID NO: 1771429 - DNA, 25 bp, Homo sapien
accatgtatggttgctgctcttggg

SEQ ID NO: 1771430 - DNA, 25 bp, Homo sapien
aaaagctaagacataaacacagagg

SEQ ID NO: 1771431 - DNA, 25 bp, Homo sapien
tgtgctttgatgaacggcagcactg

SEQ ID NO: 1771432 - DNA, 25 bp, Homo sapien
tgctttgatgaacggcagcactgtt

SEQ ID NO: 1771433 - DNA, 25 bp, Homo sapien
gcatgtgctttgatgaacggcagca

SEQ ID NO: 1771434 - DNA, 25 bp, Homo sapien
ttgatgaacggcagcactgtttggg

SEQ ID NO: 1771435 - DNA, 25 bp, Homo sapien
gataactgtaggatacacagggact

SEQ ID NO: 1771436 - DNA, 25 bp, Homo sapien
tccctgtgcctagatagaaagtatc

SEQ ID NO: 1771437 - DNA, 25 bp, Homo sapien
gggccttggcctctagtatatgttg

SEQ ID NO: 1771438 - DNA, 25 bp, Homo sapien
tgttgggcaatggataaggacctgt

SEQ ID NO: 1771439 - DNA, 25 bp, Homo sapien
aaattcttacatggagatctgtggc

SEQ ID NO: 1771440 - DNA, 25 bp, Homo sapien
tcttcaacttgatatagtcaatact

SEQ ID NO: 1771441 - DNA, 25 bp, Homo sapien
tcttacatggagatctgtggccttt

SEQ ID NO: 1771442 - DNA, 25 bp, Homo sapien
catggagatctgtggcctttcttca

SEQ ID NO: 1771443 - DNA, 25 bp, Homo sapien
tgttgcacttgtctggctctaaaac

SEQ ID NO: 1771444 - DNA, 25 bp, Homo sapien
taaaactactgtattattatcttcc

SEQ ID NO: 1771445 - DNA, 25 bp, Homo sapien
cttgtctggctctaaaactactgta

SEQ ID NO: 1771446 - DNA, 25 bp, Homo sapien
tctctttagttctgtacgcctgatc

SEQ ID NO: 1771447 - DNA, 25 bp, Homo sapien
ctgcagtaacgccatgaatactcac

SEQ ID NO: 1771448 - DNA, 25 bp, Homo sapien
aaatactgcagtaacgccatgaata

SEQ ID NO: 1771449 - DNA, 25 bp, Homo sapien
atactgcagtaacgccatgaatact

SEQ ID NO: 1771450 - DNA, 25 bp, Homo sapien
tgaaaatactgcagtaacgccatga

SEQ ID NO: 1771451 - DNA, 25 bp, Homo sapien
tatgtatgtaaagcaagggccaggg

SEQ ID NO: 1771452 - DNA, 25 bp, Homo sapien
gatgcacgggttattctgagaaact

SEQ ID NO: 1771453 - DNA, 25 bp, Homo sapien
gattcaggtcaagctagatacgcca

SEQ ID NO: 1771454 - DNA, 25 bp, Homo sapien
gattctcaagtgtctgaggtcagga

SEQ ID NO: 1771455 - DNA, 25 bp, Homo sapien
acgccaggtcagacgctgggagagc

SEQ ID NO: 1771456 - DNA, 25 bp, Homo sapien
aaacacgccaggtcagacgctggga

SEQ ID NO: 1771457 - DNA, 25 bp, Homo sapien
gaaacacgccaggtcagacgctggg

SEQ ID NO: 1771458 - DNA, 25 bp, Homo sapien
acacgccaggtcagacgctgggaga

SEQ ID NO: 1771459 - DNA, 25 bp, Homo sapien
tagagaacatcgccttgggatggga

SEQ ID NO: 1771460 - DNA, 25 bp, Homo sapien
cggtagagaacatcgccttgggatg

SEQ ID NO: 1771461 - DNA, 25 bp, Homo sapien
ctagcggtagagaacatcgccttgg

SEQ ID NO: 1771462 - DNA, 25 bp, Homo sapien
tagcggtagagaacatcgccttggg

SEQ ID NO: 1771463 - DNA, 25 bp, Homo sapien
cattctttgtactgcagaggttctc

SEQ ID NO: 1771464 - DNA, 25 bp, Homo sapien
taagatctaaagtaccaggacgatc

SEQ ID NO: 1771465 - DNA, 25 bp, Homo sapien
cacccaggtatgtcacgaaaacact

SEQ ID NO: 1771466 - DNA, 25 bp, Homo sapien
ggtcccaagaagcacaggcctaact

SEQ ID NO: 1771467 - DNA, 25 bp, Homo sapien
tattcctgctactttaaacaatgca

SEQ ID NO: 1771468 - DNA, 25 bp, Homo sapien
ttttccctccaatcagagagactga

SEQ ID NO: 1771469 - DNA, 25 bp, Homo sapien
tatgctcatgactgtttgcttagga

SEQ ID NO: 1771470 - DNA, 25 bp, Homo sapien
taatcagtaactattgtcaaccgac

SEQ ID NO: 1771471 - DNA, 25 bp, Homo sapien
ttctatcataagagcatctgaaggg

SEQ ID NO: 1771472 - DNA, 25 bp, Homo sapien
ggctgacagcacaggaccatcagta

SEQ ID NO: 1771473 - DNA, 25 bp, Homo sapien
aggctgacagcacaggaccatcagt

SEQ ID NO: 1771474 - DNA, 25 bp, Homo sapien
gaagtaagcaaataagcggctacct

SEQ ID NO: 1771475 - DNA, 25 bp, Homo sapien
gctacctgtatggttatgatgcaca

SEQ ID NO: 1771476 - DNA, 25 bp, Homo sapien
gaatggcatgatgaactagtttcct

SEQ ID NO: 1771477 - DNA, 25 bp, Homo sapien
tgtagtggactaaagacaggactga

SEQ ID NO: 1771478 - DNA, 25 bp, Homo sapien
gtaaatgaataatttcattttcagg

SEQ ID NO: 1771479 - DNA, 25 bp, Homo sapien
ctgaagaataaattgtatgtaaatg

SEQ ID NO: 1771480 - DNA, 25 bp, Homo sapien
gaagaataaattgtatgtaaatgaa

SEQ ID NO: 1771481 - DNA, 25 bp, Homo sapien
aaatgaataatttcattttcaggga

SEQ ID NO: 1771482 - DNA, 25 bp, Homo sapien
gtgtattccatagtcccatggggct

SEQ ID NO: 1771483 - DNA, 25 bp, Homo sapien
tgtattccatagtcccatggggctt

SEQ ID NO: 1771484 - DNA, 25 bp, Homo sapien
agtgtattccatagtcccatggggc

SEQ ID NO: 1771485 - DNA, 25 bp, Homo sapien
agaaagggatacctgcctagtcagc

SEQ ID NO: 1771486 - DNA, 25 bp, Homo sapien
tagaatacccgtgacccaagaaatg

SEQ ID NO: 1771487 - DNA, 25 bp, Homo sapien
gaggttctaacagggcaacacagtt

SEQ ID NO: 1771488 - DNA, 25 bp, Homo sapien
taaacaatgctggtggtcaacaggg

SEQ ID NO: 1771489 - DNA, 25 bp, Homo sapien
cactttgtgccaagcctaggataca

SEQ ID NO: 1771490 - DNA, 25 bp, Homo sapien
tccaggagcttatgatgcagtgaca

SEQ ID NO: 1771491 - DNA, 25 bp, Homo sapien
agagacgttcacagggcattgatca

SEQ ID NO: 1771492 - DNA, 25 bp, Homo sapien
tcttcaatgtgactctacagaggct

SEQ ID NO: 1771493 - DNA, 25 bp, Homo sapien
gattatggctttagaagtaatattg

SEQ ID NO: 1771494 - DNA, 25 bp, Homo sapien
ggcaaaagcacctctccattctttg

SEQ ID NO: 1771495 - DNA, 25 bp, Homo sapien
ggtgctagacacatacagatcttaa

SEQ ID NO: 1771496 - DNA, 25 bp, Homo sapien
ataaaggtgctagacacatacagat

SEQ ID NO: 1771497 - DNA, 25 bp, Homo sapien
ctggcctggaacaatagtatgtgtg

SEQ ID NO: 1771498 - DNA, 25 bp, Homo sapien
atgtgtgaaaagtttattcagttcc

SEQ ID NO: 1771499 - DNA, 25 bp, Homo sapien
caccaatttattgggagtgatgtta

SEQ ID NO: 1771500 - DNA, 25 bp, Homo sapien
cagtgctatggagtttagggtgtcc

SEQ ID NO: 1771501 - DNA, 25 bp, Homo sapien
gatagccttaaggtactggaaggag

SEQ ID NO: 1771502 - DNA, 25 bp, Homo sapien
catattctgcatctgatgatgaagg

SEQ ID NO: 1771503 - DNA, 25 bp, Homo sapien
tggatgatgatagccttaaggtact

SEQ ID NO: 1771504 - DNA, 25 bp, Homo sapien
caggactggatgatgatagccttaa

SEQ ID NO: 1771505 - DNA, 25 bp, Homo sapien
tcttcttcagaagtagacgataaga

SEQ ID NO: 1771506 - DNA, 25 bp, Homo sapien
ccatcggtgaagtatcgacaattca

SEQ ID NO: 1771507 - DNA, 25 bp, Homo sapien
gactctttcaatgggtttcaaggcc

SEQ ID NO: 1771508 - DNA, 25 bp, Homo sapien
caaggcctttcgtgctaagtcagca

SEQ ID NO: 1771509 - DNA, 25 bp, Homo sapien
gacatgtaaataccttgcccctggt

SEQ ID NO: 1771510 - DNA, 25 bp, Homo sapien
aaagaagctgatcccctagaagtag

SEQ ID NO: 1771511 - DNA, 25 bp, Homo sapien
tcctatgaccacaggaactcactgg

SEQ ID NO: 1771512 - DNA, 25 bp, Homo sapien
taggtaagtgattgcctcctggaga

SEQ ID NO: 1771513 - DNA, 25 bp, Homo sapien
ggcagatgagaccatactcctcaca

SEQ ID NO: 1771514 - DNA, 25 bp, Homo sapien
ccattttcaataaccagaggatcag

SEQ ID NO: 1771515 - DNA, 25 bp, Homo sapien
taggagtcactatcataacaccgcc

SEQ ID NO: 1771516 - DNA, 25 bp, Homo sapien
tgtagagcgcaatggaaacaacctc

SEQ ID NO: 1771517 - DNA, 25 bp, Homo sapien
tataaggcaaaagtaatcaggactg

SEQ ID NO: 1771518 - DNA, 25 bp, Homo sapien
gaaggtggctaccactacactgtag

SEQ ID NO: 1771519 - DNA, 25 bp, Homo sapien
gagactgcttttcctagaagttaaa

SEQ ID NO: 1771520 - DNA, 25 bp, Homo sapien
taatttcattaagaacgtgcactgc

SEQ ID NO: 1771521 - DNA, 25 bp, Homo sapien
taaaaatcagattatctgtatcagt

SEQ ID NO: 1771522 - DNA, 25 bp, Homo sapien
cagacacagtagagcgaaaggacag

SEQ ID NO: 1771523 - DNA, 25 bp, Homo sapien
ccctctttactgttaggacctactg

SEQ ID NO: 1771524 - DNA, 25 bp, Homo sapien
ttttttactgctggcttttatagag

SEQ ID NO: 1771525 - DNA, 25 bp, Homo sapien
aacaatatcgctttactttatagca

SEQ ID NO: 1771526 - DNA, 25 bp, Homo sapien
caatggtgcagctcgtttatcagct

SEQ ID NO: 1771527 - DNA, 25 bp, Homo sapien
tgattaaacatgttctcccaagtgt

SEQ ID NO: 1771528 - DNA, 25 bp, Homo sapien
cccagatcggaattacatgaaaata

SEQ ID NO: 1771529 - DNA, 25 bp, Homo sapien
aggacaaagatcctgaggtaggtca

SEQ ID NO: 1771530 - DNA, 25 bp, Homo sapien
tacagaggacaaagatcctgaggta

SEQ ID NO: 1771531 - DNA, 25 bp, Homo sapien
ctgtacagaggacaaagatcctgag

SEQ ID NO: 1771532 - DNA, 25 bp, Homo sapien
cagaggacaaagatcctgaggtagg

SEQ ID NO: 1771533 - DNA, 25 bp, Homo sapien
tctccattctgctgtcgtttttcct

SEQ ID NO: 1771534 - DNA, 25 bp, Homo sapien
gaacttactgaatgggttgatatcc

SEQ ID NO: 1771535 - DNA, 25 bp, Homo sapien
ccttgttgatagatttgaacttact

SEQ ID NO: 1771536 - DNA, 25 bp, Homo sapien
tactattggtctggaatccgaagtc

SEQ ID NO: 1771537 - DNA, 25 bp, Homo sapien
gatgtctccctagaggagtccagtt

SEQ ID NO: 1771538 - DNA, 25 bp, Homo sapien
tcaaatgcagaagaagtgtcggaag

SEQ ID NO: 1771539 - DNA, 25 bp, Homo sapien
tcactgtgggagaaccatgggatgt

SEQ ID NO: 1771540 - DNA, 25 bp, Homo sapien
gagaaaggcactccttcaaggtgtc

SEQ ID NO: 1771541 - DNA, 25 bp, Homo sapien
gaactactaagggtaatgtctattc

SEQ ID NO: 1771542 - DNA, 25 bp, Homo sapien
gctttctggcgaaccagactgcttg

SEQ ID NO: 1771543 - DNA, 25 bp, Homo sapien
aattttcagatacctgtggcccttc

SEQ ID NO: 1771544 - DNA, 25 bp, Homo sapien
tgtgttttctactcggctttctggc

SEQ ID NO: 1771545 - DNA, 25 bp, Homo sapien
ctttttcacccaggtcttatctggc

SEQ ID NO: 1771546 - DNA, 25 bp, Homo sapien
cagctgttgtccagagtagattcca

SEQ ID NO: 1771547 - DNA, 25 bp, Homo sapien
tccaaagaggagtctagagcctctt

SEQ ID NO: 1771548 - DNA, 25 bp, Homo sapien
ttattgccctcagttatgggatcac

SEQ ID NO: 1771549 - DNA, 25 bp, Homo sapien
tctttaacagccacaactgaacttc

SEQ ID NO: 1771550 - DNA, 25 bp, Homo sapien
taacagccacaactgaacttcagat

SEQ ID NO: 1771551 - DNA, 25 bp, Homo sapien
atgggtacctgaattctctttaaca

SEQ ID NO: 1771552 - DNA, 25 bp, Homo sapien
gggtacctgaattctctttaacagc

SEQ ID NO: 1771553 - DNA, 25 bp, Homo sapien
tcccactttgatgcacaggaacatg

SEQ ID NO: 1771554 - DNA, 25 bp, Homo sapien
tccgtttgccgtactgctggaccat

SEQ ID NO: 1771555 - DNA, 25 bp, Homo sapien
gctgcagtgtgagtggcaaaggatt

SEQ ID NO: 1771556 - DNA, 25 bp, Homo sapien
gaggaacagcaaaccagtactctgg

SEQ ID NO: 1771557 - DNA, 25 bp, Homo sapien
caggggtcaaggactgctttagctt

SEQ ID NO: 1771558 - DNA, 25 bp, Homo sapien
gggtcaaggactgctttagcttttc

SEQ ID NO: 1771559 - DNA, 25 bp, Homo sapien
gccaaaccaggggtcaaggactgct

SEQ ID NO: 1771560 - DNA, 25 bp, Homo sapien
accaggggtcaaggactgctttagc

SEQ ID NO: 1771561 - DNA, 25 bp, Homo sapien
catcagggtccaatgaagcttagca

SEQ ID NO: 1771562 - DNA, 25 bp, Homo sapien
tatgtgctcaaccagaataatctga

SEQ ID NO: 1771563 - DNA, 25 bp, Homo sapien
ttagctctgggcaaactgatagctg

SEQ ID NO: 1771564 - DNA, 25 bp, Homo sapien
tgttccagaaccaagagtgaatagt

SEQ ID NO: 1771565 - DNA, 25 bp, Homo sapien
agctacttgtctccaagcttgctcc

SEQ ID NO: 1771566 - DNA, 25 bp, Homo sapien
ctccaaagctacttgtctccaagct

SEQ ID NO: 1771567 - DNA, 25 bp, Homo sapien
gcagggattagtctgcagtggaaat

SEQ ID NO: 1771568 - DNA, 25 bp, Homo sapien
aaatggaccctcagctattctccaa

SEQ ID NO: 1771569 - DNA, 25 bp, Homo sapien
tcccaaacactgtgtgcagcaccca

SEQ ID NO: 1771570 - DNA, 25 bp, Homo sapien
cccaaacactgtgtgcagcacccat

SEQ ID NO: 1771571 - DNA, 25 bp, Homo sapien
ttctgtatatgccctttgttaaatc

SEQ ID NO: 1771572 - DNA, 25 bp, Homo sapien
acctttctgtatatgccctttgtta

SEQ ID NO: 1771573 - DNA, 25 bp, Homo sapien
ttctctattgtactgttcttaaaat

SEQ ID NO: 1771574 - DNA, 25 bp, Homo sapien
tcctctcggaatggaagattctcta

SEQ ID NO: 1771575 - DNA, 25 bp, Homo sapien
cctcctctcggaatggaagattctc

SEQ ID NO: 1771576 - DNA, 25 bp, Homo sapien
ctctcggaatggaagattctctatt

SEQ ID NO: 1771577 - DNA, 25 bp, Homo sapien
gacatggcctgtcccacaagaggat

SEQ ID NO: 1771578 - DNA, 25 bp, Homo sapien
caggtggtaccctctgtctctgcag

SEQ ID NO: 1771579 - DNA, 25 bp, Homo sapien
cattctctcacgtagacagggccct

SEQ ID NO: 1771580 - DNA, 25 bp, Homo sapien
tctgcagtcactagagtcgcccaaa

SEQ ID NO: 1771581 - DNA, 25 bp, Homo sapien
cattttagtatctgtccatagtcag

SEQ ID NO: 1771582 - DNA, 25 bp, Homo sapien
tagtatgggccaactacttccttgg

SEQ ID NO: 1771583 - DNA, 25 bp, Homo sapien
tccatagtcagatctcatgtcatag

SEQ ID NO: 1771584 - DNA, 25 bp, Homo sapien
tcatgtcatagtatgggccaactac

SEQ ID NO: 1771585 - DNA, 25 bp, Homo sapien
catggtacgcagcttttggtcaaac

SEQ ID NO: 1771586 - DNA, 25 bp, Homo sapien
tctcttaaggaagaaggattctacc

SEQ ID NO: 1771587 - DNA, 25 bp, Homo sapien
aaaatttcagacctgccagccctta

SEQ ID NO: 1771588 - DNA, 25 bp, Homo sapien
tgtttcaacttggtgtggccatcca

SEQ ID NO: 1771589 - DNA, 25 bp, Homo sapien
gtgtggacttcagtacataaaccat

SEQ ID NO: 1771590 - DNA, 25 bp, Homo sapien
gtccactttcttggcaggtgctagt

SEQ ID NO: 1771591 - DNA, 25 bp, Homo sapien
ctgaaaaacacgtttgtgacagatg

SEQ ID NO: 1771592 - DNA, 25 bp, Homo sapien
cccagctcttggttgttggctcact

SEQ ID NO: 1771593 - DNA, 25 bp, Homo sapien
cttttccatagacatcgggagacca

SEQ ID NO: 1771594 - DNA, 25 bp, Homo sapien
tagacatcgggagaccactgaacaa

SEQ ID NO: 1771595 - DNA, 25 bp, Homo sapien
aagaagttgtcaatcatgttcagtt

SEQ ID NO: 1771596 - DNA, 25 bp, Homo sapien
ttcaacatttctacaggaacacacc

SEQ ID NO: 1771597 - DNA, 25 bp, Homo sapien
taggatttagagcaaacacacttcc

SEQ ID NO: 1771598 - DNA, 25 bp, Homo sapien
gcatgattgagtttctgtttccctc

SEQ ID NO: 1771599 - DNA, 25 bp, Homo sapien
ttcctgccaggcatcgctgtgagac

SEQ ID NO: 1771600 - DNA, 25 bp, Homo sapien
ctctaatgaggaacaagttttctct

SEQ ID NO: 1771601 - DNA, 25 bp, Homo sapien
ctctctaatgaggaacaagttttct

SEQ ID NO: 1771602 - DNA, 25 bp, Homo sapien
tctctctctaatgaggaacaagttt

SEQ ID NO: 1771603 - DNA, 25 bp, Homo sapien
tctctctaatgaggaacaagttttc

SEQ ID NO: 1771604 - DNA, 25 bp, Homo sapien
ttcgtcaggtctggcacaatagaaa

SEQ ID NO: 1771605 - DNA, 25 bp, Homo sapien
gatgtccaagggtaatctttggcct

SEQ ID NO: 1771606 - DNA, 25 bp, Homo sapien
ctggatgtccaagggtaatctttgg

SEQ ID NO: 1771607 - DNA, 25 bp, Homo sapien
cacaaaaggctcttcgtcaggtctg

SEQ ID NO: 1771608 - DNA, 25 bp, Homo sapien
agcaccttattagccctcgggacgc

SEQ ID NO: 1771609 - DNA, 25 bp, Homo sapien
gaggtacatcactgagaattcacca

SEQ ID NO: 1771610 - DNA, 25 bp, Homo sapien
gcaatgaataaaacacctgctggta

SEQ ID NO: 1771611 - DNA, 25 bp, Homo sapien
tgagaagaggcaaccacaccataac

SEQ ID NO: 1771612 - DNA, 25 bp, Homo sapien
acaggcagcacctcttcgtcctcgt

SEQ ID NO: 1771613 - DNA, 25 bp, Homo sapien
cgtcctcgtcttcatagtagctgca

SEQ ID NO: 1771614 - DNA, 25 bp, Homo sapien
gcgctttgcctcttcaacagtgatg

SEQ ID NO: 1771615 - DNA, 25 bp, Homo sapien
catattctccaggagcgcgctgtgg

SEQ ID NO: 1771616 - DNA, 25 bp, Homo sapien
tgatgaccaataggacaggactgtc

SEQ ID NO: 1771617 - DNA, 25 bp, Homo sapien
gatttccggtagagcgtctttaagc

SEQ ID NO: 1771618 - DNA, 25 bp, Homo sapien
taacgtgctataggccagtctccat

SEQ ID NO: 1771619 - DNA, 25 bp, Homo sapien
catggatacccttgcacccttgcag

SEQ ID NO: 1771620 - DNA, 25 bp, Homo sapien
ttaacagtgcctagcgcctaacagg

SEQ ID NO: 1771621 - DNA, 25 bp, Homo sapien
gggcactactttggctacctgggaa

SEQ ID NO: 1771622 - DNA, 25 bp, Homo sapien
cctttcatgatgcaagagactgaca

SEQ ID NO: 1771623 - DNA, 25 bp, Homo sapien
tatatggctcattacaacgtggaca

SEQ ID NO: 1771624 - DNA, 25 bp, Homo sapien
ggccagactatgaagtttaccctgt

SEQ ID NO: 1771625 - DNA, 25 bp, Homo sapien
gaacttccccaagtgtgtctaaaca

SEQ ID NO: 1771626 - DNA, 25 bp, Homo sapien
tctagagtgccctttggcttgaact

SEQ ID NO: 1771627 - DNA, 25 bp, Homo sapien
tattgttgtcaacaatgcctggtgg

SEQ ID NO: 1771628 - DNA, 25 bp, Homo sapien
ctgtgccataatagtggtcactgaa

SEQ ID NO: 1771629 - DNA, 25 bp, Homo sapien
taatagtggtcactgaacttgaaag

SEQ ID NO: 1771630 - DNA, 25 bp, Homo sapien
agagaaaagtttcgcctgtgccata

SEQ ID NO: 1771631 - DNA, 25 bp, Homo sapien
tgaaaggatgagttgcatatgctcc

SEQ ID NO: 1771632 - DNA, 25 bp, Homo sapien
ggtggctctgacctgcgactctctg

SEQ ID NO: 1771633 - DNA, 25 bp, Homo sapien
gctacagtcataaagggctgaccca

SEQ ID NO: 1771634 - DNA, 25 bp, Homo sapien
gctaagcagtttgcgagctacagtc

SEQ ID NO: 1771635 - DNA, 25 bp, Homo sapien
tcaccccattgacggaggaagttcc

SEQ ID NO: 1771636 - DNA, 25 bp, Homo sapien
gtctccattgataaagtatgaattt

SEQ ID NO: 1771637 - DNA, 25 bp, Homo sapien
ccaccaagttctaaagaacttatgt

SEQ ID NO: 1771638 - DNA, 25 bp, Homo sapien
agaacttatgtctccattgataaag

SEQ ID NO: 1771639 - DNA, 25 bp, Homo sapien
caccaagttctaaagaacttatgtc

SEQ ID NO: 1771640 - DNA, 25 bp, Homo sapien
catggactagctaaaataacctgac

SEQ ID NO: 1771641 - DNA, 25 bp, Homo sapien
tactgacaggcaaaattctaaactg

SEQ ID NO: 1771642 - DNA, 25 bp, Homo sapien
gattcttagttaggccattctgtgt

SEQ ID NO: 1771643 - DNA, 25 bp, Homo sapien
tacgtaggtcaaaacagacccactc

SEQ ID NO: 1771644 - DNA, 25 bp, Homo sapien
tcagcatctagccataaaccaaatc

SEQ ID NO: 1771645 - DNA, 25 bp, Homo sapien
atctagccataaaccaaatcgtccc

SEQ ID NO: 1771646 - DNA, 25 bp, Homo sapien
gcatctagccataaaccaaatcgtc

SEQ ID NO: 1771647 - DNA, 25 bp, Homo sapien
cagcatctagccataaaccaaatcg

SEQ ID NO: 1771648 - DNA, 25 bp, Homo sapien
gctgcaagagttgcttcgtccgtgg

SEQ ID NO: 1771649 - DNA, 25 bp, Homo sapien
ttattgaaagtgctgcaagagttgc

SEQ ID NO: 1771650 - DNA, 25 bp, Homo sapien
gaaagaatatcattattgaaagtgc

SEQ ID NO: 1771651 - DNA, 25 bp, Homo sapien
agagttgcttcgtccgtggtataaa

SEQ ID NO: 1771652 - DNA, 25 bp, Homo sapien
gaagtgggagtacaaagtcttttca

SEQ ID NO: 1771653 - DNA, 25 bp, Homo sapien
cacaaggcatgtatatatccacagt

SEQ ID NO: 1771654 - DNA, 25 bp, Homo sapien
aacactctgattcctcactgtatgg

SEQ ID NO: 1771655 - DNA, 25 bp, Homo sapien
gctttaggagggctgatcgaaccca

SEQ ID NO: 1771656 - DNA, 25 bp, Homo sapien
tgtacgcttttattgactaaatgga

SEQ ID NO: 1771657 - DNA, 25 bp, Homo sapien
ggaaagctggcctataatagtcaaa

SEQ ID NO: 1771658 - DNA, 25 bp, Homo sapien
tatatgctgcttaagacctatcacc

SEQ ID NO: 1771659 - DNA, 25 bp, Homo sapien
tataaatcaaacagatttgttccca

SEQ ID NO: 1771660 - DNA, 25 bp, Homo sapien
aaatattgggatagcactgcattac

SEQ ID NO: 1771661 - DNA, 25 bp, Homo sapien
cagaggcctgctcgttaatgtaaaa

SEQ ID NO: 1771662 - DNA, 25 bp, Homo sapien
tgagtgaaacgtacacccaggctac

SEQ ID NO: 1771663 - DNA, 25 bp, Homo sapien
ttcctactagcaagcagtctttggc

SEQ ID NO: 1771664 - DNA, 25 bp, Homo sapien
cagggcagcagtgaaaacatgagct

SEQ ID NO: 1771665 - DNA, 25 bp, Homo sapien
ctggtagatacagccaagagttgtc

SEQ ID NO: 1771666 - DNA, 25 bp, Homo sapien
cataatgagagcagtttccgtgaac

SEQ ID NO: 1771667 - DNA, 25 bp, Homo sapien
gaagaaacatttggttgcctcctcc

SEQ ID NO: 1771668 - DNA, 25 bp, Homo sapien
gtgaggaacttcaaagccggaggcc

SEQ ID NO: 1771669 - DNA, 25 bp, Homo sapien
cagcgcgtcgtggtgacatcacaga

SEQ ID NO: 1771670 - DNA, 25 bp, Homo sapien
gacccctgcgcctcgttggtaatga

SEQ ID NO: 1771671 - DNA, 25 bp, Homo sapien
tcaaagcccatagtatagcgtgtcc

SEQ ID NO: 1771672 - DNA, 25 bp, Homo sapien
gcggcctagagcctcggcctctcca

SEQ ID NO: 1771673 - DNA, 25 bp, Homo sapien
ctcgcggcctagagcctcggcctct

SEQ ID NO: 1771674 - DNA, 25 bp, Homo sapien
agggctaccgggcccgcgcagtctc

SEQ ID NO: 1771675 - DNA, 25 bp, Homo sapien
gcccctcgcggcctagagcctcggc

SEQ ID NO: 1771676 - DNA, 25 bp, Homo sapien
ctcgcagtgcaggagttcggtgccc

SEQ ID NO: 1771677 - DNA, 25 bp, Homo sapien
tggtgacttgccagcggcttcacag

SEQ ID NO: 1771678 - DNA, 25 bp, Homo sapien
ggcttcacaggtccccactgaggaa

SEQ ID NO: 1771679 - DNA, 25 bp, Homo sapien
ggcagaacacgcaggtgctgtcgta

SEQ ID NO: 1771680 - DNA, 25 bp, Homo sapien
gatctttccttagagttctgcagtt

SEQ ID NO: 1771681 - DNA, 25 bp, Homo sapien
cttgatctttccttagagttctgca

SEQ ID NO: 1771682 - DNA, 25 bp, Homo sapien
tctacttgatctttccttagagttc

SEQ ID NO: 1771683 - DNA, 25 bp, Homo sapien
cagttctacttgatctttccttaga

SEQ ID NO: 1771684 - DNA, 25 bp, Homo sapien
actgataccaactgaaaatgatata

SEQ ID NO: 1771685 - DNA, 25 bp, Homo sapien
taaacatgaagaatactgccatcat

SEQ ID NO: 1771686 - DNA, 25 bp, Homo sapien
ttttccaacagttaccatgttctca

SEQ ID NO: 1771687 - DNA, 25 bp, Homo sapien
tttccaacagttaccatgttctcaa

SEQ ID NO: 1771688 - DNA, 25 bp, Homo sapien
aagaagccaagctgatccactggtg

SEQ ID NO: 1771689 - DNA, 25 bp, Homo sapien
gaattgactctataaaccaacttgg

SEQ ID NO: 1771690 - DNA, 25 bp, Homo sapien
taaaccaacttggataagaagccaa

SEQ ID NO: 1771691 - DNA, 25 bp, Homo sapien
actggtgccagaacatgaaggtgca

SEQ ID NO: 1771692 - DNA, 25 bp, Homo sapien
tttttgtatgctgctgacataacaa

SEQ ID NO: 1771693 - DNA, 25 bp, Homo sapien
atttttgtatgctgctgacataaca

SEQ ID NO: 1771694 - DNA, 25 bp, Homo sapien
ttttgtatgctgctgacataacaag

SEQ ID NO: 1771695 - DNA, 25 bp, Homo sapien
tcttagtttttcaatcaagtgatca

SEQ ID NO: 1771696 - DNA, 25 bp, Homo sapien
ttagtttttcaatcaagtgatcagc

SEQ ID NO: 1771697 - DNA, 25 bp, Homo sapien
tcatgttcttagtttttcaatcaag

SEQ ID NO: 1771698 - DNA, 25 bp, Homo sapien
gttcttagtttttcaatcaagtgat

SEQ ID NO: 1771699 - DNA, 25 bp, Homo sapien
tcagaaaagatttaaggccactaag

SEQ ID NO: 1771700 - DNA, 25 bp, Homo sapien
caagtaaccattgaaacaagtcagt

SEQ ID NO: 1771701 - DNA, 25 bp, Homo sapien
tgcaattagacttaaaagggaccta

SEQ ID NO: 1771702 - DNA, 25 bp, Homo sapien
cacttcatgctgaaccaagattaga

SEQ ID NO: 1771703 - DNA, 25 bp, Homo sapien
tagaggcaaaattccattacagtga

SEQ ID NO: 1771704 - DNA, 25 bp, Homo sapien
caatgtaggattaacttgcagcacc

SEQ ID NO: 1771705 - DNA, 25 bp, Homo sapien
gaaagaaaactagtatctcagccta

SEQ ID NO: 1771706 - DNA, 25 bp, Homo sapien
cctgatcctggcaatatctggtaca

SEQ ID NO: 1771707 - DNA, 25 bp, Homo sapien
ggcatcagggaacttaacgcactaa

SEQ ID NO: 1771708 - DNA, 25 bp, Homo sapien
taacaaataggttgtctacggccat

SEQ ID NO: 1771709 - DNA, 25 bp, Homo sapien
gaagaggtccataaggcatctgaga

SEQ ID NO: 1771710 - DNA, 25 bp, Homo sapien
tgtttgacccctgtactagcaattg

SEQ ID NO: 1771711 - DNA, 25 bp, Homo sapien
gagaaccatagggatttgtacacca

SEQ ID NO: 1771712 - DNA, 25 bp, Homo sapien
gcagcagaggtcacatgtaatatca

SEQ ID NO: 1771713 - DNA, 25 bp, Homo sapien
taaaaaatcagaggacattcctggg

SEQ ID NO: 1771714 - DNA, 25 bp, Homo sapien
gaatagaaagttaacaggtcccagc

SEQ ID NO: 1771715 - DNA, 25 bp, Homo sapien
atttcaccatttccttgtaggtttg

SEQ ID NO: 1771716 - DNA, 25 bp, Homo sapien
ttggaaatttcaccatttccttgta

SEQ ID NO: 1771717 - DNA, 25 bp, Homo sapien
ccttggaaatttcaccatttccttg

SEQ ID NO: 1771718 - DNA, 25 bp, Homo sapien
tggaaatttcaccatttccttgtag

SEQ ID NO: 1771719 - DNA, 25 bp, Homo sapien
cttggagtgtgcttccagctttctc

SEQ ID NO: 1771720 - DNA, 25 bp, Homo sapien
tctctacagcccttcaaaacctgtt

SEQ ID NO: 1771721 - DNA, 25 bp, Homo sapien
tatatttccaagttatcgttccact

SEQ ID NO: 1771722 - DNA, 25 bp, Homo sapien
ttctctacagcccttcaaaacctgt

SEQ ID NO: 1771723 - DNA, 25 bp, Homo sapien
gaagctctgcgaggcaggcgctatc

SEQ ID NO: 1771724 - DNA, 25 bp, Homo sapien
tctcccagcgctggtagctggtgag

SEQ ID NO: 1771725 - DNA, 25 bp, Homo sapien
gagtccgaaactccggccgctgtgg

SEQ ID NO: 1771726 - DNA, 25 bp, Homo sapien
aggcgctatcccgacgtttctcgcg

SEQ ID NO: 1771727 - DNA, 25 bp, Homo sapien
tgcgccatgaggagcagatacctgt

SEQ ID NO: 1771728 - DNA, 25 bp, Homo sapien
tgttaagggtacacgacagcgccat

SEQ ID NO: 1771729 - DNA, 25 bp, Homo sapien
gaactccagatgctcctgcgccatg

SEQ ID NO: 1771730 - DNA, 25 bp, Homo sapien
gagcagatacctgttaagggtacac

SEQ ID NO: 1771731 - DNA, 25 bp, Homo sapien
agttccggagggcgctacggactca

SEQ ID NO: 1771732 - DNA, 25 bp, Homo sapien
cagcgtcctcttccgtcggaagttc

SEQ ID NO: 1771733 - DNA, 25 bp, Homo sapien
tccagcgtcctcttccgtcggaagt

SEQ ID NO: 1771734 - DNA, 25 bp, Homo sapien
gttccggagggcgctacggactcac

SEQ ID NO: 1771735 - DNA, 25 bp, Homo sapien
cgcccgaggactggggacgcgtgac

SEQ ID NO: 1771736 - DNA, 25 bp, Homo sapien
actggggacgcgtgacccgcgcaga

SEQ ID NO: 1771737 - DNA, 25 bp, Homo sapien
gtgacccgcgcagaccagcgaagac

SEQ ID NO: 1771738 - DNA, 25 bp, Homo sapien
cccgaatcccagcttcctcgggcta

SEQ ID NO: 1771739 - DNA, 25 bp, Homo sapien
gttacatgcccagcgtaccgatctt

SEQ ID NO: 1771740 - DNA, 25 bp, Homo sapien
cattctacgcctatgtgtctgctca

SEQ ID NO: 1771741 - DNA, 25 bp, Homo sapien
cgatcttcgactacatgcattctga

SEQ ID NO: 1771742 - DNA, 25 bp, Homo sapien
cactgagcttgatccgcagattcca

SEQ ID NO: 1771743 - DNA, 25 bp, Homo sapien
ctccaaaaagcaaaagcaaagactt

SEQ ID NO: 1771744 - DNA, 25 bp, Homo sapien
caaaaagcaaaagcaaagactttat

SEQ ID NO: 1771745 - DNA, 25 bp, Homo sapien
agagggaatgctaagaatccaaaat

SEQ ID NO: 1771746 - DNA, 25 bp, Homo sapien
gagggaatgctaagaatccaaaatg

SEQ ID NO: 1771747 - DNA, 25 bp, Homo sapien
gattgtccatgaccccatagttcaa

SEQ ID NO: 1771748 - DNA, 25 bp, Homo sapien
ccatgaccccatagttcaaatatag

SEQ ID NO: 1771749 - DNA, 25 bp, Homo sapien
catgaccccatagttcaaatataga

SEQ ID NO: 1771750 - DNA, 25 bp, Homo sapien
tgtccatgaccccatagttcaaata

SEQ ID NO: 1771751 - DNA, 25 bp, Homo sapien
cttcttgtgtcaatgtcttattaaa

SEQ ID NO: 1771752 - DNA, 25 bp, Homo sapien
tacatgttgcggtttctttaaattc

SEQ ID NO: 1771753 - DNA, 25 bp, Homo sapien
aatacatgttgcggtttctttaaat

SEQ ID NO: 1771754 - DNA, 25 bp, Homo sapien
atacatgttgcggtttctttaaatt

SEQ ID NO: 1771755 - DNA, 25 bp, Homo sapien
tctttttgacactgtatgactcaat

SEQ ID NO: 1771756 - DNA, 25 bp, Homo sapien
tttgacactgtatgactcaataagc

SEQ ID NO: 1771757 - DNA, 25 bp, Homo sapien
gacactgtatgactcaataagctct

SEQ ID NO: 1771758 - DNA, 25 bp, Homo sapien
ctgtatgactcaataagctctctct

SEQ ID NO: 1771759 - DNA, 25 bp, Homo sapien
tttcacttttccatggttagccata

SEQ ID NO: 1771760 - DNA, 25 bp, Homo sapien
tttccatggttagccataatgaatg

SEQ ID NO: 1771761 - DNA, 25 bp, Homo sapien
tccatggttagccataatgaatgac

SEQ ID NO: 1771762 - DNA, 25 bp, Homo sapien
cacttttccatggttagccataatg

SEQ ID NO: 1771763 - DNA, 25 bp, Homo sapien
tatccatttggttagagtgagtttt

SEQ ID NO: 1771764 - DNA, 25 bp, Homo sapien
gcttccttaacagaaccttatccat

SEQ ID NO: 1771765 - DNA, 25 bp, Homo sapien
tccatttggttagagtgagttttga

SEQ ID NO: 1771766 - DNA, 25 bp, Homo sapien
catttggttagagtgagttttgaga

SEQ ID NO: 1771767 - DNA, 25 bp, Homo sapien
cacatatgcaccaaaatgagcacat

SEQ ID NO: 1771768 - DNA, 25 bp, Homo sapien
tacacatatgcaccaaaatgagcac

SEQ ID NO: 1771769 - DNA, 25 bp, Homo sapien
catacacatatgcaccaaaatgagc

SEQ ID NO: 1771770 - DNA, 25 bp, Homo sapien
acatatgcaccaaaatgagcacatg

SEQ ID NO: 1771771 - DNA, 25 bp, Homo sapien
cagtaaaaatagatttactattcat

SEQ ID NO: 1771772 - DNA, 25 bp, Homo sapien
ttcagtaaaaatagatttactattc

SEQ ID NO: 1771773 - DNA, 25 bp, Homo sapien
gtaaaaatagatttactattcatga

SEQ ID NO: 1771774 - DNA, 25 bp, Homo sapien
tattcagtaaaaatagatttactat

SEQ ID NO: 1771775 - DNA, 25 bp, Homo sapien
tgaagcttctagagtttaaaatatt

SEQ ID NO: 1771776 - DNA, 25 bp, Homo sapien
cacacatcattattgaagcttctag

SEQ ID NO: 1771777 - DNA, 25 bp, Homo sapien
ttcagtttgattcaattccatccaa

SEQ ID NO: 1771778 - DNA, 25 bp, Homo sapien
aattccatccaatcacacatcatta

SEQ ID NO: 1771779 - DNA, 25 bp, Homo sapien
gggaaaaagacaggtcaccagtaca

SEQ ID NO: 1771780 - DNA, 25 bp, Homo sapien
aaagagtattataagggctgatccc

SEQ ID NO: 1771781 - DNA, 25 bp, Homo sapien
tctttttcttgctagcccatttata

SEQ ID NO: 1771782 - DNA, 25 bp, Homo sapien
tacaataacttatactgggtgagga

SEQ ID NO: 1771783 - DNA, 25 bp, Homo sapien
gaaatgccgcagttgtgaccatgag

SEQ ID NO: 1771784 - DNA, 25 bp, Homo sapien
tgaaggccagaatatacagactttg

SEQ ID NO: 1771785 - DNA, 25 bp, Homo sapien
gatagtttaggatgatgacaccagt

SEQ ID NO: 1771786 - DNA, 25 bp, Homo sapien
gctaaagaagctcgtaagttccttg

SEQ ID NO: 1771787 - DNA, 25 bp, Homo sapien
ggaagagagaaagtattaaacagag

SEQ ID NO: 1771788 - DNA, 25 bp, Homo sapien
agagagaaagtattaaacagagtat

SEQ ID NO: 1771789 - DNA, 25 bp, Homo sapien
tcactgaaacctacatttattcaaa

SEQ ID NO: 1771790 - DNA, 25 bp, Homo sapien
cactgaaacctacatttattcaaaa

SEQ ID NO: 1771791 - DNA, 25 bp, Homo sapien
ggacatcaaggtaatacttctctaa

SEQ ID NO: 1771792 - DNA, 25 bp, Homo sapien
ttgcatcaaaatatgtgcccttcct

SEQ ID NO: 1771793 - DNA, 25 bp, Homo sapien
gatcagtaatgattgcatcaaaata

SEQ ID NO: 1771794 - DNA, 25 bp, Homo sapien
cacttctggtttttcctagtagcct

SEQ ID NO: 1771795 - DNA, 25 bp, Homo sapien
gtagattctctgataccatatggag

SEQ ID NO: 1771796 - DNA, 25 bp, Homo sapien
ggtatctccttctgtgaacctgttc

SEQ ID NO: 1771797 - DNA, 25 bp, Homo sapien
cctgttcttcttgtagattctctga

SEQ ID NO: 1771798 - DNA, 25 bp, Homo sapien
tctatcccctttggtatctccttct

SEQ ID NO: 1771799 - DNA, 25 bp, Homo sapien
gcgaagtttaacaggtcaagaaaca

SEQ ID NO: 1771800 - DNA, 25 bp, Homo sapien
caccggtaaccaatagactagtctt

SEQ ID NO: 1771801 - DNA, 25 bp, Homo sapien
tctggcgtatacaccggtaaccaat

SEQ ID NO: 1771802 - DNA, 25 bp, Homo sapien
taaaacgagggtctcagctgcgaag

SEQ ID NO: 1771803 - DNA, 25 bp, Homo sapien
caggctgaggaccatatctggccca

SEQ ID NO: 1771804 - DNA, 25 bp, Homo sapien
catctatagactggcaaaagagcta

SEQ ID NO: 1771805 - DNA, 25 bp, Homo sapien
tgtagggtacaataagggctggcaa

SEQ ID NO: 1771806 - DNA, 25 bp, Homo sapien
cattagaaggtagcagaagcgtgaa

SEQ ID NO: 1771807 - DNA, 25 bp, Homo sapien
tctggcaggatgtcgaattaagtga

SEQ ID NO: 1771808 - DNA, 25 bp, Homo sapien
tactaagtatacgagatctggcagg

SEQ ID NO: 1771809 - DNA, 25 bp, Homo sapien
tagataggtcatttcactccttgga

SEQ ID NO: 1771810 - DNA, 25 bp, Homo sapien
ggaattcagtttggctaaggcagca

SEQ ID NO: 1771811 - DNA, 25 bp, Homo sapien
taacgagttccaggcaagggtgcca

SEQ ID NO: 1771812 - DNA, 25 bp, Homo sapien
ttttccattgtgatcaagcgccttg

SEQ ID NO: 1771813 - DNA, 25 bp, Homo sapien
cttttccattgtgatcaagcgcctt

SEQ ID NO: 1771814 - DNA, 25 bp, Homo sapien
gttgctaacgagttccaggcaaggg

SEQ ID NO: 1771815 - DNA, 25 bp, Homo sapien
caggagcaccgttttgatagctgtt

SEQ ID NO: 1771816 - DNA, 25 bp, Homo sapien
tagctgtttgtgagtcccggattgc

SEQ ID NO: 1771817 - DNA, 25 bp, Homo sapien
gcacagcagaccatgcatctgccag

SEQ ID NO: 1771818 - DNA, 25 bp, Homo sapien
ttgatagctgtttgtgagtcccgga

SEQ ID NO: 1771819 - DNA, 25 bp, Homo sapien
gcaacctgggttaatgtcaaacata

SEQ ID NO: 1771820 - DNA, 25 bp, Homo sapien
gcttagaaaattgaggttcctggca

SEQ ID NO: 1771821 - DNA, 25 bp, Homo sapien
taaggactactgctcagactgacgt

SEQ ID NO: 1771822 - DNA, 25 bp, Homo sapien
caaagagagtggttccaagtaacag

SEQ ID NO: 1771823 - DNA, 25 bp, Homo sapien
agcagatgtgaatactggtcccgat

SEQ ID NO: 1771824 - DNA, 25 bp, Homo sapien
gcagatgtgaatactggtcccgatt

SEQ ID NO: 1771825 - DNA, 25 bp, Homo sapien
aaataactgttttgagtctatctcc

SEQ ID NO: 1771826 - DNA, 25 bp, Homo sapien
taaatcgatgacaaccaaaaaccaa

SEQ ID NO: 1771827 - DNA, 25 bp, Homo sapien
aatgtaaatcgatgacaaccaaaaa

SEQ ID NO: 1771828 - DNA, 25 bp, Homo sapien
tctccatcagtacttgaaagtacaa

SEQ ID NO: 1771829 - DNA, 25 bp, Homo sapien
caaaagagcttcaaatgtagacagg

SEQ ID NO: 1771830 - DNA, 25 bp, Homo sapien
gagagaggatccatttactgccacc

SEQ ID NO: 1771831 - DNA, 25 bp, Homo sapien
gaggtacatttgaccaccaaaggca

SEQ ID NO: 1771832 - DNA, 25 bp, Homo sapien
tcaacggttaggaatgcaggagcaa

SEQ ID NO: 1771833 - DNA, 25 bp, Homo sapien
tagatttccccccagtgtaccacaa

SEQ ID NO: 1771834 - DNA, 25 bp, Homo sapien
gaaatgtttgagatctgctgctgaa

SEQ ID NO: 1771835 - DNA, 25 bp, Homo sapien
tcatccttgaatacttttagatttc

SEQ ID NO: 1771836 - DNA, 25 bp, Homo sapien
aatcacatccagaaacccaaacaaa

SEQ ID NO: 1771837 - DNA, 25 bp, Homo sapien
cacctttctgaaatcagtccctatt

SEQ ID NO: 1771838 - DNA, 25 bp, Homo sapien
gccactgcaactgacaccccaaatc

SEQ ID NO: 1771839 - DNA, 25 bp, Homo sapien
actgacaccccaaatcacctttctg

SEQ ID NO: 1771840 - DNA, 25 bp, Homo sapien
atcacctttctgaaatcagtcccta

SEQ ID NO: 1771841 - DNA, 25 bp, Homo sapien
gcataatcacagtttcctgtaacct

SEQ ID NO: 1771842 - DNA, 25 bp, Homo sapien
gttattctcgcagcttcaagtggca

SEQ ID NO: 1771843 - DNA, 25 bp, Homo sapien
cggcagcctgcgtatttctttagca

SEQ ID NO: 1771844 - DNA, 25 bp, Homo sapien
ttctttttctgcgtctggagcccaa

SEQ ID NO: 1771845 - DNA, 25 bp, Homo sapien
tatacggcaaatagagcacgtccac

SEQ ID NO: 1771846 - DNA, 25 bp, Homo sapien
gacagactggaggcaaaaacatggt

SEQ ID NO: 1771847 - DNA, 25 bp, Homo sapien
gcaggaggccaacatgtgactgttt

SEQ ID NO: 1771848 - DNA, 25 bp, Homo sapien
taaaaatcatctccctcggtgcagg

SEQ ID NO: 1771849 - DNA, 25 bp, Homo sapien
tctggagcaagtatctgtcagtcag

SEQ ID NO: 1771850 - DNA, 25 bp, Homo sapien
tgggcaatctcttaccacagtgtaa

SEQ ID NO: 1771851 - DNA, 25 bp, Homo sapien
tatggtgactcaaaaagcctggttg

SEQ ID NO: 1771852 - DNA, 25 bp, Homo sapien
cacaagcaagggctagaggattcca

SEQ ID NO: 1771853 - DNA, 25 bp, Homo sapien
gtgttagagaaaaccaggcgggcca

SEQ ID NO: 1771854 - DNA, 25 bp, Homo sapien
taaaaggtcgtaaaggccaggcaca

SEQ ID NO: 1771855 - DNA, 25 bp, Homo sapien
gcagtgactagccacatcctgtgag

SEQ ID NO: 1771856 - DNA, 25 bp, Homo sapien
ctctgggtgctgtgacgccctttga

SEQ ID NO: 1771857 - DNA, 25 bp, Homo sapien
gccctttgatctgcgttgtgtcaca

SEQ ID NO: 1771858 - DNA, 25 bp, Homo sapien
tacgcactgagtgatggagccattc

SEQ ID NO: 1771859 - DNA, 25 bp, Homo sapien
gataggattagcgtccctgtgagaa

SEQ ID NO: 1771860 - DNA, 25 bp, Homo sapien
ctctaggcaaaggaatggagtatcc

SEQ ID NO: 1771861 - DNA, 25 bp, Homo sapien
taacaattcacctagggcttacaag

SEQ ID NO: 1771862 - DNA, 25 bp, Homo sapien
cctgccctcaggacaagtgtaacaa

SEQ ID NO: 1771863 - DNA, 25 bp, Homo sapien
tcaggtcccaccaactccgaaaagc

SEQ ID NO: 1771864 - DNA, 25 bp, Homo sapien
tgttcttcatgaccagctcaggtcc

SEQ ID NO: 1771865 - DNA, 25 bp, Homo sapien
cgaaaagccttcctcactgaccttt

SEQ ID NO: 1771866 - DNA, 25 bp, Homo sapien
ccttcttccacatgttcttcatgac

SEQ ID NO: 1771867 - DNA, 25 bp, Homo sapien
gacttctaatcccacattcttcttc

SEQ ID NO: 1771868 - DNA, 25 bp, Homo sapien
aggacaattgtagtgtgacttctaa

SEQ ID NO: 1771869 - DNA, 25 bp, Homo sapien
aattgtagtgtgacttctaatccca

SEQ ID NO: 1771870 - DNA, 25 bp, Homo sapien
gacaattgtagtgtgacttctaatc

SEQ ID NO: 1771871 - DNA, 25 bp, Homo sapien
gattctggtgaattaagtaagttac

SEQ ID NO: 1771872 - DNA, 25 bp, Homo sapien
tgcaggcaggatccagttcactgag

SEQ ID NO: 1771873 - DNA, 25 bp, Homo sapien
aaagcgtgacaaagatattttacac

SEQ ID NO: 1771874 - DNA, 25 bp, Homo sapien
atgcacattctgtctgattgaggaa

SEQ ID NO: 1771875 - DNA, 25 bp, Homo sapien
taatgtagcacgaagaatatcctca

SEQ ID NO: 1771876 - DNA, 25 bp, Homo sapien
aatgatttacatatggctgctgggc

SEQ ID NO: 1771877 - DNA, 25 bp, Homo sapien
tctgtgttccagatagaggtttcca

SEQ ID NO: 1771878 - DNA, 25 bp, Homo sapien
cacagcattgttcctacatgaggga

SEQ ID NO: 1771879 - DNA, 25 bp, Homo sapien
gcagtagtgtgctcatgccagctca

SEQ ID NO: 1771880 - DNA, 25 bp, Homo sapien
tggaagctgtggcatctcaacctca

SEQ ID NO: 1771881 - DNA, 25 bp, Homo sapien
catgagccaattgttgaatacagcc

SEQ ID NO: 1771882 - DNA, 25 bp, Homo sapien
taccacggagctttgcaaggatgct

SEQ ID NO: 1771883 - DNA, 25 bp, Homo sapien
cactttcggtggtatcggcataata

SEQ ID NO: 1771884 - DNA, 25 bp, Homo sapien
taaggctgtaacaatggagctgtcc

SEQ ID NO: 1771885 - DNA, 25 bp, Homo sapien
ggcataatatgcaagaccgtctcta

SEQ ID NO: 1771886 - DNA, 25 bp, Homo sapien
cacttgaagatagattgcactgtcc

SEQ ID NO: 1771887 - DNA, 25 bp, Homo sapien
gaggaagtgatcaagataagacaaa

SEQ ID NO: 1771888 - DNA, 25 bp, Homo sapien
tacttaaagtcacgtgatgtaatga

SEQ ID NO: 1771889 - DNA, 25 bp, Homo sapien
tcacgtgatgtaatgaaacttagag

SEQ ID NO: 1771890 - DNA, 25 bp, Homo sapien
gaaagacctagtatgcaatgccaaa

SEQ ID NO: 1771891 - DNA, 25 bp, Homo sapien
cactccagtgggttcatttgcaaaa

SEQ ID NO: 1771892 - DNA, 25 bp, Homo sapien
cggttagaacaaaagcgagcttctg

SEQ ID NO: 1771893 - DNA, 25 bp, Homo sapien
gaagaacagtgtattcggttagaac

SEQ ID NO: 1771894 - DNA, 25 bp, Homo sapien
cacgtttgtgaactaataaagggag

SEQ ID NO: 1771895 - DNA, 25 bp, Homo sapien
catttacttattggtgataattcca

SEQ ID NO: 1771896 - DNA, 25 bp, Homo sapien
tagaaatcaccaagccaaatgcaga

SEQ ID NO: 1771897 - DNA, 25 bp, Homo sapien
catttctagaaatcaccaagccaaa

SEQ ID NO: 1771898 - DNA, 25 bp, Homo sapien
caaatgcagaagttgcaattgccat

SEQ ID NO: 1771899 - DNA, 25 bp, Homo sapien
atcagtaccagtgccctaatgccca

SEQ ID NO: 1771900 - DNA, 25 bp, Homo sapien
aatcagtaccagtgccctaatgccc

SEQ ID NO: 1771901 - DNA, 25 bp, Homo sapien
gcccagctcttccagacccacaacc

SEQ ID NO: 1771902 - DNA, 25 bp, Homo sapien
ttctctcattccagtttcaaaaatc

SEQ ID NO: 1771903 - DNA, 25 bp, Homo sapien
aaaatcaactcaggagtctgactgc

SEQ ID NO: 1771904 - DNA, 25 bp, Homo sapien
cagtctggtgcaggtgcccagctct

SEQ ID NO: 1771905 - DNA, 25 bp, Homo sapien
tataccagaccctttaagtcagctc

SEQ ID NO: 1771906 - DNA, 25 bp, Homo sapien
agcattgttaggcacttttacgaca

SEQ ID NO: 1771907 - DNA, 25 bp, Homo sapien
taaaagaactgccattataccagac

SEQ ID NO: 1771908 - DNA, 25 bp, Homo sapien
cattccaaggacacattgccctcag

SEQ ID NO: 1771909 - DNA, 25 bp, Homo sapien
gaggttccacagttcttgcaggata

SEQ ID NO: 1771910 - DNA, 25 bp, Homo sapien
cagttcttgcaggataaatagagcc

SEQ ID NO: 1771911 - DNA, 25 bp, Homo sapien
gaagtcgaggaggttccacagttct

SEQ ID NO: 1771912 - DNA, 25 bp, Homo sapien
ttacgatggaagtcgaggaggttcc

SEQ ID NO: 1771913 - DNA, 25 bp, Homo sapien
tgacaaatgagaattagcgtaggac

SEQ ID NO: 1771914 - DNA, 25 bp, Homo sapien
caaatgagaattagcgtaggaccat

SEQ ID NO: 1771915 - DNA, 25 bp, Homo sapien
aattctccaagtatgctgtgggaag

SEQ ID NO: 1771916 - DNA, 25 bp, Homo sapien
aaattctccaagtatgctgtgggaa

SEQ ID NO: 1771917 - DNA, 25 bp, Homo sapien
tactgatgtatacaccaatactcct

SEQ ID NO: 1771918 - DNA, 25 bp, Homo sapien
ggtcactctctgttacgcatgctgg

SEQ ID NO: 1771919 - DNA, 25 bp, Homo sapien
taaaaactgtggcaattactgatgt

SEQ ID NO: 1771920 - DNA, 25 bp, Homo sapien
taagctctttatatggatagctgct

SEQ ID NO: 1771921 - DNA, 25 bp, Homo sapien
tcttgggccagtcttcagagagata

SEQ ID NO: 1771922 - DNA, 25 bp, Homo sapien
taatcgctgtgctaaatgtctcatc

SEQ ID NO: 1771923 - DNA, 25 bp, Homo sapien
gaaaggatcttatggtgtcaagcac

SEQ ID NO: 1771924 - DNA, 25 bp, Homo sapien
agaggccaggtttcatccacaggag

SEQ ID NO: 1771925 - DNA, 25 bp, Homo sapien
ggaatatcctcagataccaatcttc

SEQ ID NO: 1771926 - DNA, 25 bp, Homo sapien
tcttgagttctctccaggaatatcc

SEQ ID NO: 1771927 - DNA, 25 bp, Homo sapien
cattgtctgtatataccctatctaa

SEQ ID NO: 1771928 - DNA, 25 bp, Homo sapien
taccctatctaaagcatatgttgat

SEQ ID NO: 1771929 - DNA, 25 bp, Homo sapien
tcaggattgccttagctgtgccaga

SEQ ID NO: 1771930 - DNA, 25 bp, Homo sapien
catccatggcatgggatattttcca

SEQ ID NO: 1771931 - DNA, 25 bp, Homo sapien
catcagtgttttagttgcctcacag

SEQ ID NO: 1771932 - DNA, 25 bp, Homo sapien
ccccagcgtatattcttggtgcctt

SEQ ID NO: 1771933 - DNA, 25 bp, Homo sapien
aagtcagagtaattgaactattcat

SEQ ID NO: 1771934 - DNA, 25 bp, Homo sapien
tttttgtgaacatggtattttaata

SEQ ID NO: 1771935 - DNA, 25 bp, Homo sapien
atcaagtcagagtaattgaactatt

SEQ ID NO: 1771936 - DNA, 25 bp, Homo sapien
cagagtaattgaactattcatcaac

SEQ ID NO: 1771937 - DNA, 25 bp, Homo sapien
gcaaccaggacaagagcagaaaatg

SEQ ID NO: 1771938 - DNA, 25 bp, Homo sapien
tgagaaatgaattcacgccaatttt

SEQ ID NO: 1771939 - DNA, 25 bp, Homo sapien
aatgctcttcccaaggaacacggag

SEQ ID NO: 1771940 - DNA, 25 bp, Homo sapien
gatgttagccctgtggaagtgataa

SEQ ID NO: 1771941 - DNA, 25 bp, Homo sapien
catgacatcatgagcatgtttatta

SEQ ID NO: 1771942 - DNA, 25 bp, Homo sapien
gagatttaaagtgacatgacatcat

SEQ ID NO: 1771943 - DNA, 25 bp, Homo sapien
tagtaaaccaagattcttagagatt

SEQ ID NO: 1771944 - DNA, 25 bp, Homo sapien
gtgacatgacatcatgagcatgttt

SEQ ID NO: 1771945 - DNA, 25 bp, Homo sapien
gacgaacagccatcatgaacactag

SEQ ID NO: 1771946 - DNA, 25 bp, Homo sapien
gatgttgtctctaggaatataaact

SEQ ID NO: 1771947 - DNA, 25 bp, Homo sapien
cctggttcgtggaatgcagcttttc

SEQ ID NO: 1771948 - DNA, 25 bp, Homo sapien
acacagctccccagaattaattcca

SEQ ID NO: 1771949 - DNA, 25 bp, Homo sapien
gttggattcctaccctgtcttcagg

SEQ ID NO: 1771950 - DNA, 25 bp, Homo sapien
tagactccgggtctctgaaaaccag

SEQ ID NO: 1771951 - DNA, 25 bp, Homo sapien
cataactgcctcaggttggattcct

SEQ ID NO: 1771952 - DNA, 25 bp, Homo sapien
aaccagtgtgggaatttacagtctc

SEQ ID NO: 1771953 - DNA, 25 bp, Homo sapien
tagcaggacaactcctaagatcagc

SEQ ID NO: 1771954 - DNA, 25 bp, Homo sapien
gatcagcgaccttccaaataacctt

SEQ ID NO: 1771955 - DNA, 25 bp, Homo sapien
gaaattcaagattctccggtaactg

SEQ ID NO: 1771956 - DNA, 25 bp, Homo sapien
gacttctcatagcatgcttgccccg

SEQ ID NO: 1771957 - DNA, 25 bp, Homo sapien
actctgctcttctgttccccagaca

SEQ ID NO: 1771958 - DNA, 25 bp, Homo sapien
ccacatgatcccaggcaggactctg

SEQ ID NO: 1771959 - DNA, 25 bp, Homo sapien
tgctcttctgttccccagacattct

SEQ ID NO: 1771960 - DNA, 25 bp, Homo sapien
atgatcccaggcaggactctgctct

SEQ ID NO: 1771961 - DNA, 25 bp, Homo sapien
tctttttgcgactcactcttctgct

SEQ ID NO: 1771962 - DNA, 25 bp, Homo sapien
tctctttttgcgactcactcttctg

SEQ ID NO: 1771963 - DNA, 25 bp, Homo sapien
attttctctttttgcgactcactct

SEQ ID NO: 1771964 - DNA, 25 bp, Homo sapien
ttctctttttgcgactcactcttct

SEQ ID NO: 1771965 - DNA, 25 bp, Homo sapien
gaagggttgaaggaccatcgcattt

SEQ ID NO: 1771966 - DNA, 25 bp, Homo sapien
cactgttcatatatcaagctgtcaa

SEQ ID NO: 1771967 - DNA, 25 bp, Homo sapien
gatccatcagctagaccatcacaag

SEQ ID NO: 1771968 - DNA, 25 bp, Homo sapien
ctgcatttaacctggatgagtgaat

SEQ ID NO: 1771969 - DNA, 25 bp, Homo sapien
taaatcctgctttatgttgataaaa

SEQ ID NO: 1771970 - DNA, 25 bp, Homo sapien
ggtttatggcactacaattcagtcc

SEQ ID NO: 1771971 - DNA, 25 bp, Homo sapien
ggaattaacccaagttcaagcatat

SEQ ID NO: 1771972 - DNA, 25 bp, Homo sapien
tgccataatagttttgcatccaatc

SEQ ID NO: 1771973 - DNA, 25 bp, Homo sapien
tgctccttggtccaacccacaaaac

SEQ ID NO: 1771974 - DNA, 25 bp, Homo sapien
ttgctccttggtccaacccacaaaa

SEQ ID NO: 1771975 - DNA, 25 bp, Homo sapien
ccaacccacaaaaccctttgatatg

SEQ ID NO: 1771976 - DNA, 25 bp, Homo sapien
atcccactggaacaatggtgccctt

SEQ ID NO: 1771977 - DNA, 25 bp, Homo sapien
acaatcccactggaacaatggtgcc

SEQ ID NO: 1771978 - DNA, 25 bp, Homo sapien
caatcccactggaacaatggtgccc

SEQ ID NO: 1771979 - DNA, 25 bp, Homo sapien
tcacaatcccactggaacaatggtg

SEQ ID NO: 1771980 - DNA, 25 bp, Homo sapien
ttgttaacaaagcaccctgttaatg

SEQ ID NO: 1771981 - DNA, 25 bp, Homo sapien
gaccacaagaactaatgtgcttggg

SEQ ID NO: 1771982 - DNA, 25 bp, Homo sapien
tgttaacaaagcaccctgttaatgt

SEQ ID NO: 1771983 - DNA, 25 bp, Homo sapien
caagaactaatgtgcttggggttga

SEQ ID NO: 1771984 - DNA, 25 bp, Homo sapien
ggttcaggttcaccctactcttgga

SEQ ID NO: 1771985 - DNA, 25 bp, Homo sapien
tacaacactggctgggtctacaatc

SEQ ID NO: 1771986 - DNA, 25 bp, Homo sapien
ggaaattctttgtcaggctgcctct

SEQ ID NO: 1771987 - DNA, 25 bp, Homo sapien
tcagttgagggagcccaagaaggtc

SEQ ID NO: 1771988 - DNA, 25 bp, Homo sapien
agaacaatgttcctcaaacttgagt

SEQ ID NO: 1771989 - DNA, 25 bp, Homo sapien
gttcctcaaacttgagtggaccagg

SEQ ID NO: 1771990 - DNA, 25 bp, Homo sapien
ttgaccttcaagatctacaattaga

SEQ ID NO: 1771991 - DNA, 25 bp, Homo sapien
tgaccttcaagatctacaattagaa

SEQ ID NO: 1771992 - DNA, 25 bp, Homo sapien
gaaagacctttgtgctctgacaaga

SEQ ID NO: 1771993 - DNA, 25 bp, Homo sapien
cattctagaagctgaagagtcccct

SEQ ID NO: 1771994 - DNA, 25 bp, Homo sapien
caaaataagtagtgatgctctgccc

SEQ ID NO: 1771995 - DNA, 25 bp, Homo sapien
tctgtgctgtaaaccagtaagctgc

SEQ ID NO: 1771996 - DNA, 25 bp, Homo sapien
ctctttgaaggtacgaacaactttg

SEQ ID NO: 1771997 - DNA, 25 bp, Homo sapien
tgccagacattgtttattttagcca

SEQ ID NO: 1771998 - DNA, 25 bp, Homo sapien
taaacaacagtaactatatagtggc

SEQ ID NO: 1771999 - DNA, 25 bp, Homo sapien
tatagtggctgacttaacaaggctt

SEQ ID NO: 1772000 - DNA, 25 bp, Homo sapien
gaagcatttacagtagaaatccttc

SEQ ID NO: 1772001 - DNA, 25 bp, Homo sapien
agcatttacagtagaaatccttcac

SEQ ID NO: 1772002 - DNA, 25 bp, Homo sapien
gcatttacagtagaaatccttcacc

SEQ ID NO: 1772003 - DNA, 25 bp, Homo sapien
ttgaagcatttacagtagaaatcct

SEQ ID NO: 1772004 - DNA, 25 bp, Homo sapien
gggtgaatatctaatcttcgaccaa

SEQ ID NO: 1772005 - DNA, 25 bp, Homo sapien
atttggactctgaaagctcaagttg

SEQ ID NO: 1772006 - DNA, 25 bp, Homo sapien
tcaagagccctggatgagtctaaca

SEQ ID NO: 1772007 - DNA, 25 bp, Homo sapien
tcttcgaccaaagcaaacatgatct

SEQ ID NO: 1772008 - DNA, 25 bp, Homo sapien
tctccatctatcaccactgatgagg

SEQ ID NO: 1772009 - DNA, 25 bp, Homo sapien
gcaggctacaggtgatccaggtcca

SEQ ID NO: 1772010 - DNA, 25 bp, Homo sapien
ggtcttcattgctaggcaggctaca

SEQ ID NO: 1772011 - DNA, 25 bp, Homo sapien
attatttattaccaaccaatgtagc

SEQ ID NO: 1772012 - DNA, 25 bp, Homo sapien
gaagcactatcatggctattccaga

SEQ ID NO: 1772013 - DNA, 25 bp, Homo sapien
gcagggagtacgctttggattgtca

SEQ ID NO: 1772014 - DNA, 25 bp, Homo sapien
tcaaagcacttctccatggaccatg

SEQ ID NO: 1772015 - DNA, 25 bp, Homo sapien
tggaccatgcagtaaccaaggagac

SEQ ID NO: 1772016 - DNA, 25 bp, Homo sapien
catacacgtatagggcatcttctcc

SEQ ID NO: 1772017 - DNA, 25 bp, Homo sapien
cagacactgcattatgtaccagggc

SEQ ID NO: 1772018 - DNA, 25 bp, Homo sapien
taccagggctacatatgagtttaag

SEQ ID NO: 1772019 - DNA, 25 bp, Homo sapien
tatctttactttatccatcagacat

SEQ ID NO: 1772020 - DNA, 25 bp, Homo sapien
catgcttgtacgtaacagctttgca

SEQ ID NO: 1772021 - DNA, 25 bp, Homo sapien
gatacactagtacaagctggctttg

SEQ ID NO: 1772022 - DNA, 25 bp, Homo sapien
tgtagtagtacacacctaaaatgtc

SEQ ID NO: 1772023 - DNA, 25 bp, Homo sapien
ggctgcctgatatgccatcaagtag

SEQ ID NO: 1772024 - DNA, 25 bp, Homo sapien
tgtgcaggcatatttgagcttgttg

SEQ ID NO: 1772025 - DNA, 25 bp, Homo sapien
atgtgcaggcatatttgagcttgtt

SEQ ID NO: 1772026 - DNA, 25 bp, Homo sapien
tctcccactaaaatcaatatcatct

SEQ ID NO: 1772027 - DNA, 25 bp, Homo sapien
tcttgttgcctgatttgtcttctac

SEQ ID NO: 1772028 - DNA, 25 bp, Homo sapien
gttgcctgatttgtcttctaccagc

SEQ ID NO: 1772029 - DNA, 25 bp, Homo sapien
tcatcttgttgcctgatttgtcttc

SEQ ID NO: 1772030 - DNA, 25 bp, Homo sapien
cctgtgccccctgccctgctctcat

SEQ ID NO: 1772031 - DNA, 25 bp, Homo sapien
tcctctcccacctgtgccccctgcc

SEQ ID NO: 1772032 - DNA, 25 bp, Homo sapien
ccacctgtgccccctgccctgctct

SEQ ID NO: 1772033 - DNA, 25 bp, Homo sapien
cctcctctcccacctgtgccccctg

SEQ ID NO: 1772034 - DNA, 25 bp, Homo sapien
tgggcctcacagagggatggggaat

SEQ ID NO: 1772035 - DNA, 25 bp, Homo sapien
ggggaatagactgaccacactgctg

SEQ ID NO: 1772036 - DNA, 25 bp, Homo sapien
gcatttgtaatacagcagcttcacc

SEQ ID NO: 1772037 - DNA, 25 bp, Homo sapien
caaagcatttgtaatacagcagctt

SEQ ID NO: 1772038 - DNA, 25 bp, Homo sapien
gcatcctgaccacttagtgaaaatc

SEQ ID NO: 1772039 - DNA, 25 bp, Homo sapien
cacttagtgaaaatcccagcagaca

SEQ ID NO: 1772040 - DNA, 25 bp, Homo sapien
aaaacgatcaggactgtggttggca

SEQ ID NO: 1772041 - DNA, 25 bp, Homo sapien
caagccatttaaaacgatcaggact

SEQ ID NO: 1772042 - DNA, 25 bp, Homo sapien
tagtatgaagcattgttgtatttcg

SEQ ID NO: 1772043 - DNA, 25 bp, Homo sapien
agtatgaagcattgttgtatttcgt

SEQ ID NO: 1772044 - DNA, 25 bp, Homo sapien
ttagtatgaagcattgttgtatttc

SEQ ID NO: 1772045 - DNA, 25 bp, Homo sapien
ctggagactaaaactctagagagga

SEQ ID NO: 1772046 - DNA, 25 bp, Homo sapien
tgtacctctgccagtctgacctttg

SEQ ID NO: 1772047 - DNA, 25 bp, Homo sapien
ccctaagtggatatgtgtacctctg

SEQ ID NO: 1772048 - DNA, 25 bp, Homo sapien
taattggctaccaatgcaagtgcag

SEQ ID NO: 1772049 - DNA, 25 bp, Homo sapien
tcagatagaagggtgtggaactcac

SEQ ID NO: 1772050 - DNA, 25 bp, Homo sapien
tataccagttgttgagtcagaggca

SEQ ID NO: 1772051 - DNA, 25 bp, Homo sapien
ccatgttcaggaaatatagcagtga

SEQ ID NO: 1772052 - DNA, 25 bp, Homo sapien
gtgaacagagttcctcatgaaaggt

SEQ ID NO: 1772053 - DNA, 25 bp, Homo sapien
cattattttagattgtactcctgct

SEQ ID NO: 1772054 - DNA, 25 bp, Homo sapien
tcactatactatcctttttgtcatt

SEQ ID NO: 1772055 - DNA, 25 bp, Homo sapien
caaaagtgagtgatatttatgatcc

SEQ ID NO: 1772056 - DNA, 25 bp, Homo sapien
accttcctgtgggacaagatgagca

SEQ ID NO: 1772057 - DNA, 25 bp, Homo sapien
caaatcagtaaatatggcacaccac

SEQ ID NO: 1772058 - DNA, 25 bp, Homo sapien
tgttgactctgtggcgcaggacctt

SEQ ID NO: 1772059 - DNA, 25 bp, Homo sapien
tctaaagaagaactactaccagtgc

SEQ ID NO: 1772060 - DNA, 25 bp, Homo sapien
caaaactggataaggactcaacaac

SEQ ID NO: 1772061 - DNA, 25 bp, Homo sapien
ccgctccactacactcacactgaat

SEQ ID NO: 1772062 - DNA, 25 bp, Homo sapien
gacaggctgttgcaagccctccgct

SEQ ID NO: 1772063 - DNA, 25 bp, Homo sapien
ctgcttccctgacaggctgttgcaa

SEQ ID NO: 1772064 - DNA, 25 bp, Homo sapien
gcctgacagctggtatggtggaaga

SEQ ID NO: 1772065 - DNA, 25 bp, Homo sapien
gctggaaaccccctgtggagagtgt

SEQ ID NO: 1772066 - DNA, 25 bp, Homo sapien
ccacatgctggaaaccccctgtgga

SEQ ID NO: 1772067 - DNA, 25 bp, Homo sapien
gcactggccccaggcgatagctctc

SEQ ID NO: 1772068 - DNA, 25 bp, Homo sapien
ggccccaggcgatagctctcttctt

SEQ ID NO: 1772069 - DNA, 25 bp, Homo sapien
tttctcttcattctagggtccagtc

SEQ ID NO: 1772070 - DNA, 25 bp, Homo sapien
ccctgaagtcattttgttacaacca

SEQ ID NO: 1772071 - DNA, 25 bp, Homo sapien
tcagcatgtattgcctgagaacaag

SEQ ID NO: 1772072 - DNA, 25 bp, Homo sapien
gccattatgccaattgttcgaacaa

SEQ ID NO: 1772073 - DNA, 25 bp, Homo sapien
gtgattcactttctatgaagcaaga

SEQ ID NO: 1772074 - DNA, 25 bp, Homo sapien
cacacccagctgtgattcactttct

SEQ ID NO: 1772075 - DNA, 25 bp, Homo sapien
gggccaattaagatattatacttca

SEQ ID NO: 1772076 - DNA, 25 bp, Homo sapien
tctatgaagcaagatttcactctct

SEQ ID NO: 1772077 - DNA, 25 bp, Homo sapien
tgatggtaacccatatcaatgtggg

SEQ ID NO: 1772078 - DNA, 25 bp, Homo sapien
ccagaattttgtctatagagcatgc

SEQ ID NO: 1772079 - DNA, 25 bp, Homo sapien
tcaatgtgggtatgaaaatcgtcct

SEQ ID NO: 1772080 - DNA, 25 bp, Homo sapien
catgctctgtccaatgcaagcgcca

SEQ ID NO: 1772081 - DNA, 25 bp, Homo sapien
aacctcagtgtcacgtaatatacca

SEQ ID NO: 1772082 - DNA, 25 bp, Homo sapien
gctaaacactgatgccaatggctgg

SEQ ID NO: 1772083 - DNA, 25 bp, Homo sapien
gaaaggcagcatctttggaccataa

SEQ ID NO: 1772084 - DNA, 25 bp, Homo sapien
gattggtttcaacatggcagcaact

SEQ ID NO: 1772085 - DNA, 25 bp, Homo sapien
gacctcaactttagggcagtgcagc

SEQ ID NO: 1772086 - DNA, 25 bp, Homo sapien
cgattggctcgctatttgtctgttg

SEQ ID NO: 1772087 - DNA, 25 bp, Homo sapien
tgttccatatgagacttaaactagt

SEQ ID NO: 1772088 - DNA, 25 bp, Homo sapien
agttcactcacgattggctcgctat

SEQ ID NO: 1772089 - DNA, 25 bp, Homo sapien
tgaagcccaagagtggaaattatac

SEQ ID NO: 1772090 - DNA, 25 bp, Homo sapien
gctcacactggaaactaataaaagt

SEQ ID NO: 1772091 - DNA, 25 bp, Homo sapien
tctaggtgactgtatatccatgcaa

SEQ ID NO: 1772092 - DNA, 25 bp, Homo sapien
tacatattgatatccactgaagcat

SEQ ID NO: 1772093 - DNA, 25 bp, Homo sapien
gagcattgcctataaattgccattg

SEQ ID NO: 1772094 - DNA, 25 bp, Homo sapien
tgcatgtggtcataccctaggcggt

SEQ ID NO: 1772095 - DNA, 25 bp, Homo sapien
tgtgatctcacgcacacaagtgatc

SEQ ID NO: 1772096 - DNA, 25 bp, Homo sapien
cattggcatttgctagtctgcagac

SEQ ID NO: 1772097 - DNA, 25 bp, Homo sapien
gaccaatctttgagatccgctgtga

SEQ ID NO: 1772098 - DNA, 25 bp, Homo sapien
tacctgacgtcattgagagcctgcg

SEQ ID NO: 1772099 - DNA, 25 bp, Homo sapien
tagtgacgttaaccctgagcaagcc

SEQ ID NO: 1772100 - DNA, 25 bp, Homo sapien
cctgcctgtaggtggaaaacgccca

SEQ ID NO: 1772101 - DNA, 25 bp, Homo sapien
ggattccgacagcactaatgccatg

SEQ ID NO: 1772102 - DNA, 25 bp, Homo sapien
tctgggagactatggtcgacagcgc

SEQ ID NO: 1772103 - DNA, 25 bp, Homo sapien
gaagactcgctttagaaagccacgg

SEQ ID NO: 1772104 - DNA, 25 bp, Homo sapien
cagacgaagttgaggcttctttcgc

SEQ ID NO: 1772105 - DNA, 25 bp, Homo sapien
caataagtcaccacttttctccaga

SEQ ID NO: 1772106 - DNA, 25 bp, Homo sapien
attcccagcccgagaagggatggaa

SEQ ID NO: 1772107 - DNA, 25 bp, Homo sapien
ttcccagcccgagaagggatggaat

SEQ ID NO: 1772108 - DNA, 25 bp, Homo sapien
acctggatcccaccgcactatggag

SEQ ID NO: 1772109 - DNA, 25 bp, Homo sapien
tcccaccgcactatggagcccctct

SEQ ID NO: 1772110 - DNA, 25 bp, Homo sapien
gatcccaccgcactatggagcccct

SEQ ID NO: 1772111 - DNA, 25 bp, Homo sapien
ccacctggatcccaccgcactatgg

SEQ ID NO: 1772112 - DNA, 25 bp, Homo sapien
taaagcatcattacatatcaaaacg

SEQ ID NO: 1772113 - DNA, 25 bp, Homo sapien
tatcaaaacgtatgtaagattcgct

SEQ ID NO: 1772114 - DNA, 25 bp, Homo sapien
caaaggtcatttgtcatccaacaac

SEQ ID NO: 1772115 - DNA, 25 bp, Homo sapien
tactattaataatcttcgagcctct

SEQ ID NO: 1772116 - DNA, 25 bp, Homo sapien
ctgctaatcgatgaacaaacagtaa

SEQ ID NO: 1772117 - DNA, 25 bp, Homo sapien
caaacagtaaacagttcagatggac

SEQ ID NO: 1772118 - DNA, 25 bp, Homo sapien
aatgactctacatttactcgcacaa

SEQ ID NO: 1772119 - DNA, 25 bp, Homo sapien
gcggccagtacatgctccttgttaa

SEQ ID NO: 1772120 - DNA, 25 bp, Homo sapien
tttgctgcggccagtacatgctcct

SEQ ID NO: 1772121 - DNA, 25 bp, Homo sapien
cgcacaagcgtttgtcctggactct

SEQ ID NO: 1772122 - DNA, 25 bp, Homo sapien
ggactaatacaatgaggtaattagg

SEQ ID NO: 1772123 - DNA, 25 bp, Homo sapien
tcagtctacagattagcagattgta

SEQ ID NO: 1772124 - DNA, 25 bp, Homo sapien
cagattagcagattgtaggaacatg

SEQ ID NO: 1772125 - DNA, 25 bp, Homo sapien
tctacagattagcagattgtaggaa

SEQ ID NO: 1772126 - DNA, 25 bp, Homo sapien
cataactttcaagaatatgttcttt

SEQ ID NO: 1772127 - DNA, 25 bp, Homo sapien
cccaaaagaatgcatcataactttc

SEQ ID NO: 1772128 - DNA, 25 bp, Homo sapien
taataatcccatattaactgatgtg

SEQ ID NO: 1772129 - DNA, 25 bp, Homo sapien
aaatgtctttatgatctgttaccac

SEQ ID NO: 1772130 - DNA, 25 bp, Homo sapien
tgaaagtgcacctagatttgactgc

SEQ ID NO: 1772131 - DNA, 25 bp, Homo sapien
tacactgtacctatatgaaattcct

SEQ ID NO: 1772132 - DNA, 25 bp, Homo sapien
tggcaacagaactacatgtacactg

SEQ ID NO: 1772133 - DNA, 25 bp, Homo sapien
gtgtactgtacatgggacttctctg

SEQ ID NO: 1772134 - DNA, 25 bp, Homo sapien
aatggatctcaaggacaatatactg

SEQ ID NO: 1772135 - DNA, 25 bp, Homo sapien
tccaatgcccaaaggttacctcttg

SEQ ID NO: 1772136 - DNA, 25 bp, Homo sapien
tgtaaaaggatagcacaaagagact

SEQ ID NO: 1772137 - DNA, 25 bp, Homo sapien
tgctagggtaggacacattttaaac

SEQ ID NO: 1772138 - DNA, 25 bp, Homo sapien
ttgctggtgtcatctgggtttcctc

SEQ ID NO: 1772139 - DNA, 25 bp, Homo sapien
ttcttgctggtgtcatctgggtttc

SEQ ID NO: 1772140 - DNA, 25 bp, Homo sapien
tacattttcttgctggtgtcatctg

SEQ ID NO: 1772141 - DNA, 25 bp, Homo sapien
ctacattttcttgctggtgtcatct

SEQ ID NO: 1772142 - DNA, 25 bp, Homo sapien
aaagcaagttactgtgaaggttctc

SEQ ID NO: 1772143 - DNA, 25 bp, Homo sapien
tcctctagttgctgtgcaaagcaag

SEQ ID NO: 1772144 - DNA, 25 bp, Homo sapien
tgctgtgcaaagcaagttactgtga

SEQ ID NO: 1772145 - DNA, 25 bp, Homo sapien
aacttcctctagttgctgtgcaaag

SEQ ID NO: 1772146 - DNA, 25 bp, Homo sapien
actccatcaggtcagttacattctt

SEQ ID NO: 1772147 - DNA, 25 bp, Homo sapien
attcttgtggtgtgtttctcaactc

SEQ ID NO: 1772148 - DNA, 25 bp, Homo sapien
tgtggtgtgtttctcaactccatca

SEQ ID NO: 1772149 - DNA, 25 bp, Homo sapien
tgtttctcaactccatcaggtcagt

SEQ ID NO: 1772150 - DNA, 25 bp, Homo sapien
ggcttggtctgagtgtccttttgtg

SEQ ID NO: 1772151 - DNA, 25 bp, Homo sapien
gaatgaagctatcttttaaggtgga

SEQ ID NO: 1772152 - DNA, 25 bp, Homo sapien
gaaacgttgtataagcagaatgaag

SEQ ID NO: 1772153 - DNA, 25 bp, Homo sapien
tgtgctactgtatatggtgaaacgt

SEQ ID NO: 1772154 - DNA, 25 bp, Homo sapien
tgttctttggaacatgaatgcagct

SEQ ID NO: 1772155 - DNA, 25 bp, Homo sapien
tcatgttctttggaacatgaatgca

SEQ ID NO: 1772156 - DNA, 25 bp, Homo sapien
atgttctttggaacatgaatgcagc

SEQ ID NO: 1772157 - DNA, 25 bp, Homo sapien
catgttctttggaacatgaatgcag

SEQ ID NO: 1772158 - DNA, 25 bp, Homo sapien
catccactctgcccttgtgccagta

SEQ ID NO: 1772159 - DNA, 25 bp, Homo sapien
tcatttgatatagccggccctccat

SEQ ID NO: 1772160 - DNA, 25 bp, Homo sapien
ttgtgccagtatagtctccttcaac

SEQ ID NO: 1772161 - DNA, 25 bp, Homo sapien
ccttgtgccagtatagtctccttca

SEQ ID NO: 1772162 - DNA, 25 bp, Homo sapien
tactccccatttagcctcacagagg

SEQ ID NO: 1772163 - DNA, 25 bp, Homo sapien
gaggacatagattgccaggtgttta

SEQ ID NO: 1772164 - DNA, 25 bp, Homo sapien
tgcttcctactgaggacatagattg

SEQ ID NO: 1772165 - DNA, 25 bp, Homo sapien
gtactccccatttagcctcacagag

SEQ ID NO: 1772166 - DNA, 25 bp, Homo sapien
taatctttatagataacaaccgacc

SEQ ID NO: 1772167 - DNA, 25 bp, Homo sapien
cagcccaatcagaacaggacccatt

SEQ ID NO: 1772168 - DNA, 25 bp, Homo sapien
ctgtcagacccatgtgcaaaacaac

SEQ ID NO: 1772169 - DNA, 25 bp, Homo sapien
tttgttcaatgtatagcaaagatac

SEQ ID NO: 1772170 - DNA, 25 bp, Homo sapien
gcctggccagtattgctcatttcta

SEQ ID NO: 1772171 - DNA, 25 bp, Homo sapien
ggtcctccttctaatcatccaatgg

SEQ ID NO: 1772172 - DNA, 25 bp, Homo sapien
tgctgcggcatgaaacaacgtgggt

SEQ ID NO: 1772173 - DNA, 25 bp, Homo sapien
catacattgtgtttagccaggaaaa

SEQ ID NO: 1772174 - DNA, 25 bp, Homo sapien
tattctccactcttcagttttcaga

SEQ ID NO: 1772175 - DNA, 25 bp, Homo sapien
cctgctgaacatattctccactctt

SEQ ID NO: 1772176 - DNA, 25 bp, Homo sapien
tgaacatattctccactcttcagtt

SEQ ID NO: 1772177 - DNA, 25 bp, Homo sapien
tgctgaacatattctccactcttca

SEQ ID NO: 1772178 - DNA, 25 bp, Homo sapien
caaaaaagtgttggatagcactacc

SEQ ID NO: 1772179 - DNA, 25 bp, Homo sapien
taactcttgagttgtactgaaatcc

SEQ ID NO: 1772180 - DNA, 25 bp, Homo sapien
caagtttcatgttggtatcaagcaa

SEQ ID NO: 1772181 - DNA, 25 bp, Homo sapien
tattccaaaactaggatttggcctg

SEQ ID NO: 1772182 - DNA, 25 bp, Homo sapien
caagtgcccaacctaagaagaaatg

SEQ ID NO: 1772183 - DNA, 25 bp, Homo sapien
tcatgagtgagttcaagggaccaca

SEQ ID NO: 1772184 - DNA, 25 bp, Homo sapien
cacatggtatcagcccctgtatggg

SEQ ID NO: 1772185 - DNA, 25 bp, Homo sapien
gatagtataggttacactggcctgg

SEQ ID NO: 1772186 - DNA, 25 bp, Homo sapien
tgttgcactgggaaaatcaaacttg

SEQ ID NO: 1772187 - DNA, 25 bp, Homo sapien
tgcgacagcattaagagtgggacct

SEQ ID NO: 1772188 - DNA, 25 bp, Homo sapien
gattgagttataaggactctgccca

SEQ ID NO: 1772189 - DNA, 25 bp, Homo sapien
taaaagggtccactacctaggatca

SEQ ID NO: 1772190 - DNA, 25 bp, Homo sapien
ttggtaaagtgttaattggctctga

SEQ ID NO: 1772191 - DNA, 25 bp, Homo sapien
aaagtgttaattggctctgaaggga

SEQ ID NO: 1772192 - DNA, 25 bp, Homo sapien
tgaggtgaccccattggtaaagtgt

SEQ ID NO: 1772193 - DNA, 25 bp, Homo sapien
ctgaggtgaccccattggtaaagtg

SEQ ID NO: 1772194 - DNA, 25 bp, Homo sapien
gagctgctgaacctccacagtaggt

SEQ ID NO: 1772195 - DNA, 25 bp, Homo sapien
tgagctggcagggagtagattccaa

SEQ ID NO: 1772196 - DNA, 25 bp, Homo sapien
cagaaagcaatcaagctgagctggc

SEQ ID NO: 1772197 - DNA, 25 bp, Homo sapien
actgaaaggaaggtcgagctgctga

SEQ ID NO: 1772198 - DNA, 25 bp, Homo sapien
ttttgaaagctgcaatcccacttcc

SEQ ID NO: 1772199 - DNA, 25 bp, Homo sapien
tatcatcatccagtcttaagatcaa

SEQ ID NO: 1772200 - DNA, 25 bp, Homo sapien
ccagtcttaagatcaatgttacata

SEQ ID NO: 1772201 - DNA, 25 bp, Homo sapien
tgccaatttggtttggtaatactag

SEQ ID NO: 1772202 - DNA, 25 bp, Homo sapien
tatgaaagtgtagttactaagaacc

SEQ ID NO: 1772203 - DNA, 25 bp, Homo sapien
cgtgatgtgtgttagcagtatgaaa

SEQ ID NO: 1772204 - DNA, 25 bp, Homo sapien
tctctctgaggctattaactgaacc

SEQ ID NO: 1772205 - DNA, 25 bp, Homo sapien
tcatggctgcactgcgtgatgtgtg

SEQ ID NO: 1772206 - DNA, 25 bp, Homo sapien
ctgaatgatggtttcatacacatcg

SEQ ID NO: 1772207 - DNA, 25 bp, Homo sapien
ggtttcatacacatcgacaaggtgc

SEQ ID NO: 1772208 - DNA, 25 bp, Homo sapien
catcgacaaggtgcacttcttggtc

SEQ ID NO: 1772209 - DNA, 25 bp, Homo sapien
tccagaaacagggaaagtcaacctg

SEQ ID NO: 1772210 - DNA, 25 bp, Homo sapien
ccccatagccaagtctaccagattg

SEQ ID NO: 1772211 - DNA, 25 bp, Homo sapien
tagccaagtctaccagattggagcc

SEQ ID NO: 1772212 - DNA, 25 bp, Homo sapien
tggcctctccttgcctagcaagaag

SEQ ID NO: 1772213 - DNA, 25 bp, Homo sapien
gaaggccctgccacagtggcccagt

SEQ ID NO: 1772214 - DNA, 25 bp, Homo sapien
gcatagccagcaacccatgtgaagg

SEQ ID NO: 1772215 - DNA, 25 bp, Homo sapien
aaagcccatcaactcaaatgcctcg

SEQ ID NO: 1772216 - DNA, 25 bp, Homo sapien
aaatgcctcgccaacacatatgaag

SEQ ID NO: 1772217 - DNA, 25 bp, Homo sapien
catgtgaaggcaaagcccatcaact

SEQ ID NO: 1772218 - DNA, 25 bp, Homo sapien
aattctataacttcaagaaccatat

SEQ ID NO: 1772219 - DNA, 25 bp, Homo sapien
tctataacttcaagaaccatatcac

SEQ ID NO: 1772220 - DNA, 25 bp, Homo sapien
attctataacttcaagaaccatatc

SEQ ID NO: 1772221 - DNA, 25 bp, Homo sapien
cactggctttagagggcctgcttcc

SEQ ID NO: 1772222 - DNA, 25 bp, Homo sapien
tggctttagagggcctgcttccagg

SEQ ID NO: 1772223 - DNA, 25 bp, Homo sapien
actggctttagagggcctgcttcca

SEQ ID NO: 1772224 - DNA, 25 bp, Homo sapien
gctttagagggcctgcttccaggca

SEQ ID NO: 1772225 - DNA, 25 bp, Homo sapien
aattctcagccttagtcctaaaggc

SEQ ID NO: 1772226 - DNA, 25 bp, Homo sapien
tcatcatcattgagcacttccatca

SEQ ID NO: 1772227 - DNA, 25 bp, Homo sapien
agagtacaggagtgattatagtcac

SEQ ID NO: 1772228 - DNA, 25 bp, Homo sapien
tttctctaacgtatgctcttggcag

SEQ ID NO: 1772229 - DNA, 25 bp, Homo sapien
cctggccggaccggggctcggcgcg

SEQ ID NO: 1772230 - DNA, 25 bp, Homo sapien
gagcctgggacgcacgcaggggcct

SEQ ID NO: 1772231 - DNA, 25 bp, Homo sapien
gaactccggagcatgctctggccca

SEQ ID NO: 1772232 - DNA, 25 bp, Homo sapien
tccggagcatgctctggcccaggaa

SEQ ID NO: 1772233 - DNA, 25 bp, Homo sapien
ccaggaactccggagcatgctctgg

SEQ ID NO: 1772234 - DNA, 25 bp, Homo sapien
actccggagcatgctctggcccagg

SEQ ID NO: 1772235 - DNA, 25 bp, Homo sapien
ttgcttttgaaccggcaagtccaaa

SEQ ID NO: 1772236 - DNA, 25 bp, Homo sapien
tgcttttgaaccggcaagtccaaat

SEQ ID NO: 1772237 - DNA, 25 bp, Homo sapien
gcttcttggtggccgccttgctggc

SEQ ID NO: 1772238 - DNA, 25 bp, Homo sapien
ccttctctgtagctgccagtgccgt

SEQ ID NO: 1772239 - DNA, 25 bp, Homo sapien
gcttccttggctgtcccaacaagtg

SEQ ID NO: 1772240 - DNA, 25 bp, Homo sapien
ccttgctggcgaggtccttggcctt

SEQ ID NO: 1772241 - DNA, 25 bp, Homo sapien
gaggggctaagcctagctgtctggg

SEQ ID NO: 1772242 - DNA, 25 bp, Homo sapien
gaggactggtggattgatgaagagc

SEQ ID NO: 1772243 - DNA, 25 bp, Homo sapien
atcagtatcttgccagtctccgagt

SEQ ID NO: 1772244 - DNA, 25 bp, Homo sapien
ccagtctccgagtcaatctgaacgg

SEQ ID NO: 1772245 - DNA, 25 bp, Homo sapien
ctgaacggtttcattaaccttgatg

SEQ ID NO: 1772246 - DNA, 25 bp, Homo sapien
tcacacaaattattcccaagttagc

SEQ ID NO: 1772247 - DNA, 25 bp, Homo sapien
tgccgttggcgtctttcacgtgaac

SEQ ID NO: 1772248 - DNA, 25 bp, Homo sapien
tttgttgcccttggcttgttgccat

SEQ ID NO: 1772249 - DNA, 25 bp, Homo sapien
tttcacgtgaaccatggcaaaatat

SEQ ID NO: 1772250 - DNA, 25 bp, Homo sapien
ccagtctcttgtctccgtctttagc

SEQ ID NO: 1772251 - DNA, 25 bp, Homo sapien
tgtctccgtctttagcaaaggtgag

SEQ ID NO: 1772252 - DNA, 25 bp, Homo sapien
tctcttgtctccgtctttagcaaag

SEQ ID NO: 1772253 - DNA, 25 bp, Homo sapien
tagcaaaggtgaggtggacaccctt

SEQ ID NO: 1772254 - DNA, 25 bp, Homo sapien
atgtgaaggacagcacatgggcatt

SEQ ID NO: 1772255 - DNA, 25 bp, Homo sapien
agcacatgggcattctttctgagac

SEQ ID NO: 1772256 - DNA, 25 bp, Homo sapien
gacagcacatgggcattctttctga

SEQ ID NO: 1772257 - DNA, 25 bp, Homo sapien
catgtgaaggacagcacatgggcat

SEQ ID NO: 1772258 - DNA, 25 bp, Homo sapien
tgcctgcatgcaagagcaagtctct

SEQ ID NO: 1772259 - DNA, 25 bp, Homo sapien
ccaactgcctgcatgcaagagcaag

SEQ ID NO: 1772260 - DNA, 25 bp, Homo sapien
cctgagcgtgctctggctaaagcaa

SEQ ID NO: 1772261 - DNA, 25 bp, Homo sapien
tcaagatatccactgaccatgacgc

SEQ ID NO: 1772262 - DNA, 25 bp, Homo sapien
ctttctaaagctttgtctgggagac

SEQ ID NO: 1772263 - DNA, 25 bp, Homo sapien
gacaaccatccagcaactgaaataa

SEQ ID NO: 1772264 - DNA, 25 bp, Homo sapien
gtttttctgacaaccatccagcaac

SEQ ID NO: 1772265 - DNA, 25 bp, Homo sapien
tctgacaaccatccagcaactgaaa

SEQ ID NO: 1772266 - DNA, 25 bp, Homo sapien
aatattctgcatgaacaggaatttt

SEQ ID NO: 1772267 - DNA, 25 bp, Homo sapien
ggtgcttccagtgactgtataataa

SEQ ID NO: 1772268 - DNA, 25 bp, Homo sapien
atattctgcatgaacaggaattttg

SEQ ID NO: 1772269 - DNA, 25 bp, Homo sapien
atctggtgcttccagtgactgtata

SEQ ID NO: 1772270 - DNA, 25 bp, Homo sapien
gctttttaacagcttcccctggaga

SEQ ID NO: 1772271 - DNA, 25 bp, Homo sapien
acccatgcctgtgagtttacccaac

SEQ ID NO: 1772272 - DNA, 25 bp, Homo sapien
tacagtctcagttccttttgtgccc

SEQ ID NO: 1772273 - DNA, 25 bp, Homo sapien
gatgggatgggctatttcacctgat

SEQ ID NO: 1772274 - DNA, 25 bp, Homo sapien
ttcgagttttctgcacgcttacttt

SEQ ID NO: 1772275 - DNA, 25 bp, Homo sapien
cgagttttctgcacgcttactttat

SEQ ID NO: 1772276 - DNA, 25 bp, Homo sapien
acgcttactttattggattgcatcc

SEQ ID NO: 1772277 - DNA, 25 bp, Homo sapien
tattggattgcatcccacctttctc

SEQ ID NO: 1772278 - DNA, 25 bp, Homo sapien
tgcccactggcagcaaccaatatgt

SEQ ID NO: 1772279 - DNA, 25 bp, Homo sapien
ccactggcagcaaccaatatgtctg

SEQ ID NO: 1772280 - DNA, 25 bp, Homo sapien
ggcagcaaccaatatgtctgtctgt

SEQ ID NO: 1772281 - DNA, 25 bp, Homo sapien
tatgcccactggcagcaaccaatat

SEQ ID NO: 1772282 - DNA, 25 bp, Homo sapien
attcttccttttccgggcaatgtga

SEQ ID NO: 1772283 - DNA, 25 bp, Homo sapien
cttcttcagagttgccacctgtggg

SEQ ID NO: 1772284 - DNA, 25 bp, Homo sapien
cagtaatagacatgacctgctccct

SEQ ID NO: 1772285 - DNA, 25 bp, Homo sapien
gatggatgtcgcctttcccactgca

SEQ ID NO: 1772286 - DNA, 25 bp, Homo sapien
gaatgtgaactgagaaatcgctacc

SEQ ID NO: 1772287 - DNA, 25 bp, Homo sapien
gaccctttgattcgtacatctggga

SEQ ID NO: 1772288 - DNA, 25 bp, Homo sapien
gtgattaagcgagtgagcagcagac

SEQ ID NO: 1772289 - DNA, 25 bp, Homo sapien
cagactctggaagtatcctggactc

SEQ ID NO: 1772290 - DNA, 25 bp, Homo sapien
tgtttctcttcttctagcccaaaat

SEQ ID NO: 1772291 - DNA, 25 bp, Homo sapien
gtttctcttcttctagcccaaaatg

SEQ ID NO: 1772292 - DNA, 25 bp, Homo sapien
ccacatcatgtattaaggggaagaa

SEQ ID NO: 1772293 - DNA, 25 bp, Homo sapien
tctcttcttctagcccaaaatgtct

SEQ ID NO: 1772294 - DNA, 25 bp, Homo sapien
aaatctatgaacaagattatctcct

SEQ ID NO: 1772295 - DNA, 25 bp, Homo sapien
ctcacagatctcaacagacttatta

SEQ ID NO: 1772296 - DNA, 25 bp, Homo sapien
taacaactcacagatctcaacagac

SEQ ID NO: 1772297 - DNA, 25 bp, Homo sapien
aatctatgaacaagattatctccta

SEQ ID NO: 1772298 - DNA, 25 bp, Homo sapien
tcactgggtttgagtccgcactggg

SEQ ID NO: 1772299 - DNA, 25 bp, Homo sapien
tttgtctcagcaacatagcccagtt

SEQ ID NO: 1772300 - DNA, 25 bp, Homo sapien
ctcagcaacatagcccagtttttgg

SEQ ID NO: 1772301 - DNA, 25 bp, Homo sapien
tgtctcagcaacatagcccagtttt

SEQ ID NO: 1772302 - DNA, 25 bp, Homo sapien
aatctgaagctaaacctttcttctc

SEQ ID NO: 1772303 - DNA, 25 bp, Homo sapien
gaccccagccttgttagtgctgcca

SEQ ID NO: 1772304 - DNA, 25 bp, Homo sapien
tctctgaccccagccttgttagtgc

SEQ ID NO: 1772305 - DNA, 25 bp, Homo sapien
tcagaatctgaagctaaacctttct

SEQ ID NO: 1772306 - DNA, 25 bp, Homo sapien
cacactcgagcagtgatatctttta

SEQ ID NO: 1772307 - DNA, 25 bp, Homo sapien
gggttccacactcgagcagtgatat

SEQ ID NO: 1772308 - DNA, 25 bp, Homo sapien
tcctggcctggggttccacactcga

SEQ ID NO: 1772309 - DNA, 25 bp, Homo sapien
ccttgagttttgaggcatcacattt

SEQ ID NO: 1772310 - DNA, 25 bp, Homo sapien
acctgaggttgtaagtggatctttc

SEQ ID NO: 1772311 - DNA, 25 bp, Homo sapien
gaggttgtaagtggatctttctcac

SEQ ID NO: 1772312 - DNA, 25 bp, Homo sapien
aaatttcatgcgcgtccatgtgaag

SEQ ID NO: 1772313 - DNA, 25 bp, Homo sapien
gaggacctgaggttgtaagtggatc

SEQ ID NO: 1772314 - DNA, 25 bp, Homo sapien
aactgccggtgcattaatcttggac

SEQ ID NO: 1772315 - DNA, 25 bp, Homo sapien
ccctcatgactaggattcggtgtcg

SEQ ID NO: 1772316 - DNA, 25 bp, Homo sapien
tgtagcaacaagacctcattaaggg

SEQ ID NO: 1772317 - DNA, 25 bp, Homo sapien
gccattagaaggtgattgagtccct

SEQ ID NO: 1772318 - DNA, 25 bp, Homo sapien
ctgcactttttctcccccaaggtgt

SEQ ID NO: 1772319 - DNA, 25 bp, Homo sapien
gctcagtgccaagagagacctcctt

SEQ ID NO: 1772320 - DNA, 25 bp, Homo sapien
tgcactttttctcccccaaggtgtc

SEQ ID NO: 1772321 - DNA, 25 bp, Homo sapien
cccaaggtgtcacagctcagtgcca

SEQ ID NO: 1772322 - DNA, 25 bp, Homo sapien
gaaacagtgtatcataggcccagtg

SEQ ID NO: 1772323 - DNA, 25 bp, Homo sapien
tctgcatataggacttaaaggagcc

SEQ ID NO: 1772324 - DNA, 25 bp, Homo sapien
ccagtgatgtagaggtacccaggag

SEQ ID NO: 1772325 - DNA, 25 bp, Homo sapien
ccagattttggaagatagctcaccc

SEQ ID NO: 1772326 - DNA, 25 bp, Homo sapien
gaggcatattcgtcataggagatcc

SEQ ID NO: 1772327 - DNA, 25 bp, Homo sapien
gagaaactcagtggcctcaacattg

SEQ ID NO: 1772328 - DNA, 25 bp, Homo sapien
tctgaagattgtggtagttaaacgg

SEQ ID NO: 1772329 - DNA, 25 bp, Homo sapien
tccaggtggctgttaaatgtggttg

SEQ ID NO: 1772330 - DNA, 25 bp, Homo sapien
ggtggttgtgcagcccgcctttagc

SEQ ID NO: 1772331 - DNA, 25 bp, Homo sapien
aacacatgtggttccttaatgatac

SEQ ID NO: 1772332 - DNA, 25 bp, Homo sapien
tattttaaacacatgtggttcctta

SEQ ID NO: 1772333 - DNA, 25 bp, Homo sapien
cccgcctttagcaggaagtgctgat

SEQ ID NO: 1772334 - DNA, 25 bp, Homo sapien
gcacatactgaactaaaccttcggg

SEQ ID NO: 1772335 - DNA, 25 bp, Homo sapien
taggcggacgatgttttccatcact

SEQ ID NO: 1772336 - DNA, 25 bp, Homo sapien
tggcacatactgaactaaaccttcg

SEQ ID NO: 1772337 - DNA, 25 bp, Homo sapien
ttataggcggacgatgttttccatc

SEQ ID NO: 1772338 - DNA, 25 bp, Homo sapien
gcattcatcaatgccaagccacaaa

SEQ ID NO: 1772339 - DNA, 25 bp, Homo sapien
tattgcggctgcttcactatgaaag

SEQ ID NO: 1772340 - DNA, 25 bp, Homo sapien
ttggagcttgtgctctgcattagtg

SEQ ID NO: 1772341 - DNA, 25 bp, Homo sapien
gattccttatagcaattaagtccac

SEQ ID NO: 1772342 - DNA, 25 bp, Homo sapien
caggaagcactgattagtaggactc

SEQ ID NO: 1772343 - DNA, 25 bp, Homo sapien
gattagtaggactcacagtagaata

SEQ ID NO: 1772344 - DNA, 25 bp, Homo sapien
cactgattagtaggactcacagtag

SEQ ID NO: 1772345 - DNA, 25 bp, Homo sapien
agtaggactcacagtagaataagcc

SEQ ID NO: 1772346 - DNA, 25 bp, Homo sapien
ttatctggaagaacggccttgcctt

SEQ ID NO: 1772347 - DNA, 25 bp, Homo sapien
catgtaaagtgcagtgatatgtact

SEQ ID NO: 1772348 - DNA, 25 bp, Homo sapien
tgttgtgctcctatggagatcccct

SEQ ID NO: 1772349 - DNA, 25 bp, Homo sapien
gagatcccctgtgtcatgaaatggc

SEQ ID NO: 1772350 - DNA, 25 bp, Homo sapien
ctatatctttatccgtcatttctct

SEQ ID NO: 1772351 - DNA, 25 bp, Homo sapien
atattaacaaagaacatggagccca

SEQ ID NO: 1772352 - DNA, 25 bp, Homo sapien
gcccattctaaacttcctcaggtaa

SEQ ID NO: 1772353 - DNA, 25 bp, Homo sapien
tggcctcaaaccaatctatatcttt

SEQ ID NO: 1772354 - DNA, 25 bp, Homo sapien
agctttcctccctttttatcaatag

SEQ ID NO: 1772355 - DNA, 25 bp, Homo sapien
cctccctttttatcaataggctcac

SEQ ID NO: 1772356 - DNA, 25 bp, Homo sapien
ccagctttcctccctttttatcaat

SEQ ID NO: 1772357 - DNA, 25 bp, Homo sapien
ttcctccctttttatcaataggctc

SEQ ID NO: 1772358 - DNA, 25 bp, Homo sapien
catttggctgaggattgacccatta

SEQ ID NO: 1772359 - DNA, 25 bp, Homo sapien
gaaagacaatatcctgccattctcc

SEQ ID NO: 1772360 - DNA, 25 bp, Homo sapien
tggccttcagttgaacacatttggc

SEQ ID NO: 1772361 - DNA, 25 bp, Homo sapien
attattaagataagtctctgcctgg

SEQ ID NO: 1772362 - DNA, 25 bp, Homo sapien
tggacaatatggccattctcacaac

SEQ ID NO: 1772363 - DNA, 25 bp, Homo sapien
actttggacaatatggccattctca

SEQ ID NO: 1772364 - DNA, 25 bp, Homo sapien
gacaatatggccattctcacaacat

SEQ ID NO: 1772365 - DNA, 25 bp, Homo sapien
attactttggacaatatggccattc

SEQ ID NO: 1772366 - DNA, 25 bp, Homo sapien
tcctttacttaggatatcttccaaa

SEQ ID NO: 1772367 - DNA, 25 bp, Homo sapien
tattctgctgtaccctctgtcatgc

SEQ ID NO: 1772368 - DNA, 25 bp, Homo sapien
catttgttcctcctttacttaggat

SEQ ID NO: 1772369 - DNA, 25 bp, Homo sapien
ttttattctgctgtaccctctgtca

SEQ ID NO: 1772370 - DNA, 25 bp, Homo sapien
ttgaattgtttcccacacatggcat

SEQ ID NO: 1772371 - DNA, 25 bp, Homo sapien
ttgtttcccacacatggcattgcag

SEQ ID NO: 1772372 - DNA, 25 bp, Homo sapien
gaattgtttcccacacatggcattg

SEQ ID NO: 1772373 - DNA, 25 bp, Homo sapien
attgtttcccacacatggcattgca

SEQ ID NO: 1772374 - DNA, 25 bp, Homo sapien
gagcagggaaattgtcacttgatag

SEQ ID NO: 1772375 - DNA, 25 bp, Homo sapien
gttttcaatccccatggacagctct

SEQ ID NO: 1772376 - DNA, 25 bp, Homo sapien
cacttgatagatgacaagcattgtg

SEQ ID NO: 1772377 - DNA, 25 bp, Homo sapien
agactttcggaacatgagcagggaa

SEQ ID NO: 1772378 - DNA, 25 bp, Homo sapien
gacagtggtatagctgccactttca

SEQ ID NO: 1772379 - DNA, 25 bp, Homo sapien
ggtcctggcacaactgaaatctgag

SEQ ID NO: 1772380 - DNA, 25 bp, Homo sapien
tgagcagggctaaagtgatgacacc

SEQ ID NO: 1772381 - DNA, 25 bp, Homo sapien
tacttccagatatctctgagctgtc

SEQ ID NO: 1772382 - DNA, 25 bp, Homo sapien
cagactttccagtagttgctttgtt

SEQ ID NO: 1772383 - DNA, 25 bp, Homo sapien
ctttccagtagttgctttgttgttc

SEQ ID NO: 1772384 - DNA, 25 bp, Homo sapien
gactttccagtagttgctttgttgt

SEQ ID NO: 1772385 - DNA, 25 bp, Homo sapien
ttccagtagttgctttgttgttcat

SEQ ID NO: 1772386 - DNA, 25 bp, Homo sapien
aaacttgtgacttttgagatagtag

SEQ ID NO: 1772387 - DNA, 25 bp, Homo sapien
aacttgtgacttttgagatagtagc

SEQ ID NO: 1772388 - DNA, 25 bp, Homo sapien
tttctctccatacaaagactcctgc

SEQ ID NO: 1772389 - DNA, 25 bp, Homo sapien
ctctccatacaaagactcctgccct

SEQ ID NO: 1772390 - DNA, 25 bp, Homo sapien
ccatgtgaagacctccatgagaggt

SEQ ID NO: 1772391 - DNA, 25 bp, Homo sapien
tggggtgggcagaagtgctggcttc

SEQ ID NO: 1772392 - DNA, 25 bp, Homo sapien
tgcattatgagtgaaatatgtttct

SEQ ID NO: 1772393 - DNA, 25 bp, Homo sapien
catgtgaagacctccatgagaggtc

SEQ ID NO: 1772394 - DNA, 25 bp, Homo sapien
gaatatcgtaatcgtcctttcttat

SEQ ID NO: 1772395 - DNA, 25 bp, Homo sapien
tatcgtaatcgtcctttcttatgtc

SEQ ID NO: 1772396 - DNA, 25 bp, Homo sapien
tccagaatatcgtaatcgtcctttc

SEQ ID NO: 1772397 - DNA, 25 bp, Homo sapien
cgtaatcgtcctttcttatgtcctt

SEQ ID NO: 1772398 - DNA, 25 bp, Homo sapien
gctatgtcctgagcaagcttgtttg

SEQ ID NO: 1772399 - DNA, 25 bp, Homo sapien
tcttgatagtgaactgctatgtcct

SEQ ID NO: 1772400 - DNA, 25 bp, Homo sapien
caggcttgtgacctttcttgatagt

SEQ ID NO: 1772401 - DNA, 25 bp, Homo sapien
gaagatctgtcttctaccagtgtgg

SEQ ID NO: 1772402 - DNA, 25 bp, Homo sapien
ctacttcaagtaaaggatgtggact

SEQ ID NO: 1772403 - DNA, 25 bp, Homo sapien
gaatggatgaatccaggacatggat

SEQ ID NO: 1772404 - DNA, 25 bp, Homo sapien
acttcaagtaaaggatgtggactgc

SEQ ID NO: 1772405 - DNA, 25 bp, Homo sapien
gatgtggactgcaagaatggatgaa

SEQ ID NO: 1772406 - DNA, 25 bp, Homo sapien
tttgtcaattgagacagaaatccca

SEQ ID NO: 1772407 - DNA, 25 bp, Homo sapien
gggaatttcaattggctttgacagg

SEQ ID NO: 1772408 - DNA, 25 bp, Homo sapien
tcaatatggctccaagatagtggtt

SEQ ID NO: 1772409 - DNA, 25 bp, Homo sapien
caagaaggcactatgactttggtat

SEQ ID NO: 1772410 - DNA, 25 bp, Homo sapien
catcttgagctctaattgtcagtaa

SEQ ID NO: 1772411 - DNA, 25 bp, Homo sapien
tagatactgactgccaaattcacca

SEQ ID NO: 1772412 - DNA, 25 bp, Homo sapien
tgcactctcccaatatcaacggatg

SEQ ID NO: 1772413 - DNA, 25 bp, Homo sapien
tgcaatccgatttacatcttgagct

SEQ ID NO: 1772414 - DNA, 25 bp, Homo sapien
ggctgattgctttatgcctggttct

SEQ ID NO: 1772415 - DNA, 25 bp, Homo sapien
gattgctttatgcctggttctggag

SEQ ID NO: 1772416 - DNA, 25 bp, Homo sapien
gctgattgctttatgcctggttctg

SEQ ID NO: 1772417 - DNA, 25 bp, Homo sapien
tgattgctttatgcctggttctgga

SEQ ID NO: 1772418 - DNA, 25 bp, Homo sapien
cacctaatccccttccgtataccag

SEQ ID NO: 1772419 - DNA, 25 bp, Homo sapien
ccattggagatttgtagcattctcc

SEQ ID NO: 1772420 - DNA, 25 bp, Homo sapien
tctcctaagaatcgcagtgcttgct

SEQ ID NO: 1772421 - DNA, 25 bp, Homo sapien
gaatcgcagtgcttgcttttcatcc

SEQ ID NO: 1772422 - DNA, 25 bp, Homo sapien
tgtagcattctcctaagaatcgcag

SEQ ID NO: 1772423 - DNA, 25 bp, Homo sapien
tctgatgcagatatgctagttgcca

SEQ ID NO: 1772424 - DNA, 25 bp, Homo sapien
tgtactttagaacatgagctttcca

SEQ ID NO: 1772425 - DNA, 25 bp, Homo sapien
gaaggtagcaggatgagtcttcaac

SEQ ID NO: 1772426 - DNA, 25 bp, Homo sapien
tctctgaagccaaggacaatgtact

SEQ ID NO: 1772427 - DNA, 25 bp, Homo sapien
tgaaaaatcccaatgttaccatggt

SEQ ID NO: 1772428 - DNA, 25 bp, Homo sapien
tcagcacaaggattcacactcttcc

SEQ ID NO: 1772429 - DNA, 25 bp, Homo sapien
cccaatgttaccatggtttctgtga

SEQ ID NO: 1772430 - DNA, 25 bp, Homo sapien
tcctctctccactccgttgaaaaat

SEQ ID NO: 1772431 - DNA, 25 bp, Homo sapien
agtgaggactgtatgaaagtatttt

SEQ ID NO: 1772432 - DNA, 25 bp, Homo sapien
tgttagtgaggactgtatgaaagta

SEQ ID NO: 1772433 - DNA, 25 bp, Homo sapien
ctgttagtgaggactgtatgaaagt

SEQ ID NO: 1772434 - DNA, 25 bp, Homo sapien
ttagtgaggactgtatgaaagtatt

SEQ ID NO: 1772435 - DNA, 25 bp, Homo sapien
tcttcaccccatataatcttttctt

SEQ ID NO: 1772436 - DNA, 25 bp, Homo sapien
agataagattgcctcactgagaagt

SEQ ID NO: 1772437 - DNA, 25 bp, Homo sapien
tgtcacaggtgtaggcggtttcaag

SEQ ID NO: 1772438 - DNA, 25 bp, Homo sapien
cactttggcctgtggggtatgtcac

SEQ ID NO: 1772439 - DNA, 25 bp, Homo sapien
ctgccagtggatttcagagctcaag

SEQ ID NO: 1772440 - DNA, 25 bp, Homo sapien
tgccagtggatttcagagctcaagc

SEQ ID NO: 1772441 - DNA, 25 bp, Homo sapien
tcttcaaacaagaaaacaacactca

SEQ ID NO: 1772442 - DNA, 25 bp, Homo sapien
ttcttcaaacaagaaaacaacactc

SEQ ID NO: 1772443 - DNA, 25 bp, Homo sapien
cttcaaacaagaaaacaacactcac

SEQ ID NO: 1772444 - DNA, 25 bp, Homo sapien
tagcaccagccgatgaacttttcag

SEQ ID NO: 1772445 - DNA, 25 bp, Homo sapien
ttttctccggtagcaccagccgatg

SEQ ID NO: 1772446 - DNA, 25 bp, Homo sapien
cctggctgtcgttagtaaatggtga

SEQ ID NO: 1772447 - DNA, 25 bp, Homo sapien
tggtgagctttccacgtcttttctc

SEQ ID NO: 1772448 - DNA, 25 bp, Homo sapien
gccggcacccctgagtggggcacac

SEQ ID NO: 1772449 - DNA, 25 bp, Homo sapien
tgcgaagagcccctccagaagggca

SEQ ID NO: 1772450 - DNA, 25 bp, Homo sapien
gaaagcagtgcgtgcgaagagcccc

SEQ ID NO: 1772451 - DNA, 25 bp, Homo sapien
ctacagcgcagcatctctggacact

SEQ ID NO: 1772452 - DNA, 25 bp, Homo sapien
acactgcagtgacggccggagaatt

SEQ ID NO: 1772453 - DNA, 25 bp, Homo sapien
tggaaaagtacaggcgttgcgcttt

SEQ ID NO: 1772454 - DNA, 25 bp, Homo sapien
aaaagtacaggcgttgcgctttggc

SEQ ID NO: 1772455 - DNA, 25 bp, Homo sapien
ctggaaaagtacaggcgttgcgctt

SEQ ID NO: 1772456 - DNA, 25 bp, Homo sapien
agtacaggcgttgcgctttggcaga

SEQ ID NO: 1772457 - DNA, 25 bp, Homo sapien
cgcgagcaggagacgctccagtgtt

SEQ ID NO: 1772458 - DNA, 25 bp, Homo sapien
tgggctcccgggagcaccacatagg

SEQ ID NO: 1772459 - DNA, 25 bp, Homo sapien
tgcttctggcgtgcgcgagcaggag

SEQ ID NO: 1772460 - DNA, 25 bp, Homo sapien
agagaccccgagctgcttctggcgt

SEQ ID NO: 1772461 - DNA, 25 bp, Homo sapien
ccccttgggctcagaagctgcggcg

SEQ ID NO: 1772462 - DNA, 25 bp, Homo sapien
gggcgccgtcggcacagcggccatg

SEQ ID NO: 1772463 - DNA, 25 bp, Homo sapien
cagcggcggccccttgggctcagaa

SEQ ID NO: 1772464 - DNA, 25 bp, Homo sapien
agcgggcgccgtcggcacagcggcc

SEQ ID NO: 1772465 - DNA, 25 bp, Homo sapien
gcaggtagcatgttgtgcggcaact

SEQ ID NO: 1772466 - DNA, 25 bp, Homo sapien
ttatccaagcactgaactgcggcgg

SEQ ID NO: 1772467 - DNA, 25 bp, Homo sapien
taggcgtatatagacagtgcccgag

SEQ ID NO: 1772468 - DNA, 25 bp, Homo sapien
tctcacatccgataggcgtgctgtg

SEQ ID NO: 1772469 - DNA, 25 bp, Homo sapien
agccaagaaatcagtcgcaagtgca

SEQ ID NO: 1772470 - DNA, 25 bp, Homo sapien
gccaagaaatcagtcgcaagtgcat

SEQ ID NO: 1772471 - DNA, 25 bp, Homo sapien
ttcttcgctggcgccttccccggga

SEQ ID NO: 1772472 - DNA, 25 bp, Homo sapien
cttcgctggcgccttccccgggagg

SEQ ID NO: 1772473 - DNA, 25 bp, Homo sapien
ttcgctggcgccttccccgggaggc

SEQ ID NO: 1772474 - DNA, 25 bp, Homo sapien
cgctggcgccttccccgggaggcgt

SEQ ID NO: 1772475 - DNA, 25 bp, Homo sapien
gagcaaacgcgtaaaaaaccctgca

SEQ ID NO: 1772476 - DNA, 25 bp, Homo sapien
tgaacgcggcgggagggagcaaacg

SEQ ID NO: 1772477 - DNA, 25 bp, Homo sapien
gttgggagccggctccggacaggca

SEQ ID NO: 1772478 - DNA, 25 bp, Homo sapien
aaagcgacccgacaggtgaacgcgg

SEQ ID NO: 1772479 - DNA, 25 bp, Homo sapien
aggggcgccgagaggcaagggtgaa

SEQ ID NO: 1772480 - DNA, 25 bp, Homo sapien
ggggcgccgagaggcaagggtgaaa

SEQ ID NO: 1772481 - DNA, 25 bp, Homo sapien
aggcaagggtgaaagacgccgtcca

SEQ ID NO: 1772482 - DNA, 25 bp, Homo sapien
caagggtgaaagacgccgtccatac

SEQ ID NO: 1772483 - DNA, 25 bp, Homo sapien
gggagccaccttagcgccgcgtccg

SEQ ID NO: 1772484 - DNA, 25 bp, Homo sapien
cccgcgaacctgaagttaccatggg

SEQ ID NO: 1772485 - DNA, 25 bp, Homo sapien
catggggcgggagccaccttagcgc

SEQ ID NO: 1772486 - DNA, 25 bp, Homo sapien
ttcccgcgaacctgaagttaccatg

SEQ ID NO: 1772487 - DNA, 25 bp, Homo sapien
tccgctggtgcgtgtcggggatgcg

SEQ ID NO: 1772488 - DNA, 25 bp, Homo sapien
cgcagacacgcgaaccccatcgcct

SEQ ID NO: 1772489 - DNA, 25 bp, Homo sapien
gcagctctgcaaacgcgcagacacg

SEQ ID NO: 1772490 - DNA, 25 bp, Homo sapien
gcgcgccctttggctccgctggtgc

SEQ ID NO: 1772491 - DNA, 25 bp, Homo sapien
ccggctccccacagctggggttttg

SEQ ID NO: 1772492 - DNA, 25 bp, Homo sapien
ggctccccacagctggggttttgct

SEQ ID NO: 1772493 - DNA, 25 bp, Homo sapien
ctccggctccccacagctggggttt

SEQ ID NO: 1772494 - DNA, 25 bp, Homo sapien
ctccccacagctggggttttgctgt

SEQ ID NO: 1772495 - DNA, 25 bp, Homo sapien
acaagagagaacctggaaactccgc

SEQ ID NO: 1772496 - DNA, 25 bp, Homo sapien
aagagagaacctggaaactccgcac

SEQ ID NO: 1772497 - DNA, 25 bp, Homo sapien
atgtgacaagagagaacctggaaac

SEQ ID NO: 1772498 - DNA, 25 bp, Homo sapien
tgacaagagagaacctggaaactcc

SEQ ID NO: 1772499 - DNA, 25 bp, Homo sapien
tgagatctgcgaaaggactccccat

SEQ ID NO: 1772500 - DNA, 25 bp, Homo sapien
tgctctgagatctgcgaaaggactc

SEQ ID NO: 1772501 - DNA, 25 bp, Homo sapien
atagagccagggtcgcccctgctct

SEQ ID NO: 1772502 - DNA, 25 bp, Homo sapien
tgcccctcgcgagctccaggagaag

SEQ ID NO: 1772503 - DNA, 25 bp, Homo sapien
ctgcacgccgcggaggtgcgagagc

SEQ ID NO: 1772504 - DNA, 25 bp, Homo sapien
tgccccgacgtctgccccgaaaggc

SEQ ID NO: 1772505 - DNA, 25 bp, Homo sapien
cttcccgggcgggacgctgggagag

SEQ ID NO: 1772506 - DNA, 25 bp, Homo sapien
gcggaggtgcgagagcccagagcag

SEQ ID NO: 1772507 - DNA, 25 bp, Homo sapien
acagactttaataggagtcacagac

SEQ ID NO: 1772508 - DNA, 25 bp, Homo sapien
catagacacagactttaataggagt

SEQ ID NO: 1772509 - DNA, 25 bp, Homo sapien
cagactttaataggagtcacagaca

SEQ ID NO: 1772510 - DNA, 25 bp, Homo sapien
agacacagactttaataggagtcac

SEQ ID NO: 1772511 - DNA, 25 bp, Homo sapien
taaattaactgtggtaattgcctta

SEQ ID NO: 1772512 - DNA, 25 bp, Homo sapien
gatacaagtaagtagaagctatcat

SEQ ID NO: 1772513 - DNA, 25 bp, Homo sapien
ccttatgatacaagtaagtagaagc

SEQ ID NO: 1772514 - DNA, 25 bp, Homo sapien
ggtaattgccttatgatacaagtaa

SEQ ID NO: 1772515 - DNA, 25 bp, Homo sapien
attgtaatctgagcatgttgcacag

SEQ ID NO: 1772516 - DNA, 25 bp, Homo sapien
gcagccttgactaacgttaggatgc

SEQ ID NO: 1772517 - DNA, 25 bp, Homo sapien
taatctgagcatgttgcacagcctc

SEQ ID NO: 1772518 - DNA, 25 bp, Homo sapien
ggcagccttgactaacgttaggatg

SEQ ID NO: 1772519 - DNA, 25 bp, Homo sapien
tctttccagagcaaaaaatagtctg

SEQ ID NO: 1772520 - DNA, 25 bp, Homo sapien
tccagagcaaaaaatagtctgggct

SEQ ID NO: 1772521 - DNA, 25 bp, Homo sapien
gccaattctttccagagcaaaaaat

SEQ ID NO: 1772522 - DNA, 25 bp, Homo sapien
attctttccagagcaaaaaatagtc

SEQ ID NO: 1772523 - DNA, 25 bp, Homo sapien
ttggacatgaagagagacatactcc

SEQ ID NO: 1772524 - DNA, 25 bp, Homo sapien
tacacttatttatatctggatatcg

SEQ ID NO: 1772525 - DNA, 25 bp, Homo sapien
cacttggacatgaagagagacatac

SEQ ID NO: 1772526 - DNA, 25 bp, Homo sapien
tcgagttccataatatccacttgga

SEQ ID NO: 1772527 - DNA, 25 bp, Homo sapien
tccatagtatggttgttggcttcca

SEQ ID NO: 1772528 - DNA, 25 bp, Homo sapien
caattgtcaaggcactttccaaggt

SEQ ID NO: 1772529 - DNA, 25 bp, Homo sapien
aaacaggtatcacagtcagctttgc

SEQ ID NO: 1772530 - DNA, 25 bp, Homo sapien
ttttgttgaaacaggtatcacagtc

SEQ ID NO: 1772531 - DNA, 25 bp, Homo sapien
tcaaattattacaggttctccttac

SEQ ID NO: 1772532 - DNA, 25 bp, Homo sapien
ctgaaggatgctgtattatttctcg

SEQ ID NO: 1772533 - DNA, 25 bp, Homo sapien
gatgctgtattatttctcggacccg

SEQ ID NO: 1772534 - DNA, 25 bp, Homo sapien
gctgtattatttctcggacccgtgt

SEQ ID NO: 1772535 - DNA, 25 bp, Homo sapien
attatttctcggacccgtgtttcag

SEQ ID NO: 1772536 - DNA, 25 bp, Homo sapien
ttcttcctttgcactgtacactttc

SEQ ID NO: 1772537 - DNA, 25 bp, Homo sapien
ctgtacactttcttgtctcatttgt

SEQ ID NO: 1772538 - DNA, 25 bp, Homo sapien
cttcttcctttgcactgtacacttt

SEQ ID NO: 1772539 - DNA, 25 bp, Homo sapien
tgaaaaatgcaacagattatgagga

SEQ ID NO: 1772540 - DNA, 25 bp, Homo sapien
acagattatgaggattcaaacaagc

SEQ ID NO: 1772541 - DNA, 25 bp, Homo sapien
gcacattttgttattatgattgtac

SEQ ID NO: 1772542 - DNA, 25 bp, Homo sapien
ttatgaggattcaaacaagcacatt

SEQ ID NO: 1772543 - DNA, 25 bp, Homo sapien
tcaaagtagggtccattggaatcct

SEQ ID NO: 1772544 - DNA, 25 bp, Homo sapien
tggaatcctttcgtgagattggatg

SEQ ID NO: 1772545 - DNA, 25 bp, Homo sapien
tcctttcgtgagattggatgcaggg

SEQ ID NO: 1772546 - DNA, 25 bp, Homo sapien
cagtgattcaaagtagggtccattg

SEQ ID NO: 1772547 - DNA, 25 bp, Homo sapien
caaatacagattttaccatgattat

SEQ ID NO: 1772548 - DNA, 25 bp, Homo sapien
gcttttctgtggcaaaaagtccaca

SEQ ID NO: 1772549 - DNA, 25 bp, Homo sapien
tggcaaaaagtccacaggaatgtca

SEQ ID NO: 1772550 - DNA, 25 bp, Homo sapien
tccacaggaatgtcaaatacagatt

SEQ ID NO: 1772551 - DNA, 25 bp, Homo sapien
tatctcctctatttccagaggacac

SEQ ID NO: 1772552 - DNA, 25 bp, Homo sapien
tggcctttaagagccaataataatt

SEQ ID NO: 1772553 - DNA, 25 bp, Homo sapien
aataatttatctcctctatttccag

SEQ ID NO: 1772554 - DNA, 25 bp, Homo sapien
ccaattctcccatgaaattatgaac

SEQ ID NO: 1772555 - DNA, 25 bp, Homo sapien
tctttgctggattccagacttttgc

SEQ ID NO: 1772556 - DNA, 25 bp, Homo sapien
ttggacttttcgcttcttctgctgc

SEQ ID NO: 1772557 - DNA, 25 bp, Homo sapien
tgttttctcgttgctctgggatttc

SEQ ID NO: 1772558 - DNA, 25 bp, Homo sapien
cgatttctgtttatcttggactttt

SEQ ID NO: 1772559 - DNA, 25 bp, Homo sapien
gatctcccggtcaaaacaacactgt

SEQ ID NO: 1772560 - DNA, 25 bp, Homo sapien
tggtggctttctcccctactagata

SEQ ID NO: 1772561 - DNA, 25 bp, Homo sapien
taatggctagagcacctgtcctggg

SEQ ID NO: 1772562 - DNA, 25 bp, Homo sapien
tgagatagcagcatcatgagtctac

SEQ ID NO: 1772563 - DNA, 25 bp, Homo sapien
cagtgaaatcagctagggaggccca

SEQ ID NO: 1772564 - DNA, 25 bp, Homo sapien
ggatctgacatacaagaaatgatgc

SEQ ID NO: 1772565 - DNA, 25 bp, Homo sapien
ggaggcccatgtgtctataattaga

SEQ ID NO: 1772566 - DNA, 25 bp, Homo sapien
tattctgaattacataggaaccagg

SEQ ID NO: 1772567 - DNA, 25 bp, Homo sapien
gtgaaacactggtgaggccttcagc

SEQ ID NO: 1772568 - DNA, 25 bp, Homo sapien
taagccaagtagattacatgaactg

SEQ ID NO: 1772569 - DNA, 25 bp, Homo sapien
tgaactgtacaactggtggagaacg

SEQ ID NO: 1772570 - DNA, 25 bp, Homo sapien
gggtcatgcgattctgtgctgcaca

SEQ ID NO: 1772571 - DNA, 25 bp, Homo sapien
acagagcagccgtgcatccttccat

SEQ ID NO: 1772572 - DNA, 25 bp, Homo sapien
taagtgactcactagtggttacaca

SEQ ID NO: 1772573 - DNA, 25 bp, Homo sapien
tatcaacagtttaccccattatgga

SEQ ID NO: 1772574 - DNA, 25 bp, Homo sapien
tctgaggatagaaaacaggccttcc

SEQ ID NO: 1772575 - DNA, 25 bp, Homo sapien
ggcaggagcttgatcagacattaac

SEQ ID NO: 1772576 - DNA, 25 bp, Homo sapien
gcagaattgagacattaacacaagc

SEQ ID NO: 1772577 - DNA, 25 bp, Homo sapien
caagctgcaaccagttagtagcaga

SEQ ID NO: 1772578 - DNA, 25 bp, Homo sapien
tgtctaacgctagcaccagtgcact

SEQ ID NO: 1772579 - DNA, 25 bp, Homo sapien
tattctgcgagatcatacaatgtgc

SEQ ID NO: 1772580 - DNA, 25 bp, Homo sapien
tgaatactatcacatatcatgaatc

SEQ ID NO: 1772581 - DNA, 25 bp, Homo sapien
atgaatactatcacatatcatgaat

SEQ ID NO: 1772582 - DNA, 25 bp, Homo sapien
tggaagctccaaaaagtagcttatc

SEQ ID NO: 1772583 - DNA, 25 bp, Homo sapien
aaacactgtcatggatattggaagc

SEQ ID NO: 1772584 - DNA, 25 bp, Homo sapien
ggaagctccaaaaagtagcttatcc

SEQ ID NO: 1772585 - DNA, 25 bp, Homo sapien
ctgtcatggatattggaagctccaa

SEQ ID NO: 1772586 - DNA, 25 bp, Homo sapien
cttgaagtttactctgctggccaga

SEQ ID NO: 1772587 - DNA, 25 bp, Homo sapien
tctcccctgctcaccagtagtgaaa

SEQ ID NO: 1772588 - DNA, 25 bp, Homo sapien
agtttactctgctggccagattctc

SEQ ID NO: 1772589 - DNA, 25 bp, Homo sapien
tgaaacctcatcttgatcttgggca

SEQ ID NO: 1772590 - DNA, 25 bp, Homo sapien
ttctggctctcgtactttctcattc

SEQ ID NO: 1772591 - DNA, 25 bp, Homo sapien
atttctggctctcgtactttctcat

SEQ ID NO: 1772592 - DNA, 25 bp, Homo sapien
ctggctctcgtactttctcattcct

SEQ ID NO: 1772593 - DNA, 25 bp, Homo sapien
catttctggctctcgtactttctca

SEQ ID NO: 1772594 - DNA, 25 bp, Homo sapien
aaatccagctttgctatcctgagga

SEQ ID NO: 1772595 - DNA, 25 bp, Homo sapien
gctgagtttcggcttaaagatccct

SEQ ID NO: 1772596 - DNA, 25 bp, Homo sapien
aaagatcccttagcaaaagtactgc

SEQ ID NO: 1772597 - DNA, 25 bp, Homo sapien
taaaacgtgtgtaggaccagcaggt

SEQ ID NO: 1772598 - DNA, 25 bp, Homo sapien
ggagcggcgacttcgctgcttgcat

SEQ ID NO: 1772599 - DNA, 25 bp, Homo sapien
tgtctcgcgccgctgtctgccggta

SEQ ID NO: 1772600 - DNA, 25 bp, Homo sapien
ctggcttctttagagtgtgcttgct

SEQ ID NO: 1772601 - DNA, 25 bp, Homo sapien
tgctttgtattagggcccagaggct

SEQ ID NO: 1772602 - DNA, 25 bp, Homo sapien
tgaccacccggcgcgtcgcggagga

SEQ ID NO: 1772603 - DNA, 25 bp, Homo sapien
gcggccacctcgcagtcttttctct

SEQ ID NO: 1772604 - DNA, 25 bp, Homo sapien
aggaggggccgcgacgcgccgcgca

SEQ ID NO: 1772605 - DNA, 25 bp, Homo sapien
gcggccgtcacgtgaccacccggcg

SEQ ID NO: 1772606 - DNA, 25 bp, Homo sapien
ccggagtacgttgcggctggaggtg

SEQ ID NO: 1772607 - DNA, 25 bp, Homo sapien
aggtgacaccgcgagctatgcctcc

SEQ ID NO: 1772608 - DNA, 25 bp, Homo sapien
tcctctccccgagtgaggatcctag

SEQ ID NO: 1772609 - DNA, 25 bp, Homo sapien
agagtggccggcgttcaccctgctc

SEQ ID NO: 1772610 - DNA, 25 bp, Homo sapien
cgccgcccctctcaggccccgagcg

SEQ ID NO: 1772611 - DNA, 25 bp, Homo sapien
cccctctcaggccccgagcgcaagg

SEQ ID NO: 1772612 - DNA, 25 bp, Homo sapien
cctctcaggccccgagcgcaaggcc

SEQ ID NO: 1772613 - DNA, 25 bp, Homo sapien
ctcaggccccgagcgcaaggccgac

SEQ ID NO: 1772614 - DNA, 25 bp, Homo sapien
gcagcgcaggggctgtcacggtcgt

SEQ ID NO: 1772615 - DNA, 25 bp, Homo sapien
cgcaggggctgtcacggtcgtcttg

SEQ ID NO: 1772616 - DNA, 25 bp, Homo sapien
caggggctgtcacggtcgtcttgcc

SEQ ID NO: 1772617 - DNA, 25 bp, Homo sapien
ggctgtcacggtcgtcttgcctgcc

SEQ ID NO: 1772618 - DNA, 25 bp, Homo sapien
gccctggcttcgatctgacccaagg

SEQ ID NO: 1772619 - DNA, 25 bp, Homo sapien
atggagcaggctaccgccgaaaaac

SEQ ID NO: 1772620 - DNA, 25 bp, Homo sapien
caaactgtctgaccccacacgggaa

SEQ ID NO: 1772621 - DNA, 25 bp, Homo sapien
tctgaccccacacgggaaaacatgg

SEQ ID NO: 1772622 - DNA, 25 bp, Homo sapien
aattgttccgatgcttcaacagccg

SEQ ID NO: 1772623 - DNA, 25 bp, Homo sapien
cagcgctgggcttcactaggacaag

SEQ ID NO: 1772624 - DNA, 25 bp, Homo sapien
ttttaggcaagaccgagacactgag

SEQ ID NO: 1772625 - DNA, 25 bp, Homo sapien
aacaactaagaatatgcagcgctgg

SEQ ID NO: 1772626 - DNA, 25 bp, Homo sapien
tgtaggttttacctgtggagaggac

SEQ ID NO: 1772627 - DNA, 25 bp, Homo sapien
gcaaaataaatagcgacaacaatgg

SEQ ID NO: 1772628 - DNA, 25 bp, Homo sapien
atagcgacaacaatggaagacccac

SEQ ID NO: 1772629 - DNA, 25 bp, Homo sapien
gaggacggttccgtctccactctta

SEQ ID NO: 1772630 - DNA, 25 bp, Homo sapien
gaaaagattctagttgccaggatgt

SEQ ID NO: 1772631 - DNA, 25 bp, Homo sapien
tcatacaaagaacaaagcgtaccct

SEQ ID NO: 1772632 - DNA, 25 bp, Homo sapien
gccaatattatacgttcacatccca

SEQ ID NO: 1772633 - DNA, 25 bp, Homo sapien
tgctcactaaaatggcacttagaga

SEQ ID NO: 1772634 - DNA, 25 bp, Homo sapien
tactttgcccctaacaattctggag

SEQ ID NO: 1772635 - DNA, 25 bp, Homo sapien
gatagtccgtaagtaagcacaggtg

SEQ ID NO: 1772636 - DNA, 25 bp, Homo sapien
gattgggctgaacaacatcctccac

SEQ ID NO: 1772637 - DNA, 25 bp, Homo sapien
catgtgtttttagggcacccagaca

SEQ ID NO: 1772638 - DNA, 25 bp, Homo sapien
caggaatcctacagcagccctaaga

SEQ ID NO: 1772639 - DNA, 25 bp, Homo sapien
tacatttgcgtagaacaacacaacc

SEQ ID NO: 1772640 - DNA, 25 bp, Homo sapien
gttggcacccttaaccccatgttgc

SEQ ID NO: 1772641 - DNA, 25 bp, Homo sapien
tatgcaaccaataaaagtgactcca

SEQ ID NO: 1772642 - DNA, 25 bp, Homo sapien
ggtgccacttgaggtggtacaagaa

SEQ ID NO: 1772643 - DNA, 25 bp, Homo sapien
gacgataacctcatacagctgacct

SEQ ID NO: 1772644 - DNA, 25 bp, Homo sapien
aacaagttgacttatatacatacag

SEQ ID NO: 1772645 - DNA, 25 bp, Homo sapien
cacaggttggaaatgaacaagttga

SEQ ID NO: 1772646 - DNA, 25 bp, Homo sapien
gtccagtggtatgactgcaggtaac

SEQ ID NO: 1772647 - DNA, 25 bp, Homo sapien
gctgttggtcattagcactgcctat

SEQ ID NO: 1772648 - DNA, 25 bp, Homo sapien
tcatgtgatgctcctaccacaggct

SEQ ID NO: 1772649 - DNA, 25 bp, Homo sapien
ggtaaaacctctagtgtgaagattc

SEQ ID NO: 1772650 - DNA, 25 bp, Homo sapien
gctagtgccctagtttaaacctaca

SEQ ID NO: 1772651 - DNA, 25 bp, Homo sapien
gtactctctacccattgctagtgcc

SEQ ID NO: 1772652 - DNA, 25 bp, Homo sapien
aattcttacaatatgacatctcagg

SEQ ID NO: 1772653 - DNA, 25 bp, Homo sapien
cacctggactattgttcagcctgat

SEQ ID NO: 1772654 - DNA, 25 bp, Homo sapien
tcttcaatttcatggggacctacca

SEQ ID NO: 1772655 - DNA, 25 bp, Homo sapien
ttcatggggacctaccatctcttga

SEQ ID NO: 1772656 - DNA, 25 bp, Homo sapien
gctcttcaatttcatggggacctac

SEQ ID NO: 1772657 - DNA, 25 bp, Homo sapien
caatttcatggggacctaccatctc

SEQ ID NO: 1772658 - DNA, 25 bp, Homo sapien
agtattttctcttccactgctggtt

SEQ ID NO: 1772659 - DNA, 25 bp, Homo sapien
tattttctcttccactgctggttca

SEQ ID NO: 1772660 - DNA, 25 bp, Homo sapien
ttttctcttccactgctggttcatt

SEQ ID NO: 1772661 - DNA, 25 bp, Homo sapien
tttctcttccactgctggttcattc

SEQ ID NO: 1772662 - DNA, 25 bp, Homo sapien
agatgcctgccacaaaaataaagca

SEQ ID NO: 1772663 - DNA, 25 bp, Homo sapien
gatgcctgccacaaaaataaagcat

SEQ ID NO: 1772664 - DNA, 25 bp, Homo sapien
cagatgcctgccacaaaaataaagc

SEQ ID NO: 1772665 - DNA, 25 bp, Homo sapien
aaaactacatatgacagatactcaa

SEQ ID NO: 1772666 - DNA, 25 bp, Homo sapien
tccttttgaggagacttggaaatct

SEQ ID NO: 1772667 - DNA, 25 bp, Homo sapien
gacagatactcaatttaccacacgt

SEQ ID NO: 1772668 - DNA, 25 bp, Homo sapien
caaaagctagtactacttgcctagc

SEQ ID NO: 1772669 - DNA, 25 bp, Homo sapien
taaacttttactcggccaagacatc

SEQ ID NO: 1772670 - DNA, 25 bp, Homo sapien
tggtgcaaaagttgtgaaccccaca

SEQ ID NO: 1772671 - DNA, 25 bp, Homo sapien
tttcctaaacaccatcaatcccagt

SEQ ID NO: 1772672 - DNA, 25 bp, Homo sapien
gccaacaagggagacattcgcaaaa

SEQ ID NO: 1772673 - DNA, 25 bp, Homo sapien
tgcccaaattaaacctgtagagaga

SEQ ID NO: 1772674 - DNA, 25 bp, Homo sapien
caaccacagaatcttgaattactcc

SEQ ID NO: 1772675 - DNA, 25 bp, Homo sapien
acacatacatggtccttggagccat

SEQ ID NO: 1772676 - DNA, 25 bp, Homo sapien
aatgcccaaattaaacctgtagaga

SEQ ID NO: 1772677 - DNA, 25 bp, Homo sapien
tgcaaacaatggacaccagacagct

SEQ ID NO: 1772678 - DNA, 25 bp, Homo sapien
cacgtggaccaatgccatgctttta

SEQ ID NO: 1772679 - DNA, 25 bp, Homo sapien
catacagctcgtttatctacagaaa

SEQ ID NO: 1772680 - DNA, 25 bp, Homo sapien
ggcccaagaagtcagttttccatca

SEQ ID NO: 1772681 - DNA, 25 bp, Homo sapien
catgtggcccacaagttggataagc

SEQ ID NO: 1772682 - DNA, 25 bp, Homo sapien
tcctcccctaaaagaattggctgtg

SEQ ID NO: 1772683 - DNA, 25 bp, Homo sapien
aaatagccaattacacattccctgc

SEQ ID NO: 1772684 - DNA, 25 bp, Homo sapien
tagacaaggctcaaaaagatggcaa

SEQ ID NO: 1772685 - DNA, 25 bp, Homo sapien
gcttcataaaggtaacaatcatata

SEQ ID NO: 1772686 - DNA, 25 bp, Homo sapien
acaatcatataagaccaaaggagaa

SEQ ID NO: 1772687 - DNA, 25 bp, Homo sapien
aagcttcataaaggtaacaatcata

SEQ ID NO: 1772688 - DNA, 25 bp, Homo sapien
taacaatcatataagaccaaaggag

SEQ ID NO: 1772689 - DNA, 25 bp, Homo sapien
gatcaatttcaccacagccagccat

SEQ ID NO: 1772690 - DNA, 25 bp, Homo sapien
tgatcaatttcaccacagccagcca

SEQ ID NO: 1772691 - DNA, 25 bp, Homo sapien
aatggcacattcagggacggttaaa

SEQ ID NO: 1772692 - DNA, 25 bp, Homo sapien
tcttgtcgacaaagagcacaccgct

SEQ ID NO: 1772693 - DNA, 25 bp, Homo sapien
caagatcagcgacatacagaaagcc

SEQ ID NO: 1772694 - DNA, 25 bp, Homo sapien
ttcttctggtgacaacaaggttggc

SEQ ID NO: 1772695 - DNA, 25 bp, Homo sapien
tcagatgaggaccattaatgcacag

SEQ ID NO: 1772696 - DNA, 25 bp, Homo sapien
tgtgggcagaaatttacaggtaacc

SEQ ID NO: 1772697 - DNA, 25 bp, Homo sapien
cagcaaagcctatgggaacaccatg

SEQ ID NO: 1772698 - DNA, 25 bp, Homo sapien
ctttcaaccttgagcatggagctga

SEQ ID NO: 1772699 - DNA, 25 bp, Homo sapien
tttaagtgacctttggtcacaaatg

SEQ ID NO: 1772700 - DNA, 25 bp, Homo sapien
tgacctttggtcacaaatgtcaaaa

SEQ ID NO: 1772701 - DNA, 25 bp, Homo sapien
taagtgacctttggtcacaaatgtc

SEQ ID NO: 1772702 - DNA, 25 bp, Homo sapien
ttttctgagcaggtgattaagctga

SEQ ID NO: 1772703 - DNA, 25 bp, Homo sapien
cagattcgtccacaaagagatgggc

SEQ ID NO: 1772704 - DNA, 25 bp, Homo sapien
gggactcatgaagcatcctgcaaca

SEQ ID NO: 1772705 - DNA, 25 bp, Homo sapien
caagggccaccggaagtaattagag

SEQ ID NO: 1772706 - DNA, 25 bp, Homo sapien
aataatcggaagtagacaagctctc

SEQ ID NO: 1772707 - DNA, 25 bp, Homo sapien
cacctgcatttgagtatttaacacg

SEQ ID NO: 1772708 - DNA, 25 bp, Homo sapien
atgaacccgttagggaaactcactg

SEQ ID NO: 1772709 - DNA, 25 bp, Homo sapien
gctatcagtctaatccaagccacta

SEQ ID NO: 1772710 - DNA, 25 bp, Homo sapien
gttgaactggcaaatgttaactccc

SEQ ID NO: 1772711 - DNA, 25 bp, Homo sapien
gtttcatatgtcttaaggaccatta

SEQ ID NO: 1772712 - DNA, 25 bp, Homo sapien
tgtgatggcgcacgtgtagttgcag

SEQ ID NO: 1772713 - DNA, 25 bp, Homo sapien
aagttcttcaagtattagggataat

SEQ ID NO: 1772714 - DNA, 25 bp, Homo sapien
aaaaaacatggtccactgtgggagg

SEQ ID NO: 1772715 - DNA, 25 bp, Homo sapien
tccctcagcacttgcagtatgtcgt

SEQ ID NO: 1772716 - DNA, 25 bp, Homo sapien
agacatattggagcttaattgtgtg

SEQ ID NO: 1772717 - DNA, 25 bp, Homo sapien
actattttctatatcctgtagggat

SEQ ID NO: 1772718 - DNA, 25 bp, Homo sapien
ctatctctaggtgttggaagctctt

SEQ ID NO: 1772719 - DNA, 25 bp, Homo sapien
tcctaggttcaagtgattctcctgc

SEQ ID NO: 1772720 - DNA, 25 bp, Homo sapien
ctggagtgcagtaggctggagtgca

SEQ ID NO: 1772721 - DNA, 25 bp, Homo sapien
cctcctccacctcctaggttcaagt

SEQ ID NO: 1772722 - DNA, 25 bp, Homo sapien
gtggtgtaatctcagctcactgcaa

SEQ ID NO: 1772723 - DNA, 25 bp, Homo sapien
ctataatatgagtgctttggtaggc

SEQ ID NO: 1772724 - DNA, 25 bp, Homo sapien
taatatgagtgctttggtaggctga

SEQ ID NO: 1772725 - DNA, 25 bp, Homo sapien
acacctataatatgagtgctttggt

SEQ ID NO: 1772726 - DNA, 25 bp, Homo sapien
aatagtgaaacctattttagcatgg

SEQ ID NO: 1772727 - DNA, 25 bp, Homo sapien
acttacagttctgcacgctatacag

SEQ ID NO: 1772728 - DNA, 25 bp, Homo sapien
gacatcctgcatggcaagttttaaa

SEQ ID NO: 1772729 - DNA, 25 bp, Homo sapien
tgggaagtgcgacctttgatctcag

SEQ ID NO: 1772730 - DNA, 25 bp, Homo sapien
cagatcacctttgcagaacttgaaa

SEQ ID NO: 1772731 - DNA, 25 bp, Homo sapien
tctctgaatttagaactgggacgaa

SEQ ID NO: 1772732 - DNA, 25 bp, Homo sapien
ctggatttagtgattacagtataag

SEQ ID NO: 1772733 - DNA, 25 bp, Homo sapien
cagtataaggtgaaacaggtaaagg

SEQ ID NO: 1772734 - DNA, 25 bp, Homo sapien
ttacagtataaggtgaaacaggtaa

SEQ ID NO: 1772735 - DNA, 25 bp, Homo sapien
cttctggatttagtgattacagtat

SEQ ID NO: 1772736 - DNA, 25 bp, Homo sapien
ctacaagaacggaggacaggggcgc

SEQ ID NO: 1772737 - DNA, 25 bp, Homo sapien
tacaagaacggaggacaggggcgca

SEQ ID NO: 1772738 - DNA, 25 bp, Homo sapien
cctggctccctcgtgacacgaggga

SEQ ID NO: 1772739 - DNA, 25 bp, Homo sapien
tagtaaaagagaagacgcggagaag

SEQ ID NO: 1772740 - DNA, 25 bp, Homo sapien
ctcgcggcaggagcgggatttccgg

SEQ ID NO: 1772741 - DNA, 25 bp, Homo sapien
agggagcgcgaagcggagggcgcct

SEQ ID NO: 1772742 - DNA, 25 bp, Homo sapien
ttatctgagcgaaaacaagcacggt

SEQ ID NO: 1772743 - DNA, 25 bp, Homo sapien
tgcacgaatcgaaatagagctcagc

SEQ ID NO: 1772744 - DNA, 25 bp, Homo sapien
caaagcacttcctgtctgcggcata

SEQ ID NO: 1772745 - DNA, 25 bp, Homo sapien
aagccaagtacaataggagaccgcc

SEQ ID NO: 1772746 - DNA, 25 bp, Homo sapien
atcctgcggtaactgttaaaacgcg

SEQ ID NO: 1772747 - DNA, 25 bp, Homo sapien
gcgccatggagattagcctagcatt

SEQ ID NO: 1772748 - DNA, 25 bp, Homo sapien
caacctggtgttggagcctggtgcc

SEQ ID NO: 1772749 - DNA, 25 bp, Homo sapien
tatatccactggtgccaacctggag

SEQ ID NO: 1772750 - DNA, 25 bp, Homo sapien
tgtagggaccagcagtcagtggacc

SEQ ID NO: 1772751 - DNA, 25 bp, Homo sapien
gcagtcactgagcttttctaagaat

SEQ ID NO: 1772752 - DNA, 25 bp, Homo sapien
caccacgcccggcagtcactgagct

SEQ ID NO: 1772753 - DNA, 25 bp, Homo sapien
cagtcactgagcttttctaagaatt

SEQ ID NO: 1772754 - DNA, 25 bp, Homo sapien
gtcactgagcttttctaagaattat

SEQ ID NO: 1772755 - DNA, 25 bp, Homo sapien
ggagttatcatgagacttacacgaa

SEQ ID NO: 1772756 - DNA, 25 bp, Homo sapien
ttctcctacatcttatgctattggt

SEQ ID NO: 1772757 - DNA, 25 bp, Homo sapien
gagttaaaagtgacttatgcatcac

SEQ ID NO: 1772758 - DNA, 25 bp, Homo sapien
gtctattttaagctcgaacaattta

SEQ ID NO: 1772759 - DNA, 25 bp, Homo sapien
tcttcagctcctcaccatgcgatgt

SEQ ID NO: 1772760 - DNA, 25 bp, Homo sapien
gagttcctatcagcaagaaggcact

SEQ ID NO: 1772761 - DNA, 25 bp, Homo sapien
gaaggcactcaccagatagaccacc

SEQ ID NO: 1772762 - DNA, 25 bp, Homo sapien
gacagtatcaggtatattggcttat

SEQ ID NO: 1772763 - DNA, 25 bp, Homo sapien
taaaaatgcaactgattggccaggt

SEQ ID NO: 1772764 - DNA, 25 bp, Homo sapien
tggttatggtatgagataagggtcc

SEQ ID NO: 1772765 - DNA, 25 bp, Homo sapien
tattaaagagagtgcccttttccca

SEQ ID NO: 1772766 - DNA, 25 bp, Homo sapien
tatgtgattatctagttgtcccaac

SEQ ID NO: 1772767 - DNA, 25 bp, Homo sapien
gcatttttatatcagcgccatgctg

SEQ ID NO: 1772768 - DNA, 25 bp, Homo sapien
tagaatatttactccttataagaag

SEQ ID NO: 1772769 - DNA, 25 bp, Homo sapien
gggctcgatttccttataaactaga

SEQ ID NO: 1772770 - DNA, 25 bp, Homo sapien
tctcccattccatagctggtctatt

SEQ ID NO: 1772771 - DNA, 25 bp, Homo sapien
cagaccaacaagggctcagcagtct

SEQ ID NO: 1772772 - DNA, 25 bp, Homo sapien
tctgaaccagctcatttttatccat

SEQ ID NO: 1772773 - DNA, 25 bp, Homo sapien
tgggccagttcggccttctgaacca

SEQ ID NO: 1772774 - DNA, 25 bp, Homo sapien
gggccagttcggccttctgaaccag

SEQ ID NO: 1772775 - DNA, 25 bp, Homo sapien
ccttctgaaccagctcatttttatc

SEQ ID NO: 1772776 - DNA, 25 bp, Homo sapien
ctataggcgcctacatttttagaag

SEQ ID NO: 1772777 - DNA, 25 bp, Homo sapien
ataggcgcctacatttttagaagca

SEQ ID NO: 1772778 - DNA, 25 bp, Homo sapien
tataggcgcctacatttttagaagc

SEQ ID NO: 1772779 - DNA, 25 bp, Homo sapien
aatacttgagacaacactccaaaat

SEQ ID NO: 1772780 - DNA, 25 bp, Homo sapien
caatacttgagacaacactccaaaa

SEQ ID NO: 1772781 - DNA, 25 bp, Homo sapien
tcaatacttgagacaacactccaaa

SEQ ID NO: 1772782 - DNA, 25 bp, Homo sapien
ggagtaaatccagtctgatagcatg

SEQ ID NO: 1772783 - DNA, 25 bp, Homo sapien
accagcaacgacctcagccaagtaa

SEQ ID NO: 1772784 - DNA, 25 bp, Homo sapien
agaggagtaaatccagtctgatagc

SEQ ID NO: 1772785 - DNA, 25 bp, Homo sapien
taaatccagtctgatagcatgtgtt

SEQ ID NO: 1772786 - DNA, 25 bp, Homo sapien
tggccaagggcaggctttccctggg

SEQ ID NO: 1772787 - DNA, 25 bp, Homo sapien
ctggtcctggccaagggcaggcttt

SEQ ID NO: 1772788 - DNA, 25 bp, Homo sapien
cctggccaagggcaggctttccctg

SEQ ID NO: 1772789 - DNA, 25 bp, Homo sapien
tccttccgtcctttcagatggagtc

SEQ ID NO: 1772790 - DNA, 25 bp, Homo sapien
gtcagtaactgcattattagcgtgt

SEQ ID NO: 1772791 - DNA, 25 bp, Homo sapien
aacaattgtgcttggactgttcttg

SEQ ID NO: 1772792 - DNA, 25 bp, Homo sapien
taacaattgtgcttggactgttctt

SEQ ID NO: 1772793 - DNA, 25 bp, Homo sapien
acaattgtgcttggactgttcttga

SEQ ID NO: 1772794 - DNA, 25 bp, Homo sapien
gctgcctgtatctttgctaaagcac

SEQ ID NO: 1772795 - DNA, 25 bp, Homo sapien
gctaaagcacagcataagtaacctt

SEQ ID NO: 1772796 - DNA, 25 bp, Homo sapien
gcgcccagcctaagttccaagtttg

SEQ ID NO: 1772797 - DNA, 25 bp, Homo sapien
tcagccaggccacctcttaaatgct

SEQ ID NO: 1772798 - DNA, 25 bp, Homo sapien
ttggtatctcttaaagtaggcctta

SEQ ID NO: 1772799 - DNA, 25 bp, Homo sapien
gtatctcttaaagtaggccttattg

SEQ ID NO: 1772800 - DNA, 25 bp, Homo sapien
tggtatctcttaaagtaggccttat

SEQ ID NO: 1772801 - DNA, 25 bp, Homo sapien
tctcttaaagtaggccttattgtta

SEQ ID NO: 1772802 - DNA, 25 bp, Homo sapien
agcattgctgagaataataatcatt

SEQ ID NO: 1772803 - DNA, 25 bp, Homo sapien
ctgtatttgggtgtgttgtatttat

SEQ ID NO: 1772804 - DNA, 25 bp, Homo sapien
tgtatttgggtgtgttgtatttatt

SEQ ID NO: 1772805 - DNA, 25 bp, Homo sapien
tgggtgtgttgtatttatttttatc

SEQ ID NO: 1772806 - DNA, 25 bp, Homo sapien
ttcttgttaggatcttcatctcctt

SEQ ID NO: 1772807 - DNA, 25 bp, Homo sapien
ctgacaaatgatacgtctttttgtt

SEQ ID NO: 1772808 - DNA, 25 bp, Homo sapien
tgtttcttgttaggatcttcatctc

SEQ ID NO: 1772809 - DNA, 25 bp, Homo sapien
tctgacaaatgatacgtctttttgt

SEQ ID NO: 1772810 - DNA, 25 bp, Homo sapien
ttgtagactggattttctcatatag

SEQ ID NO: 1772811 - DNA, 25 bp, Homo sapien
ctgctctttttcctcccacattcat

SEQ ID NO: 1772812 - DNA, 25 bp, Homo sapien
aaatgatcagaatttagtgtaagca

SEQ ID NO: 1772813 - DNA, 25 bp, Homo sapien
tttagtgtaagcataatcatagaag

SEQ ID NO: 1772814 - DNA, 25 bp, Homo sapien
tcgtaggtaaatgatcagaatttag

SEQ ID NO: 1772815 - DNA, 25 bp, Homo sapien
gtaagcataatcatagaagggaaca

SEQ ID NO: 1772816 - DNA, 25 bp, Homo sapien
tacaatctgtaacctcacatcctga

SEQ ID NO: 1772817 - DNA, 25 bp, Homo sapien
aaaatcaggcatctgtttgtaggta

SEQ ID NO: 1772818 - DNA, 25 bp, Homo sapien
taggtatccggtgtagctaatgcag

SEQ ID NO: 1772819 - DNA, 25 bp, Homo sapien
cacatcctgaacttggttggaagaa

SEQ ID NO: 1772820 - DNA, 25 bp, Homo sapien
taccttccttggaggttgcatgaca

SEQ ID NO: 1772821 - DNA, 25 bp, Homo sapien
tatgtaccattgcatcagagcatct

SEQ ID NO: 1772822 - DNA, 25 bp, Homo sapien
catttggcaaaatcggctaagctca

SEQ ID NO: 1772823 - DNA, 25 bp, Homo sapien
tcagatccccactagacagtaagct

SEQ ID NO: 1772824 - DNA, 25 bp, Homo sapien
tgctagcatgcagtcgctccaatgt

SEQ ID NO: 1772825 - DNA, 25 bp, Homo sapien
gcatgcagtcgctccaatgtagcac

SEQ ID NO: 1772826 - DNA, 25 bp, Homo sapien
caatgtagcacacgcttgtcctgcc

SEQ ID NO: 1772827 - DNA, 25 bp, Homo sapien
tcgctccaatgtagcacacgcttgt

SEQ ID NO: 1772828 - DNA, 25 bp, Homo sapien
cccttaaatgtaggtggcccacagc

SEQ ID NO: 1772829 - DNA, 25 bp, Homo sapien
aggtggcccacagctttcagttctc

SEQ ID NO: 1772830 - DNA, 25 bp, Homo sapien
atgtaggtggcccacagctttcagt

SEQ ID NO: 1772831 - DNA, 25 bp, Homo sapien
ccttaaatgtaggtggcccacagct

SEQ ID NO: 1772832 - DNA, 25 bp, Homo sapien
gtcagggtcagcagatgcttctcag

SEQ ID NO: 1772833 - DNA, 25 bp, Homo sapien
agcagggagagtcagggtcagcaga

SEQ ID NO: 1772834 - DNA, 25 bp, Homo sapien
gagagtcagggtcagcagatgcttc

SEQ ID NO: 1772835 - DNA, 25 bp, Homo sapien
gggagagtcagggtcagcagatgct

SEQ ID NO: 1772836 - DNA, 25 bp, Homo sapien
tcttgctctactccagactgtcagg

SEQ ID NO: 1772837 - DNA, 25 bp, Homo sapien
tggagactactaacccaagtccctg

SEQ ID NO: 1772838 - DNA, 25 bp, Homo sapien
gactgtcaggtttgccctagataca

SEQ ID NO: 1772839 - DNA, 25 bp, Homo sapien
cattcaaaaccagtaggcagcatga

SEQ ID NO: 1772840 - DNA, 25 bp, Homo sapien
ctgttggttggcatgattttgtgga

SEQ ID NO: 1772841 - DNA, 25 bp, Homo sapien
cttgtaacattagaatagtgaacac

SEQ ID NO: 1772842 - DNA, 25 bp, Homo sapien
acattagaatagtgaacactgtttc

SEQ ID NO: 1772843 - DNA, 25 bp, Homo sapien
tgtaacattagaatagtgaacactg

SEQ ID NO: 1772844 - DNA, 25 bp, Homo sapien
tagtgaacactgtttctataaagtg

SEQ ID NO: 1772845 - DNA, 25 bp, Homo sapien
gaccagagaatctctgtctacaacc

SEQ ID NO: 1772846 - DNA, 25 bp, Homo sapien
tgtctacaaccttaagttcactcag

SEQ ID NO: 1772847 - DNA, 25 bp, Homo sapien
tgtcctggacacacttatcaactcc

SEQ ID NO: 1772848 - DNA, 25 bp, Homo sapien
aaccccactgtttgtcctggacaca

SEQ ID NO: 1772849 - DNA, 25 bp, Homo sapien
gcggcgcatcctgagtgctttgttc

SEQ ID NO: 1772850 - DNA, 25 bp, Homo sapien
agcggcgcatcctgagtgctttgtt

SEQ ID NO: 1772851 - DNA, 25 bp, Homo sapien
taaggtatggatttaatcagaccat

SEQ ID NO: 1772852 - DNA, 25 bp, Homo sapien
aaggtatggatttaatcagaccatg

SEQ ID NO: 1772853 - DNA, 25 bp, Homo sapien
ctttttctccggtggatccacctct

SEQ ID NO: 1772854 - DNA, 25 bp, Homo sapien
ttttctccggtggatccacctcttc

SEQ ID NO: 1772855 - DNA, 25 bp, Homo sapien
tttttgagccaagatccatattgag

SEQ ID NO: 1772856 - DNA, 25 bp, Homo sapien
aaagagtaacggattttgaggcacg

SEQ ID NO: 1772857 - DNA, 25 bp, Homo sapien
aactgcaagatggtcctggatagga

SEQ ID NO: 1772858 - DNA, 25 bp, Homo sapien
aaatgactagactaggaggccgagg

SEQ ID NO: 1772859 - DNA, 25 bp, Homo sapien
tcacggcggagctcaacaagtacaa

SEQ ID NO: 1772860 - DNA, 25 bp, Homo sapien
tcctgggcaggaaaatcgtcgaact

SEQ ID NO: 1772861 - DNA, 25 bp, Homo sapien
gagaaccgcgtgcttatgtccaaca

SEQ ID NO: 1772862 - DNA, 25 bp, Homo sapien
caagtacaagtacaagtccggcggc

SEQ ID NO: 1772863 - DNA, 25 bp, Homo sapien
aaaaaaggctcaacagactcccaca

SEQ ID NO: 1772864 - DNA, 25 bp, Homo sapien
gaaaggctgttcctatagtgtcagg

SEQ ID NO: 1772865 - DNA, 25 bp, Homo sapien
tatactcatgatgctaatcttgtcc

SEQ ID NO: 1772866 - DNA, 25 bp, Homo sapien
aaaggaatgttgcagagggaagtca

SEQ ID NO: 1772867 - DNA, 25 bp, Homo sapien
gaagagtgtgtcaggtaagcataga

SEQ ID NO: 1772868 - DNA, 25 bp, Homo sapien
tagtttgtcgaataacatgggcagg

SEQ ID NO: 1772869 - DNA, 25 bp, Homo sapien
tcttctcagagccaatagtttgtcg

SEQ ID NO: 1772870 - DNA, 25 bp, Homo sapien
tatatttagatgcatcaattacaca

SEQ ID NO: 1772871 - DNA, 25 bp, Homo sapien
tgcgaaggcaggatatgttccaggc

SEQ ID NO: 1772872 - DNA, 25 bp, Homo sapien
caggcctccctctatggcttgtaga

SEQ ID NO: 1772873 - DNA, 25 bp, Homo sapien
cctaaggacctcatttgacctgcct

SEQ ID NO: 1772874 - DNA, 25 bp, Homo sapien
cccctttttgtaaggatatcagtga

SEQ ID NO: 1772875 - DNA, 25 bp, Homo sapien
aatgcgccacgagttggagagagcc

SEQ ID NO: 1772876 - DNA, 25 bp, Homo sapien
gacactttcttcgaggaggatgcct

SEQ ID NO: 1772877 - DNA, 25 bp, Homo sapien
ggagccttagggacacagtttcgta

SEQ ID NO: 1772878 - DNA, 25 bp, Homo sapien
gaacgagatcgatgagctgagaacc

SEQ ID NO: 1772879 - DNA, 25 bp, Homo sapien
ccatgagaatgtaaggttcagctgc

SEQ ID NO: 1772880 - DNA, 25 bp, Homo sapien
ctaccatgagaatgtaaggttcagc

SEQ ID NO: 1772881 - DNA, 25 bp, Homo sapien
ttccaaagcctgctaccatgagaat

SEQ ID NO: 1772882 - DNA, 25 bp, Homo sapien
cctttccaaagcctgctaccatgag

SEQ ID NO: 1772883 - DNA, 25 bp, Homo sapien
ttccatcaattcctgtctgactctg

SEQ ID NO: 1772884 - DNA, 25 bp, Homo sapien
tatggatttgatggtaaggaaagcc

SEQ ID NO: 1772885 - DNA, 25 bp, Homo sapien
gcagagttgacaactctaatatatg

SEQ ID NO: 1772886 - DNA, 25 bp, Homo sapien
aactctaatatatggatatcttttc

SEQ ID NO: 1772887 - DNA, 25 bp, Homo sapien
taattgatggagaatgaccgaaccc

SEQ ID NO: 1772888 - DNA, 25 bp, Homo sapien
tggtacctcgcgtgttagcctgctg

SEQ ID NO: 1772889 - DNA, 25 bp, Homo sapien
aaaccagtgcatccgtgttcgagcg

SEQ ID NO: 1772890 - DNA, 25 bp, Homo sapien
tgcatcaggagatgttagtcacgcc

SEQ ID NO: 1772891 - DNA, 25 bp, Homo sapien
agaaccctttgtctgtgggacggtg

SEQ ID NO: 1772892 - DNA, 25 bp, Homo sapien
ggcaaaccgttctgtaaaggatctc

SEQ ID NO: 1772893 - DNA, 25 bp, Homo sapien
ctctgtgggccgatatttatttcgg

SEQ ID NO: 1772894 - DNA, 25 bp, Homo sapien
tagtcgtggcttcgcaagaaccctt

SEQ ID NO: 1772895 - DNA, 25 bp, Homo sapien
aaaccggcactcagtagaaaacagg

SEQ ID NO: 1772896 - DNA, 25 bp, Homo sapien
ctcattttcacggtagaaaccggca

SEQ ID NO: 1772897 - DNA, 25 bp, Homo sapien
ggtagaaaccggcactcagtagaaa

SEQ ID NO: 1772898 - DNA, 25 bp, Homo sapien
ttcacggtagaaaccggcactcagt

SEQ ID NO: 1772899 - DNA, 25 bp, Homo sapien
ggttagtgtaaattgtaaagacatg

SEQ ID NO: 1772900 - DNA, 25 bp, Homo sapien
ccttttaggctgatataatgtattc

SEQ ID NO: 1772901 - DNA, 25 bp, Homo sapien
ggtttctgttattgttcgcatgcac

SEQ ID NO: 1772902 - DNA, 25 bp, Homo sapien
ctgtgaaacagtatgggttagtgta

SEQ ID NO: 1772903 - DNA, 25 bp, Homo sapien
gctcacaaaggaattcttagaggta

SEQ ID NO: 1772904 - DNA, 25 bp, Homo sapien
ttagaggtagaagggaggctcccat

SEQ ID NO: 1772905 - DNA, 25 bp, Homo sapien
tcttagaggtagaagggaggctccc

SEQ ID NO: 1772906 - DNA, 25 bp, Homo sapien
tattctcatactcaagctcacaaag

SEQ ID NO: 1772907 - DNA, 25 bp, Homo sapien
tatttcacttttaatgcaagatcaa

SEQ ID NO: 1772908 - DNA, 25 bp, Homo sapien
tggaaaattgaatctcttgagccaa

SEQ ID NO: 1772909 - DNA, 25 bp, Homo sapien
aattgaatctcttgagccaaaattc

SEQ ID NO: 1772910 - DNA, 25 bp, Homo sapien
tgaatctcttgagccaaaattcatg

SEQ ID NO: 1772911 - DNA, 25 bp, Homo sapien
gagtctggatgcgatgtaacaatgt

SEQ ID NO: 1772912 - DNA, 25 bp, Homo sapien
gatgcgatgtaacaatgtagacatg

SEQ ID NO: 1772913 - DNA, 25 bp, Homo sapien
ctggatgcgatgtaacaatgtagac

SEQ ID NO: 1772914 - DNA, 25 bp, Homo sapien
aagaagagtctggatgcgatgtaac

SEQ ID NO: 1772915 - DNA, 25 bp, Homo sapien
gaccctttacagtatggcgaagatg

SEQ ID NO: 1772916 - DNA, 25 bp, Homo sapien
tgattccactgcattagatcttggg

SEQ ID NO: 1772917 - DNA, 25 bp, Homo sapien
gaggaccctttacagtatggcgaag

SEQ ID NO: 1772918 - DNA, 25 bp, Homo sapien
gggaagatgattccactgcattaga

SEQ ID NO: 1772919 - DNA, 25 bp, Homo sapien
tagtgatttgtgttcagtacagaga

SEQ ID NO: 1772920 - DNA, 25 bp, Homo sapien
ctgatgactttgacgatactggaaa

SEQ ID NO: 1772921 - DNA, 25 bp, Homo sapien
gatgactttgacgatactggaaaaa

SEQ ID NO: 1772922 - DNA, 25 bp, Homo sapien
tagagctctataaaagttagtgatt

SEQ ID NO: 1772923 - DNA, 25 bp, Homo sapien
aaaatcctgaggagctagaactagc

SEQ ID NO: 1772924 - DNA, 25 bp, Homo sapien
aatcctgaggagctagaactagcta

SEQ ID NO: 1772925 - DNA, 25 bp, Homo sapien
cctgaggagctagaactagctagct

SEQ ID NO: 1772926 - DNA, 25 bp, Homo sapien
gaggagctagaactagctagctaga

SEQ ID NO: 1772927 - DNA, 25 bp, Homo sapien
ccaactagtacacaaacccaggaag

SEQ ID NO: 1772928 - DNA, 25 bp, Homo sapien
caactagtacacaaacccaggaagg

SEQ ID NO: 1772929 - DNA, 25 bp, Homo sapien
tctctcaaggtatacccagggatta

SEQ ID NO: 1772930 - DNA, 25 bp, Homo sapien
caccctgtagtcactgagctgacca

SEQ ID NO: 1772931 - DNA, 25 bp, Homo sapien
gtagtcactgagctgaccaggactc

SEQ ID NO: 1772932 - DNA, 25 bp, Homo sapien
ctgtagtcactgagctgaccaggac

SEQ ID NO: 1772933 - DNA, 25 bp, Homo sapien
cattatctggtgcaaattttgcaaa

SEQ ID NO: 1772934 - DNA, 25 bp, Homo sapien
caaaatacctggctgtctgattcaa

SEQ ID NO: 1772935 - DNA, 25 bp, Homo sapien
ttctgttcattatctggtgcaaatt

SEQ ID NO: 1772936 - DNA, 25 bp, Homo sapien
tgcaaaatacctggctgtctgattc

SEQ ID NO: 1772937 - DNA, 25 bp, Homo sapien
cttcgggttggatcagctaatctgc

SEQ ID NO: 1772938 - DNA, 25 bp, Homo sapien
gatgcacatatgatctccagattca

SEQ ID NO: 1772939 - DNA, 25 bp, Homo sapien
catagccacagtttgtccttcgggt

SEQ ID NO: 1772940 - DNA, 25 bp, Homo sapien
cagcccaccaactgtccacagagat

SEQ ID NO: 1772941 - DNA, 25 bp, Homo sapien
tattgacattgtggctcttaaatcc

SEQ ID NO: 1772942 - DNA, 25 bp, Homo sapien
cttctgtgaaaagctggatatgtcc

SEQ ID NO: 1772943 - DNA, 25 bp, Homo sapien
gaaccttgttttcgtccttctgtga

SEQ ID NO: 1772944 - DNA, 25 bp, Homo sapien
aaagctggatatgtcctaaggaatc

SEQ ID NO: 1772945 - DNA, 25 bp, Homo sapien
ccgcagcaagaaagggtaatgaaga

SEQ ID NO: 1772946 - DNA, 25 bp, Homo sapien
ttacaccagaatcaaccgcagcaag

SEQ ID NO: 1772947 - DNA, 25 bp, Homo sapien
ctcagggaaggatgaacgacagcta

SEQ ID NO: 1772948 - DNA, 25 bp, Homo sapien
gcaaaagcctgacttggtctgatga

SEQ ID NO: 1772949 - DNA, 25 bp, Homo sapien
tgaagtgtgtgcagcccataagtac

SEQ ID NO: 1772950 - DNA, 25 bp, Homo sapien
ttgatattatctgccaaggttgaag

SEQ ID NO: 1772951 - DNA, 25 bp, Homo sapien
tgtgtgcagcccataagtacttcaa

SEQ ID NO: 1772952 - DNA, 25 bp, Homo sapien
gccaaggttgaagtgtgtgcagccc

SEQ ID NO: 1772953 - DNA, 25 bp, Homo sapien
gaatatgtgcgctagctaacactcc

SEQ ID NO: 1772954 - DNA, 25 bp, Homo sapien
gagccaccgacaattaagggattcc

SEQ ID NO: 1772955 - DNA, 25 bp, Homo sapien
tatatgtgggcaaatccatgtctca

SEQ ID NO: 1772956 - DNA, 25 bp, Homo sapien
gaaactggatattggtctgcaactc

SEQ ID NO: 1772957 - DNA, 25 bp, Homo sapien
ctccctgccctatacttggaagtgg

SEQ ID NO: 1772958 - DNA, 25 bp, Homo sapien
gacagaagtgtttggtcgggattca

SEQ ID NO: 1772959 - DNA, 25 bp, Homo sapien
gcagagttggattgtcgatgacaga

SEQ ID NO: 1772960 - DNA, 25 bp, Homo sapien
ctgtttgattcctatgcttgtggga

SEQ ID NO: 1772961 - DNA, 25 bp, Homo sapien
atgatccacagccagtacccaactt

SEQ ID NO: 1772962 - DNA, 25 bp, Homo sapien
gaagaaccaggactacattctgaaa

SEQ ID NO: 1772963 - DNA, 25 bp, Homo sapien
aagaggactgcagctaaatgatcca

SEQ ID NO: 1772964 - DNA, 25 bp, Homo sapien
aagaagaattcgtggtggcatgccc

SEQ ID NO: 1772965 - DNA, 25 bp, Homo sapien
cataacttctagagctagattccga

SEQ ID NO: 1772966 - DNA, 25 bp, Homo sapien
gagctagattccgaatgatctctat

SEQ ID NO: 1772967 - DNA, 25 bp, Homo sapien
caggagttatttccataacttctag

SEQ ID NO: 1772968 - DNA, 25 bp, Homo sapien
ccgaatgatctctatatacattaga

SEQ ID NO: 1772969 - DNA, 25 bp, Homo sapien
ctgattgtcaagttcgagtttttca

SEQ ID NO: 1772970 - DNA, 25 bp, Homo sapien
ctacatggtcatgatgacattaatt

SEQ ID NO: 1772971 - DNA, 25 bp, Homo sapien
aattttttgaaattactgattgtca

SEQ ID NO: 1772972 - DNA, 25 bp, Homo sapien
tacaagatcttaacaaataagcata

SEQ ID NO: 1772973 - DNA, 25 bp, Homo sapien
ttaatgaattttaaaatcatgagca

SEQ ID NO: 1772974 - DNA, 25 bp, Homo sapien
cattaatgaattttaaaatcatgag

SEQ ID NO: 1772975 - DNA, 25 bp, Homo sapien
taatcattaatgaattttaaaatca

SEQ ID NO: 1772976 - DNA, 25 bp, Homo sapien
atgaattttaaaatcatgagcaaaa

SEQ ID NO: 1772977 - DNA, 25 bp, Homo sapien
atatgtttgttaatttctcagttat

SEQ ID NO: 1772978 - DNA, 25 bp, Homo sapien
tatgtttgttaatttctcagttatt

SEQ ID NO: 1772979 - DNA, 25 bp, Homo sapien
gtagtacatggcctctatcgctgaa

SEQ ID NO: 1772980 - DNA, 25 bp, Homo sapien
tccaatatcttgtagtacatggcct

SEQ ID NO: 1772981 - DNA, 25 bp, Homo sapien
catggcctctatcgctgaatttcct

SEQ ID NO: 1772982 - DNA, 25 bp, Homo sapien
catctttttgggctccaatatcttg

SEQ ID NO: 1772983 - DNA, 25 bp, Homo sapien
ctgtcaattgcaggaaaaatctctg

SEQ ID NO: 1772984 - DNA, 25 bp, Homo sapien
aactgtcaattgcaggaaaaatctc

SEQ ID NO: 1772985 - DNA, 25 bp, Homo sapien
ttaactgtcaattgcaggaaaaatc

SEQ ID NO: 1772986 - DNA, 25 bp, Homo sapien
accatatgtatcagggagataagaa

SEQ ID NO: 1772987 - DNA, 25 bp, Homo sapien
tgtagcctctgaattagtttcccta

SEQ ID NO: 1772988 - DNA, 25 bp, Homo sapien
acaaatgccctggagatacgtttgt

SEQ ID NO: 1772989 - DNA, 25 bp, Homo sapien
agtttccctatgtttggtgtgcaca

SEQ ID NO: 1772990 - DNA, 25 bp, Homo sapien
gagatacgtttgttctggtagaatg

SEQ ID NO: 1772991 - DNA, 25 bp, Homo sapien
aatgttgattcaattggataactca

SEQ ID NO: 1772992 - DNA, 25 bp, Homo sapien
gattcaattggataactcacaagtg

SEQ ID NO: 1772993 - DNA, 25 bp, Homo sapien
ttgattcaattggataactcacaag

SEQ ID NO: 1772994 - DNA, 25 bp, Homo sapien
tgttgattcaattggataactcaca

SEQ ID NO: 1772995 - DNA, 25 bp, Homo sapien
acccttctatttgtggttccaccag

SEQ ID NO: 1772996 - DNA, 25 bp, Homo sapien
attctgggacttaggacccttctat

SEQ ID NO: 1772997 - DNA, 25 bp, Homo sapien
ttcacagcttcactattgcatgcca

SEQ ID NO: 1772998 - DNA, 25 bp, Homo sapien
ggagactttcttccatggtaattct

SEQ ID NO: 1772999 - DNA, 25 bp, Homo sapien
catggccagtcgactacagccaaat

SEQ ID NO: 1773000 - DNA, 25 bp, Homo sapien
tatagtcccacttgaaccatggcca

SEQ ID NO: 1773001 - DNA, 25 bp, Homo sapien
cacttgaaccatggccagtcgacta

SEQ ID NO: 1773002 - DNA, 25 bp, Homo sapien
cacgtactgctatagtcccacttga

SEQ ID NO: 1773003 - DNA, 25 bp, Homo sapien
tagctttcagtcctgatggccggta

SEQ ID NO: 1773004 - DNA, 25 bp, Homo sapien
tcctgatggccggtatctggccagc

SEQ ID NO: 1773005 - DNA, 25 bp, Homo sapien
atgagaagcctgtgtacagtgtagc

SEQ ID NO: 1773006 - DNA, 25 bp, Homo sapien
tgtgtacagtgtagctttcagtcct

SEQ ID NO: 1773007 - DNA, 25 bp, Homo sapien
atcaaagaaagtaccatcctcatta

SEQ ID NO: 1773008 - DNA, 25 bp, Homo sapien
catcaaagaaagtaccatcctcatt

SEQ ID NO: 1773009 - DNA, 25 bp, Homo sapien
ctatcagggacagactcattggtcg

SEQ ID NO: 1773010 - DNA, 25 bp, Homo sapien
atcagggacagactcattggtcgac

SEQ ID NO: 1773011 - DNA, 25 bp, Homo sapien
tatcagggacagactcattggtcga

SEQ ID NO: 1773012 - DNA, 25 bp, Homo sapien
agatccttgttggttggctgtggca

SEQ ID NO: 1773013 - DNA, 25 bp, Homo sapien
gtttaagcttatcgctataagcttg

SEQ ID NO: 1773014 - DNA, 25 bp, Homo sapien
tgctgtttaagcttatcgctataag

SEQ ID NO: 1773015 - DNA, 25 bp, Homo sapien
gcagatccttgttggttggctgtgg

SEQ ID NO: 1773016 - DNA, 25 bp, Homo sapien
cttcttctgtagataatgttggctg

SEQ ID NO: 1773017 - DNA, 25 bp, Homo sapien
tccttcttctgtagataatgttggc

SEQ ID NO: 1773018 - DNA, 25 bp, Homo sapien
tcttctgtagataatgttggctgtc

SEQ ID NO: 1773019 - DNA, 25 bp, Homo sapien
taatgttggctgtcaaggttgtaat

SEQ ID NO: 1773020 - DNA, 25 bp, Homo sapien
tggacatattcatagtttgctggag

SEQ ID NO: 1773021 - DNA, 25 bp, Homo sapien
catattcatagtttgctggagggat

SEQ ID NO: 1773022 - DNA, 25 bp, Homo sapien
cctctatagattaatagaagacaag

SEQ ID NO: 1773023 - DNA, 25 bp, Homo sapien
caagtctatactctgaaggtggtaa

SEQ ID NO: 1773024 - DNA, 25 bp, Homo sapien
cagctgactgttattgttgaatgtt

SEQ ID NO: 1773025 - DNA, 25 bp, Homo sapien
tcccttggacagctaatatgttgaa

SEQ ID NO: 1773026 - DNA, 25 bp, Homo sapien
catttgcttatcatggctctgcttc

SEQ ID NO: 1773027 - DNA, 25 bp, Homo sapien
ctagagtcccttgtattcattttgg

SEQ ID NO: 1773028 - DNA, 25 bp, Homo sapien
aaagctgatcgtccatacatgaaga

SEQ ID NO: 1773029 - DNA, 25 bp, Homo sapien
aaactccatgcttactcaaatccca

SEQ ID NO: 1773030 - DNA, 25 bp, Homo sapien
ctaaatctgtgtatacaaaaagctg

SEQ ID NO: 1773031 - DNA, 25 bp, Homo sapien
aaatcccacagtctgacctgctaaa

SEQ ID NO: 1773032 - DNA, 25 bp, Homo sapien
tacagattttgatactgagagtggg

SEQ ID NO: 1773033 - DNA, 25 bp, Homo sapien
tctctgttattcaaaccccccagga

SEQ ID NO: 1773034 - DNA, 25 bp, Homo sapien
tgagagtgggatgccaactgtaaaa

SEQ ID NO: 1773035 - DNA, 25 bp, Homo sapien
tgatactgagagtgggatgccaact

SEQ ID NO: 1773036 - DNA, 25 bp, Homo sapien
tctcgtaaagctggtacctgtttat

SEQ ID NO: 1773037 - DNA, 25 bp, Homo sapien
ttctcgtaaagctggtacctgttta

SEQ ID NO: 1773038 - DNA, 25 bp, Homo sapien
cacacatggcagattgttcctgttc

SEQ ID NO: 1773039 - DNA, 25 bp, Homo sapien
ctggcaactgtcattccagggcttt

SEQ ID NO: 1773040 - DNA, 25 bp, Homo sapien
tagtacctgggcttcttgatcgcag

SEQ ID NO: 1773041 - DNA, 25 bp, Homo sapien
gctttctgaagttgtaaacacacat

SEQ ID NO: 1773042 - DNA, 25 bp, Homo sapien
cagtcacaaatatgatccttagttt

SEQ ID NO: 1773043 - DNA, 25 bp, Homo sapien
ttctctatcttgagtcctgcttcat

SEQ ID NO: 1773044 - DNA, 25 bp, Homo sapien
tcacaaatatgatccttagtttttt

SEQ ID NO: 1773045 - DNA, 25 bp, Homo sapien
attctctatcttgagtcctgcttca

SEQ ID NO: 1773046 - DNA, 25 bp, Homo sapien
tttcctagttgaaaattcatcccaa

SEQ ID NO: 1773047 - DNA, 25 bp, Homo sapien
ttttcctagttgaaaattcatccca

SEQ ID NO: 1773048 - DNA, 25 bp, Homo sapien
ccacaactgaaattgaatctctatg

SEQ ID NO: 1773049 - DNA, 25 bp, Homo sapien
cagctagtgacctggtatcagcttc

SEQ ID NO: 1773050 - DNA, 25 bp, Homo sapien
cacagctagtgacctggtatcagct

SEQ ID NO: 1773051 - DNA, 25 bp, Homo sapien
aatttaccacaactgaaattgaatc

SEQ ID NO: 1773052 - DNA, 25 bp, Homo sapien
tcaggttgtaagatcatcagtgttg

SEQ ID NO: 1773053 - DNA, 25 bp, Homo sapien
aaagattgattacgtgcactaagag

SEQ ID NO: 1773054 - DNA, 25 bp, Homo sapien
catcagtgttgatcttcaggataaa

SEQ ID NO: 1773055 - DNA, 25 bp, Homo sapien
aggaaagattgattacgtgcactaa

SEQ ID NO: 1773056 - DNA, 25 bp, Homo sapien
taagctcctgtccaagtcaaatcca

SEQ ID NO: 1773057 - DNA, 25 bp, Homo sapien
accaggtaccaggtcaaagcttcca

SEQ ID NO: 1773058 - DNA, 25 bp, Homo sapien
gctgttcaggtgttcgtgctgacca

SEQ ID NO: 1773059 - DNA, 25 bp, Homo sapien
tatattggaaggtcagggacggcca

SEQ ID NO: 1773060 - DNA, 25 bp, Homo sapien
ggacttgagcctgctgataacatta

SEQ ID NO: 1773061 - DNA, 25 bp, Homo sapien
taattgccaaatgaggatcatagca

SEQ ID NO: 1773062 - DNA, 25 bp, Homo sapien
ctcctaatctgttgcaattgtctgc

SEQ ID NO: 1773063 - DNA, 25 bp, Homo sapien
tgccaatcgccaacatagtaggttt

SEQ ID NO: 1773064 - DNA, 25 bp, Homo sapien
tgctgagctggaacggtagagcata

SEQ ID NO: 1773065 - DNA, 25 bp, Homo sapien
agctggaacggtagagcatagggcc

SEQ ID NO: 1773066 - DNA, 25 bp, Homo sapien
ctgctgagctggaacggtagagcat

SEQ ID NO: 1773067 - DNA, 25 bp, Homo sapien
tggaacggtagagcatagggcccat

SEQ ID NO: 1773068 - DNA, 25 bp, Homo sapien
catcctgttcaacttcaatgtcaga

SEQ ID NO: 1773069 - DNA, 25 bp, Homo sapien
aatgtcagaaggaaatgaagccaca

SEQ ID NO: 1773070 - DNA, 25 bp, Homo sapien
gagctataacattttttgtctcctg

SEQ ID NO: 1773071 - DNA, 25 bp, Homo sapien
cactctggctgtagtgtgacattcc

SEQ ID NO: 1773072 - DNA, 25 bp, Homo sapien
gccaccagtttttgccttctcagac

SEQ ID NO: 1773073 - DNA, 25 bp, Homo sapien
ctcctgagccaccagtttttgcctt

SEQ ID NO: 1773074 - DNA, 25 bp, Homo sapien
gtgccagttactaacccataaaagc

SEQ ID NO: 1773075 - DNA, 25 bp, Homo sapien
tctcttggtgccagttactaaccca

SEQ ID NO: 1773076 - DNA, 25 bp, Homo sapien
gactcagttgagtcaagtctcctca

SEQ ID NO: 1773077 - DNA, 25 bp, Homo sapien
ggcagaactgcgtgtaaaaaaatac

SEQ ID NO: 1773078 - DNA, 25 bp, Homo sapien
aaaaaatacgcagatcgactcagtt

SEQ ID NO: 1773079 - DNA, 25 bp, Homo sapien
tgttctgtggcaccgagcagtaggc

SEQ ID NO: 1773080 - DNA, 25 bp, Homo sapien
tcatccactttgcttagacgagaag

SEQ ID NO: 1773081 - DNA, 25 bp, Homo sapien
gcagagcattacgttcacttggcca

SEQ ID NO: 1773082 - DNA, 25 bp, Homo sapien
taagttaggccatagaagtaggtca

SEQ ID NO: 1773083 - DNA, 25 bp, Homo sapien
tctggttacaagtcatccctgggtc

SEQ ID NO: 1773084 - DNA, 25 bp, Homo sapien
ggaaagtaacagcttcctcggaagc

SEQ ID NO: 1773085 - DNA, 25 bp, Homo sapien
ccagtatatcttttagttcaaattc

SEQ ID NO: 1773086 - DNA, 25 bp, Homo sapien
gaatttgtggctagttcttcagaag

SEQ ID NO: 1773087 - DNA, 25 bp, Homo sapien
tcctcggaagcaggaatttgtggct

SEQ ID NO: 1773088 - DNA, 25 bp, Homo sapien
ttttcccttggctaccaacagccga

SEQ ID NO: 1773089 - DNA, 25 bp, Homo sapien
gtatcacatttagatccttggagga

SEQ ID NO: 1773090 - DNA, 25 bp, Homo sapien
tttggggcagacatccaaatgccag

SEQ ID NO: 1773091 - DNA, 25 bp, Homo sapien
gcacagcacggatttctgatattga

SEQ ID NO: 1773092 - DNA, 25 bp, Homo sapien
ccagagggtcagcagtacaactttg

SEQ ID NO: 1773093 - DNA, 25 bp, Homo sapien
agagggtcagcagtacaactttgct

SEQ ID NO: 1773094 - DNA, 25 bp, Homo sapien
gggtcagcagtacaactttgctgtc

SEQ ID NO: 1773095 - DNA, 25 bp, Homo sapien
gtcagcagtacaactttgctgtctt

SEQ ID NO: 1773096 - DNA, 25 bp, Homo sapien
ctggatagcctcgaagcatgtcact

SEQ ID NO: 1773097 - DNA, 25 bp, Homo sapien
gatagcctcgaagcatgtcactcat

SEQ ID NO: 1773098 - DNA, 25 bp, Homo sapien
tcagagctggatagcctcgaagcat

SEQ ID NO: 1773099 - DNA, 25 bp, Homo sapien
ccgtcagagctggatagcctcgaag

SEQ ID NO: 1773100 - DNA, 25 bp, Homo sapien
tccccactacatcatacagtgtttc

SEQ ID NO: 1773101 - DNA, 25 bp, Homo sapien
tgtgttttccccactacatcataca

SEQ ID NO: 1773102 - DNA, 25 bp, Homo sapien
tttccccactacatcatacagtgtt

SEQ ID NO: 1773103 - DNA, 25 bp, Homo sapien
gttttccccactacatcatacagtg

SEQ ID NO: 1773104 - DNA, 25 bp, Homo sapien
tggagtttttcagcctgtggcccag

SEQ ID NO: 1773105 - DNA, 25 bp, Homo sapien
ggtcttgttcacatgctccacgtag

SEQ ID NO: 1773106 - DNA, 25 bp, Homo sapien
tgtttgtacagtgaacatgccacct

SEQ ID NO: 1773107 - DNA, 25 bp, Homo sapien
tcatggtttcagtagagcagctacc

SEQ ID NO: 1773108 - DNA, 25 bp, Homo sapien
gtcagtgtcctcatcggtaaaagaa

SEQ ID NO: 1773109 - DNA, 25 bp, Homo sapien
cagtgtcctcatcggtaaaagaaga

SEQ ID NO: 1773110 - DNA, 25 bp, Homo sapien
gtgtcctcatcggtaaaagaagata

SEQ ID NO: 1773111 - DNA, 25 bp, Homo sapien
tgtcctcatcggtaaaagaagatac

SEQ ID NO: 1773112 - DNA, 25 bp, Homo sapien
tccagtttacgttgagctatgatcg

SEQ ID NO: 1773113 - DNA, 25 bp, Homo sapien
gaagcgagagcatcgcttaagccca

SEQ ID NO: 1773114 - DNA, 25 bp, Homo sapien
agaagttccagtttacgttgagcta

SEQ ID NO: 1773115 - DNA, 25 bp, Homo sapien
aggctgaagcgagagcatcgcttaa

SEQ ID NO: 1773116 - DNA, 25 bp, Homo sapien
caaaggatacaacatctatttccag

SEQ ID NO: 1773117 - DNA, 25 bp, Homo sapien
tatttccaggcgatgagcagtgtgg

SEQ ID NO: 1773118 - DNA, 25 bp, Homo sapien
cctcctttggctccgcgcaaaggat

SEQ ID NO: 1773119 - DNA, 25 bp, Homo sapien
ctatttccaggcgatgagcagtgtg

SEQ ID NO: 1773120 - DNA, 25 bp, Homo sapien
tcaaggaacatcctttgaaaataag

SEQ ID NO: 1773121 - DNA, 25 bp, Homo sapien
gaactggaaagaacctttggatcca

SEQ ID NO: 1773122 - DNA, 25 bp, Homo sapien
ggaatcatcactcaatatgaggtat

SEQ ID NO: 1773123 - DNA, 25 bp, Homo sapien
cagtaaaatctcttcaaggaacatc

SEQ ID NO: 1773124 - DNA, 25 bp, Homo sapien
tgaagtgacattccctgcaatcagt

SEQ ID NO: 1773125 - DNA, 25 bp, Homo sapien
catataagtctcaggcaagggaaca

SEQ ID NO: 1773126 - DNA, 25 bp, Homo sapien
tcttcggctgacaatggcttgaaca

SEQ ID NO: 1773127 - DNA, 25 bp, Homo sapien
tatgatcatccaagtacacgacaag

SEQ ID NO: 1773128 - DNA, 25 bp, Homo sapien
gaccctgtaggttatatcttgaagt

SEQ ID NO: 1773129 - DNA, 25 bp, Homo sapien
tatcatattccaaaacgattgacag

SEQ ID NO: 1773130 - DNA, 25 bp, Homo sapien
gatttactatcatacctctgagtca

SEQ ID NO: 1773131 - DNA, 25 bp, Homo sapien
gaaaatcggaaattgaggaggagca

SEQ ID NO: 1773132 - DNA, 25 bp, Homo sapien
actgattctagggaaatatgatccc

SEQ ID NO: 1773133 - DNA, 25 bp, Homo sapien
gcttcagcgttcttagtttgtgtac

SEQ ID NO: 1773134 - DNA, 25 bp, Homo sapien
aggagcacgaagctcctgtcatgct

SEQ ID NO: 1773135 - DNA, 25 bp, Homo sapien
ccttggcacgagctttgggacatct

SEQ ID NO: 1773136 - DNA, 25 bp, Homo sapien
atcaaatgaggtgttaaagtgtgta

SEQ ID NO: 1773137 - DNA, 25 bp, Homo sapien
aatcaaatgaggtgttaaagtgtgt

SEQ ID NO: 1773138 - DNA, 25 bp, Homo sapien
tcaaatgaggtgttaaagtgtgtat

SEQ ID NO: 1773139 - DNA, 25 bp, Homo sapien
actattgtgatgttgttgtagatta

SEQ ID NO: 1773140 - DNA, 25 bp, Homo sapien
gtcatttgaactgccgatcctcacc

SEQ ID NO: 1773141 - DNA, 25 bp, Homo sapien
aacaattgtgtcatttgaactgccg

SEQ ID NO: 1773142 - DNA, 25 bp, Homo sapien
tgtagattagagttaagcttgcaac

SEQ ID NO: 1773143 - DNA, 25 bp, Homo sapien
taagttggcaagcatgtctgactga

SEQ ID NO: 1773144 - DNA, 25 bp, Homo sapien
caaactgtcagcgtctaagttggca

SEQ ID NO: 1773145 - DNA, 25 bp, Homo sapien
tgtttggatctagggttaaaccaga

SEQ ID NO: 1773146 - DNA, 25 bp, Homo sapien
gcagatatttagttactggcagttc

SEQ ID NO: 1773147 - DNA, 25 bp, Homo sapien
gttttccataatgaggacgacttct

SEQ ID NO: 1773148 - DNA, 25 bp, Homo sapien
ttattggttcttggatcatgtttat

SEQ ID NO: 1773149 - DNA, 25 bp, Homo sapien
ctttttgccaagcaatacaagcaga

SEQ ID NO: 1773150 - DNA, 25 bp, Homo sapien
acaagcagagtagtacattcagaac

SEQ ID NO: 1773151 - DNA, 25 bp, Homo sapien
agaactggcaagatgattgtctgaa

SEQ ID NO: 1773152 - DNA, 25 bp, Homo sapien
ggcaagatgattgtctgaatgtgac

SEQ ID NO: 1773153 - DNA, 25 bp, Homo sapien
tgtggctccgcatagatttttatta

SEQ ID NO: 1773154 - DNA, 25 bp, Homo sapien
gactagagcattcatagtggtcgtt

SEQ ID NO: 1773155 - DNA, 25 bp, Homo sapien
tcccaagtagatgcagactagagca

SEQ ID NO: 1773156 - DNA, 25 bp, Homo sapien
tagtggtcgttcatccgatgtggct

SEQ ID NO: 1773157 - DNA, 25 bp, Homo sapien
tttttattatatgctgagatgctca

SEQ ID NO: 1773158 - DNA, 25 bp, Homo sapien
tttattatatgctgagatgctcaga

SEQ ID NO: 1773159 - DNA, 25 bp, Homo sapien
tattatatgctgagatgctcagatg

SEQ ID NO: 1773160 - DNA, 25 bp, Homo sapien
attatatgctgagatgctcagatgc

SEQ ID NO: 1773161 - DNA, 25 bp, Homo sapien
aatgttgttcgttctccataatgtt

SEQ ID NO: 1773162 - DNA, 25 bp, Homo sapien
ctccataatgttgttcgttctccat

SEQ ID NO: 1773163 - DNA, 25 bp, Homo sapien
ccataatgttgttcgttctccataa

SEQ ID NO: 1773164 - DNA, 25 bp, Homo sapien
cataatgttgttcgttctccataat

SEQ ID NO: 1773165 - DNA, 25 bp, Homo sapien
tcttgattcctgtactcagaacctg

SEQ ID NO: 1773166 - DNA, 25 bp, Homo sapien
attcttgattcctgtactcagaacc

SEQ ID NO: 1773167 - DNA, 25 bp, Homo sapien
ttgattcctgtactcagaacctgca

SEQ ID NO: 1773168 - DNA, 25 bp, Homo sapien
cttgattcctgtactcagaacctgc

SEQ ID NO: 1773169 - DNA, 25 bp, Homo sapien
tgtatctaggttctcagtagggtac

SEQ ID NO: 1773170 - DNA, 25 bp, Homo sapien
ttttgtatctaggttctcagtaggg

SEQ ID NO: 1773171 - DNA, 25 bp, Homo sapien
gtttttgtatctaggttctcagtag

SEQ ID NO: 1773172 - DNA, 25 bp, Homo sapien
acctgtttttgtatctaggttctca

SEQ ID NO: 1773173 - DNA, 25 bp, Homo sapien
tgtgtggtttggaaggaattgtcgt

SEQ ID NO: 1773174 - DNA, 25 bp, Homo sapien
tctgtgtggtttggaaggaattgtc

SEQ ID NO: 1773175 - DNA, 25 bp, Homo sapien
agtctgtgtggtttggaaggaattg

SEQ ID NO: 1773176 - DNA, 25 bp, Homo sapien
aagtctgtgtggtttggaaggaatt

SEQ ID NO: 1773177 - DNA, 25 bp, Homo sapien
tcctccgtgggcctgccaaaacagg

SEQ ID NO: 1773178 - DNA, 25 bp, Homo sapien
aacaggagagtcagccaccgcttcg

SEQ ID NO: 1773179 - DNA, 25 bp, Homo sapien
tcgcccttggtgaggctcatcattg

SEQ ID NO: 1773180 - DNA, 25 bp, Homo sapien
accgcttcgcccttggtgaggctca

SEQ ID NO: 1773181 - DNA, 25 bp, Homo sapien
tatataatcccttctacccccagag

SEQ ID NO: 1773182 - DNA, 25 bp, Homo sapien
gcaagtatataatcccttctacccc

SEQ ID NO: 1773183 - DNA, 25 bp, Homo sapien
gagaaagcaagtatataatcccttc

SEQ ID NO: 1773184 - DNA, 25 bp, Homo sapien
tcttgagaaagcaagtatataatcc

SEQ ID NO: 1773185 - DNA, 25 bp, Homo sapien
tcagacattaggaatgagcaaggta

SEQ ID NO: 1773186 - DNA, 25 bp, Homo sapien
caaggtagtgagtttgtggtactgt

SEQ ID NO: 1773187 - DNA, 25 bp, Homo sapien
agcacagaagagctaaaaggtgtat

SEQ ID NO: 1773188 - DNA, 25 bp, Homo sapien
gtagcacagaagagctaaaaggtgt

SEQ ID NO: 1773189 - DNA, 25 bp, Homo sapien
ttaggaagccatgtcatcagaagtg

SEQ ID NO: 1773190 - DNA, 25 bp, Homo sapien
catcctcagggttaatgccgtcatc

SEQ ID NO: 1773191 - DNA, 25 bp, Homo sapien
tattttatttttgggcatcctcagg

SEQ ID NO: 1773192 - DNA, 25 bp, Homo sapien
agaaaagcggtaatctccatcccag

SEQ ID NO: 1773193 - DNA, 25 bp, Homo sapien
tctcattgttggcagggtagtttgc

SEQ ID NO: 1773194 - DNA, 25 bp, Homo sapien
tgccaatctccactgatgggtatgg

SEQ ID NO: 1773195 - DNA, 25 bp, Homo sapien
tgtagtagtctgcttcataccaacc

SEQ ID NO: 1773196 - DNA, 25 bp, Homo sapien
cttctggagcaaagtggttcactac

SEQ ID NO: 1773197 - DNA, 25 bp, Homo sapien
cagatgtggggaggaccccccatct

SEQ ID NO: 1773198 - DNA, 25 bp, Homo sapien
gatgtggggaggaccccccatcttc

SEQ ID NO: 1773199 - DNA, 25 bp, Homo sapien
agatgtggggaggaccccccatctt

SEQ ID NO: 1773200 - DNA, 25 bp, Homo sapien
gactttttccacgttggtatactga

SEQ ID NO: 1773201 - DNA, 25 bp, Homo sapien
tccacgttggtatactgagcctcat

SEQ ID NO: 1773202 - DNA, 25 bp, Homo sapien
tttttccacgttggtatactgagcc

SEQ ID NO: 1773203 - DNA, 25 bp, Homo sapien
ttggtatactgagcctcattaaccc

SEQ ID NO: 1773204 - DNA, 25 bp, Homo sapien
ctgtggcttctttagcacctggtcc

SEQ ID NO: 1773205 - DNA, 25 bp, Homo sapien
gctgtggcttctttagcacctggtc

SEQ ID NO: 1773206 - DNA, 25 bp, Homo sapien
cctggttaccaagaagcttgatgag

SEQ ID NO: 1773207 - DNA, 25 bp, Homo sapien
tgaggagagtctggcgtaggatacc

SEQ ID NO: 1773208 - DNA, 25 bp, Homo sapien
gctgtcctggagttttgagttgaga

SEQ ID NO: 1773209 - DNA, 25 bp, Homo sapien
tctggcgtaggatacctggttacca

SEQ ID NO: 1773210 - DNA, 25 bp, Homo sapien
tcctgccttcgctttatttggagaa

SEQ ID NO: 1773211 - DNA, 25 bp, Homo sapien
tggctggccctgttctcagatactg

SEQ ID NO: 1773212 - DNA, 25 bp, Homo sapien
cttggcctgccctttgattcctgac

SEQ ID NO: 1773213 - DNA, 25 bp, Homo sapien
cctgttctcagatactggccttgcc

SEQ ID NO: 1773214 - DNA, 25 bp, Homo sapien
ggtgctttgggaattgagagatggg

SEQ ID NO: 1773215 - DNA, 25 bp, Homo sapien
tgctttgggaattgagagatgggca

SEQ ID NO: 1773216 - DNA, 25 bp, Homo sapien
aaggtgctttgggaattgagagatg

SEQ ID NO: 1773217 - DNA, 25 bp, Homo sapien
gctttgggaattgagagatgggcat

SEQ ID NO: 1773218 - DNA, 25 bp, Homo sapien
gcgcatctgaacaagattcataggg

SEQ ID NO: 1773219 - DNA, 25 bp, Homo sapien
aagaagcgcatctgaacaagattca

SEQ ID NO: 1773220 - DNA, 25 bp, Homo sapien
gaacaagattcatagggagattttg

SEQ ID NO: 1773221 - DNA, 25 bp, Homo sapien
tctgaacaagattcatagggagatt

SEQ ID NO: 1773222 - DNA, 25 bp, Homo sapien
ggacggatgccctatgaactgcatc

SEQ ID NO: 1773223 - DNA, 25 bp, Homo sapien
gaattcataggacggatgccctatg

SEQ ID NO: 1773224 - DNA, 25 bp, Homo sapien
aagaattcataggacggatgcccta

SEQ ID NO: 1773225 - DNA, 25 bp, Homo sapien
tcataggacggatgccctatgaact

SEQ ID NO: 1773226 - DNA, 25 bp, Homo sapien
tctcatagactgacaaagacctcag

SEQ ID NO: 1773227 - DNA, 25 bp, Homo sapien
gctttcactccctaagggcttctca

SEQ ID NO: 1773228 - DNA, 25 bp, Homo sapien
tacggattcataggaaaacttccca

SEQ ID NO: 1773229 - DNA, 25 bp, Homo sapien
ttaatgcaatgccagtaatacggat

SEQ ID NO: 1773230 - DNA, 25 bp, Homo sapien
ccaagagtactccattgattggcag

SEQ ID NO: 1773231 - DNA, 25 bp, Homo sapien
gtactccattgattggcagcaggaa

SEQ ID NO: 1773232 - DNA, 25 bp, Homo sapien
gagtactccattgattggcagcagg

SEQ ID NO: 1773233 - DNA, 25 bp, Homo sapien
caagagtactccattgattggcagc

SEQ ID NO: 1773234 - DNA, 25 bp, Homo sapien
acacactgtacgattcaagccccat

SEQ ID NO: 1773235 - DNA, 25 bp, Homo sapien
caagccccatcggtctgaactagac

SEQ ID NO: 1773236 - DNA, 25 bp, Homo sapien
gaactagacctatgaagttgcgttg

SEQ ID NO: 1773237 - DNA, 25 bp, Homo sapien
gcatttactggacatccacacactg

SEQ ID NO: 1773238 - DNA, 25 bp, Homo sapien
tgaatacttcatggaatgctcagaa

SEQ ID NO: 1773239 - DNA, 25 bp, Homo sapien
cctgtgccagactgtatattggtga

SEQ ID NO: 1773240 - DNA, 25 bp, Homo sapien
gtgaaattctagtccctgtctcctg

SEQ ID NO: 1773241 - DNA, 25 bp, Homo sapien
tagtgagaatagagctagccctcct

SEQ ID NO: 1773242 - DNA, 25 bp, Homo sapien
ttttgtgctgtggtgatttcagttt

SEQ ID NO: 1773243 - DNA, 25 bp, Homo sapien
aatttaacttttgtgctgtggtgat

SEQ ID NO: 1773244 - DNA, 25 bp, Homo sapien
aatgtcagacatttgtagtcttttc

SEQ ID NO: 1773245 - DNA, 25 bp, Homo sapien
atgtgaacaaaatattggtgttata

SEQ ID NO: 1773246 - DNA, 25 bp, Homo sapien
taagacagtggatcactgactaaac

SEQ ID NO: 1773247 - DNA, 25 bp, Homo sapien
tgggatactaggctggatactttca

SEQ ID NO: 1773248 - DNA, 25 bp, Homo sapien
tcactgactaaacaggctagaaagg

SEQ ID NO: 1773249 - DNA, 25 bp, Homo sapien
tattgggtatctactgtgagtggga

SEQ ID NO: 1773250 - DNA, 25 bp, Homo sapien
ttaagaatatttggccgagcacgat

SEQ ID NO: 1773251 - DNA, 25 bp, Homo sapien
tgaggcttgccctaactaaaatggc

SEQ ID NO: 1773252 - DNA, 25 bp, Homo sapien
catagctctgcttagtaggcaaacc

SEQ ID NO: 1773253 - DNA, 25 bp, Homo sapien
tacctgtgttcaaaagactcagctg

SEQ ID NO: 1773254 - DNA, 25 bp, Homo sapien
ttttcccagatagccttccattttc

SEQ ID NO: 1773255 - DNA, 25 bp, Homo sapien
gatagccttccattttccactctgt

SEQ ID NO: 1773256 - DNA, 25 bp, Homo sapien
ccactctgttttcacttcatgttcc

SEQ ID NO: 1773257 - DNA, 25 bp, Homo sapien
tcatgttcctcatcctttctagcca

SEQ ID NO: 1773258 - DNA, 25 bp, Homo sapien
caacacccatacatgatcttttcct

SEQ ID NO: 1773259 - DNA, 25 bp, Homo sapien
tgtaaatgcattcgcaacacccata

SEQ ID NO: 1773260 - DNA, 25 bp, Homo sapien
tgagacattgggtgtttgtaaatgc

SEQ ID NO: 1773261 - DNA, 25 bp, Homo sapien
tagttgagacattgggtgtttgtaa

SEQ ID NO: 1773262 - DNA, 25 bp, Homo sapien
atttattacattgtatggcatcagt

SEQ ID NO: 1773263 - DNA, 25 bp, Homo sapien
tatttattacattgtatggcatcag

SEQ ID NO: 1773264 - DNA, 25 bp, Homo sapien
ctatttattacattgtatggcatca

SEQ ID NO: 1773265 - DNA, 25 bp, Homo sapien
tttattacattgtatggcatcagtt

SEQ ID NO: 1773266 - DNA, 25 bp, Homo sapien
tgaatagcaaacacccaaggcatcg

SEQ ID NO: 1773267 - DNA, 25 bp, Homo sapien
ctctgatatgggcaagtgaaaatga

SEQ ID NO: 1773268 - DNA, 25 bp, Homo sapien
caaggcatcgtcatctttacttttg

SEQ ID NO: 1773269 - DNA, 25 bp, Homo sapien
aactgaaaatgttctgctgaatagc

SEQ ID NO: 1773270 - DNA, 25 bp, Homo sapien
taaggaagagggattatagcactgg

SEQ ID NO: 1773271 - DNA, 25 bp, Homo sapien
tgtatgaagagtgggccttggccat

SEQ ID NO: 1773272 - DNA, 25 bp, Homo sapien
gactggaagtcatgaaccctgggct

SEQ ID NO: 1773273 - DNA, 25 bp, Homo sapien
tatgtgtaccaatctagtagcggag

SEQ ID NO: 1773274 - DNA, 25 bp, Homo sapien
gggccggcagagtcaattttcttgt

SEQ ID NO: 1773275 - DNA, 25 bp, Homo sapien
taggtctcattagggccggcagagt

SEQ ID NO: 1773276 - DNA, 25 bp, Homo sapien
agcacagttctaggtctcattaggg

SEQ ID NO: 1773277 - DNA, 25 bp, Homo sapien
ttgtttgaactgctaggggcaagtc

SEQ ID NO: 1773278 - DNA, 25 bp, Homo sapien
tactatgtaggaatgatgcatctgc

SEQ ID NO: 1773279 - DNA, 25 bp, Homo sapien
ggctatactatgtaggaatgatgca

SEQ ID NO: 1773280 - DNA, 25 bp, Homo sapien
cttgggctatactatgtaggaatga

SEQ ID NO: 1773281 - DNA, 25 bp, Homo sapien
tatgtaggaatgatgcatctgcaga

SEQ ID NO: 1773282 - DNA, 25 bp, Homo sapien
tgtctgtgcttgtggtcggtaactt

SEQ ID NO: 1773283 - DNA, 25 bp, Homo sapien
tgctgtctgccattccattcgccat

SEQ ID NO: 1773284 - DNA, 25 bp, Homo sapien
tgtggtcggtaacttttgctgctgt

SEQ ID NO: 1773285 - DNA, 25 bp, Homo sapien
caagccgctttcgttttcagtgtct

SEQ ID NO: 1773286 - DNA, 25 bp, Homo sapien
gccaagtattcttcctgccgtgaag

SEQ ID NO: 1773287 - DNA, 25 bp, Homo sapien
tcttcctgccgtgaagattagcctg

SEQ ID NO: 1773288 - DNA, 25 bp, Homo sapien
gggaagtttcattgccaagtattct

SEQ ID NO: 1773289 - DNA, 25 bp, Homo sapien
gccgtgaagattagcctgttagtta

SEQ ID NO: 1773290 - DNA, 25 bp, Homo sapien
cttcagctgtatattgagcaccttc

SEQ ID NO: 1773291 - DNA, 25 bp, Homo sapien
gtcttcagctgtatattgagcacct

SEQ ID NO: 1773292 - DNA, 25 bp, Homo sapien
cagtcttcagctgtatattgagcac

SEQ ID NO: 1773293 - DNA, 25 bp, Homo sapien
agtcttcagctgtatattgagcacc

SEQ ID NO: 1773294 - DNA, 25 bp, Homo sapien
cctgtgatcagtagacgttaaactc

SEQ ID NO: 1773295 - DNA, 25 bp, Homo sapien
gcactaagtcgattgtttcctgtac

SEQ ID NO: 1773296 - DNA, 25 bp, Homo sapien
cagttagtactctttctccttgagg

SEQ ID NO: 1773297 - DNA, 25 bp, Homo sapien
taataaagattcctcagactgtgca

SEQ ID NO: 1773298 - DNA, 25 bp, Homo sapien
tggcaggctgaggcagatggatcat

SEQ ID NO: 1773299 - DNA, 25 bp, Homo sapien
tgggtgtggttgcacacacctgtag

SEQ ID NO: 1773300 - DNA, 25 bp, Homo sapien
ttgaggtcaggagtttgagaccagc

SEQ ID NO: 1773301 - DNA, 25 bp, Homo sapien
ctggtcaacgtggtgaaaccctgtc

SEQ ID NO: 1773302 - DNA, 25 bp, Homo sapien
cccatcccagtaagtattatgtcct

SEQ ID NO: 1773303 - DNA, 25 bp, Homo sapien
tgtcctatctgggagtagcactcag

SEQ ID NO: 1773304 - DNA, 25 bp, Homo sapien
tttccccaatggttatagaatgaga

SEQ ID NO: 1773305 - DNA, 25 bp, Homo sapien
taatcaacaagataagagggatctc

SEQ ID NO: 1773306 - DNA, 25 bp, Homo sapien
tttgaacttctgtcttaaaagaggc

SEQ ID NO: 1773307 - DNA, 25 bp, Homo sapien
gaacttctgtcttaaaagaggccca

SEQ ID NO: 1773308 - DNA, 25 bp, Homo sapien
cttctgtcttaaaagaggcccacat

SEQ ID NO: 1773309 - DNA, 25 bp, Homo sapien
caggaaatggggattttgaacttct

SEQ ID NO: 1773310 - DNA, 25 bp, Homo sapien
ttgcttctgtagcccattgccctgt

SEQ ID NO: 1773311 - DNA, 25 bp, Homo sapien
tgcttatgaactgcctctcttgcct

SEQ ID NO: 1773312 - DNA, 25 bp, Homo sapien
ttgcctggactttgatcagccctct

SEQ ID NO: 1773313 - DNA, 25 bp, Homo sapien
ctgcagctgcttatgaactgcctct

SEQ ID NO: 1773314 - DNA, 25 bp, Homo sapien
cactggaggcttgttttcgtacact

SEQ ID NO: 1773315 - DNA, 25 bp, Homo sapien
tcactggaggcttgttttcgtacac

SEQ ID NO: 1773316 - DNA, 25 bp, Homo sapien
ctggaggcttgttttcgtacacttt

SEQ ID NO: 1773317 - DNA, 25 bp, Homo sapien
gtcactggaggcttgttttcgtaca

SEQ ID NO: 1773318 - DNA, 25 bp, Homo sapien
tgaggaggaaggtttactgacttca

SEQ ID NO: 1773319 - DNA, 25 bp, Homo sapien
ggcactttaatggtccgtaatggac

SEQ ID NO: 1773320 - DNA, 25 bp, Homo sapien
gggatagtctccaggcactttaatg

SEQ ID NO: 1773321 - DNA, 25 bp, Homo sapien
tggaccttcaatggccagggcagct

SEQ ID NO: 1773322 - DNA, 25 bp, Homo sapien
tttgactgaggaccatggctgtgcc

SEQ ID NO: 1773323 - DNA, 25 bp, Homo sapien
cagacggaaagaggagagtctggct

SEQ ID NO: 1773324 - DNA, 25 bp, Homo sapien
ccagacggaaagaggagagtctggc

SEQ ID NO: 1773325 - DNA, 25 bp, Homo sapien
tggctgctgtttggacattggcatg

SEQ ID NO: 1773326 - DNA, 25 bp, Homo sapien
ctggctgctgtttggacattggcat

SEQ ID NO: 1773327 - DNA, 25 bp, Homo sapien
ctcgtataaatccttacttgagtta

SEQ ID NO: 1773328 - DNA, 25 bp, Homo sapien
tggttcctaatgtagtaagcttcaa

SEQ ID NO: 1773329 - DNA, 25 bp, Homo sapien
cgatatcatgtggttcctaatgtag

SEQ ID NO: 1773330 - DNA, 25 bp, Homo sapien
tcatgtggttcctaatgtagtaagc

SEQ ID NO: 1773331 - DNA, 25 bp, Homo sapien
tttccgatatcatgtggttcctaat

SEQ ID NO: 1773332 - DNA, 25 bp, Homo sapien
cagagggtgatggagaagacgggaa

SEQ ID NO: 1773333 - DNA, 25 bp, Homo sapien
cttggctggcgagcgcatctgctgc

SEQ ID NO: 1773334 - DNA, 25 bp, Homo sapien
ggttcgcggtgcagatggagacgca

SEQ ID NO: 1773335 - DNA, 25 bp, Homo sapien
aacctacccagcttcgcttggctgg

SEQ ID NO: 1773336 - DNA, 25 bp, Homo sapien
gctcagagaagtccgtgaaccctgg

SEQ ID NO: 1773337 - DNA, 25 bp, Homo sapien
caagtggagcgtctcgctgtagccc

SEQ ID NO: 1773338 - DNA, 25 bp, Homo sapien
gggttctcggtcaagccgctcagag

SEQ ID NO: 1773339 - DNA, 25 bp, Homo sapien
cttctgccggagaacccaaaaggag

SEQ ID NO: 1773340 - DNA, 25 bp, Homo sapien
cggagccctgtaagatgtgttgaaa

SEQ ID NO: 1773341 - DNA, 25 bp, Homo sapien
gttgctcccgggcttgccctgtgcg

SEQ ID NO: 1773342 - DNA, 25 bp, Homo sapien
tgtgttgaaatgcggttctaaggac

SEQ ID NO: 1773343 - DNA, 25 bp, Homo sapien
gctctgggttgctcccgggcttgcc

SEQ ID NO: 1773344 - DNA, 25 bp, Homo sapien
caaactcggcatggatacgactgcg

SEQ ID NO: 1773345 - DNA, 25 bp, Homo sapien
tgtccccagagttcgtgccaggtgg

SEQ ID NO: 1773346 - DNA, 25 bp, Homo sapien
ccagttctccgcaggtgagtggccg

SEQ ID NO: 1773347 - DNA, 25 bp, Homo sapien
tgttcctctccgaagcttgctcggg

SEQ ID NO: 1773348 - DNA, 25 bp, Homo sapien
aatcagcaaccgctcggggggacct

SEQ ID NO: 1773349 - DNA, 25 bp, Homo sapien
gaactctcgcctctcaaattctgag

SEQ ID NO: 1773350 - DNA, 25 bp, Homo sapien
tctgcgcgcgtcctcggtcgtctgg

SEQ ID NO: 1773351 - DNA, 25 bp, Homo sapien
ggtcgcacggcttaccgaactctcg

SEQ ID NO: 1773352 - DNA, 25 bp, Homo sapien
tccagctgtaggcaaattgctcttc

SEQ ID NO: 1773353 - DNA, 25 bp, Homo sapien
tgttaattatatccagctgtaggca

SEQ ID NO: 1773354 - DNA, 25 bp, Homo sapien
cttgataaaacctttggagcatgca

SEQ ID NO: 1773355 - DNA, 25 bp, Homo sapien
ccaaattggcaatactgagctctca

SEQ ID NO: 1773356 - DNA, 25 bp, Homo sapien
taattttagccttaccatagatatt

SEQ ID NO: 1773357 - DNA, 25 bp, Homo sapien
tcaccctgactagtaattttagcct

SEQ ID NO: 1773358 - DNA, 25 bp, Homo sapien
gactagtaattttagccttaccata

SEQ ID NO: 1773359 - DNA, 25 bp, Homo sapien
atgttcaccctgactagtaatttta

SEQ ID NO: 1773360 - DNA, 25 bp, Homo sapien
aacatcactgtacttgggcgagcct

SEQ ID NO: 1773361 - DNA, 25 bp, Homo sapien
taggttatccattccctgaagcatt

SEQ ID NO: 1773362 - DNA, 25 bp, Homo sapien
tacaaatgatgcagttacactgttt

SEQ ID NO: 1773363 - DNA, 25 bp, Homo sapien
ggagaataggttatccattccctga

SEQ ID NO: 1773364 - DNA, 25 bp, Homo sapien
caaatgatgcagttacactgttttt

SEQ ID NO: 1773365 - DNA, 25 bp, Homo sapien
tggattgagactaaggatgtgaccc

SEQ ID NO: 1773366 - DNA, 25 bp, Homo sapien
aatgctggcagaagtatctcactca

SEQ ID NO: 1773367 - DNA, 25 bp, Homo sapien
tgtaagtccttgcaaagctactgct

SEQ ID NO: 1773368 - DNA, 25 bp, Homo sapien
ctcagcagctgtagactgggatttt

SEQ ID NO: 1773369 - DNA, 25 bp, Homo sapien
gcatgaggaagccccatgagcccat

SEQ ID NO: 1773370 - DNA, 25 bp, Homo sapien
gaattacaccatacatttgccacag

SEQ ID NO: 1773371 - DNA, 25 bp, Homo sapien
tgataccaaaagacatgcatgagga

SEQ ID NO: 1773372 - DNA, 25 bp, Homo sapien
taagctcatggactagaattacacc

SEQ ID NO: 1773373 - DNA, 25 bp, Homo sapien
tgaatgaaacattcccactggttgt

SEQ ID NO: 1773374 - DNA, 25 bp, Homo sapien
agtgaatgaaacattcccactggtt

SEQ ID NO: 1773375 - DNA, 25 bp, Homo sapien
cacgtgatggtccttttgtcattga

SEQ ID NO: 1773376 - DNA, 25 bp, Homo sapien
actggttgtccacgtgatggtcctt

SEQ ID NO: 1773377 - DNA, 25 bp, Homo sapien
ctgttctccatccaagccatcaaca

SEQ ID NO: 1773378 - DNA, 25 bp, Homo sapien
caacatctttctcaccatggttacc

SEQ ID NO: 1773379 - DNA, 25 bp, Homo sapien
tccatccaagccatcaacatctttc

SEQ ID NO: 1773380 - DNA, 25 bp, Homo sapien
aagccatcaacatctttctcaccat

SEQ ID NO: 1773381 - DNA, 25 bp, Homo sapien
cctatgctgtaacaaccaggtttga

SEQ ID NO: 1773382 - DNA, 25 bp, Homo sapien
ttgaaatcggcaaccctccagccat

SEQ ID NO: 1773383 - DNA, 25 bp, Homo sapien
ctgcttccttttgaaatcggcaacc

SEQ ID NO: 1773384 - DNA, 25 bp, Homo sapien
tagtatttcctagacaaggcaaggt

SEQ ID NO: 1773385 - DNA, 25 bp, Homo sapien
tccagccatccctagtatttcctag

SEQ ID NO: 1773386 - DNA, 25 bp, Homo sapien
attaccatggcaaaattggaagaat

SEQ ID NO: 1773387 - DNA, 25 bp, Homo sapien
atttggccatgtacatgcaaactta

SEQ ID NO: 1773388 - DNA, 25 bp, Homo sapien
acagggagttgttcatttggccatg

SEQ ID NO: 1773389 - DNA, 25 bp, Homo sapien
gccatgtacatgcaaacttagaaga

SEQ ID NO: 1773390 - DNA, 25 bp, Homo sapien
gagctcttcctagaaaaacccatgg

SEQ ID NO: 1773391 - DNA, 25 bp, Homo sapien
tggccctgctatcaatctgttcctg

SEQ ID NO: 1773392 - DNA, 25 bp, Homo sapien
tatcaacctcatgggcctctgtcaa

SEQ ID NO: 1773393 - DNA, 25 bp, Homo sapien
aaaatattggctagctctctatgcc

SEQ ID NO: 1773394 - DNA, 25 bp, Homo sapien
gatcagacagtatcggcgtgttcag

SEQ ID NO: 1773395 - DNA, 25 bp, Homo sapien
aatactaaccaagctggacggtgct

SEQ ID NO: 1773396 - DNA, 25 bp, Homo sapien
agctggacggtgcttagcctctgag

SEQ ID NO: 1773397 - DNA, 25 bp, Homo sapien
gttcagagtggaatggccacagaca

SEQ ID NO: 1773398 - DNA, 25 bp, Homo sapien
taaaatatgtggtttcaccaggaaa

SEQ ID NO: 1773399 - DNA, 25 bp, Homo sapien
gtggtttcaccaggaaagtcaagga

SEQ ID NO: 1773400 - DNA, 25 bp, Homo sapien
aatatgtggtttcaccaggaaagtc

SEQ ID NO: 1773401 - DNA, 25 bp, Homo sapien
tatgtggtttcaccaggaaagtcaa

SEQ ID NO: 1773402 - DNA, 25 bp, Homo sapien
cttcacaagctcaaggtcattagtc

SEQ ID NO: 1773403 - DNA, 25 bp, Homo sapien
caaacatgggaaattggcagatttt

SEQ ID NO: 1773404 - DNA, 25 bp, Homo sapien
taaaaatgtcgtgggcaaacatggg

SEQ ID NO: 1773405 - DNA, 25 bp, Homo sapien
tgatgaggtgtaaacaggagcagca

SEQ ID NO: 1773406 - DNA, 25 bp, Homo sapien
ggcagattttgtaactagactgatg

SEQ ID NO: 1773407 - DNA, 25 bp, Homo sapien
ctacccaacatccatgggcaatgct

SEQ ID NO: 1773408 - DNA, 25 bp, Homo sapien
ccatgggcaatgctgtcatctgtca

SEQ ID NO: 1773409 - DNA, 25 bp, Homo sapien
gctgtcatctgtcaatgttgaagga

SEQ ID NO: 1773410 - DNA, 25 bp, Homo sapien
tggaccatacttccctacccaacat

SEQ ID NO: 1773411 - DNA, 25 bp, Homo sapien
tcttacctctttatctcggcaattg

SEQ ID NO: 1773412 - DNA, 25 bp, Homo sapien
atcttcttacctctttatctcggca

SEQ ID NO: 1773413 - DNA, 25 bp, Homo sapien
ctttatctcggcaattgattttctc

SEQ ID NO: 1773414 - DNA, 25 bp, Homo sapien
tacctctttatctcggcaattgatt

SEQ ID NO: 1773415 - DNA, 25 bp, Homo sapien
cttactgtggaaatttgcaaaatgt

SEQ ID NO: 1773416 - DNA, 25 bp, Homo sapien
tggaaatttgcaaaatgtagtctgc

SEQ ID NO: 1773417 - DNA, 25 bp, Homo sapien
ctgtggaaatttgcaaaatgtagtc

SEQ ID NO: 1773418 - DNA, 25 bp, Homo sapien
tactgtggaaatttgcaaaatgtag

SEQ ID NO: 1773419 - DNA, 25 bp, Homo sapien
tgcaaacagctaggaacttttacct

SEQ ID NO: 1773420 - DNA, 25 bp, Homo sapien
tactagccgagggaaggtgccctct

SEQ ID NO: 1773421 - DNA, 25 bp, Homo sapien
gaacttactgctaggtaggctgctg

SEQ ID NO: 1773422 - DNA, 25 bp, Homo sapien
tgtgtacctagaagatccaagacat

SEQ ID NO: 1773423 - DNA, 25 bp, Homo sapien
ccaggacggccctctattaaaggat

SEQ ID NO: 1773424 - DNA, 25 bp, Homo sapien
ggatcattcctagcttgacctggta

SEQ ID NO: 1773425 - DNA, 25 bp, Homo sapien
ttccctctgagaccggatcattcct

SEQ ID NO: 1773426 - DNA, 25 bp, Homo sapien
gatcctcctttcctagagcgctcct

SEQ ID NO: 1773427 - DNA, 25 bp, Homo sapien
cctctggctttggccgggccgccgc

SEQ ID NO: 1773428 - DNA, 25 bp, Homo sapien
ccctctggctttggccgggccgccg

SEQ ID NO: 1773429 - DNA, 25 bp, Homo sapien
gggagccagaggagtcgctgccgcc

SEQ ID NO: 1773430 - DNA, 25 bp, Homo sapien
cctggccttggcttgtgagctgagc

SEQ ID NO: 1773431 - DNA, 25 bp, Homo sapien
cgcgaccggatccacttctcgggag

SEQ ID NO: 1773432 - DNA, 25 bp, Homo sapien
ccttggcttgtgagctgagcgagca

SEQ ID NO: 1773433 - DNA, 25 bp, Homo sapien
ctttgctgatgtgcctgtgactgcc

SEQ ID NO: 1773434 - DNA, 25 bp, Homo sapien
gctgcgcctgtacgcccccgaggcc

SEQ ID NO: 1773435 - DNA, 25 bp, Homo sapien
gctgatgtgcctgtgactgccgctg

SEQ ID NO: 1773436 - DNA, 25 bp, Homo sapien
ctgcggccgctgcgcctgtacgccc

SEQ ID NO: 1773437 - DNA, 25 bp, Homo sapien
aagtgaggaatctcggtcccggcaa

SEQ ID NO: 1773438 - DNA, 25 bp, Homo sapien
aagcaagacggcagtccacagacag

SEQ ID NO: 1773439 - DNA, 25 bp, Homo sapien
acagacagcaactctcggaagagtg

SEQ ID NO: 1773440 - DNA, 25 bp, Homo sapien
gagcgcactctctgaaggcgaagca

SEQ ID NO: 1773441 - DNA, 25 bp, Homo sapien
ctacactacgctctcatggcattga

SEQ ID NO: 1773442 - DNA, 25 bp, Homo sapien
tctttccaggtgtaagatagatccg

SEQ ID NO: 1773443 - DNA, 25 bp, Homo sapien
tgtaataatttgaacgcagaggcag

SEQ ID NO: 1773444 - DNA, 25 bp, Homo sapien
cacactgcagccaatcttttgaaaa

SEQ ID NO: 1773445 - DNA, 25 bp, Homo sapien
gcgtacaaaaatatcgttgatgcag

SEQ ID NO: 1773446 - DNA, 25 bp, Homo sapien
cactaaaactgtggccaacaagccc

SEQ ID NO: 1773447 - DNA, 25 bp, Homo sapien
gcaactttgactaccctatgaccac

SEQ ID NO: 1773448 - DNA, 25 bp, Homo sapien
catccataaccaggatagtggcaac

SEQ ID NO: 1773449 - DNA, 25 bp, Homo sapien
tctagatcttttaagttaaagctcc

SEQ ID NO: 1773450 - DNA, 25 bp, Homo sapien
cagatgccaatcaaatcaccccatg

SEQ ID NO: 1773451 - DNA, 25 bp, Homo sapien
gaaaacagatgccaatcaaatcacc

SEQ ID NO: 1773452 - DNA, 25 bp, Homo sapien
gccaatcaaatcaccccatgtgagt

SEQ ID NO: 1773453 - DNA, 25 bp, Homo sapien
tcaccccatgtgagttatctatatt

SEQ ID NO: 1773454 - DNA, 25 bp, Homo sapien
tagaggccttgtgagtggtttttaa

SEQ ID NO: 1773455 - DNA, 25 bp, Homo sapien
tattgtagaggccttgtgagtggtt

SEQ ID NO: 1773456 - DNA, 25 bp, Homo sapien
acatattgtagaggccttgtgagtg

SEQ ID NO: 1773457 - DNA, 25 bp, Homo sapien
tatctgacatattgtagaggccttg

SEQ ID NO: 1773458 - DNA, 25 bp, Homo sapien
gcaagagaccatacacatccaagga

SEQ ID NO: 1773459 - DNA, 25 bp, Homo sapien
cagtagtaacaaaacagacctgggc

SEQ ID NO: 1773460 - DNA, 25 bp, Homo sapien
ggtactgcgtttcttgacctccaga

SEQ ID NO: 1773461 - DNA, 25 bp, Homo sapien
tggctgataacttcaagcaagagac

SEQ ID NO: 1773462 - DNA, 25 bp, Homo sapien
tctatcgttgagtagaaattgtaac

SEQ ID NO: 1773463 - DNA, 25 bp, Homo sapien
ccgacagtatcatgatgttaaccat

SEQ ID NO: 1773464 - DNA, 25 bp, Homo sapien
tgcctacatccgacagtatcatgat

SEQ ID NO: 1773465 - DNA, 25 bp, Homo sapien
tagaaattgtaactgcctacatccg

SEQ ID NO: 1773466 - DNA, 25 bp, Homo sapien
acatacaatccaggaaagatcctat

SEQ ID NO: 1773467 - DNA, 25 bp, Homo sapien
tcctccacagcagacgctctgtcac

SEQ ID NO: 1773468 - DNA, 25 bp, Homo sapien
tcagaaacatacaatccaggaaaga

SEQ ID NO: 1773469 - DNA, 25 bp, Homo sapien
cacagcagacgctctgtcaccaaat

SEQ ID NO: 1773470 - DNA, 25 bp, Homo sapien
tcctccgggatctcaagaacagttg

SEQ ID NO: 1773471 - DNA, 25 bp, Homo sapien
atcatactctaaatatcttcctgtc

SEQ ID NO: 1773472 - DNA, 25 bp, Homo sapien
tgcctgacacagaattggtactatg

SEQ ID NO: 1773473 - DNA, 25 bp, Homo sapien
tatagacttataactgcaatagtcc

SEQ ID NO: 1773474 - DNA, 25 bp, Homo sapien
caccgtgcgtgagccgaagcagggt

SEQ ID NO: 1773475 - DNA, 25 bp, Homo sapien
tgggtgcgcgcaccgtgcgtgagcc

SEQ ID NO: 1773476 - DNA, 25 bp, Homo sapien
ggtgcgcgcaccgtgcgtgagccga

SEQ ID NO: 1773477 - DNA, 25 bp, Homo sapien
ccgtgcgtgagccgaagcagggtga

SEQ ID NO: 1773478 - DNA, 25 bp, Homo sapien
gaataggaacagctccggtctacag

SEQ ID NO: 1773479 - DNA, 25 bp, Homo sapien
agacaggtgatttctgcttttccat

SEQ ID NO: 1773480 - DNA, 25 bp, Homo sapien
ctttaggggaggagccaagatggcc

SEQ ID NO: 1773481 - DNA, 25 bp, Homo sapien
ctcccagcgtgagcgacgcagaaga

SEQ ID NO: 1773482 - DNA, 25 bp, Homo sapien
tgggctgacggttatatgggtatat

SEQ ID NO: 1773483 - DNA, 25 bp, Homo sapien
tcattcaacggaaaatgttagcgat

SEQ ID NO: 1773484 - DNA, 25 bp, Homo sapien
cagtcttaatgtcatcaacaggcca

SEQ ID NO: 1773485 - DNA, 25 bp, Homo sapien
ttctaagacagatgaaactaatcag

SEQ ID NO: 1773486 - DNA, 25 bp, Homo sapien
catggttggaactggactaggatgt

SEQ ID NO: 1773487 - DNA, 25 bp, Homo sapien
taaattgaggtgtccatgaaagctg

SEQ ID NO: 1773488 - DNA, 25 bp, Homo sapien
tgggcccgggagctataatgaactt

SEQ ID NO: 1773489 - DNA, 25 bp, Homo sapien
tagagctactcataaataggtctgg

SEQ ID NO: 1773490 - DNA, 25 bp, Homo sapien
agcaggttagcaactaaaagagaga

SEQ ID NO: 1773491 - DNA, 25 bp, Homo sapien
ggccaaatagtgagtacatagccat

SEQ ID NO: 1773492 - DNA, 25 bp, Homo sapien
caaaacattttgacggaggcaaata

SEQ ID NO: 1773493 - DNA, 25 bp, Homo sapien
gagagaaaattcgtatgtgtatgta

SEQ ID NO: 1773494 - DNA, 25 bp, Homo sapien
ctcttccaagataaccatggactaa

SEQ ID NO: 1773495 - DNA, 25 bp, Homo sapien
cctcttccaagataaccatggacta

SEQ ID NO: 1773496 - DNA, 25 bp, Homo sapien
taagcagtgttcagtgggctgtact

SEQ ID NO: 1773497 - DNA, 25 bp, Homo sapien
gagaatcagaaacgctttgcataga

SEQ ID NO: 1773498 - DNA, 25 bp, Homo sapien
cctacacaactggaagacatgtctc

SEQ ID NO: 1773499 - DNA, 25 bp, Homo sapien
ctggcttgtggtaaactgctggtaa

SEQ ID NO: 1773500 - DNA, 25 bp, Homo sapien
agtaatactcccatcgagtgtagtt

SEQ ID NO: 1773501 - DNA, 25 bp, Homo sapien
cccatcgagtgtagttatataagac

SEQ ID NO: 1773502 - DNA, 25 bp, Homo sapien
gtgtagttatataagacactgccaa

SEQ ID NO: 1773503 - DNA, 25 bp, Homo sapien
ttcacactgtttaagtaatactccc

SEQ ID NO: 1773504 - DNA, 25 bp, Homo sapien
ggctattatgctacccacttaagac

SEQ ID NO: 1773505 - DNA, 25 bp, Homo sapien
aataactggcagactatccacttgc

SEQ ID NO: 1773506 - DNA, 25 bp, Homo sapien
tatcatcaccaagggagatgggcgg

SEQ ID NO: 1773507 - DNA, 25 bp, Homo sapien
cagcacagcagttagataatagaga

SEQ ID NO: 1773508 - DNA, 25 bp, Homo sapien
aacaaatgtgaggataatgtcaggg

SEQ ID NO: 1773509 - DNA, 25 bp, Homo sapien
aaagaatcaggtggatcaaggtaga

SEQ ID NO: 1773510 - DNA, 25 bp, Homo sapien
gccaacaggtttcccatttgacttg

SEQ ID NO: 1773511 - DNA, 25 bp, Homo sapien
ggaaagagaggtcaacactccctag

SEQ ID NO: 1773512 - DNA, 25 bp, Homo sapien
ttcacaggaatcattaacctaaatt

SEQ ID NO: 1773513 - DNA, 25 bp, Homo sapien
ttttacaactatgtaggaagttgta

SEQ ID NO: 1773514 - DNA, 25 bp, Homo sapien
tcacaggaatcattaacctaaattt

SEQ ID NO: 1773515 - DNA, 25 bp, Homo sapien
ctatgtaggaagttgtaatataata

SEQ ID NO: 1773516 - DNA, 25 bp, Homo sapien
tggcaatgattttcattctcctcca

SEQ ID NO: 1773517 - DNA, 25 bp, Homo sapien
ggcaatgattttcattctcctccat

SEQ ID NO: 1773518 - DNA, 25 bp, Homo sapien
ctggcaatgattttcattctcctcc

SEQ ID NO: 1773519 - DNA, 25 bp, Homo sapien
tcccaagaagaaactcggcaaactc

SEQ ID NO: 1773520 - DNA, 25 bp, Homo sapien
cggcaaactctcataattaacactg

SEQ ID NO: 1773521 - DNA, 25 bp, Homo sapien
ctctttcccgcatcctttattctca

SEQ ID NO: 1773522 - DNA, 25 bp, Homo sapien
gaaactcggcaaactctcataatta

SEQ ID NO: 1773523 - DNA, 25 bp, Homo sapien
ccaatgattcgcgtttcaggtttat

SEQ ID NO: 1773524 - DNA, 25 bp, Homo sapien
tctgacttaggcatctagatgatta

SEQ ID NO: 1773525 - DNA, 25 bp, Homo sapien
cagttcactaagtctttgtggagga

SEQ ID NO: 1773526 - DNA, 25 bp, Homo sapien
gattagaatgtccttcaccaagtag

SEQ ID NO: 1773527 - DNA, 25 bp, Homo sapien
tgctgaaaggaagtagatccaactc

SEQ ID NO: 1773528 - DNA, 25 bp, Homo sapien
tgggtgacagaagccgaccaaagac

SEQ ID NO: 1773529 - DNA, 25 bp, Homo sapien
ccaagccctggaaggcatttttaat

SEQ ID NO: 1773530 - DNA, 25 bp, Homo sapien
ccaaagacttttcattagggcttga

SEQ ID NO: 1773531 - DNA, 25 bp, Homo sapien
gaagtgttcaggctagtaacagcac

SEQ ID NO: 1773532 - DNA, 25 bp, Homo sapien
aatctgtattttacaacagcaccct

SEQ ID NO: 1773533 - DNA, 25 bp, Homo sapien
atatgcacaagcaaccatctgaccc

SEQ ID NO: 1773534 - DNA, 25 bp, Homo sapien
actgcatggtggtttgaagtgttca

SEQ ID NO: 1773535 - DNA, 25 bp, Homo sapien
ctcctctccgcatcaggcacccact

SEQ ID NO: 1773536 - DNA, 25 bp, Homo sapien
aggcacccactcccatggccctttc

SEQ ID NO: 1773537 - DNA, 25 bp, Homo sapien
cctcctctccgcatcaggcacccac

SEQ ID NO: 1773538 - DNA, 25 bp, Homo sapien
atcaggcacccactcccatggccct

SEQ ID NO: 1773539 - DNA, 25 bp, Homo sapien
gcgccgtttcttaagccggtctgaa

SEQ ID NO: 1773540 - DNA, 25 bp, Homo sapien
cgcgcacggtgcgcacacacactgg

SEQ ID NO: 1773541 - DNA, 25 bp, Homo sapien
cttaagccggtctgaaaagcgcaat

SEQ ID NO: 1773542 - DNA, 25 bp, Homo sapien
cgcacggtgcgcacacacactggcc

SEQ ID NO: 1773543 - DNA, 25 bp, Homo sapien
ggaaagaggatcctgccatataatc

SEQ ID NO: 1773544 - DNA, 25 bp, Homo sapien
gaaagaggatcctgccatataatca

SEQ ID NO: 1773545 - DNA, 25 bp, Homo sapien
gggaaagaggatcctgccatataat

SEQ ID NO: 1773546 - DNA, 25 bp, Homo sapien
aaagaggatcctgccatataatcaa

SEQ ID NO: 1773547 - DNA, 25 bp, Homo sapien
caggtatcaaaagaccgtgttctac

SEQ ID NO: 1773548 - DNA, 25 bp, Homo sapien
caaggcaactagatttgacaaagtc

SEQ ID NO: 1773549 - DNA, 25 bp, Homo sapien
ttgggtatctcagatgacaggtatc

SEQ ID NO: 1773550 - DNA, 25 bp, Homo sapien
taatggcgttagaaaaaacacttca

SEQ ID NO: 1773551 - DNA, 25 bp, Homo sapien
cagggctggacacataaagggattc

SEQ ID NO: 1773552 - DNA, 25 bp, Homo sapien
gaaggtctagcttccttgctggaac

SEQ ID NO: 1773553 - DNA, 25 bp, Homo sapien
tatattctcagagcctaccacaggg

SEQ ID NO: 1773554 - DNA, 25 bp, Homo sapien
ggaacgtaagcttcatgatgggaga

SEQ ID NO: 1773555 - DNA, 25 bp, Homo sapien
aatatttatcctgctatttcatgcc

SEQ ID NO: 1773556 - DNA, 25 bp, Homo sapien
tacatggctgatccttatcctttct

SEQ ID NO: 1773557 - DNA, 25 bp, Homo sapien
tcatcttacttttggtagacaatat

SEQ ID NO: 1773558 - DNA, 25 bp, Homo sapien
tactgtttacaataatacatggctg

SEQ ID NO: 1773559 - DNA, 25 bp, Homo sapien
ttcttggctgtccaacattcatcct

SEQ ID NO: 1773560 - DNA, 25 bp, Homo sapien
ttggctgtccaacattcatcctcca

SEQ ID NO: 1773561 - DNA, 25 bp, Homo sapien
cttggctgtccaacattcatcctcc

SEQ ID NO: 1773562 - DNA, 25 bp, Homo sapien
tcttggctgtccaacattcatcctc

SEQ ID NO: 1773563 - DNA, 25 bp, Homo sapien
agattcgacactgcgggttcctcac

SEQ ID NO: 1773564 - DNA, 25 bp, Homo sapien
cagggacatgttctaccaatttgca

SEQ ID NO: 1773565 - DNA, 25 bp, Homo sapien
cattggtcgtgataagagcattaga

SEQ ID NO: 1773566 - DNA, 25 bp, Homo sapien
gagcattagaagcaagattcaggac

SEQ ID NO: 1773567 - DNA, 25 bp, Homo sapien
agctatttatggtattatagtccta

SEQ ID NO: 1773568 - DNA, 25 bp, Homo sapien
attatagtcctattccagatatgga

SEQ ID NO: 1773569 - DNA, 25 bp, Homo sapien
catgaagactatgttttaagctatt

SEQ ID NO: 1773570 - DNA, 25 bp, Homo sapien
cagatttgtgaagatttgtattaca

SEQ ID NO: 1773571 - DNA, 25 bp, Homo sapien
ccttacagaagctttttgcggccag

SEQ ID NO: 1773572 - DNA, 25 bp, Homo sapien
gatgatggcacatgaaactctatcc

SEQ ID NO: 1773573 - DNA, 25 bp, Homo sapien
tcacccagacatataagaacaggac

SEQ ID NO: 1773574 - DNA, 25 bp, Homo sapien
tgtgacctttgttgcagctcccttc

SEQ ID NO: 1773575 - DNA, 25 bp, Homo sapien
ccattcttaatactgggactctgcc

SEQ ID NO: 1773576 - DNA, 25 bp, Homo sapien
tgtaaatccagggtaattgtcacat

SEQ ID NO: 1773577 - DNA, 25 bp, Homo sapien
atagcatttgtaatcgggtgtctct

SEQ ID NO: 1773578 - DNA, 25 bp, Homo sapien
tgtcacataatggtattcgattcca

SEQ ID NO: 1773579 - DNA, 25 bp, Homo sapien
gatataagctgcagcactgagcccc

SEQ ID NO: 1773580 - DNA, 25 bp, Homo sapien
catatcccgaggaggcccatatggg

SEQ ID NO: 1773581 - DNA, 25 bp, Homo sapien
tcttgaatatatgcagccctcacca

SEQ ID NO: 1773582 - DNA, 25 bp, Homo sapien
gaaggcaggtctaccgtgcaatcca

SEQ ID NO: 1773583 - DNA, 25 bp, Homo sapien
tagttttgagggatagaccaggaag

SEQ ID NO: 1773584 - DNA, 25 bp, Homo sapien
aattgcttattgaggagaagactcc

SEQ ID NO: 1773585 - DNA, 25 bp, Homo sapien
gagtgtgatctctgtagctgtaaga

SEQ ID NO: 1773586 - DNA, 25 bp, Homo sapien
cttcaagactgaaaattggatcacc

SEQ ID NO: 1773587 - DNA, 25 bp, Homo sapien
cctgcattgatagatgagaagttct

SEQ ID NO: 1773588 - DNA, 25 bp, Homo sapien
cttcaaaacgaagacttgcaaaaga

SEQ ID NO: 1773589 - DNA, 25 bp, Homo sapien
aacgaagacttgcaaaagagagcat

SEQ ID NO: 1773590 - DNA, 25 bp, Homo sapien
tgatagatgagaagttctaccaaaa

SEQ ID NO: 1773591 - DNA, 25 bp, Homo sapien
gagatcacaggtacccactaagaaa

SEQ ID NO: 1773592 - DNA, 25 bp, Homo sapien
tagcaaagcatattagagatcacag

SEQ ID NO: 1773593 - DNA, 25 bp, Homo sapien
tcttttctaaagacacaaccaggga

SEQ ID NO: 1773594 - DNA, 25 bp, Homo sapien
tatctcagggtaaacattaagccac

SEQ ID NO: 1773595 - DNA, 25 bp, Homo sapien
tgaatgcatgcatgcttgagagcca

SEQ ID NO: 1773596 - DNA, 25 bp, Homo sapien
gaatgcatgcatgcttgagagccat

SEQ ID NO: 1773597 - DNA, 25 bp, Homo sapien
ttgaatgcatgcatgcttgagagcc

SEQ ID NO: 1773598 - DNA, 25 bp, Homo sapien
tcaagagagcgttccaaaatccagt

SEQ ID NO: 1773599 - DNA, 25 bp, Homo sapien
catctttggcatatgacggtggccc

SEQ ID NO: 1773600 - DNA, 25 bp, Homo sapien
tgtcacagcatgatactgccagggc

SEQ ID NO: 1773601 - DNA, 25 bp, Homo sapien
tattgtaaagcgttaggcactccgt

SEQ ID NO: 1773602 - DNA, 25 bp, Homo sapien
tgaacccagttctctaacatttgtt

SEQ ID NO: 1773603 - DNA, 25 bp, Homo sapien
agctctttcttggtagtagttgaac

SEQ ID NO: 1773604 - DNA, 25 bp, Homo sapien
ggtagtagttgaacccagttctcta

SEQ ID NO: 1773605 - DNA, 25 bp, Homo sapien
catttgttgatctcttgaaatcaat

SEQ ID NO: 1773606 - DNA, 25 bp, Homo sapien
tacagcctcacttatgtgcacaaag

SEQ ID NO: 1773607 - DNA, 25 bp, Homo sapien
ttcacacaagaagtaacaggtccac

SEQ ID NO: 1773608 - DNA, 25 bp, Homo sapien
aaatgcttgtgtgcctatctgtaca

SEQ ID NO: 1773609 - DNA, 25 bp, Homo sapien
caatggccaagagtggattccatga

SEQ ID NO: 1773610 - DNA, 25 bp, Homo sapien
gactacctggcaacaaatacggatg

SEQ ID NO: 1773611 - DNA, 25 bp, Homo sapien
tacttggcacaaggcatgtgatcgg

SEQ ID NO: 1773612 - DNA, 25 bp, Homo sapien
catgattgtggctgagcacgcagac

SEQ ID NO: 1773613 - DNA, 25 bp, Homo sapien
acttttgtgtggcaacgggccgcct

SEQ ID NO: 1773614 - DNA, 25 bp, Homo sapien
tgaaaaagattgcaaagggtctggg

SEQ ID NO: 1773615 - DNA, 25 bp, Homo sapien
ggaatgacacttaacgtgtacaagg

SEQ ID NO: 1773616 - DNA, 25 bp, Homo sapien
gctgctgacagaacatatgagactt

SEQ ID NO: 1773617 - DNA, 25 bp, Homo sapien
gcaatttagcctgacacagcttggt

SEQ ID NO: 1773618 - DNA, 25 bp, Homo sapien
aaggtctaagcacacatttcccaaa

SEQ ID NO: 1773619 - DNA, 25 bp, Homo sapien
ggaataattcaattaagctagtaac

SEQ ID NO: 1773620 - DNA, 25 bp, Homo sapien
aaaatctgcaatacaccattattaa

SEQ ID NO: 1773621 - DNA, 25 bp, Homo sapien
gccctgacgctgtttatttagtaac

SEQ ID NO: 1773622 - DNA, 25 bp, Homo sapien
ccatctcctctttatcgtcctcctg

SEQ ID NO: 1773623 - DNA, 25 bp, Homo sapien
atctcctctttatcgtcctcctgtt

SEQ ID NO: 1773624 - DNA, 25 bp, Homo sapien
ctcctctttatcgtcctcctgttgc

SEQ ID NO: 1773625 - DNA, 25 bp, Homo sapien
cttctggaatagtctttactgtttg

SEQ ID NO: 1773626 - DNA, 25 bp, Homo sapien
ggtattatgctttcgatacctaaca

SEQ ID NO: 1773627 - DNA, 25 bp, Homo sapien
caaatatgactgtatcgttgacaac

SEQ ID NO: 1773628 - DNA, 25 bp, Homo sapien
aaatggcaacttgaactgttcaaca

SEQ ID NO: 1773629 - DNA, 25 bp, Homo sapien
ccctaagcttagacttaacaggtct

SEQ ID NO: 1773630 - DNA, 25 bp, Homo sapien
gaaactaattctggtgtcacaaaga

SEQ ID NO: 1773631 - DNA, 25 bp, Homo sapien
tgagaaactaattctggtgtcacaa

SEQ ID NO: 1773632 - DNA, 25 bp, Homo sapien
tctggtgtcacaaagaatagactca

SEQ ID NO: 1773633 - DNA, 25 bp, Homo sapien
aattctggtgtcacaaagaatagac

SEQ ID NO: 1773634 - DNA, 25 bp, Homo sapien
tagcgagcggaggtaaattctagca

SEQ ID NO: 1773635 - DNA, 25 bp, Homo sapien
tggagaaggatcatcggcacttggt

SEQ ID NO: 1773636 - DNA, 25 bp, Homo sapien
aatctcaggcgaatatagcgagcgg

SEQ ID NO: 1773637 - DNA, 25 bp, Homo sapien
caagtcagcattcagtgtgcggatc

SEQ ID NO: 1773638 - DNA, 25 bp, Homo sapien
ctgcaaaaagcaatccagagagaaa

SEQ ID NO: 1773639 - DNA, 25 bp, Homo sapien
gcaaaaagcaatccagagagaaatc

SEQ ID NO: 1773640 - DNA, 25 bp, Homo sapien
tgcaaaaagcaatccagagagaaat

SEQ ID NO: 1773641 - DNA, 25 bp, Homo sapien
gcagatgcacatccctccaactgaa

SEQ ID NO: 1773642 - DNA, 25 bp, Homo sapien
gaaatatccttgaccgagtagtaat

SEQ ID NO: 1773643 - DNA, 25 bp, Homo sapien
tgtcgctggatcaagtggacaagcc

SEQ ID NO: 1773644 - DNA, 25 bp, Homo sapien
tggacaagccctggcatgaccatag

SEQ ID NO: 1773645 - DNA, 25 bp, Homo sapien
actgatcacagctatcgccacatgt

SEQ ID NO: 1773646 - DNA, 25 bp, Homo sapien
tttagttagaaaagttccagctctc

SEQ ID NO: 1773647 - DNA, 25 bp, Homo sapien
acatgtgttatgctcacactcacag

SEQ ID NO: 1773648 - DNA, 25 bp, Homo sapien
acagctatcgccacatgtgttatgc

SEQ ID NO: 1773649 - DNA, 25 bp, Homo sapien
gctttcaggaatgtactcattgctg

SEQ ID NO: 1773650 - DNA, 25 bp, Homo sapien
tatggctaagatccccatcttgaat

SEQ ID NO: 1773651 - DNA, 25 bp, Homo sapien
ttttatgtatggctttatggctaag

SEQ ID NO: 1773652 - DNA, 25 bp, Homo sapien
tacttaagctttcaggaatgtactc

SEQ ID NO: 1773653 - DNA, 25 bp, Homo sapien
tgtactttccacgtatattcaaact

SEQ ID NO: 1773654 - DNA, 25 bp, Homo sapien
tgtctcgcagtttataccagcagtg

SEQ ID NO: 1773655 - DNA, 25 bp, Homo sapien
gaagccatcagtacatgtctcgcag

SEQ ID NO: 1773656 - DNA, 25 bp, Homo sapien
tgggtacaattaatgcagacacccc

SEQ ID NO: 1773657 - DNA, 25 bp, Homo sapien
caagctctgggtactgaattgcctg

SEQ ID NO: 1773658 - DNA, 25 bp, Homo sapien
cagtcaagctctgggtactgaattg

SEQ ID NO: 1773659 - DNA, 25 bp, Homo sapien
gtcaagctctgggtactgaattgcc

SEQ ID NO: 1773660 - DNA, 25 bp, Homo sapien
aagctctgggtactgaattgcctgt

SEQ ID NO: 1773661 - DNA, 25 bp, Homo sapien
actagagactcagatagtttcacta

SEQ ID NO: 1773662 - DNA, 25 bp, Homo sapien
tcactaggaaattttatcaagcatt

SEQ ID NO: 1773663 - DNA, 25 bp, Homo sapien
aaacctatctaaccctatgtctaat

SEQ ID NO: 1773664 - DNA, 25 bp, Homo sapien
tagccaatacaatgcacgaagaaaa

SEQ ID NO: 1773665 - DNA, 25 bp, Homo sapien
tctgcattgtattctccgaaatgtc

SEQ ID NO: 1773666 - DNA, 25 bp, Homo sapien
gaatagtgtggtgaaatctcgggcc

SEQ ID NO: 1773667 - DNA, 25 bp, Homo sapien
ccgaaatgtcctgtagagatgataa

SEQ ID NO: 1773668 - DNA, 25 bp, Homo sapien
gttatcatggttaaccacagttcga

SEQ ID NO: 1773669 - DNA, 25 bp, Homo sapien
gatcactcagcaagtttattactaa

SEQ ID NO: 1773670 - DNA, 25 bp, Homo sapien
cttcatggtgatcactcagcaagtt

SEQ ID NO: 1773671 - DNA, 25 bp, Homo sapien
ggtgatcactcagcaagtttattac

SEQ ID NO: 1773672 - DNA, 25 bp, Homo sapien
catggtgatcactcagcaagtttat

SEQ ID NO: 1773673 - DNA, 25 bp, Homo sapien
gttttccactaatctgtcctaacaa

SEQ ID NO: 1773674 - DNA, 25 bp, Homo sapien
ctggagttttccactaatctgtcct

SEQ ID NO: 1773675 - DNA, 25 bp, Homo sapien
gagttttccactaatctgtcctaac

SEQ ID NO: 1773676 - DNA, 25 bp, Homo sapien
ggagttttccactaatctgtcctaa

SEQ ID NO: 1773677 - DNA, 25 bp, Homo sapien
ccattatgaagttgggactgtgcac

SEQ ID NO: 1773678 - DNA, 25 bp, Homo sapien
gaaattcagtggaaagcaaccgctg

SEQ ID NO: 1773679 - DNA, 25 bp, Homo sapien
gagttttcaggtgctaccaaccata

SEQ ID NO: 1773680 - DNA, 25 bp, Homo sapien
ctgtgcacagaataggtaaggcata

SEQ ID NO: 1773681 - DNA, 25 bp, Homo sapien
catccttgacacagacttcatttaa

SEQ ID NO: 1773682 - DNA, 25 bp, Homo sapien
tttaaggaaccaattggatcgcaat

SEQ ID NO: 1773683 - DNA, 25 bp, Homo sapien
cgtcgagcatgtttctcatccttga

SEQ ID NO: 1773684 - DNA, 25 bp, Homo sapien
attggatcgcaatgacatggctggc

SEQ ID NO: 1773685 - DNA, 25 bp, Homo sapien
agtgtagcccctggcacaccgatca

SEQ ID NO: 1773686 - DNA, 25 bp, Homo sapien
gcagtccgggtagccagtgtagccc

SEQ ID NO: 1773687 - DNA, 25 bp, Homo sapien
tttttgctccctaacccactgcagt

SEQ ID NO: 1773688 - DNA, 25 bp, Homo sapien
cagttacaggctttgcagtccgggt

SEQ ID NO: 1773689 - DNA, 25 bp, Homo sapien
tgggtcaccacacgtagaatagatt

SEQ ID NO: 1773690 - DNA, 25 bp, Homo sapien
gaaaaataaccttctgtcttgacag

SEQ ID NO: 1773691 - DNA, 25 bp, Homo sapien
aaattgcttaatgccaaggaaatca

SEQ ID NO: 1773692 - DNA, 25 bp, Homo sapien
tagattatggatacttccagaagtc

SEQ ID NO: 1773693 - DNA, 25 bp, Homo sapien
tcaacattatgagctgcgtccatgt

SEQ ID NO: 1773694 - DNA, 25 bp, Homo sapien
atccttcaacattatgagctgcgtc

SEQ ID NO: 1773695 - DNA, 25 bp, Homo sapien
ttcaacattatgagctgcgtccatg

SEQ ID NO: 1773696 - DNA, 25 bp, Homo sapien
ccttcaacattatgagctgcgtcca

SEQ ID NO: 1773697 - DNA, 25 bp, Homo sapien
tcctcttgcaaattgaagaagccgg

SEQ ID NO: 1773698 - DNA, 25 bp, Homo sapien
catctgtttgaaacccctgaacaga

SEQ ID NO: 1773699 - DNA, 25 bp, Homo sapien
tttgccataggtccagtaggaactc

SEQ ID NO: 1773700 - DNA, 25 bp, Homo sapien
gaagccggatttgcaacgactacag

SEQ ID NO: 1773701 - DNA, 25 bp, Homo sapien
agaacaacgatgaaagcaacaaaga

SEQ ID NO: 1773702 - DNA, 25 bp, Homo sapien
gaagttcactatcagaaactgttca

SEQ ID NO: 1773703 - DNA, 25 bp, Homo sapien
tgttcatacaaaagaacaacgatga

SEQ ID NO: 1773704 - DNA, 25 bp, Homo sapien
ttcttcctgtaactttatgtagaag

SEQ ID NO: 1773705 - DNA, 25 bp, Homo sapien
tcatgttcctggtcgtgtccacttt

SEQ ID NO: 1773706 - DNA, 25 bp, Homo sapien
tggtcgtgtccacttttggaaatta

SEQ ID NO: 1773707 - DNA, 25 bp, Homo sapien
ctctttcatgttcctggtcgtgtcc

SEQ ID NO: 1773708 - DNA, 25 bp, Homo sapien
tcctggtcgtgtccacttttggaaa

SEQ ID NO: 1773709 - DNA, 25 bp, Homo sapien
gggcctccgcgttactgatgctgat

SEQ ID NO: 1773710 - DNA, 25 bp, Homo sapien
aggaaggtcagtcagataccagcca

SEQ ID NO: 1773711 - DNA, 25 bp, Homo sapien
agccactcgaatgcggccaggaagg

SEQ ID NO: 1773712 - DNA, 25 bp, Homo sapien
tctgctgaggtgagtccaagtcgtc

SEQ ID NO: 1773713 - DNA, 25 bp, Homo sapien
tagcgggaagcaagcgtggacttac

SEQ ID NO: 1773714 - DNA, 25 bp, Homo sapien
cagtcagttaaagcagaatagcggg

SEQ ID NO: 1773715 - DNA, 25 bp, Homo sapien
gatttagctggttctggcaatccaa

SEQ ID NO: 1773716 - DNA, 25 bp, Homo sapien
gatgccgtggctctttaaggtcttg

SEQ ID NO: 1773717 - DNA, 25 bp, Homo sapien
tggttctgattcgaacagcaattac

SEQ ID NO: 1773718 - DNA, 25 bp, Homo sapien
caatggttctgattcgaacagcaat

SEQ ID NO: 1773719 - DNA, 25 bp, Homo sapien
gcaattactggtaaagaatttagcc

SEQ ID NO: 1773720 - DNA, 25 bp, Homo sapien
ctgattcgaacagcaattactggta

SEQ ID NO: 1773721 - DNA, 25 bp, Homo sapien
caaactgtttctgaatagctgtagc

SEQ ID NO: 1773722 - DNA, 25 bp, Homo sapien
gcaatgttccagtagcacttagttt

SEQ ID NO: 1773723 - DNA, 25 bp, Homo sapien
tagtttactagggcagtaaattatc

SEQ ID NO: 1773724 - DNA, 25 bp, Homo sapien
taagcaaatgactgttgcaatgttc

SEQ ID NO: 1773725 - DNA, 25 bp, Homo sapien
gactataggtattcttggcaactat

SEQ ID NO: 1773726 - DNA, 25 bp, Homo sapien
ggtattcttggcaactatatgaaca

SEQ ID NO: 1773727 - DNA, 25 bp, Homo sapien
cttggcaactatatgaacaaattta

SEQ ID NO: 1773728 - DNA, 25 bp, Homo sapien
taaactagactataggtattcttgg

SEQ ID NO: 1773729 - DNA, 25 bp, Homo sapien
aaagtaggacatcttgaagcgaggt

SEQ ID NO: 1773730 - DNA, 25 bp, Homo sapien
taagttacacattggttcggcccag

SEQ ID NO: 1773731 - DNA, 25 bp, Homo sapien
tgcaggcaaagacatacaccagtac

SEQ ID NO: 1773732 - DNA, 25 bp, Homo sapien
aagatgactgggttacagcttggcg

SEQ ID NO: 1773733 - DNA, 25 bp, Homo sapien
cactacaaggaattaagctgttgca

SEQ ID NO: 1773734 - DNA, 25 bp, Homo sapien
gctgtcagcaggattggttctttat

SEQ ID NO: 1773735 - DNA, 25 bp, Homo sapien
gccaggtttagaattgacataatac

SEQ ID NO: 1773736 - DNA, 25 bp, Homo sapien
tgggtctgatctattgcaagtggca

SEQ ID NO: 1773737 - DNA, 25 bp, Homo sapien
catcacatttcagttggaggcccta

SEQ ID NO: 1773738 - DNA, 25 bp, Homo sapien
tctcagacacagctaatatagaggg

SEQ ID NO: 1773739 - DNA, 25 bp, Homo sapien
tcgatgtgcctcaaggagataagca

SEQ ID NO: 1773740 - DNA, 25 bp, Homo sapien
caattccgtcagctttcgatgtgcc

SEQ ID NO: 1773741 - DNA, 25 bp, Homo sapien
tgtgagcaatctccaagaaaacctt

SEQ ID NO: 1773742 - DNA, 25 bp, Homo sapien
gacaccatcttgagtactgcatatg

SEQ ID NO: 1773743 - DNA, 25 bp, Homo sapien
taataaaccctgcagaatcccaacc

SEQ ID NO: 1773744 - DNA, 25 bp, Homo sapien
taaagcctgtaaatatcttcccctg

SEQ ID NO: 1773745 - DNA, 25 bp, Homo sapien
cgtaaccggcatctgtctcatactg

SEQ ID NO: 1773746 - DNA, 25 bp, Homo sapien
taaccggcatctgtctcatactgta

SEQ ID NO: 1773747 - DNA, 25 bp, Homo sapien
aaccggcatctgtctcatactgtaa

SEQ ID NO: 1773748 - DNA, 25 bp, Homo sapien
ccggcatctgtctcatactgtaacc

SEQ ID NO: 1773749 - DNA, 25 bp, Homo sapien
ctgatctgtttgtatcatgttttcc

SEQ ID NO: 1773750 - DNA, 25 bp, Homo sapien
ctgtttgtatcatgttttcccaaaa

SEQ ID NO: 1773751 - DNA, 25 bp, Homo sapien
tctgtttgtatcatgttttcccaaa

SEQ ID NO: 1773752 - DNA, 25 bp, Homo sapien
gatctgtttgtatcatgttttccca

SEQ ID NO: 1773753 - DNA, 25 bp, Homo sapien
ctatccacagtagattatatcctgg

SEQ ID NO: 1773754 - DNA, 25 bp, Homo sapien
actattggctacaggcccaagttta

SEQ ID NO: 1773755 - DNA, 25 bp, Homo sapien
tttgaaacttcacaagacccatttg

SEQ ID NO: 1773756 - DNA, 25 bp, Homo sapien
tggagaagctgaactgtcccaagcc

SEQ ID NO: 1773757 - DNA, 25 bp, Homo sapien
aatctgaaagccaacttagttgtgc

SEQ ID NO: 1773758 - DNA, 25 bp, Homo sapien
agtcatgtatttattcagcaaagct

SEQ ID NO: 1773759 - DNA, 25 bp, Homo sapien
tgaaatcaccactataaatcctccc

SEQ ID NO: 1773760 - DNA, 25 bp, Homo sapien
aacatcttgagctggtactccacca

SEQ ID NO: 1773761 - DNA, 25 bp, Homo sapien
cacacacaggctcaaaataaaggga

SEQ ID NO: 1773762 - DNA, 25 bp, Homo sapien
aagagacccatctcatgtgcagaga

SEQ ID NO: 1773763 - DNA, 25 bp, Homo sapien
tggaggaagatctaccaaggaaata

SEQ ID NO: 1773764 - DNA, 25 bp, Homo sapien
ggcaggggttgcaaacctagtctct

SEQ ID NO: 1773765 - DNA, 25 bp, Homo sapien
aagtgggccatgaaagttgtcctat

SEQ ID NO: 1773766 - DNA, 25 bp, Homo sapien
cctgctaagagttcaaagtgggcca

SEQ ID NO: 1773767 - DNA, 25 bp, Homo sapien
tcttttgaagaggtgctgaccatgc

SEQ ID NO: 1773768 - DNA, 25 bp, Homo sapien
tcagttggttctaagccccttggcc

SEQ ID NO: 1773769 - DNA, 25 bp, Homo sapien
ctttcctcttgctttagataaagaa

SEQ ID NO: 1773770 - DNA, 25 bp, Homo sapien
taaatgtcaactgtcctcctactgc

SEQ ID NO: 1773771 - DNA, 25 bp, Homo sapien
taagctggagaacacgttctgtatc

SEQ ID NO: 1773772 - DNA, 25 bp, Homo sapien
caaggtcatatgatatggtaaatgt

SEQ ID NO: 1773773 - DNA, 25 bp, Homo sapien
agataatcataagctggagaacacg

SEQ ID NO: 1773774 - DNA, 25 bp, Homo sapien
tttctacggactggaaaatgtgtgc

SEQ ID NO: 1773775 - DNA, 25 bp, Homo sapien
ggaggactctcttcaaattcgcaag

SEQ ID NO: 1773776 - DNA, 25 bp, Homo sapien
ttcgcaagcactgtcataaattcct

SEQ ID NO: 1773777 - DNA, 25 bp, Homo sapien
tgcaggtacacctcatcttgggctg

SEQ ID NO: 1773778 - DNA, 25 bp, Homo sapien
ccttggccccaaagtaaatgtgtga

SEQ ID NO: 1773779 - DNA, 25 bp, Homo sapien
aaatgtgtgaacgttggagctgcag

SEQ ID NO: 1773780 - DNA, 25 bp, Homo sapien
gctatgagccatcataaaggagact

SEQ ID NO: 1773781 - DNA, 25 bp, Homo sapien
aaaactagggctccgttcttatctg

SEQ ID NO: 1773782 - DNA, 25 bp, Homo sapien
gaagtccaaagaggtcaaagccata

SEQ ID NO: 1773783 - DNA, 25 bp, Homo sapien
tggaggaacctaagcccatttgctg

SEQ ID NO: 1773784 - DNA, 25 bp, Homo sapien
tgtgctgggttaccactagccaagt

SEQ ID NO: 1773785 - DNA, 25 bp, Homo sapien
tcaaaattcttgacccgcagtccag

SEQ ID NO: 1773786 - DNA, 25 bp, Homo sapien
cattccaatgactgcttgatttctt

SEQ ID NO: 1773787 - DNA, 25 bp, Homo sapien
ccaaaagctctggtcctttgtcata

SEQ ID NO: 1773788 - DNA, 25 bp, Homo sapien
ggctcttggctatgtgttttgattt

SEQ ID NO: 1773789 - DNA, 25 bp, Homo sapien
agaatgttcttcctcgtctcttggc

SEQ ID NO: 1773790 - DNA, 25 bp, Homo sapien
gagacagcggattcaaggttaacag

SEQ ID NO: 1773791 - DNA, 25 bp, Homo sapien
ttcacaagaggagccagtataccct

SEQ ID NO: 1773792 - DNA, 25 bp, Homo sapien
tgctgcaatgcttccatcagtagga

SEQ ID NO: 1773793 - DNA, 25 bp, Homo sapien
cactgacacacttctacagctgctg

SEQ ID NO: 1773794 - DNA, 25 bp, Homo sapien
tattttgaagtgctattctgctacc

SEQ ID NO: 1773795 - DNA, 25 bp, Homo sapien
tctgctaccatccagcatacaatag

SEQ ID NO: 1773796 - DNA, 25 bp, Homo sapien
taatactctaattgaaagccacagc

SEQ ID NO: 1773797 - DNA, 25 bp, Homo sapien
gattatatgcttcagatgattgtga

SEQ ID NO: 1773798 - DNA, 25 bp, Homo sapien
ggcaggtatgagattagaggaagca

SEQ ID NO: 1773799 - DNA, 25 bp, Homo sapien
tggcaggtatgagattagaggaagc

SEQ ID NO: 1773800 - DNA, 25 bp, Homo sapien
cttagtgttattggcaggtatgaga

SEQ ID NO: 1773801 - DNA, 25 bp, Homo sapien
cagatgccaccaaaaatagtgccgt

SEQ ID NO: 1773802 - DNA, 25 bp, Homo sapien
gttaactcgcctgtgcctaggccaa

SEQ ID NO: 1773803 - DNA, 25 bp, Homo sapien
ttctccagtgacgtcatcacaggac

SEQ ID NO: 1773804 - DNA, 25 bp, Homo sapien
gcatgaccaaagcactgacatggct

SEQ ID NO: 1773805 - DNA, 25 bp, Homo sapien
tcttcagaggttcctttagtaggct

SEQ ID NO: 1773806 - DNA, 25 bp, Homo sapien
taggctcgccatagaaaccaggaag

SEQ ID NO: 1773807 - DNA, 25 bp, Homo sapien
catttatcacaatatgggccacctg

SEQ ID NO: 1773808 - DNA, 25 bp, Homo sapien
atgggatattgagtggacaggcaca

SEQ ID NO: 1773809 - DNA, 25 bp, Homo sapien
acttcccatgaaggttgcgtcaacc

SEQ ID NO: 1773810 - DNA, 25 bp, Homo sapien
tattgaggtcctatctctgtccagc

SEQ ID NO: 1773811 - DNA, 25 bp, Homo sapien
tctcgtcttcaggattgtatgcaaa

SEQ ID NO: 1773812 - DNA, 25 bp, Homo sapien
taacctataagctatgtgatgccag

SEQ ID NO: 1773813 - DNA, 25 bp, Homo sapien
tgtgtacccgacagggcatccatca

SEQ ID NO: 1773814 - DNA, 25 bp, Homo sapien
tcacagatcaatccaagactccggt

SEQ ID NO: 1773815 - DNA, 25 bp, Homo sapien
ggtctaaatggcacgttgggctaaa

SEQ ID NO: 1773816 - DNA, 25 bp, Homo sapien
tcacagcgtggtcctgtgtacccga

SEQ ID NO: 1773817 - DNA, 25 bp, Homo sapien
tagacttgattcgaattcagacatt

SEQ ID NO: 1773818 - DNA, 25 bp, Homo sapien
attagacttgattcgaattcagaca

SEQ ID NO: 1773819 - DNA, 25 bp, Homo sapien
ttagacttgattcgaattcagacat

SEQ ID NO: 1773820 - DNA, 25 bp, Homo sapien
gagctcacagtaccggcctgttgta

SEQ ID NO: 1773821 - DNA, 25 bp, Homo sapien
cattggcatggctgacatgatcctc

SEQ ID NO: 1773822 - DNA, 25 bp, Homo sapien
tttacatatcagacaggagccagac

SEQ ID NO: 1773823 - DNA, 25 bp, Homo sapien
tccaggtacagagggttgtccaaaa

SEQ ID NO: 1773824 - DNA, 25 bp, Homo sapien
gactgtggcaaacctcagagaaaga

SEQ ID NO: 1773825 - DNA, 25 bp, Homo sapien
aagagccaccggcattacagcgaca

SEQ ID NO: 1773826 - DNA, 25 bp, Homo sapien
tctgaccctgaacgttggctctgca

SEQ ID NO: 1773827 - DNA, 25 bp, Homo sapien
ttgcatttgtcacatctctgaccct

SEQ ID NO: 1773828 - DNA, 25 bp, Homo sapien
agccaacgggatcgcagtcacatag

SEQ ID NO: 1773829 - DNA, 25 bp, Homo sapien
tttccctacgaagcctgatttacag

SEQ ID NO: 1773830 - DNA, 25 bp, Homo sapien
tatcacattgcggtgacacagagcc

SEQ ID NO: 1773831 - DNA, 25 bp, Homo sapien
gttggtgcacctgcctgccgaggtt

SEQ ID NO: 1773832 - DNA, 25 bp, Homo sapien
ggcacccgctggagctgccgatagc

SEQ ID NO: 1773833 - DNA, 25 bp, Homo sapien
taggctccccgagggcacccgctgg

SEQ ID NO: 1773834 - DNA, 25 bp, Homo sapien
tccccgagggcacccgctggagctg

SEQ ID NO: 1773835 - DNA, 25 bp, Homo sapien
agctggggcccgataggctccccga

SEQ ID NO: 1773836 - DNA, 25 bp, Homo sapien
aaatatgcttaggatatagcatgaa

SEQ ID NO: 1773837 - DNA, 25 bp, Homo sapien
gaaattgtcttcactcatatatcta

SEQ ID NO: 1773838 - DNA, 25 bp, Homo sapien
aattacatacccataccaccagaca

SEQ ID NO: 1773839 - DNA, 25 bp, Homo sapien
tctgagtcatagaaataatactttg

SEQ ID NO: 1773840 - DNA, 25 bp, Homo sapien
ccctgtgactccaggttggcaccaa

SEQ ID NO: 1773841 - DNA, 25 bp, Homo sapien
gccccttgctgattgtaggccaaag

SEQ ID NO: 1773842 - DNA, 25 bp, Homo sapien
gacccaaaagaattgcagttgcagg

SEQ ID NO: 1773843 - DNA, 25 bp, Homo sapien
tgaaatagccgtgggcacagcggtc

SEQ ID NO: 1773844 - DNA, 25 bp, Homo sapien
gggtcacaattattacccagatgag

SEQ ID NO: 1773845 - DNA, 25 bp, Homo sapien
tattgggagggcaaatgcatcgccc

SEQ ID NO: 1773846 - DNA, 25 bp, Homo sapien
ttacaaccagtggtaatgctgtggc

SEQ ID NO: 1773847 - DNA, 25 bp, Homo sapien
tgtggccccaggtattgggtgcaca

SEQ ID NO: 1773848 - DNA, 25 bp, Homo sapien
ttgcagtacctcatcccgacgacaa

SEQ ID NO: 1773849 - DNA, 25 bp, Homo sapien
ccgacgacaacgctacaagaaaaat

SEQ ID NO: 1773850 - DNA, 25 bp, Homo sapien
gagggaatacttctgaatccatttc

SEQ ID NO: 1773851 - DNA, 25 bp, Homo sapien
gctagcaaacaggattcaacataat

SEQ ID NO: 1773852 - DNA, 25 bp, Homo sapien
cagcccaaatgatgtgtatgctcac

SEQ ID NO: 1773853 - DNA, 25 bp, Homo sapien
tacttcaataacagcccaaatgatg

SEQ ID NO: 1773854 - DNA, 25 bp, Homo sapien
agtgaaagaaggcaggcttcgtatt

SEQ ID NO: 1773855 - DNA, 25 bp, Homo sapien
aagaaggcaggcttcgtattctact

SEQ ID NO: 1773856 - DNA, 25 bp, Homo sapien
ggcttctcagtagcccagcgtgctc

SEQ ID NO: 1773857 - DNA, 25 bp, Homo sapien
cacacgctctgaccttgaagtcggc

SEQ ID NO: 1773858 - DNA, 25 bp, Homo sapien
gcatttgcctacaaactccgacgtg

SEQ ID NO: 1773859 - DNA, 25 bp, Homo sapien
tatcctccaagaacggtgggcagct

SEQ ID NO: 1773860 - DNA, 25 bp, Homo sapien
gaggaagcagtcacagagattgcag

SEQ ID NO: 1773861 - DNA, 25 bp, Homo sapien
gcccagtttgatcactacaggagca

SEQ ID NO: 1773862 - DNA, 25 bp, Homo sapien
tgcagcgagggtagttccagtgacc

SEQ ID NO: 1773863 - DNA, 25 bp, Homo sapien
cagagaattttggatgacagttgca

SEQ ID NO: 1773864 - DNA, 25 bp, Homo sapien
ttaattggctctttttctacatcat

SEQ ID NO: 1773865 - DNA, 25 bp, Homo sapien
tagtagtgccgaagcaatagcagct

SEQ ID NO: 1773866 - DNA, 25 bp, Homo sapien
ccgaatttgccaggccggcatctgt

SEQ ID NO: 1773867 - DNA, 25 bp, Homo sapien
tggattcttggcatcgagtccgaat

SEQ ID NO: 1773868 - DNA, 25 bp, Homo sapien
cacgtccggatcagtccttttgctt

SEQ ID NO: 1773869 - DNA, 25 bp, Homo sapien
ggtccatgtgggcaacaatctctgg

SEQ ID NO: 1773870 - DNA, 25 bp, Homo sapien
aaaaggttccaaatggagatcttct

SEQ ID NO: 1773871 - DNA, 25 bp, Homo sapien
tctggatgttgaaaaacaatgccct

SEQ ID NO: 1773872 - DNA, 25 bp, Homo sapien
aatgcccttggtggtcgtgtgctgc

SEQ ID NO: 1773873 - DNA, 25 bp, Homo sapien
tgtcccacctcgaatgatcacttga

SEQ ID NO: 1773874 - DNA, 25 bp, Homo sapien
tcccgagcctcgaaatagattgcat

SEQ ID NO: 1773875 - DNA, 25 bp, Homo sapien
tgccttgtcaattggccaatcagag

SEQ ID NO: 1773876 - DNA, 25 bp, Homo sapien
gccatatgcctgacgataattctag

SEQ ID NO: 1773877 - DNA, 25 bp, Homo sapien
caagaagtcttctcgggtcacagtt

SEQ ID NO: 1773878 - DNA, 25 bp, Homo sapien
cacagttctatggactcgaggatca

SEQ ID NO: 1773879 - DNA, 25 bp, Homo sapien
tgctttgtcgcatgaaatttccata

SEQ ID NO: 1773880 - DNA, 25 bp, Homo sapien
catatagtatatccaagaagtcttc

SEQ ID NO: 1773881 - DNA, 25 bp, Homo sapien
acaggccagaatagcccaggggaca

SEQ ID NO: 1773882 - DNA, 25 bp, Homo sapien
ccttgttcagctacctccattgaga

SEQ ID NO: 1773883 - DNA, 25 bp, Homo sapien
gcccaggggacaatcacatttttca

SEQ ID NO: 1773884 - DNA, 25 bp, Homo sapien
gagtcattgttgttccacgtccttg

SEQ ID NO: 1773885 - DNA, 25 bp, Homo sapien
tacattgacatggaacacaggtgcc

SEQ ID NO: 1773886 - DNA, 25 bp, Homo sapien
cctggttgagaacgcagtcgataaa

SEQ ID NO: 1773887 - DNA, 25 bp, Homo sapien
ggcatatcgatgtttcagggtcaca

SEQ ID NO: 1773888 - DNA, 25 bp, Homo sapien
caggctgctgtgtccattacattga

SEQ ID NO: 1773889 - DNA, 25 bp, Homo sapien
acaattccatagtatccaagagcac

SEQ ID NO: 1773890 - DNA, 25 bp, Homo sapien
tatccaagagcacatcgttcacaga

SEQ ID NO: 1773891 - DNA, 25 bp, Homo sapien
caggcacattgctgacagtcatttg

SEQ ID NO: 1773892 - DNA, 25 bp, Homo sapien
tcatttggcaatcccttgacaattc

SEQ ID NO: 1773893 - DNA, 25 bp, Homo sapien
gacttgaactaatgccgtggaaatg

SEQ ID NO: 1773894 - DNA, 25 bp, Homo sapien
gatttcacagggattgtctgaggga

SEQ ID NO: 1773895 - DNA, 25 bp, Homo sapien
tgagggaatagcaagagcagactgc

SEQ ID NO: 1773896 - DNA, 25 bp, Homo sapien
gagcactgccactccgtcataagag

SEQ ID NO: 1773897 - DNA, 25 bp, Homo sapien
gccaaaaaccatggtgtcaaccgtg

SEQ ID NO: 1773898 - DNA, 25 bp, Homo sapien
tgccaagcatgggtctgtctcaggg

SEQ ID NO: 1773899 - DNA, 25 bp, Homo sapien
tggaagatttttagccctcaggaga

SEQ ID NO: 1773900 - DNA, 25 bp, Homo sapien
tcctgcaggtattcacatggctcac

SEQ ID NO: 1773901 - DNA, 25 bp, Homo sapien
tcaagtccttctgcgacacaagagg

SEQ ID NO: 1773902 - DNA, 25 bp, Homo sapien
ctttcacagtactggccttcatatc

SEQ ID NO: 1773903 - DNA, 25 bp, Homo sapien
ttcatatccccgtggacaagccgtg

SEQ ID NO: 1773904 - DNA, 25 bp, Homo sapien
acaagccgtgcagcggtagtcgtca

SEQ ID NO: 1773905 - DNA, 25 bp, Homo sapien
gttgcctggactgccagtatagcca

SEQ ID NO: 1773906 - DNA, 25 bp, Homo sapien
gagcctccagggttgcctggactgc

SEQ ID NO: 1773907 - DNA, 25 bp, Homo sapien
gcctggactgccagtatagccaggg

SEQ ID NO: 1773908 - DNA, 25 bp, Homo sapien
tccagggttgcctggactgccagta

SEQ ID NO: 1773909 - DNA, 25 bp, Homo sapien
caggcagtgagccatagggatcaca

SEQ ID NO: 1773910 - DNA, 25 bp, Homo sapien
agccctcgcgtgcatgccagtgctt

SEQ ID NO: 1773911 - DNA, 25 bp, Homo sapien
tccaggtcggcacgtgcagaatcct

SEQ ID NO: 1773912 - DNA, 25 bp, Homo sapien
gtgcttgcagccgtcacacttcctt

SEQ ID NO: 1773913 - DNA, 25 bp, Homo sapien
ctaacagcaaagttagtatacgtac

SEQ ID NO: 1773914 - DNA, 25 bp, Homo sapien
gagacagaactggaatcaaggcctc

SEQ ID NO: 1773915 - DNA, 25 bp, Homo sapien
tcaaggcctccaaaactaacagcaa

SEQ ID NO: 1773916 - DNA, 25 bp, Homo sapien
ggaatcaaggcctccaaaactaaca

SEQ ID NO: 1773917 - DNA, 25 bp, Homo sapien
ataacattgtaaagctgtcccaaat

SEQ ID NO: 1773918 - DNA, 25 bp, Homo sapien
caagctcctgatgcttcacaagctg

SEQ ID NO: 1773919 - DNA, 25 bp, Homo sapien
gcaggtgacaactgtagagcgtcac

SEQ ID NO: 1773920 - DNA, 25 bp, Homo sapien
gctcctgatgcttcacaagctgaat

SEQ ID NO: 1773921 - DNA, 25 bp, Homo sapien
gacaactgtagagcgtcacctgcag

SEQ ID NO: 1773922 - DNA, 25 bp, Homo sapien
cagcggaccagtgaggttgatgctc

SEQ ID NO: 1773923 - DNA, 25 bp, Homo sapien
cagcattttatatggcgcaggcagc

SEQ ID NO: 1773924 - DNA, 25 bp, Homo sapien
gcgagccaagtcaccgagaagaagg

SEQ ID NO: 1773925 - DNA, 25 bp, Homo sapien
gagaagaaggccagtgcactcatct

SEQ ID NO: 1773926 - DNA, 25 bp, Homo sapien
acatttttagtaaatggccttgcag

SEQ ID NO: 1773927 - DNA, 25 bp, Homo sapien
aaatggccttgcagtgatagtgttc

SEQ ID NO: 1773928 - DNA, 25 bp, Homo sapien
gatagtgttcgacagaacacatttt

SEQ ID NO: 1773929 - DNA, 25 bp, Homo sapien
ccttgcagtgatagtgttcgacaga

SEQ ID NO: 1773930 - DNA, 25 bp, Homo sapien
agcagctcgttcatttcggtcacga

SEQ ID NO: 1773931 - DNA, 25 bp, Homo sapien
ggtcacgagtgtattcagattgccc

SEQ ID NO: 1773932 - DNA, 25 bp, Homo sapien
cctctgccagctgaataagcctctc

SEQ ID NO: 1773933 - DNA, 25 bp, Homo sapien
gtgtattcagattgccctctgccag

SEQ ID NO: 1773934 - DNA, 25 bp, Homo sapien
gctccttaatgaattctcccaggga

SEQ ID NO: 1773935 - DNA, 25 bp, Homo sapien
agctccttaatgaattctcccaggg

SEQ ID NO: 1773936 - DNA, 25 bp, Homo sapien
aagctccttaatgaattctcccagg

SEQ ID NO: 1773937 - DNA, 25 bp, Homo sapien
tctcaaaggcctcgtctcgagttcc

SEQ ID NO: 1773938 - DNA, 25 bp, Homo sapien
tcgagttcctagagtttcatttagt

SEQ ID NO: 1773939 - DNA, 25 bp, Homo sapien
aatcatctggtcaatctctttctga

SEQ ID NO: 1773940 - DNA, 25 bp, Homo sapien
gcctcgtctcgagttcctagagttt

SEQ ID NO: 1773941 - DNA, 25 bp, Homo sapien
ctccaatgcagtcatgtttttctga

SEQ ID NO: 1773942 - DNA, 25 bp, Homo sapien
ttttctgatttactgcaaataggcg

SEQ ID NO: 1773943 - DNA, 25 bp, Homo sapien
ggcttctctcaaaaggtcccaagca

SEQ ID NO: 1773944 - DNA, 25 bp, Homo sapien
gcaaataggcgattagcttctctga

SEQ ID NO: 1773945 - DNA, 25 bp, Homo sapien
ctttggcaaggatataatggtagat

SEQ ID NO: 1773946 - DNA, 25 bp, Homo sapien
tttatgtagcaacttactctttact

SEQ ID NO: 1773947 - DNA, 25 bp, Homo sapien
gatccgcactgccttctttggcaag

SEQ ID NO: 1773948 - DNA, 25 bp, Homo sapien
gatttggggatagactgctcaatac

SEQ ID NO: 1773949 - DNA, 25 bp, Homo sapien
gaaataccaatgcatcacagataca

SEQ ID NO: 1773950 - DNA, 25 bp, Homo sapien
cttgattacttttgccgggagttgc

SEQ ID NO: 1773951 - DNA, 25 bp, Homo sapien
tacagggactagcagaaaggcacag

SEQ ID NO: 1773952 - DNA, 25 bp, Homo sapien
tgaaggacaacacattgaatctatt

SEQ ID NO: 1773953 - DNA, 25 bp, Homo sapien
tgttctcaatttgtcgtttgccgct

SEQ ID NO: 1773954 - DNA, 25 bp, Homo sapien
acggttggcttcatcgagtatgtca

SEQ ID NO: 1773955 - DNA, 25 bp, Homo sapien
gtttgccgctttcaacagcctcctt

SEQ ID NO: 1773956 - DNA, 25 bp, Homo sapien
tgatttcatctgcaagacggttggc

SEQ ID NO: 1773957 - DNA, 25 bp, Homo sapien
tcttgggagaggtcatctattttat

SEQ ID NO: 1773958 - DNA, 25 bp, Homo sapien
tcagacataggtggcaatttagttt

SEQ ID NO: 1773959 - DNA, 25 bp, Homo sapien
gagtcattcaactgagctgcgtggc

SEQ ID NO: 1773960 - DNA, 25 bp, Homo sapien
ggacagcagatgagtcattcaactg

SEQ ID NO: 1773961 - DNA, 25 bp, Homo sapien
ctttgaaggctgcagtggcattgaa

SEQ ID NO: 1773962 - DNA, 25 bp, Homo sapien
ccttaatattgctgtaagctttgaa

SEQ ID NO: 1773963 - DNA, 25 bp, Homo sapien
tgtagcttcatgtgcaagatctttg

SEQ ID NO: 1773964 - DNA, 25 bp, Homo sapien
gctgcagtggcattgaaggagatgt

SEQ ID NO: 1773965 - DNA, 25 bp, Homo sapien
tttacaaaatgacagtcattgcaag

SEQ ID NO: 1773966 - DNA, 25 bp, Homo sapien
caaaatgacagtcattgcaaggtga

SEQ ID NO: 1773967 - DNA, 25 bp, Homo sapien
tacaaaatgacagtcattgcaaggt

SEQ ID NO: 1773968 - DNA, 25 bp, Homo sapien
aatgacagtcattgcaaggtgaaga

SEQ ID NO: 1773969 - DNA, 25 bp, Homo sapien
cctttggattcaagacggcaatatt

SEQ ID NO: 1773970 - DNA, 25 bp, Homo sapien
gggaacctcatccaacagtcagagg

SEQ ID NO: 1773971 - DNA, 25 bp, Homo sapien
cagtcagaggccttaagaagaatta

SEQ ID NO: 1773972 - DNA, 25 bp, Homo sapien
ggcaatattcacctattccctgcag

SEQ ID NO: 1773973 - DNA, 25 bp, Homo sapien
ggcttcgttaagaatcctgaagctt

SEQ ID NO: 1773974 - DNA, 25 bp, Homo sapien
ttctgaagacagcctttggcatctt

SEQ ID NO: 1773975 - DNA, 25 bp, Homo sapien
tgctaacttcttggcttcgttaaga

SEQ ID NO: 1773976 - DNA, 25 bp, Homo sapien
acatcatttgctaacttcttggctt

SEQ ID NO: 1773977 - DNA, 25 bp, Homo sapien
tctccaatagtgtgatagaatatct

SEQ ID NO: 1773978 - DNA, 25 bp, Homo sapien
taacaacccgattaactggaatata

SEQ ID NO: 1773979 - DNA, 25 bp, Homo sapien
tatcttatcagtaacaacccgatta

SEQ ID NO: 1773980 - DNA, 25 bp, Homo sapien
taataaaaactatggccacactgac

SEQ ID NO: 1773981 - DNA, 25 bp, Homo sapien
cacgggattgagtccatttgtccaa

SEQ ID NO: 1773982 - DNA, 25 bp, Homo sapien
aaggagtgaccgcaaagtcacggga

SEQ ID NO: 1773983 - DNA, 25 bp, Homo sapien
cagccctgggcaagggtatgagata

SEQ ID NO: 1773984 - DNA, 25 bp, Homo sapien
tgtccaataggaacacaggttttgg

SEQ ID NO: 1773985 - DNA, 25 bp, Homo sapien
cacttgtctgaacggaatgactgag

SEQ ID NO: 1773986 - DNA, 25 bp, Homo sapien
tgcaagtgtattacatccatgatct

SEQ ID NO: 1773987 - DNA, 25 bp, Homo sapien
agacccacttgtctgaacggaatga

SEQ ID NO: 1773988 - DNA, 25 bp, Homo sapien
caacaggttagcgtttgcaagtgta

SEQ ID NO: 1773989 - DNA, 25 bp, Homo sapien
cttcctgtcctcctcctttcctttg

SEQ ID NO: 1773990 - DNA, 25 bp, Homo sapien
tcaccctcaaccttttcttcctgtc

SEQ ID NO: 1773991 - DNA, 25 bp, Homo sapien
ctcctttcctttgtcttcctctcat

SEQ ID NO: 1773992 - DNA, 25 bp, Homo sapien
catcaccctcaaccttttcttcctg

SEQ ID NO: 1773993 - DNA, 25 bp, Homo sapien
cattcaaagttctcaagagatcccc

SEQ ID NO: 1773994 - DNA, 25 bp, Homo sapien
tttttaagccatttagatggtcttc

SEQ ID NO: 1773995 - DNA, 25 bp, Homo sapien
cagcattttctatcctggtttttaa

SEQ ID NO: 1773996 - DNA, 25 bp, Homo sapien
gagatccccatttctagcatcagca

SEQ ID NO: 1773997 - DNA, 25 bp, Homo sapien
tagctgtgtcgttggcttgtctggc

SEQ ID NO: 1773998 - DNA, 25 bp, Homo sapien
gagctctgtaatctgtgccagtaca

SEQ ID NO: 1773999 - DNA, 25 bp, Homo sapien
tcttcaggccatcgaggttctggtg

SEQ ID NO: 1774000 - DNA, 25 bp, Homo sapien
aaccacagcattcgttttggcgacg

SEQ ID NO: 1774001 - DNA, 25 bp, Homo sapien
agaattggcttgtttccgagcttgg

SEQ ID NO: 1774002 - DNA, 25 bp, Homo sapien
tccgagcttggtttatcaattcctt

SEQ ID NO: 1774003 - DNA, 25 bp, Homo sapien
ggttatcctcaagttccttgatggg

SEQ ID NO: 1774004 - DNA, 25 bp, Homo sapien
gagtttatctattagccggtcagct

SEQ ID NO: 1774005 - DNA, 25 bp, Homo sapien
gggaaagacattccctctatgaata

SEQ ID NO: 1774006 - DNA, 25 bp, Homo sapien
tcctaccccaaatcgcttcgagtta

SEQ ID NO: 1774007 - DNA, 25 bp, Homo sapien
tggtgattatcattctcatgaaatg

SEQ ID NO: 1774008 - DNA, 25 bp, Homo sapien
ggtactctcatccatggctttttag

SEQ ID NO: 1774009 - DNA, 25 bp, Homo sapien
atttggcacttccaagataaaagag

SEQ ID NO: 1774010 - DNA, 25 bp, Homo sapien
cttgatttctggtttgtatgttcga

SEQ ID NO: 1774011 - DNA, 25 bp, Homo sapien
aaagaggaggttatcagcaacagct

SEQ ID NO: 1774012 - DNA, 25 bp, Homo sapien
aacagctgtctttacgttgacaaca

SEQ ID NO: 1774013 - DNA, 25 bp, Homo sapien
gcctttacgcatttctatagccaga

SEQ ID NO: 1774014 - DNA, 25 bp, Homo sapien
tgagtcatcaatagtcaaatctggg

SEQ ID NO: 1774015 - DNA, 25 bp, Homo sapien
gatgctacgatacggtaccaatatg

SEQ ID NO: 1774016 - DNA, 25 bp, Homo sapien
gggtactctacacgtccaactccag

SEQ ID NO: 1774017 - DNA, 25 bp, Homo sapien
taccctggaggagacgtcgaatggt

SEQ ID NO: 1774018 - DNA, 25 bp, Homo sapien
acaatgctggctttgggtccatcca

SEQ ID NO: 1774019 - DNA, 25 bp, Homo sapien
ctttaatttcccagtcaggccacca

SEQ ID NO: 1774020 - DNA, 25 bp, Homo sapien
gcatttgcatccacatctagaatcg

SEQ ID NO: 1774021 - DNA, 25 bp, Homo sapien
taatcacacgtacagcatcagcctt

SEQ ID NO: 1774022 - DNA, 25 bp, Homo sapien
catgcagccagtgaatgtaatcaca

SEQ ID NO: 1774023 - DNA, 25 bp, Homo sapien
aaagtatgtttctcccatgcagcca

SEQ ID NO: 1774024 - DNA, 25 bp, Homo sapien
ctcggaaattccacaaacctatagg

SEQ ID NO: 1774025 - DNA, 25 bp, Homo sapien
caggtctcgtgtggcaagatacatc

SEQ ID NO: 1774026 - DNA, 25 bp, Homo sapien
cttctccatcaaattgaatagtccc

SEQ ID NO: 1774027 - DNA, 25 bp, Homo sapien
ggacggctgaccaatgcataacctt

SEQ ID NO: 1774028 - DNA, 25 bp, Homo sapien
gatacatcagaagagcactcgaaga

SEQ ID NO: 1774029 - DNA, 25 bp, Homo sapien
tcctgagcccagatcgtaactgact

SEQ ID NO: 1774030 - DNA, 25 bp, Homo sapien
tgctgacaacggaagccattcctga

SEQ ID NO: 1774031 - DNA, 25 bp, Homo sapien
gcccagatcgtaactgacttttatg

SEQ ID NO: 1774032 - DNA, 25 bp, Homo sapien
tcttgacagagtgaatgatttccat

SEQ ID NO: 1774033 - DNA, 25 bp, Homo sapien
caggaacaatgtatgcagcagcact

SEQ ID NO: 1774034 - DNA, 25 bp, Homo sapien
gcattgtgcctctcttacacaggaa

SEQ ID NO: 1774035 - DNA, 25 bp, Homo sapien
tagagttctcggtatccctatggct

SEQ ID NO: 1774036 - DNA, 25 bp, Homo sapien
cactggttctgttatctcttggccc

SEQ ID NO: 1774037 - DNA, 25 bp, Homo sapien
tatattgcataagagtgaagtttgg

SEQ ID NO: 1774038 - DNA, 25 bp, Homo sapien
tattgtttccatcttcacgtcttcg

SEQ ID NO: 1774039 - DNA, 25 bp, Homo sapien
gaacactgtacccaacaggcgattt

SEQ ID NO: 1774040 - DNA, 25 bp, Homo sapien
tagcttctcgccttgtaagtgagaa

SEQ ID NO: 1774041 - DNA, 25 bp, Homo sapien
gaagttgctatattctcctcctgat

SEQ ID NO: 1774042 - DNA, 25 bp, Homo sapien
ttgtttccagaagacgaagttgcta

SEQ ID NO: 1774043 - DNA, 25 bp, Homo sapien
aagtttctcagcgttggcaggccac

SEQ ID NO: 1774044 - DNA, 25 bp, Homo sapien
tcatctgctttcaagtcaagaccaa

SEQ ID NO: 1774045 - DNA, 25 bp, Homo sapien
aaacaaattagaccttggcagtgta

SEQ ID NO: 1774046 - DNA, 25 bp, Homo sapien
tttttcttgcataatgcacagagaa

SEQ ID NO: 1774047 - DNA, 25 bp, Homo sapien
ttatttcatgtcaggtgtctgtctg

SEQ ID NO: 1774048 - DNA, 25 bp, Homo sapien
cagtgtatatcaggtgatttatttc

SEQ ID NO: 1774049 - DNA, 25 bp, Homo sapien
gaacatcctttggtaacaccaacat

SEQ ID NO: 1774050 - DNA, 25 bp, Homo sapien
gagtatattgtacggagttcttgaa

SEQ ID NO: 1774051 - DNA, 25 bp, Homo sapien
caccaacataatcgggactactgag

SEQ ID NO: 1774052 - DNA, 25 bp, Homo sapien
tgaggcagccggaatatttcttcag

SEQ ID NO: 1774053 - DNA, 25 bp, Homo sapien
ccaaagatttaagtcaaactgacac

SEQ ID NO: 1774054 - DNA, 25 bp, Homo sapien
accaaagatttaagtcaaactgaca

SEQ ID NO: 1774055 - DNA, 25 bp, Homo sapien
tcttggtgctgaatgacaggttgat

SEQ ID NO: 1774056 - DNA, 25 bp, Homo sapien
aatgatgccggactcattcttggtg

SEQ ID NO: 1774057 - DNA, 25 bp, Homo sapien
ctaggtggtgctggtgtccctccac

SEQ ID NO: 1774058 - DNA, 25 bp, Homo sapien
ctccacaaaaccaggcttaggaaag

SEQ ID NO: 1774059 - DNA, 25 bp, Homo sapien
taccttctaatgtgctgatatctgg

SEQ ID NO: 1774060 - DNA, 25 bp, Homo sapien
tgaattaacatgatagctccacaat

SEQ ID NO: 1774061 - DNA, 25 bp, Homo sapien
gtggaacagccccaactacgctatt

SEQ ID NO: 1774062 - DNA, 25 bp, Homo sapien
tatgaataaccaattgccctgaaat

SEQ ID NO: 1774063 - DNA, 25 bp, Homo sapien
tgttcaacttcaggagatagtgcca

SEQ ID NO: 1774064 - DNA, 25 bp, Homo sapien
ttctaccagcagtgatcaagggcac

SEQ ID NO: 1774065 - DNA, 25 bp, Homo sapien
tcccattatgcaaaagtgccacagt

SEQ ID NO: 1774066 - DNA, 25 bp, Homo sapien
caaccagtatggtttcgatatccca

SEQ ID NO: 1774067 - DNA, 25 bp, Homo sapien
tctggcaatgatgaaggaatcaagt

SEQ ID NO: 1774068 - DNA, 25 bp, Homo sapien
ggttcctccttcagatagcatatac

SEQ ID NO: 1774069 - DNA, 25 bp, Homo sapien
ggaatcaagtatcctttagtggaaa

SEQ ID NO: 1774070 - DNA, 25 bp, Homo sapien
gagccagtaggtagtgtttaaatat

SEQ ID NO: 1774071 - DNA, 25 bp, Homo sapien
tagctttagagattccctggcagaa

SEQ ID NO: 1774072 - DNA, 25 bp, Homo sapien
ctcatttatggcttagctttagaga

SEQ ID NO: 1774073 - DNA, 25 bp, Homo sapien
acagaagtctcatttatggcttagc

SEQ ID NO: 1774074 - DNA, 25 bp, Homo sapien
gagattccctggcagaaccacaggt

SEQ ID NO: 1774075 - DNA, 25 bp, Homo sapien
tctagttcgctctacatgaacggaa

SEQ ID NO: 1774076 - DNA, 25 bp, Homo sapien
ccctgttgaggagtattgcataata

SEQ ID NO: 1774077 - DNA, 25 bp, Homo sapien
tgcccctgtggagagatgcacttcc

SEQ ID NO: 1774078 - DNA, 25 bp, Homo sapien
agattcggctctggtctgatcacaa

SEQ ID NO: 1774079 - DNA, 25 bp, Homo sapien
gatactgatagataccgatgctagc

SEQ ID NO: 1774080 - DNA, 25 bp, Homo sapien
ggctgaggcaaatgaggttcccgaa

SEQ ID NO: 1774081 - DNA, 25 bp, Homo sapien
taagggtagaactcctaagggctga

SEQ ID NO: 1774082 - DNA, 25 bp, Homo sapien
tgcaatgcatagtaggtccacacac

SEQ ID NO: 1774083 - DNA, 25 bp, Homo sapien
tctgtatctgtgacagctaagcagc

SEQ ID NO: 1774084 - DNA, 25 bp, Homo sapien
gcagctgccataactgctttggaac

SEQ ID NO: 1774085 - DNA, 25 bp, Homo sapien
acactctgtatctgtgacagctaag

SEQ ID NO: 1774086 - DNA, 25 bp, Homo sapien
tatctgtgacagctaagcagctgcc

SEQ ID NO: 1774087 - DNA, 25 bp, Homo sapien
gccctgaggctgtattacttaaaaa

SEQ ID NO: 1774088 - DNA, 25 bp, Homo sapien
gtttttattgagaaggacattgcca

SEQ ID NO: 1774089 - DNA, 25 bp, Homo sapien
gggcattgctagaaaactacagcta

SEQ ID NO: 1774090 - DNA, 25 bp, Homo sapien
tagtgtggttctgccacaaggacca

SEQ ID NO: 1774091 - DNA, 25 bp, Homo sapien
cagcttccttgctaagagtgtcggt

SEQ ID NO: 1774092 - DNA, 25 bp, Homo sapien
ggtggtttcctgagacgagaatttc

SEQ ID NO: 1774093 - DNA, 25 bp, Homo sapien
ttggcaaaacccaggaggttcagct

SEQ ID NO: 1774094 - DNA, 25 bp, Homo sapien
aaaatgtgttggcaaaacccaggag

SEQ ID NO: 1774095 - DNA, 25 bp, Homo sapien
gatggaaacctcagtcctaaagtac

SEQ ID NO: 1774096 - DNA, 25 bp, Homo sapien
ggttgaaattcaggtggagcacccc

SEQ ID NO: 1774097 - DNA, 25 bp, Homo sapien
cagagttaataacaagattccatat

SEQ ID NO: 1774098 - DNA, 25 bp, Homo sapien
gataggctgttcaactgtcaggttt

SEQ ID NO: 1774099 - DNA, 25 bp, Homo sapien
ctttttaacttcgataggctgttca

SEQ ID NO: 1774100 - DNA, 25 bp, Homo sapien
tctgatgggcacagcgaccaatgtc

SEQ ID NO: 1774101 - DNA, 25 bp, Homo sapien
tgggaactggctcaggctggataac

SEQ ID NO: 1774102 - DNA, 25 bp, Homo sapien
atcttcatcttcacggagtttctga

SEQ ID NO: 1774103 - DNA, 25 bp, Homo sapien
tggataactatttcagctggagctg

SEQ ID NO: 1774104 - DNA, 25 bp, Homo sapien
gaacttgtcacgtttccacatgtca

SEQ ID NO: 1774105 - DNA, 25 bp, Homo sapien
gcctcttatctacctctacctcctg

SEQ ID NO: 1774106 - DNA, 25 bp, Homo sapien
ttgcagagaacttgtcacgtttcca

SEQ ID NO: 1774107 - DNA, 25 bp, Homo sapien
cttatctacctctacctcctgccat

SEQ ID NO: 1774108 - DNA, 25 bp, Homo sapien
aattggtcttcatggaagtatttcc

SEQ ID NO: 1774109 - DNA, 25 bp, Homo sapien
gatcttagtcaaacgaagcactctg

SEQ ID NO: 1774110 - DNA, 25 bp, Homo sapien
agtgttttgaaatgccgtaaaattg

SEQ ID NO: 1774111 - DNA, 25 bp, Homo sapien
aaattggtcttcatggaagtatttc

SEQ ID NO: 1774112 - DNA, 25 bp, Homo sapien
caaaagagctggttctgattctgca

SEQ ID NO: 1774113 - DNA, 25 bp, Homo sapien
tcttgaaagcccgaactgcttgctc

SEQ ID NO: 1774114 - DNA, 25 bp, Homo sapien
gctccctatcaaaagagctggttct

SEQ ID NO: 1774115 - DNA, 25 bp, Homo sapien
gaactgcttgctccctatcaaaaga

SEQ ID NO: 1774116 - DNA, 25 bp, Homo sapien
aaatcagcatgattgatgcgagcca

SEQ ID NO: 1774117 - DNA, 25 bp, Homo sapien
actccccaagtcatagctgaagtag

SEQ ID NO: 1774118 - DNA, 25 bp, Homo sapien
gctgaagtagggcaatccatttctc

SEQ ID NO: 1774119 - DNA, 25 bp, Homo sapien
ccatgtaaaaaagcaagccggattc

SEQ ID NO: 1774120 - DNA, 25 bp, Homo sapien
ccaggatgtcggcttttttgggact

SEQ ID NO: 1774121 - DNA, 25 bp, Homo sapien
tggaccaattcttcgggtagtgtag

SEQ ID NO: 1774122 - DNA, 25 bp, Homo sapien
cagcattcccacgacatccaggatg

SEQ ID NO: 1774123 - DNA, 25 bp, Homo sapien
tagtgtagttgatgggtaacccacc

SEQ ID NO: 1774124 - DNA, 25 bp, Homo sapien
tgacgcagccatcaatgctataggt

SEQ ID NO: 1774125 - DNA, 25 bp, Homo sapien
gtggagattcctgacgcagccatca

SEQ ID NO: 1774126 - DNA, 25 bp, Homo sapien
gattcctgacgcagccatcaatgct

SEQ ID NO: 1774127 - DNA, 25 bp, Homo sapien
cgcagccatcaatgctataggtcac

SEQ ID NO: 1774128 - DNA, 25 bp, Homo sapien
atttgcaaaacatgtcccaacatgg

SEQ ID NO: 1774129 - DNA, 25 bp, Homo sapien
ggaggtgggttgttccagatcggca

SEQ ID NO: 1774130 - DNA, 25 bp, Homo sapien
ctctgagcatttgcaaaacatgtcc

SEQ ID NO: 1774131 - DNA, 25 bp, Homo sapien
tgctttggcaaaaccggttccgtca

SEQ ID NO: 1774132 - DNA, 25 bp, Homo sapien
gatccccagaagaactccagtcgtt

SEQ ID NO: 1774133 - DNA, 25 bp, Homo sapien
cagtcgttgtagttgtgcggaattc

SEQ ID NO: 1774134 - DNA, 25 bp, Homo sapien
tacaagaaggtccaatcccactttg

SEQ ID NO: 1774135 - DNA, 25 bp, Homo sapien
tttttgactactgatccccagaaga

SEQ ID NO: 1774136 - DNA, 25 bp, Homo sapien
tgatgcgtcagttggctaccttggc

SEQ ID NO: 1774137 - DNA, 25 bp, Homo sapien
catagactgtgtgttccttaagagg

SEQ ID NO: 1774138 - DNA, 25 bp, Homo sapien
gagatgcctagcctgttaaaagagg

SEQ ID NO: 1774139 - DNA, 25 bp, Homo sapien
cactggagtccatagtctcatagac

SEQ ID NO: 1774140 - DNA, 25 bp, Homo sapien
ctgcctatagtgcaaagttgtctta

SEQ ID NO: 1774141 - DNA, 25 bp, Homo sapien
gagttgaagtacgattcctatttaa

SEQ ID NO: 1774142 - DNA, 25 bp, Homo sapien
cactaagggtggaaacgtgaactga

SEQ ID NO: 1774143 - DNA, 25 bp, Homo sapien
cttcttgggaggcaacactaagggt

SEQ ID NO: 1774144 - DNA, 25 bp, Homo sapien
gaaacgtgaactgagttgaagtacg

SEQ ID NO: 1774145 - DNA, 25 bp, Homo sapien
gccagaaggccagttaaattcctaa

SEQ ID NO: 1774146 - DNA, 25 bp, Homo sapien
taataggcaagatacgtaaagctgg

SEQ ID NO: 1774147 - DNA, 25 bp, Homo sapien
gaaaaggacctagtgtacacaggga

SEQ ID NO: 1774148 - DNA, 25 bp, Homo sapien
tggagcccgtttcatgtcacaggtg

SEQ ID NO: 1774149 - DNA, 25 bp, Homo sapien
ctgtgagctcaatgcggtgtttgat

SEQ ID NO: 1774150 - DNA, 25 bp, Homo sapien
tagacagcagtgaatctgcccgcac

SEQ ID NO: 1774151 - DNA, 25 bp, Homo sapien
ggaaccccagcatcatagacagcag

SEQ ID NO: 1774152 - DNA, 25 bp, Homo sapien
caatgcggtgtttgatcttgttggc

SEQ ID NO: 1774153 - DNA, 25 bp, Homo sapien
gctccaattgctgttaaatgcctca

SEQ ID NO: 1774154 - DNA, 25 bp, Homo sapien
gatctccccatctatgcccaaagtg

SEQ ID NO: 1774155 - DNA, 25 bp, Homo sapien
catgaaaagttcagtcccatgtggt

SEQ ID NO: 1774156 - DNA, 25 bp, Homo sapien
cactcttgtttatgggcactttagg

SEQ ID NO: 1774157 - DNA, 25 bp, Homo sapien
gggatctgatgcaacctcggaacgg

SEQ ID NO: 1774158 - DNA, 25 bp, Homo sapien
ctcggaacggaatactggttgttag

SEQ ID NO: 1774159 - DNA, 25 bp, Homo sapien
gaacggaatactggttgttaggcca

SEQ ID NO: 1774160 - DNA, 25 bp, Homo sapien
ttggtgagcttcagggatctgatgc

SEQ ID NO: 1774161 - DNA, 25 bp, Homo sapien
gttgaacgcccctcagttccagggc

SEQ ID NO: 1774162 - DNA, 25 bp, Homo sapien
tagttggctgggcatgatacaggtt

SEQ ID NO: 1774163 - DNA, 25 bp, Homo sapien
tgatacaggttgaacgcccctcagt

SEQ ID NO: 1774164 - DNA, 25 bp, Homo sapien
tggctgggcatgatacaggttgaac

SEQ ID NO: 1774165 - DNA, 25 bp, Homo sapien
tgaattagcaccatctgaatacaga

SEQ ID NO: 1774166 - DNA, 25 bp, Homo sapien
tacttgatatacttgttttgacaga

SEQ ID NO: 1774167 - DNA, 25 bp, Homo sapien
ttctatgtacatgcacaaattagtt

SEQ ID NO: 1774168 - DNA, 25 bp, Homo sapien
gatatacttgttttgacagactctt

SEQ ID NO: 1774169 - DNA, 25 bp, Homo sapien
gatattcactgtaggcttagagagc

SEQ ID NO: 1774170 - DNA, 25 bp, Homo sapien
tggcctgaatctggtctataccctc

SEQ ID NO: 1774171 - DNA, 25 bp, Homo sapien
ctaataatgaacttgggtcaggaca

SEQ ID NO: 1774172 - DNA, 25 bp, Homo sapien
ggccaaagctgtcatacatggtaaa

SEQ ID NO: 1774173 - DNA, 25 bp, Homo sapien
gctgacaacctggtaggagtgggtg

SEQ ID NO: 1774174 - DNA, 25 bp, Homo sapien
ggaaaataagtgaaaagtcttctgc

SEQ ID NO: 1774175 - DNA, 25 bp, Homo sapien
cttctaaagtgcaaagcaccttttt

SEQ ID NO: 1774176 - DNA, 25 bp, Homo sapien
tttaaagaagaaggctgacaacctg

SEQ ID NO: 1774177 - DNA, 25 bp, Homo sapien
tctccaaattcggtgaaagtctgtt

SEQ ID NO: 1774178 - DNA, 25 bp, Homo sapien
cgttctccaaattcggtgaaagtct

SEQ ID NO: 1774179 - DNA, 25 bp, Homo sapien
acacgttctccaaattcggtgaaag

SEQ ID NO: 1774180 - DNA, 25 bp, Homo sapien
caaattcggtgaaagtctgttcaga

SEQ ID NO: 1774181 - DNA, 25 bp, Homo sapien
gcagttgtcttctacagtgcaaaac

SEQ ID NO: 1774182 - DNA, 25 bp, Homo sapien
gaggcagttgtcttctacagtgcaa

SEQ ID NO: 1774183 - DNA, 25 bp, Homo sapien
tgaggcagttgtcttctacagtgca

SEQ ID NO: 1774184 - DNA, 25 bp, Homo sapien
ggcagttgtcttctacagtgcaaaa

SEQ ID NO: 1774185 - DNA, 25 bp, Homo sapien
tgtcacatccttatgcacactatgc

SEQ ID NO: 1774186 - DNA, 25 bp, Homo sapien
aacagttccaactgtcacatcctta

SEQ ID NO: 1774187 - DNA, 25 bp, Homo sapien
tagtagcaaatcagatacaacagtt

SEQ ID NO: 1774188 - DNA, 25 bp, Homo sapien
agatctgggctctccctacttagta

SEQ ID NO: 1774189 - DNA, 25 bp, Homo sapien
aactgttgtaatcagagattgtcta

SEQ ID NO: 1774190 - DNA, 25 bp, Homo sapien
gctggttcttctccatagacccctt

SEQ ID NO: 1774191 - DNA, 25 bp, Homo sapien
ctccatagaccccttgaaaataact

SEQ ID NO: 1774192 - DNA, 25 bp, Homo sapien
gagattgtctatttccatgcagcca

SEQ ID NO: 1774193 - DNA, 25 bp, Homo sapien
gtgcacggatcacaagaggtcaaca

SEQ ID NO: 1774194 - DNA, 25 bp, Homo sapien
tagtgcacggatcacaagaggtcaa

SEQ ID NO: 1774195 - DNA, 25 bp, Homo sapien
ctgcagtagtgcacggatcacaaga

SEQ ID NO: 1774196 - DNA, 25 bp, Homo sapien
cagtagtgcacggatcacaagaggt

SEQ ID NO: 1774197 - DNA, 25 bp, Homo sapien
cttgagagtggttattcgtgccacc

SEQ ID NO: 1774198 - DNA, 25 bp, Homo sapien
gagtggttattcgtgccacctgatc

SEQ ID NO: 1774199 - DNA, 25 bp, Homo sapien
gagagtggttattcgtgccacctga

SEQ ID NO: 1774200 - DNA, 25 bp, Homo sapien
gccacttgagagtggttattcgtgc

SEQ ID NO: 1774201 - DNA, 25 bp, Homo sapien
gatttctgtgtagccgatctcctcc

SEQ ID NO: 1774202 - DNA, 25 bp, Homo sapien
gaatttagctccgactttgtcttgg

SEQ ID NO: 1774203 - DNA, 25 bp, Homo sapien
gttttaatgctaatcctatagtcaa

SEQ ID NO: 1774204 - DNA, 25 bp, Homo sapien
cccctgaacttctgtgcatcctgaa

SEQ ID NO: 1774205 - DNA, 25 bp, Homo sapien
cattctgagtaaacactaggccttt

SEQ ID NO: 1774206 - DNA, 25 bp, Homo sapien
taaagtgcttgcagatcatgagaag

SEQ ID NO: 1774207 - DNA, 25 bp, Homo sapien
aaatttatatcgatctatcaggcag

SEQ ID NO: 1774208 - DNA, 25 bp, Homo sapien
tgtactgcaatagacacacaaacca

SEQ ID NO: 1774209 - DNA, 25 bp, Homo sapien
tacatgggaattgggattcactgac

SEQ ID NO: 1774210 - DNA, 25 bp, Homo sapien
tgctcagctaagtcccctaggagag

SEQ ID NO: 1774211 - DNA, 25 bp, Homo sapien
gccgacagctacatgggaattggga

SEQ ID NO: 1774212 - DNA, 25 bp, Homo sapien
tgggattcactgacttgcccagcct

SEQ ID NO: 1774213 - DNA, 25 bp, Homo sapien
tactttttcgttatcttggggcaga

SEQ ID NO: 1774214 - DNA, 25 bp, Homo sapien
accccgctccaacatactcacatat

SEQ ID NO: 1774215 - DNA, 25 bp, Homo sapien
gagctaaagatctttcctccaacac

SEQ ID NO: 1774216 - DNA, 25 bp, Homo sapien
atattcacgaaacacaacagtgacc

SEQ ID NO: 1774217 - DNA, 25 bp, Homo sapien
tgttgccacgaatgagactttggct

SEQ ID NO: 1774218 - DNA, 25 bp, Homo sapien
ggccattgaagaagacaatttgggt

SEQ ID NO: 1774219 - DNA, 25 bp, Homo sapien
gttatttgttgccacgaatgagact

SEQ ID NO: 1774220 - DNA, 25 bp, Homo sapien
gaagcatcaagtgtgggaccacctg

SEQ ID NO: 1774221 - DNA, 25 bp, Homo sapien
tttcgtgtaatctctgctgcaagtc

SEQ ID NO: 1774222 - DNA, 25 bp, Homo sapien
ctctcgctgcacctgggtagctcag

SEQ ID NO: 1774223 - DNA, 25 bp, Homo sapien
cagcaagggccaaagtgaacaagga

SEQ ID NO: 1774224 - DNA, 25 bp, Homo sapien
tcttttgatgttctcctctcgctgc

SEQ ID NO: 1774225 - DNA, 25 bp, Homo sapien
tcaggtactgttagcagggattcag

SEQ ID NO: 1774226 - DNA, 25 bp, Homo sapien
catgaccttgcatgagatcaccaag

SEQ ID NO: 1774227 - DNA, 25 bp, Homo sapien
taactgtggagtgataagtacccag

SEQ ID NO: 1774228 - DNA, 25 bp, Homo sapien
taggcagttacatgagcaggcatta

SEQ ID NO: 1774229 - DNA, 25 bp, Homo sapien
tgatgttaacctactgcttttgctg

SEQ ID NO: 1774230 - DNA, 25 bp, Homo sapien
aactcacgacccaagttcatcaatg

SEQ ID NO: 1774231 - DNA, 25 bp, Homo sapien
aaaacttgataccatagagccttga

SEQ ID NO: 1774232 - DNA, 25 bp, Homo sapien
gagtacagcagtgcattcgcggcta

SEQ ID NO: 1774233 - DNA, 25 bp, Homo sapien
tataattacaagaacagcctgtgga

SEQ ID NO: 1774234 - DNA, 25 bp, Homo sapien
gagatgagcctctgtactgtaaata

SEQ ID NO: 1774235 - DNA, 25 bp, Homo sapien
gctgcacaaacggtgttcatgatac

SEQ ID NO: 1774236 - DNA, 25 bp, Homo sapien
tgttcttgaaagtactattcccagg

SEQ ID NO: 1774237 - DNA, 25 bp, Homo sapien
tacaatctcatatgcaaccacagcc

SEQ ID NO: 1774238 - DNA, 25 bp, Homo sapien
aactctgagccgaaacttgtttgta

SEQ ID NO: 1774239 - DNA, 25 bp, Homo sapien
gcttggttaaagcaacatctgtgat

SEQ ID NO: 1774240 - DNA, 25 bp, Homo sapien
tttgctcgaagccagggatactaag

SEQ ID NO: 1774241 - DNA, 25 bp, Homo sapien
tctgtcatgggctcagcatttcaaa

SEQ ID NO: 1774242 - DNA, 25 bp, Homo sapien
taacccacaagtagctttttgcatg

SEQ ID NO: 1774243 - DNA, 25 bp, Homo sapien
cccaggctggtgagtcggatttttt

SEQ ID NO: 1774244 - DNA, 25 bp, Homo sapien
tcaaacatgctaagaaaaaagtggc

SEQ ID NO: 1774245 - DNA, 25 bp, Homo sapien
ttcaggttcccacaatcccttcctg

SEQ ID NO: 1774246 - DNA, 25 bp, Homo sapien
tcaggttcccacaatcccttcctgt

SEQ ID NO: 1774247 - DNA, 25 bp, Homo sapien
caggttcccacaatcccttcctgta

SEQ ID NO: 1774248 - DNA, 25 bp, Homo sapien
ccaggaaaattgttcgctgggtgag

SEQ ID NO: 1774249 - DNA, 25 bp, Homo sapien
taaacagctgttgggttctgaacaa

SEQ ID NO: 1774250 - DNA, 25 bp, Homo sapien
aggacacagatgactgcttggtgga

SEQ ID NO: 1774251 - DNA, 25 bp, Homo sapien
ggacttgaaaccagctctaaacagc

SEQ ID NO: 1774252 - DNA, 25 bp, Homo sapien
ggcattcttggtgacggaagtagca

SEQ ID NO: 1774253 - DNA, 25 bp, Homo sapien
tagcatgagcaactagtaggtgctc

SEQ ID NO: 1774254 - DNA, 25 bp, Homo sapien
caactagtaggtgctccaaaggtgg

SEQ ID NO: 1774255 - DNA, 25 bp, Homo sapien
ccaaaggtggtttgatgaggatact

SEQ ID NO: 1774256 - DNA, 25 bp, Homo sapien
aaaagctgggcagagctcatagagt

SEQ ID NO: 1774257 - DNA, 25 bp, Homo sapien
gaggaacccgacgaggaatggagaa

SEQ ID NO: 1774258 - DNA, 25 bp, Homo sapien
ccggcagctggtactgtttggccat

SEQ ID NO: 1774259 - DNA, 25 bp, Homo sapien
gggcagagctcatagagtcttgaac

SEQ ID NO: 1774260 - DNA, 25 bp, Homo sapien
tagcttctaaagcgtatttcctcat

SEQ ID NO: 1774261 - DNA, 25 bp, Homo sapien
ttagcttctaaagcgtatttcctca

SEQ ID NO: 1774262 - DNA, 25 bp, Homo sapien
cttagcttctaaagcgtatttcctc

SEQ ID NO: 1774263 - DNA, 25 bp, Homo sapien
tcgttcctgatattgaccggagaag

SEQ ID NO: 1774264 - DNA, 25 bp, Homo sapien
gaattagttctagggatcgttcctg

SEQ ID NO: 1774265 - DNA, 25 bp, Homo sapien
ttgctggctgtcacgtagcctgccc

SEQ ID NO: 1774266 - DNA, 25 bp, Homo sapien
tgcccacacggcaagtgccctgtgt

SEQ ID NO: 1774267 - DNA, 25 bp, Homo sapien
atgagctgaggagtctcagacagga

SEQ ID NO: 1774268 - DNA, 25 bp, Homo sapien
ggatgagctgaggagtctcagacag

SEQ ID NO: 1774269 - DNA, 25 bp, Homo sapien
tgagctgaggagtctcagacaggat

SEQ ID NO: 1774270 - DNA, 25 bp, Homo sapien
gagctgaggagtctcagacaggatc

SEQ ID NO: 1774271 - DNA, 25 bp, Homo sapien
gaagattctattgctgcagtgtgtc

SEQ ID NO: 1774272 - DNA, 25 bp, Homo sapien
ccataggatagttttggattccctc

SEQ ID NO: 1774273 - DNA, 25 bp, Homo sapien
ggttctgaagattctattgctgcag

SEQ ID NO: 1774274 - DNA, 25 bp, Homo sapien
tctccattcatctagcgtaaaatcc

SEQ ID NO: 1774275 - DNA, 25 bp, Homo sapien
caagccaaggaacgtgacgggtaca

SEQ ID NO: 1774276 - DNA, 25 bp, Homo sapien
ggtgtactcctagaagacagaaact

SEQ ID NO: 1774277 - DNA, 25 bp, Homo sapien
ctaaggtgcaggtcagccaagggac

SEQ ID NO: 1774278 - DNA, 25 bp, Homo sapien
cttctgtgccagtcggaaaggtgac

SEQ ID NO: 1774279 - DNA, 25 bp, Homo sapien
gaaacttgtaactctaagcatgatg

SEQ ID NO: 1774280 - DNA, 25 bp, Homo sapien
catggtgcacattgtatgtatctcc

SEQ ID NO: 1774281 - DNA, 25 bp, Homo sapien
tggagatgtgcacagttcatgttgc

SEQ ID NO: 1774282 - DNA, 25 bp, Homo sapien
taggaggacatctgacacctgtcat

SEQ ID NO: 1774283 - DNA, 25 bp, Homo sapien
ctcttctggcttaaataaactggaa

SEQ ID NO: 1774284 - DNA, 25 bp, Homo sapien
aaactggaaaatgtctgctctaaga

SEQ ID NO: 1774285 - DNA, 25 bp, Homo sapien
aaataaactggaaaatgtctgctct

SEQ ID NO: 1774286 - DNA, 25 bp, Homo sapien
taaactggaaaatgtctgctctaag

SEQ ID NO: 1774287 - DNA, 25 bp, Homo sapien
tacctgtcctgtgaaccctttttga

SEQ ID NO: 1774288 - DNA, 25 bp, Homo sapien
tgaaccctttttgacaccagtgttg

SEQ ID NO: 1774289 - DNA, 25 bp, Homo sapien
tgtcattttccgagaaactggttta

SEQ ID NO: 1774290 - DNA, 25 bp, Homo sapien
gtgttgtcattttccgagaaactgg

SEQ ID NO: 1774291 - DNA, 25 bp, Homo sapien
tctatgaaggtgtgcctgatatatg

SEQ ID NO: 1774292 - DNA, 25 bp, Homo sapien
aattcaggcaggtacataaggcaag

SEQ ID NO: 1774293 - DNA, 25 bp, Homo sapien
cataaggcaagggaggtgcgtctta

SEQ ID NO: 1774294 - DNA, 25 bp, Homo sapien
ggtctatgaaggtgtgcctgatata

SEQ ID NO: 1774295 - DNA, 25 bp, Homo sapien
tgctgatttccgtagcttgccgtgg

SEQ ID NO: 1774296 - DNA, 25 bp, Homo sapien
tgatttccgtagcttgccgtggcag

SEQ ID NO: 1774297 - DNA, 25 bp, Homo sapien
ttgctgatttccgtagcttgccgtg

SEQ ID NO: 1774298 - DNA, 25 bp, Homo sapien
atttccgtagcttgccgtggcagat

SEQ ID NO: 1774299 - DNA, 25 bp, Homo sapien
taactggtaatccaagccttcgctg

SEQ ID NO: 1774300 - DNA, 25 bp, Homo sapien
ttataactggtaatccaagccttcg

SEQ ID NO: 1774301 - DNA, 25 bp, Homo sapien
ggtaatccaagccttcgctgatgta

SEQ ID NO: 1774302 - DNA, 25 bp, Homo sapien
ctggtaatccaagccttcgctgatg

SEQ ID NO: 1774303 - DNA, 25 bp, Homo sapien
tgatctctacccaataacatgcggc

SEQ ID NO: 1774304 - DNA, 25 bp, Homo sapien
tggtttgcaccaacaccggctagca

SEQ ID NO: 1774305 - DNA, 25 bp, Homo sapien
ggctcgtgcacagctgatgcctgtt

SEQ ID NO: 1774306 - DNA, 25 bp, Homo sapien
tctcgagatgctgccgggctcgtgc

SEQ ID NO: 1774307 - DNA, 25 bp, Homo sapien
accccagctagcttcacatcagtat

SEQ ID NO: 1774308 - DNA, 25 bp, Homo sapien
ttctggatgagctctacagtcaccc

SEQ ID NO: 1774309 - DNA, 25 bp, Homo sapien
tggatgagctctacagtcaccccag

SEQ ID NO: 1774310 - DNA, 25 bp, Homo sapien
tgagctctacagtcaccccagctag

SEQ ID NO: 1774311 - DNA, 25 bp, Homo sapien
tgagagcgacgttcctctggaaacc

SEQ ID NO: 1774312 - DNA, 25 bp, Homo sapien
cacaaagttgtggaggtcttcactc

SEQ ID NO: 1774313 - DNA, 25 bp, Homo sapien
aaataaggccaactggtccacaggg

SEQ ID NO: 1774314 - DNA, 25 bp, Homo sapien
cagcgaaccctgatgaagtgtcttc

SEQ ID NO: 1774315 - DNA, 25 bp, Homo sapien
tgcagctaggactgaaagttgtttt

SEQ ID NO: 1774316 - DNA, 25 bp, Homo sapien
tatcagtgggtcttaaatgtgaaac

SEQ ID NO: 1774317 - DNA, 25 bp, Homo sapien
cctctttcgtaagtgtttagtatca

SEQ ID NO: 1774318 - DNA, 25 bp, Homo sapien
cgtaagtgtttagtatcagtgggtc

SEQ ID NO: 1774319 - DNA, 25 bp, Homo sapien
gatatagctttggtaaaaattgtca

SEQ ID NO: 1774320 - DNA, 25 bp, Homo sapien
tgcataacaaagcatccatagatat

SEQ ID NO: 1774321 - DNA, 25 bp, Homo sapien
tctcaatgttgttgctttatacact

SEQ ID NO: 1774322 - DNA, 25 bp, Homo sapien
gaattgctaggtaagtaaatgcata

SEQ ID NO: 1774323 - DNA, 25 bp, Homo sapien
ttacttattgactccttcactagag

SEQ ID NO: 1774324 - DNA, 25 bp, Homo sapien
taagccagatactgaccacaatgat

SEQ ID NO: 1774325 - DNA, 25 bp, Homo sapien
gaaaacacatgtagaaagtactgag

SEQ ID NO: 1774326 - DNA, 25 bp, Homo sapien
cacaatgatcacactatctagtcac

SEQ ID NO: 1774327 - DNA, 25 bp, Homo sapien
gaagctgctactgcactgatgtgat

SEQ ID NO: 1774328 - DNA, 25 bp, Homo sapien
tactgcctctatagcgggtacacac

SEQ ID NO: 1774329 - DNA, 25 bp, Homo sapien
ggccacacagagacacttctacata

SEQ ID NO: 1774330 - DNA, 25 bp, Homo sapien
cactgatgtgatggatactgcctct

SEQ ID NO: 1774331 - DNA, 25 bp, Homo sapien
caggtgcagcttccacggtatttat

SEQ ID NO: 1774332 - DNA, 25 bp, Homo sapien
gcagcttccacggtatttatcctca

SEQ ID NO: 1774333 - DNA, 25 bp, Homo sapien
tccacggtatttatcctcagcaatg

SEQ ID NO: 1774334 - DNA, 25 bp, Homo sapien
gtatttatcctcagcaatggtgaca

SEQ ID NO: 1774335 - DNA, 25 bp, Homo sapien
gctgctgctgtgtctccttcctctt

SEQ ID NO: 1774336 - DNA, 25 bp, Homo sapien
tgccgctgctgctgtgtctccttcc

SEQ ID NO: 1774337 - DNA, 25 bp, Homo sapien
ctgccgtgaaatcttccaggagctg

SEQ ID NO: 1774338 - DNA, 25 bp, Homo sapien
gccgctgctgctgtgtctccttcct

SEQ ID NO: 1774339 - DNA, 25 bp, Homo sapien
tgtgagctcagggtgaaacagcctc

SEQ ID NO: 1774340 - DNA, 25 bp, Homo sapien
agagtattccagcgtagggatgaac

SEQ ID NO: 1774341 - DNA, 25 bp, Homo sapien
tccagcgtagggatgaacatgagat

SEQ ID NO: 1774342 - DNA, 25 bp, Homo sapien
gagtattccagcgtagggatgaaca

SEQ ID NO: 1774343 - DNA, 25 bp, Homo sapien
tattccagcgtagggatgaacatga

SEQ ID NO: 1774344 - DNA, 25 bp, Homo sapien
aatttaaagtagtccagatatggtg

SEQ ID NO: 1774345 - DNA, 25 bp, Homo sapien
gcaggatgatcttttgatgccggga

SEQ ID NO: 1774346 - DNA, 25 bp, Homo sapien
attaggtatgtgtagtccatttaaa

SEQ ID NO: 1774347 - DNA, 25 bp, Homo sapien
agttcaggacaagactgggcattat

SEQ ID NO: 1774348 - DNA, 25 bp, Homo sapien
gaatccattcctggatgtacagggc

SEQ ID NO: 1774349 - DNA, 25 bp, Homo sapien
gatgtacagggcgtgaatcttcccg

SEQ ID NO: 1774350 - DNA, 25 bp, Homo sapien
tgaacgggagcgagggagaatccat

SEQ ID NO: 1774351 - DNA, 25 bp, Homo sapien
cttcccgtgagtcccagacctgtgg

SEQ ID NO: 1774352 - DNA, 25 bp, Homo sapien
tagaagcagaccacccgatatatct

SEQ ID NO: 1774353 - DNA, 25 bp, Homo sapien
catatgccttaacatgtactccaga

SEQ ID NO: 1774354 - DNA, 25 bp, Homo sapien
ccagaacaaacggacaaatcctgtg

SEQ ID NO: 1774355 - DNA, 25 bp, Homo sapien
tgcttcatacgttgaacagccgttg

SEQ ID NO: 1774356 - DNA, 25 bp, Homo sapien
gggagaggggaaactgcgctggtgc

SEQ ID NO: 1774357 - DNA, 25 bp, Homo sapien
gggaaactgcgctggtgccggtgcc

SEQ ID NO: 1774358 - DNA, 25 bp, Homo sapien
cgcatgtgcgcgtagagtcagggct

SEQ ID NO: 1774359 - DNA, 25 bp, Homo sapien
gggctgcgggcgcaatgcgcatgtg

SEQ ID NO: 1774360 - DNA, 25 bp, Homo sapien
gcctcccgccgcaccgatccgcggc

SEQ ID NO: 1774361 - DNA, 25 bp, Homo sapien
cgcctcccgccgcaccgatccgcgg

SEQ ID NO: 1774362 - DNA, 25 bp, Homo sapien
cacaaaggccacacgggcggagggg

SEQ ID NO: 1774363 - DNA, 25 bp, Homo sapien
gtgcgcgcccggcacaaaggccaca

SEQ ID NO: 1774364 - DNA, 25 bp, Homo sapien
aaaaatccacgcgaccgagatagcc

SEQ ID NO: 1774365 - DNA, 25 bp, Homo sapien
gagaaatgctctctactcgagtcag

SEQ ID NO: 1774366 - DNA, 25 bp, Homo sapien
cgttcgctattttgctgcacttgaa

SEQ ID NO: 1774367 - DNA, 25 bp, Homo sapien
taaaaacttgcgcaaaaatccacgc

SEQ ID NO: 1774368 - DNA, 25 bp, Homo sapien
catgtcggatggaagttacagggtc

SEQ ID NO: 1774369 - DNA, 25 bp, Homo sapien
tacgtagctacgagtaaaggccaaa

SEQ ID NO: 1774370 - DNA, 25 bp, Homo sapien
tccacgtctgaacggactacgtagc

SEQ ID NO: 1774371 - DNA, 25 bp, Homo sapien
tccaattcagggagcgatcaatctc

SEQ ID NO: 1774372 - DNA, 25 bp, Homo sapien
gcgatcttcacaattgctgtccact

SEQ ID NO: 1774373 - DNA, 25 bp, Homo sapien
tctctggcgatcttcacaattgctg

SEQ ID NO: 1774374 - DNA, 25 bp, Homo sapien
tctggcgatcttcacaattgctgtc

SEQ ID NO: 1774375 - DNA, 25 bp, Homo sapien
tggcgatcttcacaattgctgtcca

SEQ ID NO: 1774376 - DNA, 25 bp, Homo sapien
tttcggcggtgatgaaacacagaac

SEQ ID NO: 1774377 - DNA, 25 bp, Homo sapien
ctttcggcggtgatgaaacacagaa

SEQ ID NO: 1774378 - DNA, 25 bp, Homo sapien
cttactcatttctgaaggcgaagca

SEQ ID NO: 1774379 - DNA, 25 bp, Homo sapien
tgctagacattccttgactgtgggt

SEQ ID NO: 1774380 - DNA, 25 bp, Homo sapien
catcttgctagactcttgctagaca

SEQ ID NO: 1774381 - DNA, 25 bp, Homo sapien
tggtcaaagaaagaatcgcctcaat

SEQ ID NO: 1774382 - DNA, 25 bp, Homo sapien
acacatcaaactcttgaccacttgt

SEQ ID NO: 1774383 - DNA, 25 bp, Homo sapien
tggtaacgtgcccactccatctttc

SEQ ID NO: 1774384 - DNA, 25 bp, Homo sapien
gtcacttcctggtaacgtgcccact

SEQ ID NO: 1774385 - DNA, 25 bp, Homo sapien
cacatcaaactcttgaccacttgtg

SEQ ID NO: 1774386 - DNA, 25 bp, Homo sapien
cagggctccaaactcatttacccga

SEQ ID NO: 1774387 - DNA, 25 bp, Homo sapien
ggtaccatccaagtggtggtagcag

SEQ ID NO: 1774388 - DNA, 25 bp, Homo sapien
tcttgagcagttggtaccatccaag

SEQ ID NO: 1774389 - DNA, 25 bp, Homo sapien
ggtggtagcagttgcttttttaaca

SEQ ID NO: 1774390 - DNA, 25 bp, Homo sapien
gcaggtggaaatacgggcctggagc

SEQ ID NO: 1774391 - DNA, 25 bp, Homo sapien
aggcaggtggaaatacgggcctgga

SEQ ID NO: 1774392 - DNA, 25 bp, Homo sapien
caggtggaaatacgggcctggagct

SEQ ID NO: 1774393 - DNA, 25 bp, Homo sapien
gtggaaatacgggcctggagctcgg

SEQ ID NO: 1774394 - DNA, 25 bp, Homo sapien
tactttcactggatccttcaacctg

SEQ ID NO: 1774395 - DNA, 25 bp, Homo sapien
gttgccatactgacaacagttctca

SEQ ID NO: 1774396 - DNA, 25 bp, Homo sapien
cgagcacaattctggctgcaatagt

SEQ ID NO: 1774397 - DNA, 25 bp, Homo sapien
gaaagacactcatctacgttgccat

SEQ ID NO: 1774398 - DNA, 25 bp, Homo sapien
tgtcttcttctacgtccctttcttc

SEQ ID NO: 1774399 - DNA, 25 bp, Homo sapien
tcttccgactacacttaggatcttc

SEQ ID NO: 1774400 - DNA, 25 bp, Homo sapien
ttttcttccgactacacttaggatc

SEQ ID NO: 1774401 - DNA, 25 bp, Homo sapien
ctcattgtcttcttctacgtccctt

SEQ ID NO: 1774402 - DNA, 25 bp, Homo sapien
tagaacagtgactcccaagtaacag

SEQ ID NO: 1774403 - DNA, 25 bp, Homo sapien
atcgtctttgagagggctccctgac

SEQ ID NO: 1774404 - DNA, 25 bp, Homo sapien
gccaggagagactctatgtcatcta

SEQ ID NO: 1774405 - DNA, 25 bp, Homo sapien
aaagtagtcagccaatcctaatgcc

SEQ ID NO: 1774406 - DNA, 25 bp, Homo sapien
tttagtacagccgaatcccctcgtc

SEQ ID NO: 1774407 - DNA, 25 bp, Homo sapien
ctgctttagtacagccgaatcccct

SEQ ID NO: 1774408 - DNA, 25 bp, Homo sapien
ttttcctccgtgctctctgcgaacc

SEQ ID NO: 1774409 - DNA, 25 bp, Homo sapien
tagtacagccgaatcccctcgtctt

SEQ ID NO: 1774410 - DNA, 25 bp, Homo sapien
ggtttgtcgggacagtatgactgac

SEQ ID NO: 1774411 - DNA, 25 bp, Homo sapien
agccttgtgggggacatcccccagg

SEQ ID NO: 1774412 - DNA, 25 bp, Homo sapien
gccctggtttgtcgggacagtatga

SEQ ID NO: 1774413 - DNA, 25 bp, Homo sapien
ggcaggcaaggggatagagccttgt

SEQ ID NO: 1774414 - DNA, 25 bp, Homo sapien
gacttccaggactggtatctctgtc

SEQ ID NO: 1774415 - DNA, 25 bp, Homo sapien
tgactgatacgctgcctggctcttc

SEQ ID NO: 1774416 - DNA, 25 bp, Homo sapien
cgtccctgactgatacgctgcctgg

SEQ ID NO: 1774417 - DNA, 25 bp, Homo sapien
tccaggactggtatctctgtctctc

SEQ ID NO: 1774418 - DNA, 25 bp, Homo sapien
tccttgaacagcttcgccggcactg

SEQ ID NO: 1774419 - DNA, 25 bp, Homo sapien
cttccaggtaggatgcccagcacca

SEQ ID NO: 1774420 - DNA, 25 bp, Homo sapien
caccacgctttctttcctttaggag

SEQ ID NO: 1774421 - DNA, 25 bp, Homo sapien
gccggcactgccaccgctttctcct

SEQ ID NO: 1774422 - DNA, 25 bp, Homo sapien
gggacatcaactgctactcagaact

SEQ ID NO: 1774423 - DNA, 25 bp, Homo sapien
agtccagggacatcaactgctactc

SEQ ID NO: 1774424 - DNA, 25 bp, Homo sapien
ttttaaatcacttatgataaaacac

SEQ ID NO: 1774425 - DNA, 25 bp, Homo sapien
gaactacatctgatatctatattgt

SEQ ID NO: 1774426 - DNA, 25 bp, Homo sapien
caggatccacgccttctaatttcat

SEQ ID NO: 1774427 - DNA, 25 bp, Homo sapien
tgctcaggatccacgccttctaatt

SEQ ID NO: 1774428 - DNA, 25 bp, Homo sapien
cagtacacagactgatgctcaggat

SEQ ID NO: 1774429 - DNA, 25 bp, Homo sapien
ctccgcgacggtgaggacacagtac

SEQ ID NO: 1774430 - DNA, 25 bp, Homo sapien
gccttgcgctcttgctgggcaatat

SEQ ID NO: 1774431 - DNA, 25 bp, Homo sapien
caaaggacaaacacaaatcatccac

SEQ ID NO: 1774432 - DNA, 25 bp, Homo sapien
tcttccaactcaaaagggtctaaca

SEQ ID NO: 1774433 - DNA, 25 bp, Homo sapien
aatcatccaccaagaaactctgacc

SEQ ID NO: 1774434 - DNA, 25 bp, Homo sapien
tgcccacagtcatacctagctcgtc

SEQ ID NO: 1774435 - DNA, 25 bp, Homo sapien
ctttgagaaacaatctcctacatcc

SEQ ID NO: 1774436 - DNA, 25 bp, Homo sapien
agtcatacctagctcgtccttctca

SEQ ID NO: 1774437 - DNA, 25 bp, Homo sapien
gctttgagaaacaatctcctacatc

SEQ ID NO: 1774438 - DNA, 25 bp, Homo sapien
gctctagcatggccccagagtggac

SEQ ID NO: 1774439 - DNA, 25 bp, Homo sapien
gacagtctgccctgcactgaaggct

SEQ ID NO: 1774440 - DNA, 25 bp, Homo sapien
gaccacagctggtgcatatgcacag

SEQ ID NO: 1774441 - DNA, 25 bp, Homo sapien
cacagctggtgcatatgcacagaag

SEQ ID NO: 1774442 - DNA, 25 bp, Homo sapien
gtgaagctttatccggtatccacaa

SEQ ID NO: 1774443 - DNA, 25 bp, Homo sapien
ctgggtggatatccagagcgtctgc

SEQ ID NO: 1774444 - DNA, 25 bp, Homo sapien
ccacccaactgggtggatatccaga

SEQ ID NO: 1774445 - DNA, 25 bp, Homo sapien
tacccatcaaagtgaagctttatcc

SEQ ID NO: 1774446 - DNA, 25 bp, Homo sapien
tggagtttgtggccggttttctcac

SEQ ID NO: 1774447 - DNA, 25 bp, Homo sapien
gatggagtttgtggccggttttctc

SEQ ID NO: 1774448 - DNA, 25 bp, Homo sapien
atggagtttgtggccggttttctca

SEQ ID NO: 1774449 - DNA, 25 bp, Homo sapien
ggagcagcttgagctttacatgtct

SEQ ID NO: 1774450 - DNA, 25 bp, Homo sapien
taagataggtctgccaattgaattc

SEQ ID NO: 1774451 - DNA, 25 bp, Homo sapien
ttacatgtcttaagataggtctgcc

SEQ ID NO: 1774452 - DNA, 25 bp, Homo sapien
aataatgacttaggagcagcttgag

SEQ ID NO: 1774453 - DNA, 25 bp, Homo sapien
taccaactcgaaagcccgatgggat

SEQ ID NO: 1774454 - DNA, 25 bp, Homo sapien
caatagtcatagctctcatcccagt

SEQ ID NO: 1774455 - DNA, 25 bp, Homo sapien
tgagggattctttttgtctactgcc

SEQ ID NO: 1774456 - DNA, 25 bp, Homo sapien
aatgtaccaggaaacgattgtccac

SEQ ID NO: 1774457 - DNA, 25 bp, Homo sapien
caaccaactggatgaatatgtggac

SEQ ID NO: 1774458 - DNA, 25 bp, Homo sapien
gatgaatatgtggacttgatgcttc

SEQ ID NO: 1774459 - DNA, 25 bp, Homo sapien
ccaactggatgaatatgtggacttg

SEQ ID NO: 1774460 - DNA, 25 bp, Homo sapien
taagggttcttctatgttccttaca

SEQ ID NO: 1774461 - DNA, 25 bp, Homo sapien
tgaaagctcttgcaggagcaggtaa

SEQ ID NO: 1774462 - DNA, 25 bp, Homo sapien
ttgaaagctcttgcaggagcaggta

SEQ ID NO: 1774463 - DNA, 25 bp, Homo sapien
gctactctaataaacatagggttcc

SEQ ID NO: 1774464 - DNA, 25 bp, Homo sapien
tacccggtgatcatctgtgtctgcc

SEQ ID NO: 1774465 - DNA, 25 bp, Homo sapien
tttgtctacaacctcaagcttcatt

SEQ ID NO: 1774466 - DNA, 25 bp, Homo sapien
gtgtctgccacagttgctactctaa

SEQ ID NO: 1774467 - DNA, 25 bp, Homo sapien
ccagcctacagggtgaatatcagga

SEQ ID NO: 1774468 - DNA, 25 bp, Homo sapien
tcaggagaatctgcatctatccagt

SEQ ID NO: 1774469 - DNA, 25 bp, Homo sapien
tgtttttgaacaccagcctacaggg

SEQ ID NO: 1774470 - DNA, 25 bp, Homo sapien
cagtaatcatagcaattgttccagc

SEQ ID NO: 1774471 - DNA, 25 bp, Homo sapien
catccaccatgttctgaagcttcca

SEQ ID NO: 1774472 - DNA, 25 bp, Homo sapien
catcccggggttgagcatccaccat

SEQ ID NO: 1774473 - DNA, 25 bp, Homo sapien
agggcccagatgtctcgctctcttg

SEQ ID NO: 1774474 - DNA, 25 bp, Homo sapien
tcgctctcttgaaatggccaatccc

SEQ ID NO: 1774475 - DNA, 25 bp, Homo sapien
agatggaaagcccggatggcagcat

SEQ ID NO: 1774476 - DNA, 25 bp, Homo sapien
gattggtgggtgtgggattcctgcc

SEQ ID NO: 1774477 - DNA, 25 bp, Homo sapien
tcattcctcaagatggaaagcccgg

SEQ ID NO: 1774478 - DNA, 25 bp, Homo sapien
ctgagaaagggaagcctcggtccct

SEQ ID NO: 1774479 - DNA, 25 bp, Homo sapien
cacttaagcggtctggaaaaatacg

SEQ ID NO: 1774480 - DNA, 25 bp, Homo sapien
aatgacggactagccggaggcatct

SEQ ID NO: 1774481 - DNA, 25 bp, Homo sapien
tcttggaaatgacggactagccgga

SEQ ID NO: 1774482 - DNA, 25 bp, Homo sapien
tttatttcttggaaatgacggacta

SEQ ID NO: 1774483 - DNA, 25 bp, Homo sapien
gaaatgacggactagccggaggcat

SEQ ID NO: 1774484 - DNA, 25 bp, Homo sapien
agatactgatccccacagcccgctg

SEQ ID NO: 1774485 - DNA, 25 bp, Homo sapien
tctgagatactgatccccacagccc

SEQ ID NO: 1774486 - DNA, 25 bp, Homo sapien
tgagatactgatccccacagcccgc

SEQ ID NO: 1774487 - DNA, 25 bp, Homo sapien
atactgatccccacagcccgctgca

SEQ ID NO: 1774488 - DNA, 25 bp, Homo sapien
cattcggcataccaggtggattcag

SEQ ID NO: 1774489 - DNA, 25 bp, Homo sapien
gcttcccgatgaggatgccctgaat

SEQ ID NO: 1774490 - DNA, 25 bp, Homo sapien
ggaaaagagatccaagcattcggca

SEQ ID NO: 1774491 - DNA, 25 bp, Homo sapien
tggattcagggtgggaccgtcttaa

SEQ ID NO: 1774492 - DNA, 25 bp, Homo sapien
ctctggcttcatgtgatgttctcat

SEQ ID NO: 1774493 - DNA, 25 bp, Homo sapien
tctggcttcatgtgatgttctcatt

SEQ ID NO: 1774494 - DNA, 25 bp, Homo sapien
caaagtcttctttgacatcatcagc

SEQ ID NO: 1774495 - DNA, 25 bp, Homo sapien
tctttgacatcatcagcatgctggt

SEQ ID NO: 1774496 - DNA, 25 bp, Homo sapien
ttaggaggctacagctggatgagac

SEQ ID NO: 1774497 - DNA, 25 bp, Homo sapien
gaggaaacccactgactaggctccg

SEQ ID NO: 1774498 - DNA, 25 bp, Homo sapien
gatggtgctatccagtaccggacaa

SEQ ID NO: 1774499 - DNA, 25 bp, Homo sapien
tggtttcggaccaaagctccctgga

SEQ ID NO: 1774500 - DNA, 25 bp, Homo sapien
tccttctgagttatcatccactgac

SEQ ID NO: 1774501 - DNA, 25 bp, Homo sapien
atccactgactccacaattccaagt

SEQ ID NO: 1774502 - DNA, 25 bp, Homo sapien
tccacaattccaagtttagaagttc

SEQ ID NO: 1774503 - DNA, 25 bp, Homo sapien
aagattccttctgagttatcatcca

SEQ ID NO: 1774504 - DNA, 25 bp, Homo sapien
gggtcagcagatgctctctggatag

SEQ ID NO: 1774505 - DNA, 25 bp, Homo sapien
gatgctctctggatagatcggatgg

SEQ ID NO: 1774506 - DNA, 25 bp, Homo sapien
caccttccagcgagataaaagaatg

SEQ ID NO: 1774507 - DNA, 25 bp, Homo sapien
tagatcggatggatggcaccttcca

SEQ ID NO: 1774508 - DNA, 25 bp, Homo sapien
gtggttaaagcattggttcctttca

SEQ ID NO: 1774509 - DNA, 25 bp, Homo sapien
ccaaatgccgtgcatctcccagata

SEQ ID NO: 1774510 - DNA, 25 bp, Homo sapien
tcccagataacgagactggaggtgg

SEQ ID NO: 1774511 - DNA, 25 bp, Homo sapien
gttaaagcattggttcctttcagca

SEQ ID NO: 1774512 - DNA, 25 bp, Homo sapien
cctgcgacagttggaagaagtttgc

SEQ ID NO: 1774513 - DNA, 25 bp, Homo sapien
tgctttgctgctcccagcgcaaggg

SEQ ID NO: 1774514 - DNA, 25 bp, Homo sapien
atttggaaactttactggcagggat

SEQ ID NO: 1774515 - DNA, 25 bp, Homo sapien
catggaattggggacttaaaggaca

SEQ ID NO: 1774516 - DNA, 25 bp, Homo sapien
gccagtaatcctgtatctggtgtcg

SEQ ID NO: 1774517 - DNA, 25 bp, Homo sapien
tcaatgttccacacctcttaagcca

SEQ ID NO: 1774518 - DNA, 25 bp, Homo sapien
tctggtgtcgggcagcaaagaaaat

SEQ ID NO: 1774519 - DNA, 25 bp, Homo sapien
aatcctgtatctggtgtcgggcagc

SEQ ID NO: 1774520 - DNA, 25 bp, Homo sapien
ggtaagctctgtataaattctgaca

SEQ ID NO: 1774521 - DNA, 25 bp, Homo sapien
gttcttcacacccaggtaagctctg

SEQ ID NO: 1774522 - DNA, 25 bp, Homo sapien
tttaaatacctttccatgttcttca

SEQ ID NO: 1774523 - DNA, 25 bp, Homo sapien
aatacctttccatgttcttcacacc

SEQ ID NO: 1774524 - DNA, 25 bp, Homo sapien
ttttttcggttagcttctgcaatgc

SEQ ID NO: 1774525 - DNA, 25 bp, Homo sapien
tatacaatgccattattccagacat

SEQ ID NO: 1774526 - DNA, 25 bp, Homo sapien
tctgcaatgcatatacaatgccatt

SEQ ID NO: 1774527 - DNA, 25 bp, Homo sapien
tccagacattaggtgtcttgctaat

SEQ ID NO: 1774528 - DNA, 25 bp, Homo sapien
caaggagcccactacaaaggctgac

SEQ ID NO: 1774529 - DNA, 25 bp, Homo sapien
acaatggacagccttatagaagtct

SEQ ID NO: 1774530 - DNA, 25 bp, Homo sapien
aaggctgactggtttattacaacct

SEQ ID NO: 1774531 - DNA, 25 bp, Homo sapien
aactgacattcccaaggagcccact

SEQ ID NO: 1774532 - DNA, 25 bp, Homo sapien
gagagcagggcccagtttaatgctc

SEQ ID NO: 1774533 - DNA, 25 bp, Homo sapien
tcataagtagaaatgcttctccatc

SEQ ID NO: 1774534 - DNA, 25 bp, Homo sapien
gctttgaacatcaggatggaattga

SEQ ID NO: 1774535 - DNA, 25 bp, Homo sapien
cattgtgagaattcttctctgcagc

SEQ ID NO: 1774536 - DNA, 25 bp, Homo sapien
ttcagccctgacaattatgacaagc

SEQ ID NO: 1774537 - DNA, 25 bp, Homo sapien
gagttataaccgtccttgtgctttg

SEQ ID NO: 1774538 - DNA, 25 bp, Homo sapien
gctaaacttagccaggtttcgacta

SEQ ID NO: 1774539 - DNA, 25 bp, Homo sapien
gacaagcagttaggcaatatcatga

SEQ ID NO: 1774540 - DNA, 25 bp, Homo sapien
ccaagatgagtgagactgatgccac

SEQ ID NO: 1774541 - DNA, 25 bp, Homo sapien
gggaaatcacctccctgatctgtga

SEQ ID NO: 1774542 - DNA, 25 bp, Homo sapien
ccatctggctcttgtaaacaccggg

SEQ ID NO: 1774543 - DNA, 25 bp, Homo sapien
ccaacagggatatcaaaggaagtcc

SEQ ID NO: 1774544 - DNA, 25 bp, Homo sapien
ggtgagtcctacacttcccttcagt

SEQ ID NO: 1774545 - DNA, 25 bp, Homo sapien
gaagtgatctctttcgtgcttcatg

SEQ ID NO: 1774546 - DNA, 25 bp, Homo sapien
cgtgcttcatgtctactttctttga

SEQ ID NO: 1774547 - DNA, 25 bp, Homo sapien
tgagcacggccctccattaactttg

SEQ ID NO: 1774548 - DNA, 25 bp, Homo sapien
ttgttccttagagagctggtgctca

SEQ ID NO: 1774549 - DNA, 25 bp, Homo sapien
ctgagcccgttcttaacagagccat

SEQ ID NO: 1774550 - DNA, 25 bp, Homo sapien
gttgattcctagagctttcccgtga

SEQ ID NO: 1774551 - DNA, 25 bp, Homo sapien
gttagggcccactgactcttgtttg

SEQ ID NO: 1774552 - DNA, 25 bp, Homo sapien
gctatgtcgtaggtgcaaaatccat

SEQ ID NO: 1774553 - DNA, 25 bp, Homo sapien
tcaagatctcccagtgttagggccc

SEQ ID NO: 1774554 - DNA, 25 bp, Homo sapien
gcagtaatgtgtttaccatgtccat

SEQ ID NO: 1774555 - DNA, 25 bp, Homo sapien
tccacatatggccaagcagtaatgt

SEQ ID NO: 1774556 - DNA, 25 bp, Homo sapien
gtccatatgggcatgtggacagcat

SEQ ID NO: 1774557 - DNA, 25 bp, Homo sapien
atgtgtttaccatgtccatatgggc

SEQ ID NO: 1774558 - DNA, 25 bp, Homo sapien
ttgtcttccggtcaacccacagtga

SEQ ID NO: 1774559 - DNA, 25 bp, Homo sapien
ggcttggcacatttttcttaggtcc

SEQ ID NO: 1774560 - DNA, 25 bp, Homo sapien
ttggcacatttttcttaggtccagg

SEQ ID NO: 1774561 - DNA, 25 bp, Homo sapien
tcaacccacagtgagtgtgtcaggt

SEQ ID NO: 1774562 - DNA, 25 bp, Homo sapien
gcctctgtgatgtgaaactatactc

SEQ ID NO: 1774563 - DNA, 25 bp, Homo sapien
gatgaggctcttgggattgtagcgg

SEQ ID NO: 1774564 - DNA, 25 bp, Homo sapien
aggctagtggatgaatgcttctgca

SEQ ID NO: 1774565 - DNA, 25 bp, Homo sapien
tgccctttcacatgtgggtgggctg

SEQ ID NO: 1774566 - DNA, 25 bp, Homo sapien
acaagcacttgtccccgttgggtca

SEQ ID NO: 1774567 - DNA, 25 bp, Homo sapien
tccagtagagacataattgacaagc

SEQ ID NO: 1774568 - DNA, 25 bp, Homo sapien
gacagaaaagtagttagagattcca

SEQ ID NO: 1774569 - DNA, 25 bp, Homo sapien
aaagtagttagagattccagtagag

SEQ ID NO: 1774570 - DNA, 25 bp, Homo sapien
ggagagcctgccttattactgcaga

SEQ ID NO: 1774571 - DNA, 25 bp, Homo sapien
agatactgccatgcttggagcgtct

SEQ ID NO: 1774572 - DNA, 25 bp, Homo sapien
tggtttcggtcagcactaattcccc

SEQ ID NO: 1774573 - DNA, 25 bp, Homo sapien
catgcttggagcgtcttccttgctt

SEQ ID NO: 1774574 - DNA, 25 bp, Homo sapien
aaatggagcatagatcctttcttga

SEQ ID NO: 1774575 - DNA, 25 bp, Homo sapien
taaatggagcatagatcctttcttg

SEQ ID NO: 1774576 - DNA, 25 bp, Homo sapien
gcaaagattcttcaggagagcagat

SEQ ID NO: 1774577 - DNA, 25 bp, Homo sapien
gatgagggccttctttctgtcttgc

SEQ ID NO: 1774578 - DNA, 25 bp, Homo sapien
tcttgcagatggctcccttattcct

SEQ ID NO: 1774579 - DNA, 25 bp, Homo sapien
ggtgctggccaattcagtttctgat

SEQ ID NO: 1774580 - DNA, 25 bp, Homo sapien
gatcaaggtgctggccaattcagtt

SEQ ID NO: 1774581 - DNA, 25 bp, Homo sapien
agggtaaaagggacagccacatgga

SEQ ID NO: 1774582 - DNA, 25 bp, Homo sapien
ccagggtaaaagggacagccacatg

SEQ ID NO: 1774583 - DNA, 25 bp, Homo sapien
ttccttgcagggctccaattgcatc

SEQ ID NO: 1774584 - DNA, 25 bp, Homo sapien
ccttgcagggctccaattgcatcta

SEQ ID NO: 1774585 - DNA, 25 bp, Homo sapien
ccagccaagtatggtgtggtgctcc

SEQ ID NO: 1774586 - DNA, 25 bp, Homo sapien
ccaaaaaccagccaagtatggtgtg

SEQ ID NO: 1774587 - DNA, 25 bp, Homo sapien
agccaagtatggtgtggtgctcctg

SEQ ID NO: 1774588 - DNA, 25 bp, Homo sapien
aaaccagccaagtatggtgtggtgc

SEQ ID NO: 1774589 - DNA, 25 bp, Homo sapien
aacgtaacaatataagagtattatt

SEQ ID NO: 1774590 - DNA, 25 bp, Homo sapien
gactgacaaatccttatacaggaat

SEQ ID NO: 1774591 - DNA, 25 bp, Homo sapien
gagatgggataatggtcagccattt

SEQ ID NO: 1774592 - DNA, 25 bp, Homo sapien
catgtcagtaaagatagcatttcaa

SEQ ID NO: 1774593 - DNA, 25 bp, Homo sapien
tgctcccactgctaagatgctgtgt

SEQ ID NO: 1774594 - DNA, 25 bp, Homo sapien
ggtcagtcttgaagcctgagcaggc

SEQ ID NO: 1774595 - DNA, 25 bp, Homo sapien
tacccgtatagcataagacttccgc

SEQ ID NO: 1774596 - DNA, 25 bp, Homo sapien
tgctgtgtgcataaggcccatgttg

SEQ ID NO: 1774597 - DNA, 25 bp, Homo sapien
tcatcagtcagctgaaggattctga

SEQ ID NO: 1774598 - DNA, 25 bp, Homo sapien
gtgccgtgaactttactgactcaga

SEQ ID NO: 1774599 - DNA, 25 bp, Homo sapien
gctcagcaggttcttaagtgagaga

SEQ ID NO: 1774600 - DNA, 25 bp, Homo sapien
tggagtgggcttcaactaactagag

SEQ ID NO: 1774601 - DNA, 25 bp, Homo sapien
cactgtagtttacagagtctctaaa

SEQ ID NO: 1774602 - DNA, 25 bp, Homo sapien
atacactgtagtttacagagtctct

SEQ ID NO: 1774603 - DNA, 25 bp, Homo sapien
gcacagtttgcttagcaattacatt

SEQ ID NO: 1774604 - DNA, 25 bp, Homo sapien
ataaatgtgattgcaagatattaaa

SEQ ID NO: 1774605 - DNA, 25 bp, Homo sapien
tggcgtgcggaaacggacacaccca

SEQ ID NO: 1774606 - DNA, 25 bp, Homo sapien
gggcccgcctctagctaccgcggga

SEQ ID NO: 1774607 - DNA, 25 bp, Homo sapien
gctggcgtgcggaaacggacacacc

SEQ ID NO: 1774608 - DNA, 25 bp, Homo sapien
tggaaggctggcgtgcggaaacgga

SEQ ID NO: 1774609 - DNA, 25 bp, Homo sapien
gcgtcccggccacaaagttgcactt

SEQ ID NO: 1774610 - DNA, 25 bp, Homo sapien
cataaagccccgaagaggcgggttg

SEQ ID NO: 1774611 - DNA, 25 bp, Homo sapien
tcctggaggacgcagacaggatctg

SEQ ID NO: 1774612 - DNA, 25 bp, Homo sapien
aaagttttctgctcggctccagatg

SEQ ID NO: 1774613 - DNA, 25 bp, Homo sapien
cagtcctggtctcactccaggagct

SEQ ID NO: 1774614 - DNA, 25 bp, Homo sapien
ctcactccaggagctgtcgggacgt

SEQ ID NO: 1774615 - DNA, 25 bp, Homo sapien
cactccaggagctgtcgggacgtcg

SEQ ID NO: 1774616 - DNA, 25 bp, Homo sapien
ggagctgtcgggacgtcgggcgcct

SEQ ID NO: 1774617 - DNA, 25 bp, Homo sapien
tcctgagcaccgggccctgggggtc

SEQ ID NO: 1774618 - DNA, 25 bp, Homo sapien
ctgagcaccgggccctgggggtcgg

SEQ ID NO: 1774619 - DNA, 25 bp, Homo sapien
tgtcctgagcaccgggccctggggg

SEQ ID NO: 1774620 - DNA, 25 bp, Homo sapien
ctgtcctgagcaccgggccctgggg

SEQ ID NO: 1774621 - DNA, 25 bp, Homo sapien
cccactcccgtcagcaccctttcct

SEQ ID NO: 1774622 - DNA, 25 bp, Homo sapien
caattactctgtgatagtcaaagcc

SEQ ID NO: 1774623 - DNA, 25 bp, Homo sapien
tgtgatagtcaaagccccagaattc

SEQ ID NO: 1774624 - DNA, 25 bp, Homo sapien
gctcttggaagagtcatatcaatta

SEQ ID NO: 1774625 - DNA, 25 bp, Homo sapien
cagcatcactaaaagctcttggaag

SEQ ID NO: 1774626 - DNA, 25 bp, Homo sapien
cagtcgttttcagcggctctgtgtg

SEQ ID NO: 1774627 - DNA, 25 bp, Homo sapien
tgctctcttcagtcgttttcagcgg

SEQ ID NO: 1774628 - DNA, 25 bp, Homo sapien
agagccagatgtcccaggaaatccc

SEQ ID NO: 1774629 - DNA, 25 bp, Homo sapien
tgtcccaggaaatcccttgctctct

SEQ ID NO: 1774630 - DNA, 25 bp, Homo sapien
tgacgtcattccctgctgtcgctca

SEQ ID NO: 1774631 - DNA, 25 bp, Homo sapien
cccaggtccctgacgtcattccctg

SEQ ID NO: 1774632 - DNA, 25 bp, Homo sapien
gacgtcattccctgctgtcgctcac

SEQ ID NO: 1774633 - DNA, 25 bp, Homo sapien
ccctgacgtcattccctgctgtcgc

SEQ ID NO: 1774634 - DNA, 25 bp, Homo sapien
tatttcaactcaacagcagtgtaaa

SEQ ID NO: 1774635 - DNA, 25 bp, Homo sapien
tggacaaatactgacttcaaaccct

SEQ ID NO: 1774636 - DNA, 25 bp, Homo sapien
gttggctccctcaatatagaacaat

SEQ ID NO: 1774637 - DNA, 25 bp, Homo sapien
cagactctaggctgggttcaggaga

SEQ ID NO: 1774638 - DNA, 25 bp, Homo sapien
ctatgctcctttatccaagggaacc

SEQ ID NO: 1774639 - DNA, 25 bp, Homo sapien
tgtcactgaatccaacatcgtctgt

SEQ ID NO: 1774640 - DNA, 25 bp, Homo sapien
gctgagcactgccatgagtagtgac

SEQ ID NO: 1774641 - DNA, 25 bp, Homo sapien
catcgtctgtgctcttactgggctg

SEQ ID NO: 1774642 - DNA, 25 bp, Homo sapien
tggcagttaacgaaggcttggcaca

SEQ ID NO: 1774643 - DNA, 25 bp, Homo sapien
aaacctcatccctgatttcaaggag

SEQ ID NO: 1774644 - DNA, 25 bp, Homo sapien
gactattgcataagggtccctgccc

SEQ ID NO: 1774645 - DNA, 25 bp, Homo sapien
tatgatggagctacaggagcattgc

SEQ ID NO: 1774646 - DNA, 25 bp, Homo sapien
taaatctaactagaaggccagccac

SEQ ID NO: 1774647 - DNA, 25 bp, Homo sapien
agtctctttggatcctaagcctggc

SEQ ID NO: 1774648 - DNA, 25 bp, Homo sapien
ggcattgaagtagacactgggctca

SEQ ID NO: 1774649 - DNA, 25 bp, Homo sapien
caaagcttcacccaagtgtttggaa

SEQ ID NO: 1774650 - DNA, 25 bp, Homo sapien
cagactcaaaggagaccacttttct

SEQ ID NO: 1774651 - DNA, 25 bp, Homo sapien
ggagaccacttttctacctccacat

SEQ ID NO: 1774652 - DNA, 25 bp, Homo sapien
tgggtgagtatctggcctcttgcac

SEQ ID NO: 1774653 - DNA, 25 bp, Homo sapien
tcagtgtatgaagatgcagactcaa

SEQ ID NO: 1774654 - DNA, 25 bp, Homo sapien
ccatggggagtacataagtttgaag

SEQ ID NO: 1774655 - DNA, 25 bp, Homo sapien
gagtacataagtttgaaggcctcac

SEQ ID NO: 1774656 - DNA, 25 bp, Homo sapien
gggagtacataagtttgaaggcctc

SEQ ID NO: 1774657 - DNA, 25 bp, Homo sapien
tggggagtacataagtttgaaggcc

SEQ ID NO: 1774658 - DNA, 25 bp, Homo sapien
tcacagtcaaaagtcaggttagcag

SEQ ID NO: 1774659 - DNA, 25 bp, Homo sapien
gctctattatcactcagggtcccaa

SEQ ID NO: 1774660 - DNA, 25 bp, Homo sapien
gaggcaccaagactcccaaggattg

SEQ ID NO: 1774661 - DNA, 25 bp, Homo sapien
ggaataggaacttggccagcacaca

SEQ ID NO: 1774662 - DNA, 25 bp, Homo sapien
tttgctaaaatgctgaatgagggac

SEQ ID NO: 1774663 - DNA, 25 bp, Homo sapien
tataaagccttctctagctgaccca

SEQ ID NO: 1774664 - DNA, 25 bp, Homo sapien
taacaatgtttcagctgtccagaat

SEQ ID NO: 1774665 - DNA, 25 bp, Homo sapien
tagcagggtcagttctcagatttgg

SEQ ID NO: 1774666 - DNA, 25 bp, Homo sapien
aaaaggaaaaagatgatgtaaatat

SEQ ID NO: 1774667 - DNA, 25 bp, Homo sapien
aaggaaaaagatgatgtaaatatgt

SEQ ID NO: 1774668 - DNA, 25 bp, Homo sapien
aaaggaaaaagatgatgtaaatatg

SEQ ID NO: 1774669 - DNA, 25 bp, Homo sapien
ggaaaaagatgatgtaaatatgttc

SEQ ID NO: 1774670 - DNA, 25 bp, Homo sapien
gatggacgatgacacaattgacttg

SEQ ID NO: 1774671 - DNA, 25 bp, Homo sapien
gaaagaggcgatcgtatttgctgcc

SEQ ID NO: 1774672 - DNA, 25 bp, Homo sapien
gctgtccattcgaaaactgctccga

SEQ ID NO: 1774673 - DNA, 25 bp, Homo sapien
gaataaagccggattttgccacgaa

SEQ ID NO: 1774674 - DNA, 25 bp, Homo sapien
taacatagagtactgcagtcacaag

SEQ ID NO: 1774675 - DNA, 25 bp, Homo sapien
cagccatggctcttgaatacgttgt

SEQ ID NO: 1774676 - DNA, 25 bp, Homo sapien
gaactaccgagatagtggcatatga

SEQ ID NO: 1774677 - DNA, 25 bp, Homo sapien
gagttatcataaggctctccagcac

SEQ ID NO: 1774678 - DNA, 25 bp, Homo sapien
cacagacttaatgttctaacaaaga

SEQ ID NO: 1774679 - DNA, 25 bp, Homo sapien
tagtaaaatattgagcccactctat

SEQ ID NO: 1774680 - DNA, 25 bp, Homo sapien
aagaaaactgcctcaattgagggaa

SEQ ID NO: 1774681 - DNA, 25 bp, Homo sapien
cactctattacaatacacagactta

SEQ ID NO: 1774682 - DNA, 25 bp, Homo sapien
aagcaatagcaaaggtgtgaagaac

SEQ ID NO: 1774683 - DNA, 25 bp, Homo sapien
tagcaaaggtgtgaagaacacaaac

SEQ ID NO: 1774684 - DNA, 25 bp, Homo sapien
ttaaaaagcaatagcaaaggtgtga

SEQ ID NO: 1774685 - DNA, 25 bp, Homo sapien
aaaagcaatagcaaaggtgtgaaga

SEQ ID NO: 1774686 - DNA, 25 bp, Homo sapien
tgagggcatcaagaaccctggacct

SEQ ID NO: 1774687 - DNA, 25 bp, Homo sapien
cacaactgatggatgccgggtcttc

SEQ ID NO: 1774688 - DNA, 25 bp, Homo sapien
ggtgaggaattcaaagccatggcat

SEQ ID NO: 1774689 - DNA, 25 bp, Homo sapien
tcctttgagaagtaatctgctacaa

SEQ ID NO: 1774690 - DNA, 25 bp, Homo sapien
ctaaggcttggctgccggtagagct

SEQ ID NO: 1774691 - DNA, 25 bp, Homo sapien
tctgacaaggtcatcctgtaagaca

SEQ ID NO: 1774692 - DNA, 25 bp, Homo sapien
tctttctgacaaggtcatcctgtaa

SEQ ID NO: 1774693 - DNA, 25 bp, Homo sapien
ccaagagggccagtgcttggcctaa

SEQ ID NO: 1774694 - DNA, 25 bp, Homo sapien
cgtggtcttgaagaagtggagcagt

SEQ ID NO: 1774695 - DNA, 25 bp, Homo sapien
gtggtcttgaagaagtggagcagtc

SEQ ID NO: 1774696 - DNA, 25 bp, Homo sapien
ttgggtccttttagccttgttgatc

SEQ ID NO: 1774697 - DNA, 25 bp, Homo sapien
tcttgatgttcattgaaacccccat

SEQ ID NO: 1774698 - DNA, 25 bp, Homo sapien
ttcctctagctgtcaaccagactag

SEQ ID NO: 1774699 - DNA, 25 bp, Homo sapien
caaccagactagatcttgatgttca

SEQ ID NO: 1774700 - DNA, 25 bp, Homo sapien
tgttctaccttcttgaggtgtgcca

SEQ ID NO: 1774701 - DNA, 25 bp, Homo sapien
tttgaggacccttcgaagcactggc

SEQ ID NO: 1774702 - DNA, 25 bp, Homo sapien
aggacccttcgaagcactggcccag

SEQ ID NO: 1774703 - DNA, 25 bp, Homo sapien
tgaggacccttcgaagcactggccc

SEQ ID NO: 1774704 - DNA, 25 bp, Homo sapien
ctttgaggacccttcgaagcactgg

SEQ ID NO: 1774705 - DNA, 25 bp, Homo sapien
tatgccatgctatggaagagtgcct

SEQ ID NO: 1774706 - DNA, 25 bp, Homo sapien
ttatacgtaatcaagtaggttccag

SEQ ID NO: 1774707 - DNA, 25 bp, Homo sapien
ggtcataggcagattcatatgccat

SEQ ID NO: 1774708 - DNA, 25 bp, Homo sapien
ttccagtagggagttcaggtttgtg

SEQ ID NO: 1774709 - DNA, 25 bp, Homo sapien
ggaaattctagccaggataatcagg

SEQ ID NO: 1774710 - DNA, 25 bp, Homo sapien
atgacatacccccagtcaatatcat

SEQ ID NO: 1774711 - DNA, 25 bp, Homo sapien
tattaagagccgtatatgacatacc

SEQ ID NO: 1774712 - DNA, 25 bp, Homo sapien
ctagccaggataatcaggtaagaga

SEQ ID NO: 1774713 - DNA, 25 bp, Homo sapien
tgagtgttgaagattcccctctcag

SEQ ID NO: 1774714 - DNA, 25 bp, Homo sapien
ggtctttgaacctccacggatagct

SEQ ID NO: 1774715 - DNA, 25 bp, Homo sapien
tagatttcggtatctttgctgagtg

SEQ ID NO: 1774716 - DNA, 25 bp, Homo sapien
ctttgaagtcaaaggagcctagatt

SEQ ID NO: 1774717 - DNA, 25 bp, Homo sapien
ataattctggaagctaaacatctaa

SEQ ID NO: 1774718 - DNA, 25 bp, Homo sapien
taaaatcaaggagctggccaatctg

SEQ ID NO: 1774719 - DNA, 25 bp, Homo sapien
tctgtctctatttctccccgcaccc

SEQ ID NO: 1774720 - DNA, 25 bp, Homo sapien
caaaataccaccagttaggtggctt

SEQ ID NO: 1774721 - DNA, 25 bp, Homo sapien
ggtggcagggaatactgaagaaatt

SEQ ID NO: 1774722 - DNA, 25 bp, Homo sapien
gatactaagagaaaagcatcgcctc

SEQ ID NO: 1774723 - DNA, 25 bp, Homo sapien
caggactagatgtgaaattcagcca

SEQ ID NO: 1774724 - DNA, 25 bp, Homo sapien
tgccactgtcgttgtgtctcctctc

SEQ ID NO: 1774725 - DNA, 25 bp, Homo sapien
aaatacagtcttacccttgatggaa

SEQ ID NO: 1774726 - DNA, 25 bp, Homo sapien
atacagtcttacccttgatggaact

SEQ ID NO: 1774727 - DNA, 25 bp, Homo sapien
aatacagtcttacccttgatggaac

SEQ ID NO: 1774728 - DNA, 25 bp, Homo sapien
tcacaaatacctggcatagactcat

SEQ ID NO: 1774729 - DNA, 25 bp, Homo sapien
gaaccttcaaatgtaccagctcatt

SEQ ID NO: 1774730 - DNA, 25 bp, Homo sapien
ttctgaaccttcaaatgtaccagct

SEQ ID NO: 1774731 - DNA, 25 bp, Homo sapien
tttaatgtgtcacaaatacctggca

SEQ ID NO: 1774732 - DNA, 25 bp, Homo sapien
caggccggatatcctaggttttcca

SEQ ID NO: 1774733 - DNA, 25 bp, Homo sapien
tccagcagaacaggccggatatcct

SEQ ID NO: 1774734 - DNA, 25 bp, Homo sapien
tttttccagcagaacaggccggata

SEQ ID NO: 1774735 - DNA, 25 bp, Homo sapien
cagaacaggccggatatcctaggtt

SEQ ID NO: 1774736 - DNA, 25 bp, Homo sapien
gctggaatctaggtcagtactgagt

SEQ ID NO: 1774737 - DNA, 25 bp, Homo sapien
taggaggagggcgtaagtcccagta

SEQ ID NO: 1774738 - DNA, 25 bp, Homo sapien
taagggcagtgttgctagagttgct

SEQ ID NO: 1774739 - DNA, 25 bp, Homo sapien
cctgggtttggatccttcgaagatg

SEQ ID NO: 1774740 - DNA, 25 bp, Homo sapien
gccacctgaactggaagccagggcc

SEQ ID NO: 1774741 - DNA, 25 bp, Homo sapien
ccttatttgcatagtctttagtagt

SEQ ID NO: 1774742 - DNA, 25 bp, Homo sapien
tgcatagtctttagtagtgatactt

SEQ ID NO: 1774743 - DNA, 25 bp, Homo sapien
agccacctgaactggaagccagggc

SEQ ID NO: 1774744 - DNA, 25 bp, Homo sapien
agggtgatgaataaggcttttgtcc

SEQ ID NO: 1774745 - DNA, 25 bp, Homo sapien
ctggagagaatgagggtgatgaata

SEQ ID NO: 1774746 - DNA, 25 bp, Homo sapien
agaatgagggtgatgaataaggctt

SEQ ID NO: 1774747 - DNA, 25 bp, Homo sapien
aatgagggtgatgaataaggctttt

SEQ ID NO: 1774748 - DNA, 25 bp, Homo sapien
gcattaagaatgttcctagaccggg

SEQ ID NO: 1774749 - DNA, 25 bp, Homo sapien
aatgttcctagaccgggatgtacca

SEQ ID NO: 1774750 - DNA, 25 bp, Homo sapien
ttaagaatgttcctagaccgggatg

SEQ ID NO: 1774751 - DNA, 25 bp, Homo sapien
aagaatgttcctagaccgggatgta

SEQ ID NO: 1774752 - DNA, 25 bp, Homo sapien
agggcttgtaagtatggctcccaga

SEQ ID NO: 1774753 - DNA, 25 bp, Homo sapien
tagtctaagggcttgtaagtatggc

SEQ ID NO: 1774754 - DNA, 25 bp, Homo sapien
tctaagggcttgtaagtatggctcc

SEQ ID NO: 1774755 - DNA, 25 bp, Homo sapien
tgtaagtatggctcccagagactgg

SEQ ID NO: 1774756 - DNA, 25 bp, Homo sapien
cgtcttatagagaggcagctgtcca

SEQ ID NO: 1774757 - DNA, 25 bp, Homo sapien
ctccttacgctcctgtaaagccctg

SEQ ID NO: 1774758 - DNA, 25 bp, Homo sapien
ccccaaggcagtcgtcttatagaga

SEQ ID NO: 1774759 - DNA, 25 bp, Homo sapien
cagttgccaagacatcccattaggg

SEQ ID NO: 1774760 - DNA, 25 bp, Homo sapien
cctttagatctcagattgatgtcac

SEQ ID NO: 1774761 - DNA, 25 bp, Homo sapien
cagattgatgtcacttttctgactc

SEQ ID NO: 1774762 - DNA, 25 bp, Homo sapien
ctaaggaagacagtagttgaggaaa

SEQ ID NO: 1774763 - DNA, 25 bp, Homo sapien
ggcagtatttccgaagagcatcaat

SEQ ID NO: 1774764 - DNA, 25 bp, Homo sapien
ggaaagggcagtatttccgaagagc

SEQ ID NO: 1774765 - DNA, 25 bp, Homo sapien
gagcatcaatagtaagtcccatgga

SEQ ID NO: 1774766 - DNA, 25 bp, Homo sapien
ccattgtaaaaggagactgtcccat

SEQ ID NO: 1774767 - DNA, 25 bp, Homo sapien
tagtcaccaggagggtccttgcctt

SEQ ID NO: 1774768 - DNA, 25 bp, Homo sapien
atcttctattgttaagttagtcacc

SEQ ID NO: 1774769 - DNA, 25 bp, Homo sapien
tgttaagttagtcaccaggagggtc

SEQ ID NO: 1774770 - DNA, 25 bp, Homo sapien
agaaaccttgttcaaatacccatct

SEQ ID NO: 1774771 - DNA, 25 bp, Homo sapien
tgtcccctgttgagtgcagctggcg

SEQ ID NO: 1774772 - DNA, 25 bp, Homo sapien
tgtgtttcatgatggtagcttgcac

SEQ ID NO: 1774773 - DNA, 25 bp, Homo sapien
cacgacgacaaagatgtaacatgga

SEQ ID NO: 1774774 - DNA, 25 bp, Homo sapien
agtgagtctgtacttcagtgaatgt

SEQ ID NO: 1774775 - DNA, 25 bp, Homo sapien
cacatctcaacagtgtcaacaactt

SEQ ID NO: 1774776 - DNA, 25 bp, Homo sapien
taccaccttgtgaacatttatccaa

SEQ ID NO: 1774777 - DNA, 25 bp, Homo sapien
ttagcagttctttatctctaccacc

SEQ ID NO: 1774778 - DNA, 25 bp, Homo sapien
ggttgaacctgcgacagctttcttt

SEQ ID NO: 1774779 - DNA, 25 bp, Homo sapien
ttatctggttgattgcttcagattc

SEQ ID NO: 1774780 - DNA, 25 bp, Homo sapien
ttctggcaaattttatctggttgat

SEQ ID NO: 1774781 - DNA, 25 bp, Homo sapien
aaattttatctggttgattgcttca

SEQ ID NO: 1774782 - DNA, 25 bp, Homo sapien
ggcaaattttatctggttgattgct

SEQ ID NO: 1774783 - DNA, 25 bp, Homo sapien
ataagttttgaggaagcaaggatac

SEQ ID NO: 1774784 - DNA, 25 bp, Homo sapien
cacaggctccactacccaaaccttc

SEQ ID NO: 1774785 - DNA, 25 bp, Homo sapien
ttggcaattgttgggtcagctcttc

SEQ ID NO: 1774786 - DNA, 25 bp, Homo sapien
tccacaggctccactacccaaacct

SEQ ID NO: 1774787 - DNA, 25 bp, Homo sapien
ctctacccagaagcaaagtgcatcc

SEQ ID NO: 1774788 - DNA, 25 bp, Homo sapien
gagagaagcttgctgtatttccgca

SEQ ID NO: 1774789 - DNA, 25 bp, Homo sapien
gaagcttgctgtatttccgcaattc

SEQ ID NO: 1774790 - DNA, 25 bp, Homo sapien
gctgtatttccgcaattctttctca

SEQ ID NO: 1774791 - DNA, 25 bp, Homo sapien
cctatggagaccctatttggatcct

SEQ ID NO: 1774792 - DNA, 25 bp, Homo sapien
tctgtgtatcactctgtcaaaggca

SEQ ID NO: 1774793 - DNA, 25 bp, Homo sapien
tggtaggtgaagtaagactctgtgt

SEQ ID NO: 1774794 - DNA, 25 bp, Homo sapien
ggctgtttgttgaaggtcgtatttc

SEQ ID NO: 1774795 - DNA, 25 bp, Homo sapien
tgtcaaaggcattctggctgtttgt

SEQ ID NO: 1774796 - DNA, 25 bp, Homo sapien
cattgcgggtactcttttcccatgg

SEQ ID NO: 1774797 - DNA, 25 bp, Homo sapien
gagaccctgtatcatctccaacata

SEQ ID NO: 1774798 - DNA, 25 bp, Homo sapien
ttccctacctccatgcattgcgggt

SEQ ID NO: 1774799 - DNA, 25 bp, Homo sapien
caaccaacttcccaatctatctgag

SEQ ID NO: 1774800 - DNA, 25 bp, Homo sapien
tcttaacttattctgtccttcctgc

SEQ ID NO: 1774801 - DNA, 25 bp, Homo sapien
gatatgcacaatatacggatgctcc

SEQ ID NO: 1774802 - DNA, 25 bp, Homo sapien
tcactgttctcccagatatttgaga

SEQ ID NO: 1774803 - DNA, 25 bp, Homo sapien
cctaattgattgagtcatagctgag

SEQ ID NO: 1774804 - DNA, 25 bp, Homo sapien
agggagtcgtagaccactctggtag

SEQ ID NO: 1774805 - DNA, 25 bp, Homo sapien
tagaagggagtcgtagaccactctg

SEQ ID NO: 1774806 - DNA, 25 bp, Homo sapien
tggtagaagggagtcgtagaccact

SEQ ID NO: 1774807 - DNA, 25 bp, Homo sapien
caggcaagtggtagaagggagtcgt

SEQ ID NO: 1774808 - DNA, 25 bp, Homo sapien
aaccctgtctttaacaattcagaag

SEQ ID NO: 1774809 - DNA, 25 bp, Homo sapien
caaattttaagttgcaaccctgtct

SEQ ID NO: 1774810 - DNA, 25 bp, Homo sapien
accctgtctttaacaattcagaagc

SEQ ID NO: 1774811 - DNA, 25 bp, Homo sapien
gagtcagggacttcattgcaacact

SEQ ID NO: 1774812 - DNA, 25 bp, Homo sapien
atcctcacaacactataatagttat

SEQ ID NO: 1774813 - DNA, 25 bp, Homo sapien
gaggcagaaggacttctacatagcc

SEQ ID NO: 1774814 - DNA, 25 bp, Homo sapien
tacatagccagtaagcagtgcagct

SEQ ID NO: 1774815 - DNA, 25 bp, Homo sapien
gccattctgagtgcccgtttctgca

SEQ ID NO: 1774816 - DNA, 25 bp, Homo sapien
gcactgcaaaagagtctcccataca

SEQ ID NO: 1774817 - DNA, 25 bp, Homo sapien
cttgttggataataagagttcatgg

SEQ ID NO: 1774818 - DNA, 25 bp, Homo sapien
ggataataagagttcatggttcatg

SEQ ID NO: 1774819 - DNA, 25 bp, Homo sapien
agattcttctcagaacagtctgggc

SEQ ID NO: 1774820 - DNA, 25 bp, Homo sapien
agagtcctaaatgtgggcctgcagt

SEQ ID NO: 1774821 - DNA, 25 bp, Homo sapien
cagtgtcagtgtaagcgatgagagt

SEQ ID NO: 1774822 - DNA, 25 bp, Homo sapien
aatccccagtcgacttctctgtgcg

SEQ ID NO: 1774823 - DNA, 25 bp, Homo sapien
ctctgtgcgaggtccaagggtcagt

SEQ ID NO: 1774824 - DNA, 25 bp, Homo sapien
tcccagagtcacatcagaattcatg

SEQ ID NO: 1774825 - DNA, 25 bp, Homo sapien
catcctatcagtattgggcctgcct

SEQ ID NO: 1774826 - DNA, 25 bp, Homo sapien
taataaatccacatcggagacctca

SEQ ID NO: 1774827 - DNA, 25 bp, Homo sapien
tcatggagtcccgacgaactggagg

SEQ ID NO: 1774828 - DNA, 25 bp, Homo sapien
ctgcaagtgaggtggtatgaatcac

SEQ ID NO: 1774829 - DNA, 25 bp, Homo sapien
agtaaggtagaaggcatgatatgtc

SEQ ID NO: 1774830 - DNA, 25 bp, Homo sapien
ggtggtatgaatcactatccacaaa

SEQ ID NO: 1774831 - DNA, 25 bp, Homo sapien
taaggtagaaggcatgatatgtctg

SEQ ID NO: 1774832 - DNA, 25 bp, Homo sapien
cattaactgtttagtcttggtcacc

SEQ ID NO: 1774833 - DNA, 25 bp, Homo sapien
cattctcatggcaaagggtgtaact

SEQ ID NO: 1774834 - DNA, 25 bp, Homo sapien
ccaatggttcatttagtctttgccc

SEQ ID NO: 1774835 - DNA, 25 bp, Homo sapien
tacatgactgaacttagggtcaagg

SEQ ID NO: 1774836 - DNA, 25 bp, Homo sapien
gctctaagaatgtaaccccagaact

SEQ ID NO: 1774837 - DNA, 25 bp, Homo sapien
ctgtctagagttacatctgtgtgac

SEQ ID NO: 1774838 - DNA, 25 bp, Homo sapien
tactttgcattgaaagctctaagaa

SEQ ID NO: 1774839 - DNA, 25 bp, Homo sapien
aatgtaaccccagaactgtctagag

SEQ ID NO: 1774840 - DNA, 25 bp, Homo sapien
gagcatcagtctcagctggagagtg

SEQ ID NO: 1774841 - DNA, 25 bp, Homo sapien
gcatcagtctcagctggagagtgca

SEQ ID NO: 1774842 - DNA, 25 bp, Homo sapien
catcagtctcagctggagagtgcaa

SEQ ID NO: 1774843 - DNA, 25 bp, Homo sapien
tcagtctcagctggagagtgcaaca

SEQ ID NO: 1774844 - DNA, 25 bp, Homo sapien
tcaaacccatcatggttggagttga

SEQ ID NO: 1774845 - DNA, 25 bp, Homo sapien
gactgggttatagttagctcttttc

SEQ ID NO: 1774846 - DNA, 25 bp, Homo sapien
gagtgctccgattggctttgttgcc

SEQ ID NO: 1774847 - DNA, 25 bp, Homo sapien
ttggagttgagtgctccgattggct

SEQ ID NO: 1774848 - DNA, 25 bp, Homo sapien
ccccaagaatgtagcttgattctgc

SEQ ID NO: 1774849 - DNA, 25 bp, Homo sapien
cctggcaggtggaaaatgacttccc

SEQ ID NO: 1774850 - DNA, 25 bp, Homo sapien
tgtgactctggattgaggtccctct

SEQ ID NO: 1774851 - DNA, 25 bp, Homo sapien
ctgtcatgctgtgatcctccaggaa

SEQ ID NO: 1774852 - DNA, 25 bp, Homo sapien
tcctgaactggcatgcagtttttct

SEQ ID NO: 1774853 - DNA, 25 bp, Homo sapien
gcattcctgaactggcatgcagttt

SEQ ID NO: 1774854 - DNA, 25 bp, Homo sapien
tcttgggaatgcagggcaaatgttg

SEQ ID NO: 1774855 - DNA, 25 bp, Homo sapien
caaatgttggtccagacagtgcatt

SEQ ID NO: 1774856 - DNA, 25 bp, Homo sapien
cagtaatgagttgtagccatctggc

SEQ ID NO: 1774857 - DNA, 25 bp, Homo sapien
tatttcatcctgaatactgccaggc

SEQ ID NO: 1774858 - DNA, 25 bp, Homo sapien
ggcagtaatgagttgtagccatctg

SEQ ID NO: 1774859 - DNA, 25 bp, Homo sapien
tcatcctgaatactgccaggcagta

SEQ ID NO: 1774860 - DNA, 25 bp, Homo sapien
gggctccggcctttgctcagcatgt

SEQ ID NO: 1774861 - DNA, 25 bp, Homo sapien
tgaatgctgataggattgctggcag

SEQ ID NO: 1774862 - DNA, 25 bp, Homo sapien
cacggggaccatgggagtcacactc

SEQ ID NO: 1774863 - DNA, 25 bp, Homo sapien
tgtctcagtggaattttttgtggac

SEQ ID NO: 1774864 - DNA, 25 bp, Homo sapien
gagctccctcatgaaagctgacagc

SEQ ID NO: 1774865 - DNA, 25 bp, Homo sapien
agccagggagctccctcatgaaagc

SEQ ID NO: 1774866 - DNA, 25 bp, Homo sapien
tttgatcctgaagtaggcgatgagg

SEQ ID NO: 1774867 - DNA, 25 bp, Homo sapien
agtttgatcctgaagtaggcgatga

SEQ ID NO: 1774868 - DNA, 25 bp, Homo sapien
cagtatgtctgtgaggtgctacacg

SEQ ID NO: 1774869 - DNA, 25 bp, Homo sapien
cactgacagtgcatcggtatatttc

SEQ ID NO: 1774870 - DNA, 25 bp, Homo sapien
catggaacgtttacaccaaggtcaa

SEQ ID NO: 1774871 - DNA, 25 bp, Homo sapien
tccacacagtggaaaggatcaaact

SEQ ID NO: 1774872 - DNA, 25 bp, Homo sapien
catccagccagagatgaaacttgga

SEQ ID NO: 1774873 - DNA, 25 bp, Homo sapien
gacgttcaatgtcaatgggaggctg

SEQ ID NO: 1774874 - DNA, 25 bp, Homo sapien
gaagtctccaagtccccgatgatga

SEQ ID NO: 1774875 - DNA, 25 bp, Homo sapien
gcatcgttttattgtccctgggacg

SEQ ID NO: 1774876 - DNA, 25 bp, Homo sapien
tactttattagctgaactgttggcc

SEQ ID NO: 1774877 - DNA, 25 bp, Homo sapien
ccttgggattatgttggcgatcaca

SEQ ID NO: 1774878 - DNA, 25 bp, Homo sapien
gatcacagttctgggacagttcttc

SEQ ID NO: 1774879 - DNA, 25 bp, Homo sapien
ttgctgaccagtagaaactcattgt

SEQ ID NO: 1774880 - DNA, 25 bp, Homo sapien
taaatatgccgtttagagcagacac

SEQ ID NO: 1774881 - DNA, 25 bp, Homo sapien
tcaagagctgctgttatactgagtc

SEQ ID NO: 1774882 - DNA, 25 bp, Homo sapien
caatgtgtccagtgtatatacccag

SEQ ID NO: 1774883 - DNA, 25 bp, Homo sapien
gaagtccccttagataatagctgcc

SEQ ID NO: 1774884 - DNA, 25 bp, Homo sapien
tccatatggcaagagcactgttact

SEQ ID NO: 1774885 - DNA, 25 bp, Homo sapien
gacaaattcgttagcagtgccttca

SEQ ID NO: 1774886 - DNA, 25 bp, Homo sapien
aatggaaactactcacggaatgggt

SEQ ID NO: 1774887 - DNA, 25 bp, Homo sapien
tgcaaaggaccgaagcagttcagga

SEQ ID NO: 1774888 - DNA, 25 bp, Homo sapien
taatgtagggagactgccgacttgg

SEQ ID NO: 1774889 - DNA, 25 bp, Homo sapien
cccctggtgaaaggccttggagcat

SEQ ID NO: 1774890 - DNA, 25 bp, Homo sapien
tatccctattggtgaaccgtttcag

SEQ ID NO: 1774891 - DNA, 25 bp, Homo sapien
gattcggaactgttgtagtgagacc

SEQ ID NO: 1774892 - DNA, 25 bp, Homo sapien
tgaacacttgggtagaactcttgct

SEQ ID NO: 1774893 - DNA, 25 bp, Homo sapien
taccatttaaagctggcaccagaga

SEQ ID NO: 1774894 - DNA, 25 bp, Homo sapien
cccaagctggtaaggtgctgttcac

SEQ ID NO: 1774895 - DNA, 25 bp, Homo sapien
tgctgttgcgcagaaaggaaactct

SEQ ID NO: 1774896 - DNA, 25 bp, Homo sapien
taatgtccctttcttcaccgtccta

SEQ ID NO: 1774897 - DNA, 25 bp, Homo sapien
caatgctcaactttagtaatgtccc

SEQ ID NO: 1774898 - DNA, 25 bp, Homo sapien
tactactcactataccaatgctcaa

SEQ ID NO: 1774899 - DNA, 25 bp, Homo sapien
tagatcaagctggtacttctcagtc

SEQ ID NO: 1774900 - DNA, 25 bp, Homo sapien
ttgtgacttgttgacggtcagcatg

SEQ ID NO: 1774901 - DNA, 25 bp, Homo sapien
gtgacttgttgacggtcagcatgag

SEQ ID NO: 1774902 - DNA, 25 bp, Homo sapien
cttctttgtgacttgttgacggtca

SEQ ID NO: 1774903 - DNA, 25 bp, Homo sapien
tctttgtgacttgttgacggtcagc

SEQ ID NO: 1774904 - DNA, 25 bp, Homo sapien
gagagcagcaccctgacatgtcggt

SEQ ID NO: 1774905 - DNA, 25 bp, Homo sapien
cctgacatgtcggtcacaagagtgg

SEQ ID NO: 1774906 - DNA, 25 bp, Homo sapien
gtcggtcacaagagtggtggtacac

SEQ ID NO: 1774907 - DNA, 25 bp, Homo sapien
gcagcaccctgacatgtcggtcaca

SEQ ID NO: 1774908 - DNA, 25 bp, Homo sapien
gacagtgaacccatttcaaatcttc

SEQ ID NO: 1774909 - DNA, 25 bp, Homo sapien
tgagaagcagtctgtaaaatgacag

SEQ ID NO: 1774910 - DNA, 25 bp, Homo sapien
aacatgtttcctctacgtgtcatta

SEQ ID NO: 1774911 - DNA, 25 bp, Homo sapien
aaagtggactgaagaattgggagat

SEQ ID NO: 1774912 - DNA, 25 bp, Homo sapien
agtgatcgcccgcgttggcgtccca

SEQ ID NO: 1774913 - DNA, 25 bp, Homo sapien
tttcctagacttcaagggttctctg

SEQ ID NO: 1774914 - DNA, 25 bp, Homo sapien
tctttcctagacttcaagggttctc

SEQ ID NO: 1774915 - DNA, 25 bp, Homo sapien
ctcaagtgatcgcccgcgttggcgt

SEQ ID NO: 1774916 - DNA, 25 bp, Homo sapien
gatgagtcagctttggtataattca

SEQ ID NO: 1774917 - DNA, 25 bp, Homo sapien
tgctcccgagtcagaagggccttgc

SEQ ID NO: 1774918 - DNA, 25 bp, Homo sapien
tttgttctgcagacacgtgctcccg

SEQ ID NO: 1774919 - DNA, 25 bp, Homo sapien
tcatttaagaatcagcgttccaggc

SEQ ID NO: 1774920 - DNA, 25 bp, Homo sapien
gaaaggcccagaatgtgcagataag

SEQ ID NO: 1774921 - DNA, 25 bp, Homo sapien
ggactgcccaagctgtaacacagga

SEQ ID NO: 1774922 - DNA, 25 bp, Homo sapien
gcatatttagcacgcctgagggaat

SEQ ID NO: 1774923 - DNA, 25 bp, Homo sapien
gaagaggccattccgtgcagagaaa

SEQ ID NO: 1774924 - DNA, 25 bp, Homo sapien
gagacatagagacactgttcctgga

SEQ ID NO: 1774925 - DNA, 25 bp, Homo sapien
tagttcaatatgcacatctttggcc

SEQ ID NO: 1774926 - DNA, 25 bp, Homo sapien
gtaaattttactccagtgagacctg

SEQ ID NO: 1774927 - DNA, 25 bp, Homo sapien
cctggatgtactggagtgaggactc

SEQ ID NO: 1774928 - DNA, 25 bp, Homo sapien
ccatcttcggatttccacctggatg

SEQ ID NO: 1774929 - DNA, 25 bp, Homo sapien
aaccatcttcggatttccacctgga

SEQ ID NO: 1774930 - DNA, 25 bp, Homo sapien
cttcaaccatcttcggatttccacc

SEQ ID NO: 1774931 - DNA, 25 bp, Homo sapien
caaccatcttcggatttccacctgg

SEQ ID NO: 1774932 - DNA, 25 bp, Homo sapien
ttatacagccttgtggagcttgtaa

SEQ ID NO: 1774933 - DNA, 25 bp, Homo sapien
tatacagccttgtggagcttgtaac

SEQ ID NO: 1774934 - DNA, 25 bp, Homo sapien
ctgtgaattttgtttcatagggtgc

SEQ ID NO: 1774935 - DNA, 25 bp, Homo sapien
ggtagttgcgttggtcagatttcct

SEQ ID NO: 1774936 - DNA, 25 bp, Homo sapien
catagggtgccattaacccgttgat

SEQ ID NO: 1774937 - DNA, 25 bp, Homo sapien
cccgttgatgtatggttcagatttg

SEQ ID NO: 1774938 - DNA, 25 bp, Homo sapien
agctgcattccagggacagttcaga

SEQ ID NO: 1774939 - DNA, 25 bp, Homo sapien
ttttttccgatataacctgcccatg

SEQ ID NO: 1774940 - DNA, 25 bp, Homo sapien
gcattccagggacagttcagaccca

SEQ ID NO: 1774941 - DNA, 25 bp, Homo sapien
ggacagttcagacccatggctggta

SEQ ID NO: 1774942 - DNA, 25 bp, Homo sapien
cagactagaggagttaaaatttcat

SEQ ID NO: 1774943 - DNA, 25 bp, Homo sapien
cgtagagggctgtatggctttccat

SEQ ID NO: 1774944 - DNA, 25 bp, Homo sapien
ttccatacagactagaggagttaaa

SEQ ID NO: 1774945 - DNA, 25 bp, Homo sapien
tatggctttccatacagactagagg

SEQ ID NO: 1774946 - DNA, 25 bp, Homo sapien
tagtgtgtgtgaaactgtgattgaa

SEQ ID NO: 1774947 - DNA, 25 bp, Homo sapien
tgattgaaactgtacatgtgtggaa

SEQ ID NO: 1774948 - DNA, 25 bp, Homo sapien
taaagtcattgaggaactgcgaaca

SEQ ID NO: 1774949 - DNA, 25 bp, Homo sapien
tagggagcagataacagtagggccc

SEQ ID NO: 1774950 - DNA, 25 bp, Homo sapien
gaggttcctctatccattggtcaag

SEQ ID NO: 1774951 - DNA, 25 bp, Homo sapien
catgtcgtgctatgagaggttcctc

SEQ ID NO: 1774952 - DNA, 25 bp, Homo sapien
ttgagcgagtcacttggcagagcct

SEQ ID NO: 1774953 - DNA, 25 bp, Homo sapien
attggtcaaggaagggatcaggccc

SEQ ID NO: 1774954 - DNA, 25 bp, Homo sapien
cttgtgtgcagacagactgccgaga

SEQ ID NO: 1774955 - DNA, 25 bp, Homo sapien
gctcatttagagtaacgggaaggga

SEQ ID NO: 1774956 - DNA, 25 bp, Homo sapien
ccactgaagtcagtagtggtcttgt

SEQ ID NO: 1774957 - DNA, 25 bp, Homo sapien
gacagactgccgagaacaagaggct

SEQ ID NO: 1774958 - DNA, 25 bp, Homo sapien
gatggcttgttttttctcctcctgc

SEQ ID NO: 1774959 - DNA, 25 bp, Homo sapien
cagatggcttgttttttctcctcct

SEQ ID NO: 1774960 - DNA, 25 bp, Homo sapien
cacagatggcttgttttttctcctc

SEQ ID NO: 1774961 - DNA, 25 bp, Homo sapien
tggcttgttttttctcctcctgcgc

SEQ ID NO: 1774962 - DNA, 25 bp, Homo sapien
tgccgtgggctcaggtcacgcgtcc

SEQ ID NO: 1774963 - DNA, 25 bp, Homo sapien
gagcaacagcgggaaaaatccggct

SEQ ID NO: 1774964 - DNA, 25 bp, Homo sapien
ggtcctgttgctccgggccggatcc

SEQ ID NO: 1774965 - DNA, 25 bp, Homo sapien
tttgggattttctgcggctccctct

SEQ ID NO: 1774966 - DNA, 25 bp, Homo sapien
ggcagcccaggtcgtctcgactctg

SEQ ID NO: 1774967 - DNA, 25 bp, Homo sapien
atgccaggccggacgccggaacaag

SEQ ID NO: 1774968 - DNA, 25 bp, Homo sapien
tcgactctgcaatgcgacgctgggt

SEQ ID NO: 1774969 - DNA, 25 bp, Homo sapien
gcgacgctgggtcttcgcctgcctg

SEQ ID NO: 1774970 - DNA, 25 bp, Homo sapien
cgcatgcgggcggcgcgtctgggct

SEQ ID NO: 1774971 - DNA, 25 bp, Homo sapien
tgcgggcggcgcgtctgggctggcg

SEQ ID NO: 1774972 - DNA, 25 bp, Homo sapien
gcgctccatggtcgcggcgcatgcg

SEQ ID NO: 1774973 - DNA, 25 bp, Homo sapien
tggtcgcggcgcatgcgggcggcgc

SEQ ID NO: 1774974 - DNA, 25 bp, Homo sapien
gcactgatgtacaccccggttgcac

SEQ ID NO: 1774975 - DNA, 25 bp, Homo sapien
ccacaatgcgtgcattaaaacgctt

SEQ ID NO: 1774976 - DNA, 25 bp, Homo sapien
cattaaaacgcttcgctacaggcag

SEQ ID NO: 1774977 - DNA, 25 bp, Homo sapien
gggcttctcggtgctaccctgagtc

SEQ ID NO: 1774978 - DNA, 25 bp, Homo sapien
tttggtgagagcctcaagaagctta

SEQ ID NO: 1774979 - DNA, 25 bp, Homo sapien
gattacatctcaacacgggatttgg

SEQ ID NO: 1774980 - DNA, 25 bp, Homo sapien
gggcacgaaggcattcatgagagat

SEQ ID NO: 1774981 - DNA, 25 bp, Homo sapien
ctcattactgcagggagggcacgaa

SEQ ID NO: 1774982 - DNA, 25 bp, Homo sapien
tcacactcattggaattaattcctc

SEQ ID NO: 1774983 - DNA, 25 bp, Homo sapien
agaatccatagtattggcttcaaat

SEQ ID NO: 1774984 - DNA, 25 bp, Homo sapien
agagaatccatagtattggcttcaa

SEQ ID NO: 1774985 - DNA, 25 bp, Homo sapien
gagaatccatagtattggcttcaaa

SEQ ID NO: 1774986 - DNA, 25 bp, Homo sapien
gtcatcctgaatatctacagtagca

SEQ ID NO: 1774987 - DNA, 25 bp, Homo sapien
agtcatcctgaatatctacagtagc

SEQ ID NO: 1774988 - DNA, 25 bp, Homo sapien
tcatcctgaatatctacagtagcaa

SEQ ID NO: 1774989 - DNA, 25 bp, Homo sapien
caacgcagctgacaatcgagagaca

SEQ ID NO: 1774990 - DNA, 25 bp, Homo sapien
cgagagacactaaccgtttcaaggg

SEQ ID NO: 1774991 - DNA, 25 bp, Homo sapien
gcagttaactcgcaatttccacacg

SEQ ID NO: 1774992 - DNA, 25 bp, Homo sapien
cattcgcactgaaggcaacgcagct

SEQ ID NO: 1774993 - DNA, 25 bp, Homo sapien
tcttcagttattacagagtagaatt

SEQ ID NO: 1774994 - DNA, 25 bp, Homo sapien
aaattacgatttcccatatctccaa

SEQ ID NO: 1774995 - DNA, 25 bp, Homo sapien
taagtagcaaaattacgatttccca

SEQ ID NO: 1774996 - DNA, 25 bp, Homo sapien
taataagtagcaaaattacgatttc

SEQ ID NO: 1774997 - DNA, 25 bp, Homo sapien
taaatgagtgggtacagttgtgttc

SEQ ID NO: 1774998 - DNA, 25 bp, Homo sapien
tgtaaaggacctcatagtaaatagt

SEQ ID NO: 1774999 - DNA, 25 bp, Homo sapien
taggcattgcagatgacatagtctc

SEQ ID NO: 1775000 - DNA, 25 bp, Homo sapien
tagtgagctgactcatgatctgaag

SEQ ID NO: 1775001 - DNA, 25 bp, Homo sapien
ttacttgatcactcttgacccattc

SEQ ID NO: 1775002 - DNA, 25 bp, Homo sapien
tacttgatcactcttgacccattca

SEQ ID NO: 1775003 - DNA, 25 bp, Homo sapien
aaatttatttgaggttcatcagtga

SEQ ID NO: 1775004 - DNA, 25 bp, Homo sapien
cttcaaatttatttgaggttcatca

SEQ ID NO: 1775005 - DNA, 25 bp, Homo sapien
atagttgggttgataatcttttctc

SEQ ID NO: 1775006 - DNA, 25 bp, Homo sapien
aatagttgggttgataatcttttct

SEQ ID NO: 1775007 - DNA, 25 bp, Homo sapien
tgattggaatggacaggaaatagtt

SEQ ID NO: 1775008 - DNA, 25 bp, Homo sapien
ctctttgttggtgattggaatggac

SEQ ID NO: 1775009 - DNA, 25 bp, Homo sapien
caaatactcttaaaagctaagagca

SEQ ID NO: 1775010 - DNA, 25 bp, Homo sapien
caagtgggctaataagcatttagtt

SEQ ID NO: 1775011 - DNA, 25 bp, Homo sapien
gggctaataagcatttagttgtact

SEQ ID NO: 1775012 - DNA, 25 bp, Homo sapien
gtcctgctaaaatgccaccaaatac

SEQ ID NO: 1775013 - DNA, 25 bp, Homo sapien
gtggaaatgtgcctggtcaaagaga

SEQ ID NO: 1775014 - DNA, 25 bp, Homo sapien
ttcaaatctggctcgtaattgggcc

SEQ ID NO: 1775015 - DNA, 25 bp, Homo sapien
caatttgttagcattccctagagac

SEQ ID NO: 1775016 - DNA, 25 bp, Homo sapien
gtaaaaacagtcagtcttccaagtg

SEQ ID NO: 1775017 - DNA, 25 bp, Homo sapien
ctgaaacagggagaggaatgatgca

SEQ ID NO: 1775018 - DNA, 25 bp, Homo sapien
tgaaacagggagaggaatgatgcat

SEQ ID NO: 1775019 - DNA, 25 bp, Homo sapien
ctcccttcctctctcagcacctgct

SEQ ID NO: 1775020 - DNA, 25 bp, Homo sapien
ctggtccaccatctcccttcctctc

SEQ ID NO: 1775021 - DNA, 25 bp, Homo sapien
ccttcctctctcagcacctgctcct

SEQ ID NO: 1775022 - DNA, 25 bp, Homo sapien
tggtccaccatctcccttcctctct

SEQ ID NO: 1775023 - DNA, 25 bp, Homo sapien
catgaagagttgcaaagaagtccaa

SEQ ID NO: 1775024 - DNA, 25 bp, Homo sapien
gaagagttgcaaagaagtccaaatg

SEQ ID NO: 1775025 - DNA, 25 bp, Homo sapien
ttgcaaagaagtccaaatgcacaca

SEQ ID NO: 1775026 - DNA, 25 bp, Homo sapien
gagttgcaaagaagtccaaatgcac

SEQ ID NO: 1775027 - DNA, 25 bp, Homo sapien
cgctcatcttgttgtattattgcat

SEQ ID NO: 1775028 - DNA, 25 bp, Homo sapien
tgcaggatcttaattccttttataa

SEQ ID NO: 1775029 - DNA, 25 bp, Homo sapien
atttaataattgcatcaccagcagg

SEQ ID NO: 1775030 - DNA, 25 bp, Homo sapien
catcactgaccattgctttggccag

SEQ ID NO: 1775031 - DNA, 25 bp, Homo sapien
gaattacttctatcctgaagagaat

SEQ ID NO: 1775032 - DNA, 25 bp, Homo sapien
tgaagagaattttggtgtaggtact

SEQ ID NO: 1775033 - DNA, 25 bp, Homo sapien
gaggtccccctatgctgtgaaagct

SEQ ID NO: 1775034 - DNA, 25 bp, Homo sapien
actagagggcagccattacttaaaa

SEQ ID NO: 1775035 - DNA, 25 bp, Homo sapien
gatacagctttcgatgctgctgcct

SEQ ID NO: 1775036 - DNA, 25 bp, Homo sapien
ggctgagcaggcagaatccattgac

SEQ ID NO: 1775037 - DNA, 25 bp, Homo sapien
gatatcgtccagttgcttctggcaa

SEQ ID NO: 1775038 - DNA, 25 bp, Homo sapien
gcaatgccgaggactatctcgatga

SEQ ID NO: 1775039 - DNA, 25 bp, Homo sapien
gctggaagcactgccttatactggg

SEQ ID NO: 1775040 - DNA, 25 bp, Homo sapien
gaagggttatgcagatatcgtccag

SEQ ID NO: 1775041 - DNA, 25 bp, Homo sapien
aaggcacctccaaaggcaggactgg

SEQ ID NO: 1775042 - DNA, 25 bp, Homo sapien
gactcagattaattcctttctggag

SEQ ID NO: 1775043 - DNA, 25 bp, Homo sapien
acatggctaccaatgctgcctgtgc

SEQ ID NO: 1775044 - DNA, 25 bp, Homo sapien
gcttgccacgggggccacaaagata

SEQ ID NO: 1775045 - DNA, 25 bp, Homo sapien
agaagaagctggccttcgacatggc

SEQ ID NO: 1775046 - DNA, 25 bp, Homo sapien
gcacaggcagcattggtagccatgt

SEQ ID NO: 1775047 - DNA, 25 bp, Homo sapien
gtcaatggattctgcctgctcagcc

SEQ ID NO: 1775048 - DNA, 25 bp, Homo sapien
aggcagcagcatcgaaagctgtatc

SEQ ID NO: 1775049 - DNA, 25 bp, Homo sapien
ccagtcctgcctttggaggtgcctt

SEQ ID NO: 1775050 - DNA, 25 bp, Homo sapien
ctccagaaaggaattaatctgagtc

SEQ ID NO: 1775051 - DNA, 25 bp, Homo sapien
gccatgtcgaaggccagcttcttct

SEQ ID NO: 1775052 - DNA, 25 bp, Homo sapien
ctggacgatatctgcataacccttc

SEQ ID NO: 1775053 - DNA, 25 bp, Homo sapien
tatctttgtggcccccgtggcaagc

SEQ ID NO: 1775054 - DNA, 25 bp, Homo sapien
tcatcgagatagtcctcggcattgc

SEQ ID NO: 1775055 - DNA, 25 bp, Homo sapien
cccagtataaggcagtgcttccagc

SEQ ID NO: 1775056 - DNA, 25 bp, Homo sapien
ttgccagaagcaactggacgatatc

SEQ ID NO: 1775057 - DNA, 25 bp, Homo sapien
caattccaaaagagcatcaatacca

SEQ ID NO: 1775058 - DNA, 25 bp, Homo sapien
tgccagcttcacaaatccaacctga

SEQ ID NO: 1775059 - DNA, 25 bp, Homo sapien
ccctggaggagttcttctatgaatg

SEQ ID NO: 1775060 - DNA, 25 bp, Homo sapien
ccaaaagtgagtttacatgatctcc

SEQ ID NO: 1775061 - DNA, 25 bp, Homo sapien
ccttcagacttatgattgggacagt

SEQ ID NO: 1775062 - DNA, 25 bp, Homo sapien
tcaccaactggctctctgcaatggg

SEQ ID NO: 1775063 - DNA, 25 bp, Homo sapien
taaatggaaaccttgctgattcacc

SEQ ID NO: 1775064 - DNA, 25 bp, Homo sapien
cattgattcagtacctaccaagtgc

SEQ ID NO: 1775065 - DNA, 25 bp, Homo sapien
gaaagcgtagcccaagccattaggg

SEQ ID NO: 1775066 - DNA, 25 bp, Homo sapien
tctgaagaaagcgtagcccaagcca

SEQ ID NO: 1775067 - DNA, 25 bp, Homo sapien
ccattaggggaacggttagcaggct

SEQ ID NO: 1775068 - DNA, 25 bp, Homo sapien
gaagaaagcgtagcccaagccatta

SEQ ID NO: 1775069 - DNA, 25 bp, Homo sapien
acaagaagatgggacaacctgagga

SEQ ID NO: 1775070 - DNA, 25 bp, Homo sapien
tggggaactcaaagattaacaagaa

SEQ ID NO: 1775071 - DNA, 25 bp, Homo sapien
aacaagaagatgggacaacctgagg

SEQ ID NO: 1775072 - DNA, 25 bp, Homo sapien
attcttacggagccacggtgatttt

SEQ ID NO: 1775073 - DNA, 25 bp, Homo sapien
ctctctcctaccaggatgccttttt

SEQ ID NO: 1775074 - DNA, 25 bp, Homo sapien
cttacggagccacggtgattttgac

SEQ ID NO: 1775075 - DNA, 25 bp, Homo sapien
tctctcctaccaggatgcctttttc

SEQ ID NO: 1775076 - DNA, 25 bp, Homo sapien
gcaagagtagtgtcagagaccacag

SEQ ID NO: 1775077 - DNA, 25 bp, Homo sapien
agaagcaagagtagtgtcagagacc

SEQ ID NO: 1775078 - DNA, 25 bp, Homo sapien
ctgacttggaaacccagaagcaaga

SEQ ID NO: 1775079 - DNA, 25 bp, Homo sapien
cacagcaatgtcactcgtgctccag

SEQ ID NO: 1775080 - DNA, 25 bp, Homo sapien
aaaagtgaactctggcaccacctcg

SEQ ID NO: 1775081 - DNA, 25 bp, Homo sapien
agtgaactctggcaccacctcgagg

SEQ ID NO: 1775082 - DNA, 25 bp, Homo sapien
tgagcagcaccagcgtaacaggcca

SEQ ID NO: 1775083 - DNA, 25 bp, Homo sapien
gcaccagcgtaacaggccagcagag

SEQ ID NO: 1775084 - DNA, 25 bp, Homo sapien
atgcccagtccccggtatacctggt

SEQ ID NO: 1775085 - DNA, 25 bp, Homo sapien
agggggtccctcagttaccctcatg

SEQ ID NO: 1775086 - DNA, 25 bp, Homo sapien
tcatgcccagtccccggtatacctg

SEQ ID NO: 1775087 - DNA, 25 bp, Homo sapien
aaggccttaattgaggcaactgctg

SEQ ID NO: 1775088 - DNA, 25 bp, Homo sapien
catctccaaaactctggtatatgag

SEQ ID NO: 1775089 - DNA, 25 bp, Homo sapien
cggatattaatctgcatgcccatct

SEQ ID NO: 1775090 - DNA, 25 bp, Homo sapien
ggagcggatattaatctgcatgccc

SEQ ID NO: 1775091 - DNA, 25 bp, Homo sapien
ggtatatgagagcaggccatcagat

SEQ ID NO: 1775092 - DNA, 25 bp, Homo sapien
gtttgaaaccacttggaagaggaca

SEQ ID NO: 1775093 - DNA, 25 bp, Homo sapien
tgtgattaagtttgaaaccacttgg

SEQ ID NO: 1775094 - DNA, 25 bp, Homo sapien
tgtcattctgtgattaagtttgaaa

SEQ ID NO: 1775095 - DNA, 25 bp, Homo sapien
accacttggaagaggacaatccatt

SEQ ID NO: 1775096 - DNA, 25 bp, Homo sapien
ggacttctgcaccaaatactgaaca

SEQ ID NO: 1775097 - DNA, 25 bp, Homo sapien
gggaaaccctcacactagatctgta

SEQ ID NO: 1775098 - DNA, 25 bp, Homo sapien
aagtgcctaccagaggacaggaccc

SEQ ID NO: 1775099 - DNA, 25 bp, Homo sapien
actagatctgtacgacctcccaggg

SEQ ID NO: 1775100 - DNA, 25 bp, Homo sapien
tcagagtcagcctgtatctataaac

SEQ ID NO: 1775101 - DNA, 25 bp, Homo sapien
taggcatcaaaccagtcagtaattt

SEQ ID NO: 1775102 - DNA, 25 bp, Homo sapien
cctaatgcactcagagtcagcctgt

SEQ ID NO: 1775103 - DNA, 25 bp, Homo sapien
gcatcaaaccagtcagtaatttcca

SEQ ID NO: 1775104 - DNA, 25 bp, Homo sapien
agtctgttcccacgtaagctcattg

SEQ ID NO: 1775105 - DNA, 25 bp, Homo sapien
gaaaatgctggttgcctcctggtcc

SEQ ID NO: 1775106 - DNA, 25 bp, Homo sapien
taaggccatgttaaccacagagaga

SEQ ID NO: 1775107 - DNA, 25 bp, Homo sapien
acttttaagaagtgctggatgctcc

SEQ ID NO: 1775108 - DNA, 25 bp, Homo sapien
ggcgcgtgttaccacacctgtattt

SEQ ID NO: 1775109 - DNA, 25 bp, Homo sapien
gaaaaaatgccctaataagatggag

SEQ ID NO: 1775110 - DNA, 25 bp, Homo sapien
tgcgcccagcgaaatagatacattt

SEQ ID NO: 1775111 - DNA, 25 bp, Homo sapien
aagacaagattacttgaattggagc

SEQ ID NO: 1775112 - DNA, 25 bp, Homo sapien
tttcatataaatcaggatctatttt

SEQ ID NO: 1775113 - DNA, 25 bp, Homo sapien
tgtgactgataaacttttcatataa

SEQ ID NO: 1775114 - DNA, 25 bp, Homo sapien
aacttttcatataaatcaggatcta

SEQ ID NO: 1775115 - DNA, 25 bp, Homo sapien
ctgtgactgataaacttttcatata

SEQ ID NO: 1775116 - DNA, 25 bp, Homo sapien
caatcacaatggaagattcacagtg

SEQ ID NO: 1775117 - DNA, 25 bp, Homo sapien
cttcagcatggagcaaagatctatg

SEQ ID NO: 1775118 - DNA, 25 bp, Homo sapien
ggagcaaagatctatgcgatataat

SEQ ID NO: 1775119 - DNA, 25 bp, Homo sapien
gatctatgcgatataatatttcttc

SEQ ID NO: 1775120 - DNA, 25 bp, Homo sapien
tcttaaggactgtgtcttatacttc

SEQ ID NO: 1775121 - DNA, 25 bp, Homo sapien
tttgctgtccggtgcttctgtatca

SEQ ID NO: 1775122 - DNA, 25 bp, Homo sapien
cttctgtatcactcttaaggactgt

SEQ ID NO: 1775123 - DNA, 25 bp, Homo sapien
agatgtagcctttgctgtccggtgc

SEQ ID NO: 1775124 - DNA, 25 bp, Homo sapien
tcagttgtacttgctgtgacaggtt

SEQ ID NO: 1775125 - DNA, 25 bp, Homo sapien
cattatcctactgtgtgctctgtca

SEQ ID NO: 1775126 - DNA, 25 bp, Homo sapien
gattagcagtaaataatgtcagttg

SEQ ID NO: 1775127 - DNA, 25 bp, Homo sapien
gaaaatgcctgtcaacacccaagta

SEQ ID NO: 1775128 - DNA, 25 bp, Homo sapien
gtctgcgagcacaccctgccttttt

SEQ ID NO: 1775129 - DNA, 25 bp, Homo sapien
tgttcttctccgtgaggaccccaaa

SEQ ID NO: 1775130 - DNA, 25 bp, Homo sapien
gctgccgtgagcaaaaaaggctcca

SEQ ID NO: 1775131 - DNA, 25 bp, Homo sapien
gtttatagcacagtctgcgagcaca

SEQ ID NO: 1775132 - DNA, 25 bp, Homo sapien
atttttccttcatctcttgagaaag

SEQ ID NO: 1775133 - DNA, 25 bp, Homo sapien
ttcatctcttgagaaaggaaagcag

SEQ ID NO: 1775134 - DNA, 25 bp, Homo sapien
ccttcatctcttgagaaaggaaagc

SEQ ID NO: 1775135 - DNA, 25 bp, Homo sapien
ttccttcatctcttgagaaaggaaa

SEQ ID NO: 1775136 - DNA, 25 bp, Homo sapien
ttgctgtatctctgtaggactgcag

SEQ ID NO: 1775137 - DNA, 25 bp, Homo sapien
gcagaggacgagctttccaactcac

SEQ ID NO: 1775138 - DNA, 25 bp, Homo sapien
actgggtatatccttgctgtatctc

SEQ ID NO: 1775139 - DNA, 25 bp, Homo sapien
taggactgcagaggacgagctttcc

SEQ ID NO: 1775140 - DNA, 25 bp, Homo sapien
tttgtaaacacagcaagtgctggcg

SEQ ID NO: 1775141 - DNA, 25 bp, Homo sapien
cccgatccgcacatccttgtaggaa

SEQ ID NO: 1775142 - DNA, 25 bp, Homo sapien
aaaccacatggttcaggatgagccc

SEQ ID NO: 1775143 - DNA, 25 bp, Homo sapien
tgctggcgcatttggaatcttcatt

SEQ ID NO: 1775144 - DNA, 25 bp, Homo sapien
aatgccggatgtttcccatttatat

SEQ ID NO: 1775145 - DNA, 25 bp, Homo sapien
caatgccggatgtttcccatttata

SEQ ID NO: 1775146 - DNA, 25 bp, Homo sapien
atgccggatgtttcccatttatatg

SEQ ID NO: 1775147 - DNA, 25 bp, Homo sapien
ggtcactgagatcacattgccatag

SEQ ID NO: 1775148 - DNA, 25 bp, Homo sapien
tacattccacaatagagaagagagg

SEQ ID NO: 1775149 - DNA, 25 bp, Homo sapien
gagaagagaggtcactgagatcaca

SEQ ID NO: 1775150 - DNA, 25 bp, Homo sapien
ctacattccacaatagagaagagag

SEQ ID NO: 1775151 - DNA, 25 bp, Homo sapien
gacagccttgagcaccgcgttctcc

SEQ ID NO: 1775152 - DNA, 25 bp, Homo sapien
tactagttcagcgtcatcgggctcc

SEQ ID NO: 1775153 - DNA, 25 bp, Homo sapien
tccaccagcctcttactgagcctta

SEQ ID NO: 1775154 - DNA, 25 bp, Homo sapien
tactgagccttactagttcagcgtc

SEQ ID NO: 1775155 - DNA, 25 bp, Homo sapien
ctgagggcgaatgaaacttgggcca

SEQ ID NO: 1775156 - DNA, 25 bp, Homo sapien
gaaacttaacttaaacagcacgctg

SEQ ID NO: 1775157 - DNA, 25 bp, Homo sapien
tccctttcccttgtgcgtggctgag

SEQ ID NO: 1775158 - DNA, 25 bp, Homo sapien
gcgtccaggaggcataacccaaagt

SEQ ID NO: 1775159 - DNA, 25 bp, Homo sapien
tgtacagatgacaattccaacagtg

SEQ ID NO: 1775160 - DNA, 25 bp, Homo sapien
tactataaataaagatcacactgca

SEQ ID NO: 1775161 - DNA, 25 bp, Homo sapien
ggcatactgacttatcaaaatagga

SEQ ID NO: 1775162 - DNA, 25 bp, Homo sapien
caaacatgaaacattatggactaat

SEQ ID NO: 1775163 - DNA, 25 bp, Homo sapien
gacctggagcttatcttcggacacg

SEQ ID NO: 1775164 - DNA, 25 bp, Homo sapien
gatgtagacacacctggacaacgct

SEQ ID NO: 1775165 - DNA, 25 bp, Homo sapien
ggacttcagacccatcgtttctcga

SEQ ID NO: 1775166 - DNA, 25 bp, Homo sapien
agatggcaagggatacgataagacc

SEQ ID NO: 1775167 - DNA, 25 bp, Homo sapien
atcccctgctatcttgtctttctcc

SEQ ID NO: 1775168 - DNA, 25 bp, Homo sapien
tcatcccctgctatcttgtctttct

SEQ ID NO: 1775169 - DNA, 25 bp, Homo sapien
ccttcatcccctgctatcttgtctt

SEQ ID NO: 1775170 - DNA, 25 bp, Homo sapien
ttcatcccctgctatcttgtctttc

SEQ ID NO: 1775171 - DNA, 25 bp, Homo sapien
aaggatctgggcaaacagggcccac

SEQ ID NO: 1775172 - DNA, 25 bp, Homo sapien
gggcccaccagagacttgtatccaa

SEQ ID NO: 1775173 - DNA, 25 bp, Homo sapien
gagacttgtatccaaatgtagcagg

SEQ ID NO: 1775174 - DNA, 25 bp, Homo sapien
tgcccaaggatctgggcaaacaggg

SEQ ID NO: 1775175 - DNA, 25 bp, Homo sapien
tatgagtaggtgagaacggtgaata

SEQ ID NO: 1775176 - DNA, 25 bp, Homo sapien
gagaaacaatgtaaactggcagtgt

SEQ ID NO: 1775177 - DNA, 25 bp, Homo sapien
aaaggagcgtctatataggagctta

SEQ ID NO: 1775178 - DNA, 25 bp, Homo sapien
ggctgtaccttgtagcattctgagg

SEQ ID NO: 1775179 - DNA, 25 bp, Homo sapien
tatcactctcctattgtcaccatag

SEQ ID NO: 1775180 - DNA, 25 bp, Homo sapien
gtcaccatagcgacagatgttatat

SEQ ID NO: 1775181 - DNA, 25 bp, Homo sapien
tgaaaacaatgtcggttgaaaactg

SEQ ID NO: 1775182 - DNA, 25 bp, Homo sapien
tgatcgccttgctgttgcttccaca

SEQ ID NO: 1775183 - DNA, 25 bp, Homo sapien
agaacagacaatgcctcgccagatg

SEQ ID NO: 1775184 - DNA, 25 bp, Homo sapien
cttgagaagggtggttgacaaaagc

SEQ ID NO: 1775185 - DNA, 25 bp, Homo sapien
caatgcctcgccagatgggttcact

SEQ ID NO: 1775186 - DNA, 25 bp, Homo sapien
tagtccttcttgatttggagaacag

SEQ ID NO: 1775187 - DNA, 25 bp, Homo sapien
gttttgtgccttgtttttgcagact

SEQ ID NO: 1775188 - DNA, 25 bp, Homo sapien
cttgtttttgcagacttgatctgtt

SEQ ID NO: 1775189 - DNA, 25 bp, Homo sapien
gccttgtttttgcagacttgatctg

SEQ ID NO: 1775190 - DNA, 25 bp, Homo sapien
gtgccttgtttttgcagacttgatc

SEQ ID NO: 1775191 - DNA, 25 bp, Homo sapien
tgcacccagaaggctttcccttctc

SEQ ID NO: 1775192 - DNA, 25 bp, Homo sapien
cacccagaaggctttcccttctctt

SEQ ID NO: 1775193 - DNA, 25 bp, Homo sapien
tttcccttctctttctactatgcat

SEQ ID NO: 1775194 - DNA, 25 bp, Homo sapien
gctttcccttctctttctactatgc

SEQ ID NO: 1775195 - DNA, 25 bp, Homo sapien
tggctacaacaggtacccttccgta

SEQ ID NO: 1775196 - DNA, 25 bp, Homo sapien
ggatagaccactgagaagcaggtaa

SEQ ID NO: 1775197 - DNA, 25 bp, Homo sapien
accctcacgcaatggatagaccact

SEQ ID NO: 1775198 - DNA, 25 bp, Homo sapien
cgcaatggatagaccactgagaagc

SEQ ID NO: 1775199 - DNA, 25 bp, Homo sapien
tcacgcaatggatagaccactgaga

SEQ ID NO: 1775200 - DNA, 25 bp, Homo sapien
gagaaaactcgaactctgctccttt

SEQ ID NO: 1775201 - DNA, 25 bp, Homo sapien
gttgaaggagaaaactcgaactctg

SEQ ID NO: 1775202 - DNA, 25 bp, Homo sapien
tctttgctaccacttccgtttttca

SEQ ID NO: 1775203 - DNA, 25 bp, Homo sapien
tccccttgaatagatgccagagcag

SEQ ID NO: 1775204 - DNA, 25 bp, Homo sapien
caactcccgaggaaggctttgttgg

SEQ ID NO: 1775205 - DNA, 25 bp, Homo sapien
tgtgcacactgacagagcctggtgc

SEQ ID NO: 1775206 - DNA, 25 bp, Homo sapien
gaaagcaggcgtcccccttctgtgc

SEQ ID NO: 1775207 - DNA, 25 bp, Homo sapien
cacatcttctccgaaagcaggcgtc

SEQ ID NO: 1775208 - DNA, 25 bp, Homo sapien
ttccttgttgcagccagagtgaccg

SEQ ID NO: 1775209 - DNA, 25 bp, Homo sapien
gccagagtgaccgttgtcatttttg

SEQ ID NO: 1775210 - DNA, 25 bp, Homo sapien
actccttccaatctgtgttccttgt

SEQ ID NO: 1775211 - DNA, 25 bp, Homo sapien
cagacttttgtctccggccttgact

SEQ ID NO: 1775212 - DNA, 25 bp, Homo sapien
caggaattcccacaagtatttcatg

SEQ ID NO: 1775213 - DNA, 25 bp, Homo sapien
gataggaaacgttgcaactttgctg

SEQ ID NO: 1775214 - DNA, 25 bp, Homo sapien
gttctgcttcacaatagagcaggtc

SEQ ID NO: 1775215 - DNA, 25 bp, Homo sapien
taattcccttagctacggcagtcgc

SEQ ID NO: 1775216 - DNA, 25 bp, Homo sapien
catggagcaaagaacagcagtacag

SEQ ID NO: 1775217 - DNA, 25 bp, Homo sapien
tggagcaaagaacagcagtacaggg

SEQ ID NO: 1775218 - DNA, 25 bp, Homo sapien
accaaatttcatgcgtgtctgtgtg

SEQ ID NO: 1775219 - DNA, 25 bp, Homo sapien
tctcatggagcaaagaacagcagta

SEQ ID NO: 1775220 - DNA, 25 bp, Homo sapien
ttccatggcttctctttagttctac

SEQ ID NO: 1775221 - DNA, 25 bp, Homo sapien
tttccatggcttctctttagttcta

SEQ ID NO: 1775222 - DNA, 25 bp, Homo sapien
cacgcccagcagggatcagctgagc

SEQ ID NO: 1775223 - DNA, 25 bp, Homo sapien
tgagcaaaatcacctcgccgaatca

SEQ ID NO: 1775224 - DNA, 25 bp, Homo sapien
tccagatgactgcaggtgcatgagc

SEQ ID NO: 1775225 - DNA, 25 bp, Homo sapien
catgagcacgcccagcagggatcag

SEQ ID NO: 1775226 - DNA, 25 bp, Homo sapien
cttctttccatcctagaccatccat

SEQ ID NO: 1775227 - DNA, 25 bp, Homo sapien
cttcccgtttacctactgattggag

SEQ ID NO: 1775228 - DNA, 25 bp, Homo sapien
gggataccacacttgcaggaaaaag

SEQ ID NO: 1775229 - DNA, 25 bp, Homo sapien
tctctgccattggaaatgagggata

SEQ ID NO: 1775230 - DNA, 25 bp, Homo sapien
agacagtgccccattaggaggtgga

SEQ ID NO: 1775231 - DNA, 25 bp, Homo sapien
ggaaaaagacagtgccccattagga

SEQ ID NO: 1775232 - DNA, 25 bp, Homo sapien
atgggttggtatgccacatactgtt

SEQ ID NO: 1775233 - DNA, 25 bp, Homo sapien
tgccacatactgtttgaccatctga

SEQ ID NO: 1775234 - DNA, 25 bp, Homo sapien
ggtatgccacatactgtttgaccat

SEQ ID NO: 1775235 - DNA, 25 bp, Homo sapien
cacatactgtttgaccatctgagtt

SEQ ID NO: 1775236 - DNA, 25 bp, Homo sapien
ggtttgcagcactagttgccagatg

SEQ ID NO: 1775237 - DNA, 25 bp, Homo sapien
aacactgcttggttgctacttaagg

SEQ ID NO: 1775238 - DNA, 25 bp, Homo sapien
agtgacacaacactgcttggttgct

SEQ ID NO: 1775239 - DNA, 25 bp, Homo sapien
tttgcagcactagttgccagatggc

SEQ ID NO: 1775240 - DNA, 25 bp, Homo sapien
gtcatccttggggttcagagcagag

SEQ ID NO: 1775241 - DNA, 25 bp, Homo sapien
ccatgagcatggtatggatctccag

SEQ ID NO: 1775242 - DNA, 25 bp, Homo sapien
ctccagtgtaatgggaattctgagc

SEQ ID NO: 1775243 - DNA, 25 bp, Homo sapien
tcagagcagaggttctaaaatccat

SEQ ID NO: 1775244 - DNA, 25 bp, Homo sapien
tacaattgggccataagagttattc

SEQ ID NO: 1775245 - DNA, 25 bp, Homo sapien
cacctgatctacaattgggccataa

SEQ ID NO: 1775246 - DNA, 25 bp, Homo sapien
gggccataagagttattctccagtt

SEQ ID NO: 1775247 - DNA, 25 bp, Homo sapien
cataagagttattctccagtttgct

SEQ ID NO: 1775248 - DNA, 25 bp, Homo sapien
tcttgcagatccactaccttggcca

SEQ ID NO: 1775249 - DNA, 25 bp, Homo sapien
cttcttgcagatccactaccttggc

SEQ ID NO: 1775250 - DNA, 25 bp, Homo sapien
tgcagatccactaccttggccacag

SEQ ID NO: 1775251 - DNA, 25 bp, Homo sapien
ttgcagatccactaccttggccaca

SEQ ID NO: 1775252 - DNA, 25 bp, Homo sapien
cgggaactttgagcattcactctcc

SEQ ID NO: 1775253 - DNA, 25 bp, Homo sapien
cagtgctgaaccactcgggaacttt

SEQ ID NO: 1775254 - DNA, 25 bp, Homo sapien
actctcccttggactgctccaccgc

SEQ ID NO: 1775255 - DNA, 25 bp, Homo sapien
gaaccactcgggaactttgagcatt

SEQ ID NO: 1775256 - DNA, 25 bp, Homo sapien
tccatcccgtggatgtctacaaaat

SEQ ID NO: 1775257 - DNA, 25 bp, Homo sapien
taattcttttgccaagatcttgccc

SEQ ID NO: 1775258 - DNA, 25 bp, Homo sapien
tttggaacggtatccatcccgtgga

SEQ ID NO: 1775259 - DNA, 25 bp, Homo sapien
ttctggcagattctcatgtttgtgc

SEQ ID NO: 1775260 - DNA, 25 bp, Homo sapien
tctaggtggagtaggctggtgcttt

SEQ ID NO: 1775261 - DNA, 25 bp, Homo sapien
tgccttccttcttttccagattatt

SEQ ID NO: 1775262 - DNA, 25 bp, Homo sapien
cgtgaatgcacagggaataggctcc

SEQ ID NO: 1775263 - DNA, 25 bp, Homo sapien
tgccgtgaatgcacagggaataggc

SEQ ID NO: 1775264 - DNA, 25 bp, Homo sapien
ccagaggtcttttgcttcttttata

SEQ ID NO: 1775265 - DNA, 25 bp, Homo sapien
gtccagaggtcttttgcttctttta

SEQ ID NO: 1775266 - DNA, 25 bp, Homo sapien
agtccagaggtcttttgcttctttt

SEQ ID NO: 1775267 - DNA, 25 bp, Homo sapien
cagaggtcttttgcttcttttatac

SEQ ID NO: 1775268 - DNA, 25 bp, Homo sapien
gccatacagttctgaccaacaagtg

SEQ ID NO: 1775269 - DNA, 25 bp, Homo sapien
tagatgtcttctagtaggatggccc

SEQ ID NO: 1775270 - DNA, 25 bp, Homo sapien
ccacattttggttggtggactccct

SEQ ID NO: 1775271 - DNA, 25 bp, Homo sapien
tttacaacctctttacctagatgtc

SEQ ID NO: 1775272 - DNA, 25 bp, Homo sapien
accacgatcaaacttgcttcatccc

SEQ ID NO: 1775273 - DNA, 25 bp, Homo sapien
ccacgatcaaacttgcttcatccct

SEQ ID NO: 1775274 - DNA, 25 bp, Homo sapien
atccaccacgatcaaacttgcttca

SEQ ID NO: 1775275 - DNA, 25 bp, Homo sapien
tccaccacgatcaaacttgcttcat

SEQ ID NO: 1775276 - DNA, 25 bp, Homo sapien
caccaaaattggcattatgcaaagc

SEQ ID NO: 1775277 - DNA, 25 bp, Homo sapien
gaatccaggagatactcatatgcct

SEQ ID NO: 1775278 - DNA, 25 bp, Homo sapien
attggcattatgcaaagcctccttc

SEQ ID NO: 1775279 - DNA, 25 bp, Homo sapien
agtctgattgaaggaatccaggaga

SEQ ID NO: 1775280 - DNA, 25 bp, Homo sapien
gatcacctgaacttgggaggttaag

SEQ ID NO: 1775281 - DNA, 25 bp, Homo sapien
aggcaagaggatcacctgaacttgg

SEQ ID NO: 1775282 - DNA, 25 bp, Homo sapien
aagaggatcacctgaacttgggagg

SEQ ID NO: 1775283 - DNA, 25 bp, Homo sapien
ggatcacctgaacttgggaggttaa

SEQ ID NO: 1775284 - DNA, 25 bp, Homo sapien
agaggcgcgtcagctttctcaccaa

SEQ ID NO: 1775285 - DNA, 25 bp, Homo sapien
caccaagttttagggttgtgtggat

SEQ ID NO: 1775286 - DNA, 25 bp, Homo sapien
atccatttcccaagaggcgcgtcag

SEQ ID NO: 1775287 - DNA, 25 bp, Homo sapien
tagggttgtgtggatgtctagattt

SEQ ID NO: 1775288 - DNA, 25 bp, Homo sapien
gctgcctctcatactaaacacattg

SEQ ID NO: 1775289 - DNA, 25 bp, Homo sapien
tgaggctactgctcttgaagagtaa

SEQ ID NO: 1775290 - DNA, 25 bp, Homo sapien
ttgccatatgattgaagtgctgctg

SEQ ID NO: 1775291 - DNA, 25 bp, Homo sapien
gctaccacgcatgctgggagccata

SEQ ID NO: 1775292 - DNA, 25 bp, Homo sapien
atagagaactcaaagattgtactta

SEQ ID NO: 1775293 - DNA, 25 bp, Homo sapien
tagagaactcaaagattgtacttac

SEQ ID NO: 1775294 - DNA, 25 bp, Homo sapien
tatagagaactcaaagattgtactt

SEQ ID NO: 1775295 - DNA, 25 bp, Homo sapien
taaaaagtggataatggctgggtgc

SEQ ID NO: 1775296 - DNA, 25 bp, Homo sapien
taaatatggctaatattgtgcaata

SEQ ID NO: 1775297 - DNA, 25 bp, Homo sapien
tgtacatcatacacaaccctacatc

SEQ ID NO: 1775298 - DNA, 25 bp, Homo sapien
taaaaagtagatatgtttccttata

SEQ ID NO: 1775299 - DNA, 25 bp, Homo sapien
cattccccctaggtctagcttctga

SEQ ID NO: 1775300 - DNA, 25 bp, Homo sapien
ttggaagcagggctatgagcagtat

SEQ ID NO: 1775301 - DNA, 25 bp, Homo sapien
tttcaaaatttttgccaacaaggca

SEQ ID NO: 1775302 - DNA, 25 bp, Homo sapien
ttgtaacatccaggaacttggctgc

SEQ ID NO: 1775303 - DNA, 25 bp, Homo sapien
gaatttttcctctggtttgtggaca

SEQ ID NO: 1775304 - DNA, 25 bp, Homo sapien
tctggtttgtggacaccttcatggc

SEQ ID NO: 1775305 - DNA, 25 bp, Homo sapien
tcacagcttggcagcaactgaggac

SEQ ID NO: 1775306 - DNA, 25 bp, Homo sapien
aactgaggaccactgggtccacagg

SEQ ID NO: 1775307 - DNA, 25 bp, Homo sapien
gagcaatcagaacgatttctgcccc

SEQ ID NO: 1775308 - DNA, 25 bp, Homo sapien
gatggagagcaatcagaacgatttc

SEQ ID NO: 1775309 - DNA, 25 bp, Homo sapien
tcagatggatggagagcaatcagaa

SEQ ID NO: 1775310 - DNA, 25 bp, Homo sapien
gcaatcagaacgatttctgccccaa

SEQ ID NO: 1775311 - DNA, 25 bp, Homo sapien
ccctcagtgacagagggcgcatctt

SEQ ID NO: 1775312 - DNA, 25 bp, Homo sapien
ctcagtgacagagggcgcatctttt

SEQ ID NO: 1775313 - DNA, 25 bp, Homo sapien
aacctttatctaatgaggacagctg

SEQ ID NO: 1775314 - DNA, 25 bp, Homo sapien
aacaacctttatctaatgaggacag

SEQ ID NO: 1775315 - DNA, 25 bp, Homo sapien
ccaataatccctatggttctggact

SEQ ID NO: 1775316 - DNA, 25 bp, Homo sapien
aaggagctccaataatccctatggt

SEQ ID NO: 1775317 - DNA, 25 bp, Homo sapien
taatccctatggttctggacttggc

SEQ ID NO: 1775318 - DNA, 25 bp, Homo sapien
ggagctccaataatccctatggttc

SEQ ID NO: 1775319 - DNA, 25 bp, Homo sapien
tttagagttgccaacccgcagtagg

SEQ ID NO: 1775320 - DNA, 25 bp, Homo sapien
cctggccagattgtatcagaaaact

SEQ ID NO: 1775321 - DNA, 25 bp, Homo sapien
tagccttggctgagatcacgagcca

SEQ ID NO: 1775322 - DNA, 25 bp, Homo sapien
caagtgaggcacataaaggattcta

SEQ ID NO: 1775323 - DNA, 25 bp, Homo sapien
ctttctcaatactgtagggccttct

SEQ ID NO: 1775324 - DNA, 25 bp, Homo sapien
gacgtcatgttaccagtatcacaca

SEQ ID NO: 1775325 - DNA, 25 bp, Homo sapien
tgtaaatcttgggaaggtagaccca

SEQ ID NO: 1775326 - DNA, 25 bp, Homo sapien
tatcacacactggtgcggctgtata

SEQ ID NO: 1775327 - DNA, 25 bp, Homo sapien
cggctgtatactgggctctcagtga

SEQ ID NO: 1775328 - DNA, 25 bp, Homo sapien
caatttgaaagggactgtcattagg

SEQ ID NO: 1775329 - DNA, 25 bp, Homo sapien
tagggatgtcagcaaagggcaggtc

SEQ ID NO: 1775330 - DNA, 25 bp, Homo sapien
ggtccccataatccttcacatcaca

SEQ ID NO: 1775331 - DNA, 25 bp, Homo sapien
aaagggactgtcattagggatgtca

SEQ ID NO: 1775332 - DNA, 25 bp, Homo sapien
cttccgttcttcttgacttctgcca

SEQ ID NO: 1775333 - DNA, 25 bp, Homo sapien
cgttcttcttgacttctgccacctt

SEQ ID NO: 1775334 - DNA, 25 bp, Homo sapien
tccgttcttcttgacttctgccacc

SEQ ID NO: 1775335 - DNA, 25 bp, Homo sapien
ttcttcttgacttctgccaccttgc

SEQ ID NO: 1775336 - DNA, 25 bp, Homo sapien
ccagcgtatggcgtgtgttcactca

SEQ ID NO: 1775337 - DNA, 25 bp, Homo sapien
tctcgaagtggaagcaataatgcct

SEQ ID NO: 1775338 - DNA, 25 bp, Homo sapien
tataatgcaacctgaatatgccgca

SEQ ID NO: 1775339 - DNA, 25 bp, Homo sapien
gaaaaccacgattagagcgtagcca

SEQ ID NO: 1775340 - DNA, 25 bp, Homo sapien
gactccaagatcagggtggaccctg

SEQ ID NO: 1775341 - DNA, 25 bp, Homo sapien
cagtgtgagcatccacccagatgac

SEQ ID NO: 1775342 - DNA, 25 bp, Homo sapien
ggttgtccatgcaagtttccacttg

SEQ ID NO: 1775343 - DNA, 25 bp, Homo sapien
aaagatacaggttgtccatgcaagt

SEQ ID NO: 1775344 - DNA, 25 bp, Homo sapien
ggagacctggtgctagcccttgctt

SEQ ID NO: 1775345 - DNA, 25 bp, Homo sapien
ccagaggatggcctagagcagctga

SEQ ID NO: 1775346 - DNA, 25 bp, Homo sapien
tattgcactagagtaccaaccagtc

SEQ ID NO: 1775347 - DNA, 25 bp, Homo sapien
tattaagtcagtttgcaaggcagag

SEQ ID NO: 1775348 - DNA, 25 bp, Homo sapien
tacagggagtcacccaggagaatcc

SEQ ID NO: 1775349 - DNA, 25 bp, Homo sapien
ggagtcacccaggagaatcctggca

SEQ ID NO: 1775350 - DNA, 25 bp, Homo sapien
gatatacagggagtcacccaggaga

SEQ ID NO: 1775351 - DNA, 25 bp, Homo sapien
cccaggagaatcctggcacatcggg

SEQ ID NO: 1775352 - DNA, 25 bp, Homo sapien
ctctcaagccaatatacacaatatc

SEQ ID NO: 1775353 - DNA, 25 bp, Homo sapien
tctctcaagccaatatacacaatat

SEQ ID NO: 1775354 - DNA, 25 bp, Homo sapien
tgtgcccgcctgtctccttttaagg

SEQ ID NO: 1775355 - DNA, 25 bp, Homo sapien
ggtcagtaaagcatatctagcacac

SEQ ID NO: 1775356 - DNA, 25 bp, Homo sapien
ggttctatgaacctaactcaatata

SEQ ID NO: 1775357 - DNA, 25 bp, Homo sapien
taattaataaggctgactgtgcccg

SEQ ID NO: 1775358 - DNA, 25 bp, Homo sapien
gtatttaatgcctagagttttcaaa

SEQ ID NO: 1775359 - DNA, 25 bp, Homo sapien
tatttaatgcctagagttttcaaaa

SEQ ID NO: 1775360 - DNA, 25 bp, Homo sapien
aagtatttaatgcctagagttttca

SEQ ID NO: 1775361 - DNA, 25 bp, Homo sapien
agtatttaatgcctagagttttcaa

SEQ ID NO: 1775362 - DNA, 25 bp, Homo sapien
cttcctagtagatagctgagtgttt

SEQ ID NO: 1775363 - DNA, 25 bp, Homo sapien
gctgagtgtttcttccatcaccttg

SEQ ID NO: 1775364 - DNA, 25 bp, Homo sapien
catcaccttgccaattcctagtctg

SEQ ID NO: 1775365 - DNA, 25 bp, Homo sapien
accttgccaattcctagtctgtcca

SEQ ID NO: 1775366 - DNA, 25 bp, Homo sapien
cttctgtgatgtagagaccttctct

SEQ ID NO: 1775367 - DNA, 25 bp, Homo sapien
tgggtccagtccgtcaacatcaaaa

SEQ ID NO: 1775368 - DNA, 25 bp, Homo sapien
gacctcccacgactggtgtgccagt

SEQ ID NO: 1775369 - DNA, 25 bp, Homo sapien
ctggtgtgaaagatgggtccagtcc

SEQ ID NO: 1775370 - DNA, 25 bp, Homo sapien
attatatctaatcctgagagtagcc

SEQ ID NO: 1775371 - DNA, 25 bp, Homo sapien
cttccattatatctaatcctgagag

SEQ ID NO: 1775372 - DNA, 25 bp, Homo sapien
cacttccattatatctaatcctgag

SEQ ID NO: 1775373 - DNA, 25 bp, Homo sapien
tccattatatctaatcctgagagta

SEQ ID NO: 1775374 - DNA, 25 bp, Homo sapien
gagcaagtccgaaacaagccaaggt

SEQ ID NO: 1775375 - DNA, 25 bp, Homo sapien
tgggttaaggtagtcaataggcttg

SEQ ID NO: 1775376 - DNA, 25 bp, Homo sapien
aggttattgcaactgctgtgttcac

SEQ ID NO: 1775377 - DNA, 25 bp, Homo sapien
tgtgattaccctcccgagcaagtcc

SEQ ID NO: 1775378 - DNA, 25 bp, Homo sapien
cacatgtggtagctttgtctcctga

SEQ ID NO: 1775379 - DNA, 25 bp, Homo sapien
ccaagagtcccactctatgtatggg

SEQ ID NO: 1775380 - DNA, 25 bp, Homo sapien
ttttttgaatgacatggacacatag

SEQ ID NO: 1775381 - DNA, 25 bp, Homo sapien
tacaccaagagggaatttgtagagt

SEQ ID NO: 1775382 - DNA, 25 bp, Homo sapien
ggcattgcgaaagacttgaaaacta

SEQ ID NO: 1775383 - DNA, 25 bp, Homo sapien
cttggattttgagagacattgttaa

SEQ ID NO: 1775384 - DNA, 25 bp, Homo sapien
catgcttaaatggttgattctccaa

SEQ ID NO: 1775385 - DNA, 25 bp, Homo sapien
gttgacactctcacctgacagatga

SEQ ID NO: 1775386 - DNA, 25 bp, Homo sapien
acttattagagctatgtaggaacat

SEQ ID NO: 1775387 - DNA, 25 bp, Homo sapien
taggaacatagaggtatctgtgatc

SEQ ID NO: 1775388 - DNA, 25 bp, Homo sapien
cagtctttcctattctagccgttgt

SEQ ID NO: 1775389 - DNA, 25 bp, Homo sapien
tgtcattggcactttcagtctttcc

SEQ ID NO: 1775390 - DNA, 25 bp, Homo sapien
ggaaaattccccagagcactggtta

SEQ ID NO: 1775391 - DNA, 25 bp, Homo sapien
cacaaggtactagtcctaattggta

SEQ ID NO: 1775392 - DNA, 25 bp, Homo sapien
gatgaagtgatttggccgttttctc

SEQ ID NO: 1775393 - DNA, 25 bp, Homo sapien
ctggttacagaatgactggcacacc

SEQ ID NO: 1775394 - DNA, 25 bp, Homo sapien
ttgaaaaaaattctatggcggtgac

SEQ ID NO: 1775395 - DNA, 25 bp, Homo sapien
aaagatattgaagtaggctggaaaa

SEQ ID NO: 1775396 - DNA, 25 bp, Homo sapien
ttctatggcggtgacatttggagtg

SEQ ID NO: 1775397 - DNA, 25 bp, Homo sapien
gatattgaagtaggctggaaaatgc

SEQ ID NO: 1775398 - DNA, 25 bp, Homo sapien
tagtcaagggtgctaggagtagcct

SEQ ID NO: 1775399 - DNA, 25 bp, Homo sapien
caggagatggcaggattgtcagact

SEQ ID NO: 1775400 - DNA, 25 bp, Homo sapien
cgtgaatatttaggttcctgcagca

SEQ ID NO: 1775401 - DNA, 25 bp, Homo sapien
ggagtagcctaacttcccacctaga

SEQ ID NO: 1775402 - DNA, 25 bp, Homo sapien
cagtcaacccatgcctttgcaatga

SEQ ID NO: 1775403 - DNA, 25 bp, Homo sapien
gacaactccaagctacagattccaa

SEQ ID NO: 1775404 - DNA, 25 bp, Homo sapien
gattccaatacctcattccctaaga

SEQ ID NO: 1775405 - DNA, 25 bp, Homo sapien
ccctaagacttcaccatgagtaagt

SEQ ID NO: 1775406 - DNA, 25 bp, Homo sapien
gtgctgactctgggttccttgaggc

SEQ ID NO: 1775407 - DNA, 25 bp, Homo sapien
tgctgactctgggttccttgaggct

SEQ ID NO: 1775408 - DNA, 25 bp, Homo sapien
gggcaccagtccctctaaattgttg

SEQ ID NO: 1775409 - DNA, 25 bp, Homo sapien
cttcttagattacatttccgagcag

SEQ ID NO: 1775410 - DNA, 25 bp, Homo sapien
taaattgttgcattagtgagcagtc

SEQ ID NO: 1775411 - DNA, 25 bp, Homo sapien
tgaatgcttatgtactcagacccct

SEQ ID NO: 1775412 - DNA, 25 bp, Homo sapien
tcattttggtgactctctaagagct

SEQ ID NO: 1775413 - DNA, 25 bp, Homo sapien
gagggatgttctcttaatatgtgcc

SEQ ID NO: 1775414 - DNA, 25 bp, Homo sapien
ggcccacagcaaggataaactccat

SEQ ID NO: 1775415 - DNA, 25 bp, Homo sapien
tctaattattgaacaaagctgaggg

SEQ ID NO: 1775416 - DNA, 25 bp, Homo sapien
gaataaattagtgctccttctttag

SEQ ID NO: 1775417 - DNA, 25 bp, Homo sapien
tcagaataaattagtgctccttctt

SEQ ID NO: 1775418 - DNA, 25 bp, Homo sapien
taaattagtgctccttctttagtct

SEQ ID NO: 1775419 - DNA, 25 bp, Homo sapien
tatcagaataaattagtgctccttc

SEQ ID NO: 1775420 - DNA, 25 bp, Homo sapien
caggttgttccgttgctaaagtcaa

SEQ ID NO: 1775421 - DNA, 25 bp, Homo sapien
ttgctaaagtcaacgtagattccat

SEQ ID NO: 1775422 - DNA, 25 bp, Homo sapien
gagtgttcttcttaacaggttgttc

SEQ ID NO: 1775423 - DNA, 25 bp, Homo sapien
tttatatttcttaagagtgttcttc

SEQ ID NO: 1775424 - DNA, 25 bp, Homo sapien
tgtggtgaggtgagatcccaaagga

SEQ ID NO: 1775425 - DNA, 25 bp, Homo sapien
tggtgaggtgagatcccaaaggaga

SEQ ID NO: 1775426 - DNA, 25 bp, Homo sapien
gtgaggtgagatcccaaaggagaga

SEQ ID NO: 1775427 - DNA, 25 bp, Homo sapien
gttgtggtgaggtgagatcccaaag

SEQ ID NO: 1775428 - DNA, 25 bp, Homo sapien
gtccaagccccaggcctaatccaag

SEQ ID NO: 1775429 - DNA, 25 bp, Homo sapien
caagccccaggcctaatccaagtga

SEQ ID NO: 1775430 - DNA, 25 bp, Homo sapien
gccccaggcctaatccaagtgacat

SEQ ID NO: 1775431 - DNA, 25 bp, Homo sapien
tccaagccccaggcctaatccaagt

SEQ ID NO: 1775432 - DNA, 25 bp, Homo sapien
gttctccagtcctctaaatgatgca

SEQ ID NO: 1775433 - DNA, 25 bp, Homo sapien
tctaaatgatgcatcaaagcacttc

SEQ ID NO: 1775434 - DNA, 25 bp, Homo sapien
cagtcctctaaatgatgcatcaaag

SEQ ID NO: 1775435 - DNA, 25 bp, Homo sapien
aatgatgcatcaaagcacttcttcc

SEQ ID NO: 1775436 - DNA, 25 bp, Homo sapien
ctcggtctttacatgccacatcaca

SEQ ID NO: 1775437 - DNA, 25 bp, Homo sapien
tcggtctttacatgccacatcacac

SEQ ID NO: 1775438 - DNA, 25 bp, Homo sapien
cacaggtgtcttcaaaatcccagca

SEQ ID NO: 1775439 - DNA, 25 bp, Homo sapien
aggtgtcttcaaaatcccagcagca

SEQ ID NO: 1775440 - DNA, 25 bp, Homo sapien
tgtcttcaaaatcccagcagcaatc

SEQ ID NO: 1775441 - DNA, 25 bp, Homo sapien
ccacacaggtgtcttcaaaatccca

SEQ ID NO: 1775442 - DNA, 25 bp, Homo sapien
attgcacctcgacgtttgagaacca

SEQ ID NO: 1775443 - DNA, 25 bp, Homo sapien
agttttattgcacctcgacgtttga

SEQ ID NO: 1775444 - DNA, 25 bp, Homo sapien
tcccagagagttttattgcacctcg

SEQ ID NO: 1775445 - DNA, 25 bp, Homo sapien
cagagagttttattgcacctcgacg

SEQ ID NO: 1775446 - DNA, 25 bp, Homo sapien
tatctatactgggttatcctctccc

SEQ ID NO: 1775447 - DNA, 25 bp, Homo sapien
tccacttcagttacatatagatttc

SEQ ID NO: 1775448 - DNA, 25 bp, Homo sapien
gtaaagggaacacagatctctatct

SEQ ID NO: 1775449 - DNA, 25 bp, Homo sapien
atagaaacagaagatttttggagat

SEQ ID NO: 1775450 - DNA, 25 bp, Homo sapien
ggttctcccaggctatggacttagg

SEQ ID NO: 1775451 - DNA, 25 bp, Homo sapien
tctcccaggctatggacttaggatg

SEQ ID NO: 1775452 - DNA, 25 bp, Homo sapien
caggctatggacttaggatgagaac

SEQ ID NO: 1775453 - DNA, 25 bp, Homo sapien
ctatggacttaggatgagaacagtt

SEQ ID NO: 1775454 - DNA, 25 bp, Homo sapien
tatagtcagcacagcaatctttcct

SEQ ID NO: 1775455 - DNA, 25 bp, Homo sapien
ttggcaaacactcttatagtcagca

SEQ ID NO: 1775456 - DNA, 25 bp, Homo sapien
aaaggctggcctctaatctggtctc

SEQ ID NO: 1775457 - DNA, 25 bp, Homo sapien
tctggtctctccacaacgaaattta

SEQ ID NO: 1775458 - DNA, 25 bp, Homo sapien
aagcataagatcaaaatcttgatac

SEQ ID NO: 1775459 - DNA, 25 bp, Homo sapien
tgaaaagcataagatcaaaatcttg

SEQ ID NO: 1775460 - DNA, 25 bp, Homo sapien
cataagatcaaaatcttgatacttg

SEQ ID NO: 1775461 - DNA, 25 bp, Homo sapien
gaaaagcataagatcaaaatcttga

SEQ ID NO: 1775462 - DNA, 25 bp, Homo sapien
cttctgggcactgagactgctgggc

SEQ ID NO: 1775463 - DNA, 25 bp, Homo sapien
cagttttcttccagccatgaggttt

SEQ ID NO: 1775464 - DNA, 25 bp, Homo sapien
cacagttttcttccagccatgaggt

SEQ ID NO: 1775465 - DNA, 25 bp, Homo sapien
ctgctgggctgtgtcacagttttct

SEQ ID NO: 1775466 - DNA, 25 bp, Homo sapien
ccatgtgtataaatattcagctcta

SEQ ID NO: 1775467 - DNA, 25 bp, Homo sapien
tatttggcattaaagtatcccatgt

SEQ ID NO: 1775468 - DNA, 25 bp, Homo sapien
gaaaacaagataactggtggcaggt

SEQ ID NO: 1775469 - DNA, 25 bp, Homo sapien
taaatccatccatagaaaacaagat

SEQ ID NO: 1775470 - DNA, 25 bp, Homo sapien
taactaggtgtctttatcatttgca

SEQ ID NO: 1775471 - DNA, 25 bp, Homo sapien
gattgactaactaggtgtctttatc

SEQ ID NO: 1775472 - DNA, 25 bp, Homo sapien
ctagagattgactaactaggtgtct

SEQ ID NO: 1775473 - DNA, 25 bp, Homo sapien
ggtgtctttatcatttgcatgccac

SEQ ID NO: 1775474 - DNA, 25 bp, Homo sapien
gatctaggctaagacaaaccaccag

SEQ ID NO: 1775475 - DNA, 25 bp, Homo sapien
gaaaccatgtggtaaagtcagagag

SEQ ID NO: 1775476 - DNA, 25 bp, Homo sapien
cagcaagcgtgaaaatatacttccg

SEQ ID NO: 1775477 - DNA, 25 bp, Homo sapien
catcactttcaaggcagtacacatg

SEQ ID NO: 1775478 - DNA, 25 bp, Homo sapien
attccagaactggaaatagatcctg

SEQ ID NO: 1775479 - DNA, 25 bp, Homo sapien
gatcctggacttgatatcggctgaa

SEQ ID NO: 1775480 - DNA, 25 bp, Homo sapien
taaaaggtgaaggaaagttgtctga

SEQ ID NO: 1775481 - DNA, 25 bp, Homo sapien
gaggtgctggatctgtctaagccca

SEQ ID NO: 1775482 - DNA, 25 bp, Homo sapien
actatcaggtgggaagtcaccattt

SEQ ID NO: 1775483 - DNA, 25 bp, Homo sapien
taatactatcaggtgggaagtcacc

SEQ ID NO: 1775484 - DNA, 25 bp, Homo sapien
aatactatcaggtgggaagtcacca

SEQ ID NO: 1775485 - DNA, 25 bp, Homo sapien
atcaggtgggaagtcaccatttcac

SEQ ID NO: 1775486 - DNA, 25 bp, Homo sapien
taacttaaaaccacccattgtatgc

SEQ ID NO: 1775487 - DNA, 25 bp, Homo sapien
cacagaagtacaacattataataaa

SEQ ID NO: 1775488 - DNA, 25 bp, Homo sapien
taaaaccacccattgtatgccacat

SEQ ID NO: 1775489 - DNA, 25 bp, Homo sapien
taaattgtgtgaaggccaagtgtcc

SEQ ID NO: 1775490 - DNA, 25 bp, Homo sapien
cagggcagtgaagagtgtgcgcctt

SEQ ID NO: 1775491 - DNA, 25 bp, Homo sapien
gcgccttggagttagctctctgatt

SEQ ID NO: 1775492 - DNA, 25 bp, Homo sapien
ggatataaaacagcctcggaggagg

SEQ ID NO: 1775493 - DNA, 25 bp, Homo sapien
aaagagaggaattgcagggcagtga

SEQ ID NO: 1775494 - DNA, 25 bp, Homo sapien
cattataatgtatgggaccgccatt

SEQ ID NO: 1775495 - DNA, 25 bp, Homo sapien
tctacagctaacatcctattcaatg

SEQ ID NO: 1775496 - DNA, 25 bp, Homo sapien
ccagctggtgatgggaatttctcaa

SEQ ID NO: 1775497 - DNA, 25 bp, Homo sapien
gattatatgaaaagtctacagctaa

SEQ ID NO: 1775498 - DNA, 25 bp, Homo sapien
tttggtaggatacatagctctcatg

SEQ ID NO: 1775499 - DNA, 25 bp, Homo sapien
atggtgtaatgatttgggaaggttt

SEQ ID NO: 1775500 - DNA, 25 bp, Homo sapien
gatacatagctctcatgtattttga

SEQ ID NO: 1775501 - DNA, 25 bp, Homo sapien
ggaaggttttggtaggatacatagc

SEQ ID NO: 1775502 - DNA, 25 bp, Homo sapien
gccaccaggctggattattttgttc

SEQ ID NO: 1775503 - DNA, 25 bp, Homo sapien
tgtcaatgatgccatgtgactctgg

SEQ ID NO: 1775504 - DNA, 25 bp, Homo sapien
gagatttacatcatacatattattg

SEQ ID NO: 1775505 - DNA, 25 bp, Homo sapien
tcttgttgagatttacatcatacat

SEQ ID NO: 1775506 - DNA, 25 bp, Homo sapien
cagttgcgacgtgtagaatgctaca

SEQ ID NO: 1775507 - DNA, 25 bp, Homo sapien
tcagttgcgacgtgtagaatgctac

SEQ ID NO: 1775508 - DNA, 25 bp, Homo sapien
agttgcgacgtgtagaatgctacat

SEQ ID NO: 1775509 - DNA, 25 bp, Homo sapien
ttcagttgcgacgtgtagaatgcta

SEQ ID NO: 1775510 - DNA, 25 bp, Homo sapien
gccatttatagccacttctgatccg

SEQ ID NO: 1775511 - DNA, 25 bp, Homo sapien
tgatccgggccaaaagtaggtagcg

SEQ ID NO: 1775512 - DNA, 25 bp, Homo sapien
ccgttgtaaggcatgtatatggaag

SEQ ID NO: 1775513 - DNA, 25 bp, Homo sapien
taaggcatgtatatggaaggaaagg

SEQ ID NO: 1775514 - DNA, 25 bp, Homo sapien
aatggtgattcccaagatttttggc

SEQ ID NO: 1775515 - DNA, 25 bp, Homo sapien
gcatttactgagagactgcttgagt

SEQ ID NO: 1775516 - DNA, 25 bp, Homo sapien
tgccaccaagattaagacagaaaac

SEQ ID NO: 1775517 - DNA, 25 bp, Homo sapien
agactgcttgagtgacataaaggaa

SEQ ID NO: 1775518 - DNA, 25 bp, Homo sapien
ctttcagctttgggcaggtccagcc

SEQ ID NO: 1775519 - DNA, 25 bp, Homo sapien
acagtgtagaaatcctctcttcaaa

SEQ ID NO: 1775520 - DNA, 25 bp, Homo sapien
ggcaggtccagccattttaacagtg

SEQ ID NO: 1775521 - DNA, 25 bp, Homo sapien
ccattttaacagtgtagaaatcctc

SEQ ID NO: 1775522 - DNA, 25 bp, Homo sapien
cttggagtctatccttataactgag

SEQ ID NO: 1775523 - DNA, 25 bp, Homo sapien
ccattccatatctggctctggttct

SEQ ID NO: 1775524 - DNA, 25 bp, Homo sapien
gcttgatggagcaccttgtgctctt

SEQ ID NO: 1775525 - DNA, 25 bp, Homo sapien
tccaatctgtgggtatgggcttgat

SEQ ID NO: 1775526 - DNA, 25 bp, Homo sapien
gggcttgctagccattgccttttct

SEQ ID NO: 1775527 - DNA, 25 bp, Homo sapien
tttgtagatcttgggcttgctagcc

SEQ ID NO: 1775528 - DNA, 25 bp, Homo sapien
cttggctccagcaaggataggtttc

SEQ ID NO: 1775529 - DNA, 25 bp, Homo sapien
cttgttcagacccagtagttctact

SEQ ID NO: 1775530 - DNA, 25 bp, Homo sapien
tattatcaatttgctataaacatac

SEQ ID NO: 1775531 - DNA, 25 bp, Homo sapien
aacagaaatatattatcaatttgct

SEQ ID NO: 1775532 - DNA, 25 bp, Homo sapien
aatatattatcaatttgctataaac

SEQ ID NO: 1775533 - DNA, 25 bp, Homo sapien
cagaaatatattatcaatttgctat

SEQ ID NO: 1775534 - DNA, 25 bp, Homo sapien
tgtccagaggaatcaggttcttcaa

SEQ ID NO: 1775535 - DNA, 25 bp, Homo sapien
cacctgcatgtccagaggaatcagg

SEQ ID NO: 1775536 - DNA, 25 bp, Homo sapien
aggttcttcaaaatacatggtataa

SEQ ID NO: 1775537 - DNA, 25 bp, Homo sapien
caaaatacatggtataaaacctggg

SEQ ID NO: 1775538 - DNA, 25 bp, Homo sapien
tgcaaattccgctgcttcaggcctt

SEQ ID NO: 1775539 - DNA, 25 bp, Homo sapien
aattccgctgcttcaggccttccat

SEQ ID NO: 1775540 - DNA, 25 bp, Homo sapien
agttgtgcaaattccgctgcttcag

SEQ ID NO: 1775541 - DNA, 25 bp, Homo sapien
tgatattgacacagttgtgcaaatt

SEQ ID NO: 1775542 - DNA, 25 bp, Homo sapien
tcgtacatgtagaagaagtttattc

SEQ ID NO: 1775543 - DNA, 25 bp, Homo sapien
gggcaggcccttcgtacatgtagaa

SEQ ID NO: 1775544 - DNA, 25 bp, Homo sapien
aggtatattatgagctcggatgcgg

SEQ ID NO: 1775545 - DNA, 25 bp, Homo sapien
catcttgttacaataagtctggtcc

SEQ ID NO: 1775546 - DNA, 25 bp, Homo sapien
tttttttcatataggtgtcttcata

SEQ ID NO: 1775547 - DNA, 25 bp, Homo sapien
ttttttcatataggtgtcttcatac

SEQ ID NO: 1775548 - DNA, 25 bp, Homo sapien
tttctaacaatttcctcagaattaa

SEQ ID NO: 1775549 - DNA, 25 bp, Homo sapien
gaggtttctaacaatttcctcagaa

SEQ ID NO: 1775550 - DNA, 25 bp, Homo sapien
gtttctaacaatttcctcagaatta

SEQ ID NO: 1775551 - DNA, 25 bp, Homo sapien
actgaggtttctaacaatttcctca

SEQ ID NO: 1775552 - DNA, 25 bp, Homo sapien
gcaaatcaggagtcaaatagggctt

SEQ ID NO: 1775553 - DNA, 25 bp, Homo sapien
gattctgacgttcttggcatagtgc

SEQ ID NO: 1775554 - DNA, 25 bp, Homo sapien
tagtgcagtcgctttggcaaatcag

SEQ ID NO: 1775555 - DNA, 25 bp, Homo sapien
gccagccactgttgatccacaaaga

SEQ ID NO: 1775556 - DNA, 25 bp, Homo sapien
gagataagtaaacagatacacgaac

SEQ ID NO: 1775557 - DNA, 25 bp, Homo sapien
ggttattaaaggcattatgagataa

SEQ ID NO: 1775558 - DNA, 25 bp, Homo sapien
cattatgagataagtaaacagatac

SEQ ID NO: 1775559 - DNA, 25 bp, Homo sapien
taagtagacttataatgacaaatgg

SEQ ID NO: 1775560 - DNA, 25 bp, Homo sapien
caatcacttgaaatgtagaactgct

SEQ ID NO: 1775561 - DNA, 25 bp, Homo sapien
caatcactcattatcaggctgaaag

SEQ ID NO: 1775562 - DNA, 25 bp, Homo sapien
tcattagcttggtcttacagcccta

SEQ ID NO: 1775563 - DNA, 25 bp, Homo sapien
gctaaatagcatgcacaaagtcaaa

SEQ ID NO: 1775564 - DNA, 25 bp, Homo sapien
gaaaaaagtgctggtatgaaataca

SEQ ID NO: 1775565 - DNA, 25 bp, Homo sapien
gatactttttacatctacttatgca

SEQ ID NO: 1775566 - DNA, 25 bp, Homo sapien
gaaaaatgccataaagtccagatac

SEQ ID NO: 1775567 - DNA, 25 bp, Homo sapien
tgtcaaacatatctcttagccactg

SEQ ID NO: 1775568 - DNA, 25 bp, Homo sapien
ccatttcacaatagacattggagaa

SEQ ID NO: 1775569 - DNA, 25 bp, Homo sapien
cagtggatttgcaccggtgttttgt

SEQ ID NO: 1775570 - DNA, 25 bp, Homo sapien
aacagtggatttgcaccggtgtttt

SEQ ID NO: 1775571 - DNA, 25 bp, Homo sapien
caatagacattggagaacattttca

SEQ ID NO: 1775572 - DNA, 25 bp, Homo sapien
tgatcagtgcaagagtggaaagttt

SEQ ID NO: 1775573 - DNA, 25 bp, Homo sapien
tatcaatagtaagcccaaatccaac

SEQ ID NO: 1775574 - DNA, 25 bp, Homo sapien
tgccaatcacctgcatagacaatgc

SEQ ID NO: 1775575 - DNA, 25 bp, Homo sapien
tgctcatctaaacattgtgggaaag

SEQ ID NO: 1775576 - DNA, 25 bp, Homo sapien
tacttatccttggaatggtggtagg

SEQ ID NO: 1775577 - DNA, 25 bp, Homo sapien
ttcaacatgagcataatacttatcc

SEQ ID NO: 1775578 - DNA, 25 bp, Homo sapien
ggtaggaaaaatccaatgcaaatga

SEQ ID NO: 1775579 - DNA, 25 bp, Homo sapien
tcggttttgcaggattaaatttata

SEQ ID NO: 1775580 - DNA, 25 bp, Homo sapien
atgagacaccaagcatagcccagca

SEQ ID NO: 1775581 - DNA, 25 bp, Homo sapien
tattacgcacaatcttacgaggcca

SEQ ID NO: 1775582 - DNA, 25 bp, Homo sapien
tacgaggccacacaatctgagcaat

SEQ ID NO: 1775583 - DNA, 25 bp, Homo sapien
tcaaagtttagatccaatctcagga

SEQ ID NO: 1775584 - DNA, 25 bp, Homo sapien
ggtgaactaatccactcttagagaa

SEQ ID NO: 1775585 - DNA, 25 bp, Homo sapien
tctaaaggttgtggtgtcttcatgc

SEQ ID NO: 1775586 - DNA, 25 bp, Homo sapien
cactgtggttgtagataaatgtgaa

SEQ ID NO: 1775587 - DNA, 25 bp, Homo sapien
tttctaaaatcagaatgatgccaac

SEQ ID NO: 1775588 - DNA, 25 bp, Homo sapien
gccagtgttactgcggtgaccgcca

SEQ ID NO: 1775589 - DNA, 25 bp, Homo sapien
gctccggttggttgtcacgtgcgca

SEQ ID NO: 1775590 - DNA, 25 bp, Homo sapien
tgcgcattcgggttccagacccaag

SEQ ID NO: 1775591 - DNA, 25 bp, Homo sapien
cagcctcgacgctatggaggagcct

SEQ ID NO: 1775592 - DNA, 25 bp, Homo sapien
tgttataaccatggttgcctcctcc

SEQ ID NO: 1775593 - DNA, 25 bp, Homo sapien
ccatgctcctaaactcattgttata

SEQ ID NO: 1775594 - DNA, 25 bp, Homo sapien
ctccatgctcctaaactcattgtta

SEQ ID NO: 1775595 - DNA, 25 bp, Homo sapien
actcattgttataaccatggttgcc

SEQ ID NO: 1775596 - DNA, 25 bp, Homo sapien
tgggtccatgtgccagaaagatagc

SEQ ID NO: 1775597 - DNA, 25 bp, Homo sapien
ctgggtccatgtgccagaaagatag

SEQ ID NO: 1775598 - DNA, 25 bp, Homo sapien
aactaccatgggttccattgtttgg

SEQ ID NO: 1775599 - DNA, 25 bp, Homo sapien
tgggcaatggattagcaaagccaca

SEQ ID NO: 1775600 - DNA, 25 bp, Homo sapien
ggtgctggttgaatgcgtagaagat

SEQ ID NO: 1775601 - DNA, 25 bp, Homo sapien
ctcctctgcatgggatggctcataa

SEQ ID NO: 1775602 - DNA, 25 bp, Homo sapien
ttcttgggtgagatttagcatctga

SEQ ID NO: 1775603 - DNA, 25 bp, Homo sapien
tgggtgagatttagcatctgattca

SEQ ID NO: 1775604 - DNA, 25 bp, Homo sapien
cttgggtgagatttagcatctgatt

SEQ ID NO: 1775605 - DNA, 25 bp, Homo sapien
gggtgagatttagcatctgattcac

SEQ ID NO: 1775606 - DNA, 25 bp, Homo sapien
aaaggagacagtggtccacgttctt

SEQ ID NO: 1775607 - DNA, 25 bp, Homo sapien
gtaaaggagacagtggtccacgttc

SEQ ID NO: 1775608 - DNA, 25 bp, Homo sapien
aaggagacagtggtccacgttcttc

SEQ ID NO: 1775609 - DNA, 25 bp, Homo sapien
taaaggagacagtggtccacgttct

SEQ ID NO: 1775610 - DNA, 25 bp, Homo sapien
aactgggggactgtgtatgaactcc

SEQ ID NO: 1775611 - DNA, 25 bp, Homo sapien
actgggggactgtgtatgaactcca

SEQ ID NO: 1775612 - DNA, 25 bp, Homo sapien
caactgggggactgtgtatgaactc

SEQ ID NO: 1775613 - DNA, 25 bp, Homo sapien
atgggcatcctcatagcttttccaa

SEQ ID NO: 1775614 - DNA, 25 bp, Homo sapien
tctccaggtaaaacacaatgtgttc

SEQ ID NO: 1775615 - DNA, 25 bp, Homo sapien
tcttttgcacccgtgtagcacctat

SEQ ID NO: 1775616 - DNA, 25 bp, Homo sapien
ggccaattggcctgtaaacattttc

SEQ ID NO: 1775617 - DNA, 25 bp, Homo sapien
tcttgcaagctacaggccagtgagt

SEQ ID NO: 1775618 - DNA, 25 bp, Homo sapien
cagtgggaggcagaggcgatgtgtc

SEQ ID NO: 1775619 - DNA, 25 bp, Homo sapien
gggacagtgggaggcagaggcgatg

SEQ ID NO: 1775620 - DNA, 25 bp, Homo sapien
acagtgggaggcagaggcgatgtgt

SEQ ID NO: 1775621 - DNA, 25 bp, Homo sapien
tgggaggcagaggcgatgtgtctcc

SEQ ID NO: 1775622 - DNA, 25 bp, Homo sapien
cgtgggtgatattcttgtctgctaa

SEQ ID NO: 1775623 - DNA, 25 bp, Homo sapien
ggaagccgtgggtgatattcttgtc

SEQ ID NO: 1775624 - DNA, 25 bp, Homo sapien
ggctctcagaaggaggaaccctgac

SEQ ID NO: 1775625 - DNA, 25 bp, Homo sapien
atagaggaagccgtgggtgatattc

SEQ ID NO: 1775626 - DNA, 25 bp, Homo sapien
acatctgggccagatgagagctgct

SEQ ID NO: 1775627 - DNA, 25 bp, Homo sapien
gagctttctaagctactgctctaaa

SEQ ID NO: 1775628 - DNA, 25 bp, Homo sapien
tctcaggcagctagcttacccaagc

SEQ ID NO: 1775629 - DNA, 25 bp, Homo sapien
tattctccaggtggaccttagcttg

SEQ ID NO: 1775630 - DNA, 25 bp, Homo sapien
aatctctaagaaggtgaaattgttg

SEQ ID NO: 1775631 - DNA, 25 bp, Homo sapien
tgttgaaaatctcataggcaagtta

SEQ ID NO: 1775632 - DNA, 25 bp, Homo sapien
cactagctttggcaggttcccaaga

SEQ ID NO: 1775633 - DNA, 25 bp, Homo sapien
aaaaatgacgtttcctgttgcacag

SEQ ID NO: 1775634 - DNA, 25 bp, Homo sapien
aacaaatggatcttattagatctag

SEQ ID NO: 1775635 - DNA, 25 bp, Homo sapien
tgcaaaacaaatggatcttattaga

SEQ ID NO: 1775636 - DNA, 25 bp, Homo sapien
caaaacaaatggatcttattagatc

SEQ ID NO: 1775637 - DNA, 25 bp, Homo sapien
aaacaaatggatcttattagatcta

SEQ ID NO: 1775638 - DNA, 25 bp, Homo sapien
caaattgctagtaattaaagcatca

SEQ ID NO: 1775639 - DNA, 25 bp, Homo sapien
catacataggtaccaaattgctagt

SEQ ID NO: 1775640 - DNA, 25 bp, Homo sapien
tctgaattcttcatacataggtacc

SEQ ID NO: 1775641 - DNA, 25 bp, Homo sapien
gtaccaaattgctagtaattaaagc

SEQ ID NO: 1775642 - DNA, 25 bp, Homo sapien
gaagaacactgtggaagtagtccca

SEQ ID NO: 1775643 - DNA, 25 bp, Homo sapien
atcaaaatggccatcataattataa

SEQ ID NO: 1775644 - DNA, 25 bp, Homo sapien
gagcatcaaaatggccatcataatt

SEQ ID NO: 1775645 - DNA, 25 bp, Homo sapien
tggagcatcaaaatggccatcataa

SEQ ID NO: 1775646 - DNA, 25 bp, Homo sapien
caccacaaagtagtgtgttgggatg

SEQ ID NO: 1775647 - DNA, 25 bp, Homo sapien
tcagcaccacaaagtagtgtgttgg

SEQ ID NO: 1775648 - DNA, 25 bp, Homo sapien
ctggtcagcaccacaaagtagtgtg

SEQ ID NO: 1775649 - DNA, 25 bp, Homo sapien
gttgggatgggaacatcagtgttgg

SEQ ID NO: 1775650 - DNA, 25 bp, Homo sapien
agggatgataaagggtaggacatcc

SEQ ID NO: 1775651 - DNA, 25 bp, Homo sapien
gctctccacgttggtaggtcggtga

SEQ ID NO: 1775652 - DNA, 25 bp, Homo sapien
taaagggtaggacatccagccaccc

SEQ ID NO: 1775653 - DNA, 25 bp, Homo sapien
acagctctccacgttggtaggtcgg

SEQ ID NO: 1775654 - DNA, 25 bp, Homo sapien
caattgacctggaacttatagcctg

SEQ ID NO: 1775655 - DNA, 25 bp, Homo sapien
taagttggtagtagtgcacactgac

SEQ ID NO: 1775656 - DNA, 25 bp, Homo sapien
ctaatagaaggtcaaaagggcccag

SEQ ID NO: 1775657 - DNA, 25 bp, Homo sapien
cactttaccttgacgcccagatgga

SEQ ID NO: 1775658 - DNA, 25 bp, Homo sapien
tatgcaggcttaatacagatagcca

SEQ ID NO: 1775659 - DNA, 25 bp, Homo sapien
gacttcgatgcagtggtttacttgt

SEQ ID NO: 1775660 - DNA, 25 bp, Homo sapien
gatagccactatctgagccagagga

SEQ ID NO: 1775661 - DNA, 25 bp, Homo sapien
gtcagattcacaatgcgagctaata

SEQ ID NO: 1775662 - DNA, 25 bp, Homo sapien
tttatcctgatagaagtcaagccca

SEQ ID NO: 1775663 - DNA, 25 bp, Homo sapien
ctacatcacggacccgggcaatgtg

SEQ ID NO: 1775664 - DNA, 25 bp, Homo sapien
tgagaagttctacatcacggacccg

SEQ ID NO: 1775665 - DNA, 25 bp, Homo sapien
tatcctgatagaagtcaagcccagt

SEQ ID NO: 1775666 - DNA, 25 bp, Homo sapien
aaatatgtctttagttgcaaaattt

SEQ ID NO: 1775667 - DNA, 25 bp, Homo sapien
taaatagtggtttcaaatgttggta

SEQ ID NO: 1775668 - DNA, 25 bp, Homo sapien
taaatatgtctttagttgcaaaatt

SEQ ID NO: 1775669 - DNA, 25 bp, Homo sapien
tagtggtttcaaatgttggtaaata

SEQ ID NO: 1775670 - DNA, 25 bp, Homo sapien
cagtaaattatatattaagtagaca

SEQ ID NO: 1775671 - DNA, 25 bp, Homo sapien
tatatattaagtagacattattaag

SEQ ID NO: 1775672 - DNA, 25 bp, Homo sapien
aaatcacttatattttgccaaaatt

SEQ ID NO: 1775673 - DNA, 25 bp, Homo sapien
tgccaaaattactttatacagtaaa

SEQ ID NO: 1775674 - DNA, 25 bp, Homo sapien
ccttttgtttagataattctgggca

SEQ ID NO: 1775675 - DNA, 25 bp, Homo sapien
gagttgattcagttcccaagtgaga

SEQ ID NO: 1775676 - DNA, 25 bp, Homo sapien
ggaaggtgtaatatagcatcatctc

SEQ ID NO: 1775677 - DNA, 25 bp, Homo sapien
tcatgagattagagtttaagaaacc

SEQ ID NO: 1775678 - DNA, 25 bp, Homo sapien
aaagcgtgatgttcctaaggcgagc

SEQ ID NO: 1775679 - DNA, 25 bp, Homo sapien
catttgcccttctgtagagtcagca

SEQ ID NO: 1775680 - DNA, 25 bp, Homo sapien
ggccctcttggaatgcacagacact

SEQ ID NO: 1775681 - DNA, 25 bp, Homo sapien
tcaaaataccactatgcagaggtca

SEQ ID NO: 1775682 - DNA, 25 bp, Homo sapien
acccacagatgctgaagcacctctg

SEQ ID NO: 1775683 - DNA, 25 bp, Homo sapien
tctggatacaaggagagttgccatc

SEQ ID NO: 1775684 - DNA, 25 bp, Homo sapien
tggataagtctggatacaaggagag

SEQ ID NO: 1775685 - DNA, 25 bp, Homo sapien
gatacaaggagagttgccatcccag

SEQ ID NO: 1775686 - DNA, 25 bp, Homo sapien
aggagagttgccatcccaggacaga

SEQ ID NO: 1775687 - DNA, 25 bp, Homo sapien
gggaacattcgtccaacagtctcct

SEQ ID NO: 1775688 - DNA, 25 bp, Homo sapien
gaggggaacattcgtccaacagtct

SEQ ID NO: 1775689 - DNA, 25 bp, Homo sapien
acattcgtccaacagtctcctcctc

SEQ ID NO: 1775690 - DNA, 25 bp, Homo sapien
ggaacattcgtccaacagtctcctc

SEQ ID NO: 1775691 - DNA, 25 bp, Homo sapien
gacacttgcaggaatcgccctgcgt

SEQ ID NO: 1775692 - DNA, 25 bp, Homo sapien
tctgatttcgggcactctgtgtgtc

SEQ ID NO: 1775693 - DNA, 25 bp, Homo sapien
ctctcgcagtcagggcaaagcgact

SEQ ID NO: 1775694 - DNA, 25 bp, Homo sapien
aaagcgactcaacgccccggattat

SEQ ID NO: 1775695 - DNA, 25 bp, Homo sapien
gcgcctttaataggccccgcgccgc

SEQ ID NO: 1775696 - DNA, 25 bp, Homo sapien
gccgcgcctttaataggccccgcgc

SEQ ID NO: 1775697 - DNA, 25 bp, Homo sapien
cggtcagatccttggctccccgccc

SEQ ID NO: 1775698 - DNA, 25 bp, Homo sapien
cgcccgcccctcgcggtcagatcct

SEQ ID NO: 1775699 - DNA, 25 bp, Homo sapien
ctcccggggagcgcgcccgccctcg

SEQ ID NO: 1775700 - DNA, 25 bp, Homo sapien
cgccccccgcgcagccgtcgcgctc

SEQ ID NO: 1775701 - DNA, 25 bp, Homo sapien
tcccggggagcgcgcccgccctcgc

SEQ ID NO: 1775702 - DNA, 25 bp, Homo sapien
cccccgcgcagccgtcgcgctccat

SEQ ID NO: 1775703 - DNA, 25 bp, Homo sapien
gtccccgggcgcctcggcagcgtgg

SEQ ID NO: 1775704 - DNA, 25 bp, Homo sapien
ggctgcggccccgatcgcggccgtt

SEQ ID NO: 1775705 - DNA, 25 bp, Homo sapien
tgcggccccgatcgcggccgttccc

SEQ ID NO: 1775706 - DNA, 25 bp, Homo sapien
gggcgcctcggcagcgtggctgcgg

SEQ ID NO: 1775707 - DNA, 25 bp, Homo sapien
cgagagtactttataggtgttgggg

SEQ ID NO: 1775708 - DNA, 25 bp, Homo sapien
agcgagagtactttataggtgttgg

SEQ ID NO: 1775709 - DNA, 25 bp, Homo sapien
gcgagagtactttataggtgttggg

SEQ ID NO: 1775710 - DNA, 25 bp, Homo sapien
cagcgagagtactttataggtgttg

SEQ ID NO: 1775711 - DNA, 25 bp, Homo sapien
tccggtgcccggtgctgactgcgct

SEQ ID NO: 1775712 - DNA, 25 bp, Homo sapien
tgactgcgctgagagcgcaggagct

SEQ ID NO: 1775713 - DNA, 25 bp, Homo sapien
gcgaagaagcactcccggaccatgc

SEQ ID NO: 1775714 - DNA, 25 bp, Homo sapien
ctgtgtagggcacttgcaaaggctg

SEQ ID NO: 1775715 - DNA, 25 bp, Homo sapien
tcacataatgtgaacatccatggaa

SEQ ID NO: 1775716 - DNA, 25 bp, Homo sapien
atgtgaacatccatggaatttctga

SEQ ID NO: 1775717 - DNA, 25 bp, Homo sapien
tgaacatccatggaatttctgagca

SEQ ID NO: 1775718 - DNA, 25 bp, Homo sapien
acataatgtgaacatccatggaatt

SEQ ID NO: 1775719 - DNA, 25 bp, Homo sapien
ttcttcaaccgagcgcacatcttcg

SEQ ID NO: 1775720 - DNA, 25 bp, Homo sapien
tctccctagttcttgagagtttgtt

SEQ ID NO: 1775721 - DNA, 25 bp, Homo sapien
gttctcatctatgggagatggtcat

SEQ ID NO: 1775722 - DNA, 25 bp, Homo sapien
cgagcgcacatcttcgggagggaca

SEQ ID NO: 1775723 - DNA, 25 bp, Homo sapien
cagtcacattgaagcttatcaacaa

SEQ ID NO: 1775724 - DNA, 25 bp, Homo sapien
gataatgctgatatgtcagtctgca

SEQ ID NO: 1775725 - DNA, 25 bp, Homo sapien
tctctatgctacagttgtggtacta

SEQ ID NO: 1775726 - DNA, 25 bp, Homo sapien
taaccgtagcaggatttaaacctga

SEQ ID NO: 1775727 - DNA, 25 bp, Homo sapien
caaagacagaagattggcaacgcta

SEQ ID NO: 1775728 - DNA, 25 bp, Homo sapien
caacgctaagggcaataaagagcaa

SEQ ID NO: 1775729 - DNA, 25 bp, Homo sapien
tatccatgtgccactgaggttcatg

SEQ ID NO: 1775730 - DNA, 25 bp, Homo sapien
cattgatcgtgcgatggaaagcacc

SEQ ID NO: 1775731 - DNA, 25 bp, Homo sapien
attcctggataaactggggcattat

SEQ ID NO: 1775732 - DNA, 25 bp, Homo sapien
tggataaactggggcattatctaac

SEQ ID NO: 1775733 - DNA, 25 bp, Homo sapien
tcctggataaactggggcattatct

SEQ ID NO: 1775734 - DNA, 25 bp, Homo sapien
cctggataaactggggcattatcta

SEQ ID NO: 1775735 - DNA, 25 bp, Homo sapien
tgcaagccctccagacagctgatat

SEQ ID NO: 1775736 - DNA, 25 bp, Homo sapien
acagctgatatttctagggcaatta

SEQ ID NO: 1775737 - DNA, 25 bp, Homo sapien
tatctggagtctattgcaccatggc

SEQ ID NO: 1775738 - DNA, 25 bp, Homo sapien
tgttagcattcccacggttagctgt

SEQ ID NO: 1775739 - DNA, 25 bp, Homo sapien
gaagttttgtggcagtgtcactccc

SEQ ID NO: 1775740 - DNA, 25 bp, Homo sapien
agactcctctggcttcatatctgga

SEQ ID NO: 1775741 - DNA, 25 bp, Homo sapien
attgttgttaacacacatactgaca

SEQ ID NO: 1775742 - DNA, 25 bp, Homo sapien
tacaaccaagtattgttgttaacac

SEQ ID NO: 1775743 - DNA, 25 bp, Homo sapien
ttcaacccaaatatacaaccaagta

SEQ ID NO: 1775744 - DNA, 25 bp, Homo sapien
ccaaatatacaaccaagtattgttg

SEQ ID NO: 1775745 - DNA, 25 bp, Homo sapien
gcagtttccaagctcaacacaggca

SEQ ID NO: 1775746 - DNA, 25 bp, Homo sapien
acaggcagcatcacagcgacagttc

SEQ ID NO: 1775747 - DNA, 25 bp, Homo sapien
gacagttcccaaatgttctctcgaa

SEQ ID NO: 1775748 - DNA, 25 bp, Homo sapien
ctggttctatgcacgtctcctggta

SEQ ID NO: 1775749 - DNA, 25 bp, Homo sapien
gaatttgttgcaagtccatatatgt

SEQ ID NO: 1775750 - DNA, 25 bp, Homo sapien
tgatgcagcagtcgcccttgtcctt

SEQ ID NO: 1775751 - DNA, 25 bp, Homo sapien
cacagaactgtagttgatgcagcag

SEQ ID NO: 1775752 - DNA, 25 bp, Homo sapien
caccacacctgaatttgttgcaagt

SEQ ID NO: 1775753 - DNA, 25 bp, Homo sapien
taagacgctggaagataccaggctg

SEQ ID NO: 1775754 - DNA, 25 bp, Homo sapien
ttcagctaatatagttggccaatag

SEQ ID NO: 1775755 - DNA, 25 bp, Homo sapien
tagccatgactcctaatataaaaga

SEQ ID NO: 1775756 - DNA, 25 bp, Homo sapien
acacctatgtaaagccccgctaaga

SEQ ID NO: 1775757 - DNA, 25 bp, Homo sapien
tctcacatggttcttctacccaact

SEQ ID NO: 1775758 - DNA, 25 bp, Homo sapien
ggctcattaatgctctcacatggtt

SEQ ID NO: 1775759 - DNA, 25 bp, Homo sapien
gcactgtggctcattaatgctctca

SEQ ID NO: 1775760 - DNA, 25 bp, Homo sapien
catggttcttctacccaacttttct

SEQ ID NO: 1775761 - DNA, 25 bp, Homo sapien
acaggaagaagtccaccccaagtgt

SEQ ID NO: 1775762 - DNA, 25 bp, Homo sapien
ggaagaagtccaccccaagtgtgta

SEQ ID NO: 1775763 - DNA, 25 bp, Homo sapien
gtgtgtaaatattctgccctgaatc

SEQ ID NO: 1775764 - DNA, 25 bp, Homo sapien
gtgtaaatattctgccctgaatcca

SEQ ID NO: 1775765 - DNA, 25 bp, Homo sapien
ttggatataccggtctcatgttttt

SEQ ID NO: 1775766 - DNA, 25 bp, Homo sapien
tttgttggatataccggtctcatgt

SEQ ID NO: 1775767 - DNA, 25 bp, Homo sapien
ggatataccggtctcatgtttttag

SEQ ID NO: 1775768 - DNA, 25 bp, Homo sapien
ctgtagtgattggggaaagtttttg

SEQ ID NO: 1775769 - DNA, 25 bp, Homo sapien
tttgtaccactcaggattaaatttc

SEQ ID NO: 1775770 - DNA, 25 bp, Homo sapien
atacattttattgtcgattatgcca

SEQ ID NO: 1775771 - DNA, 25 bp, Homo sapien
cctttgtaccactcaggattaaatt

SEQ ID NO: 1775772 - DNA, 25 bp, Homo sapien
tattgtcgattatgccatgagattc

SEQ ID NO: 1775773 - DNA, 25 bp, Homo sapien
ttatagatgtctgggaaaattccgt

SEQ ID NO: 1775774 - DNA, 25 bp, Homo sapien
cttgatacttagctgtgacccaaat

SEQ ID NO: 1775775 - DNA, 25 bp, Homo sapien
tccgttaatttccacatctgatcct

SEQ ID NO: 1775776 - DNA, 25 bp, Homo sapien
ccttgatacttagctgtgacccaaa

SEQ ID NO: 1775777 - DNA, 25 bp, Homo sapien
aatcctttcttcaaatggtactgaa

SEQ ID NO: 1775778 - DNA, 25 bp, Homo sapien
tgtagccactgaagaacagctaaaa

SEQ ID NO: 1775779 - DNA, 25 bp, Homo sapien
ctttcatctttaggaagctgtagcc

SEQ ID NO: 1775780 - DNA, 25 bp, Homo sapien
tttcatctttaggaagctgtagcca

SEQ ID NO: 1775781 - DNA, 25 bp, Homo sapien
ctaaatacagagtgtaaaagtgtgg

SEQ ID NO: 1775782 - DNA, 25 bp, Homo sapien
taaatacagagtgtaaaagtgtggt

SEQ ID NO: 1775783 - DNA, 25 bp, Homo sapien
gctgactggtccatatgaatgacct

SEQ ID NO: 1775784 - DNA, 25 bp, Homo sapien
gactggtccatatgaatgacctgaa

SEQ ID NO: 1775785 - DNA, 25 bp, Homo sapien
tgctgactggtccatatgaatgacc

SEQ ID NO: 1775786 - DNA, 25 bp, Homo sapien
tgactggtccatatgaatgacctga

SEQ ID NO: 1775787 - DNA, 25 bp, Homo sapien
tgccagtaatgttggagttcacaga

SEQ ID NO: 1775788 - DNA, 25 bp, Homo sapien
tgtgtggaatcagcttaatcttcat

SEQ ID NO: 1775789 - DNA, 25 bp, Homo sapien
tcaaagttatccaagcaacatgaac

SEQ ID NO: 1775790 - DNA, 25 bp, Homo sapien
tatgaatatcacaagaacacagaat

SEQ ID NO: 1775791 - DNA, 25 bp, Homo sapien
ctgaaataaggatgaggttcaggca

SEQ ID NO: 1775792 - DNA, 25 bp, Homo sapien
ggatgaggttcaggcatctgtgcaa

SEQ ID NO: 1775793 - DNA, 25 bp, Homo sapien
ataccaaccataccatcaaccctct

SEQ ID NO: 1775794 - DNA, 25 bp, Homo sapien
gaccatccatcagcataccaaccat

SEQ ID NO: 1775795 - DNA, 25 bp, Homo sapien
agccctttatcctgaagagtaaata

SEQ ID NO: 1775796 - DNA, 25 bp, Homo sapien
ttatcctgaagagtaaataatgcaa

SEQ ID NO: 1775797 - DNA, 25 bp, Homo sapien
ctttatcctgaagagtaaataatgc

SEQ ID NO: 1775798 - DNA, 25 bp, Homo sapien
tcagccctttatcctgaagagtaaa

SEQ ID NO: 1775799 - DNA, 25 bp, Homo sapien
gaatagtatttatctgggacatcag

SEQ ID NO: 1775800 - DNA, 25 bp, Homo sapien
tttcttacaactgccttgttccatg

SEQ ID NO: 1775801 - DNA, 25 bp, Homo sapien
atcagagggtctcaatcgagctgca

SEQ ID NO: 1775802 - DNA, 25 bp, Homo sapien
gctgcaggtccatagataactttaa

SEQ ID NO: 1775803 - DNA, 25 bp, Homo sapien
agatttcgggcaatgccttcatagt

SEQ ID NO: 1775804 - DNA, 25 bp, Homo sapien
agaaagatttcgggcaatgccttca

SEQ ID NO: 1775805 - DNA, 25 bp, Homo sapien
aaagatttcgggcaatgccttcata

SEQ ID NO: 1775806 - DNA, 25 bp, Homo sapien
atttcgggcaatgccttcatagtta

SEQ ID NO: 1775807 - DNA, 25 bp, Homo sapien
tgtcaagggctcaattctatcactc

SEQ ID NO: 1775808 - DNA, 25 bp, Homo sapien
tgtttcaggtaaggtttgaagtgct

SEQ ID NO: 1775809 - DNA, 25 bp, Homo sapien
cactgagggtccaaatagaatgtca

SEQ ID NO: 1775810 - DNA, 25 bp, Homo sapien
gcaaagtgcaaacgcttaggtaaga

SEQ ID NO: 1775811 - DNA, 25 bp, Homo sapien
catgaaatccacttccacaatattt

SEQ ID NO: 1775812 - DNA, 25 bp, Homo sapien
gaaatccacttccacaatatttcct

SEQ ID NO: 1775813 - DNA, 25 bp, Homo sapien
agagccatgaaatccacttccacaa

SEQ ID NO: 1775814 - DNA, 25 bp, Homo sapien
gccatgaaatccacttccacaatat

SEQ ID NO: 1775815 - DNA, 25 bp, Homo sapien
caggtccatagccaacaaagagggc

SEQ ID NO: 1775816 - DNA, 25 bp, Homo sapien
gcttgaatccaggtccatagccaac

SEQ ID NO: 1775817 - DNA, 25 bp, Homo sapien
gcctcaatgccatgcttgaatccag

SEQ ID NO: 1775818 - DNA, 25 bp, Homo sapien
aatgccatgcttgaatccaggtcca

SEQ ID NO: 1775819 - DNA, 25 bp, Homo sapien
caaagttgcctacaatgtgacctgc

SEQ ID NO: 1775820 - DNA, 25 bp, Homo sapien
taatcctatttcaggtctattttca

SEQ ID NO: 1775821 - DNA, 25 bp, Homo sapien
tgtgacctgcttttgataatcctat

SEQ ID NO: 1775822 - DNA, 25 bp, Homo sapien
catcatctccacaaagttgcctaca

SEQ ID NO: 1775823 - DNA, 25 bp, Homo sapien
cgaagggttacatgagcagccaagg

SEQ ID NO: 1775824 - DNA, 25 bp, Homo sapien
tgctttggcgtataaacaggattct

SEQ ID NO: 1775825 - DNA, 25 bp, Homo sapien
ttccgttattaggagccggtgtcaa

SEQ ID NO: 1775826 - DNA, 25 bp, Homo sapien
gacttccatgagttccgttattagg

SEQ ID NO: 1775827 - DNA, 25 bp, Homo sapien
tgtgctcatcacctcactgctagag

SEQ ID NO: 1775828 - DNA, 25 bp, Homo sapien
caagtcaagtcacagctccaaggaa

SEQ ID NO: 1775829 - DNA, 25 bp, Homo sapien
gcagagggtgctatcaaaccataca

SEQ ID NO: 1775830 - DNA, 25 bp, Homo sapien
tacagcacatgctatgcagagggtg

SEQ ID NO: 1775831 - DNA, 25 bp, Homo sapien
ttgaactgtgtttgaaaatcctcaa

SEQ ID NO: 1775832 - DNA, 25 bp, Homo sapien
tcagattgaactgtgtttgaaaatc

SEQ ID NO: 1775833 - DNA, 25 bp, Homo sapien
gattgaactgtgtttgaaaatcctc

SEQ ID NO: 1775834 - DNA, 25 bp, Homo sapien
cacagtcagattgaactgtgtttga

SEQ ID NO: 1775835 - DNA, 25 bp, Homo sapien
gaaccaggtgagatagaaacttagg

SEQ ID NO: 1775836 - DNA, 25 bp, Homo sapien
taaccttgtatgattaagaaccagg

SEQ ID NO: 1775837 - DNA, 25 bp, Homo sapien
cctccatcatgttcacaaggtgtga

SEQ ID NO: 1775838 - DNA, 25 bp, Homo sapien
caaggtgtgattcagcttccactaa

SEQ ID NO: 1775839 - DNA, 25 bp, Homo sapien
ctctaggtcttccatagggtaaagt

SEQ ID NO: 1775840 - DNA, 25 bp, Homo sapien
tccttctggagaactctaggtcttc

SEQ ID NO: 1775841 - DNA, 25 bp, Homo sapien
ggagaactctaggtcttccataggg

SEQ ID NO: 1775842 - DNA, 25 bp, Homo sapien
tccatagggtaaagtttcatgctta

SEQ ID NO: 1775843 - DNA, 25 bp, Homo sapien
gatgtcttggctgtatccactcata

SEQ ID NO: 1775844 - DNA, 25 bp, Homo sapien
tccacggtataggatgtccaaaggg

SEQ ID NO: 1775845 - DNA, 25 bp, Homo sapien
tctgtccacggtataggatgtccaa

SEQ ID NO: 1775846 - DNA, 25 bp, Homo sapien
tccaaaggggcattaagatgtcttg

SEQ ID NO: 1775847 - DNA, 25 bp, Homo sapien
cctggtttgggctcgtgtcttccta

SEQ ID NO: 1775848 - DNA, 25 bp, Homo sapien
taatggctttgccaaacagtgaggg

SEQ ID NO: 1775849 - DNA, 25 bp, Homo sapien
tgtcttcctatagatggtacgtgca

SEQ ID NO: 1775850 - DNA, 25 bp, Homo sapien
caaggcctaactcctctggtgttgg

SEQ ID NO: 1775851 - DNA, 25 bp, Homo sapien
caattccacgtaagatcaaaatctc

SEQ ID NO: 1775852 - DNA, 25 bp, Homo sapien
tttcaattccacgtaagatcaaaat

SEQ ID NO: 1775853 - DNA, 25 bp, Homo sapien
taaaatttcaattccacgtaagatc

SEQ ID NO: 1775854 - DNA, 25 bp, Homo sapien
aatttcaattccacgtaagatcaaa

SEQ ID NO: 1775855 - DNA, 25 bp, Homo sapien
tatggacaggactaagaggaattct

SEQ ID NO: 1775856 - DNA, 25 bp, Homo sapien
gacagttggagaagtcttccgtaga

SEQ ID NO: 1775857 - DNA, 25 bp, Homo sapien
gaggaattctaaagtcctggtacag

SEQ ID NO: 1775858 - DNA, 25 bp, Homo sapien
taaagtcctggtacagacagttgga

SEQ ID NO: 1775859 - DNA, 25 bp, Homo sapien
tcagaatatattccacttgaatttt

SEQ ID NO: 1775860 - DNA, 25 bp, Homo sapien
gaatatattccacttgaatttttat

SEQ ID NO: 1775861 - DNA, 25 bp, Homo sapien
cagaatatattccacttgaattttt

SEQ ID NO: 1775862 - DNA, 25 bp, Homo sapien
cttcagaatatattccacttgaatt

SEQ ID NO: 1775863 - DNA, 25 bp, Homo sapien
cttgaaaactctggtacattggcac

SEQ ID NO: 1775864 - DNA, 25 bp, Homo sapien
tggtacattggcactatatttgtag

SEQ ID NO: 1775865 - DNA, 25 bp, Homo sapien
gaaaactctggtacattggcactat

SEQ ID NO: 1775866 - DNA, 25 bp, Homo sapien
ctctggtacattggcactatatttg

SEQ ID NO: 1775867 - DNA, 25 bp, Homo sapien
caaatatagagttaacattatttac

SEQ ID NO: 1775868 - DNA, 25 bp, Homo sapien
attatcaaatatagagttaacatta

SEQ ID NO: 1775869 - DNA, 25 bp, Homo sapien
ttatgcctatatgtgcacaaattca

SEQ ID NO: 1775870 - DNA, 25 bp, Homo sapien
gaattatgcctatatgtgcacaaat

SEQ ID NO: 1775871 - DNA, 25 bp, Homo sapien
taactttaggaagcgcatcacatac

SEQ ID NO: 1775872 - DNA, 25 bp, Homo sapien
gctggataactttaggaagcgcatc

SEQ ID NO: 1775873 - DNA, 25 bp, Homo sapien
gaatttttgtgtactagtattctca

SEQ ID NO: 1775874 - DNA, 25 bp, Homo sapien
gcgcatcacatactttctcaccaaa

SEQ ID NO: 1775875 - DNA, 25 bp, Homo sapien
tcttcagcatactttcgcagtaggg

SEQ ID NO: 1775876 - DNA, 25 bp, Homo sapien
cacaacgtccatcataatcaaagtc

SEQ ID NO: 1775877 - DNA, 25 bp, Homo sapien
acaggaccactgacgacattgacac

SEQ ID NO: 1775878 - DNA, 25 bp, Homo sapien
gattctctaaggaatcacaacgtcc

SEQ ID NO: 1775879 - DNA, 25 bp, Homo sapien
cttgttagcacaataaagaagtgag

SEQ ID NO: 1775880 - DNA, 25 bp, Homo sapien
gatgtatctttacagcttgttagca

SEQ ID NO: 1775881 - DNA, 25 bp, Homo sapien
taaggtgtctaggttttcacagtgc

SEQ ID NO: 1775882 - DNA, 25 bp, Homo sapien
tgcaaaggcgtctgagatgtatctt

SEQ ID NO: 1775883 - DNA, 25 bp, Homo sapien
cacacagctctcgctgttatcagtc

SEQ ID NO: 1775884 - DNA, 25 bp, Homo sapien
cagtcttcttggctaaaggttggca

SEQ ID NO: 1775885 - DNA, 25 bp, Homo sapien
gaagctgagtccagtgatgtgctca

SEQ ID NO: 1775886 - DNA, 25 bp, Homo sapien
gatccgtgctctgtgtaacattaac

SEQ ID NO: 1775887 - DNA, 25 bp, Homo sapien
tgtgctcaacatctgtgatccgtgc

SEQ ID NO: 1775888 - DNA, 25 bp, Homo sapien
tatgtgcaagattcaacaggaacac

SEQ ID NO: 1775889 - DNA, 25 bp, Homo sapien
gctgagtacgcaagtttccctgaga

SEQ ID NO: 1775890 - DNA, 25 bp, Homo sapien
ggctccgttctaactctggtcgaca

SEQ ID NO: 1775891 - DNA, 25 bp, Homo sapien
caatgcaatagtgtagctagaggac

SEQ ID NO: 1775892 - DNA, 25 bp, Homo sapien
ctgtttgcccaatgccatcaaggtt

SEQ ID NO: 1775893 - DNA, 25 bp, Homo sapien
ttaccaatagtaagaaagattcaaa

SEQ ID NO: 1775894 - DNA, 25 bp, Homo sapien
gctacttctcctttaagagaagcag

SEQ ID NO: 1775895 - DNA, 25 bp, Homo sapien
tgccatcaaggtttattaccaatag

SEQ ID NO: 1775896 - DNA, 25 bp, Homo sapien
gtcacataacatgggctaccccaac

SEQ ID NO: 1775897 - DNA, 25 bp, Homo sapien
gaaacaaggtctcagaagtattttg

SEQ ID NO: 1775898 - DNA, 25 bp, Homo sapien
gaaaacacataagattaataacttg

SEQ ID NO: 1775899 - DNA, 25 bp, Homo sapien
caaagatcgtccctcaaagttgaac

SEQ ID NO: 1775900 - DNA, 25 bp, Homo sapien
ccaagctgtaaagaggtgccccaac

SEQ ID NO: 1775901 - DNA, 25 bp, Homo sapien
cattagtggagattcccagggtgca

SEQ ID NO: 1775902 - DNA, 25 bp, Homo sapien
agtgtctcttttgtgcagcctggca

SEQ ID NO: 1775903 - DNA, 25 bp, Homo sapien
ccttaggccgttgaagaatggtcac

SEQ ID NO: 1775904 - DNA, 25 bp, Homo sapien
cttaaacaggaacagccaacaggcc

SEQ ID NO: 1775905 - DNA, 25 bp, Homo sapien
taccagtccttgtactctatgcagc

SEQ ID NO: 1775906 - DNA, 25 bp, Homo sapien
gatgggtaaacacctaccatagcgc

SEQ ID NO: 1775907 - DNA, 25 bp, Homo sapien
ttaagaagcacacagcagctctcgc

SEQ ID NO: 1775908 - DNA, 25 bp, Homo sapien
caggctttgtgtgagagcagtaaag

SEQ ID NO: 1775909 - DNA, 25 bp, Homo sapien
ttgtgtgagagcagtaaagctgttt

SEQ ID NO: 1775910 - DNA, 25 bp, Homo sapien
gtgtgagagcagtaaagctgtttat

SEQ ID NO: 1775911 - DNA, 25 bp, Homo sapien
ctttgtgtgagagcagtaaagctgt

SEQ ID NO: 1775912 - DNA, 25 bp, Homo sapien
catctgggtgtatatgtgcaaatca

SEQ ID NO: 1775913 - DNA, 25 bp, Homo sapien
tgggtgtatatgtgcaaatcacagg

SEQ ID NO: 1775914 - DNA, 25 bp, Homo sapien
ccatctgggtgtatatgtgcaaatc

SEQ ID NO: 1775915 - DNA, 25 bp, Homo sapien
tctgggtgtatatgtgcaaatcaca

SEQ ID NO: 1775916 - DNA, 25 bp, Homo sapien
tccccatatgatgctcctctcagtg

SEQ ID NO: 1775917 - DNA, 25 bp, Homo sapien
ccccatatgatgctcctctcagtgt

SEQ ID NO: 1775918 - DNA, 25 bp, Homo sapien
tcaaagatcccaatggatactccaa

SEQ ID NO: 1775919 - DNA, 25 bp, Homo sapien
agatcccaatggatactccaacacc

SEQ ID NO: 1775920 - DNA, 25 bp, Homo sapien
caaagagatgtagcactcaaggaca

SEQ ID NO: 1775921 - DNA, 25 bp, Homo sapien
cagtgacccctgaggtacaagggaa

SEQ ID NO: 1775922 - DNA, 25 bp, Homo sapien
cacgtgactggtgaaggtcccattg

SEQ ID NO: 1775923 - DNA, 25 bp, Homo sapien
gcagccatcgccagtcattctgaga

SEQ ID NO: 1775924 - DNA, 25 bp, Homo sapien
taccatagccactgaggttaccatg

SEQ ID NO: 1775925 - DNA, 25 bp, Homo sapien
caaagtcccctctaggaacacagag

SEQ ID NO: 1775926 - DNA, 25 bp, Homo sapien
gcatttgagcaagaccctaaaggaa

SEQ ID NO: 1775927 - DNA, 25 bp, Homo sapien
catgaagtctcagacacgggcctca

SEQ ID NO: 1775928 - DNA, 25 bp, Homo sapien
cagtagatgagtttagtttcccctt

SEQ ID NO: 1775929 - DNA, 25 bp, Homo sapien
cagagtgactttgacaaggctctca

SEQ ID NO: 1775930 - DNA, 25 bp, Homo sapien
ttcacaagccacatccgaaatctct

SEQ ID NO: 1775931 - DNA, 25 bp, Homo sapien
ttcctctttgtggtctggttaacca

SEQ ID NO: 1775932 - DNA, 25 bp, Homo sapien
acaactactttaaatagacagaact

SEQ ID NO: 1775933 - DNA, 25 bp, Homo sapien
caactactttaaatagacagaactc

SEQ ID NO: 1775934 - DNA, 25 bp, Homo sapien
gacaactactttaaatagacagaac

SEQ ID NO: 1775935 - DNA, 25 bp, Homo sapien
gaggaaagctaacagacctgaactg

SEQ ID NO: 1775936 - DNA, 25 bp, Homo sapien
ttatgaggaaagctaacagacctga

SEQ ID NO: 1775937 - DNA, 25 bp, Homo sapien
catggttttatgaggaaagctaaca

SEQ ID NO: 1775938 - DNA, 25 bp, Homo sapien
tctctccaaacatggttttatgagg

SEQ ID NO: 1775939 - DNA, 25 bp, Homo sapien
gacttgtgccagcaaagacacgtga

SEQ ID NO: 1775940 - DNA, 25 bp, Homo sapien
gaatcagccctgtctgatggacaag

SEQ ID NO: 1775941 - DNA, 25 bp, Homo sapien
gcacagaagctatggcgtggcctcc

SEQ ID NO: 1775942 - DNA, 25 bp, Homo sapien
cagagatcaggatggacagttcccc

SEQ ID NO: 1775943 - DNA, 25 bp, Homo sapien
tctgctcagatagaatgacagtccg

SEQ ID NO: 1775944 - DNA, 25 bp, Homo sapien
gaatgacactgttcaggaatcggaa

SEQ ID NO: 1775945 - DNA, 25 bp, Homo sapien
tagactggacagcttgtggcaagtg

SEQ ID NO: 1775946 - DNA, 25 bp, Homo sapien
agtgaatttgcctgtaacaagccag

SEQ ID NO: 1775947 - DNA, 25 bp, Homo sapien
ccttagaagggcaaaaagtgcatcc

SEQ ID NO: 1775948 - DNA, 25 bp, Homo sapien
tgcaccagcatgaagacataccgag

SEQ ID NO: 1775949 - DNA, 25 bp, Homo sapien
ttcaagtgccctgacggcgaggtca

SEQ ID NO: 1775950 - DNA, 25 bp, Homo sapien
tctgtggagtatgtaccgacggccg

SEQ ID NO: 1775951 - DNA, 25 bp, Homo sapien
gagtggagcgcctgttccaagacct

SEQ ID NO: 1775952 - DNA, 25 bp, Homo sapien
acgtttggcccagacccaactatga

SEQ ID NO: 1775953 - DNA, 25 bp, Homo sapien
gattagagccaactgcctggtccag

SEQ ID NO: 1775954 - DNA, 25 bp, Homo sapien
taccgactggaagacacgtttggcc

SEQ ID NO: 1775955 - DNA, 25 bp, Homo sapien
ccctgtgcagcatggacgttcgtct

SEQ ID NO: 1775956 - DNA, 25 bp, Homo sapien
tacggtgtaccgcagcggagagtcc

SEQ ID NO: 1775957 - DNA, 25 bp, Homo sapien
tgcaagtaccagtgcacgtgcctgg

SEQ ID NO: 1775958 - DNA, 25 bp, Homo sapien
tccctgcatcttcggtggtacggtg

SEQ ID NO: 1775959 - DNA, 25 bp, Homo sapien
atgaccgccgccagtatgggccccg

SEQ ID NO: 1775960 - DNA, 25 bp, Homo sapien
ccgtccgcgtcgccttcgtggtcct

SEQ ID NO: 1775961 - DNA, 25 bp, Homo sapien
cgcccgcagtgccaaccatgaccgc

SEQ ID NO: 1775962 - DNA, 25 bp, Homo sapien
agtatgggccccgtccgcgtcgcct

SEQ ID NO: 1775963 - DNA, 25 bp, Homo sapien
cttggaatgttccttctttaaatag

SEQ ID NO: 1775964 - DNA, 25 bp, Homo sapien
tggaatgttccttctttaaatagga

SEQ ID NO: 1775965 - DNA, 25 bp, Homo sapien
taaataggaactcttaggcctcttc

SEQ ID NO: 1775966 - DNA, 25 bp, Homo sapien
cttaggcctcttctttttgaggaat

SEQ ID NO: 1775967 - DNA, 25 bp, Homo sapien
ttttgagacttcgagggactatgag

SEQ ID NO: 1775968 - DNA, 25 bp, Homo sapien
tagtgcaagaattcagatcccatgg

SEQ ID NO: 1775969 - DNA, 25 bp, Homo sapien
agtggccagcttagttaattcctca

SEQ ID NO: 1775970 - DNA, 25 bp, Homo sapien
tatggatggagtatcagcctttccc

SEQ ID NO: 1775971 - DNA, 25 bp, Homo sapien
gagcagagcacaccctgatattaag

SEQ ID NO: 1775972 - DNA, 25 bp, Homo sapien
ttggtcccagtctcagccgaaacaa

SEQ ID NO: 1775973 - DNA, 25 bp, Homo sapien
tatccctaagggtagcttatcagtg

SEQ ID NO: 1775974 - DNA, 25 bp, Homo sapien
gccgaaacaagactgcatagggtta

SEQ ID NO: 1775975 - DNA, 25 bp, Homo sapien
gcctcagcaatcagtcaaatacgga

SEQ ID NO: 1775976 - DNA, 25 bp, Homo sapien
tcaagaagaaccaacatagagacgt

SEQ ID NO: 1775977 - DNA, 25 bp, Homo sapien
tcgaaagcgatcaaagccaaccagg

SEQ ID NO: 1775978 - DNA, 25 bp, Homo sapien
gaaagcaaatagtaggagcctcagc

SEQ ID NO: 1775979 - DNA, 25 bp, Homo sapien
ttaatattacccacatgcatgtgca

SEQ ID NO: 1775980 - DNA, 25 bp, Homo sapien
ctcctacagcattaatattacccac

SEQ ID NO: 1775981 - DNA, 25 bp, Homo sapien
gcattaatattacccacatgcatgt

SEQ ID NO: 1775982 - DNA, 25 bp, Homo sapien
acatgcatgtgcacgcccacacatt

SEQ ID NO: 1775983 - DNA, 25 bp, Homo sapien
cgacacttgagaaagagctctcaag

SEQ ID NO: 1775984 - DNA, 25 bp, Homo sapien
cacttgagaaagagctctcaagcct

SEQ ID NO: 1775985 - DNA, 25 bp, Homo sapien
cttgagaaagagctctcaagcctca

SEQ ID NO: 1775986 - DNA, 25 bp, Homo sapien
ttgagaaagagctctcaagcctcat

SEQ ID NO: 1775987 - DNA, 25 bp, Homo sapien
cccaaagtcaggactgttgtcccca

SEQ ID NO: 1775988 - DNA, 25 bp, Homo sapien
caggactgttgtccccactactaag

SEQ ID NO: 1775989 - DNA, 25 bp, Homo sapien
atgtgccacggcatccccaaagtca

SEQ ID NO: 1775990 - DNA, 25 bp, Homo sapien
tccccactactaaggtctgaaatgc

SEQ ID NO: 1775991 - DNA, 25 bp, Homo sapien
gatagtattccaaaatatggtccat

SEQ ID NO: 1775992 - DNA, 25 bp, Homo sapien
cttctgcaatgtagaacatctctat

SEQ ID NO: 1775993 - DNA, 25 bp, Homo sapien
tctgcaatgtagaacatctctattt

SEQ ID NO: 1775994 - DNA, 25 bp, Homo sapien
cactagcattaagatagtattccaa

SEQ ID NO: 1775995 - DNA, 25 bp, Homo sapien
gacaaaccactattgcacagtccaa

SEQ ID NO: 1775996 - DNA, 25 bp, Homo sapien
gatcgccaaggtccttatctggaca

SEQ ID NO: 1775997 - DNA, 25 bp, Homo sapien
ggcatcatgctgctagatggtttaa

SEQ ID NO: 1775998 - DNA, 25 bp, Homo sapien
gatggtttaaatgactccggatcgc

SEQ ID NO: 1775999 - DNA, 25 bp, Homo sapien
tatccccatgagtttgtaccccagg

SEQ ID NO: 1776000 - DNA, 25 bp, Homo sapien
gcatgatctatgctgtgggaccaca

SEQ ID NO: 1776001 - DNA, 25 bp, Homo sapien
cacattcagttgatggtaaagccta

SEQ ID NO: 1776002 - DNA, 25 bp, Homo sapien
ggactttaatctagcaaactatgcg

SEQ ID NO: 1776003 - DNA, 25 bp, Homo sapien
aaaatgtttggcttgtgcagcattt

SEQ ID NO: 1776004 - DNA, 25 bp, Homo sapien
caggtattagctgtctgttactttg

SEQ ID NO: 1776005 - DNA, 25 bp, Homo sapien
cagcattttaacaggtattagctgt

SEQ ID NO: 1776006 - DNA, 25 bp, Homo sapien
gaaaaatgtttggcttgtgcagcat

SEQ ID NO: 1776007 - DNA, 25 bp, Homo sapien
atatcttggttctaggaatgtgcac

SEQ ID NO: 1776008 - DNA, 25 bp, Homo sapien
aatatcttggttctaggaatgtgca

SEQ ID NO: 1776009 - DNA, 25 bp, Homo sapien
gcacagccatatgcagaattaagca

SEQ ID NO: 1776010 - DNA, 25 bp, Homo sapien
agactgagcacagccatatgcagaa

SEQ ID NO: 1776011 - DNA, 25 bp, Homo sapien
acagcaatgtgttcatcaatatgtt

SEQ ID NO: 1776012 - DNA, 25 bp, Homo sapien
aacagcaatgtgttcatcaatatgt

SEQ ID NO: 1776013 - DNA, 25 bp, Homo sapien
cagcaatgtgttcatcaatatgttc

SEQ ID NO: 1776014 - DNA, 25 bp, Homo sapien
aaacagcaatgtgttcatcaatatg

SEQ ID NO: 1776015 - DNA, 25 bp, Homo sapien
gaaacaacaggatttggctggtgac

SEQ ID NO: 1776016 - DNA, 25 bp, Homo sapien
aataaagcactgttaaaactatctg

SEQ ID NO: 1776017 - DNA, 25 bp, Homo sapien
tctcatctctttaaataaagcactg

SEQ ID NO: 1776018 - DNA, 25 bp, Homo sapien
taaaactatctgttgttgaaacaac

SEQ ID NO: 1776019 - DNA, 25 bp, Homo sapien
ataatgtgccgccatcctcctgcag

SEQ ID NO: 1776020 - DNA, 25 bp, Homo sapien
gctccccgctgcaaggaacataatg

SEQ ID NO: 1776021 - DNA, 25 bp, Homo sapien
gttagtgactatgctgctccccgct

SEQ ID NO: 1776022 - DNA, 25 bp, Homo sapien
actctgagcttcatcgttagtgact

SEQ ID NO: 1776023 - DNA, 25 bp, Homo sapien
gtacggactggcaaggaatagagaa

SEQ ID NO: 1776024 - DNA, 25 bp, Homo sapien
cagtgactgccgaacagtgacaatc

SEQ ID NO: 1776025 - DNA, 25 bp, Homo sapien
taatgactaatccagtacggactgg

SEQ ID NO: 1776026 - DNA, 25 bp, Homo sapien
gactgacactttggcaataatgact

SEQ ID NO: 1776027 - DNA, 25 bp, Homo sapien
gcattcagtagtatgtgttcaaaaa

SEQ ID NO: 1776028 - DNA, 25 bp, Homo sapien
cattcagtagtatgtgttcaaaaag

SEQ ID NO: 1776029 - DNA, 25 bp, Homo sapien
gtgtgcattcagtagtatgtgttca

SEQ ID NO: 1776030 - DNA, 25 bp, Homo sapien
gtgcattcagtagtatgtgttcaaa

SEQ ID NO: 1776031 - DNA, 25 bp, Homo sapien
ccatggtgtcgatatcaagggcagg

SEQ ID NO: 1776032 - DNA, 25 bp, Homo sapien
ctgtggctaaaacggaatctgggtg

SEQ ID NO: 1776033 - DNA, 25 bp, Homo sapien
cttctggttactgtggctaaaacgg

SEQ ID NO: 1776034 - DNA, 25 bp, Homo sapien
aaagcttgccatggtgtcgatatca

SEQ ID NO: 1776035 - DNA, 25 bp, Homo sapien
tacctggaggaatacacactcccag

SEQ ID NO: 1776036 - DNA, 25 bp, Homo sapien
ttcaaggctacaggttttaagatca

SEQ ID NO: 1776037 - DNA, 25 bp, Homo sapien
cacagattaagttctgaagaggagc

SEQ ID NO: 1776038 - DNA, 25 bp, Homo sapien
gatcaaactttagatgacctgtggg

SEQ ID NO: 1776039 - DNA, 25 bp, Homo sapien
gtgtttggagtttcatggttgtctt

SEQ ID NO: 1776040 - DNA, 25 bp, Homo sapien
tcatggttgtcttgttggtttcttt

SEQ ID NO: 1776041 - DNA, 25 bp, Homo sapien
ttggttttggtacttctgtcctcac

SEQ ID NO: 1776042 - DNA, 25 bp, Homo sapien
gtttcatggttgtcttgttggtttc

SEQ ID NO: 1776043 - DNA, 25 bp, Homo sapien
ggcgcttcaacaggatggccagaaa

SEQ ID NO: 1776044 - DNA, 25 bp, Homo sapien
ctgctagcagcaggcgcttcaacag

SEQ ID NO: 1776045 - DNA, 25 bp, Homo sapien
tagcagcaggcgcttcaacaggatg

SEQ ID NO: 1776046 - DNA, 25 bp, Homo sapien
cagcaggcgcttcaacaggatggcc

SEQ ID NO: 1776047 - DNA, 25 bp, Homo sapien
tcaatccctgcatttagatgctgat

SEQ ID NO: 1776048 - DNA, 25 bp, Homo sapien
caggcatttatagagcatctcaatc

SEQ ID NO: 1776049 - DNA, 25 bp, Homo sapien
tccttagtcaggcatttatagagca

SEQ ID NO: 1776050 - DNA, 25 bp, Homo sapien
gcatctcaatccctgcatttagatg

SEQ ID NO: 1776051 - DNA, 25 bp, Homo sapien
cagttttatagttgcttatggtagg

SEQ ID NO: 1776052 - DNA, 25 bp, Homo sapien
tggccagtagaagtcttttgagtcc

SEQ ID NO: 1776053 - DNA, 25 bp, Homo sapien
gatcagttgcctatatattgtccag

SEQ ID NO: 1776054 - DNA, 25 bp, Homo sapien
tatagtaacaggtacttcattatgg

SEQ ID NO: 1776055 - DNA, 25 bp, Homo sapien
gcaattctataagagatatttaatt

SEQ ID NO: 1776056 - DNA, 25 bp, Homo sapien
caattctataagagatatttaattt

SEQ ID NO: 1776057 - DNA, 25 bp, Homo sapien
agcaattctataagagatatttaat

SEQ ID NO: 1776058 - DNA, 25 bp, Homo sapien
taaactaatcaatgggttgtcaatg

SEQ ID NO: 1776059 - DNA, 25 bp, Homo sapien
tgttactgattaaagggttattgag

SEQ ID NO: 1776060 - DNA, 25 bp, Homo sapien
ctgattaaagggttattgagaactt

SEQ ID NO: 1776061 - DNA, 25 bp, Homo sapien
gggagagcataaactaatcaatggg

SEQ ID NO: 1776062 - DNA, 25 bp, Homo sapien
gagagatggtgacagcttagcaaca

SEQ ID NO: 1776063 - DNA, 25 bp, Homo sapien
tcagtccagatcttgaggcacaatt

SEQ ID NO: 1776064 - DNA, 25 bp, Homo sapien
aactggaaccttaagccctggctat

SEQ ID NO: 1776065 - DNA, 25 bp, Homo sapien
tagcaacaacggtcatagccctgcc

SEQ ID NO: 1776066 - DNA, 25 bp, Homo sapien
tgttttaatgtgaggtcttctcaga

SEQ ID NO: 1776067 - DNA, 25 bp, Homo sapien
gaagagcttcccatacatccttgta

SEQ ID NO: 1776068 - DNA, 25 bp, Homo sapien
tacatccttgtactggttaattacc

SEQ ID NO: 1776069 - DNA, 25 bp, Homo sapien
tactggttaattaccccacagaagc

SEQ ID NO: 1776070 - DNA, 25 bp, Homo sapien
taacaaggtgcccaaatatgaccca

SEQ ID NO: 1776071 - DNA, 25 bp, Homo sapien
taataacaaggtgcccaaatatgac

SEQ ID NO: 1776072 - DNA, 25 bp, Homo sapien
ctgtaataacaaggtgcccaaatat

SEQ ID NO: 1776073 - DNA, 25 bp, Homo sapien
caaggtgcccaaatatgacccagct

SEQ ID NO: 1776074 - DNA, 25 bp, Homo sapien
tgaatatgacagtttgatatccctc

SEQ ID NO: 1776075 - DNA, 25 bp, Homo sapien
cctccactgatcctaaactcatagg

SEQ ID NO: 1776076 - DNA, 25 bp, Homo sapien
ctcataggtgaatatgacagtttga

SEQ ID NO: 1776077 - DNA, 25 bp, Homo sapien
cactgatcctaaactcataggtgaa

SEQ ID NO: 1776078 - DNA, 25 bp, Homo sapien
tattttccattgttaaagtgacaac

SEQ ID NO: 1776079 - DNA, 25 bp, Homo sapien
ccctatatagattagtacagaggtt

SEQ ID NO: 1776080 - DNA, 25 bp, Homo sapien
tgttaaagtgacaacagagacttct

SEQ ID NO: 1776081 - DNA, 25 bp, Homo sapien
tgaggtacatcctgtaacatgcagt

SEQ ID NO: 1776082 - DNA, 25 bp, Homo sapien
tgtactgcaaggctatattcaggtt

SEQ ID NO: 1776083 - DNA, 25 bp, Homo sapien
acatttcttgttgctgtgaattcca

SEQ ID NO: 1776084 - DNA, 25 bp, Homo sapien
agtggacagcatgaccagtgctttg

SEQ ID NO: 1776085 - DNA, 25 bp, Homo sapien
tgttttctgctcctttgccagcatt

SEQ ID NO: 1776086 - DNA, 25 bp, Homo sapien
tttgttactgtcactgaaggtgata

SEQ ID NO: 1776087 - DNA, 25 bp, Homo sapien
gcccatcataagctgaataattgat

SEQ ID NO: 1776088 - DNA, 25 bp, Homo sapien
ctagcccatcataagctgaataatt

SEQ ID NO: 1776089 - DNA, 25 bp, Homo sapien
ttgttactgtcactgaaggtgataa

SEQ ID NO: 1776090 - DNA, 25 bp, Homo sapien
tactatgttgtattgccaaggtggc

SEQ ID NO: 1776091 - DNA, 25 bp, Homo sapien
tcatggacatgatcaagtctgtggc

SEQ ID NO: 1776092 - DNA, 25 bp, Homo sapien
tggccattgccatacgggaatagag

SEQ ID NO: 1776093 - DNA, 25 bp, Homo sapien
tctgtggcaggcgaaatcaggtctc

SEQ ID NO: 1776094 - DNA, 25 bp, Homo sapien
tgcaaacagattgtaggccagattt

SEQ ID NO: 1776095 - DNA, 25 bp, Homo sapien
tcagcatttgaacctcctcagagag

SEQ ID NO: 1776096 - DNA, 25 bp, Homo sapien
tattttcaggctacacaatcctggc

SEQ ID NO: 1776097 - DNA, 25 bp, Homo sapien
aacctaatggcttgcttacacctca

SEQ ID NO: 1776098 - DNA, 25 bp, Homo sapien
tgctggatgccaactagcacagttt

SEQ ID NO: 1776099 - DNA, 25 bp, Homo sapien
tgatgcagtcacaggttctagtggg

SEQ ID NO: 1776100 - DNA, 25 bp, Homo sapien
gggttaaataatacttgggcactgc

SEQ ID NO: 1776101 - DNA, 25 bp, Homo sapien
agtgtagctctcctttgttccaggc

SEQ ID NO: 1776102 - DNA, 25 bp, Homo sapien
tctgatggtcagtggctaaataagc

SEQ ID NO: 1776103 - DNA, 25 bp, Homo sapien
caaacgatggttccttcttgagcag

SEQ ID NO: 1776104 - DNA, 25 bp, Homo sapien
taatggctcatcagtatcagtctcc

SEQ ID NO: 1776105 - DNA, 25 bp, Homo sapien
tcccacacttagctgagacagaagc

SEQ ID NO: 1776106 - DNA, 25 bp, Homo sapien
caataccacaaactggctcttattc

SEQ ID NO: 1776107 - DNA, 25 bp, Homo sapien
cctcatcagacagaataatcacctt

SEQ ID NO: 1776108 - DNA, 25 bp, Homo sapien
cggccggatcctgccttttttggat

SEQ ID NO: 1776109 - DNA, 25 bp, Homo sapien
tattctcctcatcagacagaataat

SEQ ID NO: 1776110 - DNA, 25 bp, Homo sapien
ttcatataccatgactccagactgc

SEQ ID NO: 1776111 - DNA, 25 bp, Homo sapien
aagatcttcagactttgtgcccact

SEQ ID NO: 1776112 - DNA, 25 bp, Homo sapien
tgtttaatgtctcttctagggtagg

SEQ ID NO: 1776113 - DNA, 25 bp, Homo sapien
cattagctgcactacaaagatcttc

SEQ ID NO: 1776114 - DNA, 25 bp, Homo sapien
ggctgagagctcaaccatcaatgct

SEQ ID NO: 1776115 - DNA, 25 bp, Homo sapien
ccaaaaaggtctgatggctgagagc

SEQ ID NO: 1776116 - DNA, 25 bp, Homo sapien
tctgagcagtgtagcagagcattct

SEQ ID NO: 1776117 - DNA, 25 bp, Homo sapien
gaagttctggcaagcttcagcagca

SEQ ID NO: 1776118 - DNA, 25 bp, Homo sapien
aatcattggattggtatacactacc

SEQ ID NO: 1776119 - DNA, 25 bp, Homo sapien
ggtatacactaccaatactctactc

SEQ ID NO: 1776120 - DNA, 25 bp, Homo sapien
aataccttaaatcattggattggta

SEQ ID NO: 1776121 - DNA, 25 bp, Homo sapien
ctctactcatgttagaagtaacaca

SEQ ID NO: 1776122 - DNA, 25 bp, Homo sapien
tcctatctggaataacctcagtcat

SEQ ID NO: 1776123 - DNA, 25 bp, Homo sapien
tattctgacagcactttgaaggatt

SEQ ID NO: 1776124 - DNA, 25 bp, Homo sapien
gagtttctcccagaatcctatctgg

SEQ ID NO: 1776125 - DNA, 25 bp, Homo sapien
tttgagatggagaacgctgtgccgt

SEQ ID NO: 1776126 - DNA, 25 bp, Homo sapien
aaactagaaaggcaagtgactggca

SEQ ID NO: 1776127 - DNA, 25 bp, Homo sapien
caatccttaatgtaaacctaggtgc

SEQ ID NO: 1776128 - DNA, 25 bp, Homo sapien
cctaggtgctgacattaaaatagga

SEQ ID NO: 1776129 - DNA, 25 bp, Homo sapien
tccagatgcaaaattacttaccaga

SEQ ID NO: 1776130 - DNA, 25 bp, Homo sapien
ggtaagcagttttgctggcaggcat

SEQ ID NO: 1776131 - DNA, 25 bp, Homo sapien
gttcttgtagagtgcagggtaagca

SEQ ID NO: 1776132 - DNA, 25 bp, Homo sapien
catttactgcttgaaggacctttgg

SEQ ID NO: 1776133 - DNA, 25 bp, Homo sapien
tttgagcaccgagctggaccctctg

SEQ ID NO: 1776134 - DNA, 25 bp, Homo sapien
ctaccagcccaatgatgacaatatt

SEQ ID NO: 1776135 - DNA, 25 bp, Homo sapien
gaagtatcaattgtgacaccacgtt

SEQ ID NO: 1776136 - DNA, 25 bp, Homo sapien
ggtctcttgtcagtcccaccacatg

SEQ ID NO: 1776137 - DNA, 25 bp, Homo sapien
ccaccacatgtttagatcagtaggg

SEQ ID NO: 1776138 - DNA, 25 bp, Homo sapien
ggcacaaatgcctcagtgtaagggc

SEQ ID NO: 1776139 - DNA, 25 bp, Homo sapien
ggcctgtgatcacatggctccagca

SEQ ID NO: 1776140 - DNA, 25 bp, Homo sapien
gtcaacagcgacaatcaaggcagcg

SEQ ID NO: 1776141 - DNA, 25 bp, Homo sapien
ttgttacacatctggcatgcaagcc

SEQ ID NO: 1776142 - DNA, 25 bp, Homo sapien
ggatagtgccaatatcccaaatttt

SEQ ID NO: 1776143 - DNA, 25 bp, Homo sapien
tggtggtaggaaggagtccagagct

SEQ ID NO: 1776144 - DNA, 25 bp, Homo sapien
cagggatagtgccaatatcccaaat

SEQ ID NO: 1776145 - DNA, 25 bp, Homo sapien
gtgccaatatcccaaattttgtaga

SEQ ID NO: 1776146 - DNA, 25 bp, Homo sapien
ttgccacgacgaacagctttgccag

SEQ ID NO: 1776147 - DNA, 25 bp, Homo sapien
gcattttaacggacattacttcagt

SEQ ID NO: 1776148 - DNA, 25 bp, Homo sapien
ttcatggtgcattttaacggacatt

SEQ ID NO: 1776149 - DNA, 25 bp, Homo sapien
cgacgaacagctttgccagacacat

SEQ ID NO: 1776150 - DNA, 25 bp, Homo sapien
cgatagttttcacccaatttcgaga

SEQ ID NO: 1776151 - DNA, 25 bp, Homo sapien
caaaatgacctggaggagcatagtc

SEQ ID NO: 1776152 - DNA, 25 bp, Homo sapien
cttgcaagcaatgtgcgccgtgtga

SEQ ID NO: 1776153 - DNA, 25 bp, Homo sapien
cacacctaggcttgataggaaccat

SEQ ID NO: 1776154 - DNA, 25 bp, Homo sapien
caacttcctgctttctaggaagcgg

SEQ ID NO: 1776155 - DNA, 25 bp, Homo sapien
cggcagccatattgttgtgctttgg

SEQ ID NO: 1776156 - DNA, 25 bp, Homo sapien
tgttgtgctttggcccaacttcctg

SEQ ID NO: 1776157 - DNA, 25 bp, Homo sapien
gaagcggaatattgatttgaagaga

SEQ ID NO: 1776158 - DNA, 25 bp, Homo sapien
ggagtgaattaggagcacagtgccc

SEQ ID NO: 1776159 - DNA, 25 bp, Homo sapien
tcttctggtagatctggcactttgc

SEQ ID NO: 1776160 - DNA, 25 bp, Homo sapien
tgggataagacaggacacagagctg

SEQ ID NO: 1776161 - DNA, 25 bp, Homo sapien
gcccctggaatcttctgggataaga

SEQ ID NO: 1776162 - DNA, 25 bp, Homo sapien
cagtaaggggtgagttatttcccag

SEQ ID NO: 1776163 - DNA, 25 bp, Homo sapien
agacgcatgagaattcgggattaca

SEQ ID NO: 1776164 - DNA, 25 bp, Homo sapien
gtgtttgaagatggtagacgcatga

SEQ ID NO: 1776165 - DNA, 25 bp, Homo sapien
tggctggcagggcaaggttgtgttt

SEQ ID NO: 1776166 - DNA, 25 bp, Homo sapien
gatgtagctcggaagttcaggattc

SEQ ID NO: 1776167 - DNA, 25 bp, Homo sapien
caaaagatgtagctcggaagttcag

SEQ ID NO: 1776168 - DNA, 25 bp, Homo sapien
agatgtagctcggaagttcaggatt

SEQ ID NO: 1776169 - DNA, 25 bp, Homo sapien
aaagatgtagctcggaagttcagga

SEQ ID NO: 1776170 - DNA, 25 bp, Homo sapien
tgaaatatgccatcaaacttgaacg

SEQ ID NO: 1776171 - DNA, 25 bp, Homo sapien
ccgtggatttagagtgcgcttctta

SEQ ID NO: 1776172 - DNA, 25 bp, Homo sapien
tgattctggcactgagctgttaact

SEQ ID NO: 1776173 - DNA, 25 bp, Homo sapien
caggttcttttcgactgaaatatgc

SEQ ID NO: 1776174 - DNA, 25 bp, Homo sapien
catgggactgatgcaggtaggactc

SEQ ID NO: 1776175 - DNA, 25 bp, Homo sapien
tggggatcacatgggctgaggccat

SEQ ID NO: 1776176 - DNA, 25 bp, Homo sapien
tcaccctcgtcctgatttttacaca

SEQ ID NO: 1776177 - DNA, 25 bp, Homo sapien
cgctgtcaccctcgtcctgattttt

SEQ ID NO: 1776178 - DNA, 25 bp, Homo sapien
tagacaacttagatggacaaaaagg

SEQ ID NO: 1776179 - DNA, 25 bp, Homo sapien
gacccgtggcacagaaataatagac

SEQ ID NO: 1776180 - DNA, 25 bp, Homo sapien
cagagagaatcctgcctttcattaa

SEQ ID NO: 1776181 - DNA, 25 bp, Homo sapien
aacaggtgcaatgtgggaggtaaac

SEQ ID NO: 1776182 - DNA, 25 bp, Homo sapien
gtcagcatgatgcagctgataaggg

SEQ ID NO: 1776183 - DNA, 25 bp, Homo sapien
gctgataagggcgagtgctttggaa

SEQ ID NO: 1776184 - DNA, 25 bp, Homo sapien
atttggtcagaggtcagcatgatgc

SEQ ID NO: 1776185 - DNA, 25 bp, Homo sapien
cgagtgctttggaagtgatgtcaaa

SEQ ID NO: 1776186 - DNA, 25 bp, Homo sapien
tctttaccatgttaagccttcccga

SEQ ID NO: 1776187 - DNA, 25 bp, Homo sapien
cacaggatcacttcacttcatttca

SEQ ID NO: 1776188 - DNA, 25 bp, Homo sapien
ttcagcatacaaggtctgtacatgt

SEQ ID NO: 1776189 - DNA, 25 bp, Homo sapien
tcaaataggctggtttattccactt

SEQ ID NO: 1776190 - DNA, 25 bp, Homo sapien
catgatatttgtcgaaaaggctctt

SEQ ID NO: 1776191 - DNA, 25 bp, Homo sapien
ttgtataaaatgtgagacttaggtc

SEQ ID NO: 1776192 - DNA, 25 bp, Homo sapien
tcctcccagtcagtagcatgtcttt

SEQ ID NO: 1776193 - DNA, 25 bp, Homo sapien
ggatcatgcttctggtatcaagaac

SEQ ID NO: 1776194 - DNA, 25 bp, Homo sapien
tgtttagacacacctacaatgataa

SEQ ID NO: 1776195 - DNA, 25 bp, Homo sapien
agaggtcgccactgggttatttagt

SEQ ID NO: 1776196 - DNA, 25 bp, Homo sapien
catctgtggtttagcaaggaaagta

SEQ ID NO: 1776197 - DNA, 25 bp, Homo sapien
cattggtgaccaaggacactgcact

SEQ ID NO: 1776198 - DNA, 25 bp, Homo sapien
ggttgccctgtggagattaaaatta

SEQ ID NO: 1776199 - DNA, 25 bp, Homo sapien
cataactgacagcatggtgaatcca

SEQ ID NO: 1776200 - DNA, 25 bp, Homo sapien
caacaaaagcgcttacaaatttggg

SEQ ID NO: 1776201 - DNA, 25 bp, Homo sapien
tgctgtgaaaagtgaaggttgccct

SEQ ID NO: 1776202 - DNA, 25 bp, Homo sapien
cctgatacttagtgctgtgctgcct

SEQ ID NO: 1776203 - DNA, 25 bp, Homo sapien
gtagctaagtaaaccacatctttgc

SEQ ID NO: 1776204 - DNA, 25 bp, Homo sapien
gaaggcggtgtttaacttggcaagc

SEQ ID NO: 1776205 - DNA, 25 bp, Homo sapien
aggactatgctctggtgggaccaca

SEQ ID NO: 1776206 - DNA, 25 bp, Homo sapien
ccaagtgtgaccagaccatatttaa

SEQ ID NO: 1776207 - DNA, 25 bp, Homo sapien
gtatccatagattatatatccccag

SEQ ID NO: 1776208 - DNA, 25 bp, Homo sapien
tgttgccggcactggtcttcaattc

SEQ ID NO: 1776209 - DNA, 25 bp, Homo sapien
aaatatggatatgtagtcagcactc

SEQ ID NO: 1776210 - DNA, 25 bp, Homo sapien
gtggagctctgcaaccccggttatt

SEQ ID NO: 1776211 - DNA, 25 bp, Homo sapien
ggccgtatgtacacgtttttgagaa

SEQ ID NO: 1776212 - DNA, 25 bp, Homo sapien
tctgttgcttttggccgtatgtaca

SEQ ID NO: 1776213 - DNA, 25 bp, Homo sapien
gccccacccatacggcttcctgctc

SEQ ID NO: 1776214 - DNA, 25 bp, Homo sapien
gagtccccggtgcttctcagccctg

SEQ ID NO: 1776215 - DNA, 25 bp, Homo sapien
gtccccggtgcttctcagccctgct

SEQ ID NO: 1776216 - DNA, 25 bp, Homo sapien
agagtccccggtgcttctcagccct

SEQ ID NO: 1776217 - DNA, 25 bp, Homo sapien
tccccggtgcttctcagccctgctt

SEQ ID NO: 1776218 - DNA, 25 bp, Homo sapien
atctgttccgtgtctccttttccca

SEQ ID NO: 1776219 - DNA, 25 bp, Homo sapien
gaatctgttccgtgtctccttttcc

SEQ ID NO: 1776220 - DNA, 25 bp, Homo sapien
cctgaatctgttccgtgtctccttt

SEQ ID NO: 1776221 - DNA, 25 bp, Homo sapien
ctcctgaatctgttccgtgtctcct

SEQ ID NO: 1776222 - DNA, 25 bp, Homo sapien
ctggtttttgagtagggtcggcagc

SEQ ID NO: 1776223 - DNA, 25 bp, Homo sapien
tggtttttgagtagggtcggcagcc

SEQ ID NO: 1776224 - DNA, 25 bp, Homo sapien
tttttgagtagggtcggcagcccat

SEQ ID NO: 1776225 - DNA, 25 bp, Homo sapien
gtttttgagtagggtcggcagccca

SEQ ID NO: 1776226 - DNA, 25 bp, Homo sapien
ttcatcggccccaagatgcacagac

SEQ ID NO: 1776227 - DNA, 25 bp, Homo sapien
acttcatcggccccaagatgcacag

SEQ ID NO: 1776228 - DNA, 25 bp, Homo sapien
tcacttcatcggccccaagatgcac

SEQ ID NO: 1776229 - DNA, 25 bp, Homo sapien
catcggccccaagatgcacagacac

SEQ ID NO: 1776230 - DNA, 25 bp, Homo sapien
agggcttcccgctccatccctgatg

SEQ ID NO: 1776231 - DNA, 25 bp, Homo sapien
cctagcctggtgtaggagggcttcc

SEQ ID NO: 1776232 - DNA, 25 bp, Homo sapien
tcagcccctagcctggtgtaggagg

SEQ ID NO: 1776233 - DNA, 25 bp, Homo sapien
ggtgtaggagggcttcccgctccat

SEQ ID NO: 1776234 - DNA, 25 bp, Homo sapien
gcagggactgtaggaatggtacatt

SEQ ID NO: 1776235 - DNA, 25 bp, Homo sapien
actgctgcagtttgtcacaggccac

SEQ ID NO: 1776236 - DNA, 25 bp, Homo sapien
gccaccggcgttggctctgctttgc

SEQ ID NO: 1776237 - DNA, 25 bp, Homo sapien
gaatggtacattgagaactgctgca

SEQ ID NO: 1776238 - DNA, 25 bp, Homo sapien
cttgctctcagggtttggccctcgg

SEQ ID NO: 1776239 - DNA, 25 bp, Homo sapien
ttcttcagcctagttccttacaagg

SEQ ID NO: 1776240 - DNA, 25 bp, Homo sapien
taatcattaactcctcaacagctgt

SEQ ID NO: 1776241 - DNA, 25 bp, Homo sapien
gataccttgggtgattctagtcttg

SEQ ID NO: 1776242 - DNA, 25 bp, Homo sapien
gggagagtcattcgttctccttcct

SEQ ID NO: 1776243 - DNA, 25 bp, Homo sapien
aggggagagtcattcgttctccttc

SEQ ID NO: 1776244 - DNA, 25 bp, Homo sapien
ggggagagtcattcgttctccttcc

SEQ ID NO: 1776245 - DNA, 25 bp, Homo sapien
gcctttgcatttttcgatagagctg

SEQ ID NO: 1776246 - DNA, 25 bp, Homo sapien
ttcctgctaggattgtgtactcgcc

SEQ ID NO: 1776247 - DNA, 25 bp, Homo sapien
tccttcattgttcctgctaggattg

SEQ ID NO: 1776248 - DNA, 25 bp, Homo sapien
tcgatagagctgtcaacgcgatcta

SEQ ID NO: 1776249 - DNA, 25 bp, Homo sapien
gcctcagcttgggagaaattgttca

SEQ ID NO: 1776250 - DNA, 25 bp, Homo sapien
tcagcttgggagaaattgttcacca

SEQ ID NO: 1776251 - DNA, 25 bp, Homo sapien
ccacagcctcagcttgggagaaatt

SEQ ID NO: 1776252 - DNA, 25 bp, Homo sapien
acagcctcagcttgggagaaattgt

SEQ ID NO: 1776253 - DNA, 25 bp, Homo sapien
ccaaggacggcgtagaggatagatc

SEQ ID NO: 1776254 - DNA, 25 bp, Homo sapien
gagttttaatgcaggattcgttcac

SEQ ID NO: 1776255 - DNA, 25 bp, Homo sapien
gatagatcgaggacctggcgagtaa

SEQ ID NO: 1776256 - DNA, 25 bp, Homo sapien
gattcgttcacgttcttgtaacaca

SEQ ID NO: 1776257 - DNA, 25 bp, Homo sapien
tagaagtgaaggatagcaatcatga

SEQ ID NO: 1776258 - DNA, 25 bp, Homo sapien
ttagaagtgaaggatagcaatcatg

SEQ ID NO: 1776259 - DNA, 25 bp, Homo sapien
agaagtgaaggatagcaatcatgac

SEQ ID NO: 1776260 - DNA, 25 bp, Homo sapien
ggccagcgacgcaatcagaaagttt

SEQ ID NO: 1776261 - DNA, 25 bp, Homo sapien
gcgacgcaatcagaaagtttgtagg

SEQ ID NO: 1776262 - DNA, 25 bp, Homo sapien
cagaaagtttgtaggtgtgtgcagt

SEQ ID NO: 1776263 - DNA, 25 bp, Homo sapien
tcagcacaggccagcgacgcaatca

SEQ ID NO: 1776264 - DNA, 25 bp, Homo sapien
gttggctcccgtgtaaaagatcgaa

SEQ ID NO: 1776265 - DNA, 25 bp, Homo sapien
tataaacaccatggcgacattgggt

SEQ ID NO: 1776266 - DNA, 25 bp, Homo sapien
caacgaggtatggtagccaagagac

SEQ ID NO: 1776267 - DNA, 25 bp, Homo sapien
gaatcagtccttaagaccttgccgc

SEQ ID NO: 1776268 - DNA, 25 bp, Homo sapien
agtcacacctaccaagaagtcagca

SEQ ID NO: 1776269 - DNA, 25 bp, Homo sapien
gcaaagctgcacaacaggttgggaa

SEQ ID NO: 1776270 - DNA, 25 bp, Homo sapien
gctaaacgccgtgtacagaattacc

SEQ ID NO: 1776271 - DNA, 25 bp, Homo sapien
aatacagccagcaaagacccaaagc

SEQ ID NO: 1776272 - DNA, 25 bp, Homo sapien
tgtagaacacagcaccgctgtacgt

SEQ ID NO: 1776273 - DNA, 25 bp, Homo sapien
aataatttgacagccacctacgcag

SEQ ID NO: 1776274 - DNA, 25 bp, Homo sapien
tgagagcacttactaattcctccag

SEQ ID NO: 1776275 - DNA, 25 bp, Homo sapien
cacgctgatgcaaattcccgacaca

SEQ ID NO: 1776276 - DNA, 25 bp, Homo sapien
aatctatcaacacccagccttgact

SEQ ID NO: 1776277 - DNA, 25 bp, Homo sapien
gaaaatctatcaacacccagccttg

SEQ ID NO: 1776278 - DNA, 25 bp, Homo sapien
taggtatgaagaataacagaaaatc

SEQ ID NO: 1776279 - DNA, 25 bp, Homo sapien
aattatcataacaagggtaggtatg

SEQ ID NO: 1776280 - DNA, 25 bp, Homo sapien
taacaaatgctagtaccgtgacccc

SEQ ID NO: 1776281 - DNA, 25 bp, Homo sapien
gcaaatttcatagatataggcaggg

SEQ ID NO: 1776282 - DNA, 25 bp, Homo sapien
tacggtaaccatgaaataacaaatg

SEQ ID NO: 1776283 - DNA, 25 bp, Homo sapien
taactctctgaggatgattctactt

SEQ ID NO: 1776284 - DNA, 25 bp, Homo sapien
actaatggttgatgaactagccttt

SEQ ID NO: 1776285 - DNA, 25 bp, Homo sapien
aaaataaactaatggttgatgaact

SEQ ID NO: 1776286 - DNA, 25 bp, Homo sapien
ataaactaatggttgatgaactagc

SEQ ID NO: 1776287 - DNA, 25 bp, Homo sapien
aaactaatggttgatgaactagcct

SEQ ID NO: 1776288 - DNA, 25 bp, Homo sapien
tgtttagagaatagtagtcttccag

SEQ ID NO: 1776289 - DNA, 25 bp, Homo sapien
ctgatgtttagagaatagtagtctt

SEQ ID NO: 1776290 - DNA, 25 bp, Homo sapien
gatgtttagagaatagtagtcttcc

SEQ ID NO: 1776291 - DNA, 25 bp, Homo sapien
gtttagagaatagtagtcttccaga

SEQ ID NO: 1776292 - DNA, 25 bp, Homo sapien
tctaagacacccctgaggacaccaa

SEQ ID NO: 1776293 - DNA, 25 bp, Homo sapien
cctgaggacaccaaacccattagtg

SEQ ID NO: 1776294 - DNA, 25 bp, Homo sapien
gacaccaaacccattagtggcatga

SEQ ID NO: 1776295 - DNA, 25 bp, Homo sapien
aacccattagtggcatgagggtcca

SEQ ID NO: 1776296 - DNA, 25 bp, Homo sapien
gggaccatgggtttgctgccataca

SEQ ID NO: 1776297 - DNA, 25 bp, Homo sapien
gctctgggggaccatgggtttgctg

SEQ ID NO: 1776298 - DNA, 25 bp, Homo sapien
ctctgggggaccatgggtttgctgc

SEQ ID NO: 1776299 - DNA, 25 bp, Homo sapien
ccatgggtttgctgccatacaacat

SEQ ID NO: 1776300 - DNA, 25 bp, Homo sapien
catatggagaagttttgtccttgtt

SEQ ID NO: 1776301 - DNA, 25 bp, Homo sapien
ttttgtccttgttgattatcacaaa

SEQ ID NO: 1776302 - DNA, 25 bp, Homo sapien
tttacatatggagaagttttgtcct

SEQ ID NO: 1776303 - DNA, 25 bp, Homo sapien
tgtccttgttgattatcacaaaaaa

SEQ ID NO: 1776304 - DNA, 25 bp, Homo sapien
gcctgtcgtctagccacaagaaata

SEQ ID NO: 1776305 - DNA, 25 bp, Homo sapien
acaggacccattcacgttcgcgtag

SEQ ID NO: 1776306 - DNA, 25 bp, Homo sapien
tattgctttcctaaaccatgggtaa

SEQ ID NO: 1776307 - DNA, 25 bp, Homo sapien
gatagaaaatctgtcaacacccagt

SEQ ID NO: 1776308 - DNA, 25 bp, Homo sapien
catgaattgaccagataaggagatc

SEQ ID NO: 1776309 - DNA, 25 bp, Homo sapien
ggagatccttccagttggcgtagtg

SEQ ID NO: 1776310 - DNA, 25 bp, Homo sapien
tatactaaagctaccaaagcggtcc

SEQ ID NO: 1776311 - DNA, 25 bp, Homo sapien
tggcgtagtgaacatctaggtagga

SEQ ID NO: 1776312 - DNA, 25 bp, Homo sapien
gctgtgtggtcatgcccttcagtgt

SEQ ID NO: 1776313 - DNA, 25 bp, Homo sapien
tccactccccgaccaacttcttgat

SEQ ID NO: 1776314 - DNA, 25 bp, Homo sapien
tgatcacatccatcgagtcctgctg

SEQ ID NO: 1776315 - DNA, 25 bp, Homo sapien
tgacatcatactctgcaccacctcc

SEQ ID NO: 1776316 - DNA, 25 bp, Homo sapien
gtctatagtgatgacaatgctgggc

SEQ ID NO: 1776317 - DNA, 25 bp, Homo sapien
ggtcatgatcgggtctatagtgatg

SEQ ID NO: 1776318 - DNA, 25 bp, Homo sapien
gctgggcaacatgatcgtaatgatt

SEQ ID NO: 1776319 - DNA, 25 bp, Homo sapien
gatcgtaatgatttccatcgctcac

SEQ ID NO: 1776320 - DNA, 25 bp, Homo sapien
tcctcatggccgattggggagttca

SEQ ID NO: 1776321 - DNA, 25 bp, Homo sapien
tcctcctcatggccgattggggagt

SEQ ID NO: 1776322 - DNA, 25 bp, Homo sapien
ctcctcatggccgattggggagttc

SEQ ID NO: 1776323 - DNA, 25 bp, Homo sapien
ctcatggccgattggggagttcaga

SEQ ID NO: 1776324 - DNA, 25 bp, Homo sapien
tgtccttgcacgtcgaatctctcct

SEQ ID NO: 1776325 - DNA, 25 bp, Homo sapien
tttgtccttgcacgtcgaatctctc

SEQ ID NO: 1776326 - DNA, 25 bp, Homo sapien
ttgcacgtcgaatctctcctctcag

SEQ ID NO: 1776327 - DNA, 25 bp, Homo sapien
tctttgtccttgcacgtcgaatctc

SEQ ID NO: 1776328 - DNA, 25 bp, Homo sapien
gaaagcagcgaagacactgggtata

SEQ ID NO: 1776329 - DNA, 25 bp, Homo sapien
tacttgcaaccctcttattcatggc

SEQ ID NO: 1776330 - DNA, 25 bp, Homo sapien
tgattgacccatacctagactactc

SEQ ID NO: 1776331 - DNA, 25 bp, Homo sapien
agcattcaagtacatagtgtcagga

SEQ ID NO: 1776332 - DNA, 25 bp, Homo sapien
tgtttccggtatgcagagctataag

SEQ ID NO: 1776333 - DNA, 25 bp, Homo sapien
aacagcatgctcgagtcatcagcca

SEQ ID NO: 1776334 - DNA, 25 bp, Homo sapien
gaactccaccataaagcaactgctg

SEQ ID NO: 1776335 - DNA, 25 bp, Homo sapien
cataatgcgatcagtggagagttgc

SEQ ID NO: 1776336 - DNA, 25 bp, Homo sapien
tagagggctatgacatcttggttgc

SEQ ID NO: 1776337 - DNA, 25 bp, Homo sapien
tacttctatgttggtcggtccctgg

SEQ ID NO: 1776338 - DNA, 25 bp, Homo sapien
tctcagaggcctatgcagatggaat

SEQ ID NO: 1776339 - DNA, 25 bp, Homo sapien
ctggtttcgcagagcactgaagtac

SEQ ID NO: 1776340 - DNA, 25 bp, Homo sapien
tgggcttacattttgcaagatttat

SEQ ID NO: 1776341 - DNA, 25 bp, Homo sapien
cagatcggtggagaactgctggtat

SEQ ID NO: 1776342 - DNA, 25 bp, Homo sapien
gggattcaccatcatgccatatagt

SEQ ID NO: 1776343 - DNA, 25 bp, Homo sapien
gccatatagtatgatcagatcggtg

SEQ ID NO: 1776344 - DNA, 25 bp, Homo sapien
ggcaggatccatattcatcacaata

SEQ ID NO: 1776345 - DNA, 25 bp, Homo sapien
atttcctacttcaagcagcttcaca

SEQ ID NO: 1776346 - DNA, 25 bp, Homo sapien
gcaggatccatattcatcacaatat

SEQ ID NO: 1776347 - DNA, 25 bp, Homo sapien
tcaaatacgtcccatcatacaccag

SEQ ID NO: 1776348 - DNA, 25 bp, Homo sapien
caaatacgtcccatcatacaccagg

SEQ ID NO: 1776349 - DNA, 25 bp, Homo sapien
caccaggccattagttctctgcaag

SEQ ID NO: 1776350 - DNA, 25 bp, Homo sapien
atacaccaggccattagttctctgc

SEQ ID NO: 1776351 - DNA, 25 bp, Homo sapien
gttgcaactacaggccactccactg

SEQ ID NO: 1776352 - DNA, 25 bp, Homo sapien
tcgggtaaggacacactagtatatt

SEQ ID NO: 1776353 - DNA, 25 bp, Homo sapien
ggaactgggcatgctgagaacctct

SEQ ID NO: 1776354 - DNA, 25 bp, Homo sapien
ctatttggcttgtgcattcgggtaa

SEQ ID NO: 1776355 - DNA, 25 bp, Homo sapien
ccaacagagacttagggagccagca

SEQ ID NO: 1776356 - DNA, 25 bp, Homo sapien
caagagtacactggactgatgacgc

SEQ ID NO: 1776357 - DNA, 25 bp, Homo sapien
tgggcatcagctcaggacattttct

SEQ ID NO: 1776358 - DNA, 25 bp, Homo sapien
gatgacgctctcttgcagttctgag

SEQ ID NO: 1776359 - DNA, 25 bp, Homo sapien
ttgatgtgttggtgataggcttgaa

SEQ ID NO: 1776360 - DNA, 25 bp, Homo sapien
cagtagtgatctatgccagcaaaac

SEQ ID NO: 1776361 - DNA, 25 bp, Homo sapien
catagtaccgataacagccatgcac

SEQ ID NO: 1776362 - DNA, 25 bp, Homo sapien
tgggtgacattaactgacatttgct

SEQ ID NO: 1776363 - DNA, 25 bp, Homo sapien
gaatcaaagacccattcctgttcct

SEQ ID NO: 1776364 - DNA, 25 bp, Homo sapien
tgaatcaaagacccattcctgttcc

SEQ ID NO: 1776365 - DNA, 25 bp, Homo sapien
atcaaagacccattcctgttcctct

SEQ ID NO: 1776366 - DNA, 25 bp, Homo sapien
aatcaaagacccattcctgttcctc

SEQ ID NO: 1776367 - DNA, 25 bp, Homo sapien
ggacaactctttacaagctaagaag

SEQ ID NO: 1776368 - DNA, 25 bp, Homo sapien
caggcacaaagggagaccataagga

SEQ ID NO: 1776369 - DNA, 25 bp, Homo sapien
aggcgagtagggcacaacaggcaca

SEQ ID NO: 1776370 - DNA, 25 bp, Homo sapien
aaaagaagaggcgagtagggcacaa

SEQ ID NO: 1776371 - DNA, 25 bp, Homo sapien
gacggacgcttgtttagtctgaagc

SEQ ID NO: 1776372 - DNA, 25 bp, Homo sapien
gaaggactgggcatcaaatgcttca

SEQ ID NO: 1776373 - DNA, 25 bp, Homo sapien
cagtgccagtttcatagctccaatt

SEQ ID NO: 1776374 - DNA, 25 bp, Homo sapien
taatcaggtgtcaactgacggacgc

SEQ ID NO: 1776375 - DNA, 25 bp, Homo sapien
gggctgcaccttcatttaacacagg

SEQ ID NO: 1776376 - DNA, 25 bp, Homo sapien
ttgggcttccagtcaaaattgaggc

SEQ ID NO: 1776377 - DNA, 25 bp, Homo sapien
ttacagccgaatagaagaagctcag

SEQ ID NO: 1776378 - DNA, 25 bp, Homo sapien
gaagctcagttcaacacatccaagg

SEQ ID NO: 1776379 - DNA, 25 bp, Homo sapien
ttagttgcaatgcagtatgcccaga

SEQ ID NO: 1776380 - DNA, 25 bp, Homo sapien
tgcaatgcagtatgcccagaaacaa

SEQ ID NO: 1776381 - DNA, 25 bp, Homo sapien
aatgcagtatgcccagaaacaatcc

SEQ ID NO: 1776382 - DNA, 25 bp, Homo sapien
agttgcaatgcagtatgcccagaaa

SEQ ID NO: 1776383 - DNA, 25 bp, Homo sapien
tgttggatggtgaatttttcttcag

SEQ ID NO: 1776384 - DNA, 25 bp, Homo sapien
caggaattgttggatggtgaatttt

SEQ ID NO: 1776385 - DNA, 25 bp, Homo sapien
ggaattgttggatggtgaatttttc

SEQ ID NO: 1776386 - DNA, 25 bp, Homo sapien
attgttggatggtgaatttttcttc

SEQ ID NO: 1776387 - DNA, 25 bp, Homo sapien
agctggcagcgaagcaggtattacc

SEQ ID NO: 1776388 - DNA, 25 bp, Homo sapien
tgatattaccaaacagaacagaaac

SEQ ID NO: 1776389 - DNA, 25 bp, Homo sapien
aagcagttaagctggcagcgaagca

SEQ ID NO: 1776390 - DNA, 25 bp, Homo sapien
gtatatgagcatgcggtgatattac

SEQ ID NO: 1776391 - DNA, 25 bp, Homo sapien
catacagagagtgcaagtaatttgc

SEQ ID NO: 1776392 - DNA, 25 bp, Homo sapien
agatagtgtcatcccaattttgcag

SEQ ID NO: 1776393 - DNA, 25 bp, Homo sapien
ggctgcatggcatatcctcgtgaca

SEQ ID NO: 1776394 - DNA, 25 bp, Homo sapien
taatttgccaaatgctacccagcta

SEQ ID NO: 1776395 - DNA, 25 bp, Homo sapien
gagagatgctatggacgtatgttac

SEQ ID NO: 1776396 - DNA, 25 bp, Homo sapien
tgagcctcagtttaatgtccctgaa

SEQ ID NO: 1776397 - DNA, 25 bp, Homo sapien
ggagattccctgcagttgaccatag

SEQ ID NO: 1776398 - DNA, 25 bp, Homo sapien
cctgaaaagccggagttggtgactt

SEQ ID NO: 1776399 - DNA, 25 bp, Homo sapien
acctctgactcccaggttcaaccca

SEQ ID NO: 1776400 - DNA, 25 bp, Homo sapien
cctctgactcccaggttcaacccat

SEQ ID NO: 1776401 - DNA, 25 bp, Homo sapien
tgcaggttggtactcaggacagttt

SEQ ID NO: 1776402 - DNA, 25 bp, Homo sapien
ggatgccttgaatctcatgaacgag

SEQ ID NO: 1776403 - DNA, 25 bp, Homo sapien
agaaatcactaaaccttggccatgg

SEQ ID NO: 1776404 - DNA, 25 bp, Homo sapien
ggagacagcgatcaagcaggcagct

SEQ ID NO: 1776405 - DNA, 25 bp, Homo sapien
cataccctttcaaacgcatgtctct

SEQ ID NO: 1776406 - DNA, 25 bp, Homo sapien
ctttcaaacgcatgtctctccaact

SEQ ID NO: 1776407 - DNA, 25 bp, Homo sapien
ctctccaactgcctacataaatcaa

SEQ ID NO: 1776408 - DNA, 25 bp, Homo sapien
caacgagtgacttggatccagttcc

SEQ ID NO: 1776409 - DNA, 25 bp, Homo sapien
gataaaaatgcgaatggcttggtgg

SEQ ID NO: 1776410 - DNA, 25 bp, Homo sapien
taagacagctatggcattggatcgt

SEQ ID NO: 1776411 - DNA, 25 bp, Homo sapien
ggaacacgatttagtgagggagaca

SEQ ID NO: 1776412 - DNA, 25 bp, Homo sapien
ggttgttagtaagctgggtccagcc

SEQ ID NO: 1776413 - DNA, 25 bp, Homo sapien
tcctgaggtttttcggtcttgttca

SEQ ID NO: 1776414 - DNA, 25 bp, Homo sapien
tgctctaaatacataaaggtgcttc

SEQ ID NO: 1776415 - DNA, 25 bp, Homo sapien
tgggctgtacttactgtgatactga

SEQ ID NO: 1776416 - DNA, 25 bp, Homo sapien
tggatgatcctgtattgggctgtac

SEQ ID NO: 1776417 - DNA, 25 bp, Homo sapien
tggctttcgagagaacaggtttttg

SEQ ID NO: 1776418 - DNA, 25 bp, Homo sapien
ccccgggtggctttcgagagaacag

SEQ ID NO: 1776419 - DNA, 25 bp, Homo sapien
aggtttttgtactgatatcggcagc

SEQ ID NO: 1776420 - DNA, 25 bp, Homo sapien
gcagcttcggtgaacttaggttcca

SEQ ID NO: 1776421 - DNA, 25 bp, Homo sapien
acctctgctttttaagtactgtgtg

SEQ ID NO: 1776422 - DNA, 25 bp, Homo sapien
tgtgtcacggtttctaatgactttc

SEQ ID NO: 1776423 - DNA, 25 bp, Homo sapien
ggatatgtgtcacggtttctaatga

SEQ ID NO: 1776424 - DNA, 25 bp, Homo sapien
ccaggattggatatgtgtcacggtt

SEQ ID NO: 1776425 - DNA, 25 bp, Homo sapien
caacgattgaattgcttatagcttg

SEQ ID NO: 1776426 - DNA, 25 bp, Homo sapien
tatagcttgatctgtttccgagaga

SEQ ID NO: 1776427 - DNA, 25 bp, Homo sapien
ggcgtgtctctttagcaacgattga

SEQ ID NO: 1776428 - DNA, 25 bp, Homo sapien
accatgaattgcgtggccgggagcc

SEQ ID NO: 1776429 - DNA, 25 bp, Homo sapien
tggctccttggaggtcgagtccaag

SEQ ID NO: 1776430 - DNA, 25 bp, Homo sapien
ggccgggcggatcgctgcctgcagg

SEQ ID NO: 1776431 - DNA, 25 bp, Homo sapien
ggtcgagtccaaggacgtggcttga

SEQ ID NO: 1776432 - DNA, 25 bp, Homo sapien
ccttggaggtcgagtccaaggacgt

SEQ ID NO: 1776433 - DNA, 25 bp, Homo sapien
ggttctgaggcaaacgtactgcgag

SEQ ID NO: 1776434 - DNA, 25 bp, Homo sapien
aggccggtccttggcgagtgcaaca

SEQ ID NO: 1776435 - DNA, 25 bp, Homo sapien
ttgtccttctttgcggaggcgtggc

SEQ ID NO: 1776436 - DNA, 25 bp, Homo sapien
gagtttctgtttccggattgaggcg

SEQ ID NO: 1776437 - DNA, 25 bp, Homo sapien
cctcgaaagaggtggctcccgcagt

SEQ ID NO: 1776438 - DNA, 25 bp, Homo sapien
tcgaaagaggtggctcccgcagtgc

SEQ ID NO: 1776439 - DNA, 25 bp, Homo sapien
agaggtggctcccgcagtgccgggc

SEQ ID NO: 1776440 - DNA, 25 bp, Homo sapien
aaagaggtggctcccgcagtgccgg

SEQ ID NO: 1776441 - DNA, 25 bp, Homo sapien
atccgcacgcatgccggtatttaag

SEQ ID NO: 1776442 - DNA, 25 bp, Homo sapien
ctcatccgcacgcatgccggtattt

SEQ ID NO: 1776443 - DNA, 25 bp, Homo sapien
aggtcccctgtgcgcatgtgcactc

SEQ ID NO: 1776444 - DNA, 25 bp, Homo sapien
aagaggcctcatccgcacgcatgcc

SEQ ID NO: 1776445 - DNA, 25 bp, Homo sapien
ttacgggtgaagttgaatcttgaac

SEQ ID NO: 1776446 - DNA, 25 bp, Homo sapien
ggttacgggtgaagttgaatcttga

SEQ ID NO: 1776447 - DNA, 25 bp, Homo sapien
tacgggtgaagttgaatcttgaacg

SEQ ID NO: 1776448 - DNA, 25 bp, Homo sapien
cgggtgaagttgaatcttgaacgca

SEQ ID NO: 1776449 - DNA, 25 bp, Homo sapien
aatcctcacaccacataaggccttg

SEQ ID NO: 1776450 - DNA, 25 bp, Homo sapien
tcagaaccatcagttaaaatcctca

SEQ ID NO: 1776451 - DNA, 25 bp, Homo sapien
cttaaacgcgacacatcagaaccat

SEQ ID NO: 1776452 - DNA, 25 bp, Homo sapien
aaaagctaagtgtacaacagacgcg

SEQ ID NO: 1776453 - DNA, 25 bp, Homo sapien
gtggatgagggcagtcttcagaacc

SEQ ID NO: 1776454 - DNA, 25 bp, Homo sapien
gggcagtcttcagaacctcttgtaa

SEQ ID NO: 1776455 - DNA, 25 bp, Homo sapien
ttggcagcttcgcgaattccacgtg

SEQ ID NO: 1776456 - DNA, 25 bp, Homo sapien
tggcagcttcgcgaattccacgtgc

SEQ ID NO: 1776457 - DNA, 25 bp, Homo sapien
cttcttcccttgggtggcagttttg

SEQ ID NO: 1776458 - DNA, 25 bp, Homo sapien
tttgttccggttgcaagaacccaca

SEQ ID NO: 1776459 - DNA, 25 bp, Homo sapien
ggtggcagttttgttccggttgcaa

SEQ ID NO: 1776460 - DNA, 25 bp, Homo sapien
ttccggttgcaagaacccacagtat

SEQ ID NO: 1776461 - DNA, 25 bp, Homo sapien
aggtttccggtaggacggatgccat

SEQ ID NO: 1776462 - DNA, 25 bp, Homo sapien
taggtttccggtaggacggatgcca

SEQ ID NO: 1776463 - DNA, 25 bp, Homo sapien
taagtgggctttatagatctgagtt

SEQ ID NO: 1776464 - DNA, 25 bp, Homo sapien
tttaagtgggctttatagatctgag

SEQ ID NO: 1776465 - DNA, 25 bp, Homo sapien
ttaagtgggctttatagatctgagt

SEQ ID NO: 1776466 - DNA, 25 bp, Homo sapien
gtgggctttatagatctgagttctg

SEQ ID NO: 1776467 - DNA, 25 bp, Homo sapien
tgtcagactcttatgtttcactcat

SEQ ID NO: 1776468 - DNA, 25 bp, Homo sapien
ggtatccgacaattaaagtcatcat

SEQ ID NO: 1776469 - DNA, 25 bp, Homo sapien
gtttgtcagactcttatgtttcact

SEQ ID NO: 1776470 - DNA, 25 bp, Homo sapien
gagtgaaggggtatccgacaattaa

SEQ ID NO: 1776471 - DNA, 25 bp, Homo sapien
cagaagactcatactaggacctact

SEQ ID NO: 1776472 - DNA, 25 bp, Homo sapien
taacacttgcgaaacataagcagcc

SEQ ID NO: 1776473 - DNA, 25 bp, Homo sapien
gctagggagcatatacatcttcaat

SEQ ID NO: 1776474 - DNA, 25 bp, Homo sapien
tctgtccctgacacactgaattggt

SEQ ID NO: 1776475 - DNA, 25 bp, Homo sapien
cctccaccaacttgacatacatagg

SEQ ID NO: 1776476 - DNA, 25 bp, Homo sapien
acatacataggctcatcacagttgg

SEQ ID NO: 1776477 - DNA, 25 bp, Homo sapien
ataggctcatcacagttggatgcaa

SEQ ID NO: 1776478 - DNA, 25 bp, Homo sapien
tttggtgttcagcacaaagggcctc

SEQ ID NO: 1776479 - DNA, 25 bp, Homo sapien
tcagaagggtgacatggcagtttcc

SEQ ID NO: 1776480 - DNA, 25 bp, Homo sapien
gggagccagttgtcatcatgtacag

SEQ ID NO: 1776481 - DNA, 25 bp, Homo sapien
tcatggcagttcagtagagggagcc

SEQ ID NO: 1776482 - DNA, 25 bp, Homo sapien
taaaatggccgacagtatcaggtgc

SEQ ID NO: 1776483 - DNA, 25 bp, Homo sapien
ctctgtcaattttacaaaggcctac

SEQ ID NO: 1776484 - DNA, 25 bp, Homo sapien
tgtcaattttacaaaggcctaccca

SEQ ID NO: 1776485 - DNA, 25 bp, Homo sapien
tacaaaggcctacccattctcctag

SEQ ID NO: 1776486 - DNA, 25 bp, Homo sapien
caaaggcctacccattctcctagtt

SEQ ID NO: 1776487 - DNA, 25 bp, Homo sapien
aaatgctttaaacctgttgaatcag

SEQ ID NO: 1776488 - DNA, 25 bp, Homo sapien
cagcataaccttcatccctagaata

SEQ ID NO: 1776489 - DNA, 25 bp, Homo sapien
caatacaaggttttatatgattacc

SEQ ID NO: 1776490 - DNA, 25 bp, Homo sapien
tccttttataagatcctcaacttat

SEQ ID NO: 1776491 - DNA, 25 bp, Homo sapien
tcagggaccttaacgacttcaatgt

SEQ ID NO: 1776492 - DNA, 25 bp, Homo sapien
tctcagggaccttaacgacttcaat

SEQ ID NO: 1776493 - DNA, 25 bp, Homo sapien
cagggaccttaacgacttcaatgtc

SEQ ID NO: 1776494 - DNA, 25 bp, Homo sapien
ctcagggaccttaacgacttcaatg

SEQ ID NO: 1776495 - DNA, 25 bp, Homo sapien
gaatttcaccaagctattagtatca

SEQ ID NO: 1776496 - DNA, 25 bp, Homo sapien
caacaattagctatgtcttataaaa

SEQ ID NO: 1776497 - DNA, 25 bp, Homo sapien
tattagtatcaattatagtggagct

SEQ ID NO: 1776498 - DNA, 25 bp, Homo sapien
tcaattatagtggagcttcaacaat

SEQ ID NO: 1776499 - DNA, 25 bp, Homo sapien
gcatttgaaatactcttcaatgaca

SEQ ID NO: 1776500 - DNA, 25 bp, Homo sapien
tgcatttgaaatactcttcaatgac

SEQ ID NO: 1776501 - DNA, 25 bp, Homo sapien
atttgaaatactcttcaatgacatc

SEQ ID NO: 1776502 - DNA, 25 bp, Homo sapien
cttgcatttgaaatactcttcaatg

SEQ ID NO: 1776503 - DNA, 25 bp, Homo sapien
taaagttcacttcaaggcacgcaaa

SEQ ID NO: 1776504 - DNA, 25 bp, Homo sapien
aagagcaagtgggtcttccttggga

SEQ ID NO: 1776505 - DNA, 25 bp, Homo sapien
aaaacaaaatagacttgggaatcag

SEQ ID NO: 1776506 - DNA, 25 bp, Homo sapien
tccttgggaaattgtctggtacagc

SEQ ID NO: 1776507 - DNA, 25 bp, Homo sapien
tgaattccatataagctacacaggc

SEQ ID NO: 1776508 - DNA, 25 bp, Homo sapien
tgaagccgacattacatttgcactg

SEQ ID NO: 1776509 - DNA, 25 bp, Homo sapien
gaaaacaggcagtcacaagtctcat

SEQ ID NO: 1776510 - DNA, 25 bp, Homo sapien
ttgtccatgggtgcaagaaaacatc

SEQ ID NO: 1776511 - DNA, 25 bp, Homo sapien
ctgtccctcagctggcatcagtttc

SEQ ID NO: 1776512 - DNA, 25 bp, Homo sapien
tgtactccatattgtgataggatat

SEQ ID NO: 1776513 - DNA, 25 bp, Homo sapien
tctatgccctgctccctagagtgga

SEQ ID NO: 1776514 - DNA, 25 bp, Homo sapien
tgtttctatgccctgctccctagag

SEQ ID NO: 1776515 - DNA, 25 bp, Homo sapien
tgtgataggatatgtttctatgccc

SEQ ID NO: 1776516 - DNA, 25 bp, Homo sapien
gacctgagacccaagttccatatta

SEQ ID NO: 1776517 - DNA, 25 bp, Homo sapien
ggcctgttacactggaaaatatgcg

SEQ ID NO: 1776518 - DNA, 25 bp, Homo sapien
tgacatgaaaaacgagctgaggcct

SEQ ID NO: 1776519 - DNA, 25 bp, Homo sapien
caagctctttgttatgcatgcacag

SEQ ID NO: 1776520 - DNA, 25 bp, Homo sapien
ctaagtggctacaatcaatgcgctt

SEQ ID NO: 1776521 - DNA, 25 bp, Homo sapien
caggggcacaaagccacagttgaga

SEQ ID NO: 1776522 - DNA, 25 bp, Homo sapien
agtggctacaatcaatgcgcttaac

SEQ ID NO: 1776523 - DNA, 25 bp, Homo sapien
acaatcaatgcgcttaacaacaggg

SEQ ID NO: 1776524 - DNA, 25 bp, Homo sapien
ctttcttgatacaggtgaaccagtg

SEQ ID NO: 1776525 - DNA, 25 bp, Homo sapien
ccagtggtggcccatttgtcaatcc

SEQ ID NO: 1776526 - DNA, 25 bp, Homo sapien
gaaagggcatcatcagtgtgtaaac

SEQ ID NO: 1776527 - DNA, 25 bp, Homo sapien
catttatcctacacagatgtcttcc

SEQ ID NO: 1776528 - DNA, 25 bp, Homo sapien
agcatcaagcagggactgtgtgatc

SEQ ID NO: 1776529 - DNA, 25 bp, Homo sapien
gcatcaagcagggactgtgtgatca

SEQ ID NO: 1776530 - DNA, 25 bp, Homo sapien
gagcatcaagcagggactgtgtgat

SEQ ID NO: 1776531 - DNA, 25 bp, Homo sapien
gatctgtaatcagcatgtaacccat

SEQ ID NO: 1776532 - DNA, 25 bp, Homo sapien
caactttataaatcattctcctaac

SEQ ID NO: 1776533 - DNA, 25 bp, Homo sapien
ttctcctaacctcataagctgaagg

SEQ ID NO: 1776534 - DNA, 25 bp, Homo sapien
taagctgaaggtctgctatggagat

SEQ ID NO: 1776535 - DNA, 25 bp, Homo sapien
gcatcattgggtgccagtgtgacca

SEQ ID NO: 1776536 - DNA, 25 bp, Homo sapien
aagtactgaaaccagagcacagtca

SEQ ID NO: 1776537 - DNA, 25 bp, Homo sapien
ttcctctgcatcattgggtgccagt

SEQ ID NO: 1776538 - DNA, 25 bp, Homo sapien
gaaaccagagcacagtcactatgac

SEQ ID NO: 1776539 - DNA, 25 bp, Homo sapien
tatgggcaatgagttctagactcca

SEQ ID NO: 1776540 - DNA, 25 bp, Homo sapien
gcttaattgaaaacatgcggacaca

SEQ ID NO: 1776541 - DNA, 25 bp, Homo sapien
tagcaatgtttctctggctgccata

SEQ ID NO: 1776542 - DNA, 25 bp, Homo sapien
catcaatttagctttacatttaaca

SEQ ID NO: 1776543 - DNA, 25 bp, Homo sapien
gcgagaggatcacgggaaacttctg

SEQ ID NO: 1776544 - DNA, 25 bp, Homo sapien
agaggatcacgggaaacttctgtac

SEQ ID NO: 1776545 - DNA, 25 bp, Homo sapien
tttggaagcagttctactttcttag

SEQ ID NO: 1776546 - DNA, 25 bp, Homo sapien
tctactttcttagcgagaggatcac

SEQ ID NO: 1776547 - DNA, 25 bp, Homo sapien
accatgtcctttgcccctacactgt

SEQ ID NO: 1776548 - DNA, 25 bp, Homo sapien
gagaggcattttgaatctgcaaagc

SEQ ID NO: 1776549 - DNA, 25 bp, Homo sapien
taaatcatggctgactgtttggcac

SEQ ID NO: 1776550 - DNA, 25 bp, Homo sapien
actgtgtcctgagaggcattttgaa

SEQ ID NO: 1776551 - DNA, 25 bp, Homo sapien
tcggttgtctctgatgcaacttatg

SEQ ID NO: 1776552 - DNA, 25 bp, Homo sapien
tgatgcaacttatgcaaaataatca

SEQ ID NO: 1776553 - DNA, 25 bp, Homo sapien
ggttgtctctgatgcaacttatgca

SEQ ID NO: 1776554 - DNA, 25 bp, Homo sapien
attttcggttgtctctgatgcaact

SEQ ID NO: 1776555 - DNA, 25 bp, Homo sapien
tcttgttgtgttctaagtatcacta

SEQ ID NO: 1776556 - DNA, 25 bp, Homo sapien
tgttctaagtatcactaaaaaatca

SEQ ID NO: 1776557 - DNA, 25 bp, Homo sapien
ctggcctatccattggtggtgttgt

SEQ ID NO: 1776558 - DNA, 25 bp, Homo sapien
tatccattggtggtgttgtgaagaa

SEQ ID NO: 1776559 - DNA, 25 bp, Homo sapien
agaggcggacaaggcctgttatgaa

SEQ ID NO: 1776560 - DNA, 25 bp, Homo sapien
aaaatgtgaagatatggcagaggcg

SEQ ID NO: 1776561 - DNA, 25 bp, Homo sapien
ggcagaggcggacaaggcctgttat

SEQ ID NO: 1776562 - DNA, 25 bp, Homo sapien
gtgaagatatggcagaggcggacaa

SEQ ID NO: 1776563 - DNA, 25 bp, Homo sapien
acaaagatgcttcggtcaatttctc

SEQ ID NO: 1776564 - DNA, 25 bp, Homo sapien
aagtgaaagctggactggcacaggg

SEQ ID NO: 1776565 - DNA, 25 bp, Homo sapien
caagtgaaagctggactggcacagg

SEQ ID NO: 1776566 - DNA, 25 bp, Homo sapien
tgttgatctgttgggctgtccattc

SEQ ID NO: 1776567 - DNA, 25 bp, Homo sapien
taggcttccttttcacgccacacag

SEQ ID NO: 1776568 - DNA, 25 bp, Homo sapien
ctttctcactgagtcatgtgtaggc

SEQ ID NO: 1776569 - DNA, 25 bp, Homo sapien
tctgatgtatcattggccgtgggtg

SEQ ID NO: 1776570 - DNA, 25 bp, Homo sapien
ttcttctggagagcaagcttttttg

SEQ ID NO: 1776571 - DNA, 25 bp, Homo sapien
cttctggagagcaagcttttttggt

SEQ ID NO: 1776572 - DNA, 25 bp, Homo sapien
gcttttttggtggagtagccaacat

SEQ ID NO: 1776573 - DNA, 25 bp, Homo sapien
ctggagagcaagcttttttggtgga

SEQ ID NO: 1776574 - DNA, 25 bp, Homo sapien
aatggttcatgggtcaactgttgac

SEQ ID NO: 1776575 - DNA, 25 bp, Homo sapien
tgttgacctcctctgcataagacag

SEQ ID NO: 1776576 - DNA, 25 bp, Homo sapien
ccagtttaaatggttcatgggtcaa

SEQ ID NO: 1776577 - DNA, 25 bp, Homo sapien
taagacagccttgagcaatcgcctc

SEQ ID NO: 1776578 - DNA, 25 bp, Homo sapien
ctttcggttctgaggttatgttcat

SEQ ID NO: 1776579 - DNA, 25 bp, Homo sapien
ggagagatgccacactctttttaaa

SEQ ID NO: 1776580 - DNA, 25 bp, Homo sapien
tggagaagacaaacatccgaagtat

SEQ ID NO: 1776581 - DNA, 25 bp, Homo sapien
accagacctcatgtaaactcattgc

SEQ ID NO: 1776582 - DNA, 25 bp, Homo sapien
caagggtgtgcagacctatcacgtg

SEQ ID NO: 1776583 - DNA, 25 bp, Homo sapien
cacatggagcatccacaagaatcat

SEQ ID NO: 1776584 - DNA, 25 bp, Homo sapien
ctttcctcacatggagcatccacaa

SEQ ID NO: 1776585 - DNA, 25 bp, Homo sapien
gatcctttcctcacatggagcatcc

SEQ ID NO: 1776586 - DNA, 25 bp, Homo sapien
tcctcacatggagcatccacaagaa

SEQ ID NO: 1776587 - DNA, 25 bp, Homo sapien
cttcctgaatacagactcttcccat

SEQ ID NO: 1776588 - DNA, 25 bp, Homo sapien
tctctgctgccaataatagttcgtc

SEQ ID NO: 1776589 - DNA, 25 bp, Homo sapien
ccaggttagatggtcagggctctca

SEQ ID NO: 1776590 - DNA, 25 bp, Homo sapien
tcgtctaggtgccaaatttagtggt

SEQ ID NO: 1776591 - DNA, 25 bp, Homo sapien
tcaaatccgaatgctgattcaggcc

SEQ ID NO: 1776592 - DNA, 25 bp, Homo sapien
atggcatcaggcaataatcccttaa

SEQ ID NO: 1776593 - DNA, 25 bp, Homo sapien
gcaaacacgccactctcagtcctga

SEQ ID NO: 1776594 - DNA, 25 bp, Homo sapien
caataatcccttaaatgttcccact

SEQ ID NO: 1776595 - DNA, 25 bp, Homo sapien
taaaccctgcaaacacgccactctc

SEQ ID NO: 1776596 - DNA, 25 bp, Homo sapien
gcttttcctcatcatcgctttgtca

SEQ ID NO: 1776597 - DNA, 25 bp, Homo sapien
ctacgaacgtgcaagctcactaaaa

SEQ ID NO: 1776598 - DNA, 25 bp, Homo sapien
gctttcactgctgaatggccctttg

SEQ ID NO: 1776599 - DNA, 25 bp, Homo sapien
gcaagctcactaaaagccatgcttt

SEQ ID NO: 1776600 - DNA, 25 bp, Homo sapien
tagcttttaactcatcgcatcttag

SEQ ID NO: 1776601 - DNA, 25 bp, Homo sapien
gattttgcgaatgaccaggacttct

SEQ ID NO: 1776602 - DNA, 25 bp, Homo sapien
tctttaggttgaaggattttgcgaa

SEQ ID NO: 1776603 - DNA, 25 bp, Homo sapien
gatgctaataaagcatctagctttc

SEQ ID NO: 1776604 - DNA, 25 bp, Homo sapien
tttctagctttagggaattctcttc

SEQ ID NO: 1776605 - DNA, 25 bp, Homo sapien
agtcttttgtagtgccctgtagcct

SEQ ID NO: 1776606 - DNA, 25 bp, Homo sapien
gcctattatgcaggcaggtactgtc

SEQ ID NO: 1776607 - DNA, 25 bp, Homo sapien
tgtagtgccctgtagcctattatgc

SEQ ID NO: 1776608 - DNA, 25 bp, Homo sapien
aagacactgggtctgcataggttgg

SEQ ID NO: 1776609 - DNA, 25 bp, Homo sapien
cactgggtctgcataggttggaaat

SEQ ID NO: 1776610 - DNA, 25 bp, Homo sapien
gacactgggtctgcataggttggaa

SEQ ID NO: 1776611 - DNA, 25 bp, Homo sapien
tctgcataggttggaaatgggtttt

SEQ ID NO: 1776612 - DNA, 25 bp, Homo sapien
tgaaaccagctacccaattccttgt

SEQ ID NO: 1776613 - DNA, 25 bp, Homo sapien
gtaaatattgcccacccaatccgta

SEQ ID NO: 1776614 - DNA, 25 bp, Homo sapien
tttgttttgagtcaccagtgtaaat

SEQ ID NO: 1776615 - DNA, 25 bp, Homo sapien
ttgcacaaattaactgaaaccagct

SEQ ID NO: 1776616 - DNA, 25 bp, Homo sapien
ccagtccgtttagccaagtcagtgt

SEQ ID NO: 1776617 - DNA, 25 bp, Homo sapien
tttggggatccagtccgtttagcca

SEQ ID NO: 1776618 - DNA, 25 bp, Homo sapien
gatccagtccgtttagccaagtcag

SEQ ID NO: 1776619 - DNA, 25 bp, Homo sapien
gggatccagtccgtttagccaagtc

SEQ ID NO: 1776620 - DNA, 25 bp, Homo sapien
cttcagagtgggacacctgcatgct

SEQ ID NO: 1776621 - DNA, 25 bp, Homo sapien
ttcagagtgggacacctgcatgctg

SEQ ID NO: 1776622 - DNA, 25 bp, Homo sapien
aagcaagtcctcagtgacctacaaa

SEQ ID NO: 1776623 - DNA, 25 bp, Homo sapien
agtcctcagtgacctacaaagagac

SEQ ID NO: 1776624 - DNA, 25 bp, Homo sapien
aagtcctcagtgacctacaaagaga

SEQ ID NO: 1776625 - DNA, 25 bp, Homo sapien
cataaagcaagtcctcagtgaccta

SEQ ID NO: 1776626 - DNA, 25 bp, Homo sapien
aaattgtagcacaaatacaggcatg

SEQ ID NO: 1776627 - DNA, 25 bp, Homo sapien
tcatggtccaagacatagtttccca

SEQ ID NO: 1776628 - DNA, 25 bp, Homo sapien
cttgggttaataatcctagagtctg

SEQ ID NO: 1776629 - DNA, 25 bp, Homo sapien
caggcatgtgccgtaaaagtaaagt

SEQ ID NO: 1776630 - DNA, 25 bp, Homo sapien
gctcttcttttctctagctccaccc

SEQ ID NO: 1776631 - DNA, 25 bp, Homo sapien
ttgctcttcttttctctagctccac

SEQ ID NO: 1776632 - DNA, 25 bp, Homo sapien
cttgctcttcttttctctagctcca

SEQ ID NO: 1776633 - DNA, 25 bp, Homo sapien
tcttcttttctctagctccacccat

SEQ ID NO: 1776634 - DNA, 25 bp, Homo sapien
acaagagggggccaaggagcagaag

SEQ ID NO: 1776635 - DNA, 25 bp, Homo sapien
gagggggccaaggagcagaagcctg

SEQ ID NO: 1776636 - DNA, 25 bp, Homo sapien
gggccaaggagcagaagcctgacag

SEQ ID NO: 1776637 - DNA, 25 bp, Homo sapien
gccaaggagcagaagcctgacagat

SEQ ID NO: 1776638 - DNA, 25 bp, Homo sapien
ggtcctccacttccctcaaagaaga

SEQ ID NO: 1776639 - DNA, 25 bp, Homo sapien
tgagacactggtacatttcaaatca

SEQ ID NO: 1776640 - DNA, 25 bp, Homo sapien
tttgctgcattgagcttgagacact

SEQ ID NO: 1776641 - DNA, 25 bp, Homo sapien
acagccagtgcatgaggggtcctcc

SEQ ID NO: 1776642 - DNA, 25 bp, Homo sapien
gctgttttgccccagaagatactgg

SEQ ID NO: 1776643 - DNA, 25 bp, Homo sapien
tgttttgccccagaagatactggat

SEQ ID NO: 1776644 - DNA, 25 bp, Homo sapien
gttttgccccagaagatactggatt

SEQ ID NO: 1776645 - DNA, 25 bp, Homo sapien
ggctgttttgccccagaagatactg

SEQ ID NO: 1776646 - DNA, 25 bp, Homo sapien
tctctgcttccgtgtcattttcaag

SEQ ID NO: 1776647 - DNA, 25 bp, Homo sapien
tgcttccgtgtcattttcaagggcc

SEQ ID NO: 1776648 - DNA, 25 bp, Homo sapien
tctgcttccgtgtcattttcaaggg

SEQ ID NO: 1776649 - DNA, 25 bp, Homo sapien
atctctgcttccgtgtcattttcaa

SEQ ID NO: 1776650 - DNA, 25 bp, Homo sapien
tgatttctttactaaccattttcca

SEQ ID NO: 1776651 - DNA, 25 bp, Homo sapien
tctttactaaccattttccagcctc

SEQ ID NO: 1776652 - DNA, 25 bp, Homo sapien
cataaaataacggttgtgttctggt

SEQ ID NO: 1776653 - DNA, 25 bp, Homo sapien
gtctgtgaaacacatctgtgatttc

SEQ ID NO: 1776654 - DNA, 25 bp, Homo sapien
gtaaaaccacctgcagatccacagc

SEQ ID NO: 1776655 - DNA, 25 bp, Homo sapien
taatctttgccttgggcacaccctt

SEQ ID NO: 1776656 - DNA, 25 bp, Homo sapien
agccactctaatctttgccttgggc

SEQ ID NO: 1776657 - DNA, 25 bp, Homo sapien
caagtttctgttccctccgagtgct

SEQ ID NO: 1776658 - DNA, 25 bp, Homo sapien
tatggtcacagctgcagtagttatg

SEQ ID NO: 1776659 - DNA, 25 bp, Homo sapien
cagcaaacatttctacgtcagattt

SEQ ID NO: 1776660 - DNA, 25 bp, Homo sapien
ggttggtttatagtgcattgcccat

SEQ ID NO: 1776661 - DNA, 25 bp, Homo sapien
gcctgttccacctttctatttggaa

SEQ ID NO: 1776662 - DNA, 25 bp, Homo sapien
gaactgtgccatgaaaacaagctgc

SEQ ID NO: 1776663 - DNA, 25 bp, Homo sapien
gtgcccctggtgatgtcctacttaa

SEQ ID NO: 1776664 - DNA, 25 bp, Homo sapien
aaatagaagtatgttgtgcccctgg

SEQ ID NO: 1776665 - DNA, 25 bp, Homo sapien
aacaaatctttggtcacaggcctaa

SEQ ID NO: 1776666 - DNA, 25 bp, Homo sapien
cccagcaggaggaagttctcagctt

SEQ ID NO: 1776667 - DNA, 25 bp, Homo sapien
gagaagcctttttccgacttattca

SEQ ID NO: 1776668 - DNA, 25 bp, Homo sapien
tcttcatttccttagcggttgtggg

SEQ ID NO: 1776669 - DNA, 25 bp, Homo sapien
taacaaattcccacgcaattagtgg

SEQ ID NO: 1776670 - DNA, 25 bp, Homo sapien
tacgcttgtcactcacttaaggaag

SEQ ID NO: 1776671 - DNA, 25 bp, Homo sapien
taatagttaaaggacagcttcccac

SEQ ID NO: 1776672 - DNA, 25 bp, Homo sapien
gtgtcactggtaccacattcagcag

SEQ ID NO: 1776673 - DNA, 25 bp, Homo sapien
tccaggtacatgagtgatatttgcc

SEQ ID NO: 1776674 - DNA, 25 bp, Homo sapien
tactgtggtaagtatcttcaaacat

SEQ ID NO: 1776675 - DNA, 25 bp, Homo sapien
ttgtcttaaacatgcagaagttggg

SEQ ID NO: 1776676 - DNA, 25 bp, Homo sapien
tgtcttaaacatgcagaagttgggt

SEQ ID NO: 1776677 - DNA, 25 bp, Homo sapien
tcttaaacatgcagaagttgggttc

SEQ ID NO: 1776678 - DNA, 25 bp, Homo sapien
cttgtcttaaacatgcagaagttgg

SEQ ID NO: 1776679 - DNA, 25 bp, Homo sapien
aggtatttagacaatagaaatattc

SEQ ID NO: 1776680 - DNA, 25 bp, Homo sapien
taaggtatttagacaatagaaatat

SEQ ID NO: 1776681 - DNA, 25 bp, Homo sapien
tttagacaatagaaatattcaggaa

SEQ ID NO: 1776682 - DNA, 25 bp, Homo sapien
gtatttagacaatagaaatattcag

SEQ ID NO: 1776683 - DNA, 25 bp, Homo sapien
ccagaacttttaggccatccgtaga

SEQ ID NO: 1776684 - DNA, 25 bp, Homo sapien
tcattgccagaacttttaggccatc

SEQ ID NO: 1776685 - DNA, 25 bp, Homo sapien
ctacagtttaggatagaactggaaa

SEQ ID NO: 1776686 - DNA, 25 bp, Homo sapien
ggccatccgtagaagcagtaaactt

SEQ ID NO: 1776687 - DNA, 25 bp, Homo sapien
tggatccaggccataataccaatct

SEQ ID NO: 1776688 - DNA, 25 bp, Homo sapien
tatgctacacattcagatacctgat

SEQ ID NO: 1776689 - DNA, 25 bp, Homo sapien
caacactcagttgtatatgctacac

SEQ ID NO: 1776690 - DNA, 25 bp, Homo sapien
gcacatattcttcgtgatgaaaacg

SEQ ID NO: 1776691 - DNA, 25 bp, Homo sapien
aatctctgttgacttccatgacctg

SEQ ID NO: 1776692 - DNA, 25 bp, Homo sapien
catacaagacccatcacaagctggt

SEQ ID NO: 1776693 - DNA, 25 bp, Homo sapien
tttccagcccaaactgattctgaca

SEQ ID NO: 1776694 - DNA, 25 bp, Homo sapien
tatttcctgcctcaatcattctttc

SEQ ID NO: 1776695 - DNA, 25 bp, Homo sapien
agcagttgagggttcttattctcac

SEQ ID NO: 1776696 - DNA, 25 bp, Homo sapien
cagttgagggttcttattctcactc

SEQ ID NO: 1776697 - DNA, 25 bp, Homo sapien
cagcagttgagggttcttattctca

SEQ ID NO: 1776698 - DNA, 25 bp, Homo sapien
aattcccatttcctatagtggaaga

SEQ ID NO: 1776699 - DNA, 25 bp, Homo sapien
cagtgactcaatccattctgctttc

SEQ ID NO: 1776700 - DNA, 25 bp, Homo sapien
tgctttcaggttgagtgttctgctc

SEQ ID NO: 1776701 - DNA, 25 bp, Homo sapien
ccactgccacgctgcagtgactcaa

SEQ ID NO: 1776702 - DNA, 25 bp, Homo sapien
tcctttgccaacatcaaacaccatt

SEQ ID NO: 1776703 - DNA, 25 bp, Homo sapien
gtaggcagcaaacatattagcaata

SEQ ID NO: 1776704 - DNA, 25 bp, Homo sapien
aaaacttaggtgattcatccaaagc

SEQ ID NO: 1776705 - DNA, 25 bp, Homo sapien
tatacatggtaagcgtaaattctca

SEQ ID NO: 1776706 - DNA, 25 bp, Homo sapien
caggactgcaacacagactttattc

SEQ ID NO: 1776707 - DNA, 25 bp, Homo sapien
tcacacctacttttttgctgaaatc

SEQ ID NO: 1776708 - DNA, 25 bp, Homo sapien
gtgttcccatctgtacattcacaca

SEQ ID NO: 1776709 - DNA, 25 bp, Homo sapien
ctgtcacacctacttttttgctgaa

SEQ ID NO: 1776710 - DNA, 25 bp, Homo sapien
tgtgttcccatctgtacattcacac

SEQ ID NO: 1776711 - DNA, 25 bp, Homo sapien
ctgcctagagctatcgaacttgatg

SEQ ID NO: 1776712 - DNA, 25 bp, Homo sapien
ctagagctatcgaacttgatgagaa

SEQ ID NO: 1776713 - DNA, 25 bp, Homo sapien
gagctatcgaacttgatgagaatct

SEQ ID NO: 1776714 - DNA, 25 bp, Homo sapien
tatcgaacttgatgagaatctgcag

SEQ ID NO: 1776715 - DNA, 25 bp, Homo sapien
agaacttgttctaggcatctggtac

SEQ ID NO: 1776716 - DNA, 25 bp, Homo sapien
gaagctgccagaacttgttctaggc

SEQ ID NO: 1776717 - DNA, 25 bp, Homo sapien
catctggtactgtgtatgcttggga

SEQ ID NO: 1776718 - DNA, 25 bp, Homo sapien
ctgtgtatgcttgggataaggtttc

SEQ ID NO: 1776719 - DNA, 25 bp, Homo sapien
gcctgatattctttgggagctgcaa

SEQ ID NO: 1776720 - DNA, 25 bp, Homo sapien
gccttttactagtggctccagtgcc

SEQ ID NO: 1776721 - DNA, 25 bp, Homo sapien
cttctggtgtataaggccttttact

SEQ ID NO: 1776722 - DNA, 25 bp, Homo sapien
tgtataaggccttttactagtggct

SEQ ID NO: 1776723 - DNA, 25 bp, Homo sapien
tgtaacagctggtctgcgagtgttg

SEQ ID NO: 1776724 - DNA, 25 bp, Homo sapien
gcgtcctggaaagttgtaacagctg

SEQ ID NO: 1776725 - DNA, 25 bp, Homo sapien
atttagaaaatttaggagcgtcctg

SEQ ID NO: 1776726 - DNA, 25 bp, Homo sapien
ttgaatgtctgaggaattcggaggc

SEQ ID NO: 1776727 - DNA, 25 bp, Homo sapien
gctctgaggcccgaggtgaaactga

SEQ ID NO: 1776728 - DNA, 25 bp, Homo sapien
tgaaactgagagctgcggaagaatg

SEQ ID NO: 1776729 - DNA, 25 bp, Homo sapien
cggaagaatgtggaaataatgggcc

SEQ ID NO: 1776730 - DNA, 25 bp, Homo sapien
tcaggccttgagcttcccgctgaac

SEQ ID NO: 1776731 - DNA, 25 bp, Homo sapien
tcacaaggcagggtactccaacaga

SEQ ID NO: 1776732 - DNA, 25 bp, Homo sapien
cctcacaaggcagggtactccaaca

SEQ ID NO: 1776733 - DNA, 25 bp, Homo sapien
cacctcacaaggcagggtactccaa

SEQ ID NO: 1776734 - DNA, 25 bp, Homo sapien
acaaggcagggtactccaacagacc

SEQ ID NO: 1776735 - DNA, 25 bp, Homo sapien
ttgataataggagggctaatacgcc

SEQ ID NO: 1776736 - DNA, 25 bp, Homo sapien
tgcgtaggcgaatagaaagtaacat

SEQ ID NO: 1776737 - DNA, 25 bp, Homo sapien
tagaaggtcgggtgagaatagtacc

SEQ ID NO: 1776738 - DNA, 25 bp, Homo sapien
ttttgggaatggaccgtaggattgc

SEQ ID NO: 1776739 - DNA, 25 bp, Homo sapien
tgcaaagtacagatagaccatctgc

SEQ ID NO: 1776740 - DNA, 25 bp, Homo sapien
aaatgcaaagtacagatagaccatc

SEQ ID NO: 1776741 - DNA, 25 bp, Homo sapien
gggctgctttgcatagattcatcag

SEQ ID NO: 1776742 - DNA, 25 bp, Homo sapien
ttgcatagattcatcagctctggga

SEQ ID NO: 1776743 - DNA, 25 bp, Homo sapien
ctgatggaaagctgtccacacagtc

SEQ ID NO: 1776744 - DNA, 25 bp, Homo sapien
tgatggaaagctgtccacacagtca

SEQ ID NO: 1776745 - DNA, 25 bp, Homo sapien
ctgatgactaacaagggccttatac

SEQ ID NO: 1776746 - DNA, 25 bp, Homo sapien
gggccttatacaggccatcagatgg

SEQ ID NO: 1776747 - DNA, 25 bp, Homo sapien
tacactgacatcctgttactgtctg

SEQ ID NO: 1776748 - DNA, 25 bp, Homo sapien
agtaatcagatacatcattatacac

SEQ ID NO: 1776749 - DNA, 25 bp, Homo sapien
actgacatcctgttactgtctggaa

SEQ ID NO: 1776750 - DNA, 25 bp, Homo sapien
gacatcctgttactgtctggaaaaa

SEQ ID NO: 1776751 - DNA, 25 bp, Homo sapien
tcagtgtcatgggataaacccagat

SEQ ID NO: 1776752 - DNA, 25 bp, Homo sapien
tcatgggataaacccagattttagc

SEQ ID NO: 1776753 - DNA, 25 bp, Homo sapien
atgggataaacccagattttagcag

SEQ ID NO: 1776754 - DNA, 25 bp, Homo sapien
gtgtcatgggataaacccagatttt

SEQ ID NO: 1776755 - DNA, 25 bp, Homo sapien
tgaagagactggcaaaagacagaca

SEQ ID NO: 1776756 - DNA, 25 bp, Homo sapien
tgggcaccaacatacctttaagtct

SEQ ID NO: 1776757 - DNA, 25 bp, Homo sapien
tagtctcgcccaactttcagtaaag

SEQ ID NO: 1776758 - DNA, 25 bp, Homo sapien
cacttagtgaggctttaaatgtgcc

SEQ ID NO: 1776759 - DNA, 25 bp, Homo sapien
ataggataacattaccatagcggta

SEQ ID NO: 1776760 - DNA, 25 bp, Homo sapien
taccatagcggtatccgtggccaag

SEQ ID NO: 1776761 - DNA, 25 bp, Homo sapien
aacattaccatagcggtatccgtgg

SEQ ID NO: 1776762 - DNA, 25 bp, Homo sapien
agcggtatccgtggccaagagacat

SEQ ID NO: 1776763 - DNA, 25 bp, Homo sapien
tatttggaactaacatatcttggaa

SEQ ID NO: 1776764 - DNA, 25 bp, Homo sapien
cacatttataatctccctcatctgg

SEQ ID NO: 1776765 - DNA, 25 bp, Homo sapien
ccctcatctgggctatcaagtgaat

SEQ ID NO: 1776766 - DNA, 25 bp, Homo sapien
tatcaagtgaatttggactatttgg

SEQ ID NO: 1776767 - DNA, 25 bp, Homo sapien
ctgggccggagagccactgtcgatc

SEQ ID NO: 1776768 - DNA, 25 bp, Homo sapien
tattgtcatggtttgcgatctcgcg

SEQ ID NO: 1776769 - DNA, 25 bp, Homo sapien
ttttatttgacctcgggtgactgcc

SEQ ID NO: 1776770 - DNA, 25 bp, Homo sapien
gggacttcgcctacttgcaacaacg

SEQ ID NO: 1776771 - DNA, 25 bp, Homo sapien
cagccgcggttcagtgcgtccgtaa

SEQ ID NO: 1776772 - DNA, 25 bp, Homo sapien
taaggcagcgacaacttcacgtgga

SEQ ID NO: 1776773 - DNA, 25 bp, Homo sapien
acaacaaatagcgtacacaagcggg

SEQ ID NO: 1776774 - DNA, 25 bp, Homo sapien
ggagccaaaactccggactgcgaca

SEQ ID NO: 1776775 - DNA, 25 bp, Homo sapien
tttacagaatgtccagtgttcttgc

SEQ ID NO: 1776776 - DNA, 25 bp, Homo sapien
gctgcaatacagaactatggtgaat

SEQ ID NO: 1776777 - DNA, 25 bp, Homo sapien
ccatgaaatatgatcagcagctgca

SEQ ID NO: 1776778 - DNA, 25 bp, Homo sapien
gaactatggtgaataaactccttat

SEQ ID NO: 1776779 - DNA, 25 bp, Homo sapien
ttatagaagggagagtagacacacc

SEQ ID NO: 1776780 - DNA, 25 bp, Homo sapien
tgtgcataatgagccctcccggtat

SEQ ID NO: 1776781 - DNA, 25 bp, Homo sapien
tatatgactgatggaagcaagagcc

SEQ ID NO: 1776782 - DNA, 25 bp, Homo sapien
gatcactccgttgggtatatgcaga

SEQ ID NO: 1776783 - DNA, 25 bp, Homo sapien
gactcatattccacgcctagctcta

SEQ ID NO: 1776784 - DNA, 25 bp, Homo sapien
ccaaaagtggcccactagggactca

SEQ ID NO: 1776785 - DNA, 25 bp, Homo sapien
tctaatgagcatcagcatcgggtgc

SEQ ID NO: 1776786 - DNA, 25 bp, Homo sapien
catcgggtgccttaacccagcgttt

SEQ ID NO: 1776787 - DNA, 25 bp, Homo sapien
gcttccttcaagtaaaaatgactat

SEQ ID NO: 1776788 - DNA, 25 bp, Homo sapien
cactcccaagtagaagcagcttcct

SEQ ID NO: 1776789 - DNA, 25 bp, Homo sapien
tcctgccactcccaagtagaagcag

SEQ ID NO: 1776790 - DNA, 25 bp, Homo sapien
tggttttctcacttctcctgccact

SEQ ID NO: 1776791 - DNA, 25 bp, Homo sapien
catttaaatcctgggagtcttccat

SEQ ID NO: 1776792 - DNA, 25 bp, Homo sapien
tgttcatttaaatcctgggagtctt

SEQ ID NO: 1776793 - DNA, 25 bp, Homo sapien
tgattgttcatttaaatcctgggag

SEQ ID NO: 1776794 - DNA, 25 bp, Homo sapien
ttcatttaaatcctgggagtcttcc

SEQ ID NO: 1776795 - DNA, 25 bp, Homo sapien
gcctcttatcagctatgccaacatg

SEQ ID NO: 1776796 - DNA, 25 bp, Homo sapien
cacgtcgatgttatggagagagctt

SEQ ID NO: 1776797 - DNA, 25 bp, Homo sapien
catttaacagttctaagcatctctt

SEQ ID NO: 1776798 - DNA, 25 bp, Homo sapien
tggagtcagaagaaccgtgtgaagt

SEQ ID NO: 1776799 - DNA, 25 bp, Homo sapien
actcttcccatctgatgtggatctg

SEQ ID NO: 1776800 - DNA, 25 bp, Homo sapien
tctgtggctgccacaatggacactt

SEQ ID NO: 1776801 - DNA, 25 bp, Homo sapien
gatgggctagcctggcatcctataa

SEQ ID NO: 1776802 - DNA, 25 bp, Homo sapien
taaacatgcatgcagcactgatcac

SEQ ID NO: 1776803 - DNA, 25 bp, Homo sapien
caagatgatataggtcctttcttct

SEQ ID NO: 1776804 - DNA, 25 bp, Homo sapien
cacaagatgatataggtcctttctt

SEQ ID NO: 1776805 - DNA, 25 bp, Homo sapien
aagatgatataggtcctttcttctt

SEQ ID NO: 1776806 - DNA, 25 bp, Homo sapien
acaagatgatataggtcctttcttc

SEQ ID NO: 1776807 - DNA, 25 bp, Homo sapien
ggaacaatcggtccctgtgtccagg

SEQ ID NO: 1776808 - DNA, 25 bp, Homo sapien
aaagaacagagtcagttgatggcaa

SEQ ID NO: 1776809 - DNA, 25 bp, Homo sapien
cagcacttcagtcacggtgaaggga

SEQ ID NO: 1776810 - DNA, 25 bp, Homo sapien
tgatggcaatctgcccattaagagc

SEQ ID NO: 1776811 - DNA, 25 bp, Homo sapien
cgcacagctttactgcacccaaatg

SEQ ID NO: 1776812 - DNA, 25 bp, Homo sapien
tttactgcacccaaatgcttcactt

SEQ ID NO: 1776813 - DNA, 25 bp, Homo sapien
tgcacccaaatgcttcactttgttt

SEQ ID NO: 1776814 - DNA, 25 bp, Homo sapien
tgttttcggggttccattcacaatg

SEQ ID NO: 1776815 - DNA, 25 bp, Homo sapien
aacctggagaatttcgcagattggg

SEQ ID NO: 1776816 - DNA, 25 bp, Homo sapien
tgagttggtgaaagatttacccaac

SEQ ID NO: 1776817 - DNA, 25 bp, Homo sapien
tgtattcagaacctggagaatttcg

SEQ ID NO: 1776818 - DNA, 25 bp, Homo sapien
atttacgctgccgatgtcagcacag

SEQ ID NO: 1776819 - DNA, 25 bp, Homo sapien
ggctgtcgtgtttcattaggcagcc

SEQ ID NO: 1776820 - DNA, 25 bp, Homo sapien
gctgtcgtgtttcattaggcagcca

SEQ ID NO: 1776821 - DNA, 25 bp, Homo sapien
ctggctgtcgtgtttcattaggcag

SEQ ID NO: 1776822 - DNA, 25 bp, Homo sapien
tggctgtcgtgtttcattaggcagc

SEQ ID NO: 1776823 - DNA, 25 bp, Homo sapien
taaatctgggcaatcctcttgccct

SEQ ID NO: 1776824 - DNA, 25 bp, Homo sapien
caatcctcttgcccttttccgtatt

SEQ ID NO: 1776825 - DNA, 25 bp, Homo sapien
tgggcaatcctcttgcccttttccg

SEQ ID NO: 1776826 - DNA, 25 bp, Homo sapien
aaatctgggcaatcctcttgccctt

SEQ ID NO: 1776827 - DNA, 25 bp, Homo sapien
ttccctcacatgagtactaaaagtc

SEQ ID NO: 1776828 - DNA, 25 bp, Homo sapien
gaatggcagaaatgaactcgcacat

SEQ ID NO: 1776829 - DNA, 25 bp, Homo sapien
tatttaatgtcagaaatgggttttc

SEQ ID NO: 1776830 - DNA, 25 bp, Homo sapien
gacgaaaacagtagcctcttgagta

SEQ ID NO: 1776831 - DNA, 25 bp, Homo sapien
gagactggcttatcataaatgctca

SEQ ID NO: 1776832 - DNA, 25 bp, Homo sapien
gtgttgaaatgccactttcttgtgg

SEQ ID NO: 1776833 - DNA, 25 bp, Homo sapien
cactttcttgtggtatccctgttca

SEQ ID NO: 1776834 - DNA, 25 bp, Homo sapien
aaatggttgttgtagaatctgacac

SEQ ID NO: 1776835 - DNA, 25 bp, Homo sapien
ggagcatcgagaatgccatcccggt

SEQ ID NO: 1776836 - DNA, 25 bp, Homo sapien
gagaaagaggagcatcgagaatgcc

SEQ ID NO: 1776837 - DNA, 25 bp, Homo sapien
cggtttctgactaaatagacaccag

SEQ ID NO: 1776838 - DNA, 25 bp, Homo sapien
aatgccatcccggtttctgactaaa

SEQ ID NO: 1776839 - DNA, 25 bp, Homo sapien
ctatgctatttcaggacctttgtac

SEQ ID NO: 1776840 - DNA, 25 bp, Homo sapien
ccacccattgtgataagtaggccag

SEQ ID NO: 1776841 - DNA, 25 bp, Homo sapien
agtaggccagtgacccaatctagtc

SEQ ID NO: 1776842 - DNA, 25 bp, Homo sapien
tctgtgacaacgacaatggacatgg

SEQ ID NO: 1776843 - DNA, 25 bp, Homo sapien
tgcagcaaacgaccctgaatgtagg

SEQ ID NO: 1776844 - DNA, 25 bp, Homo sapien
gctccaaagaggtcattagggttgt

SEQ ID NO: 1776845 - DNA, 25 bp, Homo sapien
tggtcaggagactcccctctggact

SEQ ID NO: 1776846 - DNA, 25 bp, Homo sapien
tgtgagtccagaactccaagggtga

SEQ ID NO: 1776847 - DNA, 25 bp, Homo sapien
gtcatagagaactgaagctccaaag

SEQ ID NO: 1776848 - DNA, 25 bp, Homo sapien
tcagtttaactagaagagacccttc

SEQ ID NO: 1776849 - DNA, 25 bp, Homo sapien
ttacaaggtctccacgggccaggca

SEQ ID NO: 1776850 - DNA, 25 bp, Homo sapien
cagtttaactagaagagacccttct

SEQ ID NO: 1776851 - DNA, 25 bp, Homo sapien
attcagtttaactagaagagaccct

SEQ ID NO: 1776852 - DNA, 25 bp, Homo sapien
caaggacttcccataagatgtacac

SEQ ID NO: 1776853 - DNA, 25 bp, Homo sapien
aatgggctgccctagattatcctgg

SEQ ID NO: 1776854 - DNA, 25 bp, Homo sapien
aaattgataaccgactgatacaggg

SEQ ID NO: 1776855 - DNA, 25 bp, Homo sapien
tttaatgcatctcaattgactggcc

SEQ ID NO: 1776856 - DNA, 25 bp, Homo sapien
catctgattctgtgcacgttttctt

SEQ ID NO: 1776857 - DNA, 25 bp, Homo sapien
ctggaattctgagattgtgaaacat

SEQ ID NO: 1776858 - DNA, 25 bp, Homo sapien
tggaattctgagattgtgaaacatc

SEQ ID NO: 1776859 - DNA, 25 bp, Homo sapien
tgaaacatctgattctgtgcacgtt

SEQ ID NO: 1776860 - DNA, 25 bp, Homo sapien
gattactaaagcatactgggcttcc

SEQ ID NO: 1776861 - DNA, 25 bp, Homo sapien
taaattcacataatacagtggcagg

SEQ ID NO: 1776862 - DNA, 25 bp, Homo sapien
tacaagcttataaaggtgccgctgt

SEQ ID NO: 1776863 - DNA, 25 bp, Homo sapien
gagtttgccatcaagtctgtggagc

SEQ ID NO: 1776864 - DNA, 25 bp, Homo sapien
cattcttagcgaaattctgggctct

SEQ ID NO: 1776865 - DNA, 25 bp, Homo sapien
caaagaaaaggtccacattcttagc

SEQ ID NO: 1776866 - DNA, 25 bp, Homo sapien
tctgggctctacttagagtcttctc

SEQ ID NO: 1776867 - DNA, 25 bp, Homo sapien
gagtcttctcaaagtttttaagcaa

SEQ ID NO: 1776868 - DNA, 25 bp, Homo sapien
ttctacaccacacatcaacatcttg

SEQ ID NO: 1776869 - DNA, 25 bp, Homo sapien
atcagtttctcatagtcatcctcta

SEQ ID NO: 1776870 - DNA, 25 bp, Homo sapien
gaataatactgtgtatcagtttctc

SEQ ID NO: 1776871 - DNA, 25 bp, Homo sapien
tctagtgaactaaccagataatgaa

SEQ ID NO: 1776872 - DNA, 25 bp, Homo sapien
tggcatgctgtggaactgcttctgc

SEQ ID NO: 1776873 - DNA, 25 bp, Homo sapien
gattgcatgttatctgtggcacagg

SEQ ID NO: 1776874 - DNA, 25 bp, Homo sapien
aaagagtttgcacctgtagggtcca

SEQ ID NO: 1776875 - DNA, 25 bp, Homo sapien
tagagctcactgtttgatccacaaa

SEQ ID NO: 1776876 - DNA, 25 bp, Homo sapien
aatcgatagccaagacaactgtttc

SEQ ID NO: 1776877 - DNA, 25 bp, Homo sapien
tgacccaagaagttaacgtctagtg

SEQ ID NO: 1776878 - DNA, 25 bp, Homo sapien
cgtctagtgttggttctgcctgaaa

SEQ ID NO: 1776879 - DNA, 25 bp, Homo sapien
caaagtgtgacccaatgacccaaga

SEQ ID NO: 1776880 - DNA, 25 bp, Homo sapien
gcaaatgcagttatgccatggagtt

SEQ ID NO: 1776881 - DNA, 25 bp, Homo sapien
taagacgatctgaatgacactgatg

SEQ ID NO: 1776882 - DNA, 25 bp, Homo sapien
taactagccttgtcttcacttgagg

SEQ ID NO: 1776883 - DNA, 25 bp, Homo sapien
taatcagcgtgtagtaggaacagca

SEQ ID NO: 1776884 - DNA, 25 bp, Homo sapien
cttgcataatgaggccgtaactagc

SEQ ID NO: 1776885 - DNA, 25 bp, Homo sapien
gtattaccagtcattctatccccag

SEQ ID NO: 1776886 - DNA, 25 bp, Homo sapien
cacagccgtggatggcagtgcaaaa

SEQ ID NO: 1776887 - DNA, 25 bp, Homo sapien
aaaggagggagcatgtagtctgact

SEQ ID NO: 1776888 - DNA, 25 bp, Homo sapien
tcttccgctgaatataaaggaggga

SEQ ID NO: 1776889 - DNA, 25 bp, Homo sapien
aaaggctggtgcctcaaaagaagct

SEQ ID NO: 1776890 - DNA, 25 bp, Homo sapien
aaggctggtgcctcaaaagaagcta

SEQ ID NO: 1776891 - DNA, 25 bp, Homo sapien
ggctggtgcctcaaaagaagctaaa

SEQ ID NO: 1776892 - DNA, 25 bp, Homo sapien
tggtgcctcaaaagaagctaaatct

SEQ ID NO: 1776893 - DNA, 25 bp, Homo sapien
tatcaccacctccaacaagagtatg

SEQ ID NO: 1776894 - DNA, 25 bp, Homo sapien
tccaacaagagtatgaggacttgct

SEQ ID NO: 1776895 - DNA, 25 bp, Homo sapien
ccagtttggagctacctggagtatc

SEQ ID NO: 1776896 - DNA, 25 bp, Homo sapien
gtatgaggacttgctaggtcctgca

SEQ ID NO: 1776897 - DNA, 25 bp, Homo sapien
tcttcaatgcttgcactggtttctg

SEQ ID NO: 1776898 - DNA, 25 bp, Homo sapien
agttcattgtctgaatgcctgctga

SEQ ID NO: 1776899 - DNA, 25 bp, Homo sapien
tgcctgctgagtggatatgaataat

SEQ ID NO: 1776900 - DNA, 25 bp, Homo sapien
tgagaacaggaacagtataaaagtt

SEQ ID NO: 1776901 - DNA, 25 bp, Homo sapien
gggtgttgcaactcagcaaccagtc

SEQ ID NO: 1776902 - DNA, 25 bp, Homo sapien
gggggtgttgcaactcagcaaccag

SEQ ID NO: 1776903 - DNA, 25 bp, Homo sapien
ggtgttgcaactcagcaaccagtct

SEQ ID NO: 1776904 - DNA, 25 bp, Homo sapien
agagggggtgttgcaactcagcaac

SEQ ID NO: 1776905 - DNA, 25 bp, Homo sapien
gtggccctgacgcacaactccttgt

SEQ ID NO: 1776906 - DNA, 25 bp, Homo sapien
tgtgtagtgctaagatccagatcca

SEQ ID NO: 1776907 - DNA, 25 bp, Homo sapien
taaacactatttgagaacagaccac

SEQ ID NO: 1776908 - DNA, 25 bp, Homo sapien
gcctgatgcttaccacttagaaaaa

SEQ ID NO: 1776909 - DNA, 25 bp, Homo sapien
gaataagtacatgtgagttttactt

SEQ ID NO: 1776910 - DNA, 25 bp, Homo sapien
gtaaaagtgtcaagcgctccatctc

SEQ ID NO: 1776911 - DNA, 25 bp, Homo sapien
ccagtaaaagtgtcaagcgctccat

SEQ ID NO: 1776912 - DNA, 25 bp, Homo sapien
cagtaaaagtgtcaagcgctccatc

SEQ ID NO: 1776913 - DNA, 25 bp, Homo sapien
agtaaaagtgtcaagcgctccatct

SEQ ID NO: 1776914 - DNA, 25 bp, Homo sapien
tggaaggatacagctgtggggaata

SEQ ID NO: 1776915 - DNA, 25 bp, Homo sapien
ggggctgtagccactacttgtaatt

SEQ ID NO: 1776916 - DNA, 25 bp, Homo sapien
gatctggggctgtagccactacttg

SEQ ID NO: 1776917 - DNA, 25 bp, Homo sapien
gaaggatacagctgtggggaatact

SEQ ID NO: 1776918 - DNA, 25 bp, Homo sapien
tcttccaggtctacaattcttgctc

SEQ ID NO: 1776919 - DNA, 25 bp, Homo sapien
gctctgctacaagccaatctagtga

SEQ ID NO: 1776920 - DNA, 25 bp, Homo sapien
ggaaaaagcaacagtctgaatgtca

SEQ ID NO: 1776921 - DNA, 25 bp, Homo sapien
tcagtgaaaccctataatatccagg

SEQ ID NO: 1776922 - DNA, 25 bp, Homo sapien
tggtgtagaaagaatgtgtggatag

SEQ ID NO: 1776923 - DNA, 25 bp, Homo sapien
ggtgtagaaagaatgtgtggatagg

SEQ ID NO: 1776924 - DNA, 25 bp, Homo sapien
tgtagaaagaatgtgtggatagggc

SEQ ID NO: 1776925 - DNA, 25 bp, Homo sapien
ctggtgtagaaagaatgtgtggata

SEQ ID NO: 1776926 - DNA, 25 bp, Homo sapien
tgagtctggcctgcataggcagaca

SEQ ID NO: 1776927 - DNA, 25 bp, Homo sapien
tggctgctgcatccccgaatactga

SEQ ID NO: 1776928 - DNA, 25 bp, Homo sapien
taggctgtgtagacggctggctgct

SEQ ID NO: 1776929 - DNA, 25 bp, Homo sapien
taagtgggcaagctgtagggctgtc

SEQ ID NO: 1776930 - DNA, 25 bp, Homo sapien
gaagaaaacagaagatgtgaaatac

SEQ ID NO: 1776931 - DNA, 25 bp, Homo sapien
caaagaagaaaacagaagatgtgaa

SEQ ID NO: 1776932 - DNA, 25 bp, Homo sapien
ctgcctataaccaaagaagaaaaca

SEQ ID NO: 1776933 - DNA, 25 bp, Homo sapien
aagaagaaaacagaagatgtgaaat

SEQ ID NO: 1776934 - DNA, 25 bp, Homo sapien
ctgaggcagccactctgtaatgggg

SEQ ID NO: 1776935 - DNA, 25 bp, Homo sapien
tttgggaaagtccactctctgtctt

SEQ ID NO: 1776936 - DNA, 25 bp, Homo sapien
gccactctgtaatggggactgagtt

SEQ ID NO: 1776937 - DNA, 25 bp, Homo sapien
gatggctggcaacatcacacccaaa

SEQ ID NO: 1776938 - DNA, 25 bp, Homo sapien
tggtaagaataaggtgtctggcctg

SEQ ID NO: 1776939 - DNA, 25 bp, Homo sapien
tttggtaagaataaggtgtctggcc

SEQ ID NO: 1776940 - DNA, 25 bp, Homo sapien
ctggcatttggtaagaataaggtgt

SEQ ID NO: 1776941 - DNA, 25 bp, Homo sapien
catttggtaagaataaggtgtctgg

SEQ ID NO: 1776942 - DNA, 25 bp, Homo sapien
catcgtgtttctgtctagttatctt

SEQ ID NO: 1776943 - DNA, 25 bp, Homo sapien
gatgttacgcagcttaaacttaagt

SEQ ID NO: 1776944 - DNA, 25 bp, Homo sapien
tcatgtttcctgacgtatactcaac

SEQ ID NO: 1776945 - DNA, 25 bp, Homo sapien
tgtctggcttgggagttgctttgct

SEQ ID NO: 1776946 - DNA, 25 bp, Homo sapien
cactgaaattcgttgaattggaaac

SEQ ID NO: 1776947 - DNA, 25 bp, Homo sapien
tatttgcataaatagtagatgatgg

SEQ ID NO: 1776948 - DNA, 25 bp, Homo sapien
gtagatgatggtgcaaaactagaac

SEQ ID NO: 1776949 - DNA, 25 bp, Homo sapien
ccactgaaattcgttgaattggaaa

SEQ ID NO: 1776950 - DNA, 25 bp, Homo sapien
tatacgctccatacgttgatgctga

SEQ ID NO: 1776951 - DNA, 25 bp, Homo sapien
tgttattcgatgtcatatacgctcc

SEQ ID NO: 1776952 - DNA, 25 bp, Homo sapien
gagagattcctgcaactgataagta

SEQ ID NO: 1776953 - DNA, 25 bp, Homo sapien
gctgaataatactgtgcatactggt

SEQ ID NO: 1776954 - DNA, 25 bp, Homo sapien
ggactttgacccagaactcctacag

SEQ ID NO: 1776955 - DNA, 25 bp, Homo sapien
tggactttgacccagaactcctaca

SEQ ID NO: 1776956 - DNA, 25 bp, Homo sapien
actttgacccagaactcctacaggt

SEQ ID NO: 1776957 - DNA, 25 bp, Homo sapien
gactttgacccagaactcctacagg

SEQ ID NO: 1776958 - DNA, 25 bp, Homo sapien
tctgtgcataagacccggtgagcag

SEQ ID NO: 1776959 - DNA, 25 bp, Homo sapien
acttctgtgcataagacccggtgag

SEQ ID NO: 1776960 - DNA, 25 bp, Homo sapien
atacttctgtgcataagacccggtg

SEQ ID NO: 1776961 - DNA, 25 bp, Homo sapien
cataagacccggtgagcagtgagtg

SEQ ID NO: 1776962 - DNA, 25 bp, Homo sapien
taaatttgccagttcatattaaaga

SEQ ID NO: 1776963 - DNA, 25 bp, Homo sapien
ttaaatttgccagttcatattaaag

SEQ ID NO: 1776964 - DNA, 25 bp, Homo sapien
aaatttgccagttcatattaaagaa

SEQ ID NO: 1776965 - DNA, 25 bp, Homo sapien
gtgcttgcacccacttgagatttgt

SEQ ID NO: 1776966 - DNA, 25 bp, Homo sapien
tcaaaacctccaataggaagagttc

SEQ ID NO: 1776967 - DNA, 25 bp, Homo sapien
gccacattcaactgttgaggtacag

SEQ ID NO: 1776968 - DNA, 25 bp, Homo sapien
tcatgaccccaagagtgcttgcacc

SEQ ID NO: 1776969 - DNA, 25 bp, Homo sapien
tacgtaacgatgactcagcatacat

SEQ ID NO: 1776970 - DNA, 25 bp, Homo sapien
gacatacgtaacgatgactcagcat

SEQ ID NO: 1776971 - DNA, 25 bp, Homo sapien
gaattcagacatacgtaacgatgac

SEQ ID NO: 1776972 - DNA, 25 bp, Homo sapien
cacacctgggaattcagacatacgt

SEQ ID NO: 1776973 - DNA, 25 bp, Homo sapien
aaaaacaaatgagtatcagcaagat

SEQ ID NO: 1776974 - DNA, 25 bp, Homo sapien
ttcttccatgcggagtccaagggtt

SEQ ID NO: 1776975 - DNA, 25 bp, Homo sapien
caaatgagtatcagcaagattaaaa

SEQ ID NO: 1776976 - DNA, 25 bp, Homo sapien
tgcggagtccaagggttacagccat

SEQ ID NO: 1776977 - DNA, 25 bp, Homo sapien
tctttttgtcaacaagagtagaaat

SEQ ID NO: 1776978 - DNA, 25 bp, Homo sapien
tgtcaacaagagtagaaatcattta

SEQ ID NO: 1776979 - DNA, 25 bp, Homo sapien
taatgttagagttactctcttgagg

SEQ ID NO: 1776980 - DNA, 25 bp, Homo sapien
cataataagctaatgttagagttac

SEQ ID NO: 1776981 - DNA, 25 bp, Homo sapien
cccattatcatcagaggaaacatca

SEQ ID NO: 1776982 - DNA, 25 bp, Homo sapien
tgcccattatcatcagaggaaacat

SEQ ID NO: 1776983 - DNA, 25 bp, Homo sapien
gcccattatcatcagaggaaacatc

SEQ ID NO: 1776984 - DNA, 25 bp, Homo sapien
tgtgcaaaactccacagccgaattt

SEQ ID NO: 1776985 - DNA, 25 bp, Homo sapien
aattacatgtgcaaaactccacagc

SEQ ID NO: 1776986 - DNA, 25 bp, Homo sapien
ttacatgtgcaaaactccacagccg

SEQ ID NO: 1776987 - DNA, 25 bp, Homo sapien
catgtgcaaaactccacagccgaat

SEQ ID NO: 1776988 - DNA, 25 bp, Homo sapien
agccatcagttgcaaaactgtaggt

SEQ ID NO: 1776989 - DNA, 25 bp, Homo sapien
aaacaaaggtttgcactacttgcag

SEQ ID NO: 1776990 - DNA, 25 bp, Homo sapien
aaaggtttgcactacttgcagctgc

SEQ ID NO: 1776991 - DNA, 25 bp, Homo sapien
aacaaaggtttgcactacttgcagc

SEQ ID NO: 1776992 - DNA, 25 bp, Homo sapien
taacgaaaagccaacttcctcatcc

SEQ ID NO: 1776993 - DNA, 25 bp, Homo sapien
gttcttgtaggtgttatataattct

SEQ ID NO: 1776994 - DNA, 25 bp, Homo sapien
ctcatccagtcaacccctcctctta

SEQ ID NO: 1776995 - DNA, 25 bp, Homo sapien
tttactcttctgtaacgaaaagcca

SEQ ID NO: 1776996 - DNA, 25 bp, Homo sapien
tagccaggaatctgtcagaccttca

SEQ ID NO: 1776997 - DNA, 25 bp, Homo sapien
gataaagacttaagtgcatttgtta

SEQ ID NO: 1776998 - DNA, 25 bp, Homo sapien
ctgtcagaccttcaatctctgccct

SEQ ID NO: 1776999 - DNA, 25 bp, Homo sapien
tgcccttaactgtagccaggcatcc

SEQ ID NO: 1777000 - DNA, 25 bp, Homo sapien
gagtagaaccttcgcaagtgctggg

SEQ ID NO: 1777001 - DNA, 25 bp, Homo sapien
tcctaaactatagagtagaaccttc

SEQ ID NO: 1777002 - DNA, 25 bp, Homo sapien
gctgggatcagttgagttgtcgtta

SEQ ID NO: 1777003 - DNA, 25 bp, Homo sapien
caatggggaaagcacctcctaaact

SEQ ID NO: 1777004 - DNA, 25 bp, Homo sapien
taagttatgttagtgccaaatctgg

SEQ ID NO: 1777005 - DNA, 25 bp, Homo sapien
gacactatacgctcaaaacagcttt

SEQ ID NO: 1777006 - DNA, 25 bp, Homo sapien
ttagcggcatgctcctcatctcggc

SEQ ID NO: 1777007 - DNA, 25 bp, Homo sapien
tctccaatcacaacataagttatgt

SEQ ID NO: 1777008 - DNA, 25 bp, Homo sapien
acctttgcattattcgttcaaagca

SEQ ID NO: 1777009 - DNA, 25 bp, Homo sapien
tacaccatccccaattacaacatac

SEQ ID NO: 1777010 - DNA, 25 bp, Homo sapien
gcattattcgttcaaagcaactttc

SEQ ID NO: 1777011 - DNA, 25 bp, Homo sapien
tttgcattattcgttcaaagcaact

SEQ ID NO: 1777012 - DNA, 25 bp, Homo sapien
caaacaaaaaggcttgcattagaag

SEQ ID NO: 1777013 - DNA, 25 bp, Homo sapien
aaggcttgcattagaagtatcacac

SEQ ID NO: 1777014 - DNA, 25 bp, Homo sapien
aaaaaggcttgcattagaagtatca

SEQ ID NO: 1777015 - DNA, 25 bp, Homo sapien
aaaggcttgcattagaagtatcaca

SEQ ID NO: 1777016 - DNA, 25 bp, Homo sapien
tcatttgtcaagctgccattgggcc

SEQ ID NO: 1777017 - DNA, 25 bp, Homo sapien
ccttagggtgatacagatgacattc

SEQ ID NO: 1777018 - DNA, 25 bp, Homo sapien
tctatcattcggtgaaggcagcagt

SEQ ID NO: 1777019 - DNA, 25 bp, Homo sapien
taaaacagtataggctggcatgtca

SEQ ID NO: 1777020 - DNA, 25 bp, Homo sapien
cagcagtagatcttagggtggagtt

SEQ ID NO: 1777021 - DNA, 25 bp, Homo sapien
cagccctgacctcatacaggacgtg

SEQ ID NO: 1777022 - DNA, 25 bp, Homo sapien
gctgtcttgggtcattgacactgct

SEQ ID NO: 1777023 - DNA, 25 bp, Homo sapien
tgacctcatacaggacgtgcttggg

SEQ ID NO: 1777024 - DNA, 25 bp, Homo sapien
ttgacactgctaatgaaggctgagg

SEQ ID NO: 1777025 - DNA, 25 bp, Homo sapien
ccattcagggttatgcgtttccctc

SEQ ID NO: 1777026 - DNA, 25 bp, Homo sapien
aaatagcattctatctgagattgtt

SEQ ID NO: 1777027 - DNA, 25 bp, Homo sapien
cctgaagttttaggtataacaactg

SEQ ID NO: 1777028 - DNA, 25 bp, Homo sapien
tatctgagattgttttccattcagg

SEQ ID NO: 1777029 - DNA, 25 bp, Homo sapien
taatcagtgcatcactcctacgggc

SEQ ID NO: 1777030 - DNA, 25 bp, Homo sapien
taacttaagccagtagagtcgacct

SEQ ID NO: 1777031 - DNA, 25 bp, Homo sapien
tccccactggcgatgataatgaaaa

SEQ ID NO: 1777032 - DNA, 25 bp, Homo sapien
tcctacctggctaatggaaagcaag

SEQ ID NO: 1777033 - DNA, 25 bp, Homo sapien
tctgagtgactggatatcctccaga

SEQ ID NO: 1777034 - DNA, 25 bp, Homo sapien
ggtctgagtgactggatatcctcca

SEQ ID NO: 1777035 - DNA, 25 bp, Homo sapien
gtctgagtgactggatatcctccag

SEQ ID NO: 1777036 - DNA, 25 bp, Homo sapien
aggtctgagtgactggatatcctcc

SEQ ID NO: 1777037 - DNA, 25 bp, Homo sapien
taatgaatgccatccgttgcgcagt

SEQ ID NO: 1777038 - DNA, 25 bp, Homo sapien
aagtctgttacgaggagaacctgca

SEQ ID NO: 1777039 - DNA, 25 bp, Homo sapien
tattttcaagctaagggccaacaga

SEQ ID NO: 1777040 - DNA, 25 bp, Homo sapien
aatttatatgtgtagagccagaggc

SEQ ID NO: 1777041 - DNA, 25 bp, Homo sapien
tgtgccagacaagctgttctccgtc

SEQ ID NO: 1777042 - DNA, 25 bp, Homo sapien
tcccatggccaagctgtgatgctgg

SEQ ID NO: 1777043 - DNA, 25 bp, Homo sapien
catttaggttttatgccggcagcct

SEQ ID NO: 1777044 - DNA, 25 bp, Homo sapien
tttgtgcatactcaacgtcccatgg

SEQ ID NO: 1777045 - DNA, 25 bp, Homo sapien
gagatgtccataatgctaccgtagt

SEQ ID NO: 1777046 - DNA, 25 bp, Homo sapien
tcattgcggactaaggagaaaacat

SEQ ID NO: 1777047 - DNA, 25 bp, Homo sapien
catatgtcaataggaggtgggaact

SEQ ID NO: 1777048 - DNA, 25 bp, Homo sapien
cagaaacccttgacattgtgagatg

SEQ ID NO: 1777049 - DNA, 25 bp, Homo sapien
tatggtcagagttggcaagtacctc

SEQ ID NO: 1777050 - DNA, 25 bp, Homo sapien
actagaaggttttctcaggatggga

SEQ ID NO: 1777051 - DNA, 25 bp, Homo sapien
gagacagcctcagaatagaacattt

SEQ ID NO: 1777052 - DNA, 25 bp, Homo sapien
tccgaggagagaaagtaactagaag

SEQ ID NO: 1777053 - DNA, 25 bp, Homo sapien
ctctgtgcttccgtagtacaacatt

SEQ ID NO: 1777054 - DNA, 25 bp, Homo sapien
caacattccttcgagtgcctttact

SEQ ID NO: 1777055 - DNA, 25 bp, Homo sapien
tactatttgcttttatacccagttc

SEQ ID NO: 1777056 - DNA, 25 bp, Homo sapien
tttgcttttatacccagttcattca

SEQ ID NO: 1777057 - DNA, 25 bp, Homo sapien
gaactgagctggggtcagctcccct

SEQ ID NO: 1777058 - DNA, 25 bp, Homo sapien
tacactagggctggttttattaatc

SEQ ID NO: 1777059 - DNA, 25 bp, Homo sapien
ctgtagagcccttggctacactagg

SEQ ID NO: 1777060 - DNA, 25 bp, Homo sapien
atccccattttgttgggtgcctgga

SEQ ID NO: 1777061 - DNA, 25 bp, Homo sapien
gctcgttcatacagctcttcagcct

SEQ ID NO: 1777062 - DNA, 25 bp, Homo sapien
caaaggcatctatttgtgctcgttc

SEQ ID NO: 1777063 - DNA, 25 bp, Homo sapien
aatgaatgaccccttcccattggga

SEQ ID NO: 1777064 - DNA, 25 bp, Homo sapien
cttcccattgggaaacaggtgtctc

SEQ ID NO: 1777065 - DNA, 25 bp, Homo sapien
agctgaggcagcaccccaataatgc

SEQ ID NO: 1777066 - DNA, 25 bp, Homo sapien
aataatgccaagtggcgccttcagc

SEQ ID NO: 1777067 - DNA, 25 bp, Homo sapien
gctacaagctgttggttcgtatggg

SEQ ID NO: 1777068 - DNA, 25 bp, Homo sapien
cacaagtttgctttcattccaaaag

SEQ ID NO: 1777069 - DNA, 25 bp, Homo sapien
tgccttctccaagacgaatgactac

SEQ ID NO: 1777070 - DNA, 25 bp, Homo sapien
ggctattccgcctacaactgaagct

SEQ ID NO: 1777071 - DNA, 25 bp, Homo sapien
aaatggctctttggatgacatgtac

SEQ ID NO: 1777072 - DNA, 25 bp, Homo sapien
gacatgtacaatagcatccaatgcc

SEQ ID NO: 1777073 - DNA, 25 bp, Homo sapien
gaaagaccatactgagctccagaca

SEQ ID NO: 1777074 - DNA, 25 bp, Homo sapien
tccagacattgcctcgtccctttca

SEQ ID NO: 1777075 - DNA, 25 bp, Homo sapien
ggaccagaaagaccatactgagctc

SEQ ID NO: 1777076 - DNA, 25 bp, Homo sapien
attgcctcgtccctttcaccatatt

SEQ ID NO: 1777077 - DNA, 25 bp, Homo sapien
caccaccctttacatcttgttgcat

SEQ ID NO: 1777078 - DNA, 25 bp, Homo sapien
ccctgaattccttctgcgccccgcg

SEQ ID NO: 1777079 - DNA, 25 bp, Homo sapien
gactcctcggagttgtctcaaatct

SEQ ID NO: 1777080 - DNA, 25 bp, Homo sapien
tcctctactgcttgggaattgcagg

SEQ ID NO: 1777081 - DNA, 25 bp, Homo sapien
ttctgtatttccacgtagcccatct

SEQ ID NO: 1777082 - DNA, 25 bp, Homo sapien
gtaatcatccgaccaacttcctcta

SEQ ID NO: 1777083 - DNA, 25 bp, Homo sapien
aagcgggctgccgttttcgaaagct

SEQ ID NO: 1777084 - DNA, 25 bp, Homo sapien
ccggccacagtaacaaagcgggctg

SEQ ID NO: 1777085 - DNA, 25 bp, Homo sapien
gctttaagcacctaatctccagagt

SEQ ID NO: 1777086 - DNA, 25 bp, Homo sapien
taggtagtgccgaaaaggagcctgt

SEQ ID NO: 1777087 - DNA, 25 bp, Homo sapien
cagctctcacatgctgtgttacagc

SEQ ID NO: 1777088 - DNA, 25 bp, Homo sapien
tgctgtgttacagcagaccctaatt

SEQ ID NO: 1777089 - DNA, 25 bp, Homo sapien
cctgtagaaactctcgcaacaccat

SEQ ID NO: 1777090 - DNA, 25 bp, Homo sapien
cccacagtttttacggctgccagtg

SEQ ID NO: 1777091 - DNA, 25 bp, Homo sapien
tctcaacaggtcctacaccactgga

SEQ ID NO: 1777092 - DNA, 25 bp, Homo sapien
aaaggaatatctcaacaggtcctac

SEQ ID NO: 1777093 - DNA, 25 bp, Homo sapien
aactggccgcctttcaggtcatttg

SEQ ID NO: 1777094 - DNA, 25 bp, Homo sapien
gccgcctttcaggtcatttgataaa

SEQ ID NO: 1777095 - DNA, 25 bp, Homo sapien
caggccctagtcttcccttcctgtt

SEQ ID NO: 1777096 - DNA, 25 bp, Homo sapien
tcctgttaactgatcataggaaact

SEQ ID NO: 1777097 - DNA, 25 bp, Homo sapien
ccttcctgttaactgatcataggaa

SEQ ID NO: 1777098 - DNA, 25 bp, Homo sapien
cttcccttcctgttaactgatcata

SEQ ID NO: 1777099 - DNA, 25 bp, Homo sapien
cctgctttccctagcttgtaggtgt

SEQ ID NO: 1777100 - DNA, 25 bp, Homo sapien
gggtccactgatctttctccggcat

SEQ ID NO: 1777101 - DNA, 25 bp, Homo sapien
tgtggtcgtgtaaggtggctattgc

SEQ ID NO: 1777102 - DNA, 25 bp, Homo sapien
taggtgtgtggtcgtgtaaggtggc

SEQ ID NO: 1777103 - DNA, 25 bp, Homo sapien
agcagcaggttcttatctgaggaca

SEQ ID NO: 1777104 - DNA, 25 bp, Homo sapien
agggccatgtggcacaccacagccg

SEQ ID NO: 1777105 - DNA, 25 bp, Homo sapien
caggttcttatctgaggacagcagg

SEQ ID NO: 1777106 - DNA, 25 bp, Homo sapien
cagtgtcaggggaagcatgtggtct

SEQ ID NO: 1777107 - DNA, 25 bp, Homo sapien
tcaacttgagtgtccacacgataag

SEQ ID NO: 1777108 - DNA, 25 bp, Homo sapien
gtgtccacacgataagctcttcaag

SEQ ID NO: 1777109 - DNA, 25 bp, Homo sapien
cgataagctcttcaaggcagaacat

SEQ ID NO: 1777110 - DNA, 25 bp, Homo sapien
cacacgataagctcttcaaggcaga

SEQ ID NO: 1777111 - DNA, 25 bp, Homo sapien
agctttcagttgccatacgctgccc

SEQ ID NO: 1777112 - DNA, 25 bp, Homo sapien
gtgtccaggcaaaacctcattatca

SEQ ID NO: 1777113 - DNA, 25 bp, Homo sapien
cagagaatccactcattttgtgtgc

SEQ ID NO: 1777114 - DNA, 25 bp, Homo sapien
ccaaacatgaagctcatgtccaaca

SEQ ID NO: 1777115 - DNA, 25 bp, Homo sapien
gggaagttcagctctaactcttgaa

SEQ ID NO: 1777116 - DNA, 25 bp, Homo sapien
ggaagttcagctctaactcttgaag

SEQ ID NO: 1777117 - DNA, 25 bp, Homo sapien
aaggaccagcgggccaggttcttct

SEQ ID NO: 1777118 - DNA, 25 bp, Homo sapien
tactcctgagtgtcggttagctggg

SEQ ID NO: 1777119 - DNA, 25 bp, Homo sapien
tacctgtcctgtcacacagaggggt

SEQ ID NO: 1777120 - DNA, 25 bp, Homo sapien
tagctgggggtacacatggagcatt

SEQ ID NO: 1777121 - DNA, 25 bp, Homo sapien
cattaaatggtgtcctacgtagtca

SEQ ID NO: 1777122 - DNA, 25 bp, Homo sapien
tacattcactgaccaagcatcaaaa

SEQ ID NO: 1777123 - DNA, 25 bp, Homo sapien
cattcactgaccaagcatcaaaaca

SEQ ID NO: 1777124 - DNA, 25 bp, Homo sapien
tttacattcactgaccaagcatcaa

SEQ ID NO: 1777125 - DNA, 25 bp, Homo sapien
gttttacattcactgaccaagcatc

SEQ ID NO: 1777126 - DNA, 25 bp, Homo sapien
aaagcacagcttcaagcaacatggc

SEQ ID NO: 1777127 - DNA, 25 bp, Homo sapien
ccatctcagacagaggcaaagcaca

SEQ ID NO: 1777128 - DNA, 25 bp, Homo sapien
catctcagacagaggcaaagcacag

SEQ ID NO: 1777129 - DNA, 25 bp, Homo sapien
ggcaaagcacagcttcaagcaacat

SEQ ID NO: 1777130 - DNA, 25 bp, Homo sapien
cagctctgtgggaagtgcttactac

SEQ ID NO: 1777131 - DNA, 25 bp, Homo sapien
tatgccagaaacgtacactcctcag

SEQ ID NO: 1777132 - DNA, 25 bp, Homo sapien
cgagaccaaagggatggaactatct

SEQ ID NO: 1777133 - DNA, 25 bp, Homo sapien
ctagcagtcagggtgcgagaccaaa

SEQ ID NO: 1777134 - DNA, 25 bp, Homo sapien
tggcaacaactttgttaaatctcat

SEQ ID NO: 1777135 - DNA, 25 bp, Homo sapien
tttggcaacaactttgttaaatctc

SEQ ID NO: 1777136 - DNA, 25 bp, Homo sapien
gagctctcacggtttgcacatttgc

SEQ ID NO: 1777137 - DNA, 25 bp, Homo sapien
agctctcacggtttgcacatttgcc

SEQ ID NO: 1777138 - DNA, 25 bp, Homo sapien
ttggctttcactaaactgcacagtc

SEQ ID NO: 1777139 - DNA, 25 bp, Homo sapien
gatccaggtcggcaaaacaatttgg

SEQ ID NO: 1777140 - DNA, 25 bp, Homo sapien
tcttcagccctgaatagacactcag

SEQ ID NO: 1777141 - DNA, 25 bp, Homo sapien
ctgaatagacactcagttttttggc

SEQ ID NO: 1777142 - DNA, 25 bp, Homo sapien
tttgattgtcctgcttttggccagc

SEQ ID NO: 1777143 - DNA, 25 bp, Homo sapien
gccagctttgctgcgtgatgattaa

SEQ ID NO: 1777144 - DNA, 25 bp, Homo sapien
tatccgaagctgagggatccgcttg

SEQ ID NO: 1777145 - DNA, 25 bp, Homo sapien
agcaagccctttgattgtcctgctt

SEQ ID NO: 1777146 - DNA, 25 bp, Homo sapien
tgccctctcaggattggtattctct

SEQ ID NO: 1777147 - DNA, 25 bp, Homo sapien
tatcccaaggtgtagtcagtgacca

SEQ ID NO: 1777148 - DNA, 25 bp, Homo sapien
tcagtgaccacatatggtagatgct

SEQ ID NO: 1777149 - DNA, 25 bp, Homo sapien
tacttgaccactctgtgatattggc

SEQ ID NO: 1777150 - DNA, 25 bp, Homo sapien
aaatcactattttcgaggtctctct

SEQ ID NO: 1777151 - DNA, 25 bp, Homo sapien
ggtctctcttagttgcagcaaaatt

SEQ ID NO: 1777152 - DNA, 25 bp, Homo sapien
cctggactgctgaatatcagttttc

SEQ ID NO: 1777153 - DNA, 25 bp, Homo sapien
tgggtgggccgctgttttcatgtac

SEQ ID NO: 1777154 - DNA, 25 bp, Homo sapien
tgaaagcagccaagtgagctttggg

SEQ ID NO: 1777155 - DNA, 25 bp, Homo sapien
gaactcagatgtacacgtgatgtct

SEQ ID NO: 1777156 - DNA, 25 bp, Homo sapien
agcactagaattgggaaagaagacc

SEQ ID NO: 1777157 - DNA, 25 bp, Homo sapien
tgaagagctcttgaagccactgcat

SEQ ID NO: 1777158 - DNA, 25 bp, Homo sapien
ctgtgttctaaccgcctccttttgg

SEQ ID NO: 1777159 - DNA, 25 bp, Homo sapien
cacaagtgttcttaagtcaactggg

SEQ ID NO: 1777160 - DNA, 25 bp, Homo sapien
gttgtcattgtaggcatgatcaatc

SEQ ID NO: 1777161 - DNA, 25 bp, Homo sapien
tcttaagtcaactgggaggacaaag

SEQ ID NO: 1777162 - DNA, 25 bp, Homo sapien
gaggacaaagattgcgtgagtgctt

SEQ ID NO: 1777163 - DNA, 25 bp, Homo sapien
taccatcggaatgaagagttgtcta

SEQ ID NO: 1777164 - DNA, 25 bp, Homo sapien
tctaagaagtaccatcggaatgaag

SEQ ID NO: 1777165 - DNA, 25 bp, Homo sapien
ccatcggaatgaagagttgtctatt

SEQ ID NO: 1777166 - DNA, 25 bp, Homo sapien
gaagtaccatcggaatgaagagttg

SEQ ID NO: 1777167 - DNA, 25 bp, Homo sapien
caggagcacactatcacggttggct

SEQ ID NO: 1777168 - DNA, 25 bp, Homo sapien
caatttgtggtccttgatggctggc

SEQ ID NO: 1777169 - DNA, 25 bp, Homo sapien
aattaagtaggtaatggtgcctcca

SEQ ID NO: 1777170 - DNA, 25 bp, Homo sapien
gatctaccacatttcagaggtttgg

SEQ ID NO: 1777171 - DNA, 25 bp, Homo sapien
gatgcatgatgcctcacggtttact

SEQ ID NO: 1777172 - DNA, 25 bp, Homo sapien
ggtgatggcctacgcaaaggtctct

SEQ ID NO: 1777173 - DNA, 25 bp, Homo sapien
taggctctcagtagaagctcacaga

SEQ ID NO: 1777174 - DNA, 25 bp, Homo sapien
ccctgtcttctatggcggctccaga

SEQ ID NO: 1777175 - DNA, 25 bp, Homo sapien
gaattttcatcattaggataatcca

SEQ ID NO: 1777176 - DNA, 25 bp, Homo sapien
gtttctaaatatgcaaaaccatcag

SEQ ID NO: 1777177 - DNA, 25 bp, Homo sapien
tctaaatatgcaaaaccatcagagg

SEQ ID NO: 1777178 - DNA, 25 bp, Homo sapien
aaaccatcagaggaattttcatcat

SEQ ID NO: 1777179 - DNA, 25 bp, Homo sapien
gaggaaccggctctctgtttcccca

SEQ ID NO: 1777180 - DNA, 25 bp, Homo sapien
ccctttccccttcgcagagttgtga

SEQ ID NO: 1777181 - DNA, 25 bp, Homo sapien
accccgaggacttctgcagcagagg

SEQ ID NO: 1777182 - DNA, 25 bp, Homo sapien
tctggttgggtctcacaaccctttc

SEQ ID NO: 1777183 - DNA, 25 bp, Homo sapien
cctcggtgctctcgttggaagtcac

SEQ ID NO: 1777184 - DNA, 25 bp, Homo sapien
tgttcgaatccattttcaacccgtc

SEQ ID NO: 1777185 - DNA, 25 bp, Homo sapien
cgcggcccttctggggagacccatt

SEQ ID NO: 1777186 - DNA, 25 bp, Homo sapien
ttttcaacccgtcacattccaacat

SEQ ID NO: 1777187 - DNA, 25 bp, Homo sapien
caggttgaccgggtgaatgtacccg

SEQ ID NO: 1777188 - DNA, 25 bp, Homo sapien
cctcaagtgggcgatgtagctggac

SEQ ID NO: 1777189 - DNA, 25 bp, Homo sapien
ttctcgtatttgtcgttagccagga

SEQ ID NO: 1777190 - DNA, 25 bp, Homo sapien
gcggcgttgcgctggacctgcttcc

SEQ ID NO: 1777191 - DNA, 25 bp, Homo sapien
aggaggtaagtggccgtggcggagg

SEQ ID NO: 1777192 - DNA, 25 bp, Homo sapien
gaggaggtaagtggccgtggcggag

SEQ ID NO: 1777193 - DNA, 25 bp, Homo sapien
tcaggtcactctcgggtttcccggc

SEQ ID NO: 1777194 - DNA, 25 bp, Homo sapien
cactctcgggtttcccggccaccat

SEQ ID NO: 1777195 - DNA, 25 bp, Homo sapien
tctttcaggtcactctcgggtttcc

SEQ ID NO: 1777196 - DNA, 25 bp, Homo sapien
tcactctcgggtttcccggccacca

SEQ ID NO: 1777197 - DNA, 25 bp, Homo sapien
cggtggttccacataagcggctcgc

SEQ ID NO: 1777198 - DNA, 25 bp, Homo sapien
gtggttccacataagcggctcgcgg

SEQ ID NO: 1777199 - DNA, 25 bp, Homo sapien
ttccacataagcggctcgcggtcac

SEQ ID NO: 1777200 - DNA, 25 bp, Homo sapien
ggttccacataagcggctcgcggtc

SEQ ID NO: 1777201 - DNA, 25 bp, Homo sapien
gagcgcgcctttcccagactcgcac

SEQ ID NO: 1777202 - DNA, 25 bp, Homo sapien
gggagcgcgcctttcccagactcgc

SEQ ID NO: 1777203 - DNA, 25 bp, Homo sapien
ggagcgcgcctttcccagactcgca

SEQ ID NO: 1777204 - DNA, 25 bp, Homo sapien
cgtcgttgtaaagtgttctcgcggg

SEQ ID NO: 1777205 - DNA, 25 bp, Homo sapien
cagagtcattcacggtagaagttaa

SEQ ID NO: 1777206 - DNA, 25 bp, Homo sapien
tctggtttggaaacgaatctcctcg

SEQ ID NO: 1777207 - DNA, 25 bp, Homo sapien
tagatgggaatctttgtaagtacaa

SEQ ID NO: 1777208 - DNA, 25 bp, Homo sapien
catattgtacaaaagatacattgat

SEQ ID NO: 1777209 - DNA, 25 bp, Homo sapien
tataaatgtgactgtcaaagtcagc

SEQ ID NO: 1777210 - DNA, 25 bp, Homo sapien
gctatcctatgatctacattttaca

SEQ ID NO: 1777211 - DNA, 25 bp, Homo sapien
gactgtcaaagtcagctatcctatg

SEQ ID NO: 1777212 - DNA, 25 bp, Homo sapien
tgtcagcagtcatacggtggaatcc

SEQ ID NO: 1777213 - DNA, 25 bp, Homo sapien
gcaaccaaaaggcaggcatgcgggt

SEQ ID NO: 1777214 - DNA, 25 bp, Homo sapien
tttgcagctatgctcacacctggaa

SEQ ID NO: 1777215 - DNA, 25 bp, Homo sapien
cttaggagctgttccgtagcctgga

SEQ ID NO: 1777216 - DNA, 25 bp, Homo sapien
gaacattaaacagccccggtggcat

SEQ ID NO: 1777217 - DNA, 25 bp, Homo sapien
tcaaggctctctgcgaggaataaca

SEQ ID NO: 1777218 - DNA, 25 bp, Homo sapien
taaacactgcggtcataaccccgaa

SEQ ID NO: 1777219 - DNA, 25 bp, Homo sapien
caaatgaagcggaagtttcaaggct

SEQ ID NO: 1777220 - DNA, 25 bp, Homo sapien
gaatttgaggaacgggactctggcc

SEQ ID NO: 1777221 - DNA, 25 bp, Homo sapien
gaaacagctagttggatgcagaacc

SEQ ID NO: 1777222 - DNA, 25 bp, Homo sapien
cactttcagtttgggtctaggcaca

SEQ ID NO: 1777223 - DNA, 25 bp, Homo sapien
gatgaagtcaccgaagttctcagcc

SEQ ID NO: 1777224 - DNA, 25 bp, Homo sapien
tcgcaacggagccaacagaagtctg

SEQ ID NO: 1777225 - DNA, 25 bp, Homo sapien
ttttctggcccgagaatggaccaag

SEQ ID NO: 1777226 - DNA, 25 bp, Homo sapien
tctctcccttagaggtcgcaacgga

SEQ ID NO: 1777227 - DNA, 25 bp, Homo sapien
ctgagaacacaggatgagcgcatcc

SEQ ID NO: 1777228 - DNA, 25 bp, Homo sapien
tgagtgctgggtacaaaagaccgcc

SEQ ID NO: 1777229 - DNA, 25 bp, Homo sapien
gacccaaagatcaaaggcgtgttcc

SEQ ID NO: 1777230 - DNA, 25 bp, Homo sapien
ttggtgaacacatccgcttactggg

SEQ ID NO: 1777231 - DNA, 25 bp, Homo sapien
aatgtgcgcccagacttcaaggtaa

SEQ ID NO: 1777232 - DNA, 25 bp, Homo sapien
cagtctacatgttctaagcaaagtg

SEQ ID NO: 1777233 - DNA, 25 bp, Homo sapien
gaaatgttcttaataaaccagaaga

SEQ ID NO: 1777234 - DNA, 25 bp, Homo sapien
tgactggctttagccaatagaacac

SEQ ID NO: 1777235 - DNA, 25 bp, Homo sapien
cagagaactcttctaagaaatgttc

SEQ ID NO: 1777236 - DNA, 25 bp, Homo sapien
ggtgccttcagctgacaataattta

SEQ ID NO: 1777237 - DNA, 25 bp, Homo sapien
ccatgttcccttggaggctttaggg

SEQ ID NO: 1777238 - DNA, 25 bp, Homo sapien
ggattgcctaacacaggctgtatta

SEQ ID NO: 1777239 - DNA, 25 bp, Homo sapien
aaggtgtaggcggagccatgttccc

SEQ ID NO: 1777240 - DNA, 25 bp, Homo sapien
tgaatgtacctgatatgaaatattg

SEQ ID NO: 1777241 - DNA, 25 bp, Homo sapien
ggatggtccctaagatgatgcagag

SEQ ID NO: 1777242 - DNA, 25 bp, Homo sapien
tcagctatcactctgatggtctatc

SEQ ID NO: 1777243 - DNA, 25 bp, Homo sapien
aaagcaaaagacaggttctagagac

SEQ ID NO: 1777244 - DNA, 25 bp, Homo sapien
caattgtatgaagtggcaacaggct

SEQ ID NO: 1777245 - DNA, 25 bp, Homo sapien
tatgtctctggaagtaaaccctttc

SEQ ID NO: 1777246 - DNA, 25 bp, Homo sapien
tagaagcctctcatggtgtactgtg

SEQ ID NO: 1777247 - DNA, 25 bp, Homo sapien
tagacttccctctatggcaagagga

SEQ ID NO: 1777248 - DNA, 25 bp, Homo sapien
gaacgaaagtggtgatgactaacat

SEQ ID NO: 1777249 - DNA, 25 bp, Homo sapien
aggtgtattctctatttaatgtgtc

SEQ ID NO: 1777250 - DNA, 25 bp, Homo sapien
ttgtgtccagtaatccctttttatc

SEQ ID NO: 1777251 - DNA, 25 bp, Homo sapien
tattgcactgcctagaacttttagc

SEQ ID NO: 1777252 - DNA, 25 bp, Homo sapien
gcaagtacttatagacagcttacca

SEQ ID NO: 1777253 - DNA, 25 bp, Homo sapien
gcttaccaaaagtatagcactcact

SEQ ID NO: 1777254 - DNA, 25 bp, Homo sapien
tgtaaacacctatcctagagcaagc

SEQ ID NO: 1777255 - DNA, 25 bp, Homo sapien
cactgcagcagggagataatgtatg

SEQ ID NO: 1777256 - DNA, 25 bp, Homo sapien
gcaaatcagtgtatccttagggata

SEQ ID NO: 1777257 - DNA, 25 bp, Homo sapien
accatgatcgagtgagtttatccca

SEQ ID NO: 1777258 - DNA, 25 bp, Homo sapien
tatacctcagaaaagctcctaacat

SEQ ID NO: 1777259 - DNA, 25 bp, Homo sapien
ggtggtatcaccatgaaacggaata

SEQ ID NO: 1777260 - DNA, 25 bp, Homo sapien
gaatcctggtcttagagcgaccggg

SEQ ID NO: 1777261 - DNA, 25 bp, Homo sapien
gcacaatggcccgtttgaaccgtcg

SEQ ID NO: 1777262 - DNA, 25 bp, Homo sapien
gataacgcaggaccgtatgccactt

SEQ ID NO: 1777263 - DNA, 25 bp, Homo sapien
tgatgtcgcgataaattcccctagt

SEQ ID NO: 1777264 - DNA, 25 bp, Homo sapien
gaggctcggactccgtcttccttgc

SEQ ID NO: 1777265 - DNA, 25 bp, Homo sapien
gcttccccgcgacaataaatagact

SEQ ID NO: 1777266 - DNA, 25 bp, Homo sapien
cgcagcttccccgcgacaataaata

SEQ ID NO: 1777267 - DNA, 25 bp, Homo sapien
ttgttgttccgggtgcgaggcggcc

SEQ ID NO: 1777268 - DNA, 25 bp, Homo sapien
gatgagacgggcgcgctccccagtc

SEQ ID NO: 1777269 - DNA, 25 bp, Homo sapien
cgtgggaagagggagcggtggctga

SEQ ID NO: 1777270 - DNA, 25 bp, Homo sapien
cgtcggatgcgaaggagaagctgga

SEQ ID NO: 1777271 - DNA, 25 bp, Homo sapien
ggcagcgctgctgccggttgcgtcg

SEQ ID NO: 1777272 - DNA, 25 bp, Homo sapien
gagtcttattgcaatgagcacattg

SEQ ID NO: 1777273 - DNA, 25 bp, Homo sapien
agtttgagtcttattgcaatgagca

SEQ ID NO: 1777274 - DNA, 25 bp, Homo sapien
ttgcaatgagcacattgacagagcc

SEQ ID NO: 1777275 - DNA, 25 bp, Homo sapien
tcttattgcaatgagcacattgaca

SEQ ID NO: 1777276 - DNA, 25 bp, Homo sapien
gccagtgtcgctttggaactgcagg

SEQ ID NO: 1777277 - DNA, 25 bp, Homo sapien
ggaactgcaggtgacagatgcagtc

SEQ ID NO: 1777278 - DNA, 25 bp, Homo sapien
tgtcgctttggaactgcaggtgaca

SEQ ID NO: 1777279 - DNA, 25 bp, Homo sapien
agtcagagagctcacagatgtggat

SEQ ID NO: 1777280 - DNA, 25 bp, Homo sapien
tgagaagaaataactctctccaaaa

SEQ ID NO: 1777281 - DNA, 25 bp, Homo sapien
cacagaacaggctctacaatacttt

SEQ ID NO: 1777282 - DNA, 25 bp, Homo sapien
taagtagttccctcaaatttggcag

SEQ ID NO: 1777283 - DNA, 25 bp, Homo sapien
aaagtgaccgtctacaattacagta

SEQ ID NO: 1777284 - DNA, 25 bp, Homo sapien
gcagacaccaagctccttgaagata

SEQ ID NO: 1777285 - DNA, 25 bp, Homo sapien
tagccagccatatgaaacactggga

SEQ ID NO: 1777286 - DNA, 25 bp, Homo sapien
gaacttggctgaattgctggcattt

SEQ ID NO: 1777287 - DNA, 25 bp, Homo sapien
gctggcatttggtcctaaactcaat

SEQ ID NO: 1777288 - DNA, 25 bp, Homo sapien
tagcatagacaacctgtttaaggtc

SEQ ID NO: 1777289 - DNA, 25 bp, Homo sapien
caacctgtttaaggtctatgtcatg

SEQ ID NO: 1777290 - DNA, 25 bp, Homo sapien
ggtctatgtcatgcacaaatgccat

SEQ ID NO: 1777291 - DNA, 25 bp, Homo sapien
taaaatgctctagcatagacaacct

SEQ ID NO: 1777292 - DNA, 25 bp, Homo sapien
agaccagcctggtgaaacctcgctc

SEQ ID NO: 1777293 - DNA, 25 bp, Homo sapien
gagaccagcctggtgaaacctcgct

SEQ ID NO: 1777294 - DNA, 25 bp, Homo sapien
ggagaccagcctggtgaaacctcgc

SEQ ID NO: 1777295 - DNA, 25 bp, Homo sapien
caatgggccagtgcctgttttgcaa

SEQ ID NO: 1777296 - DNA, 25 bp, Homo sapien
cataataggttaggcaagggtcagc

SEQ ID NO: 1777297 - DNA, 25 bp, Homo sapien
gattactggacaagcccaaagaggc

SEQ ID NO: 1777298 - DNA, 25 bp, Homo sapien
taatgactacgcagcacaactgagt

SEQ ID NO: 1777299 - DNA, 25 bp, Homo sapien
tttggtcctctttctagtggtattc

SEQ ID NO: 1777300 - DNA, 25 bp, Homo sapien
catagcttgatcaggtgttttgtcc

SEQ ID NO: 1777301 - DNA, 25 bp, Homo sapien
ttctcaaggaaatggcttagtgtga

SEQ ID NO: 1777302 - DNA, 25 bp, Homo sapien
ataccaattatttgcccactgccca

SEQ ID NO: 1777303 - DNA, 25 bp, Homo sapien
aacacagactacatttgtaattaga

SEQ ID NO: 1777304 - DNA, 25 bp, Homo sapien
gacatcttgttctaaaaacacagac

SEQ ID NO: 1777305 - DNA, 25 bp, Homo sapien
tataaattacatttgctccttccaa

SEQ ID NO: 1777306 - DNA, 25 bp, Homo sapien
tgtaattagaatgtccaatgcaaca

SEQ ID NO: 1777307 - DNA, 25 bp, Homo sapien
gcctggcggaagagtgagactccgt

SEQ ID NO: 1777308 - DNA, 25 bp, Homo sapien
agcctggcggaagagtgagactccg

SEQ ID NO: 1777309 - DNA, 25 bp, Homo sapien
tacaaggtgtatagaaatctctcac

SEQ ID NO: 1777310 - DNA, 25 bp, Homo sapien
tactctccaagcttatccaagactg

SEQ ID NO: 1777311 - DNA, 25 bp, Homo sapien
gaagctttgcagtagctgttgcttt

SEQ ID NO: 1777312 - DNA, 25 bp, Homo sapien
gtcatataactggaacttgcatggt

SEQ ID NO: 1777313 - DNA, 25 bp, Homo sapien
gttgctccagtgcaaataatttttc

SEQ ID NO: 1777314 - DNA, 25 bp, Homo sapien
atttttcctgaggaccaaattgtag

SEQ ID NO: 1777315 - DNA, 25 bp, Homo sapien
cttgttgctccagtgcaaataattt

SEQ ID NO: 1777316 - DNA, 25 bp, Homo sapien
caaattgtagctgtaattctaggtt

SEQ ID NO: 1777317 - DNA, 25 bp, Homo sapien
gtttctgcagactacgggctaagcg

SEQ ID NO: 1777318 - DNA, 25 bp, Homo sapien
agactacgggctaagcgtctggcac

SEQ ID NO: 1777319 - DNA, 25 bp, Homo sapien
cgggctaagcgtctggcaccaaatt

SEQ ID NO: 1777320 - DNA, 25 bp, Homo sapien
taagcgtctggcaccaaatttagct

SEQ ID NO: 1777321 - DNA, 25 bp, Homo sapien
cacactgccagaacgttaacaacct

SEQ ID NO: 1777322 - DNA, 25 bp, Homo sapien
aatggcatgttacacactgccagaa

SEQ ID NO: 1777323 - DNA, 25 bp, Homo sapien
tcaaatggcatgttacacactgcca

SEQ ID NO: 1777324 - DNA, 25 bp, Homo sapien
catgttacacactgccagaacgtta

SEQ ID NO: 1777325 - DNA, 25 bp, Homo sapien
ctggcatgaggtctattgttctttg

SEQ ID NO: 1777326 - DNA, 25 bp, Homo sapien
tatccgatagcacacagcaggatga

SEQ ID NO: 1777327 - DNA, 25 bp, Homo sapien
aaaatctgtaatgtagctcttagag

SEQ ID NO: 1777328 - DNA, 25 bp, Homo sapien
ctgttactgtgatacttcctgttga

SEQ ID NO: 1777329 - DNA, 25 bp, Homo sapien
gctcttagagattttatccgatagc

SEQ ID NO: 1777330 - DNA, 25 bp, Homo sapien
ccataattgataagtgtggtttcaa

SEQ ID NO: 1777331 - DNA, 25 bp, Homo sapien
caatccataattgataagtgtggtt

SEQ ID NO: 1777332 - DNA, 25 bp, Homo sapien
tatcattcaatccataattgataag

SEQ ID NO: 1777333 - DNA, 25 bp, Homo sapien
ttcaatccataattgataagtgtgg

SEQ ID NO: 1777334 - DNA, 25 bp, Homo sapien
ccatgctccaaagtgtagaaacaga

SEQ ID NO: 1777335 - DNA, 25 bp, Homo sapien
cttagtagagattgttcaataggct

SEQ ID NO: 1777336 - DNA, 25 bp, Homo sapien
tatatacttagtagagattgttcaa

SEQ ID NO: 1777337 - DNA, 25 bp, Homo sapien
tgctccaaagtgtagaaacagagag

SEQ ID NO: 1777338 - DNA, 25 bp, Homo sapien
aaaagcacaaggctacgaggtgacc

SEQ ID NO: 1777339 - DNA, 25 bp, Homo sapien
cgaggtgaccatgcattatgctaat

SEQ ID NO: 1777340 - DNA, 25 bp, Homo sapien
caccctcagagcgtatacaagtcaa

SEQ ID NO: 1777341 - DNA, 25 bp, Homo sapien
gctatgctttgttcatgggaaccaa

SEQ ID NO: 1777342 - DNA, 25 bp, Homo sapien
acaaatgggtaaatctgttccacag

SEQ ID NO: 1777343 - DNA, 25 bp, Homo sapien
cacaaatgggtaaatctgttccaca

SEQ ID NO: 1777344 - DNA, 25 bp, Homo sapien
aggtgctcagttagagattctaacc

SEQ ID NO: 1777345 - DNA, 25 bp, Homo sapien
gtgctcagttagagattctaaccaa

SEQ ID NO: 1777346 - DNA, 25 bp, Homo sapien
gctcagttagagattctaaccaatt

SEQ ID NO: 1777347 - DNA, 25 bp, Homo sapien
cagttagagattctaaccaattaag

SEQ ID NO: 1777348 - DNA, 25 bp, Homo sapien
tggtccagttttccttttgagtcca

SEQ ID NO: 1777349 - DNA, 25 bp, Homo sapien
gccgtgaatgaataaaagagtctat

SEQ ID NO: 1777350 - DNA, 25 bp, Homo sapien
tttatattacagcaaggtttggaat

SEQ ID NO: 1777351 - DNA, 25 bp, Homo sapien
tccaaagggactggagcttacactg

SEQ ID NO: 1777352 - DNA, 25 bp, Homo sapien
tactgcgaaaataaatagaatgtcc

SEQ ID NO: 1777353 - DNA, 25 bp, Homo sapien
caggttctttggtgcccatattcag

SEQ ID NO: 1777354 - DNA, 25 bp, Homo sapien
gcacactgtgacagctctgcttatg

SEQ ID NO: 1777355 - DNA, 25 bp, Homo sapien
tgacgacaataaaacaatctaaggt

SEQ ID NO: 1777356 - DNA, 25 bp, Homo sapien
cttttacaggttctttggtgcccat

SEQ ID NO: 1777357 - DNA, 25 bp, Homo sapien
cacagaggcagcttatgggcacttc

SEQ ID NO: 1777358 - DNA, 25 bp, Homo sapien
ttagtataggcttgggcatcaaccc

SEQ ID NO: 1777359 - DNA, 25 bp, Homo sapien
gaaggacagtatcacacaaaatggc

SEQ ID NO: 1777360 - DNA, 25 bp, Homo sapien
tgtattaccacatcagggctcctgg

SEQ ID NO: 1777361 - DNA, 25 bp, Homo sapien
tgtccccattaagtttctcctgaga

SEQ ID NO: 1777362 - DNA, 25 bp, Homo sapien
tcactgttggttacactaaactcct

SEQ ID NO: 1777363 - DNA, 25 bp, Homo sapien
gaagctaattggactctccactcag

SEQ ID NO: 1777364 - DNA, 25 bp, Homo sapien
aacattgtgttggaatattgtcccc

SEQ ID NO: 1777365 - DNA, 25 bp, Homo sapien
aatatgtgttgttcagtgcagtgcc

SEQ ID NO: 1777366 - DNA, 25 bp, Homo sapien
taaggttagcgaattacccatggac

SEQ ID NO: 1777367 - DNA, 25 bp, Homo sapien
gatctgcccagttttcaagtcatgc

SEQ ID NO: 1777368 - DNA, 25 bp, Homo sapien
ttaggtgaggctcattcggcagccc

SEQ ID NO: 1777369 - DNA, 25 bp, Homo sapien
ttttatccaatatccattgcaccac

SEQ ID NO: 1777370 - DNA, 25 bp, Homo sapien
ttaagtcaagcctagaaaagctgcc

SEQ ID NO: 1777371 - DNA, 25 bp, Homo sapien
cacctgtaccagcaacgtgggtttc

SEQ ID NO: 1777372 - DNA, 25 bp, Homo sapien
tcaggttacggtacacaggctataa

SEQ ID NO: 1777373 - DNA, 25 bp, Homo sapien
tgggtttcacccacacaacgatgaa

SEQ ID NO: 1777374 - DNA, 25 bp, Homo sapien
agggactgtatctttggctggaagc

SEQ ID NO: 1777375 - DNA, 25 bp, Homo sapien
aaactaggtttgcagatgagagtca

SEQ ID NO: 1777376 - DNA, 25 bp, Homo sapien
gctggaagcggtcagaggaaaaact

SEQ ID NO: 1777377 - DNA, 25 bp, Homo sapien
gcttcttgtgatgcatcttggcaag

SEQ ID NO: 1777378 - DNA, 25 bp, Homo sapien
actgaatgtgccttgacttggtcca

SEQ ID NO: 1777379 - DNA, 25 bp, Homo sapien
cactgaatgtgccttgacttggtcc

SEQ ID NO: 1777380 - DNA, 25 bp, Homo sapien
ctgaatgtgccttgacttggtccat

SEQ ID NO: 1777381 - DNA, 25 bp, Homo sapien
cctcaagtgcactgtgggggccact

SEQ ID NO: 1777382 - DNA, 25 bp, Homo sapien
gttgttcgtagttgactactccttg

SEQ ID NO: 1777383 - DNA, 25 bp, Homo sapien
gtcaggggccgccacaatgcaaatg

SEQ ID NO: 1777384 - DNA, 25 bp, Homo sapien
ttcgtagttgactactccttgccac

SEQ ID NO: 1777385 - DNA, 25 bp, Homo sapien
ctaatgtctttggtcctcgtaggac

SEQ ID NO: 1777386 - DNA, 25 bp, Homo sapien
ggatcagaggacgagccatggcttt

SEQ ID NO: 1777387 - DNA, 25 bp, Homo sapien
gctttaacttctagcatgaactggg

SEQ ID NO: 1777388 - DNA, 25 bp, Homo sapien
cctcatctcgctgacatttttgact

SEQ ID NO: 1777389 - DNA, 25 bp, Homo sapien
gtttttctagacaagcccctggcag

SEQ ID NO: 1777390 - DNA, 25 bp, Homo sapien
caggcttgcaatgtggatctcgagt

SEQ ID NO: 1777391 - DNA, 25 bp, Homo sapien
cctggcagttcagactgagcacata

SEQ ID NO: 1777392 - DNA, 25 bp, Homo sapien
ccatcttcttgttggcgaggtccac

SEQ ID NO: 1777393 - DNA, 25 bp, Homo sapien
gagacagagagacttcaacgaactt

SEQ ID NO: 1777394 - DNA, 25 bp, Homo sapien
ccaagtccatgtcctcaaccggaga

SEQ ID NO: 1777395 - DNA, 25 bp, Homo sapien
cataagcacgctgtctgtggatttc

SEQ ID NO: 1777396 - DNA, 25 bp, Homo sapien
gacactctgtgtagccataagcacg

SEQ ID NO: 1777397 - DNA, 25 bp, Homo sapien
tacagagaatcatgaagctttggtg

SEQ ID NO: 1777398 - DNA, 25 bp, Homo sapien
gagaaacatagttcaatcctaggtc

SEQ ID NO: 1777399 - DNA, 25 bp, Homo sapien
cagagaccggattgtggctttgaga

SEQ ID NO: 1777400 - DNA, 25 bp, Homo sapien
aaagccctttattgatttacgatgc

SEQ ID NO: 1777401 - DNA, 25 bp, Homo sapien
ctcgactccccactgtttctggggt

SEQ ID NO: 1777402 - DNA, 25 bp, Homo sapien
gactccccactgtttctggggtgct

SEQ ID NO: 1777403 - DNA, 25 bp, Homo sapien
tccccactgtttctggggtgctctt

SEQ ID NO: 1777404 - DNA, 25 bp, Homo sapien
ccccactgtttctggggtgctcttg

SEQ ID NO: 1777405 - DNA, 25 bp, Homo sapien
tctgtaatgtccacaaaaagccaag

SEQ ID NO: 1777406 - DNA, 25 bp, Homo sapien
ccacttctgtaatgtccacaaaaag

SEQ ID NO: 1777407 - DNA, 25 bp, Homo sapien
ccacaaaaagccaagaattccccat

SEQ ID NO: 1777408 - DNA, 25 bp, Homo sapien
ccaggtagtttccacttctgtaatg

SEQ ID NO: 1777409 - DNA, 25 bp, Homo sapien
gaggtaaagtgagcctgcagtgctc

SEQ ID NO: 1777410 - DNA, 25 bp, Homo sapien
gctgtactcatctcccgagtgtact

SEQ ID NO: 1777411 - DNA, 25 bp, Homo sapien
tactcatctcccgagtgtactgtct

SEQ ID NO: 1777412 - DNA, 25 bp, Homo sapien
cctccctgggcgagaggtaaagtga

SEQ ID NO: 1777413 - DNA, 25 bp, Homo sapien
ctgttgaaaacaccgagggccccag

SEQ ID NO: 1777414 - DNA, 25 bp, Homo sapien
gggacagccgtggagacggagggca

SEQ ID NO: 1777415 - DNA, 25 bp, Homo sapien
ggacagccgtggagacggagggcag

SEQ ID NO: 1777416 - DNA, 25 bp, Homo sapien
tgaaaacaccgagggccccagtctg

SEQ ID NO: 1777417 - DNA, 25 bp, Homo sapien
tgtaacttctacgtgaccatggtac

SEQ ID NO: 1777418 - DNA, 25 bp, Homo sapien
aagcggctgtaacttctacgtgacc

SEQ ID NO: 1777419 - DNA, 25 bp, Homo sapien
ggctgtaacttctacgtgaccatgg

SEQ ID NO: 1777420 - DNA, 25 bp, Homo sapien
gggaagcggctgtaacttctacgtg

SEQ ID NO: 1777421 - DNA, 25 bp, Homo sapien
tcagcagacatacaacgggtacata

SEQ ID NO: 1777422 - DNA, 25 bp, Homo sapien
tcataaggggcctggattatgcctg

SEQ ID NO: 1777423 - DNA, 25 bp, Homo sapien
cgggtacataataaagactagttga

SEQ ID NO: 1777424 - DNA, 25 bp, Homo sapien
ggaggacttccattttctagcacta

SEQ ID NO: 1777425 - DNA, 25 bp, Homo sapien
tacctgccttaagagtagaagggca

SEQ ID NO: 1777426 - DNA, 25 bp, Homo sapien
gtataccacactcccacaatgacat

SEQ ID NO: 1777427 - DNA, 25 bp, Homo sapien
agacattgtgtataccacactccca

SEQ ID NO: 1777428 - DNA, 25 bp, Homo sapien
taggaataaacagaatgactaaatc

SEQ ID NO: 1777429 - DNA, 25 bp, Homo sapien
ttgccctgatactgatgggatcccc

SEQ ID NO: 1777430 - DNA, 25 bp, Homo sapien
tgatgggatcccctcactcagctgc

SEQ ID NO: 1777431 - DNA, 25 bp, Homo sapien
tgctctcctatgtaggattccttcc

SEQ ID NO: 1777432 - DNA, 25 bp, Homo sapien
agatggatccagttacaatcctcat

SEQ ID NO: 1777433 - DNA, 25 bp, Homo sapien
aatggcctgggttgaaatgcccagc

SEQ ID NO: 1777434 - DNA, 25 bp, Homo sapien
ctgggttgaaatgcccagcctgtgc

SEQ ID NO: 1777435 - DNA, 25 bp, Homo sapien
ggaaactgaacagccttaatacctc

SEQ ID NO: 1777436 - DNA, 25 bp, Homo sapien
caggaatggcctgggttgaaatgcc

SEQ ID NO: 1777437 - DNA, 25 bp, Homo sapien
gcactacagcccagacctccttgtc

SEQ ID NO: 1777438 - DNA, 25 bp, Homo sapien
agtgatgggattgctttgttgccca

SEQ ID NO: 1777439 - DNA, 25 bp, Homo sapien
ccagacctccttgtctcaagcgatc

SEQ ID NO: 1777440 - DNA, 25 bp, Homo sapien
gctgaccttagtgcagacactgatt

SEQ ID NO: 1777441 - DNA, 25 bp, Homo sapien
ggagaatgttttaaataagtggata

SEQ ID NO: 1777442 - DNA, 25 bp, Homo sapien
cctaagtgctggggagaatgtttta

SEQ ID NO: 1777443 - DNA, 25 bp, Homo sapien
gggttcatgtgatccccccatctca

SEQ ID NO: 1777444 - DNA, 25 bp, Homo sapien
tgctggggagaatgttttaaataag

SEQ ID NO: 1777445 - DNA, 25 bp, Homo sapien
tccaaagcttttcctatcgcagtgt

SEQ ID NO: 1777446 - DNA, 25 bp, Homo sapien
tggatatgctgtgtgaaccgtcgtg

SEQ ID NO: 1777447 - DNA, 25 bp, Homo sapien
atgccccagttgtcagtcagagccg

SEQ ID NO: 1777448 - DNA, 25 bp, Homo sapien
caatgtgacacttgcaggacactac

SEQ ID NO: 1777449 - DNA, 25 bp, Homo sapien
ctagtgtgagttcttgacaagagtg

SEQ ID NO: 1777450 - DNA, 25 bp, Homo sapien
ggcccaacgacctacggcactttga

SEQ ID NO: 1777451 - DNA, 25 bp, Homo sapien
acttggtatttaaagcctggtcaag

SEQ ID NO: 1777452 - DNA, 25 bp, Homo sapien
tggtcaagatttccctgtcctgtgt

SEQ ID NO: 1777453 - DNA, 25 bp, Homo sapien
ttgggtttcttatcaacagatggag

SEQ ID NO: 1777454 - DNA, 25 bp, Homo sapien
gacctccctgcccttattgaatgca

SEQ ID NO: 1777455 - DNA, 25 bp, Homo sapien
cccaaatgtggtgagtatctgtctc

SEQ ID NO: 1777456 - DNA, 25 bp, Homo sapien
tgtgtcccaacaaggctcccataat

SEQ ID NO: 1777457 - DNA, 25 bp, Homo sapien
gcccgtcgtccaatcctcatgctaa

SEQ ID NO: 1777458 - DNA, 25 bp, Homo sapien
agcaaatcaaccttggcccgtcgtc

SEQ ID NO: 1777459 - DNA, 25 bp, Homo sapien
tcatgctaaaccatctgactttcac

SEQ ID NO: 1777460 - DNA, 25 bp, Homo sapien
tcagcaaatcaaccttggcccgtcg

SEQ ID NO: 1777461 - DNA, 25 bp, Homo sapien
cttcgcttgttacctcctcacgtgt

SEQ ID NO: 1777462 - DNA, 25 bp, Homo sapien
aggccccacagaggaatcgaggatg

SEQ ID NO: 1777463 - DNA, 25 bp, Homo sapien
tcgcttgttacctcctcacgtgttc

SEQ ID NO: 1777464 - DNA, 25 bp, Homo sapien
cgaggatgcccggttcacgccaggt

SEQ ID NO: 1777465 - DNA, 25 bp, Homo sapien
tggtaacttgtaactgcccgctccg

SEQ ID NO: 1777466 - DNA, 25 bp, Homo sapien
ctggccctgcgaatagtggtaactt

SEQ ID NO: 1777467 - DNA, 25 bp, Homo sapien
caccggcatcgctgttctgcagagc

SEQ ID NO: 1777468 - DNA, 25 bp, Homo sapien
tgccttctgcagcggagtcacccgg

SEQ ID NO: 1777469 - DNA, 25 bp, Homo sapien
tgtgccagatccagtaggcaacttt

SEQ ID NO: 1777470 - DNA, 25 bp, Homo sapien
ggcgtttcacatgctattcctggtt

SEQ ID NO: 1777471 - DNA, 25 bp, Homo sapien
cctttggtagcaagaggtcatggca

SEQ ID NO: 1777472 - DNA, 25 bp, Homo sapien
cagctggtatttcgggactgtgcca

SEQ ID NO: 1777473 - DNA, 25 bp, Homo sapien
gcactggcaataacaaagtcacatt

SEQ ID NO: 1777474 - DNA, 25 bp, Homo sapien
gggtggcactggcaataacaaagtc

SEQ ID NO: 1777475 - DNA, 25 bp, Homo sapien
tggcactggcaataacaaagtcaca

SEQ ID NO: 1777476 - DNA, 25 bp, Homo sapien
ggtggcactggcaataacaaagtca

SEQ ID NO: 1777477 - DNA, 25 bp, Homo sapien
gtagaaccctccgacctgaatgcca

SEQ ID NO: 1777478 - DNA, 25 bp, Homo sapien
tcctcccggaatgcatgccacagag

SEQ ID NO: 1777479 - DNA, 25 bp, Homo sapien
cgcgtagaaccctccgacctgaatg

SEQ ID NO: 1777480 - DNA, 25 bp, Homo sapien
ctgaatgccacgttcctcccggaat

SEQ ID NO: 1777481 - DNA, 25 bp, Homo sapien
gaagtcttagtaggttgctgggaca

SEQ ID NO: 1777482 - DNA, 25 bp, Homo sapien
ttagccgaccatccgtctccaagtg

SEQ ID NO: 1777483 - DNA, 25 bp, Homo sapien
gattctctcggttaaatgataagtt

SEQ ID NO: 1777484 - DNA, 25 bp, Homo sapien
tcacgtatccggttggaagaaaagc

SEQ ID NO: 1777485 - DNA, 25 bp, Homo sapien
acttcgccaccagggagtatgagga

SEQ ID NO: 1777486 - DNA, 25 bp, Homo sapien
cagtaggaggactatctggaccaaa

SEQ ID NO: 1777487 - DNA, 25 bp, Homo sapien
tggaccaatagaacctcaggagaca

SEQ ID NO: 1777488 - DNA, 25 bp, Homo sapien
caaacagttcgggaggctactcgga

SEQ ID NO: 1777489 - DNA, 25 bp, Homo sapien
ctccctgaagccttgctcaacaact

SEQ ID NO: 1777490 - DNA, 25 bp, Homo sapien
taccgcctcctcaccaatccaaatg

SEQ ID NO: 1777491 - DNA, 25 bp, Homo sapien
agagaggacacccttctaccgcctc

SEQ ID NO: 1777492 - DNA, 25 bp, Homo sapien
accaatccaaatggtgccagtgttt

SEQ ID NO: 1777493 - DNA, 25 bp, Homo sapien
caggcctgccacactagtctgagca

SEQ ID NO: 1777494 - DNA, 25 bp, Homo sapien
cccagggacaaaggcatgagaaacc

SEQ ID NO: 1777495 - DNA, 25 bp, Homo sapien
tgagcgtggcggttgatgtaccaaa

SEQ ID NO: 1777496 - DNA, 25 bp, Homo sapien
tgagaaacccattcgactgtgtgag

SEQ ID NO: 1777497 - DNA, 25 bp, Homo sapien
cgaagacacttcctttaatcttggt

SEQ ID NO: 1777498 - DNA, 25 bp, Homo sapien
cttggtgcctgatgtaatcgttttt

SEQ ID NO: 1777499 - DNA, 25 bp, Homo sapien
cctgatgtaatcgtttttctctcta

SEQ ID NO: 1777500 - DNA, 25 bp, Homo sapien
ctcgaagacacttcctttaatcttg

SEQ ID NO: 1777501 - DNA, 25 bp, Homo sapien
tcgtacaatacgcttgattcttctt

SEQ ID NO: 1777502 - DNA, 25 bp, Homo sapien
ttgttaaggataaatatgcttgaga

SEQ ID NO: 1777503 - DNA, 25 bp, Homo sapien
tgagatttcgtacaatacgcttgat

SEQ ID NO: 1777504 - DNA, 25 bp, Homo sapien
tatgcttgagatttcgtacaatacg

SEQ ID NO: 1777505 - DNA, 25 bp, Homo sapien
cagtgtgccgcgttcccagtgatga

SEQ ID NO: 1777506 - DNA, 25 bp, Homo sapien
agtgtgccgcgttcccagtgatgag

SEQ ID NO: 1777507 - DNA, 25 bp, Homo sapien
ttttatttcataagctctccaggga

SEQ ID NO: 1777508 - DNA, 25 bp, Homo sapien
tttttatttcataagctctccaggg

SEQ ID NO: 1777509 - DNA, 25 bp, Homo sapien
ctccaggagtacttccatgtttcca

SEQ ID NO: 1777510 - DNA, 25 bp, Homo sapien
tagagccaggaggtcacccctgttc

SEQ ID NO: 1777511 - DNA, 25 bp, Homo sapien
cgcgcacattgtgtgagcagccaga

SEQ ID NO: 1777512 - DNA, 25 bp, Homo sapien
cctgttcgagtcactgctgacctct

SEQ ID NO: 1777513 - DNA, 25 bp, Homo sapien
ggaaggatccatgcgatttgaagtt

SEQ ID NO: 1777514 - DNA, 25 bp, Homo sapien
tctggaaggatccatgcgatttgaa

SEQ ID NO: 1777515 - DNA, 25 bp, Homo sapien
taaaggcctagtgaagccagagtcc

SEQ ID NO: 1777516 - DNA, 25 bp, Homo sapien
ggatccatgcgatttgaagttatta

SEQ ID NO: 1777517 - DNA, 25 bp, Homo sapien
gaaacaagggtattcataatgccaa

SEQ ID NO: 1777518 - DNA, 25 bp, Homo sapien
tatcccgaggagtgctgtctgaaat

SEQ ID NO: 1777519 - DNA, 25 bp, Homo sapien
cattgcacttagtttgtaccaggcc

SEQ ID NO: 1777520 - DNA, 25 bp, Homo sapien
taatgccaatgaatcacccagaaga

SEQ ID NO: 1777521 - DNA, 25 bp, Homo sapien
catccaagtaccagccaggtccgat

SEQ ID NO: 1777522 - DNA, 25 bp, Homo sapien
agtaccagccaggtccgatcctgct

SEQ ID NO: 1777523 - DNA, 25 bp, Homo sapien
aagtaccagccaggtccgatcctgc

SEQ ID NO: 1777524 - DNA, 25 bp, Homo sapien
ccaagtaccagccaggtccgatcct

SEQ ID NO: 1777525 - DNA, 25 bp, Homo sapien
ttcgctctggatctattctcctgga

SEQ ID NO: 1777526 - DNA, 25 bp, Homo sapien
tcgctctggatctattctcctggaa

SEQ ID NO: 1777527 - DNA, 25 bp, Homo sapien
gttcgctctggatctattctcctgg

SEQ ID NO: 1777528 - DNA, 25 bp, Homo sapien
gttcatgggaaactcaatctgggtg

SEQ ID NO: 1777529 - DNA, 25 bp, Homo sapien
catgcctgggtgaacatgctttcca

SEQ ID NO: 1777530 - DNA, 25 bp, Homo sapien
tccctcaggagaacgagtcatgttc

SEQ ID NO: 1777531 - DNA, 25 bp, Homo sapien
agagtcccagcctgaagtacaccgg

SEQ ID NO: 1777532 - DNA, 25 bp, Homo sapien
tgcattcactgggtcggtccagcca

SEQ ID NO: 1777533 - DNA, 25 bp, Homo sapien
gagcaagcaaacatcgtaaactctg

SEQ ID NO: 1777534 - DNA, 25 bp, Homo sapien
taaactctgtccttaattgggcctg

SEQ ID NO: 1777535 - DNA, 25 bp, Homo sapien
taaagaagggacacgttgaagccag

SEQ ID NO: 1777536 - DNA, 25 bp, Homo sapien
tctatgagcatgctttgaaacatgc

SEQ ID NO: 1777537 - DNA, 25 bp, Homo sapien
ccaaggttggccctctctatgagca

SEQ ID NO: 1777538 - DNA, 25 bp, Homo sapien
caaggttggccctctctatgagcat

SEQ ID NO: 1777539 - DNA, 25 bp, Homo sapien
ctctctatgagcatgctttgaaaca

SEQ ID NO: 1777540 - DNA, 25 bp, Homo sapien
tgcccttcatctaggtcacatagag

SEQ ID NO: 1777541 - DNA, 25 bp, Homo sapien
gaccctggtcatttcgtgctccatt

SEQ ID NO: 1777542 - DNA, 25 bp, Homo sapien
tcatttcgtgctccatttagccttc

SEQ ID NO: 1777543 - DNA, 25 bp, Homo sapien
ttccctgcccttcatctaggtcaca

SEQ ID NO: 1777544 - DNA, 25 bp, Homo sapien
aaacaccattgcacttggaccggct

SEQ ID NO: 1777545 - DNA, 25 bp, Homo sapien
aaggctagttaggtgaagcagcggg

SEQ ID NO: 1777546 - DNA, 25 bp, Homo sapien
gtaaacaccattgcacttggaccgg

SEQ ID NO: 1777547 - DNA, 25 bp, Homo sapien
ggctagttaggtgaagcagcgggag

SEQ ID NO: 1777548 - DNA, 25 bp, Homo sapien
caagaacttttattgcagagtatgg

SEQ ID NO: 1777549 - DNA, 25 bp, Homo sapien
gggagcattaggacaggaggatctt

SEQ ID NO: 1777550 - DNA, 25 bp, Homo sapien
gcattaggacaggaggatctttgtg

SEQ ID NO: 1777551 - DNA, 25 bp, Homo sapien
attgcagagtatggagggagcatta

SEQ ID NO: 1777552 - DNA, 25 bp, Homo sapien
ctggcaaactgcacagtgatgctgg

SEQ ID NO: 1777553 - DNA, 25 bp, Homo sapien
tctggcaaactgcacagtgatgctg

SEQ ID NO: 1777554 - DNA, 25 bp, Homo sapien
tttctctggcaaactgcacagtgat

SEQ ID NO: 1777555 - DNA, 25 bp, Homo sapien
tctctggcaaactgcacagtgatgc

SEQ ID NO: 1777556 - DNA, 25 bp, Homo sapien
ctaacctgggtctatcagttgctgg

SEQ ID NO: 1777557 - DNA, 25 bp, Homo sapien
taccaagataactggcaggcagctt

SEQ ID NO: 1777558 - DNA, 25 bp, Homo sapien
tatcaagtcattgaatgccccaggg

SEQ ID NO: 1777559 - DNA, 25 bp, Homo sapien
tgctggagacaggatcagacatctc

SEQ ID NO: 1777560 - DNA, 25 bp, Homo sapien
tagattctccatcccgctcagtctt

SEQ ID NO: 1777561 - DNA, 25 bp, Homo sapien
ggagaggttgctgcagtagctggtg

SEQ ID NO: 1777562 - DNA, 25 bp, Homo sapien
gtgaagaactgagccccgctagatt

SEQ ID NO: 1777563 - DNA, 25 bp, Homo sapien
ctggtgctgcagaatgcgcgagtga

SEQ ID NO: 1777564 - DNA, 25 bp, Homo sapien
ccttctcccgctcggtaagagccac

SEQ ID NO: 1777565 - DNA, 25 bp, Homo sapien
ggtcctgcagcggtgatgcatatgt

SEQ ID NO: 1777566 - DNA, 25 bp, Homo sapien
tatgtttcggagcaatgatggaagg

SEQ ID NO: 1777567 - DNA, 25 bp, Homo sapien
cggagattggccgtatcccaccgtc

SEQ ID NO: 1777568 - DNA, 25 bp, Homo sapien
gatctagcatagaccaagtgacagt

SEQ ID NO: 1777569 - DNA, 25 bp, Homo sapien
atgcactggaccttccataggatct

SEQ ID NO: 1777570 - DNA, 25 bp, Homo sapien
ggaccttccataggatctagcatag

SEQ ID NO: 1777571 - DNA, 25 bp, Homo sapien
tccataggatctagcatagaccaag

SEQ ID NO: 1777572 - DNA, 25 bp, Homo sapien
tgttgtagtgttctaaagctctcca

SEQ ID NO: 1777573 - DNA, 25 bp, Homo sapien
gaagattatgcagtttgagtctcaa

SEQ ID NO: 1777574 - DNA, 25 bp, Homo sapien
tcaatgaaatcatgacgcagaagat

SEQ ID NO: 1777575 - DNA, 25 bp, Homo sapien
gagtctcaagatgtaaaaggtctga

SEQ ID NO: 1777576 - DNA, 25 bp, Homo sapien
ttaataggctgctcaaaatggcgtg

SEQ ID NO: 1777577 - DNA, 25 bp, Homo sapien
ccagctgttttaagctaagcgcttg

SEQ ID NO: 1777578 - DNA, 25 bp, Homo sapien
taagcgcttgaccttgctcactacc

SEQ ID NO: 1777579 - DNA, 25 bp, Homo sapien
ttgctccgcaaaatctccccaagga

SEQ ID NO: 1777580 - DNA, 25 bp, Homo sapien
tccatggcttgttagctagtgtgcg

SEQ ID NO: 1777581 - DNA, 25 bp, Homo sapien
ggctgacaaattgccccagggctcc

SEQ ID NO: 1777582 - DNA, 25 bp, Homo sapien
tattgaaattcacagggcctccagc

SEQ ID NO: 1777583 - DNA, 25 bp, Homo sapien
tgagcacctgaaccatgatgttgat

SEQ ID NO: 1777584 - DNA, 25 bp, Homo sapien
tccatttctagagccatttcaccag

SEQ ID NO: 1777585 - DNA, 25 bp, Homo sapien
tttggatcggccacagaaattacat

SEQ ID NO: 1777586 - DNA, 25 bp, Homo sapien
acaaatcaggaggttgaaagatttg

SEQ ID NO: 1777587 - DNA, 25 bp, Homo sapien
tttctagagccatttcaccagctgc

SEQ ID NO: 1777588 - DNA, 25 bp, Homo sapien
tgctaagagtctgacatataccagc

SEQ ID NO: 1777589 - DNA, 25 bp, Homo sapien
caatggcaggattcttagtagggct

SEQ ID NO: 1777590 - DNA, 25 bp, Homo sapien
tgtcatggagaaagacccaataggg

SEQ ID NO: 1777591 - DNA, 25 bp, Homo sapien
gtagggctagcaagcaccacttaca

SEQ ID NO: 1777592 - DNA, 25 bp, Homo sapien
aaatgtgagtgtacaaaatccaacc

SEQ ID NO: 1777593 - DNA, 25 bp, Homo sapien
ttatgcatccctgacagtgaaaaag

SEQ ID NO: 1777594 - DNA, 25 bp, Homo sapien
ggtacgacgacccagttggcttaga

SEQ ID NO: 1777595 - DNA, 25 bp, Homo sapien
taactttgaatctaaggtacgacga

SEQ ID NO: 1777596 - DNA, 25 bp, Homo sapien
cagatgccacgctaagactaagagt

SEQ ID NO: 1777597 - DNA, 25 bp, Homo sapien
gctgcttttcttgctaagcacaagg

SEQ ID NO: 1777598 - DNA, 25 bp, Homo sapien
gagtgagtccactatcagctgtctc

SEQ ID NO: 1777599 - DNA, 25 bp, Homo sapien
aaggatatctctctgcttgcctgaa

SEQ ID NO: 1777600 - DNA, 25 bp, Homo sapien
cccgggttgcagctgcaatgttcac

SEQ ID NO: 1777601 - DNA, 25 bp, Homo sapien
ctcccgggttgcagctgcaatgttc

SEQ ID NO: 1777602 - DNA, 25 bp, Homo sapien
tgtgcatgggggtcaagttgcagga

SEQ ID NO: 1777603 - DNA, 25 bp, Homo sapien
gcatgggggtcaagttgcaggactg

SEQ ID NO: 1777604 - DNA, 25 bp, Homo sapien
aatgcaggtgactgggcatgctgct

SEQ ID NO: 1777605 - DNA, 25 bp, Homo sapien
gcaatgcaggtgactgggcatgctg

SEQ ID NO: 1777606 - DNA, 25 bp, Homo sapien
attaggcaatgcaggtgactgggca

SEQ ID NO: 1777607 - DNA, 25 bp, Homo sapien
tgactgggcatgctgctgaccccat

SEQ ID NO: 1777608 - DNA, 25 bp, Homo sapien
ctggagatgacttcaaagcaacttg

SEQ ID NO: 1777609 - DNA, 25 bp, Homo sapien
cttcaaagcaacttgaacgctgtct

SEQ ID NO: 1777610 - DNA, 25 bp, Homo sapien
gcaacttgaacgctgtctgcatagc

SEQ ID NO: 1777611 - DNA, 25 bp, Homo sapien
gaacgctgtctgcatagcttcctcc

SEQ ID NO: 1777612 - DNA, 25 bp, Homo sapien
tagtgattggcacctgaccaatgaa

SEQ ID NO: 1777613 - DNA, 25 bp, Homo sapien
agtgattggcacctgaccaatgaat

SEQ ID NO: 1777614 - DNA, 25 bp, Homo sapien
cattagtgattggcacctgaccaat

SEQ ID NO: 1777615 - DNA, 25 bp, Homo sapien
ttagtgattggcacctgaccaatga

SEQ ID NO: 1777616 - DNA, 25 bp, Homo sapien
gctctcccgctgtgtcacagtgtga

SEQ ID NO: 1777617 - DNA, 25 bp, Homo sapien
cagtgtgaggcgtgtgcaccactgc

SEQ ID NO: 1777618 - DNA, 25 bp, Homo sapien
gagcaggaagagtgcagtcattcca

SEQ ID NO: 1777619 - DNA, 25 bp, Homo sapien
cattccaacagctgtcgctctgggc

SEQ ID NO: 1777620 - DNA, 25 bp, Homo sapien
agtcaaggaggcattgttcagccgc

SEQ ID NO: 1777621 - DNA, 25 bp, Homo sapien
tcaaggaggcattgttcagccgcat

SEQ ID NO: 1777622 - DNA, 25 bp, Homo sapien
ctgaagtcaaggaggcattgttcag

SEQ ID NO: 1777623 - DNA, 25 bp, Homo sapien
gaagtcaaggaggcattgttcagcc

SEQ ID NO: 1777624 - DNA, 25 bp, Homo sapien
cctgacttgaagctcatgaaagtag

SEQ ID NO: 1777625 - DNA, 25 bp, Homo sapien
ctgacttgaagctcatgaaagtagt

SEQ ID NO: 1777626 - DNA, 25 bp, Homo sapien
tgaagctcatgaaagtagtttttat

SEQ ID NO: 1777627 - DNA, 25 bp, Homo sapien
agctcatgaaagtagtttttatatc

SEQ ID NO: 1777628 - DNA, 25 bp, Homo sapien
tctgctacaggctggtttgggtgcc

SEQ ID NO: 1777629 - DNA, 25 bp, Homo sapien
tttgggtgcctgagttagaagtgtt

SEQ ID NO: 1777630 - DNA, 25 bp, Homo sapien
ttctgctacaggctggtttgggtgc

SEQ ID NO: 1777631 - DNA, 25 bp, Homo sapien
ttaaaagggcacagaaaacagatct

SEQ ID NO: 1777632 - DNA, 25 bp, Homo sapien
acaatagcgacatctctgctgctgc

SEQ ID NO: 1777633 - DNA, 25 bp, Homo sapien
cacaatagcgacatctctgctgctg

SEQ ID NO: 1777634 - DNA, 25 bp, Homo sapien
aagaagctaaagtcaggaacaccag

SEQ ID NO: 1777635 - DNA, 25 bp, Homo sapien
tgaggtgtcttgtttgccatcgacc

SEQ ID NO: 1777636 - DNA, 25 bp, Homo sapien
catcgaccacctgtgctatgtgcac

SEQ ID NO: 1777637 - DNA, 25 bp, Homo sapien
tgtccagactgtatgcccttagaag

SEQ ID NO: 1777638 - DNA, 25 bp, Homo sapien
ctgaaaatctgaccccaatcaactt

SEQ ID NO: 1777639 - DNA, 25 bp, Homo sapien
atctgaccccaatcaactttcaaaa

SEQ ID NO: 1777640 - DNA, 25 bp, Homo sapien
cagctgaaaatctgaccccaatcaa

SEQ ID NO: 1777641 - DNA, 25 bp, Homo sapien
actttcaaaaatgcactgatatatt

SEQ ID NO: 1777642 - DNA, 25 bp, Homo sapien
gtcttcatacgctttcctgacagca

SEQ ID NO: 1777643 - DNA, 25 bp, Homo sapien
tggctgtgtgcactctagcagggta

SEQ ID NO: 1777644 - DNA, 25 bp, Homo sapien
ctagcagggtagaagtagtggtctt

SEQ ID NO: 1777645 - DNA, 25 bp, Homo sapien
catcatctggatatgcagtcctcag

SEQ ID NO: 1777646 - DNA, 25 bp, Homo sapien
caacaattcaggtgaatagggaatg

SEQ ID NO: 1777647 - DNA, 25 bp, Homo sapien
ggagctcagggactctaaaagtctt

SEQ ID NO: 1777648 - DNA, 25 bp, Homo sapien
gaagatccatgtcagggcaggtcct

SEQ ID NO: 1777649 - DNA, 25 bp, Homo sapien
gtcttattctggtcctggcaacaat

SEQ ID NO: 1777650 - DNA, 25 bp, Homo sapien
tcctgacatatctagggaaagccac

SEQ ID NO: 1777651 - DNA, 25 bp, Homo sapien
tacctagtaatttcccgagcaagag

SEQ ID NO: 1777652 - DNA, 25 bp, Homo sapien
tggtctccacatctaggtactaagt

SEQ ID NO: 1777653 - DNA, 25 bp, Homo sapien
tcaaagtgtttggactgctcctgcc

SEQ ID NO: 1777654 - DNA, 25 bp, Homo sapien
ttgaaacatcttccaggtacggagt

SEQ ID NO: 1777655 - DNA, 25 bp, Homo sapien
tccaggtacggagtcttagtccacc

SEQ ID NO: 1777656 - DNA, 25 bp, Homo sapien
ctgcccttctctcacgattgaaaca

SEQ ID NO: 1777657 - DNA, 25 bp, Homo sapien
gcccttctctcacgattgaaacatc

SEQ ID NO: 1777658 - DNA, 25 bp, Homo sapien
tgaatagctgcagcatatggttgta

SEQ ID NO: 1777659 - DNA, 25 bp, Homo sapien
tagctgcagcatatggttgtaggag

SEQ ID NO: 1777660 - DNA, 25 bp, Homo sapien
aatagctgcagcatatggttgtagg

SEQ ID NO: 1777661 - DNA, 25 bp, Homo sapien
gagtggttggggtccacacacttta

SEQ ID NO: 1777662 - DNA, 25 bp, Homo sapien
tccaagaagtctccagacataggac

SEQ ID NO: 1777663 - DNA, 25 bp, Homo sapien
caagaagtctccagacataggacaa

SEQ ID NO: 1777664 - DNA, 25 bp, Homo sapien
gaagtctccagacataggacaaagg

SEQ ID NO: 1777665 - DNA, 25 bp, Homo sapien
agaagtctccagacataggacaaag

SEQ ID NO: 1777666 - DNA, 25 bp, Homo sapien
cttggccacacggccaagctggcag

SEQ ID NO: 1777667 - DNA, 25 bp, Homo sapien
gttccccgaagccagtctattcatg

SEQ ID NO: 1777668 - DNA, 25 bp, Homo sapien
ccgaagccagtctattcatgcccat

SEQ ID NO: 1777669 - DNA, 25 bp, Homo sapien
ccccgaagccagtctattcatgccc

SEQ ID NO: 1777670 - DNA, 25 bp, Homo sapien
cctcttcaggcttaatgtttctaca

SEQ ID NO: 1777671 - DNA, 25 bp, Homo sapien
aattcaacgtcgtcgcctcttcagg

SEQ ID NO: 1777672 - DNA, 25 bp, Homo sapien
gagctctagctctgccttggcttgc

SEQ ID NO: 1777673 - DNA, 25 bp, Homo sapien
tgcattttagaattcaacgtcgtcg

SEQ ID NO: 1777674 - DNA, 25 bp, Homo sapien
ccaacaccccacgtgcaggaccaca

SEQ ID NO: 1777675 - DNA, 25 bp, Homo sapien
cacctttgcccctgctggactttga

SEQ ID NO: 1777676 - DNA, 25 bp, Homo sapien
ggactttgacttctgggcacacccg

SEQ ID NO: 1777677 - DNA, 25 bp, Homo sapien
acacccggagcagccagacagcttg

SEQ ID NO: 1777678 - DNA, 25 bp, Homo sapien
tatttgttgccagcaaacagcgacg

SEQ ID NO: 1777679 - DNA, 25 bp, Homo sapien
tgcagggcatgatcagtcaggcccc

SEQ ID NO: 1777680 - DNA, 25 bp, Homo sapien
tgtaaagttgtagatggcactgcct

SEQ ID NO: 1777681 - DNA, 25 bp, Homo sapien
gacttgtccagttcctagcctttta

SEQ ID NO: 1777682 - DNA, 25 bp, Homo sapien
gcagcacacccctggcacattctgt

SEQ ID NO: 1777683 - DNA, 25 bp, Homo sapien
gagcccatcttaaccagagatggca

SEQ ID NO: 1777684 - DNA, 25 bp, Homo sapien
gtcctagagggtgagcccatcttaa

SEQ ID NO: 1777685 - DNA, 25 bp, Homo sapien
gcactcttggtggtccgaggactca

SEQ ID NO: 1777686 - DNA, 25 bp, Homo sapien
cagatgggtacttgtgaagaacttc

SEQ ID NO: 1777687 - DNA, 25 bp, Homo sapien
tgaagaaggcgttgggacacagatt

SEQ ID NO: 1777688 - DNA, 25 bp, Homo sapien
taagaaagttaggatccctgccacg

SEQ ID NO: 1777689 - DNA, 25 bp, Homo sapien
cattggaaactaattccacagggaa

SEQ ID NO: 1777690 - DNA, 25 bp, Homo sapien
ggtcactaacgtgggaataacttga

SEQ ID NO: 1777691 - DNA, 25 bp, Homo sapien
gagaatgcatttaagtagccaaaga

SEQ ID NO: 1777692 - DNA, 25 bp, Homo sapien
ctgagttcagagcatcccagatgga

SEQ ID NO: 1777693 - DNA, 25 bp, Homo sapien
acgatctcctttacctgactcagag

SEQ ID NO: 1777694 - DNA, 25 bp, Homo sapien
tctgatagtcgaactgaatgaagcc

SEQ ID NO: 1777695 - DNA, 25 bp, Homo sapien
tacacaacacttccaggtgggcaga

SEQ ID NO: 1777696 - DNA, 25 bp, Homo sapien
gcactgtgaagaatctgatagtcga

SEQ ID NO: 1777697 - DNA, 25 bp, Homo sapien
gaagccaagtccagtctttacggaa

SEQ ID NO: 1777698 - DNA, 25 bp, Homo sapien
agtttagtgcctccaagaaccacag

SEQ ID NO: 1777699 - DNA, 25 bp, Homo sapien
gggctcaggagcaacagccttcatg

SEQ ID NO: 1777700 - DNA, 25 bp, Homo sapien
agccttcatggtgcccaccctctgg

SEQ ID NO: 1777701 - DNA, 25 bp, Homo sapien
agaacaacggatgccccacaactga

SEQ ID NO: 1777702 - DNA, 25 bp, Homo sapien
tcactcgggcctctgatattgtaac

SEQ ID NO: 1777703 - DNA, 25 bp, Homo sapien
tgtaactgtgggcctttaagaaaca

SEQ ID NO: 1777704 - DNA, 25 bp, Homo sapien
gcctctgatattgtaactgtgggcc

SEQ ID NO: 1777705 - DNA, 25 bp, Homo sapien
tcgggcctctgatattgtaactgtg

SEQ ID NO: 1777706 - DNA, 25 bp, Homo sapien
tcccaccctcttgctgattggccat

SEQ ID NO: 1777707 - DNA, 25 bp, Homo sapien
gcatttcccaccctcttgctgattg

SEQ ID NO: 1777708 - DNA, 25 bp, Homo sapien
ctgcatttcccaccctcttgctgat

SEQ ID NO: 1777709 - DNA, 25 bp, Homo sapien
atttcccaccctcttgctgattggc

SEQ ID NO: 1777710 - DNA, 25 bp, Homo sapien
tgaacattgtgtttcaaagcccgct

SEQ ID NO: 1777711 - DNA, 25 bp, Homo sapien
gagatcttatcgagccttcctgtgc

SEQ ID NO: 1777712 - DNA, 25 bp, Homo sapien
ggaacatcccacttgagtctgctga

SEQ ID NO: 1777713 - DNA, 25 bp, Homo sapien
tcctcttgctcggtaagagctgcag

SEQ ID NO: 1777714 - DNA, 25 bp, Homo sapien
tacccccatttgtgtcctgtggcat

SEQ ID NO: 1777715 - DNA, 25 bp, Homo sapien
agtacccccatttgtgtcctgtggc

SEQ ID NO: 1777716 - DNA, 25 bp, Homo sapien
cagtacccccatttgtgtcctgtgg

SEQ ID NO: 1777717 - DNA, 25 bp, Homo sapien
gtacccccatttgtgtcctgtggca

SEQ ID NO: 1777718 - DNA, 25 bp, Homo sapien
actttgtctctgtactaactccttg

SEQ ID NO: 1777719 - DNA, 25 bp, Homo sapien
gtctctgtactaactccttgtactg

SEQ ID NO: 1777720 - DNA, 25 bp, Homo sapien
ttaactttgtctctgtactaactcc

SEQ ID NO: 1777721 - DNA, 25 bp, Homo sapien
tctttatgaggttcaagggtcttta

SEQ ID NO: 1777722 - DNA, 25 bp, Homo sapien
gtcttctgctgggtacttcaatatt

SEQ ID NO: 1777723 - DNA, 25 bp, Homo sapien
gttcctggatgagtgccttcccgtt

SEQ ID NO: 1777724 - DNA, 25 bp, Homo sapien
tctgcagtatcttttatgagttcct

SEQ ID NO: 1777725 - DNA, 25 bp, Homo sapien
tacaaagttgtagatgctcgtggac

SEQ ID NO: 1777726 - DNA, 25 bp, Homo sapien
atgcagctgacttcttctatacagg

SEQ ID NO: 1777727 - DNA, 25 bp, Homo sapien
ggaacgtagcttcttcgctattgta

SEQ ID NO: 1777728 - DNA, 25 bp, Homo sapien
tccaggagggaacgtagcttcttcg

SEQ ID NO: 1777729 - DNA, 25 bp, Homo sapien
cgctattgtatgcatgcagctgact

SEQ ID NO: 1777730 - DNA, 25 bp, Homo sapien
catgaagcggcttattagtgatggc

SEQ ID NO: 1777731 - DNA, 25 bp, Homo sapien
ccttagggacagttattgagtctaa

SEQ ID NO: 1777732 - DNA, 25 bp, Homo sapien
tcattgtgcctagaaccttagggac

SEQ ID NO: 1777733 - DNA, 25 bp, Homo sapien
aatgacactccattccatgaagcgg

SEQ ID NO: 1777734 - DNA, 25 bp, Homo sapien
tgtcttctcagataccgcaaacctg

SEQ ID NO: 1777735 - DNA, 25 bp, Homo sapien
ctcagataccgcaaacctgtctggg

SEQ ID NO: 1777736 - DNA, 25 bp, Homo sapien
tccctctcttgggttagttacacca

SEQ ID NO: 1777737 - DNA, 25 bp, Homo sapien
ctctcttgggttagttacaccaagg

SEQ ID NO: 1777738 - DNA, 25 bp, Homo sapien
caacctgtttagctgagcagggtcc

SEQ ID NO: 1777739 - DNA, 25 bp, Homo sapien
ggaccacttggtactttagaagaca

SEQ ID NO: 1777740 - DNA, 25 bp, Homo sapien
taagtgacactcgaagcaacctgtt

SEQ ID NO: 1777741 - DNA, 25 bp, Homo sapien
gggctcttttgggtgaacttgctca

SEQ ID NO: 1777742 - DNA, 25 bp, Homo sapien
tatcattagaatcccttgggcttcc

SEQ ID NO: 1777743 - DNA, 25 bp, Homo sapien
tatccctaagtggagtgcctttcca

SEQ ID NO: 1777744 - DNA, 25 bp, Homo sapien
tgcaggcacagttcagaggagccct

SEQ ID NO: 1777745 - DNA, 25 bp, Homo sapien
catctagatccactgcgctgcaggc

SEQ ID NO: 1777746 - DNA, 25 bp, Homo sapien
ttcgagttgtgacatcagtgcttat

SEQ ID NO: 1777747 - DNA, 25 bp, Homo sapien
aacgtccactatacgagctttgatc

SEQ ID NO: 1777748 - DNA, 25 bp, Homo sapien
tgttagtattacaacgtccactata

SEQ ID NO: 1777749 - DNA, 25 bp, Homo sapien
gttgtgacatcagtgcttattgcac

SEQ ID NO: 1777750 - DNA, 25 bp, Homo sapien
tgctccagtcgtgggcctgggacac

SEQ ID NO: 1777751 - DNA, 25 bp, Homo sapien
cccttgctccagtcgtgggcctggg

SEQ ID NO: 1777752 - DNA, 25 bp, Homo sapien
ggtaggatccatggccccttggtga

SEQ ID NO: 1777753 - DNA, 25 bp, Homo sapien
ttctcatgtgcaggcgtctgagctg

SEQ ID NO: 1777754 - DNA, 25 bp, Homo sapien
cgggtggcgcttctctccggacagt

SEQ ID NO: 1777755 - DNA, 25 bp, Homo sapien
ttctcttcgggtggcgcttctctcc

SEQ ID NO: 1777756 - DNA, 25 bp, Homo sapien
acagagcttctcttcgggtggcgct

SEQ ID NO: 1777757 - DNA, 25 bp, Homo sapien
gcttctcttcgggtggcgcttctct

SEQ ID NO: 1777758 - DNA, 25 bp, Homo sapien
tgatggattgaagccgccccacaag

SEQ ID NO: 1777759 - DNA, 25 bp, Homo sapien
aggcgggctgcaaagtgcccgaagc

SEQ ID NO: 1777760 - DNA, 25 bp, Homo sapien
gggctgcaaagtgcccgaagctatg

SEQ ID NO: 1777761 - DNA, 25 bp, Homo sapien
ctgatggattgaagccgccccacaa

SEQ ID NO: 1777762 - DNA, 25 bp, Homo sapien
gagactggatgttcttggcacctgg

SEQ ID NO: 1777763 - DNA, 25 bp, Homo sapien
taaggatgtgatttccccactgtgg

SEQ ID NO: 1777764 - DNA, 25 bp, Homo sapien
gattccttcggccttcagagcatgt

SEQ ID NO: 1777765 - DNA, 25 bp, Homo sapien
taccctaaggcttgactcagaggtg

SEQ ID NO: 1777766 - DNA, 25 bp, Homo sapien
caatattgctctagcatagccacca

SEQ ID NO: 1777767 - DNA, 25 bp, Homo sapien
ccttctgatgagagcttgggtgaca

SEQ ID NO: 1777768 - DNA, 25 bp, Homo sapien
taacagacccttctgatgagagctt

SEQ ID NO: 1777769 - DNA, 25 bp, Homo sapien
gcttgggtgacaatattgctctagc

SEQ ID NO: 1777770 - DNA, 25 bp, Homo sapien
taagttgccacgatcctaggttcag

SEQ ID NO: 1777771 - DNA, 25 bp, Homo sapien
taaccgaggtgcaggacagcactgt

SEQ ID NO: 1777772 - DNA, 25 bp, Homo sapien
gaacgctatctgtcctttcgaccat

SEQ ID NO: 1777773 - DNA, 25 bp, Homo sapien
tgtggccatgaagtcaagagtaacc

SEQ ID NO: 1777774 - DNA, 25 bp, Homo sapien
cttcatcctgcacatcttaaaatta

SEQ ID NO: 1777775 - DNA, 25 bp, Homo sapien
agtcctttgactaccctggctcttt

SEQ ID NO: 1777776 - DNA, 25 bp, Homo sapien
catcttaaaattaacgagcagtcct

SEQ ID NO: 1777777 - DNA, 25 bp, Homo sapien
taacgagcagtcctttgactaccct

SEQ ID NO: 1777778 - DNA, 25 bp, Homo sapien
aaccaaataattagcagatgtcacc

SEQ ID NO: 1777779 - DNA, 25 bp, Homo sapien
gccagtcacgagtcaaaccaaataa

SEQ ID NO: 1777780 - DNA, 25 bp, Homo sapien
tgattgatgcagatggaagtctcat

SEQ ID NO: 1777781 - DNA, 25 bp, Homo sapien
gatgtcaccaatgccgatctgctga

SEQ ID NO: 1777782 - DNA, 25 bp, Homo sapien
caggcttgcctgctactgcggctgt

SEQ ID NO: 1777783 - DNA, 25 bp, Homo sapien
gacagtagtcaagctgtaacttgta

SEQ ID NO: 1777784 - DNA, 25 bp, Homo sapien
gaggaaaaccaggatctgtgatcag

SEQ ID NO: 1777785 - DNA, 25 bp, Homo sapien
aggcaagggttccagatctgtctgt

SEQ ID NO: 1777786 - DNA, 25 bp, Homo sapien
tctaagccttcattagcatggagct

SEQ ID NO: 1777787 - DNA, 25 bp, Homo sapien
tctgggtggactcaggtttgcctgc

SEQ ID NO: 1777788 - DNA, 25 bp, Homo sapien
caacctgtaccctatactttctggg

SEQ ID NO: 1777789 - DNA, 25 bp, Homo sapien
aatctgtgtatggtggacacactca

SEQ ID NO: 1777790 - DNA, 25 bp, Homo sapien
tccttgaggaatcagtggtgctctt

SEQ ID NO: 1777791 - DNA, 25 bp, Homo sapien
gtcaatctttcatgctttccttgag

SEQ ID NO: 1777792 - DNA, 25 bp, Homo sapien
tggtgctctttgaagaacagatccc

SEQ ID NO: 1777793 - DNA, 25 bp, Homo sapien
tctgatgcccatgatgtcaatcttt

SEQ ID NO: 1777794 - DNA, 25 bp, Homo sapien
tgtggctctcagcaccaatactctt

SEQ ID NO: 1777795 - DNA, 25 bp, Homo sapien
aggtatgcaactacacttcatgtaa

SEQ ID NO: 1777796 - DNA, 25 bp, Homo sapien
tactcttccacgcataggtatgcaa

SEQ ID NO: 1777797 - DNA, 25 bp, Homo sapien
agcaccaatactcttccacgcatag

SEQ ID NO: 1777798 - DNA, 25 bp, Homo sapien
cattcatcactcatccggtgacagg

SEQ ID NO: 1777799 - DNA, 25 bp, Homo sapien
catcaaaacccgtggtgaggattta

SEQ ID NO: 1777800 - DNA, 25 bp, Homo sapien
gcatattttctaacagaggccacag

SEQ ID NO: 1777801 - DNA, 25 bp, Homo sapien
gtgacaggcctgttgtactctccag

SEQ ID NO: 1777802 - DNA, 25 bp, Homo sapien
gtgctactggtctaaatattctctc

SEQ ID NO: 1777803 - DNA, 25 bp, Homo sapien
tcccttgtgctactggtctaaatat

SEQ ID NO: 1777804 - DNA, 25 bp, Homo sapien
gtgagccttggtatcatctgatgag

SEQ ID NO: 1777805 - DNA, 25 bp, Homo sapien
aaatcagcattcttgtgtgagcctt

SEQ ID NO: 1777806 - DNA, 25 bp, Homo sapien
cctcctgtgggaagcactggtaagg

SEQ ID NO: 1777807 - DNA, 25 bp, Homo sapien
aatcagatgagccttgcctcctgtg

SEQ ID NO: 1777808 - DNA, 25 bp, Homo sapien
ccatgaggaaatatgtcccagtaaa

SEQ ID NO: 1777809 - DNA, 25 bp, Homo sapien
gggcgacttctcatatctgacaaac

SEQ ID NO: 1777810 - DNA, 25 bp, Homo sapien
tcataacacgaaggccacctcagag

SEQ ID NO: 1777811 - DNA, 25 bp, Homo sapien
cataacacgaaggccacctcagagg

SEQ ID NO: 1777812 - DNA, 25 bp, Homo sapien
taacacgaaggccacctcagaggct

SEQ ID NO: 1777813 - DNA, 25 bp, Homo sapien
ataacacgaaggccacctcagaggc

SEQ ID NO: 1777814 - DNA, 25 bp, Homo sapien
aattcacctgctacaaacctttgtg

SEQ ID NO: 1777815 - DNA, 25 bp, Homo sapien
ctaccttaagacagtcaaaattact

SEQ ID NO: 1777816 - DNA, 25 bp, Homo sapien
cactggcggaaattgtattatgtca

SEQ ID NO: 1777817 - DNA, 25 bp, Homo sapien
tgactctgctaagcccattctcttg

SEQ ID NO: 1777818 - DNA, 25 bp, Homo sapien
tgtaccatgtgcacagttggcttag

SEQ ID NO: 1777819 - DNA, 25 bp, Homo sapien
ccatgtgcacagttggcttagtaca

SEQ ID NO: 1777820 - DNA, 25 bp, Homo sapien
cacagttggcttagtacaaattcca

SEQ ID NO: 1777821 - DNA, 25 bp, Homo sapien
ggcttagtacaaattccaaagccat

SEQ ID NO: 1777822 - DNA, 25 bp, Homo sapien
gagaatccagattcccgtcagcagg

SEQ ID NO: 1777823 - DNA, 25 bp, Homo sapien
gaaggctgtaaagtccaggaaatgg

SEQ ID NO: 1777824 - DNA, 25 bp, Homo sapien
tgggctgccttattattcatgagtc

SEQ ID NO: 1777825 - DNA, 25 bp, Homo sapien
ctgtgggcgagggagcacatcgggc

SEQ ID NO: 1777826 - DNA, 25 bp, Homo sapien
ctgaatggaaaaatgctgctttggt

SEQ ID NO: 1777827 - DNA, 25 bp, Homo sapien
gaatggaaaaatgctgctttggtca

SEQ ID NO: 1777828 - DNA, 25 bp, Homo sapien
gaaaaatgctgctttggtcagggtc

SEQ ID NO: 1777829 - DNA, 25 bp, Homo sapien
aaatgctgctttggtcagggtctct

SEQ ID NO: 1777830 - DNA, 25 bp, Homo sapien
gccatctggagcaatctcacattca

SEQ ID NO: 1777831 - DNA, 25 bp, Homo sapien
tcagctttgccatctggagcaatct

SEQ ID NO: 1777832 - DNA, 25 bp, Homo sapien
atctggagcaatctcacattcacag

SEQ ID NO: 1777833 - DNA, 25 bp, Homo sapien
gctttgccatctggagcaatctcac

SEQ ID NO: 1777834 - DNA, 25 bp, Homo sapien
gacagatttagaacaggctattgga

SEQ ID NO: 1777835 - DNA, 25 bp, Homo sapien
ctatgtgacagatttagaacaggct

SEQ ID NO: 1777836 - DNA, 25 bp, Homo sapien
acaggctattggatcaaaagccact

SEQ ID NO: 1777837 - DNA, 25 bp, Homo sapien
caggctattggatcaaaagccactg

SEQ ID NO: 1777838 - DNA, 25 bp, Homo sapien
ctggctcctgctatcgggatctgtc

SEQ ID NO: 1777839 - DNA, 25 bp, Homo sapien
ggatctgtcattagtaaaaccccag

SEQ ID NO: 1777840 - DNA, 25 bp, Homo sapien
cctgctatcgggatctgtcattagt

SEQ ID NO: 1777841 - DNA, 25 bp, Homo sapien
tgtcattagtaaaaccccagctcct

SEQ ID NO: 1777842 - DNA, 25 bp, Homo sapien
cccagggcagtgcatgcagccagct

SEQ ID NO: 1777843 - DNA, 25 bp, Homo sapien
cagggcagtgcatgcagccagctct

SEQ ID NO: 1777844 - DNA, 25 bp, Homo sapien
gccccagggcagtgcatgcagccag

SEQ ID NO: 1777845 - DNA, 25 bp, Homo sapien
gggcagtgcatgcagccagctctga

SEQ ID NO: 1777846 - DNA, 25 bp, Homo sapien
ggtcttcttaatcctcagtcgccac

SEQ ID NO: 1777847 - DNA, 25 bp, Homo sapien
acaggactgtgtgctggcaggcaga

SEQ ID NO: 1777848 - DNA, 25 bp, Homo sapien
tcctcagtcgccacaggactgtgtg

SEQ ID NO: 1777849 - DNA, 25 bp, Homo sapien
ctgggttcctggtcttcttaatcct

SEQ ID NO: 1777850 - DNA, 25 bp, Homo sapien
gccacaatgacagaggggtcaacct

SEQ ID NO: 1777851 - DNA, 25 bp, Homo sapien
agaagagcacaagcttaacagcaga

SEQ ID NO: 1777852 - DNA, 25 bp, Homo sapien
caccactgtaaccacagtagcagca

SEQ ID NO: 1777853 - DNA, 25 bp, Homo sapien
cacaagcttaacagcagacaactga

SEQ ID NO: 1777854 - DNA, 25 bp, Homo sapien
caacactggctttctagtggccacc

SEQ ID NO: 1777855 - DNA, 25 bp, Homo sapien
gcctggcgttccgtcagagagcctg

SEQ ID NO: 1777856 - DNA, 25 bp, Homo sapien
tctagtggccaccactaacttctgc

SEQ ID NO: 1777857 - DNA, 25 bp, Homo sapien
cagatgagacctgttggccaggtgt

SEQ ID NO: 1777858 - DNA, 25 bp, Homo sapien
ctgttggctgtcaccatgacaggct

SEQ ID NO: 1777859 - DNA, 25 bp, Homo sapien
accatgacaggctgcttcatgtcac

SEQ ID NO: 1777860 - DNA, 25 bp, Homo sapien
tgttggctgtcaccatgacaggctg

SEQ ID NO: 1777861 - DNA, 25 bp, Homo sapien
gctgttggctgtcaccatgacaggc

SEQ ID NO: 1777862 - DNA, 25 bp, Homo sapien
gaaatgattcttgacattccttcca

SEQ ID NO: 1777863 - DNA, 25 bp, Homo sapien
attccttccaggatcatgggtgagg

SEQ ID NO: 1777864 - DNA, 25 bp, Homo sapien
ccttgggatatctctctagttacag

SEQ ID NO: 1777865 - DNA, 25 bp, Homo sapien
ttaaggagataagcctcgtccttgg

SEQ ID NO: 1777866 - DNA, 25 bp, Homo sapien
tagagtgcaggtgaaaaaggtccat

SEQ ID NO: 1777867 - DNA, 25 bp, Homo sapien
ttttagagtgcaggtgaaaaaggtc

SEQ ID NO: 1777868 - DNA, 25 bp, Homo sapien
ctacacagtagcattttagagtgca

SEQ ID NO: 1777869 - DNA, 25 bp, Homo sapien
tacacagtagcattttagagtgcag

SEQ ID NO: 1777870 - DNA, 25 bp, Homo sapien
ttgccaaatttgtagattcttttac

SEQ ID NO: 1777871 - DNA, 25 bp, Homo sapien
tgccaaatttgtagattcttttact

SEQ ID NO: 1777872 - DNA, 25 bp, Homo sapien
caaatttgtagattcttttactctt

SEQ ID NO: 1777873 - DNA, 25 bp, Homo sapien
gccaaatttgtagattcttttactc

SEQ ID NO: 1777874 - DNA, 25 bp, Homo sapien
caccagcaataaaactgatcttttg

SEQ ID NO: 1777875 - DNA, 25 bp, Homo sapien
ccaccagcaataaaactgatctttt

SEQ ID NO: 1777876 - DNA, 25 bp, Homo sapien
cttttgatccttcattggaatctgg

SEQ ID NO: 1777877 - DNA, 25 bp, Homo sapien
aaactgatcttttgatccttcattg

SEQ ID NO: 1777878 - DNA, 25 bp, Homo sapien
tcagtccattcggtgaggctgcaca

SEQ ID NO: 1777879 - DNA, 25 bp, Homo sapien
gcccctttggcatcaagtctaaata

SEQ ID NO: 1777880 - DNA, 25 bp, Homo sapien
ggaagcccctttggcatcaagtcta

SEQ ID NO: 1777881 - DNA, 25 bp, Homo sapien
agtccattcggtgaggctgcacatt

SEQ ID NO: 1777882 - DNA, 25 bp, Homo sapien
agcaggtcacagttgtgaggtaaag

SEQ ID NO: 1777883 - DNA, 25 bp, Homo sapien
gtcacagttgtgaggtaaaggcctc

SEQ ID NO: 1777884 - DNA, 25 bp, Homo sapien
ggacctcctccaattgtctgcagct

SEQ ID NO: 1777885 - DNA, 25 bp, Homo sapien
ctggacctcctccaattgtctgcag

SEQ ID NO: 1777886 - DNA, 25 bp, Homo sapien
aattgtctgcagctggttctgctcc

SEQ ID NO: 1777887 - DNA, 25 bp, Homo sapien
ttgtctgcagctggttctgctccat

SEQ ID NO: 1777888 - DNA, 25 bp, Homo sapien
aactcagcttgtccccagagcttgt

SEQ ID NO: 1777889 - DNA, 25 bp, Homo sapien
tcagagtcagatctattgtcaattc

SEQ ID NO: 1777890 - DNA, 25 bp, Homo sapien
tggttcccatggctgcaaaacttgg

SEQ ID NO: 1777891 - DNA, 25 bp, Homo sapien
tgtcaattctaaagttatactgatc

SEQ ID NO: 1777892 - DNA, 25 bp, Homo sapien
ggaagagttcagagtcagatctatt

SEQ ID NO: 1777893 - DNA, 25 bp, Homo sapien
ctgactgtctctgatctgagatttg

SEQ ID NO: 1777894 - DNA, 25 bp, Homo sapien
tgtctctgactgtctctgatctgag

SEQ ID NO: 1777895 - DNA, 25 bp, Homo sapien
attgtctctgactgtctctgatctg

SEQ ID NO: 1777896 - DNA, 25 bp, Homo sapien
ctctgactgtctctgatctgagatt

SEQ ID NO: 1777897 - DNA, 25 bp, Homo sapien
tacccagtgttctgtttttcggtca

SEQ ID NO: 1777898 - DNA, 25 bp, Homo sapien
tctgtttttcggtcaagggctctgg

SEQ ID NO: 1777899 - DNA, 25 bp, Homo sapien
tttttcggtcaagggctctggtgtg

SEQ ID NO: 1777900 - DNA, 25 bp, Homo sapien
ctctggtgtgtgagcgtgtaaaggg

SEQ ID NO: 1777901 - DNA, 25 bp, Homo sapien
gttttactatgttcagtgaactgtg

SEQ ID NO: 1777902 - DNA, 25 bp, Homo sapien
taaatctgtggcataattccaaatt

SEQ ID NO: 1777903 - DNA, 25 bp, Homo sapien
catgttctcctaatttagggttgag

SEQ ID NO: 1777904 - DNA, 25 bp, Homo sapien
tcttcatgttctcctaatttagggt

SEQ ID NO: 1777905 - DNA, 25 bp, Homo sapien
tctgccactcagtgggggtctctgc

SEQ ID NO: 1777906 - DNA, 25 bp, Homo sapien
ctgccactcagtgggggtctctgcg

SEQ ID NO: 1777907 - DNA, 25 bp, Homo sapien
tctctgcgcctgctgcttcattcat

SEQ ID NO: 1777908 - DNA, 25 bp, Homo sapien
gggtctctgcgcctgctgcttcatt

SEQ ID NO: 1777909 - DNA, 25 bp, Homo sapien
ggatggccagagtttcttgagacaa

SEQ ID NO: 1777910 - DNA, 25 bp, Homo sapien
gaaacttgccttgttgcctgggtcc

SEQ ID NO: 1777911 - DNA, 25 bp, Homo sapien
aagactttcctaagcgtgccagcta

SEQ ID NO: 1777912 - DNA, 25 bp, Homo sapien
gctaaagcttttaaggtggtagaga

SEQ ID NO: 1777913 - DNA, 25 bp, Homo sapien
caaatatgcggatgccacgtcgtgg

SEQ ID NO: 1777914 - DNA, 25 bp, Homo sapien
gagcctgatattggtgccctccaca

SEQ ID NO: 1777915 - DNA, 25 bp, Homo sapien
ttattgtgaaatcatgctggagtgg

SEQ ID NO: 1777916 - DNA, 25 bp, Homo sapien
ccagcttgtccattgtaggaaggca

SEQ ID NO: 1777917 - DNA, 25 bp, Homo sapien
tgtgtctgacaacgcaggctcttgt

SEQ ID NO: 1777918 - DNA, 25 bp, Homo sapien
aaatcactcttggtcctacttggcc

SEQ ID NO: 1777919 - DNA, 25 bp, Homo sapien
gctgtttcatgtggactgcctgctt

SEQ ID NO: 1777920 - DNA, 25 bp, Homo sapien
cgtgtttctgcgttgtccttggcaa

SEQ ID NO: 1777921 - DNA, 25 bp, Homo sapien
ctgtggcacacttctttagccccat

SEQ ID NO: 1777922 - DNA, 25 bp, Homo sapien
atctgctgatccagaagactggaga

SEQ ID NO: 1777923 - DNA, 25 bp, Homo sapien
gaggccatgggttcgtgagtgtttg

SEQ ID NO: 1777924 - DNA, 25 bp, Homo sapien
gatctgctgatccagaagactggag

SEQ ID NO: 1777925 - DNA, 25 bp, Homo sapien
agcatgaggccatgggttcgtgagt

SEQ ID NO: 1777926 - DNA, 25 bp, Homo sapien
aaattatgataaagatggaagttca

SEQ ID NO: 1777927 - DNA, 25 bp, Homo sapien
gaagtggagaggtaaattatgataa

SEQ ID NO: 1777928 - DNA, 25 bp, Homo sapien
cagagaagtggagaggtaaattatg

SEQ ID NO: 1777929 - DNA, 25 bp, Homo sapien
attatgataaagatggaagttcaga

SEQ ID NO: 1777930 - DNA, 25 bp, Homo sapien
tgctctctcctttgccctcagtgtg

SEQ ID NO: 1777931 - DNA, 25 bp, Homo sapien
tctcctttgccctcagtgtgaccat

SEQ ID NO: 1777932 - DNA, 25 bp, Homo sapien
tctctcctttgccctcagtgtgacc

SEQ ID NO: 1777933 - DNA, 25 bp, Homo sapien
cttatcttgcactgctctctccttt

SEQ ID NO: 1777934 - DNA, 25 bp, Homo sapien
catttttgctcgttacagtcaaggg

SEQ ID NO: 1777935 - DNA, 25 bp, Homo sapien
gaactgtaatccctatgtgccgagg

SEQ ID NO: 1777936 - DNA, 25 bp, Homo sapien
tgtagtcagtggttgtcatcggatg

SEQ ID NO: 1777937 - DNA, 25 bp, Homo sapien
cagagaccctaggttggaaactcct

SEQ ID NO: 1777938 - DNA, 25 bp, Homo sapien
tgtcatttttatctgccccagaata

SEQ ID NO: 1777939 - DNA, 25 bp, Homo sapien
ttttatctgccccagaatacctcat

SEQ ID NO: 1777940 - DNA, 25 bp, Homo sapien
gttgtcatttttatctgccccagaa

SEQ ID NO: 1777941 - DNA, 25 bp, Homo sapien
tcatttttatctgccccagaatacc

SEQ ID NO: 1777942 - DNA, 25 bp, Homo sapien
cactaggtccccttgaataagtcat

SEQ ID NO: 1777943 - DNA, 25 bp, Homo sapien
tgtgctagtttagcagcattggcag

SEQ ID NO: 1777944 - DNA, 25 bp, Homo sapien
tagtttagcagcattggcagcgaca

SEQ ID NO: 1777945 - DNA, 25 bp, Homo sapien
ttggcagcgacactaggtccccttg

SEQ ID NO: 1777946 - DNA, 25 bp, Homo sapien
tatagttgtgctggtcaatagcaga

SEQ ID NO: 1777947 - DNA, 25 bp, Homo sapien
tgtgctggtcaatagcagatgaaat

SEQ ID NO: 1777948 - DNA, 25 bp, Homo sapien
gtcaatagcagatgaaataagggtc

SEQ ID NO: 1777949 - DNA, 25 bp, Homo sapien
gctggtcaatagcagatgaaataag

SEQ ID NO: 1777950 - DNA, 25 bp, Homo sapien
tctccagggctcatagagtacacgt

SEQ ID NO: 1777951 - DNA, 25 bp, Homo sapien
tacacgtaaacgtttactgcctctg

SEQ ID NO: 1777952 - DNA, 25 bp, Homo sapien
tagagtacacgtaaacgtttactgc

SEQ ID NO: 1777953 - DNA, 25 bp, Homo sapien
ggctcatagagtacacgtaaacgtt

SEQ ID NO: 1777954 - DNA, 25 bp, Homo sapien
cacaaattggctgctgtatgtacag

SEQ ID NO: 1777955 - DNA, 25 bp, Homo sapien
caaagggaacttaagctggagaagc

SEQ ID NO: 1777956 - DNA, 25 bp, Homo sapien
ctggagaagctacccaaggttcgga

SEQ ID NO: 1777957 - DNA, 25 bp, Homo sapien
cttgggcagctccatagaagtgagt

SEQ ID NO: 1777958 - DNA, 25 bp, Homo sapien
ggcctgagcactgtgggctttgtgg

SEQ ID NO: 1777959 - DNA, 25 bp, Homo sapien
ttagttcctggtcagggcctgagca

SEQ ID NO: 1777960 - DNA, 25 bp, Homo sapien
cactgtgggctttgtggagactcac

SEQ ID NO: 1777961 - DNA, 25 bp, Homo sapien
agcactgtgggctttgtggagactc

SEQ ID NO: 1777962 - DNA, 25 bp, Homo sapien
gaaatagaaatgatacgtgtccaca

SEQ ID NO: 1777963 - DNA, 25 bp, Homo sapien
cagaaatagaaatgatacgtgtcca

SEQ ID NO: 1777964 - DNA, 25 bp, Homo sapien
aatagaaatgatacgtgtccacagc

SEQ ID NO: 1777965 - DNA, 25 bp, Homo sapien
agaaatgatacgtgtccacagcagc

SEQ ID NO: 1777966 - DNA, 25 bp, Homo sapien
tgaaatacattgatctgaactgatg

SEQ ID NO: 1777967 - DNA, 25 bp, Homo sapien
cgagagttggtgaaatacattgatc

SEQ ID NO: 1777968 - DNA, 25 bp, Homo sapien
ccctctggatctcgagagttggtga

SEQ ID NO: 1777969 - DNA, 25 bp, Homo sapien
tgtcctatgtcccattccctctgga

SEQ ID NO: 1777970 - DNA, 25 bp, Homo sapien
gagggcagatggaacgtggaagttt

SEQ ID NO: 1777971 - DNA, 25 bp, Homo sapien
cccatttaggagggcagatggaacg

SEQ ID NO: 1777972 - DNA, 25 bp, Homo sapien
taggagggcagatggaacgtggaag

SEQ ID NO: 1777973 - DNA, 25 bp, Homo sapien
cagatggaacgtggaagtttttggg

SEQ ID NO: 1777974 - DNA, 25 bp, Homo sapien
cacttggatgagatctggcagcagc

SEQ ID NO: 1777975 - DNA, 25 bp, Homo sapien
gccacttggatgagatctggcagca

SEQ ID NO: 1777976 - DNA, 25 bp, Homo sapien
ctgccacttggatgagatctggcag

SEQ ID NO: 1777977 - DNA, 25 bp, Homo sapien
acttggatgagatctggcagcagcg

SEQ ID NO: 1777978 - DNA, 25 bp, Homo sapien
taacagcctttccaattctcacaag

SEQ ID NO: 1777979 - DNA, 25 bp, Homo sapien
tcacttatcacatgcaacaccactg

SEQ ID NO: 1777980 - DNA, 25 bp, Homo sapien
gaatatttttcctggcgcttaacag

SEQ ID NO: 1777981 - DNA, 25 bp, Homo sapien
ctgcatcccagcaggtgacgctgct

SEQ ID NO: 1777982 - DNA, 25 bp, Homo sapien
cttcaggagactgaccttctgcttc

SEQ ID NO: 1777983 - DNA, 25 bp, Homo sapien
caggagactgaccttctgcttctag

SEQ ID NO: 1777984 - DNA, 25 bp, Homo sapien
ttcaggagactgaccttctgcttct

SEQ ID NO: 1777985 - DNA, 25 bp, Homo sapien
tcaggagactgaccttctgcttcta

SEQ ID NO: 1777986 - DNA, 25 bp, Homo sapien
gagtaagcatgcagttgcacacaga

SEQ ID NO: 1777987 - DNA, 25 bp, Homo sapien
aggtgccagtttctaggtgttcgca

SEQ ID NO: 1777988 - DNA, 25 bp, Homo sapien
ttcgcatgtgaagggacacattgca

SEQ ID NO: 1777989 - DNA, 25 bp, Homo sapien
tctatgattggcactcttggtgccc

SEQ ID NO: 1777990 - DNA, 25 bp, Homo sapien
tgttctgggtgcgtttctgctgaga

SEQ ID NO: 1777991 - DNA, 25 bp, Homo sapien
gcttgttctgggtgcgtttctgctg

SEQ ID NO: 1777992 - DNA, 25 bp, Homo sapien
tgcttgttctgggtgcgtttctgct

SEQ ID NO: 1777993 - DNA, 25 bp, Homo sapien
cttgttctgggtgcgtttctgctga

SEQ ID NO: 1777994 - DNA, 25 bp, Homo sapien
gatggcactgccttatggagcttgg

SEQ ID NO: 1777995 - DNA, 25 bp, Homo sapien
tatggagcttggtgtatcctcctgg

SEQ ID NO: 1777996 - DNA, 25 bp, Homo sapien
gaaccaagatggcactgccttatgg

SEQ ID NO: 1777997 - DNA, 25 bp, Homo sapien
ttttgatgtttggccattcagagaa

SEQ ID NO: 1777998 - DNA, 25 bp, Homo sapien
ggcttcccagcggaccactcggttg

SEQ ID NO: 1777999 - DNA, 25 bp, Homo sapien
tgtgtaccagttcccagagtggctg

SEQ ID NO: 1778000 - DNA, 25 bp, Homo sapien
gaggctgtgtaccagttcccagagt

SEQ ID NO: 1778001 - DNA, 25 bp, Homo sapien
cttcccagcggaccactcggttgga

SEQ ID NO: 1778002 - DNA, 25 bp, Homo sapien
gtaatagacggatccacttgtttat

SEQ ID NO: 1778003 - DNA, 25 bp, Homo sapien
ctgcagagacatgcgttcaaacatt

SEQ ID NO: 1778004 - DNA, 25 bp, Homo sapien
aatagacggatccacttgtttataa

SEQ ID NO: 1778005 - DNA, 25 bp, Homo sapien
agagacatgcgttcaaacattcctg

SEQ ID NO: 1778006 - DNA, 25 bp, Homo sapien
aggaataatggtaaactcatcctta

SEQ ID NO: 1778007 - DNA, 25 bp, Homo sapien
gaataatggtaaactcatccttatg

SEQ ID NO: 1778008 - DNA, 25 bp, Homo sapien
aataatggtaaactcatccttatgg

SEQ ID NO: 1778009 - DNA, 25 bp, Homo sapien
ggaataatggtaaactcatccttat

SEQ ID NO: 1778010 - DNA, 25 bp, Homo sapien
gaccgtgagcgctccagttgtgtaa

SEQ ID NO: 1778011 - DNA, 25 bp, Homo sapien
cgtgagcgctccagttgtgtaactc

SEQ ID NO: 1778012 - DNA, 25 bp, Homo sapien
gcgctccagttgtgtaactcactga

SEQ ID NO: 1778013 - DNA, 25 bp, Homo sapien
gagcgctccagttgtgtaactcact

SEQ ID NO: 1778014 - DNA, 25 bp, Homo sapien
ggatcacggactcctcagcaatctg

SEQ ID NO: 1778015 - DNA, 25 bp, Homo sapien
tctttgataccgtcggaacagcctg

SEQ ID NO: 1778016 - DNA, 25 bp, Homo sapien
ctgtacatgcgtttgtgtcactgag

SEQ ID NO: 1778017 - DNA, 25 bp, Homo sapien
ggaacagcctgtacccagagcttgg

SEQ ID NO: 1778018 - DNA, 25 bp, Homo sapien
catttcagaaggcttgctgtagata

SEQ ID NO: 1778019 - DNA, 25 bp, Homo sapien
cagaaggcttgctgtagatacccag

SEQ ID NO: 1778020 - DNA, 25 bp, Homo sapien
aaggcttgctgtagatacccaggaa

SEQ ID NO: 1778021 - DNA, 25 bp, Homo sapien
ttcagaaggcttgctgtagataccc

SEQ ID NO: 1778022 - DNA, 25 bp, Homo sapien
agcagagactgacagtgactgttct

SEQ ID NO: 1778023 - DNA, 25 bp, Homo sapien
tgagtcagcgctgacacgaggcacc

SEQ ID NO: 1778024 - DNA, 25 bp, Homo sapien
tgatgatgatttgcaccggcctttg

SEQ ID NO: 1778025 - DNA, 25 bp, Homo sapien
aggcaccgacaagcttggcagcaga

SEQ ID NO: 1778026 - DNA, 25 bp, Homo sapien
tcccaatgactgaactcgacctgaa

SEQ ID NO: 1778027 - DNA, 25 bp, Homo sapien
taagcactttggtatcgctcccaag

SEQ ID NO: 1778028 - DNA, 25 bp, Homo sapien
tcgacctgaatgcagaccgctgagt

SEQ ID NO: 1778029 - DNA, 25 bp, Homo sapien
caggagttactagaaagaaacgctc

SEQ ID NO: 1778030 - DNA, 25 bp, Homo sapien
tctctccctttatttaggatatcag

SEQ ID NO: 1778031 - DNA, 25 bp, Homo sapien
tccctttatttaggatatcagagga

SEQ ID NO: 1778032 - DNA, 25 bp, Homo sapien
gaactctctccctttatttaggata

SEQ ID NO: 1778033 - DNA, 25 bp, Homo sapien
tctccctttatttaggatatcagag

SEQ ID NO: 1778034 - DNA, 25 bp, Homo sapien
ccttgtctattagccactagcatgg

SEQ ID NO: 1778035 - DNA, 25 bp, Homo sapien
ttgattggacctcattacataaggg

SEQ ID NO: 1778036 - DNA, 25 bp, Homo sapien
tacggtcgagtctaatcaattccat

SEQ ID NO: 1778037 - DNA, 25 bp, Homo sapien
gaaggctatgtggtaagctctacta

SEQ ID NO: 1778038 - DNA, 25 bp, Homo sapien
cccagcagggcctctggacagctgc

SEQ ID NO: 1778039 - DNA, 25 bp, Homo sapien
cagcagggcctctggacagctgcac

SEQ ID NO: 1778040 - DNA, 25 bp, Homo sapien
ggcctctggacagctgcacctccat

SEQ ID NO: 1778041 - DNA, 25 bp, Homo sapien
agggcctctggacagctgcacctcc

SEQ ID NO: 1778042 - DNA, 25 bp, Homo sapien
tctaaagccaggtactcctcgtggg

SEQ ID NO: 1778043 - DNA, 25 bp, Homo sapien
tcacattcgacataatggtctaaag

SEQ ID NO: 1778044 - DNA, 25 bp, Homo sapien
tatgattccaagagcttctgagaga

SEQ ID NO: 1778045 - DNA, 25 bp, Homo sapien
gggtgctgaatcattgatgaagttc

SEQ ID NO: 1778046 - DNA, 25 bp, Homo sapien
tagtttgcactcatctcagaaagct

SEQ ID NO: 1778047 - DNA, 25 bp, Homo sapien
ttctgcttgatccttatagaaaata

SEQ ID NO: 1778048 - DNA, 25 bp, Homo sapien
ttattcactgttagatcaggtgcag

SEQ ID NO: 1778049 - DNA, 25 bp, Homo sapien
cacgttactatcaactcaactgaag

SEQ ID NO: 1778050 - DNA, 25 bp, Homo sapien
ccctatttggattttgtcaagcaag

SEQ ID NO: 1778051 - DNA, 25 bp, Homo sapien
tcagtttgcaagtgcatgtcccggt

SEQ ID NO: 1778052 - DNA, 25 bp, Homo sapien
tatctgaatctggactaagacatgc

SEQ ID NO: 1778053 - DNA, 25 bp, Homo sapien
tgtcccggtagcaccggcatacagg

SEQ ID NO: 1778054 - DNA, 25 bp, Homo sapien
cattgctgtatctttagactctaga

SEQ ID NO: 1778055 - DNA, 25 bp, Homo sapien
tatcttccctggactagaatgtcag

SEQ ID NO: 1778056 - DNA, 25 bp, Homo sapien
gcaatatatgtatcttatcccttta

SEQ ID NO: 1778057 - DNA, 25 bp, Homo sapien
actagaatgtcagcttcttggtcag

SEQ ID NO: 1778058 - DNA, 25 bp, Homo sapien
taagaaactggctacgatctgttcc

SEQ ID NO: 1778059 - DNA, 25 bp, Homo sapien
ctcttgttgctcacgctgcctggaa

SEQ ID NO: 1778060 - DNA, 25 bp, Homo sapien
gaagggtcctgagtctatgctggta

SEQ ID NO: 1778061 - DNA, 25 bp, Homo sapien
ccccttctgagagtagatgtcacct

SEQ ID NO: 1778062 - DNA, 25 bp, Homo sapien
ttgtaccccattgcctagaccagtg

SEQ ID NO: 1778063 - DNA, 25 bp, Homo sapien
ccatgaaggagagtgtccgcagcct

SEQ ID NO: 1778064 - DNA, 25 bp, Homo sapien
tgtaccagcaggatctttgtccaga

SEQ ID NO: 1778065 - DNA, 25 bp, Homo sapien
tgcagggtgctctatccatgaagga

SEQ ID NO: 1778066 - DNA, 25 bp, Homo sapien
ttgtggtgaccataagaatgtccct

SEQ ID NO: 1778067 - DNA, 25 bp, Homo sapien
gaaagccaagatattatttaagttg

SEQ ID NO: 1778068 - DNA, 25 bp, Homo sapien
tgaccataagaatgtccctccccaa

SEQ ID NO: 1778069 - DNA, 25 bp, Homo sapien
aatttggaattagtggaagctgttc

SEQ ID NO: 1778070 - DNA, 25 bp, Homo sapien
gctcagcatgatataagttttagaa

SEQ ID NO: 1778071 - DNA, 25 bp, Homo sapien
tttgataatacatctgttgattggc

SEQ ID NO: 1778072 - DNA, 25 bp, Homo sapien
cattccatagatagcagatgcttcc

SEQ ID NO: 1778073 - DNA, 25 bp, Homo sapien
tttcttcattccatagatagcagat

SEQ ID NO: 1778074 - DNA, 25 bp, Homo sapien
aaaggaccgcccattgaagatgcca

SEQ ID NO: 1778075 - DNA, 25 bp, Homo sapien
cagcaccggtgaaaaagtctggcaa

SEQ ID NO: 1778076 - DNA, 25 bp, Homo sapien
tagtttccacacacctcaaaaagga

SEQ ID NO: 1778077 - DNA, 25 bp, Homo sapien
cagcaaatagatgtgaaggcggaac

SEQ ID NO: 1778078 - DNA, 25 bp, Homo sapien
ggtttgagtctagctacttatcatt

SEQ ID NO: 1778079 - DNA, 25 bp, Homo sapien
agtttttctcatgggatcttccacg

SEQ ID NO: 1778080 - DNA, 25 bp, Homo sapien
ttgagtctagctacttatcatttcc

SEQ ID NO: 1778081 - DNA, 25 bp, Homo sapien
gatcttccacggttgtatttgtgtg

SEQ ID NO: 1778082 - DNA, 25 bp, Homo sapien
taattaattataggcctgaaatcca

SEQ ID NO: 1778083 - DNA, 25 bp, Homo sapien
ttaattataggcctgaaatccaaat

SEQ ID NO: 1778084 - DNA, 25 bp, Homo sapien
agtcagtaattaattataggcctga

SEQ ID NO: 1778085 - DNA, 25 bp, Homo sapien
cagtaattaattataggcctgaaat

SEQ ID NO: 1778086 - DNA, 25 bp, Homo sapien
cattaacctctttccctagattctt

SEQ ID NO: 1778087 - DNA, 25 bp, Homo sapien
ctacattaacctctttccctagatt

SEQ ID NO: 1778088 - DNA, 25 bp, Homo sapien
catgcctgactaattcccccatgtt

SEQ ID NO: 1778089 - DNA, 25 bp, Homo sapien
atgcctgactaattcccccatgttc

SEQ ID NO: 1778090 - DNA, 25 bp, Homo sapien
cgtatctaggcagtctttcataaaa

SEQ ID NO: 1778091 - DNA, 25 bp, Homo sapien
ggaagcagagttcctttatggactg

SEQ ID NO: 1778092 - DNA, 25 bp, Homo sapien
cctcagtgccaagaacatgctataa

SEQ ID NO: 1778093 - DNA, 25 bp, Homo sapien
gaaaaactctgaagatccaagatcg

SEQ ID NO: 1778094 - DNA, 25 bp, Homo sapien
tcttgatgactcttttgttgggtcc

SEQ ID NO: 1778095 - DNA, 25 bp, Homo sapien
gggtccttcagaggtacgcctccaa

SEQ ID NO: 1778096 - DNA, 25 bp, Homo sapien
aatctggagtcctatgtttctcatg

SEQ ID NO: 1778097 - DNA, 25 bp, Homo sapien
ttctcatgtgctctcagtttgatcc

SEQ ID NO: 1778098 - DNA, 25 bp, Homo sapien
cagggataaaactaataaggtgctc

SEQ ID NO: 1778099 - DNA, 25 bp, Homo sapien
tgggaggtcatgtaactaattgtca

SEQ ID NO: 1778100 - DNA, 25 bp, Homo sapien
gtttttagtactcagtgggaggtca

SEQ ID NO: 1778101 - DNA, 25 bp, Homo sapien
gataaaatacggttatagagaagaa

SEQ ID NO: 1778102 - DNA, 25 bp, Homo sapien
gaacaagtttgatgtgcagaaggct

SEQ ID NO: 1778103 - DNA, 25 bp, Homo sapien
tacttggagatgctgtgccagatga

SEQ ID NO: 1778104 - DNA, 25 bp, Homo sapien
tgatcacatgagagaggtacttgga

SEQ ID NO: 1778105 - DNA, 25 bp, Homo sapien
tgaaggacaagaatgaggcaacagt

SEQ ID NO: 1778106 - DNA, 25 bp, Homo sapien
cagaacgctggcgtaggtagctcaa

SEQ ID NO: 1778107 - DNA, 25 bp, Homo sapien
ccggcctgggctaaatctgattcca

SEQ ID NO: 1778108 - DNA, 25 bp, Homo sapien
ggtagctcaaggttccccgcttgca

SEQ ID NO: 1778109 - DNA, 25 bp, Homo sapien
tcttactgagcgcatagctttctca

SEQ ID NO: 1778110 - DNA, 25 bp, Homo sapien
tcccagatagcctcaagtcctttgg

SEQ ID NO: 1778111 - DNA, 25 bp, Homo sapien
tgaagatccgtttcagcgtccctga

SEQ ID NO: 1778112 - DNA, 25 bp, Homo sapien
tgtcagcgcttctgtcaaacatgga

SEQ ID NO: 1778113 - DNA, 25 bp, Homo sapien
gccttatgaaatgcatgaccctatc

SEQ ID NO: 1778114 - DNA, 25 bp, Homo sapien
cagagtcaaggaaggtgtcgcagaa

SEQ ID NO: 1778115 - DNA, 25 bp, Homo sapien
cacaggagggacacttattctgcag

SEQ ID NO: 1778116 - DNA, 25 bp, Homo sapien
ggagctgatgtagagtgccccacgt

SEQ ID NO: 1778117 - DNA, 25 bp, Homo sapien
taaaataaactagagtgtccctgcc

SEQ ID NO: 1778118 - DNA, 25 bp, Homo sapien
tcttgtcttcctctctctcccccat

SEQ ID NO: 1778119 - DNA, 25 bp, Homo sapien
tttcccaacttcttgtcttcctctc

SEQ ID NO: 1778120 - DNA, 25 bp, Homo sapien
tcccaacttcttgtcttcctctctc

SEQ ID NO: 1778121 - DNA, 25 bp, Homo sapien
cttcttgtcttcctctctctccccc

SEQ ID NO: 1778122 - DNA, 25 bp, Homo sapien
tcacaacagcttctcacatctccct

SEQ ID NO: 1778123 - DNA, 25 bp, Homo sapien
aacagcttctcacatctccctttcc

SEQ ID NO: 1778124 - DNA, 25 bp, Homo sapien
cttcacaacagcttctcacatctcc

SEQ ID NO: 1778125 - DNA, 25 bp, Homo sapien
cagcttctcacatctccctttccac

SEQ ID NO: 1778126 - DNA, 25 bp, Homo sapien
aatatcaatattgtttgctcggttc

SEQ ID NO: 1778127 - DNA, 25 bp, Homo sapien
ttttagctttgcctaaaacattcaa

SEQ ID NO: 1778128 - DNA, 25 bp, Homo sapien
tacaaaatatcaatattgtttgctc

SEQ ID NO: 1778129 - DNA, 25 bp, Homo sapien
catgttttagctttgcctaaaacat

SEQ ID NO: 1778130 - DNA, 25 bp, Homo sapien
tctggatagcacgatcagggagtgt

SEQ ID NO: 1778131 - DNA, 25 bp, Homo sapien
ttagttctggatagcacgatcaggg

SEQ ID NO: 1778132 - DNA, 25 bp, Homo sapien
ttctggatagcacgatcagggagtg

SEQ ID NO: 1778133 - DNA, 25 bp, Homo sapien
agttctggatagcacgatcagggag

SEQ ID NO: 1778134 - DNA, 25 bp, Homo sapien
tatccagtaccaaataaggcatgaa

SEQ ID NO: 1778135 - DNA, 25 bp, Homo sapien
ccaggaagtcctggataaacttgca

SEQ ID NO: 1778136 - DNA, 25 bp, Homo sapien
gaagtcctggataaacttgcagaat

SEQ ID NO: 1778137 - DNA, 25 bp, Homo sapien
taaacttgcagaatatccagtacca

SEQ ID NO: 1778138 - DNA, 25 bp, Homo sapien
ttggttgtgttctatgaaattgctc

SEQ ID NO: 1778139 - DNA, 25 bp, Homo sapien
acctcatgtcagttgttggttgtgt

SEQ ID NO: 1778140 - DNA, 25 bp, Homo sapien
ctttgccactggctgaagtttcatg

SEQ ID NO: 1778141 - DNA, 25 bp, Homo sapien
tttgccactggctgaagtttcatga

SEQ ID NO: 1778142 - DNA, 25 bp, Homo sapien
gaaaagaggttggttcgtgggtgca

SEQ ID NO: 1778143 - DNA, 25 bp, Homo sapien
taatctaatattttggctaggggca

SEQ ID NO: 1778144 - DNA, 25 bp, Homo sapien
aagaggttggttcgtgggtgcatga

SEQ ID NO: 1778145 - DNA, 25 bp, Homo sapien
ggggcattcggacatctatttacat

SEQ ID NO: 1778146 - DNA, 25 bp, Homo sapien
ggcttgaggtatctccaagtgctga

SEQ ID NO: 1778147 - DNA, 25 bp, Homo sapien
caataagagtgtctgtggccacggt

SEQ ID NO: 1778148 - DNA, 25 bp, Homo sapien
gactgaatcagggtgctgcctcctg

SEQ ID NO: 1778149 - DNA, 25 bp, Homo sapien
tgagcatcctttgaaccaataagag

SEQ ID NO: 1778150 - DNA, 25 bp, Homo sapien
tgggcctggctatagacaacctgca

SEQ ID NO: 1778151 - DNA, 25 bp, Homo sapien
agtatttaatacctgaagtggctca

SEQ ID NO: 1778152 - DNA, 25 bp, Homo sapien
gggcttgacgggcacactgactgca

SEQ ID NO: 1778153 - DNA, 25 bp, Homo sapien
catgtattggccaatcagagtgggc

SEQ ID NO: 1778154 - DNA, 25 bp, Homo sapien
ctttgtatccctgacaatgtttcca

SEQ ID NO: 1778155 - DNA, 25 bp, Homo sapien
tgtttacttagtgttgggcactgtg

SEQ ID NO: 1778156 - DNA, 25 bp, Homo sapien
cacatgtgtttacttagtgttgggc

SEQ ID NO: 1778157 - DNA, 25 bp, Homo sapien
gttccttatagttgataaacacatg

SEQ ID NO: 1778158 - DNA, 25 bp, Homo sapien
tttaactccgtgagaaagttggtgc

SEQ ID NO: 1778159 - DNA, 25 bp, Homo sapien
taaagattcaggctctccataaccc

SEQ ID NO: 1778160 - DNA, 25 bp, Homo sapien
gagaaagttggtgctgctgaccaga

SEQ ID NO: 1778161 - DNA, 25 bp, Homo sapien
tcttccttcgctactgaacttcaac

SEQ ID NO: 1778162 - DNA, 25 bp, Homo sapien
gaaacaggttgatattaaagtgtaa

SEQ ID NO: 1778163 - DNA, 25 bp, Homo sapien
gaggaaacaggttgatattaaagtg

SEQ ID NO: 1778164 - DNA, 25 bp, Homo sapien
cgctccgcaccgctggggcgaagtt

SEQ ID NO: 1778165 - DNA, 25 bp, Homo sapien
accgctggggcgaagtttctcagga

SEQ ID NO: 1778166 - DNA, 25 bp, Homo sapien
gccgcggggaccgcaccgggctgcc

SEQ ID NO: 1778167 - DNA, 25 bp, Homo sapien
gagccgcggggaccgcaccgggctg

SEQ ID NO: 1778168 - DNA, 25 bp, Homo sapien
agagccgcggggaccgcaccgggct

SEQ ID NO: 1778169 - DNA, 25 bp, Homo sapien
cgagagccgcggggaccgcaccggg

SEQ ID NO: 1778170 - DNA, 25 bp, Homo sapien
ccttgagccgagtggcgactgcgac

SEQ ID NO: 1778171 - DNA, 25 bp, Homo sapien
atcgcgtcccggttgcgcggcagcg

SEQ ID NO: 1778172 - DNA, 25 bp, Homo sapien
gacggctgccgagctagccctggca

SEQ ID NO: 1778173 - DNA, 25 bp, Homo sapien
cagcggccttgggtgctgccggcct

SEQ ID NO: 1778174 - DNA, 25 bp, Homo sapien
tgaggcaggttcaaggctcccgccc

SEQ ID NO: 1778175 - DNA, 25 bp, Homo sapien
ctggttaatataatccctgccgagt

SEQ ID NO: 1778176 - DNA, 25 bp, Homo sapien
ttgacgctcgcccttgcaagaaacg

SEQ ID NO: 1778177 - DNA, 25 bp, Homo sapien
gctccgagcccgcagtcgggtttct

SEQ ID NO: 1778178 - DNA, 25 bp, Homo sapien
ccacctgctagacccggtgtggtta

SEQ ID NO: 1778179 - DNA, 25 bp, Homo sapien
ccggtgtggttacaagagtacaact

SEQ ID NO: 1778180 - DNA, 25 bp, Homo sapien
gtcaaggaaacaaaccgtgcaaaga

SEQ ID NO: 1778181 - DNA, 25 bp, Homo sapien
aagagtacaactatgaatgttacat

SEQ ID NO: 1778182 - DNA, 25 bp, Homo sapien
ctgcagaaataagaatgggtagacg

SEQ ID NO: 1778183 - DNA, 25 bp, Homo sapien
tgcagaaataagaatgggtagacgt

SEQ ID NO: 1778184 - DNA, 25 bp, Homo sapien
cctcatcatcctcgtcactgctata

SEQ ID NO: 1778185 - DNA, 25 bp, Homo sapien
aaagtcctcatcatcctcgtcactg

SEQ ID NO: 1778186 - DNA, 25 bp, Homo sapien
tcatcatcctcgtcactgctatata

SEQ ID NO: 1778187 - DNA, 25 bp, Homo sapien
atcatcctcgtcactgctatatatg

SEQ ID NO: 1778188 - DNA, 25 bp, Homo sapien
tgacgctttccagacttgggaagca

SEQ ID NO: 1778189 - DNA, 25 bp, Homo sapien
gggaagcagcccatcatagtcatgg

SEQ ID NO: 1778190 - DNA, 25 bp, Homo sapien
ttttccccaagtgacgctttccaga

SEQ ID NO: 1778191 - DNA, 25 bp, Homo sapien
gcccatcatagtcatggtcacacat

SEQ ID NO: 1778192 - DNA, 25 bp, Homo sapien
ccaccagcttcttcagtttttcatc

SEQ ID NO: 1778193 - DNA, 25 bp, Homo sapien
attctgttccaccagcttcttcagt

SEQ ID NO: 1778194 - DNA, 25 bp, Homo sapien
tgttccaccagcttcttcagttttt

SEQ ID NO: 1778195 - DNA, 25 bp, Homo sapien
ccagtcatctgttccattctgttcc

SEQ ID NO: 1778196 - DNA, 25 bp, Homo sapien
cagagtatctacatagcctgaggct

SEQ ID NO: 1778197 - DNA, 25 bp, Homo sapien
gatgtgcttcaatccaggaccaaag

SEQ ID NO: 1778198 - DNA, 25 bp, Homo sapien
tacttacaggctacagaacatgcaa

SEQ ID NO: 1778199 - DNA, 25 bp, Homo sapien
catgtgcctgccaagttaaccttaa

SEQ ID NO: 1778200 - DNA, 25 bp, Homo sapien
ctcagggtttagtactttctgccat

SEQ ID NO: 1778201 - DNA, 25 bp, Homo sapien
agtactttctgccatcggtgctggc

SEQ ID NO: 1778202 - DNA, 25 bp, Homo sapien
ggtttagtactttctgccatcggtg

SEQ ID NO: 1778203 - DNA, 25 bp, Homo sapien
tgccatcggtgctggcactgcacat

SEQ ID NO: 1778204 - DNA, 25 bp, Homo sapien
ggcaataacagaccaacgtttcgga

SEQ ID NO: 1778205 - DNA, 25 bp, Homo sapien
cccctttaagtgcttggcaataaca

SEQ ID NO: 1778206 - DNA, 25 bp, Homo sapien
tccaggcagtagctttgcgatttct

SEQ ID NO: 1778207 - DNA, 25 bp, Homo sapien
tgtgtgcctggtaaataattctgtc

SEQ ID NO: 1778208 - DNA, 25 bp, Homo sapien
gggaaattactcctttgaatgtggc

SEQ ID NO: 1778209 - DNA, 25 bp, Homo sapien
ccaacacaatgtaaagttccagctg

SEQ ID NO: 1778210 - DNA, 25 bp, Homo sapien
cggtcgcggtacaagactccaacac

SEQ ID NO: 1778211 - DNA, 25 bp, Homo sapien
ggtcgcggtacaagactccaacaca

SEQ ID NO: 1778212 - DNA, 25 bp, Homo sapien
tcctgttcgaccttccgacgcattg

SEQ ID NO: 1778213 - DNA, 25 bp, Homo sapien
tccgacgcattgtagaattccagtg

SEQ ID NO: 1778214 - DNA, 25 bp, Homo sapien
gaagactcctgcagataaccttcct

SEQ ID NO: 1778215 - DNA, 25 bp, Homo sapien
ccagtggttcttgatagcattatca

SEQ ID NO: 1778216 - DNA, 25 bp, Homo sapien
tcaaatgactgttcttctggaagct

SEQ ID NO: 1778217 - DNA, 25 bp, Homo sapien
aatagtcgttgttaacagtgggctg

SEQ ID NO: 1778218 - DNA, 25 bp, Homo sapien
aatgtggtaataggaatagtcgttg

SEQ ID NO: 1778219 - DNA, 25 bp, Homo sapien
tgtaggcggagcctgagcaaaaccc

SEQ ID NO: 1778220 - DNA, 25 bp, Homo sapien
tctctcattaaactagattcacagg

SEQ ID NO: 1778221 - DNA, 25 bp, Homo sapien
cattaaactagattcacaggaatgg

SEQ ID NO: 1778222 - DNA, 25 bp, Homo sapien
aactagattcacaggaatggcttac

SEQ ID NO: 1778223 - DNA, 25 bp, Homo sapien
ttaaactagattcacaggaatggct

SEQ ID NO: 1778224 - DNA, 25 bp, Homo sapien
ctgagggacattgactatatttaca

SEQ ID NO: 1778225 - DNA, 25 bp, Homo sapien
taacgctacagggtatggaacatga

SEQ ID NO: 1778226 - DNA, 25 bp, Homo sapien
cagggtatggaacatgactggagac

SEQ ID NO: 1778227 - DNA, 25 bp, Homo sapien
tatatttacatgtaacgctacaggg

SEQ ID NO: 1778228 - DNA, 25 bp, Homo sapien
ttaggagcaattctaattcctttat

SEQ ID NO: 1778229 - DNA, 25 bp, Homo sapien
gctgtccttttagctcattctcggt

SEQ ID NO: 1778230 - DNA, 25 bp, Homo sapien
tcggttgacattaggagcaattcta

SEQ ID NO: 1778231 - DNA, 25 bp, Homo sapien
agctcattctcggttgacattagga

SEQ ID NO: 1778232 - DNA, 25 bp, Homo sapien
cttgtgttgagacattctgaatgga

SEQ ID NO: 1778233 - DNA, 25 bp, Homo sapien
tctgaatggatatatggagccttgc

SEQ ID NO: 1778234 - DNA, 25 bp, Homo sapien
gagaagagcgcttaggtaaactgag

SEQ ID NO: 1778235 - DNA, 25 bp, Homo sapien
tgaggcaaagctgctatcccctcat

SEQ ID NO: 1778236 - DNA, 25 bp, Homo sapien
catatagatacatagctctgtagaa

SEQ ID NO: 1778237 - DNA, 25 bp, Homo sapien
attcattttatctttgctagtcttt

SEQ ID NO: 1778238 - DNA, 25 bp, Homo sapien
aaaccaaaatggtaccatatagata

SEQ ID NO: 1778239 - DNA, 25 bp, Homo sapien
accaaaatggtaccatatagataca

SEQ ID NO: 1778240 - DNA, 25 bp, Homo sapien
tatgttgcaaagcacaaggagccat

SEQ ID NO: 1778241 - DNA, 25 bp, Homo sapien
atcccagttggctgcccagtcgcta

SEQ ID NO: 1778242 - DNA, 25 bp, Homo sapien
tgcccagtcgctaaagatgtcagaa

SEQ ID NO: 1778243 - DNA, 25 bp, Homo sapien
gatgtcagaattcagtaatggccca

SEQ ID NO: 1778244 - DNA, 25 bp, Homo sapien
tggtgccctggtggacgatcatgca

SEQ ID NO: 1778245 - DNA, 25 bp, Homo sapien
aggcgctttcttcaggtagggagcc

SEQ ID NO: 1778246 - DNA, 25 bp, Homo sapien
caaacaggaaacaggtgcactgtct

SEQ ID NO: 1778247 - DNA, 25 bp, Homo sapien
atgcaccttgctggcgaggcgcttt

SEQ ID NO: 1778248 - DNA, 25 bp, Homo sapien
tgaaggagctacagtctccagtggc

SEQ ID NO: 1778249 - DNA, 25 bp, Homo sapien
ctgtgccttgcaggaggtaagacct

SEQ ID NO: 1778250 - DNA, 25 bp, Homo sapien
catacgtttgttcacccttgggcta

SEQ ID NO: 1778251 - DNA, 25 bp, Homo sapien
tgttggctaggtgaaaaatctgctt

SEQ ID NO: 1778252 - DNA, 25 bp, Homo sapien
acagtcaatttgtgaccaatgaggg

SEQ ID NO: 1778253 - DNA, 25 bp, Homo sapien
gagttttcatggttactggaagtgt

SEQ ID NO: 1778254 - DNA, 25 bp, Homo sapien
cagtctggtctctatgaaatggtgt

SEQ ID NO: 1778255 - DNA, 25 bp, Homo sapien
tctatgaaatggtgttgtaacagtc

SEQ ID NO: 1778256 - DNA, 25 bp, Homo sapien
gattgaccttttgatagctggggtt

SEQ ID NO: 1778257 - DNA, 25 bp, Homo sapien
catcttcaggggaccgtatttaatt

SEQ ID NO: 1778258 - DNA, 25 bp, Homo sapien
gctgcaagtgcatgtttgaatggtg

SEQ ID NO: 1778259 - DNA, 25 bp, Homo sapien
gtgtaggagttcttggagagctttc

SEQ ID NO: 1778260 - DNA, 25 bp, Homo sapien
ccattttcttgaaactcagcaacaa

SEQ ID NO: 1778261 - DNA, 25 bp, Homo sapien
atcttctactagatgagagggtgtc

SEQ ID NO: 1778262 - DNA, 25 bp, Homo sapien
agatcttctactagatgagagggtg

SEQ ID NO: 1778263 - DNA, 25 bp, Homo sapien
cattttcttgaaactcagcaacaat

SEQ ID NO: 1778264 - DNA, 25 bp, Homo sapien
gtctgcgtgaacagttgggtattca

SEQ ID NO: 1778265 - DNA, 25 bp, Homo sapien
gggtattcagactgtccccttccca

SEQ ID NO: 1778266 - DNA, 25 bp, Homo sapien
tctgccacaggcgaggtctgcgtga

SEQ ID NO: 1778267 - DNA, 25 bp, Homo sapien
gaagtttcctgatttatcagttgga

SEQ ID NO: 1778268 - DNA, 25 bp, Homo sapien
gccattaaaacggagcttgtaagaa

SEQ ID NO: 1778269 - DNA, 25 bp, Homo sapien
tggtgccattaaaacggagcttgta

SEQ ID NO: 1778270 - DNA, 25 bp, Homo sapien
taggtactgtaaatgctttgagaac

SEQ ID NO: 1778271 - DNA, 25 bp, Homo sapien
ttaggtactgtaaatgctttgagaa

SEQ ID NO: 1778272 - DNA, 25 bp, Homo sapien
aataccaatgttggaatagtaatta

SEQ ID NO: 1778273 - DNA, 25 bp, Homo sapien
aaaataccaatgttggaatagtaat

SEQ ID NO: 1778274 - DNA, 25 bp, Homo sapien
ttaaaataccaatgttggaatagta

SEQ ID NO: 1778275 - DNA, 25 bp, Homo sapien
ataccaatgttggaatagtaattac

SEQ ID NO: 1778276 - DNA, 25 bp, Homo sapien
tttagagggatagacaatcaactgc

SEQ ID NO: 1778277 - DNA, 25 bp, Homo sapien
cctcccaattggcaagtatgtagaa

SEQ ID NO: 1778278 - DNA, 25 bp, Homo sapien
taaaacacagaattgcgcagttcct

SEQ ID NO: 1778279 - DNA, 25 bp, Homo sapien
tctagatggtttggctaaaatccca

SEQ ID NO: 1778280 - DNA, 25 bp, Homo sapien
acctggcctaaaagtcaaggtctga

SEQ ID NO: 1778281 - DNA, 25 bp, Homo sapien
tgatcctttgtaatatagtccttag

SEQ ID NO: 1778282 - DNA, 25 bp, Homo sapien
caaggtctgatcctttgtaatatag

SEQ ID NO: 1778283 - DNA, 25 bp, Homo sapien
ctcagaattcccaaagtcgattcag

SEQ ID NO: 1778284 - DNA, 25 bp, Homo sapien
ctccctggcccccagaaatccggtg

SEQ ID NO: 1778285 - DNA, 25 bp, Homo sapien
ggatggcaacaggagcgtcagacaa

SEQ ID NO: 1778286 - DNA, 25 bp, Homo sapien
ctcattctatagacccagcagggcc

SEQ ID NO: 1778287 - DNA, 25 bp, Homo sapien
gcactgaccaacagatggcaagtgg

SEQ ID NO: 1778288 - DNA, 25 bp, Homo sapien
atggcaagtggttgacaccaggaag

SEQ ID NO: 1778289 - DNA, 25 bp, Homo sapien
tgagaatgcattcacgtatttacga

SEQ ID NO: 1778290 - DNA, 25 bp, Homo sapien
cacgtatttacgagcttgactggaa

SEQ ID NO: 1778291 - DNA, 25 bp, Homo sapien
atgaccagcgtccgggctgagaatg

SEQ ID NO: 1778292 - DNA, 25 bp, Homo sapien
ggaagatgtcatctgctcctccatc

SEQ ID NO: 1778293 - DNA, 25 bp, Homo sapien
aaagttcagtgctggccatcttgca

SEQ ID NO: 1778294 - DNA, 25 bp, Homo sapien
tgtctccccagttgcaaacacagga

SEQ ID NO: 1778295 - DNA, 25 bp, Homo sapien
gatactagcagcatgtctacaggct

SEQ ID NO: 1778296 - DNA, 25 bp, Homo sapien
cccaaaaaagaagtgcaacgcatgc

SEQ ID NO: 1778297 - DNA, 25 bp, Homo sapien
cagatgttctcaactcccaaacaga

SEQ ID NO: 1778298 - DNA, 25 bp, Homo sapien
tcaactcccaaacagaagcagtcat

SEQ ID NO: 1778299 - DNA, 25 bp, Homo sapien
tgttctcaactcccaaacagaagca

SEQ ID NO: 1778300 - DNA, 25 bp, Homo sapien
tctcaactcccaaacagaagcagtc

SEQ ID NO: 1778301 - DNA, 25 bp, Homo sapien
gaaaggccccattagctgagaccac

SEQ ID NO: 1778302 - DNA, 25 bp, Homo sapien
gtctttgcaatcttaagtagctcaa

SEQ ID NO: 1778303 - DNA, 25 bp, Homo sapien
cagctcaaggcctgaatattgttgc

SEQ ID NO: 1778304 - DNA, 25 bp, Homo sapien
agctaaccaacctaccagctcaagg

SEQ ID NO: 1778305 - DNA, 25 bp, Homo sapien
cccctctgggggtcccggatgaatg

SEQ ID NO: 1778306 - DNA, 25 bp, Homo sapien
cccggatgaatgtggaggtctccat

SEQ ID NO: 1778307 - DNA, 25 bp, Homo sapien
ctggaagcactttagtcccctctgg

SEQ ID NO: 1778308 - DNA, 25 bp, Homo sapien
tggaagcactttagtcccctctggg

SEQ ID NO: 1778309 - DNA, 25 bp, Homo sapien
tgctctcgggacatttgccttcatc

SEQ ID NO: 1778310 - DNA, 25 bp, Homo sapien
ggtgctctcgggacatttgccttca

SEQ ID NO: 1778311 - DNA, 25 bp, Homo sapien
gtgctctcgggacatttgccttcat

SEQ ID NO: 1778312 - DNA, 25 bp, Homo sapien
ccagcctgaagctaagcctgctcac

SEQ ID NO: 1778313 - DNA, 25 bp, Homo sapien
gaccagcctgaagctaagcctgctc

SEQ ID NO: 1778314 - DNA, 25 bp, Homo sapien
tcagaccagcctgaagctaagcctg

SEQ ID NO: 1778315 - DNA, 25 bp, Homo sapien
agaccagcctgaagctaagcctgct

SEQ ID NO: 1778316 - DNA, 25 bp, Homo sapien
cagagcttagaaatgacaactgaac

SEQ ID NO: 1778317 - DNA, 25 bp, Homo sapien
tggctgccaggctgacagcaacaca

SEQ ID NO: 1778318 - DNA, 25 bp, Homo sapien
tgaaactgtcagctcagaaacactg

SEQ ID NO: 1778319 - DNA, 25 bp, Homo sapien
ccattgattccaagccagggcagtg

SEQ ID NO: 1778320 - DNA, 25 bp, Homo sapien
ccaaagcaggtacagctgaaaatct

SEQ ID NO: 1778321 - DNA, 25 bp, Homo sapien
aggccaaagcaggtacagctgaaaa

SEQ ID NO: 1778322 - DNA, 25 bp, Homo sapien
aaagcaggtacagctgaaaatctgc

SEQ ID NO: 1778323 - DNA, 25 bp, Homo sapien
agcaggtacagctgaaaatctgctg

SEQ ID NO: 1778324 - DNA, 25 bp, Homo sapien
ttaggtattgaaaggaaataggcac

SEQ ID NO: 1778325 - DNA, 25 bp, Homo sapien
tcagatgttctaaaaccatcagtgt

SEQ ID NO: 1778326 - DNA, 25 bp, Homo sapien
ttcagatgttctaaaaccatcagtg

SEQ ID NO: 1778327 - DNA, 25 bp, Homo sapien
ttttgtcggttgtctcaggatcttt

SEQ ID NO: 1778328 - DNA, 25 bp, Homo sapien
ttggctttttgtcggttgtctcagg

SEQ ID NO: 1778329 - DNA, 25 bp, Homo sapien
tgttggctttttgtcggttgtctca

SEQ ID NO: 1778330 - DNA, 25 bp, Homo sapien
ctttttgtcggttgtctcaggatct

SEQ ID NO: 1778331 - DNA, 25 bp, Homo sapien
gccaccaggaaaggctgccaagaca

SEQ ID NO: 1778332 - DNA, 25 bp, Homo sapien
ggcccaagtcagctgtcaagttccc

SEQ ID NO: 1778333 - DNA, 25 bp, Homo sapien
caagttccccagtaaaagcagatac

SEQ ID NO: 1778334 - DNA, 25 bp, Homo sapien
ccaagacatcatgggcacatcctgt

SEQ ID NO: 1778335 - DNA, 25 bp, Homo sapien
agagaaaaaccagcggtgtttgtct

SEQ ID NO: 1778336 - DNA, 25 bp, Homo sapien
aaccagcggtgtttgtctttactca

SEQ ID NO: 1778337 - DNA, 25 bp, Homo sapien
cagcggtgtttgtctttactcagga

SEQ ID NO: 1778338 - DNA, 25 bp, Homo sapien
gcggtgtttgtctttactcaggatg

SEQ ID NO: 1778339 - DNA, 25 bp, Homo sapien
gacagtcacttgtcattccactacc

SEQ ID NO: 1778340 - DNA, 25 bp, Homo sapien
acagtcacttgtcattccactacct

SEQ ID NO: 1778341 - DNA, 25 bp, Homo sapien
cttcctctgagtgcacattctccat

SEQ ID NO: 1778342 - DNA, 25 bp, Homo sapien
ttaagctttataccactgctcagtg

SEQ ID NO: 1778343 - DNA, 25 bp, Homo sapien
agtcggagatgatttttgggttaga

SEQ ID NO: 1778344 - DNA, 25 bp, Homo sapien
tgccttcaacttgggcatcatctgg

SEQ ID NO: 1778345 - DNA, 25 bp, Homo sapien
ccttcaacttgggcatcatctgggt

SEQ ID NO: 1778346 - DNA, 25 bp, Homo sapien
gaagtcggagatgatttttgggtta

SEQ ID NO: 1778347 - DNA, 25 bp, Homo sapien
gctggagggggagcttgatgccaaa

SEQ ID NO: 1778348 - DNA, 25 bp, Homo sapien
tggagggggagcttgatgccaaaag

SEQ ID NO: 1778349 - DNA, 25 bp, Homo sapien
ggagggggagcttgatgccaaaagt

SEQ ID NO: 1778350 - DNA, 25 bp, Homo sapien
ctggagggggagcttgatgccaaaa

SEQ ID NO: 1778351 - DNA, 25 bp, Homo sapien
acagaagtcagtgggttggtatacc

SEQ ID NO: 1778352 - DNA, 25 bp, Homo sapien
tagagagtcaggactcgtccagtgg

SEQ ID NO: 1778353 - DNA, 25 bp, Homo sapien
gggtaggtgggcacagaagtcagtg

SEQ ID NO: 1778354 - DNA, 25 bp, Homo sapien
ggttggtataccaaactagagagtc

SEQ ID NO: 1778355 - DNA, 25 bp, Homo sapien
taagacatacggagtttcactacgt

SEQ ID NO: 1778356 - DNA, 25 bp, Homo sapien
cattttatgaggtggtcaggccagt

SEQ ID NO: 1778357 - DNA, 25 bp, Homo sapien
gggtcattgattgcattctgggtca

SEQ ID NO: 1778358 - DNA, 25 bp, Homo sapien
tgtgaaaacctcctggcaaaagaaa

SEQ ID NO: 1778359 - DNA, 25 bp, Homo sapien
tccatacccagatagaatctcttct

SEQ ID NO: 1778360 - DNA, 25 bp, Homo sapien
ccactctatcatgtagattcaccct

SEQ ID NO: 1778361 - DNA, 25 bp, Homo sapien
tggcttccactctatcatgtagatt

SEQ ID NO: 1778362 - DNA, 25 bp, Homo sapien
tttcattctccatacccagatagaa

SEQ ID NO: 1778363 - DNA, 25 bp, Homo sapien
cctgaggtccggaagttaaggctgc

SEQ ID NO: 1778364 - DNA, 25 bp, Homo sapien
acctgaggtccggaagttaaggctg

SEQ ID NO: 1778365 - DNA, 25 bp, Homo sapien
tcgaggctggagcattgtttgaggc

SEQ ID NO: 1778366 - DNA, 25 bp, Homo sapien
ggtcgaggctggagcattgtttgag

SEQ ID NO: 1778367 - DNA, 25 bp, Homo sapien
gtcgaggctggagcattgtttgagg

SEQ ID NO: 1778368 - DNA, 25 bp, Homo sapien
gacagcagaaacctgaccgctttta

SEQ ID NO: 1778369 - DNA, 25 bp, Homo sapien
tttccactcccttcgcagctaaaga

SEQ ID NO: 1778370 - DNA, 25 bp, Homo sapien
tctgcatagcatggagcaccaaagc

SEQ ID NO: 1778371 - DNA, 25 bp, Homo sapien
tttattcctcatgcatgctcttggc

SEQ ID NO: 1778372 - DNA, 25 bp, Homo sapien
taagtcctctgggtaaaacattgtc

SEQ ID NO: 1778373 - DNA, 25 bp, Homo sapien
aaaaacaagctgcacctgtacacag

SEQ ID NO: 1778374 - DNA, 25 bp, Homo sapien
gattctggtcagctatttttctctg

SEQ ID NO: 1778375 - DNA, 25 bp, Homo sapien
tgtcaatcactagtggctgccacca

SEQ ID NO: 1778376 - DNA, 25 bp, Homo sapien
tgataactggtgaagcctacagcca

SEQ ID NO: 1778377 - DNA, 25 bp, Homo sapien
catgtcccgctgtgtagaactttaa

SEQ ID NO: 1778378 - DNA, 25 bp, Homo sapien
tttgcccagatgtatacccagtgtg

SEQ ID NO: 1778379 - DNA, 25 bp, Homo sapien
tctcaagtgtgtgataaggtctgct

SEQ ID NO: 1778380 - DNA, 25 bp, Homo sapien
cacataatggatacacggatgagga

SEQ ID NO: 1778381 - DNA, 25 bp, Homo sapien
aatggatacacggatgaggaagaac

SEQ ID NO: 1778382 - DNA, 25 bp, Homo sapien
aaggacacataatggatacacggat

SEQ ID NO: 1778383 - DNA, 25 bp, Homo sapien
atgaggaccaaggacacataatgga

SEQ ID NO: 1778384 - DNA, 25 bp, Homo sapien
tcaataagaacaagtcccaggactt

SEQ ID NO: 1778385 - DNA, 25 bp, Homo sapien
cagactaggctcagaatctatgaca

SEQ ID NO: 1778386 - DNA, 25 bp, Homo sapien
tagacaatatatgttcaggacaggc

SEQ ID NO: 1778387 - DNA, 25 bp, Homo sapien
aactctctggagaactacttccttg

SEQ ID NO: 1778388 - DNA, 25 bp, Homo sapien
aaaagtctccttgctctttaattct

SEQ ID NO: 1778389 - DNA, 25 bp, Homo sapien
taatcatataattatggtccagaaa

SEQ ID NO: 1778390 - DNA, 25 bp, Homo sapien
tggtccagaaaagcataatatcctc

SEQ ID NO: 1778391 - DNA, 25 bp, Homo sapien
gcttgacttaaagctctacagctag

SEQ ID NO: 1778392 - DNA, 25 bp, Homo sapien
ggcaagacctgcacatggcaacata

SEQ ID NO: 1778393 - DNA, 25 bp, Homo sapien
catttcacatgaacaggcttagcag

SEQ ID NO: 1778394 - DNA, 25 bp, Homo sapien
gacaaactttctgaggatatcacag

SEQ ID NO: 1778395 - DNA, 25 bp, Homo sapien
aagaatagctggacatggaggcgca

SEQ ID NO: 1778396 - DNA, 25 bp, Homo sapien
attgcaccttttacctgcctcctga

SEQ ID NO: 1778397 - DNA, 25 bp, Homo sapien
ctgcctggtatatagccttctggtc

SEQ ID NO: 1778398 - DNA, 25 bp, Homo sapien
ttcattgcaccttttacctgcctcc

SEQ ID NO: 1778399 - DNA, 25 bp, Homo sapien
gcctggtatatagccttctggtctc

SEQ ID NO: 1778400 - DNA, 25 bp, Homo sapien
gacccttcagtttgcaggaattcta

SEQ ID NO: 1778401 - DNA, 25 bp, Homo sapien
ttcattcttctcaaaccgggcctct

SEQ ID NO: 1778402 - DNA, 25 bp, Homo sapien
ggcgtttttaagcagccacctctta

SEQ ID NO: 1778403 - DNA, 25 bp, Homo sapien
tgcttccgtggttgtctgcaatcag

SEQ ID NO: 1778404 - DNA, 25 bp, Homo sapien
taatttatgcttggatttgctttaa

SEQ ID NO: 1778405 - DNA, 25 bp, Homo sapien
ctgacctgaagccttaccttataag

SEQ ID NO: 1778406 - DNA, 25 bp, Homo sapien
tagtgatgaaactgacctgaagcct

SEQ ID NO: 1778407 - DNA, 25 bp, Homo sapien
aaggatagtgatgaaactgacctga

SEQ ID NO: 1778408 - DNA, 25 bp, Homo sapien
caaatttataatagacagtgcagat

SEQ ID NO: 1778409 - DNA, 25 bp, Homo sapien
gccagtagttagttaatatatacta

SEQ ID NO: 1778410 - DNA, 25 bp, Homo sapien
aaatagccagtagttagttaatata

SEQ ID NO: 1778411 - DNA, 25 bp, Homo sapien
actaaatcattggaaatatggtcat

SEQ ID NO: 1778412 - DNA, 25 bp, Homo sapien
ggacagactattctaaaccaaagtg

SEQ ID NO: 1778413 - DNA, 25 bp, Homo sapien
gctggcttaattccaaaggacagac

SEQ ID NO: 1778414 - DNA, 25 bp, Homo sapien
tagagtcaataagagcatgctggct

SEQ ID NO: 1778415 - DNA, 25 bp, Homo sapien
tagctaatcttcacatgagcagagg

SEQ ID NO: 1778416 - DNA, 25 bp, Homo sapien
cttttcttattagcagagacaatcc

SEQ ID NO: 1778417 - DNA, 25 bp, Homo sapien
tcttattagcagagacaatcctatt

SEQ ID NO: 1778418 - DNA, 25 bp, Homo sapien
tgatgggatcccaactcactgcaac

SEQ ID NO: 1778419 - DNA, 25 bp, Homo sapien
ttattagcagagacaatcctatttt

SEQ ID NO: 1778420 - DNA, 25 bp, Homo sapien
gaggtctgcgtgtacttgaatgtca

SEQ ID NO: 1778421 - DNA, 25 bp, Homo sapien
tacgtagagcgatctatgaaggaag

SEQ ID NO: 1778422 - DNA, 25 bp, Homo sapien
tttgtggaagctccgcgacatcagc

SEQ ID NO: 1778423 - DNA, 25 bp, Homo sapien
aggaccctctgattgctcataagac

SEQ ID NO: 1778424 - DNA, 25 bp, Homo sapien
tacacttcctttaacaatcatttcc

SEQ ID NO: 1778425 - DNA, 25 bp, Homo sapien
aactacacttcctttaacaatcatt

SEQ ID NO: 1778426 - DNA, 25 bp, Homo sapien
tttcttcatcataaccaactacact

SEQ ID NO: 1778427 - DNA, 25 bp, Homo sapien
tcatcataaccaactacacttcctt

SEQ ID NO: 1778428 - DNA, 25 bp, Homo sapien
catttccatggccagaatcaaggtt

SEQ ID NO: 1778429 - DNA, 25 bp, Homo sapien
aaggttgtcttctctgacatggaga

SEQ ID NO: 1778430 - DNA, 25 bp, Homo sapien
gacatggagaaatatggtctcctta

SEQ ID NO: 1778431 - DNA, 25 bp, Homo sapien
ccatggccagaatcaaggttgtctt

SEQ ID NO: 1778432 - DNA, 25 bp, Homo sapien
cacgttccccttgctccaagtactg

SEQ ID NO: 1778433 - DNA, 25 bp, Homo sapien
tttacccattttcatgcccacgttc

SEQ ID NO: 1778434 - DNA, 25 bp, Homo sapien
ttctttacccattttcatgcccacg

SEQ ID NO: 1778435 - DNA, 25 bp, Homo sapien
gcccacgttccccttgctccaagta

SEQ ID NO: 1778436 - DNA, 25 bp, Homo sapien
tagaaatcacaagagcataagctac

SEQ ID NO: 1778437 - DNA, 25 bp, Homo sapien
taatctgtgaaccaccagtccttgg

SEQ ID NO: 1778438 - DNA, 25 bp, Homo sapien
cagtccttggtacctatcagagggt

SEQ ID NO: 1778439 - DNA, 25 bp, Homo sapien
tcagagggtcaaaaatcacgattaa

SEQ ID NO: 1778440 - DNA, 25 bp, Homo sapien
caaagttttgcagccatccctacta

SEQ ID NO: 1778441 - DNA, 25 bp, Homo sapien
ccaagggtgaaggatcatgccattc

SEQ ID NO: 1778442 - DNA, 25 bp, Homo sapien
taatctggaaactccccaagggtga

SEQ ID NO: 1778443 - DNA, 25 bp, Homo sapien
tataatttatataccgtaatgccca

SEQ ID NO: 1778444 - DNA, 25 bp, Homo sapien
taggcacttggaatgcaataggcta

SEQ ID NO: 1778445 - DNA, 25 bp, Homo sapien
aggctattgtcgctttcctgatggg

SEQ ID NO: 1778446 - DNA, 25 bp, Homo sapien
ggtgtaatgattgtagctccaagat

SEQ ID NO: 1778447 - DNA, 25 bp, Homo sapien
ctgcagatgttcaggaaacgttcct

SEQ ID NO: 1778448 - DNA, 25 bp, Homo sapien
tgtttaccatgtagcacagcaattc

SEQ ID NO: 1778449 - DNA, 25 bp, Homo sapien
caaggcaaagctattgtgataccag

SEQ ID NO: 1778450 - DNA, 25 bp, Homo sapien
ccagatcagtggttgagtagggtca

SEQ ID NO: 1778451 - DNA, 25 bp, Homo sapien
tgcgaaatagtacagccagtttgag

SEQ ID NO: 1778452 - DNA, 25 bp, Homo sapien
ttctagaaacatgggaattatctcc

SEQ ID NO: 1778453 - DNA, 25 bp, Homo sapien
ggacatggattttaaactactgccc

SEQ ID NO: 1778454 - DNA, 25 bp, Homo sapien
aatattacctcactccatcacctgg

SEQ ID NO: 1778455 - DNA, 25 bp, Homo sapien
actgccctgtactgcattatattac

SEQ ID NO: 1778456 - DNA, 25 bp, Homo sapien
agactgttcccgctcgcgtggccgg

SEQ ID NO: 1778457 - DNA, 25 bp, Homo sapien
ggaggagactgttcccgctcgcgtg

SEQ ID NO: 1778458 - DNA, 25 bp, Homo sapien
gggcaggcgccgcacggcccctcct

SEQ ID NO: 1778459 - DNA, 25 bp, Homo sapien
ctaagttccctgaagctcgcgcccg

SEQ ID NO: 1778460 - DNA, 25 bp, Homo sapien
gcgcatctagtatttttccagccct

SEQ ID NO: 1778461 - DNA, 25 bp, Homo sapien
gagtccacgagtagcgcatctagta

SEQ ID NO: 1778462 - DNA, 25 bp, Homo sapien
tcacgagtgtattcacgagtccacg

SEQ ID NO: 1778463 - DNA, 25 bp, Homo sapien
acaggaaatggcctgtattcacgag

SEQ ID NO: 1778464 - DNA, 25 bp, Homo sapien
gaaatactaggtacctaccagccag

SEQ ID NO: 1778465 - DNA, 25 bp, Homo sapien
tttaaagcaaatcctggacacctta

SEQ ID NO: 1778466 - DNA, 25 bp, Homo sapien
taagtcatactctacataaccacac

SEQ ID NO: 1778467 - DNA, 25 bp, Homo sapien
tctgttctgtgcacgtaagtcatac

SEQ ID NO: 1778468 - DNA, 25 bp, Homo sapien
caaaaggcatctttatttccgcctt

SEQ ID NO: 1778469 - DNA, 25 bp, Homo sapien
tttcaaaaggcatctttatttccgc

SEQ ID NO: 1778470 - DNA, 25 bp, Homo sapien
ctcgttggtttcaaaaggcatcttt

SEQ ID NO: 1778471 - DNA, 25 bp, Homo sapien
aaaggcatctttatttccgccttca

SEQ ID NO: 1778472 - DNA, 25 bp, Homo sapien
tgccggctggttccatgtaggctct

SEQ ID NO: 1778473 - DNA, 25 bp, Homo sapien
tgacagtggaacttgtctttgccgg

SEQ ID NO: 1778474 - DNA, 25 bp, Homo sapien
gctctgttaatagaggtcactggga

SEQ ID NO: 1778475 - DNA, 25 bp, Homo sapien
tcttttctctagttgtgacagtgga

SEQ ID NO: 1778476 - DNA, 25 bp, Homo sapien
tcagagattacctagtaaaaattct

SEQ ID NO: 1778477 - DNA, 25 bp, Homo sapien
taagcagttagaagagtggtgtagt

SEQ ID NO: 1778478 - DNA, 25 bp, Homo sapien
tttcccagactttagcttaatttga

SEQ ID NO: 1778479 - DNA, 25 bp, Homo sapien
agaaaggtcatcaaatttcctaaag

SEQ ID NO: 1778480 - DNA, 25 bp, Homo sapien
cactgtagagattttccatctccct

SEQ ID NO: 1778481 - DNA, 25 bp, Homo sapien
ctgtagagattttccatctccctgg

SEQ ID NO: 1778482 - DNA, 25 bp, Homo sapien
actgtagagattttccatctccctg

SEQ ID NO: 1778483 - DNA, 25 bp, Homo sapien
gataaagagccttggaaagccatga

SEQ ID NO: 1778484 - DNA, 25 bp, Homo sapien
cacatgtatctggtcattgaggcaa

SEQ ID NO: 1778485 - DNA, 25 bp, Homo sapien
aggctgactgtagatcacatgtatc

SEQ ID NO: 1778486 - DNA, 25 bp, Homo sapien
tcattgaggcaagtcattaaagaat

SEQ ID NO: 1778487 - DNA, 25 bp, Homo sapien
ggaagaaagcacgaagcctgttaca

SEQ ID NO: 1778488 - DNA, 25 bp, Homo sapien
gactgacattgatatacccctaagt

SEQ ID NO: 1778489 - DNA, 25 bp, Homo sapien
taggtaggacaagtttagactgaca

SEQ ID NO: 1778490 - DNA, 25 bp, Homo sapien
taagattccaagaccgggtcccagc

SEQ ID NO: 1778491 - DNA, 25 bp, Homo sapien
ggttcttgggcctgctagccgttag

SEQ ID NO: 1778492 - DNA, 25 bp, Homo sapien
agttgactgaaccatggcataccca

SEQ ID NO: 1778493 - DNA, 25 bp, Homo sapien
ttgatagactgagcaaagcacactg

SEQ ID NO: 1778494 - DNA, 25 bp, Homo sapien
tagccgttagactacaccgtcagtt

SEQ ID NO: 1778495 - DNA, 25 bp, Homo sapien
ggatgtgatcccctaattacactgt

SEQ ID NO: 1778496 - DNA, 25 bp, Homo sapien
caaagggtttgcaaaatttggatgt

SEQ ID NO: 1778497 - DNA, 25 bp, Homo sapien
tgtacctagctgacatatagttagt

SEQ ID NO: 1778498 - DNA, 25 bp, Homo sapien
gcaattccagatcaacaaaagacag

SEQ ID NO: 1778499 - DNA, 25 bp, Homo sapien
tggaactggggctccctctttgaaa

SEQ ID NO: 1778500 - DNA, 25 bp, Homo sapien
caggaagcttccttctagggctgat

SEQ ID NO: 1778501 - DNA, 25 bp, Homo sapien
ttggccccacagaacccgagggaga

SEQ ID NO: 1778502 - DNA, 25 bp, Homo sapien
tgggattgaggggacgcctctcctt

SEQ ID NO: 1778503 - DNA, 25 bp, Homo sapien
ccttgccacattcctaaggacccac

SEQ ID NO: 1778504 - DNA, 25 bp, Homo sapien
aatcttgctgcccttgccacattcc

SEQ ID NO: 1778505 - DNA, 25 bp, Homo sapien
tcaatcttgctgcccttgccacatt

SEQ ID NO: 1778506 - DNA, 25 bp, Homo sapien
tgctgcccttgccacattcctaagg

SEQ ID NO: 1778507 - DNA, 25 bp, Homo sapien
atttccaaggagtacattctccaac

SEQ ID NO: 1778508 - DNA, 25 bp, Homo sapien
ccaaggagtacattctccaacaggt

SEQ ID NO: 1778509 - DNA, 25 bp, Homo sapien
ccatcatactgggaattccctttcc

SEQ ID NO: 1778510 - DNA, 25 bp, Homo sapien
ttccaaggagtacattctccaacag

SEQ ID NO: 1778511 - DNA, 25 bp, Homo sapien
tctcccacacttgatccagggaaag

SEQ ID NO: 1778512 - DNA, 25 bp, Homo sapien
cacacttgatccagggaaagactca

SEQ ID NO: 1778513 - DNA, 25 bp, Homo sapien
acttttgctcagaaccagttccacg

SEQ ID NO: 1778514 - DNA, 25 bp, Homo sapien
gctcagaaccagttccacggtcttc

SEQ ID NO: 1778515 - DNA, 25 bp, Homo sapien
tgccaactgcccctgccaagatggt

SEQ ID NO: 1778516 - DNA, 25 bp, Homo sapien
cttctcttgccaactgcccctgcca

SEQ ID NO: 1778517 - DNA, 25 bp, Homo sapien
ggtgcctcctgtccccaatttctgg

SEQ ID NO: 1778518 - DNA, 25 bp, Homo sapien
aagatggtgcctcctgtccccaatt

SEQ ID NO: 1778519 - DNA, 25 bp, Homo sapien
ttcctccaaagtgtcatgggcctct

SEQ ID NO: 1778520 - DNA, 25 bp, Homo sapien
ggcacatttgaggagcagttcctcc

SEQ ID NO: 1778521 - DNA, 25 bp, Homo sapien
cagttcctccaaagtgtcatgggcc

SEQ ID NO: 1778522 - DNA, 25 bp, Homo sapien
ggagcagttcctccaaagtgtcatg

SEQ ID NO: 1778523 - DNA, 25 bp, Homo sapien
tgtaaagcagactcacagccatacc

SEQ ID NO: 1778524 - DNA, 25 bp, Homo sapien
tctaaaccaatcctgaatggagctg

SEQ ID NO: 1778525 - DNA, 25 bp, Homo sapien
gccatatgatgcagagccatctgta

SEQ ID NO: 1778526 - DNA, 25 bp, Homo sapien
agtcattgggaatgtccacaggcca

SEQ ID NO: 1778527 - DNA, 25 bp, Homo sapien
caaggaagtagctctgaacttttcc

SEQ ID NO: 1778528 - DNA, 25 bp, Homo sapien
ccaaggaagtagctctgaacttttc

SEQ ID NO: 1778529 - DNA, 25 bp, Homo sapien
tgtcaacatgatactgtcctctgac

SEQ ID NO: 1778530 - DNA, 25 bp, Homo sapien
agactgattgatgccactgctgatg

SEQ ID NO: 1778531 - DNA, 25 bp, Homo sapien
tcaacatgatactgtcctctgacat

SEQ ID NO: 1778532 - DNA, 25 bp, Homo sapien
ccaggatgagactgattgatgccac

SEQ ID NO: 1778533 - DNA, 25 bp, Homo sapien
tttaggtaagtccaaggcatcggga

SEQ ID NO: 1778534 - DNA, 25 bp, Homo sapien
aggtaagtccaaggcatcgggaaag

SEQ ID NO: 1778535 - DNA, 25 bp, Homo sapien
taggtaagtccaaggcatcgggaaa

SEQ ID NO: 1778536 - DNA, 25 bp, Homo sapien
ttaggtaagtccaaggcatcgggaa

SEQ ID NO: 1778537 - DNA, 25 bp, Homo sapien
gagttttacctagttctatatctgc

SEQ ID NO: 1778538 - DNA, 25 bp, Homo sapien
ctatatctgcaaagataagctgacc

SEQ ID NO: 1778539 - DNA, 25 bp, Homo sapien
actttgctaagcaccggtattttag

SEQ ID NO: 1778540 - DNA, 25 bp, Homo sapien
tttgcatgatatgtaattctccagg

SEQ ID NO: 1778541 - DNA, 25 bp, Homo sapien
tcataggtttttctccacctattca

SEQ ID NO: 1778542 - DNA, 25 bp, Homo sapien
gcctcgttccccaagtagaacctga

SEQ ID NO: 1778543 - DNA, 25 bp, Homo sapien
ggtgccattaattcataggtttttc

SEQ ID NO: 1778544 - DNA, 25 bp, Homo sapien
ctccccagacggcagagcctcgttc

SEQ ID NO: 1778545 - DNA, 25 bp, Homo sapien
acatactaattacatagtagacatt

SEQ ID NO: 1778546 - DNA, 25 bp, Homo sapien
acatagtagacatttgtaataagaa

SEQ ID NO: 1778547 - DNA, 25 bp, Homo sapien
catagtagacatttgtaataagaat

SEQ ID NO: 1778548 - DNA, 25 bp, Homo sapien
ttggcatggaaatttaaacaggttc

SEQ ID NO: 1778549 - DNA, 25 bp, Homo sapien
aattggcatggaaatttaaacaggt

SEQ ID NO: 1778550 - DNA, 25 bp, Homo sapien
ctggcacagtatgggggttgcaaat

SEQ ID NO: 1778551 - DNA, 25 bp, Homo sapien
tgcaaattggcatggaaatttaaac

SEQ ID NO: 1778552 - DNA, 25 bp, Homo sapien
agaagaagaagcacccaaatgttcg

SEQ ID NO: 1778553 - DNA, 25 bp, Homo sapien
gaagcacccaaatgttcggtcaatt

SEQ ID NO: 1778554 - DNA, 25 bp, Homo sapien
gaagaagcacccaaatgttcggtca

SEQ ID NO: 1778555 - DNA, 25 bp, Homo sapien
gcacccaaatgttcggtcaatttct

SEQ ID NO: 1778556 - DNA, 25 bp, Homo sapien
catcagcagagagttggccatgggc

SEQ ID NO: 1778557 - DNA, 25 bp, Homo sapien
agtccagtcatcagcagagagttgg

SEQ ID NO: 1778558 - DNA, 25 bp, Homo sapien
caggcacaggagtctggatctataa

SEQ ID NO: 1778559 - DNA, 25 bp, Homo sapien
ggtcaggcacaggagtctggatcta

SEQ ID NO: 1778560 - DNA, 25 bp, Homo sapien
ggattgttttccgtctctgccacac

SEQ ID NO: 1778561 - DNA, 25 bp, Homo sapien
tcttatgctcaatagaccttgggag

SEQ ID NO: 1778562 - DNA, 25 bp, Homo sapien
tcacatgttcatatcttggagctag

SEQ ID NO: 1778563 - DNA, 25 bp, Homo sapien
tctgtcttaaaacatggtggctgct

SEQ ID NO: 1778564 - DNA, 25 bp, Homo sapien
taagcacttctttagccgcatctca

SEQ ID NO: 1778565 - DNA, 25 bp, Homo sapien
ccttcccctgacagaagcatgagag

SEQ ID NO: 1778566 - DNA, 25 bp, Homo sapien
aaaactccaataggttaggctctgg

SEQ ID NO: 1778567 - DNA, 25 bp, Homo sapien
gagtttaggtttatatagcccagca

SEQ ID NO: 1778568 - DNA, 25 bp, Homo sapien
tcatttgtgccctttataggtaacc

SEQ ID NO: 1778569 - DNA, 25 bp, Homo sapien
acgaccaaggtataggatatttcca

SEQ ID NO: 1778570 - DNA, 25 bp, Homo sapien
tgtgcaatcaccacaacgaccaagg

SEQ ID NO: 1778571 - DNA, 25 bp, Homo sapien
caactttaggtatacgtctggtgag

SEQ ID NO: 1778572 - DNA, 25 bp, Homo sapien
ggttcgtggagatctacatcctctg

SEQ ID NO: 1778573 - DNA, 25 bp, Homo sapien
ggagatctacatcctctggaatccc

SEQ ID NO: 1778574 - DNA, 25 bp, Homo sapien
agtcagagggttcgtggagatctac

SEQ ID NO: 1778575 - DNA, 25 bp, Homo sapien
cagagggttcgtggagatctacatc

SEQ ID NO: 1778576 - DNA, 25 bp, Homo sapien
gatttgatttggcagcttcacatac

SEQ ID NO: 1778577 - DNA, 25 bp, Homo sapien
cattagcttggaccattttggcaag

SEQ ID NO: 1778578 - DNA, 25 bp, Homo sapien
agcttcacatacagcctttttccgc

SEQ ID NO: 1778579 - DNA, 25 bp, Homo sapien
tttggcaaggatttgatttggcagc

SEQ ID NO: 1778580 - DNA, 25 bp, Homo sapien
tcatccattgaactgtaatttacaa

SEQ ID NO: 1778581 - DNA, 25 bp, Homo sapien
atccattgaactgtaatttacaaac

SEQ ID NO: 1778582 - DNA, 25 bp, Homo sapien
catccattgaactgtaatttacaaa

SEQ ID NO: 1778583 - DNA, 25 bp, Homo sapien
accacagtctctgccatggtaatgg

SEQ ID NO: 1778584 - DNA, 25 bp, Homo sapien
gcaggagaggagaccgtcaactttg

SEQ ID NO: 1778585 - DNA, 25 bp, Homo sapien
gaggagaccgtcaactttgagtggt

SEQ ID NO: 1778586 - DNA, 25 bp, Homo sapien
agccttgcttcagtacgctacacca

SEQ ID NO: 1778587 - DNA, 25 bp, Homo sapien
catgaacaaatgtgtagtggagttg

SEQ ID NO: 1778588 - DNA, 25 bp, Homo sapien
tgtaggaagtgaacaccatgaacaa

SEQ ID NO: 1778589 - DNA, 25 bp, Homo sapien
caccatgaacaaatgtgtagtggag

SEQ ID NO: 1778590 - DNA, 25 bp, Homo sapien
atcttgtaggaagtgaacaccatga

SEQ ID NO: 1778591 - DNA, 25 bp, Homo sapien
gtagcctctacagcaataagttggg

SEQ ID NO: 1778592 - DNA, 25 bp, Homo sapien
catctccagggacaatgagctcagg

SEQ ID NO: 1778593 - DNA, 25 bp, Homo sapien
tcaggtagcctctacagcaataagt

SEQ ID NO: 1778594 - DNA, 25 bp, Homo sapien
tgagctcaggtagcctctacagcaa

SEQ ID NO: 1778595 - DNA, 25 bp, Homo sapien
catcttggaagtgtagcctccagcc

SEQ ID NO: 1778596 - DNA, 25 bp, Homo sapien
gagcagaggtatccaaattacacag

SEQ ID NO: 1778597 - DNA, 25 bp, Homo sapien
gagaacagatgcctcttgaagctca

SEQ ID NO: 1778598 - DNA, 25 bp, Homo sapien
gccttccaatgatagtagtcccaga

SEQ ID NO: 1778599 - DNA, 25 bp, Homo sapien
gctttcagtcatcaagatggcatct

SEQ ID NO: 1778600 - DNA, 25 bp, Homo sapien
tagggcaccaaacctaatcatcagc

SEQ ID NO: 1778601 - DNA, 25 bp, Homo sapien
tagtctcaattgtcccattagggca

SEQ ID NO: 1778602 - DNA, 25 bp, Homo sapien
taaaagtcatggatggtactcagta

SEQ ID NO: 1778603 - DNA, 25 bp, Homo sapien
accagggtcgcagtctattttcaca

SEQ ID NO: 1778604 - DNA, 25 bp, Homo sapien
tatgggatgtgctccaattcctcac

SEQ ID NO: 1778605 - DNA, 25 bp, Homo sapien
gttaaattcttagttgcagttcaac

SEQ ID NO: 1778606 - DNA, 25 bp, Homo sapien
cccttgataacattctgtgaacttg

SEQ ID NO: 1778607 - DNA, 25 bp, Homo sapien
tgaacaggcactgaaacctcagtcc

SEQ ID NO: 1778608 - DNA, 25 bp, Homo sapien
caggcactgaaacctcagtcccttt

SEQ ID NO: 1778609 - DNA, 25 bp, Homo sapien
aacaggcactgaaacctcagtccct

SEQ ID NO: 1778610 - DNA, 25 bp, Homo sapien
ctgaacaggcactgaaacctcagtc

SEQ ID NO: 1778611 - DNA, 25 bp, Homo sapien
agccttccactggtggctccactgt

SEQ ID NO: 1778612 - DNA, 25 bp, Homo sapien
ccactggtggctccactgtggtcct

SEQ ID NO: 1778613 - DNA, 25 bp, Homo sapien
ctgtggtcctccaccttggccaaca

SEQ ID NO: 1778614 - DNA, 25 bp, Homo sapien
tggtcctccaccttggccaacacac

SEQ ID NO: 1778615 - DNA, 25 bp, Homo sapien
tgtgttttgcagtgcggaggtttac

SEQ ID NO: 1778616 - DNA, 25 bp, Homo sapien
gcacctttcctggttgactcttttg

SEQ ID NO: 1778617 - DNA, 25 bp, Homo sapien
gcggaggtttacagcaacagctatt

SEQ ID NO: 1778618 - DNA, 25 bp, Homo sapien
aaatttcaatggcttactacaccga

SEQ ID NO: 1778619 - DNA, 25 bp, Homo sapien
caagatttagaacaggttgctgcaa

SEQ ID NO: 1778620 - DNA, 25 bp, Homo sapien
aacccaaatgctttcactgtgaatg

SEQ ID NO: 1778621 - DNA, 25 bp, Homo sapien
gaggagcctagagacaccgacttta

SEQ ID NO: 1778622 - DNA, 25 bp, Homo sapien
tttaagtagggatcaaaagaaagca

SEQ ID NO: 1778623 - DNA, 25 bp, Homo sapien
cccagatgtaaagaacactcagtca

SEQ ID NO: 1778624 - DNA, 25 bp, Homo sapien
ggccttcccagatgtaaagaacact

SEQ ID NO: 1778625 - DNA, 25 bp, Homo sapien
ttcccagatgtaaagaacactcagt

SEQ ID NO: 1778626 - DNA, 25 bp, Homo sapien
ccaggccttcccagatgtaaagaac

SEQ ID NO: 1778627 - DNA, 25 bp, Homo sapien
tctgtgaaacactttggcgaacttg

SEQ ID NO: 1778628 - DNA, 25 bp, Homo sapien
cactttggcgaacttgtgcaagtct

SEQ ID NO: 1778629 - DNA, 25 bp, Homo sapien
aacttgtgcaagtctggttcctgta

SEQ ID NO: 1778630 - DNA, 25 bp, Homo sapien
gcaagtctggttcctgtacacaggt

SEQ ID NO: 1778631 - DNA, 25 bp, Homo sapien
gcatggatctgagcctagctgacct

SEQ ID NO: 1778632 - DNA, 25 bp, Homo sapien
ggaacttcctcatgtacagcataag

SEQ ID NO: 1778633 - DNA, 25 bp, Homo sapien
tagctgacctaactcgtgagccact

SEQ ID NO: 1778634 - DNA, 25 bp, Homo sapien
tatgtgccactgactacaaggcgtg

SEQ ID NO: 1778635 - DNA, 25 bp, Homo sapien
tccagctggttttttagctcgcaaa

SEQ ID NO: 1778636 - DNA, 25 bp, Homo sapien
gttcactctatttgtttccagctgg

SEQ ID NO: 1778637 - DNA, 25 bp, Homo sapien
ccaagccacatgaccaaaaactaaa

SEQ ID NO: 1778638 - DNA, 25 bp, Homo sapien
agtaaacaatttcctgacaccgaag

SEQ ID NO: 1778639 - DNA, 25 bp, Homo sapien
ccctgagtctatagtgcagtcatat

SEQ ID NO: 1778640 - DNA, 25 bp, Homo sapien
gacaccaactggataaacgttatat

SEQ ID NO: 1778641 - DNA, 25 bp, Homo sapien
tctttcccgattttatccgacacca

SEQ ID NO: 1778642 - DNA, 25 bp, Homo sapien
catcagaataattttgggccctgag

SEQ ID NO: 1778643 - DNA, 25 bp, Homo sapien
catgaaggccagatccttgtgagag

SEQ ID NO: 1778644 - DNA, 25 bp, Homo sapien
gcaggagccataatcacgggcagca

SEQ ID NO: 1778645 - DNA, 25 bp, Homo sapien
cttaggaagtgtaaccaagcgtact

SEQ ID NO: 1778646 - DNA, 25 bp, Homo sapien
ctgccctccgcagtgaagatcagca

SEQ ID NO: 1778647 - DNA, 25 bp, Homo sapien
tagctcgcacttccagagaatctga

SEQ ID NO: 1778648 - DNA, 25 bp, Homo sapien
tccacattacgggatgcagaaagtt

SEQ ID NO: 1778649 - DNA, 25 bp, Homo sapien
ccagaatccagtcaataagagccca

SEQ ID NO: 1778650 - DNA, 25 bp, Homo sapien
gaatctgattctgttggcagtgggt

SEQ ID NO: 1778651 - DNA, 25 bp, Homo sapien
gggaccaaacctgtaatcatgaact

SEQ ID NO: 1778652 - DNA, 25 bp, Homo sapien
ttgggatctcctgccgtcacttatg

SEQ ID NO: 1778653 - DNA, 25 bp, Homo sapien
taattgacgaacctcttcaaagtaa

SEQ ID NO: 1778654 - DNA, 25 bp, Homo sapien
tatgactgatgctaattgacgaacc

SEQ ID NO: 1778655 - DNA, 25 bp, Homo sapien
ccagggtctgagatgctgtgttgat

SEQ ID NO: 1778656 - DNA, 25 bp, Homo sapien
tccaaatggagggaaattgtcacag

SEQ ID NO: 1778657 - DNA, 25 bp, Homo sapien
ctacagcaaaaccatggccacggct

SEQ ID NO: 1778658 - DNA, 25 bp, Homo sapien
gaaaaagtcccagcacgatatgaga

SEQ ID NO: 1778659 - DNA, 25 bp, Homo sapien
tcttgtttccaaatcgttcctcaca

SEQ ID NO: 1778660 - DNA, 25 bp, Homo sapien
tggtcataacctacgtcaacttcgt

SEQ ID NO: 1778661 - DNA, 25 bp, Homo sapien
ttcgttgaatgggttcttgtttcca

SEQ ID NO: 1778662 - DNA, 25 bp, Homo sapien
tgaacttcccgttcctggtcataac

SEQ ID NO: 1778663 - DNA, 25 bp, Homo sapien
caacttcatccaggattaggaatat

SEQ ID NO: 1778664 - DNA, 25 bp, Homo sapien
gtgagtaacaccacttttctcccag

SEQ ID NO: 1778665 - DNA, 25 bp, Homo sapien
agcggtgctgcttgttcatgaagac

SEQ ID NO: 1778666 - DNA, 25 bp, Homo sapien
tgcttgttcatgaagacttgtgctg

SEQ ID NO: 1778667 - DNA, 25 bp, Homo sapien
ttaaccatagtggcagttctgtgac

SEQ ID NO: 1778668 - DNA, 25 bp, Homo sapien
cttcgggcagggctccaataatata

SEQ ID NO: 1778669 - DNA, 25 bp, Homo sapien
aggctttcatgtctacagaagcttc

SEQ ID NO: 1778670 - DNA, 25 bp, Homo sapien
cgggcagggctccaataatataggc

SEQ ID NO: 1778671 - DNA, 25 bp, Homo sapien
ctcttcgggcagggctccaataata

SEQ ID NO: 1778672 - DNA, 25 bp, Homo sapien
tgtaaggaaattcttcgcttgtcca

SEQ ID NO: 1778673 - DNA, 25 bp, Homo sapien
tttgtaaggaaattcttcgcttgtc

SEQ ID NO: 1778674 - DNA, 25 bp, Homo sapien
attttgtaaggaaattcttcgcttg

SEQ ID NO: 1778675 - DNA, 25 bp, Homo sapien
aaggaaattcttcgcttgtccacca

SEQ ID NO: 1778676 - DNA, 25 bp, Homo sapien
gtttgaacgcacaaacaatctgcat

SEQ ID NO: 1778677 - DNA, 25 bp, Homo sapien
cattcaccggagtgaaacaaatcaa

SEQ ID NO: 1778678 - DNA, 25 bp, Homo sapien
ctctggtccgcaactttgaccagtt

SEQ ID NO: 1778679 - DNA, 25 bp, Homo sapien
gacaaatgctgccaaacatgaatga

SEQ ID NO: 1778680 - DNA, 25 bp, Homo sapien
cttctgcaagttggtgagatccacc

SEQ ID NO: 1778681 - DNA, 25 bp, Homo sapien
tatagttcagttcaccttcatgggt

SEQ ID NO: 1778682 - DNA, 25 bp, Homo sapien
ccctcagagtttgtgcttatgccaa

SEQ ID NO: 1778683 - DNA, 25 bp, Homo sapien
ctgacacaatgggaaggcacttctg

SEQ ID NO: 1778684 - DNA, 25 bp, Homo sapien
ccattgacgtcacttggaagttgtg

SEQ ID NO: 1778685 - DNA, 25 bp, Homo sapien
tgcttccattgacgtcacttggaag

SEQ ID NO: 1778686 - DNA, 25 bp, Homo sapien
ttccattgacgtcacttggaagttg

SEQ ID NO: 1778687 - DNA, 25 bp, Homo sapien
gctctgcttccattgacgtcacttg

SEQ ID NO: 1778688 - DNA, 25 bp, Homo sapien
tgtttatcagaacataaagttcggt

SEQ ID NO: 1778689 - DNA, 25 bp, Homo sapien
gcaccacattgtttatcagaacata

SEQ ID NO: 1778690 - DNA, 25 bp, Homo sapien
ttcggttgaaatcccgcagtgacgt

SEQ ID NO: 1778691 - DNA, 25 bp, Homo sapien
cataaagttcggttgaaatcccgca

SEQ ID NO: 1778692 - DNA, 25 bp, Homo sapien
tgacctggttttgtaagggccaaga

SEQ ID NO: 1778693 - DNA, 25 bp, Homo sapien
gaatggctcctgtacttccatatga

SEQ ID NO: 1778694 - DNA, 25 bp, Homo sapien
tagtaactcaaaatgattccctggt

SEQ ID NO: 1778695 - DNA, 25 bp, Homo sapien
tccatatgaataagagagtgactca

SEQ ID NO: 1778696 - DNA, 25 bp, Homo sapien
ttaaaagcatctgtgccacggccac

SEQ ID NO: 1778697 - DNA, 25 bp, Homo sapien
tagtgaagcagggaggttttccaga

SEQ ID NO: 1778698 - DNA, 25 bp, Homo sapien
aaacaggattgatatctcttgaaag

SEQ ID NO: 1778699 - DNA, 25 bp, Homo sapien
cttgaaagttctagtgaagcaggga

SEQ ID NO: 1778700 - DNA, 25 bp, Homo sapien
cgctcattgtaagttttaagtattc

SEQ ID NO: 1778701 - DNA, 25 bp, Homo sapien
ttattttgcatgtcccgtacgctca

SEQ ID NO: 1778702 - DNA, 25 bp, Homo sapien
tgtcccgtacgctcattgtaagttt

SEQ ID NO: 1778703 - DNA, 25 bp, Homo sapien
aggaaataataagcgcttgtttgtt

SEQ ID NO: 1778704 - DNA, 25 bp, Homo sapien
cttctaaacgccctcgtagcaccat

SEQ ID NO: 1778705 - DNA, 25 bp, Homo sapien
tcaaatgcctcttctaaacgccctc

SEQ ID NO: 1778706 - DNA, 25 bp, Homo sapien
aaatgcctcttctaaacgccctcgt

SEQ ID NO: 1778707 - DNA, 25 bp, Homo sapien
atgcctcttctaaacgccctcgtag

SEQ ID NO: 1778708 - DNA, 25 bp, Homo sapien
gcgaaacctgacattgagatgacat

SEQ ID NO: 1778709 - DNA, 25 bp, Homo sapien
ggcgaaacctgacattgagatgaca

SEQ ID NO: 1778710 - DNA, 25 bp, Homo sapien
gggcgaaacctgacattgagatgac

SEQ ID NO: 1778711 - DNA, 25 bp, Homo sapien
aagggcgaaacctgacattgagatg

SEQ ID NO: 1778712 - DNA, 25 bp, Homo sapien
tctgcatatacaccagtaagcactg

SEQ ID NO: 1778713 - DNA, 25 bp, Homo sapien
tgtgggctattctgaagttttctgg

SEQ ID NO: 1778714 - DNA, 25 bp, Homo sapien
caggacatttctgcatatacaccag

SEQ ID NO: 1778715 - DNA, 25 bp, Homo sapien
gggtagcatgagaagagattatttt

SEQ ID NO: 1778716 - DNA, 25 bp, Homo sapien
tctctccttagggattctatctttg

SEQ ID NO: 1778717 - DNA, 25 bp, Homo sapien
gattctgcctaattctcaggatcca

SEQ ID NO: 1778718 - DNA, 25 bp, Homo sapien
tgaaatatcgagaccaacttgcctt

SEQ ID NO: 1778719 - DNA, 25 bp, Homo sapien
ctggtgctgctcaccaggattctgc

SEQ ID NO: 1778720 - DNA, 25 bp, Homo sapien
tgcccttaaggagaccgaagatgag

SEQ ID NO: 1778721 - DNA, 25 bp, Homo sapien
cacaacttggttaattccattccca

SEQ ID NO: 1778722 - DNA, 25 bp, Homo sapien
ccattcccatcaatctttgttgtaa

SEQ ID NO: 1778723 - DNA, 25 bp, Homo sapien
gttctcactacatatttcctttgcc

SEQ ID NO: 1778724 - DNA, 25 bp, Homo sapien
tggcattctgatcggggttctcaaa

SEQ ID NO: 1778725 - DNA, 25 bp, Homo sapien
catttggcattctgatcggggttct

SEQ ID NO: 1778726 - DNA, 25 bp, Homo sapien
acacatttggcattctgatcggggt

SEQ ID NO: 1778727 - DNA, 25 bp, Homo sapien
tctgatcggggttctcaaacaagat

SEQ ID NO: 1778728 - DNA, 25 bp, Homo sapien
taaattaccaagatctttgcctgcc

SEQ ID NO: 1778729 - DNA, 25 bp, Homo sapien
aatgctgtgtcgataatagttgtgc

SEQ ID NO: 1778730 - DNA, 25 bp, Homo sapien
catggtccttgactggctgacaatt

SEQ ID NO: 1778731 - DNA, 25 bp, Homo sapien
catcatagctgcctgaatacaaacc

SEQ ID NO: 1778732 - DNA, 25 bp, Homo sapien
taaggtacctgcagtattcaaccat

SEQ ID NO: 1778733 - DNA, 25 bp, Homo sapien
cattgattcaagttactagaccagg

SEQ ID NO: 1778734 - DNA, 25 bp, Homo sapien
aaatccaaaactgggacacatggct

SEQ ID NO: 1778735 - DNA, 25 bp, Homo sapien
tagaccaggtgaaagctacaatcaa

SEQ ID NO: 1778736 - DNA, 25 bp, Homo sapien
gaggtactgtcatatcctccaccag

SEQ ID NO: 1778737 - DNA, 25 bp, Homo sapien
ctgacggcagactttgagaggtact

SEQ ID NO: 1778738 - DNA, 25 bp, Homo sapien
gagcatgggacagttactcttttga

SEQ ID NO: 1778739 - DNA, 25 bp, Homo sapien
cacaatcgcaggtttaaggctcaca

SEQ ID NO: 1778740 - DNA, 25 bp, Homo sapien
cagggaaagggccagtcctgtttca

SEQ ID NO: 1778741 - DNA, 25 bp, Homo sapien
aaagggccagtcctgtttcattctc

SEQ ID NO: 1778742 - DNA, 25 bp, Homo sapien
tttcattctcttgcagagcagaggg

SEQ ID NO: 1778743 - DNA, 25 bp, Homo sapien
tatccatgagtttgtaaaacaatgc

SEQ ID NO: 1778744 - DNA, 25 bp, Homo sapien
gtgaccataccctttacaagcctga

SEQ ID NO: 1778745 - DNA, 25 bp, Homo sapien
aatgtggttcactcaactaccaagg

SEQ ID NO: 1778746 - DNA, 25 bp, Homo sapien
gagccaggacataaaatcaagtctc

SEQ ID NO: 1778747 - DNA, 25 bp, Homo sapien
cattcaaactcataagcaatgcagt

SEQ ID NO: 1778748 - DNA, 25 bp, Homo sapien
agattctagatgttagaattgtcag

SEQ ID NO: 1778749 - DNA, 25 bp, Homo sapien
actagagatgcttgcgtcatttgtt

SEQ ID NO: 1778750 - DNA, 25 bp, Homo sapien
ccagttctcccaacaaagctatttt

SEQ ID NO: 1778751 - DNA, 25 bp, Homo sapien
tctagatgttagaattgtcagatgg

SEQ ID NO: 1778752 - DNA, 25 bp, Homo sapien
tgggttttcttttagtccattatca

SEQ ID NO: 1778753 - DNA, 25 bp, Homo sapien
tcttttagtccattatcaatggtca

SEQ ID NO: 1778754 - DNA, 25 bp, Homo sapien
tgtgccaagaacattgcagctgtca

SEQ ID NO: 1778755 - DNA, 25 bp, Homo sapien
gttttcttttagtccattatcaatg

SEQ ID NO: 1778756 - DNA, 25 bp, Homo sapien
ccttctggttgtgagaggtcagaga

SEQ ID NO: 1778757 - DNA, 25 bp, Homo sapien
tcctctgtccaaaggcagtagggaa

SEQ ID NO: 1778758 - DNA, 25 bp, Homo sapien
ttcctagtggaagggaagtactgct

SEQ ID NO: 1778759 - DNA, 25 bp, Homo sapien
agtactgcttatgatatccttctgg

SEQ ID NO: 1778760 - DNA, 25 bp, Homo sapien
gagtttccaaggttccaaatcctgc

SEQ ID NO: 1778761 - DNA, 25 bp, Homo sapien
cattctggttggaggatttgtctcc

SEQ ID NO: 1778762 - DNA, 25 bp, Homo sapien
aaatcctgcattctggttggaggat

SEQ ID NO: 1778763 - DNA, 25 bp, Homo sapien
tccaaggttccaaatcctgcattct

SEQ ID NO: 1778764 - DNA, 25 bp, Homo sapien
ggtatggaagctactccacttgtac

SEQ ID NO: 1778765 - DNA, 25 bp, Homo sapien
gagatcataaccctcaaggtcagca

SEQ ID NO: 1778766 - DNA, 25 bp, Homo sapien
tcctcctttgacaagggtatggaag

SEQ ID NO: 1778767 - DNA, 25 bp, Homo sapien
cttggcccaatgaaagtgaggtctg

SEQ ID NO: 1778768 - DNA, 25 bp, Homo sapien
gactacagaagtgtacagtaacatt

SEQ ID NO: 1778769 - DNA, 25 bp, Homo sapien
cattctcggtcttcatattcactca

SEQ ID NO: 1778770 - DNA, 25 bp, Homo sapien
acggtaagtgccctagaaatgtgta

SEQ ID NO: 1778771 - DNA, 25 bp, Homo sapien
tcttatcaagttagtgtagcctaag

SEQ ID NO: 1778772 - DNA, 25 bp, Homo sapien
tggcactgtatacggccaccctggt

SEQ ID NO: 1778773 - DNA, 25 bp, Homo sapien
ccctggttgggactatcaaagtgca

SEQ ID NO: 1778774 - DNA, 25 bp, Homo sapien
cacgttgtcaaggtctcagtggcac

SEQ ID NO: 1778775 - DNA, 25 bp, Homo sapien
taagccaggcttgaactaactgaac

SEQ ID NO: 1778776 - DNA, 25 bp, Homo sapien
agcattataattggctcccatgggt

SEQ ID NO: 1778777 - DNA, 25 bp, Homo sapien
gagcaaacgctgaacagaactctga

SEQ ID NO: 1778778 - DNA, 25 bp, Homo sapien
gagcatcgcccggtgcctgagcaac

SEQ ID NO: 1778779 - DNA, 25 bp, Homo sapien
tctctagtgagcaatatgagtgcct

SEQ ID NO: 1778780 - DNA, 25 bp, Homo sapien
ccaatcaacctaattagtcaacaca

SEQ ID NO: 1778781 - DNA, 25 bp, Homo sapien
atacatttgtggtgtacaacgtgat

SEQ ID NO: 1778782 - DNA, 25 bp, Homo sapien
gctgggaaaaagacctgataaactg

SEQ ID NO: 1778783 - DNA, 25 bp, Homo sapien
tgtatacatttgtggtgtacaacgt

SEQ ID NO: 1778784 - DNA, 25 bp, Homo sapien
cagtatgtatatcctgaagcaggag

SEQ ID NO: 1778785 - DNA, 25 bp, Homo sapien
gctgatgacgtctgttgtggtttgc

SEQ ID NO: 1778786 - DNA, 25 bp, Homo sapien
gaaaggcaagggttatatccgctga

SEQ ID NO: 1778787 - DNA, 25 bp, Homo sapien
tccgctgacaattgtgtaagcctgc

SEQ ID NO: 1778788 - DNA, 25 bp, Homo sapien
aaatcaaaggcagggctgttggata

SEQ ID NO: 1778789 - DNA, 25 bp, Homo sapien
cgagaatgcaggagtaaaggaaatc

SEQ ID NO: 1778790 - DNA, 25 bp, Homo sapien
aaatttgggttccccagcgagaatg

SEQ ID NO: 1778791 - DNA, 25 bp, Homo sapien
gggctgttggatatagggtactggg

SEQ ID NO: 1778792 - DNA, 25 bp, Homo sapien
gtgcactccaatgcatctggaggtg

SEQ ID NO: 1778793 - DNA, 25 bp, Homo sapien
cttactgacaatgagcaggtgactg

SEQ ID NO: 1778794 - DNA, 25 bp, Homo sapien
gggtggttgaagtgcactccaatgc

SEQ ID NO: 1778795 - DNA, 25 bp, Homo sapien
tctggaggtgatgttcttactgaca

SEQ ID NO: 1778796 - DNA, 25 bp, Homo sapien
gcacttaattaatcccaggctacag

SEQ ID NO: 1778797 - DNA, 25 bp, Homo sapien
tgcccagtcaccaagaccagtgctg

SEQ ID NO: 1778798 - DNA, 25 bp, Homo sapien
gctacagctggaacgacagcaggga

SEQ ID NO: 1778799 - DNA, 25 bp, Homo sapien
cactgccgacgagagcgattcactt

SEQ ID NO: 1778800 - DNA, 25 bp, Homo sapien
cgtaagatcctctccagcttcggaa

SEQ ID NO: 1778801 - DNA, 25 bp, Homo sapien
ttcattgtccagaatgcctctctgt

SEQ ID NO: 1778802 - DNA, 25 bp, Homo sapien
ggaaatatcgctctagcacaggcat

SEQ ID NO: 1778803 - DNA, 25 bp, Homo sapien
ggtcgcctgcagctcacttttggat

SEQ ID NO: 1778804 - DNA, 25 bp, Homo sapien
tttagaccagagacaccgaaatgaa

SEQ ID NO: 1778805 - DNA, 25 bp, Homo sapien
caagtcctgctaagggatatctagt

SEQ ID NO: 1778806 - DNA, 25 bp, Homo sapien
tgtatacgagacacaatcctttgac

SEQ ID NO: 1778807 - DNA, 25 bp, Homo sapien
tatctagtcttaaacaggttgctga

SEQ ID NO: 1778808 - DNA, 25 bp, Homo sapien
tgtttgcagagaacgagcagagatc

SEQ ID NO: 1778809 - DNA, 25 bp, Homo sapien
tttctgtccagttgaaccagccttg

SEQ ID NO: 1778810 - DNA, 25 bp, Homo sapien
gagatcttgggaataccatcctcca

SEQ ID NO: 1778811 - DNA, 25 bp, Homo sapien
tcgtagggctgggtaaacacacacc

SEQ ID NO: 1778812 - DNA, 25 bp, Homo sapien
ctgtttcctgtgaggccaaatatac

SEQ ID NO: 1778813 - DNA, 25 bp, Homo sapien
cctgtgaggccaaatatacttcgag

SEQ ID NO: 1778814 - DNA, 25 bp, Homo sapien
agagggttattttatggcatttcac

SEQ ID NO: 1778815 - DNA, 25 bp, Homo sapien
ccaaatatacttcgagagagggtta

SEQ ID NO: 1778816 - DNA, 25 bp, Homo sapien
caggaattgctgtattgcctcgcag

SEQ ID NO: 1778817 - DNA, 25 bp, Homo sapien
gcctcgcaggtagaagagtctttcc

SEQ ID NO: 1778818 - DNA, 25 bp, Homo sapien
tgtgctgttgtgcaatggaaacagg

SEQ ID NO: 1778819 - DNA, 25 bp, Homo sapien
taagtataatattatgggcaaggcc

SEQ ID NO: 1778820 - DNA, 25 bp, Homo sapien
aattctccacgaaggaattatttct

SEQ ID NO: 1778821 - DNA, 25 bp, Homo sapien
taggaacgagataggcataaattct

SEQ ID NO: 1778822 - DNA, 25 bp, Homo sapien
tcctttttgtcataggaacgagata

SEQ ID NO: 1778823 - DNA, 25 bp, Homo sapien
gcataaattctccacgaaggaatta

SEQ ID NO: 1778824 - DNA, 25 bp, Homo sapien
catggagaaaggctttaggtgctgt

SEQ ID NO: 1778825 - DNA, 25 bp, Homo sapien
ttagaatagtgcatcattccttccc

SEQ ID NO: 1778826 - DNA, 25 bp, Homo sapien
tcattcccatgaccttagaatagtg

SEQ ID NO: 1778827 - DNA, 25 bp, Homo sapien
taggtgctgtcgtttagtacacatc

SEQ ID NO: 1778828 - DNA, 25 bp, Homo sapien
gatgggtcccaatctacaaaggagg

SEQ ID NO: 1778829 - DNA, 25 bp, Homo sapien
gaaatgttattagtgcacctcagga

SEQ ID NO: 1778830 - DNA, 25 bp, Homo sapien
taaaatagagtttccctgggtgaca

SEQ ID NO: 1778831 - DNA, 25 bp, Homo sapien
caagagctgtcatgtcccaaggaag

SEQ ID NO: 1778832 - DNA, 25 bp, Homo sapien
agcgacagcaatgcccaatgggaga

SEQ ID NO: 1778833 - DNA, 25 bp, Homo sapien
taactgcagcaacgtatggagcaac

SEQ ID NO: 1778834 - DNA, 25 bp, Homo sapien
gcaacgtatggagcaacagcgacag

SEQ ID NO: 1778835 - DNA, 25 bp, Homo sapien
tcctcaagtgccgtaactgcagcaa

SEQ ID NO: 1778836 - DNA, 25 bp, Homo sapien
aaccattgggtttgcaacttcaggg

SEQ ID NO: 1778837 - DNA, 25 bp, Homo sapien
gaagtatccccaggtcagtatcaca

SEQ ID NO: 1778838 - DNA, 25 bp, Homo sapien
gagagccaatcataattcagctgtt

SEQ ID NO: 1778839 - DNA, 25 bp, Homo sapien
cacttcatactaaaaggccagtttg

SEQ ID NO: 1778840 - DNA, 25 bp, Homo sapien
cagctctcctgcaagtggcagatgc

SEQ ID NO: 1778841 - DNA, 25 bp, Homo sapien
ccagccatcggctaggagtcgagac

SEQ ID NO: 1778842 - DNA, 25 bp, Homo sapien
aaagttcggtgaggctcgactagga

SEQ ID NO: 1778843 - DNA, 25 bp, Homo sapien
cctggaacgttcatcccagagtgtg

SEQ ID NO: 1778844 - DNA, 25 bp, Homo sapien
tagcaagacaaactgggctaccagg

SEQ ID NO: 1778845 - DNA, 25 bp, Homo sapien
ggtgagagcttcgtaaattccttgc

SEQ ID NO: 1778846 - DNA, 25 bp, Homo sapien
aaccgtaagagtatgatgggcaaac

SEQ ID NO: 1778847 - DNA, 25 bp, Homo sapien
tagtcagttacggtaccacggagcc

SEQ ID NO: 1778848 - DNA, 25 bp, Homo sapien
gaaagggatactgatataagagtag

SEQ ID NO: 1778849 - DNA, 25 bp, Homo sapien
caagtagcttcacaatggaactgga

SEQ ID NO: 1778850 - DNA, 25 bp, Homo sapien
ggaactggaaagggatactgatata

SEQ ID NO: 1778851 - DNA, 25 bp, Homo sapien
gaatggacaagtagcttcacaatgg

SEQ ID NO: 1778852 - DNA, 25 bp, Homo sapien
tctggcgcacgatgcccacagtttg

SEQ ID NO: 1778853 - DNA, 25 bp, Homo sapien
gttggcttgtgaaggcgctctctcc

SEQ ID NO: 1778854 - DNA, 25 bp, Homo sapien
tggttcccagatagagagctttaga

SEQ ID NO: 1778855 - DNA, 25 bp, Homo sapien
ttaatcgacgtaagatgcccagccg

SEQ ID NO: 1778856 - DNA, 25 bp, Homo sapien
gatggatggtcccacagatttgcca

SEQ ID NO: 1778857 - DNA, 25 bp, Homo sapien
gaactttagtcttgtagcactggta

SEQ ID NO: 1778858 - DNA, 25 bp, Homo sapien
cagatttgccactgattgtccactc

SEQ ID NO: 1778859 - DNA, 25 bp, Homo sapien
cactggtatactgccgatgggatgg

SEQ ID NO: 1778860 - DNA, 25 bp, Homo sapien
gaaatggaccaaattgcaggaggta

SEQ ID NO: 1778861 - DNA, 25 bp, Homo sapien
ggccccaaagaaaatacgctgagta

SEQ ID NO: 1778862 - DNA, 25 bp, Homo sapien
tcaaatgaacaattgcatctttctc

SEQ ID NO: 1778863 - DNA, 25 bp, Homo sapien
gagtaccagggtcatcaaatgaaca

SEQ ID NO: 1778864 - DNA, 25 bp, Homo sapien
aagtatttgggagttcttcattcca

SEQ ID NO: 1778865 - DNA, 25 bp, Homo sapien
tcaaccaccacactctccgctggag

SEQ ID NO: 1778866 - DNA, 25 bp, Homo sapien
ccaggaagtatttgggagttcttca

SEQ ID NO: 1778867 - DNA, 25 bp, Homo sapien
ggaagtatttgggagttcttcattc

SEQ ID NO: 1778868 - DNA, 25 bp, Homo sapien
tgtcagggacagagcagtagctact

SEQ ID NO: 1778869 - DNA, 25 bp, Homo sapien
tatgtcaaggtcatttcagggtgag

SEQ ID NO: 1778870 - DNA, 25 bp, Homo sapien
agactctggcccctgtcgtggtatg

SEQ ID NO: 1778871 - DNA, 25 bp, Homo sapien
cagagcagtagctactgggcttcca

SEQ ID NO: 1778872 - DNA, 25 bp, Homo sapien
gcagatgtctatgtagcctcttatg

SEQ ID NO: 1778873 - DNA, 25 bp, Homo sapien
taaaagcttgtgctaggaagcagat

SEQ ID NO: 1778874 - DNA, 25 bp, Homo sapien
ctaggaagcagatgtctatgtagcc

SEQ ID NO: 1778875 - DNA, 25 bp, Homo sapien
tcacgctgcctctggttaataaaag

SEQ ID NO: 1778876 - DNA, 25 bp, Homo sapien
agattccatttcagtgctgacactg

SEQ ID NO: 1778877 - DNA, 25 bp, Homo sapien
ctggaagattccatttcagtgctga

SEQ ID NO: 1778878 - DNA, 25 bp, Homo sapien
ttccatttcagtgctgacactgtcc

SEQ ID NO: 1778879 - DNA, 25 bp, Homo sapien
ccatttcagtgctgacactgtccat

SEQ ID NO: 1778880 - DNA, 25 bp, Homo sapien
gatttagggaaactgaggaagagta

SEQ ID NO: 1778881 - DNA, 25 bp, Homo sapien
ttagatttagggaaactgaggaaga

SEQ ID NO: 1778882 - DNA, 25 bp, Homo sapien
agatttagggaaactgaggaagagt

SEQ ID NO: 1778883 - DNA, 25 bp, Homo sapien
tagatttagggaaactgaggaagag

SEQ ID NO: 1778884 - DNA, 25 bp, Homo sapien
tcactgtgtaatattgatgaagttt

SEQ ID NO: 1778885 - DNA, 25 bp, Homo sapien
cactgtgtaatattgatgaagtttt

SEQ ID NO: 1778886 - DNA, 25 bp, Homo sapien
attgatgaagtttttaatgcctgtg

SEQ ID NO: 1778887 - DNA, 25 bp, Homo sapien
aatcactgtgtaatattgatgaagt

SEQ ID NO: 1778888 - DNA, 25 bp, Homo sapien
ctgttgctgtaatctcatgggctcc

SEQ ID NO: 1778889 - DNA, 25 bp, Homo sapien
cccgtctgaccccttagtcgtatat

SEQ ID NO: 1778890 - DNA, 25 bp, Homo sapien
gtctgaccccttagtcgtatatctc

SEQ ID NO: 1778891 - DNA, 25 bp, Homo sapien
gcggaagtcaatgaatgggtaggag

SEQ ID NO: 1778892 - DNA, 25 bp, Homo sapien
tcaatgaatgggtaggagccacggc

SEQ ID NO: 1778893 - DNA, 25 bp, Homo sapien
tcgaagttcagagggaaatgaggat

SEQ ID NO: 1778894 - DNA, 25 bp, Homo sapien
gaaggcagaccccagaaggtttcga

SEQ ID NO: 1778895 - DNA, 25 bp, Homo sapien
ccccagaaggtttcgaagttcagag

SEQ ID NO: 1778896 - DNA, 25 bp, Homo sapien
gtttcgaagttcagagggaaatgag

SEQ ID NO: 1778897 - DNA, 25 bp, Homo sapien
ttacttcacttgtgaggaaactcaa

SEQ ID NO: 1778898 - DNA, 25 bp, Homo sapien
aattacttcacttgtgaggaaactc

SEQ ID NO: 1778899 - DNA, 25 bp, Homo sapien
agaattacttcacttgtgaggaaac

SEQ ID NO: 1778900 - DNA, 25 bp, Homo sapien
tacttcacttgtgaggaaactcaaa

SEQ ID NO: 1778901 - DNA, 25 bp, Homo sapien
ttatacttttaaagctgacctgatc

SEQ ID NO: 1778902 - DNA, 25 bp, Homo sapien
taaagctgacctgatctcatttgac

SEQ ID NO: 1778903 - DNA, 25 bp, Homo sapien
tatacttttaaagctgacctgatct

SEQ ID NO: 1778904 - DNA, 25 bp, Homo sapien
gttgagcccaggtgctcagaagtcc

SEQ ID NO: 1778905 - DNA, 25 bp, Homo sapien
tcactcgatgagtggaggattgtga

SEQ ID NO: 1778906 - DNA, 25 bp, Homo sapien
cccaggtgctcagaagtcctggagg

SEQ ID NO: 1778907 - DNA, 25 bp, Homo sapien
tggaggattgtgagtaccaggtggg

SEQ ID NO: 1778908 - DNA, 25 bp, Homo sapien
gaggagaagtctgaacaagtcccag

SEQ ID NO: 1778909 - DNA, 25 bp, Homo sapien
agaagtctgaacaagtcccagcgga

SEQ ID NO: 1778910 - DNA, 25 bp, Homo sapien
cactcacaagtgtgaggagaagtct

SEQ ID NO: 1778911 - DNA, 25 bp, Homo sapien
ttggcactcacaagtgtgaggagaa

SEQ ID NO: 1778912 - DNA, 25 bp, Homo sapien
cagccagaagccctgagtgcaccat

SEQ ID NO: 1778913 - DNA, 25 bp, Homo sapien
aagccctgagtgcaccatcatggag

SEQ ID NO: 1778914 - DNA, 25 bp, Homo sapien
tgccctggcacttccgcagctgaag

SEQ ID NO: 1778915 - DNA, 25 bp, Homo sapien
gaaagcaccactaccacagccagtg

SEQ ID NO: 1778916 - DNA, 25 bp, Homo sapien
gagacctatagcctggggaccttgc

SEQ ID NO: 1778917 - DNA, 25 bp, Homo sapien
tgttagatatagtggcattggccac

SEQ ID NO: 1778918 - DNA, 25 bp, Homo sapien
ctgttatggtggctgttgttagata

SEQ ID NO: 1778919 - DNA, 25 bp, Homo sapien
ggggtgcacacctggccttgtacat

SEQ ID NO: 1778920 - DNA, 25 bp, Homo sapien
tccaatttaggcctgttaaataatg

SEQ ID NO: 1778921 - DNA, 25 bp, Homo sapien
caatttaggcctgttaaataatgtt

SEQ ID NO: 1778922 - DNA, 25 bp, Homo sapien
cacccaacttcacaatttccaacca

SEQ ID NO: 1778923 - DNA, 25 bp, Homo sapien
caaccaattttccaatttaggcctg

SEQ ID NO: 1778924 - DNA, 25 bp, Homo sapien
tattcataaaatagctgccagaaaa

SEQ ID NO: 1778925 - DNA, 25 bp, Homo sapien
catctctagacattaaagtttcatt

SEQ ID NO: 1778926 - DNA, 25 bp, Homo sapien
agtttagcatctctagacattaaag

SEQ ID NO: 1778927 - DNA, 25 bp, Homo sapien
ttcacagtttagcatctctagacat

SEQ ID NO: 1778928 - DNA, 25 bp, Homo sapien
ccaaggtagtcttcatccagcaggt

SEQ ID NO: 1778929 - DNA, 25 bp, Homo sapien
gggcttgtggtataattccacgaag

SEQ ID NO: 1778930 - DNA, 25 bp, Homo sapien
gccaatctcccctgagtatgttgta

SEQ ID NO: 1778931 - DNA, 25 bp, Homo sapien
cacgaagcagccttgatgcatggaa

SEQ ID NO: 1778932 - DNA, 25 bp, Homo sapien
catttgtcaagcgatcaaacaagaa

SEQ ID NO: 1778933 - DNA, 25 bp, Homo sapien
tcaaaatcccacattcccactttgg

SEQ ID NO: 1778934 - DNA, 25 bp, Homo sapien
caagcgatcaaacaagaaaatgtca

SEQ ID NO: 1778935 - DNA, 25 bp, Homo sapien
aaaatgtcaaaatcccacattccca

SEQ ID NO: 1778936 - DNA, 25 bp, Homo sapien
gcaggaaaacagtcacttcctttaa

SEQ ID NO: 1778937 - DNA, 25 bp, Homo sapien
tgcaggaaaacagtcacttccttta

SEQ ID NO: 1778938 - DNA, 25 bp, Homo sapien
ctgcaggaaaacagtcacttccttt

SEQ ID NO: 1778939 - DNA, 25 bp, Homo sapien
gaaatggtgaatgagtccatgggta

SEQ ID NO: 1778940 - DNA, 25 bp, Homo sapien
ctaaaaatcggtgtaaggtcaccat

SEQ ID NO: 1778941 - DNA, 25 bp, Homo sapien
gtggcacaacagtgttaccaggctg

SEQ ID NO: 1778942 - DNA, 25 bp, Homo sapien
tccatgggtattgaagaggtggcac

SEQ ID NO: 1778943 - DNA, 25 bp, Homo sapien
ctgggaggtaaacagataactcaat

SEQ ID NO: 1778944 - DNA, 25 bp, Homo sapien
ggaggtaaacagataactcaatcaa

SEQ ID NO: 1778945 - DNA, 25 bp, Homo sapien
gggaggtaaacagataactcaatca

SEQ ID NO: 1778946 - DNA, 25 bp, Homo sapien
tgggaggtaaacagataactcaatc

SEQ ID NO: 1778947 - DNA, 25 bp, Homo sapien
gcctgggtgacgtcggctgcgtgaa

SEQ ID NO: 1778948 - DNA, 25 bp, Homo sapien
ggctgcgtgaacagcattgtgatac

SEQ ID NO: 1778949 - DNA, 25 bp, Homo sapien
tttcaggtagcagtgcatggcctgg

SEQ ID NO: 1778950 - DNA, 25 bp, Homo sapien
tgatacgggttttggctgtggtaat

SEQ ID NO: 1778951 - DNA, 25 bp, Homo sapien
ggagattgattggtgtattttcaca

SEQ ID NO: 1778952 - DNA, 25 bp, Homo sapien
gggagattgattggtgtattttcac

SEQ ID NO: 1778953 - DNA, 25 bp, Homo sapien
tgggagattgattggtgtattttca

SEQ ID NO: 1778954 - DNA, 25 bp, Homo sapien
tgggtggtccacatcgtgtgctgct

SEQ ID NO: 1778955 - DNA, 25 bp, Homo sapien
ccaagcatgatgtccagaggcgtga

SEQ ID NO: 1778956 - DNA, 25 bp, Homo sapien
ctgatataggtttgcaagatggtgg

SEQ ID NO: 1778957 - DNA, 25 bp, Homo sapien
tttatcaaaaatggctggttcaccc

SEQ ID NO: 1778958 - DNA, 25 bp, Homo sapien
gattgaccatactgtggctggctcc

SEQ ID NO: 1778959 - DNA, 25 bp, Homo sapien
caaactgggattaagtttgcttgga

SEQ ID NO: 1778960 - DNA, 25 bp, Homo sapien
tctccatgggcaagattcaggcttg

SEQ ID NO: 1778961 - DNA, 25 bp, Homo sapien
tgagcaccgggcctaaggcgattga

SEQ ID NO: 1778962 - DNA, 25 bp, Homo sapien
tcgacatgagctaattcctcaaacc

SEQ ID NO: 1778963 - DNA, 25 bp, Homo sapien
caagtatttactctttagagatttt

SEQ ID NO: 1778964 - DNA, 25 bp, Homo sapien
taaaaaacaattgtatcgacatgag

SEQ ID NO: 1778965 - DNA, 25 bp, Homo sapien
ttgtatcgacatgagctaattcctc

SEQ ID NO: 1778966 - DNA, 25 bp, Homo sapien
atgagagaggtgccaagtagaagtg

SEQ ID NO: 1778967 - DNA, 25 bp, Homo sapien
tggactgcttccagtctgatgagag

SEQ ID NO: 1778968 - DNA, 25 bp, Homo sapien
gatgagagaggtgccaagtagaagt

SEQ ID NO: 1778969 - DNA, 25 bp, Homo sapien
tgatgagagaggtgccaagtagaag

SEQ ID NO: 1778970 - DNA, 25 bp, Homo sapien
gcccaccattaaatttgtatgtgtg

SEQ ID NO: 1778971 - DNA, 25 bp, Homo sapien
aagcccaccattaaatttgtatgtg

SEQ ID NO: 1778972 - DNA, 25 bp, Homo sapien
ccaccattaaatttgtatgtgtggg

SEQ ID NO: 1778973 - DNA, 25 bp, Homo sapien
agcccaccattaaatttgtatgtgt

SEQ ID NO: 1778974 - DNA, 25 bp, Homo sapien
ccttgaagaaacgatagcactgcct

SEQ ID NO: 1778975 - DNA, 25 bp, Homo sapien
ccttgagccctaaacaagaccttgg

SEQ ID NO: 1778976 - DNA, 25 bp, Homo sapien
tccttggtaacactatgagagcccc

SEQ ID NO: 1778977 - DNA, 25 bp, Homo sapien
gatgccaattgctgtctgcagggaa

SEQ ID NO: 1778978 - DNA, 25 bp, Homo sapien
ggttgaatgaggatctatttccagc

SEQ ID NO: 1778979 - DNA, 25 bp, Homo sapien
ttgaatgaggatctatttccagcat

SEQ ID NO: 1778980 - DNA, 25 bp, Homo sapien
tctgctgcagggttgaatgaggatc

SEQ ID NO: 1778981 - DNA, 25 bp, Homo sapien
tgcagggttgaatgaggatctattt

SEQ ID NO: 1778982 - DNA, 25 bp, Homo sapien
gatgattctccagcacagacatatt

SEQ ID NO: 1778983 - DNA, 25 bp, Homo sapien
gccaattgtagatcgccagtgatga

SEQ ID NO: 1778984 - DNA, 25 bp, Homo sapien
gaagccttgattctcgaagcatgcc

SEQ ID NO: 1778985 - DNA, 25 bp, Homo sapien
gattctcgaagcatgccaattgtag

SEQ ID NO: 1778986 - DNA, 25 bp, Homo sapien
tgaagcataaagtgcctgtcctgtg

SEQ ID NO: 1778987 - DNA, 25 bp, Homo sapien
tctgcctgttgatgtctgttgccaa

SEQ ID NO: 1778988 - DNA, 25 bp, Homo sapien
tgtgcatcctccagtcttaagtctt

SEQ ID NO: 1778989 - DNA, 25 bp, Homo sapien
ttaagtctttattgtggaggtgagc

SEQ ID NO: 1778990 - DNA, 25 bp, Homo sapien
gttaccttgaattcccagagaagca

SEQ ID NO: 1778991 - DNA, 25 bp, Homo sapien
gagggttaccttgaattcccagaga

SEQ ID NO: 1778992 - DNA, 25 bp, Homo sapien
ctatgagggttaccttgaattccca

SEQ ID NO: 1778993 - DNA, 25 bp, Homo sapien
atgaccctatgagggttaccttgaa

SEQ ID NO: 1778994 - DNA, 25 bp, Homo sapien
gcttgctcatctcccagattctaca

SEQ ID NO: 1778995 - DNA, 25 bp, Homo sapien
gattctacaaggattgcaaatgtca

SEQ ID NO: 1778996 - DNA, 25 bp, Homo sapien
ttcacagaccctttcactccactgc

SEQ ID NO: 1778997 - DNA, 25 bp, Homo sapien
gcaaatgtcagcacacttcaaggcg

SEQ ID NO: 1778998 - DNA, 25 bp, Homo sapien
tgttgatgcctgaacaaacatcctg

SEQ ID NO: 1778999 - DNA, 25 bp, Homo sapien
tcttatatccacagaggagagccat

SEQ ID NO: 1779000 - DNA, 25 bp, Homo sapien
gaagaactcactttttggtcagctg

SEQ ID NO: 1779001 - DNA, 25 bp, Homo sapien
gattctgtcactagcatgagggcac

SEQ ID NO: 1779002 - DNA, 25 bp, Homo sapien
tacataagtgacatggtcctgcccc

SEQ ID NO: 1779003 - DNA, 25 bp, Homo sapien
catgctgggcatgattgagtcaaaa

SEQ ID NO: 1779004 - DNA, 25 bp, Homo sapien
aaaaggtttacactgcagtcgatgc

SEQ ID NO: 1779005 - DNA, 25 bp, Homo sapien
tgccccaaggtgctcagaatccaaa

SEQ ID NO: 1779006 - DNA, 25 bp, Homo sapien
aggaaggtacatggaagcctgcctt

SEQ ID NO: 1779007 - DNA, 25 bp, Homo sapien
cagcctataatcttctcttaaaaca

SEQ ID NO: 1779008 - DNA, 25 bp, Homo sapien
gaatttctactagaccataaggcta

SEQ ID NO: 1779009 - DNA, 25 bp, Homo sapien
cctgcctttagagatcagtgttaca

SEQ ID NO: 1779010 - DNA, 25 bp, Homo sapien
tctgagataactcccattgtcatgt

SEQ ID NO: 1779011 - DNA, 25 bp, Homo sapien
cccattgtcatgttctctactgtag

SEQ ID NO: 1779012 - DNA, 25 bp, Homo sapien
gttctctactgtagcctggtgccca

SEQ ID NO: 1779013 - DNA, 25 bp, Homo sapien
tgagataactcccattgtcatgttc

SEQ ID NO: 1779014 - DNA, 25 bp, Homo sapien
actagggatggaatctttctgttga

SEQ ID NO: 1779015 - DNA, 25 bp, Homo sapien
ttgtatactagggatggaatctttc

SEQ ID NO: 1779016 - DNA, 25 bp, Homo sapien
caatttgtatactagggatggaatc

SEQ ID NO: 1779017 - DNA, 25 bp, Homo sapien
tatactagggatggaatctttctgt

SEQ ID NO: 1779018 - DNA, 25 bp, Homo sapien
actgtgaatgcgttcagctgtctga

SEQ ID NO: 1779019 - DNA, 25 bp, Homo sapien
tccactgggccttgttgtgtgcgag

SEQ ID NO: 1779020 - DNA, 25 bp, Homo sapien
ggaagagcggctccacgatgtagct

SEQ ID NO: 1779021 - DNA, 25 bp, Homo sapien
aaatgggcccattcccggaagagcg

SEQ ID NO: 1779022 - DNA, 25 bp, Homo sapien
ttctccgacagggtgctgttacccg

SEQ ID NO: 1779023 - DNA, 25 bp, Homo sapien
gaattgctgcctgttccagtgcgac

SEQ ID NO: 1779024 - DNA, 25 bp, Homo sapien
tcacgcagatcagcagtcagatagc

SEQ ID NO: 1779025 - DNA, 25 bp, Homo sapien
caaacgctccggacttaggaattgc

SEQ ID NO: 1779026 - DNA, 25 bp, Homo sapien
agatggcgttccaaagagccccagg

SEQ ID NO: 1779027 - DNA, 25 bp, Homo sapien
caaactgattttacggccaggtgtc

SEQ ID NO: 1779028 - DNA, 25 bp, Homo sapien
tctgaggaaacgatgcttggtgcca

SEQ ID NO: 1779029 - DNA, 25 bp, Homo sapien
taactacaatgacctgccaggaagg

SEQ ID NO: 1779030 - DNA, 25 bp, Homo sapien
aacactatggtctcaagcggaatgc

SEQ ID NO: 1779031 - DNA, 25 bp, Homo sapien
tcccctgccttggaaacctcctcta

SEQ ID NO: 1779032 - DNA, 25 bp, Homo sapien
cctgccttggaaacctcctctacca

SEQ ID NO: 1779033 - DNA, 25 bp, Homo sapien
ctgccttggaaacctcctctaccat

SEQ ID NO: 1779034 - DNA, 25 bp, Homo sapien
atctcccctgccttggaaacctcct

SEQ ID NO: 1779035 - DNA, 25 bp, Homo sapien
cctccatatggatctccatagcctc

SEQ ID NO: 1779036 - DNA, 25 bp, Homo sapien
tccatatggatctccatagcctctt

SEQ ID NO: 1779037 - DNA, 25 bp, Homo sapien
ccatatggatctccatagcctcttc

SEQ ID NO: 1779038 - DNA, 25 bp, Homo sapien
catatggatctccatagcctcttcc

SEQ ID NO: 1779039 - DNA, 25 bp, Homo sapien
gctgtctatctggtaggcatctgaa

SEQ ID NO: 1779040 - DNA, 25 bp, Homo sapien
ggtaggcatctgaatgaccattaat

SEQ ID NO: 1779041 - DNA, 25 bp, Homo sapien
ctatctggtaggcatctgaatgacc

SEQ ID NO: 1779042 - DNA, 25 bp, Homo sapien
ttcttggtttgctgtctatctggta

SEQ ID NO: 1779043 - DNA, 25 bp, Homo sapien
ctgcacggcttgcagtacaagtgcc

SEQ ID NO: 1779044 - DNA, 25 bp, Homo sapien
tgcagtacaagtgccctgcttccac

SEQ ID NO: 1779045 - DNA, 25 bp, Homo sapien
cctgcttccacttggaggaaagggc

SEQ ID NO: 1779046 - DNA, 25 bp, Homo sapien
gccctgcttccacttggaggaaagg

SEQ ID NO: 1779047 - DNA, 25 bp, Homo sapien
tgcggtcatcagtttcccacaggtc

SEQ ID NO: 1779048 - DNA, 25 bp, Homo sapien
cttcagaggcaaatgcggtcatcag

SEQ ID NO: 1779049 - DNA, 25 bp, Homo sapien
tgcgcaaactctgtgcgtggatgtg

SEQ ID NO: 1779050 - DNA, 25 bp, Homo sapien
ggatgtgtgcgcaccactttctttt

SEQ ID NO: 1779051 - DNA, 25 bp, Homo sapien
agtggttcactgtgaatcctacatt

SEQ ID NO: 1779052 - DNA, 25 bp, Homo sapien
cagtggttcactgtgaatcctacat

SEQ ID NO: 1779053 - DNA, 25 bp, Homo sapien
tcagtggttcactgtgaatcctaca

SEQ ID NO: 1779054 - DNA, 25 bp, Homo sapien
cagctttctcttgcaagttacgtta

SEQ ID NO: 1779055 - DNA, 25 bp, Homo sapien
caaaatcttgactggttgatatgca

SEQ ID NO: 1779056 - DNA, 25 bp, Homo sapien
gagacgtgactacctaggagtgtgt

SEQ ID NO: 1779057 - DNA, 25 bp, Homo sapien
tagttagtgccctcaaactaaggtg

SEQ ID NO: 1779058 - DNA, 25 bp, Homo sapien
tggctgtaggtgcatgcttggtccc

SEQ ID NO: 1779059 - DNA, 25 bp, Homo sapien
tcgggcttagtatcaagtggcaact

SEQ ID NO: 1779060 - DNA, 25 bp, Homo sapien
gcttggtcccaactagatcttgtac

SEQ ID NO: 1779061 - DNA, 25 bp, Homo sapien
caggaagagcatgaggcagcttgtt

SEQ ID NO: 1779062 - DNA, 25 bp, Homo sapien
tgtgaccaaagcgagggacgcgatc

SEQ ID NO: 1779063 - DNA, 25 bp, Homo sapien
catcgttaccgcctgtggctgcaag

SEQ ID NO: 1779064 - DNA, 25 bp, Homo sapien
gacgtctgagcgatctgcacaagga

SEQ ID NO: 1779065 - DNA, 25 bp, Homo sapien
taacgccctccgcttgatgttctgg

SEQ ID NO: 1779066 - DNA, 25 bp, Homo sapien
aaatcacataggatcaggagactgg

SEQ ID NO: 1779067 - DNA, 25 bp, Homo sapien
gactggtatttgatacttgtccgat

SEQ ID NO: 1779068 - DNA, 25 bp, Homo sapien
cgctcccagccaagataggttcttg

SEQ ID NO: 1779069 - DNA, 25 bp, Homo sapien
tgggctgtcttaaaaattgctggga

SEQ ID NO: 1779070 - DNA, 25 bp, Homo sapien
tataccagagtgtagtaggctaggg

SEQ ID NO: 1779071 - DNA, 25 bp, Homo sapien
taggctagggtgattgtaagaactc

SEQ ID NO: 1779072 - DNA, 25 bp, Homo sapien
tatgtgtacctttcagcatcctagg

SEQ ID NO: 1779073 - DNA, 25 bp, Homo sapien
gctaaacgattcttactcagtgtga

SEQ ID NO: 1779074 - DNA, 25 bp, Homo sapien
cgaggatttgcagtgcgtctagcac

SEQ ID NO: 1779075 - DNA, 25 bp, Homo sapien
gtctagcacctagattacagccagg

SEQ ID NO: 1779076 - DNA, 25 bp, Homo sapien
cgtgtgaaagcaacatggatgtgat

SEQ ID NO: 1779077 - DNA, 25 bp, Homo sapien
tatggccctcagatccttagtattg

SEQ ID NO: 1779078 - DNA, 25 bp, Homo sapien
tgtcaccaataaaagttttggcagg

SEQ ID NO: 1779079 - DNA, 25 bp, Homo sapien
caggaagcttgttgcggcattgatc

SEQ ID NO: 1779080 - DNA, 25 bp, Homo sapien
cctcttaagagttctattcttcagg

SEQ ID NO: 1779081 - DNA, 25 bp, Homo sapien
gttaagtgtctgctttatgggcata

SEQ ID NO: 1779082 - DNA, 25 bp, Homo sapien
aatttgaacacactacatcgtaggg

SEQ ID NO: 1779083 - DNA, 25 bp, Homo sapien
tataagatatggtcaagtacagctc

SEQ ID NO: 1779084 - DNA, 25 bp, Homo sapien
cgttagctctacatataaatcctgg

SEQ ID NO: 1779085 - DNA, 25 bp, Homo sapien
catcgtagggtgactgatttttgaa

SEQ ID NO: 1779086 - DNA, 25 bp, Homo sapien
ctttgcaggagttagccgaccacga

SEQ ID NO: 1779087 - DNA, 25 bp, Homo sapien
tctgttgtaagattcagcagggtct

SEQ ID NO: 1779088 - DNA, 25 bp, Homo sapien
gacttcgagatcaataactgtacct

SEQ ID NO: 1779089 - DNA, 25 bp, Homo sapien
gaccacgaggaacctttgtaagtga

SEQ ID NO: 1779090 - DNA, 25 bp, Homo sapien
tcttttatttaggtagaaggctaca

SEQ ID NO: 1779091 - DNA, 25 bp, Homo sapien
gaaggctacattacaactacagatt

SEQ ID NO: 1779092 - DNA, 25 bp, Homo sapien
gagcttgatcataatgaggcttaag

SEQ ID NO: 1779093 - DNA, 25 bp, Homo sapien
ttggtcagattatttgggaagagct

SEQ ID NO: 1779094 - DNA, 25 bp, Homo sapien
cagggacctgtgagcaactttcgaa

SEQ ID NO: 1779095 - DNA, 25 bp, Homo sapien
tagatgtagtattgacagggacctg

SEQ ID NO: 1779096 - DNA, 25 bp, Homo sapien
gaaacactctcctgttgaggtacaa

SEQ ID NO: 1779097 - DNA, 25 bp, Homo sapien
ggcagcatatagtcactgatgaaat

SEQ ID NO: 1779098 - DNA, 25 bp, Homo sapien
tgtggtaaagctgtcatcacgccgc

SEQ ID NO: 1779099 - DNA, 25 bp, Homo sapien
taatctccagttaggcgtccaagag

SEQ ID NO: 1779100 - DNA, 25 bp, Homo sapien
taggccctaagaaagtgcagcccgg

SEQ ID NO: 1779101 - DNA, 25 bp, Homo sapien
gatttgatcagacgccacgaaaggg

SEQ ID NO: 1779102 - DNA, 25 bp, Homo sapien
tctttgtcatattgacctctccaca

SEQ ID NO: 1779103 - DNA, 25 bp, Homo sapien
cacagactcatggagtcactctcca

SEQ ID NO: 1779104 - DNA, 25 bp, Homo sapien
tccacagactcatggagtcactctc

SEQ ID NO: 1779105 - DNA, 25 bp, Homo sapien
catattgacctctccacagactcat

SEQ ID NO: 1779106 - DNA, 25 bp, Homo sapien
cctggagtcatcagtcatgagtcag

SEQ ID NO: 1779107 - DNA, 25 bp, Homo sapien
atttttccctggagtcatcagtcat

SEQ ID NO: 1779108 - DNA, 25 bp, Homo sapien
tccctggagtcatcagtcatgagtc

SEQ ID NO: 1779109 - DNA, 25 bp, Homo sapien
tttccctggagtcatcagtcatgag

SEQ ID NO: 1779110 - DNA, 25 bp, Homo sapien
cagtagttctatggcggagtctgag

SEQ ID NO: 1779111 - DNA, 25 bp, Homo sapien
ttgctgcagcgtcatttcctcgagg

SEQ ID NO: 1779112 - DNA, 25 bp, Homo sapien
cattactgggatgaacgggaatacc

SEQ ID NO: 1779113 - DNA, 25 bp, Homo sapien
catttcctcgattagcattactggg

SEQ ID NO: 1779114 - DNA, 25 bp, Homo sapien
acatcagcgatggcgcattagctga

SEQ ID NO: 1779115 - DNA, 25 bp, Homo sapien
gcgatggcgcattagctgagttcaa

SEQ ID NO: 1779116 - DNA, 25 bp, Homo sapien
gatggcgcattagctgagttcaaga

SEQ ID NO: 1779117 - DNA, 25 bp, Homo sapien
tcagcgatggcgcattagctgagtt

SEQ ID NO: 1779118 - DNA, 25 bp, Homo sapien
acagcaaaacaactcggaggagaat

SEQ ID NO: 1779119 - DNA, 25 bp, Homo sapien
tcttgggcactgcttcgatgatacc

SEQ ID NO: 1779120 - DNA, 25 bp, Homo sapien
ggcactgcttcgatgatacccacag

SEQ ID NO: 1779121 - DNA, 25 bp, Homo sapien
caaaacaactcggaggagaatagtc

SEQ ID NO: 1779122 - DNA, 25 bp, Homo sapien
gctgatgaaattggccagtctgaca

SEQ ID NO: 1779123 - DNA, 25 bp, Homo sapien
ctgatgaaattggccagtctgacat

SEQ ID NO: 1779124 - DNA, 25 bp, Homo sapien
ggctgatgaaattggccagtctgac

SEQ ID NO: 1779125 - DNA, 25 bp, Homo sapien
ggctggcagaggcttttgtacacga

SEQ ID NO: 1779126 - DNA, 25 bp, Homo sapien
cagatggaagtgacaagggttgtca

SEQ ID NO: 1779127 - DNA, 25 bp, Homo sapien
aacaaacaggctttgctggctggca

SEQ ID NO: 1779128 - DNA, 25 bp, Homo sapien
cacgagtgtgtgtatcctctgagtc

SEQ ID NO: 1779129 - DNA, 25 bp, Homo sapien
tcttcttagctgtgttttgtcacac

SEQ ID NO: 1779130 - DNA, 25 bp, Homo sapien
catcattagcaaacggaaagccttc

SEQ ID NO: 1779131 - DNA, 25 bp, Homo sapien
tatttacttgcagaccttaaggagg

SEQ ID NO: 1779132 - DNA, 25 bp, Homo sapien
gagaatgaccctgacctttacaatg

SEQ ID NO: 1779133 - DNA, 25 bp, Homo sapien
tatattgtgttaaagagcagcgctg

SEQ ID NO: 1779134 - DNA, 25 bp, Homo sapien
tgagcctagctgtacaaacttgcac

SEQ ID NO: 1779135 - DNA, 25 bp, Homo sapien
gaagtccttgctctgcgtggcatct

SEQ ID NO: 1779136 - DNA, 25 bp, Homo sapien
tgtttggcacacaggacacggacct

SEQ ID NO: 1779137 - DNA, 25 bp, Homo sapien
tgatgttaccacgatagaatgttac

SEQ ID NO: 1779138 - DNA, 25 bp, Homo sapien
aatgagggccgagccttatgcagaa

SEQ ID NO: 1779139 - DNA, 25 bp, Homo sapien
tatgcagaatgcaggcgagctcaga

SEQ ID NO: 1779140 - DNA, 25 bp, Homo sapien
agaatgagggccgagccttatgcag

SEQ ID NO: 1779141 - DNA, 25 bp, Homo sapien
cagaatgcaggcgagctcagaaaca

SEQ ID NO: 1779142 - DNA, 25 bp, Homo sapien
catgtcaacattggccaaggctttt

SEQ ID NO: 1779143 - DNA, 25 bp, Homo sapien
tccccatgtcaacattggccaaggc

SEQ ID NO: 1779144 - DNA, 25 bp, Homo sapien
ggctccccatgtcaacattggccaa

SEQ ID NO: 1779145 - DNA, 25 bp, Homo sapien
gatgaggctccccatgtcaacattg

SEQ ID NO: 1779146 - DNA, 25 bp, Homo sapien
ctcctcagctggaacagcattggtg

SEQ ID NO: 1779147 - DNA, 25 bp, Homo sapien
tcctcagctggaacagcattggtgg

SEQ ID NO: 1779148 - DNA, 25 bp, Homo sapien
ctcagctggaacagcattggtggag

SEQ ID NO: 1779149 - DNA, 25 bp, Homo sapien
cctcagctggaacagcattggtgga

SEQ ID NO: 1779150 - DNA, 25 bp, Homo sapien
tctcccctgggaaaagacctgggca

SEQ ID NO: 1779151 - DNA, 25 bp, Homo sapien
ggtggctgcagcttttgatacccaa

SEQ ID NO: 1779152 - DNA, 25 bp, Homo sapien
caaaaattgtccctcttgagtcttt

SEQ ID NO: 1779153 - DNA, 25 bp, Homo sapien
ccaggagtgccccatatggtggctg

SEQ ID NO: 1779154 - DNA, 25 bp, Homo sapien
tgttgcccagaccattgacttgctg

SEQ ID NO: 1779155 - DNA, 25 bp, Homo sapien
tcagtgaatcgtctctgttggagga

SEQ ID NO: 1779156 - DNA, 25 bp, Homo sapien
caatagggaatgcatggaatctgtg

SEQ ID NO: 1779157 - DNA, 25 bp, Homo sapien
ggtgggctattaactcagatcagga

SEQ ID NO: 1779158 - DNA, 25 bp, Homo sapien
gattttttacgtggacatgccttcc

SEQ ID NO: 1779159 - DNA, 25 bp, Homo sapien
cctctggcactcttgtgtgtaaaac

SEQ ID NO: 1779160 - DNA, 25 bp, Homo sapien
cagttgagtatgatggttctgggca

SEQ ID NO: 1779161 - DNA, 25 bp, Homo sapien
tttgtcctcgttcagcatcttgcag

SEQ ID NO: 1779162 - DNA, 25 bp, Homo sapien
cactagcatgctctgcaattggcaa

SEQ ID NO: 1779163 - DNA, 25 bp, Homo sapien
gcacttcctggtagaaagtagtagt

SEQ ID NO: 1779164 - DNA, 25 bp, Homo sapien
gcaataatgtctagctctactgtga

SEQ ID NO: 1779165 - DNA, 25 bp, Homo sapien
tagcaataagtttgcactcactagc

SEQ ID NO: 1779166 - DNA, 25 bp, Homo sapien
gaaggagcttctgagctaggacttg

SEQ ID NO: 1779167 - DNA, 25 bp, Homo sapien
taaaagcagagtagctaccgtctgg

SEQ ID NO: 1779168 - DNA, 25 bp, Homo sapien
gagtctgaatccagctagcagatgg

SEQ ID NO: 1779169 - DNA, 25 bp, Homo sapien
tgtaagtgctatgagggagtctgaa

SEQ ID NO: 1779170 - DNA, 25 bp, Homo sapien
tctgtgcctagagtttcctccctgg

SEQ ID NO: 1779171 - DNA, 25 bp, Homo sapien
tggaagtgaacatgctctgctgttt

SEQ ID NO: 1779172 - DNA, 25 bp, Homo sapien
ggcatagatttcatttgcttactgg

SEQ ID NO: 1779173 - DNA, 25 bp, Homo sapien
cctggcctgatgggttccctgcagg

SEQ ID NO: 1779174 - DNA, 25 bp, Homo sapien
ggcgcggccctgtcagatttctatg

SEQ ID NO: 1779175 - DNA, 25 bp, Homo sapien
tgcgatgttttacctggcgcggccc

SEQ ID NO: 1779176 - DNA, 25 bp, Homo sapien
tgaacacaagatccagtcatctggg

SEQ ID NO: 1779177 - DNA, 25 bp, Homo sapien
tgcactgaggttatggcccacttcg

SEQ ID NO: 1779178 - DNA, 25 bp, Homo sapien
tcttagctaagtgacctcagattga

SEQ ID NO: 1779179 - DNA, 25 bp, Homo sapien
gaggtaggaaacctgcattggttcc

SEQ ID NO: 1779180 - DNA, 25 bp, Homo sapien
gatggaaccggtgttagctgtaccc

SEQ ID NO: 1779181 - DNA, 25 bp, Homo sapien
taagtagcagggcactttcgggagc

SEQ ID NO: 1779182 - DNA, 25 bp, Homo sapien
tcctcctaaggagtcggtagttcca

SEQ ID NO: 1779183 - DNA, 25 bp, Homo sapien
tgaccctcacgcgtcttagaaacca

SEQ ID NO: 1779184 - DNA, 25 bp, Homo sapien
gagtggtggtcacacgctctgatgc

SEQ ID NO: 1779185 - DNA, 25 bp, Homo sapien
tattaacaaggttagttgccaagtc

SEQ ID NO: 1779186 - DNA, 25 bp, Homo sapien
agaatgcagaaggacacaattcttt

SEQ ID NO: 1779187 - DNA, 25 bp, Homo sapien
gatgtgttctaaggaatacaaaaga

SEQ ID NO: 1779188 - DNA, 25 bp, Homo sapien
tatctggtagaacaactagatcttc

SEQ ID NO: 1779189 - DNA, 25 bp, Homo sapien
ctggtagaacaactagatcttcatc

SEQ ID NO: 1779190 - DNA, 25 bp, Homo sapien
cctaaataaacagcatgggtagctt

SEQ ID NO: 1779191 - DNA, 25 bp, Homo sapien
ttgtcactgtccaaggtactatata

SEQ ID NO: 1779192 - DNA, 25 bp, Homo sapien
gtctcctaaataaacagcatgggta

SEQ ID NO: 1779193 - DNA, 25 bp, Homo sapien
caaggtactatataacttgggctaa

SEQ ID NO: 1779194 - DNA, 25 bp, Homo sapien
gagaagacgagcacttctgtttggg

SEQ ID NO: 1779195 - DNA, 25 bp, Homo sapien
gcagtaatgctgttagagaaggtta

SEQ ID NO: 1779196 - DNA, 25 bp, Homo sapien
tgattgaagagacatttcaggtgga

SEQ ID NO: 1779197 - DNA, 25 bp, Homo sapien
ttgagatgtactttagagagggtga

SEQ ID NO: 1779198 - DNA, 25 bp, Homo sapien
tatcccagtgccactggaattgact

SEQ ID NO: 1779199 - DNA, 25 bp, Homo sapien
gtaggccattgcagtttagggtgtt

SEQ ID NO: 1779200 - DNA, 25 bp, Homo sapien
tgcagtttagggtgtttcttgagct

SEQ ID NO: 1779201 - DNA, 25 bp, Homo sapien
gaattgactcatactggagggtagg

SEQ ID NO: 1779202 - DNA, 25 bp, Homo sapien
tatatttttcgcctgaatgccgcag

SEQ ID NO: 1779203 - DNA, 25 bp, Homo sapien
ttttgaagcattcaagggcagttgt

SEQ ID NO: 1779204 - DNA, 25 bp, Homo sapien
gcagttgttttgtaggatgtctctc

SEQ ID NO: 1779205 - DNA, 25 bp, Homo sapien
tccatgtatcgtatcaggaggcaca

SEQ ID NO: 1779206 - DNA, 25 bp, Homo sapien
tcatcttacatgtggtagccttctg

SEQ ID NO: 1779207 - DNA, 25 bp, Homo sapien
ttacatgtggtagccttctgtcctg

SEQ ID NO: 1779208 - DNA, 25 bp, Homo sapien
gccttcatcttacatgtggtagcct

SEQ ID NO: 1779209 - DNA, 25 bp, Homo sapien
ctcctgtttgcagggagccttcatc

SEQ ID NO: 1779210 - DNA, 25 bp, Homo sapien
taaaccgggtgatgccattgaacag

SEQ ID NO: 1779211 - DNA, 25 bp, Homo sapien
caccgcctgaagtagttgtcatgat

SEQ ID NO: 1779212 - DNA, 25 bp, Homo sapien
ccttgcacagggatacaggtttgcc

SEQ ID NO: 1779213 - DNA, 25 bp, Homo sapien
cacagggtggtggttcttcatctct

SEQ ID NO: 1779214 - DNA, 25 bp, Homo sapien
ctgtgaccgaatggcttgtgggatc

SEQ ID NO: 1779215 - DNA, 25 bp, Homo sapien
gaccgaatggcttgtgggatctctt

SEQ ID NO: 1779216 - DNA, 25 bp, Homo sapien
gtgaccgaatggcttgtgggatctc

SEQ ID NO: 1779217 - DNA, 25 bp, Homo sapien
ccgaatggcttgtgggatctcttgg

SEQ ID NO: 1779218 - DNA, 25 bp, Homo sapien
tcttcttttggaaccacatcgagtt

SEQ ID NO: 1779219 - DNA, 25 bp, Homo sapien
agttgacagacctgagcctttggtt

SEQ ID NO: 1779220 - DNA, 25 bp, Homo sapien
gaaccacatcgagttgacagacctg

SEQ ID NO: 1779221 - DNA, 25 bp, Homo sapien
tgtttggacagattcttcttttgga

SEQ ID NO: 1779222 - DNA, 25 bp, Homo sapien
tccttgaactgccagagcttattat

SEQ ID NO: 1779223 - DNA, 25 bp, Homo sapien
ttctagagctagaccattccagaag

SEQ ID NO: 1779224 - DNA, 25 bp, Homo sapien
ccttctaccatcatttttccttgaa

SEQ ID NO: 1779225 - DNA, 25 bp, Homo sapien
aaacgttcatttcgtgtttgtggca

SEQ ID NO: 1779226 - DNA, 25 bp, Homo sapien
atctggttcctcataagataactga

SEQ ID NO: 1779227 - DNA, 25 bp, Homo sapien
tgattggaggcaacacactctggcc

SEQ ID NO: 1779228 - DNA, 25 bp, Homo sapien
gatgggtcatgcgtgctccagtgcc

SEQ ID NO: 1779229 - DNA, 25 bp, Homo sapien
tagaatatgcattacatggcctgcc

SEQ ID NO: 1779230 - DNA, 25 bp, Homo sapien
tcatcagctggagctaagtagcagc

SEQ ID NO: 1779231 - DNA, 25 bp, Homo sapien
gcagctgtcaccatatgctatagat

SEQ ID NO: 1779232 - DNA, 25 bp, Homo sapien
cctgtctcctgttgttgtttttgtt

SEQ ID NO: 1779233 - DNA, 25 bp, Homo sapien
ctgtctcctgttgttgtttttgttt

SEQ ID NO: 1779234 - DNA, 25 bp, Homo sapien
tgtctcctgttgttgtttttgttta

SEQ ID NO: 1779235 - DNA, 25 bp, Homo sapien
tacatcattgaaccagagtgtgttg

SEQ ID NO: 1779236 - DNA, 25 bp, Homo sapien
cattttgcctctgaaaagttggtaa

SEQ ID NO: 1779237 - DNA, 25 bp, Homo sapien
tatttgcctgtgaattacatcattg

SEQ ID NO: 1779238 - DNA, 25 bp, Homo sapien
tgatgctatgactggagggtgactt

SEQ ID NO: 1779239 - DNA, 25 bp, Homo sapien
taaatccaaaagcatattacttcat

SEQ ID NO: 1779240 - DNA, 25 bp, Homo sapien
cgaattaatcttactttgcttttct

SEQ ID NO: 1779241 - DNA, 25 bp, Homo sapien
cctgtttctcgaattaatcttactt

SEQ ID NO: 1779242 - DNA, 25 bp, Homo sapien
gtttctcgaattaatcttactttgc

SEQ ID NO: 1779243 - DNA, 25 bp, Homo sapien
aacagatgggttatgagttttcttg

SEQ ID NO: 1779244 - DNA, 25 bp, Homo sapien
agcatcctaagtcttgcttcccctt

SEQ ID NO: 1779245 - DNA, 25 bp, Homo sapien
tgaaaaaggagctttaaggcctgtg

SEQ ID NO: 1779246 - DNA, 25 bp, Homo sapien
gtcactgaggtatcaaattttcttc

SEQ ID NO: 1779247 - DNA, 25 bp, Homo sapien
caagtagcagcggtatgcctggatc

SEQ ID NO: 1779248 - DNA, 25 bp, Homo sapien
gcattagctccaccctttggtcgga

SEQ ID NO: 1779249 - DNA, 25 bp, Homo sapien
cacagtatgaaaggtagcagcagct

SEQ ID NO: 1779250 - DNA, 25 bp, Homo sapien
cattaatgaggaagacgaacagcaa

SEQ ID NO: 1779251 - DNA, 25 bp, Homo sapien
tattaggcacgctggtgtctgccga

SEQ ID NO: 1779252 - DNA, 25 bp, Homo sapien
tgaggaccagtaaacagagaacgct

SEQ ID NO: 1779253 - DNA, 25 bp, Homo sapien
cgagtaccatgtagtatgaggacca

SEQ ID NO: 1779254 - DNA, 25 bp, Homo sapien
gagaacgcttgtcctcctattaggc

SEQ ID NO: 1779255 - DNA, 25 bp, Homo sapien
ctggtaacctctgcggtttttaatg

SEQ ID NO: 1779256 - DNA, 25 bp, Homo sapien
aacctctgcggtttttaatgtgcat

SEQ ID NO: 1779257 - DNA, 25 bp, Homo sapien
gtaacctctgcggtttttaatgtgc

SEQ ID NO: 1779258 - DNA, 25 bp, Homo sapien
taacctctgcggtttttaatgtgca

SEQ ID NO: 1779259 - DNA, 25 bp, Homo sapien
gcaccagacaggacctggttgctta

SEQ ID NO: 1779260 - DNA, 25 bp, Homo sapien
gctgcttctcaagattcgaatctgg

SEQ ID NO: 1779261 - DNA, 25 bp, Homo sapien
caataacatgcataataattggctg

SEQ ID NO: 1779262 - DNA, 25 bp, Homo sapien
tgtaagatgtgttcctgtagcaaaa

SEQ ID NO: 1779263 - DNA, 25 bp, Homo sapien
aaccagtggccagagagtcgtcggc

SEQ ID NO: 1779264 - DNA, 25 bp, Homo sapien
cagttgaatgggaaatcgtatcccc

SEQ ID NO: 1779265 - DNA, 25 bp, Homo sapien
cggcctcgggtctaattcagttgaa

SEQ ID NO: 1779266 - DNA, 25 bp, Homo sapien
gcaggacgagcagtttctgggcacc

SEQ ID NO: 1779267 - DNA, 25 bp, Homo sapien
agcgaaacaggtgaccgcacagcgg

SEQ ID NO: 1779268 - DNA, 25 bp, Homo sapien
agcaccatggcggagctaggagctg

SEQ ID NO: 1779269 - DNA, 25 bp, Homo sapien
ggcgggctggcaccgaaatcacccg

SEQ ID NO: 1779270 - DNA, 25 bp, Homo sapien
cgacggcgcagtgcgaagcgaaaca

SEQ ID NO: 1779271 - DNA, 25 bp, Homo sapien
gaggaaagggcggagcggctctccg

SEQ ID NO: 1779272 - DNA, 25 bp, Homo sapien
gccgaggaaagggcggagcggctct

SEQ ID NO: 1779273 - DNA, 25 bp, Homo sapien
ccgaggaaagggcggagcggctctc

SEQ ID NO: 1779274 - DNA, 25 bp, Homo sapien
aagccgaggaaagggcggagcggct

SEQ ID NO: 1779275 - DNA, 25 bp, Homo sapien
ggccgcagccgactgccgcgctctc

SEQ ID NO: 1779276 - DNA, 25 bp, Homo sapien
tgccgcgctctctgtccccgccctc

SEQ ID NO: 1779277 - DNA, 25 bp, Homo sapien
ccgactgccgcgctctctgtccccg

SEQ ID NO: 1779278 - DNA, 25 bp, Homo sapien
ccgcagccgactgccgcgctctctg

SEQ ID NO: 1779279 - DNA, 25 bp, Homo sapien
ggagccctcagctggtcggccgcgg

SEQ ID NO: 1779280 - DNA, 25 bp, Homo sapien
cgctccatatctccgggagccctca

SEQ ID NO: 1779281 - DNA, 25 bp, Homo sapien
cgaccggaagctccggactgaggta

SEQ ID NO: 1779282 - DNA, 25 bp, Homo sapien
tgaggtactggttccgcccgccgct

SEQ ID NO: 1779283 - DNA, 25 bp, Homo sapien
gctacttcagagttcggagggaaat

SEQ ID NO: 1779284 - DNA, 25 bp, Homo sapien
catcagatgcgaagtcctggcgaca

SEQ ID NO: 1779285 - DNA, 25 bp, Homo sapien
ggaaatagcgtctccgtaccctcgc

SEQ ID NO: 1779286 - DNA, 25 bp, Homo sapien
cgcagtggcttcctaaagcgcagat

SEQ ID NO: 1779287 - DNA, 25 bp, Homo sapien
gccagaagtcacaaggtcgtttact

SEQ ID NO: 1779288 - DNA, 25 bp, Homo sapien
ccagaagtcacaaggtcgtttacta

SEQ ID NO: 1779289 - DNA, 25 bp, Homo sapien
tccagggttcttccggatagttcaa

SEQ ID NO: 1779290 - DNA, 25 bp, Homo sapien
tctacctagtcatccagaaagccag

SEQ ID NO: 1779291 - DNA, 25 bp, Homo sapien
aaaactacctctagccatctggtgc

SEQ ID NO: 1779292 - DNA, 25 bp, Homo sapien
tccattatagaaatgacactacggg

SEQ ID NO: 1779293 - DNA, 25 bp, Homo sapien
cctccttaggtttggaacacactgt

SEQ ID NO: 1779294 - DNA, 25 bp, Homo sapien
cagaaacatttagggattcgggaga

SEQ ID NO: 1779295 - DNA, 25 bp, Homo sapien
tacaacttgaagtacgacgtgatgg

SEQ ID NO: 1779296 - DNA, 25 bp, Homo sapien
tagagcccttgggtgcagaaacatt

SEQ ID NO: 1779297 - DNA, 25 bp, Homo sapien
caaaacatacgacaatagattctgg

SEQ ID NO: 1779298 - DNA, 25 bp, Homo sapien
caatagattctggagggtgggacgt

SEQ ID NO: 1779299 - DNA, 25 bp, Homo sapien
tattacctttggtgaacaaaacata

SEQ ID NO: 1779300 - DNA, 25 bp, Homo sapien
ggtgaacaaaacatacgacaataga

SEQ ID NO: 1779301 - DNA, 25 bp, Homo sapien
tttatgtactactgaactgtaccag

SEQ ID NO: 1779302 - DNA, 25 bp, Homo sapien
ctactgaactgtaccagttgcacat

SEQ ID NO: 1779303 - DNA, 25 bp, Homo sapien
acatttgtttgagtcgtttatgtac

SEQ ID NO: 1779304 - DNA, 25 bp, Homo sapien
gagtcgtttatgtactactgaactg

SEQ ID NO: 1779305 - DNA, 25 bp, Homo sapien
tacttctctgtgttaattgtaatat

SEQ ID NO: 1779306 - DNA, 25 bp, Homo sapien
taattgtaatattgactctattttg

SEQ ID NO: 1779307 - DNA, 25 bp, Homo sapien
tttcaattactgtataaagtttatg

SEQ ID NO: 1779308 - DNA, 25 bp, Homo sapien
agaaatgcgtaatttcaattactgt

SEQ ID NO: 1779309 - DNA, 25 bp, Homo sapien
aaccaaaatgtgaccataactgttt

SEQ ID NO: 1779310 - DNA, 25 bp, Homo sapien
aacatttcatgtgatcgtgcaccac

SEQ ID NO: 1779311 - DNA, 25 bp, Homo sapien
acatttcatgtgatcgtgcaccact

SEQ ID NO: 1779312 - DNA, 25 bp, Homo sapien
gtgaccataactgtttaggcttctg

SEQ ID NO: 1779313 - DNA, 25 bp, Homo sapien
gaaaggcgctgcactttaaatccag

SEQ ID NO: 1779314 - DNA, 25 bp, Homo sapien
tttaaggactcttcataaggactct

SEQ ID NO: 1779315 - DNA, 25 bp, Homo sapien
gaaggctatcattgactttcgaaac

SEQ ID NO: 1779316 - DNA, 25 bp, Homo sapien
ttaatacagagctgatcttcttggg

SEQ ID NO: 1779317 - DNA, 25 bp, Homo sapien
gacatagcagtttgtgggagtgaaa

SEQ ID NO: 1779318 - DNA, 25 bp, Homo sapien
tgatgttttgggacatagcagtttg

SEQ ID NO: 1779319 - DNA, 25 bp, Homo sapien
gcgcccagcccaagcataaaactat

SEQ ID NO: 1779320 - DNA, 25 bp, Homo sapien
ctattatacccaccattataaagac

SEQ ID NO: 1779321 - DNA, 25 bp, Homo sapien
aaatatatggacgagaaagatcacc

SEQ ID NO: 1779322 - DNA, 25 bp, Homo sapien
cacaagaagacgtcagtgaacctca

SEQ ID NO: 1779323 - DNA, 25 bp, Homo sapien
tgataggatgccctgagaaggacac

SEQ ID NO: 1779324 - DNA, 25 bp, Homo sapien
ccatcaatgactgctaaagtaggca

SEQ ID NO: 1779325 - DNA, 25 bp, Homo sapien
gacaatctgataggacactgctggt

SEQ ID NO: 1779326 - DNA, 25 bp, Homo sapien
tagtgtgaccaaacctcagagagca

SEQ ID NO: 1779327 - DNA, 25 bp, Homo sapien
agaggtgcctttcttgccatgagtg

SEQ ID NO: 1779328 - DNA, 25 bp, Homo sapien
catctgtgcatagcctcttgtgagg

SEQ ID NO: 1779329 - DNA, 25 bp, Homo sapien
caccacttcgttgtttggccttgtc

SEQ ID NO: 1779330 - DNA, 25 bp, Homo sapien
ctaaggtggttgtttccttcgagag

SEQ ID NO: 1779331 - DNA, 25 bp, Homo sapien
agcccccgccgaaagtgcatggttt

SEQ ID NO: 1779332 - DNA, 25 bp, Homo sapien
gagagtgcaaggactcagtgagtca

SEQ ID NO: 1779333 - DNA, 25 bp, Homo sapien
tctaagtcttaatcgggcccaactc

SEQ ID NO: 1779334 - DNA, 25 bp, Homo sapien
ctcatctaagtcttaatcgggccca

SEQ ID NO: 1779335 - DNA, 25 bp, Homo sapien
catctaagtcttaatcgggcccaac

SEQ ID NO: 1779336 - DNA, 25 bp, Homo sapien
ctaagtcttaatcgggcccaactct

SEQ ID NO: 1779337 - DNA, 25 bp, Homo sapien
gccaggtgtccaagtaaaagagatt

SEQ ID NO: 1779338 - DNA, 25 bp, Homo sapien
gactgttaatgtcccatggcaggat

SEQ ID NO: 1779339 - DNA, 25 bp, Homo sapien
taatcacatgagctcacatggtgcc

SEQ ID NO: 1779340 - DNA, 25 bp, Homo sapien
tctggtagcctgcactggactggac

SEQ ID NO: 1779341 - DNA, 25 bp, Homo sapien
cctggccaagagcaagaggatcttt

SEQ ID NO: 1779342 - DNA, 25 bp, Homo sapien
tgatcagagttaaccagccttggtc

SEQ ID NO: 1779343 - DNA, 25 bp, Homo sapien
tttgacgtggaagggtaatgaactc

SEQ ID NO: 1779344 - DNA, 25 bp, Homo sapien
caatttcttttgattcaaggctatg

SEQ ID NO: 1779345 - DNA, 25 bp, Homo sapien
gcatgggccacggtgtccttacaca

SEQ ID NO: 1779346 - DNA, 25 bp, Homo sapien
tatgacagtgtcaatgcatgggcca

SEQ ID NO: 1779347 - DNA, 25 bp, Homo sapien
tgaagattctggttgatagcaccct

SEQ ID NO: 1779348 - DNA, 25 bp, Homo sapien
tgtgcaattcagacaaagaagattc

SEQ ID NO: 1779349 - DNA, 25 bp, Homo sapien
gttggctttacagctcatcagcgcc

SEQ ID NO: 1779350 - DNA, 25 bp, Homo sapien
tgttggctttacagctcatcagcgc

SEQ ID NO: 1779351 - DNA, 25 bp, Homo sapien
tggctttacagctcatcagcgcctc

SEQ ID NO: 1779352 - DNA, 25 bp, Homo sapien
ttggctttacagctcatcagcgcct

SEQ ID NO: 1779353 - DNA, 25 bp, Homo sapien
tgcatcatgctacacccgaggaaag

SEQ ID NO: 1779354 - DNA, 25 bp, Homo sapien
cagtgaggcatggagtccttcgaga

SEQ ID NO: 1779355 - DNA, 25 bp, Homo sapien
tcctgaggaggacattatgggttct

SEQ ID NO: 1779356 - DNA, 25 bp, Homo sapien
gagcaaatcaatctaccagcgttct

SEQ ID NO: 1779357 - DNA, 25 bp, Homo sapien
gcttcccatgagactcacttccatg

SEQ ID NO: 1779358 - DNA, 25 bp, Homo sapien
ttcagctaagacatagcttcccatg

SEQ ID NO: 1779359 - DNA, 25 bp, Homo sapien
gccaaaggactttgaagacaggctt

SEQ ID NO: 1779360 - DNA, 25 bp, Homo sapien
ccatgagtgcagtaaatagagggaa

SEQ ID NO: 1779361 - DNA, 25 bp, Homo sapien
ccccgtcatgaataacagaggtgta

SEQ ID NO: 1779362 - DNA, 25 bp, Homo sapien
aagagaaggatgtgttcttagcccc

SEQ ID NO: 1779363 - DNA, 25 bp, Homo sapien
gagaggtctgactttgtccacccag

SEQ ID NO: 1779364 - DNA, 25 bp, Homo sapien
tagaacccaacgagacagacaagtt

SEQ ID NO: 1779365 - DNA, 25 bp, Homo sapien
gaagtcctagcgagtataacaaggc

SEQ ID NO: 1779366 - DNA, 25 bp, Homo sapien
gagaaggtacccagcagagtcagaa

SEQ ID NO: 1779367 - DNA, 25 bp, Homo sapien
taagactggtatgatttgatcccca

SEQ ID NO: 1779368 - DNA, 25 bp, Homo sapien
tagttgcagattacgtgactgtcca

SEQ ID NO: 1779369 - DNA, 25 bp, Homo sapien
tggtatagtgtttcttacttacaat

SEQ ID NO: 1779370 - DNA, 25 bp, Homo sapien
ggtgccagacattagcattctttat

SEQ ID NO: 1779371 - DNA, 25 bp, Homo sapien
tttctacagcaataatggtatagtg

SEQ ID NO: 1779372 - DNA, 25 bp, Homo sapien
ggaatgcatacatcatgtggtgcca

SEQ ID NO: 1779373 - DNA, 25 bp, Homo sapien
tgagcaacgatttctgcccataaat

SEQ ID NO: 1779374 - DNA, 25 bp, Homo sapien
caggatgagcaacgatttctgccca

SEQ ID NO: 1779375 - DNA, 25 bp, Homo sapien
cgatttctgcccataaatagtatgc

SEQ ID NO: 1779376 - DNA, 25 bp, Homo sapien
gcaacgatttctgcccataaatagt

SEQ ID NO: 1779377 - DNA, 25 bp, Homo sapien
ttaagaccacgagaaatgacagcca

SEQ ID NO: 1779378 - DNA, 25 bp, Homo sapien
tgagaggtttccattcgttgacaca

SEQ ID NO: 1779379 - DNA, 25 bp, Homo sapien
aggcgctcacccacacttcttagat

SEQ ID NO: 1779380 - DNA, 25 bp, Homo sapien
aaattattaggtgtcgaaagtgagc

SEQ ID NO: 1779381 - DNA, 25 bp, Homo sapien
ccacctagagtagcagctgtaaaga

SEQ ID NO: 1779382 - DNA, 25 bp, Homo sapien
aaaaagcagcttgtgtctgagaata

SEQ ID NO: 1779383 - DNA, 25 bp, Homo sapien
gggctcctgctgagtttcttggcag

SEQ ID NO: 1779384 - DNA, 25 bp, Homo sapien
tgctgagtttcttggcagctacagg

SEQ ID NO: 1779385 - DNA, 25 bp, Homo sapien
tgccatttgtaaaatttccatcatt

SEQ ID NO: 1779386 - DNA, 25 bp, Homo sapien
actccatgccatttgtaaaatttcc

SEQ ID NO: 1779387 - DNA, 25 bp, Homo sapien
ctactccatgccatttgtaaaattt

SEQ ID NO: 1779388 - DNA, 25 bp, Homo sapien
ccatttgtaaaatttccatcattac

SEQ ID NO: 1779389 - DNA, 25 bp, Homo sapien
caagcagcggaaacatgcagaatgc

SEQ ID NO: 1779390 - DNA, 25 bp, Homo sapien
tgaacaaacaagcagcggaaacatg

SEQ ID NO: 1779391 - DNA, 25 bp, Homo sapien
aaggctttgaacaaacaagcagcgg

SEQ ID NO: 1779392 - DNA, 25 bp, Homo sapien
ctttttcatgtccacgggcccttct

SEQ ID NO: 1779393 - DNA, 25 bp, Homo sapien
tgtgtatccggcattctttccgtga

SEQ ID NO: 1779394 - DNA, 25 bp, Homo sapien
ggcattctttccgtgatgttcagtg

SEQ ID NO: 1779395 - DNA, 25 bp, Homo sapien
cgtgatgttcagtgcctcgctagtc

SEQ ID NO: 1779396 - DNA, 25 bp, Homo sapien
cactttcaattgtgtatccggcatt

SEQ ID NO: 1779397 - DNA, 25 bp, Homo sapien
gtggatgagtgttgcaaagcacagc

SEQ ID NO: 1779398 - DNA, 25 bp, Homo sapien
aatactgggtggatgagtgttgcaa

SEQ ID NO: 1779399 - DNA, 25 bp, Homo sapien
gccccaggttcctccatatgcttcc

SEQ ID NO: 1779400 - DNA, 25 bp, Homo sapien
cgtgagcattaaatactgggtggat

SEQ ID NO: 1779401 - DNA, 25 bp, Homo sapien
ctgcaagctgcaactgccagcagat

SEQ ID NO: 1779402 - DNA, 25 bp, Homo sapien
caagctgcaactgccagcagatttc

SEQ ID NO: 1779403 - DNA, 25 bp, Homo sapien
cagcagatttctgcattcagaggca

SEQ ID NO: 1779404 - DNA, 25 bp, Homo sapien
agcagatttctgcattcagaggcat

SEQ ID NO: 1779405 - DNA, 25 bp, Homo sapien
tggattgaggaggagacgacaacct

SEQ ID NO: 1779406 - DNA, 25 bp, Homo sapien
catgcgttaggagaccagatgggcc

SEQ ID NO: 1779407 - DNA, 25 bp, Homo sapien
tctggaatgggcaactgcgtgaata

SEQ ID NO: 1779408 - DNA, 25 bp, Homo sapien
gcatcgagatcttgtcagtggaccc

SEQ ID NO: 1779409 - DNA, 25 bp, Homo sapien
agagaaagcctatgcacacttgaga

SEQ ID NO: 1779410 - DNA, 25 bp, Homo sapien
aagagaaagcctatgcacacttgag

SEQ ID NO: 1779411 - DNA, 25 bp, Homo sapien
cacacttgagaaagtgtctcttgga

SEQ ID NO: 1779412 - DNA, 25 bp, Homo sapien
tgagaaagtgtctcttggagtcttg

SEQ ID NO: 1779413 - DNA, 25 bp, Homo sapien
gatttgctggaaaaccatagagata

SEQ ID NO: 1779414 - DNA, 25 bp, Homo sapien
ttgatttgctggaaaaccatagaga

SEQ ID NO: 1779415 - DNA, 25 bp, Homo sapien
tgatttgctggaaaaccatagagat

SEQ ID NO: 1779416 - DNA, 25 bp, Homo sapien
tgcagcactgaaacctgagttttct

SEQ ID NO: 1779417 - DNA, 25 bp, Homo sapien
atgacttgaatggtctagaaccaaa

SEQ ID NO: 1779418 - DNA, 25 bp, Homo sapien
ctacgacaccttccctgggctagat

SEQ ID NO: 1779419 - DNA, 25 bp, Homo sapien
cgacaccttccctgggctagatgac

SEQ ID NO: 1779420 - DNA, 25 bp, Homo sapien
gatgacttgaatggtctagaaccaa

SEQ ID NO: 1779421 - DNA, 25 bp, Homo sapien
gatttgggatgcgagaacaattccc

SEQ ID NO: 1779422 - DNA, 25 bp, Homo sapien
tattgtgttgacagttgctggaacc

SEQ ID NO: 1779423 - DNA, 25 bp, Homo sapien
ttcttcccaggctgcgtggcatcct

SEQ ID NO: 1779424 - DNA, 25 bp, Homo sapien
gacagttgctggaaccactgatttg

SEQ ID NO: 1779425 - DNA, 25 bp, Homo sapien
gcttccttgttggtgggtactctct

SEQ ID NO: 1779426 - DNA, 25 bp, Homo sapien
gcaaggaggctagcttaggtctcat

SEQ ID NO: 1779427 - DNA, 25 bp, Homo sapien
aaatttcaccatgacacttggaggg

SEQ ID NO: 1779428 - DNA, 25 bp, Homo sapien
cactcctgcgataacctgttaatgg

SEQ ID NO: 1779429 - DNA, 25 bp, Homo sapien
tatgctgtaccagatagattcttgc

SEQ ID NO: 1779430 - DNA, 25 bp, Homo sapien
ggttttatgctgtaccagatagatt

SEQ ID NO: 1779431 - DNA, 25 bp, Homo sapien
ccagatagattcttgcacacctcat

SEQ ID NO: 1779432 - DNA, 25 bp, Homo sapien
gctgtaccagatagattcttgcaca

SEQ ID NO: 1779433 - DNA, 25 bp, Homo sapien
tcctcccgcatctgtcccccaaagt

SEQ ID NO: 1779434 - DNA, 25 bp, Homo sapien
ccactgtgccaagtcttatttttat

SEQ ID NO: 1779435 - DNA, 25 bp, Homo sapien
tgagacaggctcactctatacccag

SEQ ID NO: 1779436 - DNA, 25 bp, Homo sapien
agacaggctcactctatacccaggc

SEQ ID NO: 1779437 - DNA, 25 bp, Homo sapien
tcaacctgacttaaaggacctgttg

SEQ ID NO: 1779438 - DNA, 25 bp, Homo sapien
gaaggttggtcattctcagcaggcc

SEQ ID NO: 1779439 - DNA, 25 bp, Homo sapien
cagaataccttgctttaaccagggt

SEQ ID NO: 1779440 - DNA, 25 bp, Homo sapien
catctgaagccgtttgccctgagag

SEQ ID NO: 1779441 - DNA, 25 bp, Homo sapien
ggagccaactcaatagtggttgcca

SEQ ID NO: 1779442 - DNA, 25 bp, Homo sapien
gtgtcaacaagggagccaactcaat

SEQ ID NO: 1779443 - DNA, 25 bp, Homo sapien
ctttttcgatcagtgtcaacaaggg

SEQ ID NO: 1779444 - DNA, 25 bp, Homo sapien
ttcgatcagtgtcaacaagggagcc

SEQ ID NO: 1779445 - DNA, 25 bp, Homo sapien
gcctggcctaattactcctatttat

SEQ ID NO: 1779446 - DNA, 25 bp, Homo sapien
tccaaagctattacatgtcaaatac

SEQ ID NO: 1779447 - DNA, 25 bp, Homo sapien
tgcctggcctaattactcctattta

SEQ ID NO: 1779448 - DNA, 25 bp, Homo sapien
agctattacatgtcaaatacccttt

SEQ ID NO: 1779449 - DNA, 25 bp, Homo sapien
agcatcatcttacctgtccattgac

SEQ ID NO: 1779450 - DNA, 25 bp, Homo sapien
gaggagagctgccatagtcagtatc

SEQ ID NO: 1779451 - DNA, 25 bp, Homo sapien
ccccaagccatataaaaccaagtct

SEQ ID NO: 1779452 - DNA, 25 bp, Homo sapien
gtccattgaccccaagccatataaa

SEQ ID NO: 1779453 - DNA, 25 bp, Homo sapien
tgtagcctcttctacacccgtgaac

SEQ ID NO: 1779454 - DNA, 25 bp, Homo sapien
cctttgtactggcaatctccaaaaa

SEQ ID NO: 1779455 - DNA, 25 bp, Homo sapien
tatattcctttgtactggcaatctc

SEQ ID NO: 1779456 - DNA, 25 bp, Homo sapien
cagttataccagtactttccaatac

SEQ ID NO: 1779457 - DNA, 25 bp, Homo sapien
taacacaggcttgtctcacccgtgg

SEQ ID NO: 1779458 - DNA, 25 bp, Homo sapien
tgtcatgaccggctctgcttcctgg

SEQ ID NO: 1779459 - DNA, 25 bp, Homo sapien
ggtagttcgagctggttccatctct

SEQ ID NO: 1779460 - DNA, 25 bp, Homo sapien
tgcattatataagcgcataacacag

SEQ ID NO: 1779461 - DNA, 25 bp, Homo sapien
tggacacagggttagcttggctgcc

SEQ ID NO: 1779462 - DNA, 25 bp, Homo sapien
gattgcaaccgcttactcagccttt

SEQ ID NO: 1779463 - DNA, 25 bp, Homo sapien
tacttctggccgacgtaagacccag

SEQ ID NO: 1779464 - DNA, 25 bp, Homo sapien
aggaggcaatgccagcaggagatcc

SEQ ID NO: 1779465 - DNA, 25 bp, Homo sapien
aaggggacaaagggaagatcaggtg

SEQ ID NO: 1779466 - DNA, 25 bp, Homo sapien
aggggacaaagggaagatcaggtgg

SEQ ID NO: 1779467 - DNA, 25 bp, Homo sapien
aggaaggggacaaagggaagatcag

SEQ ID NO: 1779468 - DNA, 25 bp, Homo sapien
tgaggaaggggacaaagggaagatc

SEQ ID NO: 1779469 - DNA, 25 bp, Homo sapien
gagtagcatcttggccagatgtagg

SEQ ID NO: 1779470 - DNA, 25 bp, Homo sapien
gaagcatcaacttggagtggtgaag

SEQ ID NO: 1779471 - DNA, 25 bp, Homo sapien
cacctctgagtagcatcttggccag

SEQ ID NO: 1779472 - DNA, 25 bp, Homo sapien
ccgggacttttcttgtattagagca

SEQ ID NO: 1779473 - DNA, 25 bp, Homo sapien
tgaaaacactgaaccgtgaagaggt

SEQ ID NO: 1779474 - DNA, 25 bp, Homo sapien
gattctgggactagcctgtaagaag

SEQ ID NO: 1779475 - DNA, 25 bp, Homo sapien
tgtaagaagcctggttaacacagtt

SEQ ID NO: 1779476 - DNA, 25 bp, Homo sapien
aacacagtttatggaaccattcacc

SEQ ID NO: 1779477 - DNA, 25 bp, Homo sapien
ttaatagtgtctcttgttgtgtaga

SEQ ID NO: 1779478 - DNA, 25 bp, Homo sapien
cttaatagtgtctcttgttgtgtag

SEQ ID NO: 1779479 - DNA, 25 bp, Homo sapien
gttcgctgctagctcgaactcctgg

SEQ ID NO: 1779480 - DNA, 25 bp, Homo sapien
atcatggttcgctgctagctcgaac

SEQ ID NO: 1779481 - DNA, 25 bp, Homo sapien
tgggtcgaacggtagttcagctctt

SEQ ID NO: 1779482 - DNA, 25 bp, Homo sapien
gaacggtagttcagctcttagttct

SEQ ID NO: 1779483 - DNA, 25 bp, Homo sapien
tttggtcttcataactgagcatggc

SEQ ID NO: 1779484 - DNA, 25 bp, Homo sapien
ggaaaatacccaactgaacacttga

SEQ ID NO: 1779485 - DNA, 25 bp, Homo sapien
gcttgattctttgggtagcttgcta

SEQ ID NO: 1779486 - DNA, 25 bp, Homo sapien
cttatgtcagttttggaattcagcc

SEQ ID NO: 1779487 - DNA, 25 bp, Homo sapien
cttctggaacgtggagagcgccgct

SEQ ID NO: 1779488 - DNA, 25 bp, Homo sapien
tcaacgaagcgagccaagggcaact

SEQ ID NO: 1779489 - DNA, 25 bp, Homo sapien
acggtggcatatgtgatcaacgaag

SEQ ID NO: 1779490 - DNA, 25 bp, Homo sapien
gctgcccctggcatcggttgtccgg

SEQ ID NO: 1779491 - DNA, 25 bp, Homo sapien
agtccgggctcgagcttcctagcag

SEQ ID NO: 1779492 - DNA, 25 bp, Homo sapien
gatcgaaagagaaacgaggccaggc

SEQ ID NO: 1779493 - DNA, 25 bp, Homo sapien
gatgaaggcgagctgccgcctaaga

SEQ ID NO: 1779494 - DNA, 25 bp, Homo sapien
ggaggaaatccacccgatgaaggcg

SEQ ID NO: 1779495 - DNA, 25 bp, Homo sapien
aaacaatgtcggtatagtttcagga

SEQ ID NO: 1779496 - DNA, 25 bp, Homo sapien
tgaagacaagattctatacctagac

SEQ ID NO: 1779497 - DNA, 25 bp, Homo sapien
ctagactccaccaaatggctcctag

SEQ ID NO: 1779498 - DNA, 25 bp, Homo sapien
agccactgcgcctcatcccctgaag

SEQ ID NO: 1779499 - DNA, 25 bp, Homo sapien
taattcatagcctcccaagacagag

SEQ ID NO: 1779500 - DNA, 25 bp, Homo sapien
ccctgttagaaagtgagtcccatag

SEQ ID NO: 1779501 - DNA, 25 bp, Homo sapien
gagtgagtccaggagagaaataccc

SEQ ID NO: 1779502 - DNA, 25 bp, Homo sapien
gaagggagcccattgacttaattca

SEQ ID NO: 1779503 - DNA, 25 bp, Homo sapien
tgtgtttgagattctgattggtccg

SEQ ID NO: 1779504 - DNA, 25 bp, Homo sapien
gattctgattggtccgcacaggaaa

SEQ ID NO: 1779505 - DNA, 25 bp, Homo sapien
agggcgttgactccgacggagacca

SEQ ID NO: 1779506 - DNA, 25 bp, Homo sapien
tccgcacaggaaagggcgttgactc

SEQ ID NO: 1779507 - DNA, 25 bp, Homo sapien
ttccgagtcggaggcacactggcgc

SEQ ID NO: 1779508 - DNA, 25 bp, Homo sapien
ccgcggaagccgttccgagtcggag

SEQ ID NO: 1779509 - DNA, 25 bp, Homo sapien
gaagccgttccgagtcggaggcaca

SEQ ID NO: 1779510 - DNA, 25 bp, Homo sapien
acactggcgcggttagagagaccag

SEQ ID NO: 1779511 - DNA, 25 bp, Homo sapien
gcgccgctccaccgcacaccgcact

SEQ ID NO: 1779512 - DNA, 25 bp, Homo sapien
ccgcgccgctccaccgcacaccgca

SEQ ID NO: 1779513 - DNA, 25 bp, Homo sapien
ccgctccaccgcacaccgcactcat

SEQ ID NO: 1779514 - DNA, 25 bp, Homo sapien
gccgctccaccgcacaccgcactca

SEQ ID NO: 1779515 - DNA, 25 bp, Homo sapien
tagccgtggcgtcccggcgtccgca

SEQ ID NO: 1779516 - DNA, 25 bp, Homo sapien
ggcggcgtagccgtggcgtcccggc

SEQ ID NO: 1779517 - DNA, 25 bp, Homo sapien
ctcggcggcgtagccgtggcgtccc

SEQ ID NO: 1779518 - DNA, 25 bp, Homo sapien
cggcgtagccgtggcgtcccggcgt

SEQ ID NO: 1779519 - DNA, 25 bp, Homo sapien
gatgccgtagtgctgcgcggtggcg

SEQ ID NO: 1779520 - DNA, 25 bp, Homo sapien
ccgcgatgccgtagtgctgcgcggt

SEQ ID NO: 1779521 - DNA, 25 bp, Homo sapien
tgccgtagtgctgcgcggtggcgca

SEQ ID NO: 1779522 - DNA, 25 bp, Homo sapien
tagtgctgcgcggtggcgcaggcca

SEQ ID NO: 1779523 - DNA, 25 bp, Homo sapien
gcagctcagtgctcgaatgcagact

SEQ ID NO: 1779524 - DNA, 25 bp, Homo sapien
gactccaggcgtccattcaggagca

SEQ ID NO: 1779525 - DNA, 25 bp, Homo sapien
aattgtgggccaactcgcgagccct

SEQ ID NO: 1779526 - DNA, 25 bp, Homo sapien
tcaggagcatcgtccttaggaaggc

SEQ ID NO: 1779527 - DNA, 25 bp, Homo sapien
tccaatattagtagggttccacagc

SEQ ID NO: 1779528 - DNA, 25 bp, Homo sapien
atccaatattagtagggttccacag

SEQ ID NO: 1779529 - DNA, 25 bp, Homo sapien
catcgccactacaggtgatgaggac

SEQ ID NO: 1779530 - DNA, 25 bp, Homo sapien
gacatgttcgttgttctcactccaa

SEQ ID NO: 1779531 - DNA, 25 bp, Homo sapien
tctttatagacttgcagtggccctg

SEQ ID NO: 1779532 - DNA, 25 bp, Homo sapien
agagctgcagcgagccatcgccact

SEQ ID NO: 1779533 - DNA, 25 bp, Homo sapien
gaaacacctcgggaatctcactgaa

SEQ ID NO: 1779534 - DNA, 25 bp, Homo sapien
gcaagcacattcttagagcacaaag

SEQ ID NO: 1779535 - DNA, 25 bp, Homo sapien
gatgtctatgtgaaaagtccaccta

SEQ ID NO: 1779536 - DNA, 25 bp, Homo sapien
cacaaagaaagtgatgggcctctca

SEQ ID NO: 1779537 - DNA, 25 bp, Homo sapien
tttcacaacacagcttccctgaaca

SEQ ID NO: 1779538 - DNA, 25 bp, Homo sapien
tcacaacacagcttccctgaacata

SEQ ID NO: 1779539 - DNA, 25 bp, Homo sapien
ctatttcacaacacagcttccctga

SEQ ID NO: 1779540 - DNA, 25 bp, Homo sapien
tatttcacaacacagcttccctgaa

SEQ ID NO: 1779541 - DNA, 25 bp, Homo sapien
tcaaatccaagattgactaaaacca

SEQ ID NO: 1779542 - DNA, 25 bp, Homo sapien
tgactaaaaccatgctatacgtctt

SEQ ID NO: 1779543 - DNA, 25 bp, Homo sapien
ggattcaaatccaagattgactaaa

SEQ ID NO: 1779544 - DNA, 25 bp, Homo sapien
tccaagattgactaaaaccatgcta

SEQ ID NO: 1779545 - DNA, 25 bp, Homo sapien
tgatacagactactaataaacttag

SEQ ID NO: 1779546 - DNA, 25 bp, Homo sapien
tatttattcaatgctggtctgtgat

SEQ ID NO: 1779547 - DNA, 25 bp, Homo sapien
ggaaaaatatgtgacatacgcaagg

SEQ ID NO: 1779548 - DNA, 25 bp, Homo sapien
tttaggaaaaatatgtgacatacgc

SEQ ID NO: 1779549 - DNA, 25 bp, Homo sapien
ggaatatacagcaccctagggatcg

SEQ ID NO: 1779550 - DNA, 25 bp, Homo sapien
gacagcaagacagggtttgggcatt

SEQ ID NO: 1779551 - DNA, 25 bp, Homo sapien
aaacttcctcaaacacataaatggg

SEQ ID NO: 1779552 - DNA, 25 bp, Homo sapien
tgggcattaacctcaagctctgaaa

SEQ ID NO: 1779553 - DNA, 25 bp, Homo sapien
taagtagctggagtcacgcttgcgt

SEQ ID NO: 1779554 - DNA, 25 bp, Homo sapien
ggagtcacgcttgcgtgccaccaca

SEQ ID NO: 1779555 - DNA, 25 bp, Homo sapien
tagctggagtcacgcttgcgtgcca

SEQ ID NO: 1779556 - DNA, 25 bp, Homo sapien
tcctaagtagctggagtcacgcttg

SEQ ID NO: 1779557 - DNA, 25 bp, Homo sapien
gtatgagtatctgggcttaagccgc

SEQ ID NO: 1779558 - DNA, 25 bp, Homo sapien
tcacattggtgatcagccagcaggt

SEQ ID NO: 1779559 - DNA, 25 bp, Homo sapien
gacaaggacctgagtatatgccatt

SEQ ID NO: 1779560 - DNA, 25 bp, Homo sapien
tactgatcccgtcacttataggtgg

SEQ ID NO: 1779561 - DNA, 25 bp, Homo sapien
tctggtttggctccaatcaacacta

SEQ ID NO: 1779562 - DNA, 25 bp, Homo sapien
gtttggctccaatcaacactataca

SEQ ID NO: 1779563 - DNA, 25 bp, Homo sapien
cacctctggtttggctccaatcaac

SEQ ID NO: 1779564 - DNA, 25 bp, Homo sapien
gagccagacaccacaagctgttcac

SEQ ID NO: 1779565 - DNA, 25 bp, Homo sapien
ggcctctaaaggtgcacagagactt

SEQ ID NO: 1779566 - DNA, 25 bp, Homo sapien
atgtggggagaccagattgtgctat

SEQ ID NO: 1779567 - DNA, 25 bp, Homo sapien
ggagaccagattgtgctataaataa

SEQ ID NO: 1779568 - DNA, 25 bp, Homo sapien
tggggagaccagattgtgctataaa

SEQ ID NO: 1779569 - DNA, 25 bp, Homo sapien
aggaatcacgattcttactcctgct

SEQ ID NO: 1779570 - DNA, 25 bp, Homo sapien
tcccatattctcagagtctgatcac

SEQ ID NO: 1779571 - DNA, 25 bp, Homo sapien
gatgtgcaggaatcacgattcttac

SEQ ID NO: 1779572 - DNA, 25 bp, Homo sapien
tttacaccagtcacaactcaagatt

SEQ ID NO: 1779573 - DNA, 25 bp, Homo sapien
cagcctctcaaactacagtcaaccg

SEQ ID NO: 1779574 - DNA, 25 bp, Homo sapien
tagcataggtatgaccaagaagttc

SEQ ID NO: 1779575 - DNA, 25 bp, Homo sapien
gaagttcaaacactggttgtcgtac

SEQ ID NO: 1779576 - DNA, 25 bp, Homo sapien
gtacattccttaagtcccagcctct

SEQ ID NO: 1779577 - DNA, 25 bp, Homo sapien
gctgagatcgtgtctgggtgacagg

SEQ ID NO: 1779578 - DNA, 25 bp, Homo sapien
gagatcgtgtctgggtgacagggca

SEQ ID NO: 1779579 - DNA, 25 bp, Homo sapien
tgagatcgtgtctgggtgacagggc

SEQ ID NO: 1779580 - DNA, 25 bp, Homo sapien
gagctgagatcgtgtctgggtgaca

SEQ ID NO: 1779581 - DNA, 25 bp, Homo sapien
aaaatcatacgagcaagaggccagc

SEQ ID NO: 1779582 - DNA, 25 bp, Homo sapien
gtaaaatcatacgagcaagaggcca

SEQ ID NO: 1779583 - DNA, 25 bp, Homo sapien
cttacagtaaaatcatacgagcaag

SEQ ID NO: 1779584 - DNA, 25 bp, Homo sapien
cagtaaaatcatacgagcaagaggc

SEQ ID NO: 1779585 - DNA, 25 bp, Homo sapien
gaaaaagtcactaaagagttggaga

SEQ ID NO: 1779586 - DNA, 25 bp, Homo sapien
tggagactaaagatatagagagata

SEQ ID NO: 1779587 - DNA, 25 bp, Homo sapien
agaacaggtcacttcacggcgtaaa

SEQ ID NO: 1779588 - DNA, 25 bp, Homo sapien
aagtcactaaagagttggagactaa

SEQ ID NO: 1779589 - DNA, 25 bp, Homo sapien
gaagactgaagtctaaaccacaagt

SEQ ID NO: 1779590 - DNA, 25 bp, Homo sapien
tctgtatgatgctccactgtttcaa

SEQ ID NO: 1779591 - DNA, 25 bp, Homo sapien
gactgaagtctaaaccacaagtaaa

SEQ ID NO: 1779592 - DNA, 25 bp, Homo sapien
ccacaagtaaactctgtatgatgct

SEQ ID NO: 1779593 - DNA, 25 bp, Homo sapien
ggatcgtttgcacccaggaagttga

SEQ ID NO: 1779594 - DNA, 25 bp, Homo sapien
cccagctattcagtagggtagggtg

SEQ ID NO: 1779595 - DNA, 25 bp, Homo sapien
agctattcagtagggtagggtggga

SEQ ID NO: 1779596 - DNA, 25 bp, Homo sapien
tacaatgagccatgacgtaccactg

SEQ ID NO: 1779597 - DNA, 25 bp, Homo sapien
atgcctgaggacaccgactgcttct

SEQ ID NO: 1779598 - DNA, 25 bp, Homo sapien
gaaacagcagagactaatgcctgag

SEQ ID NO: 1779599 - DNA, 25 bp, Homo sapien
tggcttggcgaaaacaacaaggact

SEQ ID NO: 1779600 - DNA, 25 bp, Homo sapien
ggagcacactgatatcctacagagc

SEQ ID NO: 1779601 - DNA, 25 bp, Homo sapien
ggctctactgcttccgcccaaggat

SEQ ID NO: 1779602 - DNA, 25 bp, Homo sapien
taaactaatagggtaagatgccata

SEQ ID NO: 1779603 - DNA, 25 bp, Homo sapien
caagcccctgctgtggtacatttca

SEQ ID NO: 1779604 - DNA, 25 bp, Homo sapien
tctcttcccttacagtatgagtgtg

SEQ ID NO: 1779605 - DNA, 25 bp, Homo sapien
caagcagggtcatagatctttattg

SEQ ID NO: 1779606 - DNA, 25 bp, Homo sapien
tcaagcaggaatagtaagacaagca

SEQ ID NO: 1779607 - DNA, 25 bp, Homo sapien
aggaatagtaagacaagcagggtca

SEQ ID NO: 1779608 - DNA, 25 bp, Homo sapien
gtaagacaagcagggtcatagatct

SEQ ID NO: 1779609 - DNA, 25 bp, Homo sapien
tcagctccctcaaaactgattccag

SEQ ID NO: 1779610 - DNA, 25 bp, Homo sapien
taatccattttatgacccagagaca

SEQ ID NO: 1779611 - DNA, 25 bp, Homo sapien
tatggcttatgtatcaggcttaacg

SEQ ID NO: 1779612 - DNA, 25 bp, Homo sapien
ggcagttcttcagccaacatcctct

SEQ ID NO: 1779613 - DNA, 25 bp, Homo sapien
caaaagctagaagccttagtaggac

SEQ ID NO: 1779614 - DNA, 25 bp, Homo sapien
tagctgtacttaggcctggtttcaa

SEQ ID NO: 1779615 - DNA, 25 bp, Homo sapien
tagtgtcctgttactgaaccacaga

SEQ ID NO: 1779616 - DNA, 25 bp, Homo sapien
tggcaaggagcacgtatagctgtac

SEQ ID NO: 1779617 - DNA, 25 bp, Homo sapien
gctaagtattctgttagccacagag

SEQ ID NO: 1779618 - DNA, 25 bp, Homo sapien
catatagtacaagtattttgtgcta

SEQ ID NO: 1779619 - DNA, 25 bp, Homo sapien
gcaacagtgggattgtgtggcagaa

SEQ ID NO: 1779620 - DNA, 25 bp, Homo sapien
ggacttaaagatgaacacagcgcct

SEQ ID NO: 1779621 - DNA, 25 bp, Homo sapien
ctatttgtaagtgggtgatgagccg

SEQ ID NO: 1779622 - DNA, 25 bp, Homo sapien
tggcgggaatcctagcgacagctat

SEQ ID NO: 1779623 - DNA, 25 bp, Homo sapien
gttaggcagctctgcgtccgactgc

SEQ ID NO: 1779624 - DNA, 25 bp, Homo sapien
ccaggcgttcttgcggttaggcagc

SEQ ID NO: 1779625 - DNA, 25 bp, Homo sapien
cgccggcctcgccgcacccagcggt

SEQ ID NO: 1779626 - DNA, 25 bp, Homo sapien
cgcgccggcctcgccgcacccagcg

SEQ ID NO: 1779627 - DNA, 25 bp, Homo sapien
cggcctcgccgcacccagcggtggc

SEQ ID NO: 1779628 - DNA, 25 bp, Homo sapien
cctcgccgcacccagcggtggcgga

SEQ ID NO: 1779629 - DNA, 25 bp, Homo sapien
cccgtgcgcgatggccaccgagatg

SEQ ID NO: 1779630 - DNA, 25 bp, Homo sapien
agggcgcgccgttcttgagcaccag

SEQ ID NO: 1779631 - DNA, 25 bp, Homo sapien
tgaagaccacgtacatgggcaggct

SEQ ID NO: 1779632 - DNA, 25 bp, Homo sapien
tgagcaccaggacgccgatgagcat

SEQ ID NO: 1779633 - DNA, 25 bp, Homo sapien
cagagacggcgatgacgtactgcgc

SEQ ID NO: 1779634 - DNA, 25 bp, Homo sapien
gaagatgcagaccatggccgggtcc

SEQ ID NO: 1779635 - DNA, 25 bp, Homo sapien
caccgtgatggtggcgatgctcttc

SEQ ID NO: 1779636 - DNA, 25 bp, Homo sapien
acacagtaaatgatagagcccaggg

SEQ ID NO: 1779637 - DNA, 25 bp, Homo sapien
tgggtaactcctcgttttctatcaa

SEQ ID NO: 1779638 - DNA, 25 bp, Homo sapien
gtaagcatcttttaacgacctcctg

SEQ ID NO: 1779639 - DNA, 25 bp, Homo sapien
tcatatacctggttcccctaaccaa

SEQ ID NO: 1779640 - DNA, 25 bp, Homo sapien
accaacctccatacctcgaggtaag

SEQ ID NO: 1779641 - DNA, 25 bp, Homo sapien
gggaggcctctcattaaaacacgtc

SEQ ID NO: 1779642 - DNA, 25 bp, Homo sapien
gcttagggactcttggtacatgcag

SEQ ID NO: 1779643 - DNA, 25 bp, Homo sapien
aatatactctttgcccagctggcga

SEQ ID NO: 1779644 - DNA, 25 bp, Homo sapien
caaaaagtaaatgtgccaggagtct

SEQ ID NO: 1779645 - DNA, 25 bp, Homo sapien
accgtttcagtagatgctgtgatga

SEQ ID NO: 1779646 - DNA, 25 bp, Homo sapien
gagaggataccgtttcagtagatgc

SEQ ID NO: 1779647 - DNA, 25 bp, Homo sapien
tagccagggagaggataccgtttca

SEQ ID NO: 1779648 - DNA, 25 bp, Homo sapien
ccagggagaggataccgtttcagta

SEQ ID NO: 1779649 - DNA, 25 bp, Homo sapien
gagctatgctgctaagatagggcag

SEQ ID NO: 1779650 - DNA, 25 bp, Homo sapien
aagtgatcattagcacaacagcctg

SEQ ID NO: 1779651 - DNA, 25 bp, Homo sapien
tgaccccaaagtttggatagcttgg

SEQ ID NO: 1779652 - DNA, 25 bp, Homo sapien
ggcagtggtgctcaaggacgccttt

SEQ ID NO: 1779653 - DNA, 25 bp, Homo sapien
aaggggtgatgttttaataacaatg

SEQ ID NO: 1779654 - DNA, 25 bp, Homo sapien
ttttaataacaatgacttttccaca

SEQ ID NO: 1779655 - DNA, 25 bp, Homo sapien
gggtgatgttttaataacaatgact

SEQ ID NO: 1779656 - DNA, 25 bp, Homo sapien
gatgttttaataacaatgacttttc

SEQ ID NO: 1779657 - DNA, 25 bp, Homo sapien
gcggtgacaaatgggcagacaacca

SEQ ID NO: 1779658 - DNA, 25 bp, Homo sapien
taaacaagtgatacggatgttgtcc

SEQ ID NO: 1779659 - DNA, 25 bp, Homo sapien
taaatctggagttctgagtgcaagg

SEQ ID NO: 1779660 - DNA, 25 bp, Homo sapien
ggtaagtctccactcagcatatgag

SEQ ID NO: 1779661 - DNA, 25 bp, Homo sapien
tgtacaagtcaacagattttagtat

SEQ ID NO: 1779662 - DNA, 25 bp, Homo sapien
aaagtgtacaagtcaacagatttta

SEQ ID NO: 1779663 - DNA, 25 bp, Homo sapien
tcatggctgggccattgccacagcc

SEQ ID NO: 1779664 - DNA, 25 bp, Homo sapien
ggccattgccacagccacggttggg

SEQ ID NO: 1779665 - DNA, 25 bp, Homo sapien
ggctgggccattgccacagccacgg

SEQ ID NO: 1779666 - DNA, 25 bp, Homo sapien
cattgccacagccacggttgggctg

SEQ ID NO: 1779667 - DNA, 25 bp, Homo sapien
aacaccactgcattcaggccacccc

SEQ ID NO: 1779668 - DNA, 25 bp, Homo sapien
agttgcaaacaccactgcattcagg

SEQ ID NO: 1779669 - DNA, 25 bp, Homo sapien
tgcaaacaccactgcattcaggcca

SEQ ID NO: 1779670 - DNA, 25 bp, Homo sapien
caaacaccactgcattcaggccacc

SEQ ID NO: 1779671 - DNA, 25 bp, Homo sapien
gctcctctccccaaggatctttttc

SEQ ID NO: 1779672 - DNA, 25 bp, Homo sapien
caaggatctttttccattactgaat

SEQ ID NO: 1779673 - DNA, 25 bp, Homo sapien
tctccccaaggatctttttccatta

SEQ ID NO: 1779674 - DNA, 25 bp, Homo sapien
tcccagaggtggactcttcctgctt

SEQ ID NO: 1779675 - DNA, 25 bp, Homo sapien
tggctagctcagcatgccgaaggcc

SEQ ID NO: 1779676 - DNA, 25 bp, Homo sapien
caaactctaatttacgtgtaggagg

SEQ ID NO: 1779677 - DNA, 25 bp, Homo sapien
ctaatttacgtgtaggaggaattga

SEQ ID NO: 1779678 - DNA, 25 bp, Homo sapien
ttttagtaccgtaagtggctagctc

SEQ ID NO: 1779679 - DNA, 25 bp, Homo sapien
caaaggcccactgtaggtaacggtg

SEQ ID NO: 1779680 - DNA, 25 bp, Homo sapien
ggtagaacccagacctcaaagactg

SEQ ID NO: 1779681 - DNA, 25 bp, Homo sapien
cagcaactggaatctcaagaggcaa

SEQ ID NO: 1779682 - DNA, 25 bp, Homo sapien
taacagtgtgcattgtccaggaatc

SEQ ID NO: 1779683 - DNA, 25 bp, Homo sapien
catccaggggataggagcagtcact

SEQ ID NO: 1779684 - DNA, 25 bp, Homo sapien
atggtcaaggagagatatggagccc

SEQ ID NO: 1779685 - DNA, 25 bp, Homo sapien
gaaatatttgggtgccatccagggg

SEQ ID NO: 1779686 - DNA, 25 bp, Homo sapien
ggagcccacaacatttacaagggac

SEQ ID NO: 1779687 - DNA, 25 bp, Homo sapien
tataaatgcagtcgctgagggctct

SEQ ID NO: 1779688 - DNA, 25 bp, Homo sapien
gaaactctgctatgactgtgccgct

SEQ ID NO: 1779689 - DNA, 25 bp, Homo sapien
gaacggacgaggaacatctgtatca

SEQ ID NO: 1779690 - DNA, 25 bp, Homo sapien
gaacaaatgtgggataggaacggac

SEQ ID NO: 1779691 - DNA, 25 bp, Homo sapien
caatggcaaacccagaactgcagat

SEQ ID NO: 1779692 - DNA, 25 bp, Homo sapien
catttgggaactacctccgggacat

SEQ ID NO: 1779693 - DNA, 25 bp, Homo sapien
cctgttctgtgtggagatcatcatc

SEQ ID NO: 1779694 - DNA, 25 bp, Homo sapien
ttgataccctcaggtcagaaccccg

SEQ ID NO: 1779695 - DNA, 25 bp, Homo sapien
gctttttgagttgccggctttggtg

SEQ ID NO: 1779696 - DNA, 25 bp, Homo sapien
ctgcaggttcttaggagcgttctgg

SEQ ID NO: 1779697 - DNA, 25 bp, Homo sapien
ccggctttggtggtgaaccagtgca

SEQ ID NO: 1779698 - DNA, 25 bp, Homo sapien
cgttctggttgttggcaagattgcc

SEQ ID NO: 1779699 - DNA, 25 bp, Homo sapien
gccatctggctgattagaagtgggg

SEQ ID NO: 1779700 - DNA, 25 bp, Homo sapien
tgccatctggctgattagaagtggg

SEQ ID NO: 1779701 - DNA, 25 bp, Homo sapien
tacgcttcctcatactccccattca

SEQ ID NO: 1779702 - DNA, 25 bp, Homo sapien
acaccacattgtgattgttgcttta

SEQ ID NO: 1779703 - DNA, 25 bp, Homo sapien
cattgtgattgttgctttagctgcc

SEQ ID NO: 1779704 - DNA, 25 bp, Homo sapien
cttcctcatactccccattcagtgg

SEQ ID NO: 1779705 - DNA, 25 bp, Homo sapien
tggaatgtctccactgggaacattc

SEQ ID NO: 1779706 - DNA, 25 bp, Homo sapien
ggaatgtctccactgggaacattca

SEQ ID NO: 1779707 - DNA, 25 bp, Homo sapien
aatgtctccactgggaacattcaat

SEQ ID NO: 1779708 - DNA, 25 bp, Homo sapien
tgtggaatgtctccactgggaacat

SEQ ID NO: 1779709 - DNA, 25 bp, Homo sapien
agcagggattctgaattcacgttca

SEQ ID NO: 1779710 - DNA, 25 bp, Homo sapien
agggattctgaattcacgttcactg

SEQ ID NO: 1779711 - DNA, 25 bp, Homo sapien
gcagggattctgaattcacgttcac

SEQ ID NO: 1779712 - DNA, 25 bp, Homo sapien
cagggattctgaattcacgttcact

SEQ ID NO: 1779713 - DNA, 25 bp, Homo sapien
tcggaccctatgtgcctgtgcctgt

SEQ ID NO: 1779714 - DNA, 25 bp, Homo sapien
tgtctatgccggtcagcagcatcat

SEQ ID NO: 1779715 - DNA, 25 bp, Homo sapien
tatggtaggtccctccagattcgga

SEQ ID NO: 1779716 - DNA, 25 bp, Homo sapien
ttcttccctcacagatgtgtccctt

SEQ ID NO: 1779717 - DNA, 25 bp, Homo sapien
tgacagtcatccctatggtagcaag

SEQ ID NO: 1779718 - DNA, 25 bp, Homo sapien
gctttggactagaccttgcggcatg

SEQ ID NO: 1779719 - DNA, 25 bp, Homo sapien
ttaacatcgggaactaaatgtgctt

SEQ ID NO: 1779720 - DNA, 25 bp, Homo sapien
ccctatggtagcaagtgtggcagca

SEQ ID NO: 1779721 - DNA, 25 bp, Homo sapien
gaagtacaagtccagtccatgccat

SEQ ID NO: 1779722 - DNA, 25 bp, Homo sapien
acctgaccctggactagcaaatgca

SEQ ID NO: 1779723 - DNA, 25 bp, Homo sapien
ccagcaaagtgtgggcctggacagc

SEQ ID NO: 1779724 - DNA, 25 bp, Homo sapien
gcccattggaacagggcacctgacc

SEQ ID NO: 1779725 - DNA, 25 bp, Homo sapien
cacgtgattcacacaaacttctgaa

SEQ ID NO: 1779726 - DNA, 25 bp, Homo sapien
ggacacgtgattcacacaaacttct

SEQ ID NO: 1779727 - DNA, 25 bp, Homo sapien
gacacgtgattcacacaaacttctg

SEQ ID NO: 1779728 - DNA, 25 bp, Homo sapien
gtgattcacacaaacttctgaaatg

SEQ ID NO: 1779729 - DNA, 25 bp, Homo sapien
gccatgcaggccattactttgacca

SEQ ID NO: 1779730 - DNA, 25 bp, Homo sapien
gggtcctcagtgacatgtgcttgaa

SEQ ID NO: 1779731 - DNA, 25 bp, Homo sapien
gactctctgtgcttagttcctacta

SEQ ID NO: 1779732 - DNA, 25 bp, Homo sapien
gactactctggtcatgtatcgtccc

SEQ ID NO: 1779733 - DNA, 25 bp, Homo sapien
gttgaagtttcagagtccgacaagt

SEQ ID NO: 1779734 - DNA, 25 bp, Homo sapien
gagaagttgaagtttcagagtccga

SEQ ID NO: 1779735 - DNA, 25 bp, Homo sapien
tttcagagtccgacaagtatagttg

SEQ ID NO: 1779736 - DNA, 25 bp, Homo sapien
cagagtccgacaagtatagttggtc

SEQ ID NO: 1779737 - DNA, 25 bp, Homo sapien
tcctcctgtggccacgcctcaccat

SEQ ID NO: 1779738 - DNA, 25 bp, Homo sapien
ccatctctgtgcctgaggttcaagt

SEQ ID NO: 1779739 - DNA, 25 bp, Homo sapien
agaagccaccctttggtccgcttca

SEQ ID NO: 1779740 - DNA, 25 bp, Homo sapien
cctttggtccgcttcagattccatc

SEQ ID NO: 1779741 - DNA, 25 bp, Homo sapien
ttctcatgggggtggcgacatcttc

SEQ ID NO: 1779742 - DNA, 25 bp, Homo sapien
ctttgcaacttatgtatatattgaa

SEQ ID NO: 1779743 - DNA, 25 bp, Homo sapien
catcttcttagatgcggtatatctg

SEQ ID NO: 1779744 - DNA, 25 bp, Homo sapien
gcatacagtagatatttctcatggg

SEQ ID NO: 1779745 - DNA, 25 bp, Homo sapien
ttgtgcctgctgaaaaaatcgtgat

SEQ ID NO: 1779746 - DNA, 25 bp, Homo sapien
tcttgggcccgcaaacgttacagta

SEQ ID NO: 1779747 - DNA, 25 bp, Homo sapien
gaaggtacttctctcacccagcaag

SEQ ID NO: 1779748 - DNA, 25 bp, Homo sapien
gaacattattggagtcgcaggcagc

SEQ ID NO: 1779749 - DNA, 25 bp, Homo sapien
catctaccgatatatccacgttggc

SEQ ID NO: 1779750 - DNA, 25 bp, Homo sapien
attccatctaccgatatatccacgt

SEQ ID NO: 1779751 - DNA, 25 bp, Homo sapien
taccgatatatccacgttggcaaag

SEQ ID NO: 1779752 - DNA, 25 bp, Homo sapien
ccgatatatccacgttggcaaagag

SEQ ID NO: 1779753 - DNA, 25 bp, Homo sapien
caggctcaaggcatcaaaagtgaac

SEQ ID NO: 1779754 - DNA, 25 bp, Homo sapien
taggctgccacttgtaacccatcac

SEQ ID NO: 1779755 - DNA, 25 bp, Homo sapien
aacctttaaatcttgacgctcctga

SEQ ID NO: 1779756 - DNA, 25 bp, Homo sapien
catctgcagtgggatatctctaaca

SEQ ID NO: 1779757 - DNA, 25 bp, Homo sapien
aattgaaagcccttaagtaacagtg

SEQ ID NO: 1779758 - DNA, 25 bp, Homo sapien
ttccctgtggatcatggtcaaaaaa

SEQ ID NO: 1779759 - DNA, 25 bp, Homo sapien
tatggtacttaggaaatgggaaaca

SEQ ID NO: 1779760 - DNA, 25 bp, Homo sapien
ggagaagttgatcagtaagatctga

SEQ ID NO: 1779761 - DNA, 25 bp, Homo sapien
tcagagttgacaggaccttaaaagt

SEQ ID NO: 1779762 - DNA, 25 bp, Homo sapien
tcatcacaggatactcactaccctg

SEQ ID NO: 1779763 - DNA, 25 bp, Homo sapien
tgtctgctgtgtgagcacctctcat

SEQ ID NO: 1779764 - DNA, 25 bp, Homo sapien
cactctcttgattgtcctctgcagc

SEQ ID NO: 1779765 - DNA, 25 bp, Homo sapien
tgctttgtagacacttcgttcaggc

SEQ ID NO: 1779766 - DNA, 25 bp, Homo sapien
gcgagatccgcgctttaaaagccaa

SEQ ID NO: 1779767 - DNA, 25 bp, Homo sapien
acgacataaggtaactgaagagctc

SEQ ID NO: 1779768 - DNA, 25 bp, Homo sapien
gaacatgatccagaaagacgcagct

SEQ ID NO: 1779769 - DNA, 25 bp, Homo sapien
tggtagaattttgaattctaatgtc

SEQ ID NO: 1779770 - DNA, 25 bp, Homo sapien
ctctcaattctacttcctcattcat

SEQ ID NO: 1779771 - DNA, 25 bp, Homo sapien
aatcaaaacccatttctctcaattc

SEQ ID NO: 1779772 - DNA, 25 bp, Homo sapien
ttctaatgtcaaaatcaaaacccat

SEQ ID NO: 1779773 - DNA, 25 bp, Homo sapien
tagaaggcagcttacttcccgtcag

SEQ ID NO: 1779774 - DNA, 25 bp, Homo sapien
tcccgtcagccaagttatgccaatt

SEQ ID NO: 1779775 - DNA, 25 bp, Homo sapien
ccagaaaagtaggaaccctgccaag

SEQ ID NO: 1779776 - DNA, 25 bp, Homo sapien
tgagaatgagttcaaagcaaagctc

SEQ ID NO: 1779777 - DNA, 25 bp, Homo sapien
ggtgacacttgcacatactctgttt

SEQ ID NO: 1779778 - DNA, 25 bp, Homo sapien
acagtgacggtagtttcctcaggca

SEQ ID NO: 1779779 - DNA, 25 bp, Homo sapien
tcctcaggcatatttctcatcaggt

SEQ ID NO: 1779780 - DNA, 25 bp, Homo sapien
agaggatacagtgacggtagtttcc

SEQ ID NO: 1779781 - DNA, 25 bp, Homo sapien
tggctactgccggttgcttggaata

SEQ ID NO: 1779782 - DNA, 25 bp, Homo sapien
tcacagggatttgcagcccctgggt

SEQ ID NO: 1779783 - DNA, 25 bp, Homo sapien
ggttgcttggaataatgctctggca

SEQ ID NO: 1779784 - DNA, 25 bp, Homo sapien
tttgagggatctcgccaaaggtctg

SEQ ID NO: 1779785 - DNA, 25 bp, Homo sapien
caagtccagaagtcctgtcccagaa

SEQ ID NO: 1779786 - DNA, 25 bp, Homo sapien
tcaagtccagaagtcctgtcccaga

SEQ ID NO: 1779787 - DNA, 25 bp, Homo sapien
gtccagaagtcctgtcccagaattt

SEQ ID NO: 1779788 - DNA, 25 bp, Homo sapien
aagtccagaagtcctgtcccagaat

SEQ ID NO: 1779789 - DNA, 25 bp, Homo sapien
cactgccctgcccttcagatctgcc

SEQ ID NO: 1779790 - DNA, 25 bp, Homo sapien
gcactgccctgcccttcagatctgc

SEQ ID NO: 1779791 - DNA, 25 bp, Homo sapien
actgccctgcccttcagatctgccc

SEQ ID NO: 1779792 - DNA, 25 bp, Homo sapien
ggcttaagcaagttctctccagagt

SEQ ID NO: 1779793 - DNA, 25 bp, Homo sapien
ctccagagtcaacacgatgatggaa

SEQ ID NO: 1779794 - DNA, 25 bp, Homo sapien
tcaccgtcaaggtggactctccctg

SEQ ID NO: 1779795 - DNA, 25 bp, Homo sapien
gatgatggaaatacccgttgtcacc

SEQ ID NO: 1779796 - DNA, 25 bp, Homo sapien
tcctaggtgagcaggtgatgcccca

SEQ ID NO: 1779797 - DNA, 25 bp, Homo sapien
cagaaggacaagagctcataaccgt

SEQ ID NO: 1779798 - DNA, 25 bp, Homo sapien
gatgatagcggtaaagagtccttga

SEQ ID NO: 1779799 - DNA, 25 bp, Homo sapien
aatattcctgacgtggtcccgggca

SEQ ID NO: 1779800 - DNA, 25 bp, Homo sapien
tagcctgaattatacactgcactga

SEQ ID NO: 1779801 - DNA, 25 bp, Homo sapien
tcagcccgtgggacttctaacagca

SEQ ID NO: 1779802 - DNA, 25 bp, Homo sapien
tgcactgatagtatggccacacggt

SEQ ID NO: 1779803 - DNA, 25 bp, Homo sapien
tgccctaaaggatgccggacattgt

SEQ ID NO: 1779804 - DNA, 25 bp, Homo sapien
ggaagatgattgtgacgagattcag

SEQ ID NO: 1779805 - DNA, 25 bp, Homo sapien
gtactgtgtttcagcagaaggagtc

SEQ ID NO: 1779806 - DNA, 25 bp, Homo sapien
tagcgattccagtatcctcactgaa

SEQ ID NO: 1779807 - DNA, 25 bp, Homo sapien
gattcagtgccagttagcgattcca

SEQ ID NO: 1779808 - DNA, 25 bp, Homo sapien
tcctcaggtaccgtcgttcgcggca

SEQ ID NO: 1779809 - DNA, 25 bp, Homo sapien
tggttgccgccacaacaaatcacgc

SEQ ID NO: 1779810 - DNA, 25 bp, Homo sapien
tcaatgtgggacagcgtggtctcaa

SEQ ID NO: 1779811 - DNA, 25 bp, Homo sapien
tatgcgctgcagaaggacgttgctg

SEQ ID NO: 1779812 - DNA, 25 bp, Homo sapien
ttggagccagcgaccgtcggtagca

SEQ ID NO: 1779813 - DNA, 25 bp, Homo sapien
cagaccccggtgacggaagtgacgt

SEQ ID NO: 1779814 - DNA, 25 bp, Homo sapien
tgggtgctgcgcctgagtccgcctc

SEQ ID NO: 1779815 - DNA, 25 bp, Homo sapien
cacgacgccgtgctcactgctgggt

SEQ ID NO: 1779816 - DNA, 25 bp, Homo sapien
tgctgcccagaatgggtcgctctgc

SEQ ID NO: 1779817 - DNA, 25 bp, Homo sapien
ccacacttcactcccacagtggctt

SEQ ID NO: 1779818 - DNA, 25 bp, Homo sapien
atgggtcgctctgccacacttcact

SEQ ID NO: 1779819 - DNA, 25 bp, Homo sapien
cagaatgggtcgctctgccacactt

SEQ ID NO: 1779820 - DNA, 25 bp, Homo sapien
tatagccctttctcgcaggtggatg

SEQ ID NO: 1779821 - DNA, 25 bp, Homo sapien
agccctttctcgcaggtggatggat

SEQ ID NO: 1779822 - DNA, 25 bp, Homo sapien
tttatagccctttctcgcaggtgga

SEQ ID NO: 1779823 - DNA, 25 bp, Homo sapien
ccctttctcgcaggtggatggatgg

SEQ ID NO: 1779824 - DNA, 25 bp, Homo sapien
tatgctgagggcatcgtcttcatcc

SEQ ID NO: 1779825 - DNA, 25 bp, Homo sapien
ggcccagggcatatagtctaggatt

SEQ ID NO: 1779826 - DNA, 25 bp, Homo sapien
ttgaagttatggagcagtaaggcga

SEQ ID NO: 1779827 - DNA, 25 bp, Homo sapien
taaggcgagtccttagaggtcccaa

SEQ ID NO: 1779828 - DNA, 25 bp, Homo sapien
gcaaacaagttggtttcactcccac

SEQ ID NO: 1779829 - DNA, 25 bp, Homo sapien
ctggactcgaagcaagccctgctgc

SEQ ID NO: 1779830 - DNA, 25 bp, Homo sapien
aatgaaggcgtgtccaccaggttga

SEQ ID NO: 1779831 - DNA, 25 bp, Homo sapien
catcaagggcagtgcccctactcca

SEQ ID NO: 1779832 - DNA, 25 bp, Homo sapien
tgagaaatgactcgcattattcctt

SEQ ID NO: 1779833 - DNA, 25 bp, Homo sapien
gaaatgactcgcattattcctttta

SEQ ID NO: 1779834 - DNA, 25 bp, Homo sapien
actgagaaatgactcgcattattcc

SEQ ID NO: 1779835 - DNA, 25 bp, Homo sapien
cttctattgcaaccctgatcattgc

SEQ ID NO: 1779836 - DNA, 25 bp, Homo sapien
gctcttgaattggccatttatttca

SEQ ID NO: 1779837 - DNA, 25 bp, Homo sapien
cttgaattggccatttatttcaaaa

SEQ ID NO: 1779838 - DNA, 25 bp, Homo sapien
tcttgaattggccatttatttcaaa

SEQ ID NO: 1779839 - DNA, 25 bp, Homo sapien
tgaattggccatttatttcaaaatt

SEQ ID NO: 1779840 - DNA, 25 bp, Homo sapien
tagtgaagaggttgataaactgggc

SEQ ID NO: 1779841 - DNA, 25 bp, Homo sapien
agtctctcccaagggtaaaagtgca

SEQ ID NO: 1779842 - DNA, 25 bp, Homo sapien
aaagtgcaggcccttagctaagggc

SEQ ID NO: 1779843 - DNA, 25 bp, Homo sapien
taaactgggcttatggcaggccttc

SEQ ID NO: 1779844 - DNA, 25 bp, Homo sapien
tcaagcatctgaaaaaccctccaaa

SEQ ID NO: 1779845 - DNA, 25 bp, Homo sapien
gaaccagggaaattagttctgagac

SEQ ID NO: 1779846 - DNA, 25 bp, Homo sapien
cagtccttgttcatgtagacacgaa

SEQ ID NO: 1779847 - DNA, 25 bp, Homo sapien
ttctgagactaagctagcgctgtca

SEQ ID NO: 1779848 - DNA, 25 bp, Homo sapien
ggcattgaacaattcccatccgagg

SEQ ID NO: 1779849 - DNA, 25 bp, Homo sapien
gaaactgtcacgacggccatgggat

SEQ ID NO: 1779850 - DNA, 25 bp, Homo sapien
taaacgtaaaaaggatgctaggctg

SEQ ID NO: 1779851 - DNA, 25 bp, Homo sapien
tgagaatgaatcagcatgcgcctgc

SEQ ID NO: 1779852 - DNA, 25 bp, Homo sapien
ctgcctgtccctcattcacacactc

SEQ ID NO: 1779853 - DNA, 25 bp, Homo sapien
ggctctcgggtgccagcttcaggcc

SEQ ID NO: 1779854 - DNA, 25 bp, Homo sapien
gcagcatagaaggctctcgggtgcc

SEQ ID NO: 1779855 - DNA, 25 bp, Homo sapien
ggcccactcaaagactctgcctcct

SEQ ID NO: 1779856 - DNA, 25 bp, Homo sapien
tgcagcatagaaggctctcgggtgc

SEQ ID NO: 1779857 - DNA, 25 bp, Homo sapien
ggaaaatctctgctgacgtccctcg

SEQ ID NO: 1779858 - DNA, 25 bp, Homo sapien
gataacaggatacaactcccaatgg

SEQ ID NO: 1779859 - DNA, 25 bp, Homo sapien
tgagaaccaggcctaatacctcaag

SEQ ID NO: 1779860 - DNA, 25 bp, Homo sapien
cttatgatttcatggacctgggtgc

SEQ ID NO: 1779861 - DNA, 25 bp, Homo sapien
gaatcaagttcagatctgacttctc

SEQ ID NO: 1779862 - DNA, 25 bp, Homo sapien
cccattgctatttttgtccatcgaa

SEQ ID NO: 1779863 - DNA, 25 bp, Homo sapien
atcgaaactgcccaacaaagcttcc

SEQ ID NO: 1779864 - DNA, 25 bp, Homo sapien
agttcagatctgacttctcagctcc

SEQ ID NO: 1779865 - DNA, 25 bp, Homo sapien
ctattttctcctccatagtttctag

SEQ ID NO: 1779866 - DNA, 25 bp, Homo sapien
ccttcactctattttctcctccata

SEQ ID NO: 1779867 - DNA, 25 bp, Homo sapien
ttttctcctccatagtttctagtat

SEQ ID NO: 1779868 - DNA, 25 bp, Homo sapien
tctcctccatagtttctagtattaa

SEQ ID NO: 1779869 - DNA, 25 bp, Homo sapien
caggctgagcttttagagttcaaac

SEQ ID NO: 1779870 - DNA, 25 bp, Homo sapien
ctgagcttttagagttcaaactcat

SEQ ID NO: 1779871 - DNA, 25 bp, Homo sapien
gcaggctgagcttttagagttcaaa

SEQ ID NO: 1779872 - DNA, 25 bp, Homo sapien
ggctgagcttttagagttcaaactc

SEQ ID NO: 1779873 - DNA, 25 bp, Homo sapien
ggagcctgtggtttgaataatgttc

SEQ ID NO: 1779874 - DNA, 25 bp, Homo sapien
gcctgtggtttgaataatgttccgc

SEQ ID NO: 1779875 - DNA, 25 bp, Homo sapien
tggccggtcaagctgttcgtcaggt

SEQ ID NO: 1779876 - DNA, 25 bp, Homo sapien
caggctggccggtcaagctgttcgt

SEQ ID NO: 1779877 - DNA, 25 bp, Homo sapien
gtgccacaggctggccggtcaagct

SEQ ID NO: 1779878 - DNA, 25 bp, Homo sapien
caagctgttcgtcaggttctcaaac

SEQ ID NO: 1779879 - DNA, 25 bp, Homo sapien
cacttctcctgtccgagagctgcat

SEQ ID NO: 1779880 - DNA, 25 bp, Homo sapien
aggagaaagacaatcgccgatgttc

SEQ ID NO: 1779881 - DNA, 25 bp, Homo sapien
taaaacaacggttgacctgatgggc

SEQ ID NO: 1779882 - DNA, 25 bp, Homo sapien
tgcttttggaagaacccacttctcc

SEQ ID NO: 1779883 - DNA, 25 bp, Homo sapien
gaacatttactaccactagacttgt

SEQ ID NO: 1779884 - DNA, 25 bp, Homo sapien
taatatatatagctcctctttatcc

SEQ ID NO: 1779885 - DNA, 25 bp, Homo sapien
tcctgtttaggatttctaggctgcc

SEQ ID NO: 1779886 - DNA, 25 bp, Homo sapien
aagatagatttctccttcgatttca

SEQ ID NO: 1779887 - DNA, 25 bp, Homo sapien
gatagcaggtggtatgcgtgcattt

SEQ ID NO: 1779888 - DNA, 25 bp, Homo sapien
gggctctacgtccagagatagcagg

SEQ ID NO: 1779889 - DNA, 25 bp, Homo sapien
cccatgttctctgcggggctctacg

SEQ ID NO: 1779890 - DNA, 25 bp, Homo sapien
agaggtccatgttgaattaggtcca

SEQ ID NO: 1779891 - DNA, 25 bp, Homo sapien
tggttcatctggtgacctccagaaa

SEQ ID NO: 1779892 - DNA, 25 bp, Homo sapien
tgacctccagaaatcagtgcaagat

SEQ ID NO: 1779893 - DNA, 25 bp, Homo sapien
ggtgacctccagaaatcagtgcaag

SEQ ID NO: 1779894 - DNA, 25 bp, Homo sapien
ctggtgacctccagaaatcagtgca

SEQ ID NO: 1779895 - DNA, 25 bp, Homo sapien
tgagtatcctcgaaaaaggcagcag

SEQ ID NO: 1779896 - DNA, 25 bp, Homo sapien
tttggaaggtggcacgcagctcgat

SEQ ID NO: 1779897 - DNA, 25 bp, Homo sapien
caggaggcctcgcatatgattagcg

SEQ ID NO: 1779898 - DNA, 25 bp, Homo sapien
agaggcacaaatcgcttccaggagg

SEQ ID NO: 1779899 - DNA, 25 bp, Homo sapien
ctccttgccaaaggcagtgtgctcg

SEQ ID NO: 1779900 - DNA, 25 bp, Homo sapien
aagaccaagccgctccataaagcag

SEQ ID NO: 1779901 - DNA, 25 bp, Homo sapien
tgtgcatctttaaacgcaagatgac

SEQ ID NO: 1779902 - DNA, 25 bp, Homo sapien
agtgtgctcgcaagtgtaaccccag

SEQ ID NO: 1779903 - DNA, 25 bp, Homo sapien
agctgacctggatactgacatgacc

SEQ ID NO: 1779904 - DNA, 25 bp, Homo sapien
tcccaggttctgagcgttccacaga

SEQ ID NO: 1779905 - DNA, 25 bp, Homo sapien
ctgagcgttccacagagctgacctg

SEQ ID NO: 1779906 - DNA, 25 bp, Homo sapien
cttgattttaatcttggaccaccaa

SEQ ID NO: 1779907 - DNA, 25 bp, Homo sapien
aactcctccagtaggaatcctaatt

SEQ ID NO: 1779908 - DNA, 25 bp, Homo sapien
cccatcaatgctgtaccagagagga

SEQ ID NO: 1779909 - DNA, 25 bp, Homo sapien
tgtttttatgctccccagtatgatg

SEQ ID NO: 1779910 - DNA, 25 bp, Homo sapien
caggcttctcgatgatttgacagtc

SEQ ID NO: 1779911 - DNA, 25 bp, Homo sapien
gagaggcacttgaaaggactgttcg

SEQ ID NO: 1779912 - DNA, 25 bp, Homo sapien
gcattatgccacttgtctgcaaagg

SEQ ID NO: 1779913 - DNA, 25 bp, Homo sapien
gaaaggactgttcgtgcataaacac

SEQ ID NO: 1779914 - DNA, 25 bp, Homo sapien
cataaacacatgatgggcaaagtcc

SEQ ID NO: 1779915 - DNA, 25 bp, Homo sapien
gcaggtctgtatagaaagaggcgac

SEQ ID NO: 1779916 - DNA, 25 bp, Homo sapien
ccaaggctctttgtgtgacgctggg

SEQ ID NO: 1779917 - DNA, 25 bp, Homo sapien
agctctgggccgcaaagatcaagcc

SEQ ID NO: 1779918 - DNA, 25 bp, Homo sapien
cacacggagcacaaaggcaggtctg

SEQ ID NO: 1779919 - DNA, 25 bp, Homo sapien
actgctaggcttattgaaaaggaga

SEQ ID NO: 1779920 - DNA, 25 bp, Homo sapien
tgaattcagtccgttcataggcctg

SEQ ID NO: 1779921 - DNA, 25 bp, Homo sapien
caatagcgtcgttctgcacagtcag

SEQ ID NO: 1779922 - DNA, 25 bp, Homo sapien
ctgtgaatgtggcaccacagcaata

SEQ ID NO: 1779923 - DNA, 25 bp, Homo sapien
cctccctccaggtctccctctcttt

SEQ ID NO: 1779924 - DNA, 25 bp, Homo sapien
ccctccaggtctccctctctttgca

SEQ ID NO: 1779925 - DNA, 25 bp, Homo sapien
aggaacacacaacagcctccctcca

SEQ ID NO: 1779926 - DNA, 25 bp, Homo sapien
gaggaacacacaacagcctccctcc

SEQ ID NO: 1779927 - DNA, 25 bp, Homo sapien
ccccgattatgggtccaggctggag

SEQ ID NO: 1779928 - DNA, 25 bp, Homo sapien
gaggtcatcgccagatagaagggaa

SEQ ID NO: 1779929 - DNA, 25 bp, Homo sapien
gcaagaaaaggcacgctgggccctt

SEQ ID NO: 1779930 - DNA, 25 bp, Homo sapien
tggcctggagggatataaaaagctg

SEQ ID NO: 1779931 - DNA, 25 bp, Homo sapien
tactggtccagtagagatctgtggg

SEQ ID NO: 1779932 - DNA, 25 bp, Homo sapien
cgaggaatgtggagtcctagagaat

SEQ ID NO: 1779933 - DNA, 25 bp, Homo sapien
ctggtccagtagagatctgtgggaa

SEQ ID NO: 1779934 - DNA, 25 bp, Homo sapien
aacgaggaatgtggagtcctagaga

SEQ ID NO: 1779935 - DNA, 25 bp, Homo sapien
ctctgcacgagctggttttgaaatg

SEQ ID NO: 1779936 - DNA, 25 bp, Homo sapien
cacgagctggttttgaaatggacat

SEQ ID NO: 1779937 - DNA, 25 bp, Homo sapien
tgtttttcctatgtcactctgtccc

SEQ ID NO: 1779938 - DNA, 25 bp, Homo sapien
tgtctctttgttccgaagatggtca

SEQ ID NO: 1779939 - DNA, 25 bp, Homo sapien
gctgcctgccgttcacaagctgatg

SEQ ID NO: 1779940 - DNA, 25 bp, Homo sapien
tgccttgtaggcctctgcgtcttac

SEQ ID NO: 1779941 - DNA, 25 bp, Homo sapien
caccttgcctttgcagtgtgggagc

SEQ ID NO: 1779942 - DNA, 25 bp, Homo sapien
caagctgatgccttgtaggcctctg

SEQ ID NO: 1779943 - DNA, 25 bp, Homo sapien
ttttacctccgcaagtatgagtaga

SEQ ID NO: 1779944 - DNA, 25 bp, Homo sapien
ttagaatccgattccttagcaatca

SEQ ID NO: 1779945 - DNA, 25 bp, Homo sapien
ttagcaatcatcatccttaggacag

SEQ ID NO: 1779946 - DNA, 25 bp, Homo sapien
gagacaactcagtaaagacccaagt

SEQ ID NO: 1779947 - DNA, 25 bp, Homo sapien
gccatgcagcgttcccaacaagtgg

SEQ ID NO: 1779948 - DNA, 25 bp, Homo sapien
catgcagattaaccagcaaggtgct

SEQ ID NO: 1779949 - DNA, 25 bp, Homo sapien
ttggctgcaaggtcaaatgaacatg

SEQ ID NO: 1779950 - DNA, 25 bp, Homo sapien
ggagcggttttgacactgcccagtg

SEQ ID NO: 1779951 - DNA, 25 bp, Homo sapien
ctgtgcgcttgcttttgagttgggc

SEQ ID NO: 1779952 - DNA, 25 bp, Homo sapien
tgaactccagtctggcatagaaaag

SEQ ID NO: 1779953 - DNA, 25 bp, Homo sapien
caaactgaaacttcagacgagttgc

SEQ ID NO: 1779954 - DNA, 25 bp, Homo sapien
gaactccctgatataactccagtaa

SEQ ID NO: 1779955 - DNA, 25 bp, Homo sapien
cacacagtgctgcttgagttaattg

SEQ ID NO: 1779956 - DNA, 25 bp, Homo sapien
tattatcagcgctggccttctgtct

SEQ ID NO: 1779957 - DNA, 25 bp, Homo sapien
tttcatcaacctgacacaacggaag

SEQ ID NO: 1779958 - DNA, 25 bp, Homo sapien
cagcaaatctgaagttttcctggac

SEQ ID NO: 1779959 - DNA, 25 bp, Homo sapien
gaaaacttgaagctccattggccat

SEQ ID NO: 1779960 - DNA, 25 bp, Homo sapien
cgtaggttcacagggaacagagctc

SEQ ID NO: 1779961 - DNA, 25 bp, Homo sapien
catgcagcttgtgttggtttcgtag

SEQ ID NO: 1779962 - DNA, 25 bp, Homo sapien
ctcgtgggcctggtcagagaaggaa

SEQ ID NO: 1779963 - DNA, 25 bp, Homo sapien
ggcaaatagagcgtccctcttgtac

SEQ ID NO: 1779964 - DNA, 25 bp, Homo sapien
tgtgcagacagttttaatgggagtc

SEQ ID NO: 1779965 - DNA, 25 bp, Homo sapien
tttaatgggagtctgtttagcaaag

SEQ ID NO: 1779966 - DNA, 25 bp, Homo sapien
ctgtatagttgacagcttggcaaaa

SEQ ID NO: 1779967 - DNA, 25 bp, Homo sapien
attttgtgctgtgaatgaagtagcc

SEQ ID NO: 1779968 - DNA, 25 bp, Homo sapien
gatgcagatgttggtgccgtgtctc

SEQ ID NO: 1779969 - DNA, 25 bp, Homo sapien
ttggtgccgtgtctcttgtacagcc

SEQ ID NO: 1779970 - DNA, 25 bp, Homo sapien
agtagcctgaagtcctccccagatg

SEQ ID NO: 1779971 - DNA, 25 bp, Homo sapien
gggtactcacactaagtattccagg

SEQ ID NO: 1779972 - DNA, 25 bp, Homo sapien
cagcatggtcttatccaggtcagcc

SEQ ID NO: 1779973 - DNA, 25 bp, Homo sapien
tggccatttgggtacacagcatggt

SEQ ID NO: 1779974 - DNA, 25 bp, Homo sapien
gaattttgttcaggagcccattgag

SEQ ID NO: 1779975 - DNA, 25 bp, Homo sapien
ggtatgtgcgcagatagatgaagct

SEQ ID NO: 1779976 - DNA, 25 bp, Homo sapien
ttctgggtaataatcaccaactgcc

SEQ ID NO: 1779977 - DNA, 25 bp, Homo sapien
tgactgaagctgacctaaacgtatc

SEQ ID NO: 1779978 - DNA, 25 bp, Homo sapien
tcacagatgttgtaccggaatgtct

SEQ ID NO: 1779979 - DNA, 25 bp, Homo sapien
cttcactggaaggttattggatttt

SEQ ID NO: 1779980 - DNA, 25 bp, Homo sapien
ggaaacagaaatgcaaggacagaca

SEQ ID NO: 1779981 - DNA, 25 bp, Homo sapien
cactggaaggttattggattttagc

SEQ ID NO: 1779982 - DNA, 25 bp, Homo sapien
gaaatgcaaggacagacattcacca

SEQ ID NO: 1779983 - DNA, 25 bp, Homo sapien
ggataagttattgactccactgaca

SEQ ID NO: 1779984 - DNA, 25 bp, Homo sapien
aaagcagttggggataagttattga

SEQ ID NO: 1779985 - DNA, 25 bp, Homo sapien
cagttggggataagttattgactcc

SEQ ID NO: 1779986 - DNA, 25 bp, Homo sapien
gcctgatcagaggcactgccgctgc

SEQ ID NO: 1779987 - DNA, 25 bp, Homo sapien
gatgagatgtacctgagggaccacc

SEQ ID NO: 1779988 - DNA, 25 bp, Homo sapien
tgaggctgaagatcaacggacgcga

SEQ ID NO: 1779989 - DNA, 25 bp, Homo sapien
ccacgcagggcgatatgatgcagaa

SEQ ID NO: 1779990 - DNA, 25 bp, Homo sapien
tgaacctagccatggacgggctgcg

SEQ ID NO: 1779991 - DNA, 25 bp, Homo sapien
catatgttcccttgagcctcggtcc

SEQ ID NO: 1779992 - DNA, 25 bp, Homo sapien
ccttgaactgacacaatagcttctt

SEQ ID NO: 1779993 - DNA, 25 bp, Homo sapien
gggagctctccctctcgcatctctc

SEQ ID NO: 1779994 - DNA, 25 bp, Homo sapien
ctccctctcgcatctctcacactgg

SEQ ID NO: 1779995 - DNA, 25 bp, Homo sapien
tgccgcttccgctatttgttgcaag

SEQ ID NO: 1779996 - DNA, 25 bp, Homo sapien
gagtgaatttagctcattcagaaac

SEQ ID NO: 1779997 - DNA, 25 bp, Homo sapien
gcaaataacttcaactccaaaactc

SEQ ID NO: 1779998 - DNA, 25 bp, Homo sapien
gaacaactttgacgattcttgccgc

SEQ ID NO: 1779999 - DNA, 25 bp, Homo sapien
ttccttgtcctgtacaaaatgtcat

SEQ ID NO: 1780000 - DNA, 25 bp, Homo sapien
tttccttgtcctgtacaaaatgtca

SEQ ID NO: 1780001 - DNA, 25 bp, Homo sapien
ttttccttgtcctgtacaaaatgtc

SEQ ID NO: 1780002 - DNA, 25 bp, Homo sapien
ggaaagctcacattactgacacaga

SEQ ID NO: 1780003 - DNA, 25 bp, Homo sapien
ggaagagctgcccaaaggagattga

SEQ ID NO: 1780004 - DNA, 25 bp, Homo sapien
tgatcacactgtccaaggaactgac

SEQ ID NO: 1780005 - DNA, 25 bp, Homo sapien
cacagacaaggaactgcagcctctt

SEQ ID NO: 1780006 - DNA, 25 bp, Homo sapien
gctgccagggattttcagcctagaa

SEQ ID NO: 1780007 - DNA, 25 bp, Homo sapien
tgcacagctctcacacactgatttg

SEQ ID NO: 1780008 - DNA, 25 bp, Homo sapien
gatttgctctccctgcagcaaatgg

SEQ ID NO: 1780009 - DNA, 25 bp, Homo sapien
attttcagcctagaaggcggctgca

SEQ ID NO: 1780010 - DNA, 25 bp, Homo sapien
atgctttgtatgcgtctattgagat

SEQ ID NO: 1780011 - DNA, 25 bp, Homo sapien
gctttgtatgcgtctattgagatga

SEQ ID NO: 1780012 - DNA, 25 bp, Homo sapien
attgatttgtgagtgtcaaaccatc

SEQ ID NO: 1780013 - DNA, 25 bp, Homo sapien
ataaaactcacttaatcataatgaa

SEQ ID NO: 1780014 - DNA, 25 bp, Homo sapien
cataaacgtagaacattacttctgc

SEQ ID NO: 1780015 - DNA, 25 bp, Homo sapien
gagtgctctccttccatgccagaag

SEQ ID NO: 1780016 - DNA, 25 bp, Homo sapien
ctccttccatgccagaaggcataaa

SEQ ID NO: 1780017 - DNA, 25 bp, Homo sapien
tcctccacagggcatgcagaatgct

SEQ ID NO: 1780018 - DNA, 25 bp, Homo sapien
gaacctagaatcagcttaagccgtg

SEQ ID NO: 1780019 - DNA, 25 bp, Homo sapien
taagccgtgggcgtattcactcctg

SEQ ID NO: 1780020 - DNA, 25 bp, Homo sapien
aatgacacagtctaattcctgcagg

SEQ ID NO: 1780021 - DNA, 25 bp, Homo sapien
gaacaacacctctttcaagctacga

SEQ ID NO: 1780022 - DNA, 25 bp, Homo sapien
tatctccctggaagtctgctggaca

SEQ ID NO: 1780023 - DNA, 25 bp, Homo sapien
aggaaagtctatctccctggaagtc

SEQ ID NO: 1780024 - DNA, 25 bp, Homo sapien
agtctatctccctggaagtctgctg

SEQ ID NO: 1780025 - DNA, 25 bp, Homo sapien
ggaaagtctatctccctggaagtct

SEQ ID NO: 1780026 - DNA, 25 bp, Homo sapien
caaggtccaaaacagcaagcccggt

SEQ ID NO: 1780027 - DNA, 25 bp, Homo sapien
ggtccaaaacagcaagcccggttca

SEQ ID NO: 1780028 - DNA, 25 bp, Homo sapien
gtccaaaacagcaagcccggttcat

SEQ ID NO: 1780029 - DNA, 25 bp, Homo sapien
taatcgggtgtttaacagcgtccag

SEQ ID NO: 1780030 - DNA, 25 bp, Homo sapien
cagctcagagtatggcacaggagtt

SEQ ID NO: 1780031 - DNA, 25 bp, Homo sapien
gatctttggagacggtgtagtaaaa

SEQ ID NO: 1780032 - DNA, 25 bp, Homo sapien
ccagcctatgtatgcaacagcccag

SEQ ID NO: 1780033 - DNA, 25 bp, Homo sapien
ttctctttcagtgttgatgtggcca

SEQ ID NO: 1780034 - DNA, 25 bp, Homo sapien
ctgttcttgcagtgaattagggatg

SEQ ID NO: 1780035 - DNA, 25 bp, Homo sapien
tgcagtgaattagggatgttctctt

SEQ ID NO: 1780036 - DNA, 25 bp, Homo sapien
gttctctttcagtgttgatgtggcc

SEQ ID NO: 1780037 - DNA, 25 bp, Homo sapien
cttggcagctgatctggactcaatt

SEQ ID NO: 1780038 - DNA, 25 bp, Homo sapien
gactcaattttgagctctagatcag

SEQ ID NO: 1780039 - DNA, 25 bp, Homo sapien
agacctgcacttatctaggtaagga

SEQ ID NO: 1780040 - DNA, 25 bp, Homo sapien
gatcagtcgtactgtcagaaagaat

SEQ ID NO: 1780041 - DNA, 25 bp, Homo sapien
actgaggaccctctacgctgagcag

SEQ ID NO: 1780042 - DNA, 25 bp, Homo sapien
tctactgaggaccctctacgctgag

SEQ ID NO: 1780043 - DNA, 25 bp, Homo sapien
tgaggaccctctacgctgagcaggg

SEQ ID NO: 1780044 - DNA, 25 bp, Homo sapien
accctctacgctgagcaggggaata

SEQ ID NO: 1780045 - DNA, 25 bp, Homo sapien
tgtggcccttccaagggttctgtcc

SEQ ID NO: 1780046 - DNA, 25 bp, Homo sapien
ctgtggcccttccaagggttctgtc

SEQ ID NO: 1780047 - DNA, 25 bp, Homo sapien
cctttttgcaatctctccaaatagg

SEQ ID NO: 1780048 - DNA, 25 bp, Homo sapien
caatctctccaaataggagttacaa

SEQ ID NO: 1780049 - DNA, 25 bp, Homo sapien
atttgcaaatggtagtaagctctgc

SEQ ID NO: 1780050 - DNA, 25 bp, Homo sapien
taaatttgcaaatggtagtaagctc

SEQ ID NO: 1780051 - DNA, 25 bp, Homo sapien
gaagcattaaatttgcaaatggtag

SEQ ID NO: 1780052 - DNA, 25 bp, Homo sapien
ttaaatttgcaaatggtagtaagct

SEQ ID NO: 1780053 - DNA, 25 bp, Homo sapien
gggatgcatgtaaggttctctggaa

SEQ ID NO: 1780054 - DNA, 25 bp, Homo sapien
gaaggccccaagactctgatgagca

SEQ ID NO: 1780055 - DNA, 25 bp, Homo sapien
tttgagatccaggttaaccgctgcc

SEQ ID NO: 1780056 - DNA, 25 bp, Homo sapien
tgcaccctcgatgtgactgctctct

SEQ ID NO: 1780057 - DNA, 25 bp, Homo sapien
cactggcctttgttcggtgctttgt

SEQ ID NO: 1780058 - DNA, 25 bp, Homo sapien
gacttcaaactgaacagcgtattca

SEQ ID NO: 1780059 - DNA, 25 bp, Homo sapien
cacagaaattccattgagtacgttt

SEQ ID NO: 1780060 - DNA, 25 bp, Homo sapien
ggctgaaatgggtcctgacttcaaa

SEQ ID NO: 1780061 - DNA, 25 bp, Homo sapien
gagacaacaatgatcttggtcgtac

SEQ ID NO: 1780062 - DNA, 25 bp, Homo sapien
ggtcgtacggactgctcacatgctc

SEQ ID NO: 1780063 - DNA, 25 bp, Homo sapien
gatcttggtcgtacggactgctcac

SEQ ID NO: 1780064 - DNA, 25 bp, Homo sapien
caatgatcttggtcgtacggactgc

SEQ ID NO: 1780065 - DNA, 25 bp, Homo sapien
tgtacaagaaattgtcccagtcaaa

SEQ ID NO: 1780066 - DNA, 25 bp, Homo sapien
cacgacttgtatgcccctgatgaaa

SEQ ID NO: 1780067 - DNA, 25 bp, Homo sapien
gaaattgtcccagtcaaatccacga

SEQ ID NO: 1780068 - DNA, 25 bp, Homo sapien
gtcaaatccacgacttgtatgcccc

SEQ ID NO: 1780069 - DNA, 25 bp, Homo sapien
aagcatttctacacaaaaaaggcat

SEQ ID NO: 1780070 - DNA, 25 bp, Homo sapien
aagatgttggagtcactttatgatc

SEQ ID NO: 1780071 - DNA, 25 bp, Homo sapien
gatctaggttcaaacaacgttccag

SEQ ID NO: 1780072 - DNA, 25 bp, Homo sapien
cccacagcagaccaatggcttacta

SEQ ID NO: 1780073 - DNA, 25 bp, Homo sapien
caataatcatgatgaaaaaggatcc

SEQ ID NO: 1780074 - DNA, 25 bp, Homo sapien
tgaaaaaggatccttcacagcacag

SEQ ID NO: 1780075 - DNA, 25 bp, Homo sapien
catgatgaaaaaggatccttcacag

SEQ ID NO: 1780076 - DNA, 25 bp, Homo sapien
ctgtggatgcaataatcatgatgaa

SEQ ID NO: 1780077 - DNA, 25 bp, Homo sapien
gaacatccaagtagactgagttgca

SEQ ID NO: 1780078 - DNA, 25 bp, Homo sapien
agactgagttgcattatctgttaga

SEQ ID NO: 1780079 - DNA, 25 bp, Homo sapien
gagcatgtgaggaatgtttggctct

SEQ ID NO: 1780080 - DNA, 25 bp, Homo sapien
tcaggtgtgaacatccaagtagact

SEQ ID NO: 1780081 - DNA, 25 bp, Homo sapien
gagacttcctagtatataaactact

SEQ ID NO: 1780082 - DNA, 25 bp, Homo sapien
tatgtgcgatgctatgttgggcaac

SEQ ID NO: 1780083 - DNA, 25 bp, Homo sapien
tgggcaactattttcaggctattag

SEQ ID NO: 1780084 - DNA, 25 bp, Homo sapien
caagaaatagcgaggtactagcttt

SEQ ID NO: 1780085 - DNA, 25 bp, Homo sapien
gcaccagtcctgtaccagacatcta

SEQ ID NO: 1780086 - DNA, 25 bp, Homo sapien
tcaatgcatactgagcaccagtcct

SEQ ID NO: 1780087 - DNA, 25 bp, Homo sapien
tgagcaatgtagacacagtgtacca

SEQ ID NO: 1780088 - DNA, 25 bp, Homo sapien
tctatataagactattcttgctgca

SEQ ID NO: 1780089 - DNA, 25 bp, Homo sapien
ctccctgaggtcagttctaggtcat

SEQ ID NO: 1780090 - DNA, 25 bp, Homo sapien
caagaatcctggaaattagcgatct

SEQ ID NO: 1780091 - DNA, 25 bp, Homo sapien
gatttgactgtgatttctccctgag

SEQ ID NO: 1780092 - DNA, 25 bp, Homo sapien
gaaattagcgatcttgatttgactg

SEQ ID NO: 1780093 - DNA, 25 bp, Homo sapien
catgctcagcagttcaagttcacct

SEQ ID NO: 1780094 - DNA, 25 bp, Homo sapien
tcaccttgttgttgagcaattgaag

SEQ ID NO: 1780095 - DNA, 25 bp, Homo sapien
caagttcaccttgttgttgagcaat

SEQ ID NO: 1780096 - DNA, 25 bp, Homo sapien
ttgatcatgctcagcagttcaagtt

SEQ ID NO: 1780097 - DNA, 25 bp, Homo sapien
ggtgaaacccgatggagacccatgg

SEQ ID NO: 1780098 - DNA, 25 bp, Homo sapien
gattcctgataggaggcctctctca

SEQ ID NO: 1780099 - DNA, 25 bp, Homo sapien
taatattcttaagctctctgcctga

SEQ ID NO: 1780100 - DNA, 25 bp, Homo sapien
tgttcctaggaaatggaaggcacaa

SEQ ID NO: 1780101 - DNA, 25 bp, Homo sapien
tcttcttgcacattacatgaactaa

SEQ ID NO: 1780102 - DNA, 25 bp, Homo sapien
catgaactaacactttgcccgttca

SEQ ID NO: 1780103 - DNA, 25 bp, Homo sapien
gcatgtcttcttgcacattacatga

SEQ ID NO: 1780104 - DNA, 25 bp, Homo sapien
ttacatgaactaacactttgcccgt

SEQ ID NO: 1780105 - DNA, 25 bp, Homo sapien
cccttatgactgacagctacaccat

SEQ ID NO: 1780106 - DNA, 25 bp, Homo sapien
ccttgtaattatgaagcaacacttt

SEQ ID NO: 1780107 - DNA, 25 bp, Homo sapien
gactgacagctacaccattcatttc

SEQ ID NO: 1780108 - DNA, 25 bp, Homo sapien
catttctttgctatgacctaccttg

SEQ ID NO: 1780109 - DNA, 25 bp, Homo sapien
cgtcagggctgctgccaatggcctg

SEQ ID NO: 1780110 - DNA, 25 bp, Homo sapien
cagggctgctgccaatggcctgctc

SEQ ID NO: 1780111 - DNA, 25 bp, Homo sapien
gtcagggctgctgccaatggcctgc

SEQ ID NO: 1780112 - DNA, 25 bp, Homo sapien
ggctgctgccaatggcctgctccat

SEQ ID NO: 1780113 - DNA, 25 bp, Homo sapien
caccgggctagctgatctgggattt

SEQ ID NO: 1780114 - DNA, 25 bp, Homo sapien
tcatctctccatgggttgcattgca

SEQ ID NO: 1780115 - DNA, 25 bp, Homo sapien
agcagtcctggttcccgtgtagttc

SEQ ID NO: 1780116 - DNA, 25 bp, Homo sapien
ttctgtttccccaccgggctagctg

SEQ ID NO: 1780117 - DNA, 25 bp, Homo sapien
catgcagcggctgaaagtgcagaag

SEQ ID NO: 1780118 - DNA, 25 bp, Homo sapien
accatgcagcggctgaaagtgcaga

SEQ ID NO: 1780119 - DNA, 25 bp, Homo sapien
caaagaccatgcagcggctgaaagt

SEQ ID NO: 1780120 - DNA, 25 bp, Homo sapien
ggccacaaagaccatgcagcggctg

SEQ ID NO: 1780121 - DNA, 25 bp, Homo sapien
gacttggtttacttattctctcatc

SEQ ID NO: 1780122 - DNA, 25 bp, Homo sapien
tacactagacttggtttacttattc

SEQ ID NO: 1780123 - DNA, 25 bp, Homo sapien
tggtttacttattctctcatcattg

SEQ ID NO: 1780124 - DNA, 25 bp, Homo sapien
actagacttggtttacttattctct

SEQ ID NO: 1780125 - DNA, 25 bp, Homo sapien
acctccttacatgttctagcttcta

SEQ ID NO: 1780126 - DNA, 25 bp, Homo sapien
cctccttacatgttctagcttctag

SEQ ID NO: 1780127 - DNA, 25 bp, Homo sapien
aggtagtagacagggctactttcca

SEQ ID NO: 1780128 - DNA, 25 bp, Homo sapien
ctgaaatcaaggtagtagacagggc

SEQ ID NO: 1780129 - DNA, 25 bp, Homo sapien
tgcccatggatgtgcggctgtccat

SEQ ID NO: 1780130 - DNA, 25 bp, Homo sapien
caaccatctgccaacccatgccagc

SEQ ID NO: 1780131 - DNA, 25 bp, Homo sapien
gtagccagctgcatccaagaagcca

SEQ ID NO: 1780132 - DNA, 25 bp, Homo sapien
ccaggtcactggtgtagtagccagc

SEQ ID NO: 1780133 - DNA, 25 bp, Homo sapien
ggtgtagtagccagctgcatccaag

SEQ ID NO: 1780134 - DNA, 25 bp, Homo sapien
cactggtgtagtagccagctgcatc

SEQ ID NO: 1780135 - DNA, 25 bp, Homo sapien
aggatgttgttggaaggcggtgggc

SEQ ID NO: 1780136 - DNA, 25 bp, Homo sapien
tatgctaagctttgagagttgatga

SEQ ID NO: 1780137 - DNA, 25 bp, Homo sapien
agtccattcaactgaggatgttgtt

SEQ ID NO: 1780138 - DNA, 25 bp, Homo sapien
gtgtgtagaacaccctcagtccatt

SEQ ID NO: 1780139 - DNA, 25 bp, Homo sapien
ctctcataggccaaaaatacatcac

SEQ ID NO: 1780140 - DNA, 25 bp, Homo sapien
tcataggccaaaaatacatcacgtg

SEQ ID NO: 1780141 - DNA, 25 bp, Homo sapien
ggccaaaaatacatcacgtgacctc

SEQ ID NO: 1780142 - DNA, 25 bp, Homo sapien
taggccaaaaatacatcacgtgacc

SEQ ID NO: 1780143 - DNA, 25 bp, Homo sapien
ctttcaggagaagggtgagagattt

SEQ ID NO: 1780144 - DNA, 25 bp, Homo sapien
gtacagtggccaggaaaggaattac

SEQ ID NO: 1780145 - DNA, 25 bp, Homo sapien
gaagggtgagagatttttggaagaa

SEQ ID NO: 1780146 - DNA, 25 bp, Homo sapien
ttggaagaaaagaagtacagtggcc

SEQ ID NO: 1780147 - DNA, 25 bp, Homo sapien
tagtttccgcagacaaaagatagcc

SEQ ID NO: 1780148 - DNA, 25 bp, Homo sapien
gtctctgagacttgatcaatgacca

SEQ ID NO: 1780149 - DNA, 25 bp, Homo sapien
tatgcaaatcctgtgaagtggagtc

SEQ ID NO: 1780150 - DNA, 25 bp, Homo sapien
cactttcttggagagccccacatgg

SEQ ID NO: 1780151 - DNA, 25 bp, Homo sapien
ctttgaacaggaacttgaaattctg

SEQ ID NO: 1780152 - DNA, 25 bp, Homo sapien
tgaaattctgtgtagacttccaaat

SEQ ID NO: 1780153 - DNA, 25 bp, Homo sapien
ttaagtgtaatctttgaacaggaac

SEQ ID NO: 1780154 - DNA, 25 bp, Homo sapien
tgtgctttttctggacaccccctcc

SEQ ID NO: 1780155 - DNA, 25 bp, Homo sapien
tgagtgactaagcccatcaaggtgt

SEQ ID NO: 1780156 - DNA, 25 bp, Homo sapien
ttgagtgactaagcccatcaaggtg

SEQ ID NO: 1780157 - DNA, 25 bp, Homo sapien
cataaagttcagagtcttcagatga

SEQ ID NO: 1780158 - DNA, 25 bp, Homo sapien
ctggatgctccaaagacaaataata

SEQ ID NO: 1780159 - DNA, 25 bp, Homo sapien
gaaggctcttgagtatctggaaaca

SEQ ID NO: 1780160 - DNA, 25 bp, Homo sapien
ctttttctctcaaaggagataggca

SEQ ID NO: 1780161 - DNA, 25 bp, Homo sapien
ttctccacgctgacgtggctgcatc

SEQ ID NO: 1780162 - DNA, 25 bp, Homo sapien
ccccaatgcgggtctgtggctcctt

SEQ ID NO: 1780163 - DNA, 25 bp, Homo sapien
ccagaggtgctgttaggcccggaat

SEQ ID NO: 1780164 - DNA, 25 bp, Homo sapien
aatgctcttgatctttcctataccc

SEQ ID NO: 1780165 - DNA, 25 bp, Homo sapien
aggccacacggagggaggcccatgt

SEQ ID NO: 1780166 - DNA, 25 bp, Homo sapien
gcagaggccacacggagggaggccc

SEQ ID NO: 1780167 - DNA, 25 bp, Homo sapien
ccaggcaggtccaccacagcagagg

SEQ ID NO: 1780168 - DNA, 25 bp, Homo sapien
ctgtgaccaggcaggtccaccacag

SEQ ID NO: 1780169 - DNA, 25 bp, Homo sapien
cttcagagcttctggccctggatgt

SEQ ID NO: 1780170 - DNA, 25 bp, Homo sapien
aggcctgtactctgaggccataact

SEQ ID NO: 1780171 - DNA, 25 bp, Homo sapien
taggagagtgaaggccaatggcagt

SEQ ID NO: 1780172 - DNA, 25 bp, Homo sapien
gccataacttagtacccaggtccca

SEQ ID NO: 1780173 - DNA, 25 bp, Homo sapien
gattgtgatgttattgtggagatga

SEQ ID NO: 1780174 - DNA, 25 bp, Homo sapien
gggttgagcctgtgttccacctgcg

SEQ ID NO: 1780175 - DNA, 25 bp, Homo sapien
ttgcatcgggcccagaatctgaggt

SEQ ID NO: 1780176 - DNA, 25 bp, Homo sapien
cacctgcgtgatctttgtggctggg

SEQ ID NO: 1780177 - DNA, 25 bp, Homo sapien
tagctgggagatttgccggccttcc

SEQ ID NO: 1780178 - DNA, 25 bp, Homo sapien
gaatagaacacaaaatttgatctgt

SEQ ID NO: 1780179 - DNA, 25 bp, Homo sapien
tgaacagtaaattgaaataactcat

SEQ ID NO: 1780180 - DNA, 25 bp, Homo sapien
cagtaaattgaaataactcattacc

SEQ ID NO: 1780181 - DNA, 25 bp, Homo sapien
ggaggggtgaaagaatagaacacaa

SEQ ID NO: 1780182 - DNA, 25 bp, Homo sapien
ccatgaaaacgatgatgctagctga

SEQ ID NO: 1780183 - DNA, 25 bp, Homo sapien
ttatcagtcagctctcagttcctac

SEQ ID NO: 1780184 - DNA, 25 bp, Homo sapien
tatatacctcgcaaggcaatccttg

SEQ ID NO: 1780185 - DNA, 25 bp, Homo sapien
tacctagtaggaaagaaccatgaaa

SEQ ID NO: 1780186 - DNA, 25 bp, Homo sapien
gttatataactcaagtcagcctcat

SEQ ID NO: 1780187 - DNA, 25 bp, Homo sapien
taaggttcttcatctgttatataac

SEQ ID NO: 1780188 - DNA, 25 bp, Homo sapien
tcattcttgataatgtgactctggt

SEQ ID NO: 1780189 - DNA, 25 bp, Homo sapien
gataacaggcatcaatcctataagg

SEQ ID NO: 1780190 - DNA, 25 bp, Homo sapien
cttgctttgtctcagcagaccctgt

SEQ ID NO: 1780191 - DNA, 25 bp, Homo sapien
tgctttgtctcagcagaccctgtgg

SEQ ID NO: 1780192 - DNA, 25 bp, Homo sapien
ttgctttgtctcagcagaccctgtg

SEQ ID NO: 1780193 - DNA, 25 bp, Homo sapien
gacactcatttcctgatctctgctt

SEQ ID NO: 1780194 - DNA, 25 bp, Homo sapien
ctcgacactcatttcctgatctctg

SEQ ID NO: 1780195 - DNA, 25 bp, Homo sapien
cttaaaaagaactcgacactcattt

SEQ ID NO: 1780196 - DNA, 25 bp, Homo sapien
agaactcgacactcatttcctgatc

SEQ ID NO: 1780197 - DNA, 25 bp, Homo sapien
aatccgtgtatctgtagcagccagc

SEQ ID NO: 1780198 - DNA, 25 bp, Homo sapien
tgctgccctgttgctcttcagggct

SEQ ID NO: 1780199 - DNA, 25 bp, Homo sapien
catgacagttcacaggttgcgctga

SEQ ID NO: 1780200 - DNA, 25 bp, Homo sapien
tgcgctgacaggaatccgtgtatct

SEQ ID NO: 1780201 - DNA, 25 bp, Homo sapien
tctgcagactcatggcttctcctga

SEQ ID NO: 1780202 - DNA, 25 bp, Homo sapien
gaggagtgattagccccatgcacct

SEQ ID NO: 1780203 - DNA, 25 bp, Homo sapien
actgtacgtgtaggcctggactctg

SEQ ID NO: 1780204 - DNA, 25 bp, Homo sapien
tgagctctgctgtacgcagaggagt

SEQ ID NO: 1780205 - DNA, 25 bp, Homo sapien
ggttgcccggataaatgattcattg

SEQ ID NO: 1780206 - DNA, 25 bp, Homo sapien
accgtttgccttacagaagacatcc

SEQ ID NO: 1780207 - DNA, 25 bp, Homo sapien
gaagacatccccgaaatgtggctga

SEQ ID NO: 1780208 - DNA, 25 bp, Homo sapien
gagtacgcacttggtcacaaccgtt

SEQ ID NO: 1780209 - DNA, 25 bp, Homo sapien
gatttattgtcccagttaggcagcc

SEQ ID NO: 1780210 - DNA, 25 bp, Homo sapien
gaggcccactctgataactggttcc

SEQ ID NO: 1780211 - DNA, 25 bp, Homo sapien
ggtgggtacaccagacactgcttct

SEQ ID NO: 1780212 - DNA, 25 bp, Homo sapien
tcctgccaaagtggagattgtcccc

SEQ ID NO: 1780213 - DNA, 25 bp, Homo sapien
cactgaagttgaactctgagcatct

SEQ ID NO: 1780214 - DNA, 25 bp, Homo sapien
aacttcactgaagttgaactctgag

SEQ ID NO: 1780215 - DNA, 25 bp, Homo sapien
tctgagcatctaaggaaagcttgag

SEQ ID NO: 1780216 - DNA, 25 bp, Homo sapien
gttgaactctgagcatctaaggaaa

SEQ ID NO: 1780217 - DNA, 25 bp, Homo sapien
taaggactcttctgtgcgtcatgcg

SEQ ID NO: 1780218 - DNA, 25 bp, Homo sapien
gggaactataaggactcttctgtgc

SEQ ID NO: 1780219 - DNA, 25 bp, Homo sapien
cctccaggggaactataaggactct

SEQ ID NO: 1780220 - DNA, 25 bp, Homo sapien
tctgtgcgtcatgcgtggctgtcct

SEQ ID NO: 1780221 - DNA, 25 bp, Homo sapien
ttttacttacaaatgacacgtctaa

SEQ ID NO: 1780222 - DNA, 25 bp, Homo sapien
tcagggacaaatttgcagtggtgat

SEQ ID NO: 1780223 - DNA, 25 bp, Homo sapien
gacacgtctaaatggcagagacctg

SEQ ID NO: 1780224 - DNA, 25 bp, Homo sapien
cctgaagttctcttgatggggtgct

SEQ ID NO: 1780225 - DNA, 25 bp, Homo sapien
ggtctaaatgacagccctaaggagg

SEQ ID NO: 1780226 - DNA, 25 bp, Homo sapien
ggtatgtaacttgccaaagctcaca

SEQ ID NO: 1780227 - DNA, 25 bp, Homo sapien
cactcctagggattggcactggtct

SEQ ID NO: 1780228 - DNA, 25 bp, Homo sapien
attgaacctgaatagctcctctggg

SEQ ID NO: 1780229 - DNA, 25 bp, Homo sapien
gatgaagccttctggtagcagcctt

SEQ ID NO: 1780230 - DNA, 25 bp, Homo sapien
gaggccaaggttcttgttatgaaga

SEQ ID NO: 1780231 - DNA, 25 bp, Homo sapien
tcagaaagagtaataggtggtaaat

SEQ ID NO: 1780232 - DNA, 25 bp, Homo sapien
ggtaaatatctcctatcagacctta

SEQ ID NO: 1780233 - DNA, 25 bp, Homo sapien
cagtttagggggacagaatttatag

SEQ ID NO: 1780234 - DNA, 25 bp, Homo sapien
tcagtgtatgtaacgtatatgttca

SEQ ID NO: 1780235 - DNA, 25 bp, Homo sapien
ggtgttgggcttacagctgatagtt

SEQ ID NO: 1780236 - DNA, 25 bp, Homo sapien
gaatttataggcagacatcaatcag

SEQ ID NO: 1780237 - DNA, 25 bp, Homo sapien
tcaaggccactacaagggctagttc

SEQ ID NO: 1780238 - DNA, 25 bp, Homo sapien
gttgcttcttatctagggacctcag

SEQ ID NO: 1780239 - DNA, 25 bp, Homo sapien
ggtaacgtttgcacattcaaggcca

SEQ ID NO: 1780240 - DNA, 25 bp, Homo sapien
tatctggactgaatggagaaaccca

SEQ ID NO: 1780241 - DNA, 25 bp, Homo sapien
aatcgcggtgatgggaactggaaat

SEQ ID NO: 1780242 - DNA, 25 bp, Homo sapien
gaaatgaaataggttctttttcgca

SEQ ID NO: 1780243 - DNA, 25 bp, Homo sapien
atccatgtggaaatcgcggtgatgg

SEQ ID NO: 1780244 - DNA, 25 bp, Homo sapien
tgaaataggttctttttcgcagttg

SEQ ID NO: 1780245 - DNA, 25 bp, Homo sapien
gccacgaagactgcagactgcgcag

SEQ ID NO: 1780246 - DNA, 25 bp, Homo sapien
tttcagttgtatgcgggttgtaggc

SEQ ID NO: 1780247 - DNA, 25 bp, Homo sapien
tcctttcgcaaagtcccaagtcctg

SEQ ID NO: 1780248 - DNA, 25 bp, Homo sapien
ggtgtgatctctcttggcggccgct

SEQ ID NO: 1780249 - DNA, 25 bp, Homo sapien
cagaaacgtccaacaaactcccagt

SEQ ID NO: 1780250 - DNA, 25 bp, Homo sapien
agtccaggagcgctgcaaaaccaac

SEQ ID NO: 1780251 - DNA, 25 bp, Homo sapien
gtcgctgcccaacatgcacccgcag

SEQ ID NO: 1780252 - DNA, 25 bp, Homo sapien
acgccaggtagacggtgccagcccg

SEQ ID NO: 1780253 - DNA, 25 bp, Homo sapien
gttttcagcgccacaagcttccgga

SEQ ID NO: 1780254 - DNA, 25 bp, Homo sapien
aacatttccagtgtgtatcggtgca

SEQ ID NO: 1780255 - DNA, 25 bp, Homo sapien
ggatgatctcccgaaactgaggaca

SEQ ID NO: 1780256 - DNA, 25 bp, Homo sapien
tccggacttctcgacaccagttgag

SEQ ID NO: 1780257 - DNA, 25 bp, Homo sapien
gccaagaacaatgcagatagtagct

SEQ ID NO: 1780258 - DNA, 25 bp, Homo sapien
acataaaccccgtgatgatgacttc

SEQ ID NO: 1780259 - DNA, 25 bp, Homo sapien
tgattaaaaccacaaattgtcaggc

SEQ ID NO: 1780260 - DNA, 25 bp, Homo sapien
tgatgacttcacataattacctacc

SEQ ID NO: 1780261 - DNA, 25 bp, Homo sapien
tgaacgccccacatgtactgagaag

SEQ ID NO: 1780262 - DNA, 25 bp, Homo sapien
tccttgagcgtgctgaacagcgcct

SEQ ID NO: 1780263 - DNA, 25 bp, Homo sapien
gcatgcatgaggcaattgccgtcac

SEQ ID NO: 1780264 - DNA, 25 bp, Homo sapien
gagatttgagagactccagttgcca

SEQ ID NO: 1780265 - DNA, 25 bp, Homo sapien
gatcaaaagactcgctgctacagga

SEQ ID NO: 1780266 - DNA, 25 bp, Homo sapien
tacaggaacggatccacagctggga

SEQ ID NO: 1780267 - DNA, 25 bp, Homo sapien
gatgaggtatcatattgcagcccct

SEQ ID NO: 1780268 - DNA, 25 bp, Homo sapien
cagctgggaatctgctaaccaaaag

SEQ ID NO: 1780269 - DNA, 25 bp, Homo sapien
aaaggacaaatatgtgtatttcttc

SEQ ID NO: 1780270 - DNA, 25 bp, Homo sapien
tcttccagtgagttgtactgaagtc

SEQ ID NO: 1780271 - DNA, 25 bp, Homo sapien
tacagatccgtgatctgcaggcatc

SEQ ID NO: 1780272 - DNA, 25 bp, Homo sapien
ctccaggagccaaggcataaggctg

SEQ ID NO: 1780273 - DNA, 25 bp, Homo sapien
aaagcatttaagtacagatccgtga

SEQ ID NO: 1780274 - DNA, 25 bp, Homo sapien
gaactttggcagtgtggttttctcc

SEQ ID NO: 1780275 - DNA, 25 bp, Homo sapien
aaatgaggcccttaggtgactttca

SEQ ID NO: 1780276 - DNA, 25 bp, Homo sapien
aacctgattccaaacttcttagcat

SEQ ID NO: 1780277 - DNA, 25 bp, Homo sapien
ggccagtggagaggcaagtaaattc

SEQ ID NO: 1780278 - DNA, 25 bp, Homo sapien
gagaggcaagtaaattccacccact

SEQ ID NO: 1780279 - DNA, 25 bp, Homo sapien
caaaggggcgaaattggaacctgat

SEQ ID NO: 1780280 - DNA, 25 bp, Homo sapien
acaaaatgatggctgtcatagccga

SEQ ID NO: 1780281 - DNA, 25 bp, Homo sapien
tagccgagaacaatggggtatctgt

SEQ ID NO: 1780282 - DNA, 25 bp, Homo sapien
aatgatggctgtcatagccgagaac

SEQ ID NO: 1780283 - DNA, 25 bp, Homo sapien
caaaatgatggctgtcatagccgag

SEQ ID NO: 1780284 - DNA, 25 bp, Homo sapien
ttgatgagatgagttgtgccatggt

SEQ ID NO: 1780285 - DNA, 25 bp, Homo sapien
taagtactcttttaagagcttctcc

SEQ ID NO: 1780286 - DNA, 25 bp, Homo sapien
agtcttcaaatcttccccggtctct

SEQ ID NO: 1780287 - DNA, 25 bp, Homo sapien
cattttcaggatctgtcaaaaagtg

SEQ ID NO: 1780288 - DNA, 25 bp, Homo sapien
gagtccgtgcagcttgagacaggca

SEQ ID NO: 1780289 - DNA, 25 bp, Homo sapien
gatctgacttggaacgctggtgaca

SEQ ID NO: 1780290 - DNA, 25 bp, Homo sapien
gggttccacgccaagggctcatagg

SEQ ID NO: 1780291 - DNA, 25 bp, Homo sapien
tgtactcgatgaaacacagtgtgca

SEQ ID NO: 1780292 - DNA, 25 bp, Homo sapien
tcccctgcacaagctggtagaaaag

SEQ ID NO: 1780293 - DNA, 25 bp, Homo sapien
tattaggagctgctgtaatcacgca

SEQ ID NO: 1780294 - DNA, 25 bp, Homo sapien
tagaaaagcacggtaggtcctgaca

SEQ ID NO: 1780295 - DNA, 25 bp, Homo sapien
ggtctagtaaaagcacatcccatga

SEQ ID NO: 1780296 - DNA, 25 bp, Homo sapien
gaatggatgctagttagtaccacat

SEQ ID NO: 1780297 - DNA, 25 bp, Homo sapien
ctacatgagaatggatgctagttag

SEQ ID NO: 1780298 - DNA, 25 bp, Homo sapien
ggatgctagttagtaccacataggg

SEQ ID NO: 1780299 - DNA, 25 bp, Homo sapien
gggtcaccccaccgatacagagatg

SEQ ID NO: 1780300 - DNA, 25 bp, Homo sapien
tccccaggcacggaatggtgttctg

SEQ ID NO: 1780301 - DNA, 25 bp, Homo sapien
ggaacctggacgctgtgggactgac

SEQ ID NO: 1780302 - DNA, 25 bp, Homo sapien
tccttttggcctcatgaaatctctg

SEQ ID NO: 1780303 - DNA, 25 bp, Homo sapien
catggtgcttccaagggtgccgcat

SEQ ID NO: 1780304 - DNA, 25 bp, Homo sapien
gagccacagtgacatggacattccc

SEQ ID NO: 1780305 - DNA, 25 bp, Homo sapien
taatcctttatcatgaggagacaga

SEQ ID NO: 1780306 - DNA, 25 bp, Homo sapien
cagtgacatggacattccccttcag

SEQ ID NO: 1780307 - DNA, 25 bp, Homo sapien
gacatggacattccccttcaggttc

SEQ ID NO: 1780308 - DNA, 25 bp, Homo sapien
ccttgaggtgctttgtgtggttcga

SEQ ID NO: 1780309 - DNA, 25 bp, Homo sapien
cccgggcgcacttgggccttgaggt

SEQ ID NO: 1780310 - DNA, 25 bp, Homo sapien
gctttgtgtggttcgaggcacatct

SEQ ID NO: 1780311 - DNA, 25 bp, Homo sapien
gcgcacttgggccttgaggtgcttt

SEQ ID NO: 1780312 - DNA, 25 bp, Homo sapien
tgaaagcattcgttgcagtagccgt

SEQ ID NO: 1780313 - DNA, 25 bp, Homo sapien
gtagccgttgcacttggcattgcca

SEQ ID NO: 1780314 - DNA, 25 bp, Homo sapien
tctgcttgaactgaaagcattcgtt

SEQ ID NO: 1780315 - DNA, 25 bp, Homo sapien
cattcgttgcagtagccgttgcact

SEQ ID NO: 1780316 - DNA, 25 bp, Homo sapien
gacgatgaagcagtcctgatgcgca

SEQ ID NO: 1780317 - DNA, 25 bp, Homo sapien
ggttaccaaacctgagcatcgtggg

SEQ ID NO: 1780318 - DNA, 25 bp, Homo sapien
catgatgactgacagctcgaggccc

SEQ ID NO: 1780319 - DNA, 25 bp, Homo sapien
ttccaagtccaaagaagttcctggc

SEQ ID NO: 1780320 - DNA, 25 bp, Homo sapien
atgaggatctggcttcacatctctg

SEQ ID NO: 1780321 - DNA, 25 bp, Homo sapien
tgaggatctggcttcacatctctga

SEQ ID NO: 1780322 - DNA, 25 bp, Homo sapien
gaaaaaccatgaactacaaacactc

SEQ ID NO: 1780323 - DNA, 25 bp, Homo sapien
ttctgcatttctgccgggtcctcag

SEQ ID NO: 1780324 - DNA, 25 bp, Homo sapien
catttctgccgggtcctcaggaaag

SEQ ID NO: 1780325 - DNA, 25 bp, Homo sapien
ggttctgcatttctgccgggtcctc

SEQ ID NO: 1780326 - DNA, 25 bp, Homo sapien
gaggccaatttactccctgtggtca

SEQ ID NO: 1780327 - DNA, 25 bp, Homo sapien
caaagcaaggatgttctctcaggag

SEQ ID NO: 1780328 - DNA, 25 bp, Homo sapien
tcataaggagaagcacgaaacatcg

SEQ ID NO: 1780329 - DNA, 25 bp, Homo sapien
gcaaaagtgtatcaaagaggccaat

SEQ ID NO: 1780330 - DNA, 25 bp, Homo sapien
ttttcaggccataagtacagacccc

SEQ ID NO: 1780331 - DNA, 25 bp, Homo sapien
tccaaggaggtaggacactcagagg

SEQ ID NO: 1780332 - DNA, 25 bp, Homo sapien
aataccagggtaccatgggatgcag

SEQ ID NO: 1780333 - DNA, 25 bp, Homo sapien
ggcttttgctgtcccaataccaggg

SEQ ID NO: 1780334 - DNA, 25 bp, Homo sapien
tctattagggacaattaaatgtgca

SEQ ID NO: 1780335 - DNA, 25 bp, Homo sapien
agcgtggccccttgggcataagaat

SEQ ID NO: 1780336 - DNA, 25 bp, Homo sapien
ttgtggcacctgtaccttctggaag

SEQ ID NO: 1780337 - DNA, 25 bp, Homo sapien
aaaacccggagatcagataggactc

SEQ ID NO: 1780338 - DNA, 25 bp, Homo sapien
agaatagtggtgagagtttttccac

SEQ ID NO: 1780339 - DNA, 25 bp, Homo sapien
tttcaatgtaactgccttatctagg

SEQ ID NO: 1780340 - DNA, 25 bp, Homo sapien
gtaactgccttatctaggcatgcaa

SEQ ID NO: 1780341 - DNA, 25 bp, Homo sapien
gatgcaatagtttcaatgtaactgc

SEQ ID NO: 1780342 - DNA, 25 bp, Homo sapien
cagcaaggtgatgcaatagtttcaa

SEQ ID NO: 1780343 - DNA, 25 bp, Homo sapien
aatattagacatccggagtttttga

SEQ ID NO: 1780344 - DNA, 25 bp, Homo sapien
tcgtgtgattcagccccgcagttgg

SEQ ID NO: 1780345 - DNA, 25 bp, Homo sapien
tctggactggctttcaatattagac

SEQ ID NO: 1780346 - DNA, 25 bp, Homo sapien
agttctttaacactgagcgctctgg

SEQ ID NO: 1780347 - DNA, 25 bp, Homo sapien
aatgtgtaggcgctgcccacgttca

SEQ ID NO: 1780348 - DNA, 25 bp, Homo sapien
cgttcaggggtatgcccgaagctaa

SEQ ID NO: 1780349 - DNA, 25 bp, Homo sapien
gctgagatgacaatgtgtaggcgct

SEQ ID NO: 1780350 - DNA, 25 bp, Homo sapien
tgaccacggacagctctgagcctgt

SEQ ID NO: 1780351 - DNA, 25 bp, Homo sapien
tcagtagttgccgtcttgttgagag

SEQ ID NO: 1780352 - DNA, 25 bp, Homo sapien
tcactgaggagagttatagcatgtc

SEQ ID NO: 1780353 - DNA, 25 bp, Homo sapien
gcatgtctgcctatgatgtcttcag

SEQ ID NO: 1780354 - DNA, 25 bp, Homo sapien
tgcactgtcagagtaggagcatctg

SEQ ID NO: 1780355 - DNA, 25 bp, Homo sapien
tcacgtttaactgatagtgcttgtt

SEQ ID NO: 1780356 - DNA, 25 bp, Homo sapien
aggtgtcacgtttaactgatagtgc

SEQ ID NO: 1780357 - DNA, 25 bp, Homo sapien
caccaggtgtcacgtttaactgata

SEQ ID NO: 1780358 - DNA, 25 bp, Homo sapien
agacaccaggtgtcacgtttaactg

SEQ ID NO: 1780359 - DNA, 25 bp, Homo sapien
ggtcatcaatccatacagagtccac

SEQ ID NO: 1780360 - DNA, 25 bp, Homo sapien
aatcggtcatcaatccatacagagt

SEQ ID NO: 1780361 - DNA, 25 bp, Homo sapien
tgaaatcggtcatcaatccatacag

SEQ ID NO: 1780362 - DNA, 25 bp, Homo sapien
ccatgaaatcggtcatcaatccata

SEQ ID NO: 1780363 - DNA, 25 bp, Homo sapien
ctcttgcaaggaaggtcagtgcatc

SEQ ID NO: 1780364 - DNA, 25 bp, Homo sapien
ctctcaggagcccaacttcagggaa

SEQ ID NO: 1780365 - DNA, 25 bp, Homo sapien
agaacttctctcaggagcccaactt

SEQ ID NO: 1780366 - DNA, 25 bp, Homo sapien
cttctctcaggagcccaacttcagg

SEQ ID NO: 1780367 - DNA, 25 bp, Homo sapien
gatgaagaggggtatgagtataacc

SEQ ID NO: 1780368 - DNA, 25 bp, Homo sapien
gtaaataaatggtcaacaaagcaac

SEQ ID NO: 1780369 - DNA, 25 bp, Homo sapien
tgaacagggctagaggagatagagg

SEQ ID NO: 1780370 - DNA, 25 bp, Homo sapien
tatgagtataaccttttgtgagtaa

SEQ ID NO: 1780371 - DNA, 25 bp, Homo sapien
gatctccatatgcaaacccatgtaa

SEQ ID NO: 1780372 - DNA, 25 bp, Homo sapien
cagagataaccagatctccatatgc

SEQ ID NO: 1780373 - DNA, 25 bp, Homo sapien
aacagagacatcaacacagaaacct

SEQ ID NO: 1780374 - DNA, 25 bp, Homo sapien
ctaccgagagacctccaaacagaga

SEQ ID NO: 1780375 - DNA, 25 bp, Homo sapien
tccacctctacaaatgttccctcct

SEQ ID NO: 1780376 - DNA, 25 bp, Homo sapien
tggtatatctaaacataaacactac

SEQ ID NO: 1780377 - DNA, 25 bp, Homo sapien
gttcctacatgtgatcactggtata

SEQ ID NO: 1780378 - DNA, 25 bp, Homo sapien
taaacactaccttatcacctctact

SEQ ID NO: 1780379 - DNA, 25 bp, Homo sapien
tgagtcccaggatgcaatcagccct

SEQ ID NO: 1780380 - DNA, 25 bp, Homo sapien
gcaatgatgaatcccaggtgatgcc

SEQ ID NO: 1780381 - DNA, 25 bp, Homo sapien
tcattgtctcaaaaagcggtctggc

SEQ ID NO: 1780382 - DNA, 25 bp, Homo sapien
caaggtgggaatatgctgctctagc

SEQ ID NO: 1780383 - DNA, 25 bp, Homo sapien
gacaactcggaaagacggttctctc

SEQ ID NO: 1780384 - DNA, 25 bp, Homo sapien
gctggtccatagctgctgggcaaat

SEQ ID NO: 1780385 - DNA, 25 bp, Homo sapien
tatccgaggattgagggagagtacc

SEQ ID NO: 1780386 - DNA, 25 bp, Homo sapien
cacagcgggatggtcttatacatag

SEQ ID NO: 1780387 - DNA, 25 bp, Homo sapien
tactatggaggggtaacttgtctgg

SEQ ID NO: 1780388 - DNA, 25 bp, Homo sapien
tgctaaccaggtactatggaggggt

SEQ ID NO: 1780389 - DNA, 25 bp, Homo sapien
tctggattgcgaatatgatttcttt

SEQ ID NO: 1780390 - DNA, 25 bp, Homo sapien
gggtaacttgtctggattgcgaata

SEQ ID NO: 1780391 - DNA, 25 bp, Homo sapien
cttgaaggaggttgtcgtgggaaat

SEQ ID NO: 1780392 - DNA, 25 bp, Homo sapien
tacctcaacaagatgggaatctcca

SEQ ID NO: 1780393 - DNA, 25 bp, Homo sapien
cacagaccaaattaggatgttcaaa

SEQ ID NO: 1780394 - DNA, 25 bp, Homo sapien
aaaataacacagtgggctaagaggg

SEQ ID NO: 1780395 - DNA, 25 bp, Homo sapien
ggcagtgagccaattgtcttcctca

SEQ ID NO: 1780396 - DNA, 25 bp, Homo sapien
gggcagtgagccaattgtcttcctc

SEQ ID NO: 1780397 - DNA, 25 bp, Homo sapien
actccctggagatcaagattggtat

SEQ ID NO: 1780398 - DNA, 25 bp, Homo sapien
ctccccagtccaagatgaggatatt

SEQ ID NO: 1780399 - DNA, 25 bp, Homo sapien
ccctggagatcaagattggtatcta

SEQ ID NO: 1780400 - DNA, 25 bp, Homo sapien
gatgaggatattttggtccagagaa

SEQ ID NO: 1780401 - DNA, 25 bp, Homo sapien
ttgcccagactggtggctactagtc

SEQ ID NO: 1780402 - DNA, 25 bp, Homo sapien
tactagtcctcggttttagaggaga

SEQ ID NO: 1780403 - DNA, 25 bp, Homo sapien
taagtgacatgttcctgcacattta

SEQ ID NO: 1780404 - DNA, 25 bp, Homo sapien
ttatcagatgcctcggaccactgtc

SEQ ID NO: 1780405 - DNA, 25 bp, Homo sapien
gccagggtaaggggaacttcatgaa

SEQ ID NO: 1780406 - DNA, 25 bp, Homo sapien
cagggtaaggggaacttcatgaatt

SEQ ID NO: 1780407 - DNA, 25 bp, Homo sapien
ggtaaggggaacttcatgaattgat

SEQ ID NO: 1780408 - DNA, 25 bp, Homo sapien
gggtaaggggaacttcatgaattga

SEQ ID NO: 1780409 - DNA, 25 bp, Homo sapien
cagagcccagattctgcgcactgag

SEQ ID NO: 1780410 - DNA, 25 bp, Homo sapien
caccctgacgttctgtaaacaagga

SEQ ID NO: 1780411 - DNA, 25 bp, Homo sapien
gatccacaggtgttggcccctgtcc

SEQ ID NO: 1780412 - DNA, 25 bp, Homo sapien
tcagataagatcaccctgacgttct

SEQ ID NO: 1780413 - DNA, 25 bp, Homo sapien
aaacaaggagatccacaggtgttgg

SEQ ID NO: 1780414 - DNA, 25 bp, Homo sapien
cgatcagtaataatgaacttctctg

SEQ ID NO: 1780415 - DNA, 25 bp, Homo sapien
ggcttcagacgatcagtaataatga

SEQ ID NO: 1780416 - DNA, 25 bp, Homo sapien
tctcctccaaaagaacgctgttcct

SEQ ID NO: 1780417 - DNA, 25 bp, Homo sapien
cagacgatcagtaataatgaacttc

SEQ ID NO: 1780418 - DNA, 25 bp, Homo sapien
agtcaaggttggtgcaataagtcag

SEQ ID NO: 1780419 - DNA, 25 bp, Homo sapien
ggttggtgcaataagtcagttactg

SEQ ID NO: 1780420 - DNA, 25 bp, Homo sapien
tggtgcaataagtcagttactgctg

SEQ ID NO: 1780421 - DNA, 25 bp, Homo sapien
caaggttggtgcaataagtcagtta

SEQ ID NO: 1780422 - DNA, 25 bp, Homo sapien
cattgacattggcagggtattcaat

SEQ ID NO: 1780423 - DNA, 25 bp, Homo sapien
tgtgatgtagaagccatcactcttc

SEQ ID NO: 1780424 - DNA, 25 bp, Homo sapien
attcctatatgatatgacattgaca

SEQ ID NO: 1780425 - DNA, 25 bp, Homo sapien
atttgtgatgtagaagccatcactc

SEQ ID NO: 1780426 - DNA, 25 bp, Homo sapien
gtaaccaccagaagatgcagttctt

SEQ ID NO: 1780427 - DNA, 25 bp, Homo sapien
ctagatctggctagtgaagtttcca

SEQ ID NO: 1780428 - DNA, 25 bp, Homo sapien
cagttcttggaaggctgcctagatc

SEQ ID NO: 1780429 - DNA, 25 bp, Homo sapien
gctgcctagatctggctagtgaagt

SEQ ID NO: 1780430 - DNA, 25 bp, Homo sapien
cacagagcaatggttggtaggcagg

SEQ ID NO: 1780431 - DNA, 25 bp, Homo sapien
tgtgtcacacagagcaatggttggt

SEQ ID NO: 1780432 - DNA, 25 bp, Homo sapien
tcacacagagcaatggttggtaggc

SEQ ID NO: 1780433 - DNA, 25 bp, Homo sapien
caatggttggtaggcaggttaacat

SEQ ID NO: 1780434 - DNA, 25 bp, Homo sapien
gaatgcttcagtcttagtagggacc

SEQ ID NO: 1780435 - DNA, 25 bp, Homo sapien
tagtcagcctgagtagcggtgcact

SEQ ID NO: 1780436 - DNA, 25 bp, Homo sapien
gaggtgcagcagtccattctccctg

SEQ ID NO: 1780437 - DNA, 25 bp, Homo sapien
tgcttatgggagatggtgacactca

SEQ ID NO: 1780438 - DNA, 25 bp, Homo sapien
caaaccatggctggaacagtagtcg

SEQ ID NO: 1780439 - DNA, 25 bp, Homo sapien
ggtaatgaagagtcccatgacccaa

SEQ ID NO: 1780440 - DNA, 25 bp, Homo sapien
tgagcaattgtccaacccagtccac

SEQ ID NO: 1780441 - DNA, 25 bp, Homo sapien
cagggattgtgacagacgtggaaca

SEQ ID NO: 1780442 - DNA, 25 bp, Homo sapien
tctctatcaccatcataagggctaa

SEQ ID NO: 1780443 - DNA, 25 bp, Homo sapien
tctaagaacctcaactcctggagtt

SEQ ID NO: 1780444 - DNA, 25 bp, Homo sapien
taaggaaacacatagcatacaggga

SEQ ID NO: 1780445 - DNA, 25 bp, Homo sapien
taagaaacagtagaccagccagtat

SEQ ID NO: 1780446 - DNA, 25 bp, Homo sapien
tctgcttcccaggggcttaaggaat

SEQ ID NO: 1780447 - DNA, 25 bp, Homo sapien
cctctgcttcccaggggcttaagga

SEQ ID NO: 1780448 - DNA, 25 bp, Homo sapien
caccacatctaatttattttttagt

SEQ ID NO: 1780449 - DNA, 25 bp, Homo sapien
tgcttcccaggggcttaaggaatcc

SEQ ID NO: 1780450 - DNA, 25 bp, Homo sapien
ccgacttgtgctctcacccagtgct

SEQ ID NO: 1780451 - DNA, 25 bp, Homo sapien
gtgctgcctccaataccttgatcat

SEQ ID NO: 1780452 - DNA, 25 bp, Homo sapien
ttccgacttgtgctctcacccagtg

SEQ ID NO: 1780453 - DNA, 25 bp, Homo sapien
cttccgacttgtgctctcacccagt

SEQ ID NO: 1780454 - DNA, 25 bp, Homo sapien
cataatggaagtgtagctttcaggc

SEQ ID NO: 1780455 - DNA, 25 bp, Homo sapien
tccggatcttgtgtacaggacaagt

SEQ ID NO: 1780456 - DNA, 25 bp, Homo sapien
tatgagtgcctctcagtggtgggac

SEQ ID NO: 1780457 - DNA, 25 bp, Homo sapien
tggtgggacttaaactggaatgttg

SEQ ID NO: 1780458 - DNA, 25 bp, Homo sapien
ccagagtaggaagaatcagaatatt

SEQ ID NO: 1780459 - DNA, 25 bp, Homo sapien
cagagtaggaagaatcagaatatta

SEQ ID NO: 1780460 - DNA, 25 bp, Homo sapien
gacctggttgtaaccattggcacca

SEQ ID NO: 1780461 - DNA, 25 bp, Homo sapien
cattggcaccaagcctgctatgaaa

SEQ ID NO: 1780462 - DNA, 25 bp, Homo sapien
agagccgtgggcaattgctaaggac

SEQ ID NO: 1780463 - DNA, 25 bp, Homo sapien
caattgctaaggacctggttgtaac

SEQ ID NO: 1780464 - DNA, 25 bp, Homo sapien
ccccagtgctgggaagtactgcgtg

SEQ ID NO: 1780465 - DNA, 25 bp, Homo sapien
gtactgcgtgcacactacaagcttt

SEQ ID NO: 1780466 - DNA, 25 bp, Homo sapien
tgctgggaagtactgcgtgcacact

SEQ ID NO: 1780467 - DNA, 25 bp, Homo sapien
gggaagtactgcgtgcacactacaa

SEQ ID NO: 1780468 - DNA, 25 bp, Homo sapien
agagacaggcacacccatcccaggg

SEQ ID NO: 1780469 - DNA, 25 bp, Homo sapien
gggaggatgctccagggcaagtgca

SEQ ID NO: 1780470 - DNA, 25 bp, Homo sapien
ctagagacaggcacacccatcccag

SEQ ID NO: 1780471 - DNA, 25 bp, Homo sapien
gcagggaggatgctccagggcaagt

SEQ ID NO: 1780472 - DNA, 25 bp, Homo sapien
tcagctatcaggaggtggttgcccc

SEQ ID NO: 1780473 - DNA, 25 bp, Homo sapien
tagctgaggtgtcagctatcaggag

SEQ ID NO: 1780474 - DNA, 25 bp, Homo sapien
tggtttctcagcagcgtcatagctg

SEQ ID NO: 1780475 - DNA, 25 bp, Homo sapien
tggttgccccagacagttgagaaga

SEQ ID NO: 1780476 - DNA, 25 bp, Homo sapien
cccagcttctgatgtaataccagtg

SEQ ID NO: 1780477 - DNA, 25 bp, Homo sapien
ggtttagcttcataggcatccaggg

SEQ ID NO: 1780478 - DNA, 25 bp, Homo sapien
gaagtcatgtctacaataggtttag

SEQ ID NO: 1780479 - DNA, 25 bp, Homo sapien
taatccttgatacggagatccaatg

SEQ ID NO: 1780480 - DNA, 25 bp, Homo sapien
tttttcagaactaaactaatcagac

SEQ ID NO: 1780481 - DNA, 25 bp, Homo sapien
gcttggcttgcctggatacagtgtg

SEQ ID NO: 1780482 - DNA, 25 bp, Homo sapien
ggttggaacgaatagattcagtccc

SEQ ID NO: 1780483 - DNA, 25 bp, Homo sapien
ggcttgcaaccccatcagtcgatgg

SEQ ID NO: 1780484 - DNA, 25 bp, Homo sapien
gaaagggcatatttgagtctcatcc

SEQ ID NO: 1780485 - DNA, 25 bp, Homo sapien
tagtaaagcattaggagggtcattc

SEQ ID NO: 1780486 - DNA, 25 bp, Homo sapien
gcctcaggagaataaatgacttgct

SEQ ID NO: 1780487 - DNA, 25 bp, Homo sapien
agatggactgggtctaatttatcat

SEQ ID NO: 1780488 - DNA, 25 bp, Homo sapien
tatatatgatgcatcggataggtca

SEQ ID NO: 1780489 - DNA, 25 bp, Homo sapien
cctaacttgggaatgaatgtgggag

SEQ ID NO: 1780490 - DNA, 25 bp, Homo sapien
tgtaagagaatatgcacgtgaaact

SEQ ID NO: 1780491 - DNA, 25 bp, Homo sapien
tctccaggcgactttgaacccattt

SEQ ID NO: 1780492 - DNA, 25 bp, Homo sapien
gactcggtctgttaagggctaagga

SEQ ID NO: 1780493 - DNA, 25 bp, Homo sapien
gataaattcagcatcgcctccgctt

SEQ ID NO: 1780494 - DNA, 25 bp, Homo sapien
gcagcagaggcgacatgaaattatc

SEQ ID NO: 1780495 - DNA, 25 bp, Homo sapien
ccttgagatccaaacacggtgccgg

SEQ ID NO: 1780496 - DNA, 25 bp, Homo sapien
gcctttccgaaaggaagcgagcatt

SEQ ID NO: 1780497 - DNA, 25 bp, Homo sapien
ggcttatctctgctgtctaggctcc

SEQ ID NO: 1780498 - DNA, 25 bp, Homo sapien
cttggcttatctctgctgtctaggc

SEQ ID NO: 1780499 - DNA, 25 bp, Homo sapien
tgcattcatgagaactgagaccctt

SEQ ID NO: 1780500 - DNA, 25 bp, Homo sapien
taaagcacttgagctaatagtaacc

SEQ ID NO: 1780501 - DNA, 25 bp, Homo sapien
ttgccctcctgagataaagcacttg

SEQ ID NO: 1780502 - DNA, 25 bp, Homo sapien
tgagagagtcttggcagtaaatgca

SEQ ID NO: 1780503 - DNA, 25 bp, Homo sapien
ctccttttctggcccttacacctca

SEQ ID NO: 1780504 - DNA, 25 bp, Homo sapien
tccttttctggcccttacacctcat

SEQ ID NO: 1780505 - DNA, 25 bp, Homo sapien
tctccttttctggcccttacacctc

SEQ ID NO: 1780506 - DNA, 25 bp, Homo sapien
ctgagaggtccgaaagcaaggcaag

SEQ ID NO: 1780507 - DNA, 25 bp, Homo sapien
acagtaatggtagggaagggctcca

SEQ ID NO: 1780508 - DNA, 25 bp, Homo sapien
tggatccagatgtcaatgacagagg

SEQ ID NO: 1780509 - DNA, 25 bp, Homo sapien
gccctaagactcttgcatcctgagg

SEQ ID NO: 1780510 - DNA, 25 bp, Homo sapien
tttcatccttacaattggaccgggc

SEQ ID NO: 1780511 - DNA, 25 bp, Homo sapien
catccttacaattggaccgggcttt

SEQ ID NO: 1780512 - DNA, 25 bp, Homo sapien
cccttgagttagctgcagggattcc

SEQ ID NO: 1780513 - DNA, 25 bp, Homo sapien
tagatcccttgagttagctgcaggg

SEQ ID NO: 1780514 - DNA, 25 bp, Homo sapien
catggatacagctatagataatgac

SEQ ID NO: 1780515 - DNA, 25 bp, Homo sapien
agaaaacatggatacagctatagat

SEQ ID NO: 1780516 - DNA, 25 bp, Homo sapien
tggatacagctatagataatgacat

SEQ ID NO: 1780517 - DNA, 25 bp, Homo sapien
gaaaacatggatacagctatagata

SEQ ID NO: 1780518 - DNA, 25 bp, Homo sapien
ggatgctgatgaatcacgcccgctc

SEQ ID NO: 1780519 - DNA, 25 bp, Homo sapien
tggaggccgctgacctgaccgccga

SEQ ID NO: 1780520 - DNA, 25 bp, Homo sapien
cgggcgccgcgcttagcggaaaggt

SEQ ID NO: 1780521 - DNA, 25 bp, Homo sapien
acggatgtccggagctggctcgcca

SEQ ID NO: 1780522 - DNA, 25 bp, Homo sapien
gccgcccacagggagagaagcgcgg

SEQ ID NO: 1780523 - DNA, 25 bp, Homo sapien
acagggagagaagcgcgggcgagcc

SEQ ID NO: 1780524 - DNA, 25 bp, Homo sapien
ccgccgcccacagggagagaagcgc

SEQ ID NO: 1780525 - DNA, 25 bp, Homo sapien
cccacagggagagaagcgcgggcga

SEQ ID NO: 1780526 - DNA, 25 bp, Homo sapien
gatggctttgtacttgctcccggac

SEQ ID NO: 1780527 - DNA, 25 bp, Homo sapien
caggtgcagctctccttgatggctt

SEQ ID NO: 1780528 - DNA, 25 bp, Homo sapien
ctcccggacgcctccttctgcagct

SEQ ID NO: 1780529 - DNA, 25 bp, Homo sapien
tttgtacttgctcccggacgcctcc

SEQ ID NO: 1780530 - DNA, 25 bp, Homo sapien
aggcggctgatgtccacgcccgagc

SEQ ID NO: 1780531 - DNA, 25 bp, Homo sapien
cgggtcctgcctaactcggcgatgg

SEQ ID NO: 1780532 - DNA, 25 bp, Homo sapien
agaggcgcttcgctgtcaggcccca

SEQ ID NO: 1780533 - DNA, 25 bp, Homo sapien
ggttccactcgccaaggattcgaca

SEQ ID NO: 1780534 - DNA, 25 bp, Homo sapien
tggcacccaggatgagccgatgctg

SEQ ID NO: 1780535 - DNA, 25 bp, Homo sapien
ggatatatagtcaaccaaggctggg

SEQ ID NO: 1780536 - DNA, 25 bp, Homo sapien
ggcagtgacagtgaacaaccagatc

SEQ ID NO: 1780537 - DNA, 25 bp, Homo sapien
cagatcagcatggttttcccgcagg

SEQ ID NO: 1780538 - DNA, 25 bp, Homo sapien
cagtacatgtggagggatcttgaca

SEQ ID NO: 1780539 - DNA, 25 bp, Homo sapien
ctcagtacatgtggagggatcttga

SEQ ID NO: 1780540 - DNA, 25 bp, Homo sapien
cttgacaatggtatccagaccacct

SEQ ID NO: 1780541 - DNA, 25 bp, Homo sapien
atggtatccagaccacctagagttt

SEQ ID NO: 1780542 - DNA, 25 bp, Homo sapien
ggctggttcctttaggtcactgatt

SEQ ID NO: 1780543 - DNA, 25 bp, Homo sapien
cataagttttgatcatgtctctcct

SEQ ID NO: 1780544 - DNA, 25 bp, Homo sapien
tgtctctccttgaccaatttgatcc

SEQ ID NO: 1780545 - DNA, 25 bp, Homo sapien
taccatggacttccatggctggttc

SEQ ID NO: 1780546 - DNA, 25 bp, Homo sapien
tgctctcctggtttaaagtgcctgg

SEQ ID NO: 1780547 - DNA, 25 bp, Homo sapien
ggctttgagaagttccccactattg

SEQ ID NO: 1780548 - DNA, 25 bp, Homo sapien
tgtgaatcacaaactgaaacctcct

SEQ ID NO: 1780549 - DNA, 25 bp, Homo sapien
gggaaaagcccattactgtatgtct

SEQ ID NO: 1780550 - DNA, 25 bp, Homo sapien
gaccagtactgttgcaagtgacctg

SEQ ID NO: 1780551 - DNA, 25 bp, Homo sapien
tggcatagaatattggtcagagtcc

SEQ ID NO: 1780552 - DNA, 25 bp, Homo sapien
caacaagaggtttgctgccaatggc

SEQ ID NO: 1780553 - DNA, 25 bp, Homo sapien
ggtggccaaggacttttcatggaaa

SEQ ID NO: 1780554 - DNA, 25 bp, Homo sapien
aatagatcaatgcagcataaaggca

SEQ ID NO: 1780555 - DNA, 25 bp, Homo sapien
gaagctgttatggatggttctctcc

SEQ ID NO: 1780556 - DNA, 25 bp, Homo sapien
ctgataggcattggtggttcacacc

SEQ ID NO: 1780557 - DNA, 25 bp, Homo sapien
aaatgggaagctgttatggatggtt

SEQ ID NO: 1780558 - DNA, 25 bp, Homo sapien
tcaacagggccaaaactcagttaca

SEQ ID NO: 1780559 - DNA, 25 bp, Homo sapien
gactcgagatgagtttacatccaag

SEQ ID NO: 1780560 - DNA, 25 bp, Homo sapien
acttctccatgacgtaagaaaggca

SEQ ID NO: 1780561 - DNA, 25 bp, Homo sapien
gaataatgtgaagtacctgtccagc

SEQ ID NO: 1780562 - DNA, 25 bp, Homo sapien
cctggcttctgtcctaccaacagcc

SEQ ID NO: 1780563 - DNA, 25 bp, Homo sapien
ctggcttctgtcctaccaacagcct

SEQ ID NO: 1780564 - DNA, 25 bp, Homo sapien
cccagtcacgggatctctccttctc

SEQ ID NO: 1780565 - DNA, 25 bp, Homo sapien
tctgcccttcccagtcacgggatct

SEQ ID NO: 1780566 - DNA, 25 bp, Homo sapien
ggatctcttcagacctgtcacactg

SEQ ID NO: 1780567 - DNA, 25 bp, Homo sapien
atgggatctcttcagacctgtcaca

SEQ ID NO: 1780568 - DNA, 25 bp, Homo sapien
tgggatctcttcagacctgtcacac

SEQ ID NO: 1780569 - DNA, 25 bp, Homo sapien
atctcttcagacctgtcacactggg

SEQ ID NO: 1780570 - DNA, 25 bp, Homo sapien
cagggtgtctgagcaaggagcctca

SEQ ID NO: 1780571 - DNA, 25 bp, Homo sapien
cccagggtgtctgagcaaggagcct

SEQ ID NO: 1780572 - DNA, 25 bp, Homo sapien
gggtgtctgagcaaggagcctcact

SEQ ID NO: 1780573 - DNA, 25 bp, Homo sapien
aaagcccagggtgtctgagcaagga

SEQ ID NO: 1780574 - DNA, 25 bp, Homo sapien
aagctttgcagtaccttctccatag

SEQ ID NO: 1780575 - DNA, 25 bp, Homo sapien
cctctgctaaaagctttgcagtacc

SEQ ID NO: 1780576 - DNA, 25 bp, Homo sapien
gtcctctgctaaaagctttgcagta

SEQ ID NO: 1780577 - DNA, 25 bp, Homo sapien
gtaccttctccataggcatcgaaca

SEQ ID NO: 1780578 - DNA, 25 bp, Homo sapien
gagcagcgcccttccgccaaggagt

SEQ ID NO: 1780579 - DNA, 25 bp, Homo sapien
ggagttagcaccctgcccggaatct

SEQ ID NO: 1780580 - DNA, 25 bp, Homo sapien
caaggagtggcaaatgcaaacagca

SEQ ID NO: 1780581 - DNA, 25 bp, Homo sapien
agctggcaatctggagttagcaccc

SEQ ID NO: 1780582 - DNA, 25 bp, Homo sapien
gaaatggcttagatgtggcttacaa

SEQ ID NO: 1780583 - DNA, 25 bp, Homo sapien
tggcttacaaagtaacatgctacac

SEQ ID NO: 1780584 - DNA, 25 bp, Homo sapien
gattctgtgatctaagccatttatc

SEQ ID NO: 1780585 - DNA, 25 bp, Homo sapien
taatcataggtctggttgaaatggc

SEQ ID NO: 1780586 - DNA, 25 bp, Homo sapien
ggctaacaggtaacaatggacaaag

SEQ ID NO: 1780587 - DNA, 25 bp, Homo sapien
acaggtggtattgggttacaagagc

SEQ ID NO: 1780588 - DNA, 25 bp, Homo sapien
agagttaggatttaccaataattat

SEQ ID NO: 1780589 - DNA, 25 bp, Homo sapien
tatctttcaatacaagcaccaatgt

SEQ ID NO: 1780590 - DNA, 25 bp, Homo sapien
tttggaaatcctcaatgtgttgacc

SEQ ID NO: 1780591 - DNA, 25 bp, Homo sapien
aagacccttttggaaatcctcaatg

SEQ ID NO: 1780592 - DNA, 25 bp, Homo sapien
gcagcaatatgttcgcctatctata

SEQ ID NO: 1780593 - DNA, 25 bp, Homo sapien
ccttggaaagcagcaatatgttcgc

SEQ ID NO: 1780594 - DNA, 25 bp, Homo sapien
caagggcacccaacaagattggatg

SEQ ID NO: 1780595 - DNA, 25 bp, Homo sapien
ggcacccaacaagattggatgccat

SEQ ID NO: 1780596 - DNA, 25 bp, Homo sapien
gggcacccaacaagattggatgcca

SEQ ID NO: 1780597 - DNA, 25 bp, Homo sapien
aagggcacccaacaagattggatgc

SEQ ID NO: 1780598 - DNA, 25 bp, Homo sapien
ctgccaaagcatgttgggccagctt

SEQ ID NO: 1780599 - DNA, 25 bp, Homo sapien
ccctgccaaagcatgttgggccagc

SEQ ID NO: 1780600 - DNA, 25 bp, Homo sapien
cctgccaaagcatgttgggccagct

SEQ ID NO: 1780601 - DNA, 25 bp, Homo sapien
tcagtatctgattgagcagctgctt

SEQ ID NO: 1780602 - DNA, 25 bp, Homo sapien
cactttcacggcattcagtatctga

SEQ ID NO: 1780603 - DNA, 25 bp, Homo sapien
aggtcctcgttgagcgaaggcgtca

SEQ ID NO: 1780604 - DNA, 25 bp, Homo sapien
tggatacaaacctctcttccgacag

SEQ ID NO: 1780605 - DNA, 25 bp, Homo sapien
caggggatcaggatgtgttcctgtc

SEQ ID NO: 1780606 - DNA, 25 bp, Homo sapien
ctagcatgaccacaacgcagaggca

SEQ ID NO: 1780607 - DNA, 25 bp, Homo sapien
ctgtcccagtgacgcacactcttgg

SEQ ID NO: 1780608 - DNA, 25 bp, Homo sapien
atgaccacaacgcagaggcattttc

SEQ ID NO: 1780609 - DNA, 25 bp, Homo sapien
tacaagaatcagtcaacatgatggg

SEQ ID NO: 1780610 - DNA, 25 bp, Homo sapien
cctgcaggcaacttgggctttccct

SEQ ID NO: 1780611 - DNA, 25 bp, Homo sapien
taaattagtcccgtaagaccatcac

SEQ ID NO: 1780612 - DNA, 25 bp, Homo sapien
tgagctgtgattgcgtgattgcatc

SEQ ID NO: 1780613 - DNA, 25 bp, Homo sapien
gagcaagagctgcttttcggagcag

SEQ ID NO: 1780614 - DNA, 25 bp, Homo sapien
aagagctgcttttcggagcagcggt

SEQ ID NO: 1780615 - DNA, 25 bp, Homo sapien
gcaagagctgcttttcggagcagcg

SEQ ID NO: 1780616 - DNA, 25 bp, Homo sapien
tgagcaagagctgcttttcggagca

SEQ ID NO: 1780617 - DNA, 25 bp, Homo sapien
agaagagacaaggggttaacagtat

SEQ ID NO: 1780618 - DNA, 25 bp, Homo sapien
tgaaagaagagacaaggggttaaca

SEQ ID NO: 1780619 - DNA, 25 bp, Homo sapien
gagacaaggggttaacagtatggaa

SEQ ID NO: 1780620 - DNA, 25 bp, Homo sapien
aagagacaaggggttaacagtatgg

SEQ ID NO: 1780621 - DNA, 25 bp, Homo sapien
tcagatcaaatgttggcgtgtaggt

SEQ ID NO: 1780622 - DNA, 25 bp, Homo sapien
gcgtgtaggtgatgcatagtaaaac

SEQ ID NO: 1780623 - DNA, 25 bp, Homo sapien
cgatcttcagcacggcactcccatt

SEQ ID NO: 1780624 - DNA, 25 bp, Homo sapien
ctccgcgatcttcagcacggcactc

SEQ ID NO: 1780625 - DNA, 25 bp, Homo sapien
aacctggttgttgttgatactaaca

SEQ ID NO: 1780626 - DNA, 25 bp, Homo sapien
tgttgatactaacagcctcaatccc

SEQ ID NO: 1780627 - DNA, 25 bp, Homo sapien
ttcacatggcaaagggctaacaagc

SEQ ID NO: 1780628 - DNA, 25 bp, Homo sapien
ggctaacaagcctcttacacaccaa

SEQ ID NO: 1780629 - DNA, 25 bp, Homo sapien
ataacaccaagggtggcctatttgg

SEQ ID NO: 1780630 - DNA, 25 bp, Homo sapien
tataacaccaagggtggcctatttg

SEQ ID NO: 1780631 - DNA, 25 bp, Homo sapien
atataacaccaagggtggcctattt

SEQ ID NO: 1780632 - DNA, 25 bp, Homo sapien
ggaaccccaggaataacaatgccta

SEQ ID NO: 1780633 - DNA, 25 bp, Homo sapien
agagccagaggttcttctctaggct

SEQ ID NO: 1780634 - DNA, 25 bp, Homo sapien
gagagccagaggttcttctctaggc

SEQ ID NO: 1780635 - DNA, 25 bp, Homo sapien
gtgaggaaccccaggaataacaatg

SEQ ID NO: 1780636 - DNA, 25 bp, Homo sapien
tttatgctacgctggtgacagctgc

SEQ ID NO: 1780637 - DNA, 25 bp, Homo sapien
gagagttgcccgcacagcagtgttt

SEQ ID NO: 1780638 - DNA, 25 bp, Homo sapien
tgacagctgcttatgtacgtctcaa

SEQ ID NO: 1780639 - DNA, 25 bp, Homo sapien
tcctgcctctgtcgtaactgtaaag

SEQ ID NO: 1780640 - DNA, 25 bp, Homo sapien
tgggaagatgggcttgtaatcaact

SEQ ID NO: 1780641 - DNA, 25 bp, Homo sapien
gcagatatctctgggtagacagagg

SEQ ID NO: 1780642 - DNA, 25 bp, Homo sapien
gcaggtaggcagtaacacgaatggt

SEQ ID NO: 1780643 - DNA, 25 bp, Homo sapien
gagtgactgaggcaagtatctcaat

SEQ ID NO: 1780644 - DNA, 25 bp, Homo sapien
cttgattcccgaaatcctgtgggac

SEQ ID NO: 1780645 - DNA, 25 bp, Homo sapien
catgagacatcgacagggggcacga

SEQ ID NO: 1780646 - DNA, 25 bp, Homo sapien
ccatcctccactttagatggttttt

SEQ ID NO: 1780647 - DNA, 25 bp, Homo sapien
catcctccactttagatggtttttg

SEQ ID NO: 1780648 - DNA, 25 bp, Homo sapien
gggcacgacgagctccctgaaccat

SEQ ID NO: 1780649 - DNA, 25 bp, Homo sapien
gagacaacatcatcacagagggact

SEQ ID NO: 1780650 - DNA, 25 bp, Homo sapien
tctcacacaggacggtgagtacaga

SEQ ID NO: 1780651 - DNA, 25 bp, Homo sapien
gacggtgagtacagagacaacatca

SEQ ID NO: 1780652 - DNA, 25 bp, Homo sapien
cagcttctcacacaggacggtgagt

SEQ ID NO: 1780653 - DNA, 25 bp, Homo sapien
taggatggtaatctgagtgccagct

SEQ ID NO: 1780654 - DNA, 25 bp, Homo sapien
tcgctgcagttggtgctagagccct

SEQ ID NO: 1780655 - DNA, 25 bp, Homo sapien
tccactgttccaacacgccatggtc

SEQ ID NO: 1780656 - DNA, 25 bp, Homo sapien
gctagagccctcagttaggatggta

SEQ ID NO: 1780657 - DNA, 25 bp, Homo sapien
ttggcaggcttagtatctgctggtc

SEQ ID NO: 1780658 - DNA, 25 bp, Homo sapien
gttggcaggcttagtatctgctggt

SEQ ID NO: 1780659 - DNA, 25 bp, Homo sapien
ggttggcaggcttagtatctgctgg

SEQ ID NO: 1780660 - DNA, 25 bp, Homo sapien
tggcaggcttagtatctgctggtct

SEQ ID NO: 1780661 - DNA, 25 bp, Homo sapien
tgtatgcgtgtaaaagctgtccttg

SEQ ID NO: 1780662 - DNA, 25 bp, Homo sapien
caagtaagtagaatgcacaaggcaa

SEQ ID NO: 1780663 - DNA, 25 bp, Homo sapien
ttgtacaaacaagtaagtagaatgc

SEQ ID NO: 1780664 - DNA, 25 bp, Homo sapien
cagcatgtatgcgtgtaaaagctgt

SEQ ID NO: 1780665 - DNA, 25 bp, Homo sapien
gtattaaaatccaggcaggtgacaa

SEQ ID NO: 1780666 - DNA, 25 bp, Homo sapien
aagtattaaaatccaggcaggtgac

SEQ ID NO: 1780667 - DNA, 25 bp, Homo sapien
caggtgacaagagtgacagataggg

SEQ ID NO: 1780668 - DNA, 25 bp, Homo sapien
caggcaggtgacaagagtgacagat

SEQ ID NO: 1780669 - DNA, 25 bp, Homo sapien
gatgcactccaggtagagaagctgc

SEQ ID NO: 1780670 - DNA, 25 bp, Homo sapien
ggatgcactccaggtagagaagctg

SEQ ID NO: 1780671 - DNA, 25 bp, Homo sapien
cagatcaggtccgtgaagcgcctgt

SEQ ID NO: 1780672 - DNA, 25 bp, Homo sapien
ccgtgaagcgcctgtgcaggtgcat

SEQ ID NO: 1780673 - DNA, 25 bp, Homo sapien
cagagtccgactccaggctggtact

SEQ ID NO: 1780674 - DNA, 25 bp, Homo sapien
aatagatagtccgagccacaggtcc

SEQ ID NO: 1780675 - DNA, 25 bp, Homo sapien
gctcggctgcgatgtaatagatagt

SEQ ID NO: 1780676 - DNA, 25 bp, Homo sapien
caagatcacgatgagagcagggcag

SEQ ID NO: 1780677 - DNA, 25 bp, Homo sapien
agcactcggtggtagagggactgga

SEQ ID NO: 1780678 - DNA, 25 bp, Homo sapien
tttgatggcttccacccggtgctgg

SEQ ID NO: 1780679 - DNA, 25 bp, Homo sapien
gtggggggtagagcagcactcggtg

SEQ ID NO: 1780680 - DNA, 25 bp, Homo sapien
tattttgatggcttccacccggtgc

SEQ ID NO: 1780681 - DNA, 25 bp, Homo sapien
aagttccggcaagtgattggcaagc

SEQ ID NO: 1780682 - DNA, 25 bp, Homo sapien
ttcgctactggacaccatgaggcag

SEQ ID NO: 1780683 - DNA, 25 bp, Homo sapien
catgaggcagtaatgaagttccggc

SEQ ID NO: 1780684 - DNA, 25 bp, Homo sapien
ttgtatgcgaaacgctggtcaggcc

SEQ ID NO: 1780685 - DNA, 25 bp, Homo sapien
ggagtgacccacaggaataagggac

SEQ ID NO: 1780686 - DNA, 25 bp, Homo sapien
caattctgtgaagggggagtgaccc

SEQ ID NO: 1780687 - DNA, 25 bp, Homo sapien
tgacccacaggaataagggacagaa

SEQ ID NO: 1780688 - DNA, 25 bp, Homo sapien
gagtgacccacaggaataagggaca

SEQ ID NO: 1780689 - DNA, 25 bp, Homo sapien
gggaagctagaacatctacgatgaa

SEQ ID NO: 1780690 - DNA, 25 bp, Homo sapien
tctctgcaaaatgaccttgggaagc

SEQ ID NO: 1780691 - DNA, 25 bp, Homo sapien
caccgcctggacgtgctacttgggt

SEQ ID NO: 1780692 - DNA, 25 bp, Homo sapien
taccatcaaattcgagcctcatctc

SEQ ID NO: 1780693 - DNA, 25 bp, Homo sapien
gtcacagagacgctgtgggctccca

SEQ ID NO: 1780694 - DNA, 25 bp, Homo sapien
caagtcacagagacgctgtgggctc

SEQ ID NO: 1780695 - DNA, 25 bp, Homo sapien
tcacagagacgctgtgggctcccaa

SEQ ID NO: 1780696 - DNA, 25 bp, Homo sapien
gccaagtcacagagacgctgtgggc

SEQ ID NO: 1780697 - DNA, 25 bp, Homo sapien
aggagatccagatgagactttcttt

SEQ ID NO: 1780698 - DNA, 25 bp, Homo sapien
ggagatccagatgagactttctttt

SEQ ID NO: 1780699 - DNA, 25 bp, Homo sapien
taaagacttaaaaggataaacatca

SEQ ID NO: 1780700 - DNA, 25 bp, Homo sapien
agacttaaaaggataaacatcatac

SEQ ID NO: 1780701 - DNA, 25 bp, Homo sapien
aagacttaaaaggataaacatcata

SEQ ID NO: 1780702 - DNA, 25 bp, Homo sapien
aaagacttaaaaggataaacatcat

SEQ ID NO: 1780703 - DNA, 25 bp, Homo sapien
taagggaccgtgtggcttctctgca

SEQ ID NO: 1780704 - DNA, 25 bp, Homo sapien
gcaaagttctgcagagcggtgtcca

SEQ ID NO: 1780705 - DNA, 25 bp, Homo sapien
gctagtgaacagttgtccgacccaa

SEQ ID NO: 1780706 - DNA, 25 bp, Homo sapien
gaaaggtcttggtcatcaacgctaa

SEQ ID NO: 1780707 - DNA, 25 bp, Homo sapien
tattcccgtcaaagccaggagagtg

SEQ ID NO: 1780708 - DNA, 25 bp, Homo sapien
ggagcagggcgcagtgtgcagctgt

SEQ ID NO: 1780709 - DNA, 25 bp, Homo sapien
gtagtagtcaccgtgggagagcttc

SEQ ID NO: 1780710 - DNA, 25 bp, Homo sapien
cagggtcggccgcttcctgtagtag

SEQ ID NO: 1780711 - DNA, 25 bp, Homo sapien
agaagaccatcagcacgccgctggt

SEQ ID NO: 1780712 - DNA, 25 bp, Homo sapien
gagctcctcaatccaggcctgagag

SEQ ID NO: 1780713 - DNA, 25 bp, Homo sapien
atgttcctgtcgagcacctgatggt

SEQ ID NO: 1780714 - DNA, 25 bp, Homo sapien
gcacctgatggtagagctcctcaat

SEQ ID NO: 1780715 - DNA, 25 bp, Homo sapien
tgtagcagccgaggccatcagctgg

SEQ ID NO: 1780716 - DNA, 25 bp, Homo sapien
ggagtcatcaattctcctgctctgg

SEQ ID NO: 1780717 - DNA, 25 bp, Homo sapien
tcctgctctgggcgaaaggagactc

SEQ ID NO: 1780718 - DNA, 25 bp, Homo sapien
ccaatggcactgctctctaagccgt

SEQ ID NO: 1780719 - DNA, 25 bp, Homo sapien
gatggcgtcccgctccttctggttc

SEQ ID NO: 1780720 - DNA, 25 bp, Homo sapien
cagaatatagcgagcaaatgccacg

SEQ ID NO: 1780721 - DNA, 25 bp, Homo sapien
taaagtatcgatcaagttcttccag

SEQ ID NO: 1780722 - DNA, 25 bp, Homo sapien
ccgtcgaggctcatgcagatggcgt

SEQ ID NO: 1780723 - DNA, 25 bp, Homo sapien
actgggttcttgggcctccctctct

SEQ ID NO: 1780724 - DNA, 25 bp, Homo sapien
ctgggttcttgggcctccctctctt

SEQ ID NO: 1780725 - DNA, 25 bp, Homo sapien
cgagtgttggctggcgtgtgtaggc

SEQ ID NO: 1780726 - DNA, 25 bp, Homo sapien
tgtgtaggcctgtgcaggtgtgtgc

SEQ ID NO: 1780727 - DNA, 25 bp, Homo sapien
acacagaacaggcacgagtgttggc

SEQ ID NO: 1780728 - DNA, 25 bp, Homo sapien
tgtgtgcatactgcacccaaggcac

SEQ ID NO: 1780729 - DNA, 25 bp, Homo sapien
gcctacgctgaggatggcctccatg

SEQ ID NO: 1780730 - DNA, 25 bp, Homo sapien
tgcaccttcccaatctgctccagtt

SEQ ID NO: 1780731 - DNA, 25 bp, Homo sapien
cgtgggcagtgtgcagccacacccc

SEQ ID NO: 1780732 - DNA, 25 bp, Homo sapien
agcagtccgggttgtggcttcccat

SEQ ID NO: 1780733 - DNA, 25 bp, Homo sapien
ccaaggcagggttagtgccatctgg

SEQ ID NO: 1780734 - DNA, 25 bp, Homo sapien
gtttcccaaggcagggttagtgcca

SEQ ID NO: 1780735 - DNA, 25 bp, Homo sapien
cagggttagtgccatctgggggtgg

SEQ ID NO: 1780736 - DNA, 25 bp, Homo sapien
tcccaaggcagggttagtgccatct

SEQ ID NO: 1780737 - DNA, 25 bp, Homo sapien
tgctctgcctagacctgggtttgga

SEQ ID NO: 1780738 - DNA, 25 bp, Homo sapien
agtgctccttccacggtactgggtc

SEQ ID NO: 1780739 - DNA, 25 bp, Homo sapien
ttgaagacgtgaaactgaacccagc

SEQ ID NO: 1780740 - DNA, 25 bp, Homo sapien
tttgctcaacaaacactcatggcta

SEQ ID NO: 1780741 - DNA, 25 bp, Homo sapien
gcaaggtccctcatctcggagtaag

SEQ ID NO: 1780742 - DNA, 25 bp, Homo sapien
tgtttactggtaaagagcatcatgg

SEQ ID NO: 1780743 - DNA, 25 bp, Homo sapien
catctcggagtaagtctgtttactg

SEQ ID NO: 1780744 - DNA, 25 bp, Homo sapien
ggacgaagatggttcgcaaggtccc

SEQ ID NO: 1780745 - DNA, 25 bp, Homo sapien
tgcaagctccccagctttcctcttt

SEQ ID NO: 1780746 - DNA, 25 bp, Homo sapien
cagacaaaggaaatgcagccagctc

SEQ ID NO: 1780747 - DNA, 25 bp, Homo sapien
cagctctgcaagctccccagctttc

SEQ ID NO: 1780748 - DNA, 25 bp, Homo sapien
cggcagctccataaaccccacagtg

SEQ ID NO: 1780749 - DNA, 25 bp, Homo sapien
gcttgcgtggagagggtgagcacca

SEQ ID NO: 1780750 - DNA, 25 bp, Homo sapien
ccaaggaggccagcgcttccagtgg

SEQ ID NO: 1780751 - DNA, 25 bp, Homo sapien
catcgctgaagtggttgtgctccag

SEQ ID NO: 1780752 - DNA, 25 bp, Homo sapien
tgccttcccggacgaggtcctggat

SEQ ID NO: 1780753 - DNA, 25 bp, Homo sapien
ctggatgcaaacagaaagagatgtg

SEQ ID NO: 1780754 - DNA, 25 bp, Homo sapien
tggatgcaaacagaaagagatgtgt

SEQ ID NO: 1780755 - DNA, 25 bp, Homo sapien
ggatgcaaacagaaagagatgtgtt

SEQ ID NO: 1780756 - DNA, 25 bp, Homo sapien
gagtaatcaactgtatctgtaacag

SEQ ID NO: 1780757 - DNA, 25 bp, Homo sapien
gagactgcgatgctttcttcagctg

SEQ ID NO: 1780758 - DNA, 25 bp, Homo sapien
tgaggttcaacttatccgtagcatc

SEQ ID NO: 1780759 - DNA, 25 bp, Homo sapien
tggcattgccagagagtaatcaact

SEQ ID NO: 1780760 - DNA, 25 bp, Homo sapien
ctccagcagcgcatcacgtggagca

SEQ ID NO: 1780761 - DNA, 25 bp, Homo sapien
cggtcttgagtggatttaacttctc

SEQ ID NO: 1780762 - DNA, 25 bp, Homo sapien
gggccgtgctttgctccgcacaatc

SEQ ID NO: 1780763 - DNA, 25 bp, Homo sapien
tggagggcgctttttcggtcttgag

SEQ ID NO: 1780764 - DNA, 25 bp, Homo sapien
tcggaagagtgcttcattgaagtga

SEQ ID NO: 1780765 - DNA, 25 bp, Homo sapien
taatgcgctcgaaaggtcggaagag

SEQ ID NO: 1780766 - DNA, 25 bp, Homo sapien
gacttctgtcagtatgtcatggatg

SEQ ID NO: 1780767 - DNA, 25 bp, Homo sapien
ggtcttggacgtcctcatcacacaa

SEQ ID NO: 1780768 - DNA, 25 bp, Homo sapien
cctgggactcccattacaggtatgt

SEQ ID NO: 1780769 - DNA, 25 bp, Homo sapien
tacatctgggcttactcttaagtca

SEQ ID NO: 1780770 - DNA, 25 bp, Homo sapien
gacattgttctacaaatctctgagg

SEQ ID NO: 1780771 - DNA, 25 bp, Homo sapien
gccatctctttctggtaagcccgta

SEQ ID NO: 1780772 - DNA, 25 bp, Homo sapien
ggactacaggtctagtcctgggttc

SEQ ID NO: 1780773 - DNA, 25 bp, Homo sapien
gaattcacgtgatataccttgtcaa

SEQ ID NO: 1780774 - DNA, 25 bp, Homo sapien
taatcaccggtgatcaaaccaaagg

SEQ ID NO: 1780775 - DNA, 25 bp, Homo sapien
ccaaaggtgtaatttcacaaatcac

SEQ ID NO: 1780776 - DNA, 25 bp, Homo sapien
taaccaatccacattgacagctttg

SEQ ID NO: 1780777 - DNA, 25 bp, Homo sapien
tggtatcacagaaacgcaggcccca

SEQ ID NO: 1780778 - DNA, 25 bp, Homo sapien
gcttgagtagggttgatattatttc

SEQ ID NO: 1780779 - DNA, 25 bp, Homo sapien
cacagaaacgcaggccccataaaat

SEQ ID NO: 1780780 - DNA, 25 bp, Homo sapien
tttccttcttgagactttggtatca

SEQ ID NO: 1780781 - DNA, 25 bp, Homo sapien
aaccagctcaccaatggatgtgaca

SEQ ID NO: 1780782 - DNA, 25 bp, Homo sapien
cccgactggatctgcgtggaacaca

SEQ ID NO: 1780783 - DNA, 25 bp, Homo sapien
tgttcccgccatgcactgtttccag

SEQ ID NO: 1780784 - DNA, 25 bp, Homo sapien
aacaagggtctccatcccgactgga

SEQ ID NO: 1780785 - DNA, 25 bp, Homo sapien
agtggctgcattagcaaagacctgg

SEQ ID NO: 1780786 - DNA, 25 bp, Homo sapien
cctggatgttgtcagtattgagaaa

SEQ ID NO: 1780787 - DNA, 25 bp, Homo sapien
tgtcagtattgagaaaagcttcaaa

SEQ ID NO: 1780788 - DNA, 25 bp, Homo sapien
cttcataaggcacatgatgtagcta

SEQ ID NO: 1780789 - DNA, 25 bp, Homo sapien
acaggtctgtggacggggctccggg

SEQ ID NO: 1780790 - DNA, 25 bp, Homo sapien
tgagagcagcgcctgaggtaatcca

SEQ ID NO: 1780791 - DNA, 25 bp, Homo sapien
tccaatctctttacagtccacctcc

SEQ ID NO: 1780792 - DNA, 25 bp, Homo sapien
cagcgcctgaggtaatccagggccg

SEQ ID NO: 1780793 - DNA, 25 bp, Homo sapien
cagacaggactgattcaattccatc

SEQ ID NO: 1780794 - DNA, 25 bp, Homo sapien
gactgttcctgaagtcttcgaggca

SEQ ID NO: 1780795 - DNA, 25 bp, Homo sapien
tcatcaaaatcagacaggactgatt

SEQ ID NO: 1780796 - DNA, 25 bp, Homo sapien
tcttcgaggcaagccggcaagtctc

SEQ ID NO: 1780797 - DNA, 25 bp, Homo sapien
gattcacaggagatcacatgggacc

SEQ ID NO: 1780798 - DNA, 25 bp, Homo sapien
cagtagttttagacagaggaatcca

SEQ ID NO: 1780799 - DNA, 25 bp, Homo sapien
taagtacttaggcaccaatggaact

SEQ ID NO: 1780800 - DNA, 25 bp, Homo sapien
tcaacagtcacaaatagagtctctc

SEQ ID NO: 1780801 - DNA, 25 bp, Homo sapien
caacagctcaaagagtaaatccaga

SEQ ID NO: 1780802 - DNA, 25 bp, Homo sapien
tgctccagcaggattatccagactt

SEQ ID NO: 1780803 - DNA, 25 bp, Homo sapien
tggtgttttcgtcacatctctcaac

SEQ ID NO: 1780804 - DNA, 25 bp, Homo sapien
tgccgtggacaattggacacagccg

SEQ ID NO: 1780805 - DNA, 25 bp, Homo sapien
aaaaagaaaagtcagcgtagcaaca

SEQ ID NO: 1780806 - DNA, 25 bp, Homo sapien
aaaagaaaagtcagcgtagcaacaa

SEQ ID NO: 1780807 - DNA, 25 bp, Homo sapien
aaagaaaagtcagcgtagcaacaac

SEQ ID NO: 1780808 - DNA, 25 bp, Homo sapien
ggacagaccaatagcgtgcttgaaa

SEQ ID NO: 1780809 - DNA, 25 bp, Homo sapien
ggagccaaacggacatcacaggaag

SEQ ID NO: 1780810 - DNA, 25 bp, Homo sapien
gaaggaggaggtgaaccactgcata

SEQ ID NO: 1780811 - DNA, 25 bp, Homo sapien
gaatggtctttatggctccggcgga

SEQ ID NO: 1780812 - DNA, 25 bp, Homo sapien
ctatgggaaacagcaaaatcacagt

SEQ ID NO: 1780813 - DNA, 25 bp, Homo sapien
tgggaaacagcaaaatcacagtttc

SEQ ID NO: 1780814 - DNA, 25 bp, Homo sapien
gaaacagcaaaatcacagtttcaca

SEQ ID NO: 1780815 - DNA, 25 bp, Homo sapien
aacagcaaaatcacagtttcacaca

SEQ ID NO: 1780816 - DNA, 25 bp, Homo sapien
acaggcgaccagcaactcaaagagg

SEQ ID NO: 1780817 - DNA, 25 bp, Homo sapien
gcagcccactctggagatggtttca

SEQ ID NO: 1780818 - DNA, 25 bp, Homo sapien
ccttcagcatggtattgatcatgct

SEQ ID NO: 1780819 - DNA, 25 bp, Homo sapien
gtattgatcatgctctcgtacctga

SEQ ID NO: 1780820 - DNA, 25 bp, Homo sapien
agggcccgctgtcacaaggacgtat

SEQ ID NO: 1780821 - DNA, 25 bp, Homo sapien
agaacgcatcttgcagggcacagca

SEQ ID NO: 1780822 - DNA, 25 bp, Homo sapien
cacagcaggcaagcctccacatctc

SEQ ID NO: 1780823 - DNA, 25 bp, Homo sapien
tgtggcagagaacgcatcttgcagg

SEQ ID NO: 1780824 - DNA, 25 bp, Homo sapien
ccttccccgctgaagctctccgtgc

SEQ ID NO: 1780825 - DNA, 25 bp, Homo sapien
gctcggatgcgccagtactcggcct

SEQ ID NO: 1780826 - DNA, 25 bp, Homo sapien
gatgcgccagtactcggcctcggca

SEQ ID NO: 1780827 - DNA, 25 bp, Homo sapien
cccgctgaagctctccgtgccgctg

SEQ ID NO: 1780828 - DNA, 25 bp, Homo sapien
tcatcaggaggcagctcaataatga

SEQ ID NO: 1780829 - DNA, 25 bp, Homo sapien
tcaggaggcagctcaataatgagct

SEQ ID NO: 1780830 - DNA, 25 bp, Homo sapien
caaagttgtttggtgtctttggtga

SEQ ID NO: 1780831 - DNA, 25 bp, Homo sapien
tcaaagttgtttggtgtctttggtg

SEQ ID NO: 1780832 - DNA, 25 bp, Homo sapien
caatctgcgttgctgacaggctgga

SEQ ID NO: 1780833 - DNA, 25 bp, Homo sapien
tacagttctccaggtccaagtgcat

SEQ ID NO: 1780834 - DNA, 25 bp, Homo sapien
gttaaagctcatcgcagactggcgg

SEQ ID NO: 1780835 - DNA, 25 bp, Homo sapien
tcctataagagtccagcagcaggtc

SEQ ID NO: 1780836 - DNA, 25 bp, Homo sapien
catggtgtagattttgttccccgca

SEQ ID NO: 1780837 - DNA, 25 bp, Homo sapien
gaatgccgcatttgcccttggtcca

SEQ ID NO: 1780838 - DNA, 25 bp, Homo sapien
ttcaggctcagggactcgcccatgt

SEQ ID NO: 1780839 - DNA, 25 bp, Homo sapien
gaaatggtcttgtcggctgccatgg

SEQ ID NO: 1780840 - DNA, 25 bp, Homo sapien
tgagggagctcccggtggagcctga

SEQ ID NO: 1780841 - DNA, 25 bp, Homo sapien
ctgagggagctcccggtggagcctg

SEQ ID NO: 1780842 - DNA, 25 bp, Homo sapien
gagggagctcccggtggagcctgag

SEQ ID NO: 1780843 - DNA, 25 bp, Homo sapien
ctggatctgtgcttctgcgtctctc

SEQ ID NO: 1780844 - DNA, 25 bp, Homo sapien
tggatctgtgcttctgcgtctctca

SEQ ID NO: 1780845 - DNA, 25 bp, Homo sapien
ggatctgtgcttctgcgtctctcac

SEQ ID NO: 1780846 - DNA, 25 bp, Homo sapien
ctgatgcacgggaacactgcgggct

SEQ ID NO: 1780847 - DNA, 25 bp, Homo sapien
tgtcggtcacgtgacaggtcagctg

SEQ ID NO: 1780848 - DNA, 25 bp, Homo sapien
agcctggcgaactctgatgtcggtc

SEQ ID NO: 1780849 - DNA, 25 bp, Homo sapien
gacaggtcagctgactgatgcacgg

SEQ ID NO: 1780850 - DNA, 25 bp, Homo sapien
tacacaatgatgtcatagacacggc

SEQ ID NO: 1780851 - DNA, 25 bp, Homo sapien
caatgatgtcatagacacggcccac

SEQ ID NO: 1780852 - DNA, 25 bp, Homo sapien
ctacacaatgatgtcatagacacgg

SEQ ID NO: 1780853 - DNA, 25 bp, Homo sapien
cacaatgatgtcatagacacggccc

SEQ ID NO: 1780854 - DNA, 25 bp, Homo sapien
gactctaaccctcactactgttatt

SEQ ID NO: 1780855 - DNA, 25 bp, Homo sapien
ctctaaccctcactactgttatttg

SEQ ID NO: 1780856 - DNA, 25 bp, Homo sapien
ggactctaaccctcactactgttat

SEQ ID NO: 1780857 - DNA, 25 bp, Homo sapien
cagctgtattggcaggactctaacc

SEQ ID NO: 1780858 - DNA, 25 bp, Homo sapien
tacaaaccttagtatggccccaatg

SEQ ID NO: 1780859 - DNA, 25 bp, Homo sapien
aatgctgatcagtggttggaaaggc

SEQ ID NO: 1780860 - DNA, 25 bp, Homo sapien
aggctttttacattaggaaacactg

SEQ ID NO: 1780861 - DNA, 25 bp, Homo sapien
cagaatatcgtttgtgtcatctaga

SEQ ID NO: 1780862 - DNA, 25 bp, Homo sapien
taatccctggtactagatgtctgag

SEQ ID NO: 1780863 - DNA, 25 bp, Homo sapien
gattatgacacccaagaatatgtat

SEQ ID NO: 1780864 - DNA, 25 bp, Homo sapien
ttattttacaacagaagtcacctct

SEQ ID NO: 1780865 - DNA, 25 bp, Homo sapien
gtttatcagcttgacttaccagcag

SEQ ID NO: 1780866 - DNA, 25 bp, Homo sapien
catggggaaattggtgaatacctga

SEQ ID NO: 1780867 - DNA, 25 bp, Homo sapien
cttacatggggaaattggtgaatac

SEQ ID NO: 1780868 - DNA, 25 bp, Homo sapien
tggggaaattggtgaatacctgaaa

SEQ ID NO: 1780869 - DNA, 25 bp, Homo sapien
tacatggggaaattggtgaatacct

SEQ ID NO: 1780870 - DNA, 25 bp, Homo sapien
gccacagacttcaaaccctgctagg

SEQ ID NO: 1780871 - DNA, 25 bp, Homo sapien
tgagactagagcttgtgtaactgac

SEQ ID NO: 1780872 - DNA, 25 bp, Homo sapien
cccagtaaactgtggagtactcaca

SEQ ID NO: 1780873 - DNA, 25 bp, Homo sapien
gcccagctggtattctcaaattgag

SEQ ID NO: 1780874 - DNA, 25 bp, Homo sapien
tgggacccataatcaggctagaact

SEQ ID NO: 1780875 - DNA, 25 bp, Homo sapien
catctgcctgggttcttatcggtca

SEQ ID NO: 1780876 - DNA, 25 bp, Homo sapien
ctgacactttcagagactgggaggg

SEQ ID NO: 1780877 - DNA, 25 bp, Homo sapien
tgggaagaaccacctgaatgcctac

SEQ ID NO: 1780878 - DNA, 25 bp, Homo sapien
tagagactactttgcatcaagctgc

SEQ ID NO: 1780879 - DNA, 25 bp, Homo sapien
tacaggtaagggtttgcaatcacag

SEQ ID NO: 1780880 - DNA, 25 bp, Homo sapien
tgcattaccgtctcacagcgaaggc

SEQ ID NO: 1780881 - DNA, 25 bp, Homo sapien
gaatctggcaaagtcaagggtatct

SEQ ID NO: 1780882 - DNA, 25 bp, Homo sapien
tatggcccttgaattcagaaacacc

SEQ ID NO: 1780883 - DNA, 25 bp, Homo sapien
gttcttctgtgttaatagctggcca

SEQ ID NO: 1780884 - DNA, 25 bp, Homo sapien
gtttacaaattgtgcatgccgttcc

SEQ ID NO: 1780885 - DNA, 25 bp, Homo sapien
cgttccagacacacactgccatgtt

SEQ ID NO: 1780886 - DNA, 25 bp, Homo sapien
ggctacagggcactttattctgagt

SEQ ID NO: 1780887 - DNA, 25 bp, Homo sapien
tcccaaactttgtgctactaattta

SEQ ID NO: 1780888 - DNA, 25 bp, Homo sapien
caaactttgtgctactaatttagta

SEQ ID NO: 1780889 - DNA, 25 bp, Homo sapien
gctactaatttagtaccatgtattt

SEQ ID NO: 1780890 - DNA, 25 bp, Homo sapien
tactaatttagtaccatgtatttcc

SEQ ID NO: 1780891 - DNA, 25 bp, Homo sapien
aatgtgtagatgttatggcacatgg

SEQ ID NO: 1780892 - DNA, 25 bp, Homo sapien
ggatgtcgacctgatgcccttagca

SEQ ID NO: 1780893 - DNA, 25 bp, Homo sapien
ttcaagaaatcctgtccaaccagct

SEQ ID NO: 1780894 - DNA, 25 bp, Homo sapien
gcccttagcacctggctcttcaaga

SEQ ID NO: 1780895 - DNA, 25 bp, Homo sapien
gcaagactgctgtatagaatccaat

SEQ ID NO: 1780896 - DNA, 25 bp, Homo sapien
tcttcaatgatggagtggtaccaca

SEQ ID NO: 1780897 - DNA, 25 bp, Homo sapien
gaactctgaccatgagcccagcaat

SEQ ID NO: 1780898 - DNA, 25 bp, Homo sapien
gaagatactagacaaccactggtta

SEQ ID NO: 1780899 - DNA, 25 bp, Homo sapien
agtcaaagggtcaacatgatacaaa

SEQ ID NO: 1780900 - DNA, 25 bp, Homo sapien
gtacaagtcaaagggtcaacatgat

SEQ ID NO: 1780901 - DNA, 25 bp, Homo sapien
tcaaagggtcaacatgatacaaatg

SEQ ID NO: 1780902 - DNA, 25 bp, Homo sapien
caagtcaaagggtcaacatgataca

SEQ ID NO: 1780903 - DNA, 25 bp, Homo sapien
ggcacacctgctgcttaaaagggaa

SEQ ID NO: 1780904 - DNA, 25 bp, Homo sapien
gcagcttgcacataatcccgaggta

SEQ ID NO: 1780905 - DNA, 25 bp, Homo sapien
gaagcactcccaataagaaccagat

SEQ ID NO: 1780906 - DNA, 25 bp, Homo sapien
tccgtgaagcctttgggtagactct

SEQ ID NO: 1780907 - DNA, 25 bp, Homo sapien
caaatagttgaagtgtatcctctct

SEQ ID NO: 1780908 - DNA, 25 bp, Homo sapien
gtatattgaatctagctttaagctg

SEQ ID NO: 1780909 - DNA, 25 bp, Homo sapien
taatacacgttttgatcataagcca

SEQ ID NO: 1780910 - DNA, 25 bp, Homo sapien
gctttaagctgtatgggaaggtgaa

SEQ ID NO: 1780911 - DNA, 25 bp, Homo sapien
gagataagaggaatgctggtcaata

SEQ ID NO: 1780912 - DNA, 25 bp, Homo sapien
taagaggaatgctggtcaatatgtg

SEQ ID NO: 1780913 - DNA, 25 bp, Homo sapien
gcttgagataagaggaatgctggtc

SEQ ID NO: 1780914 - DNA, 25 bp, Homo sapien
gaatgctggtcaatatgtgaaaacc

SEQ ID NO: 1780915 - DNA, 25 bp, Homo sapien
gcatgggcaggtcgcagacaatgta

SEQ ID NO: 1780916 - DNA, 25 bp, Homo sapien
ttgatgcctaggagcagcatgggca

SEQ ID NO: 1780917 - DNA, 25 bp, Homo sapien
gaatcctgtgcatcctttcaagagc

SEQ ID NO: 1780918 - DNA, 25 bp, Homo sapien
gttctgataattgctgaatcctgtg

SEQ ID NO: 1780919 - DNA, 25 bp, Homo sapien
gaaagatgacctcaacctggagatc

SEQ ID NO: 1780920 - DNA, 25 bp, Homo sapien
gaaccctgaggattagaacacaacc

SEQ ID NO: 1780921 - DNA, 25 bp, Homo sapien
ctaactgtcttggactgaaccctga

SEQ ID NO: 1780922 - DNA, 25 bp, Homo sapien
cacaacctaattgctgcttacttgg

SEQ ID NO: 1780923 - DNA, 25 bp, Homo sapien
aagtcgtttctgctttttaggatag

SEQ ID NO: 1780924 - DNA, 25 bp, Homo sapien
ttgttttagaagatatccttaattc

SEQ ID NO: 1780925 - DNA, 25 bp, Homo sapien
taagtcgtttctgctttttaggata

SEQ ID NO: 1780926 - DNA, 25 bp, Homo sapien
agaagatatccttaattctggtgaa

SEQ ID NO: 1780927 - DNA, 25 bp, Homo sapien
cctggatccagtttggatgtgcttg

SEQ ID NO: 1780928 - DNA, 25 bp, Homo sapien
tcaacaatgctgcttgctcttggcc

SEQ ID NO: 1780929 - DNA, 25 bp, Homo sapien
agctgatgccctggccacccttcca

SEQ ID NO: 1780930 - DNA, 25 bp, Homo sapien
ccagtttggatgtgcttggctgatg

SEQ ID NO: 1780931 - DNA, 25 bp, Homo sapien
gctggttaaccactcatatgtcccc

SEQ ID NO: 1780932 - DNA, 25 bp, Homo sapien
gccgggctcgctggttaaccactca

SEQ ID NO: 1780933 - DNA, 25 bp, Homo sapien
gcaggccgggctcgctggttaacca

SEQ ID NO: 1780934 - DNA, 25 bp, Homo sapien
ggctcgctggttaaccactcatatg

SEQ ID NO: 1780935 - DNA, 25 bp, Homo sapien
ctttcttgtgttgtcggcggtgtca

SEQ ID NO: 1780936 - DNA, 25 bp, Homo sapien
ttcttgtgttgtcggcggtgtcact

SEQ ID NO: 1780937 - DNA, 25 bp, Homo sapien
ttgtgttgtcggcggtgtcactcat

SEQ ID NO: 1780938 - DNA, 25 bp, Homo sapien
tctttcttgtgttgtcggcggtgtc

SEQ ID NO: 1780939 - DNA, 25 bp, Homo sapien
gctctggtaggtcaatgctgaacac

SEQ ID NO: 1780940 - DNA, 25 bp, Homo sapien
ggtaggtcaatgctgaacacctgcc

SEQ ID NO: 1780941 - DNA, 25 bp, Homo sapien
ttgcagcggcggtacaggaacagca

SEQ ID NO: 1780942 - DNA, 25 bp, Homo sapien
atggtggccggcagaaggatgcaca

SEQ ID NO: 1780943 - DNA, 25 bp, Homo sapien
gggagagtggcctccgggggcagtg

SEQ ID NO: 1780944 - DNA, 25 bp, Homo sapien
ggagagtggcctccgggggcagtgg

SEQ ID NO: 1780945 - DNA, 25 bp, Homo sapien
aggggagagtggcctccgggggcag

SEQ ID NO: 1780946 - DNA, 25 bp, Homo sapien
tctggtggcctcttcgtaggagggc

SEQ ID NO: 1780947 - DNA, 25 bp, Homo sapien
tggtggcctcttcgtaggagggcgg

SEQ ID NO: 1780948 - DNA, 25 bp, Homo sapien
tggcctcttcgtaggagggcggtaa

SEQ ID NO: 1780949 - DNA, 25 bp, Homo sapien
ttctggtggcctcttcgtaggaggg

SEQ ID NO: 1780950 - DNA, 25 bp, Homo sapien
tacccttttttgtggctagtacaca

SEQ ID NO: 1780951 - DNA, 25 bp, Homo sapien
cagtgaacaggaattgggcatcagt

SEQ ID NO: 1780952 - DNA, 25 bp, Homo sapien
tataggacaatcaaagtcataccct

SEQ ID NO: 1780953 - DNA, 25 bp, Homo sapien
tcacagctagagtttctttagacat

SEQ ID NO: 1780954 - DNA, 25 bp, Homo sapien
tatagttaccactgtctcatatgtg

SEQ ID NO: 1780955 - DNA, 25 bp, Homo sapien
cagttttgacgagaattagaatacc

SEQ ID NO: 1780956 - DNA, 25 bp, Homo sapien
tggttatctggtccccctatagtta

SEQ ID NO: 1780957 - DNA, 25 bp, Homo sapien
actgtaaaatgggtagcaacttggt

SEQ ID NO: 1780958 - DNA, 25 bp, Homo sapien
ttttccaagagatttattaagatat

SEQ ID NO: 1780959 - DNA, 25 bp, Homo sapien
tttccaagagatttattaagatata

SEQ ID NO: 1780960 - DNA, 25 bp, Homo sapien
tttttccaagagatttattaagata

SEQ ID NO: 1780961 - DNA, 25 bp, Homo sapien
gaatcaactgtgtctcttttttgac

SEQ ID NO: 1780962 - DNA, 25 bp, Homo sapien
ccctgcctagggttctattcaagtt

SEQ ID NO: 1780963 - DNA, 25 bp, Homo sapien
tccctcctgtggattctccaatcgg

SEQ ID NO: 1780964 - DNA, 25 bp, Homo sapien
cagctacattccctttccttctctc

SEQ ID NO: 1780965 - DNA, 25 bp, Homo sapien
tctctccctcctgtggattctccaa

SEQ ID NO: 1780966 - DNA, 25 bp, Homo sapien
tcctgtggattctccaatcggccat

SEQ ID NO: 1780967 - DNA, 25 bp, Homo sapien
cacgcgaaagccaacggacaggagg

SEQ ID NO: 1780968 - DNA, 25 bp, Homo sapien
aggcactccccacgcgaaagccaac

SEQ ID NO: 1780969 - DNA, 25 bp, Homo sapien
tccccacgcgaaagccaacggacag

SEQ ID NO: 1780970 - DNA, 25 bp, Homo sapien
cactccccacgcgaaagccaacgga

SEQ ID NO: 1780971 - DNA, 25 bp, Homo sapien
tgtcccctgcggcggggacccggca

SEQ ID NO: 1780972 - DNA, 25 bp, Homo sapien
gctttcccgagccgagtggggtgcg

SEQ ID NO: 1780973 - DNA, 25 bp, Homo sapien
ggctttcccgagccgagtggggtgc

SEQ ID NO: 1780974 - DNA, 25 bp, Homo sapien
ggggtgcggctctgttccccagcac

SEQ ID NO: 1780975 - DNA, 25 bp, Homo sapien
cagggctttcccgagccgagtgggg

SEQ ID NO: 1780976 - DNA, 25 bp, Homo sapien
ggagccgcacctcgcttcggcccgc

SEQ ID NO: 1780977 - DNA, 25 bp, Homo sapien
agctccggccggagttgcgcgtcct

SEQ ID NO: 1780978 - DNA, 25 bp, Homo sapien
ggccggctcacgaccccggacagct

SEQ ID NO: 1780979 - DNA, 25 bp, Homo sapien
ccctccgcggcgacagggagccgca

SEQ ID NO: 1780980 - DNA, 25 bp, Homo sapien
tggtcagccgcgcagaggccccgca

SEQ ID NO: 1780981 - DNA, 25 bp, Homo sapien
gaggccccgagtccccgctccgcag

SEQ ID NO: 1780982 - DNA, 25 bp, Homo sapien
ccgctccgcagacccggtccctcct

SEQ ID NO: 1780983 - DNA, 25 bp, Homo sapien
agacccgagcccacccgatgcgtct

SEQ ID NO: 1780984 - DNA, 25 bp, Homo sapien
cccggggtctggctggagcggctcg

SEQ ID NO: 1780985 - DNA, 25 bp, Homo sapien
ggtctggctggagcggctcggccat

SEQ ID NO: 1780986 - DNA, 25 bp, Homo sapien
gggtctggctggagcggctcggcca

SEQ ID NO: 1780987 - DNA, 25 bp, Homo sapien
cggggtctggctggagcggctcggc

SEQ ID NO: 1780988 - DNA, 25 bp, Homo sapien
cagcccggcgtctccacagcttggg

SEQ ID NO: 1780989 - DNA, 25 bp, Homo sapien
cttccagcccggcgtctccacagct

SEQ ID NO: 1780990 - DNA, 25 bp, Homo sapien
agcccggcgtctccacagcttgggc

SEQ ID NO: 1780991 - DNA, 25 bp, Homo sapien
tccagcccggcgtctccacagcttg

SEQ ID NO: 1780992 - DNA, 25 bp, Homo sapien
tagctgttcagtttcgtaaagcccg

SEQ ID NO: 1780993 - DNA, 25 bp, Homo sapien
agcccgtctggatggctgaatccca

SEQ ID NO: 1780994 - DNA, 25 bp, Homo sapien
tagtgtcggatctcataacttccgg

SEQ ID NO: 1780995 - DNA, 25 bp, Homo sapien
cacttggctggtccatagtgtcgga

SEQ ID NO: 1780996 - DNA, 25 bp, Homo sapien
ggacctgaaccaggctccacgtagc

SEQ ID NO: 1780997 - DNA, 25 bp, Homo sapien
ccacgtagcttgtcactggagctgt

SEQ ID NO: 1780998 - DNA, 25 bp, Homo sapien
taaaaggacctgaaccaggctccac

SEQ ID NO: 1780999 - DNA, 25 bp, Homo sapien
gaaccaggctccacgtagcttgtca

SEQ ID NO: 1781000 - DNA, 25 bp, Homo sapien
ggcctgggtggatcaaattgctgtt

SEQ ID NO: 1781001 - DNA, 25 bp, Homo sapien
cagggaaatggtaatggtagactca

SEQ ID NO: 1781002 - DNA, 25 bp, Homo sapien
attgctgttcagagggaatatacag

SEQ ID NO: 1781003 - DNA, 25 bp, Homo sapien
caaacacagtcatttcggctctatc

SEQ ID NO: 1781004 - DNA, 25 bp, Homo sapien
ccgtgtcttatatgaagggcatgca

SEQ ID NO: 1781005 - DNA, 25 bp, Homo sapien
cattggagctaaactgtgagtgcac

SEQ ID NO: 1781006 - DNA, 25 bp, Homo sapien
gtaaaacatgtccaataaagctgcc

SEQ ID NO: 1781007 - DNA, 25 bp, Homo sapien
taacatatacaacaaagccagtagg

SEQ ID NO: 1781008 - DNA, 25 bp, Homo sapien
tcagcagagcttcacaagtgggacc

SEQ ID NO: 1781009 - DNA, 25 bp, Homo sapien
ggtccctccaactgtgagagctgca

SEQ ID NO: 1781010 - DNA, 25 bp, Homo sapien
gatgaactgtaccttgagcctcaga

SEQ ID NO: 1781011 - DNA, 25 bp, Homo sapien
caattcgagcctggtagagctgcag

SEQ ID NO: 1781012 - DNA, 25 bp, Homo sapien
ctgttatcaatgtgccagtgcaaaa

SEQ ID NO: 1781013 - DNA, 25 bp, Homo sapien
cagctgaggtgtcatctcttttaag

SEQ ID NO: 1781014 - DNA, 25 bp, Homo sapien
tgtgccagtgcaaaaaatcaatcct

SEQ ID NO: 1781015 - DNA, 25 bp, Homo sapien
tcctaccacgcttcagctgaggtgt

SEQ ID NO: 1781016 - DNA, 25 bp, Homo sapien
atatgatacagttttcacctctctg

SEQ ID NO: 1781017 - DNA, 25 bp, Homo sapien
cacctctctgaatttatgatccaat

SEQ ID NO: 1781018 - DNA, 25 bp, Homo sapien
gaagagatcaacgttctggcagctc

SEQ ID NO: 1781019 - DNA, 25 bp, Homo sapien
gatccaatggaagagatcaacgttc

SEQ ID NO: 1781020 - DNA, 25 bp, Homo sapien
gagagtgtatttcctccgagctccc

SEQ ID NO: 1781021 - DNA, 25 bp, Homo sapien
catccatgccggtgctgctgatcag

SEQ ID NO: 1781022 - DNA, 25 bp, Homo sapien
tcgattttcacttgcacattgcccc

SEQ ID NO: 1781023 - DNA, 25 bp, Homo sapien
gctacgatgcagattcaggtctggg

SEQ ID NO: 1781024 - DNA, 25 bp, Homo sapien
gacaggtggatttggaacctacaca

SEQ ID NO: 1781025 - DNA, 25 bp, Homo sapien
tctcaagtgctctaccctgtgcttc

SEQ ID NO: 1781026 - DNA, 25 bp, Homo sapien
gaacctacacaatctcaagtgctct

SEQ ID NO: 1781027 - DNA, 25 bp, Homo sapien
tccatctgttgacaggtggatttgg

SEQ ID NO: 1781028 - DNA, 25 bp, Homo sapien
cgggcgctagtaccgtgaatgctga

SEQ ID NO: 1781029 - DNA, 25 bp, Homo sapien
agtctgaagcaaaaagcgggcgcta

SEQ ID NO: 1781030 - DNA, 25 bp, Homo sapien
tgaatgctgagtgaagtgcagctcc

SEQ ID NO: 1781031 - DNA, 25 bp, Homo sapien
ggagaaaggaaataaccgtgaatga

SEQ ID NO: 1781032 - DNA, 25 bp, Homo sapien
tttgggcactagaaaatccatcgaa

SEQ ID NO: 1781033 - DNA, 25 bp, Homo sapien
ggcactagaaaatccatcgaaagac

SEQ ID NO: 1781034 - DNA, 25 bp, Homo sapien
tgggcactagaaaatccatcgaaag

SEQ ID NO: 1781035 - DNA, 25 bp, Homo sapien
cttttgggcactagaaaatccatcg

SEQ ID NO: 1781036 - DNA, 25 bp, Homo sapien
catcttcccttaaaatgcttgctaa

SEQ ID NO: 1781037 - DNA, 25 bp, Homo sapien
cttctcatcgaaaacttttccatct

SEQ ID NO: 1781038 - DNA, 25 bp, Homo sapien
tcttcccttaaaatgcttgctaatg

SEQ ID NO: 1781039 - DNA, 25 bp, Homo sapien
ttccatcttcccttaaaatgcttgc

SEQ ID NO: 1781040 - DNA, 25 bp, Homo sapien
tttgacaggactgttgtagcctgca

SEQ ID NO: 1781041 - DNA, 25 bp, Homo sapien
tctattaagcaatttgacaggactg

SEQ ID NO: 1781042 - DNA, 25 bp, Homo sapien
gacaggactgttgtagcctgcagtg

SEQ ID NO: 1781043 - DNA, 25 bp, Homo sapien
caatttgacaggactgttgtagcct

SEQ ID NO: 1781044 - DNA, 25 bp, Homo sapien
tcattcgttttctttggtgggttca

SEQ ID NO: 1781045 - DNA, 25 bp, Homo sapien
ttggtgggttcatttttttgaatca

SEQ ID NO: 1781046 - DNA, 25 bp, Homo sapien
cattcgttttctttggtgggttcat

SEQ ID NO: 1781047 - DNA, 25 bp, Homo sapien
gttcatttttttgaatcaaccacac

SEQ ID NO: 1781048 - DNA, 25 bp, Homo sapien
caatagaagacactagacacgcact

SEQ ID NO: 1781049 - DNA, 25 bp, Homo sapien
agatgttttgcctctgacagcagaa

SEQ ID NO: 1781050 - DNA, 25 bp, Homo sapien
agactactgtcctctgttacctgtg

SEQ ID NO: 1781051 - DNA, 25 bp, Homo sapien
taaagaccacgatagttatgaccga

SEQ ID NO: 1781052 - DNA, 25 bp, Homo sapien
tatcttgaaatctggcgtggaccct

SEQ ID NO: 1781053 - DNA, 25 bp, Homo sapien
agctgggcggctggtactttcttga

SEQ ID NO: 1781054 - DNA, 25 bp, Homo sapien
gagtggcacacctcacgttgtctgc

SEQ ID NO: 1781055 - DNA, 25 bp, Homo sapien
taacggggagactgtcggcgaacca

SEQ ID NO: 1781056 - DNA, 25 bp, Homo sapien
agtgagtcactcagcctgcaaatgc

SEQ ID NO: 1781057 - DNA, 25 bp, Homo sapien
cgtgggccactggtaccaattgtgc

SEQ ID NO: 1781058 - DNA, 25 bp, Homo sapien
tgctgtcttaccacctacgttcgtg

SEQ ID NO: 1781059 - DNA, 25 bp, Homo sapien
ttcattatccacttgcaggacgtca

SEQ ID NO: 1781060 - DNA, 25 bp, Homo sapien
catgagactttacaggtcaggaccc

SEQ ID NO: 1781061 - DNA, 25 bp, Homo sapien
gttaacaggatactgatggcaccct

SEQ ID NO: 1781062 - DNA, 25 bp, Homo sapien
cgctgagctcctttatgatgcccaa

SEQ ID NO: 1781063 - DNA, 25 bp, Homo sapien
gctctcagcaagtgaagttccatca

SEQ ID NO: 1781064 - DNA, 25 bp, Homo sapien
cccacaggacctagttaagatgagc

SEQ ID NO: 1781065 - DNA, 25 bp, Homo sapien
caatgggctgctgccgatcctacta

SEQ ID NO: 1781066 - DNA, 25 bp, Homo sapien
tatgacttagtgcttcccacaggac

SEQ ID NO: 1781067 - DNA, 25 bp, Homo sapien
tctcaaagttccgtgtctaccaggg

SEQ ID NO: 1781068 - DNA, 25 bp, Homo sapien
gagaatagcgtgacctcagcttgaa

SEQ ID NO: 1781069 - DNA, 25 bp, Homo sapien
taaaccaagctctcattcctgaggg

SEQ ID NO: 1781070 - DNA, 25 bp, Homo sapien
tcagttacaactgggcaaggagtac

SEQ ID NO: 1781071 - DNA, 25 bp, Homo sapien
ttttcccaaaaacacgcagagagtg

SEQ ID NO: 1781072 - DNA, 25 bp, Homo sapien
tgttgcgccactttccttaataagc

SEQ ID NO: 1781073 - DNA, 25 bp, Homo sapien
aagccactcggtaactgtaatacag

SEQ ID NO: 1781074 - DNA, 25 bp, Homo sapien
cagcggccagcctttattcacagaa

SEQ ID NO: 1781075 - DNA, 25 bp, Homo sapien
aaacatggacctgattgttgcgcca

SEQ ID NO: 1781076 - DNA, 25 bp, Homo sapien
tacgaataacctatcgcctggcggt

SEQ ID NO: 1781077 - DNA, 25 bp, Homo sapien
ggcccgcttctgttatggaccgcat

SEQ ID NO: 1781078 - DNA, 25 bp, Homo sapien
gaggtgacaacccaacagaggaggt

SEQ ID NO: 1781079 - DNA, 25 bp, Homo sapien
gatggcaccatctacaagggcacgt

SEQ ID NO: 1781080 - DNA, 25 bp, Homo sapien
gataaagcaacataacactaattat

SEQ ID NO: 1781081 - DNA, 25 bp, Homo sapien
taaagcaacataacactaattataa

SEQ ID NO: 1781082 - DNA, 25 bp, Homo sapien
aaagcaacataacactaattataaa

SEQ ID NO: 1781083 - DNA, 25 bp, Homo sapien
ataaagcaacataacactaattata

SEQ ID NO: 1781084 - DNA, 25 bp, Homo sapien
tcatagctgcctaaaaaagactaga

SEQ ID NO: 1781085 - DNA, 25 bp, Homo sapien
tgaatatgaaatcttctcatagctg

SEQ ID NO: 1781086 - DNA, 25 bp, Homo sapien
ggcattggcttttgaatatgaaatc

SEQ ID NO: 1781087 - DNA, 25 bp, Homo sapien
tcttctcatagctgcctaaaaaaga

SEQ ID NO: 1781088 - DNA, 25 bp, Homo sapien
taaaaattggtagggcctggctatc

SEQ ID NO: 1781089 - DNA, 25 bp, Homo sapien
gacacacgtgtgtgaagtctttatt

SEQ ID NO: 1781090 - DNA, 25 bp, Homo sapien
cagtatcatgtcctaattcagaaag

SEQ ID NO: 1781091 - DNA, 25 bp, Homo sapien
cctggctatcaattagccctgggaa

SEQ ID NO: 1781092 - DNA, 25 bp, Homo sapien
caggtacagcatgcggaaccggatc

SEQ ID NO: 1781093 - DNA, 25 bp, Homo sapien
gccctgcagtgtgagtgaacggtta

SEQ ID NO: 1781094 - DNA, 25 bp, Homo sapien
gaacacagaccctagattccagagg

SEQ ID NO: 1781095 - DNA, 25 bp, Homo sapien
taagcttggtagagtaacggagtcc

SEQ ID NO: 1781096 - DNA, 25 bp, Homo sapien
gtcgatcatgaagcagggtctggca

SEQ ID NO: 1781097 - DNA, 25 bp, Homo sapien
gtgaaattcactccggatcagcccg

SEQ ID NO: 1781098 - DNA, 25 bp, Homo sapien
tagaagttggcacatggtcctggaa

SEQ ID NO: 1781099 - DNA, 25 bp, Homo sapien
tcagcccgtctaggagagatcaagg

SEQ ID NO: 1781100 - DNA, 25 bp, Homo sapien
tgtttctaatgatagattttctaga

SEQ ID NO: 1781101 - DNA, 25 bp, Homo sapien
taaatgtggtcctaggtatgaagaa

SEQ ID NO: 1781102 - DNA, 25 bp, Homo sapien
tgtggtcctaggtatgaagaaaaag

SEQ ID NO: 1781103 - DNA, 25 bp, Homo sapien
tcctaggtatgaagaaaaagtatat

SEQ ID NO: 1781104 - DNA, 25 bp, Homo sapien
cccagtccgcccacgacaccagggt

SEQ ID NO: 1781105 - DNA, 25 bp, Homo sapien
ggccgtgatggccaagctggcggcc

SEQ ID NO: 1781106 - DNA, 25 bp, Homo sapien
tgccggccgtgatggccaagctggc

SEQ ID NO: 1781107 - DNA, 25 bp, Homo sapien
agtccgcccacgacaccagggtctg

SEQ ID NO: 1781108 - DNA, 25 bp, Homo sapien
tttagccttatactgatgctcagag

SEQ ID NO: 1781109 - DNA, 25 bp, Homo sapien
agcaaattggcattgtcatgacagc

SEQ ID NO: 1781110 - DNA, 25 bp, Homo sapien
cagaaggtgaattacagagtaggac

SEQ ID NO: 1781111 - DNA, 25 bp, Homo sapien
ggtttctgggtgtgtagagaccact

SEQ ID NO: 1781112 - DNA, 25 bp, Homo sapien
gtggcatgcatctgttgtatcaact

SEQ ID NO: 1781113 - DNA, 25 bp, Homo sapien
ttgagttgtggtcactccattgtac

SEQ ID NO: 1781114 - DNA, 25 bp, Homo sapien
taatagttgatcaaaaaatgggaaa

SEQ ID NO: 1781115 - DNA, 25 bp, Homo sapien
tttgatcttcaaatgatcttcaccc

SEQ ID NO: 1781116 - DNA, 25 bp, Homo sapien
cattgattgagagctctccctgatg

SEQ ID NO: 1781117 - DNA, 25 bp, Homo sapien
ggttctccacttgaaggtcctgtgg

SEQ ID NO: 1781118 - DNA, 25 bp, Homo sapien
cttgtctttcgccatcggttctcca

SEQ ID NO: 1781119 - DNA, 25 bp, Homo sapien
tggcctgtggacattgattgagagc

SEQ ID NO: 1781120 - DNA, 25 bp, Homo sapien
gctgtgatgataagtaacctaaatc

SEQ ID NO: 1781121 - DNA, 25 bp, Homo sapien
ggctaaatttttatctgcatagttt

SEQ ID NO: 1781122 - DNA, 25 bp, Homo sapien
gagatagctgtgatgataagtaacc

SEQ ID NO: 1781123 - DNA, 25 bp, Homo sapien
tcatgaacttcattggagatagctg

SEQ ID NO: 1781124 - DNA, 25 bp, Homo sapien
aggctcagtcgtttctcatttgcca

SEQ ID NO: 1781125 - DNA, 25 bp, Homo sapien
gtggcaagcaagaccctgcgggcct

SEQ ID NO: 1781126 - DNA, 25 bp, Homo sapien
cacggtggcaagcaagaccctgcgg

SEQ ID NO: 1781127 - DNA, 25 bp, Homo sapien
cggtggcaagcaagaccctgcgggc

SEQ ID NO: 1781128 - DNA, 25 bp, Homo sapien
ccacggtggcaagcaagaccctgcg

SEQ ID NO: 1781129 - DNA, 25 bp, Homo sapien
atgcaccagtgtgtcgttgagtgtc

SEQ ID NO: 1781130 - DNA, 25 bp, Homo sapien
tttcatgcaccagtgtgtcgttgag

SEQ ID NO: 1781131 - DNA, 25 bp, Homo sapien
tcatgcaccagtgtgtcgttgagtg

SEQ ID NO: 1781132 - DNA, 25 bp, Homo sapien
gcaccagtgtgtcgttgagtgtcat

SEQ ID NO: 1781133 - DNA, 25 bp, Homo sapien
ctgtaaatgacagctgagggaatca

SEQ ID NO: 1781134 - DNA, 25 bp, Homo sapien
tgtaaatgacagctgagggaatcat

SEQ ID NO: 1781135 - DNA, 25 bp, Homo sapien
gggcacagggatcatagaatatgtc

SEQ ID NO: 1781136 - DNA, 25 bp, Homo sapien
gcttggttgcagacactaggtggtt

SEQ ID NO: 1781137 - DNA, 25 bp, Homo sapien
gaattgaggctcaaaagggcacagg

SEQ ID NO: 1781138 - DNA, 25 bp, Homo sapien
tcaggggtacttccttaatgtgggc

SEQ ID NO: 1781139 - DNA, 25 bp, Homo sapien
tgctgtttggagaattttgctgctg

SEQ ID NO: 1781140 - DNA, 25 bp, Homo sapien
ttggagaattttgctgctgtgtatt

SEQ ID NO: 1781141 - DNA, 25 bp, Homo sapien
tcatgcttcataagaacctgtgatt

SEQ ID NO: 1781142 - DNA, 25 bp, Homo sapien
gaacctgtgattttgctgtttggag

SEQ ID NO: 1781143 - DNA, 25 bp, Homo sapien
ggcatctccaaagccaatatggccc

SEQ ID NO: 1781144 - DNA, 25 bp, Homo sapien
tggcatctccaaagccaatatggcc

SEQ ID NO: 1781145 - DNA, 25 bp, Homo sapien
ctcctggactgttggtgtcgtcttg

SEQ ID NO: 1781146 - DNA, 25 bp, Homo sapien
ggactgttggtgtcgtcttggacta

SEQ ID NO: 1781147 - DNA, 25 bp, Homo sapien
cctggactgttggtgtcgtcttgga

SEQ ID NO: 1781148 - DNA, 25 bp, Homo sapien
ctgttggtgtcgtcttggactaggt

SEQ ID NO: 1781149 - DNA, 25 bp, Homo sapien
gaacttagagctcaactagtgcgac

SEQ ID NO: 1781150 - DNA, 25 bp, Homo sapien
gcagggctcccgtcattcagatgat

SEQ ID NO: 1781151 - DNA, 25 bp, Homo sapien
gaagctgactatgcacacactctga

SEQ ID NO: 1781152 - DNA, 25 bp, Homo sapien
tagtgcgaccctatcattacagagg

SEQ ID NO: 1781153 - DNA, 25 bp, Homo sapien
gctttattgatagggattaagttag

SEQ ID NO: 1781154 - DNA, 25 bp, Homo sapien
ggctttattgatagggattaagtta

SEQ ID NO: 1781155 - DNA, 25 bp, Homo sapien
ttattgaccaagtttgatagagttt

SEQ ID NO: 1781156 - DNA, 25 bp, Homo sapien
tttattgaccaagtttgatagagtt

SEQ ID NO: 1781157 - DNA, 25 bp, Homo sapien
tattgaccaagtttgatagagtttc

SEQ ID NO: 1781158 - DNA, 25 bp, Homo sapien
ctttgtgaaaccatagaatggatcc

SEQ ID NO: 1781159 - DNA, 25 bp, Homo sapien
ttgtgaaaccatagaatggatccat

SEQ ID NO: 1781160 - DNA, 25 bp, Homo sapien
tttgtgaaaccatagaatggatcca

SEQ ID NO: 1781161 - DNA, 25 bp, Homo sapien
cttagtcgctccccagtcctcactc

SEQ ID NO: 1781162 - DNA, 25 bp, Homo sapien
tgagtttgtcttagtcgctccccag

SEQ ID NO: 1781163 - DNA, 25 bp, Homo sapien
gtttgtcttagtcgctccccagtcc

SEQ ID NO: 1781164 - DNA, 25 bp, Homo sapien
ttagtcgctccccagtcctcactca

SEQ ID NO: 1781165 - DNA, 25 bp, Homo sapien
taaaggtgctactgcttgtgccagc

SEQ ID NO: 1781166 - DNA, 25 bp, Homo sapien
ctgatgctctggacttctcgccggc

SEQ ID NO: 1781167 - DNA, 25 bp, Homo sapien
tgtgccagcttttggcggttctttc

SEQ ID NO: 1781168 - DNA, 25 bp, Homo sapien
tgttttcctgcccactgtaaaggtg

SEQ ID NO: 1781169 - DNA, 25 bp, Homo sapien
tcatcaggtctgtcataagattcct

SEQ ID NO: 1781170 - DNA, 25 bp, Homo sapien
cagtatttgtggactgtttctcatc

SEQ ID NO: 1781171 - DNA, 25 bp, Homo sapien
tgctcctgaggcagtatttgtggac

SEQ ID NO: 1781172 - DNA, 25 bp, Homo sapien
gagagtccacagtcaagtaaccttg

SEQ ID NO: 1781173 - DNA, 25 bp, Homo sapien
cagatagatagattggttctgtgag

SEQ ID NO: 1781174 - DNA, 25 bp, Homo sapien
gatagattggttctgtgagtcagtt

SEQ ID NO: 1781175 - DNA, 25 bp, Homo sapien
acagcaacgggtcctgtgaacaatg

SEQ ID NO: 1781176 - DNA, 25 bp, Homo sapien
aaggaagacctgcaaacagcaacgg

SEQ ID NO: 1781177 - DNA, 25 bp, Homo sapien
tattccgcacaagaacagaattcat

SEQ ID NO: 1781178 - DNA, 25 bp, Homo sapien
gtcacttttattccgcacaagaaca

SEQ ID NO: 1781179 - DNA, 25 bp, Homo sapien
acttttattccgcacaagaacagaa

SEQ ID NO: 1781180 - DNA, 25 bp, Homo sapien
ttttattccgcacaagaacagaatt

SEQ ID NO: 1781181 - DNA, 25 bp, Homo sapien
aaagaggaagaacgccagtcctgaa

SEQ ID NO: 1781182 - DNA, 25 bp, Homo sapien
caaaagaggaagaacgccagtcctg

SEQ ID NO: 1781183 - DNA, 25 bp, Homo sapien
aaaagaggaagaacgccagtcctga

SEQ ID NO: 1781184 - DNA, 25 bp, Homo sapien
acaaaagaggaagaacgccagtcct

SEQ ID NO: 1781185 - DNA, 25 bp, Homo sapien
tattgactggaagatgcatgagatc

SEQ ID NO: 1781186 - DNA, 25 bp, Homo sapien
gagccacaatcctgtgggcagtgct

SEQ ID NO: 1781187 - DNA, 25 bp, Homo sapien
cccagtgtattgcaacagtattgac

SEQ ID NO: 1781188 - DNA, 25 bp, Homo sapien
ggaagatgcatgagatcccgagcca

SEQ ID NO: 1781189 - DNA, 25 bp, Homo sapien
tccaggaccccgttggtgtataagc

SEQ ID NO: 1781190 - DNA, 25 bp, Homo sapien
aagttggcagcaggaccgagtgatt

SEQ ID NO: 1781191 - DNA, 25 bp, Homo sapien
ggtgtataagccttgaaagttggca

SEQ ID NO: 1781192 - DNA, 25 bp, Homo sapien
tgattgccaacaggagccttgctgc

SEQ ID NO: 1781193 - DNA, 25 bp, Homo sapien
tggctggtgcttagtttggttgctg

SEQ ID NO: 1781194 - DNA, 25 bp, Homo sapien
ctggtgcttagtttggttgctgtga

SEQ ID NO: 1781195 - DNA, 25 bp, Homo sapien
tgtggctggtgcttagtttggttgc

SEQ ID NO: 1781196 - DNA, 25 bp, Homo sapien
gtgcttagtttggttgctgtgatca

SEQ ID NO: 1781197 - DNA, 25 bp, Homo sapien
tgcccgctgtctccaggtatgcttt

SEQ ID NO: 1781198 - DNA, 25 bp, Homo sapien
gttccctgcccgctgtctccaggta

SEQ ID NO: 1781199 - DNA, 25 bp, Homo sapien
cccctgtgggatctctggttggcgg

SEQ ID NO: 1781200 - DNA, 25 bp, Homo sapien
taacaagctagcctcgcatcagttg

SEQ ID NO: 1781201 - DNA, 25 bp, Homo sapien
agaaaattggcttccaactttgaca

SEQ ID NO: 1781202 - DNA, 25 bp, Homo sapien
gaaaattggcttccaactttgacat

SEQ ID NO: 1781203 - DNA, 25 bp, Homo sapien
ctggatatacagagcccagcccaga

SEQ ID NO: 1781204 - DNA, 25 bp, Homo sapien
agcccagaaaaggtgactcgatttt

SEQ ID NO: 1781205 - DNA, 25 bp, Homo sapien
gcccagcccagaaaaggtgactcga

SEQ ID NO: 1781206 - DNA, 25 bp, Homo sapien
ccagcccagaaaaggtgactcgatt

SEQ ID NO: 1781207 - DNA, 25 bp, Homo sapien
agagctctcggtttgtgggcagcag

SEQ ID NO: 1781208 - DNA, 25 bp, Homo sapien
caggcagacaaagaggctgtttcgc

SEQ ID NO: 1781209 - DNA, 25 bp, Homo sapien
tgctgtaagttggataaatttctcc

SEQ ID NO: 1781210 - DNA, 25 bp, Homo sapien
tttcgcagtgatggagagctctcgg

SEQ ID NO: 1781211 - DNA, 25 bp, Homo sapien
tgaggagttacttcaccagggcagc

SEQ ID NO: 1781212 - DNA, 25 bp, Homo sapien
gaggagttacttcaccagggcagct

SEQ ID NO: 1781213 - DNA, 25 bp, Homo sapien
tgactctttttctctagggtgagga

SEQ ID NO: 1781214 - DNA, 25 bp, Homo sapien
ctgactctttttctctagggtgagg

SEQ ID NO: 1781215 - DNA, 25 bp, Homo sapien
tttggtgtcgggaaagcctatcgtc

SEQ ID NO: 1781216 - DNA, 25 bp, Homo sapien
tattgtttgcggagtcctgcggctc

SEQ ID NO: 1781217 - DNA, 25 bp, Homo sapien
tatcgtctttcgcaggagtgcttgc

SEQ ID NO: 1781218 - DNA, 25 bp, Homo sapien
gcaatagccacgcagccggttttat

SEQ ID NO: 1781219 - DNA, 25 bp, Homo sapien
cagaagtctgtattctgcacagact

SEQ ID NO: 1781220 - DNA, 25 bp, Homo sapien
tagtttcagaagtatggtttgataa

SEQ ID NO: 1781221 - DNA, 25 bp, Homo sapien
ggtttgataattcataatcaagttc

SEQ ID NO: 1781222 - DNA, 25 bp, Homo sapien
tttctttatgcccagaagtctgtat

SEQ ID NO: 1781223 - DNA, 25 bp, Homo sapien
ggctgcgtttcacctttgttggaag

SEQ ID NO: 1781224 - DNA, 25 bp, Homo sapien
ctcccagtgatacggcagaggagga

SEQ ID NO: 1781225 - DNA, 25 bp, Homo sapien
cagtgatacggcagaggaggatcca

SEQ ID NO: 1781226 - DNA, 25 bp, Homo sapien
agtaacaggtacaatgatggctgcg

SEQ ID NO: 1781227 - DNA, 25 bp, Homo sapien
ttgaggaaagcgctcaacagcactt

SEQ ID NO: 1781228 - DNA, 25 bp, Homo sapien
gttgaggaaagcgctcaacagcact

SEQ ID NO: 1781229 - DNA, 25 bp, Homo sapien
gagttgaggaaagcgctcaacagca

SEQ ID NO: 1781230 - DNA, 25 bp, Homo sapien
ggagttgaggaaagcgctcaacagc

SEQ ID NO: 1781231 - DNA, 25 bp, Homo sapien
ctgcttggcaggaaatgttccttta

SEQ ID NO: 1781232 - DNA, 25 bp, Homo sapien
taaagcagtggtagttgagggcaac

SEQ ID NO: 1781233 - DNA, 25 bp, Homo sapien
taattccgttgaaggcactgtggct

SEQ ID NO: 1781234 - DNA, 25 bp, Homo sapien
gcttaggatgtcagatctgttcgcc

SEQ ID NO: 1781235 - DNA, 25 bp, Homo sapien
tctgttcgcccttttcaggcatgaa

SEQ ID NO: 1781236 - DNA, 25 bp, Homo sapien
caagcctctgacgtccatgttctgt

SEQ ID NO: 1781237 - DNA, 25 bp, Homo sapien
gcttctttaccagcgacatcctttg

SEQ ID NO: 1781238 - DNA, 25 bp, Homo sapien
ttctgtgtcagtggcggcttcttta

SEQ ID NO: 1781239 - DNA, 25 bp, Homo sapien
tattgcttctgtatcaagtgatccc

SEQ ID NO: 1781240 - DNA, 25 bp, Homo sapien
agttgtcttgatttaacacacccag

SEQ ID NO: 1781241 - DNA, 25 bp, Homo sapien
tgaagttcttcgtggtggcatatct

SEQ ID NO: 1781242 - DNA, 25 bp, Homo sapien
agtctgccatcagtggaaagggcgt

SEQ ID NO: 1781243 - DNA, 25 bp, Homo sapien
tctggaacaaatgtctccgtctgtg

SEQ ID NO: 1781244 - DNA, 25 bp, Homo sapien
cacaggtgcattttgcggcagctct

SEQ ID NO: 1781245 - DNA, 25 bp, Homo sapien
ccacacaggtgcattttgcggcagc

SEQ ID NO: 1781246 - DNA, 25 bp, Homo sapien
gtgcattttgcggcagctctgttgt

SEQ ID NO: 1781247 - DNA, 25 bp, Homo sapien
tgcattttgcggcagctctgttgta

SEQ ID NO: 1781248 - DNA, 25 bp, Homo sapien
ataggtctgagtgcctcctgagtgc

SEQ ID NO: 1781249 - DNA, 25 bp, Homo sapien
aaagataggtctgagtgcctcctga

SEQ ID NO: 1781250 - DNA, 25 bp, Homo sapien
aagataggtctgagtgcctcctgag

SEQ ID NO: 1781251 - DNA, 25 bp, Homo sapien
ttatatcctgcacattctcaagttc

SEQ ID NO: 1781252 - DNA, 25 bp, Homo sapien
ctatgaacggggaatcacgaacttc

SEQ ID NO: 1781253 - DNA, 25 bp, Homo sapien
aacggggaatcacgaacttcagagc

SEQ ID NO: 1781254 - DNA, 25 bp, Homo sapien
tgatgtacttgaagactatgaacgg

SEQ ID NO: 1781255 - DNA, 25 bp, Homo sapien
gatgtacttgaagactatgaacggg

SEQ ID NO: 1781256 - DNA, 25 bp, Homo sapien
tccataggactcagcgttttgtttc

SEQ ID NO: 1781257 - DNA, 25 bp, Homo sapien
attcttacccattcattgtacataa

SEQ ID NO: 1781258 - DNA, 25 bp, Homo sapien
gactcagcgttttgtttccgaaatc

SEQ ID NO: 1781259 - DNA, 25 bp, Homo sapien
ttccgaaatctttcaacttcacctg

SEQ ID NO: 1781260 - DNA, 25 bp, Homo sapien
agcttccaagtagggtttatggcct

SEQ ID NO: 1781261 - DNA, 25 bp, Homo sapien
tagcttccaagtagggtttatggcc

SEQ ID NO: 1781262 - DNA, 25 bp, Homo sapien
ttagcttccaagtagggtttatggc

SEQ ID NO: 1781263 - DNA, 25 bp, Homo sapien
gatgaatatggtgttgagtctgttc

SEQ ID NO: 1781264 - DNA, 25 bp, Homo sapien
cagatgaatatggtgttgagtctgt

SEQ ID NO: 1781265 - DNA, 25 bp, Homo sapien
aatcagatgaatatggtgttgagtc

SEQ ID NO: 1781266 - DNA, 25 bp, Homo sapien
cttaatcagatgaatatggtgttga

SEQ ID NO: 1781267 - DNA, 25 bp, Homo sapien
gattatgactcctggcggtccttgc

SEQ ID NO: 1781268 - DNA, 25 bp, Homo sapien
catgtatgaggcattggccacagct

SEQ ID NO: 1781269 - DNA, 25 bp, Homo sapien
gcatttaacttcaaagcctcatggg

SEQ ID NO: 1781270 - DNA, 25 bp, Homo sapien
gacaagaaaccccactccgattatg

SEQ ID NO: 1781271 - DNA, 25 bp, Homo sapien
cactctcggacccaggcatggtgtt

SEQ ID NO: 1781272 - DNA, 25 bp, Homo sapien
tgttgacgaaatgaaaaagagcctt

SEQ ID NO: 1781273 - DNA, 25 bp, Homo sapien
taggtgcacatactccctcagtttt

SEQ ID NO: 1781274 - DNA, 25 bp, Homo sapien
tatccgcaagacgtgggactggaca

SEQ ID NO: 1781275 - DNA, 25 bp, Homo sapien
tggaggcagtggcagtctggtggcc

SEQ ID NO: 1781276 - DNA, 25 bp, Homo sapien
ggcagtggcagtctggtggccccac

SEQ ID NO: 1781277 - DNA, 25 bp, Homo sapien
ctggaggcagtggcagtctggtggc

SEQ ID NO: 1781278 - DNA, 25 bp, Homo sapien
gaggcagtggcagtctggtggcccc

SEQ ID NO: 1781279 - DNA, 25 bp, Homo sapien
tctcctattactgcccagggactta

SEQ ID NO: 1781280 - DNA, 25 bp, Homo sapien
attcgcttcccctctcctattactg

SEQ ID NO: 1781281 - DNA, 25 bp, Homo sapien
aatgtcttatcaaatgtccttattc

SEQ ID NO: 1781282 - DNA, 25 bp, Homo sapien
cccagggacttaaatgtcttatcaa

SEQ ID NO: 1781283 - DNA, 25 bp, Homo sapien
ctgcagttccgtagaattcttgacc

SEQ ID NO: 1781284 - DNA, 25 bp, Homo sapien
tccgtagaattcttgaccttctcag

SEQ ID NO: 1781285 - DNA, 25 bp, Homo sapien
ctgtcaagcttagctgatagtcgtc

SEQ ID NO: 1781286 - DNA, 25 bp, Homo sapien
tagtcgtctagtatcttcattgtgt

SEQ ID NO: 1781287 - DNA, 25 bp, Homo sapien
tgggcacaagtcatttggaacagtg

SEQ ID NO: 1781288 - DNA, 25 bp, Homo sapien
catttggaacagtgatggactgtgt

SEQ ID NO: 1781289 - DNA, 25 bp, Homo sapien
catccttgtgcatcagtgacggctg

SEQ ID NO: 1781290 - DNA, 25 bp, Homo sapien
tcatgagaaatgtttggtggtgagg

SEQ ID NO: 1781291 - DNA, 25 bp, Homo sapien
ctgtgtcctcctctttcttgctctc

SEQ ID NO: 1781292 - DNA, 25 bp, Homo sapien
tctctttattcaggattccgtcttc

SEQ ID NO: 1781293 - DNA, 25 bp, Homo sapien
caggtttctcaactaatgttaatag

SEQ ID NO: 1781294 - DNA, 25 bp, Homo sapien
atctctttattcaggattccgtctt

SEQ ID NO: 1781295 - DNA, 25 bp, Homo sapien
ctctttattcaggattccgtcttca

SEQ ID NO: 1781296 - DNA, 25 bp, Homo sapien
ttattccatgatgaccttgcaaaga

SEQ ID NO: 1781297 - DNA, 25 bp, Homo sapien
gatgaccttgcaaagaacttcagga

SEQ ID NO: 1781298 - DNA, 25 bp, Homo sapien
tgaccttgcaaagaacttcaggaaa

SEQ ID NO: 1781299 - DNA, 25 bp, Homo sapien
attccatgatgaccttgcaaagaac

SEQ ID NO: 1781300 - DNA, 25 bp, Homo sapien
tcccaagtggctggttgataagaat

SEQ ID NO: 1781301 - DNA, 25 bp, Homo sapien
tggtgcaatctgcaggggcttatgc

SEQ ID NO: 1781302 - DNA, 25 bp, Homo sapien
tctaatccttacaacaggttctttg

SEQ ID NO: 1781303 - DNA, 25 bp, Homo sapien
tatgctgagtcttttcaatatatta

SEQ ID NO: 1781304 - DNA, 25 bp, Homo sapien
gcagattatattgagggagttgtgt

SEQ ID NO: 1781305 - DNA, 25 bp, Homo sapien
tattgagggagttgtgtattcctac

SEQ ID NO: 1781306 - DNA, 25 bp, Homo sapien
caacaattccagattggcagattat

SEQ ID NO: 1781307 - DNA, 25 bp, Homo sapien
gaacttcaacaattccagattggca

SEQ ID NO: 1781308 - DNA, 25 bp, Homo sapien
tcagcgtctctagtcctgtccagtt

SEQ ID NO: 1781309 - DNA, 25 bp, Homo sapien
agatcagcgtctctagtcctgtcca

SEQ ID NO: 1781310 - DNA, 25 bp, Homo sapien
gcgtctctagtcctgtccagttcat

SEQ ID NO: 1781311 - DNA, 25 bp, Homo sapien
gatcagcgtctctagtcctgtccag

SEQ ID NO: 1781312 - DNA, 25 bp, Homo sapien
ccaacaagggtgatatgaagacttc

SEQ ID NO: 1781313 - DNA, 25 bp, Homo sapien
atgtccaacgccctcttcactgtga

SEQ ID NO: 1781314 - DNA, 25 bp, Homo sapien
tgacctgggtagcatgaagaaggct

SEQ ID NO: 1781315 - DNA, 25 bp, Homo sapien
gatggtaagatagggctgttccaag

SEQ ID NO: 1781316 - DNA, 25 bp, Homo sapien
cttccgtctaaagaagctgctgcta

SEQ ID NO: 1781317 - DNA, 25 bp, Homo sapien
tccgtctaaagaagctgctgctaca

SEQ ID NO: 1781318 - DNA, 25 bp, Homo sapien
ccgtctaaagaagctgctgctacat

SEQ ID NO: 1781319 - DNA, 25 bp, Homo sapien
ttccgtctaaagaagctgctgctac

SEQ ID NO: 1781320 - DNA, 25 bp, Homo sapien
tatggatagtatatatgctccggat

SEQ ID NO: 1781321 - DNA, 25 bp, Homo sapien
atgttgtcagacaggagatccttca

SEQ ID NO: 1781322 - DNA, 25 bp, Homo sapien
tggtgagtgtgatgactgacatttc

SEQ ID NO: 1781323 - DNA, 25 bp, Homo sapien
taactttgctcatgtaagcgccttg

SEQ ID NO: 1781324 - DNA, 25 bp, Homo sapien
gagtaattggtgttgtattaataca

SEQ ID NO: 1781325 - DNA, 25 bp, Homo sapien
taatacaaaaagagagggcaatggg

SEQ ID NO: 1781326 - DNA, 25 bp, Homo sapien
gcaatgggtactggattggcacaac

SEQ ID NO: 1781327 - DNA, 25 bp, Homo sapien
ctggattggcacaacagtatatgcc

SEQ ID NO: 1781328 - DNA, 25 bp, Homo sapien
tcagagtcacgagttgcctgcggca

SEQ ID NO: 1781329 - DNA, 25 bp, Homo sapien
gaagaagtcattcctttcatcgagg

SEQ ID NO: 1781330 - DNA, 25 bp, Homo sapien
catcgaggaccggtgcttaagcatt

SEQ ID NO: 1781331 - DNA, 25 bp, Homo sapien
tgtgtttttatcagggcacacggct

SEQ ID NO: 1781332 - DNA, 25 bp, Homo sapien
tatccagacttgactttgcccagtg

SEQ ID NO: 1781333 - DNA, 25 bp, Homo sapien
gcccagtgatggctagataaagcca

SEQ ID NO: 1781334 - DNA, 25 bp, Homo sapien
tgcttgtaacctcattatctgtggt

SEQ ID NO: 1781335 - DNA, 25 bp, Homo sapien
gaacgcaggtgtgaaatttattgtg

SEQ ID NO: 1781336 - DNA, 25 bp, Homo sapien
caagattagtaacatggccactggc

SEQ ID NO: 1781337 - DNA, 25 bp, Homo sapien
tttgcagtatccactggcccagggc

SEQ ID NO: 1781338 - DNA, 25 bp, Homo sapien
ggtagcaggccttcactatttcaag

SEQ ID NO: 1781339 - DNA, 25 bp, Homo sapien
gactgaatctgcgtagacaccttag

SEQ ID NO: 1781340 - DNA, 25 bp, Homo sapien
cagataaccacgtttactagtttct

SEQ ID NO: 1781341 - DNA, 25 bp, Homo sapien
ctccagataaccacgtttactagtt

SEQ ID NO: 1781342 - DNA, 25 bp, Homo sapien
cccactccagataaccacgtttact

SEQ ID NO: 1781343 - DNA, 25 bp, Homo sapien
cactccagataaccacgtttactag

SEQ ID NO: 1781344 - DNA, 25 bp, Homo sapien
tttcagcagcttaactggctccggt

SEQ ID NO: 1781345 - DNA, 25 bp, Homo sapien
tcctccaaccctgaaagtcaagtct

SEQ ID NO: 1781346 - DNA, 25 bp, Homo sapien
tgtcctgatatagtgatctctccgg

SEQ ID NO: 1781347 - DNA, 25 bp, Homo sapien
tggctccggtgaatgaagcaactgg

SEQ ID NO: 1781348 - DNA, 25 bp, Homo sapien
cgacaagcaaaactatgcagacttt

SEQ ID NO: 1781349 - DNA, 25 bp, Homo sapien
tgtgattcagaagacgttgaccttg

SEQ ID NO: 1781350 - DNA, 25 bp, Homo sapien
ccagactgacccaccagctctttgt

SEQ ID NO: 1781351 - DNA, 25 bp, Homo sapien
agggttttcccatttggcgcagaat

SEQ ID NO: 1781352 - DNA, 25 bp, Homo sapien
gtgggaattggacagtccccttgtc

SEQ ID NO: 1781353 - DNA, 25 bp, Homo sapien
tgtctgtctgtttgggagaccccgg

SEQ ID NO: 1781354 - DNA, 25 bp, Homo sapien
cagaggagagccaagttcgtgggaa

SEQ ID NO: 1781355 - DNA, 25 bp, Homo sapien
gacttcaggacgatccgtttgtaaa

SEQ ID NO: 1781356 - DNA, 25 bp, Homo sapien
gctctgtgactttcggactcctgga

SEQ ID NO: 1781357 - DNA, 25 bp, Homo sapien
cgcagagcgctctgtgactttcgga

SEQ ID NO: 1781358 - DNA, 25 bp, Homo sapien
tgtgactttcggactcctggagggt

SEQ ID NO: 1781359 - DNA, 25 bp, Homo sapien
cagagcgctctgtgactttcggact

SEQ ID NO: 1781360 - DNA, 25 bp, Homo sapien
tggaccaccgccgagtgaaaatccg

SEQ ID NO: 1781361 - DNA, 25 bp, Homo sapien
ccgagtgaaaatccgtgagtggccg

SEQ ID NO: 1781362 - DNA, 25 bp, Homo sapien
ggaggcacccggagagctgctcccg

SEQ ID NO: 1781363 - DNA, 25 bp, Homo sapien
caccgccgagtgaaaatccgtgagt

SEQ ID NO: 1781364 - DNA, 25 bp, Homo sapien
gacatcttcggcgagctcgagggcc

SEQ ID NO: 1781365 - DNA, 25 bp, Homo sapien
catcttcggcgagctcgagggccag

SEQ ID NO: 1781366 - DNA, 25 bp, Homo sapien
cgccggggacatcttcggcgagctc

SEQ ID NO: 1781367 - DNA, 25 bp, Homo sapien
ctgcaccgccgcctcgacgccctgc

SEQ ID NO: 1781368 - DNA, 25 bp, Homo sapien
ctgcctgctggcgcagctggccgac

SEQ ID NO: 1781369 - DNA, 25 bp, Homo sapien
gggctgcctgctggcgcagctggcc

SEQ ID NO: 1781370 - DNA, 25 bp, Homo sapien
tgggctgcctgctggcgcagctggc

SEQ ID NO: 1781371 - DNA, 25 bp, Homo sapien
tcagctcgcatgccctgggctgcct

SEQ ID NO: 1781372 - DNA, 25 bp, Homo sapien
tccaggctcgaattcagggttctag

SEQ ID NO: 1781373 - DNA, 25 bp, Homo sapien
tttctgagcaaacacagcgatgggc

SEQ ID NO: 1781374 - DNA, 25 bp, Homo sapien
tcattacaatcagcgctgctctggg

SEQ ID NO: 1781375 - DNA, 25 bp, Homo sapien
tgttagcgggtgtcccatgaccacg

SEQ ID NO: 1781376 - DNA, 25 bp, Homo sapien
tgtaaaaaatgaggcgctgtacaac

SEQ ID NO: 1781377 - DNA, 25 bp, Homo sapien
gatacgaaatagttactggcccaca

SEQ ID NO: 1781378 - DNA, 25 bp, Homo sapien
tgaaggtggtcagagtaggtgatac

SEQ ID NO: 1781379 - DNA, 25 bp, Homo sapien
aggtgatacgaaatagttactggcc

SEQ ID NO: 1781380 - DNA, 25 bp, Homo sapien
acagcagccgttcctttgagcctca

SEQ ID NO: 1781381 - DNA, 25 bp, Homo sapien
tccagtgcttcataaattgcaaagc

SEQ ID NO: 1781382 - DNA, 25 bp, Homo sapien
gcatgcttttataccgttcctgatg

SEQ ID NO: 1781383 - DNA, 25 bp, Homo sapien
ctagtatttcttgagtaagcagcat

SEQ ID NO: 1781384 - DNA, 25 bp, Homo sapien
ggaagaactatcctcatggaacaga

SEQ ID NO: 1781385 - DNA, 25 bp, Homo sapien
tatggatacacccatgagtcctgtt

SEQ ID NO: 1781386 - DNA, 25 bp, Homo sapien
tctattgatattgccccaggattac

SEQ ID NO: 1781387 - DNA, 25 bp, Homo sapien
tcaaaccaatgggaaagtctcaagg

SEQ ID NO: 1781388 - DNA, 25 bp, Homo sapien
ttgcccgcacttctgtccataggag

SEQ ID NO: 1781389 - DNA, 25 bp, Homo sapien
cagcgtgggtgacccattccaccag

SEQ ID NO: 1781390 - DNA, 25 bp, Homo sapien
ggaggaacaaagctccttgcccgca

SEQ ID NO: 1781391 - DNA, 25 bp, Homo sapien
tcagtacatgccttactgccggcct

SEQ ID NO: 1781392 - DNA, 25 bp, Homo sapien
cagtgttcacgaaagagtcactttc

SEQ ID NO: 1781393 - DNA, 25 bp, Homo sapien
tcacaacagtgttcacgaaagagtc

SEQ ID NO: 1781394 - DNA, 25 bp, Homo sapien
gcgtcaggaagcatggccagacatt

SEQ ID NO: 1781395 - DNA, 25 bp, Homo sapien
tagagaaaattcattgccagcgtca

SEQ ID NO: 1781396 - DNA, 25 bp, Homo sapien
ttggcaggaccctgatggtaagagt

SEQ ID NO: 1781397 - DNA, 25 bp, Homo sapien
gttggcaggaccctgatggtaagag

SEQ ID NO: 1781398 - DNA, 25 bp, Homo sapien
ggcactggcatcgaacaccaagctg

SEQ ID NO: 1781399 - DNA, 25 bp, Homo sapien
tgtgagtctcagataccatatgtgg

SEQ ID NO: 1781400 - DNA, 25 bp, Homo sapien
ggcccgactcccatcggaggaaggc

SEQ ID NO: 1781401 - DNA, 25 bp, Homo sapien
cctcgcagggagcttgctggcttct

SEQ ID NO: 1781402 - DNA, 25 bp, Homo sapien
ttcctcttctagtgaatatcttgtt

SEQ ID NO: 1781403 - DNA, 25 bp, Homo sapien
tacaagatgggtggaaaacgaccat

SEQ ID NO: 1781404 - DNA, 25 bp, Homo sapien
ttttttgcttcacaggtacaagatg

SEQ ID NO: 1781405 - DNA, 25 bp, Homo sapien
taatgtgctctctccacatctgcat

SEQ ID NO: 1781406 - DNA, 25 bp, Homo sapien
tacccgaaatgccataatgtgctct

SEQ ID NO: 1781407 - DNA, 25 bp, Homo sapien
gggctattttcagtttgtgctatta

SEQ ID NO: 1781408 - DNA, 25 bp, Homo sapien
gataaaacgactatgaaaattcttc

SEQ ID NO: 1781409 - DNA, 25 bp, Homo sapien
cctatcgatgggtatttgggctatt

SEQ ID NO: 1781410 - DNA, 25 bp, Homo sapien
aaagcagcagtgctcgttagttgct

SEQ ID NO: 1781411 - DNA, 25 bp, Homo sapien
ctttagctgtaactccggcgggcgt

SEQ ID NO: 1781412 - DNA, 25 bp, Homo sapien
gagcaagacgcaataagcgggtgca

SEQ ID NO: 1781413 - DNA, 25 bp, Homo sapien
tgttgggtgtgtcgttttaggctct

SEQ ID NO: 1781414 - DNA, 25 bp, Homo sapien
aatgcagtaccctttccggaagcta

SEQ ID NO: 1781415 - DNA, 25 bp, Homo sapien
tcctccgcagctccgtttgtttacg

SEQ ID NO: 1781416 - DNA, 25 bp, Homo sapien
ccccagtgtcgctcttggctccgcc

SEQ ID NO: 1781417 - DNA, 25 bp, Homo sapien
cggaagtgacgtaagaggtacagcc

SEQ ID NO: 1781418 - DNA, 25 bp, Homo sapien
agccacaagcagagccccggtcaca

SEQ ID NO: 1781419 - DNA, 25 bp, Homo sapien
tgttttaagttccttattgcaccac

SEQ ID NO: 1781420 - DNA, 25 bp, Homo sapien
tttaagttccttattgcaccacggc

SEQ ID NO: 1781421 - DNA, 25 bp, Homo sapien
taagttccttattgcaccacggcca

SEQ ID NO: 1781422 - DNA, 25 bp, Homo sapien
agttccttattgcaccacggccagc

SEQ ID NO: 1781423 - DNA, 25 bp, Homo sapien
gagtacagtgggcactaaaagactt

SEQ ID NO: 1781424 - DNA, 25 bp, Homo sapien
tacagtgggcactaaaagacttagg

SEQ ID NO: 1781425 - DNA, 25 bp, Homo sapien
ctaaaagacttaggactcctcctct

SEQ ID NO: 1781426 - DNA, 25 bp, Homo sapien
tgggcactaaaagacttaggactcc

SEQ ID NO: 1781427 - DNA, 25 bp, Homo sapien
actgtgatgcaggatttgaaaaccc

SEQ ID NO: 1781428 - DNA, 25 bp, Homo sapien
caggatttgaaaaccctgtgctttt

SEQ ID NO: 1781429 - DNA, 25 bp, Homo sapien
tgtgaagttgactgtgatgcaggat

SEQ ID NO: 1781430 - DNA, 25 bp, Homo sapien
taactttggtcgctgtgaagttgac

SEQ ID NO: 1781431 - DNA, 25 bp, Homo sapien
atcattcaaaagactgagcagccct

SEQ ID NO: 1781432 - DNA, 25 bp, Homo sapien
aatcattcaaaagactgagcagccc

SEQ ID NO: 1781433 - DNA, 25 bp, Homo sapien
ctggatcggagttgactgagcgcct

SEQ ID NO: 1781434 - DNA, 25 bp, Homo sapien
atcggagttgactgagcgcctttgc

SEQ ID NO: 1781435 - DNA, 25 bp, Homo sapien
tgtgaactctgtgactacgaaaaaa

SEQ ID NO: 1781436 - DNA, 25 bp, Homo sapien
tacaaataagttccagactgcacat

SEQ ID NO: 1781437 - DNA, 25 bp, Homo sapien
tattttaactgaccaagactgtccc

SEQ ID NO: 1781438 - DNA, 25 bp, Homo sapien
gaatcccaggcaagaaacaagttta

SEQ ID NO: 1781439 - DNA, 25 bp, Homo sapien
ttatgcatcttctaaaaaactgggg

SEQ ID NO: 1781440 - DNA, 25 bp, Homo sapien
aatatgtatgtggacatttatgcat

SEQ ID NO: 1781441 - DNA, 25 bp, Homo sapien
aaaagattatgcatattattgaaat

SEQ ID NO: 1781442 - DNA, 25 bp, Homo sapien
tttatgcatttgtataagattatgc

SEQ ID NO: 1781443 - DNA, 25 bp, Homo sapien
tctgacagaagcctatccagattgg

SEQ ID NO: 1781444 - DNA, 25 bp, Homo sapien
tccagattggagtcactggctgttt

SEQ ID NO: 1781445 - DNA, 25 bp, Homo sapien
gcattccccgaacatgttccatctg

SEQ ID NO: 1781446 - DNA, 25 bp, Homo sapien
tcaagcgagctaatttctcctgcat

SEQ ID NO: 1781447 - DNA, 25 bp, Homo sapien
tcaccagaaattgtaagttgtaaac

SEQ ID NO: 1781448 - DNA, 25 bp, Homo sapien
caccagaaattgtaagttgtaaact

SEQ ID NO: 1781449 - DNA, 25 bp, Homo sapien
gaacaaacgcattatgatgagaatg

SEQ ID NO: 1781450 - DNA, 25 bp, Homo sapien
caacctgaacaaacgcattatgatg

SEQ ID NO: 1781451 - DNA, 25 bp, Homo sapien
ctaggtaggaggtacaacctgaaca

SEQ ID NO: 1781452 - DNA, 25 bp, Homo sapien
gaggtacaacctgaacaaacgcatt

SEQ ID NO: 1781453 - DNA, 25 bp, Homo sapien
ggaaaagctcttgtgttgctactga

SEQ ID NO: 1781454 - DNA, 25 bp, Homo sapien
taagaagattttcattctataaggg

SEQ ID NO: 1781455 - DNA, 25 bp, Homo sapien
aaagagatatgttcaaaggaaaagc

SEQ ID NO: 1781456 - DNA, 25 bp, Homo sapien
gagcaaagagaaagcggtatttaaa

SEQ ID NO: 1781457 - DNA, 25 bp, Homo sapien
catcttgtgcatctgccaaatggag

SEQ ID NO: 1781458 - DNA, 25 bp, Homo sapien
tcttgtgcatctgccaaatggagtt

SEQ ID NO: 1781459 - DNA, 25 bp, Homo sapien
gaacatcttgtgcatctgccaaatg

SEQ ID NO: 1781460 - DNA, 25 bp, Homo sapien
ttgtgcatctgccaaatggagtttt

SEQ ID NO: 1781461 - DNA, 25 bp, Homo sapien
tgattctgctactggatttggctgg

SEQ ID NO: 1781462 - DNA, 25 bp, Homo sapien
tgttgtggaagatgattctgctact

SEQ ID NO: 1781463 - DNA, 25 bp, Homo sapien
ggctggaaaagtaaagactgctgct

SEQ ID NO: 1781464 - DNA, 25 bp, Homo sapien
ttcaaatcacaagaaagcaaactac

SEQ ID NO: 1781465 - DNA, 25 bp, Homo sapien
acaatctctgcgtcacatttcctga

SEQ ID NO: 1781466 - DNA, 25 bp, Homo sapien
tgatgaagccttcaacaaggcctag

SEQ ID NO: 1781467 - DNA, 25 bp, Homo sapien
gcgagtcacatttactaaaagcagt

SEQ ID NO: 1781468 - DNA, 25 bp, Homo sapien
cagttatggtgaattacagcgagtc

SEQ ID NO: 1781469 - DNA, 25 bp, Homo sapien
cacaccagcatgtgtactgattgtc

SEQ ID NO: 1781470 - DNA, 25 bp, Homo sapien
agcttgcgatcaacactggaataag

SEQ ID NO: 1781471 - DNA, 25 bp, Homo sapien
gccacaagacgcctgtgcatcaaca

SEQ ID NO: 1781472 - DNA, 25 bp, Homo sapien
tatcactggccattggaaaacacac

SEQ ID NO: 1781473 - DNA, 25 bp, Homo sapien
ggcctggtcattgtgcactatattt

SEQ ID NO: 1781474 - DNA, 25 bp, Homo sapien
tcctacaacgaataagcaacatcta

SEQ ID NO: 1781475 - DNA, 25 bp, Homo sapien
tgcaacgtgtgtaagaaatctggga

SEQ ID NO: 1781476 - DNA, 25 bp, Homo sapien
tctgggagtatgtacacaaataggt

SEQ ID NO: 1781477 - DNA, 25 bp, Homo sapien
gcccgcgccgtgcgagccaccgccc

SEQ ID NO: 1781478 - DNA, 25 bp, Homo sapien
cccgcgccgtgcgagccaccgccct

SEQ ID NO: 1781479 - DNA, 25 bp, Homo sapien
ccgcgccgtgcgagccaccgccctt

SEQ ID NO: 1781480 - DNA, 25 bp, Homo sapien
cgcccgcgccgtgcgagccaccgcc

SEQ ID NO: 1781481 - DNA, 25 bp, Homo sapien
aagtggctatgaggcccggtacagt

SEQ ID NO: 1781482 - DNA, 25 bp, Homo sapien
tgaaaatcgagtgcgccaactcggg

SEQ ID NO: 1781483 - DNA, 25 bp, Homo sapien
atctccatagggatccaacaacacg

SEQ ID NO: 1781484 - DNA, 25 bp, Homo sapien
ctcctcttggaaccgcgcagtgaaa

SEQ ID NO: 1781485 - DNA, 25 bp, Homo sapien
tgaacgtatgggatctgacactaac

SEQ ID NO: 1781486 - DNA, 25 bp, Homo sapien
tataggacgtagagttggtggccac

SEQ ID NO: 1781487 - DNA, 25 bp, Homo sapien
tatagagagctaaatcctcactggg

SEQ ID NO: 1781488 - DNA, 25 bp, Homo sapien
cactgggatcacacagaagagcaat

SEQ ID NO: 1781489 - DNA, 25 bp, Homo sapien
aatgagagactcagttcttcgctgg

SEQ ID NO: 1781490 - DNA, 25 bp, Homo sapien
gagcccttgtgtggcgtaacctcag

SEQ ID NO: 1781491 - DNA, 25 bp, Homo sapien
tcttcgctggttgttggccacaggc

SEQ ID NO: 1781492 - DNA, 25 bp, Homo sapien
catgtgggcctctctatagtttagc

SEQ ID NO: 1781493 - DNA, 25 bp, Homo sapien
agttgcactgagctgttatcttgtc

SEQ ID NO: 1781494 - DNA, 25 bp, Homo sapien
aagttgcactgagctgttatcttgt

SEQ ID NO: 1781495 - DNA, 25 bp, Homo sapien
tctggagttctccaggaagaatccc

SEQ ID NO: 1781496 - DNA, 25 bp, Homo sapien
ttctagaaactacaggtttatttca

SEQ ID NO: 1781497 - DNA, 25 bp, Homo sapien
aggaagaatccccagctgacgtctc

SEQ ID NO: 1781498 - DNA, 25 bp, Homo sapien
ccagctgacgtctcagcaaattttc

SEQ ID NO: 1781499 - DNA, 25 bp, Homo sapien
taaaaggtgtccaggcactaaatct

SEQ ID NO: 1781500 - DNA, 25 bp, Homo sapien
gttgctaaaaggtgtccaggcacta

SEQ ID NO: 1781501 - DNA, 25 bp, Homo sapien
ctaaatctggtgtggaagctctcca

SEQ ID NO: 1781502 - DNA, 25 bp, Homo sapien
ggtgtccaggcactaaatctggtgt

SEQ ID NO: 1781503 - DNA, 25 bp, Homo sapien
aaaaaattgcgaataagaattcttg

SEQ ID NO: 1781504 - DNA, 25 bp, Homo sapien
cttaattgtgatttagtgcatctta

SEQ ID NO: 1781505 - DNA, 25 bp, Homo sapien
ttagtccagaggtcaaaccaatgac

SEQ ID NO: 1781506 - DNA, 25 bp, Homo sapien
attcttgacgttgcttgttagtcca

SEQ ID NO: 1781507 - DNA, 25 bp, Homo sapien
gatgatgtctatggctcggcagaac

SEQ ID NO: 1781508 - DNA, 25 bp, Homo sapien
gaaaactataacgactgtgagcaga

SEQ ID NO: 1781509 - DNA, 25 bp, Homo sapien
ttcattgatgttcctaggtagcggg

SEQ ID NO: 1781510 - DNA, 25 bp, Homo sapien
gaattgcctgcaagtccaatgacga

SEQ ID NO: 1781511 - DNA, 25 bp, Homo sapien
agtactggttggctctgtaggaccc

SEQ ID NO: 1781512 - DNA, 25 bp, Homo sapien
gttggctctgtaggaccctcagaat

SEQ ID NO: 1781513 - DNA, 25 bp, Homo sapien
tactggttggctctgtaggaccctc

SEQ ID NO: 1781514 - DNA, 25 bp, Homo sapien
tggttggctctgtaggaccctcaga

SEQ ID NO: 1781515 - DNA, 25 bp, Homo sapien
caaagctcttcttcgttacagcaga

SEQ ID NO: 1781516 - DNA, 25 bp, Homo sapien
ttacaaagatggtacagagtggtcc

SEQ ID NO: 1781517 - DNA, 25 bp, Homo sapien
tattataagttgcaaccacggcgtc

SEQ ID NO: 1781518 - DNA, 25 bp, Homo sapien
gtagatttgtataagcaccactgca

SEQ ID NO: 1781519 - DNA, 25 bp, Homo sapien
cttgcatcctttctgaaaaccagtc

SEQ ID NO: 1781520 - DNA, 25 bp, Homo sapien
atcctttctgaaaaccagtcttgga

SEQ ID NO: 1781521 - DNA, 25 bp, Homo sapien
ttctgaaaaccagtcttggacaaac

SEQ ID NO: 1781522 - DNA, 25 bp, Homo sapien
cactttggccacttgcatcctttct

SEQ ID NO: 1781523 - DNA, 25 bp, Homo sapien
gcacacaaatctttcggactcaaaa

SEQ ID NO: 1781524 - DNA, 25 bp, Homo sapien
tgaagcgtggtaacactgtagagaa

SEQ ID NO: 1781525 - DNA, 25 bp, Homo sapien
gaaatgaagcgtggtaacactgtag

SEQ ID NO: 1781526 - DNA, 25 bp, Homo sapien
atagagaaatgaagcgtggtaacac

SEQ ID NO: 1781527 - DNA, 25 bp, Homo sapien
ttaaaaacttccagggccagctgac

SEQ ID NO: 1781528 - DNA, 25 bp, Homo sapien
agttaaaaacttccagggccagctg

SEQ ID NO: 1781529 - DNA, 25 bp, Homo sapien
tcagttaaaaacttccagggccagc

SEQ ID NO: 1781530 - DNA, 25 bp, Homo sapien
cagttaaaaacttccagggccagct

SEQ ID NO: 1781531 - DNA, 25 bp, Homo sapien
gagtatagggcagaaaccatccgaa

SEQ ID NO: 1781532 - DNA, 25 bp, Homo sapien
ctgttggagtatagggcagaaacca

SEQ ID NO: 1781533 - DNA, 25 bp, Homo sapien
catccgaacttaacgcatttgggca

SEQ ID NO: 1781534 - DNA, 25 bp, Homo sapien
agaaaccatccgaacttaacgcatt

SEQ ID NO: 1781535 - DNA, 25 bp, Homo sapien
tcagcgtcccataagtagcagcagc

SEQ ID NO: 1781536 - DNA, 25 bp, Homo sapien
tccctaggtgtcagccagtctaagt

SEQ ID NO: 1781537 - DNA, 25 bp, Homo sapien
cagtctaagtgggacacacaagcaa

SEQ ID NO: 1781538 - DNA, 25 bp, Homo sapien
cacaagcaatgtaatggcgcttcca

SEQ ID NO: 1781539 - DNA, 25 bp, Homo sapien
gctttagcacgctagagcagcaagt

SEQ ID NO: 1781540 - DNA, 25 bp, Homo sapien
cgcttgggcaaggtttctaacgatg

SEQ ID NO: 1781541 - DNA, 25 bp, Homo sapien
tctaacgatgtcaaaacaagctgtt

SEQ ID NO: 1781542 - DNA, 25 bp, Homo sapien
cactcgctcccttacagtctgggag

SEQ ID NO: 1781543 - DNA, 25 bp, Homo sapien
gagcatatgaagatctgtcatcatt

SEQ ID NO: 1781544 - DNA, 25 bp, Homo sapien
tttatgaactccatgccaatttttc

SEQ ID NO: 1781545 - DNA, 25 bp, Homo sapien
taacatgaagtgtggccggagagca

SEQ ID NO: 1781546 - DNA, 25 bp, Homo sapien
ggaatccgggatgatattaacatga

SEQ ID NO: 1781547 - DNA, 25 bp, Homo sapien
ggttacgctgtgttcatataccaca

SEQ ID NO: 1781548 - DNA, 25 bp, Homo sapien
aaggctttccaaggttacgctgtgt

SEQ ID NO: 1781549 - DNA, 25 bp, Homo sapien
ccagagctttttctataagatacag

SEQ ID NO: 1781550 - DNA, 25 bp, Homo sapien
gctttttctataagatacagaaggc

SEQ ID NO: 1781551 - DNA, 25 bp, Homo sapien
tcgctaaatattccgatgctctgtg

SEQ ID NO: 1781552 - DNA, 25 bp, Homo sapien
aaatattccgatgctctgtgccttc

SEQ ID NO: 1781553 - DNA, 25 bp, Homo sapien
tctgctgtctccatcgctaaatatt

SEQ ID NO: 1781554 - DNA, 25 bp, Homo sapien
tgtctccatcgctaaatattccgat

SEQ ID NO: 1781555 - DNA, 25 bp, Homo sapien
ggcacgaagaagtccacgtgacccc

SEQ ID NO: 1781556 - DNA, 25 bp, Homo sapien
ttcagtggccacatagcttcctaat

SEQ ID NO: 1781557 - DNA, 25 bp, Homo sapien
ctgatgctccaaggggcacgaagaa

SEQ ID NO: 1781558 - DNA, 25 bp, Homo sapien
tcacttcaggcctcagtaaattttt

SEQ ID NO: 1781559 - DNA, 25 bp, Homo sapien
ttcctgtcctctgattgaagcctgc

SEQ ID NO: 1781560 - DNA, 25 bp, Homo sapien
tgtcctctgattgaagcctgccagg

SEQ ID NO: 1781561 - DNA, 25 bp, Homo sapien
cctgtcctctgattgaagcctgcca

SEQ ID NO: 1781562 - DNA, 25 bp, Homo sapien
ttttcctgtcctctgattgaagcct

SEQ ID NO: 1781563 - DNA, 25 bp, Homo sapien
ccaggtggatattacatttgatgag

SEQ ID NO: 1781564 - DNA, 25 bp, Homo sapien
gattttaggagtgatttacagccac

SEQ ID NO: 1781565 - DNA, 25 bp, Homo sapien
gcccagaatggtgatagaaagccta

SEQ ID NO: 1781566 - DNA, 25 bp, Homo sapien
cagccactgggctgacaagcctaag

SEQ ID NO: 1781567 - DNA, 25 bp, Homo sapien
tgcaatcccagtgggggccgtaaag

SEQ ID NO: 1781568 - DNA, 25 bp, Homo sapien
gctggtaagagccagttgcaatccc

SEQ ID NO: 1781569 - DNA, 25 bp, Homo sapien
ccgtaaagaacgtgccagttagttg

SEQ ID NO: 1781570 - DNA, 25 bp, Homo sapien
ccagttagttgagacagctgggaaa

SEQ ID NO: 1781571 - DNA, 25 bp, Homo sapien
tgggatcccagccaatcactaagaa

SEQ ID NO: 1781572 - DNA, 25 bp, Homo sapien
cttcgattcgcagaagtagatggaa

SEQ ID NO: 1781573 - DNA, 25 bp, Homo sapien
ccttgaagaaaggatacagctgctt

SEQ ID NO: 1781574 - DNA, 25 bp, Homo sapien
ttgaagaaaggatacagctgcttcc

SEQ ID NO: 1781575 - DNA, 25 bp, Homo sapien
tgaagaaaggatacagctgcttcct

SEQ ID NO: 1781576 - DNA, 25 bp, Homo sapien
aagaaaggatacagctgcttcctta

SEQ ID NO: 1781577 - DNA, 25 bp, Homo sapien
tttagaatgttggtcatacccatgg

SEQ ID NO: 1781578 - DNA, 25 bp, Homo sapien
cccatggtgtcaaacataaactgcc

SEQ ID NO: 1781579 - DNA, 25 bp, Homo sapien
ttgacaactccatcaatccatctgc

SEQ ID NO: 1781580 - DNA, 25 bp, Homo sapien
tcttggttgtttagaatgttggtca

SEQ ID NO: 1781581 - DNA, 25 bp, Homo sapien
caaacagaatttatttaaatgttgg

SEQ ID NO: 1781582 - DNA, 25 bp, Homo sapien
gcaaacagaatttatttaaatgttg

SEQ ID NO: 1781583 - DNA, 25 bp, Homo sapien
ttaataataactgcaaacagaattt

SEQ ID NO: 1781584 - DNA, 25 bp, Homo sapien
taataactgcaaacagaatttattt

SEQ ID NO: 1781585 - DNA, 25 bp, Homo sapien
cttcagcagaaaatacgacaaaaat

SEQ ID NO: 1781586 - DNA, 25 bp, Homo sapien
atacgacaaaaattccagaggtttg

SEQ ID NO: 1781587 - DNA, 25 bp, Homo sapien
cagaaaatacgacaaaaattccaga

SEQ ID NO: 1781588 - DNA, 25 bp, Homo sapien
cagcagaaaatacgacaaaaattcc

SEQ ID NO: 1781589 - DNA, 25 bp, Homo sapien
cttcatgaataaactgaatgttgtc

SEQ ID NO: 1781590 - DNA, 25 bp, Homo sapien
ccttcaacatctttgatctttttgc

SEQ ID NO: 1781591 - DNA, 25 bp, Homo sapien
tctttgggtcacattttgttggaat

SEQ ID NO: 1781592 - DNA, 25 bp, Homo sapien
gttggaataacatttccttcaacat

SEQ ID NO: 1781593 - DNA, 25 bp, Homo sapien
aattgtcttctacaacatttctttc

SEQ ID NO: 1781594 - DNA, 25 bp, Homo sapien
ctgagcctggactttgtgtcccaag

SEQ ID NO: 1781595 - DNA, 25 bp, Homo sapien
gctgagcctggactttgtgtcccaa

SEQ ID NO: 1781596 - DNA, 25 bp, Homo sapien
tgagcctggactttgtgtcccaaga

SEQ ID NO: 1781597 - DNA, 25 bp, Homo sapien
tcagtggtgcgacataaacatctct

SEQ ID NO: 1781598 - DNA, 25 bp, Homo sapien
cacaatttccagtatctgcacgtat

SEQ ID NO: 1781599 - DNA, 25 bp, Homo sapien
aactctagctcgcttttctgctgag

SEQ ID NO: 1781600 - DNA, 25 bp, Homo sapien
tgatctggatattggcagcactcag

SEQ ID NO: 1781601 - DNA, 25 bp, Homo sapien
ggtatatgtgtttaactggcttcca

SEQ ID NO: 1781602 - DNA, 25 bp, Homo sapien
ttcgtgactatttctcccacacagt

SEQ ID NO: 1781603 - DNA, 25 bp, Homo sapien
cccacacagtgagctgggccccatt

SEQ ID NO: 1781604 - DNA, 25 bp, Homo sapien
gacagggtaattgttgaagaaattg

SEQ ID NO: 1781605 - DNA, 25 bp, Homo sapien
tgcctcttcaggaaagttcggaatg

SEQ ID NO: 1781606 - DNA, 25 bp, Homo sapien
aagttcggaatgctggtatcatttc

SEQ ID NO: 1781607 - DNA, 25 bp, Homo sapien
cattttggtaacaatggtcttatca

SEQ ID NO: 1781608 - DNA, 25 bp, Homo sapien
ggtaacaatggtcttatcatgcctc

SEQ ID NO: 1781609 - DNA, 25 bp, Homo sapien
cagcgtagagaagattaaggtattc

SEQ ID NO: 1781610 - DNA, 25 bp, Homo sapien
aggtattcttcaaatcttcgggatg

SEQ ID NO: 1781611 - DNA, 25 bp, Homo sapien
gacagcgtagagaagattaaggtat

SEQ ID NO: 1781612 - DNA, 25 bp, Homo sapien
tcgggatgggtacagcagcagctct

SEQ ID NO: 1781613 - DNA, 25 bp, Homo sapien
agtccccacggtcaacatgctctgc

SEQ ID NO: 1781614 - DNA, 25 bp, Homo sapien
aagtccccacggtcaacatgctctg

SEQ ID NO: 1781615 - DNA, 25 bp, Homo sapien
cagatatctgtttacttctgataga

SEQ ID NO: 1781616 - DNA, 25 bp, Homo sapien
tgaagttgggctacatcttgtaccc

SEQ ID NO: 1781617 - DNA, 25 bp, Homo sapien
tcttgtaccctaatcagatatctgt

SEQ ID NO: 1781618 - DNA, 25 bp, Homo sapien
ttcatcacagcaatgaagttgggct

SEQ ID NO: 1781619 - DNA, 25 bp, Homo sapien
gaagtcctctcaaatggagtgtgag

SEQ ID NO: 1781620 - DNA, 25 bp, Homo sapien
agatgtgccccgactagaaacgagc

SEQ ID NO: 1781621 - DNA, 25 bp, Homo sapien
gtaaccgatgaagggccactgatgc

SEQ ID NO: 1781622 - DNA, 25 bp, Homo sapien
gagatcatggatgtgttcatagagc

SEQ ID NO: 1781623 - DNA, 25 bp, Homo sapien
agtactgacagccataggaacttat

SEQ ID NO: 1781624 - DNA, 25 bp, Homo sapien
tgacagccataggaacttatcatcc

SEQ ID NO: 1781625 - DNA, 25 bp, Homo sapien
tttgattgcatttcgaagtactgac

SEQ ID NO: 1781626 - DNA, 25 bp, Homo sapien
acttctccatactgcttttgattgc

SEQ ID NO: 1781627 - DNA, 25 bp, Homo sapien
cagaattgcttatggttccccaaca

SEQ ID NO: 1781628 - DNA, 25 bp, Homo sapien
tggagcactgttggccccacttgga

SEQ ID NO: 1781629 - DNA, 25 bp, Homo sapien
ggcatatacaggtaatcttgggtca

SEQ ID NO: 1781630 - DNA, 25 bp, Homo sapien
tcatgtcttacaaaccagtggttct

SEQ ID NO: 1781631 - DNA, 25 bp, Homo sapien
taagaaatcctatggtgataatgca

SEQ ID NO: 1781632 - DNA, 25 bp, Homo sapien
taatttaagttagctcttgccacaa

SEQ ID NO: 1781633 - DNA, 25 bp, Homo sapien
tgccaagggcagattcataatcacc

SEQ ID NO: 1781634 - DNA, 25 bp, Homo sapien
tgcaggtacattcatgattgtggtg

SEQ ID NO: 1781635 - DNA, 25 bp, Homo sapien
gttacatagctgcatccttgccctg

SEQ ID NO: 1781636 - DNA, 25 bp, Homo sapien
taaggtcagccagaaatcatctaac

SEQ ID NO: 1781637 - DNA, 25 bp, Homo sapien
gaaaagacagctgctagtgctcctg

SEQ ID NO: 1781638 - DNA, 25 bp, Homo sapien
gaaaaagcttctgatcctgcaagtt

SEQ ID NO: 1781639 - DNA, 25 bp, Homo sapien
ttccaatggcaagaacctctctagg

SEQ ID NO: 1781640 - DNA, 25 bp, Homo sapien
tctattgtagttccaatggcaagaa

SEQ ID NO: 1781641 - DNA, 25 bp, Homo sapien
tgtagttccaatggcaagaacctct

SEQ ID NO: 1781642 - DNA, 25 bp, Homo sapien
gatattctattgtagttccaatggc

SEQ ID NO: 1781643 - DNA, 25 bp, Homo sapien
gatcagtctggctctcctaatggta

SEQ ID NO: 1781644 - DNA, 25 bp, Homo sapien
tagcggtaatcaggcaagggaagat

SEQ ID NO: 1781645 - DNA, 25 bp, Homo sapien
caggacacaatttaggagatagcgg

SEQ ID NO: 1781646 - DNA, 25 bp, Homo sapien
taataggccaaaagaaggcgagaca

SEQ ID NO: 1781647 - DNA, 25 bp, Homo sapien
gaactgacccctcatagaaggagct

SEQ ID NO: 1781648 - DNA, 25 bp, Homo sapien
agtccctaagatcaggcctactgtg

SEQ ID NO: 1781649 - DNA, 25 bp, Homo sapien
ttctgagaggctaccattgtcttca

SEQ ID NO: 1781650 - DNA, 25 bp, Homo sapien
atccgtaggaagtttgtattgtgcc

SEQ ID NO: 1781651 - DNA, 25 bp, Homo sapien
ctaatcatttactgtatttttccct

SEQ ID NO: 1781652 - DNA, 25 bp, Homo sapien
ctgtgaccctgggcaagttctaatc

SEQ ID NO: 1781653 - DNA, 25 bp, Homo sapien
gaccctgggcaagttctaatcattt

SEQ ID NO: 1781654 - DNA, 25 bp, Homo sapien
gtgaccctgggcaagttctaatcat

SEQ ID NO: 1781655 - DNA, 25 bp, Homo sapien
acatggtctgacttagttgtctaaa

SEQ ID NO: 1781656 - DNA, 25 bp, Homo sapien
caaatgggcatttatctatcaggca

SEQ ID NO: 1781657 - DNA, 25 bp, Homo sapien
ttgtctaaattacgcagaaggaatc

SEQ ID NO: 1781658 - DNA, 25 bp, Homo sapien
tatcaggcagcatctctttaaccta

SEQ ID NO: 1781659 - DNA, 25 bp, Homo sapien
gcaactggcagtgaatcacttcttg

SEQ ID NO: 1781660 - DNA, 25 bp, Homo sapien
tcacttcttggtggatattgtctct

SEQ ID NO: 1781661 - DNA, 25 bp, Homo sapien
ctggcagtgaatcacttcttggtgg

SEQ ID NO: 1781662 - DNA, 25 bp, Homo sapien
tcttggtggatattgtctcttcttg

SEQ ID NO: 1781663 - DNA, 25 bp, Homo sapien
tcaatctgagtttgcataaggagct

SEQ ID NO: 1781664 - DNA, 25 bp, Homo sapien
cccaatcctcacaattataatagca

SEQ ID NO: 1781665 - DNA, 25 bp, Homo sapien
caatcctcacaattataatagcatg

SEQ ID NO: 1781666 - DNA, 25 bp, Homo sapien
ggagctagatcttggtcccaatcct

SEQ ID NO: 1781667 - DNA, 25 bp, Homo sapien
ggcactgtaaatggcggcggaggga

SEQ ID NO: 1781668 - DNA, 25 bp, Homo sapien
ccccacaactttccgggaagcgctg

SEQ ID NO: 1781669 - DNA, 25 bp, Homo sapien
tcctcgcgacctccgggccctgttg

SEQ ID NO: 1781670 - DNA, 25 bp, Homo sapien
cgctccggaggcgtggacggaaggg

SEQ ID NO: 1781671 - DNA, 25 bp, Homo sapien
gtcttgctgctgagatctccgcgca

SEQ ID NO: 1781672 - DNA, 25 bp, Homo sapien
ctgctgagatctccgcgcagagggc

SEQ ID NO: 1781673 - DNA, 25 bp, Homo sapien
tgctgctgagatctccgcgcagagg

SEQ ID NO: 1781674 - DNA, 25 bp, Homo sapien
gggtcttgctgctgagatctccgcg

SEQ ID NO: 1781675 - DNA, 25 bp, Homo sapien
tcaatgttggtgtctacgtggaggc

SEQ ID NO: 1781676 - DNA, 25 bp, Homo sapien
cagccccgggcctacatgagttgat

SEQ ID NO: 1781677 - DNA, 25 bp, Homo sapien
gagtattaagttcccagtgaccgga

SEQ ID NO: 1781678 - DNA, 25 bp, Homo sapien
gaaaatacggaaggcagcccctgtg

SEQ ID NO: 1781679 - DNA, 25 bp, Homo sapien
catatcctctaggaagttcaatgct

SEQ ID NO: 1781680 - DNA, 25 bp, Homo sapien
ccatatcctctaggaagttcaatgc

SEQ ID NO: 1781681 - DNA, 25 bp, Homo sapien
agaatgtaaagtatctctgctgctc

SEQ ID NO: 1781682 - DNA, 25 bp, Homo sapien
tatcccacagaatgtaaagtatctc

SEQ ID NO: 1781683 - DNA, 25 bp, Homo sapien
tctaatgtatcccacagaatgtaaa

SEQ ID NO: 1781684 - DNA, 25 bp, Homo sapien
atgtctttctaatgtatcccacaga

SEQ ID NO: 1781685 - DNA, 25 bp, Homo sapien
caaagagaaagacggctgtggagga

SEQ ID NO: 1781686 - DNA, 25 bp, Homo sapien
gggaaaagtaagtgtttctgcgctc

SEQ ID NO: 1781687 - DNA, 25 bp, Homo sapien
ttctgcgctcaagaaaggggccgcc

SEQ ID NO: 1781688 - DNA, 25 bp, Homo sapien
gtaagtgtttctgcgctcaagaaag

SEQ ID NO: 1781689 - DNA, 25 bp, Homo sapien
cgccggagaactggcgccgcgtggg

SEQ ID NO: 1781690 - DNA, 25 bp, Homo sapien
ggacccggttaccttcttcagtgca

SEQ ID NO: 1781691 - DNA, 25 bp, Homo sapien
tggacccggttaccttcttcagtgc

SEQ ID NO: 1781692 - DNA, 25 bp, Homo sapien
tctctgcgcggttttccttcccgcc

SEQ ID NO: 1781693 - DNA, 25 bp, Homo sapien
accacggacacccagtccatccctg

SEQ ID NO: 1781694 - DNA, 25 bp, Homo sapien
tccctgctacctaagccacatctgc

SEQ ID NO: 1781695 - DNA, 25 bp, Homo sapien
tgcccggcggcgcaccacggacacc

SEQ ID NO: 1781696 - DNA, 25 bp, Homo sapien
cagtccatccctgctacctaagcca

SEQ ID NO: 1781697 - DNA, 25 bp, Homo sapien
gggcgcgctcactccatatttggcc

SEQ ID NO: 1781698 - DNA, 25 bp, Homo sapien
ttctgcctggtagaggtcccctaac

SEQ ID NO: 1781699 - DNA, 25 bp, Homo sapien
ttggccattctgctaccagcttggg

SEQ ID NO: 1781700 - DNA, 25 bp, Homo sapien
ggttctgcctggtagaggtccccta

SEQ ID NO: 1781701 - DNA, 25 bp, Homo sapien
gacaagcagctggtgcgggtcaaag

SEQ ID NO: 1781702 - DNA, 25 bp, Homo sapien
caatcgcggacaagcagctggtgcg

SEQ ID NO: 1781703 - DNA, 25 bp, Homo sapien
agcccttcttcgcaatcgcggacaa

SEQ ID NO: 1781704 - DNA, 25 bp, Homo sapien
ttcgcaatcgcggacaagcagctgg

SEQ ID NO: 1781705 - DNA, 25 bp, Homo sapien
cgtctgtgggggagaatacagccat

SEQ ID NO: 1781706 - DNA, 25 bp, Homo sapien
tccttgcacccacgattcactacag

SEQ ID NO: 1781707 - DNA, 25 bp, Homo sapien
gcactcctattctccacgtctgtgg

SEQ ID NO: 1781708 - DNA, 25 bp, Homo sapien
tgcacccacgattcactatgcgtag

SEQ ID NO: 1781709 - DNA, 25 bp, Homo sapien
cgatgaatttcctccactaagaggt

SEQ ID NO: 1781710 - DNA, 25 bp, Homo sapien
cactaagaggttaacctcgtgatcc

SEQ ID NO: 1781711 - DNA, 25 bp, Homo sapien
cctccactaagaggttaacctcgtg

SEQ ID NO: 1781712 - DNA, 25 bp, Homo sapien
cccaaacgatgaatttcctccacta

SEQ ID NO: 1781713 - DNA, 25 bp, Homo sapien
ggagaaatactctatctctgtcaga

SEQ ID NO: 1781714 - DNA, 25 bp, Homo sapien
agcatgccagtctcacctgttccaa

SEQ ID NO: 1781715 - DNA, 25 bp, Homo sapien
aagccaggagaaatactctatctct

SEQ ID NO: 1781716 - DNA, 25 bp, Homo sapien
catgccagtctcacctgttccaagg

SEQ ID NO: 1781717 - DNA, 25 bp, Homo sapien
gatgtcaattcctggctaagggcag

SEQ ID NO: 1781718 - DNA, 25 bp, Homo sapien
taccaaatttcaatgcagtcaaata

SEQ ID NO: 1781719 - DNA, 25 bp, Homo sapien
gaattttaatagtatgacaagtaaa

SEQ ID NO: 1781720 - DNA, 25 bp, Homo sapien
tatctcaactattccctgcatcaga

SEQ ID NO: 1781721 - DNA, 25 bp, Homo sapien
tgtccttgaaatagagtattattgt

SEQ ID NO: 1781722 - DNA, 25 bp, Homo sapien
tgtgtccttgaaatagagtattatt

SEQ ID NO: 1781723 - DNA, 25 bp, Homo sapien
tttaatgtgaagaaatgtgtccttg

SEQ ID NO: 1781724 - DNA, 25 bp, Homo sapien
tccttgaaatagagtattattgttt

SEQ ID NO: 1781725 - DNA, 25 bp, Homo sapien
tcatcctctggccttgcatctatca

SEQ ID NO: 1781726 - DNA, 25 bp, Homo sapien
tcttcatcctctggccttgcatcta

SEQ ID NO: 1781727 - DNA, 25 bp, Homo sapien
cctctggccttgcatctatcacttg

SEQ ID NO: 1781728 - DNA, 25 bp, Homo sapien
atcctctggccttgcatctatcact

SEQ ID NO: 1781729 - DNA, 25 bp, Homo sapien
aatttcacgcttaactttccatcag

SEQ ID NO: 1781730 - DNA, 25 bp, Homo sapien
atcatgaacaccttgcagaagcagc

SEQ ID NO: 1781731 - DNA, 25 bp, Homo sapien
tttatcatcacggaagaggacccca

SEQ ID NO: 1781732 - DNA, 25 bp, Homo sapien
gcagctctcctggatatgttacaat

SEQ ID NO: 1781733 - DNA, 25 bp, Homo sapien
tgcaattcctaaccagattcctgag

SEQ ID NO: 1781734 - DNA, 25 bp, Homo sapien
tgttgctttcgcagaatgtcaaata

SEQ ID NO: 1781735 - DNA, 25 bp, Homo sapien
gccccgcaaaaaatctcattgcctg

SEQ ID NO: 1781736 - DNA, 25 bp, Homo sapien
acatgaatctcctttcgtttacaaa

SEQ ID NO: 1781737 - DNA, 25 bp, Homo sapien
tgatctgctcaatgcttcctggctg

SEQ ID NO: 1781738 - DNA, 25 bp, Homo sapien
cctaagctctgtagttgactccagc

SEQ ID NO: 1781739 - DNA, 25 bp, Homo sapien
tatttcatcgttatcagggcccttt

SEQ ID NO: 1781740 - DNA, 25 bp, Homo sapien
gcttcctggctggtatggagagtcc

SEQ ID NO: 1781741 - DNA, 25 bp, Homo sapien
gttgccaactgtgatagtcaagcac

SEQ ID NO: 1781742 - DNA, 25 bp, Homo sapien
tcataaccaaccgagaaacctggac

SEQ ID NO: 1781743 - DNA, 25 bp, Homo sapien
taacaagatgacaagcacgaggacg

SEQ ID NO: 1781744 - DNA, 25 bp, Homo sapien
cgcagaaagctaggagaggcatcac

SEQ ID NO: 1781745 - DNA, 25 bp, Homo sapien
ttcaccagaagacttaagccttaag

SEQ ID NO: 1781746 - DNA, 25 bp, Homo sapien
cttaagccttaagtccccattgtgg

SEQ ID NO: 1781747 - DNA, 25 bp, Homo sapien
aatttcaccagaagacttaagcctt

SEQ ID NO: 1781748 - DNA, 25 bp, Homo sapien
ttaagtccccattgtggagtgtcat

SEQ ID NO: 1781749 - DNA, 25 bp, Homo sapien
catacgttcttggacctttaaagca

SEQ ID NO: 1781750 - DNA, 25 bp, Homo sapien
ggctctagtagcagtctcaggaaga

SEQ ID NO: 1781751 - DNA, 25 bp, Homo sapien
tacctccccagggtgtcagatccat

SEQ ID NO: 1781752 - DNA, 25 bp, Homo sapien
aacccaagcctttaatgttgcacta

SEQ ID NO: 1781753 - DNA, 25 bp, Homo sapien
cagccaccacagtcatgatactata

SEQ ID NO: 1781754 - DNA, 25 bp, Homo sapien
ctatatttattacagggagatggtg

SEQ ID NO: 1781755 - DNA, 25 bp, Homo sapien
aataatagcattcacagtgagtcac

SEQ ID NO: 1781756 - DNA, 25 bp, Homo sapien
ttaataatagcattcacagtgagtc

SEQ ID NO: 1781757 - DNA, 25 bp, Homo sapien
attcggctgcactgacacgctctgg

SEQ ID NO: 1781758 - DNA, 25 bp, Homo sapien
gggcgcaagcgagacgctcccgagc

SEQ ID NO: 1781759 - DNA, 25 bp, Homo sapien
acgacactggggattcggcctggcc

SEQ ID NO: 1781760 - DNA, 25 bp, Homo sapien
gcgggtctccggcttgttttgattc

SEQ ID NO: 1781761 - DNA, 25 bp, Homo sapien
gcttcctggagccggcacgcggcca

SEQ ID NO: 1781762 - DNA, 25 bp, Homo sapien
cttcctggagccggcacgcggccac

SEQ ID NO: 1781763 - DNA, 25 bp, Homo sapien
cgcgagccggcggttccctcggctc

SEQ ID NO: 1781764 - DNA, 25 bp, Homo sapien
cctgcgtgaagccggctccgggaaa

SEQ ID NO: 1781765 - DNA, 25 bp, Homo sapien
tccaggtaggtgcccggcgtcagcg

SEQ ID NO: 1781766 - DNA, 25 bp, Homo sapien
ccggcgtcagcgaaggcggatccca

SEQ ID NO: 1781767 - DNA, 25 bp, Homo sapien
gcgcttgtttttgcggccgcctttg

SEQ ID NO: 1781768 - DNA, 25 bp, Homo sapien
ttggcgcgcttgtttttgcggccgc

SEQ ID NO: 1781769 - DNA, 25 bp, Homo sapien
cattttcctgctcgtcgccgctgct

SEQ ID NO: 1781770 - DNA, 25 bp, Homo sapien
gctgctgttggcgcgcttgtttttg

SEQ ID NO: 1781771 - DNA, 25 bp, Homo sapien
tgtctcgaggcctcttcacctgtgg

SEQ ID NO: 1781772 - DNA, 25 bp, Homo sapien
tgggtgtgctaagaattgaggctct

SEQ ID NO: 1781773 - DNA, 25 bp, Homo sapien
tgtggcgatcgacgcagcaagcctg

SEQ ID NO: 1781774 - DNA, 25 bp, Homo sapien
ggccttggagcaccgggaagaatta

SEQ ID NO: 1781775 - DNA, 25 bp, Homo sapien
tgctgctgcccacaattaagatagg

SEQ ID NO: 1781776 - DNA, 25 bp, Homo sapien
cacaattaagataggctttccatac

SEQ ID NO: 1781777 - DNA, 25 bp, Homo sapien
gcagtcttggatcctgcaacactgt

SEQ ID NO: 1781778 - DNA, 25 bp, Homo sapien
gctttccatacagcagtcttggatc

SEQ ID NO: 1781779 - DNA, 25 bp, Homo sapien
tgaattcatcctcttgatcacgtgt

SEQ ID NO: 1781780 - DNA, 25 bp, Homo sapien
cttgatcacgtgttatgaaggaata

SEQ ID NO: 1781781 - DNA, 25 bp, Homo sapien
gataccttactaacttttgtctgaa

SEQ ID NO: 1781782 - DNA, 25 bp, Homo sapien
cggagcaatttgataccttactaac

SEQ ID NO: 1781783 - DNA, 25 bp, Homo sapien
ggttgcaaccaattctgagaaacag

SEQ ID NO: 1781784 - DNA, 25 bp, Homo sapien
cacacctggcgggttgcaaccaatt

SEQ ID NO: 1781785 - DNA, 25 bp, Homo sapien
aacacaacctcataaatgtaatagc

SEQ ID NO: 1781786 - DNA, 25 bp, Homo sapien
cacaacctcataaatgtaatagcat

SEQ ID NO: 1781787 - DNA, 25 bp, Homo sapien
gagtttggaaacctcttccaaatca

SEQ ID NO: 1781788 - DNA, 25 bp, Homo sapien
tgtttagaacagaaatgagtttgga

SEQ ID NO: 1781789 - DNA, 25 bp, Homo sapien
cacagacatctgagaaggcacaaag

SEQ ID NO: 1781790 - DNA, 25 bp, Homo sapien
gtctcccaaatctcacactgtttag

SEQ ID NO: 1781791 - DNA, 25 bp, Homo sapien
gcttgccctgagaccggcaggagaa

SEQ ID NO: 1781792 - DNA, 25 bp, Homo sapien
tacagatttggaagaccggcattca

SEQ ID NO: 1781793 - DNA, 25 bp, Homo sapien
gaatactacagattctctgggcaaa

SEQ ID NO: 1781794 - DNA, 25 bp, Homo sapien
cttgcagagaaacgaaaggctcccc

SEQ ID NO: 1781795 - DNA, 25 bp, Homo sapien
agcccagccccagctgactttttat

SEQ ID NO: 1781796 - DNA, 25 bp, Homo sapien
ccagccccagctgactttttataaa

SEQ ID NO: 1781797 - DNA, 25 bp, Homo sapien
ctgtgttttccaggacggtctccat

SEQ ID NO: 1781798 - DNA, 25 bp, Homo sapien
tgtgttttccaggacggtctccatc

SEQ ID NO: 1781799 - DNA, 25 bp, Homo sapien
gaacaaatccccttgtttgcagaga

SEQ ID NO: 1781800 - DNA, 25 bp, Homo sapien
tagatcgctgattattcctcttatg

SEQ ID NO: 1781801 - DNA, 25 bp, Homo sapien
taagtcccggttccatgggatacta

SEQ ID NO: 1781802 - DNA, 25 bp, Homo sapien
gatactagctgtgtaaaagtgaact

SEQ ID NO: 1781803 - DNA, 25 bp, Homo sapien
tggggactcttcataatccccacca

SEQ ID NO: 1781804 - DNA, 25 bp, Homo sapien
cttcataatccccaccagctgacga

SEQ ID NO: 1781805 - DNA, 25 bp, Homo sapien
ggactcttcataatccccaccagct

SEQ ID NO: 1781806 - DNA, 25 bp, Homo sapien
actcttcataatccccaccagctga

SEQ ID NO: 1781807 - DNA, 25 bp, Homo sapien
ctgcagatcaggggagtggcacatg

SEQ ID NO: 1781808 - DNA, 25 bp, Homo sapien
tgcagatcaggggagtggcacatgg

SEQ ID NO: 1781809 - DNA, 25 bp, Homo sapien
catcatgtctcgacgggcttaggaa

SEQ ID NO: 1781810 - DNA, 25 bp, Homo sapien
tgggaactgttcgaacaccgggagc

SEQ ID NO: 1781811 - DNA, 25 bp, Homo sapien
catgcgcacgtggaaagtgttcagc

SEQ ID NO: 1781812 - DNA, 25 bp, Homo sapien
actgagcgcggccagaatgaacttc

SEQ ID NO: 1781813 - DNA, 25 bp, Homo sapien
ttttgctgctatcaacacactctca

SEQ ID NO: 1781814 - DNA, 25 bp, Homo sapien
taccttggcccttttctgaccactg

SEQ ID NO: 1781815 - DNA, 25 bp, Homo sapien
gctgctatcaacacactctcatctt

SEQ ID NO: 1781816 - DNA, 25 bp, Homo sapien
tcctcactgttatgtttataaggat

SEQ ID NO: 1781817 - DNA, 25 bp, Homo sapien
actgtattcacgcaggacttcctgc

SEQ ID NO: 1781818 - DNA, 25 bp, Homo sapien
caaagccacatacactcaaaaccag

SEQ ID NO: 1781819 - DNA, 25 bp, Homo sapien
caaaaagggctgctgggcttacata

SEQ ID NO: 1781820 - DNA, 25 bp, Homo sapien
gggtccatccaaattcaagtaacaa

SEQ ID NO: 1781821 - DNA, 25 bp, Homo sapien
taggtgtacatagtgcccagctggt

SEQ ID NO: 1781822 - DNA, 25 bp, Homo sapien
caccgtgacttacacttgatgcaga

SEQ ID NO: 1781823 - DNA, 25 bp, Homo sapien
gcagccaggatgtcgtaggtgtaca

SEQ ID NO: 1781824 - DNA, 25 bp, Homo sapien
agtccacgcacacggcatacagatg

SEQ ID NO: 1781825 - DNA, 25 bp, Homo sapien
taaggaggtcggtctagatcccagg

SEQ ID NO: 1781826 - DNA, 25 bp, Homo sapien
cacaatgtatgtagacctgggtaaa

SEQ ID NO: 1781827 - DNA, 25 bp, Homo sapien
gaacaggagtcacacggtgcagtca

SEQ ID NO: 1781828 - DNA, 25 bp, Homo sapien
taaaagataatcctccacggtgtgt

SEQ ID NO: 1781829 - DNA, 25 bp, Homo sapien
gaacctttcagcaatgggtccagga

SEQ ID NO: 1781830 - DNA, 25 bp, Homo sapien
gctagctgtttcacctacttatgag

SEQ ID NO: 1781831 - DNA, 25 bp, Homo sapien
tctcctgatatgcagcactgctagc

SEQ ID NO: 1781832 - DNA, 25 bp, Homo sapien
taaaattagcaatccaggaagtgcg

SEQ ID NO: 1781833 - DNA, 25 bp, Homo sapien
taagcttcgagaactttgaaggagg

SEQ ID NO: 1781834 - DNA, 25 bp, Homo sapien
ggacactgctggacgttgctatatt

SEQ ID NO: 1781835 - DNA, 25 bp, Homo sapien
tatattcggagaagtactgcatccc

SEQ ID NO: 1781836 - DNA, 25 bp, Homo sapien
cacgaagtggtagtccaggttccca

SEQ ID NO: 1781837 - DNA, 25 bp, Homo sapien
aagttactcaacagctgctaccagg

SEQ ID NO: 1781838 - DNA, 25 bp, Homo sapien
aatgcacaggattacccatctgggc

SEQ ID NO: 1781839 - DNA, 25 bp, Homo sapien
tctataagggtatgcgacgtcagtc

SEQ ID NO: 1781840 - DNA, 25 bp, Homo sapien
aactggagttcctgacctagacaca

SEQ ID NO: 1781841 - DNA, 25 bp, Homo sapien
tctgtacaatgtccagacacttctc

SEQ ID NO: 1781842 - DNA, 25 bp, Homo sapien
tgctctgtacaatgtccagacactt

SEQ ID NO: 1781843 - DNA, 25 bp, Homo sapien
tacaatgtccagacacttctccttc

SEQ ID NO: 1781844 - DNA, 25 bp, Homo sapien
ctgctctgtacaatgtccagacact

SEQ ID NO: 1781845 - DNA, 25 bp, Homo sapien
cagcatctcttacctcctgactcat

SEQ ID NO: 1781846 - DNA, 25 bp, Homo sapien
ctcctgactcatctcccgacatcca

SEQ ID NO: 1781847 - DNA, 25 bp, Homo sapien
tctcccgacatccaccattgatcat

SEQ ID NO: 1781848 - DNA, 25 bp, Homo sapien
ctcttacctcctgactcatctcccg

SEQ ID NO: 1781849 - DNA, 25 bp, Homo sapien
tgattcccatgatgcagtcaaaagg

SEQ ID NO: 1781850 - DNA, 25 bp, Homo sapien
aatgtgtaagcgcaaggctgctgtc

SEQ ID NO: 1781851 - DNA, 25 bp, Homo sapien
tcaagtactaaatgtgtaagcgcaa

SEQ ID NO: 1781852 - DNA, 25 bp, Homo sapien
gatgcagtcaaaagggaggttttca

SEQ ID NO: 1781853 - DNA, 25 bp, Homo sapien
ttgcctagagatataccagatattt

SEQ ID NO: 1781854 - DNA, 25 bp, Homo sapien
cagatattttttgttcgaatgcagg

SEQ ID NO: 1781855 - DNA, 25 bp, Homo sapien
ggttttcagcaattttgcctagaga

SEQ ID NO: 1781856 - DNA, 25 bp, Homo sapien
gatattttttgttcgaatgcagggc

SEQ ID NO: 1781857 - DNA, 25 bp, Homo sapien
tgcattttactgacaaccctaccct

SEQ ID NO: 1781858 - DNA, 25 bp, Homo sapien
atggaaagtacagcggtaagttggt

SEQ ID NO: 1781859 - DNA, 25 bp, Homo sapien
cctgatacagtactttagttgtggc

SEQ ID NO: 1781860 - DNA, 25 bp, Homo sapien
tgctggaggaacatgagaagagttc

SEQ ID NO: 1781861 - DNA, 25 bp, Homo sapien
gcttctgaggttgatccccatactc

SEQ ID NO: 1781862 - DNA, 25 bp, Homo sapien
ggtcagtctgagatcgacactccta

SEQ ID NO: 1781863 - DNA, 25 bp, Homo sapien
ccaggtctacaactccataataatg

SEQ ID NO: 1781864 - DNA, 25 bp, Homo sapien
gatgtggccccagcgatggtcagtc

SEQ ID NO: 1781865 - DNA, 25 bp, Homo sapien
taaccctgcagattatgagacccac

SEQ ID NO: 1781866 - DNA, 25 bp, Homo sapien
caacatctgaggtctgtgcgctaac

SEQ ID NO: 1781867 - DNA, 25 bp, Homo sapien
tctctagtaaagctaggcagtggcc

SEQ ID NO: 1781868 - DNA, 25 bp, Homo sapien
cagaacgattagtgagcccagtgcc

SEQ ID NO: 1781869 - DNA, 25 bp, Homo sapien
gccttatgcaacagcgctgtgtctg

SEQ ID NO: 1781870 - DNA, 25 bp, Homo sapien
agtgaccacagccttatgcaacagc

SEQ ID NO: 1781871 - DNA, 25 bp, Homo sapien
gtagacttcctaccacgctgagcat

SEQ ID NO: 1781872 - DNA, 25 bp, Homo sapien
gctgtgtctgctacacaggtggttc

SEQ ID NO: 1781873 - DNA, 25 bp, Homo sapien
gacaacattatgtgggctgggagaa

SEQ ID NO: 1781874 - DNA, 25 bp, Homo sapien
gaagcctagggagtttcagaatcca

SEQ ID NO: 1781875 - DNA, 25 bp, Homo sapien
aaagctcattcacagggctattctg

SEQ ID NO: 1781876 - DNA, 25 bp, Homo sapien
tgtcactgacatcgcaggaccaaag

SEQ ID NO: 1781877 - DNA, 25 bp, Homo sapien
tctctcgtgggtaaagtcactttcc

SEQ ID NO: 1781878 - DNA, 25 bp, Homo sapien
aaaatctctctcgtgggtaaagtca

SEQ ID NO: 1781879 - DNA, 25 bp, Homo sapien
aatctctctcgtgggtaaagtcact

SEQ ID NO: 1781880 - DNA, 25 bp, Homo sapien
tctctctcgtgggtaaagtcacttt

SEQ ID NO: 1781881 - DNA, 25 bp, Homo sapien
aatgtctctacaacctaagctccca

SEQ ID NO: 1781882 - DNA, 25 bp, Homo sapien
gtctctacaacctaagctcccagga

SEQ ID NO: 1781883 - DNA, 25 bp, Homo sapien
ttctcctacaataaacgcagtactt

SEQ ID NO: 1781884 - DNA, 25 bp, Homo sapien
tctcctacaataaacgcagtactta

SEQ ID NO: 1781885 - DNA, 25 bp, Homo sapien
tggggagggatagtttcgggatgat

SEQ ID NO: 1781886 - DNA, 25 bp, Homo sapien
gatataatgaaatgattatacaact

SEQ ID NO: 1781887 - DNA, 25 bp, Homo sapien
gtaagatataatgaaatgattatac

SEQ ID NO: 1781888 - DNA, 25 bp, Homo sapien
ctggggagggatagtttcgggatga

SEQ ID NO: 1781889 - DNA, 25 bp, Homo sapien
ttgccaaaagtcatgaccactggga

SEQ ID NO: 1781890 - DNA, 25 bp, Homo sapien
gcagaacagccgtcaacctttttgg

SEQ ID NO: 1781891 - DNA, 25 bp, Homo sapien
gcagcagtgagacagtgaattccta

SEQ ID NO: 1781892 - DNA, 25 bp, Homo sapien
taggtaaagtcatgtgcagctggtc

SEQ ID NO: 1781893 - DNA, 25 bp, Homo sapien
aaagcatcgtagtttcaattaagaa

SEQ ID NO: 1781894 - DNA, 25 bp, Homo sapien
caaaaattcatctaagcaaaatatt

SEQ ID NO: 1781895 - DNA, 25 bp, Homo sapien
tacctacatgtatgctaccatctta

SEQ ID NO: 1781896 - DNA, 25 bp, Homo sapien
aacagcttaattcatatgatattca

SEQ ID NO: 1781897 - DNA, 25 bp, Homo sapien
ccattggagtgtcatcttgcatcat

SEQ ID NO: 1781898 - DNA, 25 bp, Homo sapien
ctcacagatgttcaacaatacctcc

SEQ ID NO: 1781899 - DNA, 25 bp, Homo sapien
aaactttctaatagcaagctgccct

SEQ ID NO: 1781900 - DNA, 25 bp, Homo sapien
tctcacagatgttcaacaatacctc

SEQ ID NO: 1781901 - DNA, 25 bp, Homo sapien
taaactttctaatagcaagctgccc

SEQ ID NO: 1781902 - DNA, 25 bp, Homo sapien
cttcacagttgccttagagtggaat

SEQ ID NO: 1781903 - DNA, 25 bp, Homo sapien
gtggaatatggccactgtagctcta

SEQ ID NO: 1781904 - DNA, 25 bp, Homo sapien
gccttagagtggaatatggccactg

SEQ ID NO: 1781905 - DNA, 25 bp, Homo sapien
ggccactgtagctctaacaaataca

SEQ ID NO: 1781906 - DNA, 25 bp, Homo sapien
aggaggggagtaaccaatggcagac

SEQ ID NO: 1781907 - DNA, 25 bp, Homo sapien
ggaaggaggggagtaaccaatggca

SEQ ID NO: 1781908 - DNA, 25 bp, Homo sapien
agtagtggaggcagccgttccacag

SEQ ID NO: 1781909 - DNA, 25 bp, Homo sapien
tggaggcagccgttccacagaggaa

SEQ ID NO: 1781910 - DNA, 25 bp, Homo sapien
gatgttggtactctaaattttgctc

SEQ ID NO: 1781911 - DNA, 25 bp, Homo sapien
cactatctcttgatgttggtactct

SEQ ID NO: 1781912 - DNA, 25 bp, Homo sapien
ttgatgttggtactctaaattttgc

SEQ ID NO: 1781913 - DNA, 25 bp, Homo sapien
tatctcttgatgttggtactctaaa

SEQ ID NO: 1781914 - DNA, 25 bp, Homo sapien
tgtcttagtatgatagtggcctcaa

SEQ ID NO: 1781915 - DNA, 25 bp, Homo sapien
tagagttctgtagtaatcgattttc

SEQ ID NO: 1781916 - DNA, 25 bp, Homo sapien
gcctggcctcaacattagagttctg

SEQ ID NO: 1781917 - DNA, 25 bp, Homo sapien
tctcttaaaagcctaactattgcct

SEQ ID NO: 1781918 - DNA, 25 bp, Homo sapien
cgtctttgcttcctcttcatggagc

SEQ ID NO: 1781919 - DNA, 25 bp, Homo sapien
tttgcttcctcttcatggagcagcc

SEQ ID NO: 1781920 - DNA, 25 bp, Homo sapien
gcttcctcttcatggagcagccctg

SEQ ID NO: 1781921 - DNA, 25 bp, Homo sapien
ctttgcttcctcttcatggagcagc

SEQ ID NO: 1781922 - DNA, 25 bp, Homo sapien
agctgctctattactatgatagcta

SEQ ID NO: 1781923 - DNA, 25 bp, Homo sapien
tttaatagttataagcttcgttgta

SEQ ID NO: 1781924 - DNA, 25 bp, Homo sapien
gttataagcttcgttgtaatcttcc

SEQ ID NO: 1781925 - DNA, 25 bp, Homo sapien
gctctattactatgatagctagcat

SEQ ID NO: 1781926 - DNA, 25 bp, Homo sapien
atctccatgggcttcgcagaacctt

SEQ ID NO: 1781927 - DNA, 25 bp, Homo sapien
gaactcctgttgtgagtgagcattg

SEQ ID NO: 1781928 - DNA, 25 bp, Homo sapien
atttcactgtgaaagtatctccatg

SEQ ID NO: 1781929 - DNA, 25 bp, Homo sapien
tgcattagcatttgtgaactcctgt

SEQ ID NO: 1781930 - DNA, 25 bp, Homo sapien
gcaaggtccgcgtacatacagagca

SEQ ID NO: 1781931 - DNA, 25 bp, Homo sapien
ataataaaggcaaggtccgcgtaca

SEQ ID NO: 1781932 - DNA, 25 bp, Homo sapien
cacttctcaaaacttgtttctatga

SEQ ID NO: 1781933 - DNA, 25 bp, Homo sapien
tccacattggtggaatccgttcata

SEQ ID NO: 1781934 - DNA, 25 bp, Homo sapien
gatgataaagacctcgccacttcct

SEQ ID NO: 1781935 - DNA, 25 bp, Homo sapien
cgtaggaccgcggaagaataccttg

SEQ ID NO: 1781936 - DNA, 25 bp, Homo sapien
catttctgcacgcaaggcaggcctt

SEQ ID NO: 1781937 - DNA, 25 bp, Homo sapien
ttcacagctgaagcccgtaggaccg

SEQ ID NO: 1781938 - DNA, 25 bp, Homo sapien
aaaccttaacctatgattaagtgtg

SEQ ID NO: 1781939 - DNA, 25 bp, Homo sapien
tgtaaggagcagtggtttgggctga

SEQ ID NO: 1781940 - DNA, 25 bp, Homo sapien
taagtgtgcataattgagatttgcc

SEQ ID NO: 1781941 - DNA, 25 bp, Homo sapien
gatgctttagcctgcaaactgaggg

SEQ ID NO: 1781942 - DNA, 25 bp, Homo sapien
gacactgatttcatcgacgaggaag

SEQ ID NO: 1781943 - DNA, 25 bp, Homo sapien
catatgatggccatgaaccacgggc

SEQ ID NO: 1781944 - DNA, 25 bp, Homo sapien
taatgggcgagcacatacactacgg

SEQ ID NO: 1781945 - DNA, 25 bp, Homo sapien
gacggacttcgtgtgcaaacagcag

SEQ ID NO: 1781946 - DNA, 25 bp, Homo sapien
cgccctcggtcttcggagcagaaat

SEQ ID NO: 1781947 - DNA, 25 bp, Homo sapien
ctatgtgctgctgagccggtcctgg

SEQ ID NO: 1781948 - DNA, 25 bp, Homo sapien
tcgcaaaaacggaaggtaagcgcga

SEQ ID NO: 1781949 - DNA, 25 bp, Homo sapien
ctgctgagccggtcctggacgcgac

SEQ ID NO: 1781950 - DNA, 25 bp, Homo sapien
gggaacggctccgaatctgccccag

SEQ ID NO: 1781951 - DNA, 25 bp, Homo sapien
tcggcgccgacatcgcgacagcgaa

SEQ ID NO: 1781952 - DNA, 25 bp, Homo sapien
aagcgctttgcacgccaggaaggtc

SEQ ID NO: 1781953 - DNA, 25 bp, Homo sapien
taaaagggaacggctccgaatctgc

SEQ ID NO: 1781954 - DNA, 25 bp, Homo sapien
catgaaccacttaggcattttcaga
